United States Patent Application Publication US 2006/0003322 A1 - sequence listing, part 14

SEQ ID NO: 558901 - RNA, 24 nt, Human
ccagcggccugagacccgcuuccu

SEQ ID NO: 558902 - RNA, 19 nt, Human
ccaggacagccuccuggca

SEQ ID NO: 558903 - RNA, 20 nt, Human
ccauugcacuccagccuggg

SEQ ID NO: 558904 - RNA, 21 nt, Human
ccauugcacuccagccugggu

SEQ ID NO: 558905 - RNA, 21 nt, Human
ccauugcacuccagccugggu

SEQ ID NO: 558906 - RNA, 22 nt, Human
ccauugcacuccagccugggug

SEQ ID NO: 558907 - RNA, 24 nt, Human
ccauugcacuccagccugggugac

SEQ ID NO: 558908 - RNA, 19 nt, Human
cccaagacaaccgggaaga

SEQ ID NO: 558909 - RNA, 19 nt, Human
cccaagacuucccuagagc

SEQ ID NO: 558910 - RNA, 23 nt, Human
cccacagcagcaggcaggaugac

SEQ ID NO: 558911 - RNA, 22 nt, Human
cccacgauggugcaggucucug

SEQ ID NO: 558912 - RNA, 19 nt, Human
ccccaacccucccuccacc

SEQ ID NO: 558913 - RNA, 22 nt, Human
ccccaacccucccuccaccucu

SEQ ID NO: 558914 - RNA, 18 nt, Human
cccccaucaggggccccc

SEQ ID NO: 558915 - RNA, 22 nt, Human
cccccgccagagcucacagccc

SEQ ID NO: 558916 - RNA, 18 nt, Human
ccccuaaggcuacugccu

SEQ ID NO: 558917 - RNA, 19 nt, Human
ccccugaguacccagacuc

SEQ ID NO: 558918 - RNA, 21 nt, Human
ccccugcaaguggccacaagg

SEQ ID NO: 558919 - RNA, 20 nt, Human
cccgcuuuggccuugccccc

SEQ ID NO: 558920 - RNA, 21 nt, Human
cccugagcccccaaaagaggc

SEQ ID NO: 558921 - RNA, 18 nt, Human
cccugaguacccagacuc

SEQ ID NO: 558922 - RNA, 19 nt, Human
cccuguccccacccauccu

SEQ ID NO: 558923 - RNA, 20 nt, Human
ccuccaccuggggguugcag

SEQ ID NO: 558924 - RNA, 21 nt, Human
ccuccuaaucagcucccccuc

SEQ ID NO: 558925 - RNA, 20 nt, Human
ccuccuagagccgcccaagg

SEQ ID NO: 558926 - RNA, 27 nt, Human
ccucucgacgauaagcccacccagccc

SEQ ID NO: 558927 - RNA, 27 nt, Human
ccugaaacucccaggcccuggcucagg

SEQ ID NO: 558928 - RNA, 18 nt, Human
ccugaccccagccuuggg

SEQ ID NO: 558929 - RNA, 25 nt, Human
ccugcagccucuccaggguguuccu

SEQ ID NO: 558930 - RNA, 18 nt, Human
ccugccccugagccccca

SEQ ID NO: 558931 - RNA, 21 nt, Human
ccugccccugagcccccaaaa

SEQ ID NO: 558932 - RNA, 24 nt, Human
ccugcuuagaucuccccucucccu

SEQ ID NO: 558933 - RNA, 21 nt, Human
ccuggcaggaagccuggggcc

SEQ ID NO: 558934 - RNA, 25 nt, Human
ccugggaggcagagguugcagugag

SEQ ID NO: 558935 - RNA, 20 nt, Human
ccuggugcagccaacagcag

SEQ ID NO: 558936 - RNA, 24 nt, Human
ccuguccccacccauccucagaca

SEQ ID NO: 558937 - RNA, 24 nt, Human
ccugugcuccaacaugagcaagga

SEQ ID NO: 558938 - RNA, 20 nt, Human
ccuuaccuuugagacuaaca

SEQ ID NO: 558939 - RNA, 19 nt, Human
ccuuccaccuccaucacug

SEQ ID NO: 558940 - RNA, 20 nt, Human
ccuugaauaaacgcaauagc

SEQ ID NO: 558941 - RNA, 28 nt, Human
cgacggcaguggcuaaacggucauuaag

SEQ ID NO: 558942 - RNA, 24 nt, Human
cgagaucauaccauugcacuccag

SEQ ID NO: 558943 - RNA, 21 nt, Human
cgagcugggcccggagaccga

SEQ ID NO: 558944 - RNA, 18 nt, Human
cgcccacucuguccucac

SEQ ID NO: 558945 - RNA, 19 nt, Human
cucacuguccggaaguacc

SEQ ID NO: 558946 - RNA, 27 nt, Human
cucagaacccuggcacaaugggucagg

SEQ ID NO: 558947 - RNA, 22 nt, Human
cucaggcaaagacaggugagga

SEQ ID NO: 558948 - RNA, 28 nt, Human
cuccaggaauaaaccagcgggguacccc

SEQ ID NO: 558949 - RNA, 19 nt, Human
cucccaagacaaccgggaa

SEQ ID NO: 558950 - RNA, 18 nt, Human
cuccuggcacgagcuggg

SEQ ID NO: 558951 - RNA, 19 nt, Human
cuccugguaagugcauugg

SEQ ID NO: 558952 - RNA, 26 nt, Human
cucuuucguuugcaaagagcugaagg

SEQ ID NO: 558953 - RNA, 21 nt, Human
cugagaaaaaggagaggcaag

SEQ ID NO: 558954 - RNA, 18 nt, Human
cugagugugggucccggg

SEQ ID NO: 558955 - RNA, 20 nt, Human
cugcaaguggccacaaggcc

SEQ ID NO: 558956 - RNA, 23 nt, Human
cuggaggacauaagaagaaucgg

SEQ ID NO: 558957 - RNA, 21 nt, Human
cuggcuccugccucgaguguu

SEQ ID NO: 558958 - RNA, 21 nt, Human
cugggaccgagggagggcagg

SEQ ID NO: 558959 - RNA, 21 nt, Human
cuggggguggguccugaggac

SEQ ID NO: 558960 - RNA, 18 nt, Human
cuguucaucucauugaaa

SEQ ID NO: 558961 - RNA, 24 nt, Human
cuuucuuucuccgauugguuuucu

SEQ ID NO: 558962 - RNA, 23 nt, Human
cuuuuacaguacaccaggggcca

SEQ ID NO: 558963 - RNA, 19 nt, Human
gaaaaagccacacaccugg

SEQ ID NO: 558964 - RNA, 22 nt, Human
gaaagaaggggcacgggugaag

SEQ ID NO: 558965 - RNA, 18 nt, Human
gaagggccagggacucaa

SEQ ID NO: 558966 - RNA, 20 nt, Human
gaccagguagcccugauuug

SEQ ID NO: 558967 - RNA, 25 nt, Human
gaccugcagccucuccaggguguuc

SEQ ID NO: 558968 - RNA, 21 nt, Human
gaccugggaccgagggagggc

SEQ ID NO: 558969 - RNA, 19 nt, Human
gagaaccugcaguuucugc

SEQ ID NO: 558970 - RNA, 22 nt, Human
gagaacgagcccugucuuggcc

SEQ ID NO: 558971 - RNA, 23 nt, Human
gagaaucgcuugaaccugggagg

SEQ ID NO: 558972 - RNA, 20 nt, Human
gagaccagaggucacccuga

SEQ ID NO: 558973 - RNA, 18 nt, Human
gagcaaggaggcugaagg

SEQ ID NO: 558974 - RNA, 20 nt, Human
gagggcggagggaccugggg

SEQ ID NO: 558975 - RNA, 21 nt, Human
gauaagcccacccagcccucc

SEQ ID NO: 558976 - RNA, 20 nt, Human
gauggagaaggaaaaagcca

SEQ ID NO: 558977 - RNA, 19 nt, Human
gcacguggggucugucugu

SEQ ID NO: 558978 - RNA, 24 nt, Human
gcacuccagccugggugacagagc

SEQ ID NO: 558979 - RNA, 21 nt, Human
gcccacagacaauccgccaac

SEQ ID NO: 558980 - RNA, 22 nt, Human
gcccacagacaauccgccaaca

SEQ ID NO: 558981 - RNA, 21 nt, Human
gcccaggguccacugucagcc

SEQ ID NO: 558982 - RNA, 24 nt, Human
gcccccaucaggggcccccugagc

SEQ ID NO: 558983 - RNA, 20 nt, Human
gcccuggagcuccagugacc

SEQ ID NO: 558984 - RNA, 19 nt, Human
gccggggaggccuucccgg

SEQ ID NO: 558985 - RNA, 18 nt, Human
gccuccauccucacaaga

SEQ ID NO: 558986 - RNA, 19 nt, Human
gcucagggccagggccaaa

SEQ ID NO: 558987 - RNA, 21 nt, Human
ggaaacgcccacucuguccuc

SEQ ID NO: 558988 - RNA, 18 nt, Human
ggaagaagggcucaagag

SEQ ID NO: 558989 - RNA, 19 nt, Human
ggaggccuucccgggggca

SEQ ID NO: 558990 - RNA, 19 nt, Human
ggcaugcagugggaggggu

SEQ ID NO: 558991 - RNA, 23 nt, Human
ggcccuggcucaggcaaagacag

SEQ ID NO: 558992 - RNA, 19 nt, Human
ggcugggggccgggcaugc

SEQ ID NO: 558993 - RNA, 23 nt, Human
ggcuguaaucccagcuacucggg

SEQ ID NO: 558994 - RNA, 19 nt, Human
gggaggccuucccgggggc

SEQ ID NO: 558995 - RNA, 18 nt, Human
gggaggggugcuggcucc

SEQ ID NO: 558996 - RNA, 21 nt, Human
gggcagggacuuugguuccca

SEQ ID NO: 558997 - RNA, 20 nt, Human
gggccagccagccacagggg

SEQ ID NO: 558998 - RNA, 21 nt, Human
gggcccggagaccgacggcag

SEQ ID NO: 558999 - RNA, 18 nt, Human
ggggaggccuucccgggg

SEQ ID NO: 559000 - RNA, 21 nt, Human
ggggggccccacagcagcagg

SEQ ID NO: 559001 - RNA, 19 nt, Human
gggguugcagcgggugcag

SEQ ID NO: 559002 - RNA, 21 nt, Human
ggguggagggagagaaggggc

SEQ ID NO: 559003 - RNA, 21 nt, Human
guccagucacagacgcgcuga

SEQ ID NO: 559004 - RNA, 22 nt, Human
guccucaccuguugcucuccac

SEQ ID NO: 559005 - RNA, 20 nt, Human
guccugaggacugagagggu

SEQ ID NO: 559006 - RNA, 22 nt, Human
gucuugugccuccugguaagug

SEQ ID NO: 559007 - RNA, 20 nt, Human
guuuuuuuaaaaaacggaaa

SEQ ID NO: 559008 - RNA, 23 nt, Human
uaaaccagcggccugagacccgc

SEQ ID NO: 559009 - RNA, 18 nt, Human
uaaaugcccauccucacc

SEQ ID NO: 559010 - RNA, 24 nt, Human
uagaaaagagauccugcuuucuuu

SEQ ID NO: 559011 - RNA, 19 nt, Human
uagaaugguuguaucuugc

SEQ ID NO: 559012 - RNA, 19 nt, Human
uagagcuugggugccuucc

SEQ ID NO: 559013 - RNA, 20 nt, Human
uagcaaaauuggggccgccg

SEQ ID NO: 559014 - RNA, 22 nt, Human
uagcccuccucuuccugacccc

SEQ ID NO: 559015 - RNA, 20 nt, Human
ucacaggagccugccucucu

SEQ ID NO: 559016 - RNA, 20 nt, Human
ucacccuucucccaagacaa

SEQ ID NO: 559017 - RNA, 22 nt, Human
ucagcucccccuccuccugccc

SEQ ID NO: 559018 - RNA, 23 nt, Human
ucauaccauugcacuccagccug

SEQ ID NO: 559019 - RNA, 25 nt, Human
uccaccuccaucacuguggcaccca

SEQ ID NO: 559020 - RNA, 21 nt, Human
uccacugucagccccagcuac

SEQ ID NO: 559021 - RNA, 24 nt, Human
uccagccugggugacagagccaga

SEQ ID NO: 559022 - RNA, 23 nt, Human
uccaucacuguggcacccagagc

SEQ ID NO: 559023 - RNA, 18 nt, Human
ucccagcccuguccccac

SEQ ID NO: 559024 - RNA, 22 nt, Human
ucccagcccuguccccacccau

SEQ ID NO: 559025 - RNA, 21 nt, Human
ucccaggacagccuccuggca

SEQ ID NO: 559026 - RNA, 23 nt, Human
ucccaggcuggcagacagcacug

SEQ ID NO: 559027 - RNA, 18 nt, Human
ucccagggaugggcuucc

SEQ ID NO: 559028 - RNA, 24 nt, Human
ucccaguccugaaacucccaggcc

SEQ ID NO: 559029 - RNA, 20 nt, Human
uccccuaauagccccugcaa

SEQ ID NO: 559030 - RNA, 22 nt, Human
uccugaaacucccaggcccugg

SEQ ID NO: 559031 - RNA, 21 nt, Human
uccugaccccagccuuggggu

SEQ ID NO: 559032 - RNA, 19 nt, Human
uccuggaggucggggagcu

SEQ ID NO: 559033 - RNA, 20 nt, Human
ucgacgauaagcccacccag

SEQ ID NO: 559034 - RNA, 19 nt, Human
ucgcgggcgaccccaaccc

SEQ ID NO: 559035 - RNA, 18 nt, Human
ucgcuugaaccugggagg

SEQ ID NO: 559036 - RNA, 24 nt, Human
ucgggaggcugaggcaggagaauc

SEQ ID NO: 559037 - RNA, 21 nt, Human
ucuccaggguguuccuagccc

SEQ ID NO: 559038 - RNA, 21 nt, Human
ucucgcgggcgaccccaaccc

SEQ ID NO: 559039 - RNA, 20 nt, Human
ucuguccucaccuguugcuc

SEQ ID NO: 559040 - RNA, 22 nt, Human
ucuguccucaccuguugcucuu

SEQ ID NO: 559041 - RNA, 21 nt, Human
ucugugguguugccguaccag

SEQ ID NO: 559042 - RNA, 22 nt, Human
ucugugguguugccguaccagg

SEQ ID NO: 559043 - RNA, 23 nt, Human
ugaacccccaggguccugucccu

SEQ ID NO: 559044 - RNA, 24 nt, Human
ugaaccugggaggcagagguugca

SEQ ID NO: 559045 - RNA, 20 nt, Human
ugaaggagcagaccggggcu

SEQ ID NO: 559046 - RNA, 21 nt, Human
ugaauaaacgcaauagcccgu

SEQ ID NO: 559047 - RNA, 21 nt, Human
ugacagagccagacccugucu

SEQ ID NO: 559048 - RNA, 22 nt, Human
ugaccugggaccgagggagggc

SEQ ID NO: 559049 - RNA, 21 nt, Human
ugacugaagagugagucugag

SEQ ID NO: 559050 - RNA, 19 nt, Human
ugagaaaaaggagaggcaa

SEQ ID NO: 559051 - RNA, 23 nt, Human
ugagaacgagcccugucuuggcu

SEQ ID NO: 559052 - RNA, 22 nt, Human
ugagacccgcuuccugaacccc

SEQ ID NO: 559053 - RNA, 21 nt, Human
ugagagggugaaaauucccug

SEQ ID NO: 559054 - RNA, 18 nt, Human
ugagcaccgugccagccg

SEQ ID NO: 559055 - RNA, 18 nt, Human
ugaggaagggcagaaaga

SEQ ID NO: 559056 - RNA, 19 nt, Human
ugaggacaggaagcagggg

SEQ ID NO: 559057 - RNA, 20 nt, Human
ugaggcaggagaaucgcuug

SEQ ID NO: 559058 - RNA, 24 nt, Human
ugaggcaggagaaucgcuugaacc

SEQ ID NO: 559059 - RNA, 24 nt, Human
ugaggcaggagaaucgcuugaacc

SEQ ID NO: 559060 - RNA, 18 nt, Human
ugcaaagagcugaagguc

SEQ ID NO: 559061 - RNA, 24 nt, Human
ugcacuccagccugggugacagag

SEQ ID NO: 559062 - RNA, 23 nt, Human
ugccaaaaagaaagagugagcag

SEQ ID NO: 559063 - RNA, 21 nt, Human
ugccucgaguguuugcucuca

SEQ ID NO: 559064 - RNA, 22 nt, Human
ugccucucuccuccuagagccg

SEQ ID NO: 559065 - RNA, 19 nt, Human
ugccuggugcagccaacag

SEQ ID NO: 559066 - RNA, 22 nt, Human
ugcggggagguccuggccccca

SEQ ID NO: 559067 - RNA, 22 nt, Human
ugcugaaugacugaagagugag

SEQ ID NO: 559068 - RNA, 22 nt, Human
ugcuuuagugcaacaaagaccu

SEQ ID NO: 559069 - RNA, 19 nt, Human
uggaaggagcguggcuuca

SEQ ID NO: 559070 - RNA, 18 nt, Human
uggagaaggaaaaagccc

SEQ ID NO: 559071 - RNA, 21 nt, Human
uggagacccuuugaggguggc

SEQ ID NO: 559072 - RNA, 18 nt, Human
uggagccaccccccgcca

SEQ ID NO: 559073 - RNA, 20 nt, Human
uggagggagagaaggggcug

SEQ ID NO: 559074 - RNA, 22 nt, Human
uggaucccuccaccuggggguu

SEQ ID NO: 559075 - RNA, 21 nt, Human
uggaucuugcccuccuggagg

SEQ ID NO: 559076 - RNA, 20 nt, Human
uggauggagaaggaaaaagc

SEQ ID NO: 559077 - RNA, 20 nt, Human
uggcaagcuggaaggagcgu

SEQ ID NO: 559078 - RNA, 20 nt, Human
uggcacaaugggucaggacu

SEQ ID NO: 559079 - RNA, 20 nt, Human
uggcacgagcugggcccgga

SEQ ID NO: 559080 - RNA, 19 nt, Human
uggcucagggccagggcca

SEQ ID NO: 559081 - RNA, 23 nt, Human
ugggaagagaggggagaagaggc

SEQ ID NO: 559082 - RNA, 24 nt, Human
ugggaggcagagguugcagugagc

SEQ ID NO: 559083 - RNA, 18 nt, Human
ugggaggggcgccccuga

SEQ ID NO: 559084 - RNA, 18 nt, Human
ugggcaucuccugcccag

SEQ ID NO: 559085 - RNA, 24 nt, Human
ugggcaucuccugcccagccccug

SEQ ID NO: 559086 - RNA, 23 nt, Human
uggggcccacgauggugcagguc

SEQ ID NO: 559087 - RNA, 22 nt, Human
ugggggccgggcaugcaguggg

SEQ ID NO: 559088 - RNA, 22 nt, Human
ugggggccuagucuccuauuuc

SEQ ID NO: 559089 - RNA, 18 nt, Human
ugggguuuucuuuccuuu

SEQ ID NO: 559090 - RNA, 18 nt, Human
ugggucagggggcaaggu

SEQ ID NO: 559091 - RNA, 22 nt, Human
ugggucagggggcaaggugggc

SEQ ID NO: 559092 - RNA, 20 nt, Human
ugggucccgggcggguagcu

SEQ ID NO: 559093 - RNA, 26 nt, Human
uggguccugaggacugaggaguucgu

SEQ ID NO: 559094 - RNA, 18 nt, Human
ugggugccuuccaccucc

SEQ ID NO: 559095 - RNA, 26 nt, Human
ugguggggcccacgauggugcagguc

SEQ ID NO: 559096 - RNA, 24 nt, Human
uguaaaaaaaaaaagguucauugu

SEQ ID NO: 559097 - RNA, 23 nt, Human
ugucacggagacucuuacaagug

SEQ ID NO: 559098 - RNA, 18 nt, Human
uguccacgccagggcggg

SEQ ID NO: 559099 - RNA, 24 nt, Human
ugucucuuugaucgggggcuggag

SEQ ID NO: 559100 - RNA, 19 nt, Human
uuccugaccccagccuugg

SEQ ID NO: 559101 - RNA, 18 nt, Human
uucugcggggagguccug

SEQ ID NO: 559102 - RNA, 19 nt, Human
uucuuuccuuucccagucc

SEQ ID NO: 559103 - RNA, 24 nt, Human
uugaaccugggaggcagagguugc

SEQ ID NO: 559104 - RNA, 18 nt, Human
uugcagugagccgagauc

SEQ ID NO: 559105 - RNA, 19 nt, Human
uugcagugagccgagauca

SEQ ID NO: 559106 - RNA, 20 nt, Human
uugcagugagccgagaucau

SEQ ID NO: 559107 - RNA, 24 nt, Human
uuucccaguccugaaacucccagg

SEQ ID NO: 559108 - RNA, 21 nt, Human
uuucgggguggcacggccucc

SEQ ID NO: 559109 - RNA, 25 nt, Human
aaaaaagcaaagcauuaucggagaa

SEQ ID NO: 559110 - RNA, 20 nt, Human
aaagcaguaucugugauuuc

SEQ ID NO: 559111 - RNA, 21 nt, Human
aagaaacuuggucccagagag

SEQ ID NO: 559112 - RNA, 21 nt, Human
aaucuccucccaaauuuccaa

SEQ ID NO: 559113 - RNA, 19 nt, Human
acaaguuugcccugccuuc

SEQ ID NO: 559114 - RNA, 22 nt, Human
acauaugcugacagacagcaca

SEQ ID NO: 559115 - RNA, 18 nt, Human
accagcaaguccuucucc

SEQ ID NO: 559116 - RNA, 21 nt, Human
agaaaaauagauaguacacaa

SEQ ID NO: 559117 - RNA, 18 nt, Human
agagugcuggcugaucag

SEQ ID NO: 559118 - RNA, 21 nt, Human
agaguggagguuuugaaguug

SEQ ID NO: 559119 - RNA, 21 nt, Human
agcaagccuggaauugacuug

SEQ ID NO: 559120 - RNA, 24 nt, Human
aggagaaaaauagauaguacacaa

SEQ ID NO: 559121 - RNA, 21 nt, Human
agucagacagcaauugaugau

SEQ ID NO: 559122 - RNA, 23 nt, Human
aucaucucucagaugggcaguga

SEQ ID NO: 559123 - RNA, 18 nt, Human
auuguaguaaggcuuccc

SEQ ID NO: 559124 - RNA, 18 nt, Human
caaaaauaacuauacagc

SEQ ID NO: 559125 - RNA, 24 nt, Human
caaauaaucuccucccaaauuucc

SEQ ID NO: 559126 - RNA, 24 nt, Human
caagagugacauaagaaaaaaagc

SEQ ID NO: 559127 - RNA, 20 nt, Human
caaggagagggcucuuucag

SEQ ID NO: 559128 - RNA, 18 nt, Human
cacaauguucugaaauga

SEQ ID NO: 559129 - RNA, 22 nt, Human
cagcaaguccuucuccaggguu

SEQ ID NO: 559130 - RNA, 23 nt, Human
caggagaagcugcuuaugccuug

SEQ ID NO: 559131 - RNA, 18 nt, Human
cagucaguccuggguggc

SEQ ID NO: 559132 - RNA, 20 nt, Human
ccagagaggagaaaaauaga

SEQ ID NO: 559133 - RNA, 19 nt, Human
cccccaguauggcaaaaau

SEQ ID NO: 559134 - RNA, 18 nt, Human
ccuccaucccgccacccc

SEQ ID NO: 559135 - RNA, 22 nt, Human
cuccaucccgccaccccccagu

SEQ ID NO: 559136 - RNA, 19 nt, Human
cucuuucagaaagccuucu

SEQ ID NO: 559137 - RNA, 21 nt, Human
cugacugcuccaaguaccgug

SEQ ID NO: 559138 - RNA, 21 nt, Human
cuggcugacugcuccaaguac

SEQ ID NO: 559139 - RNA, 21 nt, Human
gaaaaagcugcuaacgcucag

SEQ ID NO: 559140 - RNA, 20 nt, Human
gacagcacaauguucugaaa

SEQ ID NO: 559141 - RNA, 24 nt, Human
gccuuccuauaaagagugaaauuc

SEQ ID NO: 559142 - RNA, 20 nt, Human
ggagaauuguuuccauuuaa

SEQ ID NO: 559143 - RNA, 21 nt, Human
gggaguguacagucaguccug

SEQ ID NO: 559144 - RNA, 22 nt, Human
gguugcagggccacagucucca

SEQ ID NO: 559145 - RNA, 22 nt, Human
guuccucuuuuuccuaaagucc

SEQ ID NO: 559146 - RNA, 18 nt, Human
uaagugaaagcaguaucu

SEQ ID NO: 559147 - RNA, 20 nt, Human
uagauugggccaauguccuc

SEQ ID NO: 559148 - RNA, 25 nt, Human
uaguaaggcuucccuuuguagauuu

SEQ ID NO: 559149 - RNA, 20 nt, Human
uauaaaaagaaacuuggucc

SEQ ID NO: 559150 - RNA, 19 nt, Human
uauuuuguagcugauauac

SEQ ID NO: 559151 - RNA, 23 nt, Human
uauuuuguagcugauauacauau

SEQ ID NO: 559152 - RNA, 21 nt, Human
ucagaguccauuugggaauaa

SEQ ID NO: 559153 - RNA, 22 nt, Human
ucaguccuggguggcaaauguc

SEQ ID NO: 559154 - RNA, 23 nt, Human
ucaucgcuaaggcgaucuccuuc

SEQ ID NO: 559155 - RNA, 21 nt, Human
uccuggguggcaaauguccca

SEQ ID NO: 559156 - RNA, 21 nt, Human
ucgcuaaggcgaucuccuucc

SEQ ID NO: 559157 - RNA, 24 nt, Human
ucucaaauaaugucuuuguuccuc

SEQ ID NO: 559158 - RNA, 24 nt, Human
ucuggucagaguccauuugggaau

SEQ ID NO: 559159 - RNA, 22 nt, Human
ugaaguuggauccaaccccauu

SEQ ID NO: 559160 - RNA, 26 nt, Human
ugacauaagaaaaaaagcaaagcauu

SEQ ID NO: 559161 - RNA, 19 nt, Human
ugacugcuccaaguaccgu

SEQ ID NO: 559162 - RNA, 23 nt, Human
uggaaaaacacacuuuaauaaau

SEQ ID NO: 559163 - RNA, 19 nt, Human
uggagcuguagaaaucucc

SEQ ID NO: 559164 - RNA, 19 nt, Human
ugggaucccaaagcuuccc

SEQ ID NO: 559165 - RNA, 18 nt, Human
uggguggcaaauguccca

SEQ ID NO: 559166 - RNA, 24 nt, Human
ugguacauuguggaaaaacacacu

SEQ ID NO: 559167 - RNA, 20 nt, Human
uguagucagcuaaaaacuug

SEQ ID NO: 559168 - RNA, 20 nt, Human
ugucuuuguuccucuuuuuc

SEQ ID NO: 559169 - RNA, 22 nt, Human
uuaaguaccagcaaguccuucu

SEQ ID NO: 559170 - RNA, 23 nt, Human
uucacaaauaaucuccucccaaa

SEQ ID NO: 559171 - RNA, 22 nt, Human
uuccugggaucccaaagcuucc

SEQ ID NO: 559172 - RNA, 23 nt, Human
uuccugggaucccaaagcuucca

SEQ ID NO: 559173 - RNA, 24 nt, Human
uuuccuaaaguccuuugucaaaag

SEQ ID NO: 559174 - RNA, 19 nt, Human
aaaaaaaaaaguggagaau

SEQ ID NO: 559175 - RNA, 22 nt, Human
aagugaccccuugaggaagggc

SEQ ID NO: 559176 - RNA, 23 nt, Human
accccaccaucugcaccagccua

SEQ ID NO: 559177 - RNA, 24 nt, Human
accccagggauucccggcagaaaa

SEQ ID NO: 559178 - RNA, 18 nt, Human
acccggaagcccccccgg

SEQ ID NO: 559179 - RNA, 23 nt, Human
acccggaagcccccccgggucac

SEQ ID NO: 559180 - RNA, 24 nt, Human
acccggaagcccccccgggucacu

SEQ ID NO: 559181 - RNA, 23 nt, Human
agaaacccacaggcuucuggcaa

SEQ ID NO: 559182 - RNA, 21 nt, Human
agagaggcuuguccccccaag

SEQ ID NO: 559183 - RNA, 25 nt, Human
agaggccagaggucgcagcugagcu

SEQ ID NO: 559184 - RNA, 25 nt, Human
agaugguggggucuggacagcucag

SEQ ID NO: 559185 - RNA, 25 nt, Human
agcacauguggcggucggugugugc

SEQ ID NO: 559186 - RNA, 22 nt, Human
aggagggcaggggaggcggagc

SEQ ID NO: 559187 - RNA, 19 nt, Human
aggcaggcgggcucucccu

SEQ ID NO: 559188 - RNA, 22 nt, Human
agguauuuuccacagugugguc

SEQ ID NO: 559189 - RNA, 20 nt, Human
auaaaacaugcguucacccc

SEQ ID NO: 559190 - RNA, 22 nt, Human
caagcuagaaagaaacccacaa

SEQ ID NO: 559191 - RNA, 24 nt, Human
caccaucugcaccagccuaggagc

SEQ ID NO: 559192 - RNA, 19 nt, Human
cacccgacgcugccuugug

SEQ ID NO: 559193 - RNA, 22 nt, Human
caggagcaccuuccgcccuggc

SEQ ID NO: 559194 - RNA, 22 nt, Human
cagggucggggccuggcccgcu

SEQ ID NO: 559195 - RNA, 20 nt, Human
ccacccccgcccgccagcuc

SEQ ID NO: 559196 - RNA, 24 nt, Human
ccagaacuugggcaggacgggcug

SEQ ID NO: 559197 - RNA, 20 nt, Human
ccaggugggucacaacaggg

SEQ ID NO: 559198 - RNA, 26 nt, Human
ccaguggggccgggcuuggcacagcu

SEQ ID NO: 559199 - RNA, 21 nt, Human
cccaggcuacagaaggagaaa

SEQ ID NO: 559200 - RNA, 22 nt, Human
ccccaccaucugcaccagccua

SEQ ID NO: 559201 - RNA, 18 nt, Human
ccccagaacuugggcagg

SEQ ID NO: 559202 - RNA, 21 nt, Human
ccccagaacuugggcaggacg

SEQ ID NO: 559203 - RNA, 24 nt, Human
ccccagaggccagaggucgcagcu

SEQ ID NO: 559204 - RNA, 23 nt, Human
cccccaagcuagaaagaaaccca

SEQ ID NO: 559205 - RNA, 20 nt, Human
cccccaaggcuagagcugcu

SEQ ID NO: 559206 - RNA, 21 nt, Human
cccccgcccgccagcuccccg

SEQ ID NO: 559207 - RNA, 18 nt, Human
cccccgggucacucacgg

SEQ ID NO: 559208 - RNA, 19 nt, Human
ccccgagccucaguuuacc

SEQ ID NO: 559209 - RNA, 19 nt, Human
ccccgcccgccagcucccc

SEQ ID NO: 559210 - RNA, 20 nt, Human
ccccgggucacucacgggcg

SEQ ID NO: 559211 - RNA, 20 nt, Human
cccggcagaaaagcacaugu

SEQ ID NO: 559212 - RNA, 18 nt, Human
ccggcugccuggggcugc

SEQ ID NO: 559213 - RNA, 18 nt, Human
ccgggucacucacgggcg

SEQ ID NO: 559214 - RNA, 21 nt, Human
cucaagaaaaaaaaaagugga

SEQ ID NO: 559215 - RNA, 24 nt, Human
cucaagaaaaaaaaaaguggagaa

SEQ ID NO: 559216 - RNA, 20 nt, Human
cucggacacgguggccggcc

SEQ ID NO: 559217 - RNA, 19 nt, Human
cugcagcagccuccguucc

SEQ ID NO: 559218 - RNA, 20 nt, Human
cuggugucucgcucagcagc

SEQ ID NO: 559219 - RNA, 21 nt, Human
cuugugugugugcgugggugg

SEQ ID NO: 559220 - RNA, 22 nt, Human
gaacccaaggcccuguggacag

SEQ ID NO: 559221 - RNA, 18 nt, Human
gagggugggagaggggug

SEQ ID NO: 559222 - RNA, 20 nt, Human
gcagaaaagcacauguggcg

SEQ ID NO: 559223 - RNA, 20 nt, Human
gcagaaaagcacauguggcg

SEQ ID NO: 559224 - RNA, 24 nt, Human
gcccauaaaacaugcguucacccc

SEQ ID NO: 559225 - RNA, 21 nt, Human
gccccguuuauguccccagag

SEQ ID NO: 559226 - RNA, 24 nt, Human
gccggcccgucaaagggaccacgc

SEQ ID NO: 559227 - RNA, 19 nt, Human
gccuggcccgcuguggccc

SEQ ID NO: 559228 - RNA, 21 nt, Human
ggacaggugugugacggcccu

SEQ ID NO: 559229 - RNA, 23 nt, Human
ggacaggugugugacggcccucu

SEQ ID NO: 559230 - RNA, 23 nt, Human
ggagccccggcugccuggggcug

SEQ ID NO: 559231 - RNA, 20 nt, Human
ggccgggcuuggcacagcug

SEQ ID NO: 559232 - RNA, 22 nt, Human
ggccuggaggccuagcguugcg

SEQ ID NO: 559233 - RNA, 23 nt, Human
ggccugggguuaccccuggggag

SEQ ID NO: 559234 - RNA, 25 nt, Human
ggcugcgucucugcagcagccuccg

SEQ ID NO: 559235 - RNA, 23 nt, Human
ggcuucuggcaauggccaccucc

SEQ ID NO: 559236 - RNA, 22 nt, Human
gggcaggggaggcggagcuggu

SEQ ID NO: 559237 - RNA, 24 nt, Human
gggguuaccccuggggaggguggg

SEQ ID NO: 559238 - RNA, 20 nt, Human
gggugggagaggggugaggg

SEQ ID NO: 559239 - RNA, 22 nt, Human
ggucacugaagucuacucaaga

SEQ ID NO: 559240 - RNA, 22 nt, Human
gguucuggcuccuuccuggaga

SEQ ID NO: 559241 - RNA, 23 nt, Human
gucgcagcugagcuaucugugcu

SEQ ID NO: 559242 - RNA, 24 nt, Human
gucgcagcugagcuaucugugcuu

SEQ ID NO: 559243 - RNA, 18 nt, Human
gugcagagggccuggccu

SEQ ID NO: 559244 - RNA, 18 nt, Human
guggcuccaccuccaccc

SEQ ID NO: 559245 - RNA, 19 nt, Human
uaccccuggggaggguggg

SEQ ID NO: 559246 - RNA, 23 nt, Human
uagcugagagaggcuuguccccc

SEQ ID NO: 559247 - RNA, 20 nt, Human
ucagcccguuuaaccccacc

SEQ ID NO: 559248 - RNA, 24 nt, Human
uccacccggaagcccccccggguc

SEQ ID NO: 559249 - RNA, 20 nt, Human
ucccagggucucuggaacag

SEQ ID NO: 559250 - RNA, 23 nt, Human
ucccugggguccgggagauggug

SEQ ID NO: 559251 - RNA, 23 nt, Human
ucucugcagcagccuccguuccc

SEQ ID NO: 559252 - RNA, 22 nt, Human
ucugugcuuggccugggguuac

SEQ ID NO: 559253 - RNA, 21 nt, Human
ugaggguucuggcuccuuccu

SEQ ID NO: 559254 - RNA, 20 nt, Human
ugaguguccuuaacucucuu

SEQ ID NO: 559255 - RNA, 25 nt, Human
ugcagagggccuggccucaggccgu

SEQ ID NO: 559256 - RNA, 18 nt, Human
ugccccagaacuugggca

SEQ ID NO: 559257 - RNA, 19 nt, Human
ugccccagaacuugggcag

SEQ ID NO: 559258 - RNA, 23 nt, Human
ugccuggggcugcgucucugcag

SEQ ID NO: 559259 - RNA, 22 nt, Human
ugcugcugccacccccgcccgc

SEQ ID NO: 559260 - RNA, 19 nt, Human
uggaaaggguggaggcagg

SEQ ID NO: 559261 - RNA, 19 nt, Human
uggaaaggguggaggcagg

SEQ ID NO: 559262 - RNA, 22 nt, Human
uggacagugaaggagaggccag

SEQ ID NO: 559263 - RNA, 23 nt, Human
uggagagaggagggcaggggagg

SEQ ID NO: 559264 - RNA, 18 nt, Human
uggagauggaugcguggc

SEQ ID NO: 559265 - RNA, 19 nt, Human
uggccugggguuaccccug

SEQ ID NO: 559266 - RNA, 20 nt, Human
uggccugggguuaccccugg

SEQ ID NO: 559267 - RNA, 18 nt, Human
uggggagggugggagagg

SEQ ID NO: 559268 - RNA, 26 nt, Human
ugggguguguuuguucccaguuacca

SEQ ID NO: 559269 - RNA, 21 nt, Human
ugggugcggcacaccuggaau

SEQ ID NO: 559270 - RNA, 21 nt, Human
uuuuaaggaaaaacggggugg

SEQ ID NO: 559271 - RNA, 21 nt, Human
uuuuccacaguguggucacug

SEQ ID NO: 559272 - RNA, 24 nt, Human
aaaaaaaauccuccuaggaauaga

SEQ ID NO: 559273 - RNA, 24 nt, Human
aaaaauccuccuaggaauagaucc

SEQ ID NO: 559274 - RNA, 19 nt, Human
aacauggugaaauuccauc

SEQ ID NO: 559275 - RNA, 21 nt, Human
aacauggugaaauuccaucuc

SEQ ID NO: 559276 - RNA, 21 nt, Human
aacccaaaugcccaucaauga

SEQ ID NO: 559277 - RNA, 23 nt, Human
aagaccauccuggcuaacauggu

SEQ ID NO: 559278 - RNA, 19 nt, Human
aagcauucagacacugcug

SEQ ID NO: 559279 - RNA, 21 nt, Human
aaguaccuucuuaaggcgggc

SEQ ID NO: 559280 - RNA, 21 nt, Human
aaguaccuucuugggcggggc

SEQ ID NO: 559281 - RNA, 19 nt, Human
aaguggcugggacuacagg

SEQ ID NO: 559282 - RNA, 20 nt, Human
aaguggcugggacuacaggc

SEQ ID NO: 559283 - RNA, 23 nt, Human
aauacacuucaucucugcaaaau

SEQ ID NO: 559284 - RNA, 22 nt, Human
aauaggcucugcaucuucaaau

SEQ ID NO: 559285 - RNA, 18 nt, Human
acaaggaaaacauuuugu

SEQ ID NO: 559286 - RNA, 21 nt, Human
acaaggaaaacauuuuguguu

SEQ ID NO: 559287 - RNA, 18 nt, Human
acagacaugagccaccgc

SEQ ID NO: 559288 - RNA, 24 nt, Human
acagagcaagccuccaucucaaaa

SEQ ID NO: 559289 - RNA, 21 nt, Human
acaggcacccgccaccaugcc

SEQ ID NO: 559290 - RNA, 21 nt, Human
acaugagccaccgcacccagc

SEQ ID NO: 559291 - RNA, 19 nt, Human
acauggugaaauuccaucu

SEQ ID NO: 559292 - RNA, 18 nt, Human
acccaccucggcccccca

SEQ ID NO: 559293 - RNA, 20 nt, Human
accucggccccccagagugc

SEQ ID NO: 559294 - RNA, 23 nt, Human
accucggccccccagagugcugg

SEQ ID NO: 559295 - RNA, 20 nt, Human
acgggguuucaccacauuag

SEQ ID NO: 559296 - RNA, 20 nt, Human
acugcaagcucugccuccug

SEQ ID NO: 559297 - RNA, 24 nt, Human
acugcacuccagccugggugacag

SEQ ID NO: 559298 - RNA, 26 nt, Human
acugcacuccagccugggugacagag

SEQ ID NO: 559299 - RNA, 24 nt, Human
acuggcucacgccuguaaucccag

SEQ ID NO: 559300 - RNA, 20 nt, Human
agaaaaccagacaccgcaug

SEQ ID NO: 559301 - RNA, 24 nt, Human
agaagacauuauccucagcaaacu

SEQ ID NO: 559302 - RNA, 24 nt, Human
agagcuugcagugagccgagauug

SEQ ID NO: 559303 - RNA, 22 nt, Human
agaguuucaggauaacucagau

SEQ ID NO: 559304 - RNA, 19 nt, Human
agaugacucagauauagaa

SEQ ID NO: 559305 - RNA, 21 nt, Human
agcaagccuccaucucaaaaa

SEQ ID NO: 559306 - RNA, 24 nt, Human
agcacuuugggaggccgaggcggg

SEQ ID NO: 559307 - RNA, 20 nt, Human
agccaccgcacccagccuug

SEQ ID NO: 559308 - RNA, 23 nt, Human
agccgggcaugguggugggcgcc

SEQ ID NO: 559309 - RNA, 22 nt, Human
agccucccccacuaaauucaga

SEQ ID NO: 559310 - RNA, 24 nt, Human
agccugggugacagagcaagccuc

SEQ ID NO: 559311 - RNA, 22 nt, Human
agcgugauccagccucccccac

SEQ ID NO: 559312 - RNA, 18 nt, Human
agcucugccuccuggguu

SEQ ID NO: 559313 - RNA, 18 nt, Human
aggaaaacauuuuguguc

SEQ ID NO: 559314 - RNA, 21 nt, Human
aggcagagcuugcagugagcc

SEQ ID NO: 559315 - RNA, 24 nt, Human
aggcagagcuugcagugagccgag

SEQ ID NO: 559316 - RNA, 20 nt, Human
aggccgaggcgggcggauca

SEQ ID NO: 559317 - RNA, 23 nt, Human
aggccgaggcgggcggaucauga

SEQ ID NO: 559318 - RNA, 18 nt, Human
aggcgggcgagcgggggc

SEQ ID NO: 559319 - RNA, 24 nt, Human
aggcgggcggaucaugaggucagg

SEQ ID NO: 559320 - RNA, 21 nt, Human
aggcugcagcgugauccagcc

SEQ ID NO: 559321 - RNA, 25 nt, Human
aggcugcagcgugauccagccuccc

SEQ ID NO: 559322 - RNA, 25 nt, Human
aggcuggagugcaguggcgcgaucu

SEQ ID NO: 559323 - RNA, 25 nt, Human
agggaggggaacacauucacugggg

SEQ ID NO: 559324 - RNA, 23 nt, Human
agggcggugggggguaagggggc

SEQ ID NO: 559325 - RNA, 21 nt, Human
agggguuggggugauugguca

SEQ ID NO: 559326 - RNA, 18 nt, Human
agucccagcuaaucggga

SEQ ID NO: 559327 - RNA, 21 nt, Human
agugcaguggcgcgaucucag

SEQ ID NO: 559328 - RNA, 23 nt, Human
agugcaguggcgcgaucucagcu

SEQ ID NO: 559329 - RNA, 24 nt, Human
agugcaguggcgcgaucucagcuc

SEQ ID NO: 559330 - RNA, 20 nt, Human
agugcugggauuacagacau

SEQ ID NO: 559331 - RNA, 22 nt, Human
agugcugggauuacagacauga

SEQ ID NO: 559332 - RNA, 24 nt, Human
agugcugggauuacagacaugagc

SEQ ID NO: 559333 - RNA, 22 nt, Human
aguggcuaccauauuagaugac

SEQ ID NO: 559334 - RNA, 24 nt, Human
auagaauacacuucaucucugcaa

SEQ ID NO: 559335 - RNA, 24 nt, Human
augagaucauaucauuugcagaga

SEQ ID NO: 559336 - RNA, 25 nt, Human
auggcuuagcuugggcucagaggcc

SEQ ID NO: 559337 - RNA, 24 nt, Human
auugcgccacugcacuccagccug

SEQ ID NO: 559338 - RNA, 18 nt, Human
caaacuaaugcaggaaca

SEQ ID NO: 559339 - RNA, 22 nt, Human
caaaguaccuucuuaaggcggg

SEQ ID NO: 559340 - RNA, 22 nt, Human
caaaugcccaucaaugauagac

SEQ ID NO: 559341 - RNA, 23 nt, Human
caagaccaaaacaaggcaagggc

SEQ ID NO: 559342 - RNA, 18 nt, Human
caccacauuagccaggau

SEQ ID NO: 559343 - RNA, 22 nt, Human
caccacauuagccaggaugguc

SEQ ID NO: 559344 - RNA, 24 nt, Human
caccacauuagccaggauggucuc

SEQ ID NO: 559345 - RNA, 23 nt, Human
cacccaccucggccccccagagu

SEQ ID NO: 559346 - RNA, 21 nt, Human
caccgcacccagccuugaaua

SEQ ID NO: 559347 - RNA, 24 nt, Human
cacgccuguaaucccagcacuuug

SEQ ID NO: 559348 - RNA, 22 nt, Human
cacuccagccugggugacagag

SEQ ID NO: 559349 - RNA, 23 nt, Human
cacugcaagcucugccuccuggg

SEQ ID NO: 559350 - RNA, 19 nt, Human
cacugcacuccagccuggg

SEQ ID NO: 559351 - RNA, 19 nt, Human
cacugcacuccagccuggg

SEQ ID NO: 559352 - RNA, 19 nt, Human
cacugcacuccagccuggg

SEQ ID NO: 559353 - RNA, 22 nt, Human
cacugcacuccagccuggguga

SEQ ID NO: 559354 - RNA, 24 nt, Human
cacugcacuccagccugggugaca

SEQ ID NO: 559355 - RNA, 25 nt, Human
cacugcacuccagccugggugacag

SEQ ID NO: 559356 - RNA, 21 nt, Human
cagagguggcaauaccaagac

SEQ ID NO: 559357 - RNA, 24 nt, Human
cagagucuugcucuaucgcccagg

SEQ ID NO: 559358 - RNA, 24 nt, Human
cagagugcugggauuacagacaug

SEQ ID NO: 559359 - RNA, 22 nt, Human
cagcacuuugggaggccgaggc

SEQ ID NO: 559360 - RNA, 24 nt, Human
cagcacuuugggaggccgaggcgg

SEQ ID NO: 559361 - RNA, 21 nt, Human
cagcagccacacguggcucug

SEQ ID NO: 559362 - RNA, 24 nt, Human
cagcuaaucgggaggcugaggugg

SEQ ID NO: 559363 - RNA, 23 nt, Human
caucaguuaaggcuauuuucacu

SEQ ID NO: 559364 - RNA, 22 nt, Human
caugguggugggcgccuguagu

SEQ ID NO: 559365 - RNA, 21 nt, Human
caugucaccauugaugugaaa

SEQ ID NO: 559366 - RNA, 19 nt, Human
ccacacguggcucugagaa

SEQ ID NO: 559367 - RNA, 18 nt, Human
ccacugcacuccagccug

SEQ ID NO: 559368 - RNA, 20 nt, Human
ccacugcacuccagccuggg

SEQ ID NO: 559369 - RNA, 20 nt, Human
ccacugcacuccagccuggg

SEQ ID NO: 559370 - RNA, 20 nt, Human
ccacugcacuccagccuggg

SEQ ID NO: 559371 - RNA, 21 nt, Human
ccacugcacuccagccugggu

SEQ ID NO: 559372 - RNA, 24 nt, Human
ccacugcacuccagccugggugac

SEQ ID NO: 559373 - RNA, 18 nt, Human
ccagaggugagguggagg

SEQ ID NO: 559374 - RNA, 19 nt, Human
ccagagugcugggauuaca

SEQ ID NO: 559375 - RNA, 24 nt, Human
ccagagugcugggauuacagacau

SEQ ID NO: 559376 - RNA, 21 nt, Human
ccaucucuacuaaaaauacaa

SEQ ID NO: 559377 - RNA, 23 nt, Human
cccaaguggcugggacuacaggc

SEQ ID NO: 559378 - RNA, 24 nt, Human
cccaaguggcugggacuacaggca

SEQ ID NO: 559379 - RNA, 22 nt, Human
cccacaagcauucagacacugc

SEQ ID NO: 559380 - RNA, 23 nt, Human
cccacuaaauucagagaaccacc

SEQ ID NO: 559381 - RNA, 21 nt, Human
cccauccuucugccucucuca

SEQ ID NO: 559382 - RNA, 21 nt, Human
ccccacuaaauucagagaacc

SEQ ID NO: 559383 - RNA, 19 nt, Human
ccccagaacuuuaaaaaaa

SEQ ID NO: 559384 - RNA, 24 nt, Human
ccccagaggugagguggagguagg

SEQ ID NO: 559385 - RNA, 18 nt, Human
ccccagagugcugggauu

SEQ ID NO: 559386 - RNA, 20 nt, Human
ccuacguaacaaaccugcac

SEQ ID NO: 559387 - RNA, 24 nt, Human
ccuccccagaggugagguggaggu

SEQ ID NO: 559388 - RNA, 24 nt, Human
ccugacagaggugaccuucucaaa

SEQ ID NO: 559389 - RNA, 22 nt, Human
ccugaccucgugauccacccac

SEQ ID NO: 559390 - RNA, 19 nt, Human
ccugcacauccugagcaug

SEQ ID NO: 559391 - RNA, 19 nt, Human
ccuggcuaacauggugaaa

SEQ ID NO: 559392 - RNA, 24 nt, Human
ccuggcuaacauggugaaauucca

SEQ ID NO: 559393 - RNA, 22 nt, Human
ccugggugacagagcaagccuc

SEQ ID NO: 559394 - RNA, 19 nt, Human
ccuguagucccagcuaauc

SEQ ID NO: 559395 - RNA, 21 nt, Human
ccuguagucccagcuaaucgg

SEQ ID NO: 559396 - RNA, 24 nt, Human
cgagauugcgccacugcacuccag

SEQ ID NO: 559397 - RNA, 24 nt, Human
cgaggcgggcggaucaugagguca

SEQ ID NO: 559398 - RNA, 23 nt, Human
cgauagauggcccccauccuucu

SEQ ID NO: 559399 - RNA, 26 nt, Human
cgccacugcacuccagccugggugac

SEQ ID NO: 559400 - RNA, 24 nt, Human
cgcccaggcuggagugcaguggcg

SEQ ID NO: 559401 - RNA, 24 nt, Human
cgccuguaaucccagcacuuuggg

SEQ ID NO: 559402 - RNA, 24 nt, Human
cgccuguagucccagcuaaucggg

SEQ ID NO: 559403 - RNA, 23 nt, Human
cgugauccagccucccccacuaa

SEQ ID NO: 559404 - RNA, 19 nt, Human
cuagaagacauuauccuca

SEQ ID NO: 559405 - RNA, 22 nt, Human
cucacgccuguaaucccagcac

SEQ ID NO: 559406 - RNA, 24 nt, Human
cucacgccuguaaucccagcacuu

SEQ ID NO: 559407 - RNA, 24 nt, Human
cucacugcaagcucugccuccugg

SEQ ID NO: 559408 - RNA, 19 nt, Human
cuccaucucaaaaaaaaaa

SEQ ID NO: 559409 - RNA, 18 nt, Human
cuccugaccucgugaucc

SEQ ID NO: 559410 - RNA, 25 nt, Human
cuccugaccucgugauccacccacc

SEQ ID NO: 559411 - RNA, 21 nt, Human
cuccuggguucacgccauucu

SEQ ID NO: 559412 - RNA, 19 nt, Human
cugcaagcucugccuccug

SEQ ID NO: 559413 - RNA, 23 nt, Human
cugcuuguuccccgcauuucgua

SEQ ID NO: 559414 - RNA, 23 nt, Human
cuggcuaacauggugaaauucca

SEQ ID NO: 559415 - RNA, 19 nt, Human
cuugcagugagccgagauu

SEQ ID NO: 559416 - RNA, 21 nt, Human
cuugcagugagccgagauugc

SEQ ID NO: 559417 - RNA, 22 nt, Human
cuuggggcaaucuugacugccc

SEQ ID NO: 559418 - RNA, 22 nt, Human
gaacagaaaaccagacaccgca

SEQ ID NO: 559419 - RNA, 22 nt, Human
gaccucgugauccacccaccuc

SEQ ID NO: 559420 - RNA, 22 nt, Human
gaccucgugauccacccaccuc

SEQ ID NO: 559421 - RNA, 24 nt, Human
gaccucgugauccacccaccucgg

SEQ ID NO: 559422 - RNA, 25 nt, Human
gaccucgugauccacccaccucggc

SEQ ID NO: 559423 - RNA, 24 nt, Human
gacuacaggcacccgccaccaugc

SEQ ID NO: 559424 - RNA, 21 nt, Human
gagacagagucuugcucuauc

SEQ ID NO: 559425 - RNA, 18 nt, Human
gagacgggguuucaccac

SEQ ID NO: 559426 - RNA, 20 nt, Human
gagagcuaaugccugcuggg

SEQ ID NO: 559427 - RNA, 18 nt, Human
gagcuugcagugagccga

SEQ ID NO: 559428 - RNA, 23 nt, Human
gaggcgggcggaucaugagguca

SEQ ID NO: 559429 - RNA, 18 nt, Human
gaggggaacacauucacu

SEQ ID NO: 559430 - RNA, 18 nt, Human
gauuacagacaugagcca

SEQ ID NO: 559431 - RNA, 23 nt, Human
gauuacagacaugagccaccgca

SEQ ID NO: 559432 - RNA, 24 nt, Human
gcacuccagccugggugacagagc

SEQ ID NO: 559433 - RNA, 19 nt, Human
gcaggggguauggagagca

SEQ ID NO: 559434 - RNA, 19 nt, Human
gccacugcacuccagccug

SEQ ID NO: 559435 - RNA, 24 nt, Human
gccacugcacuccagccuggguga

SEQ ID NO: 559436 - RNA, 19 nt, Human
gcccaggcuggagugcagu

SEQ ID NO: 559437 - RNA, 20 nt, Human
gcccaggcuggagugcagug

SEQ ID NO: 559438 - RNA, 24 nt, Human
gccucagacucccaaguggcuggg

SEQ ID NO: 559439 - RNA, 25 nt, Human
gccuccuggguucacgccauucucc

SEQ ID NO: 559440 - RNA, 24 nt, Human
gcuaacauggugaaauuccaucuc

SEQ ID NO: 559441 - RNA, 25 nt, Human
gcucuaucgcccaggcuggagugca

SEQ ID NO: 559442 - RNA, 19 nt, Human
gcuggagugcaguggcgcg

SEQ ID NO: 559443 - RNA, 24 nt, Human
ggaagaauguccguggaaaaaaaa

SEQ ID NO: 559444 - RNA, 21 nt, Human
ggagguaggggagggguuggg

SEQ ID NO: 559445 - RNA, 24 nt, Human
ggauggucucgaucuccugaccuc

SEQ ID NO: 559446 - RNA, 22 nt, Human
ggauuacagacaugagccaccg

SEQ ID NO: 559447 - RNA, 20 nt, Human
ggcagggcggugggggguaa

SEQ ID NO: 559448 - RNA, 22 nt, Human
ggcaugguggugggcgccugua

SEQ ID NO: 559449 - RNA, 21 nt, Human
ggcggaucaugaggucaggag

SEQ ID NO: 559450 - RNA, 23 nt, Human
ggcgggcggaucaugaggucagg

SEQ ID NO: 559451 - RNA, 19 nt, Human
ggcgugagcccgggaggca

SEQ ID NO: 559452 - RNA, 24 nt, Human
gggcacacuggcucacgccuguaa

SEQ ID NO: 559453 - RNA, 24 nt, Human
gggcagggcggugggggguaaggg

SEQ ID NO: 559454 - RNA, 22 nt, Human
gggcggugggggguaagggggc

SEQ ID NO: 559455 - RNA, 19 nt, Human
gggcucagaggccugacag

SEQ ID NO: 559456 - RNA, 24 nt, Human
gguggugggcgccuguagucccag

SEQ ID NO: 559457 - RNA, 21 nt, Human
gugauccacccaccucggccc

SEQ ID NO: 559458 - RNA, 25 nt, Human
guuuuguuacauuaggucucuucca

SEQ ID NO: 559459 - RNA, 23 nt, Human
uaaaaagccauauuuggcuagug

SEQ ID NO: 559460 - RNA, 18 nt, Human
uaacagcaaagacgugga

SEQ ID NO: 559461 - RNA, 22 nt, Human
uaacauggugaaauuccaucuc

SEQ ID NO: 559462 - RNA, 24 nt, Human
uaacauggugaaauuccaucucua

SEQ ID NO: 559463 - RNA, 23 nt, Human
uaagacacuccacaagagaacuc

SEQ ID NO: 559464 - RNA, 25 nt, Human
uaagauaaucccacaagcauucaga

SEQ ID NO: 559465 - RNA, 24 nt, Human
uacagacaugagccaccgcaccca

SEQ ID NO: 559466 - RNA, 24 nt, Human
uacaggcacccgccaccaugccca

SEQ ID NO: 559467 - RNA, 22 nt, Human
uaccaagaccaaaacaaggcaa

SEQ ID NO: 559468 - RNA, 22 nt, Human
uaccaagaccaaaacaaggcaa

SEQ ID NO: 559469 - RNA, 23 nt, Human
uaccagaaggaggaagaaugucc

SEQ ID NO: 559470 - RNA, 22 nt, Human
uaccccagaacuuuaaaaaaau

SEQ ID NO: 559471 - RNA, 18 nt, Human
uacgugcaggucacaggg

SEQ ID NO: 559472 - RNA, 21 nt, Human
uagagacgggguuucaccaca

SEQ ID NO: 559473 - RNA, 24 nt, Human
uagaguuucaggauaacucagaug

SEQ ID NO: 559474 - RNA, 25 nt, Human
uagauggcccccauccuucugccuc

SEQ ID NO: 559475 - RNA, 23 nt, Human
uaguagagacgggguuucaccac

SEQ ID NO: 559476 - RNA, 26 nt, Human
uaguagagacgggguuucaccacauu

SEQ ID NO: 559477 - RNA, 19 nt, Human
uaucgcccaggcuggagug

SEQ ID NO: 559478 - RNA, 21 nt, Human
uauuacaaaguaccuucuaaa

SEQ ID NO: 559479 - RNA, 21 nt, Human
uauuacaaaguaccuucuaaa

SEQ ID NO: 559480 - RNA, 21 nt, Human
uauuacaaaguaccuucuaaa

SEQ ID NO: 559481 - RNA, 19 nt, Human
ucaaaauagaauuguagaa

SEQ ID NO: 559482 - RNA, 18 nt, Human
ucaacccaaaugcccauc

SEQ ID NO: 559483 - RNA, 24 nt, Human
ucaccacauuagccaggauggucu

SEQ ID NO: 559484 - RNA, 18 nt, Human
ucacugcaagcucugccu

SEQ ID NO: 559485 - RNA, 23 nt, Human
ucacugcaagcucugccuccugg

SEQ ID NO: 559486 - RNA, 24 nt, Human
ucacugcaagcucugccuccuggg

SEQ ID NO: 559487 - RNA, 22 nt, Human
ucacuggggccugucagaggag

SEQ ID NO: 559488 - RNA, 22 nt, Human
ucagaggagggcaggggguaug

SEQ ID NO: 559489 - RNA, 22 nt, Human
ucagcaaacuaaugcaggaaca

SEQ ID NO: 559490 - RNA, 24 nt, Human
ucaugaggucaggagauaaagacc

SEQ ID NO: 559491 - RNA, 18 nt, Human
uccacccaccucggcccc

SEQ ID NO: 559492 - RNA, 18 nt, Human
uccagccugggugacaga

SEQ ID NO: 559493 - RNA, 24 nt, Human
ucccaaguggcugggacuacaggc

SEQ ID NO: 559494 - RNA, 20 nt, Human
uccccagaggugagguggag

SEQ ID NO: 559495 - RNA, 20 nt, Human
uccguggaaaaaaaauccuc

SEQ ID NO: 559496 - RNA, 19 nt, Human
uccugagcauguaccccag

SEQ ID NO: 559497 - RNA, 24 nt, Human
uccuggguucacgccauucuccug

SEQ ID NO: 559498 - RNA, 24 nt, Human
ucgcccaggcuggagugcaguggc

SEQ ID NO: 559499 - RNA, 24 nt, Human
ucuaucgcccaggcuggagugcag

SEQ ID NO: 559500 - RNA, 23 nt, Human
ucucauggaccaucuccugcagg

SEQ ID NO: 559501 - RNA, 22 nt, Human
ucucuacuaaaaauacaaaaaa

SEQ ID NO: 559502 - RNA, 18 nt, Human
ucugacaaggaaaacauu

SEQ ID NO: 559503 - RNA, 23 nt, Human
ucuucaguugcuucaggccaucu

SEQ ID NO: 559504 - RNA, 19 nt, Human
ucuugcucuaucgcccagg

SEQ ID NO: 559505 - RNA, 22 nt, Human
ucuugcucuaucgcccaggcug

SEQ ID NO: 559506 - RNA, 23 nt, Human
ucuugcucuaucgcccaggcugg

SEQ ID NO: 559507 - RNA, 24 nt, Human
ucuugcucuaucgcccaggcugga

SEQ ID NO: 559508 - RNA, 22 nt, Human
ugaaaaagaaagucuuccagau

SEQ ID NO: 559509 - RNA, 18 nt, Human
ugaagggaaggagcaggg

SEQ ID NO: 559510 - RNA, 22 nt, Human
ugagccgagauugcgccacugc

SEQ ID NO: 559511 - RNA, 24 nt, Human
ugauccacccaccucggcccccca

SEQ ID NO: 559512 - RNA, 23 nt, Human
ugcagcaaaccaccauggcacac

SEQ ID NO: 559513 - RNA, 21 nt, Human
ugccucagacucccaaguggc

SEQ ID NO: 559514 - RNA, 24 nt, Human
ugccucagacucccaaguggcugg

SEQ ID NO: 559515 - RNA, 19 nt, Human
ugccuccuggguucacgcc

SEQ ID NO: 559516 - RNA, 24 nt, Human
ugcucuaucgcccaggcuggagug

SEQ ID NO: 559517 - RNA, 24 nt, Human
ugcugggauuacagacaugagcca

SEQ ID NO: 559518 - RNA, 22 nt, Human
uggaaaaaaaauccuccuagga

SEQ ID NO: 559519 - RNA, 24 nt, Human
uggaagaauggcgugagcccggga

SEQ ID NO: 559520 - RNA, 20 nt, Human
uggaaucaacccaaaugccc

SEQ ID NO: 559521 - RNA, 20 nt, Human
uggaaugucaucaguuaagg

SEQ ID NO: 559522 - RNA, 22 nt, Human
uggaauuuuaagauaaucccac

SEQ ID NO: 559523 - RNA, 22 nt, Human
uggagguaggggagggguuggg

SEQ ID NO: 559524 - RNA, 23 nt, Human
uggagugcaguggcgcgaucuca

SEQ ID NO: 559525 - RNA, 24 nt, Human
uggagugcaguggcgcgaucucag

SEQ ID NO: 559526 - RNA, 23 nt, Human
uggcaauaccaagaccaaaacaa

SEQ ID NO: 559527 - RNA, 18 nt, Human
uggccauguggcugagga

SEQ ID NO: 559528 - RNA, 21 nt, Human
uggcccccauccuucugccuc

SEQ ID NO: 559529 - RNA, 24 nt, Human
uggcgcgaucucagcucacugcaa

SEQ ID NO: 559530 - RNA, 18 nt, Human
uggcuaguugucuguuca

SEQ ID NO: 559531 - RNA, 22 nt, Human
uggcucacgccuguaaucccag

SEQ ID NO: 559532 - RNA, 24 nt, Human
uggcucacgccuguaaucccagca

SEQ ID NO: 559533 - RNA, 21 nt, Human
ugggacuacaggcacccgcca

SEQ ID NO: 559534 - RNA, 22 nt, Human
ugggacuacaggcacccgccac

SEQ ID NO: 559535 - RNA, 24 nt, Human
ugggacuacaggcacccgccacca

SEQ ID NO: 559536 - RNA, 25 nt, Human
ugggacuacaggcacccgccaccau

SEQ ID NO: 559537 - RNA, 19 nt, Human
ugggaggccgaggcgggcg

SEQ ID NO: 559538 - RNA, 24 nt, Human
ugggaggccgaggcgggcggauca

SEQ ID NO: 559539 - RNA, 18 nt, Human
ugggauuacagacaugag

SEQ ID NO: 559540 - RNA, 21 nt, Human
ugggauuacagacaugagcca

SEQ ID NO: 559541 - RNA, 22 nt, Human
ugggauuacagacaugagccac

SEQ ID NO: 559542 - RNA, 23 nt, Human
ugggauuacagacaugagccacc

SEQ ID NO: 559543 - RNA, 24 nt, Human
ugggauuacagacaugagccaccg

SEQ ID NO: 559544 - RNA, 24 nt, Human
ugggauuacagacaugagccaccg

SEQ ID NO: 559545 - RNA, 26 nt, Human
ugggauuacagacaugagccaccgca

SEQ ID NO: 559546 - RNA, 20 nt, Human
uggguucacgccauucuccu

SEQ ID NO: 559547 - RNA, 24 nt, Human
ugguggugggcgccuguaguccca

SEQ ID NO: 559548 - RNA, 20 nt, Human
ugucagaggagggcaggggg

SEQ ID NO: 559549 - RNA, 24 nt, Human
ugucagaggagggcaggggguaug

SEQ ID NO: 559550 - RNA, 21 nt, Human
uguucaugcuauucucuccca

SEQ ID NO: 559551 - RNA, 24 nt, Human
uguuuuguauuuuuuuaguagaga

SEQ ID NO: 559552 - RNA, 26 nt, Human
uguuuuguauuuuuuuaguagagacg

SEQ ID NO: 559553 - RNA, 19 nt, Human
uuacaaaguaccuucuaaa

SEQ ID NO: 559554 - RNA, 19 nt, Human
uuacaaaguaccuucuaaa

SEQ ID NO: 559555 - RNA, 18 nt, Human
uuagccgggcaugguggu

SEQ ID NO: 559556 - RNA, 24 nt, Human
uuagccgggcaugguggugggcgc

SEQ ID NO: 559557 - RNA, 18 nt, Human
uuaguagagacgggguuu

SEQ ID NO: 559558 - RNA, 22 nt, Human
uuaguagagacgggguuucacc

SEQ ID NO: 559559 - RNA, 25 nt, Human
uuaguagagacgggguuucaccaca

SEQ ID NO: 559560 - RNA, 21 nt, Human
uucaugcuauucucucccaca

SEQ ID NO: 559561 - RNA, 21 nt, Human
uucuaaguuaaaaagccauau

SEQ ID NO: 559562 - RNA, 18 nt, Human
uugcagugagccgagauu

SEQ ID NO: 559563 - RNA, 19 nt, Human
uugcagugagccgagauug

SEQ ID NO: 559564 - RNA, 22 nt, Human
uugcagugagccgagauugcgc

SEQ ID NO: 559565 - RNA, 24 nt, Human
uugcucuaucgcccaggcuggagu

SEQ ID NO: 559566 - RNA, 25 nt, Human
uugggaggccgaggcgggcggauca

SEQ ID NO: 559567 - RNA, 19 nt, Human
uuggggcaaucuugacugc

SEQ ID NO: 559568 - RNA, 21 nt, Human
uuuuguauuuuuuuaguagag

SEQ ID NO: 559569 - RNA, 22 nt, Human
uuuuguauuuuuuuaguagaga

SEQ ID NO: 559570 - RNA, 24 nt, Human
uuuuuaguagagacgggguuucac

SEQ ID NO: 559571 - RNA, 23 nt, Human
uuuuuuaguagagacgggguuuc

SEQ ID NO: 559572 - RNA, 18 nt, Human
agcggcaaaggcgaauuc

SEQ ID NO: 559573 - RNA, 20 nt, Human
aggcuggcgggcgggcaggc

SEQ ID NO: 559574 - RNA, 24 nt, Human
caccuccuuccaggcggugugacc

SEQ ID NO: 559575 - RNA, 22 nt, Human
caggcaugcgagccggcguucu

SEQ ID NO: 559576 - RNA, 18 nt, Human
cccccgucaccuccuucc

SEQ ID NO: 559577 - RNA, 25 nt, Human
cgcggcuaaguguucagagacugcc

SEQ ID NO: 559578 - RNA, 21 nt, Human
cggaaaaggccguacccggca

SEQ ID NO: 559579 - RNA, 22 nt, Human
cggcaaaggcgaauucuuugac

SEQ ID NO: 559580 - RNA, 18 nt, Human
cggcaggcuggcgggcgg

SEQ ID NO: 559581 - RNA, 18 nt, Human
gaccuggaagccccggcg

SEQ ID NO: 559582 - RNA, 19 nt, Human
gaguagagauggggacaca

SEQ ID NO: 559583 - RNA, 18 nt, Human
gcaggcuggcgggcgggc

SEQ ID NO: 559584 - RNA, 20 nt, Human
gcaggcuggcgggcgggcag

SEQ ID NO: 559585 - RNA, 18 nt, Human
gccccgcgccgcccccgu

SEQ ID NO: 559586 - RNA, 22 nt, Human
ggcgggcaggcaugcgagccgg

SEQ ID NO: 559587 - RNA, 28 nt, Human
gggcgggcaggcaugcgagccggcguuc

SEQ ID NO: 559588 - RNA, 18 nt, Human
ggggaguguccgcgcccc

SEQ ID NO: 559589 - RNA, 24 nt, Human
uauuguguaaaguuuauagaagua

SEQ ID NO: 559590 - RNA, 20 nt, Human
uccaaagaguccauugcgca

SEQ ID NO: 559591 - RNA, 19 nt, Human
ucuccaaagaguccauugc

SEQ ID NO: 559592 - RNA, 22 nt, Human
uggcgcggcuaaguguucagag

SEQ ID NO: 559593 - RNA, 21 nt, Human
uuaaaauaucuucuuucucca

SEQ ID NO: 559594 - RNA, 19 nt, Human
uuccuuuguacaaaguaca

SEQ ID NO: 559595 - RNA, 23 nt, Human
uuuacagacacacuaaaaauguu

SEQ ID NO: 559596 - RNA, 19 nt, Human
aaagugcugggauuacaga

SEQ ID NO: 559597 - RNA, 24 nt, Human
aaagugcugggauuacagacguga

SEQ ID NO: 559598 - RNA, 19 nt, Human
aacaaaaaaagccagagag

SEQ ID NO: 559599 - RNA, 19 nt, Human
aacaaaacaaaaaaagccg

SEQ ID NO: 559600 - RNA, 19 nt, Human
aaccgggccagccuuggcc

SEQ ID NO: 559601 - RNA, 20 nt, Human
aacuuggccucgcaggcaca

SEQ ID NO: 559602 - RNA, 21 nt, Human
aagaugcugccguccuuaaca

SEQ ID NO: 559603 - RNA, 20 nt, Human
aagcagcguugcugcacaag

SEQ ID NO: 559604 - RNA, 19 nt, Human
aagggacagguugccacug

SEQ ID NO: 559605 - RNA, 19 nt, Human
aagugcugggauuacagac

SEQ ID NO: 559606 - RNA, 26 nt, Human
aagugcugggauuacagacgugagcc

SEQ ID NO: 559607 - RNA, 19 nt, Human
acaaaacaaaaaaagccag

SEQ ID NO: 559608 - RNA, 22 nt, Human
acaaaacaaaaaaagccagaga

SEQ ID NO: 559609 - RNA, 23 nt, Human
acaaaacaaaaaaagccagagag

SEQ ID NO: 559610 - RNA, 18 nt, Human
acaagcgugccgggcccc

SEQ ID NO: 559611 - RNA, 22 nt, Human
acaccagaaccgggccagccuu

SEQ ID NO: 559612 - RNA, 18 nt, Human
acagacgugagccaccgc

SEQ ID NO: 559613 - RNA, 18 nt, Human
acgcagggugagauaaga

SEQ ID NO: 559614 - RNA, 24 nt, Human
acggagucuugcugugucgcccag

SEQ ID NO: 559615 - RNA, 21 nt, Human
acgugagccaccgcgccuggc

SEQ ID NO: 559616 - RNA, 20 nt, Human
acugcaagcucugccuccca

SEQ ID NO: 559617 - RNA, 21 nt, Human
agaaccgggccagccuuggcc

SEQ ID NO: 559618 - RNA, 22 nt, Human
agaccuuuaucucagagagggc

SEQ ID NO: 559619 - RNA, 23 nt, Human
agagaggaaaacaaaacaaaaaa

SEQ ID NO: 559620 - RNA, 22 nt, Human
agagggcaguaguggggcuggg

SEQ ID NO: 559621 - RNA, 21 nt, Human
agaugugagaggcuggcagcc

SEQ ID NO: 559622 - RNA, 24 nt, Human
agccgcuuuauccucucgggggcu

SEQ ID NO: 559623 - RNA, 21 nt, Human
agccuuccgaguagcugggac

SEQ ID NO: 559624 - RNA, 23 nt, Human
agcgugcucggcuccuagacggc

SEQ ID NO: 559625 - RNA, 27 nt, Human
aggagagggcaguaguggggcugggau

SEQ ID NO: 559626 - RNA, 25 nt, Human
aggcuggagugcaguggcgcgaucu

SEQ ID NO: 559627 - RNA, 23 nt, Human
agggaaccagcugaucagaggcc

SEQ ID NO: 559628 - RNA, 23 nt, Human
aggguggagaaggucccucuuug

SEQ ID NO: 559629 - RNA, 18 nt, Human
aguagcugggacuacagg

SEQ ID NO: 559630 - RNA, 23 nt, Human
agugcaguggcgcgaucuuggcu

SEQ ID NO: 559631 - RNA, 24 nt, Human
agugcaguggcgcgaucuuggcuc

SEQ ID NO: 559632 - RNA, 20 nt, Human
agugccccgggcagccuucc

SEQ ID NO: 559633 - RNA, 24 nt, Human
agugcugggauuacagacgugagc

SEQ ID NO: 559634 - RNA, 22 nt, Human
auaagaugcugccguccuuaac

SEQ ID NO: 559635 - RNA, 20 nt, Human
caaaaaaagccagagagaaa

SEQ ID NO: 559636 - RNA, 24 nt, Human
caaaaaaagccagagagaagcuag

SEQ ID NO: 559637 - RNA, 24 nt, Human
caaagugcugggauuacagacgug

SEQ ID NO: 559638 - RNA, 22 nt, Human
caacacaagagcaaaaucuccu

SEQ ID NO: 559639 - RNA, 26 nt, Human
caagagcaaaaucuccugcucaccag

SEQ ID NO: 559640 - RNA, 18 nt, Human
caaguaaugugcucgcaa

SEQ ID NO: 559641 - RNA, 21 nt, Human
cacacguucucugcucgcgcc

SEQ ID NO: 559642 - RNA, 23 nt, Human
cacacguucucugcucgcgccuc

SEQ ID NO: 559643 - RNA, 18 nt, Human
caccauguuagccaggau

SEQ ID NO: 559644 - RNA, 22 nt, Human
caccauguuagccaggaugguc

SEQ ID NO: 559645 - RNA, 24 nt, Human
caccauguuagccaggauggucuc

SEQ ID NO: 559646 - RNA, 22 nt, Human
caccuguagcucagggacuggg

SEQ ID NO: 559647 - RNA, 18 nt, Human
cacgacaccagcggaggg

SEQ ID NO: 559648 - RNA, 22 nt, Human
cacgccauucuccugccuuagc

SEQ ID NO: 559649 - RNA, 20 nt, Human
cacugcgugcaggccagaac

SEQ ID NO: 559650 - RNA, 25 nt, Human
cagacaaagugcucaagcauuuucc

SEQ ID NO: 559651 - RNA, 33 nt, Human
cagagagaagcuagccagucuagagcucggagg

SEQ ID NO: 559652 - RNA, 19 nt, Human
cagaggcugccagugcccc

SEQ ID NO: 559653 - RNA, 20 nt, Human
cagcaauucuaaagagagga

SEQ ID NO: 559654 - RNA, 19 nt, Human
cagcagacaaagugcucaa

SEQ ID NO: 559655 - RNA, 19 nt, Human
caggaccaccacgacacca

SEQ ID NO: 559656 - RNA, 24 nt, Human
caguaguggggcugggcuggccag

SEQ ID NO: 559657 - RNA, 19 nt, Human
caguggcgcgaucuuggcu

SEQ ID NO: 559658 - RNA, 22 nt, Human
ccaaagugcugggauuacagac

SEQ ID NO: 559659 - RNA, 24 nt, Human
ccaaagugcugggauuacagacgu

SEQ ID NO: 559660 - RNA, 18 nt, Human
ccaccgcgccuggccuca

SEQ ID NO: 559661 - RNA, 22 nt, Human
ccaccuguagcucagggacugg

SEQ ID NO: 559662 - RNA, 23 nt, Human
ccacgacaccagcggagggaaca

SEQ ID NO: 559663 - RNA, 19 nt, Human
ccagcuccaggcggaggca

SEQ ID NO: 559664 - RNA, 22 nt, Human
cccaggcuggagugcaguggcg

SEQ ID NO: 559665 - RNA, 20 nt, Human
cccagguucacgccauucuc

SEQ ID NO: 559666 - RNA, 19 nt, Human
ccccagaggcugccagugc

SEQ ID NO: 559667 - RNA, 22 nt, Human
ccccagaggcugccagugcccc

SEQ ID NO: 559668 - RNA, 22 nt, Human
ccccagggcacgcugccccucc

SEQ ID NO: 559669 - RNA, 27 nt, Human
cccccaaucaggucggugacaugucug

SEQ ID NO: 559670 - RNA, 23 nt, Human
ccucggaguggagcucucaacuu

SEQ ID NO: 559671 - RNA, 21 nt, Human
ccucucgggggcucacugccc

SEQ ID NO: 559672 - RNA, 21 nt, Human
ccugccugcugcugcccgcug

SEQ ID NO: 559673 - RNA, 23 nt, Human
ccugccuuagccuuccgaguagc

SEQ ID NO: 559674 - RNA, 24 nt, Human
ccugcugcugcccgcugcguccgu

SEQ ID NO: 559675 - RNA, 21 nt, Human
ccuguagcucagggacugggg

SEQ ID NO: 559676 - RNA, 24 nt, Human
cgaaaagguacuaaacuggcucug

SEQ ID NO: 559677 - RNA, 22 nt, Human
cgagcagccgcuuuauccucuc

SEQ ID NO: 559678 - RNA, 24 nt, Human
cgccucggccucccaaagugcugg

SEQ ID NO: 559679 - RNA, 24 nt, Human
cggagucuugcugugucgcccagg

SEQ ID NO: 559680 - RNA, 21 nt, Human
cggcuccuagacggcuuggga

SEQ ID NO: 559681 - RNA, 18 nt, Human
cgggggcucacugcccac

SEQ ID NO: 559682 - RNA, 22 nt, Human
cgugcgcugcccugccugcugc

SEQ ID NO: 559683 - RNA, 26 nt, Human
cuaaagagaggaaaacaaaacaaagg

SEQ ID NO: 559684 - RNA, 23 nt, Human
cuaauuuuuuguauuuuuaguag

SEQ ID NO: 559685 - RNA, 25 nt, Human
cuagugcugaaaaaccagaccuuua

SEQ ID NO: 559686 - RNA, 21 nt, Human
cuauguacauauauacacaua

SEQ ID NO: 559687 - RNA, 18 nt, Human
cucaagggacagguugcc

SEQ ID NO: 559688 - RNA, 21 nt, Human
cucagcacuaaaaaucucuuc

SEQ ID NO: 559689 - RNA, 24 nt, Human
cuccugaccucgugauccguccgc

SEQ ID NO: 559690 - RNA, 22 nt, Human
cucgcaaucuguucgagcagcc

SEQ ID NO: 559691 - RNA, 20 nt, Human
cucucuggcuauguacauau

SEQ ID NO: 559692 - RNA, 23 nt, Human
cugccuuagccuuccgaguagcu

SEQ ID NO: 559693 - RNA, 24 nt, Human
cuuagccuuccgaguagcugggac

SEQ ID NO: 559694 - RNA, 24 nt, Human
cuucauaguguaagcagcguugcu

SEQ ID NO: 559695 - RNA, 19 nt, Human
gaaaacaaaacaaaaaaag

SEQ ID NO: 559696 - RNA, 20 nt, Human
gaaaacaaaacaaaaaaagc

SEQ ID NO: 559697 - RNA, 23 nt, Human
gaaaacaaaacaaaaaaagccag

SEQ ID NO: 559698 - RNA, 24 nt, Human
gaaaacaaaacaaaaaaagccaga

SEQ ID NO: 559699 - RNA, 18 nt, Human
gaaugcaacaccagaacc

SEQ ID NO: 559700 - RNA, 22 nt, Human
gaccucgugauccguccgccuc

SEQ ID NO: 559701 - RNA, 24 nt, Human
gaccucgugauccguccgccucgg

SEQ ID NO: 559702 - RNA, 18 nt, Human
gagaaagaacauuucaaa

SEQ ID NO: 559703 - RNA, 21 nt, Human
gagaaagaacauuucaaaagc

SEQ ID NO: 559704 - RNA, 20 nt, Human
gaguagcugggacuacaggc

SEQ ID NO: 559705 - RNA, 27 nt, Human
gaguagcugggacuacaggcgccagcc

SEQ ID NO: 559706 - RNA, 19 nt, Human
gauacaaguauacagcaau

SEQ ID NO: 559707 - RNA, 20 nt, Human
gaucagaggccacgcccuuc

SEQ ID NO: 559708 - RNA, 18 nt, Human
gauuacagacgugagcca

SEQ ID NO: 559709 - RNA, 22 nt, Human
gauuacagacgugagccaccgc

SEQ ID NO: 559710 - RNA, 22 nt, Human
gcaaaauaaaagguauuucugc

SEQ ID NO: 559711 - RNA, 22 nt, Human
gcaagcucugccucccagguuc

SEQ ID NO: 559712 - RNA, 21 nt, Human
gcaguaguggggcugggcugg

SEQ ID NO: 559713 - RNA, 19 nt, Human
gcccaggcuggagugcagu

SEQ ID NO: 559714 - RNA, 20 nt, Human
gcccaggcuggagugcagug

SEQ ID NO: 559715 - RNA, 25 nt, Human
gccucccagguucacgccauucucc

SEQ ID NO: 559716 - RNA, 20 nt, Human
gcgccagccaccacacccgg

SEQ ID NO: 559717 - RNA, 19 nt, Human
gcgcugcccugccugcugc

SEQ ID NO: 559718 - RNA, 22 nt, Human
gcgcugcccugccugcugcugc

SEQ ID NO: 559719 - RNA, 19 nt, Human
gcgugccgggccccucaug

SEQ ID NO: 559720 - RNA, 21 nt, Human
gcucacugcaagcucugccuc

SEQ ID NO: 559721 - RNA, 21 nt, Human
ggacuggggacgagcaggaga

SEQ ID NO: 559722 - RNA, 24 nt, Human
ggauggucucgaucuccugaccuc

SEQ ID NO: 559723 - RNA, 22 nt, Human
ggauguugacauuucauucugu

SEQ ID NO: 559724 - RNA, 21 nt, Human
ggcagcccacauuauuacuau

SEQ ID NO: 559725 - RNA, 22 nt, Human
gggcagccaggaacucaugaca

SEQ ID NO: 559726 - RNA, 21 nt, Human
gggcuggccaguuucccaccg

SEQ ID NO: 559727 - RNA, 19 nt, Human
ggggguuucaccauguuag

SEQ ID NO: 559728 - RNA, 24 nt, Human
ggggguuucaccauguuagccagg

SEQ ID NO: 559729 - RNA, 18 nt, Human
gggguuucaccauguuag

SEQ ID NO: 559730 - RNA, 23 nt, Human
gggguuucaccauguuagccagg

SEQ ID NO: 559731 - RNA, 21 nt, Human
ggguggagaaggucccucuuu

SEQ ID NO: 559732 - RNA, 22 nt, Human
ggguucugacuccacaggccug

SEQ ID NO: 559733 - RNA, 24 nt, Human
gguuucaccauguuagccaggaug

SEQ ID NO: 559734 - RNA, 21 nt, Human
guaagcagcguugcugcacaa

SEQ ID NO: 559735 - RNA, 22 nt, Human
guaguggggcugggcuggccag

SEQ ID NO: 559736 - RNA, 21 nt, Human
gugaauuuuugauaucgaaaa

SEQ ID NO: 559737 - RNA, 26 nt, Human
gugaugcucuugacaucuuguuuucu

SEQ ID NO: 559738 - RNA, 23 nt, Human
gugccgggccccucaugcaggcc

SEQ ID NO: 559739 - RNA, 18 nt, Human
uaaaaugcccucaaggaa

SEQ ID NO: 559740 - RNA, 23 nt, Human
uaaaaugcccucaaggaaucuuu

SEQ ID NO: 559741 - RNA, 28 nt, Human
uaaagagaggaaaacaaaacaaaaaaag

SEQ ID NO: 559742 - RNA, 23 nt, Human
uaauagugaaaaucacucagcac

SEQ ID NO: 559743 - RNA, 24 nt, Human
uaauuuuuuguauuuuuaguagag

SEQ ID NO: 559744 - RNA, 25 nt, Human
uaauuuuuuguauuuuuaguagaga

SEQ ID NO: 559745 - RNA, 22 nt, Human
uacagacgugagccaccgcgcc

SEQ ID NO: 559746 - RNA, 23 nt, Human
uacaggcgccagccaccacaccc

SEQ ID NO: 559747 - RNA, 25 nt, Human
uaguagagacggggguuucaccaug

SEQ ID NO: 559748 - RNA, 24 nt, Human
uauauacacauauucacauauaua

SEQ ID NO: 559749 - RNA, 26 nt, Human
uauguacauauauacacauauucaca

SEQ ID NO: 559750 - RNA, 24 nt, Human
ucaccauguuagccaggauggucu

SEQ ID NO: 559751 - RNA, 18 nt, Human
ucacugcaagcucugccu

SEQ ID NO: 559752 - RNA, 18 nt, Human
ucacugcaagcucugccu

SEQ ID NO: 559753 - RNA, 19 nt, Human
ucacugcaagcucugccuc

SEQ ID NO: 559754 - RNA, 24 nt, Human
ucacugcaagcucugccucccagg

SEQ ID NO: 559755 - RNA, 20 nt, Human
ucagggagggggagcaaguc

SEQ ID NO: 559756 - RNA, 19 nt, Human
ucauuuacacacccaaaaa

SEQ ID NO: 559757 - RNA, 23 nt, Human
uccacacucaaguggccugggac

SEQ ID NO: 559758 - RNA, 18 nt, Human
uccaccucggaguggagc

SEQ ID NO: 559759 - RNA, 18 nt, Human
ucccaaagugcugggauu

SEQ ID NO: 559760 - RNA, 24 nt, Human
ucccaaagugcugggauuacagac

SEQ ID NO: 559761 - RNA, 19 nt, Human
ucccagguucacgccauuc

SEQ ID NO: 559762 - RNA, 21 nt, Human
ucccagguucacgccauucuc

SEQ ID NO: 559763 - RNA, 24 nt, Human
ucccagguucacgccauucuccug

SEQ ID NO: 559764 - RNA, 23 nt, Human
uccgaguagcugggacuacaggc

SEQ ID NO: 559765 - RNA, 24 nt, Human
uccgaguagcugggacuacaggcg

SEQ ID NO: 559766 - RNA, 21 nt, Human
uccgugccaggcaacgcaggg

SEQ ID NO: 559767 - RNA, 24 nt, Human
ucgcccaggcuggagugcaguggc

SEQ ID NO: 559768 - RNA, 18 nt, Human
ucggccucccaaagugcu

SEQ ID NO: 559769 - RNA, 21 nt, Human
ucucaacacaagagcaaaauc

SEQ ID NO: 559770 - RNA, 19 nt, Human
ucucaagggacagguugcc

SEQ ID NO: 559771 - RNA, 22 nt, Human
ucucagggagggggagcaaguc

SEQ ID NO: 559772 - RNA, 24 nt, Human
ucuccugccuuagccuuccgagua

SEQ ID NO: 559773 - RNA, 20 nt, Human
ucuccugcucaccagccugg

SEQ ID NO: 559774 - RNA, 20 nt, Human
ucucgugcgcugcccugccu

SEQ ID NO: 559775 - RNA, 24 nt, Human
ucuguaaaaugcccucaaggaauc

SEQ ID NO: 559776 - RNA, 23 nt, Human
ucuugcugugucgcccaggcugg

SEQ ID NO: 559777 - RNA, 24 nt, Human
ucuugcugugucgcccaggcugga

SEQ ID NO: 559778 - RNA, 19 nt, Human
ucuuugauuuguuuuaaac

SEQ ID NO: 559779 - RNA, 22 nt, Human
ugaaaaggcaucaaggggagca

SEQ ID NO: 559780 - RNA, 19 nt, Human
ugaugcucuugacaucuug

SEQ ID NO: 559781 - RNA, 19 nt, Human
ugccucccagguucacgcc

SEQ ID NO: 559782 - RNA, 20 nt, Human
ugccugcugcugcccgcugc

SEQ ID NO: 559783 - RNA, 24 nt, Human
ugcucucgugcgcugcccugccug

SEQ ID NO: 559784 - RNA, 19 nt, Human
ugcugaggagauacaagua

SEQ ID NO: 559785 - RNA, 24 nt, Human
ugcugggauuacagacgugagcca

SEQ ID NO: 559786 - RNA, 24 nt, Human
ugcugugucgcccaggcuggagug

SEQ ID NO: 559787 - RNA, 23 nt, Human
uggagugcaguggcgcgaucuug

SEQ ID NO: 559788 - RNA, 24 nt, Human
uggagugcaguggcgcgaucuugg

SEQ ID NO: 559789 - RNA, 24 nt, Human
uggcaaaauaaaagguauuucugc

SEQ ID NO: 559790 - RNA, 20 nt, Human
uggcuauguacauauauaca

SEQ ID NO: 559791 - RNA, 19 nt, Human
uggcucacugcaagcucug

SEQ ID NO: 559792 - RNA, 22 nt, Human
ugggacuacaggcgccagccac

SEQ ID NO: 559793 - RNA, 24 nt, Human
ugggacuacaggcgccagccacca

SEQ ID NO: 559794 - RNA, 18 nt, Human
ugggauuacagacgugag

SEQ ID NO: 559795 - RNA, 19 nt, Human
ugggauuacagacgugagc

SEQ ID NO: 559796 - RNA, 21 nt, Human
ugggauuacagacgugagcca

SEQ ID NO: 559797 - RNA, 22 nt, Human
ugggauuacagacgugagccac

SEQ ID NO: 559798 - RNA, 23 nt, Human
ugggauuacagacgugagccacc

SEQ ID NO: 559799 - RNA, 24 nt, Human
ugggauuacagacgugagccaccg

SEQ ID NO: 559800 - RNA, 21 nt, Human
uggggacgagcaggagagggc

SEQ ID NO: 559801 - RNA, 20 nt, Human
uggggcugggcuggccaguu

SEQ ID NO: 559802 - RNA, 22 nt, Human
ugguccuggacuuccuacuccc

SEQ ID NO: 559803 - RNA, 21 nt, Human
uguauuuuuaguagagacggg

SEQ ID NO: 559804 - RNA, 21 nt, Human
ugucgcccaggcuggagugca

SEQ ID NO: 559805 - RNA, 24 nt, Human
ugucgcuaaggaacacccgguggg

SEQ ID NO: 559806 - RNA, 19 nt, Human
ugugcaagaugugagaggc

SEQ ID NO: 559807 - RNA, 25 nt, Human
uuaguagagacggggguuucaccau

SEQ ID NO: 559808 - RNA, 24 nt, Human
uucaagccaguuagcucucaggga

SEQ ID NO: 559809 - RNA, 24 nt, Human
uugcugugucgcccaggcuggagu

SEQ ID NO: 559810 - RNA, 24 nt, Human
uuguauuuuuaguagagacggggg

SEQ ID NO: 559811 - RNA, 19 nt, Human
uuucaccauguuagccagg

SEQ ID NO: 559812 - RNA, 20 nt, Human
uuucaccauguuagccagga

SEQ ID NO: 559813 - RNA, 21 nt, Human
uuuuguauuuuuaguagagac

SEQ ID NO: 559814 - RNA, 25 nt, Human
uuuuuaguagagacggggguuucac

SEQ ID NO: 559815 - RNA, 21 nt, Human
uuuuuguauuuuuaguagaga

SEQ ID NO: 559816 - RNA, 19 nt, Human
aagcgggaaugccggcaau

SEQ ID NO: 559817 - RNA, 22 nt, Human
aaguuuggagauugcacuaacu

SEQ ID NO: 559818 - RNA, 21 nt, Human
accagcagaagcgggaaugcc

SEQ ID NO: 559819 - RNA, 20 nt, Human
acuugcugccccggcaccuc

SEQ ID NO: 559820 - RNA, 18 nt, Human
agaguauaaaguggaaac

SEQ ID NO: 559821 - RNA, 19 nt, Human
agaguauaaaguggaaaca

SEQ ID NO: 559822 - RNA, 21 nt, Human
aggaggaaaggaagggcaggg

SEQ ID NO: 559823 - RNA, 21 nt, Human
aguaaaaugccuacuaaugcc

SEQ ID NO: 559824 - RNA, 20 nt, Human
caccuguccccucuuucuca

SEQ ID NO: 559825 - RNA, 23 nt, Human
cagccugcagcaugaagcaacca

SEQ ID NO: 559826 - RNA, 24 nt, Human
cagccugcagcaugaagcaaccag

SEQ ID NO: 559827 - RNA, 19 nt, Human
caugaaguuuggagauugc

SEQ ID NO: 559828 - RNA, 24 nt, Human
cccucuuucucagcuuggaguuuu

SEQ ID NO: 559829 - RNA, 21 nt, Human
ccggagcucaccuccacacac

SEQ ID NO: 559830 - RNA, 26 nt, Human
ccucaacauccaaucauuucucccug

SEQ ID NO: 559831 - RNA, 28 nt, Human
ccugcagcaugaagcaaccagcagaagc

SEQ ID NO: 559832 - RNA, 19 nt, Human
ccuuaugaagaguauucca

SEQ ID NO: 559833 - RNA, 21 nt, Human
cucccugcucugacaccuguc

SEQ ID NO: 559834 - RNA, 23 nt, Human
cucccugcucugacaccuguccc

SEQ ID NO: 559835 - RNA, 23 nt, Human
cugacaccuguccccucuuucuc

SEQ ID NO: 559836 - RNA, 19 nt, Human
cuucuauaucccacuuuag

SEQ ID NO: 559837 - RNA, 18 nt, Human
gaaacugaguuuuggaca

SEQ ID NO: 559838 - RNA, 21 nt, Human
gaguauaaaguggaaacacag

SEQ ID NO: 559839 - RNA, 19 nt, Human
gccugcagcaugaagcaac

SEQ ID NO: 559840 - RNA, 19 nt, Human
ggaaaaaaaaugucugcaa

SEQ ID NO: 559841 - RNA, 21 nt, Human
guucaaaugcagcuuuccuca

SEQ ID NO: 559842 - RNA, 22 nt, Human
uaagcaccugccaguuugugcc

SEQ ID NO: 559843 - RNA, 28 nt, Human
uaagccaaaauugcuaucuaccaaagua

SEQ ID NO: 559844 - RNA, 18 nt, Human
uaaguuacaugcuucgcc

SEQ ID NO: 559845 - RNA, 24 nt, Human
uacaugcuucgcccuccgcccccu

SEQ ID NO: 559846 - RNA, 21 nt, Human
uccucaacauccaaucauuuc

SEQ ID NO: 559847 - RNA, 24 nt, Human
ucucccugcucugacaccuguccc

SEQ ID NO: 559848 - RNA, 24 nt, Human
ugaagaguauuccaagguuuucau

SEQ ID NO: 559849 - RNA, 21 nt, Human
ugacaccuguccccucuuucu

SEQ ID NO: 559850 - RNA, 22 nt, Human
ugacaccuguccccucuuucuc

SEQ ID NO: 559851 - RNA, 21 nt, Human
ugccccaaucaaaaaugauac

SEQ ID NO: 559852 - RNA, 21 nt, Human
ugcuaucuaccaaaguauuua

SEQ ID NO: 559853 - RNA, 24 nt, Human
ugucuuaucccuaugauacaucca

SEQ ID NO: 559854 - RNA, 21 nt, Human
ugugaugauuccuucaggcuu

SEQ ID NO: 559855 - RNA, 19 nt, Human
ugugccauuaagccaaaau

SEQ ID NO: 559856 - RNA, 23 nt, Human
uuaagcaccugccaguuugugcc

SEQ ID NO: 559857 - RNA, 25 nt, Human
uucaggcuuauggggaaaaaaaaug

SEQ ID NO: 559858 - RNA, 21 nt, Human
uucaugcaaaugugagggucc

SEQ ID NO: 559859 - RNA, 24 nt, Human
uuccucaacauccaaucauuucuc

SEQ ID NO: 559860 - RNA, 19 nt, Human
uucucccugcucugacacc

SEQ ID NO: 559861 - RNA, 24 nt, Human
uuuaguccuuaugaagaguauucc

SEQ ID NO: 559862 - RNA, 19 nt, Human
uuuguuucagaauugucuu

SEQ ID NO: 559863 - RNA, 26 nt, Human
uuuucaugcaaaugugagggucccau

SEQ ID NO: 559864 - RNA, 18 nt, Human
aagaaccaaauucaggca

SEQ ID NO: 559865 - RNA, 21 nt, Human
aagccacccagagcuauuuac

SEQ ID NO: 559866 - RNA, 23 nt, Human
accacccccuacaauaaguccug

SEQ ID NO: 559867 - RNA, 24 nt, Human
accauacaacauuucaacauacaa

SEQ ID NO: 559868 - RNA, 20 nt, Human
accggaaccgccaaacugaa

SEQ ID NO: 559869 - RNA, 24 nt, Human
acugaacugcgcgccggaccggcg

SEQ ID NO: 559870 - RNA, 23 nt, Human
agaaauaugcuuuccuuuuuaac

SEQ ID NO: 559871 - RNA, 24 nt, Human
aguaaaaauuauaggaacugugga

SEQ ID NO: 559872 - RNA, 21 nt, Human
auaaagcaacaugcaaucccc

SEQ ID NO: 559873 - RNA, 23 nt, Human
auaaagcaacaugcaaucccccu

SEQ ID NO: 559874 - RNA, 20 nt, Human
auagcaccuguagaagaacc

SEQ ID NO: 559875 - RNA, 21 nt, Human
aucuuuauuucuccauaaggg

SEQ ID NO: 559876 - RNA, 21 nt, Human
augguuacggagaucguggua

SEQ ID NO: 559877 - RNA, 26 nt, Human
caauaaagcaacaugcaaucccccuc

SEQ ID NO: 559878 - RNA, 23 nt, Human
caccuguagaagaaccaaauuca

SEQ ID NO: 559879 - RNA, 24 nt, Human
caguaaccagaguacccagcacac

SEQ ID NO: 559880 - RNA, 26 nt, Human
caugcaaaugguuacggagaucgugg

SEQ ID NO: 559881 - RNA, 24 nt, Human
cauuucaacauacaaguuccuauu

SEQ ID NO: 559882 - RNA, 20 nt, Human
cccaaggacuuuccuaucac

SEQ ID NO: 559883 - RNA, 23 nt, Human
cccccaguaaaaauuauaggaac

SEQ ID NO: 559884 - RNA, 22 nt, Human
ccgccgggacuauuuugaccac

SEQ ID NO: 559885 - RNA, 20 nt, Human
cucuuucucuuuuuggcuug

SEQ ID NO: 559886 - RNA, 22 nt, Human
cugaacugcgcgccggaccggc

SEQ ID NO: 559887 - RNA, 20 nt, Human
cugcuguucuacuaaugcuc

SEQ ID NO: 559888 - RNA, 21 nt, Human
cugcuguucuacuaaugcucc

SEQ ID NO: 559889 - RNA, 18 nt, Human
cuuauagaggacuucauc

SEQ ID NO: 559890 - RNA, 18 nt, Human
cuucaggaucuuccuccc

SEQ ID NO: 559891 - RNA, 24 nt, Human
gagagcgguaccggaaccgccaaa

SEQ ID NO: 559892 - RNA, 23 nt, Human
ggaaggugcgagaccaaaucuua

SEQ ID NO: 559893 - RNA, 21 nt, Human
ggcaaucagagaaauaugcuu

SEQ ID NO: 559894 - RNA, 22 nt, Human
uaaacaagguugaaauguggua

SEQ ID NO: 559895 - RNA, 19 nt, Human
uaacaagcucaucuuuaau

SEQ ID NO: 559896 - RNA, 21 nt, Human
uaaugcacauaacauaugcuu

SEQ ID NO: 559897 - RNA, 21 nt, Human
uacaacauuucaacauacaag

SEQ ID NO: 559898 - RNA, 22 nt, Human
uagaaaguauaaguauugagag

SEQ ID NO: 559899 - RNA, 21 nt, Human
uagaagaaccaaauucaggca

SEQ ID NO: 559900 - RNA, 19 nt, Human
uagcaccuguagaagaacc

SEQ ID NO: 559901 - RNA, 21 nt, Human
uauacaagaacuaccauacaa

SEQ ID NO: 559902 - RNA, 20 nt, Human
uauuuucugaaauauuuaca

SEQ ID NO: 559903 - RNA, 18 nt, Human
uauuuugaaagauuggaa

SEQ ID NO: 559904 - RNA, 22 nt, Human
ucaacauacaaguuccuauacu

SEQ ID NO: 559905 - RNA, 22 nt, Human
ucaagccacccagagcuauuua

SEQ ID NO: 559906 - RNA, 18 nt, Human
ucaauagucuucaacuuc

SEQ ID NO: 559907 - RNA, 22 nt, Human
ucaggaucuuccucccuuuucu

SEQ ID NO: 559908 - RNA, 19 nt, Human
uccauacauugcuguuuuc

SEQ ID NO: 559909 - RNA, 19 nt, Human
ucuuccucccuuuucugcu

SEQ ID NO: 559910 - RNA, 22 nt, Human
ugaugagccugugaacuccacg

SEQ ID NO: 559911 - RNA, 21 nt, Human
ugccuuauuuaucucaguaac

SEQ ID NO: 559912 - RNA, 23 nt, Human
ugcucguucucuuugucauuuca

SEQ ID NO: 559913 - RNA, 19 nt, Human
uggaaggugcgagaccaaa

SEQ ID NO: 559914 - RNA, 19 nt, Human
uguagaagaaccaaauuca

SEQ ID NO: 559915 - RNA, 22 nt, Human
ugucugcucccucuguguccuc

SEQ ID NO: 559916 - RNA, 19 nt, Human
uguggugcucguucucuuu

SEQ ID NO: 559917 - RNA, 23 nt, Human
uguuuucagguucuacaauaauu

SEQ ID NO: 559918 - RNA, 24 nt, Human
uuaaacuuucguuucaagccaccc

SEQ ID NO: 559919 - RNA, 22 nt, Human
uuacaggccaauaaagcaacau

SEQ ID NO: 559920 - RNA, 18 nt, Human
uuacuaaaaugauccugu

SEQ ID NO: 559921 - RNA, 22 nt, Human
uucagguucuacaauaauuacc

SEQ ID NO: 559922 - RNA, 23 nt, Human
aaaaaaaaaccaagagaaaagaa

SEQ ID NO: 559923 - RNA, 23 nt, Human
aaaaaaaaccaagagaaaagaaa

SEQ ID NO: 559924 - RNA, 21 nt, Human
aaaaaaauuuaaaccaagcug

SEQ ID NO: 559925 - RNA, 24 nt, Human
accccgccgacccccgcggaauaa

SEQ ID NO: 559926 - RNA, 20 nt, Human
agagcuucaccgaaacacac

SEQ ID NO: 559927 - RNA, 18 nt, Human
agcaaaacaguccggaga

SEQ ID NO: 559928 - RNA, 21 nt, Human
augaccacuaacuucugcaua

SEQ ID NO: 559929 - RNA, 19 nt, Human
caaagcgcagcggcggcgc

SEQ ID NO: 559930 - RNA, 20 nt, Human
cacacacaaagcaggccugu

SEQ ID NO: 559931 - RNA, 21 nt, Human
cacacacaaagcaggccugua

SEQ ID NO: 559932 - RNA, 22 nt, Human
cacacagugaugaacugugccc

SEQ ID NO: 559933 - RNA, 19 nt, Human
ccaccaugucugcccgccc

SEQ ID NO: 559934 - RNA, 22 nt, Human
ccaccaugucugcccgccccuc

SEQ ID NO: 559935 - RNA, 19 nt, Human
ccaggccgaccccgccgac

SEQ ID NO: 559936 - RNA, 22 nt, Human
ccccgccgacccccgcggaaua

SEQ ID NO: 559937 - RNA, 21 nt, Human
ccugaauugagagagcaaaac

SEQ ID NO: 559938 - RNA, 18 nt, Human
cgaggagggggcggcggc

SEQ ID NO: 559939 - RNA, 19 nt, Human
cgggcgcccaggccgaccc

SEQ ID NO: 559940 - RNA, 24 nt, Human
cggggccaggagccccggaaaccc

SEQ ID NO: 559941 - RNA, 22 nt, Human
cucccagaagcagugugcccag

SEQ ID NO: 559942 - RNA, 23 nt, Human
cugagaaucuucuauuaaaccag

SEQ ID NO: 559943 - RNA, 24 nt, Human
gaaaaaaaaaccaagagaaaagaa

SEQ ID NO: 559944 - RNA, 18 nt, Human
gcagcggcggcgcgggcg

SEQ ID NO: 559945 - RNA, 18 nt, Human
gccacaguccaaucaggu

SEQ ID NO: 559946 - RNA, 21 nt, Human
gccccggaaacccggcgccuu

SEQ ID NO: 559947 - RNA, 18 nt, Human
ggaagacacacacaaagc

SEQ ID NO: 559948 - RNA, 19 nt, Human
ggaagacacacacaaagca

SEQ ID NO: 559949 - RNA, 21 nt, Human
ggcgaagucuuuggggcagaa

SEQ ID NO: 559950 - RNA, 22 nt, Human
ggcggcggccgccaccaugucu

SEQ ID NO: 559951 - RNA, 22 nt, Human
gggccgaggagggggcggcggc

SEQ ID NO: 559952 - RNA, 21 nt, Human
gugcccuggcagagaugaccu

SEQ ID NO: 559953 - RNA, 20 nt, Human
uaaaaaacguacuucaguaa

SEQ ID NO: 559954 - RNA, 18 nt, Human
uaucaaagcugaugguua

SEQ ID NO: 559955 - RNA, 19 nt, Human
ucccagaagcagugugccu

SEQ ID NO: 559956 - RNA, 21 nt, Human
ucugcccgccccucccagaag

SEQ ID NO: 559957 - RNA, 18 nt, Human
ugagaaaaaaauuuaaac

SEQ ID NO: 559958 - RNA, 19 nt, Human
ugagaaaaaaauuuaaacc

SEQ ID NO: 559959 - RNA, 21 nt, Human
ugagauggcaauguacuuuac

SEQ ID NO: 559960 - RNA, 20 nt, Human
ugcccgccccucccagaagc

SEQ ID NO: 559961 - RNA, 18 nt, Human
ugccugaauugagagagc

SEQ ID NO: 559962 - RNA, 28 nt, Human
uguaucauuccuuugguuucaguuuuca

SEQ ID NO: 559963 - RNA, 22 nt, Human
uugccugaauugagagagcaaa

SEQ ID NO: 559964 - RNA, 19 nt, Human
uuggggcagaagucccgag

SEQ ID NO: 559965 - RNA, 21 nt, Human
uuguuuuuggaaaaaaaaacc

SEQ ID NO: 559966 - RNA, 21 nt, Human
uuuaaaccaagcugggugggu

SEQ ID NO: 559967 - RNA, 19 nt, Human
uuuacaaggaccauuuaca

SEQ ID NO: 559968 - RNA, 28 nt, Human
aaaaacauucaucccagcaaaagccucc

SEQ ID NO: 559969 - RNA, 20 nt, Human
aagccuccagggcuggaggg

SEQ ID NO: 559970 - RNA, 19 nt, Human
agaaagaccuccugggcug

SEQ ID NO: 559971 - RNA, 19 nt, Human
agcagaaagaccuccuggg

SEQ ID NO: 559972 - RNA, 18 nt, Human
agcaggagguuguccagg

SEQ ID NO: 559973 - RNA, 24 nt, Human
agcaggagguuguccagggacugu

SEQ ID NO: 559974 - RNA, 20 nt, Human
agccagccuggagcuccugc

SEQ ID NO: 559975 - RNA, 22 nt, Human
agccuggagcuccugcugcugg

SEQ ID NO: 559976 - RNA, 22 nt, Human
agguguccagccagccuggagc

SEQ ID NO: 559977 - RNA, 21 nt, Human
cagcaaaagccuccagggcug

SEQ ID NO: 559978 - RNA, 21 nt, Human
cagcucccucuacucacaguc

SEQ ID NO: 559979 - RNA, 24 nt, Human
ccggucguagccccggccucccuu

SEQ ID NO: 559980 - RNA, 23 nt, Human
ccucauccggcucccauagcacc

SEQ ID NO: 559981 - RNA, 21 nt, Human
ccuccagggcuggagggugag

SEQ ID NO: 559982 - RNA, 19 nt, Human
cuauaaaaacauucauccc

SEQ ID NO: 559983 - RNA, 24 nt, Human
cuccugggcuggggacauccuucc

SEQ ID NO: 559984 - RNA, 21 nt, Human
cuggcgcggcaggcggcucuc

SEQ ID NO: 559985 - RNA, 18 nt, Human
gagguuguccagggacug

SEQ ID NO: 559986 - RNA, 18 nt, Human
gccuggagcuccugcugc

SEQ ID NO: 559987 - RNA, 22 nt, Human
gggccgugcuccccugaugcga

SEQ ID NO: 559988 - RNA, 18 nt, Human
gggcuggggacauccuuc

SEQ ID NO: 559989 - RNA, 22 nt, Human
uacaacaaaaacccuauaaaaa

SEQ ID NO: 559990 - RNA, 23 nt, Human
uacaacaaaaacccuauaaaaac

SEQ ID NO: 559991 - RNA, 26 nt, Human
uacaacaaaaacccuauaaaaacauu

SEQ ID NO: 559992 - RNA, 19 nt, Human
uccagggcuggagggugag

SEQ ID NO: 559993 - RNA, 21 nt, Human
ucccacugugguccagcuccc

SEQ ID NO: 559994 - RNA, 18 nt, Human
ucccagcaaaagccucca

SEQ ID NO: 559995 - RNA, 25 nt, Human
ucccagcaaaagccuccagggcugg

SEQ ID NO: 559996 - RNA, 22 nt, Human
uccugggcuggggacauccuuc

SEQ ID NO: 559997 - RNA, 19 nt, Human
ugaugcgauugggcucuca

SEQ ID NO: 559998 - RNA, 24 nt, Human
ugcccuguccucauccggcuccca

SEQ ID NO: 559999 - RNA, 19 nt, Human
ugcguggggacccaggugu

SEQ ID NO: 560000 - RNA, 18 nt, Human
uggcgcggcaggcggcuc

SEQ ID NO: 560001 - RNA, 20 nt, Human
ugggaugcccuguccucauc

SEQ ID NO: 560002 - RNA, 19 nt, Human
ugggcuggggacauccuuc

SEQ ID NO: 560003 - RNA, 24 nt, Human
uggggcccuggcaaccugucugga

SEQ ID NO: 560004 - RNA, 24 nt, Human
uucaucccagcaaaagccuccagg

SEQ ID NO: 560005 - RNA, 21 nt, Human
uuccuuggggacgauggagca

SEQ ID NO: 560006 - RNA, 21 nt, Human
aaagggacugaagcuguaacc

SEQ ID NO: 560007 - RNA, 24 nt, Human
aaagugcugggauuacagguguga

SEQ ID NO: 560008 - RNA, 19 nt, Human
aaccagccucuccacucca

SEQ ID NO: 560009 - RNA, 20 nt, Human
aagaguggauggauggaugg

SEQ ID NO: 560010 - RNA, 18 nt, Human
aagugauccaccugccuc

SEQ ID NO: 560011 - RNA, 18 nt, Human
aagugcugggauuacagg

SEQ ID NO: 560012 - RNA, 19 nt, Human
aagugcugggauuacaggu

SEQ ID NO: 560013 - RNA, 21 nt, Human
acagauggguggauggaggaa

SEQ ID NO: 560014 - RNA, 20 nt, Human
acaggguuucgccuuguugg

SEQ ID NO: 560015 - RNA, 24 nt, Human
acaggguuucgccuuguuggccag

SEQ ID NO: 560016 - RNA, 20 nt, Human
accagccucuccacuccacc

SEQ ID NO: 560017 - RNA, 22 nt, Human
acucugccuuuucuuuuuuugu

SEQ ID NO: 560018 - RNA, 18 nt, Human
agacaaagggacugaagc

SEQ ID NO: 560019 - RNA, 18 nt, Human
agaggguggaagagugga

SEQ ID NO: 560020 - RNA, 24 nt, Human
agaguggauggauggauggacggg

SEQ ID NO: 560021 - RNA, 24 nt, Human
agcaagucucgugccucagccucc

SEQ ID NO: 560022 - RNA, 20 nt, Human
agccuuuugcuuuuucucag

SEQ ID NO: 560023 - RNA, 23 nt, Human
agcugcuccacugagcuggcccc

SEQ ID NO: 560024 - RNA, 25 nt, Human
aggcuggagugcaguggcgcgaucu

SEQ ID NO: 560025 - RNA, 20 nt, Human
aggugugaggcaccauaacc

SEQ ID NO: 560026 - RNA, 20 nt, Human
aguagagacaggguuucgcc

SEQ ID NO: 560027 - RNA, 19 nt, Human
aguagcugggauuacaggc

SEQ ID NO: 560028 - RNA, 21 nt, Human
agugcaguggcgcgaucucag

SEQ ID NO: 560029 - RNA, 23 nt, Human
agugcaguggcgcgaucucagcu

SEQ ID NO: 560030 - RNA, 24 nt, Human
agugcaguggcgcgaucucagcuc

SEQ ID NO: 560031 - RNA, 24 nt, Human
auuuuuuuauuuuuaguagagaca

SEQ ID NO: 560032 - RNA, 19 nt, Human
caaagggacugaagcugua

SEQ ID NO: 560033 - RNA, 26 nt, Human
caaagggacugaagcuguaaccaguc

SEQ ID NO: 560034 - RNA, 24 nt, Human
caaagugcugggauuacaggugug

SEQ ID NO: 560035 - RNA, 23 nt, Human
caaccuccaccuccuggguucaa

SEQ ID NO: 560036 - RNA, 20 nt, Human
caagucucgugccucagccu

SEQ ID NO: 560037 - RNA, 22 nt, Human
caagugauccaccugccucagc

SEQ ID NO: 560038 - RNA, 24 nt, Human
caagugauccaccugccucagccc

SEQ ID NO: 560039 - RNA, 21 nt, Human
caccacaaccuccaccuccug

SEQ ID NO: 560040 - RNA, 23 nt, Human
caccacaaccuccaccuccuggg

SEQ ID NO: 560041 - RNA, 24 nt, Human
cacccaggcuggagugcaguggcg

SEQ ID NO: 560042 - RNA, 27 nt, Human
caccuacccgugacugaugcucagagc

SEQ ID NO: 560043 - RNA, 23 nt, Human
caccugccucagccccccaaagu

SEQ ID NO: 560044 - RNA, 19 nt, Human
cagcaugaggucagucucu

SEQ ID NO: 560045 - RNA, 20 nt, Human
cagccuccugaguagcuggg

SEQ ID NO: 560046 - RNA, 24 nt, Human
caggguuucgccuuguuggccagg

SEQ ID NO: 560047 - RNA, 23 nt, Human
caguaucugaaacaucuguucca

SEQ ID NO: 560048 - RNA, 23 nt, Human
cagugcccuucucuucugggucc

SEQ ID NO: 560049 - RNA, 18 nt, Human
caucucugcaggucaagg

SEQ ID NO: 560050 - RNA, 21 nt, Human
ccaaagugcugggauuacagg

SEQ ID NO: 560051 - RNA, 21 nt, Human
ccaaagugcugggauuacagg

SEQ ID NO: 560052 - RNA, 24 nt, Human
ccaaagugcugggauuacaggugu

SEQ ID NO: 560053 - RNA, 18 nt, Human
ccacaaccuccaccuccu

SEQ ID NO: 560054 - RNA, 23 nt, Human
ccacaaccuccaccuccuggguu

SEQ ID NO: 560055 - RNA, 24 nt, Human
ccacaaccuccaccuccuggguuc

SEQ ID NO: 560056 - RNA, 26 nt, Human
ccaccugccucagccccccaaagugc

SEQ ID NO: 560057 - RNA, 23 nt, Human
ccccaaagugcugggauuacagg

SEQ ID NO: 560058 - RNA, 21 nt, Human
cccgugacugaugcucagagc

SEQ ID NO: 560059 - RNA, 21 nt, Human
ccgguagagugcuuugacauc

SEQ ID NO: 560060 - RNA, 19 nt, Human
ccuccaccuccuggguuca

SEQ ID NO: 560061 - RNA, 21 nt, Human
ccugaccucaagugauccacc

SEQ ID NO: 560062 - RNA, 23 nt, Human
ccugaccucaagugauccaccug

SEQ ID NO: 560063 - RNA, 23 nt, Human
ccugaccucaagugauccaccug

SEQ ID NO: 560064 - RNA, 23 nt, Human
ccugaguagcugggauuacaggc

SEQ ID NO: 560065 - RNA, 24 nt, Human
ccugaguagcugggauuacaggcg

SEQ ID NO: 560066 - RNA, 21 nt, Human
ccuggaaaacuuuguucuugg

SEQ ID NO: 560067 - RNA, 20 nt, Human
ccuggguucaagcaagucuc

SEQ ID NO: 560068 - RNA, 19 nt, Human
ccuuguuggccaggcuggu

SEQ ID NO: 560069 - RNA, 21 nt, Human
ccuuguuggccaggcuggucu

SEQ ID NO: 560070 - RNA, 21 nt, Human
ccuuguuggccaggcuggucu

SEQ ID NO: 560071 - RNA, 24 nt, Human
cgccuuguuggccaggcuggucuu

SEQ ID NO: 560072 - RNA, 24 nt, Human
cgcucugucacccaggcuggagug

SEQ ID NO: 560073 - RNA, 21 nt, Human
cgugacugaugcucagagcaa

SEQ ID NO: 560074 - RNA, 23 nt, Human
cucaagugauccaccugccucag

SEQ ID NO: 560075 - RNA, 20 nt, Human
cucacacaucucugcagguc

SEQ ID NO: 560076 - RNA, 27 nt, Human
cucaccacaaccuccaccuccuggguu

SEQ ID NO: 560077 - RNA, 21 nt, Human
cucagccccccaaagugcugg

SEQ ID NO: 560078 - RNA, 24 nt, Human
cucagccuccugaguagcugggau

SEQ ID NO: 560079 - RNA, 19 nt, Human
cucagugcccuucucuucu

SEQ ID NO: 560080 - RNA, 20 nt, Human
cuccagcauccucccuggcc

SEQ ID NO: 560081 - RNA, 21 nt, Human
cucgcucugucacccaggcug

SEQ ID NO: 560082 - RNA, 24 nt, Human
cucgcucugucacccaggcuggag

SEQ ID NO: 560083 - RNA, 25 nt, Human
cucgugccucagccuccugaguagc

SEQ ID NO: 560084 - RNA, 27 nt, Human
cugaagcuguaaccagccucuccacuc

SEQ ID NO: 560085 - RNA, 22 nt, Human
cugaguagcugggauuacaggc

SEQ ID NO: 560086 - RNA, 24 nt, Human
cugaguagcugggauuacaggcgu

SEQ ID NO: 560087 - RNA, 18 nt, Human
cuggguccaacaguaucu

SEQ ID NO: 560088 - RNA, 24 nt, Human
cuucucuagggcuuggcuccgccg

SEQ ID NO: 560089 - RNA, 20 nt, Human
gacaggguuucgccuuguuc

SEQ ID NO: 560090 - RNA, 24 nt, Human
gaccucaagugauccaccugccuc

SEQ ID NO: 560091 - RNA, 21 nt, Human
gaggacauguaucgcaccuuc

SEQ ID NO: 560092 - RNA, 20 nt, Human
gaguagcugggauuacaggc

SEQ ID NO: 560093 - RNA, 24 nt, Human
gaguagcugggauuacaggcgugc

SEQ ID NO: 560094 - RNA, 24 nt, Human
gauuacaggcgugcacuaccaugc

SEQ ID NO: 560095 - RNA, 18 nt, Human
gauuacaggugugaggca

SEQ ID NO: 560096 - RNA, 22 nt, Human
gauuacaggugugaggcaccau

SEQ ID NO: 560097 - RNA, 25 nt, Human
gcucugucacccaggcuggagugca

SEQ ID NO: 560098 - RNA, 19 nt, Human
gcuggagugcaguggcgcg

SEQ ID NO: 560099 - RNA, 23 nt, Human
gcuggucuugaacuccugaccuc

SEQ ID NO: 560100 - RNA, 18 nt, Human
ggauggacagaugggugg

SEQ ID NO: 560101 - RNA, 27 nt, Human
ggauggacagauggguggauggaggaa

SEQ ID NO: 560102 - RNA, 19 nt, Human
ggauggaggaauggauggg

SEQ ID NO: 560103 - RNA, 20 nt, Human
ggccggggcucggggguccc

SEQ ID NO: 560104 - RNA, 21 nt, Human
ggcggauggacagaugggugg

SEQ ID NO: 560105 - RNA, 24 nt, Human
ggcuggucuugaacuccugaccuc

SEQ ID NO: 560106 - RNA, 19 nt, Human
ggucuugaacuccugaccu

SEQ ID NO: 560107 - RNA, 24 nt, Human
gguggccggccggggcucgggggu

SEQ ID NO: 560108 - RNA, 18 nt, Human
guagcugggauuacaggc

SEQ ID NO: 560109 - RNA, 18 nt, Human
guagcugggauuacaggc

SEQ ID NO: 560110 - RNA, 20 nt, Human
gucaaggacagccuggucca

SEQ ID NO: 560111 - RNA, 18 nt, Human
gugauccaccugccucag

SEQ ID NO: 560112 - RNA, 22 nt, Human
gugauccaccugccucagcccc

SEQ ID NO: 560113 - RNA, 22 nt, Human
gugccucagccuccugaguagc

SEQ ID NO: 560114 - RNA, 22 nt, Human
uaaccagccucuccacuccacc

SEQ ID NO: 560115 - RNA, 23 nt, Human
uaauuuuuuuauuuuuaguagag

SEQ ID NO: 560116 - RNA, 24 nt, Human
uaauuuuuuuauuuuuaguagaga

SEQ ID NO: 560117 - RNA, 22 nt, Human
uagagacaggguuucgccuugu

SEQ ID NO: 560118 - RNA, 20 nt, Human
uagggcuuggcuccgccggu

SEQ ID NO: 560119 - RNA, 19 nt, Human
uaguagagacaggguuucg

SEQ ID NO: 560120 - RNA, 26 nt, Human
uaguagagacaggguuucgccuuguu

SEQ ID NO: 560121 - RNA, 18 nt, Human
ucaaggacagccuggucc

SEQ ID NO: 560122 - RNA, 22 nt, Human
ucaagugauccaccugccucag

SEQ ID NO: 560123 - RNA, 24 nt, Human
ucaccacaaccuccaccuccuggg

SEQ ID NO: 560124 - RNA, 27 nt, Human
ucaccacaaccuccaccuccuggguuc

SEQ ID NO: 560125 - RNA, 24 nt, Human
ucacccaggcuggagugcaguggc

SEQ ID NO: 560126 - RNA, 18 nt, Human
ucagccccccaaagugcu

SEQ ID NO: 560127 - RNA, 20 nt, Human
ucagccccccaaagugcugg

SEQ ID NO: 560128 - RNA, 20 nt, Human
ucagccuccugaguagcugg

SEQ ID NO: 560129 - RNA, 18 nt, Human
uccaccugccucagcccc

SEQ ID NO: 560130 - RNA, 18 nt, Human
uccacugagcuggccccg

SEQ ID NO: 560131 - RNA, 24 nt, Human
uccacugagcuggccccgggggug

SEQ ID NO: 560132 - RNA, 18 nt, Human
uccagcauccucccuggc

SEQ ID NO: 560133 - RNA, 24 nt, Human
uccugaguagcugggauuacaggc

SEQ ID NO: 560134 - RNA, 21 nt, Human
uccuggguucaagcaagucuc

SEQ ID NO: 560135 - RNA, 24 nt, Human
uccuggguucaagcaagucucgug

SEQ ID NO: 560136 - RNA, 24 nt, Human
ucgcucugucacccaggcuggagu

SEQ ID NO: 560137 - RNA, 19 nt, Human
ucucgcucugucacccagg

SEQ ID NO: 560138 - RNA, 23 nt, Human
ucucgcucugucacccaggcugg

SEQ ID NO: 560139 - RNA, 24 nt, Human
ucucgcucugucacccaggcugga

SEQ ID NO: 560140 - RNA, 26 nt, Human
ucucgcucugucacccaggcuggagu

SEQ ID NO: 560141 - RNA, 27 nt, Human
ucucgcucugucacccaggcuggagug

SEQ ID NO: 560142 - RNA, 21 nt, Human
ucugaaacaucuguuccacuu

SEQ ID NO: 560143 - RNA, 21 nt, Human
ucugcaggucaaggacagccu

SEQ ID NO: 560144 - RNA, 24 nt, Human
ucugucacccaggcuggagugcag

SEQ ID NO: 560145 - RNA, 28 nt, Human
ucuucuggguccaacaguaucugaaaca

SEQ ID NO: 560146 - RNA, 21 nt, Human
ucuugaacuccugaccucaag

SEQ ID NO: 560147 - RNA, 24 nt, Human
ugaccucaagugauccaccugccu

SEQ ID NO: 560148 - RNA, 20 nt, Human
ugaggcaccauaaccuaccu

SEQ ID NO: 560149 - RNA, 21 nt, Human
ugaggcaccauaaccuaccua

SEQ ID NO: 560150 - RNA, 19 nt, Human
ugcaagagcugaaccccau

SEQ ID NO: 560151 - RNA, 22 nt, Human
ugcaguggcgcgaucucagcuc

SEQ ID NO: 560152 - RNA, 21 nt, Human
ugcccuucucuucugggucca

SEQ ID NO: 560153 - RNA, 24 nt, Human
ugccucagccccccaaagugcugg

SEQ ID NO: 560154 - RNA, 22 nt, Human
ugccucagccuccugaguagcu

SEQ ID NO: 560155 - RNA, 24 nt, Human
ugccucagccuccugaguagcugg

SEQ ID NO: 560156 - RNA, 24 nt, Human
ugcugggauuacaggugugaggca

SEQ ID NO: 560157 - RNA, 19 nt, Human
uggaccacucacagucauc

SEQ ID NO: 560158 - RNA, 23 nt, Human
uggagugcaguggcgcgaucuca

SEQ ID NO: 560159 - RNA, 24 nt, Human
uggagugcaguggcgcgaucucag

SEQ ID NO: 560160 - RNA, 24 nt, Human
uggccaggcuggucuugaacuccu

SEQ ID NO: 560161 - RNA, 24 nt, Human
uggcgcgaucucagcucaccacaa

SEQ ID NO: 560162 - RNA, 22 nt, Human
ugggauuacaggcgugcacuaa

SEQ ID NO: 560163 - RNA, 22 nt, Human
ugggauuacaggcgugcacuac

SEQ ID NO: 560164 - RNA, 24 nt, Human
ugggauuacaggcgugcacuacca

SEQ ID NO: 560165 - RNA, 25 nt, Human
ugggauuacaggcgugcacuaccau

SEQ ID NO: 560166 - RNA, 25 nt, Human
ugggauuacaggcgugcacuaccau

SEQ ID NO: 560167 - RNA, 18 nt, Human
ugggauuacaggugugag

SEQ ID NO: 560168 - RNA, 19 nt, Human
ugggauuacaggugugagg

SEQ ID NO: 560169 - RNA, 22 nt, Human
ugggauuacaggugugaggcac

SEQ ID NO: 560170 - RNA, 23 nt, Human
ugggauuacaggugugaggcacc

SEQ ID NO: 560171 - RNA, 24 nt, Human
ugggauuacaggugugaggcacca

SEQ ID NO: 560172 - RNA, 25 nt, Human
ugggauuacaggugugaggcaccau

SEQ ID NO: 560173 - RNA, 22 nt, Human
ugggcuccaagcucacacaucu

SEQ ID NO: 560174 - RNA, 18 nt, Human
uguacucugccuuuucuu

SEQ ID NO: 560175 - RNA, 21 nt, Human
ugucacccaggcuggagugca

SEQ ID NO: 560176 - RNA, 20 nt, Human
uuacaggugugaggcaccau

SEQ ID NO: 560177 - RNA, 24 nt, Human
uuaguagagacaggguuucgccuu

SEQ ID NO: 560178 - RNA, 25 nt, Human
uuaguagagacaggguuucgccuug

SEQ ID NO: 560179 - RNA, 18 nt, Human
uucucuagggcuuggcuc

SEQ ID NO: 560180 - RNA, 23 nt, Human
uuguuggccaggcuggucuugaa

SEQ ID NO: 560181 - RNA, 20 nt, Human
uuguuguuuuguuuuguuuu

SEQ ID NO: 560182 - RNA, 22 nt, Human
uuucgccuuguuggccaggcug

SEQ ID NO: 560183 - RNA, 24 nt, Human
uuucgccuuguuggccaggcuggu

SEQ ID NO: 560184 - RNA, 23 nt, Human
uuuuauuuuuaguagagacaggg

SEQ ID NO: 560185 - RNA, 23 nt, Human
uuuuuaguagagacaggguuucg

SEQ ID NO: 560186 - RNA, 24 nt, Human
uuuuuaguagagacaggguuucgc

SEQ ID NO: 560187 - RNA, 21 nt, Human
uuuuuuguuguuuuguuuugu

SEQ ID NO: 560188 - RNA, 26 nt, Human
uuuuuuuauuuuuaguagagacaggg

SEQ ID NO: 560189 - RNA, 18 nt, Human
aaacaaacaaacaccagg

SEQ ID NO: 560190 - RNA, 21 nt, Human
aacaggaagggagaaggcaau

SEQ ID NO: 560191 - RNA, 21 nt, Human
aagcauggacagcgggagggg

SEQ ID NO: 560192 - RNA, 20 nt, Human
acaaacaccaggucugcgcu

SEQ ID NO: 560193 - RNA, 18 nt, Human
acaccaggucugcgcugg

SEQ ID NO: 560194 - RNA, 19 nt, Human
acacugugccacugguuga

SEQ ID NO: 560195 - RNA, 23 nt, Human
acaggacagcaugagccacugag

SEQ ID NO: 560196 - RNA, 21 nt, Human
acuugcuggcucagugugggc

SEQ ID NO: 560197 - RNA, 19 nt, Human
agcccaacaaacaaacaaa

SEQ ID NO: 560198 - RNA, 19 nt, Human
aggaaagagaaagggaggg

SEQ ID NO: 560199 - RNA, 22 nt, Human
aggcagggaugagggaacagga

SEQ ID NO: 560200 - RNA, 23 nt, Human
agggaggguaagaugcggagggc

SEQ ID NO: 560201 - RNA, 21 nt, Human
agggcacagguggauggggac

SEQ ID NO: 560202 - RNA, 26 nt, Human
aggguaagaugcggagggcacaggug

SEQ ID NO: 560203 - RNA, 22 nt, Human
agguggauggggacgagggggc

SEQ ID NO: 560204 - RNA, 19 nt, Human
aucugcauggcccuggccc

SEQ ID NO: 560205 - RNA, 19 nt, Human
augagggaacaggaaggga

SEQ ID NO: 560206 - RNA, 23 nt, Human
caaggugggauuccaggaaggcc

SEQ ID NO: 560207 - RNA, 18 nt, Human
cacaccuccucugacgcc

SEQ ID NO: 560208 - RNA, 20 nt, Human
caccuccuccuggccccacc

SEQ ID NO: 560209 - RNA, 21 nt, Human
cagaagccacggccaaggaga

SEQ ID NO: 560210 - RNA, 20 nt, Human
cagcaugagccacugagccg

SEQ ID NO: 560211 - RNA, 26 nt, Human
cauggcccuggcccuguggcuccagc

SEQ ID NO: 560212 - RNA, 19 nt, Human
ccaacaaacaaacaaacac

SEQ ID NO: 560213 - RNA, 20 nt, Human
ccacaugcgcuuaguggggc

SEQ ID NO: 560214 - RNA, 24 nt, Human
ccacccaagggcucgacacaagcc

SEQ ID NO: 560215 - RNA, 22 nt, Human
ccagaggccuccaucugcaugg

SEQ ID NO: 560216 - RNA, 20 nt, Human
ccagcuccugccuccucaca

SEQ ID NO: 560217 - RNA, 23 nt, Human
ccaucugcauggcccuggcccug

SEQ ID NO: 560218 - RNA, 19 nt, Human
cccaacaaacaaacaaaca

SEQ ID NO: 560219 - RNA, 23 nt, Human
cccaaggucggggggagaggggc

SEQ ID NO: 560220 - RNA, 21 nt, Human
cccuggguugccgggguugcc

SEQ ID NO: 560221 - RNA, 20 nt, Human
cccuguggcuccagcaggcu

SEQ ID NO: 560222 - RNA, 25 nt, Human
ccuccucacagacagaagccacggc

SEQ ID NO: 560223 - RNA, 18 nt, Human
ccuccuggccccacccaa

SEQ ID NO: 560224 - RNA, 18 nt, Human
ccuuccgaaggauggagg

SEQ ID NO: 560225 - RNA, 22 nt, Human
ccuuccgaaggauggagguggg

SEQ ID NO: 560226 - RNA, 18 nt, Human
cggaggggccgagaggca

SEQ ID NO: 560227 - RNA, 20 nt, Human
cucacagacagaagccacgg

SEQ ID NO: 560228 - RNA, 21 nt, Human
cucacagacagaagccacggc

SEQ ID NO: 560229 - RNA, 22 nt, Human
cucacaggacagcaugagccac

SEQ ID NO: 560230 - RNA, 18 nt, Human
cucccagaggccuccauc

SEQ ID NO: 560231 - RNA, 22 nt, Human
cuccccagcuccugccuccuca

SEQ ID NO: 560232 - RNA, 20 nt, Human
cucccuggaggugggaacaa

SEQ ID NO: 560233 - RNA, 21 nt, Human
cuccucacagacagaagccac

SEQ ID NO: 560234 - RNA, 20 nt, Human
cuccuccuggccccacccaa

SEQ ID NO: 560235 - RNA, 23 nt, Human
cuccuggccccacccaagggcuc

SEQ ID NO: 560236 - RNA, 23 nt, Human
cuggaggugggaacaagucaccu

SEQ ID NO: 560237 - RNA, 23 nt, Human
cugucccuggaggucugugggcg

SEQ ID NO: 560238 - RNA, 22 nt, Human
gaacaagucaccucugaccaca

SEQ ID NO: 560239 - RNA, 23 nt, Human
gaggaaagagaaagggaggguaa

SEQ ID NO: 560240 - RNA, 18 nt, Human
gaggagagacauggggaa

SEQ ID NO: 560241 - RNA, 23 nt, Human
gccaaggagaggagagacauggg

SEQ ID NO: 560242 - RNA, 18 nt, Human
gccuggggagggccaggc

SEQ ID NO: 560243 - RNA, 26 nt, Human
ggacagcaggacuugcuggcucagug

SEQ ID NO: 560244 - RNA, 23 nt, Human
ggacagcgggaggggagaaggcg

SEQ ID NO: 560245 - RNA, 22 nt, Human
ggagcuguggugcaauuugcuc

SEQ ID NO: 560246 - RNA, 23 nt, Human
ggcaaugaggaaagagaaaggga

SEQ ID NO: 560247 - RNA, 19 nt, Human
ggcacagguggauggggac

SEQ ID NO: 560248 - RNA, 21 nt, Human
gggaacaggaagggagaaggc

SEQ ID NO: 560249 - RNA, 22 nt, Human
gggaugagggaacaggaaggga

SEQ ID NO: 560250 - RNA, 24 nt, Human
gggcggaagcugugggcacaggug

SEQ ID NO: 560251 - RNA, 20 nt, Human
gggcggaggccaagguggga

SEQ ID NO: 560252 - RNA, 22 nt, Human
ggguccugucccuccagguagc

SEQ ID NO: 560253 - RNA, 20 nt, Human
gguccugucccuccagguaa

SEQ ID NO: 560254 - RNA, 21 nt, Human
uaggcucccacuccccagcuc

SEQ ID NO: 560255 - RNA, 21 nt, Human
uccgaaggauggagguggguc

SEQ ID NO: 560256 - RNA, 22 nt, Human
uccucugacgccaucaccuccu

SEQ ID NO: 560257 - RNA, 21 nt, Human
ucugugggcggaagcuguggg

SEQ ID NO: 560258 - RNA, 27 nt, Human
ugagcccaacaaacaaacaaacaccag

SEQ ID NO: 560259 - RNA, 19 nt, Human
ugagccgccuggggagggc

SEQ ID NO: 560260 - RNA, 18 nt, Human
ugaggaaagagaaaggga

SEQ ID NO: 560261 - RNA, 21 nt, Human
ugaggaaagagaaagggaggg

SEQ ID NO: 560262 - RNA, 18 nt, Human
ugagggaacaggaaggga

SEQ ID NO: 560263 - RNA, 23 nt, Human
ugagggaacaggaagggagaagg

SEQ ID NO: 560264 - RNA, 24 nt, Human
uggacagcaggacuugcuggcuca

SEQ ID NO: 560265 - RNA, 18 nt, Human
uggacagcgggaggggag

SEQ ID NO: 560266 - RNA, 23 nt, Human
uggcccuguggcuccagcaggcu

SEQ ID NO: 560267 - RNA, 18 nt, Human
uggcuccagcaggcugcc

SEQ ID NO: 560268 - RNA, 19 nt, Human
ugggaacaagucaccucug

SEQ ID NO: 560269 - RNA, 21 nt, Human
uggggaaggcagggaugaggg

SEQ ID NO: 560270 - RNA, 19 nt, Human
uggguguggacagcaggac

SEQ ID NO: 560271 - RNA, 23 nt, Human
uguggacagcaggacuugcuggc

SEQ ID NO: 560272 - RNA, 22 nt, Human
uuccgaaggauggagguggguc

SEQ ID NO: 560273 - RNA, 20 nt, Human
cacuaccgcaaguuccucua

SEQ ID NO: 560274 - RNA, 24 nt, Human
cucaacauugacgucaccaucaac

SEQ ID NO: 560275 - RNA, 21 nt, Human
gggcuuauuuuucugaggcuu

SEQ ID NO: 560276 - RNA, 21 nt, Human
guuuuuucuuuuuuccuuuug

SEQ ID NO: 560277 - RNA, 23 nt, Human
uccuuuuggugguucaguuucau

SEQ ID NO: 560278 - RNA, 24 nt, Human
uuuuguuuuuucuuuuuuccuuuu

SEQ ID NO: 560279 - RNA, 24 nt, Human
acaaacacugaugauauguuacca

SEQ ID NO: 560280 - RNA, 21 nt, Human
agaagacagcacagaguucau

SEQ ID NO: 560281 - RNA, 23 nt, Human
agagggcauccagcuugcaagag

SEQ ID NO: 560282 - RNA, 23 nt, Human
agcuggucccuugccgugacaca

SEQ ID NO: 560283 - RNA, 20 nt, Human
aggagcaggagagucaucug

SEQ ID NO: 560284 - RNA, 20 nt, Human
aggcaggugagguggcugag

SEQ ID NO: 560285 - RNA, 18 nt, Human
auccaagaccacgcgagg

SEQ ID NO: 560286 - RNA, 21 nt, Human
auuuggggcugggggaacaau

SEQ ID NO: 560287 - RNA, 22 nt, Human
caaauaaaagggggaaaaaucc

SEQ ID NO: 560288 - RNA, 19 nt, Human
cacagaguucaugagcucu

SEQ ID NO: 560289 - RNA, 20 nt, Human
caccaugaauacaaacacug

SEQ ID NO: 560290 - RNA, 21 nt, Human
cacgauacacauuuaacaccc

SEQ ID NO: 560291 - RNA, 19 nt, Human
cagagucugcccaccuuuc

SEQ ID NO: 560292 - RNA, 25 nt, Human
cagcacgauacacauuuaacacccc

SEQ ID NO: 560293 - RNA, 24 nt, Human
cagccucacuguggagccugagau

SEQ ID NO: 560294 - RNA, 19 nt, Human
cccaaugccauggauccau

SEQ ID NO: 560295 - RNA, 21 nt, Human
ccccauguagacaaguuagac

SEQ ID NO: 560296 - RNA, 22 nt, Human
cgagggcuucccugcugccccg

SEQ ID NO: 560297 - RNA, 18 nt, Human
cuccaagauacaaggucc

SEQ ID NO: 560298 - RNA, 23 nt, Human
cuccuggaaucuuaggacaaaua

SEQ ID NO: 560299 - RNA, 19 nt, Human
cugaaacaaaacauuaccu

SEQ ID NO: 560300 - RNA, 22 nt, Human
gaagauucuccaaaugucacac

SEQ ID NO: 560301 - RNA, 18 nt, Human
gagcaggagagucaucug

SEQ ID NO: 560302 - RNA, 20 nt, Human
gagggugcaggaggcucugc

SEQ ID NO: 560303 - RNA, 18 nt, Human
gagucuuuuuaaaaugcu

SEQ ID NO: 560304 - RNA, 25 nt, Human
gauacacauuuaacaccccucaucc

SEQ ID NO: 560305 - RNA, 21 nt, Human
gccacaccaugaauacaaaca

SEQ ID NO: 560306 - RNA, 20 nt, Human
gcccccaggcucuauccuuc

SEQ ID NO: 560307 - RNA, 19 nt, Human
gggaaaaauccaaccucac

SEQ ID NO: 560308 - RNA, 21 nt, Human
gggucucaugcaugcagcuuc

SEQ ID NO: 560309 - RNA, 18 nt, Human
uaaaagggggaaaaaucc

SEQ ID NO: 560310 - RNA, 21 nt, Human
uacaagguccuuuccccgaag

SEQ ID NO: 560311 - RNA, 21 nt, Human
ucacuguggagccugagaugc

SEQ ID NO: 560312 - RNA, 19 nt, Human
uccacagagggcauccagc

SEQ ID NO: 560313 - RNA, 20 nt, Human
uccacagagggcauccagcu

SEQ ID NO: 560314 - RNA, 23 nt, Human
uccagaaagcagagucugcccac

SEQ ID NO: 560315 - RNA, 23 nt, Human
uccagagacaguuugaagcagau

SEQ ID NO: 560316 - RNA, 19 nt, Human
uccagcuugcaagagucug

SEQ ID NO: 560317 - RNA, 22 nt, Human
ucuccaaaugucacacaaggac

SEQ ID NO: 560318 - RNA, 24 nt, Human
ucuuaggaacaacacccagugggc

SEQ ID NO: 560319 - RNA, 18 nt, Human
ucuuaggacaaauaaaag

SEQ ID NO: 560320 - RNA, 20 nt, Human
ucuugcuucgaguagaguug

SEQ ID NO: 560321 - RNA, 18 nt, Human
ugaaacaaaacauuaccu

SEQ ID NO: 560322 - RNA, 23 nt, Human
ugacaugcuuucagagggggcgg

SEQ ID NO: 560323 - RNA, 19 nt, Human
ugaccucacuccaagauac

SEQ ID NO: 560324 - RNA, 20 nt, Human
ugagauaaauguuaagugga

SEQ ID NO: 560325 - RNA, 18 nt, Human
ugcaagagucuguggguc

SEQ ID NO: 560326 - RNA, 21 nt, Human
ugcaaugucgaugccugggcu

SEQ ID NO: 560327 - RNA, 22 nt, Human
ugccacaccaugaauacaaaca

SEQ ID NO: 560328 - RNA, 20 nt, Human
ugcugaaacaaaacauuacc

SEQ ID NO: 560329 - RNA, 20 nt, Human
uggaugccaccuccucugcc

SEQ ID NO: 560330 - RNA, 19 nt, Human
uggcugagcuaucugggcu

SEQ ID NO: 560331 - RNA, 19 nt, Human
uguggagccugagaugcau

SEQ ID NO: 560332 - RNA, 23 nt, Human
uguuaccagaagacagcacagag

SEQ ID NO: 560333 - RNA, 21 nt, Human
uucagagggggcggggaguac

SEQ ID NO: 560334 - RNA, 22 nt, Human
uugacccauauuagggaucuuc

SEQ ID NO: 560335 - RNA, 23 nt, Human
uugcaguuugucagccucacugu

SEQ ID NO: 560336 - RNA, 21 nt, Human
uugggagcuggucccuugcug

SEQ ID NO: 560337 - RNA, 22 nt, Human
acagccaaaaaagacuuugccu

SEQ ID NO: 560338 - RNA, 22 nt, Human
aggggggauguccugauuucug

SEQ ID NO: 560339 - RNA, 20 nt, Human
auugcacuccauucuuccgc

SEQ ID NO: 560340 - RNA, 21 nt, Human
cacagccaaaaaagacuuugc

SEQ ID NO: 560341 - RNA, 22 nt, Human
caccugauaggggggauguccu

SEQ ID NO: 560342 - RNA, 22 nt, Human
cccgcgcccauuggcaaccagg

SEQ ID NO: 560343 - RNA, 24 nt, Human
ccgccuuccuuguuuucuccaaaa

SEQ ID NO: 560344 - RNA, 18 nt, Human
ccgcgcccauuggcaacc

SEQ ID NO: 560345 - RNA, 20 nt, Human
ccugccccccuuucugcuca

SEQ ID NO: 560346 - RNA, 22 nt, Human
ccugugguuuaagcaguggagc

SEQ ID NO: 560347 - RNA, 19 nt, Human
cugugguuuaagcagugga

SEQ ID NO: 560348 - RNA, 18 nt, Human
gggauguccugauuucug

SEQ ID NO: 560349 - RNA, 19 nt, Human
ggggauguccugauuucug

SEQ ID NO: 560350 - RNA, 22 nt, Human
gugaggaguuaaccagguccug

SEQ ID NO: 560351 - RNA, 20 nt, Human
uaaaugauuuauuccagcca

SEQ ID NO: 560352 - RNA, 19 nt, Human
ugaggaguuaaccaggucc

SEQ ID NO: 560353 - RNA, 27 nt, Human
uggcuaaaagagucucucucuaaguau

SEQ ID NO: 560354 - RNA, 24 nt, Human
uuccagccacagccaaaaaagacu

SEQ ID NO: 560355 - RNA, 19 nt, Human
uuccuuguuuucuccaaaa

SEQ ID NO: 560356 - RNA, 23 nt, Human
uugaacguauuuuaaauagcaug

SEQ ID NO: 560357 - RNA, 18 nt, Human
aacacagaaacugcacca

SEQ ID NO: 560358 - RNA, 22 nt, Human
aaccugcuuuauuaacacagaa

SEQ ID NO: 560359 - RNA, 21 nt, Human
aacuucucccuccugcgcccc

SEQ ID NO: 560360 - RNA, 21 nt, Human
aagucacuuucugauaacuca

SEQ ID NO: 560361 - RNA, 18 nt, Human
acacagaaacugcaccac

SEQ ID NO: 560362 - RNA, 24 nt, Human
acagaaacugcaccaaccccgggg

SEQ ID NO: 560363 - RNA, 18 nt, Human
acgcuuugugugccucug

SEQ ID NO: 560364 - RNA, 25 nt, Human
acgcuuugugugccucugaucagua

SEQ ID NO: 560365 - RNA, 18 nt, Human
acucagguugccccuccu

SEQ ID NO: 560366 - RNA, 19 nt, Human
agaaaaagagggagcagag

SEQ ID NO: 560367 - RNA, 19 nt, Human
agagaagggagaaaaagag

SEQ ID NO: 560368 - RNA, 24 nt, Human
agggagaaaaagagggagcagagg

SEQ ID NO: 560369 - RNA, 21 nt, Human
agggguucccggugucugggc

SEQ ID NO: 560370 - RNA, 22 nt, Human
caacuucucccuccugcgcccc

SEQ ID NO: 560371 - RNA, 25 nt, Human
cacuuccagccuccugggucagggg

SEQ ID NO: 560372 - RNA, 26 nt, Human
cagaaacugcaccacacaaccuucag

SEQ ID NO: 560373 - RNA, 19 nt, Human
cagacccagcacuuagcaa

SEQ ID NO: 560374 - RNA, 22 nt, Human
cagcacuccgcuggcagggaga

SEQ ID NO: 560375 - RNA, 18 nt, Human
cagccuccugggucaggg

SEQ ID NO: 560376 - RNA, 19 nt, Human
cagcuacuucccaaacagc

SEQ ID NO: 560377 - RNA, 18 nt, Human
caguguccugccucggcc

SEQ ID NO: 560378 - RNA, 18 nt, Human
cccagcucucucccaaca

SEQ ID NO: 560379 - RNA, 24 nt, Human
cccagcucucucccaacaucuucc

SEQ ID NO: 560380 - RNA, 19 nt, Human
cccucugaaaagcuggcug

SEQ ID NO: 560381 - RNA, 23 nt, Human
cccuuggccuucuuuccuuccca

SEQ ID NO: 560382 - RNA, 22 nt, Human
ccuccugggucagggguucccg

SEQ ID NO: 560383 - RNA, 18 nt, Human
ccucggccaucugcugug

SEQ ID NO: 560384 - RNA, 18 nt, Human
ccucugcaguguccugcc

SEQ ID NO: 560385 - RNA, 24 nt, Human
cgccccagagaagggagaaaaaga

SEQ ID NO: 560386 - RNA, 23 nt, Human
cgcucugccccagcucucuccca

SEQ ID NO: 560387 - RNA, 18 nt, Human
cgcuuugugugccucuga

SEQ ID NO: 560388 - RNA, 22 nt, Human
cggcccagcacuccgcuggcag

SEQ ID NO: 560389 - RNA, 24 nt, Human
cuagagaucucuucauuaucuucc

SEQ ID NO: 560390 - RNA, 19 nt, Human
cuccccgcucugccccagc

SEQ ID NO: 560391 - RNA, 19 nt, Human
cucugccccagcucucucc

SEQ ID NO: 560392 - RNA, 20 nt, Human
cugcaguguccugccucggc

SEQ ID NO: 560393 - RNA, 19 nt, Human
cugccccagcucucuccca

SEQ ID NO: 560394 - RNA, 25 nt, Human
cuggaccccacugucaccccugccg

SEQ ID NO: 560395 - RNA, 25 nt, Human
cuguggauuuccugccuagagaucu

SEQ ID NO: 560396 - RNA, 22 nt, Human
cuucauuaucuuccucugcagu

SEQ ID NO: 560397 - RNA, 21 nt, Human
cuucuuuccuucccauucugg

SEQ ID NO: 560398 - RNA, 18 nt, Human
cuuggccuucuuuccuuc

SEQ ID NO: 560399 - RNA, 23 nt, Human
gaaucugaauucccuuggccuuc

SEQ ID NO: 560400 - RNA, 18 nt, Human
gcagcuccccgcucugcc

SEQ ID NO: 560401 - RNA, 20 nt, Human
gccccagcucucucccaaca

SEQ ID NO: 560402 - RNA, 20 nt, Human
gcgccccagagaagggagaa

SEQ ID NO: 560403 - RNA, 19 nt, Human
gcucuucuuucgcagauga

SEQ ID NO: 560404 - RNA, 18 nt, Human
gcugcagcuccccgcucu

SEQ ID NO: 560405 - RNA, 23 nt, Human
ggaccccacugucaccccugccg

SEQ ID NO: 560406 - RNA, 22 nt, Human
ggccuugcucuggggagcuuua

SEQ ID NO: 560407 - RNA, 25 nt, Human
gggagaaaaagagggagcagaggag

SEQ ID NO: 560408 - RNA, 25 nt, Human
ggggacacuuccagccuccuggguc

SEQ ID NO: 560409 - RNA, 20 nt, Human
gguccaggucacuggaggcu

SEQ ID NO: 560410 - RNA, 23 nt, Human
uaacaaauacugaaagcuuagga

SEQ ID NO: 560411 - RNA, 24 nt, Human
uagcaacuucucccuccugcgccc

SEQ ID NO: 560412 - RNA, 21 nt, Human
ucacuggaggcuucguccuca

SEQ ID NO: 560413 - RNA, 18 nt, Human
ucagggguucccgguguc

SEQ ID NO: 560414 - RNA, 24 nt, Human
ucccaaacagcgccacggggaagu

SEQ ID NO: 560415 - RNA, 20 nt, Human
ucccggugucugggcucuuc

SEQ ID NO: 560416 - RNA, 22 nt, Human
uccuggaccccacugucacccc

SEQ ID NO: 560417 - RNA, 21 nt, Human
ucuuucacaauaacaaauacu

SEQ ID NO: 560418 - RNA, 23 nt, Human
ugaaccucauagccaaugaacag

SEQ ID NO: 560419 - RNA, 23 nt, Human
ugcucuggggagcuuuaaauuuu

SEQ ID NO: 560420 - RNA, 20 nt, Human
uggaccccacugucaccccu

SEQ ID NO: 560421 - RNA, 27 nt, Human
ugggucagggguucccggugucugggc

SEQ ID NO: 560422 - RNA, 18 nt, Human
uucgcagaugaggggcag

SEQ ID NO: 560423 - RNA, 21 nt, Human
uucgcagaugaggggcaggcc

SEQ ID NO: 560424 - RNA, 19 nt, Human
uucuuuggcacuguucuaa

SEQ ID NO: 560425 - RNA, 18 nt, Human
uuuuuuuuuuuuuuuucg

SEQ ID NO: 560426 - RNA, 22 nt, Human
uuuuuuuuuuuuuuuuucgacu

SEQ ID NO: 560427 - RNA, 21 nt, Human
aaacaggagguugaagacaga

SEQ ID NO: 560428 - RNA, 19 nt, Human
aaacggaaagucugaaaac

SEQ ID NO: 560429 - RNA, 24 nt, Human
aaagugcugggauuacaggcauga

SEQ ID NO: 560430 - RNA, 21 nt, Human
aacaagcagauagcuaggucu

SEQ ID NO: 560431 - RNA, 24 nt, Human
aacucaaccuuccuuucuuccacc

SEQ ID NO: 560432 - RNA, 22 nt, Human
aagcguggcguugccagggaca

SEQ ID NO: 560433 - RNA, 24 nt, Human
aagggcuuugcacuguccaccuuu

SEQ ID NO: 560434 - RNA, 19 nt, Human
aaggggaccuuuagcugau

SEQ ID NO: 560435 - RNA, 20 nt, Human
aaguagcugggacuauaggu

SEQ ID NO: 560436 - RNA, 24 nt, Human
aaguagcugggacuauaggugugu

SEQ ID NO: 560437 - RNA, 24 nt, Human
aagugauccacuugccucagccuc

SEQ ID NO: 560438 - RNA, 19 nt, Human
aagugcugggauuacaggc

SEQ ID NO: 560439 - RNA, 21 nt, Human
aagugcugggauuacaggcau

SEQ ID NO: 560440 - RNA, 26 nt, Human
aagugcugggauuacaggcaugaacc

SEQ ID NO: 560441 - RNA, 24 nt, Human
accauguuggccaggcuggucuug

SEQ ID NO: 560442 - RNA, 22 nt, Human
acucugcugccaaggggccagg

SEQ ID NO: 560443 - RNA, 25 nt, Human
acuguguugcccaggcuggagugca

SEQ ID NO: 560444 - RNA, 18 nt, Human
agauuuucuuccagaccu

SEQ ID NO: 560445 - RNA, 24 nt, Human
agcgauucuccugccucagccucc

SEQ ID NO: 560446 - RNA, 19 nt, Human
aggcaugaaccacugcacc

SEQ ID NO: 560447 - RNA, 25 nt, Human
aggcuggagugcaguggugcgaucu

SEQ ID NO: 560448 - RNA, 24 nt, Human
agggaaauauugguucaugugaug

SEQ ID NO: 560449 - RNA, 19 nt, Human
agggauccagggcagucag

SEQ ID NO: 560450 - RNA, 20 nt, Human
aggugugugccaccaccacc

SEQ ID NO: 560451 - RNA, 19 nt, Human
agugacucaacacagacaa

SEQ ID NO: 560452 - RNA, 24 nt, Human
agugauccacuugccucagccucc

SEQ ID NO: 560453 - RNA, 21 nt, Human
agugcaguggugcgaucucag

SEQ ID NO: 560454 - RNA, 23 nt, Human
agugcaguggugcgaucucagcu

SEQ ID NO: 560455 - RNA, 24 nt, Human
agugcaguggugcgaucucagcuc

SEQ ID NO: 560456 - RNA, 18 nt, Human
agugcugggauuacaggc

SEQ ID NO: 560457 - RNA, 25 nt, Human
aguggugcgaucucagcucacuugc

SEQ ID NO: 560458 - RNA, 22 nt, Human
auaaggaaacaggagguugaag

SEQ ID NO: 560459 - RNA, 24 nt, Human
augagguuacaccauguuggccag

SEQ ID NO: 560460 - RNA, 19 nt, Human
augcacagaaagauuuugc

SEQ ID NO: 560461 - RNA, 24 nt, Human
auguggaccagcugacagaggcuu

SEQ ID NO: 560462 - RNA, 21 nt, Human
auucuccuuaagcuuucauua

SEQ ID NO: 560463 - RNA, 24 nt, Human
auuuuuguauuuuuaguagagaug

SEQ ID NO: 560464 - RNA, 20 nt, Human
caaaaugcucuaaaaaauaa

SEQ ID NO: 560465 - RNA, 22 nt, Human
caaaguaagaucauauccugcc

SEQ ID NO: 560466 - RNA, 24 nt, Human
caaagugcugggauuacaggcaug

SEQ ID NO: 560467 - RNA, 18 nt, Human
caaccuccaccuccuggg

SEQ ID NO: 560468 - RNA, 23 nt, Human
caaccuccaccuccuggguucaa

SEQ ID NO: 560469 - RNA, 22 nt, Human
caagcgauucuccugccucagc

SEQ ID NO: 560470 - RNA, 27 nt, Human
caagcgauucuccugccucagccuccc

SEQ ID NO: 560471 - RNA, 22 nt, Human
caagugauccacuugccucagc

SEQ ID NO: 560472 - RNA, 24 nt, Human
caccaccaccggcuaauuuuugua

SEQ ID NO: 560473 - RNA, 18 nt, Human
caccauguuggccaggcu

SEQ ID NO: 560474 - RNA, 21 nt, Human
caccauguuggccaggcuggu

SEQ ID NO: 560475 - RNA, 23 nt, Human
caccauguuggccaggcuggucu

SEQ ID NO: 560476 - RNA, 24 nt, Human
caccauguuggccaggcuggucuu

SEQ ID NO: 560477 - RNA, 27 nt, Human
caccauguuggccaggcuggucuugaa

SEQ ID NO: 560478 - RNA, 18 nt, Human
cacuguguugcccaggcu

SEQ ID NO: 560479 - RNA, 24 nt, Human
cacuguguugcccaggcuggagug

SEQ ID NO: 560480 - RNA, 24 nt, Human
cacuugcaaccuccaccuccuggg

SEQ ID NO: 560481 - RNA, 25 nt, Human
cagagccugggagagggauccaggg

SEQ ID NO: 560482 - RNA, 24 nt, Human
cagagucucacuguguugcccagg

SEQ ID NO: 560483 - RNA, 19 nt, Human
cagcagcuggaacuggcaa

SEQ ID NO: 560484 - RNA, 19 nt, Human
caucaccaaauagccuaga

SEQ ID NO: 560485 - RNA, 23 nt, Human
caugcacagaaagauuuugcaug

SEQ ID NO: 560486 - RNA, 24 nt, Human
cauguuggccaggcuggucuugaa

SEQ ID NO: 560487 - RNA, 23 nt, Human
ccaaagugcugggauuacaggca

SEQ ID NO: 560488 - RNA, 24 nt, Human
ccaaagugcugggauuacaggcau

SEQ ID NO: 560489 - RNA, 19 nt, Human
ccaccggcuaauuuuugua

SEQ ID NO: 560490 - RNA, 24 nt, Human
ccaccuccuggguucaagcgauuc

SEQ ID NO: 560491 - RNA, 22 nt, Human
ccauauccucacuauugcaaaa

SEQ ID NO: 560492 - RNA, 22 nt, Human
ccauguggacugagaaccagga

SEQ ID NO: 560493 - RNA, 24 nt, Human
cccaaagugcugggauuacaggca

SEQ ID NO: 560494 - RNA, 19 nt, Human
cccaaguagcugggacuau

SEQ ID NO: 560495 - RNA, 24 nt, Human
cccaaguagcugggacuauaggug

SEQ ID NO: 560496 - RNA, 19 nt, Human
ccuccaccuccuggguuca

SEQ ID NO: 560497 - RNA, 24 nt, Human
ccuccuggguucaagcgauucucc

SEQ ID NO: 560498 - RNA, 20 nt, Human
ccugaccucaagugauccac

SEQ ID NO: 560499 - RNA, 23 nt, Human
ccugaccucaagugauccacuug

SEQ ID NO: 560500 - RNA, 23 nt, Human
ccugaccucaagugauccacuug

SEQ ID NO: 560501 - RNA, 23 nt, Human
ccugccucagccucccaaguagc

SEQ ID NO: 560502 - RNA, 20 nt, Human
ccugccuuguuuucucuggg

SEQ ID NO: 560503 - RNA, 19 nt, Human
ccuggaagaaaugccuggu

SEQ ID NO: 560504 - RNA, 23 nt, Human
ccuggguucaagcgauucuccug

SEQ ID NO: 560505 - RNA, 23 nt, Human
cucaagugauccacuugccucag

SEQ ID NO: 560506 - RNA, 24 nt, Human
cucagccucccaaguagcugggac

SEQ ID NO: 560507 - RNA, 22 nt, Human
cucauagcagcccuaugaaguc

SEQ ID NO: 560508 - RNA, 23 nt, Human
cuccaucuuuagagauaaggaaa

SEQ ID NO: 560509 - RNA, 21 nt, Human
cuccuggguucaagcgauucu

SEQ ID NO: 560510 - RNA, 21 nt, Human
cucugugggaugucagaagac

SEQ ID NO: 560511 - RNA, 24 nt, Human
cucuuccuuucccuuugaacaucc

SEQ ID NO: 560512 - RNA, 23 nt, Human
cugccucagccucccaaguagcu

SEQ ID NO: 560513 - RNA, 23 nt, Human
cuuaaaaccugggcacaaaagac

SEQ ID NO: 560514 - RNA, 23 nt, Human
cuuccacccucauccauauccuc

SEQ ID NO: 560515 - RNA, 22 nt, Human
cuuccuuucccuuugaacaucc

SEQ ID NO: 560516 - RNA, 25 nt, Human
cuugcaugccuuugggcagucuguu

SEQ ID NO: 560517 - RNA, 22 nt, Human
cuuugccucuuccuuucccuuu

SEQ ID NO: 560518 - RNA, 22 nt, Human
gaaccucuucucguuggaaacg

SEQ ID NO: 560519 - RNA, 24 nt, Human
gaccucaagugauccacuugccuc

SEQ ID NO: 560520 - RNA, 22 nt, Human
gagguuacaccauguuggccag

SEQ ID NO: 560521 - RNA, 22 nt, Human
gaucauaagggcagcagcugga

SEQ ID NO: 560522 - RNA, 23 nt, Human
gauuacaggcaugaaccacugca

SEQ ID NO: 560523 - RNA, 24 nt, Human
gcgauucuccugccucagccuccc

SEQ ID NO: 560524 - RNA, 19 nt, Human
gcggaagcguggcguugcc

SEQ ID NO: 560525 - RNA, 23 nt, Human
gcuggucuugaacuccugaccuc

SEQ ID NO: 560526 - RNA, 21 nt, Human
ggaaacggaaagucugaaaac

SEQ ID NO: 560527 - RNA, 20 nt, Human
ggaaagucugaaaacuuaga

SEQ ID NO: 560528 - RNA, 24 nt, Human
ggcuggucuugaacuccugaccuc

SEQ ID NO: 560529 - RNA, 22 nt, Human
gggcagucuguugagauuauuc

SEQ ID NO: 560530 - RNA, 22 nt, Human
gggccagagccugggagaggga

SEQ ID NO: 560531 - RNA, 24 nt, Human
gguccuggaagaaaugccugguag

SEQ ID NO: 560532 - RNA, 19 nt, Human
ggucuugaacuccugaccu

SEQ ID NO: 560533 - RNA, 18 nt, Human
gguuacaccauguuggcc

SEQ ID NO: 560534 - RNA, 20 nt, Human
guccuggaagaaaugccugg

SEQ ID NO: 560535 - RNA, 18 nt, Human
gugaacaagcagauagcu

SEQ ID NO: 560536 - RNA, 18 nt, Human
gugauccacuugccucag

SEQ ID NO: 560537 - RNA, 24 nt, Human
gugauccacuugccucagccuccc

SEQ ID NO: 560538 - RNA, 18 nt, Human
uaagggaaauauugguuc

SEQ ID NO: 560539 - RNA, 18 nt, Human
uaagggaaauauugguuc

SEQ ID NO: 560540 - RNA, 24 nt, Human
uaauuuuuguauuuuuaguagaga

SEQ ID NO: 560541 - RNA, 22 nt, Human
uacaggcaugaaccacugcacc

SEQ ID NO: 560542 - RNA, 18 nt, Human
uacaggguuugguuuaaa

SEQ ID NO: 560543 - RNA, 20 nt, Human
uacccucucauggauauucu

SEQ ID NO: 560544 - RNA, 22 nt, Human
uagagaugagguuacaccaugu

SEQ ID NO: 560545 - RNA, 19 nt, Human
uagaguggugauauuaccu

SEQ ID NO: 560546 - RNA, 22 nt, Human
uagaguggugauauuaccuauu

SEQ ID NO: 560547 - RNA, 23 nt, Human
uagaguggugauauuaccuauuu

SEQ ID NO: 560548 - RNA, 19 nt, Human
uaggugaugcaugcacaga

SEQ ID NO: 560549 - RNA, 25 nt, Human
uaggugugugccaccaccaccggcu

SEQ ID NO: 560550 - RNA, 24 nt, Human
uaguagagaugagguuacaccaug

SEQ ID NO: 560551 - RNA, 18 nt, Human
uauccugccuuguuuucu

SEQ ID NO: 560552 - RNA, 20 nt, Human
uauucuuccauguggacuga

SEQ ID NO: 560553 - RNA, 21 nt, Human
ucaaauguggaccagcugaca

SEQ ID NO: 560554 - RNA, 20 nt, Human
ucaacacagacaacaaaaag

SEQ ID NO: 560555 - RNA, 19 nt, Human
ucaagcgauucuccugccu

SEQ ID NO: 560556 - RNA, 22 nt, Human
ucaagugauccacuugccucag

SEQ ID NO: 560557 - RNA, 20 nt, Human
ucagccucccaaguagcugg

SEQ ID NO: 560558 - RNA, 23 nt, Human
ucauggauauucuuccaugugga

SEQ ID NO: 560559 - RNA, 24 nt, Human
ucccaaagugcugggauuacaggc

SEQ ID NO: 560560 - RNA, 24 nt, Human
ucccaaguagcugggacuauaggu

SEQ ID NO: 560561 - RNA, 23 nt, Human
ucccuaugcccuggauuaacaaa

SEQ ID NO: 560562 - RNA, 22 nt, Human
uccucacuauugcaaaaugcuc

SEQ ID NO: 560563 - RNA, 21 nt, Human
uccuggguucaagcgauucuc

SEQ ID NO: 560564 - RNA, 24 nt, Human
uccuggguucaagcgauucuccug

SEQ ID NO: 560565 - RNA, 19 nt, Human
ucucacuguguugcccagg

SEQ ID NO: 560566 - RNA, 23 nt, Human
ucucacuguguugcccaggcugg

SEQ ID NO: 560567 - RNA, 24 nt, Human
ucucacuguguugcccaggcugga

SEQ ID NO: 560568 - RNA, 26 nt, Human
ucucacuguguugcccaggcuggagu

SEQ ID NO: 560569 - RNA, 26 nt, Human
ucuccugccucagccucccaaguagc

SEQ ID NO: 560570 - RNA, 19 nt, Human
ucugaaauauucucaccaa

SEQ ID NO: 560571 - RNA, 26 nt, Human
ucuguugagauuauucuccuuuaguu

SEQ ID NO: 560572 - RNA, 21 nt, Human
ucuugaacuccugaccucaag

SEQ ID NO: 560573 - RNA, 24 nt, Human
ugaaaacuuagauuuucuuccaga

SEQ ID NO: 560574 - RNA, 24 nt, Human
ugaaccacugcaccuggagagccc

SEQ ID NO: 560575 - RNA, 21 nt, Human
ugaagucaucaaguagguggg

SEQ ID NO: 560576 - RNA, 19 nt, Human
ugaauauuauucauuuguu

SEQ ID NO: 560577 - RNA, 19 nt, Human
ugaccucaagugauccacu

SEQ ID NO: 560578 - RNA, 20 nt, Human
ugaccucaagugauccacuu

SEQ ID NO: 560579 - RNA, 24 nt, Human
ugaccucaagugauccacuugccu

SEQ ID NO: 560580 - RNA, 20 nt, Human
ugacucaacacagacaacaa

SEQ ID NO: 560581 - RNA, 23 nt, Human
ugacucaacacagacaacaaaaa

SEQ ID NO: 560582 - RNA, 24 nt, Human
ugagguuacaccauguuggccagg

SEQ ID NO: 560583 - RNA, 22 nt, Human
ugcaguggugcgaucucagcuc

SEQ ID NO: 560584 - RNA, 18 nt, Human
ugcccaggcuggagugca

SEQ ID NO: 560585 - RNA, 21 nt, Human
ugcccaggcuggagugcagug

SEQ ID NO: 560586 - RNA, 24 nt, Human
ugcccaggcuggagugcaguggug

SEQ ID NO: 560587 - RNA, 22 nt, Human
ugccucagccucccaaagugcu

SEQ ID NO: 560588 - RNA, 24 nt, Human
ugccucagccucccaaagugcugg

SEQ ID NO: 560589 - RNA, 24 nt, Human
ugccucagccucccaaguagcugg

SEQ ID NO: 560590 - RNA, 22 nt, Human
ugccugguagaauacugagagg

SEQ ID NO: 560591 - RNA, 25 nt, Human
ugccugguagaauacugagagggcg

SEQ ID NO: 560592 - RNA, 22 nt, Human
ugcucuaaaaaauaauuuuagg

SEQ ID NO: 560593 - RNA, 23 nt, Human
ugcugggauuacaggcaugaacc

SEQ ID NO: 560594 - RNA, 21 nt, Human
uggagagcccacugcuucuug

SEQ ID NO: 560595 - RNA, 23 nt, Human
uggagugcaguggugcgaucuca

SEQ ID NO: 560596 - RNA, 24 nt, Human
uggagugcaguggugcgaucucag

SEQ ID NO: 560597 - RNA, 24 nt, Human
uggccaggcuggucuugaacuccu

SEQ ID NO: 560598 - RNA, 21 nt, Human
ugggacuauaggugugugcca

SEQ ID NO: 560599 - RNA, 22 nt, Human
ugggacuauaggugugugccac

SEQ ID NO: 560600 - RNA, 24 nt, Human
ugggacuauaggugugugccacca

SEQ ID NO: 560601 - RNA, 21 nt, Human
ugggauuacaggcaugaacca

SEQ ID NO: 560602 - RNA, 22 nt, Human
ugggauuacaggcaugaaccac

SEQ ID NO: 560603 - RNA, 24 nt, Human
ugggauuacaggcaugaaccacug

SEQ ID NO: 560604 - RNA, 24 nt, Human
ugggauuacaggcaugaaccacug

SEQ ID NO: 560605 - RNA, 23 nt, Human
uggguucaagcgauucuccugcc

SEQ ID NO: 560606 - RNA, 23 nt, Human
ugguccuggaagaaaugccuggu

SEQ ID NO: 560607 - RNA, 25 nt, Human
uggugcgaucucagcucacuugcaa

SEQ ID NO: 560608 - RNA, 24 nt, Human
ugugugccaccaccaccggcuaau

SEQ ID NO: 560609 - RNA, 18 nt, Human
uguguugcccaggcugga

SEQ ID NO: 560610 - RNA, 22 nt, Human
uguguugcccaggcuggagugc

SEQ ID NO: 560611 - RNA, 24 nt, Human
uguguugcccaggcuggagugcag

SEQ ID NO: 560612 - RNA, 24 nt, Human
uuaacaucaccaaauagccuagag

SEQ ID NO: 560613 - RNA, 24 nt, Human
uuaguagagaugagguuacaccau

SEQ ID NO: 560614 - RNA, 21 nt, Human
uucaagcgauucuccugccuc

SEQ ID NO: 560615 - RNA, 23 nt, Human
uucaagcgauucuccugccucag

SEQ ID NO: 560616 - RNA, 24 nt, Human
uucaagcgauucuccugccucagc

SEQ ID NO: 560617 - RNA, 18 nt, Human
uuccacucgaagcuggag

SEQ ID NO: 560618 - RNA, 18 nt, Human
uugcaaccuccaccuccu

SEQ ID NO: 560619 - RNA, 23 nt, Human
uugcaaccuccaccuccuggguu

SEQ ID NO: 560620 - RNA, 24 nt, Human
uugcaaccuccaccuccuggguuc

SEQ ID NO: 560621 - RNA, 23 nt, Human
uugcaugcuccucuuugccucuu

SEQ ID NO: 560622 - RNA, 24 nt, Human
uugcccaggcuggagugcaguggu

SEQ ID NO: 560623 - RNA, 24 nt, Human
uugccucagccucccaaagugcug

SEQ ID NO: 560624 - RNA, 21 nt, Human
uuguuaacaucaccaaauagc

SEQ ID NO: 560625 - RNA, 18 nt, Human
uuuacugagcaucuccua

SEQ ID NO: 560626 - RNA, 24 nt, Human
uuuguucuggcaacacucugcugc

SEQ ID NO: 560627 - RNA, 20 nt, Human
uuuuuaguagagaugagguu

SEQ ID NO: 560628 - RNA, 20 nt, Human
uuuuuguauuuuuaguagag

SEQ ID NO: 560629 - RNA, 21 nt, Human
aacacuuuauugcacaaaucc

SEQ ID NO: 560630 - RNA, 20 nt, Human
aacgucuucuguggagugug

SEQ ID NO: 560631 - RNA, 20 nt, Human
acaggcagaaagcuggcccg

SEQ ID NO: 560632 - RNA, 21 nt, Human
acccuggccucacaugccaac

SEQ ID NO: 560633 - RNA, 18 nt, Human
agcagugccggcaggcag

SEQ ID NO: 560634 - RNA, 24 nt, Human
agcccacagccccaaccugucccc

SEQ ID NO: 560635 - RNA, 20 nt, Human
agggcaaaggucacaggcag

SEQ ID NO: 560636 - RNA, 23 nt, Human
cacaaaucccacaaaggucucuu

SEQ ID NO: 560637 - RNA, 21 nt, Human
cacagccccaaccuguccccu

SEQ ID NO: 560638 - RNA, 19 nt, Human
cacccuggccucacaugcc

SEQ ID NO: 560639 - RNA, 21 nt, Human
cagcagugccggcaggcagac

SEQ ID NO: 560640 - RNA, 18 nt, Human
cagccccaaccugucccc

SEQ ID NO: 560641 - RNA, 27 nt, Human
caggcagguccuucccuagguaggucc

SEQ ID NO: 560642 - RNA, 20 nt, Human
caggcccuggguccaagccc

SEQ ID NO: 560643 - RNA, 25 nt, Human
ccacaaguagucaggcacuguggca

SEQ ID NO: 560644 - RNA, 25 nt, Human
ccacagccccaaccuguccccuggc

SEQ ID NO: 560645 - RNA, 20 nt, Human
ccagcagugccggcaggcag

SEQ ID NO: 560646 - RNA, 22 nt, Human
ccaggacagggcaaaggucaca

SEQ ID NO: 560647 - RNA, 23 nt, Human
cccaaagcuggacccuccaggac

SEQ ID NO: 560648 - RNA, 21 nt, Human
cccacagaggacccggggucc

SEQ ID NO: 560649 - RNA, 19 nt, Human
cccacccuggccucacaug

SEQ ID NO: 560650 - RNA, 20 nt, Human
ccccagaggagcaaagaggg

SEQ ID NO: 560651 - RNA, 22 nt, Human
cccgaggugcagcugccccaga

SEQ ID NO: 560652 - RNA, 22 nt, Human
cccuggguccaagcccacagcc

SEQ ID NO: 560653 - RNA, 23 nt, Human
cccuggguccaagcccacagccc

SEQ ID NO: 560654 - RNA, 21 nt, Human
ccucacaugccaacgucuucu

SEQ ID NO: 560655 - RNA, 21 nt, Human
ccuccaggacagggcaaaggu

SEQ ID NO: 560656 - RNA, 25 nt, Human
ccuguccccuggcucugggccuggu

SEQ ID NO: 560657 - RNA, 19 nt, Human
gcccacagccccaaccugu

SEQ ID NO: 560658 - RNA, 18 nt, Human
gccccagaggagcaaaga

SEQ ID NO: 560659 - RNA, 22 nt, Human
gcucugggccuggucuuuggug

SEQ ID NO: 560660 - RNA, 19 nt, Human
guggagugugcaggugucc

SEQ ID NO: 560661 - RNA, 25 nt, Human
uaaaaacacuuuauugcacaaaucc

SEQ ID NO: 560662 - RNA, 18 nt, Human
ucaaaacagcucagcacu

SEQ ID NO: 560663 - RNA, 19 nt, Human
ucagcccaaagcuggaccc

SEQ ID NO: 560664 - RNA, 18 nt, Human
uccaugagcguuccugug

SEQ ID NO: 560665 - RNA, 20 nt, Human
uccccuggcucugggccugg

SEQ ID NO: 560666 - RNA, 24 nt, Human
ugaagacaggugggguggaguugg

SEQ ID NO: 560667 - RNA, 26 nt, Human
ugaagacagguggggugggggaacac

SEQ ID NO: 560668 - RNA, 25 nt, Human
ugaagacagguggggugggggaacc

SEQ ID NO: 560669 - RNA, 24 nt, Human
ugccugggccacaaguagucaggc

SEQ ID NO: 560670 - RNA, 22 nt, Human
uggaguuggguccccaccugcc

SEQ ID NO: 560671 - RNA, 19 nt, Human
ugggccuggucuuuggugc

SEQ ID NO: 560672 - RNA, 19 nt, Human
uggguccccaccugcccag

SEQ ID NO: 560673 - RNA, 25 nt, Human
uguccccuggcucugggccuggucu

SEQ ID NO: 560674 - RNA, 18 nt, Human
uguguugggggaagccug

SEQ ID NO: 560675 - RNA, 18 nt, Human
uucuguggagugugcagg

SEQ ID NO: 560676 - RNA, 18 nt, Human
uugcacaaaucccacaaa

SEQ ID NO: 560677 - RNA, 22 nt, Human
uuuuccuacccacagaggaccc

SEQ ID NO: 560678 - RNA, 19 nt, Human
aaagacaaaaacugccacu

SEQ ID NO: 560679 - RNA, 19 nt, Human
aacgucggagcuagaagga

SEQ ID NO: 560680 - RNA, 24 nt, Human
aagacaaaaacugccacuuccucu

SEQ ID NO: 560681 - RNA, 21 nt, Human
agaaggaaagggguggggagg

SEQ ID NO: 560682 - RNA, 18 nt, Human
aggaggggcggugcuggg

SEQ ID NO: 560683 - RNA, 18 nt, Human
agggguggggaggggagg

SEQ ID NO: 560684 - RNA, 22 nt, Human
agggguggggaggggagggacc

SEQ ID NO: 560685 - RNA, 23 nt, Human
caaaaacugccacuuccucuucc

SEQ ID NO: 560686 - RNA, 23 nt, Human
caagcaaucccuggauucuucua

SEQ ID NO: 560687 - RNA, 20 nt, Human
cacuuccucuuccuucuucc

SEQ ID NO: 560688 - RNA, 25 nt, Human
ccacuuccucuuccuucuuccagga

SEQ ID NO: 560689 - RNA, 23 nt, Human
ccaggaggggcggugcuggggcu

SEQ ID NO: 560690 - RNA, 20 nt, Human
ccauauccuccgccgccccc

SEQ ID NO: 560691 - RNA, 23 nt, Human
ccauauuugguuucuacaucaua

SEQ ID NO: 560692 - RNA, 20 nt, Human
ccccccgccccccuaauaaa

SEQ ID NO: 560693 - RNA, 20 nt, Human
cccccuaauaaacgccuccc

SEQ ID NO: 560694 - RNA, 23 nt, Human
cccgcggccgcaaacgucggagc

SEQ ID NO: 560695 - RNA, 20 nt, Human
cggagcuagaaggaaagggg

SEQ ID NO: 560696 - RNA, 23 nt, Human
cggggacgaagaguaagggaggg

SEQ ID NO: 560697 - RNA, 19 nt, Human
cucuuuccccccgcccccc

SEQ ID NO: 560698 - RNA, 23 nt, Human
cugacucuggcuuuacuccauau

SEQ ID NO: 560699 - RNA, 22 nt, Human
cuucgugccuggccacugacuc

SEQ ID NO: 560700 - RNA, 21 nt, Human
gaaagggguggggaggggagg

SEQ ID NO: 560701 - RNA, 24 nt, Human
ggaccggggacgaagaguaaggga

SEQ ID NO: 560702 - RNA, 20 nt, Human
ggaggggagggaccggggac

SEQ ID NO: 560703 - RNA, 19 nt, Human
ggggaggggagggaccggg

SEQ ID NO: 560704 - RNA, 20 nt, Human
ggguggggaggggagggacc

SEQ ID NO: 560705 - RNA, 18 nt, Human
ggucugcuccaauguugu

SEQ ID NO: 560706 - RNA, 26 nt, Human
guggggaggggagggaccggggacga

SEQ ID NO: 560707 - RNA, 21 nt, Human
ucacacugcuaugcaagaaug

SEQ ID NO: 560708 - RNA, 22 nt, Human
ucacugccagucagaaggucug

SEQ ID NO: 560709 - RNA, 19 nt, Human
uccgccgcccccgcggccg

SEQ ID NO: 560710 - RNA, 21 nt, Human
uccgccgcccccgcggccgca

SEQ ID NO: 560711 - RNA, 20 nt, Human
uccuccgccgcccccgcggc

SEQ ID NO: 560712 - RNA, 22 nt, Human
ugccaagcaaucccuggauucu

SEQ ID NO: 560713 - RNA, 18 nt, Human
ugccuucgugccuggcca

SEQ ID NO: 560714 - RNA, 23 nt, Human
uggcaaaaacugguucuguacaa

SEQ ID NO: 560715 - RNA, 22 nt, Human
uggcuaaacuggcaaaaacugg

SEQ ID NO: 560716 - RNA, 20 nt, Human
uggggaggggagggaccggg

SEQ ID NO: 560717 - RNA, 27 nt, Human
uuccccccgccccccuaauaaacgccu

SEQ ID NO: 560718 - RNA, 18 nt, Human
aaaccuggaauuccggca

SEQ ID NO: 560719 - RNA, 20 nt, Human
aagaaaaagcaaccuuauua

SEQ ID NO: 560720 - RNA, 27 nt, Human
aagagcccagagugaauagugggcacc

SEQ ID NO: 560721 - RNA, 21 nt, Human
aagagccuggggggaaaggag

SEQ ID NO: 560722 - RNA, 21 nt, Human
aaggcuccagaagaggaacag

SEQ ID NO: 560723 - RNA, 20 nt, Human
aagggcaaggaaggcugcag

SEQ ID NO: 560724 - RNA, 25 nt, Human
aaugaaauggaaggaugucccuuaa

SEQ ID NO: 560725 - RNA, 20 nt, Human
acacggcaaccccaccagaa

SEQ ID NO: 560726 - RNA, 21 nt, Human
acacggcaaccccaccagaac

SEQ ID NO: 560727 - RNA, 22 nt, Human
acagaccagagaacguccaugc

SEQ ID NO: 560728 - RNA, 23 nt, Human
acagaggcggaaggaagagaagc

SEQ ID NO: 560729 - RNA, 19 nt, Human
acagcacagcagaacagga

SEQ ID NO: 560730 - RNA, 21 nt, Human
acagcacagcagaacaggaga

SEQ ID NO: 560731 - RNA, 24 nt, Human
acagcccgcaagguugaaaggccc

SEQ ID NO: 560732 - RNA, 19 nt, Human
accccggcuugcccugccu

SEQ ID NO: 560733 - RNA, 26 nt, Human
accugaucccuuccccucccuauucu

SEQ ID NO: 560734 - RNA, 22 nt, Human
agaaacaccagagaaggcagac

SEQ ID NO: 560735 - RNA, 21 nt, Human
agaacguccaugcgaugccuc

SEQ ID NO: 560736 - RNA, 19 nt, Human
agaaggcagacaccugagc

SEQ ID NO: 560737 - RNA, 19 nt, Human
agagaaggcagacaccuga

SEQ ID NO: 560738 - RNA, 25 nt, Human
agaugaagaaaauuauagggaggcu

SEQ ID NO: 560739 - RNA, 18 nt, Human
agcaagagaugaagaaaa

SEQ ID NO: 560740 - RNA, 20 nt, Human
agcacagcagaacaggagaa

SEQ ID NO: 560741 - RNA, 22 nt, Human
agcugccccucagggcugcauc

SEQ ID NO: 560742 - RNA, 19 nt, Human
aggaacagaggcggaagga

SEQ ID NO: 560743 - RNA, 22 nt, Human
aggaggagguggaagggcaagg

SEQ ID NO: 560744 - RNA, 22 nt, Human
aggcugaccugacaaagucaaa

SEQ ID NO: 560745 - RNA, 19 nt, Human
agggaaacaaagagccugg

SEQ ID NO: 560746 - RNA, 20 nt, Human
aguccaugauaucuaaguuu

SEQ ID NO: 560747 - RNA, 18 nt, Human
agugaggggugggaaggg

SEQ ID NO: 560748 - RNA, 20 nt, Human
agugaggggugggaagggaa

SEQ ID NO: 560749 - RNA, 24 nt, Human
auaugguuuuucccuuucaaacac

SEQ ID NO: 560750 - RNA, 21 nt, Human
auuugcacuuaaaaaaaguca

SEQ ID NO: 560751 - RNA, 19 nt, Human
caacacgccaaaggcuaga

SEQ ID NO: 560752 - RNA, 22 nt, Human
caacuaagaaagaaaaagcaac

SEQ ID NO: 560753 - RNA, 20 nt, Human
caagugaggcugaccugaca

SEQ ID NO: 560754 - RNA, 21 nt, Human
cacacggcaaccccaccagaa

SEQ ID NO: 560755 - RNA, 25 nt, Human
cacagcacagcagaacaggagaacc

SEQ ID NO: 560756 - RNA, 20 nt, Human
caccagagaaggcagacacc

SEQ ID NO: 560757 - RNA, 21 nt, Human
cagaccagagaacguccaugc

SEQ ID NO: 560758 - RNA, 19 nt, Human
cagcugucaccaucacuca

SEQ ID NO: 560759 - RNA, 27 nt, Human
caggacaacacaccugauccccugaag

SEQ ID NO: 560760 - RNA, 22 nt, Human
cagggcacuucugggcacccac

SEQ ID NO: 560761 - RNA, 18 nt, Human
ccuccugccaccacgaga

SEQ ID NO: 560762 - RNA, 22 nt, Human
cgccaaaggcuagaguuuuacu

SEQ ID NO: 560763 - RNA, 19 nt, Human
cggcugaacuuuggacagc

SEQ ID NO: 560764 - RNA, 18 nt, Human
cuagccuuaugcaacgua

SEQ ID NO: 560765 - RNA, 19 nt, Human
cuauucuaaagggagagaa

SEQ ID NO: 560766 - RNA, 21 nt, Human
cugcuccaagaaaauggaacc

SEQ ID NO: 560767 - RNA, 24 nt, Human
cuuaauacacuuauagaccuauca

SEQ ID NO: 560768 - RNA, 26 nt, Human
gaaaauuauagggaggcugcccuggc

SEQ ID NO: 560769 - RNA, 19 nt, Human
gaacacucagcaucacugg

SEQ ID NO: 560770 - RNA, 22 nt, Human
gaauuccggcagcucuccccgg

SEQ ID NO: 560771 - RNA, 18 nt, Human
gagaagcuccaaggugac

SEQ ID NO: 560772 - RNA, 19 nt, Human
gagaagcugagugaggggu

SEQ ID NO: 560773 - RNA, 21 nt, Human
gagaaggggaaggaggaacgg

SEQ ID NO: 560774 - RNA, 25 nt, Human
gcagggcacuucugggcacccacau

SEQ ID NO: 560775 - RNA, 21 nt, Human
gcccaggacaacacaccugau

SEQ ID NO: 560776 - RNA, 20 nt, Human
gcccugagaccugcaccacc

SEQ ID NO: 560777 - RNA, 23 nt, Human
gcugucaccaucacucaugucca

SEQ ID NO: 560778 - RNA, 19 nt, Human
ggacaagaugauggggagg

SEQ ID NO: 560779 - RNA, 19 nt, Human
gggaggcaaaggcuccaga

SEQ ID NO: 560780 - RNA, 23 nt, Human
gggaggcugcccuggcccaaagg

SEQ ID NO: 560781 - RNA, 20 nt, Human
gguggagggaaacaaagagc

SEQ ID NO: 560782 - RNA, 23 nt, Human
ggugggaagggaagaagagccca

SEQ ID NO: 560783 - RNA, 23 nt, Human
gguugaaaggcccaggacaacac

SEQ ID NO: 560784 - RNA, 26 nt, Human
guaggucaaguucaaaauuauaucaa

SEQ ID NO: 560785 - RNA, 19 nt, Human
uaagaaagaaaaagcaacc

SEQ ID NO: 560786 - RNA, 19 nt, Human
uagcaagagaugaagaaaa

SEQ ID NO: 560787 - RNA, 26 nt, Human
uagcaagagaugaagaaaagggaccc

SEQ ID NO: 560788 - RNA, 24 nt, Human
uagcaagagaugaagaaaauuaua

SEQ ID NO: 560789 - RNA, 23 nt, Human
uagggcaguugauaugcaagggg

SEQ ID NO: 560790 - RNA, 22 nt, Human
ucaacuaagaaagaaaaagcaa

SEQ ID NO: 560791 - RNA, 19 nt, Human
ucaaggagauaagagaugg

SEQ ID NO: 560792 - RNA, 18 nt, Human
ucagcacagcccgcaagg

SEQ ID NO: 560793 - RNA, 19 nt, Human
ucagugagguagauaauca

SEQ ID NO: 560794 - RNA, 22 nt, Human
uccaagaaaauggaacccaagg

SEQ ID NO: 560795 - RNA, 22 nt, Human
uccacaguggagcuugcuucug

SEQ ID NO: 560796 - RNA, 19 nt, Human
ucuaggacaagaugauggg

SEQ ID NO: 560797 - RNA, 19 nt, Human
ucuccacuacagaccagag

SEQ ID NO: 560798 - RNA, 22 nt, Human
ucuggaacucagcacagcccgc

SEQ ID NO: 560799 - RNA, 20 nt, Human
ugaacuuuggacagcugaga

SEQ ID NO: 560800 - RNA, 20 nt, Human
ugacugggaaaagcaacaca

SEQ ID NO: 560801 - RNA, 20 nt, Human
ugacugggaaaagcaacaca

SEQ ID NO: 560802 - RNA, 22 nt, Human
ugaggcugaccugacaaaguca

SEQ ID NO: 560803 - RNA, 21 nt, Human
ugagugaggggugggaaggga

SEQ ID NO: 560804 - RNA, 20 nt, Human
ugcccugagaccugcaccac

SEQ ID NO: 560805 - RNA, 23 nt, Human
uggaacccaagggagagggacuc

SEQ ID NO: 560806 - RNA, 23 nt, Human
uggaacucagcacagcccgcaag

SEQ ID NO: 560807 - RNA, 21 nt, Human
ugggaaaagcaacacacaagg

SEQ ID NO: 560808 - RNA, 24 nt, Human
ugggagaaggggaaggaggaacgg

SEQ ID NO: 560809 - RNA, 22 nt, Human
aaaccacagcuuaagcggggga

SEQ ID NO: 560810 - RNA, 24 nt, Human
aacagaaccaucacagccgcucag

SEQ ID NO: 560811 - RNA, 18 nt, Human
aacuuaagucaugaaugg

SEQ ID NO: 560812 - RNA, 23 nt, Human
aagcuucauauagcucauauagu

SEQ ID NO: 560813 - RNA, 22 nt, Human
aagguggacagaucacaccuca

SEQ ID NO: 560814 - RNA, 23 nt, Human
acagacuuccaaaaggaaacacc

SEQ ID NO: 560815 - RNA, 21 nt, Human
acccauccagcccaagacugu

SEQ ID NO: 560816 - RNA, 20 nt, Human
acccucuccuaucacacaca

SEQ ID NO: 560817 - RNA, 23 nt, Human
acccugugcaaguuguagaacaa

SEQ ID NO: 560818 - RNA, 27 nt, Human
accucagugaccucaaaacacaaggac

SEQ ID NO: 560819 - RNA, 18 nt, Human
acggccggaucccuaagc

SEQ ID NO: 560820 - RNA, 21 nt, Human
acucaguaucugacgugguuu

SEQ ID NO: 560821 - RNA, 22 nt, Human
acuggagacagaggauuuuccg

SEQ ID NO: 560822 - RNA, 24 nt, Human
agcacaaaccacagggcuuacuag

SEQ ID NO: 560823 - RNA, 19 nt, Human
agcauacacugagccaaca

SEQ ID NO: 560824 - RNA, 20 nt, Human
agcgcgugcgcguuaacgcc

SEQ ID NO: 560825 - RNA, 21 nt, Human
agcucauauagucuuauuguc

SEQ ID NO: 560826 - RNA, 24 nt, Human
agcuuauugucccugcuucaccuc

SEQ ID NO: 560827 - RNA, 22 nt, Human
aggacauaucacacagcaucuu

SEQ ID NO: 560828 - RNA, 22 nt, Human
aggcaacagugauguccaaaac

SEQ ID NO: 560829 - RNA, 18 nt, Human
agggagggaagguauggg

SEQ ID NO: 560830 - RNA, 18 nt, Human
agggagggaagguauggg

SEQ ID NO: 560831 - RNA, 23 nt, Human
agguggacagaucacaccucagg

SEQ ID NO: 560832 - RNA, 24 nt, Human
agucacacuuggguugccuaauuu

SEQ ID NO: 560833 - RNA, 22 nt, Human
agugacaaagagcaugcgggug

SEQ ID NO: 560834 - RNA, 21 nt, Human
agugaccucaaaacacaagga

SEQ ID NO: 560835 - RNA, 24 nt, Human
auggaugucuccucccaacuaggc

SEQ ID NO: 560836 - RNA, 24 nt, Human
caaaccccuggguccuggaugccu

SEQ ID NO: 560837 - RNA, 27 nt, Human
caaagagcaugcggguggggcgggcac

SEQ ID NO: 560838 - RNA, 21 nt, Human
caacagugauguccaaaacaa

SEQ ID NO: 560839 - RNA, 19 nt, Human
cacaccucaggaagucauc

SEQ ID NO: 560840 - RNA, 20 nt, Human
cacacuguacugugggccag

SEQ ID NO: 560841 - RNA, 24 nt, Human
cacugaaagcuggaagagcagcga

SEQ ID NO: 560842 - RNA, 20 nt, Human
cacuucuccagggacugcca

SEQ ID NO: 560843 - RNA, 21 nt, Human
cagacuuccaaaaggaaacac

SEQ ID NO: 560844 - RNA, 22 nt, Human
cagauccuggacgauggugcuu

SEQ ID NO: 560845 - RNA, 21 nt, Human
cagcaggaccacacaccuguc

SEQ ID NO: 560846 - RNA, 20 nt, Human
caggaaggcucccagauuga

SEQ ID NO: 560847 - RNA, 24 nt, Human
cagggcccaccaugaggcagccau

SEQ ID NO: 560848 - RNA, 18 nt, Human
caugaggcagccaucacc

SEQ ID NO: 560849 - RNA, 18 nt, Human
ccaaaucuaaaacuaucu

SEQ ID NO: 560850 - RNA, 23 nt, Human
ccaacuaggcgcagaggguagca

SEQ ID NO: 560851 - RNA, 19 nt, Human
ccacacaccuguccagggc

SEQ ID NO: 560852 - RNA, 19 nt, Human
ccacagggcuuacuagcac

SEQ ID NO: 560853 - RNA, 20 nt, Human
ccacagggcuuacuagcaca

SEQ ID NO: 560854 - RNA, 18 nt, Human
ccacaguacccugaccua

SEQ ID NO: 560855 - RNA, 20 nt, Human
ccaccaguuccuuggguagc

SEQ ID NO: 560856 - RNA, 20 nt, Human
ccacugcucuuuuggugugg

SEQ ID NO: 560857 - RNA, 21 nt, Human
cccacaguacccugaccuacc

SEQ ID NO: 560858 - RNA, 19 nt, Human
cccauccagcccaagacug

SEQ ID NO: 560859 - RNA, 21 nt, Human
ccccagcauacacugagccaa

SEQ ID NO: 560860 - RNA, 20 nt, Human
ccccuggguccuggaugccu

SEQ ID NO: 560861 - RNA, 19 nt, Human
cccgcggucuuacggccgc

SEQ ID NO: 560862 - RNA, 18 nt, Human
cccuggguccuggaugcc

SEQ ID NO: 560863 - RNA, 19 nt, Human
cccuggguccuggaugccu

SEQ ID NO: 560864 - RNA, 21 nt, Human
ccgcgcgcucggccacggccg

SEQ ID NO: 560865 - RNA, 23 nt, Human
ccuaccagcuaaugcaaaaacac

SEQ ID NO: 560866 - RNA, 18 nt, Human
cgcggucuuacggccgcg

SEQ ID NO: 560867 - RNA, 20 nt, Human
cggccgcgcgcucggccacg

SEQ ID NO: 560868 - RNA, 25 nt, Human
cuaagcacaaaccacagggcuuacu

SEQ ID NO: 560869 - RNA, 19 nt, Human
cuaccagcuaaugcaaaaa

SEQ ID NO: 560870 - RNA, 21 nt, Human
cuaugagcucccuucuggcug

SEQ ID NO: 560871 - RNA, 23 nt, Human
cucacagcuccccuucuucaguu

SEQ ID NO: 560872 - RNA, 21 nt, Human
cucaugaaauagaaacgaaaa

SEQ ID NO: 560873 - RNA, 24 nt, Human
cuccuaucacacacauccccccug

SEQ ID NO: 560874 - RNA, 20 nt, Human
cugaagacaguuggcggaga

SEQ ID NO: 560875 - RNA, 24 nt, Human
cuuucugaauuuaagaauuuugag

SEQ ID NO: 560876 - RNA, 21 nt, Human
gaaaaagacaaagggcccagg

SEQ ID NO: 560877 - RNA, 21 nt, Human
gaaaacgugacucuaggccuc

SEQ ID NO: 560878 - RNA, 19 nt, Human
gaaaaggacacuugagugg

SEQ ID NO: 560879 - RNA, 18 nt, Human
gaaccugcggacucucug

SEQ ID NO: 560880 - RNA, 18 nt, Human
gaagucccucuccccacc

SEQ ID NO: 560881 - RNA, 19 nt, Human
gauccuggacgauggugcu

SEQ ID NO: 560882 - RNA, 21 nt, Human
gcacuccaaggcuuggcauag

SEQ ID NO: 560883 - RNA, 19 nt, Human
gcgucgagcugaagucugg

SEQ ID NO: 560884 - RNA, 21 nt, Human
gcugaagucuggaagucccuc

SEQ ID NO: 560885 - RNA, 21 nt, Human
ggcaggccaggaugacuccag

SEQ ID NO: 560886 - RNA, 21 nt, Human
ggccaagauacuaccuuagcu

SEQ ID NO: 560887 - RNA, 19 nt, Human
ggguuucuucucugacuug

SEQ ID NO: 560888 - RNA, 24 nt, Human
guaagcaggggaucagagcuccau

SEQ ID NO: 560889 - RNA, 22 nt, Human
uaaaaacagaaccaucacagcc

SEQ ID NO: 560890 - RNA, 22 nt, Human
uaaaugauuccuaaaagcuuca

SEQ ID NO: 560891 - RNA, 22 nt, Human
uaacuagaaacauucuaaguau

SEQ ID NO: 560892 - RNA, 21 nt, Human
uaacucccgaaaucccagacc

SEQ ID NO: 560893 - RNA, 18 nt, Human
uaagcacaaaccacaggg

SEQ ID NO: 560894 - RNA, 22 nt, Human
uacccugugcaaguuguagaac

SEQ ID NO: 560895 - RNA, 18 nt, Human
uauaacccauccagccca

SEQ ID NO: 560896 - RNA, 22 nt, Human
ucaaaacacaaggacaucucca

SEQ ID NO: 560897 - RNA, 18 nt, Human
ucacugucaaucaucuuc

SEQ ID NO: 560898 - RNA, 22 nt, Human
ucagagcuccaucuucugugac

SEQ ID NO: 560899 - RNA, 25 nt, Human
ucagagcuccaucuucugugaccac

SEQ ID NO: 560900 - RNA, 23 nt, Human
ucagcuuaucugaaccugcggac

SEQ ID NO: 560901 - RNA, 19 nt, Human
ucagggagggaagguaugg

SEQ ID NO: 560902 - RNA, 22 nt, Human
ucaguuguggaguucuucaagg

SEQ ID NO: 560903 - RNA, 22 nt, Human
ucaugaaauagaaacgaaaaca

SEQ ID NO: 560904 - RNA, 23 nt, Human
uccagauuucauaccuuccucaa

SEQ ID NO: 560905 - RNA, 21 nt, Human
uccauguacagccagaucugc

SEQ ID NO: 560906 - RNA, 23 nt, Human
ucccagaccagauggaugucucc

SEQ ID NO: 560907 - RNA, 22 nt, Human
ucccugcuucaccuccagagac

SEQ ID NO: 560908 - RNA, 24 nt, Human
uccuggacgauggugcuucccuug

SEQ ID NO: 560909 - RNA, 22 nt, Human
uccuucaagccacuuccuuugc

SEQ ID NO: 560910 - RNA, 19 nt, Human
uccuuggguagcagagcag

SEQ ID NO: 560911 - RNA, 24 nt, Human
ucuauaacccauccagcccaagac

SEQ ID NO: 560912 - RNA, 26 nt, Human
ucucacagcuccccuucuucaguugu

SEQ ID NO: 560913 - RNA, 18 nt, Human
ucuccagggacugccacc

SEQ ID NO: 560914 - RNA, 19 nt, Human
ucucuggauacagaaacug

SEQ ID NO: 560915 - RNA, 18 nt, Human
ucugacgugguuucuaag

SEQ ID NO: 560916 - RNA, 24 nt, Human
ucugacgugguuucuaagguggag

SEQ ID NO: 560917 - RNA, 23 nt, Human
ucuggaagucccucuccccaccc

SEQ ID NO: 560918 - RNA, 22 nt, Human
ucugugaccacuucuccaggga

SEQ ID NO: 560919 - RNA, 22 nt, Human
ucuuacggccgcgcgcucggcc

SEQ ID NO: 560920 - RNA, 19 nt, Human
ugaccacuucuccagggac

SEQ ID NO: 560921 - RNA, 18 nt, Human
ugacucuaggccucagcc

SEQ ID NO: 560922 - RNA, 24 nt, Human
ugagccaacaacuuaagucaugaa

SEQ ID NO: 560923 - RNA, 20 nt, Human
ugaggagucugggguuccca

SEQ ID NO: 560924 - RNA, 25 nt, Human
ugauacuaacaaaaaccagaaguuu

SEQ ID NO: 560925 - RNA, 20 nt, Human
ugccugagacuccuagacac

SEQ ID NO: 560926 - RNA, 18 nt, Human
ugcggguggggcgggcac

SEQ ID NO: 560927 - RNA, 21 nt, Human
uggacagaucacaccucagga

SEQ ID NO: 560928 - RNA, 21 nt, Human
uggaugccuccuccagauuuc

SEQ ID NO: 560929 - RNA, 20 nt, Human
uggcaaccacugcucccaac

SEQ ID NO: 560930 - RNA, 23 nt, Human
uggcaggccaggaugacuccagu

SEQ ID NO: 560931 - RNA, 21 nt, Human
uggcugccacucagacuggcc

SEQ ID NO: 560932 - RNA, 21 nt, Human
ugggguuucuucucugacuug

SEQ ID NO: 560933 - RNA, 18 nt, Human
uggguccuggaugccucc

SEQ ID NO: 560934 - RNA, 19 nt, Human
uggguccuggaugccuccu

SEQ ID NO: 560935 - RNA, 22 nt, Human
ugggugggcacuccaaggcuug

SEQ ID NO: 560936 - RNA, 18 nt, Human
uguaaaaacagaaccauc

SEQ ID NO: 560937 - RNA, 21 nt, Human
uguaaaaacagaaccaucaca

SEQ ID NO: 560938 - RNA, 18 nt, Human
uucagcuuaucugaaccu

SEQ ID NO: 560939 - RNA, 21 nt, Human
uucaugcacugaaagcuggaa

SEQ ID NO: 560940 - RNA, 24 nt, Human
uuccgggguugggguuucuucucu

SEQ ID NO: 560941 - RNA, 21 nt, Human
uuccucuguuacccugugcaa

SEQ ID NO: 560942 - RNA, 21 nt, Human
uucuucuuuuuaucuccagcu

SEQ ID NO: 560943 - RNA, 22 nt, Human
uuugcagauccuggacgauggu

SEQ ID NO: 560944 - RNA, 20 nt, Human
acaguaugaagcuuuguuua

SEQ ID NO: 560945 - RNA, 20 nt, Human
acgccacagauauaacuaaa

SEQ ID NO: 560946 - RNA, 25 nt, Human
agauucucaaaacugccagcagcuc

SEQ ID NO: 560947 - RNA, 18 nt, Human
aucugucacaguaugaag

SEQ ID NO: 560948 - RNA, 24 nt, Human
augguucugacauaccagaggcuu

SEQ ID NO: 560949 - RNA, 22 nt, Human
caaccccacaccuccugcuucc

SEQ ID NO: 560950 - RNA, 21 nt, Human
caggaaaaugucauuuaauga

SEQ ID NO: 560951 - RNA, 24 nt, Human
ccagaggggcaggaacacuuugau

SEQ ID NO: 560952 - RNA, 23 nt, Human
ccccacaccuccugcuuccccgu

SEQ ID NO: 560953 - RNA, 21 nt, Human
cccgucgcaccgcccuggcca

SEQ ID NO: 560954 - RNA, 21 nt, Human
ccuagcaacaaucauugcuac

SEQ ID NO: 560955 - RNA, 19 nt, Human
ccuccugcuuccccgucgc

SEQ ID NO: 560956 - RNA, 22 nt, Human
ccugcuuccccgucgcaccgcc

SEQ ID NO: 560957 - RNA, 20 nt, Human
ccuggccagguucacauggu

SEQ ID NO: 560958 - RNA, 26 nt, Human
ccuggccagguucacaugguuucaac

SEQ ID NO: 560959 - RNA, 19 nt, Human
ccuuuaccugagcauggug

SEQ ID NO: 560960 - RNA, 22 nt, Human
cugagugcaggguccccucgga

SEQ ID NO: 560961 - RNA, 21 nt, Human
gagcauggugagcucucucuc

SEQ ID NO: 560962 - RNA, 21 nt, Human
gcucagaagacaaauguguuc

SEQ ID NO: 560963 - RNA, 22 nt, Human
ggaggucaucagauucucaaaa

SEQ ID NO: 560964 - RNA, 25 nt, Human
uaaaacagaaagacuuucaggaaaa

SEQ ID NO: 560965 - RNA, 24 nt, Human
uauacaacucuguagccuagcaac

SEQ ID NO: 560966 - RNA, 20 nt, Human
uauacauuacauauacaacu

SEQ ID NO: 560967 - RNA, 26 nt, Human
ucagaagacaaauguguucucugggg

SEQ ID NO: 560968 - RNA, 19 nt, Human
ucagauucucaaaacugcc

SEQ ID NO: 560969 - RNA, 19 nt, Human
ugaaaccauguauucauaa

SEQ ID NO: 560970 - RNA, 18 nt, Human
ugagcuauucucaaaugu

SEQ ID NO: 560971 - RNA, 21 nt, Human
ugccaucauuaugacugugga

SEQ ID NO: 560972 - RNA, 19 nt, Human
uggaagacagcaugguucu

SEQ ID NO: 560973 - RNA, 20 nt, Human
uggugagcucucucuccucc

SEQ ID NO: 560974 - RNA, 24 nt, Human
uguccagaggggcaggaacacuuu

SEQ ID NO: 560975 - RNA, 21 nt, Human
uuaaauggaugcucuucacaa

SEQ ID NO: 560976 - RNA, 19 nt, Human
uugcgugcgggaccaaccc

SEQ ID NO: 560977 - RNA, 26 nt, Human
uuuccacuuacaagagaacgccacag

SEQ ID NO: 560978 - RNA, 19 nt, Human
aaaaaaacugucaaagaca

SEQ ID NO: 560979 - RNA, 25 nt, Human
aaaaaguaaaucacaaaaauacaag

SEQ ID NO: 560980 - RNA, 24 nt, Human
aaaccccaaaaggcuuacagaaaa

SEQ ID NO: 560981 - RNA, 26 nt, Human
acaagaaaaaaacugucaaagacaac

SEQ ID NO: 560982 - RNA, 21 nt, Human
acacacacauauguauauagu

SEQ ID NO: 560983 - RNA, 23 nt, Human
accccaaaaggcuuacagaaaaa

SEQ ID NO: 560984 - RNA, 25 nt, Human
accccaaaaggcuuacagaaaaagu

SEQ ID NO: 560985 - RNA, 19 nt, Human
acucugaaaaacacuagaa

SEQ ID NO: 560986 - RNA, 23 nt, Human
acucugaaaaacacuagaacaua

SEQ ID NO: 560987 - RNA, 18 nt, Human
aggaaaaguaauacuuac

SEQ ID NO: 560988 - RNA, 21 nt, Human
agggacaagaaaaaaacuguc

SEQ ID NO: 560989 - RNA, 25 nt, Human
auauauauacacacacacacauaug

SEQ ID NO: 560990 - RNA, 22 nt, Human
auuuuuaaaugccccugccugc

SEQ ID NO: 560991 - RNA, 22 nt, Human
caaaaauaaggacuggaaugaa

SEQ ID NO: 560992 - RNA, 23 nt, Human
cacacacacacauauguauauag

SEQ ID NO: 560993 - RNA, 25 nt, Human
caccgggagcagguaccaccgccga

SEQ ID NO: 560994 - RNA, 23 nt, Human
cacucugaaaaacacuagaacau

SEQ ID NO: 560995 - RNA, 18 nt, Human
cauucuuuuuuggucagg

SEQ ID NO: 560996 - RNA, 24 nt, Human
cccaaaaggcuuacagaaaaagua

SEQ ID NO: 560997 - RNA, 18 nt, Human
cccacacguccucagggc

SEQ ID NO: 560998 - RNA, 19 nt, Human
ccccaaaaggcuuacagaa

SEQ ID NO: 560999 - RNA, 19 nt, Human
ccccacucugugagucugg

SEQ ID NO: 561000 - RNA, 19 nt, Human
cccccuccgcuuccuaauu

SEQ ID NO: 561001 - RNA, 22 nt, Human
cuccugcucccccuccgcuucc

SEQ ID NO: 561002 - RNA, 22 nt, Human
cuccugcucccccuccgcuucc

SEQ ID NO: 561003 - RNA, 18 nt, Human
gacaagaaaaaaacuguc

SEQ ID NO: 561004 - RNA, 21 nt, Human
ggagauucuggagccccacuc

SEQ ID NO: 561005 - RNA, 22 nt, Human
uaaaccccaaaaggcuuacaga

SEQ ID NO: 561006 - RNA, 24 nt, Human
uaaaccccaaaaggcuuacagaaa

SEQ ID NO: 561007 - RNA, 24 nt, Human
uaaaucacaaaaauacaagcuugu

SEQ ID NO: 561008 - RNA, 19 nt, Human
uaaaugccccugccugccc

SEQ ID NO: 561009 - RNA, 25 nt, Human
uaaccucagcgaaaacuuuuaggau

SEQ ID NO: 561010 - RNA, 24 nt, Human
uaacuuuuaggcugagacaaaaca

SEQ ID NO: 561011 - RNA, 24 nt, Human
uacacacacaccaauggcacugau

SEQ ID NO: 561012 - RNA, 24 nt, Human
uauacacacacacacauauguaua

SEQ ID NO: 561013 - RNA, 25 nt, Human
uauacacacacacacauauguauau

SEQ ID NO: 561014 - RNA, 25 nt, Human
uauauacacacacacacauauguag

SEQ ID NO: 561015 - RNA, 24 nt, Human
uaugacacauuauauauauacaca

SEQ ID NO: 561016 - RNA, 23 nt, Human
uccgcuuccuaauuucggggccg

SEQ ID NO: 561017 - RNA, 21 nt, Human
uccuacauuuuuaaaugcccc

SEQ ID NO: 561018 - RNA, 21 nt, Human
ugagacaaaacaauauucaau

SEQ ID NO: 561019 - RNA, 19 nt, Human
ugcuuuuugaacugcuuua

SEQ ID NO: 561020 - RNA, 23 nt, Human
uggaacgagccacgacggcucug

SEQ ID NO: 561021 - RNA, 19 nt, Human
uggaaugaaaaaggaagau

SEQ ID NO: 561022 - RNA, 20 nt, Human
uggagauucuggagccccac

SEQ ID NO: 561023 - RNA, 23 nt, Human
ugguaaguguaaaccccaaaagg

SEQ ID NO: 561024 - RNA, 21 nt, Human
uggucagggacaagaaaaaaa

SEQ ID NO: 561025 - RNA, 22 nt, Human
uuaaaugccccugccugccccc

SEQ ID NO: 561026 - RNA, 21 nt, Human
uuacguacacacacaccaaug

SEQ ID NO: 561027 - RNA, 25 nt, Human
aaaaaaacaaaaacaaaacaaaaaa

SEQ ID NO: 561028 - RNA, 23 nt, Human
aaaaacaaaacaaaaaaaacuua

SEQ ID NO: 561029 - RNA, 25 nt, Human
aaaacaaaaaaacaaaaacaaaaca

SEQ ID NO: 561030 - RNA, 21 nt, Human
aaaacaaaaacaaaacaaaaa

SEQ ID NO: 561031 - RNA, 27 nt, Human
aaacaaaaaacaaaaaaacaaaaacaa

SEQ ID NO: 561032 - RNA, 25 nt, Human
aaacaaaaacaaaacaaaaaaaacu

SEQ ID NO: 561033 - RNA, 23 nt, Human
aacaaaaaacaaaaaaacaaaaa

SEQ ID NO: 561034 - RNA, 23 nt, Human
aacaucgcaagauaauguauuca

SEQ ID NO: 561035 - RNA, 24 nt, Human
aaccaaacuucaaccccaucagcg

SEQ ID NO: 561036 - RNA, 19 nt, Human
aaucaguuacaggcacuug

SEQ ID NO: 561037 - RNA, 24 nt, Human
acaaaaaaacaaaaacaaaacaaa

SEQ ID NO: 561038 - RNA, 25 nt, Human
acaaaaaaacaaaaacaaaacaaaa

SEQ ID NO: 561039 - RNA, 20 nt, Human
acaaaacaaaaaaaacuuaa

SEQ ID NO: 561040 - RNA, 21 nt, Human
agccacagacacauaaaaucc

SEQ ID NO: 561041 - RNA, 22 nt, Human
aggaaaacaaaaaacaaaaaaa

SEQ ID NO: 561042 - RNA, 24 nt, Human
aggaaaacaaaaaacaaaaaaaca

SEQ ID NO: 561043 - RNA, 20 nt, Human
aggaauccuucucuagagac

SEQ ID NO: 561044 - RNA, 28 nt, Human
caaaaaaacaaaaacaaaacaaaaaaaa

SEQ ID NO: 561045 - RNA, 27 nt, Human
caaaaaacaaaaaaacaaaaacaaaac

SEQ ID NO: 561046 - RNA, 24 nt, Human
caaaaacaaaacaaaaaaaacuua

SEQ ID NO: 561047 - RNA, 21 nt, Human
caaccccaucagcgacgcaau

SEQ ID NO: 561048 - RNA, 23 nt, Human
caaguccaaggugggguugaagg

SEQ ID NO: 561049 - RNA, 18 nt, Human
caccccgccccggcgggc

SEQ ID NO: 561050 - RNA, 18 nt, Human
cagcuccaccccgccccg

SEQ ID NO: 561051 - RNA, 22 nt, Human
cagucucucucaaaaaacaagg

SEQ ID NO: 561052 - RNA, 22 nt, Human
caucuucuccccgcgccggggg

SEQ ID NO: 561053 - RNA, 19 nt, Human
ccaaaccaaacuucaaccc

SEQ ID NO: 561054 - RNA, 23 nt, Human
ccaaccgggcucccgccgccgcc

SEQ ID NO: 561055 - RNA, 21 nt, Human
ccaucagguagguccucaagu

SEQ ID NO: 561056 - RNA, 20 nt, Human
cccaggcuggguucagcagg

SEQ ID NO: 561057 - RNA, 19 nt, Human
ccccgggcccagccgggcc

SEQ ID NO: 561058 - RNA, 21 nt, Human
ccugcaagcaaaauggaggaa

SEQ ID NO: 561059 - RNA, 23 nt, Human
cgcaaugcuccugugaccuuggu

SEQ ID NO: 561060 - RNA, 26 nt, Human
cgccaaccgggcucccgccgccgccu

SEQ ID NO: 561061 - RNA, 20 nt, Human
cgcgaagaccagacgccaac

SEQ ID NO: 561062 - RNA, 21 nt, Human
cggcgcguggcgggcccgagg

SEQ ID NO: 561063 - RNA, 25 nt, Human
cuaggcaccaucuucuccccgcgcc

SEQ ID NO: 561064 - RNA, 18 nt, Human
cugaaacaagaaccaaac

SEQ ID NO: 561065 - RNA, 20 nt, Human
cugaaacaagaaccaaacca

SEQ ID NO: 561066 - RNA, 18 nt, Human
cuugaaaugucuuuggcu

SEQ ID NO: 561067 - RNA, 18 nt, Human
gaaaugcaauaccguauc

SEQ ID NO: 561068 - RNA, 24 nt, Human
gaaccaaaccaaacuucaacccca

SEQ ID NO: 561069 - RNA, 22 nt, Human
gacgcaaugcuccugugaccuu

SEQ ID NO: 561070 - RNA, 19 nt, Human
gccacagacacauaaaauc

SEQ ID NO: 561071 - RNA, 20 nt, Human
gccccgggcccagccgggcc

SEQ ID NO: 561072 - RNA, 22 nt, Human
gccccgggcccagccgggccag

SEQ ID NO: 561073 - RNA, 21 nt, Human
gcggcgcguggcgggcccgag

SEQ ID NO: 561074 - RNA, 18 nt, Human
gcgggcagcugcgcgccc

SEQ ID NO: 561075 - RNA, 19 nt, Human
gcuuuggaaaugcaauacc

SEQ ID NO: 561076 - RNA, 18 nt, Human
ggacgcccgcggucgcgc

SEQ ID NO: 561077 - RNA, 22 nt, Human
ggcccgaggccgcuaggcacca

SEQ ID NO: 561078 - RNA, 27 nt, Human
gggcagcgucuggcuccggcccggcgg

SEQ ID NO: 561079 - RNA, 21 nt, Human
gggcagcugcgcgccccgggc

SEQ ID NO: 561080 - RNA, 22 nt, Human
ggugcagacuguuucaaauguu

SEQ ID NO: 561081 - RNA, 19 nt, Human
guggcggcgcguggcgggc

SEQ ID NO: 561082 - RNA, 19 nt, Human
guggcggcgcguggcgggc

SEQ ID NO: 561083 - RNA, 21 nt, Human
uacauauugggcugaaacaag

SEQ ID NO: 561084 - RNA, 19 nt, Human
ucaaaggugcagacuguuu

SEQ ID NO: 561085 - RNA, 24 nt, Human
uccaccccgccccggcgggcagcu

SEQ ID NO: 561086 - RNA, 25 nt, Human
uccaggaauccuucucuagagacac

SEQ ID NO: 561087 - RNA, 21 nt, Human
uccccgcgccgggggcagcgu

SEQ ID NO: 561088 - RNA, 20 nt, Human
ugaaaugucuuuggcuggaa

SEQ ID NO: 561089 - RNA, 25 nt, Human
ugcaagcaaaauggaggaaaaggua

SEQ ID NO: 561090 - RNA, 24 nt, Human
ugcuccugugaccuuggugaaaac

SEQ ID NO: 561091 - RNA, 22 nt, Human
uguuucaaauguucucuacaua

SEQ ID NO: 561092 - RNA, 23 nt, Human
uuaugguucucucagucucucuc

SEQ ID NO: 561093 - RNA, 19 nt, Human
uucucucagucucucucaa

SEQ ID NO: 561094 - RNA, 20 nt, Human
aaaaacaaccaaaaacacug

SEQ ID NO: 561095 - RNA, 20 nt, Human
aaaaacacugggggaaacug

SEQ ID NO: 561096 - RNA, 21 nt, Human
aaacaaaaacaaccaaaaaca

SEQ ID NO: 561097 - RNA, 22 nt, Human
aaacaaaaacaaccaaaaacac

SEQ ID NO: 561098 - RNA, 25 nt, Human
aaacaaccaaaaacacugggggaaa

SEQ ID NO: 561099 - RNA, 22 nt, Human
aacaaaaacaaccaaaaacacu

SEQ ID NO: 561100 - RNA, 23 nt, Human
aacaaacaaaaacaaccaaaaac

SEQ ID NO: 561101 - RNA, 21 nt, Human
aagacucuguccagggucccg

SEQ ID NO: 561102 - RNA, 18 nt, Human
aagccucaucauuugcug

SEQ ID NO: 561103 - RNA, 19 nt, Human
aaucagggcagcccagggc

SEQ ID NO: 561104 - RNA, 19 nt, Human
acaaaaacaaccaaaaaca

SEQ ID NO: 561105 - RNA, 20 nt, Human
acaaacaaaaacaaccaaaa

SEQ ID NO: 561106 - RNA, 20 nt, Human
acacagcaagaccuuaucuc

SEQ ID NO: 561107 - RNA, 25 nt, Human
acacugggggaaacugagcaagggg

SEQ ID NO: 561108 - RNA, 18 nt, Human
acagcgcugucuugcccg

SEQ ID NO: 561109 - RNA, 22 nt, Human
acaggcgaggacaucagaucug

SEQ ID NO: 561110 - RNA, 19 nt, Human
acccaaacguccccagcag

SEQ ID NO: 561111 - RNA, 23 nt, Human
acccagugaugaggggacggcuc

SEQ ID NO: 561112 - RNA, 18 nt, Human
accucggugacucacgcc

SEQ ID NO: 561113 - RNA, 18 nt, Human
acugcacuccagccuggg

SEQ ID NO: 561114 - RNA, 18 nt, Human
agaaagaccaaggcugcu

SEQ ID NO: 561115 - RNA, 24 nt, Human
agacaggcgaggacaucagaucug

SEQ ID NO: 561116 - RNA, 22 nt, Human
agcacuuugggagacagguggg

SEQ ID NO: 561117 - RNA, 18 nt, Human
agcagccaaucuccgagc

SEQ ID NO: 561118 - RNA, 18 nt, Human
agcccagggcgaggaggu

SEQ ID NO: 561119 - RNA, 18 nt, Human
agcccagggcgaggaggu

SEQ ID NO: 561120 - RNA, 19 nt, Human
agcuggggcagcccagggc

SEQ ID NO: 561121 - RNA, 19 nt, Human
agcuggggcagcccagggc

SEQ ID NO: 561122 - RNA, 19 nt, Human
agcuggggcagcccagggc

SEQ ID NO: 561123 - RNA, 19 nt, Human
agcuggggcagcccagggc

SEQ ID NO: 561124 - RNA, 19 nt, Human
agcuggggcagcccagggc

SEQ ID NO: 561125 - RNA, 20 nt, Human
aggacccuguacccucugcc

SEQ ID NO: 561126 - RNA, 26 nt, Human
aggucccccagauccagcuggggcag

SEQ ID NO: 561127 - RNA, 19 nt, Human
agucagggcagcccagggc

SEQ ID NO: 561128 - RNA, 19 nt, Human
agucggggcagcccagggc

SEQ ID NO: 561129 - RNA, 19 nt, Human
agucggggcagcccagggc

SEQ ID NO: 561130 - RNA, 24 nt, Human
auugcgccacugcacuccagccug

SEQ ID NO: 561131 - RNA, 22 nt, Human
caaacaaaaacaaccaaaaaca

SEQ ID NO: 561132 - RNA, 23 nt, Human
caaccaaaaacacugggggaaac

SEQ ID NO: 561133 - RNA, 25 nt, Human
caaccaaaaacacugggggaaacug

SEQ ID NO: 561134 - RNA, 24 nt, Human
caacccaaacguccccagcagcag

SEQ ID NO: 561135 - RNA, 27 nt, Human
cacagcaagaccuuaucucaacaaaca

SEQ ID NO: 561136 - RNA, 21 nt, Human
cacagcucagcccuacgcuuc

SEQ ID NO: 561137 - RNA, 24 nt, Human
cacgccuggcaucccagcacuuug

SEQ ID NO: 561138 - RNA, 18 nt, Human
cacugcacuccagccugg

SEQ ID NO: 561139 - RNA, 19 nt, Human
cacugcacuccagccuggg

SEQ ID NO: 561140 - RNA, 20 nt, Human
cacugcacuccagccugggc

SEQ ID NO: 561141 - RNA, 25 nt, Human
cacugcacuccagccugggccacac

SEQ ID NO: 561142 - RNA, 19 nt, Human
cagcacuuugggagacagg

SEQ ID NO: 561143 - RNA, 21 nt, Human
cagcacuuugggagacaggug

SEQ ID NO: 561144 - RNA, 22 nt, Human
cagcacuuugggagacaggugg

SEQ ID NO: 561145 - RNA, 20 nt, Human
cagcccagggcgaggagguu

SEQ ID NO: 561146 - RNA, 20 nt, Human
cagcccagggcgaggagguu

SEQ ID NO: 561147 - RNA, 20 nt, Human
cagcccagggcgaggagguu

SEQ ID NO: 561148 - RNA, 20 nt, Human
cagcccagggcgaggagguu

SEQ ID NO: 561149 - RNA, 20 nt, Human
cagcccagggcgaggagguu

SEQ ID NO: 561150 - RNA, 20 nt, Human
cagcccagggcgaggagguu

SEQ ID NO: 561151 - RNA, 20 nt, Human
cagcccagggcgaggagguu

SEQ ID NO: 561152 - RNA, 20 nt, Human
cagcccagggcgaggagguu

SEQ ID NO: 561153 - RNA, 20 nt, Human
cagcccagggcgaggagguu

SEQ ID NO: 561154 - RNA, 18 nt, Human
cagcucagcccuacgcuu

SEQ ID NO: 561155 - RNA, 20 nt, Human
cagcugcagcugggccccag

SEQ ID NO: 561156 - RNA, 19 nt, Human
caggcggggcagcccaggc

SEQ ID NO: 561157 - RNA, 20 nt, Human
cagguccacagcuuucucag

SEQ ID NO: 561158 - RNA, 18 nt, Human
cagguccccagacccagc

SEQ ID NO: 561159 - RNA, 18 nt, Human
cagguccccagacccagc

SEQ ID NO: 561160 - RNA, 21 nt, Human
cagguccccagacccagcugg

SEQ ID NO: 561161 - RNA, 21 nt, Human
cagguccccagacccagcugg

SEQ ID NO: 561162 - RNA, 23 nt, Human
cagguccccagacccagcugggg

SEQ ID NO: 561163 - RNA, 23 nt, Human
cagguccccagacccagcugggg

SEQ ID NO: 561164 - RNA, 18 nt, Human
caggucccccagacccag

SEQ ID NO: 561165 - RNA, 19 nt, Human
caggucccccagacccagc

SEQ ID NO: 561166 - RNA, 19 nt, Human
caggucccccagacccagc

SEQ ID NO: 561167 - RNA, 19 nt, Human
caggucccccagacccagc

SEQ ID NO: 561168 - RNA, 22 nt, Human
caggucccccagacccagcugg

SEQ ID NO: 561169 - RNA, 22 nt, Human
caggucccccagacccagcugg

SEQ ID NO: 561170 - RNA, 23 nt, Human
caggucccccagacccagcuggg

SEQ ID NO: 561171 - RNA, 23 nt, Human
caggucccccagacccagcuggg

SEQ ID NO: 561172 - RNA, 23 nt, Human
caggucccccagauccagcuggg

SEQ ID NO: 561173 - RNA, 18 nt, Human
cagguuaaaaaaacaacu

SEQ ID NO: 561174 - RNA, 22 nt, Human
cagucggggcagcccagggcga

SEQ ID NO: 561175 - RNA, 22 nt, Human
cagucggggcagcccagggcga

SEQ ID NO: 561176 - RNA, 23 nt, Human
caucccagcacuuugggagacag

SEQ ID NO: 561177 - RNA, 24 nt, Human
caugauugcgccacugcacuccag

SEQ ID NO: 561178 - RNA, 23 nt, Human
caugcgguauuacauuagguacu

SEQ ID NO: 561179 - RNA, 20 nt, Human
ccaacccaaacguccccagc

SEQ ID NO: 561180 - RNA, 20 nt, Human
ccacugcacuccagccuggg

SEQ ID NO: 561181 - RNA, 20 nt, Human
ccacugcacuccagccuggg

SEQ ID NO: 561182 - RNA, 21 nt, Human
ccacugcacuccagccugggc

SEQ ID NO: 561183 - RNA, 24 nt, Human
ccacugcacuccagccugggccac

SEQ ID NO: 561184 - RNA, 24 nt, Human
ccagcagugccggcacaggacaag

SEQ ID NO: 561185 - RNA, 20 nt, Human
cccaaacguccccagcagca

SEQ ID NO: 561186 - RNA, 23 nt, Human
cccaaacguccccagcagcaguc

SEQ ID NO: 561187 - RNA, 22 nt, Human
cccaggcggggcagcccagggc

SEQ ID NO: 561188 - RNA, 22 nt, Human
cccaggcggggcagcccagggc

SEQ ID NO: 561189 - RNA, 22 nt, Human
cccaggcggggcagcccagggc

SEQ ID NO: 561190 - RNA, 22 nt, Human
cccaggcggggcagcccagggc

SEQ ID NO: 561191 - RNA, 22 nt, Human
cccaggcggggcagcccagggc

SEQ ID NO: 561192 - RNA, 18 nt, Human
cccaggucccccagaccc

SEQ ID NO: 561193 - RNA, 19 nt, Human
cccagugaugaggggacgg

SEQ ID NO: 561194 - RNA, 22 nt, Human
cccagugaugaggggacggcuc

SEQ ID NO: 561195 - RNA, 20 nt, Human
ccccagacccaaucagggca

SEQ ID NO: 561196 - RNA, 23 nt, Human
ccccagacccaggcggggcagcc

SEQ ID NO: 561197 - RNA, 23 nt, Human
ccccagacccaggcggggcagcc

SEQ ID NO: 561198 - RNA, 23 nt, Human
ccccagacccaggcggggcagcc

SEQ ID NO: 561199 - RNA, 23 nt, Human
ccccagacccaggcggggcagcc

SEQ ID NO: 561200 - RNA, 23 nt, Human
ccccagacccaggcggggcagcc

SEQ ID NO: 561201 - RNA, 23 nt, Human
ccccagacccaggcggggcagcc

SEQ ID NO: 561202 - RNA, 20 nt, Human
ccccagacccagucagggca

SEQ ID NO: 561203 - RNA, 20 nt, Human
ccccagacccagucggggca

SEQ ID NO: 561204 - RNA, 20 nt, Human
ccccagacccagucggggca

SEQ ID NO: 561205 - RNA, 27 nt, Human
cccccagacccagcuggggcagcccag

SEQ ID NO: 561206 - RNA, 27 nt, Human
cccccagacccagcuggggcagcccag

SEQ ID NO: 561207 - RNA, 27 nt, Human
cccccagacccagcuggggcagcccag

SEQ ID NO: 561208 - RNA, 27 nt, Human
cccccagacccagcuggggcagcccag

SEQ ID NO: 561209 - RNA, 27 nt, Human
cccccagauccagcuggggcagcccag

SEQ ID NO: 561210 - RNA, 24 nt, Human
cccgcugcugagacaggcgaggac

SEQ ID NO: 561211 - RNA, 25 nt, Human
cccggaguuugaggccgcagugagc

SEQ ID NO: 561212 - RNA, 18 nt, Human
ccguucucucccugggag

SEQ ID NO: 561213 - RNA, 23 nt, Human
ccucgcuuuuugcauuuuccuuu

SEQ ID NO: 561214 - RNA, 19 nt, Human
ccugucuccccggaucacu

SEQ ID NO: 561215 - RNA, 26 nt, Human
cgccacugcacuccagccugggccac

SEQ ID NO: 561216 - RNA, 19 nt, Human
cggcccugcaggcggugcc

SEQ ID NO: 561217 - RNA, 24 nt, Human
cucacgccuggcaucccagcacuu

SEQ ID NO: 561218 - RNA, 27 nt, Human
cucaggacccuguacccucugccaccc

SEQ ID NO: 561219 - RNA, 21 nt, Human
cuccaagaaaaaccuucugug

SEQ ID NO: 561220 - RNA, 19 nt, Human
cuccccagcagugccggcc

SEQ ID NO: 561221 - RNA, 22 nt, Human
cugacaccaggacgacagcacu

SEQ ID NO: 561222 - RNA, 22 nt, Human
cugcagcugcagcugggcccca

SEQ ID NO: 561223 - RNA, 21 nt, Human
cugcugcagcugcagcugggc

SEQ ID NO: 561224 - RNA, 18 nt, Human
cuuccaacccaaacgucc

SEQ ID NO: 561225 - RNA, 25 nt, Human
gaacagcgaccucggugacucacgc

SEQ ID NO: 561226 - RNA, 20 nt, Human
gacccuguacccucugccac

SEQ ID NO: 561227 - RNA, 25 nt, Human
gaccucggugacucacgccuggcau

SEQ ID NO: 561228 - RNA, 24 nt, Human
gacugccugagccccggaguuuga

SEQ ID NO: 561229 - RNA, 26 nt, Human
gagauucaggucccccagacccaguc

SEQ ID NO: 561230 - RNA, 18 nt, Human
gagccccggaguuugagg

SEQ ID NO: 561231 - RNA, 25 nt, Human
gagguucagguccccagacccagcu

SEQ ID NO: 561232 - RNA, 25 nt, Human
gagguucagguccccagacccagcu

SEQ ID NO: 561233 - RNA, 26 nt, Human
gagguucaggucccccagacccagcu

SEQ ID NO: 561234 - RNA, 26 nt, Human
gagguucaggucccccagacccagcu

SEQ ID NO: 561235 - RNA, 26 nt, Human
gagguucaggucccccagacccagcu

SEQ ID NO: 561236 - RNA, 26 nt, Human
gagguucaggucccccagacccaguc

SEQ ID NO: 561237 - RNA, 26 nt, Human
gagguucaggucccccagauccagcu

SEQ ID NO: 561238 - RNA, 19 nt, Human
gcaagacaaagaggaaaca

SEQ ID NO: 561239 - RNA, 23 nt, Human
gcaagacaaagaggaaacagggg

SEQ ID NO: 561240 - RNA, 21 nt, Human
gcagcccagggcgaggagguu

SEQ ID NO: 561241 - RNA, 21 nt, Human
gcagcccagggcgaggagguu

SEQ ID NO: 561242 - RNA, 21 nt, Human
gcagcccagggcgaggagguu

SEQ ID NO: 561243 - RNA, 21 nt, Human
gcagcccagggcgaggagguu

SEQ ID NO: 561244 - RNA, 21 nt, Human
gcagugagccaugauugcgcc

SEQ ID NO: 561245 - RNA, 22 nt, Human
gccacugcacuccagccugggc

SEQ ID NO: 561246 - RNA, 20 nt, Human
gccccaggucccccagaccc

SEQ ID NO: 561247 - RNA, 23 nt, Human
gcccucaggacccuguacccucu

SEQ ID NO: 561248 - RNA, 18 nt, Human
gccgccuuccuuccaacc

SEQ ID NO: 561249 - RNA, 19 nt, Human
gccgccuuccuuccaaccc

SEQ ID NO: 561250 - RNA, 19 nt, Human
ggagcagcugagcaguggg

SEQ ID NO: 561251 - RNA, 21 nt, Human
ggcaagacaaagaggaaacag

SEQ ID NO: 561252 - RNA, 21 nt, Human
ggcgaggagguacaggucccc

SEQ ID NO: 561253 - RNA, 26 nt, Human
gggccccaggucccccagacccaguc

SEQ ID NO: 561254 - RNA, 18 nt, Human
ggucagguuaaaaaaaca

SEQ ID NO: 561255 - RNA, 18 nt, Human
uaaagaaggccugaaauu

SEQ ID NO: 561256 - RNA, 19 nt, Human
uacccucugccacccagag

SEQ ID NO: 561257 - RNA, 23 nt, Human
uagcuccaguggaugcuggugac

SEQ ID NO: 561258 - RNA, 21 nt, Human
ucaacccagugaugaggggac

SEQ ID NO: 561259 - RNA, 22 nt, Human
ucacgccuggcaucccagcacu

SEQ ID NO: 561260 - RNA, 19 nt, Human
ucaggucccccagauccag

SEQ ID NO: 561261 - RNA, 22 nt, Human
uccagcuggggcagcccagggc

SEQ ID NO: 561262 - RNA, 22 nt, Human
uccauagcaaaaggauagucac

SEQ ID NO: 561263 - RNA, 18 nt, Human
uccccagacccaggcggg

SEQ ID NO: 561264 - RNA, 18 nt, Human
uccccagacccaggcggg

SEQ ID NO: 561265 - RNA, 18 nt, Human
uccccagacccaggcggg

SEQ ID NO: 561266 - RNA, 19 nt, Human
ucccccagacccaaucagg

SEQ ID NO: 561267 - RNA, 19 nt, Human
ucccccagacccaggcggg

SEQ ID NO: 561268 - RNA, 19 nt, Human
ucccccagacccaggcggg

SEQ ID NO: 561269 - RNA, 19 nt, Human
ucccccagacccaggcggg

SEQ ID NO: 561270 - RNA, 21 nt, Human
ucccccagacccaggcggggc

SEQ ID NO: 561271 - RNA, 21 nt, Human
ucccccagacccaggcggggc

SEQ ID NO: 561272 - RNA, 21 nt, Human
ucccccagacccaggcggggc

SEQ ID NO: 561273 - RNA, 19 nt, Human
ucccccagacccagucagg

SEQ ID NO: 561274 - RNA, 19 nt, Human
ucccccagacccagucggg

SEQ ID NO: 561275 - RNA, 19 nt, Human
ucccccagacccagucggg

SEQ ID NO: 561276 - RNA, 21 nt, Human
ucccugggaggcuuuggaagg

SEQ ID NO: 561277 - RNA, 23 nt, Human
uccuugguuuugacacaagcacc

SEQ ID NO: 561278 - RNA, 22 nt, Human
ucugacaccaggacgacagcac

SEQ ID NO: 561279 - RNA, 19 nt, Human
ucugcaggaaggaggggcc

SEQ ID NO: 561280 - RNA, 18 nt, Human
ucuuguagcuccagugga

SEQ ID NO: 561281 - RNA, 24 nt, Human
ugacaccaggacgacagcacagcc

SEQ ID NO: 561282 - RNA, 21 nt, Human
ugacauaaagaaggccugaaa

SEQ ID NO: 561283 - RNA, 22 nt, Human
ugacucacgccuggcaucccag

SEQ ID NO: 561284 - RNA, 24 nt, Human
ugacucacgccuggcaucccagca

SEQ ID NO: 561285 - RNA, 19 nt, Human
ugaggagauucaggucccc

SEQ ID NO: 561286 - RNA, 21 nt, Human
ugccggcacaggacaagucug

SEQ ID NO: 561287 - RNA, 18 nt, Human
ugcugggcuacuuugcag

SEQ ID NO: 561288 - RNA, 22 nt, Human
ugcuggugaccuggaucuccug

SEQ ID NO: 561289 - RNA, 19 nt, Human
uggagcagcugagcagugg

SEQ ID NO: 561290 - RNA, 25 nt, Human
ugggccccaggucccccagacccag

SEQ ID NO: 561291 - RNA, 21 nt, Human
ugggggaaacugagcaagggg

SEQ ID NO: 561292 - RNA, 18 nt, Human
uguggggauguacuccuc

SEQ ID NO: 561293 - RNA, 18 nt, Human
uuaguccguaggccaaag

SEQ ID NO: 561294 - RNA, 23 nt, Human
uugcgccacugcacuccagccug

SEQ ID NO: 561295 - RNA, 20 nt, Human
aaacaagauuuaacugcuuu

SEQ ID NO: 561296 - RNA, 20 nt, Human
aaacagcugacacagugagc

SEQ ID NO: 561297 - RNA, 18 nt, Human
aaaccauaaugccgaaga

SEQ ID NO: 561298 - RNA, 18 nt, Human
aaagucuuggaagaccag

SEQ ID NO: 561299 - RNA, 20 nt, Human
aagcaaaaaugaaauggagg

SEQ ID NO: 561300 - RNA, 22 nt, Human
acagggaaaacgcaagaggaua

SEQ ID NO: 561301 - RNA, 21 nt, Human
agcaggcuggaacuaacagag

SEQ ID NO: 561302 - RNA, 23 nt, Human
aggauguuuuuguacaaguacag

SEQ ID NO: 561303 - RNA, 18 nt, Human
auaaugccgaagaaguga

SEQ ID NO: 561304 - RNA, 24 nt, Human
cacagcaaucaaaugcaaaguaaa

SEQ ID NO: 561305 - RNA, 24 nt, Human
cacccucacuccucucucuggcuc

SEQ ID NO: 561306 - RNA, 23 nt, Human
ccacugagauaagugaguggcaa

SEQ ID NO: 561307 - RNA, 25 nt, Human
cccuugguugugugacaagaccacc

SEQ ID NO: 561308 - RNA, 21 nt, Human
ccucauagcaaaagcggccaa

SEQ ID NO: 561309 - RNA, 26 nt, Human
cucacuccucucucuggcucucuccc

SEQ ID NO: 561310 - RNA, 23 nt, Human
cuccucucucuggcucucuccca

SEQ ID NO: 561311 - RNA, 21 nt, Human
gggaaaacagcugacacagug

SEQ ID NO: 561312 - RNA, 18 nt, Human
gggggucacugauucacu

SEQ ID NO: 561313 - RNA, 19 nt, Human
gugaaggucaaugauaugg

SEQ ID NO: 561314 - RNA, 24 nt, Human
guuguugcacagacaagauggcca

SEQ ID NO: 561315 - RNA, 18 nt, Human
uaccucagggaaaacagc

SEQ ID NO: 561316 - RNA, 21 nt, Human
uaccucagggaaaacagcuga

SEQ ID NO: 561317 - RNA, 23 nt, Human
ugaaaauaccauggcuuuauuuu

SEQ ID NO: 561318 - RNA, 21 nt, Human
ugacaugaaggggauaaaagu

SEQ ID NO: 561319 - RNA, 23 nt, Human
ugacaugaaggggauaaaagucu

SEQ ID NO: 561320 - RNA, 20 nt, Human
uguacaaguacagcccuugg

SEQ ID NO: 561321 - RNA, 23 nt, Human
ugucacacuugaacgugcgugua

SEQ ID NO: 561322 - RNA, 22 nt, Human
uuuuguacaaguacagcccuug

SEQ ID NO: 561323 - RNA, 21 nt, Human
aaaauacuuccccuacaacug

SEQ ID NO: 561324 - RNA, 18 nt, Human
aaacaggaaaaacgacca

SEQ ID NO: 561325 - RNA, 22 nt, Human
aaagccaccaacagagcaaaac

SEQ ID NO: 561326 - RNA, 24 nt, Human
aacaggacagguguuuaaaaaaaa

SEQ ID NO: 561327 - RNA, 22 nt, Human
aagcaaccgcgaagcggcggag

SEQ ID NO: 561328 - RNA, 22 nt, Human
aaguaauaaggaauaaaacccu

SEQ ID NO: 561329 - RNA, 19 nt, Human
acaaagcuaauuaagaagc

SEQ ID NO: 561330 - RNA, 22 nt, Human
acaaucuuucuucauuucucag

SEQ ID NO: 561331 - RNA, 20 nt, Human
acagagcaaaacaaaaacaa

SEQ ID NO: 561332 - RNA, 26 nt, Human
accaacaucaaauauuggaagcuuug

SEQ ID NO: 561333 - RNA, 26 nt, Human
agacaucuccucaaaucagccaaucc

SEQ ID NO: 561334 - RNA, 21 nt, Human
agagcuuaaccaacaucaaau

SEQ ID NO: 561335 - RNA, 22 nt, Human
agccaccaacagagcaaaacaa

SEQ ID NO: 561336 - RNA, 20 nt, Human
aggccgaagucgggcgagga

SEQ ID NO: 561337 - RNA, 20 nt, Human
aggcgacaggacgcuggagg

SEQ ID NO: 561338 - RNA, 18 nt, Human
aggcgcgggagaccgagu

SEQ ID NO: 561339 - RNA, 23 nt, Human
caaaaacaaagcuaauuaagaag

SEQ ID NO: 561340 - RNA, 19 nt, Human
caacagagcaaaacaaaaa

SEQ ID NO: 561341 - RNA, 19 nt, Human
caacuguacucuauccuug

SEQ ID NO: 561342 - RNA, 20 nt, Human
cagcucccgcgcucagcccu

SEQ ID NO: 561343 - RNA, 22 nt, Human
ccaagaagcugauuauacaaua

SEQ ID NO: 561344 - RNA, 25 nt, Human
ccaugccucgaagcaauucaaaacc

SEQ ID NO: 561345 - RNA, 19 nt, Human
ccauuagucuacugguucu

SEQ ID NO: 561346 - RNA, 21 nt, Human
cccaggcaaagauuuuuaaag

SEQ ID NO: 561347 - RNA, 23 nt, Human
ccccuacaacuguacucuauccu

SEQ ID NO: 561348 - RNA, 24 nt, Human
ccccuacaacuguacucuauccuu

SEQ ID NO: 561349 - RNA, 22 nt, Human
cggcccggacguugagaagcaa

SEQ ID NO: 561350 - RNA, 24 nt, Human
cucgaagcaauucaaaaccaagaa

SEQ ID NO: 561351 - RNA, 18 nt, Human
cuuuuugcucuaagaaug

SEQ ID NO: 561352 - RNA, 19 nt, Human
gaaaacagggggaagcagg

SEQ ID NO: 561353 - RNA, 19 nt, Human
gaagcaauucaaaaccaag

SEQ ID NO: 561354 - RNA, 20 nt, Human
gaggaauggagggaaacagg

SEQ ID NO: 561355 - RNA, 18 nt, Human
gagugccgauagcugcgg

SEQ ID NO: 561356 - RNA, 22 nt, Human
gccuagggcuggggcuccggcu

SEQ ID NO: 561357 - RNA, 24 nt, Human
gccuagggcuggggcuccggcucg

SEQ ID NO: 561358 - RNA, 22 nt, Human
gcgaagcggcggagauucgaac

SEQ ID NO: 561359 - RNA, 18 nt, Human
ggagggaaacaggacagg

SEQ ID NO: 561360 - RNA, 18 nt, Human
ggaggggguagggcgggg

SEQ ID NO: 561361 - RNA, 18 nt, Human
ggaggggguagggcgggg

SEQ ID NO: 561362 - RNA, 19 nt, Human
ggcccagaggcucgggcgg

SEQ ID NO: 561363 - RNA, 25 nt, Human
gggaaaacagggggaagccgguacc

SEQ ID NO: 561364 - RNA, 18 nt, Human
gggcuggggcuccggcuc

SEQ ID NO: 561365 - RNA, 19 nt, Human
uaacaaagccaccaacaga

SEQ ID NO: 561366 - RNA, 21 nt, Human
uaacaaagccaccaacagagc

SEQ ID NO: 561367 - RNA, 24 nt, Human
uaacaaagccaccaacagagcaaa

SEQ ID NO: 561368 - RNA, 26 nt, Human
uaaggaauaaaaccaugccucgaagc

SEQ ID NO: 561369 - RNA, 23 nt, Human
uacauaaaauacuuccccuacaa

SEQ ID NO: 561370 - RNA, 22 nt, Human
uauuaaaugagaaucucucaag

SEQ ID NO: 561371 - RNA, 24 nt, Human
ucacuuagagacaucuccucaaau

SEQ ID NO: 561372 - RNA, 18 nt, Human
ucagaacaaucuuucuuc

SEQ ID NO: 561373 - RNA, 18 nt, Human
ucccacugcuucggcucc

SEQ ID NO: 561374 - RNA, 18 nt, Human
ucgccgccgccgagaugc

SEQ ID NO: 561375 - RNA, 19 nt, Human
ugagaagcaaccgcgaagc

SEQ ID NO: 561376 - RNA, 21 nt, Human
ugggaaaacagggggaagcag

SEQ ID NO: 561377 - RNA, 22 nt, Human
uguaacaaagccaccaacagag

SEQ ID NO: 561378 - RNA, 24 nt, Human
uguaacaaagccaccaacagagca

SEQ ID NO: 561379 - RNA, 21 nt, Human
ugucaguguugaaaacuacag

SEQ ID NO: 561380 - RNA, 22 nt, Human
uucuuuaacaaugaaauaguaa

SEQ ID NO: 561381 - RNA, 21 nt, Human
uuuaaagugcugucaguguug

SEQ ID NO: 561382 - RNA, 19 nt, Human
accacggucacucuccagc

SEQ ID NO: 561383 - RNA, 22 nt, Human
accacggucacucuccagcccc

SEQ ID NO: 561384 - RNA, 20 nt, Human
acgcagccgucccaggucac

SEQ ID NO: 561385 - RNA, 20 nt, Human
agcccccggcccagcgccag

SEQ ID NO: 561386 - RNA, 22 nt, Human
aggagucagccccagccucgcc

SEQ ID NO: 561387 - RNA, 25 nt, Human
agggagcaggccaugggacccucau

SEQ ID NO: 561388 - RNA, 19 nt, Human
cacucuccagcccccggcc

SEQ ID NO: 561389 - RNA, 19 nt, Human
cagcccccggcccagcgcc

SEQ ID NO: 561390 - RNA, 22 nt, Human
cagccgucccaggucacucaga

SEQ ID NO: 561391 - RNA, 20 nt, Human
ccaccccggcccacgcagcc

SEQ ID NO: 561392 - RNA, 18 nt, Human
ccacggucacucuccagc

SEQ ID NO: 561393 - RNA, 21 nt, Human
ccagcccccggcccagcgcca

SEQ ID NO: 561394 - RNA, 21 nt, Human
ccagcgccaggguuagccgag

SEQ ID NO: 561395 - RNA, 20 nt, Human
ccgccaggacccggcgcggg

SEQ ID NO: 561396 - RNA, 20 nt, Human
ccugagggagcaggccaugg

SEQ ID NO: 561397 - RNA, 19 nt, Human
cgccaggguuagccgagaa

SEQ ID NO: 561398 - RNA, 22 nt, Human
cgcggcccgagcgccgccccuc

SEQ ID NO: 561399 - RNA, 21 nt, Human
cggcgcgggcagcgcgcggcc

SEQ ID NO: 561400 - RNA, 22 nt, Human
gcggcccgagcgccgccccucc

SEQ ID NO: 561401 - RNA, 20 nt, Human
ggccaugggacccucaucgg

SEQ ID NO: 561402 - RNA, 19 nt, Human
uagccgagaacaggaagua

SEQ ID NO: 561403 - RNA, 20 nt, Human
ucgccgcccgccaggacccg

SEQ ID NO: 561404 - RNA, 23 nt, Human
ucuggugcccggcuuugaggccc

SEQ ID NO: 561405 - RNA, 24 nt, Human
ugaggcaggagucagccccagccu

SEQ ID NO: 561406 - RNA, 20 nt, Human
ugagggagcaggccauggga

SEQ ID NO: 561407 - RNA, 24 nt, Human
ugcccggcuuugaggcccaccuua

SEQ ID NO: 561408 - RNA, 22 nt, Human
ugguaagaugccucuuuauugg

SEQ ID NO: 561409 - RNA, 20 nt, Human
uggugcuggagcuguuccug

SEQ ID NO: 561410 - RNA, 23 nt, Human
uuccugagggagcaggccauggg

SEQ ID NO: 561411 - RNA, 21 nt, Human
aagagaagaagguccagcaaa

SEQ ID NO: 561412 - RNA, 23 nt, Human
aagagaagaagguccagcaaaga

SEQ ID NO: 561413 - RNA, 18 nt, Human
aaucuauggauuaaccuu

SEQ ID NO: 561414 - RNA, 22 nt, Human
agaagugcaaaaucuguaaaaa

SEQ ID NO: 561415 - RNA, 18 nt, Human
agaauuuuccugaaacac

SEQ ID NO: 561416 - RNA, 19 nt, Human
aguuuuuaaccugaauuca

SEQ ID NO: 561417 - RNA, 20 nt, Human
augaggcaaagauuaagcac

SEQ ID NO: 561418 - RNA, 20 nt, Human
caagucacaguccucuaagc

SEQ ID NO: 561419 - RNA, 24 nt, Human
caaguuccuugcuuaaguggcaau

SEQ ID NO: 561420 - RNA, 20 nt, Human
caccgcgccagcguccaggu

SEQ ID NO: 561421 - RNA, 21 nt, Human
cagcguccaggugcggggaca

SEQ ID NO: 561422 - RNA, 20 nt, Human
ccgcgccagcguccaggugc

SEQ ID NO: 561423 - RNA, 21 nt, Human
ccuuaaagucuuuucaguaac

SEQ ID NO: 561424 - RNA, 20 nt, Human
gcccgggcgucgcgggcugg

SEQ ID NO: 561425 - RNA, 21 nt, Human
gcggggacagcggcagcccgg

SEQ ID NO: 561426 - RNA, 21 nt, Human
gcugguccgcgcgcaucacgc

SEQ ID NO: 561427 - RNA, 24 nt, Human
gcuuuuuuuccccucuuuuaauuc

SEQ ID NO: 561428 - RNA, 18 nt, Human
gugaguuuucuucgggcu

SEQ ID NO: 561429 - RNA, 21 nt, Human
uaacaugaaccaugaucucuu

SEQ ID NO: 561430 - RNA, 22 nt, Human
uacaaugcauuaauaaauggag

SEQ ID NO: 561431 - RNA, 28 nt, Human
uaggaagaauuuuccugaaacacagcag

SEQ ID NO: 561432 - RNA, 24 nt, Human
ucacgccgcggccggggacgcggg

SEQ ID NO: 561433 - RNA, 19 nt, Human
uccgcgcgcaucacgccgc

SEQ ID NO: 561434 - RNA, 24 nt, Human
uccgcgcgcaucacgccgcggccg

SEQ ID NO: 561435 - RNA, 20 nt, Human
ugaaccaugaucucuugaca

SEQ ID NO: 561436 - RNA, 22 nt, Human
ugcggggacagcggcagcccgg

SEQ ID NO: 561437 - RNA, 18 nt, Human
uggggcgugaguuuucuu

SEQ ID NO: 561438 - RNA, 19 nt, Human
uguagagagaagcaagcug

SEQ ID NO: 561439 - RNA, 20 nt, Human
aaccacaaugaggcagaaaa

SEQ ID NO: 561440 - RNA, 18 nt, Human
aagaugaugggaugggau

SEQ ID NO: 561441 - RNA, 21 nt, Human
acacacacccaauccuaaacc

SEQ ID NO: 561442 - RNA, 21 nt, Human
acucugggcuuccgugcucuc

SEQ ID NO: 561443 - RNA, 19 nt, Human
agccguauccuggaacuuc

SEQ ID NO: 561444 - RNA, 22 nt, Human
agguggccuguccuggagauga

SEQ ID NO: 561445 - RNA, 20 nt, Human
agugccauucagagaggaga

SEQ ID NO: 561446 - RNA, 19 nt, Human
augcucauugggcccauga

SEQ ID NO: 561447 - RNA, 22 nt, Human
auggcguuucccgcuaacuucu

SEQ ID NO: 561448 - RNA, 21 nt, Human
cacaauuaaugccaagaugag

SEQ ID NO: 561449 - RNA, 22 nt, Human
cacccuguucccuccugaugcu

SEQ ID NO: 561450 - RNA, 19 nt, Human
cagcaaacauuugagugcc

SEQ ID NO: 561451 - RNA, 28 nt, Human
ccaauccuaaaccacaaugaggcagaaa

SEQ ID NO: 561452 - RNA, 20 nt, Human
cccuuggggcuggacucccg

SEQ ID NO: 561453 - RNA, 23 nt, Human
cccuuggggcuggacucccgagc

SEQ ID NO: 561454 - RNA, 23 nt, Human
ccuaaaccacaaugaggcagaaa

SEQ ID NO: 561455 - RNA, 20 nt, Human
ccugcugugugugaggcugu

SEQ ID NO: 561456 - RNA, 24 nt, Human
ccugugguagggcuuuugcagggc

SEQ ID NO: 561457 - RNA, 23 nt, Human
cgggcuuguaacaccuucaugaa

SEQ ID NO: 561458 - RNA, 23 nt, Human
cgugcucucauuaauguaguucu

SEQ ID NO: 561459 - RNA, 23 nt, Human
cuuggcacaggucacuugcacau

SEQ ID NO: 561460 - RNA, 24 nt, Human
cuuggcacaggucacuugcacaug

SEQ ID NO: 561461 - RNA, 25 nt, Human
cuuggggcuggacucccgagccuuu

SEQ ID NO: 561462 - RNA, 22 nt, Human
gaagggugucagcacagagacu

SEQ ID NO: 561463 - RNA, 19 nt, Human
gcagaaaaguauaaucaaa

SEQ ID NO: 561464 - RNA, 20 nt, Human
gcucuuggcugaacgaaggc

SEQ ID NO: 561465 - RNA, 20 nt, Human
gcuguacaccccagucacgc

SEQ ID NO: 561466 - RNA, 21 nt, Human
ggagacacacacacccaaucc

SEQ ID NO: 561467 - RNA, 23 nt, Human
ggccccugcugugugugaggcug

SEQ ID NO: 561468 - RNA, 24 nt, Human
gggcuggacucccgagccuuuuuu

SEQ ID NO: 561469 - RNA, 18 nt, Human
guccauagcuguacaccc

SEQ ID NO: 561470 - RNA, 18 nt, Human
guccuggagaugagcuug

SEQ ID NO: 561471 - RNA, 23 nt, Human
gugguagggcuuuugcagggcug

SEQ ID NO: 561472 - RNA, 24 nt, Human
guuuugugaaagcgguauuuuuuu

SEQ ID NO: 561473 - RNA, 20 nt, Human
uaacuucucaggccccugcu

SEQ ID NO: 561474 - RNA, 18 nt, Human
uacugcugagaaauaugg

SEQ ID NO: 561475 - RNA, 25 nt, Human
uagauggcguuucccgcuaacuucu

SEQ ID NO: 561476 - RNA, 20 nt, Human
uagccguauccuggaacuuc

SEQ ID NO: 561477 - RNA, 23 nt, Human
uaguguguguugucuuucaaucu

SEQ ID NO: 561478 - RNA, 25 nt, Human
ucaacagucagcucagugcuugugu

SEQ ID NO: 561479 - RNA, 23 nt, Human
ucacauuguuguuggggauaagg

SEQ ID NO: 561480 - RNA, 23 nt, Human
uccacagaugccugggcacccug

SEQ ID NO: 561481 - RNA, 19 nt, Human
ucccgagccuuuuuucuuc

SEQ ID NO: 561482 - RNA, 19 nt, Human
ucccuuggggcuggacucc

SEQ ID NO: 561483 - RNA, 20 nt, Human
ucccuuggggcuggacuccc

SEQ ID NO: 561484 - RNA, 21 nt, Human
ucccuuggggcuggacucccg

SEQ ID NO: 561485 - RNA, 18 nt, Human
ucucaggccccugcugug

SEQ ID NO: 561486 - RNA, 20 nt, Human
ucucuuucuguucacucugg

SEQ ID NO: 561487 - RNA, 19 nt, Human
ucuuugccaggcuguuucc

SEQ ID NO: 561488 - RNA, 22 nt, Human
ugaagugccuuuucuggaugcu

SEQ ID NO: 561489 - RNA, 20 nt, Human
ugccuuaugcucuuggcuga

SEQ ID NO: 561490 - RNA, 22 nt, Human
ugcucacucccaaagccugaca

SEQ ID NO: 561491 - RNA, 19 nt, Human
ugcugucugagggcuccuc

SEQ ID NO: 561492 - RNA, 18 nt, Human
uggaugcucauugggccc

SEQ ID NO: 561493 - RNA, 21 nt, Human
uguacaccccagucacgcaga

SEQ ID NO: 561494 - RNA, 23 nt, Human
uguacaccccagucacgcagagu

SEQ ID NO: 561495 - RNA, 21 nt, Human
uuggggcuggacucccgagcc

SEQ ID NO: 561496 - RNA, 19 nt, Human
uuugaagugccuuuucugg

SEQ ID NO: 561497 - RNA, 22 nt, Human
aaaauaaaagagaugggagaga

SEQ ID NO: 561498 - RNA, 24 nt, Human
aaaguccuaggauuauagguguga

SEQ ID NO: 561499 - RNA, 24 nt, Human
aagcaaucugccugccucagccuc

SEQ ID NO: 561500 - RNA, 22 nt, Human
aaguacccuggacuacagacaa

SEQ ID NO: 561501 - RNA, 19 nt, Human
aagugauagcaagaaagaa

SEQ ID NO: 561502 - RNA, 18 nt, Human
acaggauuucauugggaa

SEQ ID NO: 561503 - RNA, 24 nt, Human
accauguugcccaggcuggucucg

SEQ ID NO: 561504 - RNA, 25 nt, Human
accauguugcccaggcuggucucga

SEQ ID NO: 561505 - RNA, 18 nt, Human
acggggucucaccauguu

SEQ ID NO: 561506 - RNA, 19 nt, Human
acggggucucaccauguug

SEQ ID NO: 561507 - RNA, 24 nt, Human
acggggucucaccauguugcccag

SEQ ID NO: 561508 - RNA, 20 nt, Human
acuuauuuuaucucccuucu

SEQ ID NO: 561509 - RNA, 26 nt, Human
acuuugucacccaggcuggaguagug

SEQ ID NO: 561510 - RNA, 19 nt, Human
aggugugagccaccuuacc

SEQ ID NO: 561511 - RNA, 21 nt, Human
agguucaagugaucccccuac

SEQ ID NO: 561512 - RNA, 23 nt, Human
auagcaucuucuccaagagcaag

SEQ ID NO: 561513 - RNA, 22 nt, Human
auaggcuggguagaaucaaaag

SEQ ID NO: 561514 - RNA, 24 nt, Human
caaaguccuaggauuauaggugug

SEQ ID NO: 561515 - RNA, 23 nt, Human
caagaaagaacugcuacaacucu

SEQ ID NO: 561516 - RNA, 20 nt, Human
caagugaucccccuaccuca

SEQ ID NO: 561517 - RNA, 24 nt, Human
caccacgccuggcuaauuuuugua

SEQ ID NO: 561518 - RNA, 24 nt, Human
caccauguugcccaggcuggucuc

SEQ ID NO: 561519 - RNA, 27 nt, Human
caccauguugcccaggcuggucucgaa

SEQ ID NO: 561520 - RNA, 23 nt, Human
cagccucgaccacccagguucaa

SEQ ID NO: 561521 - RNA, 21 nt, Human
cauagacggacaauaucaaga

SEQ ID NO: 561522 - RNA, 21 nt, Human
caucaaagucaauaaaaaauc

SEQ ID NO: 561523 - RNA, 25 nt, Human
caucucuauuuccagacuauaaggg

SEQ ID NO: 561524 - RNA, 19 nt, Human
cauguugcccaggcugguc

SEQ ID NO: 561525 - RNA, 23 nt, Human
cauguugcccaggcuggucucga

SEQ ID NO: 561526 - RNA, 24 nt, Human
cauguugcccaggcuggucucgaa

SEQ ID NO: 561527 - RNA, 21 nt, Human
ccaaaguccuaggauuauagg

SEQ ID NO: 561528 - RNA, 24 nt, Human
ccaaaguccuaggauuauaggugu

SEQ ID NO: 561529 - RNA, 20 nt, Human
ccaccacgccuggcuaauuu

SEQ ID NO: 561530 - RNA, 22 nt, Human
cccagguucaagugaucccccu

SEQ ID NO: 561531 - RNA, 25 nt, Human
cccccuaccucaggcccucaaguac

SEQ ID NO: 561532 - RNA, 18 nt, Human
ccuaaaaguaacagagau

SEQ ID NO: 561533 - RNA, 23 nt, Human
ccugagcucaagcaaucugccug

SEQ ID NO: 561534 - RNA, 20 nt, Human
ccuggacuacagacaagugc

SEQ ID NO: 561535 - RNA, 21 nt, Human
ccuggccaaaaaaaaaaaaaa

SEQ ID NO: 561536 - RNA, 21 nt, Human
ccuggccaaaaaaaaaaaaaa

SEQ ID NO: 561537 - RNA, 22 nt, Human
ccuggccaaaaaaaaaaaaaag

SEQ ID NO: 561538 - RNA, 24 nt, Human
cggggucucaccauguugcccagg

SEQ ID NO: 561539 - RNA, 22 nt, Human
cucaaguacccuggacuacaga

SEQ ID NO: 561540 - RNA, 21 nt, Human
cucagccucccaaaguccuag

SEQ ID NO: 561541 - RNA, 22 nt, Human
cucggcucacugcagccucgac

SEQ ID NO: 561542 - RNA, 25 nt, Human
cugcuacaacucuagucaauuaugu

SEQ ID NO: 561543 - RNA, 23 nt, Human
cuggccaaaaaaaaaaaaaagcc

SEQ ID NO: 561544 - RNA, 19 nt, Human
gaaaaaaaucucuaccucc

SEQ ID NO: 561545 - RNA, 23 nt, Human
gaacuccugagcucaagcaaucu

SEQ ID NO: 561546 - RNA, 24 nt, Human
gagcucaagcaaucugccugccuc

SEQ ID NO: 561547 - RNA, 18 nt, Human
gauuauaggugugagcca

SEQ ID NO: 561548 - RNA, 20 nt, Human
gauuauaggugugagccacc

SEQ ID NO: 561549 - RNA, 24 nt, Human
gauuauaggugugagccaccuuac

SEQ ID NO: 561550 - RNA, 24 nt, Human
gcaaucugccugccucagccuccc

SEQ ID NO: 561551 - RNA, 22 nt, Human
gcagccucgaccacccagguuc

SEQ ID NO: 561552 - RNA, 19 nt, Human
gccuccauuuuuuuuucuu

SEQ ID NO: 561553 - RNA, 24 nt, Human
gcuggaguaguggcgcgaucucgg

SEQ ID NO: 561554 - RNA, 22 nt, Human
ggacuacagacaagugccacca

SEQ ID NO: 561555 - RNA, 19 nt, Human
ggagcaaauggguaaaguc

SEQ ID NO: 561556 - RNA, 22 nt, Human
ggagcucauucagaaaaugggg

SEQ ID NO: 561557 - RNA, 24 nt, Human
ggaguaguggcgcgaucucggcuc

SEQ ID NO: 561558 - RNA, 21 nt, Human
ggggaaaaaaguugucucugu

SEQ ID NO: 561559 - RNA, 22 nt, Human
gggucucaccauguugcccagg

SEQ ID NO: 561560 - RNA, 22 nt, Human
guagagacggggucucaccaug

SEQ ID NO: 561561 - RNA, 21 nt, Human
guaguggcgcgaucucggcuc

SEQ ID NO: 561562 - RNA, 18 nt, Human
uaaaagagaugggagaga

SEQ ID NO: 561563 - RNA, 22 nt, Human
uaaaauaaaagagaugggagag

SEQ ID NO: 561564 - RNA, 22 nt, Human
uaagaaaaaaaucucuaccucc

SEQ ID NO: 561565 - RNA, 20 nt, Human
uaagagaauuggguuacagg

SEQ ID NO: 561566 - RNA, 23 nt, Human
uaauuuuuguacuuuuguagaga

SEQ ID NO: 561567 - RNA, 19 nt, Human
uacaaugcuacucacagag

SEQ ID NO: 561568 - RNA, 22 nt, Human
uacagacaagugccaccacgcc

SEQ ID NO: 561569 - RNA, 22 nt, Human
uacagacaagugccaccacgcc

SEQ ID NO: 561570 - RNA, 19 nt, Human
uaccucaggcccucaagua

SEQ ID NO: 561571 - RNA, 18 nt, Human
uaccuccaaaagcuggua

SEQ ID NO: 561572 - RNA, 25 nt, Human
uaccuggccaaaaaaaaaaaaaagc

SEQ ID NO: 561573 - RNA, 22 nt, Human
uacuuugucacccaggcuggag

SEQ ID NO: 561574 - RNA, 22 nt, Human
uagagacggggucucaccaugu

SEQ ID NO: 561575 - RNA, 18 nt, Human
uaggauuauaggugugag

SEQ ID NO: 561576 - RNA, 19 nt, Human
uaggauuauaggugugagc

SEQ ID NO: 561577 - RNA, 21 nt, Human
uaggauuauaggugugagcca

SEQ ID NO: 561578 - RNA, 22 nt, Human
uaggauuauaggugugagccac

SEQ ID NO: 561579 - RNA, 23 nt, Human
uaggauuauaggugugagccacc

SEQ ID NO: 561580 - RNA, 22 nt, Human
ucaaaagggcugagggagcaaa

SEQ ID NO: 561581 - RNA, 24 nt, Human
ucacugcagccucgaccacccagg

SEQ ID NO: 561582 - RNA, 19 nt, Human
ucagccucccaaaguccua

SEQ ID NO: 561583 - RNA, 19 nt, Human
ucauucagaaaauggggaa

SEQ ID NO: 561584 - RNA, 23 nt, Human
ucccaaaguccuaggauuauagg

SEQ ID NO: 561585 - RNA, 23 nt, Human
ucccuucuuaguauuuaguacaa

SEQ ID NO: 561586 - RNA, 23 nt, Human
ucucaccauguugcccaggcugg

SEQ ID NO: 561587 - RNA, 26 nt, Human
ucucaccauguugcccaggcuggucu

SEQ ID NO: 561588 - RNA, 27 nt, Human
ucucaccauguugcccaggcuggucuc

SEQ ID NO: 561589 - RNA, 23 nt, Human
ucucgaacuccugagcucaagca

SEQ ID NO: 561590 - RNA, 18 nt, Human
ucuggcuuacaacaaugg

SEQ ID NO: 561591 - RNA, 22 nt, Human
ucugucucuuagaccugccucc

SEQ ID NO: 561592 - RNA, 23 nt, Human
ucuuacuuugucacccaggcugg

SEQ ID NO: 561593 - RNA, 24 nt, Human
ucuuacuuugucacccaggcugga

SEQ ID NO: 561594 - RNA, 21 nt, Human
ugauagcaagaaagaacugcu

SEQ ID NO: 561595 - RNA, 24 nt, Human
ugcccaggcuggucucgaacuccu

SEQ ID NO: 561596 - RNA, 28 nt, Human
ugcccaggcuggucucgaacuccugagc

SEQ ID NO: 561597 - RNA, 23 nt, Human
ugccucagccucccaaaguccua

SEQ ID NO: 561598 - RNA, 24 nt, Human
ugccucagccucccaaaguccuag

SEQ ID NO: 561599 - RNA, 23 nt, Human
ugcuagauauagcaucuucucca

SEQ ID NO: 561600 - RNA, 24 nt, Human
ugcucuacuucaucucuauuucca

SEQ ID NO: 561601 - RNA, 23 nt, Human
uggacuacagacaagugccacca

SEQ ID NO: 561602 - RNA, 22 nt, Human
uggaguaguggcgcgaucucgg

SEQ ID NO: 561603 - RNA, 21 nt, Human
uggccaaaaaaaaaaaaaagc

SEQ ID NO: 561604 - RNA, 24 nt, Human
uguagagacggggucucaccaugu

SEQ ID NO: 561605 - RNA, 18 nt, Human
uuacuuugucacccaggc

SEQ ID NO: 561606 - RNA, 24 nt, Human
uuacuuugucacccaggcuggagu

SEQ ID NO: 561607 - RNA, 23 nt, Human
uucaagugaucccccuaccucag

SEQ ID NO: 561608 - RNA, 25 nt, Human
uucaagugaucccccuaccucaggc

SEQ ID NO: 561609 - RNA, 21 nt, Human
uucauugggaauauuaauuga

SEQ ID NO: 561610 - RNA, 24 nt, Human
uuccacaggcuuagaaaguuucau

SEQ ID NO: 561611 - RNA, 23 nt, Human
uucucagucuuccacaggcuuag

SEQ ID NO: 561612 - RNA, 20 nt, Human
uugaagaaauuagauggugu

SEQ ID NO: 561613 - RNA, 21 nt, Human
uugaagaaauuagaugguguu

SEQ ID NO: 561614 - RNA, 24 nt, Human
uuguagagacggggucucaccaug

SEQ ID NO: 561615 - RNA, 18 nt, Human
uuuccagacuauaagggc

SEQ ID NO: 561616 - RNA, 18 nt, Human
uuuguagagacggggucu

SEQ ID NO: 561617 - RNA, 24 nt, Human
uuuguagagacggggucucaccau

SEQ ID NO: 561618 - RNA, 22 nt, Human
uuugucacccaggcuggaguag

SEQ ID NO: 561619 - RNA, 20 nt, Human
uuuuuuuucuuugaagaaau

SEQ ID NO: 561620 - RNA, 19 nt, Human
aaacacaugcccaugcucu

SEQ ID NO: 561621 - RNA, 25 nt, Human
agcagccagagccccagccuggagc

SEQ ID NO: 561622 - RNA, 19 nt, Human
agugaccaggucgaggcug

SEQ ID NO: 561623 - RNA, 24 nt, Human
auggguccugcucuccagguuccu

SEQ ID NO: 561624 - RNA, 19 nt, Human
caccagccagcagaugcuc

SEQ ID NO: 561625 - RNA, 21 nt, Human
caccagccagcagaugcucca

SEQ ID NO: 561626 - RNA, 19 nt, Human
cacgcacagccugcacagc

SEQ ID NO: 561627 - RNA, 19 nt, Human
cacuccaucaucuuguccc

SEQ ID NO: 561628 - RNA, 19 nt, Human
cagcccccucugcaggucc

SEQ ID NO: 561629 - RNA, 22 nt, Human
caggaucuucccgcugcccagg

SEQ ID NO: 561630 - RNA, 21 nt, Human
ccagucgcccaacuucgccag

SEQ ID NO: 561631 - RNA, 20 nt, Human
ccaucuugauugagggucag

SEQ ID NO: 561632 - RNA, 19 nt, Human
ccccagagggaagaugguu

SEQ ID NO: 561633 - RNA, 18 nt, Human
cccucugcagguccccuc

SEQ ID NO: 561634 - RNA, 26 nt, Human
ccgacagcccccucugcagguccccu

SEQ ID NO: 561635 - RNA, 23 nt, Human
ccgcccagccauggguccugcuc

SEQ ID NO: 561636 - RNA, 18 nt, Human
ccugcucuccagguuccu

SEQ ID NO: 561637 - RNA, 26 nt, Human
ccuggagcugaggcucuuccuggggc

SEQ ID NO: 561638 - RNA, 19 nt, Human
ccuugacgcuguccuucuc

SEQ ID NO: 561639 - RNA, 19 nt, Human
cuaccgccgcuuccgcgcc

SEQ ID NO: 561640 - RNA, 21 nt, Human
cucgucccccuuguagaacac

SEQ ID NO: 561641 - RNA, 18 nt, Human
cugguggcggaaucggaa

SEQ ID NO: 561642 - RNA, 19 nt, Human
gaaauguucaaaauuccuc

SEQ ID NO: 561643 - RNA, 21 nt, Human
gaaggggaacucgggccaccc

SEQ ID NO: 561644 - RNA, 24 nt, Human
gcagccagagccccagccuggagc

SEQ ID NO: 561645 - RNA, 20 nt, Human
gcccaagguauacaggaacc

SEQ ID NO: 561646 - RNA, 19 nt, Human
gcucucuuucuucugaagc

SEQ ID NO: 561647 - RNA, 21 nt, Human
gcugcagcuaccgccgcuucc

SEQ ID NO: 561648 - RNA, 20 nt, Human
gggaggcuccuccgcaaucc

SEQ ID NO: 561649 - RNA, 26 nt, Human
gggcagcagcaagcuggcccuugggc

SEQ ID NO: 561650 - RNA, 19 nt, Human
gggccacaaacacgucacc

SEQ ID NO: 561651 - RNA, 19 nt, Human
gggcucucucaggccaccu

SEQ ID NO: 561652 - RNA, 18 nt, Human
ggggcggugaaggggaac

SEQ ID NO: 561653 - RNA, 19 nt, Human
gugaaggggaacucgggcc

SEQ ID NO: 561654 - RNA, 22 nt, Human
uaccagggcucucucaggccac

SEQ ID NO: 561655 - RNA, 20 nt, Human
uauucucagcagcgauuuuc

SEQ ID NO: 561656 - RNA, 19 nt, Human
ucacuggggcucucagugg

SEQ ID NO: 561657 - RNA, 20 nt, Human
ucaguggccaucccagcucu

SEQ ID NO: 561658 - RNA, 26 nt, Human
ucaguggccaucccagcucugcgcug

SEQ ID NO: 561659 - RNA, 23 nt, Human
uccccccagagggaagaugguuc

SEQ ID NO: 561660 - RNA, 28 nt, Human
ucccgacagcccccucugcagguccccu

SEQ ID NO: 561661 - RNA, 23 nt, Human
uccuggggcucgccgggccccug

SEQ ID NO: 561662 - RNA, 23 nt, Human
ucuauggaaauaaagugaccagg

SEQ ID NO: 561663 - RNA, 21 nt, Human
ucucuggcccaagguauacag

SEQ ID NO: 561664 - RNA, 20 nt, Human
ucugcgcuggcccuucugga

SEQ ID NO: 561665 - RNA, 19 nt, Human
uggaccaucuucugggcug

SEQ ID NO: 561666 - RNA, 22 nt, Human
uggagcugaggcucuuccuggg

SEQ ID NO: 561667 - RNA, 24 nt, Human
uggcccaagguauacaggaaccaa

SEQ ID NO: 561668 - RNA, 18 nt, Human
uguagaacacagcaaacu

SEQ ID NO: 561669 - RNA, 18 nt, Human
ugucacuggggcucucag

SEQ ID NO: 561670 - RNA, 20 nt, Human
ugucacuggggcucucagug

SEQ ID NO: 561671 - RNA, 18 nt, Human
ugucccgacagcccccuc

SEQ ID NO: 561672 - RNA, 20 nt, Human
ugucccggaccagugcugcg

SEQ ID NO: 561673 - RNA, 18 nt, Human
uguccuguggcaagggca

SEQ ID NO: 561674 - RNA, 21 nt, Human
uucaaaauuccucuucccgau

SEQ ID NO: 561675 - RNA, 22 nt, Human
uucaaaauuccucuucccgaug

SEQ ID NO: 561676 - RNA, 21 nt, Human
uucugggcugucacuggggcu

SEQ ID NO: 561677 - RNA, 23 nt, Human
aaacauuuagcuuuccaaaaaua

SEQ ID NO: 561678 - RNA, 19 nt, Human
aggagaagcggaggccugg

SEQ ID NO: 561679 - RNA, 23 nt, Human
caccaccaaggagaugcguuccg

SEQ ID NO: 561680 - RNA, 21 nt, Human
ccaggcugggccagggcgcag

SEQ ID NO: 561681 - RNA, 24 nt, Human
cgccgcgcucuucuggggcgcuca

SEQ ID NO: 561682 - RNA, 21 nt, Human
cuccucuaagucucuuucccc

SEQ ID NO: 561683 - RNA, 21 nt, Human
cuuucccccaccaccaaggag

SEQ ID NO: 561684 - RNA, 21 nt, Human
gagccgagccaggcugggcca

SEQ ID NO: 561685 - RNA, 19 nt, Human
gagcugagccgagccaggc

SEQ ID NO: 561686 - RNA, 22 nt, Human
gagggaaggaagggcaaggcag

SEQ ID NO: 561687 - RNA, 21 nt, Human
ggagggaaggaagggcaaggc

SEQ ID NO: 561688 - RNA, 21 nt, Human
ggcugccccaggagaagcgga

SEQ ID NO: 561689 - RNA, 21 nt, Human
ggugggggccacgaguuugcu

SEQ ID NO: 561690 - RNA, 20 nt, Human
uacaggaggauuuacauggc

SEQ ID NO: 561691 - RNA, 20 nt, Human
ucacggugacaggcuggggu

SEQ ID NO: 561692 - RNA, 20 nt, Human
ucucuuucccccaccaccaa

SEQ ID NO: 561693 - RNA, 19 nt, Human
ugccccaggagaagcggag

SEQ ID NO: 561694 - RNA, 23 nt, Human
uucccccaccaccaaggagaugc

SEQ ID NO: 561695 - RNA, 19 nt, Human
uugcugccagucaucgagg

SEQ ID NO: 561696 - RNA, 26 nt, Human
uuuccugaauauacaaaggugggggc

SEQ ID NO: 561697 - RNA, 19 nt, Human
uuuuuuuuuuuuuuuguuu

SEQ ID NO: 561698 - RNA, 27 nt, Human
aaaaaaaaaaaaaagggaauugcagag

SEQ ID NO: 561699 - RNA, 22 nt, Human
aaaaaaaaaaagggaauugcag

SEQ ID NO: 561700 - RNA, 22 nt, Human
aaaaaaacaaaaagucagcaaa

SEQ ID NO: 561701 - RNA, 19 nt, Human
aaaaacaaaaugaacagag

SEQ ID NO: 561702 - RNA, 25 nt, Human
aaaaauacgucacuccuuagaauac

SEQ ID NO: 561703 - RNA, 23 nt, Human
aaaacaaaaaaccacuucaacau

SEQ ID NO: 561704 - RNA, 22 nt, Human
aaaacaaaaacaaaaacaaaaa

SEQ ID NO: 561705 - RNA, 23 nt, Human
aaaacaaaaacaaaaacaaaaaa

SEQ ID NO: 561706 - RNA, 18 nt, Human
aaaacaaaaugaacagag

SEQ ID NO: 561707 - RNA, 20 nt, Human
aaaagccuuaucagaccauc

SEQ ID NO: 561708 - RNA, 28 nt, Human
aaacaaaaacaaaaacaaaaaaccacuu

SEQ ID NO: 561709 - RNA, 24 nt, Human
aaacaaaaagucagcaaaaccagc

SEQ ID NO: 561710 - RNA, 27 nt, Human
aaauaaaaacaaaaugaacagagacaa

SEQ ID NO: 561711 - RNA, 20 nt, Human
aacaaaaaaccacuucaaca

SEQ ID NO: 561712 - RNA, 24 nt, Human
aacaaaaaaccacuucaacaugaa

SEQ ID NO: 561713 - RNA, 19 nt, Human
aagagcgacaguaucacaa

SEQ ID NO: 561714 - RNA, 24 nt, Human
aagagcgacaguaucacaaggaca

SEQ ID NO: 561715 - RNA, 22 nt, Human
aaucaccaacuuuuucuuuuuu

SEQ ID NO: 561716 - RNA, 30 nt, Human
acaaauuaaaaaaacaaaaacaaaaacaaa

SEQ ID NO: 561717 - RNA, 24 nt, Human
accacuucaacaugaagcuaccau

SEQ ID NO: 561718 - RNA, 21 nt, Human
acugguuuaacaauacaccac

SEQ ID NO: 561719 - RNA, 20 nt, Human
agaauccaaacaggugaaaa

SEQ ID NO: 561720 - RNA, 18 nt, Human
agcgacaguaucacaagg

SEQ ID NO: 561721 - RNA, 19 nt, Human
aggccccucacgcggccag

SEQ ID NO: 561722 - RNA, 22 nt, Human
aggccccucacgcggccaguuc

SEQ ID NO: 561723 - RNA, 19 nt, Human
aguuccccucgccuccgcc

SEQ ID NO: 561724 - RNA, 21 nt, Human
auaacucugaagucagugggg

SEQ ID NO: 561725 - RNA, 21 nt, Human
auuagaacaagcuaacuuucc

SEQ ID NO: 561726 - RNA, 20 nt, Human
caaaaacaaaaaaccacuuc

SEQ ID NO: 561727 - RNA, 25 nt, Human
caaaaacaaaaaaccacuucaacau

SEQ ID NO: 561728 - RNA, 27 nt, Human
caaaaacaaaaacaaaaaaccacuuca

SEQ ID NO: 561729 - RNA, 22 nt, Human
caaaaagucagcaaaaccagca

SEQ ID NO: 561730 - RNA, 21 nt, Human
caacgagaaacccguagcgcc

SEQ ID NO: 561731 - RNA, 26 nt, Human
caacuuuuucuuuuuuuauaaauaua

SEQ ID NO: 561732 - RNA, 21 nt, Human
cagaccacuaauauagaaucc

SEQ ID NO: 561733 - RNA, 19 nt, Human
cagcugccacgaaggccgc

SEQ ID NO: 561734 - RNA, 21 nt, Human
cauagccccuauuagaacaag

SEQ ID NO: 561735 - RNA, 19 nt, Human
ccggccgcccuucccacaa

SEQ ID NO: 561736 - RNA, 23 nt, Human
ccucacgcggccaguuccccucg

SEQ ID NO: 561737 - RNA, 23 nt, Human
ccucagaccacuaauauagaauc

SEQ ID NO: 561738 - RNA, 21 nt, Human
ccucaggccccucacgcggcc

SEQ ID NO: 561739 - RNA, 19 nt, Human
cucuuccucagaccacuag

SEQ ID NO: 561740 - RNA, 24 nt, Human
cugcaccggccgcccuucccacaa

SEQ ID NO: 561741 - RNA, 25 nt, Human
gaaggaaaaaaaaaaaaaaaaggga

SEQ ID NO: 561742 - RNA, 22 nt, Human
gaucugcucuuccucagaccac

SEQ ID NO: 561743 - RNA, 18 nt, Human
gccaggcgccccuaagau

SEQ ID NO: 561744 - RNA, 23 nt, Human
gccuccaacgagaaacccguagc

SEQ ID NO: 561745 - RNA, 23 nt, Human
uacaaaguuuuuccauuuuucuu

SEQ ID NO: 561746 - RNA, 23 nt, Human
uagaauacaacaaugaucugaua

SEQ ID NO: 561747 - RNA, 18 nt, Human
uagguccaguaauacccu

SEQ ID NO: 561748 - RNA, 25 nt, Human
uauaaaaaaacaaaaagucagcaaa

SEQ ID NO: 561749 - RNA, 22 nt, Human
ucaagagcgacaguaucacaag

SEQ ID NO: 561750 - RNA, 21 nt, Human
ucagaccauccauaguuuuac

SEQ ID NO: 561751 - RNA, 19 nt, Human
uccaguaauacccugggaa

SEQ ID NO: 561752 - RNA, 24 nt, Human
ugaaauaaaaacaaaaugaacaga

SEQ ID NO: 561753 - RNA, 23 nt, Human
ugaaauaaaaacaaaaugaacuu

SEQ ID NO: 561754 - RNA, 20 nt, Human
ugaccaacuguuuccuuacc

SEQ ID NO: 561755 - RNA, 24 nt, Human
ugacuuaguggaaggaaaaaaaaa

SEQ ID NO: 561756 - RNA, 20 nt, Human
ugaucugcucuuccucagac

SEQ ID NO: 561757 - RNA, 22 nt, Human
ugcaccggccgcccuucccaca

SEQ ID NO: 561758 - RNA, 22 nt, Human
uguaucaggaacaucaagagcg

SEQ ID NO: 561759 - RNA, 24 nt, Human
uuuacaaugugaucugcucuuccu

SEQ ID NO: 561760 - RNA, 21 nt, Human
uuuacacaauggggaaugcug

SEQ ID NO: 561761 - RNA, 21 nt, Human
aaauagucuuuauuaugagaa

SEQ ID NO: 561762 - RNA, 22 nt, Human
aacaauucucccccucugcaag

SEQ ID NO: 561763 - RNA, 20 nt, Human
aagacacucucaggcuaugg

SEQ ID NO: 561764 - RNA, 23 nt, Human
aagagccuuggcaccagaaacac

SEQ ID NO: 561765 - RNA, 22 nt, Human
aagcagaaggaacaauucuccc

SEQ ID NO: 561766 - RNA, 23 nt, Human
aaguguacgaugaguuucuaagc

SEQ ID NO: 561767 - RNA, 22 nt, Human
aauugcucuugaacagggcuac

SEQ ID NO: 561768 - RNA, 18 nt, Human
acacagugggugagugac

SEQ ID NO: 561769 - RNA, 18 nt, Human
agaccccgacaccacuaa

SEQ ID NO: 561770 - RNA, 24 nt, Human
aggaaagcagaaggaaccgguacc

SEQ ID NO: 561771 - RNA, 26 nt, Human
aggcaaauagaaggcucaaggucaag

SEQ ID NO: 561772 - RNA, 18 nt, Human
agguacccgugagcccag

SEQ ID NO: 561773 - RNA, 18 nt, Human
agucccugguagggaaag

SEQ ID NO: 561774 - RNA, 19 nt, Human
ccccuaggaaagcagaagg

SEQ ID NO: 561775 - RNA, 19 nt, Human
ccuccgagucccugguagg

SEQ ID NO: 561776 - RNA, 25 nt, Human
ccuggaaauaucuccuaugccuucc

SEQ ID NO: 561777 - RNA, 18 nt, Human
ccugguagggaaaggagg

SEQ ID NO: 561778 - RNA, 21 nt, Human
cggaugacuccccaaaaacca

SEQ ID NO: 561779 - RNA, 22 nt, Human
cuaagcucaagaguccccuagg

SEQ ID NO: 561780 - RNA, 23 nt, Human
cucucaggcuauggcaggcaguc

SEQ ID NO: 561781 - RNA, 20 nt, Human
cucuguccacuagaccccga

SEQ ID NO: 561782 - RNA, 18 nt, Human
cuuccuccgagucccugg

SEQ ID NO: 561783 - RNA, 18 nt, Human
gaaaggagggaugagagu

SEQ ID NO: 561784 - RNA, 18 nt, Human
gacuccccaaaaaccagg

SEQ ID NO: 561785 - RNA, 19 nt, Human
gagcagggggcucugggcc

SEQ ID NO: 561786 - RNA, 21 nt, Human
gagcuaagagcucucaaauau

SEQ ID NO: 561787 - RNA, 21 nt, Human
gaguggggcccucaagagccu

SEQ ID NO: 561788 - RNA, 22 nt, Human
gcaggcagucacugaugggucc

SEQ ID NO: 561789 - RNA, 22 nt, Human
gcagggggcucugggccccuug

SEQ ID NO: 561790 - RNA, 19 nt, Human
gcucugggccccuuguuag

SEQ ID NO: 561791 - RNA, 21 nt, Human
ggaagcauagacauccuugag

SEQ ID NO: 561792 - RNA, 19 nt, Human
ggcccagggguacugacga

SEQ ID NO: 561793 - RNA, 18 nt, Human
gggggcucugggccccuu

SEQ ID NO: 561794 - RNA, 21 nt, Human
gggguuuuuuccaggaagcac

SEQ ID NO: 561795 - RNA, 21 nt, Human
ucaaauaucugaugcuagcac

SEQ ID NO: 561796 - RNA, 19 nt, Human
ucacaugcugguuucuuuc

SEQ ID NO: 561797 - RNA, 18 nt, Human
uccagauguggcuggagc

SEQ ID NO: 561798 - RNA, 30 nt, Human
ucccugguagggaaaggagggaugagaguu

SEQ ID NO: 561799 - RNA, 22 nt, Human
ucucaaauaucugaugcuagca

SEQ ID NO: 561800 - RNA, 18 nt, Human
ucucccccucugcaaggu

SEQ ID NO: 561801 - RNA, 22 nt, Human
ugacuccccaaaaaccaggcac

SEQ ID NO: 561802 - RNA, 25 nt, Human
ugagaaagcaguguuaucuaggaaa

SEQ ID NO: 561803 - RNA, 26 nt, Human
ugagaguggggcccucaagagccuug

SEQ ID NO: 561804 - RNA, 20 nt, Human
ugagcccagggucguaagcc

SEQ ID NO: 561805 - RNA, 26 nt, Human
ugaggcaaauagaaggcucaagguca

SEQ ID NO: 561806 - RNA, 19 nt, Human
uggcacauccacagugcuc

SEQ ID NO: 561807 - RNA, 24 nt, Human
uggcuggagcagggggcucugggc

SEQ ID NO: 561808 - RNA, 20 nt, Human
uggggcccucaagagccuug

SEQ ID NO: 561809 - RNA, 19 nt, Human
uguggcuggagcagggggc

SEQ ID NO: 561810 - RNA, 21 nt, Human
uguuagcaguggcccaggggu

SEQ ID NO: 561811 - RNA, 19 nt, Human
uucucccccucugcaaggu

SEQ ID NO: 561812 - RNA, 23 nt, Human
uucucuguccacuagaccccgac

SEQ ID NO: 561813 - RNA, 19 nt, Human
aaagcaagagaagagugag

SEQ ID NO: 561814 - RNA, 20 nt, Human
acaggcucucggcccgcucc

SEQ ID NO: 561815 - RNA, 29 nt, Human
acauccacgccccuccuuucucacgaaaa

SEQ ID NO: 561816 - RNA, 28 nt, Human
accuucauccucauucauugucuuugau

SEQ ID NO: 561817 - RNA, 18 nt, Human
agcuugcugcugcugcug

SEQ ID NO: 561818 - RNA, 18 nt, Human
aggacaagggucuggcuc

SEQ ID NO: 561819 - RNA, 21 nt, Human
agggggcagagggggaguccc

SEQ ID NO: 561820 - RNA, 22 nt, Human
aggucucuuuugcuagcaguuc

SEQ ID NO: 561821 - RNA, 25 nt, Human
auaauaauaaagauucgcaaggcac

SEQ ID NO: 561822 - RNA, 25 nt, Human
auccuuuucuccuuccacgguguuu

SEQ ID NO: 561823 - RNA, 22 nt, Human
caccaucuguacacaagaaagu

SEQ ID NO: 561824 - RNA, 21 nt, Human
cagcacagagggccuagggag

SEQ ID NO: 561825 - RNA, 20 nt, Human
ccaaccuucauccucauuca

SEQ ID NO: 561826 - RNA, 21 nt, Human
ccacagcaauccuacauccac

SEQ ID NO: 561827 - RNA, 21 nt, Human
cccauccuuuucuccuuccac

SEQ ID NO: 561828 - RNA, 19 nt, Human
ccgcugccgcuggcacugu

SEQ ID NO: 561829 - RNA, 21 nt, Human
ccgcugccgcuggcacugugc

SEQ ID NO: 561830 - RNA, 22 nt, Human
ccuacagaaaacaaaagaaaac

SEQ ID NO: 561831 - RNA, 19 nt, Human
ccuacauccacgccccucc

SEQ ID NO: 561832 - RNA, 24 nt, Human
ccuccugccggcuggccuucugaa

SEQ ID NO: 561833 - RNA, 21 nt, Human
ccuuugggccgagccagaaca

SEQ ID NO: 561834 - RNA, 22 nt, Human
cggaggacaggcucucggcccg

SEQ ID NO: 561835 - RNA, 20 nt, Human
gaaagcaagagaagagugag

SEQ ID NO: 561836 - RNA, 18 nt, Human
gaccgucgcccugcccag

SEQ ID NO: 561837 - RNA, 25 nt, Human
gagccagaacacagugcuuggggga

SEQ ID NO: 561838 - RNA, 19 nt, Human
gcaguaauaggagaggcug

SEQ ID NO: 561839 - RNA, 24 nt, Human
gcccgcgugcagccgggagcucac

SEQ ID NO: 561840 - RNA, 18 nt, Human
gcuugggggaagccaccu

SEQ ID NO: 561841 - RNA, 22 nt, Human
ggacagggggcagagggggagu

SEQ ID NO: 561842 - RNA, 19 nt, Human
ggcccgccgggaaggcggg

SEQ ID NO: 561843 - RNA, 24 nt, Human
gggaaggcggcugguugguucagg

SEQ ID NO: 561844 - RNA, 30 nt, Human
gggaaggcggcugguugguucagggggcuu

SEQ ID NO: 561845 - RNA, 21 nt, Human
gggcagagggggagucccuuc

SEQ ID NO: 561846 - RNA, 20 nt, Human
ggggagaggcauucguagug

SEQ ID NO: 561847 - RNA, 24 nt, Human
gugcaacaucucugaagucgaaac

SEQ ID NO: 561848 - RNA, 18 nt, Human
gugcagccgggagcucac

SEQ ID NO: 561849 - RNA, 20 nt, Human
uacagaaaacaaaagaaaac

SEQ ID NO: 561850 - RNA, 24 nt, Human
uacagaaaacaaaagaaaacucgc

SEQ ID NO: 561851 - RNA, 21 nt, Human
uccacagcaauccuacauccc

SEQ ID NO: 561852 - RNA, 22 nt, Human
ucccauccuuuucuccuuccac

SEQ ID NO: 561853 - RNA, 20 nt, Human
uccucaaagugcuuuuucag

SEQ ID NO: 561854 - RNA, 24 nt, Human
uccuugcccgcgugcagccgggag

SEQ ID NO: 561855 - RNA, 18 nt, Human
ucuucugguccaggcugg

SEQ ID NO: 561856 - RNA, 19 nt, Human
ugcugcugcugcuggcguc

SEQ ID NO: 561857 - RNA, 22 nt, Human
ugggaggcccgccgggaaggcg

SEQ ID NO: 561858 - RNA, 22 nt, Human
ugguucagggggcugcuggugc

SEQ ID NO: 561859 - RNA, 18 nt, Human
uguucgcuuuccacagca

SEQ ID NO: 561860 - RNA, 24 nt, Human
uuaagguuccucaaagugcuuuuu

SEQ ID NO: 561861 - RNA, 21 nt, Human
uucauccucauucauugucuu

SEQ ID NO: 561862 - RNA, 23 nt, Human
uuccuacagaaaacaaaagaaaa

SEQ ID NO: 561863 - RNA, 19 nt, Human
uucuucugguccaggcugg

SEQ ID NO: 561864 - RNA, 22 nt, Human
uucuuguuuguuuuguuguuuu

SEQ ID NO: 561865 - RNA, 24 nt, Human
uugacguuugcaccuuuccuacag

SEQ ID NO: 561866 - RNA, 21 nt, Human
uuggucucagcagcgcaguaa

SEQ ID NO: 561867 - RNA, 22 nt, Human
uugguucagggggcugcuggug

SEQ ID NO: 561868 - RNA, 24 nt, Human
uugguucagggggcugcuggugcc

SEQ ID NO: 561869 - RNA, 18 nt, Human
uuguguucgcuuuccaca

SEQ ID NO: 561870 - RNA, 24 nt, Human
uuguuuuguuguuuucaucuugac

SEQ ID NO: 561871 - RNA, 21 nt, Human
uuuguuguuuucaucuugacu

SEQ ID NO: 561872 - RNA, 23 nt, Human
uuuucaucuugacuagcaccauc

SEQ ID NO: 561873 - RNA, 24 nt, Human
uuuucaucuugacuagcaccaucu

SEQ ID NO: 561874 - RNA, 20 nt, Human
aaauauucuaacucuucauu

SEQ ID NO: 561875 - RNA, 24 nt, Human
aagcagagaugguggcagcaggaa

SEQ ID NO: 561876 - RNA, 23 nt, Human
aauauagguccaaaaccguacaa

SEQ ID NO: 561877 - RNA, 18 nt, Human
acacugaaaauauggcau

SEQ ID NO: 561878 - RNA, 20 nt, Human
acagaggggguggugagcug

SEQ ID NO: 561879 - RNA, 20 nt, Human
acuccacaacugucucacca

SEQ ID NO: 561880 - RNA, 20 nt, Human
agacagaggggguggugagc

SEQ ID NO: 561881 - RNA, 19 nt, Human
agaggccaucgagggaggg

SEQ ID NO: 561882 - RNA, 18 nt, Human
agcaggaaggcugggccu

SEQ ID NO: 561883 - RNA, 18 nt, Human
aggaaggcugggccugcu

SEQ ID NO: 561884 - RNA, 26 nt, Human
aggagaaagcaaacagugaaacagaa

SEQ ID NO: 561885 - RNA, 24 nt, Human
agggcugcuuccucugagaugcuu

SEQ ID NO: 561886 - RNA, 22 nt, Human
aucaaaaaggauaaagguggcc

SEQ ID NO: 561887 - RNA, 23 nt, Human
auccauaucaucuuccagccuca

SEQ ID NO: 561888 - RNA, 21 nt, Human
aucgaaaauuaaaagccauaa

SEQ ID NO: 561889 - RNA, 21 nt, Human
caaugcaaaucacaauucuua

SEQ ID NO: 561890 - RNA, 19 nt, Human
caccuugagggcauuuugg

SEQ ID NO: 561891 - RNA, 18 nt, Human
cagcaggaaggcugggcc

SEQ ID NO: 561892 - RNA, 19 nt, Human
caugaaagggcucugcaua

SEQ ID NO: 561893 - RNA, 21 nt, Human
ccauaaaaguguaacacugaa

SEQ ID NO: 561894 - RNA, 24 nt, Human
ccuccaggaccaccccucuccgcc

SEQ ID NO: 561895 - RNA, 23 nt, Human
ccucugagaugcuuaaugacagg

SEQ ID NO: 561896 - RNA, 20 nt, Human
cuccaggaccaccccucucc

SEQ ID NO: 561897 - RNA, 20 nt, Human
cugaaaaaccacaguauaaa

SEQ ID NO: 561898 - RNA, 18 nt, Human
gccaucaaaacgugaaca

SEQ ID NO: 561899 - RNA, 18 nt, Human
gcugcuuccucugagaug

SEQ ID NO: 561900 - RNA, 20 nt, Human
ggccuccaggaccaccccuc

SEQ ID NO: 561901 - RNA, 20 nt, Human
ggggagaagcagagauggug

SEQ ID NO: 561902 - RNA, 21 nt, Human
gugaaacagaaucauggguga

SEQ ID NO: 561903 - RNA, 20 nt, Human
gugaacaauauagguccaaa

SEQ ID NO: 561904 - RNA, 20 nt, Human
uaacaagaaaaguauauuag

SEQ ID NO: 561905 - RNA, 19 nt, Human
uaacacugaaaauauggca

SEQ ID NO: 561906 - RNA, 21 nt, Human
uacccuguuauccuccaccca

SEQ ID NO: 561907 - RNA, 21 nt, Human
uacuccacaacugucucacca

SEQ ID NO: 561908 - RNA, 18 nt, Human
uagcagcaaaaccacagc

SEQ ID NO: 561909 - RNA, 27 nt, Human
uauuucguuuuuuuuaaaagccagggg

SEQ ID NO: 561910 - RNA, 21 nt, Human
ucaaaaaggauaaagguggcc

SEQ ID NO: 561911 - RNA, 18 nt, Human
ucagugccaguacacaug

SEQ ID NO: 561912 - RNA, 18 nt, Human
ucccgggcaggacagaga

SEQ ID NO: 561913 - RNA, 19 nt, Human
ucccgggcaggacagagau

SEQ ID NO: 561914 - RNA, 28 nt, Human
uccgccaucaaaacgugaaccggggucc

SEQ ID NO: 561915 - RNA, 20 nt, Human
uccucuggggagaagcagag

SEQ ID NO: 561916 - RNA, 22 nt, Human
uccucuggggagaagcagagau

SEQ ID NO: 561917 - RNA, 21 nt, Human
ucgcugagccuugaagauggg

SEQ ID NO: 561918 - RNA, 24 nt, Human
ucuaaguuccucuggggagaagca

SEQ ID NO: 561919 - RNA, 22 nt, Human
ucucuuggcauucagucucuga

SEQ ID NO: 561920 - RNA, 21 nt, Human
ucuugcucuguucccaaaugg

SEQ ID NO: 561921 - RNA, 21 nt, Human
ugaaaauauggcaucaaaaag

SEQ ID NO: 561922 - RNA, 23 nt, Human
ugaagcauugggccuccaggacc

SEQ ID NO: 561923 - RNA, 20 nt, Human
ugacucugaagcauugggcc

SEQ ID NO: 561924 - RNA, 18 nt, Human
ugacuuccuggaucaccu

SEQ ID NO: 561925 - RNA, 23 nt, Human
ugcacauuucucuuaaccaugac

SEQ ID NO: 561926 - RNA, 24 nt, Human
ugcuugaguuuuagacagaggggg

SEQ ID NO: 561927 - RNA, 18 nt, Human
uggcagcaggaaggcugg

SEQ ID NO: 561928 - RNA, 19 nt, Human
uggcagcaggaaggcuggg

SEQ ID NO: 561929 - RNA, 22 nt, Human
uggcagcaggaaggcugggccu

SEQ ID NO: 561930 - RNA, 24 nt, Human
uggcagcaggaaggcugggccugc

SEQ ID NO: 561931 - RNA, 21 nt, Human
ugggccuccaggaccaccccu

SEQ ID NO: 561932 - RNA, 22 nt, Human
uuccagccucagucgcugagcc

SEQ ID NO: 561933 - RNA, 24 nt, Human
uuccucuggggagaagcagagaug

SEQ ID NO: 561934 - RNA, 21 nt, Human
uugcucugcgcccucucucca

SEQ ID NO: 561935 - RNA, 22 nt, Human
uugcuugaguuuuagacagagg

SEQ ID NO: 561936 - RNA, 18 nt, Human
uuuaccgaguucucuugg

SEQ ID NO: 561937 - RNA, 19 nt, Human
uuuaccgaguucucuuggc

SEQ ID NO: 561938 - RNA, 22 nt, Human
aaacacaaaacgaacauaaaac

SEQ ID NO: 561939 - RNA, 27 nt, Human
aaaguuguguuccucagggguucguaa

SEQ ID NO: 561940 - RNA, 22 nt, Human
aaccacacagaugucaaccacc

SEQ ID NO: 561941 - RNA, 19 nt, Human
aagaauauagacauacugc

SEQ ID NO: 561942 - RNA, 18 nt, Human
aagugcagguugaacacu

SEQ ID NO: 561943 - RNA, 19 nt, Human
acacugguuaaaauacuga

SEQ ID NO: 561944 - RNA, 20 nt, Human
acugaaauuaccagcaaaau

SEQ ID NO: 561945 - RNA, 24 nt, Human
acugcagccuuugacuuuaacauc

SEQ ID NO: 561946 - RNA, 24 nt, Human
agaacuauagggcuacaagaaaau

SEQ ID NO: 561947 - RNA, 18 nt, Human
agaagucaagauaauagu

SEQ ID NO: 561948 - RNA, 23 nt, Human
agacugaauacauuuaugaacaa

SEQ ID NO: 561949 - RNA, 22 nt, Human
agcaaaaugauggaauaucuuu

SEQ ID NO: 561950 - RNA, 20 nt, Human
agcaagcuaaggaccagggg

SEQ ID NO: 561951 - RNA, 23 nt, Human
agcauuugaaauguuaauaugag

SEQ ID NO: 561952 - RNA, 20 nt, Human
agucuucaaacuggcaauuc

SEQ ID NO: 561953 - RNA, 19 nt, Human
caaaaauuauuuugaugac

SEQ ID NO: 561954 - RNA, 24 nt, Human
caagaaaaucccacaaguuuauag

SEQ ID NO: 561955 - RNA, 24 nt, Human
caagcuaaggaccaggggcaacua

SEQ ID NO: 561956 - RNA, 25 nt, Human
caaguuuauagcuuaacuggaauca

SEQ ID NO: 561957 - RNA, 20 nt, Human
cacuauuuaaacucacauua

SEQ ID NO: 561958 - RNA, 19 nt, Human
cagucuucaaacuggcaau

SEQ ID NO: 561959 - RNA, 20 nt, Human
caguuacugaaauuaccagc

SEQ ID NO: 561960 - RNA, 23 nt, Human
ccaccgggccuugcaaaugcaga

SEQ ID NO: 561961 - RNA, 25 nt, Human
ccuuugacuuuaacaucaacacacu

SEQ ID NO: 561962 - RNA, 18 nt, Human
cgaaccacacaaagucac

SEQ ID NO: 561963 - RNA, 22 nt, Human
cuaaacacaaaacgaacauaaa

SEQ ID NO: 561964 - RNA, 18 nt, Human
gaacagucuucaaacugg

SEQ ID NO: 561965 - RNA, 20 nt, Human
gaacauaaauuaccagaagu

SEQ ID NO: 561966 - RNA, 18 nt, Human
gcuaaaguuguguuccuc

SEQ ID NO: 561967 - RNA, 23 nt, Human
gguaucgcuaaaguuguguuccu

SEQ ID NO: 561968 - RNA, 21 nt, Human
guccauggaaaguuacucuug

SEQ ID NO: 561969 - RNA, 22 nt, Human
uaagguaagcaagguaaauucc

SEQ ID NO: 561970 - RNA, 22 nt, Human
uaauaacuuuagagcucaugua

SEQ ID NO: 561971 - RNA, 23 nt, Human
uacugaaacuaccaaugaguaca

SEQ ID NO: 561972 - RNA, 20 nt, Human
uacugagaaauucgaaccac

SEQ ID NO: 561973 - RNA, 19 nt, Human
uauaaagaauaaaagacug

SEQ ID NO: 561974 - RNA, 24 nt, Human
ucaaccaccgggccuugcaaaugc

SEQ ID NO: 561975 - RNA, 26 nt, Human
ucccuuauacacaaaaauuauuuuga

SEQ ID NO: 561976 - RNA, 21 nt, Human
ugaacauaaauuaccagaagu

SEQ ID NO: 561977 - RNA, 24 nt, Human
ugagauacaauuucacuauuuaaa

SEQ ID NO: 561978 - RNA, 26 nt, Human
uuaacauuuacacacaauuauaaaga

SEQ ID NO: 561979 - RNA, 26 nt, Human
uuuaacuucuuuaauaauucacucaa

SEQ ID NO: 561980 - RNA, 22 nt, Human
uuuuucaauaaugaaucugaaa

SEQ ID NO: 561981 - RNA, 27 nt, Human
aaacaaaaaguggaacaaagucuccaa

SEQ ID NO: 561982 - RNA, 23 nt, Human
aagcaaaacaauauuuuuacugg

SEQ ID NO: 561983 - RNA, 20 nt, Human
caacaauagaggucaguggc

SEQ ID NO: 561984 - RNA, 24 nt, Human
cauacaaaaacaaauuucaucaaa

SEQ ID NO: 561985 - RNA, 22 nt, Human
ccauacaaaaacaaauuucauc

SEQ ID NO: 561986 - RNA, 19 nt, Human
cugacuuucacuacaggaa

SEQ ID NO: 561987 - RNA, 23 nt, Human
uacaaaaacaaauuucaucaaag

SEQ ID NO: 561988 - RNA, 23 nt, Human
uccuguguggcuuuugucucuuc

SEQ ID NO: 561989 - RNA, 19 nt, Human
uguguacagaugaagcaaa

SEQ ID NO: 561990 - RNA, 19 nt, Human
uuguccacacuggcuuugu

SEQ ID NO: 561991 - RNA, 23 nt, Human
aaaaacaucuccacccaacccuc

SEQ ID NO: 561992 - RNA, 19 nt, Human
aaaaaggccacccucuggc

SEQ ID NO: 561993 - RNA, 23 nt, Human
aaaaaggccacccucuggccuuu

SEQ ID NO: 561994 - RNA, 18 nt, Human
aaccuggagccaggggcu

SEQ ID NO: 561995 - RNA, 18 nt, Human
aagcacugcagaugugaa

SEQ ID NO: 561996 - RNA, 18 nt, Human
aaggagcguuuggggaug

SEQ ID NO: 561997 - RNA, 25 nt, Human
aagucaaaaaaggaacacaaggcag

SEQ ID NO: 561998 - RNA, 18 nt, Human
aauaugccacccaccuuc

SEQ ID NO: 561999 - RNA, 18 nt, Human
accucuucuggccugugu

SEQ ID NO: 562000 - RNA, 23 nt, Human
acuguuuggggaaaaaggccacc

SEQ ID NO: 562001 - RNA, 24 nt, Human
agagagagggaaggaagcaaagag

SEQ ID NO: 562002 - RNA, 22 nt, Human
agagagggaaggaagcaaagag

SEQ ID NO: 562003 - RNA, 18 nt, Human
agagcacacaaauaaaac

SEQ ID NO: 562004 - RNA, 18 nt, Human
agagcucaaacuuggcug

SEQ ID NO: 562005 - RNA, 20 nt, Human
agagggaaggaagcaaagag

SEQ ID NO: 562006 - RNA, 18 nt, Human
agaguccuccacccccuc

SEQ ID NO: 562007 - RNA, 21 nt, Human
aggaggcagggaaccuggagc

SEQ ID NO: 562008 - RNA, 20 nt, Human
aggcaggcuccggcucccuc

SEQ ID NO: 562009 - RNA, 22 nt, Human
aggcaggcuccggcucccucca

SEQ ID NO: 562010 - RNA, 21 nt, Human
aggcgaagcgcgcgcagcagc

SEQ ID NO: 562011 - RNA, 21 nt, Human
aggcuccggcucccuccaccc

SEQ ID NO: 562012 - RNA, 22 nt, Human
agggaaccuggagccaggggcu

SEQ ID NO: 562013 - RNA, 19 nt, Human
agggaaggaagcaaagagg

SEQ ID NO: 562014 - RNA, 21 nt, Human
aggugaccacccgcuuaaauc

SEQ ID NO: 562015 - RNA, 27 nt, Human
aggugaccacccgcuuaaauccagagc

SEQ ID NO: 562016 - RNA, 24 nt, Human
agugcaaaggccacgagggaaaga

SEQ ID NO: 562017 - RNA, 18 nt, Human
auacugaacccuucugca

SEQ ID NO: 562018 - RNA, 18 nt, Human
aucuggaagaaaucaggg

SEQ ID NO: 562019 - RNA, 19 nt, Human
caaacaauacuccaggacu

SEQ ID NO: 562020 - RNA, 18 nt, Human
caaagaggagccgccucc

SEQ ID NO: 562021 - RNA, 18 nt, Human
caaaggccacgagggaaa

SEQ ID NO: 562022 - RNA, 20 nt, Human
caaauaaaacgucccaucug

SEQ ID NO: 562023 - RNA, 21 nt, Human
cacaagucaaaaaaggaacac

SEQ ID NO: 562024 - RNA, 28 nt, Human
cacaagucaaaaaaggaacacaaggcag

SEQ ID NO: 562025 - RNA, 18 nt, Human
cacacaaauaaaacgucc

SEQ ID NO: 562026 - RNA, 18 nt, Human
cacccaacccuccugcca

SEQ ID NO: 562027 - RNA, 19 nt, Human
cacccgcuuaaauccagag

SEQ ID NO: 562028 - RNA, 21 nt, Human
caccugaacuggcccccaggg

SEQ ID NO: 562029 - RNA, 24 nt, Human
cagagccuucuuuucuguccaaag

SEQ ID NO: 562030 - RNA, 20 nt, Human
cagcagauggcccccucccc

SEQ ID NO: 562031 - RNA, 20 nt, Human
cagcagauggcccccucccc

SEQ ID NO: 562032 - RNA, 21 nt, Human
cagcagauggcccccucccca

SEQ ID NO: 562033 - RNA, 19 nt, Human
caggaacaauguguaccug

SEQ ID NO: 562034 - RNA, 24 nt, Human
caggcuccggcucccuccaccccc

SEQ ID NO: 562035 - RNA, 20 nt, Human
caggggcugccuggcagggc

SEQ ID NO: 562036 - RNA, 21 nt, Human
cagguccccaauaugccaccc

SEQ ID NO: 562037 - RNA, 23 nt, Human
caggugaccacccgcuuaaaucc

SEQ ID NO: 562038 - RNA, 28 nt, Human
cagguuaugcgcccauuccccugaaagg

SEQ ID NO: 562039 - RNA, 19 nt, Human
cagucaagggagagcacac

SEQ ID NO: 562040 - RNA, 20 nt, Human
cagucccaagguagaccugg

SEQ ID NO: 562041 - RNA, 22 nt, Human
ccaagguagaccuggucucaca

SEQ ID NO: 562042 - RNA, 18 nt, Human
ccacccaacccuccugcc

SEQ ID NO: 562043 - RNA, 22 nt, Human
ccacccacuacugugaaauuuc

SEQ ID NO: 562044 - RNA, 19 nt, Human
ccaccugaacuggccccca

SEQ ID NO: 562045 - RNA, 25 nt, Human
ccagagccuucuuuucuguccaaag

SEQ ID NO: 562046 - RNA, 26 nt, Human
cccaagguagaccuggucucacaggu

SEQ ID NO: 562047 - RNA, 22 nt, Human
ccccaaagcguaguucccuuca

SEQ ID NO: 562048 - RNA, 21 nt, Human
ccccagaggcaggggagaguc

SEQ ID NO: 562049 - RNA, 21 nt, Human
ccccuaaacuggucagcgcag

SEQ ID NO: 562050 - RNA, 19 nt, Human
cccggcgcagccaagcucu

SEQ ID NO: 562051 - RNA, 18 nt, Human
cccuaaacuggucagcgc

SEQ ID NO: 562052 - RNA, 20 nt, Human
cccuccccagaggcagggga

SEQ ID NO: 562053 - RNA, 21 nt, Human
ccuccaggagcauucugacuu

SEQ ID NO: 562054 - RNA, 20 nt, Human
ccuugcacucagaaagaccc

SEQ ID NO: 562055 - RNA, 19 nt, Human
cgcuggacaagagucugca

SEQ ID NO: 562056 - RNA, 20 nt, Human
cgugguaucugucagagccu

SEQ ID NO: 562057 - RNA, 22 nt, Human
cuacaggucuacacuaauggaa

SEQ ID NO: 562058 - RNA, 18 nt, Human
cucacaggugaccacccg

SEQ ID NO: 562059 - RNA, 19 nt, Human
cuccggcucccuccacccc

SEQ ID NO: 562060 - RNA, 18 nt, Human
cuggagccaggggcugcc

SEQ ID NO: 562061 - RNA, 18 nt, Human
cuggcccccaggguugcc

SEQ ID NO: 562062 - RNA, 25 nt, Human
cugguacacacugauccuauggggg

SEQ ID NO: 562063 - RNA, 18 nt, Human
cugugcucuucagaucug

SEQ ID NO: 562064 - RNA, 21 nt, Human
cuucgcaccuccuccucgaga

SEQ ID NO: 562065 - RNA, 19 nt, Human
gaaagaccuuuuaaccaga

SEQ ID NO: 562066 - RNA, 19 nt, Human
gaccucuucuggccugugu

SEQ ID NO: 562067 - RNA, 22 nt, Human
gagagagggaaggaagcaaaga

SEQ ID NO: 562068 - RNA, 18 nt, Human
gagcaagagcugaaggcg

SEQ ID NO: 562069 - RNA, 22 nt, Human
gagcugaaggcgaggagagcgc

SEQ ID NO: 562070 - RNA, 21 nt, Human
gaggagaagcuggagggagua

SEQ ID NO: 562071 - RNA, 19 nt, Human
gaggagccgccucccuucc

SEQ ID NO: 562072 - RNA, 23 nt, Human
gcagcuugacgagcugagcuggg

SEQ ID NO: 562073 - RNA, 21 nt, Human
gccccagagcgccaaggccuc

SEQ ID NO: 562074 - RNA, 21 nt, Human
gcucaaacuuggcuguguaac

SEQ ID NO: 562075 - RNA, 20 nt, Human
ggagagagagggaaggaagc

SEQ ID NO: 562076 - RNA, 18 nt, Human
ggaggagagagagggaag

SEQ ID NO: 562077 - RNA, 20 nt, Human
gggaagcuggggaaaugagg

SEQ ID NO: 562078 - RNA, 24 nt, Human
gggaugguaguggggagacaggcc

SEQ ID NO: 562079 - RNA, 20 nt, Human
ggggguagguuagccagagg

SEQ ID NO: 562080 - RNA, 22 nt, Human
gggggugggaggagagagaggg

SEQ ID NO: 562081 - RNA, 19 nt, Human
gguaguggggagacaggcc

SEQ ID NO: 562082 - RNA, 24 nt, Human
ggugaccacccgcuuaaauccaga

SEQ ID NO: 562083 - RNA, 19 nt, Human
ggugaugaacgaggaaggg

SEQ ID NO: 562084 - RNA, 27 nt, Human
gguggcuacaggucuacacuaauggaa

SEQ ID NO: 562085 - RNA, 18 nt, Human
guaguucccuucacuggc

SEQ ID NO: 562086 - RNA, 19 nt, Human
guaguucccuucacuggcu

SEQ ID NO: 562087 - RNA, 29 nt, Human
gucaaaaaaggaacacaaggcaggcuccc

SEQ ID NO: 562088 - RNA, 22 nt, Human
guccacaggaaccacgccccaa

SEQ ID NO: 562089 - RNA, 20 nt, Human
gugaaacgggggcgugcccc

SEQ ID NO: 562090 - RNA, 24 nt, Human
gugggaggagagagagggaaggaa

SEQ ID NO: 562091 - RNA, 22 nt, Human
uaaaaacaucuccacccaaccc

SEQ ID NO: 562092 - RNA, 25 nt, Human
uaaaaacaucuccacccaacccucc

SEQ ID NO: 562093 - RNA, 20 nt, Human
uaaaaggaaccaaacuguuu

SEQ ID NO: 562094 - RNA, 21 nt, Human
uaaaaggaaccaaacuguuug

SEQ ID NO: 562095 - RNA, 20 nt, Human
uaagccccuaaacuggucag

SEQ ID NO: 562096 - RNA, 24 nt, Human
uaagccccuaaacuggucagcgca

SEQ ID NO: 562097 - RNA, 21 nt, Human
uaggcugaagcccccaaagcg

SEQ ID NO: 562098 - RNA, 23 nt, Human
ucagagccuuaaaacaggcccac

SEQ ID NO: 562099 - RNA, 23 nt, Human
uccaccagcaggcacuccaguua

SEQ ID NO: 562100 - RNA, 23 nt, Human
ucccagguccccaauaugccacc

SEQ ID NO: 562101 - RNA, 19 nt, Human
uccuaugggggugggagga

SEQ ID NO: 562102 - RNA, 23 nt, Human
ucgcaccucucgaggcucaaauc

SEQ ID NO: 562103 - RNA, 21 nt, Human
ucgccaaaagcgucgcgcacu

SEQ ID NO: 562104 - RNA, 26 nt, Human
ucgccugaagaccucuucuggccugu

SEQ ID NO: 562105 - RNA, 22 nt, Human
ucuaggcugaagcccccaaagc

SEQ ID NO: 562106 - RNA, 19 nt, Human
ucugcuaaaaacaucucca

SEQ ID NO: 562107 - RNA, 24 nt, Human
ucugggucugaguuuccccaucug

SEQ ID NO: 562108 - RNA, 23 nt, Human
ucuugcagcucugaaacggcuuc

SEQ ID NO: 562109 - RNA, 23 nt, Human
ugaaaaaugucacaagucaaaaa

SEQ ID NO: 562110 - RNA, 24 nt, Human
ugaaaaaugucacaagucaaaaaa

SEQ ID NO: 562111 - RNA, 21 nt, Human
ugaaauuugaucuccuccuuc

SEQ ID NO: 562112 - RNA, 22 nt, Human
ugagacagcagagcauaagucc

SEQ ID NO: 562113 - RNA, 19 nt, Human
ugagaggagaagcuggagg

SEQ ID NO: 562114 - RNA, 24 nt, Human
ugcaaaggccacgagggaaagacc

SEQ ID NO: 562115 - RNA, 18 nt, Human
ugccagaagggggaaggc

SEQ ID NO: 562116 - RNA, 21 nt, Human
ugccagaagggggaaggucgg

SEQ ID NO: 562117 - RNA, 24 nt, Human
ugccagaagggggaaggucgguuc

SEQ ID NO: 562118 - RNA, 22 nt, Human
uggaagaaaucagggaagcugg

SEQ ID NO: 562119 - RNA, 21 nt, Human
uggaaugucucuguggucuug

SEQ ID NO: 562120 - RNA, 18 nt, Human
uggagggaguauggggcc

SEQ ID NO: 562121 - RNA, 21 nt, Human
uggagggaguauggggccugg

SEQ ID NO: 562122 - RNA, 22 nt, Human
uggagggaguauggggccuggu

SEQ ID NO: 562123 - RNA, 21 nt, Human
uggcaggcaucugcuaagccc

SEQ ID NO: 562124 - RNA, 19 nt, Human
uggcccccaggguugccuu

SEQ ID NO: 562125 - RNA, 21 nt, Human
ugggaggagagagagggaagg

SEQ ID NO: 562126 - RNA, 23 nt, Human
ugggaugaacauuugagccgcug

SEQ ID NO: 562127 - RNA, 19 nt, Human
uggggaugguaguggggag

SEQ ID NO: 562128 - RNA, 23 nt, Human
ugggggugggaggagagagaggg

SEQ ID NO: 562129 - RNA, 21 nt, Human
ugucacaagucaaaaaaggaa

SEQ ID NO: 562130 - RNA, 19 nt, Human
uguccaaagccacugaaau

SEQ ID NO: 562131 - RNA, 24 nt, Human
uguccaaagccacugaaauuugau

SEQ ID NO: 562132 - RNA, 20 nt, Human
uuaagagcucaaacuuggcu

SEQ ID NO: 562133 - RNA, 21 nt, Human
uuaauuugcucaagaucgcug

SEQ ID NO: 562134 - RNA, 22 nt, Human
uuaugcgcccauuccgagaccc

SEQ ID NO: 562135 - RNA, 20 nt, Human
uucacacauucccagguccc

SEQ ID NO: 562136 - RNA, 19 nt, Human
uucauucuuaaggauaucg

SEQ ID NO: 562137 - RNA, 20 nt, Human
uucccccucuuucuaaggaa

SEQ ID NO: 562138 - RNA, 24 nt, Human
uucugcaguguaguacacguugcu

SEQ ID NO: 562139 - RNA, 22 nt, Human
uugccucucucucaacacaagg

SEQ ID NO: 562140 - RNA, 23 nt, Human
uuggggaaaaaggccacccucug

SEQ ID NO: 562141 - RNA, 19 nt, Human
uuuugcggcuuaaagagau

SEQ ID NO: 562142 - RNA, 18 nt, Human
uuuuuuuuuuuuuugcgg

SEQ ID NO: 562143 - RNA, 21 nt, Human
uuuuuuuuuuuuuuuuugcgg

SEQ ID NO: 562144 - RNA, 23 nt, Human
uuuuuuuuuuuuuuuuugcggcu

SEQ ID NO: 562145 - RNA, 27 nt, Human
uuuuuuuuuuuuuuuuuuuuuuugggg

SEQ ID NO: 562146 - RNA, 24 nt, Human
aaaaaccccuuaaaugcgcuccac

SEQ ID NO: 562147 - RNA, 21 nt, Human
aaaauaaauguauacaaggca

SEQ ID NO: 562148 - RNA, 23 nt, Human
aaagaaaauaaauguauacaagg

SEQ ID NO: 562149 - RNA, 21 nt, Human
aagcaaaacaaacaaccacaa

SEQ ID NO: 562150 - RNA, 26 nt, Human
aagcaaaacaaacaaccacaaucuaa

SEQ ID NO: 562151 - RNA, 23 nt, Human
aauccccccccgcccgccgccau

SEQ ID NO: 562152 - RNA, 23 nt, Human
acaaacaaccacaaucuaaacca

SEQ ID NO: 562153 - RNA, 23 nt, Human
accacaaucuaaaccagccgcga

SEQ ID NO: 562154 - RNA, 18 nt, Human
accgccaaaaaacgugga

SEQ ID NO: 562155 - RNA, 18 nt, Human
agaaagaaaauaaaugua

SEQ ID NO: 562156 - RNA, 18 nt, Human
agaaagaaaauaaauguu

SEQ ID NO: 562157 - RNA, 19 nt, Human
agaagagacuaguuaagug

SEQ ID NO: 562158 - RNA, 20 nt, Human
agaauccccccccgcccgcc

SEQ ID NO: 562159 - RNA, 26 nt, Human
agcugaacuccugcgggaugguuccg

SEQ ID NO: 562160 - RNA, 18 nt, Human
aggaggcuguguggggca

SEQ ID NO: 562161 - RNA, 21 nt, Human
aggaggcuguguggggcaaca

SEQ ID NO: 562162 - RNA, 21 nt, Human
aggcagcaucucuuuccaaag

SEQ ID NO: 562163 - RNA, 22 nt, Human
aggcagcaucucuuuccaaagc

SEQ ID NO: 562164 - RNA, 19 nt, Human
auacaaggcagcagucaca

SEQ ID NO: 562165 - RNA, 23 nt, Human
auccaaauggcuccaugcacagc

SEQ ID NO: 562166 - RNA, 19 nt, Human
aucuaaaccagccgcgagg

SEQ ID NO: 562167 - RNA, 20 nt, Human
augugguccacagauucacc

SEQ ID NO: 562168 - RNA, 24 nt, Human
caacaaaaaccccuuaaaugcgcu

SEQ ID NO: 562169 - RNA, 22 nt, Human
caaggcagcagucacaacaaaa

SEQ ID NO: 562170 - RNA, 24 nt, Human
caaggcagcagucacaacaaaaac

SEQ ID NO: 562171 - RNA, 24 nt, Human
cacacuagaaaauaucagcugaac

SEQ ID NO: 562172 - RNA, 23 nt, Human
cagcuggccccuccgcuucucaa

SEQ ID NO: 562173 - RNA, 22 nt, Human
cagucuuaguagaagcaaaaca

SEQ ID NO: 562174 - RNA, 21 nt, Human
ccacacccuugaauguggucc

SEQ ID NO: 562175 - RNA, 20 nt, Human
ccacagauucaccagcucca

SEQ ID NO: 562176 - RNA, 21 nt, Human
cccccccgcccgccgccaucc

SEQ ID NO: 562177 - RNA, 21 nt, Human
ccccgcccgccgccauccaaa

SEQ ID NO: 562178 - RNA, 20 nt, Human
cccgugcggauggcugcggu

SEQ ID NO: 562179 - RNA, 18 nt, Human
cccucaaagaacaacagc

SEQ ID NO: 562180 - RNA, 22 nt, Human
ccugagccucaccgcuuaguuc

SEQ ID NO: 562181 - RNA, 18 nt, Human
ccugcagcaggaggcugu

SEQ ID NO: 562182 - RNA, 25 nt, Human
ccugcagcaggaggcuguguggggc

SEQ ID NO: 562183 - RNA, 24 nt, Human
cgaggccucccgugcggauggcug

SEQ ID NO: 562184 - RNA, 18 nt, Human
cgcccgaacuaggguggg

SEQ ID NO: 562185 - RNA, 22 nt, Human
cuccaugcacagcuggccccuc

SEQ ID NO: 562186 - RNA, 24 nt, Human
cucccauucccucucugagccuua

SEQ ID NO: 562187 - RNA, 21 nt, Human
cucccgugcggauggcugcgg

SEQ ID NO: 562188 - RNA, 20 nt, Human
cucugcgagagccgccaccu

SEQ ID NO: 562189 - RNA, 24 nt, Human
gacagcaaacacaaaacuuguuuc

SEQ ID NO: 562190 - RNA, 18 nt, Human
gcggcucugccuccgccc

SEQ ID NO: 562191 - RNA, 20 nt, Human
gcugcgguggaagggcccgc

SEQ ID NO: 562192 - RNA, 24 nt, Human
ggaagaugccugugccacacccuu

SEQ ID NO: 562193 - RNA, 22 nt, Human
gggaggagggcgaggcccaguu

SEQ ID NO: 562194 - RNA, 18 nt, Human
ggugugagagacaggagg

SEQ ID NO: 562195 - RNA, 19 nt, Human
ggugugagagacaggaggg

SEQ ID NO: 562196 - RNA, 22 nt, Human
uaaacacagagggaagagccag

SEQ ID NO: 562197 - RNA, 24 nt, Human
uacaaggcagcagucacaacaaaa

SEQ ID NO: 562198 - RNA, 18 nt, Human
uacagagaaucccccccc

SEQ ID NO: 562199 - RNA, 20 nt, Human
uagaagcaaaacaaacaacc

SEQ ID NO: 562200 - RNA, 22 nt, Human
uagacagcaaacacaaaacuug

SEQ ID NO: 562201 - RNA, 21 nt, Human
uaguagaagcaaaacaaacaa

SEQ ID NO: 562202 - RNA, 26 nt, Human
uaguagaagcaaaacaaacaaccaca

SEQ ID NO: 562203 - RNA, 19 nt, Human
ucaaagaacaacagcauca

SEQ ID NO: 562204 - RNA, 22 nt, Human
ucaaagaacaacagcaucaggg

SEQ ID NO: 562205 - RNA, 24 nt, Human
ucaccagcuccaaggcagcaucuc

SEQ ID NO: 562206 - RNA, 20 nt, Human
ucagugggaggagggcgagg

SEQ ID NO: 562207 - RNA, 19 nt, Human
uccaaagcaccugcagcag

SEQ ID NO: 562208 - RNA, 21 nt, Human
uccacaaaaucucucgcccca

SEQ ID NO: 562209 - RNA, 19 nt, Human
ugaaacaaaacagucuuag

SEQ ID NO: 562210 - RNA, 21 nt, Human
ugagagacaggagggagcgug

SEQ ID NO: 562211 - RNA, 20 nt, Human
ugcagcaggaggcugugugg

SEQ ID NO: 562212 - RNA, 22 nt, Human
ugccuccgccccuuggagaucu

SEQ ID NO: 562213 - RNA, 24 nt, Human
ugccuccgccccuuggagaucugc

SEQ ID NO: 562214 - RNA, 22 nt, Human
uguauacaaggcagcagucaca

SEQ ID NO: 562215 - RNA, 19 nt, Human
uuaagcccucaaagaacaa

SEQ ID NO: 562216 - RNA, 23 nt, Human
uuuccuagcuggaaaggagaaug

SEQ ID NO: 562217 - RNA, 19 nt, Human
aaacauuaacacacgugga

SEQ ID NO: 562218 - RNA, 18 nt, Human
acaauuuuguuacacaau

SEQ ID NO: 562219 - RNA, 19 nt, Human
acagcggcaccagugagcg

SEQ ID NO: 562220 - RNA, 19 nt, Human
accugcaauaaccaaucug

SEQ ID NO: 562221 - RNA, 20 nt, Human
acuauuugagccuuauauac

SEQ ID NO: 562222 - RNA, 21 nt, Human
agccauaguacugcuccacag

SEQ ID NO: 562223 - RNA, 18 nt, Human
agccaugacagcggcacc

SEQ ID NO: 562224 - RNA, 25 nt, Human
auuuuguuacacaauuauacacauu

SEQ ID NO: 562225 - RNA, 18 nt, Human
caaucuauccacuucccu

SEQ ID NO: 562226 - RNA, 22 nt, Human
cagaaaagcagcuggcaucuuc

SEQ ID NO: 562227 - RNA, 23 nt, Human
cagaggagaaugaugaugggcac

SEQ ID NO: 562228 - RNA, 22 nt, Human
cagcagcaucucgagcugaauu

SEQ ID NO: 562229 - RNA, 19 nt, Human
cagcaucucgagcugaauu

SEQ ID NO: 562230 - RNA, 21 nt, Human
cagugauuaauggaaucuucu

SEQ ID NO: 562231 - RNA, 22 nt, Human
cccucuguccuggagaucucac

SEQ ID NO: 562232 - RNA, 23 nt, Human
cguccucgauggaguccccguca

SEQ ID NO: 562233 - RNA, 22 nt, Human
cuccucugucaccagggcugga

SEQ ID NO: 562234 - RNA, 22 nt, Human
cugcuaaaucauuuaauauuuc

SEQ ID NO: 562235 - RNA, 23 nt, Human
cugcugagaauagauuccuucug

SEQ ID NO: 562236 - RNA, 19 nt, Human
cuggaacuguugcaggucc

SEQ ID NO: 562237 - RNA, 25 nt, Human
cuggcaucuucacuuuuugcaguga

SEQ ID NO: 562238 - RNA, 20 nt, Human
gaccuugcuuauagcaguuc

SEQ ID NO: 562239 - RNA, 23 nt, Human
gacggggucuccucugucaccag

SEQ ID NO: 562240 - RNA, 24 nt, Human
gagcaaacuguucuuugauaauag

SEQ ID NO: 562241 - RNA, 19 nt, Human
gcucuuugccacucagcgg

SEQ ID NO: 562242 - RNA, 19 nt, Human
uaacacacguggagacugc

SEQ ID NO: 562243 - RNA, 18 nt, Human
uaccugcaauaaccaauc

SEQ ID NO: 562244 - RNA, 22 nt, Human
uaccugcaauaaccaaucuguu

SEQ ID NO: 562245 - RNA, 20 nt, Human
ucagcagaggagaaugauga

SEQ ID NO: 562246 - RNA, 19 nt, Human
ucagcggcucuccuuuuuc

SEQ ID NO: 562247 - RNA, 18 nt, Human
ucaggcucucaggguccg

SEQ ID NO: 562248 - RNA, 22 nt, Human
uccuccaguuugcggcagaggu

SEQ ID NO: 562249 - RNA, 24 nt, Human
ucucaaucuucugcacagcagcau

SEQ ID NO: 562250 - RNA, 23 nt, Human
ucucaggguccggugggguguag

SEQ ID NO: 562251 - RNA, 21 nt, Human
ucuccucugucaccagggcug

SEQ ID NO: 562252 - RNA, 23 nt, Human
ucuccucugucaccagggcugga

SEQ ID NO: 562253 - RNA, 24 nt, Human
ugaaaucucggauucuucuccagg

SEQ ID NO: 562254 - RNA, 22 nt, Human
ugacagcggcaccagugagcga

SEQ ID NO: 562255 - RNA, 22 nt, Human
ugagaauagauuccuucuguac

SEQ ID NO: 562256 - RNA, 21 nt, Human
ugagacggggucuccucuguc

SEQ ID NO: 562257 - RNA, 18 nt, Human
ugcgugcccuaugcccug

SEQ ID NO: 562258 - RNA, 21 nt, Human
uguagccaugacagcggcacc

SEQ ID NO: 562259 - RNA, 21 nt, Human
uguucuuugauaauagucuca

SEQ ID NO: 562260 - RNA, 22 nt, Human
uuccucaggcucucaggguccg

SEQ ID NO: 562261 - RNA, 22 nt, Human
uucucaauugcuuuaugccgcu

SEQ ID NO: 562262 - RNA, 20 nt, Human
uugcagaaaagcagcuggca

SEQ ID NO: 562263 - RNA, 18 nt, Human
uuuaggcugugauaccug

SEQ ID NO: 562264 - RNA, 23 nt, Human
uuugcagaaaagcagcuggcauc

SEQ ID NO: 562265 - RNA, 27 nt, Human
uuuucgcauugucauugcucuuugcca

SEQ ID NO: 562266 - RNA, 25 nt, Human
aaaacauccaaaacagacaugaggg

SEQ ID NO: 562267 - RNA, 18 nt, Human
aaacauccaaaacagaca

SEQ ID NO: 562268 - RNA, 19 nt, Human
aagaaaacauuuuaugggc

SEQ ID NO: 562269 - RNA, 19 nt, Human
aagccaauuaacgcucaag

SEQ ID NO: 562270 - RNA, 18 nt, Human
acacaaaacauccaaaac

SEQ ID NO: 562271 - RNA, 23 nt, Human
agaauuucuccacaguuccacau

SEQ ID NO: 562272 - RNA, 19 nt, Human
caaaacagacaugaggggc

SEQ ID NO: 562273 - RNA, 23 nt, Human
caagaaaacauuuuaugggcacc

SEQ ID NO: 562274 - RNA, 22 nt, Human
cacaguuccacaucuugagacc

SEQ ID NO: 562275 - RNA, 23 nt, Human
ccauaauguuugcuguccucgau

SEQ ID NO: 562276 - RNA, 25 nt, Human
cccgggccggaggaagaccgggguc

SEQ ID NO: 562277 - RNA, 24 nt, Human
ccuccacaccucuaucugaacaaa

SEQ ID NO: 562278 - RNA, 21 nt, Human
ccuuuuaugggcauuugagau

SEQ ID NO: 562279 - RNA, 19 nt, Human
cuccacaccucuaucugaa

SEQ ID NO: 562280 - RNA, 20 nt, Human
cuccacaccucuaucugaac

SEQ ID NO: 562281 - RNA, 20 nt, Human
cuuguucauguccuagaauu

SEQ ID NO: 562282 - RNA, 20 nt, Human
gcguggggugggcggagccc

SEQ ID NO: 562283 - RNA, 23 nt, Human
gggccagggcccgggccggagga

SEQ ID NO: 562284 - RNA, 23 nt, Human
uaaauaaauaagccaauuaacgc

SEQ ID NO: 562285 - RNA, 19 nt, Human
uaccauaguccaaaaagac

SEQ ID NO: 562286 - RNA, 23 nt, Human
uaggaaagggcgggcuuguagug

SEQ ID NO: 562287 - RNA, 26 nt, Human
uaucaaguuucaauuugacaugucaa

SEQ ID NO: 562288 - RNA, 18 nt, Human
ucaaauuaaaagagaaag

SEQ ID NO: 562289 - RNA, 26 nt, Human
ucaaucaaauuaaaagagaaagacau

SEQ ID NO: 562290 - RNA, 20 nt, Human
ugaaaggauagcuuguucau

SEQ ID NO: 562291 - RNA, 23 nt, Human
ugacaugucaaaacaaaaguuuu

SEQ ID NO: 562292 - RNA, 23 nt, Human
uggagagacacaaaacauccaaa

SEQ ID NO: 562293 - RNA, 19 nt, Human
uggggugggcggagcccgg

SEQ ID NO: 562294 - RNA, 20 nt, Human
uuccacaucuugagaccaag

SEQ ID NO: 562295 - RNA, 23 nt, Human
aacaaucacugggcuuccaucau

SEQ ID NO: 562296 - RNA, 21 nt, Human
aaggcuggguccgcgggcggg

SEQ ID NO: 562297 - RNA, 18 nt, Human
agcaggaauuuacauaua

SEQ ID NO: 562298 - RNA, 21 nt, Human
agcuggaagccacccaacugu

SEQ ID NO: 562299 - RNA, 19 nt, Human
aggcuggguccgcgggcgg

SEQ ID NO: 562300 - RNA, 19 nt, Human
auacacucuguacaaugcg

SEQ ID NO: 562301 - RNA, 23 nt, Human
caauuucugcgaccuuucaaggc

SEQ ID NO: 562302 - RNA, 21 nt, Human
cagccacgacaucccauccua

SEQ ID NO: 562303 - RNA, 19 nt, Human
caucccauccuagccccgc

SEQ ID NO: 562304 - RNA, 23 nt, Human
cccccgauacuaacugaaauuaa

SEQ ID NO: 562305 - RNA, 23 nt, Human
cccccucgcuacggcggccuugg

SEQ ID NO: 562306 - RNA, 18 nt, Human
cuccuccgcgaaccccgg

SEQ ID NO: 562307 - RNA, 18 nt, Human
cuccuggcauaagcugga

SEQ ID NO: 562308 - RNA, 24 nt, Human
cugugguaggccgucccaggcagg

SEQ ID NO: 562309 - RNA, 23 nt, Human
cuuccgggccccgcccccucgcu

SEQ ID NO: 562310 - RNA, 22 nt, Human
gaccuuucaaggcagucuuuga

SEQ ID NO: 562311 - RNA, 21 nt, Human
gaguugccucggaggauuugg

SEQ ID NO: 562312 - RNA, 18 nt, Human
gcaggccaaacgccuuuc

SEQ ID NO: 562313 - RNA, 19 nt, Human
gcgggugaggaggagacuc

SEQ ID NO: 562314 - RNA, 18 nt, Human
ggccccgcccccucgcua

SEQ ID NO: 562315 - RNA, 18 nt, Human
uaagcuggaagccaccca

SEQ ID NO: 562316 - RNA, 21 nt, Human
uacacucuguacaaugcguua

SEQ ID NO: 562317 - RNA, 21 nt, Human
uagcggcccgagccugcgcuc

SEQ ID NO: 562318 - RNA, 20 nt, Human
uaggacgagccagggcagca

SEQ ID NO: 562319 - RNA, 19 nt, Human
uccuggcauaagcuggaag

SEQ ID NO: 562320 - RNA, 24 nt, Human
ucuuugaaaugucaagguuuuaaa

SEQ ID NO: 562321 - RNA, 21 nt, Human
ugaaaugucaagguuuuaaaa

SEQ ID NO: 562322 - RNA, 20 nt, Human
ugaaauuaaaaauagaaauc

SEQ ID NO: 562323 - RNA, 23 nt, Human
ugccucggaggauuuggcagcca

SEQ ID NO: 562324 - RNA, 18 nt, Human
ugcuggaaggcugggucc

SEQ ID NO: 562325 - RNA, 20 nt, Human
ugcuggaaggcuggguccgc

SEQ ID NO: 562326 - RNA, 21 nt, Human
uggaagccacccaacuguucc

SEQ ID NO: 562327 - RNA, 18 nt, Human
uggaaggcuggguccgcg

SEQ ID NO: 562328 - RNA, 24 nt, Human
uggaaggcuggguccgcgggcggg

SEQ ID NO: 562329 - RNA, 20 nt, Human
uuccgggccccgcccccucg

SEQ ID NO: 562330 - RNA, 24 nt, Human
uuuuuuuugaaaauagaaaaauuc

SEQ ID NO: 562331 - RNA, 27 nt, Human
uuuuuuuuuuuuuuuuuuuuuuugggg

SEQ ID NO: 562332 - RNA, 19 nt, Human
aacccaacaucaacucagu

SEQ ID NO: 562333 - RNA, 22 nt, Human
aacucagucccucccaccccca

SEQ ID NO: 562334 - RNA, 22 nt, Human
agagcuugggggagguauggag

SEQ ID NO: 562335 - RNA, 18 nt, Human
agcaggugcacaccacag

SEQ ID NO: 562336 - RNA, 19 nt, Human
caacucagucccucccacc

SEQ ID NO: 562337 - RNA, 21 nt, Human
caacucagucccucccacccc

SEQ ID NO: 562338 - RNA, 23 nt, Human
caccaccuuucuuggaaucugcg

SEQ ID NO: 562339 - RNA, 25 nt, Human
cacccccaucuccucucucuggccc

SEQ ID NO: 562340 - RNA, 24 nt, Human
cagcucagccacauacuggcccug

SEQ ID NO: 562341 - RNA, 23 nt, Human
caggacagcagggcugagcccug

SEQ ID NO: 562342 - RNA, 24 nt, Human
cccucccacccccaucuccucucu

SEQ ID NO: 562343 - RNA, 23 nt, Human
ccuggaccuccacgguggagcag

SEQ ID NO: 562344 - RNA, 19 nt, Human
cuuccgcugguccuggagc

SEQ ID NO: 562345 - RNA, 18 nt, Human
gagcuugggggagguaug

SEQ ID NO: 562346 - RNA, 22 nt, Human
gcucaggacagcagggcugagc

SEQ ID NO: 562347 - RNA, 18 nt, Human
gcuggaggagagcuuggg

SEQ ID NO: 562348 - RNA, 19 nt, Human
gguauggagaaugagaaaa

SEQ ID NO: 562349 - RNA, 23 nt, Human
ucagucccucccacccccaucuc

SEQ ID NO: 562350 - RNA, 21 nt, Human
ucccacccccaucuccucucu

SEQ ID NO: 562351 - RNA, 24 nt, Human
ucccucccacccccaucuccucuc

SEQ ID NO: 562352 - RNA, 19 nt, Human
uccgcugguccuggagcag

SEQ ID NO: 562353 - RNA, 26 nt, Human
ucgcugucggaacuguuucgacagcg

SEQ ID NO: 562354 - RNA, 18 nt, Human
ucugcgugcuguggccca

SEQ ID NO: 562355 - RNA, 22 nt, Human
ugaaaaacccaacaucaacuca

SEQ ID NO: 562356 - RNA, 23 nt, Human
ugagcagggcggacagcacggcc

SEQ ID NO: 562357 - RNA, 19 nt, Human
ugagcccugggaagggcug

SEQ ID NO: 562358 - RNA, 20 nt, Human
ugagcccugggaagggcugg

SEQ ID NO: 562359 - RNA, 19 nt, Human
uggaaucugcgugcugugg

SEQ ID NO: 562360 - RNA, 21 nt, Human
uggaggagagcuugggggagg

SEQ ID NO: 562361 - RNA, 19 nt, Human
uggcccaggagacgcucag

SEQ ID NO: 562362 - RNA, 21 nt, Human
ugggaagggcuggaggagagc

SEQ ID NO: 562363 - RNA, 26 nt, Human
ugggaagggcuggaggagagcuuggg

SEQ ID NO: 562364 - RNA, 20 nt, Human
ugggagggcugcaucugaca

SEQ ID NO: 562365 - RNA, 23 nt, Human
aaagaaaaccagcccaaguucug

SEQ ID NO: 562366 - RNA, 18 nt, Human
aagaaagaaaaccagccc

SEQ ID NO: 562367 - RNA, 25 nt, Human
agcugugugugugugugugugugug

SEQ ID NO: 562368 - RNA, 19 nt, Human
ccgcuugugggcaagugac

SEQ ID NO: 562369 - RNA, 21 nt, Human
cucugcacagcuggcucagcg

SEQ ID NO: 562370 - RNA, 22 nt, Human
guacagcugugugugugugugu

SEQ ID NO: 562371 - RNA, 19 nt, Human
gucaggaggaggggggaug

SEQ ID NO: 562372 - RNA, 30 nt, Human
guguacagcugugugugugugugugugugg

SEQ ID NO: 562373 - RNA, 18 nt, Human
gugugugugugugugugu

SEQ ID NO: 562374 - RNA, 21 nt, Human
gugugugugugugugugugug

SEQ ID NO: 562375 - RNA, 21 nt, Human
gugugugugugugugugugug

SEQ ID NO: 562376 - RNA, 21 nt, Human
gugugugugugugugugugug

SEQ ID NO: 562377 - RNA, 21 nt, Human
gugugugugugugugugugug

SEQ ID NO: 562378 - RNA, 21 nt, Human
gugugugugugugugugugug

SEQ ID NO: 562379 - RNA, 21 nt, Human
gugugugugugugugugugug

SEQ ID NO: 562380 - RNA, 21 nt, Human
gugugugugugugugugugug

SEQ ID NO: 562381 - RNA, 21 nt, Human
gugugugugugugugugugug

SEQ ID NO: 562382 - RNA, 25 nt, Human
ucagcgcccacgaagcagcaucucu

SEQ ID NO: 562383 - RNA, 18 nt, Human
ucugcacagcuggcucag

SEQ ID NO: 562384 - RNA, 18 nt, Human
ugggaagaaagaaaacca

SEQ ID NO: 562385 - RNA, 26 nt, Human
ugggaagaaagaaaaccagcccaagu

SEQ ID NO: 562386 - RNA, 24 nt, Human
ugguuugucaggaggaggggggau

SEQ ID NO: 562387 - RNA, 18 nt, Human
ugugugugugugugugug

SEQ ID NO: 562388 - RNA, 18 nt, Human
ugugugugugugugugug

SEQ ID NO: 562389 - RNA, 18 nt, Human
ugugugugugugugugug

SEQ ID NO: 562390 - RNA, 18 nt, Human
ugugugugugugugugug

SEQ ID NO: 562391 - RNA, 18 nt, Human
ugugugugugugugugug

SEQ ID NO: 562392 - RNA, 18 nt, Human
ugugugugugugugugug

SEQ ID NO: 562393 - RNA, 18 nt, Human
ugugugugugugugugug

SEQ ID NO: 562394 - RNA, 18 nt, Human
ugugugugugugugugug

SEQ ID NO: 562395 - RNA, 18 nt, Human
ugugugugugugugugug

SEQ ID NO: 562396 - RNA, 18 nt, Human
ugugugugugugugugug

SEQ ID NO: 562397 - RNA, 18 nt, Human
ugugugugugugugugug

SEQ ID NO: 562398 - RNA, 18 nt, Human
ugugugugugugugugug

SEQ ID NO: 562399 - RNA, 18 nt, Human
ugugugugugugugugug

SEQ ID NO: 562400 - RNA, 18 nt, Human
ugugugugugugugugug

SEQ ID NO: 562401 - RNA, 18 nt, Human
ugugugugugugugugug

SEQ ID NO: 562402 - RNA, 18 nt, Human
ugugugugugugugugug

SEQ ID NO: 562403 - RNA, 18 nt, Human
ugugugugugugugugug

SEQ ID NO: 562404 - RNA, 18 nt, Human
ugugugugugugugugug

SEQ ID NO: 562405 - RNA, 18 nt, Human
ugugugugugugugugug

SEQ ID NO: 562406 - RNA, 18 nt, Human
ugugugugugugugugug

SEQ ID NO: 562407 - RNA, 22 nt, Human
ugugugugugugugugugugag

SEQ ID NO: 562408 - RNA, 21 nt, Human
ugugugugugugugugugugu

SEQ ID NO: 562409 - RNA, 21 nt, Human
ugugugugugugugugugugu

SEQ ID NO: 562410 - RNA, 21 nt, Human
ugugugugugugugugugugu

SEQ ID NO: 562411 - RNA, 21 nt, Human
ugugugugugugugugugugu

SEQ ID NO: 562412 - RNA, 21 nt, Human
ugugugugugugugugugugu

SEQ ID NO: 562413 - RNA, 21 nt, Human
ugugugugugugugugugugu

SEQ ID NO: 562414 - RNA, 21 nt, Human
ugugugugugugugugugugu

SEQ ID NO: 562415 - RNA, 21 nt, Human
ugugugugugugugugugugu

SEQ ID NO: 562416 - RNA, 21 nt, Human
ugugugugugugugugugugu

SEQ ID NO: 562417 - RNA, 21 nt, Human
ugugugugugugugugugugu

SEQ ID NO: 562418 - RNA, 21 nt, Human
ugugugugugugugugugugu

SEQ ID NO: 562419 - RNA, 21 nt, Human
ugugugugugugugugugugu

SEQ ID NO: 562420 - RNA, 21 nt, Human
ugugugugugugugugugugu

SEQ ID NO: 562421 - RNA, 21 nt, Human
ugugugugugugugugugugu

SEQ ID NO: 562422 - RNA, 21 nt, Human
ugugugugugugugugugugu

SEQ ID NO: 562423 - RNA, 21 nt, Human
ugugugugugugugugugugu

SEQ ID NO: 562424 - RNA, 21 nt, Human
ugugugugugugugugugugu

SEQ ID NO: 562425 - RNA, 21 nt, Human
ugugugugugugugugugugu

SEQ ID NO: 562426 - RNA, 21 nt, Human
ugugugugugugugugugugu

SEQ ID NO: 562427 - RNA, 21 nt, Human
ugugugugugugugugugugu

SEQ ID NO: 562428 - RNA, 21 nt, Human
ugugugugugugugugugugu

SEQ ID NO: 562429 - RNA, 21 nt, Human
ugugugugugugugugugugu

SEQ ID NO: 562430 - RNA, 21 nt, Human
ugugugugugugugugugugu

SEQ ID NO: 562431 - RNA, 21 nt, Human
ugugugugugugugugugugu

SEQ ID NO: 562432 - RNA, 21 nt, Human
ugugugugugugugugugugu

SEQ ID NO: 562433 - RNA, 21 nt, Human
ugugugugugugugugugugu

SEQ ID NO: 562434 - RNA, 21 nt, Human
ugugugugugugugugugugu

SEQ ID NO: 562435 - RNA, 21 nt, Human
ugugugugugugugugugugu

SEQ ID NO: 562436 - RNA, 21 nt, Human
ugugugugugugugugugugu

SEQ ID NO: 562437 - RNA, 21 nt, Human
ugugugugugugugugugugu

SEQ ID NO: 562438 - RNA, 21 nt, Human
ugugugugugugugugugugu

SEQ ID NO: 562439 - RNA, 21 nt, Human
ugugugugugugugugugugu

SEQ ID NO: 562440 - RNA, 21 nt, Human
ugugugugugugugugugugu

SEQ ID NO: 562441 - RNA, 21 nt, Human
ugugugugugugugugugugu

SEQ ID NO: 562442 - RNA, 21 nt, Human
ugugugugugugugugugugu

SEQ ID NO: 562443 - RNA, 21 nt, Human
ugugugugugugugugugugu

SEQ ID NO: 562444 - RNA, 22 nt, Human
ugugugugugugugugugugug

SEQ ID NO: 562445 - RNA, 22 nt, Human
ugugugugugugugugugugug

SEQ ID NO: 562446 - RNA, 22 nt, Human
ugugugugugugugugugugug

SEQ ID NO: 562447 - RNA, 22 nt, Human
ugugugugugugugugugugug

SEQ ID NO: 562448 - RNA, 22 nt, Human
ugugugugugugugugugugug

SEQ ID NO: 562449 - RNA, 22 nt, Human
ugugugugugugugugugugug

SEQ ID NO: 562450 - RNA, 22 nt, Human
ugugugugugugugugugugug

SEQ ID NO: 562451 - RNA, 22 nt, Human
ugugugugugugugugugugug

SEQ ID NO: 562452 - RNA, 22 nt, Human
ugugugugugugugugugugug

SEQ ID NO: 562453 - RNA, 22 nt, Human
uguguguguguguguguuccca

SEQ ID NO: 562454 - RNA, 26 nt, Human
aaaaacaccuagacgccucggccuuc

SEQ ID NO: 562455 - RNA, 24 nt, Human
aaacuccaacaaauaagucuucuc

SEQ ID NO: 562456 - RNA, 18 nt, Human
aacaagugaaacuccaac

SEQ ID NO: 562457 - RNA, 20 nt, Human
aacagcgagaaaaacuguac

SEQ ID NO: 562458 - RNA, 23 nt, Human
acgcagcuucuggaugcucaggg

SEQ ID NO: 562459 - RNA, 23 nt, Human
caaaauaagcccagaccauuaaa

SEQ ID NO: 562460 - RNA, 19 nt, Human
caagcuccccucccuccuc

SEQ ID NO: 562461 - RNA, 19 nt, Human
caagcuccccucccuccuc

SEQ ID NO: 562462 - RNA, 19 nt, Human
ccaaaauaagcccagacca

SEQ ID NO: 562463 - RNA, 21 nt, Human
ccaccgccgccgccgucgccc

SEQ ID NO: 562464 - RNA, 19 nt, Human
cccgcaagcuccccucccu

SEQ ID NO: 562465 - RNA, 21 nt, Human
ccgucgcccccucucgggccc

SEQ ID NO: 562466 - RNA, 25 nt, Human
ccucaggccaccgccgccgccgucg

SEQ ID NO: 562467 - RNA, 22 nt, Human
ccucguagcucaucugugagaa

SEQ ID NO: 562468 - RNA, 19 nt, Human
ccuggggccagggucgggg

SEQ ID NO: 562469 - RNA, 24 nt, Human
ccuucgccgccaccgccgccgcuc

SEQ ID NO: 562470 - RNA, 18 nt, Human
cgccgccaccgccgccgc

SEQ ID NO: 562471 - RNA, 21 nt, Human
cgccgccgccgucgcccccuc

SEQ ID NO: 562472 - RNA, 21 nt, Human
cgccgcucgggccuccucagg

SEQ ID NO: 562473 - RNA, 20 nt, Human
cgucgcccccucucgggccc

SEQ ID NO: 562474 - RNA, 19 nt, Human
cucccgcaccgaccaccgc

SEQ ID NO: 562475 - RNA, 24 nt, Human
cugcagcuccugcagagcguuucg

SEQ ID NO: 562476 - RNA, 22 nt, Human
cugcagcucuuccaaaaacacc

SEQ ID NO: 562477 - RNA, 24 nt, Human
cuggaugcucagggcuaucuugug

SEQ ID NO: 562478 - RNA, 21 nt, Human
cuucgccgccaccgccgccgc

SEQ ID NO: 562479 - RNA, 23 nt, Human
cuuuggugacguucugagacucc

SEQ ID NO: 562480 - RNA, 19 nt, Human
gcagcggugguucccccgg

SEQ ID NO: 562481 - RNA, 19 nt, Human
gcagcucuuccaaaaacac

SEQ ID NO: 562482 - RNA, 20 nt, Human
gccccauccuuggcaguagg

SEQ ID NO: 562483 - RNA, 20 nt, Human
gccggggugggcuaggggag

SEQ ID NO: 562484 - RNA, 18 nt, Human
gggccagggucgggggac

SEQ ID NO: 562485 - RNA, 19 nt, Human
ggggacggcgguggcgagg

SEQ ID NO: 562486 - RNA, 20 nt, Human
ggggugggcuaggggaggcu

SEQ ID NO: 562487 - RNA, 24 nt, Human
ggguggugguggcggcagccacgg

SEQ ID NO: 562488 - RNA, 20 nt, Human
ggugguggcggcagccacgg

SEQ ID NO: 562489 - RNA, 26 nt, Human
gguggugguggcggcagccacgguga

SEQ ID NO: 562490 - RNA, 21 nt, Human
guagggguggugguggcggca

SEQ ID NO: 562491 - RNA, 19 nt, Human
gugguggcggcagccacgg

SEQ ID NO: 562492 - RNA, 23 nt, Human
uaggggaggcucagcaccuggca

SEQ ID NO: 562493 - RNA, 18 nt, Human
uccucaggccaccgccgc

SEQ ID NO: 562494 - RNA, 20 nt, Human
uccuuggcaguagggguggu

SEQ ID NO: 562495 - RNA, 18 nt, Human
ucgcccccucucgggccc

SEQ ID NO: 562496 - RNA, 22 nt, Human
ucgccgccaccgccgccgcucg

SEQ ID NO: 562497 - RNA, 23 nt, Human
ucgccgccaccgccgccgcucgg

SEQ ID NO: 562498 - RNA, 18 nt, Human
ucugucucucacgcagcu

SEQ ID NO: 562499 - RNA, 23 nt, Human
ucugugccggggugggcuagggg

SEQ ID NO: 562500 - RNA, 22 nt, Human
ugagaagagggcugcagcucuu

SEQ ID NO: 562501 - RNA, 24 nt, Human
ugccuuugucugugccgggguggg

SEQ ID NO: 562502 - RNA, 25 nt, Human
uggaugcucagggcuaucuuguggc

SEQ ID NO: 562503 - RNA, 22 nt, Human
uggcgagggccagcgccgucac

SEQ ID NO: 562504 - RNA, 20 nt, Human
ugggcuaggggaggcucagc

SEQ ID NO: 562505 - RNA, 18 nt, Human
uggggccagggucggggg

SEQ ID NO: 562506 - RNA, 21 nt, Human
uggugguggcggcagccacgg

SEQ ID NO: 562507 - RNA, 18 nt, Human
ugguucccccggggcccc

SEQ ID NO: 562508 - RNA, 19 nt, Human
uuccaaaauaagcccaggg

SEQ ID NO: 562509 - RNA, 20 nt, Human
uucgccgccaccgccgccgg

SEQ ID NO: 562510 - RNA, 21 nt, Human
uuuuguuuguuuuuuuuuuuu

SEQ ID NO: 562511 - RNA, 19 nt, Human
aaacucaaaauauuucccc

SEQ ID NO: 562512 - RNA, 24 nt, Human
aauaaugggguggcaaaguacacc

SEQ ID NO: 562513 - RNA, 22 nt, Human
acuccccccucaagaucuuacg

SEQ ID NO: 562514 - RNA, 23 nt, Human
aucuagaaacauucucacagcau

SEQ ID NO: 562515 - RNA, 24 nt, Human
auuccacccaacacuccccccuca

SEQ ID NO: 562516 - RNA, 20 nt, Human
auucguggugacagcucccc

SEQ ID NO: 562517 - RNA, 22 nt, Human
caaagacugggaucucagacac

SEQ ID NO: 562518 - RNA, 19 nt, Human
caaaguacacccccaaacu

SEQ ID NO: 562519 - RNA, 24 nt, Human
caaaguacacccccaaacucaaaa

SEQ ID NO: 562520 - RNA, 21 nt, Human
cacccaacacuccccccucaa

SEQ ID NO: 562521 - RNA, 21 nt, Human
cacuccccccucaagaucuua

SEQ ID NO: 562522 - RNA, 18 nt, Human
cccaguaguuugccgcug

SEQ ID NO: 562523 - RNA, 24 nt, Human
ccccaaacucaaaauauuucccca

SEQ ID NO: 562524 - RNA, 22 nt, Human
ccucaagaucuuacgggguaga

SEQ ID NO: 562525 - RNA, 25 nt, Human
gcaaaguacacccccaaacucaaaa

SEQ ID NO: 562526 - RNA, 20 nt, Human
uaaaucccaaaaaugugggg

SEQ ID NO: 562527 - RNA, 19 nt, Human
ucaucuuggcccaguaguu

SEQ ID NO: 562528 - RNA, 23 nt, Human
ugaucuagaaacauucucacagc

SEQ ID NO: 562529 - RNA, 20 nt, Human
ugauuccacccaacacuccc

SEQ ID NO: 562530 - RNA, 26 nt, Human
uggcccguagagcaauggagccaucc

SEQ ID NO: 562531 - RNA, 24 nt, Human
ugggaucucagacacaauggcccg

SEQ ID NO: 562532 - RNA, 20 nt, Human
ugugggguugcucaucuugg

SEQ ID NO: 562533 - RNA, 19 nt, Human
aaaaaaaaaaccaaaaacc

SEQ ID NO: 562534 - RNA, 26 nt, Human
aaaaaaaaccaaaaaccaaaaaacau

SEQ ID NO: 562535 - RNA, 22 nt, Human
aaaaaaaccaaaaaccaaaaaa

SEQ ID NO: 562536 - RNA, 21 nt, Human
aaaaaacauuccacuggcuca

SEQ ID NO: 562537 - RNA, 22 nt, Human
aaaaaaccaaaaaccaaaaaac

SEQ ID NO: 562538 - RNA, 22 nt, Human
aaaaaaccaaaaaccaaaaaac

SEQ ID NO: 562539 - RNA, 18 nt, Human
aaaaacauuccacuggcu

SEQ ID NO: 562540 - RNA, 23 nt, Human
aaaaccaaaaaacauuccacugg

SEQ ID NO: 562541 - RNA, 21 nt, Human
aaacgaagauucccagugagc

SEQ ID NO: 562542 - RNA, 23 nt, Human
aacacggugaaacaugaaacccc

SEQ ID NO: 562543 - RNA, 29 nt, Human
aacacggugaaacaugaaaccccaccuuc

SEQ ID NO: 562544 - RNA, 19 nt, Human
aacauagcaaaaccccauc

SEQ ID NO: 562545 - RNA, 21 nt, Human
aacauagcaaaaccccaucuc

SEQ ID NO: 562546 - RNA, 21 nt, Human
aacauagcaaaaccccaucuc

SEQ ID NO: 562547 - RNA, 24 nt, Human
aaccaaaaaccaaaaaacauucca

SEQ ID NO: 562548 - RNA, 26 nt, Human
aaccaaaaaccaaaaaacauuccacu

SEQ ID NO: 562549 - RNA, 19 nt, Human
aaugauccuccugccucag

SEQ ID NO: 562550 - RNA, 22 nt, Human
acagagcaagacugucucaaaa

SEQ ID NO: 562551 - RNA, 20 nt, Human
acccugccugcucucccagc

SEQ ID NO: 562552 - RNA, 23 nt, Human
acccugccugcucucccagcccu

SEQ ID NO: 562553 - RNA, 24 nt, Human
accugaggucaggaguucgggacc

SEQ ID NO: 562554 - RNA, 18 nt, Human
accuguaaucucagcuac

SEQ ID NO: 562555 - RNA, 22 nt, Human
acggugaaacaugaaaccccac

SEQ ID NO: 562556 - RNA, 24 nt, Human
agccugggcaacauagcaaaaccc

SEQ ID NO: 562557 - RNA, 24 nt, Human
aggcaggagaaucucuugaacccg

SEQ ID NO: 562558 - RNA, 24 nt, Human
aggcggagguugcagugagccaag

SEQ ID NO: 562559 - RNA, 22 nt, Human
aggcggguggaucaccugaggu

SEQ ID NO: 562560 - RNA, 26 nt, Human
aggcggguggaucaccugaggucagg

SEQ ID NO: 562561 - RNA, 24 nt, Human
aggcugaggcaggagaaucucuug

SEQ ID NO: 562562 - RNA, 21 nt, Human
aggcugaggcggguggaucac

SEQ ID NO: 562563 - RNA, 24 nt, Human
aggcugaggcggguggaucaccug

SEQ ID NO: 562564 - RNA, 19 nt, Human
aggggcugaagagccagcg

SEQ ID NO: 562565 - RNA, 24 nt, Human
aggggucucacuauguuuccuggg

SEQ ID NO: 562566 - RNA, 26 nt, Human
auagcaaaaccccaucuccgaaaaag

SEQ ID NO: 562567 - RNA, 19 nt, Human
aucgcacuccagccugggu

SEQ ID NO: 562568 - RNA, 24 nt, Human
aucgcacuccagccugggugacag

SEQ ID NO: 562569 - RNA, 24 nt, Human
aucgcgccaucgcacuccagccug

SEQ ID NO: 562570 - RNA, 24 nt, Human
augauccuccugccucagccuccu

SEQ ID NO: 562571 - RNA, 22 nt, Human
caaaaaccaaaaaacauuccac

SEQ ID NO: 562572 - RNA, 20 nt, Human
caaaugauccuccugccuca

SEQ ID NO: 562573 - RNA, 27 nt, Human
caaaugauccuccugccucagccuccu

SEQ ID NO: 562574 - RNA, 31 nt, Human
caagacugucucaaaaaaaaaaaaaaaaaaa

SEQ ID NO: 562575 - RNA, 24 nt, Human
cacagccccaggugugacaaccga

SEQ ID NO: 562576 - RNA, 18 nt, Human
cacccugccugcucuccc

SEQ ID NO: 562577 - RNA, 23 nt, Human
caccucuacuaaaaauacaaaaa

SEQ ID NO: 562578 - RNA, 23 nt, Human
caccugaggucaggaguucggga

SEQ ID NO: 562579 - RNA, 22 nt, Human
caccuguaaucccagcuacuug

SEQ ID NO: 562580 - RNA, 25 nt, Human
caccuguaaucccagcuacuuguga

SEQ ID NO: 562581 - RNA, 22 nt, Human
cacuccagccugggugacagag

SEQ ID NO: 562582 - RNA, 23 nt, Human
cacuccagccugggugacagagc

SEQ ID NO: 562583 - RNA, 21 nt, Human
cagcagcacccugccaguagc

SEQ ID NO: 562584 - RNA, 20 nt, Human
cagccaaggcguccguccag

SEQ ID NO: 562585 - RNA, 21 nt, Human
cagccacgcucacucccaccc

SEQ ID NO: 562586 - RNA, 20 nt, Human
cagcccaggccagagagcga

SEQ ID NO: 562587 - RNA, 22 nt, Human
cagccuccuaaguagcugggag

SEQ ID NO: 562588 - RNA, 18 nt, Human
cagcugugcuccuggguu

SEQ ID NO: 562589 - RNA, 18 nt, Human
cagguuccagcugugcuc

SEQ ID NO: 562590 - RNA, 20 nt, Human
caguagcacagccccaggug

SEQ ID NO: 562591 - RNA, 27 nt, Human
cauagcaaaaccccaucuccgaaaaaa

SEQ ID NO: 562592 - RNA, 19 nt, Human
caucgcacuccagccuggg

SEQ ID NO: 562593 - RNA, 23 nt, Human
caucgcacuccagccugggugac

SEQ ID NO: 562594 - RNA, 24 nt, Human
caucgcacuccagccugggugaca

SEQ ID NO: 562595 - RNA, 24 nt, Human
caucgcacuccagccugggugaca

SEQ ID NO: 562596 - RNA, 23 nt, Human
ccaaaaaacauuccacuggcuca

SEQ ID NO: 562597 - RNA, 18 nt, Human
ccagcccuuggccugguu

SEQ ID NO: 562598 - RNA, 20 nt, Human
ccaggugugacaaccgaaaa

SEQ ID NO: 562599 - RNA, 20 nt, Human
ccaucgcacuccagccuggg

SEQ ID NO: 562600 - RNA, 21 nt, Human
ccaucgcacuccagccugggu

SEQ ID NO: 562601 - RNA, 24 nt, Human
ccaucgcacuccagccugggugac

SEQ ID NO: 562602 - RNA, 21 nt, Human
cccagaacagggccccaucac

SEQ ID NO: 562603 - RNA, 20 nt, Human
cccccagaacagggccccau

SEQ ID NO: 562604 - RNA, 24 nt, Human
cccuggggaccagccaaggcgucc

SEQ ID NO: 562605 - RNA, 27 nt, Human
cccuggggaccagccaaggcguccguc

SEQ ID NO: 562606 - RNA, 21 nt, Human
ccucagccacgcucacuccca

SEQ ID NO: 562607 - RNA, 19 nt, Human
ccugacagugcuggucccc

SEQ ID NO: 562608 - RNA, 22 nt, Human
ccugaggucaggaguucgggac

SEQ ID NO: 562609 - RNA, 23 nt, Human
ccugccucagccuccuaaguagc

SEQ ID NO: 562610 - RNA, 24 nt, Human
ccugccucagccuccuaaguagcu

SEQ ID NO: 562611 - RNA, 24 nt, Human
ccugggcaacauagcaaaacccca

SEQ ID NO: 562612 - RNA, 22 nt, Human
ccugggcucaaaugauccuccu

SEQ ID NO: 562613 - RNA, 20 nt, Human
ccugggugacagagcaagac

SEQ ID NO: 562614 - RNA, 20 nt, Human
ccuguaaucccagcuacuug

SEQ ID NO: 562615 - RNA, 22 nt, Human
ccuguaaucucagcuacucaag

SEQ ID NO: 562616 - RNA, 24 nt, Human
cgcacuccagccugggugacagag

SEQ ID NO: 562617 - RNA, 26 nt, Human
cgccaucgcacuccagccugggugac

SEQ ID NO: 562618 - RNA, 24 nt, Human
cgggaggcggagguugcagugagc

SEQ ID NO: 562619 - RNA, 24 nt, Human
cggguggaucaccugaggucagga

SEQ ID NO: 562620 - RNA, 18 nt, Human
cucaaaaaaaaaaaaaaa

SEQ ID NO: 562621 - RNA, 26 nt, Human
cucaaaaaaaaaaaaaaaaaaaaaaa

SEQ ID NO: 562622 - RNA, 24 nt, Human
cucaaaugauccuccugccucagc

SEQ ID NO: 562623 - RNA, 21 nt, Human
cucccacccugccugcucucc

SEQ ID NO: 562624 - RNA, 22 nt, Human
cucccucagccacgcucacucc

SEQ ID NO: 562625 - RNA, 23 nt, Human
cugcuugagcccgggaguucaag

SEQ ID NO: 562626 - RNA, 25 nt, Human
cugggaggcugaggcggguggauca

SEQ ID NO: 562627 - RNA, 23 nt, Human
cugggcaacauagcaaaacccca

SEQ ID NO: 562628 - RNA, 22 nt, Human
cugucucaaaaaaaaaaaaaaa

SEQ ID NO: 562629 - RNA, 27 nt, Human
gagcaagacugucucaaaaaaaaaaaa

SEQ ID NO: 562630 - RNA, 18 nt, Human
gaggcugaggcaggagaa

SEQ ID NO: 562631 - RNA, 23 nt, Human
gagguugcagugagccaagaucg

SEQ ID NO: 562632 - RNA, 21 nt, Human
gaucaccugaggucaggaguu

SEQ ID NO: 562633 - RNA, 23 nt, Human
gaucaccugaggucaggaguucg

SEQ ID NO: 562634 - RNA, 24 nt, Human
gaucaccugaggucaggaguucgg

SEQ ID NO: 562635 - RNA, 25 nt, Human
gaucaccugaggucaggaguucggg

SEQ ID NO: 562636 - RNA, 24 nt, Human
gcacuccagccugggugacagagc

SEQ ID NO: 562637 - RNA, 19 nt, Human
gccaucgcacuccagccug

SEQ ID NO: 562638 - RNA, 24 nt, Human
gccaucgcacuccagccuggguga

SEQ ID NO: 562639 - RNA, 20 nt, Human
gcccuuggccugguuccugg

SEQ ID NO: 562640 - RNA, 20 nt, Human
gcgggcaccuguaaucccag

SEQ ID NO: 562641 - RNA, 19 nt, Human
gcucacucccacccugccu

SEQ ID NO: 562642 - RNA, 22 nt, Human
gcuugagcccgggaguucaaga

SEQ ID NO: 562643 - RNA, 20 nt, Human
ggagguugcagugagccaag

SEQ ID NO: 562644 - RNA, 24 nt, Human
ggagguugcagugagccaagaucg

SEQ ID NO: 562645 - RNA, 24 nt, Human
ggcaccuguaaucccagcuacuug

SEQ ID NO: 562646 - RNA, 21 nt, Human
ggcgggcaccuguaaucccag

SEQ ID NO: 562647 - RNA, 29 nt, Human
gggcauuuuaaacgagcucucaggugauu

SEQ ID NO: 562648 - RNA, 22 nt, Human
gggcucaaaugauccuccugcc

SEQ ID NO: 562649 - RNA, 19 nt, Human
gggcugaagagccagcgug

SEQ ID NO: 562650 - RNA, 23 nt, Human
ggugacagagcaagacugucuca

SEQ ID NO: 562651 - RNA, 23 nt, Human
gguggugcguaccuguaaucuca

SEQ ID NO: 562652 - RNA, 22 nt, Human
gugacagagcaagacugucuca

SEQ ID NO: 562653 - RNA, 23 nt, Human
guggugcguaccuguaaucucag

SEQ ID NO: 562654 - RNA, 21 nt, Human
uaaaaauacaaaaauuagcca

SEQ ID NO: 562655 - RNA, 19 nt, Human
uaaggaaacaauuuaaauc

SEQ ID NO: 562656 - RNA, 19 nt, Human
uaaggggucucacuauguu

SEQ ID NO: 562657 - RNA, 20 nt, Human
uaaggggucucacuauguuu

SEQ ID NO: 562658 - RNA, 24 nt, Human
uaaguagcugggaggcugaggcgg

SEQ ID NO: 562659 - RNA, 22 nt, Human
uaccuguaaucucagcuacuca

SEQ ID NO: 562660 - RNA, 22 nt, Human
ucaaaaaaaaaaaaaaaaaaaa

SEQ ID NO: 562661 - RNA, 23 nt, Human
ucaaaaaaaaaaaaaaaaaaaaa

SEQ ID NO: 562662 - RNA, 20 nt, Human
ucaccugaggucaggaguuc

SEQ ID NO: 562663 - RNA, 26 nt, Human
ucacucccacccugccugcucuccca

SEQ ID NO: 562664 - RNA, 24 nt, Human
uccagccugggugacagagcaaga

SEQ ID NO: 562665 - RNA, 21 nt, Human
ucccccagaacagggccccau

SEQ ID NO: 562666 - RNA, 18 nt, Human
uccgucugccccucccuc

SEQ ID NO: 562667 - RNA, 26 nt, Human
uccuccugccucagccuccuaaguag

SEQ ID NO: 562668 - RNA, 22 nt, Human
uccugggcucaaaugauccucc

SEQ ID NO: 562669 - RNA, 27 nt, Human
ucgccaaaucaacccugguugagaguc

SEQ ID NO: 562670 - RNA, 23 nt, Human
ucucccagcccuuggccugguuc

SEQ ID NO: 562671 - RNA, 20 nt, Human
ucuccgaaaaaaaaaaaaaa

SEQ ID NO: 562672 - RNA, 24 nt, Human
ucucuugaacccgggaggcggagg

SEQ ID NO: 562673 - RNA, 19 nt, Human
ugaaaccccaccucuacua

SEQ ID NO: 562674 - RNA, 21 nt, Human
ugacaggcguguggaacucca

SEQ ID NO: 562675 - RNA, 23 nt, Human
ugacagugcuggucccccagaac

SEQ ID NO: 562676 - RNA, 22 nt, Human
ugagagucacugcugcaggucu

SEQ ID NO: 562677 - RNA, 22 nt, Human
ugagccaagaucgcgccaucgc

SEQ ID NO: 562678 - RNA, 23 nt, Human
ugagcccgggaguucaagaccag

SEQ ID NO: 562679 - RNA, 20 nt, Human
ugaggcaggagaaucucuug

SEQ ID NO: 562680 - RNA, 24 nt, Human
ugaggcaggagaaucucuugaacc

SEQ ID NO: 562681 - RNA, 25 nt, Human
ugaggcaggagaaucucuugaaccc

SEQ ID NO: 562682 - RNA, 20 nt, Human
ugaggcggguggaucaccug

SEQ ID NO: 562683 - RNA, 22 nt, Human
ugaggcggguggaucaccugag

SEQ ID NO: 562684 - RNA, 24 nt, Human
ugaggcggguggaucaccugaggu

SEQ ID NO: 562685 - RNA, 26 nt, Human
ugaggcggguggaucaccugagguca

SEQ ID NO: 562686 - RNA, 24 nt, Human
ugccucagccuccuaaguagcugg

SEQ ID NO: 562687 - RNA, 21 nt, Human
ugcugcaggucuuaaaagggc

SEQ ID NO: 562688 - RNA, 23 nt, Human
ugcugcaggucuuaaaagggcau

SEQ ID NO: 562689 - RNA, 24 nt, Human
uggacaacacggugaaacaugaaa

SEQ ID NO: 562690 - RNA, 24 nt, Human
uggaucaccugaggucaggaguuc

SEQ ID NO: 562691 - RNA, 27 nt, Human
uggaucaccugaggucaggaguucggg

SEQ ID NO: 562692 - RNA, 19 nt, Human
uggcagcacagcagcgucu

SEQ ID NO: 562693 - RNA, 22 nt, Human
uggcgggcaccuguaaucccag

SEQ ID NO: 562694 - RNA, 19 nt, Human
uggcucaugacaaacgaag

SEQ ID NO: 562695 - RNA, 23 nt, Human
ugggaggcugaggcggguggauc

SEQ ID NO: 562696 - RNA, 24 nt, Human
ugggaggcugaggcggguggauca

SEQ ID NO: 562697 - RNA, 20 nt, Human
ugggauguucagcagcaccc

SEQ ID NO: 562698 - RNA, 22 nt, Human
ugggcaacauagcaaaacccca

SEQ ID NO: 562699 - RNA, 24 nt, Human
ugggcucaaaugauccuccugccu

SEQ ID NO: 562700 - RNA, 23 nt, Human
uggguuccugacagugcuggucc

SEQ ID NO: 562701 - RNA, 22 nt, Human
uggugcguaccuguaaucucag

SEQ ID NO: 562702 - RNA, 24 nt, Human
ugguggcgggcaccuguaauccca

SEQ ID NO: 562703 - RNA, 23 nt, Human
ugguugagagucacugcugcagg

SEQ ID NO: 562704 - RNA, 19 nt, Human
ugugguggcgggcaccugu

SEQ ID NO: 562705 - RNA, 21 nt, Human
uuccagcugugcuccuggguu

SEQ ID NO: 562706 - RNA, 24 nt, Human
uugaacccgggaggcggagguugc

SEQ ID NO: 562707 - RNA, 22 nt, Human
uugagcccgggaguucaagacc

SEQ ID NO: 562708 - RNA, 22 nt, Human
uugcagugagccaagaucgcgc

SEQ ID NO: 562709 - RNA, 24 nt, Human
uuuccugggcucaaaugauccucc

SEQ ID NO: 562710 - RNA, 18 nt, Human
aaaaaacccaaaccuguc

SEQ ID NO: 562711 - RNA, 20 nt, Human
aaccugucccauaccccucc

SEQ ID NO: 562712 - RNA, 20 nt, Human
agccacagggacagcccaaa

SEQ ID NO: 562713 - RNA, 22 nt, Human
agccacagggacagcccaaaca

SEQ ID NO: 562714 - RNA, 20 nt, Human
auaaaaaaaaaacccaaacc

SEQ ID NO: 562715 - RNA, 18 nt, Human
caccccagaaccagccac

SEQ ID NO: 562716 - RNA, 19 nt, Human
cauaccccucccacucaug

SEQ ID NO: 562717 - RNA, 18 nt, Human
ccaaacaacugcagggga

SEQ ID NO: 562718 - RNA, 24 nt, Human
ccauaccccucccacucaugcaaa

SEQ ID NO: 562719 - RNA, 28 nt, Human
cccauaccccucccacucaaucgguugg

SEQ ID NO: 562720 - RNA, 22 nt, Human
ccgcacaccccagaaccagcca

SEQ ID NO: 562721 - RNA, 24 nt, Human
cuggccgcacaccccagaaccagc

SEQ ID NO: 562722 - RNA, 24 nt, Human
uaaaaaaaaaacccaaaccugucc

SEQ ID NO: 562723 - RNA, 25 nt, Human
uaccccucccacucaugcaaacagc

SEQ ID NO: 562724 - RNA, 23 nt, Human
ugucccauaccccucccacucau

SEQ ID NO: 562725 - RNA, 22 nt, Human
uucaugagcauaaaaaaaaaac

SEQ ID NO: 562726 - RNA, 23 nt, Human
uucaugagcauaaaaaaaaaacc

SEQ ID NO: 562727 - RNA, 29 nt, Human
uuuuuuuuuuuuuuuuuuuuucauaaaaa

SEQ ID NO: 562728 - RNA, 18 nt, Human
aacaagaaccacgaagga

SEQ ID NO: 562729 - RNA, 21 nt, Human
aagaaauggcagugcacucac

SEQ ID NO: 562730 - RNA, 19 nt, Human
aagaaccacgaaggaggcc

SEQ ID NO: 562731 - RNA, 33 nt, Human
acaaccaacaagaaccacgaaggaggcgccuuc

SEQ ID NO: 562732 - RNA, 23 nt, Human
acagccugagccuuuaccucccc

SEQ ID NO: 562733 - RNA, 24 nt, Human
acgcaacuucugagggcuggaggg

SEQ ID NO: 562734 - RNA, 22 nt, Human
agaaguguggugagcuaccaga

SEQ ID NO: 562735 - RNA, 19 nt, Human
aggcagaagcacaaccaac

SEQ ID NO: 562736 - RNA, 23 nt, Human
aggcagaagcacaaccaacaaga

SEQ ID NO: 562737 - RNA, 19 nt, Human
agggcagcugcugaccgcc

SEQ ID NO: 562738 - RNA, 20 nt, Human
cacaaccaacaagaaccacu

SEQ ID NO: 562739 - RNA, 21 nt, Human
cagcaccacucccccacccug

SEQ ID NO: 562740 - RNA, 21 nt, Human
cagccugagccuuuaccuccc

SEQ ID NO: 562741 - RNA, 19 nt, Human
cauggaaagggcugccuga

SEQ ID NO: 562742 - RNA, 25 nt, Human
ccagacauuccaugcagcccgcuga

SEQ ID NO: 562743 - RNA, 22 nt, Human
ccagaggcagaagcacaaccaa

SEQ ID NO: 562744 - RNA, 21 nt, Human
cccugugucagucaggguccc

SEQ ID NO: 562745 - RNA, 23 nt, Human
ccuccccaggccugaacaggggc

SEQ ID NO: 562746 - RNA, 22 nt, Human
ccugagccuuuaccuccccagg

SEQ ID NO: 562747 - RNA, 22 nt, Human
cggcguccagaggcagaagcac

SEQ ID NO: 562748 - RNA, 24 nt, Human
cuccugugauuggccagcaccacu

SEQ ID NO: 562749 - RNA, 22 nt, Human
cugaaaaagcugaauuuggaac

SEQ ID NO: 562750 - RNA, 21 nt, Human
cugaauugacuggaaauccau

SEQ ID NO: 562751 - RNA, 24 nt, Human
cuuauccccuuucaaaaaacugcc

SEQ ID NO: 562752 - RNA, 23 nt, Human
gaagcacaaccaacaagaaccag

SEQ ID NO: 562753 - RNA, 19 nt, Human
gacaaggugaguguggcuc

SEQ ID NO: 562754 - RNA, 23 nt, Human
gaugcugcauguccugcaguggg

SEQ ID NO: 562755 - RNA, 24 nt, Human
gcauggaaagggcugccugacagg

SEQ ID NO: 562756 - RNA, 20 nt, Human
gccugaacaggggcauggaa

SEQ ID NO: 562757 - RNA, 20 nt, Human
gcgaaggaugcugcaugucc

SEQ ID NO: 562758 - RNA, 19 nt, Human
gcuucaggagcugggugcu

SEQ ID NO: 562759 - RNA, 21 nt, Human
ggagaaccaucccuguaaagu

SEQ ID NO: 562760 - RNA, 20 nt, Human
ggcagcugcugaccgccugg

SEQ ID NO: 562761 - RNA, 22 nt, Human
ggccagcaccacucccccaccc

SEQ ID NO: 562762 - RNA, 21 nt, Human
gggcagcugcugaccgccugg

SEQ ID NO: 562763 - RNA, 22 nt, Human
ggggugcgcuggccuuuaguga

SEQ ID NO: 562764 - RNA, 18 nt, Human
ggugcuucaggagcuggg

SEQ ID NO: 562765 - RNA, 22 nt, Human
guaaagugucaguaguagcccc

SEQ ID NO: 562766 - RNA, 20 nt, Human
gucccugcaagaaauggcag

SEQ ID NO: 562767 - RNA, 22 nt, Human
gugaguguggcucucugcggcu

SEQ ID NO: 562768 - RNA, 19 nt, Human
guggaggcgcugugucucc

SEQ ID NO: 562769 - RNA, 23 nt, Human
uaaagucaauaaauccauaacca

SEQ ID NO: 562770 - RNA, 21 nt, Human
uaaccagcaauacuauggggc

SEQ ID NO: 562771 - RNA, 23 nt, Human
uaauauagagaauuacuggcuuu

SEQ ID NO: 562772 - RNA, 22 nt, Human
uaccagacauuccaugcagccc

SEQ ID NO: 562773 - RNA, 23 nt, Human
uagccaagggcagccaggaauaa

SEQ ID NO: 562774 - RNA, 25 nt, Human
uauagagaauuacuggcuuuaacag

SEQ ID NO: 562775 - RNA, 24 nt, Human
uccagaggcagaagcacaaccaac

SEQ ID NO: 562776 - RNA, 25 nt, Human
uccauaaccagcaauacuauggggc

SEQ ID NO: 562777 - RNA, 18 nt, Human
uccccuuucaaaaaacug

SEQ ID NO: 562778 - RNA, 19 nt, Human
ucccugcaagaaauggcag

SEQ ID NO: 562779 - RNA, 23 nt, Human
uccugugauuggccagcaccacu

SEQ ID NO: 562780 - RNA, 23 nt, Human
ucuccuacgcaacuucugagggc

SEQ ID NO: 562781 - RNA, 21 nt, Human
ugagaagccacgugagugggg

SEQ ID NO: 562782 - RNA, 23 nt, Human
ugccaagggcagcugcugaccgc

SEQ ID NO: 562783 - RNA, 24 nt, Human
ugccaagggcagcugcugaccgcc

SEQ ID NO: 562784 - RNA, 19 nt, Human
ugccucaguggaggcgcug

SEQ ID NO: 562785 - RNA, 20 nt, Human
uggggccuggggugcgcugg

SEQ ID NO: 562786 - RNA, 27 nt, Human
uggggugcuggggaacgucgcgguggu

SEQ ID NO: 562787 - RNA, 21 nt, Human
uggugcuucaggagcugggug

SEQ ID NO: 562788 - RNA, 23 nt, Human
uuagccaagggcagccaggaaua

SEQ ID NO: 562789 - RNA, 24 nt, Human
uucaggagcugggugcuggggaag

SEQ ID NO: 562790 - RNA, 20 nt, Human
aaacaauuacaugggcccca

SEQ ID NO: 562791 - RNA, 19 nt, Human
aaacacauacacauaaaca

SEQ ID NO: 562792 - RNA, 20 nt, Human
aacaaaagugagccuuccac

SEQ ID NO: 562793 - RNA, 23 nt, Human
aacgcagcacaagagucugagca

SEQ ID NO: 562794 - RNA, 21 nt, Human
aagugagccuuccacuaacuu

SEQ ID NO: 562795 - RNA, 19 nt, Human
aaguguuagaaggcagcuu

SEQ ID NO: 562796 - RNA, 21 nt, Human
aauaaaauuaaacgagcuucc

SEQ ID NO: 562797 - RNA, 19 nt, Human
acaagaaauauagcacaca

SEQ ID NO: 562798 - RNA, 22 nt, Human
acaauaaaauuaaacgagcuuc

SEQ ID NO: 562799 - RNA, 26 nt, Human
acuucacugcaguuaugguuaacucc

SEQ ID NO: 562800 - RNA, 18 nt, Human
agacaaguuuacugcucu

SEQ ID NO: 562801 - RNA, 19 nt, Human
agcugcugucaggacucug

SEQ ID NO: 562802 - RNA, 21 nt, Human
auucacuuucucaaaccccca

SEQ ID NO: 562803 - RNA, 18 nt, Human
auuugcuuugcuuccccu

SEQ ID NO: 562804 - RNA, 21 nt, Human
caaagcggggcucaguuugcu

SEQ ID NO: 562805 - RNA, 23 nt, Human
cacaauaaaauuaaacgagcuuc

SEQ ID NO: 562806 - RNA, 18 nt, Human
cacauuccuaacaagccu

SEQ ID NO: 562807 - RNA, 18 nt, Human
caccagccaccaaacauu

SEQ ID NO: 562808 - RNA, 20 nt, Human
cauuacagaaugcauuuucc

SEQ ID NO: 562809 - RNA, 22 nt, Human
cauuccuaacaagccugcacug

SEQ ID NO: 562810 - RNA, 26 nt, Human
ccaaaagccccauauccaucacacga

SEQ ID NO: 562811 - RNA, 23 nt, Human
ccacacauuccuaacaagccugc

SEQ ID NO: 562812 - RNA, 20 nt, Human
cccacuucauuacagaaugc

SEQ ID NO: 562813 - RNA, 21 nt, Human
cccacuucauuacagaaugca

SEQ ID NO: 562814 - RNA, 25 nt, Human
ccucugaagcugcugucaggacucu

SEQ ID NO: 562815 - RNA, 23 nt, Human
cuaaaaacacauacacauaaaca

SEQ ID NO: 562816 - RNA, 21 nt, Human
cugaaugagauucauuaacgc

SEQ ID NO: 562817 - RNA, 27 nt, Human
cuuccaaucuucccuuccacacauucc

SEQ ID NO: 562818 - RNA, 21 nt, Human
gaaucuaccuuagaccuucuu

SEQ ID NO: 562819 - RNA, 22 nt, Human
gagcacguucugauauggacaa

SEQ ID NO: 562820 - RNA, 19 nt, Human
gaguaaauggaaauaaugu

SEQ ID NO: 562821 - RNA, 19 nt, Human
gauauuuauauugaaaauu

SEQ ID NO: 562822 - RNA, 21 nt, Human
gccaccaaacauuucuauagg

SEQ ID NO: 562823 - RNA, 25 nt, Human
ggaccuuugacaccagccaccaaac

SEQ ID NO: 562824 - RNA, 21 nt, Human
uaaaaacacauacacauaaac

SEQ ID NO: 562825 - RNA, 20 nt, Human
uaaaaguuccgaagcuguga

SEQ ID NO: 562826 - RNA, 20 nt, Human
uaaagugcaacacaacagaa

SEQ ID NO: 562827 - RNA, 20 nt, Human
uaacaaggagaauuacaguc

SEQ ID NO: 562828 - RNA, 19 nt, Human
uaacgcagcacaagagucu

SEQ ID NO: 562829 - RNA, 18 nt, Human
uaacucaaagcggggcuc

SEQ ID NO: 562830 - RNA, 23 nt, Human
uaacuuuguaaauuauacaagaa

SEQ ID NO: 562831 - RNA, 22 nt, Human
uaaggaccuuugacaccagcca

SEQ ID NO: 562832 - RNA, 20 nt, Human
uaaucucuaccccacgcguc

SEQ ID NO: 562833 - RNA, 19 nt, Human
uacacuguuaaccaaguaa

SEQ ID NO: 562834 - RNA, 20 nt, Human
uauagcacacaacuugaauu

SEQ ID NO: 562835 - RNA, 19 nt, Human
ucagacuucacugcaguua

SEQ ID NO: 562836 - RNA, 23 nt, Human
ucagacuucacugcaguuauggu

SEQ ID NO: 562837 - RNA, 20 nt, Human
ucauuccugauagguuauca

SEQ ID NO: 562838 - RNA, 25 nt, Human
uccaaaagccccauauccaucacac

SEQ ID NO: 562839 - RNA, 21 nt, Human
ucgguaacaaggagaauuaca

SEQ ID NO: 562840 - RNA, 22 nt, Human
ucgguaacaaggagaauuacag

SEQ ID NO: 562841 - RNA, 21 nt, Human
ucucaaaugcaugaacacuaa

SEQ ID NO: 562842 - RNA, 19 nt, Human
ugaaaggcuccaggcuuca

SEQ ID NO: 562843 - RNA, 19 nt, Human
ugaauuaaucuaaaaacac

SEQ ID NO: 562844 - RNA, 18 nt, Human
ugacaccagccaccaaac

SEQ ID NO: 562845 - RNA, 24 nt, Human
ugcaacacaacagaacaugucugc

SEQ ID NO: 562846 - RNA, 21 nt, Human
uggaacaguguaacucaaagc

SEQ ID NO: 562847 - RNA, 19 nt, Human
ugguugcauguuguuuuga

SEQ ID NO: 562848 - RNA, 18 nt, Human
uuguuccugagaugagca

SEQ ID NO: 562849 - RNA, 22 nt, Human
aaaaacaaugaaaaacaaacaa

SEQ ID NO: 562850 - RNA, 19 nt, Human
aaagugcugggguuacagg

SEQ ID NO: 562851 - RNA, 24 nt, Human
aaagugcugggguuacaggcguga

SEQ ID NO: 562852 - RNA, 20 nt, Human
aacaagugauuaagaaguaa

SEQ ID NO: 562853 - RNA, 22 nt, Human
aacagagauaaaauauuaaaaa

SEQ ID NO: 562854 - RNA, 20 nt, Human
aacagaggacugacugccuc

SEQ ID NO: 562855 - RNA, 21 nt, Human
aaccacuggauuaguccuuug

SEQ ID NO: 562856 - RNA, 22 nt, Human
aagcagcugggauuacaggcau

SEQ ID NO: 562857 - RNA, 24 nt, Human
aagcagcugggauuacaggcaugc

SEQ ID NO: 562858 - RNA, 24 nt, Human
aagugauccacccgccucggccuc

SEQ ID NO: 562859 - RNA, 25 nt, Human
aagugauucuccugccucagccucc

SEQ ID NO: 562860 - RNA, 19 nt, Human
aagugcugggguuacaggc

SEQ ID NO: 562861 - RNA, 19 nt, Human
aagugcugggguuacaggc

SEQ ID NO: 562862 - RNA, 23 nt, Human
acagcaacagaggacugacugcc

SEQ ID NO: 562863 - RNA, 25 nt, Human
acccgccucggccucccaaagugcu

SEQ ID NO: 562864 - RNA, 24 nt, Human
acuauauuggucaggcuggucuug

SEQ ID NO: 562865 - RNA, 24 nt, Human
agugcaauggugcacucucggcuc

SEQ ID NO: 562866 - RNA, 20 nt, Human
aguuuugcucuuuuugccca

SEQ ID NO: 562867 - RNA, 18 nt, Human
auucuccugccucagccu

SEQ ID NO: 562868 - RNA, 24 nt, Human
caaaaacaaugaaaaacaaacaac

SEQ ID NO: 562869 - RNA, 24 nt, Human
caaagugcugggguuacaggcgug

SEQ ID NO: 562870 - RNA, 22 nt, Human
caagugauucuccugccucagc

SEQ ID NO: 562871 - RNA, 23 nt, Human
cacccgccucggccucccaaagu

SEQ ID NO: 562872 - RNA, 21 nt, Human
cacuauauuggucaggcuggu

SEQ ID NO: 562873 - RNA, 24 nt, Human
cacuauauuggucaggcuggucuu

SEQ ID NO: 562874 - RNA, 18 nt, Human
cacugcaaccucugccuc

SEQ ID NO: 562875 - RNA, 21 nt, Human
cacugcaaccucugccuccug

SEQ ID NO: 562876 - RNA, 18 nt, Human
cagcgcccgcagcagccg

SEQ ID NO: 562877 - RNA, 24 nt, Human
caggcgugagucacugugcccggc

SEQ ID NO: 562878 - RNA, 23 nt, Human
cauaacaagugauuaagaaguaa

SEQ ID NO: 562879 - RNA, 18 nt, Human
caugcaccaugcccggcu

SEQ ID NO: 562880 - RNA, 19 nt, Human
caugcaccaugcccggcua

SEQ ID NO: 562881 - RNA, 20 nt, Human
ccaaagugcugggguuacag

SEQ ID NO: 562882 - RNA, 22 nt, Human
ccaaagugcugggguuacaggc

SEQ ID NO: 562883 - RNA, 22 nt, Human
ccaaagugcugggguuacaggc

SEQ ID NO: 562884 - RNA, 24 nt, Human
ccaaagugcugggguuacaggcgu

SEQ ID NO: 562885 - RNA, 23 nt, Human
ccaagcagcugggauuacaggca

SEQ ID NO: 562886 - RNA, 24 nt, Human
ccaagcagcugggauuacaggcau

SEQ ID NO: 562887 - RNA, 22 nt, Human
ccacgcuucaccgccacggccg

SEQ ID NO: 562888 - RNA, 22 nt, Human
ccacuggauuaguccuuuguau

SEQ ID NO: 562889 - RNA, 19 nt, Human
cccaagcagcugggauuac

SEQ ID NO: 562890 - RNA, 24 nt, Human
cccaagcagcugggauuacaggca

SEQ ID NO: 562891 - RNA, 19 nt, Human
cccaggcuggagugcaaug

SEQ ID NO: 562892 - RNA, 24 nt, Human
ccccacgcuucaccgccacggccg

SEQ ID NO: 562893 - RNA, 19 nt, Human
cccgaacagucaccgucuc

SEQ ID NO: 562894 - RNA, 20 nt, Human
ccgccacggccgccgccgcc

SEQ ID NO: 562895 - RNA, 22 nt, Human
ccgccgccgccgccgcugccgc

SEQ ID NO: 562896 - RNA, 18 nt, Human
ccgccgccgccgcugccg

SEQ ID NO: 562897 - RNA, 24 nt, Human
ccgccgccgccgcugccgcugccg

SEQ ID NO: 562898 - RNA, 25 nt, Human
ccgccgccgccgcugccgcugccgc

SEQ ID NO: 562899 - RNA, 27 nt, Human
ccgccgccgccgcugccgcugccgcuc

SEQ ID NO: 562900 - RNA, 18 nt, Human
ccgcugccgcucggggga

SEQ ID NO: 562901 - RNA, 22 nt, Human
ccgcugccgcugccgcucgggg

SEQ ID NO: 562902 - RNA, 24 nt, Human
ccuccuguguucaagugauucucc

SEQ ID NO: 562903 - RNA, 22 nt, Human
ccugaccucaagugauccaccc

SEQ ID NO: 562904 - RNA, 23 nt, Human
ccugaccucaagugauccacccg

SEQ ID NO: 562905 - RNA, 25 nt, Human
cgcaaaaacaaugaaaaacaaacaa

SEQ ID NO: 562906 - RNA, 21 nt, Human
cgccgcugccgcugccgcucg

SEQ ID NO: 562907 - RNA, 24 nt, Human
cgccucggccucccaaagugcugg

SEQ ID NO: 562908 - RNA, 20 nt, Human
cgcugccgcucgggggagga

SEQ ID NO: 562909 - RNA, 25 nt, Human
cggccgccgccgccuagaguagcac

SEQ ID NO: 562910 - RNA, 20 nt, Human
cuagaguagcacucgucgac

SEQ ID NO: 562911 - RNA, 21 nt, Human
cucacugcaaccucugccucc

SEQ ID NO: 562912 - RNA, 19 nt, Human
cuccuguguucaagugauu

SEQ ID NO: 562913 - RNA, 20 nt, Human
cucuuuuugcccaggcugga

SEQ ID NO: 562914 - RNA, 24 nt, Human
cugcaaccucugccuccuguguuc

SEQ ID NO: 562915 - RNA, 23 nt, Human
cugccucagccucccaagcagcu

SEQ ID NO: 562916 - RNA, 24 nt, Human
gaccucaagugauccacccgccuc

SEQ ID NO: 562917 - RNA, 18 nt, Human
gagugcaauggugcacuc

SEQ ID NO: 562918 - RNA, 20 nt, Human
gagugcaauggugcacucuc

SEQ ID NO: 562919 - RNA, 20 nt, Human
gauuacaggcaugcaccaug

SEQ ID NO: 562920 - RNA, 21 nt, Human
gauucuccugccucagccucc

SEQ ID NO: 562921 - RNA, 22 nt, Human
gcaaccucugccuccuguguuc

SEQ ID NO: 562922 - RNA, 19 nt, Human
gcccaggcuggagugcaau

SEQ ID NO: 562923 - RNA, 23 nt, Human
gccgccgccgccgccgcugccgg

SEQ ID NO: 562924 - RNA, 21 nt, Human
gccucccaagcagcugggauu

SEQ ID NO: 562925 - RNA, 21 nt, Human
gcucuuuuugcccaggcugga

SEQ ID NO: 562926 - RNA, 24 nt, Human
gcucuuuuugcccaggcuggagug

SEQ ID NO: 562927 - RNA, 23 nt, Human
gcuggucuugagcuccugaccuc

SEQ ID NO: 562928 - RNA, 21 nt, Human
ggauuacaggcaugcaccaug

SEQ ID NO: 562929 - RNA, 22 nt, Human
ggccccacgcuucaccgccacg

SEQ ID NO: 562930 - RNA, 24 nt, Human
ggcuggucuugagcuccugaccuc

SEQ ID NO: 562931 - RNA, 24 nt, Human
gguuacaggcgugagucacugugc

SEQ ID NO: 562932 - RNA, 24 nt, Human
gugauccacccgccucggccuccc

SEQ ID NO: 562933 - RNA, 24 nt, Human
gugauucuccugccucagccuccc

SEQ ID NO: 562934 - RNA, 19 nt, Human
uaaaaagaacagaugaggu

SEQ ID NO: 562935 - RNA, 20 nt, Human
uaaaaagaacagaugaggua

SEQ ID NO: 562936 - RNA, 22 nt, Human
uaaaagacaaauucuauaagga

SEQ ID NO: 562937 - RNA, 23 nt, Human
uaaagaacuugcuauaauacagg

SEQ ID NO: 562938 - RNA, 21 nt, Human
uaauacagggaagaggauaau

SEQ ID NO: 562939 - RNA, 19 nt, Human
uacugcuguaaaccacugg

SEQ ID NO: 562940 - RNA, 18 nt, Human
uaguaccuuuacugcugu

SEQ ID NO: 562941 - RNA, 24 nt, Human
uauauuggucaggcuggucuugag

SEQ ID NO: 562942 - RNA, 19 nt, Human
ucaagugauucuccugccu

SEQ ID NO: 562943 - RNA, 21 nt, Human
ucaccgccacggccgccgccg

SEQ ID NO: 562944 - RNA, 24 nt, Human
ucaccgccacggccgccgccgccu

SEQ ID NO: 562945 - RNA, 19 nt, Human
ucacugcaaccucugccuc

SEQ ID NO: 562946 - RNA, 20 nt, Human
ucacugcaaccucugccucc

SEQ ID NO: 562947 - RNA, 22 nt, Human
ucacugcaaccucugccuccug

SEQ ID NO: 562948 - RNA, 23 nt, Human
ucacugcaaccucugccuccugu

SEQ ID NO: 562949 - RNA, 27 nt, Human
ucacugcaaccucugccuccuguguuc

SEQ ID NO: 562950 - RNA, 20 nt, Human
ucagccucccaagcagcugg

SEQ ID NO: 562951 - RNA, 18 nt, Human
ucagcgcccgcagcagcc

SEQ ID NO: 562952 - RNA, 24 nt, Human
ucccaaagugcugggguuacaggc

SEQ ID NO: 562953 - RNA, 24 nt, Human
ucccaagcagcugggauuacaggc

SEQ ID NO: 562954 - RNA, 19 nt, Human
uccugugcagccgcggccg

SEQ ID NO: 562955 - RNA, 24 nt, Human
uccuguguucaagugauucuccug

SEQ ID NO: 562956 - RNA, 18 nt, Human
ucggccucccaaagugcu

SEQ ID NO: 562957 - RNA, 23 nt, Human
ucggccucccaaagugcuggggu

SEQ ID NO: 562958 - RNA, 20 nt, Human
ucuccugagacaagauggac

SEQ ID NO: 562959 - RNA, 23 nt, Human
ucuccugccucagccucccaagc

SEQ ID NO: 562960 - RNA, 23 nt, Human
ucucuacaaacagagauaaaaua

SEQ ID NO: 562961 - RNA, 20 nt, Human
ucugcuacauuggagaaagg

SEQ ID NO: 562962 - RNA, 24 nt, Human
ugaccucaagugauccacccgccu

SEQ ID NO: 562963 - RNA, 23 nt, Human
ugagacaagauggaccaagucuc

SEQ ID NO: 562964 - RNA, 24 nt, Human
ugcacucucggcucacugcaaccu

SEQ ID NO: 562965 - RNA, 18 nt, Human
ugcccaggcuggagugca

SEQ ID NO: 562966 - RNA, 21 nt, Human
ugcccaggcuggagugcaaug

SEQ ID NO: 562967 - RNA, 24 nt, Human
ugcccaggcuggagugcaauggug

SEQ ID NO: 562968 - RNA, 23 nt, Human
ugcccggcuaauucuguauuuuu

SEQ ID NO: 562969 - RNA, 18 nt, Human
ugccgcugccgcucgggg

SEQ ID NO: 562970 - RNA, 24 nt, Human
ugccucagccucccaagcagcugg

SEQ ID NO: 562971 - RNA, 22 nt, Human
ugcucuuuuugcccaggcugga

SEQ ID NO: 562972 - RNA, 24 nt, Human
ugcucuuuuugcccaggcuggagu

SEQ ID NO: 562973 - RNA, 24 nt, Human
uggagugcaauggugcacucucgg

SEQ ID NO: 562974 - RNA, 21 nt, Human
ugggauuacaggcaugcacca

SEQ ID NO: 562975 - RNA, 21 nt, Human
ugggauuacaggcaugcacca

SEQ ID NO: 562976 - RNA, 23 nt, Human
ugggauuacaggcaugcaccaug

SEQ ID NO: 562977 - RNA, 27 nt, Human
ugggauuacaggcaugcaccaugcccg

SEQ ID NO: 562978 - RNA, 18 nt, Human
ugggguuacaggcgugag

SEQ ID NO: 562979 - RNA, 22 nt, Human
ugggguuacaggcgugagucac

SEQ ID NO: 562980 - RNA, 22 nt, Human
ugggguuacaggcgugagucac

SEQ ID NO: 562981 - RNA, 24 nt, Human
ugggguuacaggcgugagucacug

SEQ ID NO: 562982 - RNA, 24 nt, Human
uggucaggcuggucuugagcuccu

SEQ ID NO: 562983 - RNA, 24 nt, Human
uguguucaagugauucuccugccu

SEQ ID NO: 562984 - RNA, 19 nt, Human
uuacaggcgugagucacug

SEQ ID NO: 562985 - RNA, 26 nt, Human
uuagaacuaucaaacguuagcucucc

SEQ ID NO: 562986 - RNA, 21 nt, Human
uucaagugauucuccugccuc

SEQ ID NO: 562987 - RNA, 23 nt, Human
uucaagugauucuccugccucag

SEQ ID NO: 562988 - RNA, 24 nt, Human
uucaagugauucuccugccucagc

SEQ ID NO: 562989 - RNA, 22 nt, Human
uucagcgcccgcagcagccgcc

SEQ ID NO: 562990 - RNA, 18 nt, Human
uugcccaggcuggagugc

SEQ ID NO: 562991 - RNA, 22 nt, Human
uugcucuuuuugcccaggcugg

SEQ ID NO: 562992 - RNA, 23 nt, Human
uugcucuuuuugcccaggcugga

SEQ ID NO: 562993 - RNA, 24 nt, Human
uuugcucuuuuugcccaggcugga

SEQ ID NO: 562994 - RNA, 24 nt, Human
uuuugcucuuuuugcccaggcugg

SEQ ID NO: 562995 - RNA, 24 nt, Human
uuuuuaguacagacaguguuucac

SEQ ID NO: 562996 - RNA, 23 nt, Human
aaaucucagcaaucccuuacucc

SEQ ID NO: 562997 - RNA, 20 nt, Human
aaccugugguuuucaucaaa

SEQ ID NO: 562998 - RNA, 23 nt, Human
aagaguauggaagagggaauuca

SEQ ID NO: 562999 - RNA, 20 nt, Human
aagcaaauauacaaggacuc

SEQ ID NO: 563000 - RNA, 18 nt, Human
aagcagacuggcgagaga

SEQ ID NO: 563001 - RNA, 18 nt, Human
aagcagacuggcgagaga

SEQ ID NO: 563002 - RNA, 25 nt, Human
aagcagacuggcgagagaaaucaaa

SEQ ID NO: 563003 - RNA, 21 nt, Human
aagccccaauccugagucugc

SEQ ID NO: 563004 - RNA, 21 nt, Human
accugagucuacauuucuaac

SEQ ID NO: 563005 - RNA, 24 nt, Human
aggaaaaagacgaugaucggaaga

SEQ ID NO: 563006 - RNA, 25 nt, Human
aggaaaauguuaaagugaacaacug

SEQ ID NO: 563007 - RNA, 25 nt, Human
aggaacacagaaaacagcaggaacu

SEQ ID NO: 563008 - RNA, 21 nt, Human
agggacaauggggaggggugg

SEQ ID NO: 563009 - RNA, 21 nt, Human
aggugaaguagaaaaagaaug

SEQ ID NO: 563010 - RNA, 23 nt, Human
auaaagcaaauauacaaggacuc

SEQ ID NO: 563011 - RNA, 18 nt, Human
auauggugugaauccaag

SEQ ID NO: 563012 - RNA, 20 nt, Human
auggaucugugguuucaggu

SEQ ID NO: 563013 - RNA, 18 nt, Human
auuuguaaucgcuucccu

SEQ ID NO: 563014 - RNA, 23 nt, Human
caaaacucaaaacaguagugagu

SEQ ID NO: 563015 - RNA, 25 nt, Human
caaaacucaaaacaguagugaguuu

SEQ ID NO: 563016 - RNA, 23 nt, Human
caaaucugauuugaagucaaaga

SEQ ID NO: 563017 - RNA, 19 nt, Human
caaccuacauaguauauca

SEQ ID NO: 563018 - RNA, 18 nt, Human
caagaaccuagagaacuu

SEQ ID NO: 563019 - RNA, 23 nt, Human
caccaucuggggaucuuguucca

SEQ ID NO: 563020 - RNA, 19 nt, Human
caguucuagcuaagaugga

SEQ ID NO: 563021 - RNA, 23 nt, Human
cauggagggugagcucagcuugc

SEQ ID NO: 563022 - RNA, 20 nt, Human
ccaggaacacagaaaacauu

SEQ ID NO: 563023 - RNA, 18 nt, Human
ccuaaacucuaaaagaga

SEQ ID NO: 563024 - RNA, 27 nt, Human
ccugcaacugguggaaaaccggggucc

SEQ ID NO: 563025 - RNA, 22 nt, Human
cgagagaaaucaaaacucaaaa

SEQ ID NO: 563026 - RNA, 19 nt, Human
cucuaagacagugguccuc

SEQ ID NO: 563027 - RNA, 19 nt, Human
cugguaauuuuucuucucu

SEQ ID NO: 563028 - RNA, 21 nt, Human
cugugcguaggcaccaucugg

SEQ ID NO: 563029 - RNA, 18 nt, Human
cuuagacuugaggacagc

SEQ ID NO: 563030 - RNA, 18 nt, Human
gaacuagaaaagaugaug

SEQ ID NO: 563031 - RNA, 24 nt, Human
gaagaguauggaagagggaauuca

SEQ ID NO: 563032 - RNA, 19 nt, Human
gacaaaagaacuaggaaaa

SEQ ID NO: 563033 - RNA, 24 nt, Human
gacagagaaaaguuccaagagaaa

SEQ ID NO: 563034 - RNA, 19 nt, Human
gagucugcacaccuguggc

SEQ ID NO: 563035 - RNA, 18 nt, Human
gauccuacuccugaaaga

SEQ ID NO: 563036 - RNA, 19 nt, Human
gaugaugaaugggagaggg

SEQ ID NO: 563037 - RNA, 18 nt, Human
gccacaaagcugagcugg

SEQ ID NO: 563038 - RNA, 23 nt, Human
gccucaaagcaagccccaauccu

SEQ ID NO: 563039 - RNA, 22 nt, Human
ggacaccaugguagagcugcug

SEQ ID NO: 563040 - RNA, 20 nt, Human
ggagagggacaauggggagg

SEQ ID NO: 563041 - RNA, 21 nt, Human
ggagagggacaauggggaggg

SEQ ID NO: 563042 - RNA, 18 nt, Human
gggaaucccugcaacugg

SEQ ID NO: 563043 - RNA, 21 nt, Human
gggagagggacaauggggagg

SEQ ID NO: 563044 - RNA, 24 nt, Human
gggagagggacaauggggaggggu

SEQ ID NO: 563045 - RNA, 19 nt, Human
gggagggguggauaucugg

SEQ ID NO: 563046 - RNA, 20 nt, Human
gguagagcugcuguuacaga

SEQ ID NO: 563047 - RNA, 21 nt, Human
ggugugaauccaagccacaaa

SEQ ID NO: 563048 - RNA, 23 nt, Human
uaaaagggagcagcauuguggca

SEQ ID NO: 563049 - RNA, 19 nt, Human
uaaagcaaauauacaagga

SEQ ID NO: 563050 - RNA, 20 nt, Human
uaaagcaaauauacaaggac

SEQ ID NO: 563051 - RNA, 19 nt, Human
uaagacagugguccucaac

SEQ ID NO: 563052 - RNA, 21 nt, Human
uaagacagugguccucaacau

SEQ ID NO: 563053 - RNA, 20 nt, Human
uaaucgcuucccuggugucu

SEQ ID NO: 563054 - RNA, 22 nt, Human
uagcuaagauggagaaagcaca

SEQ ID NO: 563055 - RNA, 20 nt, Human
uauacaaggacucugaaaag

SEQ ID NO: 563056 - RNA, 24 nt, Human
uauacaucuaucaagacuaguuug

SEQ ID NO: 563057 - RNA, 23 nt, Human
uauauacacgucauuugcuuuua

SEQ ID NO: 563058 - RNA, 18 nt, Human
uaucuggagauacaaccu

SEQ ID NO: 563059 - RNA, 24 nt, Human
uauuacuaaaaauccuggaaagaa

SEQ ID NO: 563060 - RNA, 20 nt, Human
uauuuauauuuuacgagugg

SEQ ID NO: 563061 - RNA, 18 nt, Human
ucaauagcaacaaaucug

SEQ ID NO: 563062 - RNA, 20 nt, Human
ucagcaaucccuuacucccu

SEQ ID NO: 563063 - RNA, 18 nt, Human
uccugagucugcacaccu

SEQ ID NO: 563064 - RNA, 21 nt, Human
uccuucuggcuagagaacuag

SEQ ID NO: 563065 - RNA, 20 nt, Human
ucuucugacaaaagaacuag

SEQ ID NO: 563066 - RNA, 19 nt, Human
ugaacaaaggaaugaaugu

SEQ ID NO: 563067 - RNA, 20 nt, Human
ugaagacagagaaaaguucc

SEQ ID NO: 563068 - RNA, 27 nt, Human
ugacaaaagaacuaggaaaaagacgau

SEQ ID NO: 563069 - RNA, 23 nt, Human
ugagacagaguuuugcccuuguu

SEQ ID NO: 563070 - RNA, 19 nt, Human
ugaucggaagaguauggaa

SEQ ID NO: 563071 - RNA, 23 nt, Human
ugcuuuuacgcaauccucuaaga

SEQ ID NO: 563072 - RNA, 18 nt, Human
uggcugguagcugucucc

SEQ ID NO: 563073 - RNA, 22 nt, Human
ugggagagggacaauggggagg

SEQ ID NO: 563074 - RNA, 23 nt, Human
ugggagagggacaauggggaggg

SEQ ID NO: 563075 - RNA, 26 nt, Human
uggggaucuuguuccaauucagcagg

SEQ ID NO: 563076 - RNA, 23 nt, Human
ugguaauuuuucuucucucucag

SEQ ID NO: 563077 - RNA, 19 nt, Human
uguauaaacauguacaagg

SEQ ID NO: 563078 - RNA, 18 nt, Human
ugugaauccaagccacaa

SEQ ID NO: 563079 - RNA, 22 nt, Human
uguguguucugaacaaaggaau

SEQ ID NO: 563080 - RNA, 20 nt, Human
uuaauuaucuggagauacaa

SEQ ID NO: 563081 - RNA, 24 nt, Human
uuacugugcguaggcaccaucugg

SEQ ID NO: 563082 - RNA, 23 nt, Human
uucucccacauaugucagcuuag

SEQ ID NO: 563083 - RNA, 21 nt, Human
uucuucucucucagcucugcc

SEQ ID NO: 563084 - RNA, 26 nt, Human
uuuguaaucgcuucccuggugucucu

SEQ ID NO: 563085 - RNA, 18 nt, Human
uuuugcccuuguugccca

SEQ ID NO: 563086 - RNA, 21 nt, Human
uuuuguucuugauaguagggg

SEQ ID NO: 563087 - RNA, 21 nt, Human
uuuuucuucucucucagcucu

SEQ ID NO: 563088 - RNA, 21 nt, Human
aaaagucauaucuuuuauucu

SEQ ID NO: 563089 - RNA, 19 nt, Human
aaguaggguguauugacgc

SEQ ID NO: 563090 - RNA, 21 nt, Human
accagguuacgcuaaccucaa

SEQ ID NO: 563091 - RNA, 21 nt, Human
accaguuucaucaaacuguca

SEQ ID NO: 563092 - RNA, 22 nt, Human
agaaauagauuuuagcaauauc

SEQ ID NO: 563093 - RNA, 22 nt, Human
agcagcuuccacagcuggccca

SEQ ID NO: 563094 - RNA, 19 nt, Human
aggaagaacaaaaguaugg

SEQ ID NO: 563095 - RNA, 24 nt, Human
aggaagaacaaaaguauggcaaaa

SEQ ID NO: 563096 - RNA, 22 nt, Human
aggggaagagagaaaugcguag

SEQ ID NO: 563097 - RNA, 18 nt, Human
auaaagacagcccgugga

SEQ ID NO: 563098 - RNA, 19 nt, Human
caaaguacaaguagggugu

SEQ ID NO: 563099 - RNA, 21 nt, Human
cagcagguccugaauuguucc

SEQ ID NO: 563100 - RNA, 18 nt, Human
caucaccaggggggcucu

SEQ ID NO: 563101 - RNA, 20 nt, Human
ccagcagguccugaauuguu

SEQ ID NO: 563102 - RNA, 19 nt, Human
ccccacauuccuuuuccag

SEQ ID NO: 563103 - RNA, 21 nt, Human
cuagaguccugcaaacucaac

SEQ ID NO: 563104 - RNA, 22 nt, Human
cuagaguccugcaaacucaacc

SEQ ID NO: 563105 - RNA, 24 nt, Human
cuagaguccugcaaacucaaccaa

SEQ ID NO: 563106 - RNA, 22 nt, Human
cuuccacagcuggcccagagga

SEQ ID NO: 563107 - RNA, 21 nt, Human
gaagaggaaucaaagcucagg

SEQ ID NO: 563108 - RNA, 22 nt, Human
ggaagaacaaaaguauggcaaa

SEQ ID NO: 563109 - RNA, 25 nt, Human
ggauucuucacaagugcagcagcuu

SEQ ID NO: 563110 - RNA, 19 nt, Human
ggcaucaccaggggggcuc

SEQ ID NO: 563111 - RNA, 20 nt, Human
gggcucuuucaugcaugccu

SEQ ID NO: 563112 - RNA, 20 nt, Human
uagaguccugcaaacucaac

SEQ ID NO: 563113 - RNA, 22 nt, Human
uaggaagaacaaaaguauggca

SEQ ID NO: 563114 - RNA, 26 nt, Human
ucaccaggggggcucuuucaugcaug

SEQ ID NO: 563115 - RNA, 21 nt, Human
ucccaggugcccaagauucca

SEQ ID NO: 563116 - RNA, 18 nt, Human
ugagggaggggaagagag

SEQ ID NO: 563117 - RNA, 24 nt, Human
ugagggaggggaagagagaaaugc

SEQ ID NO: 563118 - RNA, 22 nt, Human
uggauaaaaccucagcugcaga

SEQ ID NO: 563119 - RNA, 22 nt, Human
ugggaacaaauacugugacaac

SEQ ID NO: 563120 - RNA, 20 nt, Human
ugggauguaaauguaaccag

SEQ ID NO: 563121 - RNA, 22 nt, Human
uuccagcagguccugaauuguu

SEQ ID NO: 563122 - RNA, 23 nt, Human
uucccaggugcccaagauuccau

SEQ ID NO: 563123 - RNA, 23 nt, Human
uuuaguguuuucaucaaacaagg

SEQ ID NO: 563124 - RNA, 20 nt, Human
aacacaaucuuuuccugucu

SEQ ID NO: 563125 - RNA, 19 nt, Human
aaggauagaaaauugaugg

SEQ ID NO: 563126 - RNA, 20 nt, Human
agauguguucggacuucacu

SEQ ID NO: 563127 - RNA, 24 nt, Human
aucccauuucucucacuauggcag

SEQ ID NO: 563128 - RNA, 22 nt, Human
caaaaacagaagucauguuauc

SEQ ID NO: 563129 - RNA, 22 nt, Human
caacagcaccggcgacuuccaa

SEQ ID NO: 563130 - RNA, 24 nt, Human
caacagcaccggcgacuuccaaag

SEQ ID NO: 563131 - RNA, 19 nt, Human
caacugugaacuucacacu

SEQ ID NO: 563132 - RNA, 23 nt, Human
cacauacaugaauuaagcaaagc

SEQ ID NO: 563133 - RNA, 18 nt, Human
cacaugagacuaaaauaa

SEQ ID NO: 563134 - RNA, 23 nt, Human
cacucugucagaaaauccucacc

SEQ ID NO: 563135 - RNA, 24 nt, Human
cacugcacacauacaugaauuaag

SEQ ID NO: 563136 - RNA, 24 nt, Human
cagaaaauccucaccaagaagcca

SEQ ID NO: 563137 - RNA, 28 nt, Human
cauugcagcacugcacacauacagugug

SEQ ID NO: 563138 - RNA, 22 nt, Human
cugaugcgaugguaggucuuuu

SEQ ID NO: 563139 - RNA, 24 nt, Human
cuggugauaacaacgaugagguuu

SEQ ID NO: 563140 - RNA, 24 nt, Human
gaaauugacaagccuuucaaacaa

SEQ ID NO: 563141 - RNA, 23 nt, Human
gauuuuugcuucaaaaacagaag

SEQ ID NO: 563142 - RNA, 18 nt, Human
ggaugauauaaaacacaa

SEQ ID NO: 563143 - RNA, 27 nt, Human
gugauaacaacgaugagguuuauuuuu

SEQ ID NO: 563144 - RNA, 25 nt, Human
uacaacagcaccggcgacuuccaaa

SEQ ID NO: 563145 - RNA, 22 nt, Human
uagcaccaugaauugugaugaa

SEQ ID NO: 563146 - RNA, 21 nt, Human
uaugaaauugacaagccuuuc

SEQ ID NO: 563147 - RNA, 23 nt, Human
ucacacuacauugucuaaggaua

SEQ ID NO: 563148 - RNA, 22 nt, Human
uccauuuuagaaacuggugggu

SEQ ID NO: 563149 - RNA, 20 nt, Human
uggcaggacuguaugcagua

SEQ ID NO: 563150 - RNA, 26 nt, Human
uggguaucacucugucagaaaauccu

SEQ ID NO: 563151 - RNA, 21 nt, Human
uggguuacaauagauagggau

SEQ ID NO: 563152 - RNA, 22 nt, Human
uggugggugugcucacguuugu

SEQ ID NO: 563153 - RNA, 22 nt, Human
ugucagaaaauccucaccaaga

SEQ ID NO: 563154 - RNA, 24 nt, Human
uguuugucaacugugaacuucaca

SEQ ID NO: 563155 - RNA, 21 nt, Human
uucaaggaauaugaaauugac

SEQ ID NO: 563156 - RNA, 23 nt, Human
uuuucauuuuagcaccaugaauu

SEQ ID NO: 563157 - RNA, 22 nt, Human
aaaacccaauuauccaacauca

SEQ ID NO: 563158 - RNA, 22 nt, Human
aaaugaaauaggagcccgagau

SEQ ID NO: 563159 - RNA, 21 nt, Human
aacaaagaacuggacaaacac

SEQ ID NO: 563160 - RNA, 25 nt, Human
aacacacaaacaaagcaaggaaaga

SEQ ID NO: 563161 - RNA, 24 nt, Human
aacuacagacagaguaaauaauac

SEQ ID NO: 563162 - RNA, 21 nt, Human
aacuggacaaacacacaaaca

SEQ ID NO: 563163 - RNA, 22 nt, Human
aagauuauuuagggagaaguga

SEQ ID NO: 563164 - RNA, 18 nt, Human
aagcaacaaaagcagaga

SEQ ID NO: 563165 - RNA, 23 nt, Human
aagcaacaaaagcagagauuuau

SEQ ID NO: 563166 - RNA, 22 nt, Human
aaugaagcaacaaaagcagaga

SEQ ID NO: 563167 - RNA, 19 nt, Human
acaaagcaaggaaagaaug

SEQ ID NO: 563168 - RNA, 20 nt, Human
acaaagcaaggaaagaauga

SEQ ID NO: 563169 - RNA, 23 nt, Human
acaaagcaaggaaagaaugaagc

SEQ ID NO: 563170 - RNA, 24 nt, Human
agaaauucuuuucuccugguuggc

SEQ ID NO: 563171 - RNA, 19 nt, Human
agaagugaaaauagacaaa

SEQ ID NO: 563172 - RNA, 21 nt, Human
agacaaaacccaauuauccaa

SEQ ID NO: 563173 - RNA, 22 nt, Human
agcccgagaucagucugaaugg

SEQ ID NO: 563174 - RNA, 21 nt, Human
cacaaacaaagcaaggaaaga

SEQ ID NO: 563175 - RNA, 19 nt, Human
cacuccacagggugggagc

SEQ ID NO: 563176 - RNA, 23 nt, Human
cagggugggagcaggcccgagga

SEQ ID NO: 563177 - RNA, 22 nt, Human
cccaauuauccaacaucacauc

SEQ ID NO: 563178 - RNA, 23 nt, Human
cucaguagcccaguccauuuucc

SEQ ID NO: 563179 - RNA, 27 nt, Human
uagacaaaacccaauuauccaacauca

SEQ ID NO: 563180 - RNA, 19 nt, Human
uauuuucacagaauuagag

SEQ ID NO: 563181 - RNA, 27 nt, Human
ugaaaaauaucucaguagcccagucca

SEQ ID NO: 563182 - RNA, 21 nt, Human
ugaacaaagaacuggacaaac

SEQ ID NO: 563183 - RNA, 20 nt, Human
ugcacacaauguaaaugaaa

SEQ ID NO: 563184 - RNA, 20 nt, Human
ugcacuccacagggugggag

SEQ ID NO: 563185 - RNA, 22 nt, Human
uggacaaacacacaaacaaagc

SEQ ID NO: 563186 - RNA, 22 nt, Human
uuaacaaauuaauuuuccuaau

SEQ ID NO: 563187 - RNA, 19 nt, Human
uuucccacugguuacuugg

SEQ ID NO: 563188 - RNA, 22 nt, Human
uuuuccuaauaucccucaaaca

SEQ ID NO: 563189 - RNA, 18 nt, Human
uuuuuuuucaagcaugga

SEQ ID NO: 563190 - RNA, 18 nt, Human
aaaauguccuaucagaaa

SEQ ID NO: 563191 - RNA, 26 nt, Human
aaacccugacaccaucuguggaaaug

SEQ ID NO: 563192 - RNA, 18 nt, Human
aaagcaccugccuuugcu

SEQ ID NO: 563193 - RNA, 21 nt, Human
agaaagaagaaaggaaaaugu

SEQ ID NO: 563194 - RNA, 18 nt, Human
agagggugcccaucgguc

SEQ ID NO: 563195 - RNA, 23 nt, Human
caaaaacaagggaaagaaaacaa

SEQ ID NO: 563196 - RNA, 18 nt, Human
caaagcaccugccuuugc

SEQ ID NO: 563197 - RNA, 24 nt, Human
caacugauggaaggaaaaggcgau

SEQ ID NO: 563198 - RNA, 24 nt, Human
caagggaaagaaaacagaaagaag

SEQ ID NO: 563199 - RNA, 23 nt, Human
caccaucuguggaaaugcuuccg

SEQ ID NO: 563200 - RNA, 22 nt, Human
caccucuguccccuucuagcuu

SEQ ID NO: 563201 - RNA, 23 nt, Human
cacucauaucauuuaugagacuu

SEQ ID NO: 563202 - RNA, 21 nt, Human
caguggggagccugcugggga

SEQ ID NO: 563203 - RNA, 18 nt, Human
caucgcaccagcuuuugc

SEQ ID NO: 563204 - RNA, 23 nt, Human
cccccuguguggcucagggauug

SEQ ID NO: 563205 - RNA, 21 nt, Human
ccccuggaagcccuaagacuu

SEQ ID NO: 563206 - RNA, 20 nt, Human
ccuccaccuuugagcuacag

SEQ ID NO: 563207 - RNA, 22 nt, Human
ccucuguccccuucuagcuuuc

SEQ ID NO: 563208 - RNA, 22 nt, Human
ccuggccuuugcuaaaaugaug

SEQ ID NO: 563209 - RNA, 18 nt, Human
cggaaucaaucauuauuc

SEQ ID NO: 563210 - RNA, 19 nt, Human
cuaagacuucuugaaaccc

SEQ ID NO: 563211 - RNA, 23 nt, Human
cuucuugaaacccugacaccauc

SEQ ID NO: 563212 - RNA, 23 nt, Human
gaaaacccaggacccaccgggcc

SEQ ID NO: 563213 - RNA, 22 nt, Human
gaacaacucugaggucggcuug

SEQ ID NO: 563214 - RNA, 20 nt, Human
gacaccaucuguggaaaugc

SEQ ID NO: 563215 - RNA, 22 nt, Human
gaggucggcuuggugugauggg

SEQ ID NO: 563216 - RNA, 18 nt, Human
gugguccuccauguuugc

SEQ ID NO: 563217 - RNA, 19 nt, Human
uaacugggaugcucccacg

SEQ ID NO: 563218 - RNA, 28 nt, Human
uauaauugauauuugaaaaaaaaacccc

SEQ ID NO: 563219 - RNA, 18 nt, Human
uauucuaaagcuuccagg

SEQ ID NO: 563220 - RNA, 21 nt, Human
ucagaaagugguccuccaugu

SEQ ID NO: 563221 - RNA, 21 nt, Human
ucagggacaccucuguccccu

SEQ ID NO: 563222 - RNA, 20 nt, Human
ucagggaugaggcacuucuc

SEQ ID NO: 563223 - RNA, 18 nt, Human
ucccauaaggaagaugaa

SEQ ID NO: 563224 - RNA, 21 nt, Human
ucucuuggugcuugagaaauu

SEQ ID NO: 563225 - RNA, 20 nt, Human
ucuguccccuucuagcuuuc

SEQ ID NO: 563226 - RNA, 24 nt, Human
ucuguggaaaugcuuccgaggucc

SEQ ID NO: 563227 - RNA, 22 nt, Human
ucuugaaacccugacaccaucu

SEQ ID NO: 563228 - RNA, 20 nt, Human
ugaaaaaaaaacccauaaau

SEQ ID NO: 563229 - RNA, 18 nt, Human
ugaaacagguaggugaca

SEQ ID NO: 563230 - RNA, 23 nt, Human
ugaaacagguaggugacaccuuu

SEQ ID NO: 563231 - RNA, 18 nt, Human
ugaacaacucugaggucg

SEQ ID NO: 563232 - RNA, 19 nt, Human
ugcagaaaacccaggaccc

SEQ ID NO: 563233 - RNA, 20 nt, Human
ugcagaaaacccaggaccca

SEQ ID NO: 563234 - RNA, 23 nt, Human
ugcagaaaacccaggacccaccg

SEQ ID NO: 563235 - RNA, 18 nt, Human
uggaaggaaaaggcgaug

SEQ ID NO: 563236 - RNA, 22 nt, Human
ugggagagggugcccaucgguc

SEQ ID NO: 563237 - RNA, 20 nt, Human
ugggaugcucccacgccccc

SEQ ID NO: 563238 - RNA, 25 nt, Human
ugguaguaacaguauuuuaaauucc

SEQ ID NO: 563239 - RNA, 21 nt, Human
uuauuucuauuuuuccuccug

SEQ ID NO: 563240 - RNA, 18 nt, Human
uuccauuuucccugaagc

SEQ ID NO: 563241 - RNA, 21 nt, Human
uuggugcuugagaaauuucag

SEQ ID NO: 563242 - RNA, 21 nt, Human
uuugcagaaaacccaggaccc

SEQ ID NO: 563243 - RNA, 26 nt, Human
uuuuccuccuggccuuugcuaaaaug

SEQ ID NO: 563244 - RNA, 24 nt, Human
aaacaaccaaaagguuaauuaaac

SEQ ID NO: 563245 - RNA, 23 nt, Human
aaacacaggcucuucuggugagg

SEQ ID NO: 563246 - RNA, 21 nt, Human
aagaaauaauuacaaagagaa

SEQ ID NO: 563247 - RNA, 22 nt, Human
aaggaaggaggugggucagggu

SEQ ID NO: 563248 - RNA, 27 nt, Human
acagcugggcuaaggacuugggugcau

SEQ ID NO: 563249 - RNA, 23 nt, Human
accaaaauguguucacugucccu

SEQ ID NO: 563250 - RNA, 21 nt, Human
accaggcucuccagagauucc

SEQ ID NO: 563251 - RNA, 20 nt, Human
aggaacaguggguguucagc

SEQ ID NO: 563252 - RNA, 19 nt, Human
aggaaggaggugggucagg

SEQ ID NO: 563253 - RNA, 18 nt, Human
aggauagguuuccucucc

SEQ ID NO: 563254 - RNA, 20 nt, Human
aggcccaagagggccagcag

SEQ ID NO: 563255 - RNA, 24 nt, Human
aggcgagagaugccaugggugggg

SEQ ID NO: 563256 - RNA, 21 nt, Human
agggccagcagggagccacca

SEQ ID NO: 563257 - RNA, 24 nt, Human
aggggaguugagguggguagcugg

SEQ ID NO: 563258 - RNA, 22 nt, Human
aguucuuuuuucuuucuuuuuu

SEQ ID NO: 563259 - RNA, 21 nt, Human
aucccuuucacucauugguga

SEQ ID NO: 563260 - RNA, 23 nt, Human
auucucuccaucccacccccuca

SEQ ID NO: 563261 - RNA, 26 nt, Human
auucucuccaucccacccccucacug

SEQ ID NO: 563262 - RNA, 18 nt, Human
caagagaggcaaauuucc

SEQ ID NO: 563263 - RNA, 22 nt, Human
caagagcgaacuccugcaggug

SEQ ID NO: 563264 - RNA, 23 nt, Human
caaguucacccccaggauagccc

SEQ ID NO: 563265 - RNA, 21 nt, Human
cacccccucacugaagguuug

SEQ ID NO: 563266 - RNA, 19 nt, Human
cagaagggcugaggcggag

SEQ ID NO: 563267 - RNA, 21 nt, Human
cagagauuccugcagccccuc

SEQ ID NO: 563268 - RNA, 18 nt, Human
cagcagaaaaacacaggc

SEQ ID NO: 563269 - RNA, 22 nt, Human
cagcuuuaccagaguggagggu

SEQ ID NO: 563270 - RNA, 25 nt, Human
caggaacaguggguguucagcagaa

SEQ ID NO: 563271 - RNA, 19 nt, Human
caggcucuccagagauucc

SEQ ID NO: 563272 - RNA, 20 nt, Human
cagggcugggcugagacgag

SEQ ID NO: 563273 - RNA, 18 nt, Human
caucgugaagcaccaggc

SEQ ID NO: 563274 - RNA, 23 nt, Human
ccaaaauguguucacugucccug

SEQ ID NO: 563275 - RNA, 22 nt, Human
ccacugggauaggaaccaaaau

SEQ ID NO: 563276 - RNA, 19 nt, Human
ccagaagcagaagggcuga

SEQ ID NO: 563277 - RNA, 20 nt, Human
cccacgaucccuuucacucu

SEQ ID NO: 563278 - RNA, 21 nt, Human
ccccagaggugcagcuuuacc

SEQ ID NO: 563279 - RNA, 28 nt, Human
ccccucacugaagguuugaaguggaagu

SEQ ID NO: 563280 - RNA, 30 nt, Human
ccccucauucccccagaggugcagcuuuaa

SEQ ID NO: 563281 - RNA, 24 nt, Human
ccucuuacccacugggauaggaac

SEQ ID NO: 563282 - RNA, 19 nt, Human
ccugcuuauguauggacag

SEQ ID NO: 563283 - RNA, 18 nt, Human
cuccaucccacccccuca

SEQ ID NO: 563284 - RNA, 20 nt, Human
cuccaucccacccccucacu

SEQ ID NO: 563285 - RNA, 19 nt, Human
cuuuucccagcuacaaaau

SEQ ID NO: 563286 - RNA, 18 nt, Human
cuuuuuuucuuuuuuucc

SEQ ID NO: 563287 - RNA, 22 nt, Human
cuuuuuuucuuuuuuuccuuuu

SEQ ID NO: 563288 - RNA, 19 nt, Human
gaacuccugcagguggcac

SEQ ID NO: 563289 - RNA, 20 nt, Human
gacagaccagcgugggcugg

SEQ ID NO: 563290 - RNA, 21 nt, Human
gauagcccuuccagaagcaga

SEQ ID NO: 563291 - RNA, 22 nt, Human
gccaugggugggggagcugcuc

SEQ ID NO: 563292 - RNA, 23 nt, Human
ggaacaguggguguucagcagaa

SEQ ID NO: 563293 - RNA, 19 nt, Human
gggaaggcauggggacaga

SEQ ID NO: 563294 - RNA, 20 nt, Human
gggaaggcauggggacagac

SEQ ID NO: 563295 - RNA, 25 nt, Human
guucuuuuuucuuucuuuuuuaauu

SEQ ID NO: 563296 - RNA, 21 nt, Human
guuggcacaagucagaguuuc

SEQ ID NO: 563297 - RNA, 19 nt, Human
uaagugccucuuacccacu

SEQ ID NO: 563298 - RNA, 19 nt, Human
uacaaagagaaaaacccca

SEQ ID NO: 563299 - RNA, 20 nt, Human
uacaaagagaaaaaccccau

SEQ ID NO: 563300 - RNA, 19 nt, Human
uacaagaaucaccagagca

SEQ ID NO: 563301 - RNA, 20 nt, Human
uacaagaaucaccagagcag

SEQ ID NO: 563302 - RNA, 19 nt, Human
ucagcagaaaaacacaggc

SEQ ID NO: 563303 - RNA, 20 nt, Human
uccagggcugggcugagacc

SEQ ID NO: 563304 - RNA, 24 nt, Human
uccagggcugggcugagacgagcg

SEQ ID NO: 563305 - RNA, 20 nt, Human
ucccaagagaggcaaauuuc

SEQ ID NO: 563306 - RNA, 27 nt, Human
ucccacccccucacugaaaggucggac

SEQ ID NO: 563307 - RNA, 18 nt, Human
ucccagagauaagugccu

SEQ ID NO: 563308 - RNA, 24 nt, Human
ucccagagauaagugccucuuacc

SEQ ID NO: 563309 - RNA, 18 nt, Human
ucccuucuuggggagggg

SEQ ID NO: 563310 - RNA, 24 nt, Human
ucucuccaucccacccccucacug

SEQ ID NO: 563311 - RNA, 20 nt, Human
ucucucggugucccugaccc

SEQ ID NO: 563312 - RNA, 20 nt, Human
ucucuggauucugaacccca

SEQ ID NO: 563313 - RNA, 21 nt, Human
ucucuggauucugaaccccaa

SEQ ID NO: 563314 - RNA, 21 nt, Human
ugaagcaccaggcucuccaga

SEQ ID NO: 563315 - RNA, 24 nt, Human
ugaagcaccaggcucuccagagau

SEQ ID NO: 563316 - RNA, 21 nt, Human
ugagagcacaaaggcuggguc

SEQ ID NO: 563317 - RNA, 23 nt, Human
ugagguggguagcugguuggaca

SEQ ID NO: 563318 - RNA, 23 nt, Human
ugcacaaacaaccaaaagguuaa

SEQ ID NO: 563319 - RNA, 18 nt, Human
ugcaucugacaugaagaa

SEQ ID NO: 563320 - RNA, 21 nt, Human
uggauucugaaccccaaagga

SEQ ID NO: 563321 - RNA, 19 nt, Human
uggcacagcugggcuaagg

SEQ ID NO: 563322 - RNA, 18 nt, Human
uggcagaggagauuuggg

SEQ ID NO: 563323 - RNA, 19 nt, Human
uggcauggcccucccugcc

SEQ ID NO: 563324 - RNA, 20 nt, Human
uggcauggcccucccugccu

SEQ ID NO: 563325 - RNA, 23 nt, Human
uggcauggcccucccugccugcu

SEQ ID NO: 563326 - RNA, 23 nt, Human
ugggauaggaaccaaaauguguu

SEQ ID NO: 563327 - RNA, 23 nt, Human
ugggucauccuauuguuggcaca

SEQ ID NO: 563328 - RNA, 22 nt, Human
uggucucuggauucugaacccc

SEQ ID NO: 563329 - RNA, 24 nt, Human
uguauggacagaguauguugucuc

SEQ ID NO: 563330 - RNA, 23 nt, Human
uuacaaagagaaaaaccccaucc

SEQ ID NO: 563331 - RNA, 19 nt, Human
uucacugucccuguuuagc

SEQ ID NO: 563332 - RNA, 24 nt, Human
uucacugucccuguuuagccaagg

SEQ ID NO: 563333 - RNA, 20 nt, Human
uucagcauucucuccauccc

SEQ ID NO: 563334 - RNA, 20 nt, Human
uuccaggaauggaaaaugcc

SEQ ID NO: 563335 - RNA, 24 nt, Human
uucccaggugugagcagaggccca

SEQ ID NO: 563336 - RNA, 20 nt, Human
uuccugcagccccucauucc

SEQ ID NO: 563337 - RNA, 21 nt, Human
uucucagucuuccagggcugg

SEQ ID NO: 563338 - RNA, 24 nt, Human
uucuuuuuucuuucuuuuuuaauu

SEQ ID NO: 563339 - RNA, 20 nt, Human
uugagguggguagcugguug

SEQ ID NO: 563340 - RNA, 24 nt, Human
uuucccagcuacaaaauacucugg

SEQ ID NO: 563341 - RNA, 22 nt, Human
uuuuuuucuuuuuuuccuuuuu

SEQ ID NO: 563342 - RNA, 24 nt, Human
aaaacuacaaaagccagcacacua

SEQ ID NO: 563343 - RNA, 20 nt, Human
aaaccaaauauaaaugcuga

SEQ ID NO: 563344 - RNA, 19 nt, Human
aaagggaauaaaugaggau

SEQ ID NO: 563345 - RNA, 23 nt, Human
aaugacaauuacucuaauacaug

SEQ ID NO: 563346 - RNA, 23 nt, Human
acaaaauguaugcgccacuaccc

SEQ ID NO: 563347 - RNA, 19 nt, Human
acaaaccaaauauaaaugg

SEQ ID NO: 563348 - RNA, 21 nt, Human
augaaagacuaauuuucuaca

SEQ ID NO: 563349 - RNA, 24 nt, Human
auguacacuuaagucauuaguagu

SEQ ID NO: 563350 - RNA, 19 nt, Human
auguuuucgcaacauuuuu

SEQ ID NO: 563351 - RNA, 26 nt, Human
caauaaguaucuugagcuugaggccc

SEQ ID NO: 563352 - RNA, 25 nt, Human
cagauucuucacagaagaaaacaau

SEQ ID NO: 563353 - RNA, 20 nt, Human
gauaacaaaauguaugcgcc

SEQ ID NO: 563354 - RNA, 19 nt, Human
gcccuggcuaaguauuccu

SEQ ID NO: 563355 - RNA, 23 nt, Human
gcccuggcuaaguauuccuuuug

SEQ ID NO: 563356 - RNA, 20 nt, Human
ggaagagguaaacugugaca

SEQ ID NO: 563357 - RNA, 18 nt, Human
ggaugcguauagucagau

SEQ ID NO: 563358 - RNA, 19 nt, Human
uacaguacauagcaacaga

SEQ ID NO: 563359 - RNA, 23 nt, Human
uacauagcaacagauucuucaca

SEQ ID NO: 563360 - RNA, 25 nt, Human
uagagguuuucuuucuaugauuagc

SEQ ID NO: 563361 - RNA, 23 nt, Human
uagcuaugaaacaaaccaaauau

SEQ ID NO: 563362 - RNA, 25 nt, Human
uauacaguacauagcaacagauucu

SEQ ID NO: 563363 - RNA, 25 nt, Human
uaugcgccacuacccauguuuucgc

SEQ ID NO: 563364 - RNA, 20 nt, Human
ucaaaacuacaaaagccagc

SEQ ID NO: 563365 - RNA, 19 nt, Human
uccucagucugagagucug

SEQ ID NO: 563366 - RNA, 19 nt, Human
ugacauaguuccccugugc

SEQ ID NO: 563367 - RNA, 21 nt, Human
ugccuucacugguaauggcuu

SEQ ID NO: 563368 - RNA, 21 nt, Human
ugugcugcugauucuuuuggg

SEQ ID NO: 563369 - RNA, 21 nt, Human
uuugauaaacucauccgugcc

SEQ ID NO: 563370 - RNA, 21 nt, Human
aaaaauguccacauauaaguc

SEQ ID NO: 563371 - RNA, 21 nt, Human
aaaauguccacauauaaguca

SEQ ID NO: 563372 - RNA, 23 nt, Human
aaacaaaauagggauaagaugca

SEQ ID NO: 563373 - RNA, 18 nt, Human
aaaugaccugauaaaaga

SEQ ID NO: 563374 - RNA, 21 nt, Human
aacuacuuuaccaaucuccau

SEQ ID NO: 563375 - RNA, 23 nt, Human
aaucacuaccucuugaacuuaag

SEQ ID NO: 563376 - RNA, 22 nt, Human
acauggguaacuaacuuaaaca

SEQ ID NO: 563377 - RNA, 25 nt, Human
acuaccacuacuauuacuaguuaau

SEQ ID NO: 563378 - RNA, 24 nt, Human
agaaaccagucaugaguuaaauaa

SEQ ID NO: 563379 - RNA, 26 nt, Human
aggcagaaacaaaauagggauaaggu

SEQ ID NO: 563380 - RNA, 19 nt, Human
agggauaagaugcagaaga

SEQ ID NO: 563381 - RNA, 21 nt, Human
agguuuuugguuucauuaucu

SEQ ID NO: 563382 - RNA, 30 nt, Human
auaaauuuccaaaauuaauacaaacagaag

SEQ ID NO: 563383 - RNA, 24 nt, Human
auaugagacuaaagucaggaauuu

SEQ ID NO: 563384 - RNA, 21 nt, Human
caaaauagggauaagaugcag

SEQ ID NO: 563385 - RNA, 23 nt, Human
caaaucauauaaucauagaacua

SEQ ID NO: 563386 - RNA, 25 nt, Human
caaauucucagauuggcccuuguua

SEQ ID NO: 563387 - RNA, 23 nt, Human
caagauauaugagacuaaaguca

SEQ ID NO: 563388 - RNA, 22 nt, Human
cacaacaaccuugugagguagg

SEQ ID NO: 563389 - RNA, 19 nt, Human
cacagcauuuuuuaaaguu

SEQ ID NO: 563390 - RNA, 23 nt, Human
cauccccauuuuaaaaggaggaa

SEQ ID NO: 563391 - RNA, 18 nt, Human
cccaaacagaagagaaca

SEQ ID NO: 563392 - RNA, 21 nt, Human
cccuucuaaagaggauuacuu

SEQ ID NO: 563393 - RNA, 18 nt, Human
cuaaaauuaguaauucug

SEQ ID NO: 563394 - RNA, 22 nt, Human
cucauuugaugcucacaacaac

SEQ ID NO: 563395 - RNA, 26 nt, Human
uaaaaaauauuaaauaaaaucaaagg

SEQ ID NO: 563396 - RNA, 22 nt, Human
uaaguaucuuuuuggaaguucu

SEQ ID NO: 563397 - RNA, 20 nt, Human
uagguagcaugcccaagguc

SEQ ID NO: 563398 - RNA, 24 nt, Human
uauuucaaauuugugaauuauguu

SEQ ID NO: 563399 - RNA, 24 nt, Human
ucaaauucucagauuggcccuugu

SEQ ID NO: 563400 - RNA, 18 nt, Human
uccacauauaagucaaau

SEQ ID NO: 563401 - RNA, 19 nt, Human
ucuaugcauuuuacuugug

SEQ ID NO: 563402 - RNA, 21 nt, Human
ucucuaauguuuggauuucug

SEQ ID NO: 563403 - RNA, 22 nt, Human
ucuuuuuucuuugaaaacagcu

SEQ ID NO: 563404 - RNA, 21 nt, Human
ugaaccgagacagucugacaa

SEQ ID NO: 563405 - RNA, 21 nt, Human
ugacaagauauaugagacuaa

SEQ ID NO: 563406 - RNA, 18 nt, Human
ugacacaauaaaaaaagg

SEQ ID NO: 563407 - RNA, 19 nt, Human
uuaauugugaauaucucug

SEQ ID NO: 563408 - RNA, 19 nt, Human
uugaaccgagacagucuga

SEQ ID NO: 563409 - RNA, 21 nt, Human
uugagaaaaucacaauugugc

SEQ ID NO: 563410 - RNA, 25 nt, Human
uuuuaugacacaaauuaguauugcu

SEQ ID NO: 563411 - RNA, 19 nt, Human
uuuuuugguggaagacaga

SEQ ID NO: 563412 - RNA, 19 nt, Human
aaaaacaaaaaacacauca

SEQ ID NO: 563413 - RNA, 21 nt, Human
aaacagaagcagggaugacaa

SEQ ID NO: 563414 - RNA, 18 nt, Human
aacaggcguucgguuuua

SEQ ID NO: 563415 - RNA, 18 nt, Human
aagguuuuuuuacugcag

SEQ ID NO: 563416 - RNA, 20 nt, Human
aaugaggaaaaggagaggaa

SEQ ID NO: 563417 - RNA, 19 nt, Human
acgaaggugaaugcugaag

SEQ ID NO: 563418 - RNA, 23 nt, Human
acucaucugcgugucccccacac

SEQ ID NO: 563419 - RNA, 22 nt, Human
aggaaaaggagaggaaagagaa

SEQ ID NO: 563420 - RNA, 23 nt, Human
aggaaagagaagaucugggcugu

SEQ ID NO: 563421 - RNA, 24 nt, Human
aggaauaaaugaggaaaaggagag

SEQ ID NO: 563422 - RNA, 21 nt, Human
aguugacaggaauaaaaagga

SEQ ID NO: 563423 - RNA, 23 nt, Human
aguugacaggaauaaaaaggaau

SEQ ID NO: 563424 - RNA, 26 nt, Human
aucacacuuaggccacuacaaugauu

SEQ ID NO: 563425 - RNA, 25 nt, Human
caaaaugaacauauaauugggaggg

SEQ ID NO: 563426 - RNA, 21 nt, Human
cacgaaggugaaugcugaaga

SEQ ID NO: 563427 - RNA, 25 nt, Human
cacucuaagaccaaacagaagcagg

SEQ ID NO: 563428 - RNA, 28 nt, Human
cacucuaagaccaaacagaagcagggau

SEQ ID NO: 563429 - RNA, 20 nt, Human
cagacgcuccaaugcuuuuc

SEQ ID NO: 563430 - RNA, 24 nt, Human
ccaauucacucaucugcguguccc

SEQ ID NO: 563431 - RNA, 25 nt, Human
ccacacggguaaggggaacaggcgu

SEQ ID NO: 563432 - RNA, 19 nt, Human
cccacacggguaaggggaa

SEQ ID NO: 563433 - RNA, 18 nt, Human
cccgucaagccccgaggc

SEQ ID NO: 563434 - RNA, 23 nt, Human
ccgccacaaucccgucaagcccc

SEQ ID NO: 563435 - RNA, 22 nt, Human
cgaaggugaaugcugaagacca

SEQ ID NO: 563436 - RNA, 20 nt, Human
cugguuucuacucaucuuuc

SEQ ID NO: 563437 - RNA, 22 nt, Human
uaaaaacaaaaaacacaucaaa

SEQ ID NO: 563438 - RNA, 19 nt, Human
uaaccagauguguuaaugg

SEQ ID NO: 563439 - RNA, 21 nt, Human
uacagcaguaaccagaugugu

SEQ ID NO: 563440 - RNA, 20 nt, Human
uccaaacacucuaagaccaa

SEQ ID NO: 563441 - RNA, 18 nt, Human
uccacagagccccagagu

SEQ ID NO: 563442 - RNA, 22 nt, Human
uccacagagccccagaguggug

SEQ ID NO: 563443 - RNA, 25 nt, Human
uccacagagccccagaguggugaca

SEQ ID NO: 563444 - RNA, 19 nt, Human
uccgaauugggagagagga

SEQ ID NO: 563445 - RNA, 21 nt, Human
ucuacaauucaguuauaucca

SEQ ID NO: 563446 - RNA, 20 nt, Human
ucuuccacagagccccagag

SEQ ID NO: 563447 - RNA, 18 nt, Human
ugacaggaauaaaaagga

SEQ ID NO: 563448 - RNA, 21 nt, Human
ugagagcguccggagguagcu

SEQ ID NO: 563449 - RNA, 26 nt, Human
ugggcugugcuggugcugaccacugg

SEQ ID NO: 563450 - RNA, 18 nt, Human
uucaguuuguuaaagaac

SEQ ID NO: 563451 - RNA, 18 nt, Human
uucuuccacagagcccca

SEQ ID NO: 563452 - RNA, 22 nt, Human
aaacaaaaaacuacucugcaac

SEQ ID NO: 563453 - RNA, 21 nt, Human
aaacagccugaaaacauacaa

SEQ ID NO: 563454 - RNA, 23 nt, Human
aaacgcagccaacgugucccccg

SEQ ID NO: 563455 - RNA, 25 nt, Human
aacuaauuauuccacccaaaauuca

SEQ ID NO: 563456 - RNA, 23 nt, Human
aaucaaauaaaagacagaucaaa

SEQ ID NO: 563457 - RNA, 21 nt, Human
acaaaaaacuacucugcaacc

SEQ ID NO: 563458 - RNA, 21 nt, Human
acaaaagaccugaagaugaua

SEQ ID NO: 563459 - RNA, 21 nt, Human
acaaccaacaacugugggccu

SEQ ID NO: 563460 - RNA, 26 nt, Human
acucauuuaguucuccccccuccccu

SEQ ID NO: 563461 - RNA, 19 nt, Human
acuguaaaaaaaaacuaga

SEQ ID NO: 563462 - RNA, 22 nt, Human
agagauauuacaguaaaaaaga

SEQ ID NO: 563463 - RNA, 22 nt, Human
agccccccaaaauuaaauccaa

SEQ ID NO: 563464 - RNA, 23 nt, Human
aggaacaaccaacaacugugggc

SEQ ID NO: 563465 - RNA, 23 nt, Human
aggaaggagguaaaaggagggac

SEQ ID NO: 563466 - RNA, 23 nt, Human
aggaauaaagacauaaucaaaga

SEQ ID NO: 563467 - RNA, 24 nt, Human
aggcaaugggcaugcauuuugagg

SEQ ID NO: 563468 - RNA, 21 nt, Human
auaaccccucccaucccuuaa

SEQ ID NO: 563469 - RNA, 21 nt, Human
auaacuguaaaaaaaaacuag

SEQ ID NO: 563470 - RNA, 20 nt, Human
caccaaauacauugugaaau

SEQ ID NO: 563471 - RNA, 22 nt, Human
cagggguccuggcaagccuuca

SEQ ID NO: 563472 - RNA, 23 nt, Human
cauagccuccuggaaaaaacaaa

SEQ ID NO: 563473 - RNA, 19 nt, Human
cauggcaaacagguuacca

SEQ ID NO: 563474 - RNA, 19 nt, Human
cauuuggccaguugcuacc

SEQ ID NO: 563475 - RNA, 23 nt, Human
ccaccuaaaguaucuucugucac

SEQ ID NO: 563476 - RNA, 20 nt, Human
ccccccaaaauuaaauccaa

SEQ ID NO: 563477 - RNA, 20 nt, Human
ccccuccccuacacaccaaa

SEQ ID NO: 563478 - RNA, 19 nt, Human
cccgccgaaaacgcagcca

SEQ ID NO: 563479 - RNA, 27 nt, Human
ccgaaaacgcagccaacgugucccccg

SEQ ID NO: 563480 - RNA, 21 nt, Human
ccuuguauaagccccccaaaa

SEQ ID NO: 563481 - RNA, 25 nt, Human
cgcagccaacgugucccccggcgcc

SEQ ID NO: 563482 - RNA, 20 nt, Human
cuaaaguaucuucugucaca

SEQ ID NO: 563483 - RNA, 19 nt, Human
cuaaaguaucuucugucca

SEQ ID NO: 563484 - RNA, 23 nt, Human
cuaauuauuccacccaaaauuca

SEQ ID NO: 563485 - RNA, 21 nt, Human
cuccuggaaaaaacaaaaaac

SEQ ID NO: 563486 - RNA, 22 nt, Human
gacugcccgacucuagagccua

SEQ ID NO: 563487 - RNA, 25 nt, Human
gagaacggggacaaagacuuaaaga

SEQ ID NO: 563488 - RNA, 24 nt, Human
gaggaacaaccaacaacugugggc

SEQ ID NO: 563489 - RNA, 22 nt, Human
gcaaugggcaugcauuuugagg

SEQ ID NO: 563490 - RNA, 22 nt, Human
gcucagggguccuggcaagccc

SEQ ID NO: 563491 - RNA, 20 nt, Human
ggaaaucauuugacuuucca

SEQ ID NO: 563492 - RNA, 18 nt, Human
ggcaugcauuuugaggag

SEQ ID NO: 563493 - RNA, 18 nt, Human
gguccuggcaagccuuca

SEQ ID NO: 563494 - RNA, 24 nt, Human
guccaaacgguagccgcuagacac

SEQ ID NO: 563495 - RNA, 19 nt, Human
guccuggcaagccuucagg

SEQ ID NO: 563496 - RNA, 19 nt, Human
guucaaaagacgauuguuc

SEQ ID NO: 563497 - RNA, 18 nt, Human
uaaaaggaaacaaggaac

SEQ ID NO: 563498 - RNA, 22 nt, Human
uaaaaggaacauaaccugagcg

SEQ ID NO: 563499 - RNA, 21 nt, Human
uaaagcugaaaacucauuuaa

SEQ ID NO: 563500 - RNA, 22 nt, Human
uaaaguaucuucugucacagga

SEQ ID NO: 563501 - RNA, 23 nt, Human
uaaaugacaaauaaccccuccca

SEQ ID NO: 563502 - RNA, 23 nt, Human
uaaaugcaagaaaauuacaauac

SEQ ID NO: 563503 - RNA, 24 nt, Human
uaacaugggguagacuguacucuu

SEQ ID NO: 563504 - RNA, 24 nt, Human
uaacuguaaaaaaaaacuagaccu

SEQ ID NO: 563505 - RNA, 24 nt, Human
uaacuuguuccuagggcaagugga

SEQ ID NO: 563506 - RNA, 18 nt, Human
uaaguauagaaucuaggu

SEQ ID NO: 563507 - RNA, 23 nt, Human
uacaaacagccugaaaacauaca

SEQ ID NO: 563508 - RNA, 24 nt, Human
uacaaacagccugaaaacauacaa

SEQ ID NO: 563509 - RNA, 25 nt, Human
uacauucauacauacauauauguuu

SEQ ID NO: 563510 - RNA, 21 nt, Human
uaccaagccaugcucuagagc

SEQ ID NO: 563511 - RNA, 20 nt, Human
uacugcacaaucaucaaggu

SEQ ID NO: 563512 - RNA, 18 nt, Human
uagauaguggggauggag

SEQ ID NO: 563513 - RNA, 20 nt, Human
uagggcaaguggauuauaac

SEQ ID NO: 563514 - RNA, 19 nt, Human
uagugcuccauggcaaaca

SEQ ID NO: 563515 - RNA, 21 nt, Human
uauaagccccccaaaauuaaa

SEQ ID NO: 563516 - RNA, 27 nt, Human
uauacaaacagccugaaaacauacaau

SEQ ID NO: 563517 - RNA, 24 nt, Human
uauguacauucauacauacauaua

SEQ ID NO: 563518 - RNA, 20 nt, Human
ucaaaauuaaauagcacuac

SEQ ID NO: 563519 - RNA, 19 nt, Human
ucaauaggaguuaaaaaua

SEQ ID NO: 563520 - RNA, 19 nt, Human
ucagauggaagaauaaaag

SEQ ID NO: 563521 - RNA, 19 nt, Human
ugaauuagagacauagccu

SEQ ID NO: 563522 - RNA, 18 nt, Human
ugacaaauaaccccuccc

SEQ ID NO: 563523 - RNA, 22 nt, Human
ugacaaauaaccccucccaucc

SEQ ID NO: 563524 - RNA, 21 nt, Human
ugcuacccuauuggacugcac

SEQ ID NO: 563525 - RNA, 20 nt, Human
uggaaaaaacaaaaaacuac

SEQ ID NO: 563526 - RNA, 21 nt, Human
uggaacagaaacauuuuacau

SEQ ID NO: 563527 - RNA, 18 nt, Human
uggaagaauaaaaggaaa

SEQ ID NO: 563528 - RNA, 22 nt, Human
uggacugcacauaggacguuuc

SEQ ID NO: 563529 - RNA, 18 nt, Human
uggcaagccuucagaaac

SEQ ID NO: 563530 - RNA, 19 nt, Human
uggcuacauaguuccaccu

SEQ ID NO: 563531 - RNA, 22 nt, Human
ugucacaggauguaucuaccag

SEQ ID NO: 563532 - RNA, 28 nt, Human
uguuuugaggaacaaccaacaacugugg

SEQ ID NO: 563533 - RNA, 18 nt, Human
uugcaaaaaaguuauugg

SEQ ID NO: 563534 - RNA, 21 nt, Human
aaaacaaaacagauccaggca

SEQ ID NO: 563535 - RNA, 21 nt, Human
aaacagauccaggcauggcca

SEQ ID NO: 563536 - RNA, 18 nt, Human
aaaccaaaacaaaacaga

SEQ ID NO: 563537 - RNA, 23 nt, Human
aaccaaaaaccaaaacaaaacag

SEQ ID NO: 563538 - RNA, 25 nt, Human
aagagguaccuuuauuugaacagaa

SEQ ID NO: 563539 - RNA, 18 nt, Human
aagcacccuggccccagg

SEQ ID NO: 563540 - RNA, 23 nt, Human
aagcccugacccaaaaaccaaaa

SEQ ID NO: 563541 - RNA, 24 nt, Human
aagcugaggcaggaggaucacuug

SEQ ID NO: 563542 - RNA, 20 nt, Human
aaggucaaggucacagugag

SEQ ID NO: 563543 - RNA, 26 nt, Human
acagugaagcccugacccaaaaacca

SEQ ID NO: 563544 - RNA, 28 nt, Human
accaaaaaccucccacugaaaauccuuu

SEQ ID NO: 563545 - RNA, 24 nt, Human
accacugcacucuagccugggcaa

SEQ ID NO: 563546 - RNA, 21 nt, Human
accaggccccuggaugcacac

SEQ ID NO: 563547 - RNA, 18 nt, Human
acugcacucuagccuggg

SEQ ID NO: 563548 - RNA, 23 nt, Human
acugcacucuagccugggcaaca

SEQ ID NO: 563549 - RNA, 20 nt, Human
agccugggcaacacagugaa

SEQ ID NO: 563550 - RNA, 24 nt, Human
agccugggcaacacagugaagccc

SEQ ID NO: 563551 - RNA, 18 nt, Human
aggcaggaggaucacuug

SEQ ID NO: 563552 - RNA, 23 nt, Human
aggcaggaggaucacuugagucc

SEQ ID NO: 563553 - RNA, 24 nt, Human
aggcaggaggaucacuugagucca

SEQ ID NO: 563554 - RNA, 23 nt, Human
aggccauucacagcuuugucugg

SEQ ID NO: 563555 - RNA, 23 nt, Human
aggccccuggaugcacacaacuc

SEQ ID NO: 563556 - RNA, 22 nt, Human
aggcuggggccggcgccaaaaa

SEQ ID NO: 563557 - RNA, 23 nt, Human
agguggauccuggggccccaggg

SEQ ID NO: 563558 - RNA, 23 nt, Human
auaaaaugcagccccugcccaca

SEQ ID NO: 563559 - RNA, 20 nt, Human
augcagccccugcccacacc

SEQ ID NO: 563560 - RNA, 23 nt, Human
caaaccaaaaaccucccacugaa

SEQ ID NO: 563561 - RNA, 19 nt, Human
cacacaacucaggcagggc

SEQ ID NO: 563562 - RNA, 21 nt, Human
cacacaacucaggcagggcac

SEQ ID NO: 563563 - RNA, 22 nt, Human
cacacaacucaggcagggcacc

SEQ ID NO: 563564 - RNA, 20 nt, Human
caccacugcacucuagccug

SEQ ID NO: 563565 - RNA, 24 nt, Human
caccacugcacucuagccugggca

SEQ ID NO: 563566 - RNA, 20 nt, Human
cacccuggccccagggcaac

SEQ ID NO: 563567 - RNA, 19 nt, Human
cacugcacucuagccuggg

SEQ ID NO: 563568 - RNA, 21 nt, Human
cacugcacucuagccugggca

SEQ ID NO: 563569 - RNA, 22 nt, Human
cacugcacucuagccugggcaa

SEQ ID NO: 563570 - RNA, 23 nt, Human
cacugcacucuagccugggcaac

SEQ ID NO: 563571 - RNA, 24 nt, Human
cacugcacucuagccugggcaaca

SEQ ID NO: 563572 - RNA, 22 nt, Human
cacuuccccaggugcacagcca

SEQ ID NO: 563573 - RNA, 23 nt, Human
cagcagcacguggcaccaggugc

SEQ ID NO: 563574 - RNA, 21 nt, Human
cagccccugcccacacccacc

SEQ ID NO: 563575 - RNA, 18 nt, Human
cagggcaaccacuucccc

SEQ ID NO: 563576 - RNA, 25 nt, Human
caugccaccagccugggggcucacc

SEQ ID NO: 563577 - RNA, 19 nt, Human
cauggcugggcagggccag

SEQ ID NO: 563578 - RNA, 30 nt, Human
ccaaaaaccaaaaaccaaaacaaaacagag

SEQ ID NO: 563579 - RNA, 21 nt, Human
ccacacccaccuggcuucagg

SEQ ID NO: 563580 - RNA, 20 nt, Human
ccacugcacucuagccuggg

SEQ ID NO: 563581 - RNA, 21 nt, Human
ccacugcacucuagccugggc

SEQ ID NO: 563582 - RNA, 23 nt, Human
ccacugcacucuagccugggcaa

SEQ ID NO: 563583 - RNA, 24 nt, Human
ccacugcacucuagccugggcaac

SEQ ID NO: 563584 - RNA, 19 nt, Human
ccaguuagguggauccugg

SEQ ID NO: 563585 - RNA, 23 nt, Human
cccaaaaaccaaaaaccaaaaca

SEQ ID NO: 563586 - RNA, 24 nt, Human
cccaaaaaccaaaaaccaaaacaa

SEQ ID NO: 563587 - RNA, 19 nt, Human
cccacacccaccuggcuuc

SEQ ID NO: 563588 - RNA, 20 nt, Human
ccccaggugcacagccaggg

SEQ ID NO: 563589 - RNA, 23 nt, Human
ccccaggugcacagccagggccc

SEQ ID NO: 563590 - RNA, 19 nt, Human
ccccuaggccauucacagc

SEQ ID NO: 563591 - RNA, 23 nt, Human
cccgcugcacgcugaccaccgug

SEQ ID NO: 563592 - RNA, 19 nt, Human
cccuggccccagggcaacc

SEQ ID NO: 563593 - RNA, 20 nt, Human
ccuggccccagggcaaccac

SEQ ID NO: 563594 - RNA, 22 nt, Human
ccugggcaacacagugaagccc

SEQ ID NO: 563595 - RNA, 19 nt, Human
ccugugauccccgcuacuu

SEQ ID NO: 563596 - RNA, 20 nt, Human
cgggaacccgggccgcgccc

SEQ ID NO: 563597 - RNA, 21 nt, Human
cugggcagggccagucccguc

SEQ ID NO: 563598 - RNA, 19 nt, Human
gaacaagcacccuggcccc

SEQ ID NO: 563599 - RNA, 24 nt, Human
gaucacuugaguccagaaggucaa

SEQ ID NO: 563600 - RNA, 24 nt, Human
gcacacaacucaggcagggcaccu

SEQ ID NO: 563601 - RNA, 22 nt, Human
gcauggccaagcgauucauggc

SEQ ID NO: 563602 - RNA, 20 nt, Human
gccccagggagcgcagcuug

SEQ ID NO: 563603 - RNA, 19 nt, Human
gccccagggcaaccacuuc

SEQ ID NO: 563604 - RNA, 21 nt, Human
gcggcucaugccugugauccc

SEQ ID NO: 563605 - RNA, 19 nt, Human
ggaaaagagguaccuuuau

SEQ ID NO: 563606 - RNA, 21 nt, Human
gggccccagggagcgcagcuu

SEQ ID NO: 563607 - RNA, 21 nt, Human
gguguggcggcucaugccugu

SEQ ID NO: 563608 - RNA, 28 nt, Human
gugugauggccggguguggcggcucaug

SEQ ID NO: 563609 - RNA, 21 nt, Human
uccaaaccaaaaaccucccac

SEQ ID NO: 563610 - RNA, 18 nt, Human
uccccgcucaggcugggg

SEQ ID NO: 563611 - RNA, 18 nt, Human
ugaagcccugacccaaaa

SEQ ID NO: 563612 - RNA, 22 nt, Human
ugacccaaaaaccaaaaaccaa

SEQ ID NO: 563613 - RNA, 20 nt, Human
ugaggcaggaggaucacuug

SEQ ID NO: 563614 - RNA, 24 nt, Human
ugaggcaggaggaucacuugaguc

SEQ ID NO: 563615 - RNA, 25 nt, Human
ugaggcaggaggaucacuugagucc

SEQ ID NO: 563616 - RNA, 22 nt, Human
ugcacagccagggcccuccugu

SEQ ID NO: 563617 - RNA, 18 nt, Human
ugcagccccugcccacac

SEQ ID NO: 563618 - RNA, 24 nt, Human
ugccugugauccccgcuacuuggg

SEQ ID NO: 563619 - RNA, 20 nt, Human
uggauccuggggccccaggg

SEQ ID NO: 563620 - RNA, 21 nt, Human
uggaugcacacaacucaggca

SEQ ID NO: 563621 - RNA, 25 nt, Human
uggaugucuccaaaccaaaaaccuc

SEQ ID NO: 563622 - RNA, 24 nt, Human
uggccggguguggcggcucaugcc

SEQ ID NO: 563623 - RNA, 23 nt, Human
uggcggcucaugccugugauccc

SEQ ID NO: 563624 - RNA, 22 nt, Human
uggcugggcagggccagucccg

SEQ ID NO: 563625 - RNA, 22 nt, Human
uggcugggcagggccagucccg

SEQ ID NO: 563626 - RNA, 22 nt, Human
uggcuucaggcuuuggaugucu

SEQ ID NO: 563627 - RNA, 24 nt, Human
ugggaagcugaggcaggaggauca

SEQ ID NO: 563628 - RNA, 18 nt, Human
uucacagcugguguggga

SEQ ID NO: 563629 - RNA, 27 nt, Human
uugaacagaacaagcacccuggcccca

SEQ ID NO: 563630 - RNA, 25 nt, Human
uugggaagcugaggcaggaggauca

SEQ ID NO: 563631 - RNA, 23 nt, Human
uugucuggcucuguacauucauu

SEQ ID NO: 563632 - RNA, 24 nt, Human
aaaaaaaaaaaggaaagcagaagg

SEQ ID NO: 563633 - RNA, 21 nt, Human
aaaaaccaaacauaaaacaga

SEQ ID NO: 563634 - RNA, 18 nt, Human
aaaaauacaaaaaucacc

SEQ ID NO: 563635 - RNA, 24 nt, Human
aaaagaaaagcaaauccauuagaa

SEQ ID NO: 563636 - RNA, 18 nt, Human
aaaauacaaccuccugcu

SEQ ID NO: 563637 - RNA, 23 nt, Human
aaacaguugauuuuaucuggaac

SEQ ID NO: 563638 - RNA, 19 nt, Human
aacauggugaaaccccguc

SEQ ID NO: 563639 - RNA, 20 nt, Human
aacauggugaaaccccgucu

SEQ ID NO: 563640 - RNA, 21 nt, Human
aacauggugaaaccccgucuc

SEQ ID NO: 563641 - RNA, 24 nt, Human
aaucgcuugaacccaggagacgga

SEQ ID NO: 563642 - RNA, 25 nt, Human
acagagcaagacucugucuccaaaa

SEQ ID NO: 563643 - RNA, 24 nt, Human
accaacauggugaaaccccgucuc

SEQ ID NO: 563644 - RNA, 24 nt, Human
acccaggagacggagguugcggug

SEQ ID NO: 563645 - RNA, 24 nt, Human
accccgucucuacuaaaaauacaa

SEQ ID NO: 563646 - RNA, 18 nt, Human
acugcacuccagccuggg

SEQ ID NO: 563647 - RNA, 18 nt, Human
acugcacuccagccuggg

SEQ ID NO: 563648 - RNA, 19 nt, Human
acugcacuccagccugggc

SEQ ID NO: 563649 - RNA, 20 nt, Human
acugcacuccagccugggca

SEQ ID NO: 563650 - RNA, 21 nt, Human
acugcacuccagccugggcaa

SEQ ID NO: 563651 - RNA, 22 nt, Human
acugcacuccagccugggcaac

SEQ ID NO: 563652 - RNA, 24 nt, Human
acugcacuccagccugggcaacag

SEQ ID NO: 563653 - RNA, 24 nt, Human
acugcacuccagccugggcaacag

SEQ ID NO: 563654 - RNA, 23 nt, Human
agacggagguugcggugagagcc

SEQ ID NO: 563655 - RNA, 24 nt, Human
agcacuuugggaggccgaggaggg

SEQ ID NO: 563656 - RNA, 24 nt, Human
agccugaccaacauggugaaaccc

SEQ ID NO: 563657 - RNA, 24 nt, Human
agccugggcaacagagcaagacuc

SEQ ID NO: 563658 - RNA, 24 nt, Human
agcugugguggcucaugccuguaa

SEQ ID NO: 563659 - RNA, 20 nt, Human
aggaguuugagaccagccug

SEQ ID NO: 563660 - RNA, 23 nt, Human
aggcaggagaaucgcuugaaccc

SEQ ID NO: 563661 - RNA, 24 nt, Human
aggcaggagaaucgcuugaaccca

SEQ ID NO: 563662 - RNA, 21 nt, Human
aggccgaggaggguggaucac

SEQ ID NO: 563663 - RNA, 20 nt, Human
aggcugaggcaggagaaucg

SEQ ID NO: 563664 - RNA, 24 nt, Human
aggcugaggcaggagaaucgcuug

SEQ ID NO: 563665 - RNA, 24 nt, Human
aggugugguggcacaugccuguaa

SEQ ID NO: 563666 - RNA, 21 nt, Human
auaaaacagaagggggccagc

SEQ ID NO: 563667 - RNA, 24 nt, Human
aucgugcuacugcacuccagccug

SEQ ID NO: 563668 - RNA, 19 nt, Human
augccuguaaucccagcac

SEQ ID NO: 563669 - RNA, 21 nt, Human
caaaauacaaccuccugcuaa

SEQ ID NO: 563670 - RNA, 24 nt, Human
caacauggugaaaccccgucucua

SEQ ID NO: 563671 - RNA, 23 nt, Human
cacuccagccugggcaacagagc

SEQ ID NO: 563672 - RNA, 20 nt, Human
cagaagggggccagcugugg

SEQ ID NO: 563673 - RNA, 22 nt, Human
cagaagggggccagcuguggug

SEQ ID NO: 563674 - RNA, 24 nt, Human
cagauacuuaggaggcugaggcag

SEQ ID NO: 563675 - RNA, 23 nt, Human
cagcacuuugggaggccgaggag

SEQ ID NO: 563676 - RNA, 26 nt, Human
cagcacuuugggaggccgaggagggu

SEQ ID NO: 563677 - RNA, 19 nt, Human
cagcagaaacucauugcau

SEQ ID NO: 563678 - RNA, 19 nt, Human
cagcggaugcuccgcagcu

SEQ ID NO: 563679 - RNA, 18 nt, Human
cagcucccgcaccggccu

SEQ ID NO: 563680 - RNA, 26 nt, Human
cauauaaaaagaaaagcaaauccauu

SEQ ID NO: 563681 - RNA, 24 nt, Human
caugccuguaaucccagcacuuug

SEQ ID NO: 563682 - RNA, 22 nt, Human
ccaaaaaaaaaaaaggaaagca

SEQ ID NO: 563683 - RNA, 18 nt, Human
ccaaaauuaccuaauuug

SEQ ID NO: 563684 - RNA, 21 nt, Human
ccaggugugguggcacaugcc

SEQ ID NO: 563685 - RNA, 23 nt, Human
ccauauaaaaagaaaagcaaauc

SEQ ID NO: 563686 - RNA, 22 nt, Human
ccgcagcucccgcaccggccug

SEQ ID NO: 563687 - RNA, 24 nt, Human
ccggcgaauccgcgcgggggucuc

SEQ ID NO: 563688 - RNA, 23 nt, Human
ccugaccaacauggugaaacccc

SEQ ID NO: 563689 - RNA, 24 nt, Human
ccugaccaacauggugaaaccccg

SEQ ID NO: 563690 - RNA, 22 nt, Human
ccugggcaacagagcaagacuc

SEQ ID NO: 563691 - RNA, 22 nt, Human
ccuguaaucccagcacuuuggg

SEQ ID NO: 563692 - RNA, 22 nt, Human
cuaaaaauacaaaaaucaccca

SEQ ID NO: 563693 - RNA, 23 nt, Human
cuaagacuagcaagucagcagaa

SEQ ID NO: 563694 - RNA, 21 nt, Human
cuacugcacuccagccugggc

SEQ ID NO: 563695 - RNA, 24 nt, Human
cuacugcacuccagccugggcaac

SEQ ID NO: 563696 - RNA, 23 nt, Human
cucaugccuguaaucccagcacu

SEQ ID NO: 563697 - RNA, 24 nt, Human
cucaugccuguaaucccagcacuu

SEQ ID NO: 563698 - RNA, 21 nt, Human
cuccaaaaaaaaaaaaggaaa

SEQ ID NO: 563699 - RNA, 19 nt, Human
gaauccauauaaaaagaaa

SEQ ID NO: 563700 - RNA, 20 nt, Human
gaauuuugaaauuuauaugg

SEQ ID NO: 563701 - RNA, 23 nt, Human
gagaaucgcuugaacccaggaga

SEQ ID NO: 563702 - RNA, 23 nt, Human
gagaucgugcuacugcacuccag

SEQ ID NO: 563703 - RNA, 21 nt, Human
gagcaagacucugucuccaaa

SEQ ID NO: 563704 - RNA, 21 nt, Human
gagccgagaucgugcuacugc

SEQ ID NO: 563705 - RNA, 23 nt, Human
gaggaggguggaucacuagguca

SEQ ID NO: 563706 - RNA, 21 nt, Human
gaucacuaggucaggaguuug

SEQ ID NO: 563707 - RNA, 22 nt, Human
gaucacuaggucaggaguuuga

SEQ ID NO: 563708 - RNA, 24 nt, Human
gaucacuaggucaggaguuugaga

SEQ ID NO: 563709 - RNA, 24 nt, Human
gcacuccagccugggcaacagagc

SEQ ID NO: 563710 - RNA, 22 nt, Human
gcaggagaaucgcuugaaccca

SEQ ID NO: 563711 - RNA, 19 nt, Human
gccagcugugguggcucau

SEQ ID NO: 563712 - RNA, 20 nt, Human
gccuguaaucccagauacuu

SEQ ID NO: 563713 - RNA, 22 nt, Human
gcuacugcacuccagccugggc

SEQ ID NO: 563714 - RNA, 24 nt, Human
gcuacugcacuccagccugggcaa

SEQ ID NO: 563715 - RNA, 23 nt, Human
ggaaagcagaagggggccgguac

SEQ ID NO: 563716 - RNA, 21 nt, Human
ggaggcugaggcaggagaauc

SEQ ID NO: 563717 - RNA, 26 nt, Human
ggagguugcggugagagccgagaucg

SEQ ID NO: 563718 - RNA, 21 nt, Human
ggcacaugccuguaaucccag

SEQ ID NO: 563719 - RNA, 18 nt, Human
ggccgaggaggguggauc

SEQ ID NO: 563720 - RNA, 24 nt, Human
gggccagcugugguggcucaugcc

SEQ ID NO: 563721 - RNA, 19 nt, Human
ggucaggaguuugagacca

SEQ ID NO: 563722 - RNA, 23 nt, Human
gguggaucacuaggucaggaguu

SEQ ID NO: 563723 - RNA, 24 nt, Human
gguggcacaugccuguaaucccag

SEQ ID NO: 563724 - RNA, 24 nt, Human
gguggcucaugccuguaaucccag

SEQ ID NO: 563725 - RNA, 23 nt, Human
guggaucacuaggucaggaguuu

SEQ ID NO: 563726 - RNA, 21 nt, Human
uaaaaagaaaagcaaauccau

SEQ ID NO: 563727 - RNA, 20 nt, Human
uaagaaggcugcacggauga

SEQ ID NO: 563728 - RNA, 22 nt, Human
uacugcacuccagccugggcaa

SEQ ID NO: 563729 - RNA, 24 nt, Human
uacugcacuccagccugggcaaca

SEQ ID NO: 563730 - RNA, 24 nt, Human
ucacuaggucaggaguuugagacc

SEQ ID NO: 563731 - RNA, 20 nt, Human
ucauccaggugcgaggacag

SEQ ID NO: 563732 - RNA, 23 nt, Human
ucgugcuacugcacuccagccug

SEQ ID NO: 563733 - RNA, 18 nt, Human
ucuccaaaaaaaaaaaag

SEQ ID NO: 563734 - RNA, 21 nt, Human
ucuccaaaaaaaaaaaaggaa

SEQ ID NO: 563735 - RNA, 21 nt, Human
ucucuacuaaaaauacaaaaa

SEQ ID NO: 563736 - RNA, 21 nt, Human
ucucuggcgucgagaggaccc

SEQ ID NO: 563737 - RNA, 21 nt, Human
ucugucuccaaaaaaaaaaaa

SEQ ID NO: 563738 - RNA, 24 nt, Human
ugaccaacauggugaaaccccguc

SEQ ID NO: 563739 - RNA, 23 nt, Human
ugagaccagccugaccaacaugg

SEQ ID NO: 563740 - RNA, 24 nt, Human
ugagaccagccugaccaacauggu

SEQ ID NO: 563741 - RNA, 20 nt, Human
ugaggcaggagaaucgcuug

SEQ ID NO: 563742 - RNA, 24 nt, Human
ugaggcaggagaaucgcuugaacc

SEQ ID NO: 563743 - RNA, 25 nt, Human
ugaggcaggagaaucgcuugaaccc

SEQ ID NO: 563744 - RNA, 24 nt, Human
ugccuguaaucccagauacuuagg

SEQ ID NO: 563745 - RNA, 23 nt, Human
ugccuguaaucccagcacuuugg

SEQ ID NO: 563746 - RNA, 23 nt, Human
ugccuguaaucccagcacuuugg

SEQ ID NO: 563747 - RNA, 20 nt, Human
ugcuaagacuagcaagucaa

SEQ ID NO: 563748 - RNA, 21 nt, Human
uggaaggaacuacaucuggaa

SEQ ID NO: 563749 - RNA, 21 nt, Human
uggaucacuaggucaggaguu

SEQ ID NO: 563750 - RNA, 21 nt, Human
uggcacaugccuguaauccca

SEQ ID NO: 563751 - RNA, 22 nt, Human
uggcacaugccuguaaucccag

SEQ ID NO: 563752 - RNA, 19 nt, Human
uggcggguuuugugguuag

SEQ ID NO: 563753 - RNA, 24 nt, Human
uggcucaugccuguaaucccagca

SEQ ID NO: 563754 - RNA, 23 nt, Human
ugggaggccgaggaggguggauc

SEQ ID NO: 563755 - RNA, 24 nt, Human
ugggaggccgaggaggguggauca

SEQ ID NO: 563756 - RNA, 24 nt, Human
ugguggcacaugccuguaauccca

SEQ ID NO: 563757 - RNA, 24 nt, Human
ugguggcucaugccuguaauccca

SEQ ID NO: 563758 - RNA, 18 nt, Human
ugucauccaggugcgagg

SEQ ID NO: 563759 - RNA, 24 nt, Human
ugugaaugaauuggaaccuaggug

SEQ ID NO: 563760 - RNA, 22 nt, Human
uuacuuuacauagagcuuuguu

SEQ ID NO: 563761 - RNA, 25 nt, Human
uugggaggccgaggaggguggauca

SEQ ID NO: 563762 - RNA, 21 nt, Human
uuuuccugucuucaaaauaca

SEQ ID NO: 563763 - RNA, 19 nt, Human
aagaggccaccugugcccc

SEQ ID NO: 563764 - RNA, 23 nt, Human
aagcaggagcagcagagggccca

SEQ ID NO: 563765 - RNA, 20 nt, Human
aagggccugaguccgacucu

SEQ ID NO: 563766 - RNA, 18 nt, Human
acaaaaauuccacaaaca

SEQ ID NO: 563767 - RNA, 19 nt, Human
acauacuuuaugcauaaga

SEQ ID NO: 563768 - RNA, 21 nt, Human
accgacaagcaggagcagcag

SEQ ID NO: 563769 - RNA, 21 nt, Human
agagggcccagaagcacugcc

SEQ ID NO: 563770 - RNA, 21 nt, Human
agagucuucaucuuucucuuc

SEQ ID NO: 563771 - RNA, 25 nt, Human
caaccgacaagcaggagcagcagag

SEQ ID NO: 563772 - RNA, 21 nt, Human
caagagagagaaaguaaauga

SEQ ID NO: 563773 - RNA, 21 nt, Human
cacaaaaauuccacaaacaga

SEQ ID NO: 563774 - RNA, 19 nt, Human
cacccugucucugcuccug

SEQ ID NO: 563775 - RNA, 18 nt, Human
cagcaugcuggcugcugg

SEQ ID NO: 563776 - RNA, 20 nt, Human
cagcuuucuuucucgguauc

SEQ ID NO: 563777 - RNA, 21 nt, Human
cauccuggucgggaucccugc

SEQ ID NO: 563778 - RNA, 18 nt, Human
caucuucauagucuucaa

SEQ ID NO: 563779 - RNA, 19 nt, Human
ccacaaaaauuccacaaac

SEQ ID NO: 563780 - RNA, 21 nt, Human
ccacaaaaauuccacaaacag

SEQ ID NO: 563781 - RNA, 18 nt, Human
ccagcgccuagcaaccga

SEQ ID NO: 563782 - RNA, 23 nt, Human
ccagcuuccaccacacagaagag

SEQ ID NO: 563783 - RNA, 22 nt, Human
ccccgaagaggccaccugugcc

SEQ ID NO: 563784 - RNA, 22 nt, Human
cccgcaggcccgggcggccgcg

SEQ ID NO: 563785 - RNA, 22 nt, Human
cccggucuuuugcgucucuucu

SEQ ID NO: 563786 - RNA, 23 nt, Human
cccuugugcugcuuuuuucucgg

SEQ ID NO: 563787 - RNA, 22 nt, Human
ccgcgguguccucggccccggc

SEQ ID NO: 563788 - RNA, 21 nt, Human
ccgggcccuucugucuuuuuc

SEQ ID NO: 563789 - RNA, 23 nt, Human
ccguacugcagcuuucuuucucg

SEQ ID NO: 563790 - RNA, 18 nt, Human
ccucguggccaugcuucc

SEQ ID NO: 563791 - RNA, 18 nt, Human
ccucucccucugucuguc

SEQ ID NO: 563792 - RNA, 23 nt, Human
ccucucgccuucuucuuuauaaa

SEQ ID NO: 563793 - RNA, 21 nt, Human
ccugacuguauggcccagaga

SEQ ID NO: 563794 - RNA, 23 nt, Human
ccuggaaguuuuguaaaugcuag

SEQ ID NO: 563795 - RNA, 19 nt, Human
ccugugccccgcacccuuc

SEQ ID NO: 563796 - RNA, 20 nt, Human
ccuugcugucuccguacugc

SEQ ID NO: 563797 - RNA, 19 nt, Human
cgcgguccucucagccaca

SEQ ID NO: 563798 - RNA, 20 nt, Human
cgcuucugaaacaguuucaa

SEQ ID NO: 563799 - RNA, 23 nt, Human
cucgaaauacucucagaaaagag

SEQ ID NO: 563800 - RNA, 24 nt, Human
cugaggucaucugcuuuccaggua

SEQ ID NO: 563801 - RNA, 22 nt, Human
cugcuccuggcauccuggucga

SEQ ID NO: 563802 - RNA, 22 nt, Human
cuggaaguuuuguaaaugcuag

SEQ ID NO: 563803 - RNA, 19 nt, Human
cuggcucucugggcuuccu

SEQ ID NO: 563804 - RNA, 24 nt, Human
cugucucugucccucuccccacga

SEQ ID NO: 563805 - RNA, 20 nt, Human
cuuacuuuacuuacugagcg

SEQ ID NO: 563806 - RNA, 25 nt, Human
cuuucuuucuuccuuggaaccaccu

SEQ ID NO: 563807 - RNA, 21 nt, Human
gaaguucuuccaguuuuucuc

SEQ ID NO: 563808 - RNA, 19 nt, Human
gacaagcaggagcagcaga

SEQ ID NO: 563809 - RNA, 18 nt, Human
gacuguauggcccagaga

SEQ ID NO: 563810 - RNA, 23 nt, Human
gagcagcagagggcccagaagca

SEQ ID NO: 563811 - RNA, 23 nt, Human
gaucuggcucucugggcuuccug

SEQ ID NO: 563812 - RNA, 19 nt, Human
gcaggcccgggcggccgcg

SEQ ID NO: 563813 - RNA, 22 nt, Human
gcgccuagcaaccgacaagcag

SEQ ID NO: 563814 - RNA, 21 nt, Human
gcgucucuucuccucucccuc

SEQ ID NO: 563815 - RNA, 23 nt, Human
gcugcuggucccaucucuuuuug

SEQ ID NO: 563816 - RNA, 22 nt, Human
gcuuccaccacacagaagagcc

SEQ ID NO: 563817 - RNA, 19 nt, Human
ggagcagcagagggcccag

SEQ ID NO: 563818 - RNA, 21 nt, Human
ggagcagcagagggcccagaa

SEQ ID NO: 563819 - RNA, 23 nt, Human
ggcccagcagguuguggugggcc

SEQ ID NO: 563820 - RNA, 19 nt, Human
ggcccgggcggccgcggug

SEQ ID NO: 563821 - RNA, 24 nt, Human
gggcccuucugucuuuuucuuuuu

SEQ ID NO: 563822 - RNA, 22 nt, Human
gggcuccuuuucaaauucuguu

SEQ ID NO: 563823 - RNA, 19 nt, Human
ggugguagauccaagagag

SEQ ID NO: 563824 - RNA, 22 nt, Human
guccugggcuccuuuucaaauu

SEQ ID NO: 563825 - RNA, 21 nt, Human
guucuucucuucccgggcucc

SEQ ID NO: 563826 - RNA, 24 nt, Human
uaaaauaaauuauauacagaauau

SEQ ID NO: 563827 - RNA, 18 nt, Human
uaccaaagaaauauucau

SEQ ID NO: 563828 - RNA, 19 nt, Human
uaccaaagaaauauucaug

SEQ ID NO: 563829 - RNA, 21 nt, Human
uacuugagaggguuguccuug

SEQ ID NO: 563830 - RNA, 23 nt, Human
uagaggaaguucuuccaguuuuu

SEQ ID NO: 563831 - RNA, 20 nt, Human
uagauccaagagagagaaag

SEQ ID NO: 563832 - RNA, 23 nt, Human
uauggcccagagauguuuucuga

SEQ ID NO: 563833 - RNA, 22 nt, Human
uauucauguaaaauaaauuaua

SEQ ID NO: 563834 - RNA, 18 nt, Human
ucaaaaugaaaaccuucu

SEQ ID NO: 563835 - RNA, 18 nt, Human
uccaagagagagaaagua

SEQ ID NO: 563836 - RNA, 18 nt, Human
uccacaaaaauuccacaa

SEQ ID NO: 563837 - RNA, 21 nt, Human
uccacaaacagaggcucugga

SEQ ID NO: 563838 - RNA, 22 nt, Human
ucccgcaggcccgggcggccgc

SEQ ID NO: 563839 - RNA, 18 nt, Human
ucccugcaccucggcucc

SEQ ID NO: 563840 - RNA, 23 nt, Human
uccgcccgcuccaggagcugccg

SEQ ID NO: 563841 - RNA, 18 nt, Human
uccucucagccacacccg

SEQ ID NO: 563842 - RNA, 20 nt, Human
uccuucagcuuuucuuucuc

SEQ ID NO: 563843 - RNA, 27 nt, Human
ucuaaaucaguuucuuccuuuucaauu

SEQ ID NO: 563844 - RNA, 19 nt, Human
ucucccucugucugucucu

SEQ ID NO: 563845 - RNA, 24 nt, Human
ucuccuucagcuuuucuuucuccc

SEQ ID NO: 563846 - RNA, 21 nt, Human
ucugccucucgauguuucucc

SEQ ID NO: 563847 - RNA, 20 nt, Human
ucugucucugucccucuccc

SEQ ID NO: 563848 - RNA, 25 nt, Human
ucuuucuuccccuuugucagagaau

SEQ ID NO: 563849 - RNA, 21 nt, Human
ugaaaaaucuaagucaaugag

SEQ ID NO: 563850 - RNA, 18 nt, Human
ugagaggguuguccuugc

SEQ ID NO: 563851 - RNA, 20 nt, Human
ugagccgaagcaguuuugua

SEQ ID NO: 563852 - RNA, 20 nt, Human
ugaggcaaaauccacaaaaa

SEQ ID NO: 563853 - RNA, 22 nt, Human
ugaggcaaaauccacaaaaauu

SEQ ID NO: 563854 - RNA, 23 nt, Human
ugccucucgauguuucuccuuca

SEQ ID NO: 563855 - RNA, 20 nt, Human
ugcuggcugcuggucccauc

SEQ ID NO: 563856 - RNA, 18 nt, Human
uggaauauuucucucuuu

SEQ ID NO: 563857 - RNA, 19 nt, Human
uguacuucgcaucuuuugc

SEQ ID NO: 563858 - RNA, 19 nt, Human
uguauggcccagagauguu

SEQ ID NO: 563859 - RNA, 21 nt, Human
ugucuccuggcccagcagguu

SEQ ID NO: 563860 - RNA, 18 nt, Human
ugucucugucccucuccc

SEQ ID NO: 563861 - RNA, 23 nt, Human
uguguucacauacuuuaugcaua

SEQ ID NO: 563862 - RNA, 23 nt, Human
uucauagucuucaaaaucaucuu

SEQ ID NO: 563863 - RNA, 20 nt, Human
uucauuaagauacauuuuca

SEQ ID NO: 563864 - RNA, 18 nt, Human
uuccccuggaaguuuugu

SEQ ID NO: 563865 - RNA, 18 nt, Human
uucccgcaggcccgggcg

SEQ ID NO: 563866 - RNA, 19 nt, Human
uugguucuucucuucccgg

SEQ ID NO: 563867 - RNA, 25 nt, Human
uuucccuguccuuuccucugcugug

SEQ ID NO: 563868 - RNA, 23 nt, Human
uuugcgguggaguaauuccuuuu

SEQ ID NO: 563869 - RNA, 21 nt, Human
uuugguucuucucuucccggg

SEQ ID NO: 563870 - RNA, 20 nt, Human
uuuucuuucucccggucuuu

SEQ ID NO: 563871 - RNA, 29 nt, Human
uuuuucccuugugcugcuuuuuucucggu

SEQ ID NO: 563872 - RNA, 18 nt, Human
uuuuuuuuuuuuuugcgg

SEQ ID NO: 563873 - RNA, 19 nt, Human
uuuuuuuuuuuuuuuuugc

SEQ ID NO: 563874 - RNA, 22 nt, Human
uuuuuuuuuuuuuuuuuugcgg

SEQ ID NO: 563875 - RNA, 25 nt, Human
uuuuuuuuuuuuuuuuuugcggugg

SEQ ID NO: 563876 - RNA, 23 nt, Human
acacacacacacacacacacaca

SEQ ID NO: 563877 - RNA, 33 nt, Human
acacacacacacacacacacacaggcauguggu

SEQ ID NO: 563878 - RNA, 25 nt, Human
acacacacacaggcauguguucacg

SEQ ID NO: 563879 - RNA, 18 nt, Human
acucggugggcccuccuc

SEQ ID NO: 563880 - RNA, 19 nt, Human
acucugagaggagcuuggg

SEQ ID NO: 563881 - RNA, 26 nt, Human
agacacagcagccuccggccccaaca

SEQ ID NO: 563882 - RNA, 21 nt, Human
aggaggggcaagcucuuuuuc

SEQ ID NO: 563883 - RNA, 21 nt, Human
aguggucucugaggcuauagc

SEQ ID NO: 563884 - RNA, 20 nt, Human
cacacacacacacacacaca

SEQ ID NO: 563885 - RNA, 20 nt, Human
cacacacacacacacacaca

SEQ ID NO: 563886 - RNA, 24 nt, Human
cacacacacacacacaggcaugug

SEQ ID NO: 563887 - RNA, 29 nt, Human
cacacacacacacaggcauguguucacgu

SEQ ID NO: 563888 - RNA, 31 nt, Human
cacacacacacacaggcauguguucacguag

SEQ ID NO: 563889 - RNA, 23 nt, Human
cacacacaggcauguguucacgu

SEQ ID NO: 563890 - RNA, 21 nt, Human
cagagcucuagugugcuggag

SEQ ID NO: 563891 - RNA, 25 nt, Human
cagccuccggccccaacacugcccu

SEQ ID NO: 563892 - RNA, 22 nt, Human
ccacugggugggcagccagcuc

SEQ ID NO: 563893 - RNA, 22 nt, Human
cccagcccugguccugacaggc

SEQ ID NO: 563894 - RNA, 21 nt, Human
ccuccggccccaacacugccc

SEQ ID NO: 563895 - RNA, 27 nt, Human
cggugggcccuccuccgugccaggccu

SEQ ID NO: 563896 - RNA, 18 nt, Human
cguauguauacauauaca

SEQ ID NO: 563897 - RNA, 26 nt, Human
cguauguauacauauacacacagugu

SEQ ID NO: 563898 - RNA, 26 nt, Human
cgugcauacaaguacacacacacaca

SEQ ID NO: 563899 - RNA, 29 nt, Human
cuacgugcauacaaguacacacacacaca

SEQ ID NO: 563900 - RNA, 26 nt, Human
cuccggccccaacacugcccuggguu

SEQ ID NO: 563901 - RNA, 25 nt, Human
cuccucgggagggcgugacgacccu

SEQ ID NO: 563902 - RNA, 18 nt, Human
cugaggcuauagcccccc

SEQ ID NO: 563903 - RNA, 23 nt, Human
cuggggcucuuucagugcuggcu

SEQ ID NO: 563904 - RNA, 23 nt, Human
cugggugggcagccagcucugug

SEQ ID NO: 563905 - RNA, 22 nt, Human
cuuugugcuggugccuacgugc

SEQ ID NO: 563906 - RNA, 26 nt, Human
gagcucuagugugcuggaggaggggc

SEQ ID NO: 563907 - RNA, 22 nt, Human
gcccugguccugacaggcaggu

SEQ ID NO: 563908 - RNA, 19 nt, Human
ggcagacacagcagccucc

SEQ ID NO: 563909 - RNA, 25 nt, Human
guacacacacacacacacacacaca

SEQ ID NO: 563910 - RNA, 25 nt, Human
guacacacacacacacacacacagu

SEQ ID NO: 563911 - RNA, 33 nt, Human
gugcauacaaguacacacacacacacacacagu

SEQ ID NO: 563912 - RNA, 20 nt, Human
uacacacacacacacacaca

SEQ ID NO: 563913 - RNA, 26 nt, Human
uacacacacacacacacacacacagg

SEQ ID NO: 563914 - RNA, 21 nt, Human
uauuagaaagagguugauucc

SEQ ID NO: 563915 - RNA, 23 nt, Human
uauuucuuuauuggggugggggu

SEQ ID NO: 563916 - RNA, 20 nt, Human
ucaugggaccacucgguggg

SEQ ID NO: 563917 - RNA, 23 nt, Human
uccaagaggguauuagaaagagg

SEQ ID NO: 563918 - RNA, 20 nt, Human
ucuuugugcuggugccuacg

SEQ ID NO: 563919 - RNA, 18 nt, Human
ucuuuuuccaagagggua

SEQ ID NO: 563920 - RNA, 19 nt, Human
ugaagacacugaugccgcu

SEQ ID NO: 563921 - RNA, 21 nt, Human
ugaggcuauagccccccacug

SEQ ID NO: 563922 - RNA, 21 nt, Human
ugcagugaagacacugaugcc

SEQ ID NO: 563923 - RNA, 23 nt, Human
uggcaggcccagcccugguccug

SEQ ID NO: 563924 - RNA, 18 nt, Human
ugggguggggguggggug

SEQ ID NO: 563925 - RNA, 24 nt, Human
uguauacauauacacacaaggcca

SEQ ID NO: 563926 - RNA, 24 nt, Human
ugugcuggugccuacgugcauaca

SEQ ID NO: 563927 - RNA, 20 nt, Human
uguguucacguauguauaca

SEQ ID NO: 563928 - RNA, 26 nt, Human
uguguucacguauguauacauauaca

SEQ ID NO: 563929 - RNA, 20 nt, Human
uguucacguauguauacauu

SEQ ID NO: 563930 - RNA, 19 nt, Human
uuagaaagagguugauucc

SEQ ID NO: 563931 - RNA, 20 nt, Human
uuccagaggaugaguggucu

SEQ ID NO: 563932 - RNA, 20 nt, Human
aacagagucacucuccaucu

SEQ ID NO: 563933 - RNA, 20 nt, Human
aagucugugcccugaagccg

SEQ ID NO: 563934 - RNA, 21 nt, Human
aaguuuuggggcaccagcuau

SEQ ID NO: 563935 - RNA, 26 nt, Human
accaauggcagggggaaaagguaguc

SEQ ID NO: 563936 - RNA, 22 nt, Human
agacugagguaggagguacacu

SEQ ID NO: 563937 - RNA, 18 nt, Human
agaggccacagcagcauc

SEQ ID NO: 563938 - RNA, 18 nt, Human
agggagggagguggaagu

SEQ ID NO: 563939 - RNA, 27 nt, Human
agggagggagguggaaguuuugggggg

SEQ ID NO: 563940 - RNA, 18 nt, Human
agguggccagggagggag

SEQ ID NO: 563941 - RNA, 21 nt, Human
auccucgccugccuucugcca

SEQ ID NO: 563942 - RNA, 20 nt, Human
cacaggcacacacauucucu

SEQ ID NO: 563943 - RNA, 19 nt, Human
cacauaaacugcucuuggc

SEQ ID NO: 563944 - RNA, 18 nt, Human
cagccccuguggccuccu

SEQ ID NO: 563945 - RNA, 21 nt, Human
caggagcagaggccaggccag

SEQ ID NO: 563946 - RNA, 19 nt, Human
caucuuguucacugugaac

SEQ ID NO: 563947 - RNA, 19 nt, Human
ccagggcccagcccuucuc

SEQ ID NO: 563948 - RNA, 20 nt, Human
cccacaggcacacacauucu

SEQ ID NO: 563949 - RNA, 21 nt, Human
cccagagguucugacuggggc

SEQ ID NO: 563950 - RNA, 24 nt, Human
ccccuugagagcaggagcagaggc

SEQ ID NO: 563951 - RNA, 20 nt, Human
cccuugagagcaggagcaga

SEQ ID NO: 563952 - RNA, 21 nt, Human
ccucgccugccuucugccaac

SEQ ID NO: 563953 - RNA, 18 nt, Human
cgccugccuucugccaac

SEQ ID NO: 563954 - RNA, 22 nt, Human
cgucccgcucuugcugagugca

SEQ ID NO: 563955 - RNA, 22 nt, Human
cucuccaucucugcuggcuggg

SEQ ID NO: 563956 - RNA, 18 nt, Human
cugagaucccagagguuc

SEQ ID NO: 563957 - RNA, 20 nt, Human
cuuggcaaagauuuguuuca

SEQ ID NO: 563958 - RNA, 19 nt, Human
gaccaggcucacaaggcuc

SEQ ID NO: 563959 - RNA, 27 nt, Human
gagggaaggaagaauucuagaggacag

SEQ ID NO: 563960 - RNA, 18 nt, Human
gcaggagcagaggccagg

SEQ ID NO: 563961 - RNA, 25 nt, Human
ggcaaaaaaaauacucaguggcugu

SEQ ID NO: 563962 - RNA, 20 nt, Human
ggccaggccagcuucacuga

SEQ ID NO: 563963 - RNA, 25 nt, Human
ggcugguagcuggucuuguuccagg

SEQ ID NO: 563964 - RNA, 23 nt, Human
gggaaggaagaauucuagaggac

SEQ ID NO: 563965 - RNA, 19 nt, Human
gggggagggaaggaagaau

SEQ ID NO: 563966 - RNA, 18 nt, Human
ggugugggggagggaagg

SEQ ID NO: 563967 - RNA, 23 nt, Human
gugaacuccuugaaaggaggccu

SEQ ID NO: 563968 - RNA, 23 nt, Human
uaacccgggacugguuggugcaa

SEQ ID NO: 563969 - RNA, 18 nt, Human
uagagacccacaggcaca

SEQ ID NO: 563970 - RNA, 18 nt, Human
uaggggagcuaaggggug

SEQ ID NO: 563971 - RNA, 24 nt, Human
ucacugagaucccagagguucuga

SEQ ID NO: 563972 - RNA, 22 nt, Human
ucccuggugcccggcccagcac

SEQ ID NO: 563973 - RNA, 18 nt, Human
uccuagcccaggauaggg

SEQ ID NO: 563974 - RNA, 19 nt, Human
uccucgccugccuucugcc

SEQ ID NO: 563975 - RNA, 24 nt, Human
uccucucacauagacugagguagg

SEQ ID NO: 563976 - RNA, 20 nt, Human
uccuugaaaggaggccucug

SEQ ID NO: 563977 - RNA, 21 nt, Human
ucucugcuggcugggucugau

SEQ ID NO: 563978 - RNA, 23 nt, Human
ucugccaacagagucacucucca

SEQ ID NO: 563979 - RNA, 19 nt, Human
ucugugcccugaagccaga

SEQ ID NO: 563980 - RNA, 30 nt, Human
ugaaaagcagccccuugagagcaggagcag

SEQ ID NO: 563981 - RNA, 21 nt, Human
uggaaguuuuggggcaccagc

SEQ ID NO: 563982 - RNA, 18 nt, Human
uggcugggucugauccug

SEQ ID NO: 563983 - RNA, 19 nt, Human
ugggcaucccuggcuucua

SEQ ID NO: 563984 - RNA, 19 nt, Human
ugguugaaaagcagccccu

SEQ ID NO: 563985 - RNA, 24 nt, Human
uugaaaagcagccccuugagagca

SEQ ID NO: 563986 - RNA, 19 nt, Human
uugcagggacagaaugaug

SEQ ID NO: 563987 - RNA, 20 nt, Human
aagucuacuggauacccaaa

SEQ ID NO: 563988 - RNA, 23 nt, Human
agcagacagaucuccugcuucag

SEQ ID NO: 563989 - RNA, 21 nt, Human
auacccaaaucccuugaauga

SEQ ID NO: 563990 - RNA, 19 nt, Human
uaaaacauagucuucuuuc

SEQ ID NO: 563991 - RNA, 20 nt, Human
aaagcccgacacagagcagg

SEQ ID NO: 563992 - RNA, 18 nt, Human
aaaggaagaaucuggacu

SEQ ID NO: 563993 - RNA, 24 nt, Human
aacacauuguuucccugggacuuu

SEQ ID NO: 563994 - RNA, 25 nt, Human
aagcaccuccaauguaccaggaucc

SEQ ID NO: 563995 - RNA, 18 nt, Human
acacauuguuucccuggg

SEQ ID NO: 563996 - RNA, 20 nt, Human
accagccaaagcccgacaca

SEQ ID NO: 563997 - RNA, 21 nt, Human
acccuccuuccuucuugguuu

SEQ ID NO: 563998 - RNA, 19 nt, Human
acucacccuccuuccuucu

SEQ ID NO: 563999 - RNA, 19 nt, Human
agacaggggagggggagau

SEQ ID NO: 564000 - RNA, 18 nt, Human
agacaggguuucuccaug

SEQ ID NO: 564001 - RNA, 20 nt, Human
agacaggguuucuccaugcu

SEQ ID NO: 564002 - RNA, 23 nt, Human
agacaggguuucuccaugcuggc

SEQ ID NO: 564003 - RNA, 19 nt, Human
agaguuggggugagaauuc

SEQ ID NO: 564004 - RNA, 23 nt, Human
agaucuuuuaaccacacugagcc

SEQ ID NO: 564005 - RNA, 22 nt, Human
agccaacaagaggaucuggcau

SEQ ID NO: 564006 - RNA, 22 nt, Human
agcugcuuagagcgguuucaga

SEQ ID NO: 564007 - RNA, 21 nt, Human
aggcaguaagcuggccuuggg

SEQ ID NO: 564008 - RNA, 19 nt, Human
aggcgcaaaccaccacgcc

SEQ ID NO: 564009 - RNA, 20 nt, Human
aggggguggggguagaccag

SEQ ID NO: 564010 - RNA, 22 nt, Human
aguagagacaggguuucuccau

SEQ ID NO: 564011 - RNA, 23 nt, Human
agucugggcuuggcaguugggca

SEQ ID NO: 564012 - RNA, 18 nt, Human
aguggcugggauuacagg

SEQ ID NO: 564013 - RNA, 19 nt, Human
aguggcugggauuacaggc

SEQ ID NO: 564014 - RNA, 19 nt, Human
aguggcugggauuacaggc

SEQ ID NO: 564015 - RNA, 21 nt, Human
auucacaguuacucaagcacc

SEQ ID NO: 564016 - RNA, 23 nt, Human
auuuuguauuuuuaguagagaca

SEQ ID NO: 564017 - RNA, 24 nt, Human
caaaccaccacgcccagccaauuu

SEQ ID NO: 564018 - RNA, 20 nt, Human
caauguaccaggauccugug

SEQ ID NO: 564019 - RNA, 18 nt, Human
cacaguuacucaagcacc

SEQ ID NO: 564020 - RNA, 18 nt, Human
caccagccaaagcccgac

SEQ ID NO: 564021 - RNA, 25 nt, Human
caccagccaaagcccgacacagagc

SEQ ID NO: 564022 - RNA, 21 nt, Human
cacugcaaccucugccucccg

SEQ ID NO: 564023 - RNA, 23 nt, Human
cacugcaaccucugccucccggg

SEQ ID NO: 564024 - RNA, 19 nt, Human
cauguagagaugaccgagu

SEQ ID NO: 564025 - RNA, 19 nt, Human
cauucuaggaaaggaagaa

SEQ ID NO: 564026 - RNA, 23 nt, Human
ccaauguaccaggauccugugcu

SEQ ID NO: 564027 - RNA, 24 nt, Human
ccaauuuuguauuuuuaguagaga

SEQ ID NO: 564028 - RNA, 19 nt, Human
ccaccagccaaagcccgac

SEQ ID NO: 564029 - RNA, 22 nt, Human
cccgacacagagcaggcuucag

SEQ ID NO: 564030 - RNA, 18 nt, Human
cccuccuuccuucuuggu

SEQ ID NO: 564031 - RNA, 23 nt, Human
ccuguauggggucaugcgucacu

SEQ ID NO: 564032 - RNA, 22 nt, Human
ccuugggggacagggcucuagc

SEQ ID NO: 564033 - RNA, 19 nt, Human
cgacacagagcaggcuuca

SEQ ID NO: 564034 - RNA, 21 nt, Human
cucaagcaccuccaauguacc

SEQ ID NO: 564035 - RNA, 24 nt, Human
cucacugcaaccucugccucccgg

SEQ ID NO: 564036 - RNA, 23 nt, Human
cucagcacuucccuagcccugac

SEQ ID NO: 564037 - RNA, 20 nt, Human
cuccaugcuggccagacuuc

SEQ ID NO: 564038 - RNA, 23 nt, Human
cucgaguggcugggauuacaggc

SEQ ID NO: 564039 - RNA, 19 nt, Human
cucuuggcucugccaccuu

SEQ ID NO: 564040 - RNA, 21 nt, Human
cucuuguugugcaggcuggag

SEQ ID NO: 564041 - RNA, 22 nt, Human
cucuuguugugcaggcuggagu

SEQ ID NO: 564042 - RNA, 18 nt, Human
cugagccaacaagaggau

SEQ ID NO: 564043 - RNA, 19 nt, Human
cugcaaccucugccucccg

SEQ ID NO: 564044 - RNA, 24 nt, Human
cugcaaccucugccucccggguuc

SEQ ID NO: 564045 - RNA, 18 nt, Human
cuuccuucuugguuuucu

SEQ ID NO: 564046 - RNA, 19 nt, Human
cuuggcaguugggcaaauc

SEQ ID NO: 564047 - RNA, 24 nt, Human
gacuauguuccuguauucacaguu

SEQ ID NO: 564048 - RNA, 20 nt, Human
gagacaggguuucuccaugc

SEQ ID NO: 564049 - RNA, 21 nt, Human
gagacaggguuucuccaugcu

SEQ ID NO: 564050 - RNA, 19 nt, Human
gagcaggcuucagacagcu

SEQ ID NO: 564051 - RNA, 20 nt, Human
gaggggaggcaguaagcugg

SEQ ID NO: 564052 - RNA, 19 nt, Human
gcaaaccaccacgcccagc

SEQ ID NO: 564053 - RNA, 19 nt, Human
gcaguaagcuggccuuggg

SEQ ID NO: 564054 - RNA, 22 nt, Human
gcaguggaugggcagaacugga

SEQ ID NO: 564055 - RNA, 23 nt, Human
gcucugccaccuuccaagaauga

SEQ ID NO: 564056 - RNA, 25 nt, Human
gcuggagugcaauggcacugucccg

SEQ ID NO: 564057 - RNA, 18 nt, Human
gcuggccagacuucaugu

SEQ ID NO: 564058 - RNA, 20 nt, Human
ggagacaggggagggggaga

SEQ ID NO: 564059 - RNA, 18 nt, Human
ggaggagacaggggaggg

SEQ ID NO: 564060 - RNA, 20 nt, Human
gggacaggcaggccugcauu

SEQ ID NO: 564061 - RNA, 18 nt, Human
gggaggggaggcaguaag

SEQ ID NO: 564062 - RNA, 22 nt, Human
gggaggggaggcaguaagcugg

SEQ ID NO: 564063 - RNA, 22 nt, Human
gggguggggguagaccagaggg

SEQ ID NO: 564064 - RNA, 20 nt, Human
gguggggguagaccagaggg

SEQ ID NO: 564065 - RNA, 23 nt, Human
gugcaauggcacugucccggcuc

SEQ ID NO: 564066 - RNA, 18 nt, Human
guggcugggauuacaggc

SEQ ID NO: 564067 - RNA, 19 nt, Human
guggggguagaccagaggg

SEQ ID NO: 564068 - RNA, 22 nt, Human
guugggcaaauccagguuuacu

SEQ ID NO: 564069 - RNA, 22 nt, Human
uaaaagggacucgaaaaucuua

SEQ ID NO: 564070 - RNA, 21 nt, Human
uaggaaaggaagaaucuggac

SEQ ID NO: 564071 - RNA, 24 nt, Human
uaggggguggggguagaccagagg

SEQ ID NO: 564072 - RNA, 24 nt, Human
uaguagagacaggguuucuccaug

SEQ ID NO: 564073 - RNA, 27 nt, Human
uauccuugucuuucauaaaauuagggg

SEQ ID NO: 564074 - RNA, 21 nt, Human
uaugggaggagacaggggagg

SEQ ID NO: 564075 - RNA, 24 nt, Human
ucacucacccuccuuccuucuugg

SEQ ID NO: 564076 - RNA, 24 nt, Human
ucacugcaaccucugccucccggg

SEQ ID NO: 564077 - RNA, 25 nt, Human
ucacugcaaccucugccucccgggu

SEQ ID NO: 564078 - RNA, 22 nt, Human
uccaccagccaaagcccgacac

SEQ ID NO: 564079 - RNA, 21 nt, Human
uccaccuguaagaugaggagg

SEQ ID NO: 564080 - RNA, 20 nt, Human
uccaggugggaugccaggcg

SEQ ID NO: 564081 - RNA, 19 nt, Human
ucccggguucaaaugauuc

SEQ ID NO: 564082 - RNA, 21 nt, Human
ucccggguucaaaugauucuc

SEQ ID NO: 564083 - RNA, 18 nt, Human
ucccuagcccugacauuc

SEQ ID NO: 564084 - RNA, 21 nt, Human
uccugagccaacaagaggauc

SEQ ID NO: 564085 - RNA, 24 nt, Human
ucucgaguggcugggauuacaggc

SEQ ID NO: 564086 - RNA, 18 nt, Human
ucuuguugugcaggcugg

SEQ ID NO: 564087 - RNA, 22 nt, Human
ugacacugacugaggcuggggg

SEQ ID NO: 564088 - RNA, 23 nt, Human
ugacauucuaggaaaggaagaau

SEQ ID NO: 564089 - RNA, 18 nt, Human
ugacugaggcugggggag

SEQ ID NO: 564090 - RNA, 19 nt, Human
ugagggggaggggaggcag

SEQ ID NO: 564091 - RNA, 22 nt, Human
ugcaggcuggagugcaauggca

SEQ ID NO: 564092 - RNA, 23 nt, Human
uggaagaacaguaauucggaguc

SEQ ID NO: 564093 - RNA, 24 nt, Human
uggaagggggacuggaagaacagu

SEQ ID NO: 564094 - RNA, 24 nt, Human
uggaccuccccacugagggcucac

SEQ ID NO: 564095 - RNA, 24 nt, Human
uggagugcaauggcacugucccgg

SEQ ID NO: 564096 - RNA, 18 nt, Human
uggcaugggcugagcucc

SEQ ID NO: 564097 - RNA, 19 nt, Human
ugggauuacaggcgcaaac

SEQ ID NO: 564098 - RNA, 22 nt, Human
ugggauuacaggcgcaaaccac

SEQ ID NO: 564099 - RNA, 24 nt, Human
ugggauuacaggcgcaaaccacca

SEQ ID NO: 564100 - RNA, 22 nt, Human
uguaagaugaggagggcaaugc

SEQ ID NO: 564101 - RNA, 19 nt, Human
uguugugcaggcuggagug

SEQ ID NO: 564102 - RNA, 24 nt, Human
uuaguagagacaggguuucuccau

SEQ ID NO: 564103 - RNA, 19 nt, Human
uuauagagccuguaugggg

SEQ ID NO: 564104 - RNA, 18 nt, Human
uucacaguuacucaagca

SEQ ID NO: 564105 - RNA, 23 nt, Human
uucauguaugggaggagacaggg

SEQ ID NO: 564106 - RNA, 18 nt, Human
uuccaagaaugacaccuu

SEQ ID NO: 564107 - RNA, 22 nt, Human
uucccuagcccugacauucuag

SEQ ID NO: 564108 - RNA, 24 nt, Human
uucuccaugcuggccagacuucau

SEQ ID NO: 564109 - RNA, 19 nt, Human
uugggcaaauccagguuua

SEQ ID NO: 564110 - RNA, 23 nt, Human
uuguugugcaggcuggagugcaa

SEQ ID NO: 564111 - RNA, 19 nt, Human
uuuuguauuuuuaguagag

SEQ ID NO: 564112 - RNA, 20 nt, Human
uuuuguauuuuuaguagaga

SEQ ID NO: 564113 - RNA, 19 nt, Human
aagagcugcaacucaaaca

SEQ ID NO: 564114 - RNA, 19 nt, Human
acaaaaauacaaagcucug

SEQ ID NO: 564115 - RNA, 22 nt, Human
acaguacguaacaaaaauacaa

SEQ ID NO: 564116 - RNA, 20 nt, Human
accaccacuucuacccaaca

SEQ ID NO: 564117 - RNA, 19 nt, Human
acuucuacccaacagcccc

SEQ ID NO: 564118 - RNA, 27 nt, Human
agaagaagagcugcaacucaaacagaa

SEQ ID NO: 564119 - RNA, 20 nt, Human
agaggagggcuggagaggcc

SEQ ID NO: 564120 - RNA, 20 nt, Human
agggugggugggaaggugga

SEQ ID NO: 564121 - RNA, 18 nt, Human
caccacacugucuuguag

SEQ ID NO: 564122 - RNA, 22 nt, Human
caccaccacuucuacccaacag

SEQ ID NO: 564123 - RNA, 24 nt, Human
cagaagaagagcugcaacucaaac

SEQ ID NO: 564124 - RNA, 23 nt, Human
cagggagcccuuggcugaagccu

SEQ ID NO: 564125 - RNA, 18 nt, Human
ccaacagccccuugccag

SEQ ID NO: 564126 - RNA, 20 nt, Human
ccacuagagccccccgagga

SEQ ID NO: 564127 - RNA, 21 nt, Human
cccaccaccacuucuacccaa

SEQ ID NO: 564128 - RNA, 22 nt, Human
cccccaccaccacuucuaccca

SEQ ID NO: 564129 - RNA, 30 nt, Human
ccccccaccaccacuucuacccaacagccc

SEQ ID NO: 564130 - RNA, 32 nt, Human
ccccccaccaccacuucuacccaacagccccc

SEQ ID NO: 564131 - RNA, 19 nt, Human
cccccgaggaucccggcuc

SEQ ID NO: 564132 - RNA, 31 nt, Human
cccccgaggaucccggcucacagagcggagg

SEQ ID NO: 564133 - RNA, 18 nt, Human
cccuuggcugaagccugg

SEQ ID NO: 564134 - RNA, 19 nt, Human
cccuuggcugaagccugga

SEQ ID NO: 564135 - RNA, 18 nt, Human
ccgccgcagcccaguccc

SEQ ID NO: 564136 - RNA, 20 nt, Human
ccggguaucagccgcgcgcu

SEQ ID NO: 564137 - RNA, 21 nt, Human
ccuggacgcugucccugaggu

SEQ ID NO: 564138 - RNA, 22 nt, Human
cgccgccgcagcuccugcgggc

SEQ ID NO: 564139 - RNA, 22 nt, Human
cgggagaggacuaaccgccgca

SEQ ID NO: 564140 - RNA, 23 nt, Human
cuagagccccccgaggaucccgg

SEQ ID NO: 564141 - RNA, 25 nt, Human
cuccugcgggcaauaugucggaggc

SEQ ID NO: 564142 - RNA, 23 nt, Human
cugaagccuggacgcugucccug

SEQ ID NO: 564143 - RNA, 21 nt, Human
ggugggugggaagguggauac

SEQ ID NO: 564144 - RNA, 22 nt, Human
uaucaaagaaacaguacguaac

SEQ ID NO: 564145 - RNA, 23 nt, Human
uaucaaagaaacaguacguaaca

SEQ ID NO: 564146 - RNA, 20 nt, Human
ucccccccaccaccacuucu

SEQ ID NO: 564147 - RNA, 18 nt, Human
ucccggguaucagccgcg

SEQ ID NO: 564148 - RNA, 18 nt, Human
ucggaggcgacggcggcc

SEQ ID NO: 564149 - RNA, 20 nt, Human
ucguccucccaucuccuccc

SEQ ID NO: 564150 - RNA, 23 nt, Human
ugccagggagcccuuggcugaag

SEQ ID NO: 564151 - RNA, 20 nt, Human
ugcuggccuggacuggcagc

SEQ ID NO: 564152 - RNA, 19 nt, Human
ugguggauuuuuuugucuu

SEQ ID NO: 564153 - RNA, 22 nt, Human
uucagggaggugugggagggug

SEQ ID NO: 564154 - RNA, 21 nt, Human
uuugucccccccaccaccacu

SEQ ID NO: 564155 - RNA, 20 nt, Human
uuugucuuuuguccccccca

SEQ ID NO: 564156 - RNA, 21 nt, Human
uuuugucuuuuguccccccca

SEQ ID NO: 564157 - RNA, 18 nt, Human
aaacagggacgaaggcgg

SEQ ID NO: 564158 - RNA, 24 nt, Human
aaacuccaggagcagcugcuggcg

SEQ ID NO: 564159 - RNA, 22 nt, Human
aacuuggucaguuacaaaacag

SEQ ID NO: 564160 - RNA, 24 nt, Human
acgaaggcgggaggaagcccagug

SEQ ID NO: 564161 - RNA, 22 nt, Human
agcagguaguagagccccaggg

SEQ ID NO: 564162 - RNA, 23 nt, Human
agcccggaggcgcgccaaggccc

SEQ ID NO: 564163 - RNA, 18 nt, Human
aggaagcccagugucacc

SEQ ID NO: 564164 - RNA, 23 nt, Human
aggaagcccagugucaccaggug

SEQ ID NO: 564165 - RNA, 18 nt, Human
aggcaggaugucgggggc

SEQ ID NO: 564166 - RNA, 20 nt, Human
aggcccgggcgggcaggggc

SEQ ID NO: 564167 - RNA, 22 nt, Human
cacagcccggaggcgcgccaag

SEQ ID NO: 564168 - RNA, 19 nt, Human
caccaggugggaccgggug

SEQ ID NO: 564169 - RNA, 21 nt, Human
cacccgggacccaacuugguc

SEQ ID NO: 564170 - RNA, 19 nt, Human
cagcucugcggcacagccc

SEQ ID NO: 564171 - RNA, 20 nt, Human
caggagcagcugcuggcgcc

SEQ ID NO: 564172 - RNA, 19 nt, Human
cagggugaggcuccccacc

SEQ ID NO: 564173 - RNA, 18 nt, Human
ccaggagcagcugcuggc

SEQ ID NO: 564174 - RNA, 18 nt, Human
ccccacccgggacccaaa

SEQ ID NO: 564175 - RNA, 25 nt, Human
ccccagggagagcagguccccgugg

SEQ ID NO: 564176 - RNA, 20 nt, Human
ccccagggugaggcucccca

SEQ ID NO: 564177 - RNA, 22 nt, Human
ccccgggccccgagcgcggccc

SEQ ID NO: 564178 - RNA, 18 nt, Human
ccucugcagcagcguguc

SEQ ID NO: 564179 - RNA, 24 nt, Human
cggagaugugcgccccggggaugg

SEQ ID NO: 564180 - RNA, 18 nt, Human
cgggaggaagcccagugu

SEQ ID NO: 564181 - RNA, 19 nt, Human
cgggaggaagcccaguguc

SEQ ID NO: 564182 - RNA, 19 nt, Human
cgggugccgggccuguggg

SEQ ID NO: 564183 - RNA, 20 nt, Human
cuccaggagcagcugcuggc

SEQ ID NO: 564184 - RNA, 19 nt, Human
cugcagcagcguguccucc

SEQ ID NO: 564185 - RNA, 23 nt, Human
cugcagcagcguguccuccaggu

SEQ ID NO: 564186 - RNA, 23 nt, Human
gagcagcugcuggcgccggggca

SEQ ID NO: 564187 - RNA, 23 nt, Human
gcaccacgguccugugccccacc

SEQ ID NO: 564188 - RNA, 23 nt, Human
gccccagggagagcagguccccg

SEQ ID NO: 564189 - RNA, 19 nt, Human
gccgggccugugggggugu

SEQ ID NO: 564190 - RNA, 21 nt, Human
gcgccaaggcccgggcgggca

SEQ ID NO: 564191 - RNA, 20 nt, Human
gcggccccgcacagccggcc

SEQ ID NO: 564192 - RNA, 19 nt, Human
gcugagaggcugaugcugg

SEQ ID NO: 564193 - RNA, 18 nt, Human
ggcugggccugcgcgggg

SEQ ID NO: 564194 - RNA, 18 nt, Human
ggggaggcggcuccccgg

SEQ ID NO: 564195 - RNA, 18 nt, Human
uccccgcggccuggccgc

SEQ ID NO: 564196 - RNA, 21 nt, Human
ugaguaggggaggcggcuccc

SEQ ID NO: 564197 - RNA, 21 nt, Human
ugggccugcgcgggguccuug

SEQ ID NO: 564198 - RNA, 18 nt, Human
uuggucaguuacaaaaca

SEQ ID NO: 564199 - RNA, 19 nt, Human
agccaguaaaguugacuca

SEQ ID NO: 564200 - RNA, 24 nt, Human
aggugcuggaagucucuucagacu

SEQ ID NO: 564201 - RNA, 25 nt, Human
auauacauauauccauccacagaua

SEQ ID NO: 564202 - RNA, 21 nt, Human
auucugauuuugacucccauc

SEQ ID NO: 564203 - RNA, 24 nt, Human
cacacacauauauauuucugcaug

SEQ ID NO: 564204 - RNA, 27 nt, Human
cagauacacacacacauauauauuucu

SEQ ID NO: 564205 - RNA, 19 nt, Human
cagcaucucuauuaucuca

SEQ ID NO: 564206 - RNA, 24 nt, Human
ccuuuauuuucaguaucauagaau

SEQ ID NO: 564207 - RNA, 19 nt, Human
gucaggaggguucuugcuc

SEQ ID NO: 564208 - RNA, 23 nt, Human
uacacacacacauauauauuucu

SEQ ID NO: 564209 - RNA, 24 nt, Human
uauauuucugcauguauauauaca

SEQ ID NO: 564210 - RNA, 23 nt, Human
uaucauagaauuuaaauacagag

SEQ ID NO: 564211 - RNA, 25 nt, Human
uaucauagaauuuaaauacagaguc

SEQ ID NO: 564212 - RNA, 18 nt, Human
uaucugaagacuccgcug

SEQ ID NO: 564213 - RNA, 20 nt, Human
uccacagauacacacacaca

SEQ ID NO: 564214 - RNA, 24 nt, Human
uccacagauacacacacacauaua

SEQ ID NO: 564215 - RNA, 23 nt, Human
uccacugacaacuucugcacauc

SEQ ID NO: 564216 - RNA, 24 nt, Human
uccacugacaacuucugcacaucg

SEQ ID NO: 564217 - RNA, 31 nt, Human
uccauccacagauacacacacacauauagug

SEQ ID NO: 564218 - RNA, 19 nt, Human
ucccauccuccaccauuua

SEQ ID NO: 564219 - RNA, 19 nt, Human
ucugcauguauauauacau

SEQ ID NO: 564220 - RNA, 21 nt, Human
ucugcuuggccguauuugaag

SEQ ID NO: 564221 - RNA, 21 nt, Human
ugaauacauaucuauguucug

SEQ ID NO: 564222 - RNA, 27 nt, Human
ugacucccauccuccaccauuuacucc

SEQ ID NO: 564223 - RNA, 22 nt, Human
uuaauacuauuuuccacugaca

SEQ ID NO: 564224 - RNA, 21 nt, Human
uuccugagccaguaaaguuga

SEQ ID NO: 564225 - RNA, 22 nt, Human
aaaaaugcuuuggaagcuugag

SEQ ID NO: 564226 - RNA, 23 nt, Human
aaaccauaaucccacaccuacaa

SEQ ID NO: 564227 - RNA, 21 nt, Human
aaagaggaaaugaaaaugcag

SEQ ID NO: 564228 - RNA, 18 nt, Human
aaagguaucccaauaaac

SEQ ID NO: 564229 - RNA, 23 nt, Human
aacaauaaaaaugcaagaacaau

SEQ ID NO: 564230 - RNA, 26 nt, Human
aagcacagccaugcuaacuucaguac

SEQ ID NO: 564231 - RNA, 23 nt, Human
aagccaagacccaggauaaagga

SEQ ID NO: 564232 - RNA, 18 nt, Human
aaggaggggggggagggg

SEQ ID NO: 564233 - RNA, 21 nt, Human
aaugcaagaacaaucugugca

SEQ ID NO: 564234 - RNA, 20 nt, Human
acagccaugcuaacuucagu

SEQ ID NO: 564235 - RNA, 18 nt, Human
accacaugcccaauccca

SEQ ID NO: 564236 - RNA, 21 nt, Human
acccaggauaaaggauuuaau

SEQ ID NO: 564237 - RNA, 23 nt, Human
agccuaaaaaccucugcaucaga

SEQ ID NO: 564238 - RNA, 20 nt, Human
aggaaggagggagggaagga

SEQ ID NO: 564239 - RNA, 22 nt, Human
aggaaggagggagggaaggagg

SEQ ID NO: 564240 - RNA, 24 nt, Human
aggaaggagggagggaaggagggg

SEQ ID NO: 564241 - RNA, 18 nt, Human
aggaggggggggaggggg

SEQ ID NO: 564242 - RNA, 21 nt, Human
agggaaggaggggggggaggg

SEQ ID NO: 564243 - RNA, 21 nt, Human
aggggggggagggggccaagc

SEQ ID NO: 564244 - RNA, 23 nt, Human
agguaucccaauaaacgucuuug

SEQ ID NO: 564245 - RNA, 21 nt, Human
aucccacaccuacaaaacaaa

SEQ ID NO: 564246 - RNA, 20 nt, Human
aucugccccacccucucccc

SEQ ID NO: 564247 - RNA, 21 nt, Human
aucugccccacccucucccca

SEQ ID NO: 564248 - RNA, 22 nt, Human
aucugccccacccucuccccau

SEQ ID NO: 564249 - RNA, 24 nt, Human
augcagccuacagggagagcuuga

SEQ ID NO: 564250 - RNA, 24 nt, Human
augcugccuucuuguacauuggca

SEQ ID NO: 564251 - RNA, 19 nt, Human
auuaccacaugcccaaucc

SEQ ID NO: 564252 - RNA, 22 nt, Human
caaaugacacauguaacaacca

SEQ ID NO: 564253 - RNA, 22 nt, Human
caaguuguaagaacaaucuauc

SEQ ID NO: 564254 - RNA, 24 nt, Human
caauaaauggaauuacaaaggcac

SEQ ID NO: 564255 - RNA, 19 nt, Human
cagacuguacauuucaaaa

SEQ ID NO: 564256 - RNA, 18 nt, Human
cagccuaaaaaccucugc

SEQ ID NO: 564257 - RNA, 20 nt, Human
ccacacucaugaugguucug

SEQ ID NO: 564258 - RNA, 23 nt, Human
cccaaucccagucuaugcauuuc

SEQ ID NO: 564259 - RNA, 19 nt, Human
cccacaccuacaaaacaaa

SEQ ID NO: 564260 - RNA, 22 nt, Human
ccuuauacaaauuuaaccaaca

SEQ ID NO: 564261 - RNA, 21 nt, Human
cgaaaagcacagccaugcuaa

SEQ ID NO: 564262 - RNA, 25 nt, Human
cggaaggaaggagggagggaaggag

SEQ ID NO: 564263 - RNA, 21 nt, Human
cuauuacgaaaagcacagcca

SEQ ID NO: 564264 - RNA, 27 nt, Human
cucaaacagcaaucuccauuaucaaua

SEQ ID NO: 564265 - RNA, 26 nt, Human
cugccccacccucuccccauuacaug

SEQ ID NO: 564266 - RNA, 19 nt, Human
gaaagaggaaaugaaaaug

SEQ ID NO: 564267 - RNA, 23 nt, Human
gaaaugaaaaugcagccuacagg

SEQ ID NO: 564268 - RNA, 20 nt, Human
gaaggaaggagggagggaag

SEQ ID NO: 564269 - RNA, 19 nt, Human
gacauccaagauccauucu

SEQ ID NO: 564270 - RNA, 20 nt, Human
gagggaaggaggggggggag

SEQ ID NO: 564271 - RNA, 20 nt, Human
gagggaaggaggggggggag

SEQ ID NO: 564272 - RNA, 21 nt, Human
ggaaaaaagcagauuuaauca

SEQ ID NO: 564273 - RNA, 19 nt, Human
ggaaaagccaagacccagg

SEQ ID NO: 564274 - RNA, 19 nt, Human
ggaaggaggggggggaggg

SEQ ID NO: 564275 - RNA, 23 nt, Human
ggagggaaggaggggggggaggg

SEQ ID NO: 564276 - RNA, 22 nt, Human
ggagggagggaaggaggggggg

SEQ ID NO: 564277 - RNA, 23 nt, Human
ggaggggggggagggggccaagc

SEQ ID NO: 564278 - RNA, 26 nt, Human
ggaggggggggagggggccaagcucg

SEQ ID NO: 564279 - RNA, 18 nt, Human
gguaacuguggagaauau

SEQ ID NO: 564280 - RNA, 23 nt, Human
guaacaaccacugacaaagggaa

SEQ ID NO: 564281 - RNA, 24 nt, Human
uaaaaaaaggacacuauaucaagc

SEQ ID NO: 564282 - RNA, 23 nt, Human
uaaaaaaugcuaacauauugucc

SEQ ID NO: 564283 - RNA, 25 nt, Human
uaaaaaccucugcaucagaaacuaa

SEQ ID NO: 564284 - RNA, 20 nt, Human
uaaaacauuuucaggacaua

SEQ ID NO: 564285 - RNA, 23 nt, Human
uaacaaaugggggaaaagccaag

SEQ ID NO: 564286 - RNA, 24 nt, Human
uaacaaaugggggaaaagccaaga

SEQ ID NO: 564287 - RNA, 18 nt, Human
uaagugucccuuugaggu

SEQ ID NO: 564288 - RNA, 22 nt, Human
uaaugcagcacagcauuacuuu

SEQ ID NO: 564289 - RNA, 19 nt, Human
uacaaauuuaaccaacaug

SEQ ID NO: 564290 - RNA, 21 nt, Human
uaucaaguauucuaauaaaga

SEQ ID NO: 564291 - RNA, 20 nt, Human
uauugccuuauacaaauuua

SEQ ID NO: 564292 - RNA, 23 nt, Human
ucaaaaacaaacaauaaaaaugc

SEQ ID NO: 564293 - RNA, 23 nt, Human
ucuaauaaagauuauugauuacc

SEQ ID NO: 564294 - RNA, 20 nt, Human
ucucaaagucuuuagcauuc

SEQ ID NO: 564295 - RNA, 19 nt, Human
ugaaaacaccaaugcaaua

SEQ ID NO: 564296 - RNA, 19 nt, Human
ugacacauguaacaaccac

SEQ ID NO: 564297 - RNA, 21 nt, Human
ugaugaaaucacagccuaaaa

SEQ ID NO: 564298 - RNA, 23 nt, Human
ugaugaaaucacagccuaaaaac

SEQ ID NO: 564299 - RNA, 22 nt, Human
ugcagcacagcauuacuuuuaa

SEQ ID NO: 564300 - RNA, 20 nt, Human
ugccccacccucuccccauu

SEQ ID NO: 564301 - RNA, 19 nt, Human
uggaacaaaguaaucaaau

SEQ ID NO: 564302 - RNA, 24 nt, Human
uggaauuacaaaggcacuucccua

SEQ ID NO: 564303 - RNA, 28 nt, Human
uguaacaaccacugacaaaaggucaucc

SEQ ID NO: 564304 - RNA, 21 nt, Human
uucuauuacgaaaagcacagc

SEQ ID NO: 564305 - RNA, 23 nt, Human
aaauaucaagagucucaagaacc

SEQ ID NO: 564306 - RNA, 20 nt, Human
acacuacacaaaauaaauac

SEQ ID NO: 564307 - RNA, 21 nt, Human
agacagaaauaucaagagucc

SEQ ID NO: 564308 - RNA, 23 nt, Human
aggagaagacagaaauaucaaga

SEQ ID NO: 564309 - RNA, 23 nt, Human
auuuuuucucugaagaugauacc

SEQ ID NO: 564310 - RNA, 24 nt, Human
caaaauaaauacuuggauaacuca

SEQ ID NO: 564311 - RNA, 25 nt, Human
cacaaaauaaauacuuggauaacuc

SEQ ID NO: 564312 - RNA, 19 nt, Human
cagcuauacacaauuccca

SEQ ID NO: 564313 - RNA, 21 nt, Human
caguuucccacaaaaaaucag

SEQ ID NO: 564314 - RNA, 21 nt, Human
ccacaaaaaaucagcuauaca

SEQ ID NO: 564315 - RNA, 19 nt, Human
cuacacaaaauaaauacuu

SEQ ID NO: 564316 - RNA, 19 nt, Human
cuauauauguauuuuuucc

SEQ ID NO: 564317 - RNA, 19 nt, Human
cuuuauuuuuucucugaag

SEQ ID NO: 564318 - RNA, 20 nt, Human
gaaagcacaaggagaagaca

SEQ ID NO: 564319 - RNA, 23 nt, Human
gaaagcacaaggagaagacagaa

SEQ ID NO: 564320 - RNA, 18 nt, Human
ggacuuuggccuacaauu

SEQ ID NO: 564321 - RNA, 20 nt, Human
uaccuguccuuuugauguua

SEQ ID NO: 564322 - RNA, 19 nt, Human
uacucuuagugaagagaca

SEQ ID NO: 564323 - RNA, 21 nt, Human
uagaaaguucaacuggacuuu

SEQ ID NO: 564324 - RNA, 24 nt, Human
ucccaaacucauuuuaugagccuc

SEQ ID NO: 564325 - RNA, 22 nt, Human
uucccacaaaaaaucagcuaua

SEQ ID NO: 564326 - RNA, 21 nt, Human
uuuaugagccucaucaagauu

SEQ ID NO: 564327 - RNA, 21 nt, Human
uuucccacaaaaaaucagcua

SEQ ID NO: 564328 - RNA, 24 nt, Human
aacaaggaacaaggcagcccacaa

SEQ ID NO: 564329 - RNA, 22 nt, Human
aauacagguagcaaagguccac

SEQ ID NO: 564330 - RNA, 20 nt, Human
acccaagcgaacacguccaa

SEQ ID NO: 564331 - RNA, 20 nt, Human
agaagagggugagggaaggg

SEQ ID NO: 564332 - RNA, 21 nt, Human
agagaggcuccggccgccccc

SEQ ID NO: 564333 - RNA, 20 nt, Human
agagauugcgagguggcugc

SEQ ID NO: 564334 - RNA, 25 nt, Human
agagggugagggaaggggugaagag

SEQ ID NO: 564335 - RNA, 25 nt, Human
agcaaaaugaggccacugguauuaa

SEQ ID NO: 564336 - RNA, 20 nt, Human
agugaagggcauguucuaga

SEQ ID NO: 564337 - RNA, 24 nt, Human
augauacagcaaaaugaggccacc

SEQ ID NO: 564338 - RNA, 23 nt, Human
caagcgaacacguccaacccucg

SEQ ID NO: 564339 - RNA, 18 nt, Human
caccguggggugugaggc

SEQ ID NO: 564340 - RNA, 19 nt, Human
cagcaaaaugaggccacug

SEQ ID NO: 564341 - RNA, 20 nt, Human
caggagccaagcgggucgcg

SEQ ID NO: 564342 - RNA, 23 nt, Human
caggagccaagcgggucgcggag

SEQ ID NO: 564343 - RNA, 20 nt, Human
caggggcaguggccagggac

SEQ ID NO: 564344 - RNA, 20 nt, Human
caguagcuugcgagcggcga

SEQ ID NO: 564345 - RNA, 21 nt, Human
cagugaagggcauguucuaga

SEQ ID NO: 564346 - RNA, 24 nt, Human
ccagcuuuaauccuuuucaaacau

SEQ ID NO: 564347 - RNA, 21 nt, Human
ccgcugccgccgcugccuccg

SEQ ID NO: 564348 - RNA, 18 nt, Human
ccguggggugugaggcug

SEQ ID NO: 564349 - RNA, 21 nt, Human
ccuacccgacgggcucaggag

SEQ ID NO: 564350 - RNA, 21 nt, Human
cgagcggcgaucgaugcagag

SEQ ID NO: 564351 - RNA, 22 nt, Human
cggcaggggcaguggccaggga

SEQ ID NO: 564352 - RNA, 18 nt, Human
cggcccgggugagagcgg

SEQ ID NO: 564353 - RNA, 24 nt, Human
cgggggcagcugaggcgccgggcu

SEQ ID NO: 564354 - RNA, 24 nt, Human
cuagauccuuucugaagucgaaaa

SEQ ID NO: 564355 - RNA, 19 nt, Human
cucccccgagagaggcucc

SEQ ID NO: 564356 - RNA, 25 nt, Human
cuuugcgccgcgccugaggcgcuuc

SEQ ID NO: 564357 - RNA, 24 nt, Human
gaaagaagagggugagggaagggg

SEQ ID NO: 564358 - RNA, 18 nt, Human
gagagcgggaggggcggu

SEQ ID NO: 564359 - RNA, 27 nt, Human
gagaggcuccggccgcccccgccgucc

SEQ ID NO: 564360 - RNA, 18 nt, Human
gagggaaggggugaagag

SEQ ID NO: 564361 - RNA, 20 nt, Human
gcccgaguacggucaguagc

SEQ ID NO: 564362 - RNA, 18 nt, Human
gccgcugccgccgcugcc

SEQ ID NO: 564363 - RNA, 22 nt, Human
gcgccgcgccugaggcgcuucu

SEQ ID NO: 564364 - RNA, 21 nt, Human
ggccgggggcagcugaggcgc

SEQ ID NO: 564365 - RNA, 22 nt, Human
ggccgggggcagcugaggcgcc

SEQ ID NO: 564366 - RNA, 18 nt, Human
ggcucaggagccaagcgg

SEQ ID NO: 564367 - RNA, 21 nt, Human
ggcugccgcagcaggaaccca

SEQ ID NO: 564368 - RNA, 21 nt, Human
gggacgggugacgaaagaaga

SEQ ID NO: 564369 - RNA, 19 nt, Human
ggggcgguggcgggcagaa

SEQ ID NO: 564370 - RNA, 23 nt, Human
ggggugaagagcgggaacucgag

SEQ ID NO: 564371 - RNA, 23 nt, Human
gggguucuuccgccuccucaggc

SEQ ID NO: 564372 - RNA, 23 nt, Human
gggugugaggcuggaacgcggcu

SEQ ID NO: 564373 - RNA, 25 nt, Human
ggugacgaaagaagagggugaggga

SEQ ID NO: 564374 - RNA, 25 nt, Human
uacacaaccagugaagggcauguuc

SEQ ID NO: 564375 - RNA, 20 nt, Human
uacagcaaaaugaggccacu

SEQ ID NO: 564376 - RNA, 19 nt, Human
uacccgacgggcucaggag

SEQ ID NO: 564377 - RNA, 22 nt, Human
uauaagaagccaaauuguaaug

SEQ ID NO: 564378 - RNA, 27 nt, Human
uccgcggcaggggcaguggccagggac

SEQ ID NO: 564379 - RNA, 18 nt, Human
ucgaaaacagcaccgugg

SEQ ID NO: 564380 - RNA, 19 nt, Human
ucgcggagcgccggcugug

SEQ ID NO: 564381 - RNA, 23 nt, Human
ucggggacgggugacgaaagaag

SEQ ID NO: 564382 - RNA, 23 nt, Human
ucuacaguuuuauuuacacaacc

SEQ ID NO: 564383 - RNA, 18 nt, Human
ucuuccgccuccucaggc

SEQ ID NO: 564384 - RNA, 20 nt, Human
ugcaugucauaauugggacc

SEQ ID NO: 564385 - RNA, 24 nt, Human
ugcaugucauaauugggaccucuu

SEQ ID NO: 564386 - RNA, 23 nt, Human
ugccacugacgaaagcuugaaau

SEQ ID NO: 564387 - RNA, 27 nt, Human
ugccgcagcaggaacccaagcgaacac

SEQ ID NO: 564388 - RNA, 23 nt, Human
uggcauugcugcaugucauaauu

SEQ ID NO: 564389 - RNA, 21 nt, Human
ugggaccucuugcaacaacuc

SEQ ID NO: 564390 - RNA, 19 nt, Human
uggggucggggacggguga

SEQ ID NO: 564391 - RNA, 22 nt, Human
uuuacacaaccagugaagggcu

SEQ ID NO: 564392 - RNA, 24 nt, Human
uuuuuuuuuuuuuuuuuugucauu

SEQ ID NO: 564393 - RNA, 24 nt, Human
uuuuuuuuuuuuuuuuuuuuuggg

SEQ ID NO: 564394 - RNA, 19 nt, Human
aaaacaaaaacaaaaaaca

SEQ ID NO: 564395 - RNA, 23 nt, Human
aaaauacaaaaacaaaauuagcc

SEQ ID NO: 564396 - RNA, 21 nt, Human
aaacaaaaacaaaaaacaaaa

SEQ ID NO: 564397 - RNA, 24 nt, Human
aaacaaaaacaaaaaacaaaauua

SEQ ID NO: 564398 - RNA, 20 nt, Human
aacauggugaaacccugccu

SEQ ID NO: 564399 - RNA, 21 nt, Human
aacauggugaaacccugccuc

SEQ ID NO: 564400 - RNA, 24 nt, Human
acccugccucuacuaaaaauacaa

SEQ ID NO: 564401 - RNA, 18 nt, Human
acugcacuucagccuggg

SEQ ID NO: 564402 - RNA, 24 nt, Human
acugcacuucagccugggagacag

SEQ ID NO: 564403 - RNA, 24 nt, Human
acuucagccugggagacagagcga

SEQ ID NO: 564404 - RNA, 20 nt, Human
agagagaguggguuagagag

SEQ ID NO: 564405 - RNA, 24 nt, Human
agcacuuugggaggccgaggaggg

SEQ ID NO: 564406 - RNA, 19 nt, Human
agccaggcgugguggcggg

SEQ ID NO: 564407 - RNA, 22 nt, Human
agccuggucaacauggugaaac

SEQ ID NO: 564408 - RNA, 24 nt, Human
agccuggucaacauggugaaaccc

SEQ ID NO: 564409 - RNA, 23 nt, Human
agcugggcaugguggugcaugcc

SEQ ID NO: 564410 - RNA, 18 nt, Human
aggccgaggagggcagau

SEQ ID NO: 564411 - RNA, 24 nt, Human
aggcgggagaauggugugaaccug

SEQ ID NO: 564412 - RNA, 18 nt, Human
aggcugaggcgggagaau

SEQ ID NO: 564413 - RNA, 18 nt, Human
aggcugaggcgggagaau

SEQ ID NO: 564414 - RNA, 24 nt, Human
agguggagcuugcagugagccgag

SEQ ID NO: 564415 - RNA, 24 nt, Human
aucgugccacugcacuucagccug

SEQ ID NO: 564416 - RNA, 19 nt, Human
caaaacaaaaacaaaaaac

SEQ ID NO: 564417 - RNA, 19 nt, Human
caacauggugaaacccugc

SEQ ID NO: 564418 - RNA, 22 nt, Human
caacauggugaaacccugccuc

SEQ ID NO: 564419 - RNA, 24 nt, Human
caacauggugaaacccugccucua

SEQ ID NO: 564420 - RNA, 24 nt, Human
cacgccuguaaucccagcacuuug

SEQ ID NO: 564421 - RNA, 18 nt, Human
cacugcacuucagccugg

SEQ ID NO: 564422 - RNA, 19 nt, Human
cacugcacuucagccuggg

SEQ ID NO: 564423 - RNA, 22 nt, Human
cacugcacuucagccugggaga

SEQ ID NO: 564424 - RNA, 24 nt, Human
cacugcacuucagccugggagaca

SEQ ID NO: 564425 - RNA, 25 nt, Human
cacugcacuucagccugggagacag

SEQ ID NO: 564426 - RNA, 23 nt, Human
cacuucagccugggagacagagc

SEQ ID NO: 564427 - RNA, 24 nt, Human
cacuucagccugggagacagagcg

SEQ ID NO: 564428 - RNA, 23 nt, Human
cagcacuuugggaggccgaggag

SEQ ID NO: 564429 - RNA, 24 nt, Human
cagcacuuugggaggccgaggagg

SEQ ID NO: 564430 - RNA, 21 nt, Human
cagccugggagacagagcgag

SEQ ID NO: 564431 - RNA, 24 nt, Human
cagcuacucagaaggcugaggcgg

SEQ ID NO: 564432 - RNA, 21 nt, Human
caugccuguagucccggcuac

SEQ ID NO: 564433 - RNA, 19 nt, Human
ccacugcacuucagccugg

SEQ ID NO: 564434 - RNA, 20 nt, Human
ccacugcacuucagccuggg

SEQ ID NO: 564435 - RNA, 22 nt, Human
ccacugcacuucagccugggag

SEQ ID NO: 564436 - RNA, 24 nt, Human
ccacugcacuucagccugggagac

SEQ ID NO: 564437 - RNA, 18 nt, Human
ccccacaauccugcugug

SEQ ID NO: 564438 - RNA, 22 nt, Human
ccuggucaacauggugaaaccc

SEQ ID NO: 564439 - RNA, 24 nt, Human
ccuggucaacauggugaaacccug

SEQ ID NO: 564440 - RNA, 22 nt, Human
ccuguaaucccagcacuuuggg

SEQ ID NO: 564441 - RNA, 22 nt, Human
ccuguagucccggcuacucagg

SEQ ID NO: 564442 - RNA, 26 nt, Human
cgaggagggcagaugaucugagguca

SEQ ID NO: 564443 - RNA, 23 nt, Human
cgccuguaaucccagcacuuugg

SEQ ID NO: 564444 - RNA, 19 nt, Human
cgccuguacucccagcuac

SEQ ID NO: 564445 - RNA, 24 nt, Human
cgccuguacucccagcuacucaga

SEQ ID NO: 564446 - RNA, 22 nt, Human
cucacgccuguaaucccagcac

SEQ ID NO: 564447 - RNA, 24 nt, Human
cucacgccuguaaucccagcacuu

SEQ ID NO: 564448 - RNA, 18 nt, Human
cucagaaggcugaggcgg

SEQ ID NO: 564449 - RNA, 20 nt, Human
cucuacuaaaaauacaaaaa

SEQ ID NO: 564450 - RNA, 24 nt, Human
cuugcagugagccgagaucgugcc

SEQ ID NO: 564451 - RNA, 19 nt, Human
gaaacccugccucuacuaa

SEQ ID NO: 564452 - RNA, 23 nt, Human
gagaucgugccacugcacuucag

SEQ ID NO: 564453 - RNA, 18 nt, Human
gagcaggaguggguuaga

SEQ ID NO: 564454 - RNA, 23 nt, Human
gagcuugcagugagccgagaucg

SEQ ID NO: 564455 - RNA, 24 nt, Human
gagggccgggcgcgguggcucacg

SEQ ID NO: 564456 - RNA, 24 nt, Human
gaugaucugaggucagcaguucgg

SEQ ID NO: 564457 - RNA, 24 nt, Human
gcacuucagccugggagacagagc

SEQ ID NO: 564458 - RNA, 21 nt, Human
gcagccuggucaacaugguga

SEQ ID NO: 564459 - RNA, 20 nt, Human
gccgagaucgugccacugca

SEQ ID NO: 564460 - RNA, 18 nt, Human
gcgccuguacucccagcu

SEQ ID NO: 564461 - RNA, 22 nt, Human
ggagacugaggcagccucgugc

SEQ ID NO: 564462 - RNA, 24 nt, Human
ggagcuugcagugagccgagaucg

SEQ ID NO: 564463 - RNA, 24 nt, Human
gggcgcgguggcucacgccuguaa

SEQ ID NO: 564464 - RNA, 22 nt, Human
gggcuagagaacgagcaaggga

SEQ ID NO: 564465 - RNA, 23 nt, Human
ggugcaugccuguagucccggcu

SEQ ID NO: 564466 - RNA, 23 nt, Human
gguggcucacgccuguaauccca

SEQ ID NO: 564467 - RNA, 24 nt, Human
gguggcucacgccuguaaucccag

SEQ ID NO: 564468 - RNA, 21 nt, Human
gugcaugccuguagucccggc

SEQ ID NO: 564469 - RNA, 26 nt, Human
uaaaaauacaaaaacaaaauuagcca

SEQ ID NO: 564470 - RNA, 21 nt, Human
uaaagagggccgggcgcggug

SEQ ID NO: 564471 - RNA, 21 nt, Human
uacaaagaauacaaguaacug

SEQ ID NO: 564472 - RNA, 23 nt, Human
uacaggagcacacaccuaagggg

SEQ ID NO: 564473 - RNA, 26 nt, Human
uccccacaauccugcuguuucccugg

SEQ ID NO: 564474 - RNA, 23 nt, Human
ucgugccacugcacuucagccug

SEQ ID NO: 564475 - RNA, 24 nt, Human
ugaaccugggagguggagcuugca

SEQ ID NO: 564476 - RNA, 20 nt, Human
ugaaugaagggggcaucuug

SEQ ID NO: 564477 - RNA, 20 nt, Human
ugagccagugaaugagugag

SEQ ID NO: 564478 - RNA, 22 nt, Human
ugagccgagaucgugccacugc

SEQ ID NO: 564479 - RNA, 23 nt, Human
ugaggcgggagaauggugugaac

SEQ ID NO: 564480 - RNA, 24 nt, Human
ugccuguagucccggcuacucagg

SEQ ID NO: 564481 - RNA, 24 nt, Human
uggcucacgccuguaaucccagca

SEQ ID NO: 564482 - RNA, 20 nt, Human
ugggaggccgaggagggcag

SEQ ID NO: 564483 - RNA, 22 nt, Human
ugggaggccgaggagggcagau

SEQ ID NO: 564484 - RNA, 29 nt, Human
ugggagguggagcuugcagugacaacggu

SEQ ID NO: 564485 - RNA, 24 nt, Human
ugggagguggagcuugcagugagc

SEQ ID NO: 564486 - RNA, 18 nt, Human
uggugcaugccuguaguc

SEQ ID NO: 564487 - RNA, 23 nt, Human
ugguggugcaugccuguaguccc

SEQ ID NO: 564488 - RNA, 21 nt, Human
ugugcgagggugggcuagaga

SEQ ID NO: 564489 - RNA, 19 nt, Human
ugugcgcacaccacaggug

SEQ ID NO: 564490 - RNA, 24 nt, Human
uuagcugggcaugguggugcaugc

SEQ ID NO: 564491 - RNA, 18 nt, Human
uugcagugagccgagauc

SEQ ID NO: 564492 - RNA, 21 nt, Human
uugcagugagccgagaucgug

SEQ ID NO: 564493 - RNA, 22 nt, Human
uugcagugagccgagaucgugc

SEQ ID NO: 564494 - RNA, 25 nt, Human
uuuuuuuuuuccccuuuuucacauu

SEQ ID NO: 564495 - RNA, 24 nt, Human
uuuuuuuuuuuuuuuccccuuuuu

SEQ ID NO: 564496 - RNA, 18 nt, Human
aacucacagggaaaacgg

SEQ ID NO: 564497 - RNA, 22 nt, Human
augcauccugcucuccaggguc

SEQ ID NO: 564498 - RNA, 19 nt, Human
cagagcucacggacaccac

SEQ ID NO: 564499 - RNA, 20 nt, Human
caggcggaacagcugagacc

SEQ ID NO: 564500 - RNA, 21 nt, Human
cauccugcucuccagggucca

SEQ ID NO: 564501 - RNA, 22 nt, Human
cauccugcucuccaggguccac

SEQ ID NO: 564502 - RNA, 23 nt, Human
ccagaaguccuuugcagagcuga

SEQ ID NO: 564503 - RNA, 24 nt, Human
ccagaaguccuuugcagagcugaa

SEQ ID NO: 564504 - RNA, 24 nt, Human
ccagagcucacggacaccacugac

SEQ ID NO: 564505 - RNA, 21 nt, Human
ccagcccgccagcucuggcug

SEQ ID NO: 564506 - RNA, 21 nt, Human
cccaguacguauaccucguug

SEQ ID NO: 564507 - RNA, 24 nt, Human
cccuugccagcccgccagcucugg

SEQ ID NO: 564508 - RNA, 22 nt, Human
ccgccagcucuggcugggagga

SEQ ID NO: 564509 - RNA, 21 nt, Human
cgccucaggcggaacagcuga

SEQ ID NO: 564510 - RNA, 18 nt, Human
cggcccggagcaggucaa

SEQ ID NO: 564511 - RNA, 19 nt, Human
cucacagggaaaacggggc

SEQ ID NO: 564512 - RNA, 25 nt, Human
cuggcugggaggacuugcucuuggg

SEQ ID NO: 564513 - RNA, 19 nt, Human
gacaccacugacaguaugg

SEQ ID NO: 564514 - RNA, 18 nt, Human
gacaguaugggggguguu

SEQ ID NO: 564515 - RNA, 20 nt, Human
gacugagggcgagggucccc

SEQ ID NO: 564516 - RNA, 19 nt, Human
gcagccugcaucaggagcc

SEQ ID NO: 564517 - RNA, 19 nt, Human
gcuuuuuggccagaagucc

SEQ ID NO: 564518 - RNA, 20 nt, Human
ggcggcccgcggcccggagc

SEQ ID NO: 564519 - RNA, 20 nt, Human
uaugcauccugcucuccagg

SEQ ID NO: 564520 - RNA, 21 nt, Human
uaugggggguguucugcuugg

SEQ ID NO: 564521 - RNA, 19 nt, Human
uauuguagcacauuucauc

SEQ ID NO: 564522 - RNA, 24 nt, Human
ucaggagccuccacuuuccccagu

SEQ ID NO: 564523 - RNA, 22 nt, Human
ucugcagccugcaucaggagcc

SEQ ID NO: 564524 - RNA, 23 nt, Human
ucugcagccugcaucaggagccu

SEQ ID NO: 564525 - RNA, 21 nt, Human
ucugguggcagggcccagagc

SEQ ID NO: 564526 - RNA, 24 nt, Human
ugacaguaugggggguguucugcu

SEQ ID NO: 564527 - RNA, 22 nt, Human
uggcagggcccagagcucacgg

SEQ ID NO: 564528 - RNA, 24 nt, Human
ugggggguguucugcuuggcacca

SEQ ID NO: 564529 - RNA, 23 nt, Human
uguucugcuuggcaccaugucug

SEQ ID NO: 564530 - RNA, 20 nt, Human
uuugcagagcugaauauccc

SEQ ID NO: 564531 - RNA, 24 nt, Human
aaaaacaacagagaggacccaccc

SEQ ID NO: 564532 - RNA, 18 nt, Human
aaaacaacagagaggacc

SEQ ID NO: 564533 - RNA, 21 nt, Human
aaaacaacagagaggacccac

SEQ ID NO: 564534 - RNA, 24 nt, Human
aagaggccagagaggcugugagug

SEQ ID NO: 564535 - RNA, 21 nt, Human
aagggaagaggccagagaggc

SEQ ID NO: 564536 - RNA, 18 nt, Human
aaggugucccccaucccc

SEQ ID NO: 564537 - RNA, 24 nt, Human
aaggugucccccauccccagaccu

SEQ ID NO: 564538 - RNA, 26 nt, Human
aaggugucccccauccccagaccugg

SEQ ID NO: 564539 - RNA, 20 nt, Human
aaguagcgacucggaggcgg

SEQ ID NO: 564540 - RNA, 23 nt, Human
aaucagaugcaguaacacugauu

SEQ ID NO: 564541 - RNA, 22 nt, Human
acagcuuucuugaggaaggcuu

SEQ ID NO: 564542 - RNA, 23 nt, Human
accaaguucgaggcggggggguc

SEQ ID NO: 564543 - RNA, 18 nt, Human
acgcccggcccggcccgg

SEQ ID NO: 564544 - RNA, 24 nt, Human
acgcuuucugcgcucuugccgcuc

SEQ ID NO: 564545 - RNA, 19 nt, Human
acuguaccccaccaaauca

SEQ ID NO: 564546 - RNA, 19 nt, Human
agagaggaagaucucccca

SEQ ID NO: 564547 - RNA, 22 nt, Human
agagaggaagaucuccccaggg

SEQ ID NO: 564548 - RNA, 21 nt, Human
agagaggacccacccccaggg

SEQ ID NO: 564549 - RNA, 21 nt, Human
agcgacucggaggcgggggcg

SEQ ID NO: 564550 - RNA, 23 nt, Human
agcgccccgggacccagcccccc

SEQ ID NO: 564551 - RNA, 18 nt, Human
agcggcggcggcggcggc

SEQ ID NO: 564552 - RNA, 22 nt, Human
agcggcggcggcggcggcggcc

SEQ ID NO: 564553 - RNA, 18 nt, Human
aggcugcaggccauucac

SEQ ID NO: 564554 - RNA, 24 nt, Human
aggggcccaggccacuuccaucuu

SEQ ID NO: 564555 - RNA, 21 nt, Human
aggucgaggcagguggcccgc

SEQ ID NO: 564556 - RNA, 26 nt, Human
aucuccuccagacgcuuucugcgcuc

SEQ ID NO: 564557 - RNA, 24 nt, Human
auuguaccgcccgggcugggccug

SEQ ID NO: 564558 - RNA, 22 nt, Human
caaaucaaggcaaauacuacag

SEQ ID NO: 564559 - RNA, 23 nt, Human
caacagagaggacccacccccag

SEQ ID NO: 564560 - RNA, 23 nt, Human
caaggcaaacccucuuaaaggac

SEQ ID NO: 564561 - RNA, 22 nt, Human
cacgcccggcccggcccggccc

SEQ ID NO: 564562 - RNA, 21 nt, Human
cagccucccggcgccucuccc

SEQ ID NO: 564563 - RNA, 18 nt, Human
cagcuuucuugaggaagg

SEQ ID NO: 564564 - RNA, 22 nt, Human
cauucuccuggugugcugggag

SEQ ID NO: 564565 - RNA, 21 nt, Human
ccaaggcaaacccucuuaaag

SEQ ID NO: 564566 - RNA, 27 nt, Human
ccaccaaaucaaggcaaauacuacagg

SEQ ID NO: 564567 - RNA, 20 nt, Human
ccaccccagcagcgccccgg

SEQ ID NO: 564568 - RNA, 24 nt, Human
ccaccccagcagcgccccgggacc

SEQ ID NO: 564569 - RNA, 21 nt, Human
ccagacauccugguaggugau

SEQ ID NO: 564570 - RNA, 20 nt, Human
ccagacgcuuucugcgcucu

SEQ ID NO: 564571 - RNA, 24 nt, Human
ccagcagcgccccgggacccagcc

SEQ ID NO: 564572 - RNA, 20 nt, Human
ccagccccccgcgcccgcgc

SEQ ID NO: 564573 - RNA, 19 nt, Human
cccaggccacuuccaucuu

SEQ ID NO: 564574 - RNA, 22 nt, Human
cccagggggcuuuggggggagg

SEQ ID NO: 564575 - RNA, 21 nt, Human
cccagucccggccucggccca

SEQ ID NO: 564576 - RNA, 23 nt, Human
cccagucccggccucggcccaac

SEQ ID NO: 564577 - RNA, 18 nt, Human
cccauccccagaccuggg

SEQ ID NO: 564578 - RNA, 18 nt, Human
ccccagggggcuuugggg

SEQ ID NO: 564579 - RNA, 20 nt, Human
ccccagggggcuuugggggg

SEQ ID NO: 564580 - RNA, 19 nt, Human
ccccccgcgcccgcgccgu

SEQ ID NO: 564581 - RNA, 20 nt, Human
cccccgccccggagccccgc

SEQ ID NO: 564582 - RNA, 20 nt, Human
cccccgcgcccgcgccgucc

SEQ ID NO: 564583 - RNA, 24 nt, Human
ccccgcgcccgcagccucccggcg

SEQ ID NO: 564584 - RNA, 18 nt, Human
ccccggagccccgcgccc

SEQ ID NO: 564585 - RNA, 19 nt, Human
cccgcagccucccggcgcc

SEQ ID NO: 564586 - RNA, 24 nt, Human
cccgcagccucccggcgccucucc

SEQ ID NO: 564587 - RNA, 25 nt, Human
cccggccucggcccaacccuauugu

SEQ ID NO: 564588 - RNA, 19 nt, Human
cccgugccagcugcuccuc

SEQ ID NO: 564589 - RNA, 22 nt, Human
cccgugccagcugcuccucucg

SEQ ID NO: 564590 - RNA, 23 nt, Human
ccgcccgggcugggccuggccuc

SEQ ID NO: 564591 - RNA, 22 nt, Human
ccgccuccgggccuccgccucc

SEQ ID NO: 564592 - RNA, 23 nt, Human
ccgccuccgggccuccgccuccc

SEQ ID NO: 564593 - RNA, 18 nt, Human
ccgcgcccgcagccuccc

SEQ ID NO: 564594 - RNA, 22 nt, Human
ccgcgcccgcagccucccggcg

SEQ ID NO: 564595 - RNA, 22 nt, Human
ccgcgcccgcagccucccggcg

SEQ ID NO: 564596 - RNA, 22 nt, Human
ccgcgccguucgcgccgccccc

SEQ ID NO: 564597 - RNA, 23 nt, Human
ccgcggcgcaucacgcccggccc

SEQ ID NO: 564598 - RNA, 19 nt, Human
ccgcuccgccucuucccgc

SEQ ID NO: 564599 - RNA, 22 nt, Human
ccucacaacugugcccggaucc

SEQ ID NO: 564600 - RNA, 20 nt, Human
ccucugcaaagggcaggagu

SEQ ID NO: 564601 - RNA, 25 nt, Human
ccugcugcuggaagugcuuuucccg

SEQ ID NO: 564602 - RNA, 25 nt, Human
cgcccccgccccggagccccgcgcc

SEQ ID NO: 564603 - RNA, 19 nt, Human
cgcccgggcugggccuggc

SEQ ID NO: 564604 - RNA, 19 nt, Human
cgcccgggcugggccuggc

SEQ ID NO: 564605 - RNA, 23 nt, Human
cgccggcccagucccggccucgg

SEQ ID NO: 564606 - RNA, 24 nt, Human
cgccggcccagucccggccucggc

SEQ ID NO: 564607 - RNA, 23 nt, Human
cgccucccgcuccgcccgggccu

SEQ ID NO: 564608 - RNA, 22 nt, Human
cgcggcgcaucacgcccggccc

SEQ ID NO: 564609 - RNA, 22 nt, Human
cggcccggcccggcaaguagcg

SEQ ID NO: 564610 - RNA, 18 nt, Human
cgugccuccugcuccucc

SEQ ID NO: 564611 - RNA, 18 nt, Human
cuauuguaccgcccgggc

SEQ ID NO: 564612 - RNA, 19 nt, Human
cucagcggcggcggcggcg

SEQ ID NO: 564613 - RNA, 26 nt, Human
cucagcggcggcggcggcggcggccu

SEQ ID NO: 564614 - RNA, 25 nt, Human
cuccagacgcugccgcuccgccucu

SEQ ID NO: 564615 - RNA, 21 nt, Human
cucccgugccagcugcuccuc

SEQ ID NO: 564616 - RNA, 22 nt, Human
cuccgcccgggccucggccucc

SEQ ID NO: 564617 - RNA, 19 nt, Human
cuccucccgccuccgggcc

SEQ ID NO: 564618 - RNA, 19 nt, Human
cucgugccuccugcuccuc

SEQ ID NO: 564619 - RNA, 22 nt, Human
cucuugcuccugcugcuggaag

SEQ ID NO: 564620 - RNA, 20 nt, Human
cugcuccucccgccuccggg

SEQ ID NO: 564621 - RNA, 19 nt, Human
cugggccuggccucucgcu

SEQ ID NO: 564622 - RNA, 23 nt, Human
cuugaggaaggcuucugccucug

SEQ ID NO: 564623 - RNA, 18 nt, Human
cuuucugcuucugcagcc

SEQ ID NO: 564624 - RNA, 23 nt, Human
gccccggagccccgcgcccgcag

SEQ ID NO: 564625 - RNA, 24 nt, Human
gccccggagccccgcgcccgcagc

SEQ ID NO: 564626 - RNA, 27 nt, Human
gccccggagccccgcgcccgcagccuc

SEQ ID NO: 564627 - RNA, 23 nt, Human
gccccgggacccagccccccgcg

SEQ ID NO: 564628 - RNA, 18 nt, Human
gcccuggggaccgagccc

SEQ ID NO: 564629 - RNA, 20 nt, Human
gccggcccagucccggccuc

SEQ ID NO: 564630 - RNA, 20 nt, Human
gccguccgcgccguucgcgc

SEQ ID NO: 564631 - RNA, 20 nt, Human
gcggcggcggcggcggccag

SEQ ID NO: 564632 - RNA, 25 nt, Human
gcggcggcggcggcggccaguggcc

SEQ ID NO: 564633 - RNA, 22 nt, Human
gcugccgcuccgccucuucccg

SEQ ID NO: 564634 - RNA, 21 nt, Human
gcugggccuggccucucgcug

SEQ ID NO: 564635 - RNA, 23 nt, Human
ggacaggggucccgcggcgcauc

SEQ ID NO: 564636 - RNA, 20 nt, Human
ggcggcggcggcggccagug

SEQ ID NO: 564637 - RNA, 23 nt, Human
ggcggcggcggcggccaguggcc

SEQ ID NO: 564638 - RNA, 21 nt, Human
gggacccagccccccgcgccc

SEQ ID NO: 564639 - RNA, 18 nt, Human
gggccuggccucucgcug

SEQ ID NO: 564640 - RNA, 18 nt, Human
gggggagggucugccucc

SEQ ID NO: 564641 - RNA, 19 nt, Human
ggggggagggucugccucc

SEQ ID NO: 564642 - RNA, 29 nt, Human
ggggucucagcggcggcggcggcggcggg

SEQ ID NO: 564643 - RNA, 20 nt, Human
ggugucccccauccccagac

SEQ ID NO: 564644 - RNA, 18 nt, Human
gugccggucgcccggggu

SEQ ID NO: 564645 - RNA, 20 nt, Human
guggccccuccccaagggaa

SEQ ID NO: 564646 - RNA, 25 nt, Human
uaaaaacaacagagaggacccaccc

SEQ ID NO: 564647 - RNA, 19 nt, Human
uaaucagaugcaguaacac

SEQ ID NO: 564648 - RNA, 23 nt, Human
ucagacucuuguccccagagggu

SEQ ID NO: 564649 - RNA, 23 nt, Human
uccaaggcaaacccucuuaaagg

SEQ ID NO: 564650 - RNA, 22 nt, Human
uccucuuucugcuucugcagcc

SEQ ID NO: 564651 - RNA, 23 nt, Human
uccucuuucugcuucugcagccg

SEQ ID NO: 564652 - RNA, 19 nt, Human
uccugcuccucccgccucc

SEQ ID NO: 564653 - RNA, 18 nt, Human
uccugcuucuugguuuca

SEQ ID NO: 564654 - RNA, 21 nt, Human
uccuggugugcugggagaggc

SEQ ID NO: 564655 - RNA, 22 nt, Human
ucgcccggggucucucggcugc

SEQ ID NO: 564656 - RNA, 22 nt, Human
ucggccuccucuuucugcuucu

SEQ ID NO: 564657 - RNA, 26 nt, Human
ucucggaggugccggucgcccggggu

SEQ ID NO: 564658 - RNA, 21 nt, Human
ucugagcacaagcuauuuaca

SEQ ID NO: 564659 - RNA, 19 nt, Human
ucugcagcccuggggaccg

SEQ ID NO: 564660 - RNA, 20 nt, Human
ucugggcuggaaccguuggc

SEQ ID NO: 564661 - RNA, 25 nt, Human
ugaagcaaccaguauccuguggccc

SEQ ID NO: 564662 - RNA, 20 nt, Human
ugcacagccuccuucugcag

SEQ ID NO: 564663 - RNA, 26 nt, Human
ugcacugaggggcagaucuggcuccg

SEQ ID NO: 564664 - RNA, 21 nt, Human
ugccuccugcuccucccgccu

SEQ ID NO: 564665 - RNA, 19 nt, Human
uggcaacuccuugcuuggg

SEQ ID NO: 564666 - RNA, 19 nt, Human
ugggagacuccacugaggc

SEQ ID NO: 564667 - RNA, 23 nt, Human
uggugugcugggagaggcugcag

SEQ ID NO: 564668 - RNA, 23 nt, Human
uguaccgcccgggcugggccugg

SEQ ID NO: 564669 - RNA, 20 nt, Human
uguccugcuucuugguuuca

SEQ ID NO: 564670 - RNA, 21 nt, Human
ugugaccugcggggacugcac

SEQ ID NO: 564671 - RNA, 19 nt, Human
ugugaguguauaugugugu

SEQ ID NO: 564672 - RNA, 22 nt, Human
ugugaguguauauguguguaug

SEQ ID NO: 564673 - RNA, 21 nt, Human
ugugcugggagaggcugcagg

SEQ ID NO: 564674 - RNA, 22 nt, Human
uguucugucuuuuucuccucca

SEQ ID NO: 564675 - RNA, 22 nt, Human
uuaaaaacaacagagaggaccc

SEQ ID NO: 564676 - RNA, 26 nt, Human
uucaugaucuccuccagacgcuuucu

SEQ ID NO: 564677 - RNA, 21 nt, Human
uuuaaucagaugcaguaacac

SEQ ID NO: 564678 - RNA, 23 nt, Human
aaagaguacuuggaauguuugac

SEQ ID NO: 564679 - RNA, 18 nt, Human
aaaugacgcacaugagaa

SEQ ID NO: 564680 - RNA, 22 nt, Human
aacgaguuaaaaguuccacuug

SEQ ID NO: 564681 - RNA, 18 nt, Human
acccugaggaccuuugac

SEQ ID NO: 564682 - RNA, 22 nt, Human
acgccuuccaaaauaagauugc

SEQ ID NO: 564683 - RNA, 19 nt, Human
agacaaagguauugugaac

SEQ ID NO: 564684 - RNA, 21 nt, Human
aggaauucucugcuagaaaug

SEQ ID NO: 564685 - RNA, 18 nt, Human
aucccaaaacugggcaua

SEQ ID NO: 564686 - RNA, 22 nt, Human
caaaauuaauguuuugaagcac

SEQ ID NO: 564687 - RNA, 21 nt, Human
caaagagacguugccaccaug

SEQ ID NO: 564688 - RNA, 19 nt, Human
caaauaauacagagaugaa

SEQ ID NO: 564689 - RNA, 18 nt, Human
caaugcgcuggccagcac

SEQ ID NO: 564690 - RNA, 21 nt, Human
cacagaguuauucacaaucug

SEQ ID NO: 564691 - RNA, 23 nt, Human
cacagcucaaaucucaguaaccu

SEQ ID NO: 564692 - RNA, 23 nt, Human
cagaacucucuucucaccuguaa

SEQ ID NO: 564693 - RNA, 24 nt, Human
cauccaaagagacguugccaccau

SEQ ID NO: 564694 - RNA, 22 nt, Human
ccaaaaguguucugaagcugaa

SEQ ID NO: 564695 - RNA, 21 nt, Human
ccaaaugguuuggaggucaaa

SEQ ID NO: 564696 - RNA, 18 nt, Human
ccagcaaaacuuuuuucu

SEQ ID NO: 564697 - RNA, 21 nt, Human
ccagguacuaagccauucacu

SEQ ID NO: 564698 - RNA, 20 nt, Human
cccagaagcucccaagucgc

SEQ ID NO: 564699 - RNA, 23 nt, Human
ccuugacauaagguggcgcuaaa

SEQ ID NO: 564700 - RNA, 22 nt, Human
cggcgugacugugaggcaaugc

SEQ ID NO: 564701 - RNA, 20 nt, Human
cgguuugaacugcacgggca

SEQ ID NO: 564702 - RNA, 25 nt, Human
cucaaagaguacuuggaauguuuga

SEQ ID NO: 564703 - RNA, 21 nt, Human
cucaguaaccucacagaguua

SEQ ID NO: 564704 - RNA, 20 nt, Human
cugcuucgaugcuuugucca

SEQ ID NO: 564705 - RNA, 24 nt, Human
cuggccagcacagcucaaaucuca

SEQ ID NO: 564706 - RNA, 19 nt, Human
cuuuggaagaaggcugaag

SEQ ID NO: 564707 - RNA, 22 nt, Human
gauaaggaggaauuaggacuca

SEQ ID NO: 564708 - RNA, 20 nt, Human
gccauuucacgucuguggug

SEQ ID NO: 564709 - RNA, 21 nt, Human
gggaagaucauauacuucagu

SEQ ID NO: 564710 - RNA, 25 nt, Human
gggcaaaaaugugauggagacuuuu

SEQ ID NO: 564711 - RNA, 20 nt, Human
guaaauguugaguuguagau

SEQ ID NO: 564712 - RNA, 24 nt, Human
guacaaauuuaucuggaaaaaucc

SEQ ID NO: 564713 - RNA, 19 nt, Human
gucuagccaacaugcaaga

SEQ ID NO: 564714 - RNA, 21 nt, Human
gucuguggugccaugauucuc

SEQ ID NO: 564715 - RNA, 26 nt, Human
guuggaaucucaacguguguuucaug

SEQ ID NO: 564716 - RNA, 25 nt, Human
uacaaaauauauauacaaaagcaua

SEQ ID NO: 564717 - RNA, 19 nt, Human
uacaauacuaugggcuaga

SEQ ID NO: 564718 - RNA, 19 nt, Human
uagaaagauaaaguuaaca

SEQ ID NO: 564719 - RNA, 23 nt, Human
uagaauggcucucugggacucaa

SEQ ID NO: 564720 - RNA, 19 nt, Human
uagcaauacucuugccuuc

SEQ ID NO: 564721 - RNA, 23 nt, Human
ucaacaucccaaaacugggcaua

SEQ ID NO: 564722 - RNA, 20 nt, Human
ucacaaggagaaggagcuac

SEQ ID NO: 564723 - RNA, 24 nt, Human
ucagauaauuuuuuaacgccuucc

SEQ ID NO: 564724 - RNA, 20 nt, Human
uccaaagagacguugccacc

SEQ ID NO: 564725 - RNA, 19 nt, Human
uccaccaaauaaguauaca

SEQ ID NO: 564726 - RNA, 18 nt, Human
uccacgagcagucacauc

SEQ ID NO: 564727 - RNA, 19 nt, Human
uccaugcugcggcgugacu

SEQ ID NO: 564728 - RNA, 24 nt, Human
uccaugcugcggcgugacugugag

SEQ ID NO: 564729 - RNA, 25 nt, Human
uccaugcugcggcgugacugugagg

SEQ ID NO: 564730 - RNA, 20 nt, Human
uccucuggggcauaaacucc

SEQ ID NO: 564731 - RNA, 21 nt, Human
ucgcagauugacuuuaagugu

SEQ ID NO: 564732 - RNA, 21 nt, Human
ucuaaaaacaucuccacuuuc

SEQ ID NO: 564733 - RNA, 24 nt, Human
ucugaaccaaaaguguucugaagc

SEQ ID NO: 564734 - RNA, 26 nt, Human
ucugaaccaaaaguguucugaagcug

SEQ ID NO: 564735 - RNA, 21 nt, Human
ucuuccuugggugaauucuga

SEQ ID NO: 564736 - RNA, 20 nt, Human
ucuucuguccaucgucacag

SEQ ID NO: 564737 - RNA, 21 nt, Human
ugaagcugaaagcaguccuga

SEQ ID NO: 564738 - RNA, 21 nt, Human
ugaaguuucaccagguucugu

SEQ ID NO: 564739 - RNA, 22 nt, Human
ugaauucugaucucacaguuac

SEQ ID NO: 564740 - RNA, 19 nt, Human
ugacugguaaaacauccaa

SEQ ID NO: 564741 - RNA, 21 nt, Human
ugauguaaugcugggcucuca

SEQ ID NO: 564742 - RNA, 18 nt, Human
uggaagaaggcugaagga

SEQ ID NO: 564743 - RNA, 19 nt, Human
uggaagaaggcugaaggaa

SEQ ID NO: 564744 - RNA, 18 nt, Human
uggaaggcgguuuuguca

SEQ ID NO: 564745 - RNA, 20 nt, Human
ugugagagaagaggagaacc

SEQ ID NO: 564746 - RNA, 23 nt, Human
ugugagagaagaggagaacccug

SEQ ID NO: 564747 - RNA, 20 nt, Human
uuacacaaaaauguauucua

SEQ ID NO: 564748 - RNA, 23 nt, Human
uuacuuuacacaaaaauguauuc

SEQ ID NO: 564749 - RNA, 20 nt, Human
uuccaagcuagcuuuggaag

SEQ ID NO: 564750 - RNA, 22 nt, Human
uuugacugguaaaacauccaaa

SEQ ID NO: 564751 - RNA, 22 nt, Human
aaagaggagaacaugggcugcc

SEQ ID NO: 564752 - RNA, 25 nt, Human
agaaggcaccaagcuagggagacua

SEQ ID NO: 564753 - RNA, 24 nt, Human
agacuagagauagugguggcaggg

SEQ ID NO: 564754 - RNA, 22 nt, Human
agcgcagccagaccauucucca

SEQ ID NO: 564755 - RNA, 23 nt, Human
caccagggacuccaguugaccug

SEQ ID NO: 564756 - RNA, 23 nt, Human
caccucagaauggagucaccagg

SEQ ID NO: 564757 - RNA, 27 nt, Human
cagccagaccauucuccaguuuguguc

SEQ ID NO: 564758 - RNA, 18 nt, Human
caggaagcagagggaaga

SEQ ID NO: 564759 - RNA, 23 nt, Human
cagggggugagaaaagaggagaa

SEQ ID NO: 564760 - RNA, 24 nt, Human
ccaggaugggaaagcaccggaaga

SEQ ID NO: 564761 - RNA, 19 nt, Human
cccaggaugggaaagcacc

SEQ ID NO: 564762 - RNA, 21 nt, Human
ccccacugccaucccagccca

SEQ ID NO: 564763 - RNA, 21 nt, Human
ccuccaggguaugaaggcaag

SEQ ID NO: 564764 - RNA, 22 nt, Human
ccuggcagagaugauucuucuc

SEQ ID NO: 564765 - RNA, 21 nt, Human
cgcccagggcuccauuaugcc

SEQ ID NO: 564766 - RNA, 22 nt, Human
cgcccagggcuccauuaugccc

SEQ ID NO: 564767 - RNA, 26 nt, Human
cgguuccccugucacacccuccuauu

SEQ ID NO: 564768 - RNA, 22 nt, Human
cuagagauagugguggcagggc

SEQ ID NO: 564769 - RNA, 22 nt, Human
cucagggaaagucaggggguga

SEQ ID NO: 564770 - RNA, 20 nt, Human
cugccaucccagcccaaagu

SEQ ID NO: 564771 - RNA, 26 nt, Human
cuucucagggaaagucagggggugag

SEQ ID NO: 564772 - RNA, 28 nt, Human
gagaggagaagcugcacgcaaguucugg

SEQ ID NO: 564773 - RNA, 20 nt, Human
gcccagggcuccauuaugcc

SEQ ID NO: 564774 - RNA, 18 nt, Human
uccuggauacaguggccc

SEQ ID NO: 564775 - RNA, 22 nt, Human
ugacuccugcaggagaaggcac

SEQ ID NO: 564776 - RNA, 19 nt, Human
ugccccacugccaucccag

SEQ ID NO: 564777 - RNA, 23 nt, Human
uggcagagaugauucuucucagg

SEQ ID NO: 564778 - RNA, 23 nt, Human
uguggcugcucugacuccugcag

SEQ ID NO: 564779 - RNA, 23 nt, Human
uucucagggaaagucagggggug

SEQ ID NO: 564780 - RNA, 19 nt, Human
aacauggcacccaacaccc

SEQ ID NO: 564781 - RNA, 19 nt, Human
aagccagguggggauuuug

SEQ ID NO: 564782 - RNA, 22 nt, Human
aggcaccaaaaguaacauggca

SEQ ID NO: 564783 - RNA, 24 nt, Human
aggcacugagcagguagaccucgc

SEQ ID NO: 564784 - RNA, 20 nt, Human
augaaacaccacagaaaguc

SEQ ID NO: 564785 - RNA, 20 nt, Human
augaaucaccugggagagaa

SEQ ID NO: 564786 - RNA, 20 nt, Human
caaaaauaaaaauaugaaau

SEQ ID NO: 564787 - RNA, 19 nt, Human
cagccaaggcacugagcag

SEQ ID NO: 564788 - RNA, 22 nt, Human
cauggcacccaacacccaaaaa

SEQ ID NO: 564789 - RNA, 23 nt, Human
cauuuacucuuucugcagcucua

SEQ ID NO: 564790 - RNA, 23 nt, Human
ccaaaaguaacauggcacccaac

SEQ ID NO: 564791 - RNA, 20 nt, Human
gagugugaacucugaguaga

SEQ ID NO: 564792 - RNA, 21 nt, Human
gcaggagaggcuuauguggca

SEQ ID NO: 564793 - RNA, 23 nt, Human
ggcacccaacacccaaaaauaaa

SEQ ID NO: 564794 - RNA, 18 nt, Human
guggcagcacaagccagg

SEQ ID NO: 564795 - RNA, 22 nt, Human
ucacuagugauuuucuccagau

SEQ ID NO: 564796 - RNA, 19 nt, Human
uggcagcacaagccaggug

SEQ ID NO: 564797 - RNA, 26 nt, Human
ugggagagaaugccuuccagauaggg

SEQ ID NO: 564798 - RNA, 20 nt, Human
uucacuagugauuuucucca

SEQ ID NO: 564799 - RNA, 19 nt, Human
aagcugcuccagggauguu

SEQ ID NO: 564800 - RNA, 20 nt, Human
aaggccuccugcccugacca

SEQ ID NO: 564801 - RNA, 20 nt, Human
aaggccuccugcccugacca

SEQ ID NO: 564802 - RNA, 23 nt, Human
acagagaagggaccuccuggggc

SEQ ID NO: 564803 - RNA, 20 nt, Human
acccugaaguaguguuggaa

SEQ ID NO: 564804 - RNA, 23 nt, Human
agcacagugacaggugggggcag

SEQ ID NO: 564805 - RNA, 20 nt, Human
agcagcagggguccccgagg

SEQ ID NO: 564806 - RNA, 18 nt, Human
aguguuggaagcugcucc

SEQ ID NO: 564807 - RNA, 25 nt, Human
cacagugacaggugggggcaggagg

SEQ ID NO: 564808 - RNA, 22 nt, Human
caccucgcaagcaccugagaaa

SEQ ID NO: 564809 - RNA, 19 nt, Human
ccccaaacacugccacccu

SEQ ID NO: 564810 - RNA, 22 nt, Human
ccccaaacacugccacccugaa

SEQ ID NO: 564811 - RNA, 24 nt, Human
ccccaaacacugccacccugaagu

SEQ ID NO: 564812 - RNA, 18 nt, Human
ccugaaguaguguuggaa

SEQ ID NO: 564813 - RNA, 21 nt, Human
cgccaaggccuccugcccuga

SEQ ID NO: 564814 - RNA, 18 nt, Human
cgcccagugccccaaaca

SEQ ID NO: 564815 - RNA, 26 nt, Human
cuccagucacgccaaggccuccugcc

SEQ ID NO: 564816 - RNA, 21 nt, Human
cuguccggccuccagucacgc

SEQ ID NO: 564817 - RNA, 20 nt, Human
ucgcccagugccccaaacac

SEQ ID NO: 564818 - RNA, 22 nt, Human
ugacaggugggggcaggagcag

SEQ ID NO: 564819 - RNA, 22 nt, Human
ugaucaccucgcaagcaccuga

SEQ ID NO: 564820 - RNA, 19 nt, Human
ugccccaaacacugccacc

SEQ ID NO: 564821 - RNA, 18 nt, Human
uggggcugaggccccugg

SEQ ID NO: 564822 - RNA, 19 nt, Human
uuugccuucugaucaccuc

SEQ ID NO: 564823 - RNA, 24 nt, Human
aagcauugggucuggguucaggag

SEQ ID NO: 564824 - RNA, 21 nt, Human
acaccccauccccaaccuguc

SEQ ID NO: 564825 - RNA, 22 nt, Human
acacugcuucauagcaaggccu

SEQ ID NO: 564826 - RNA, 22 nt, Human
accccauccccaaccuguccac

SEQ ID NO: 564827 - RNA, 18 nt, Human
accuggcucuccaucacu

SEQ ID NO: 564828 - RNA, 23 nt, Human
aggagccacgaugcugccccggg

SEQ ID NO: 564829 - RNA, 22 nt, Human
augcugccccggguaccccccc

SEQ ID NO: 564830 - RNA, 21 nt, Human
caaagaugaaccuggcucucc

SEQ ID NO: 564831 - RNA, 20 nt, Human
cacacaccccauccccaacc

SEQ ID NO: 564832 - RNA, 24 nt, Human
cacugagccagacauucauucaac

SEQ ID NO: 564833 - RNA, 24 nt, Human
cagcaaaguuggcagcuggagcag

SEQ ID NO: 564834 - RNA, 23 nt, Human
cauucaacauuguccauucacac

SEQ ID NO: 564835 - RNA, 18 nt, Human
ccaacagggcagcugggc

SEQ ID NO: 564836 - RNA, 26 nt, Human
ccccauccccaaccuguccacggguc

SEQ ID NO: 564837 - RNA, 21 nt, Human
cccgggaaggaacugggaagg

SEQ ID NO: 564838 - RNA, 19 nt, Human
ccuguccacgggucccugg

SEQ ID NO: 564839 - RNA, 21 nt, Human
cgagccaagccacugcgaaac

SEQ ID NO: 564840 - RNA, 23 nt, Human
cuccaucacugagccagacauuc

SEQ ID NO: 564841 - RNA, 25 nt, Human
cuccugugaugagcacaggguaccc

SEQ ID NO: 564842 - RNA, 18 nt, Human
gaacguggagagcuggug

SEQ ID NO: 564843 - RNA, 22 nt, Human
gaaggagcagacaggguggggc

SEQ ID NO: 564844 - RNA, 18 nt, Human
gacaggguggggcugggg

SEQ ID NO: 564845 - RNA, 23 nt, Human
gagccaagccacugcgaaacuga

SEQ ID NO: 564846 - RNA, 20 nt, Human
gagccagacauucauucaac

SEQ ID NO: 564847 - RNA, 21 nt, Human
gaucugugaccuguagcccuu

SEQ ID NO: 564848 - RNA, 22 nt, Human
gccccggguacccccccugcca

SEQ ID NO: 564849 - RNA, 26 nt, Human
ggaaggagcagacaggguggggcugg

SEQ ID NO: 564850 - RNA, 22 nt, Human
ggagcagcguguggggcccggg

SEQ ID NO: 564851 - RNA, 21 nt, Human
ggccugggcucauuuuccuuu

SEQ ID NO: 564852 - RNA, 21 nt, Human
ggcggcaguggcucugcagca

SEQ ID NO: 564853 - RNA, 22 nt, Human
gggaacguggagagcugguggc

SEQ ID NO: 564854 - RNA, 19 nt, Human
gggaaggaacugggaagga

SEQ ID NO: 564855 - RNA, 21 nt, Human
gggcacacaccccauccccaa

SEQ ID NO: 564856 - RNA, 19 nt, Human
gggccauggugggguuggg

SEQ ID NO: 564857 - RNA, 25 nt, Human
gggcggcaguggcucugcagcaaag

SEQ ID NO: 564858 - RNA, 20 nt, Human
gugaugagcacagugggcac

SEQ ID NO: 564859 - RNA, 18 nt, Human
uaagcauugggucugggu

SEQ ID NO: 564860 - RNA, 23 nt, Human
uacuauuguuuauguugauaaag

SEQ ID NO: 564861 - RNA, 23 nt, Human
ucaauguucuuucucaggcacug

SEQ ID NO: 564862 - RNA, 21 nt, Human
ucccugggccauggugggguu

SEQ ID NO: 564863 - RNA, 23 nt, Human
ucugcagcaaaguuggcagcugg

SEQ ID NO: 564864 - RNA, 22 nt, Human
ucugugaccuguagcccuuuuu

SEQ ID NO: 564865 - RNA, 23 nt, Human
ugagcacagugggcacacacccc

SEQ ID NO: 564866 - RNA, 21 nt, Human
ugccaaggaucccgagccaag

SEQ ID NO: 564867 - RNA, 21 nt, Human
ugccccggguacccccccugc

SEQ ID NO: 564868 - RNA, 23 nt, Human
ugccccggguacccccccugcca

SEQ ID NO: 564869 - RNA, 27 nt, Human
ugccuuacuguaccccgcucacucuca

SEQ ID NO: 564870 - RNA, 19 nt, Human
ugcuaugaggggaacgugg

SEQ ID NO: 564871 - RNA, 19 nt, Human
ugcuucauagcaaggccug

SEQ ID NO: 564872 - RNA, 18 nt, Human
uggcacagacacaggccu

SEQ ID NO: 564873 - RNA, 19 nt, Human
ugggaaggagcagacaggg

SEQ ID NO: 564874 - RNA, 23 nt, Human
ugggaaggagcagacaggguggg

SEQ ID NO: 564875 - RNA, 21 nt, Human
ugggcucauuuuccuuugacu

SEQ ID NO: 564876 - RNA, 21 nt, Human
uggggcccgggaaggaacugg

SEQ ID NO: 564877 - RNA, 22 nt, Human
uggggcccgggaaggaacuggg

SEQ ID NO: 564878 - RNA, 21 nt, Human
uggggcugggggaacugccaa

SEQ ID NO: 564879 - RNA, 28 nt, Human
uugaagaugacgguacugcacuuucccc

SEQ ID NO: 564880 - RNA, 25 nt, Human
uuucucaggcacugacgaucuguga

SEQ ID NO: 564881 - RNA, 18 nt, Human
aaaaggaagggagaggga

SEQ ID NO: 564882 - RNA, 18 nt, Human
aaagcaagacauuuuccu

SEQ ID NO: 564883 - RNA, 22 nt, Human
aaccucgcccucuccccuucac

SEQ ID NO: 564884 - RNA, 27 nt, Human
aagaaaaguaggaaagaaguuaacagc

SEQ ID NO: 564885 - RNA, 24 nt, Human
aagacagacaacccgaaccaucag

SEQ ID NO: 564886 - RNA, 27 nt, Human
aaggaaagacaggcucagaggcaggaa

SEQ ID NO: 564887 - RNA, 21 nt, Human
acagcaaucaacuaguauguc

SEQ ID NO: 564888 - RNA, 20 nt, Human
accucgcccucuccccuuca

SEQ ID NO: 564889 - RNA, 20 nt, Human
agacagacaacccgaaccau

SEQ ID NO: 564890 - RNA, 24 nt, Human
agacagacaacccgaaccaucagg

SEQ ID NO: 564891 - RNA, 22 nt, Human
aggcucagaggcaggaagaacu

SEQ ID NO: 564892 - RNA, 24 nt, Human
agggggcugagagugaagaacagc

SEQ ID NO: 564893 - RNA, 19 nt, Human
agugaagaacagcaaagcc

SEQ ID NO: 564894 - RNA, 23 nt, Human
aucaguaagguagcugaaaaggg

SEQ ID NO: 564895 - RNA, 24 nt, Human
caagaaaaguaggaaagaaguuaa

SEQ ID NO: 564896 - RNA, 20 nt, Human
cacuaaggaaccucgcccuc

SEQ ID NO: 564897 - RNA, 29 nt, Human
cagagcccaggauuuuuacuauggggucc

SEQ ID NO: 564898 - RNA, 22 nt, Human
cagcaauaaauuuaaugugguc

SEQ ID NO: 564899 - RNA, 20 nt, Human
cagcagaaggaaagacaggc

SEQ ID NO: 564900 - RNA, 22 nt, Human
caucuccuuuaaucgcuggaag

SEQ ID NO: 564901 - RNA, 19 nt, Human
ccgaaccaucaggauagca

SEQ ID NO: 564902 - RNA, 20 nt, Human
ccugugcacacuagcaagau

SEQ ID NO: 564903 - RNA, 21 nt, Human
cgcccucuccccuucacacca

SEQ ID NO: 564904 - RNA, 25 nt, Human
cucaagaaguagauaguaagacaga

SEQ ID NO: 564905 - RNA, 23 nt, Human
cucgcccucuccccuucacacca

SEQ ID NO: 564906 - RNA, 19 nt, Human
gagagggaugcaagaaaag

SEQ ID NO: 564907 - RNA, 22 nt, Human
gaugcaagaaaaguaggaaaga

SEQ ID NO: 564908 - RNA, 20 nt, Human
gcagagguagggaggcgagc

SEQ ID NO: 564909 - RNA, 23 nt, Human
ggaaagacaggcucagaggcagg

SEQ ID NO: 564910 - RNA, 19 nt, Human
uaagacagacaacccgaac

SEQ ID NO: 564911 - RNA, 20 nt, Human
uaagacagacaacccgaacc

SEQ ID NO: 564912 - RNA, 21 nt, Human
uaagacagacaacccgaaccc

SEQ ID NO: 564913 - RNA, 24 nt, Human
uaagugcuuaucaguaagguagcu

SEQ ID NO: 564914 - RNA, 18 nt, Human
uaauguggucucucuacu

SEQ ID NO: 564915 - RNA, 18 nt, Human
uacagcaucaucacccaa

SEQ ID NO: 564916 - RNA, 21 nt, Human
uaggguacagcaucaucaccc

SEQ ID NO: 564917 - RNA, 23 nt, Human
uccuucaacuucccaguuuuggc

SEQ ID NO: 564918 - RNA, 24 nt, Human
ucuacaagaaagacggcaggaaaa

SEQ ID NO: 564919 - RNA, 23 nt, Human
ugaagaacagcaaagcccugcca

SEQ ID NO: 564920 - RNA, 24 nt, Human
ugaagaacagcaaagcccugccac

SEQ ID NO: 564921 - RNA, 21 nt, Human
ugcaagaaaaguaggaaagaa

SEQ ID NO: 564922 - RNA, 23 nt, Human
ugugcacacuagcaagaugcccu

SEQ ID NO: 564923 - RNA, 26 nt, Human
aaaaauugguaauaauuauagacaca

SEQ ID NO: 564924 - RNA, 25 nt, Human
aagcucacacgccgagagauuccgg

SEQ ID NO: 564925 - RNA, 20 nt, Human
acaguggcagugcccuuggg

SEQ ID NO: 564926 - RNA, 19 nt, Human
acgcgagccgaaacgcugg

SEQ ID NO: 564927 - RNA, 23 nt, Human
aggccggcgcacgcgagccgaaa

SEQ ID NO: 564928 - RNA, 20 nt, Human
cacaacccagcuucuuaccc

SEQ ID NO: 564929 - RNA, 19 nt, Human
cacacaauaucucauuuag

SEQ ID NO: 564930 - RNA, 26 nt, Human
cagcacuccagaaugcuuuuucaggg

SEQ ID NO: 564931 - RNA, 21 nt, Human
ccaaagcgcgugagggcgcga

SEQ ID NO: 564932 - RNA, 19 nt, Human
ccagaaugcuuuuucaggu

SEQ ID NO: 564933 - RNA, 20 nt, Human
ccagggcaccuccgagcaca

SEQ ID NO: 564934 - RNA, 18 nt, Human
gagagacacgggggaugg

SEQ ID NO: 564935 - RNA, 21 nt, Human
ggagcccaggagugucaccag

SEQ ID NO: 564936 - RNA, 23 nt, Human
gggaaacccaaagcgcgugaggg

SEQ ID NO: 564937 - RNA, 20 nt, Human
ggggauggggaggagcccag

SEQ ID NO: 564938 - RNA, 27 nt, Human
uaacgaaccacacaucaaaggauggac

SEQ ID NO: 564939 - RNA, 23 nt, Human
ucaccagaaaguacacaacccag

SEQ ID NO: 564940 - RNA, 20 nt, Human
ugagagacacgggggauggg

SEQ ID NO: 564941 - RNA, 22 nt, Human
uggggaggagcccaggaguguc

SEQ ID NO: 564942 - RNA, 18 nt, Human
ugguaggacaaccaagcu

SEQ ID NO: 564943 - RNA, 19 nt, Human
uucuuacccagccugcugc

SEQ ID NO: 564944 - RNA, 25 nt, Human
uugguaauaauuauagacacaacuu

SEQ ID NO: 564945 - RNA, 21 nt, Human
acgucaucuugaucaucucuu

SEQ ID NO: 564946 - RNA, 23 nt, Human
auaaaauagagccucaaguuuga

SEQ ID NO: 564947 - RNA, 26 nt, Human
cacacuggaaacgucaucuugaucau

SEQ ID NO: 564948 - RNA, 20 nt, Human
caucucuuuuuucucuaucu

SEQ ID NO: 564949 - RNA, 24 nt, Human
cccguccucggccucuuccucgac

SEQ ID NO: 564950 - RNA, 19 nt, Human
ccgggauccaggucuuucu

SEQ ID NO: 564951 - RNA, 22 nt, Human
gucaucuugaucaucucuuuuu

SEQ ID NO: 564952 - RNA, 20 nt, Human
uaaaauagagccucaaguuu

SEQ ID NO: 564953 - RNA, 20 nt, Human
ucacuguuacuucucuuuuc

SEQ ID NO: 564954 - RNA, 24 nt, Human
ucaguccuuucaccauguucuuga

SEQ ID NO: 564955 - RNA, 20 nt, Human
ucccgguuuucuuugcuguc

SEQ ID NO: 564956 - RNA, 26 nt, Human
ucuccuauuguuauguguugguuuau

SEQ ID NO: 564957 - RNA, 21 nt, Human
ucucugaucuuacaacaucuu

SEQ ID NO: 564958 - RNA, 22 nt, Human
ucucuuuucaaccuucucuucu

SEQ ID NO: 564959 - RNA, 20 nt, Human
ucugccucguccucuucccc

SEQ ID NO: 564960 - RNA, 18 nt, Human
ugaaaugguugaucaguc

SEQ ID NO: 564961 - RNA, 21 nt, Human
ugacugagccucauccucacu

SEQ ID NO: 564962 - RNA, 23 nt, Human
ugagaaaauauaaacagcaacau

SEQ ID NO: 564963 - RNA, 18 nt, Human
ugccucguccucuucccc

SEQ ID NO: 564964 - RNA, 24 nt, Human
uggaaacgucaucuugaucaucuc

SEQ ID NO: 564965 - RNA, 21 nt, Human
uguguugguuuauuugcuuca

SEQ ID NO: 564966 - RNA, 18 nt, Human
uuacuugacugagccuca

SEQ ID NO: 564967 - RNA, 21 nt, Human
uucaccucacuguagaagguc

SEQ ID NO: 564968 - RNA, 18 nt, Human
uucuuugcugucacuguu

SEQ ID NO: 564969 - RNA, 23 nt, Human
uucuuugcugucacuguuacuuc

SEQ ID NO: 564970 - RNA, 22 nt, Human
uuuccucugccucguccucuuc

SEQ ID NO: 564971 - RNA, 21 nt, Human
uuuucaaccuucucuucucua

SEQ ID NO: 564972 - RNA, 22 nt, Human
aaagcccuuuaacgucaggccu

SEQ ID NO: 564973 - RNA, 23 nt, Human
aagggaaaagagauuauugcaaa

SEQ ID NO: 564974 - RNA, 21 nt, Human
agaagaaaaaauaaaggaaag

SEQ ID NO: 564975 - RNA, 22 nt, Human
agcccuacugugucaacaaaga

SEQ ID NO: 564976 - RNA, 22 nt, Human
auaaaauggaaggauuaaacac

SEQ ID NO: 564977 - RNA, 19 nt, Human
auacaaaaugcaaaaggag

SEQ ID NO: 564978 - RNA, 20 nt, Human
auugcaaaauuaugaaugaa

SEQ ID NO: 564979 - RNA, 24 nt, Human
cacuccuauuucaauauccugaag

SEQ ID NO: 564980 - RNA, 23 nt, Human
cagcccuacugugucaacaaaga

SEQ ID NO: 564981 - RNA, 21 nt, Human
cccauacaaguccagcaaggc

SEQ ID NO: 564982 - RNA, 18 nt, Human
cgauagcagacugagcuc

SEQ ID NO: 564983 - RNA, 19 nt, Human
cuaaaauaugcugcacucc

SEQ ID NO: 564984 - RNA, 32 nt, Human
cuaauguacgauagcagacugagcuccccuuu

SEQ ID NO: 564985 - RNA, 26 nt, Human
cugcccagcccuacugugucaacaaa

SEQ ID NO: 564986 - RNA, 22 nt, Human
cugugucaacaaagacgguaca

SEQ ID NO: 564987 - RNA, 20 nt, Human
uaaaauaugcugcacuccuu

SEQ ID NO: 564988 - RNA, 19 nt, Human
uagcagacugagcuccccu

SEQ ID NO: 564989 - RNA, 24 nt, Human
ucaacaaagacgguacaauucaaa

SEQ ID NO: 564990 - RNA, 22 nt, Human
uccaaaaggccugauuaaaaaa

SEQ ID NO: 564991 - RNA, 25 nt, Human
uccaaaaggccugauuaaaaaaaaa

SEQ ID NO: 564992 - RNA, 20 nt, Human
uccugaagcguugaaagccc

SEQ ID NO: 564993 - RNA, 18 nt, Human
ucucaucugcuaccuaga

SEQ ID NO: 564994 - RNA, 20 nt, Human
ugaaugaaguccaaaaggcc

SEQ ID NO: 564995 - RNA, 21 nt, Human
uucagaagaaaaaauaaagga

SEQ ID NO: 564996 - RNA, 23 nt, Human
uucagaagaaaaaauaaaggaaa

SEQ ID NO: 564997 - RNA, 21 nt, Human
uuuagucagaaaacuauuacu

SEQ ID NO: 564998 - RNA, 24 nt, Human
aaaagcuacuuauucuggaaauac

SEQ ID NO: 564999 - RNA, 25 nt, Human
aagauaaagcaggucuauuuuuuaa

SEQ ID NO: 565000 - RNA, 18 nt, Human
aauaaaguuguuuuuaac

SEQ ID NO: 565001 - RNA, 20 nt, Human
aggaaaacaagcuuuaaaaa

SEQ ID NO: 565002 - RNA, 21 nt, Human
aggcaagauaaagcaggucua

SEQ ID NO: 565003 - RNA, 25 nt, Human
caucauggauuuuauucauacagaa

SEQ ID NO: 565004 - RNA, 21 nt, Human
ccuauaucagaugggaggaug

SEQ ID NO: 565005 - RNA, 22 nt, Human
cuuacaauuccuuccuuuuaaa

SEQ ID NO: 565006 - RNA, 22 nt, Human
gaaaacaagcuuuaaaaacuca

SEQ ID NO: 565007 - RNA, 20 nt, Human
gaggaugguauaugaauucu

SEQ ID NO: 565008 - RNA, 23 nt, Human
gaggaugguauaugaauucuuug

SEQ ID NO: 565009 - RNA, 19 nt, Human
uaaaguaauauacugguuu

SEQ ID NO: 565010 - RNA, 19 nt, Human
uaauuugcauacuaucaga

SEQ ID NO: 565011 - RNA, 25 nt, Human
uguucaaaauaaaguuguuuuuaac

SEQ ID NO: 565012 - RNA, 21 nt, Human
uuacuuugauagagcuaaagu

SEQ ID NO: 565013 - RNA, 21 nt, Human
aagcacagcggagauuagccg

SEQ ID NO: 565014 - RNA, 19 nt, Human
cagaagacucccgggagga

SEQ ID NO: 565015 - RNA, 20 nt, Human
ccuccucuucugggaguagg

SEQ ID NO: 565016 - RNA, 24 nt, Human
cgacgcagagcuaaagaaacccac

SEQ ID NO: 565017 - RNA, 21 nt, Human
cgggaggagaggcgaacagcg

SEQ ID NO: 565018 - RNA, 22 nt, Human
cucccgggaggagaggcgaaca

SEQ ID NO: 565019 - RNA, 19 nt, Human
ucucagggauccgacgcag

SEQ ID NO: 565020 - RNA, 23 nt, Human
ugcagaggaagcacagcggagau

SEQ ID NO: 565021 - RNA, 21 nt, Human
uuagccucagccaggauggcu

SEQ ID NO: 565022 - RNA, 22 nt, Human
uucugggaguaggcagaagacu

SEQ ID NO: 565023 - RNA, 22 nt, Human
aaaauuuauccgagccagccac

SEQ ID NO: 565024 - RNA, 19 nt, Human
aacaagagcaucuucaaua

SEQ ID NO: 565025 - RNA, 25 nt, Human
aagaggccuuguuuaaaacaagagc

SEQ ID NO: 565026 - RNA, 24 nt, Human
aagcagccuugcaguccacauggu

SEQ ID NO: 565027 - RNA, 20 nt, Human
accacgacaaaagccaggcu

SEQ ID NO: 565028 - RNA, 21 nt, Human
agccaccacgacaaaagccag

SEQ ID NO: 565029 - RNA, 21 nt, Human
aggaggagacguaguccuaaa

SEQ ID NO: 565030 - RNA, 22 nt, Human
auacaaggcaacgcccaaagcc

SEQ ID NO: 565031 - RNA, 25 nt, Human
caaggcaacgcccaaagccucuguc

SEQ ID NO: 565032 - RNA, 21 nt, Human
caccacgacaaaagccaggcu

SEQ ID NO: 565033 - RNA, 21 nt, Human
cagccaccacgacaaaagcca

SEQ ID NO: 565034 - RNA, 21 nt, Human
ccagucuuagaguauauaaaa

SEQ ID NO: 565035 - RNA, 23 nt, Human
cgacaaaagccaggcugaccaaa

SEQ ID NO: 565036 - RNA, 22 nt, Human
cuccauuuuuuuuugguuguuu

SEQ ID NO: 565037 - RNA, 19 nt, Human
cugugaaucaagcagccuu

SEQ ID NO: 565038 - RNA, 18 nt, Human
gaauucuucacaggagga

SEQ ID NO: 565039 - RNA, 26 nt, Human
gagccagccaccacgacaaaagccag

SEQ ID NO: 565040 - RNA, 20 nt, Human
ggcucgaggcucaaugauca

SEQ ID NO: 565041 - RNA, 21 nt, Human
uaaguaauagcuuauuuaucc

SEQ ID NO: 565042 - RNA, 22 nt, Human
uagcauuuuuauauacaaggca

SEQ ID NO: 565043 - RNA, 21 nt, Human
uauauacaaggcaacgcccaa

SEQ ID NO: 565044 - RNA, 22 nt, Human
uauauacaaggcaacgcccaaa

SEQ ID NO: 565045 - RNA, 23 nt, Human
ugaaucaagcagccuugcagucc

SEQ ID NO: 565046 - RNA, 22 nt, Human
ugcuugaaggaguaaggucuuc

SEQ ID NO: 565047 - RNA, 19 nt, Human
uguaucacuuguucucuuu

SEQ ID NO: 565048 - RNA, 25 nt, Human
uuaaaauaauagcaauugaguccau

SEQ ID NO: 565049 - RNA, 24 nt, Human
uucaccaagacuaaaauuacaaag

SEQ ID NO: 565050 - RNA, 18 nt, Human
uucuucacaggaggagac

SEQ ID NO: 565051 - RNA, 23 nt, Human
uucuugcuugacaagguaggaac

SEQ ID NO: 565052 - RNA, 23 nt, Human
uugaccccaaacauuugcuugaa

SEQ ID NO: 565053 - RNA, 23 nt, Human
uuuaauaaucauuuuuuccaucc

SEQ ID NO: 565054 - RNA, 19 nt, Human
agcaauuuuuucuucuuuu

SEQ ID NO: 565055 - RNA, 21 nt, Human
agcuucuaaagcagcaauuuu

SEQ ID NO: 565056 - RNA, 21 nt, Human
auaggccagugaugucucaaa

SEQ ID NO: 565057 - RNA, 24 nt, Human
cagcaauuuuuucuucuuuuauuu

SEQ ID NO: 565058 - RNA, 22 nt, Human
cgagcuucuaaagcagcaauuu

SEQ ID NO: 565059 - RNA, 19 nt, Human
cuacuggucuuucaacucc

SEQ ID NO: 565060 - RNA, 22 nt, Human
guggauucuucuaaucgagcuu

SEQ ID NO: 565061 - RNA, 20 nt, Human
uagaggagcgucuacugguc

SEQ ID NO: 565062 - RNA, 20 nt, Human
uauucuguucuuguaaugac

SEQ ID NO: 565063 - RNA, 24 nt, Human
ugacacugucugccucugaagugc

SEQ ID NO: 565064 - RNA, 20 nt, Human
uguucugugucucaaguugc

SEQ ID NO: 565065 - RNA, 22 nt, Human
uucugugucucaaguugcuuca

SEQ ID NO: 565066 - RNA, 20 nt, Human
uugaagagugguauucuguu

SEQ ID NO: 565067 - RNA, 27 nt, Human
aaaaaaacaaaauaaaaacaaaaacaa

SEQ ID NO: 565068 - RNA, 28 nt, Human
aaaaaaaccaaacacaaagagagcaggg

SEQ ID NO: 565069 - RNA, 23 nt, Human
aaaaaacaaaauaaaaacaaaaa

SEQ ID NO: 565070 - RNA, 27 nt, Human
aaaaacaaaaaaaccaaacacaaagag

SEQ ID NO: 565071 - RNA, 26 nt, Human
aaaaacaaaaaaaccaaacacaaagg

SEQ ID NO: 565072 - RNA, 21 nt, Human
aaaacaaaauaaaaacaaaaa

SEQ ID NO: 565073 - RNA, 25 nt, Human
aaacaaaaaaaccaaacacaaagag

SEQ ID NO: 565074 - RNA, 30 nt, Human
aaacaaaaaaaccaaacacaaagagagcaa

SEQ ID NO: 565075 - RNA, 22 nt, Human
aaacaaaaacaaaaaaaccaaa

SEQ ID NO: 565076 - RNA, 27 nt, Human
aaacaaaaacaaaaaaaccaaacacaa

SEQ ID NO: 565077 - RNA, 23 nt, Human
aaacacaaagagagcaguguugg

SEQ ID NO: 565078 - RNA, 26 nt, Human
aaauaaaaacaaaaacaaaaaaacca

SEQ ID NO: 565079 - RNA, 21 nt, Human
aacaaaaaaaccaaacacaaa

SEQ ID NO: 565080 - RNA, 21 nt, Human
aacaaaaacaaaaaaaccaaa

SEQ ID NO: 565081 - RNA, 24 nt, Human
aacaaaaacaaaaaaaccaaacac

SEQ ID NO: 565082 - RNA, 20 nt, Human
aaccaaacacaaagagagca

SEQ ID NO: 565083 - RNA, 23 nt, Human
aagcagcucagccugggcagggc

SEQ ID NO: 565084 - RNA, 23 nt, Human
acaaaaacaaaaaaaccaaacac

SEQ ID NO: 565085 - RNA, 26 nt, Human
acaaaaacaaaaaaaccaaacacaaa

SEQ ID NO: 565086 - RNA, 28 nt, Human
acaaaaacaaaaaaaccaaacacaaaga

SEQ ID NO: 565087 - RNA, 24 nt, Human
acaaaauaaaaacaaaaacaaaaa

SEQ ID NO: 565088 - RNA, 19 nt, Human
acaguaucaaaaguaaaga

SEQ ID NO: 565089 - RNA, 18 nt, Human
acgccuucagcuggcagu

SEQ ID NO: 565090 - RNA, 21 nt, Human
agcaguaccaucagcccuggc

SEQ ID NO: 565091 - RNA, 26 nt, Human
caaaaaaaccaaacacaaagagagca

SEQ ID NO: 565092 - RNA, 24 nt, Human
caaaaacaaaaaaaccaaacacaa

SEQ ID NO: 565093 - RNA, 19 nt, Human
cacaguagcagcagucaca

SEQ ID NO: 565094 - RNA, 18 nt, Human
cacaguaucaaaaguaaa

SEQ ID NO: 565095 - RNA, 24 nt, Human
cagucacagaacuucccaucucuc

SEQ ID NO: 565096 - RNA, 21 nt, Human
caguccacgggcucugagugu

SEQ ID NO: 565097 - RNA, 21 nt, Human
ccagcccaguccacgggcucu

SEQ ID NO: 565098 - RNA, 21 nt, Human
cccaucucucuggugggugga

SEQ ID NO: 565099 - RNA, 19 nt, Human
cccuuaggccagcccaguc

SEQ ID NO: 565100 - RNA, 20 nt, Human
ccuuaggccagcccaguccc

SEQ ID NO: 565101 - RNA, 18 nt, Human
cucugguggguggaggau

SEQ ID NO: 565102 - RNA, 24 nt, Human
gaaaaaaacaaaauaaaaacaaaa

SEQ ID NO: 565103 - RNA, 19 nt, Human
gaacucacaguagcagcag

SEQ ID NO: 565104 - RNA, 18 nt, Human
gacucgucggggcagcgg

SEQ ID NO: 565105 - RNA, 19 nt, Human
gagcacagagggucuugga

SEQ ID NO: 565106 - RNA, 18 nt, Human
gaggaugaggugcaggag

SEQ ID NO: 565107 - RNA, 20 nt, Human
gcauuguggccgaagaacuc

SEQ ID NO: 565108 - RNA, 22 nt, Human
ggcagcuccucuuuccgccugg

SEQ ID NO: 565109 - RNA, 24 nt, Human
guguggaggcugcguagcaccagg

SEQ ID NO: 565110 - RNA, 25 nt, Human
uaaaaacaaaaacaaaaaaaccaaa

SEQ ID NO: 565111 - RNA, 28 nt, Human
uaaaaacaaaaacaaaaaaaccaaagag

SEQ ID NO: 565112 - RNA, 24 nt, Human
ucagcuuuugguuggaccaggaug

SEQ ID NO: 565113 - RNA, 20 nt, Human
uccacgggcucugagugugg

SEQ ID NO: 565114 - RNA, 23 nt, Human
ucugcugaggucaaggggcccca

SEQ ID NO: 565115 - RNA, 20 nt, Human
ugcuuuaucuuucggcacga

SEQ ID NO: 565116 - RNA, 22 nt, Human
uggaaaaaaacaaaauaaaaac

SEQ ID NO: 565117 - RNA, 24 nt, Human
uggggagcacagagggucuuggac

SEQ ID NO: 565118 - RNA, 18 nt, Human
uugguuggaccaggaugg

SEQ ID NO: 565119 - RNA, 22 nt, Human
uuugguuggaccaggauggugg

SEQ ID NO: 565120 - RNA, 22 nt, Human
aagcaaucgguacagaaaaggc

SEQ ID NO: 565121 - RNA, 18 nt, Human
aagcucaacaggccagga

SEQ ID NO: 565122 - RNA, 19 nt, Human
accacacacacaaaaagca

SEQ ID NO: 565123 - RNA, 19 nt, Human
acugucccaucuguaguug

SEQ ID NO: 565124 - RNA, 21 nt, Human
agaaugcugaacauuuacugu

SEQ ID NO: 565125 - RNA, 23 nt, Human
agaauuucuuuccaugauuucuc

SEQ ID NO: 565126 - RNA, 19 nt, Human
agcaaccaccacgacaaag

SEQ ID NO: 565127 - RNA, 18 nt, Human
aggcaggaaggccccagg

SEQ ID NO: 565128 - RNA, 24 nt, Human
auuucuuuccaugauuucucccau

SEQ ID NO: 565129 - RNA, 18 nt, Human
caaagcaaccaccacgac

SEQ ID NO: 565130 - RNA, 20 nt, Human
cagcaguguaaugaacacag

SEQ ID NO: 565131 - RNA, 21 nt, Human
caggaaccgcccucugccucg

SEQ ID NO: 565132 - RNA, 26 nt, Human
cccaggaggacccugcugggucugcc

SEQ ID NO: 565133 - RNA, 22 nt, Human
cccgcccgccaccgcaguucag

SEQ ID NO: 565134 - RNA, 19 nt, Human
ccgcaguucaaaggcagga

SEQ ID NO: 565135 - RNA, 19 nt, Human
ccugagcgaagcccggccc

SEQ ID NO: 565136 - RNA, 23 nt, Human
cgcaguucaaaggcaggaaggcc

SEQ ID NO: 565137 - RNA, 19 nt, Human
cuccaggaaccgcccucug

SEQ ID NO: 565138 - RNA, 20 nt, Human
cuuuccaugauuucucccau

SEQ ID NO: 565139 - RNA, 19 nt, Human
gccccaggaggacccugcu

SEQ ID NO: 565140 - RNA, 19 nt, Human
gccgcgcagacacgucccg

SEQ ID NO: 565141 - RNA, 19 nt, Human
gucugccucaaacgcugcc

SEQ ID NO: 565142 - RNA, 21 nt, Human
uaccacacacacaaaaagcaa

SEQ ID NO: 565143 - RNA, 18 nt, Human
ucccugcgaggcuucguc

SEQ ID NO: 565144 - RNA, 23 nt, Human
ugagaauuucuuuccaugauuuc

SEQ ID NO: 565145 - RNA, 25 nt, Human
ugccugagcgaagcccggcccaggc

SEQ ID NO: 565146 - RNA, 24 nt, Human
uguaaaauugaauaaagauuuuau

SEQ ID NO: 565147 - RNA, 18 nt, Human
uuuuuuuuuuuuuuucug

SEQ ID NO: 565148 - RNA, 19 nt, Human
uuuuuuuuuuuuuuucugu

SEQ ID NO: 565149 - RNA, 20 nt, Human
aaggagccccugccaccugc

SEQ ID NO: 565150 - RNA, 26 nt, Human
agagucccugcaucugcucccugccu

SEQ ID NO: 565151 - RNA, 22 nt, Human
aggguucccuaacuuuucccuu

SEQ ID NO: 565152 - RNA, 21 nt, Human
agucgucuagagagcaaauac

SEQ ID NO: 565153 - RNA, 27 nt, Human
cagggugcacacaucccugcaggucuc

SEQ ID NO: 565154 - RNA, 24 nt, Human
cauguguuuucuccuccagaaugc

SEQ ID NO: 565155 - RNA, 19 nt, Human
ccacaguccccuccaaguc

SEQ ID NO: 565156 - RNA, 24 nt, Human
cccacauccacagaagggccacaa

SEQ ID NO: 565157 - RNA, 25 nt, Human
ccuccagaaugcgcuuggaaaccac

SEQ ID NO: 565158 - RNA, 22 nt, Human
cgggagcuggaggccaaggagc

SEQ ID NO: 565159 - RNA, 24 nt, Human
cguggcagagucccugcaucugcu

SEQ ID NO: 565160 - RNA, 18 nt, Human
cuccucagucccacaguc

SEQ ID NO: 565161 - RNA, 23 nt, Human
cucuaucucgacguaggccuccg

SEQ ID NO: 565162 - RNA, 18 nt, Human
cugcucccugccuggccu

SEQ ID NO: 565163 - RNA, 19 nt, Human
cuucggagucaccgcacag

SEQ ID NO: 565164 - RNA, 22 nt, Human
cuuuucgaggcugaggaaagac

SEQ ID NO: 565165 - RNA, 23 nt, Human
cuuuuuuuuuuuucaucuuuuug

SEQ ID NO: 565166 - RNA, 19 nt, Human
gaaucacuggcacggaagc

SEQ ID NO: 565167 - RNA, 19 nt, Human
gaccauauuuacucuaucu

SEQ ID NO: 565168 - RNA, 22 nt, Human
gagcaaauacacaguaauuccc

SEQ ID NO: 565169 - RNA, 21 nt, Human
gaggcugaggaaagaccccga

SEQ ID NO: 565170 - RNA, 18 nt, Human
gcucucugcucugugcuc

SEQ ID NO: 565171 - RNA, 20 nt, Human
gggcacagcggaagggcugc

SEQ ID NO: 565172 - RNA, 18 nt, Human
gucacggccaugauccau

SEQ ID NO: 565173 - RNA, 24 nt, Human
gucccugcaucugcucccugccug

SEQ ID NO: 565174 - RNA, 21 nt, Human
uacaaugucccucaccagaau

SEQ ID NO: 565175 - RNA, 18 nt, Human
ucaccuuuuaauuggacc

SEQ ID NO: 565176 - RNA, 23 nt, Human
ucacuggcacggaagcuuuuccu

SEQ ID NO: 565177 - RNA, 26 nt, Human
ucauguguuuucuccuccagaaugcg

SEQ ID NO: 565178 - RNA, 19 nt, Human
ucccacaguccccuccaag

SEQ ID NO: 565179 - RNA, 21 nt, Human
uccccuccaagucacgggagc

SEQ ID NO: 565180 - RNA, 24 nt, Human
ucccugcaggucucggggcuccug

SEQ ID NO: 565181 - RNA, 25 nt, Human
uccuggguugcuucuggaagggccc

SEQ ID NO: 565182 - RNA, 18 nt, Human
ucucugcucugugcuccu

SEQ ID NO: 565183 - RNA, 19 nt, Human
ucugcucccugccuggccu

SEQ ID NO: 565184 - RNA, 21 nt, Human
ucugucggcagagaacccuga

SEQ ID NO: 565185 - RNA, 21 nt, Human
ugaggaaagaccccgagagcg

SEQ ID NO: 565186 - RNA, 20 nt, Human
ugaggcaacgaaucacuggc

SEQ ID NO: 565187 - RNA, 22 nt, Human
ugcaccucucaggguucccuaa

SEQ ID NO: 565188 - RNA, 18 nt, Human
ugcaggucucggggcucc

SEQ ID NO: 565189 - RNA, 18 nt, Human
ugccuggccugggcuccc

SEQ ID NO: 565190 - RNA, 22 nt, Human
ugcucugugcuccucaguccca

SEQ ID NO: 565191 - RNA, 22 nt, Human
uggcugcaggugcagggcuaug

SEQ ID NO: 565192 - RNA, 23 nt, Human
uuuuucagggguugauugucggg

SEQ ID NO: 565193 - RNA, 22 nt, Human
aagaguccgaugugccccagcc

SEQ ID NO: 565194 - RNA, 26 nt, Human
aagcagcaagcagugcauuccagagc

SEQ ID NO: 565195 - RNA, 19 nt, Human
aagcagugcauuccagagc

SEQ ID NO: 565196 - RNA, 22 nt, Human
accggagcccaagggggcacug

SEQ ID NO: 565197 - RNA, 23 nt, Human
acuccacuagcuccaacucuacc

SEQ ID NO: 565198 - RNA, 24 nt, Human
agacagaacucuagggucugcagg

SEQ ID NO: 565199 - RNA, 24 nt, Human
agaguaaagccaccggagcccaag

SEQ ID NO: 565200 - RNA, 22 nt, Human
agcaagcagugcauuccagagc

SEQ ID NO: 565201 - RNA, 18 nt, Human
agcagaaagagaagucga

SEQ ID NO: 565202 - RNA, 23 nt, Human
agcagaaauuauuuagcagcagc

SEQ ID NO: 565203 - RNA, 23 nt, Human
agcagacgaaccacugagccucu

SEQ ID NO: 565204 - RNA, 23 nt, Human
agccgcaacaguauaagguggcc

SEQ ID NO: 565205 - RNA, 19 nt, Human
aggcuucuuucucuccucu

SEQ ID NO: 565206 - RNA, 19 nt, Human
caaaucgccgcugcucuuc

SEQ ID NO: 565207 - RNA, 22 nt, Human
caacguguggagcagaaagaga

SEQ ID NO: 565208 - RNA, 22 nt, Human
caacuccacuagcuccaacucu

SEQ ID NO: 565209 - RNA, 22 nt, Human
cacaguggggucagcaccugcu

SEQ ID NO: 565210 - RNA, 24 nt, Human
cacccccaucuuccaaaucaucuc

SEQ ID NO: 565211 - RNA, 22 nt, Human
cagaguccccacagucaacucc

SEQ ID NO: 565212 - RNA, 18 nt, Human
cagcagcagacgaaccac

SEQ ID NO: 565213 - RNA, 19 nt, Human
cagcagcuccaaacguccc

SEQ ID NO: 565214 - RNA, 20 nt, Human
cagcugcugcaugcaggaga

SEQ ID NO: 565215 - RNA, 19 nt, Human
cauuccagagcucuggcug

SEQ ID NO: 565216 - RNA, 20 nt, Human
ccaaacuuuauugugauuaa

SEQ ID NO: 565217 - RNA, 21 nt, Human
ccaccggagcccaagggggca

SEQ ID NO: 565218 - RNA, 22 nt, Human
ccacugagccucuuccagcugc

SEQ ID NO: 565219 - RNA, 18 nt, Human
ccagugugucugagguga

SEQ ID NO: 565220 - RNA, 18 nt, Human
cccacagucaacuccacu

SEQ ID NO: 565221 - RNA, 21 nt, Human
cccgaguguccuucaccccca

SEQ ID NO: 565222 - RNA, 24 nt, Human
ccgaugugccccagccuccugguc

SEQ ID NO: 565223 - RNA, 18 nt, Human
ccuccugcuccugcugcc

SEQ ID NO: 565224 - RNA, 21 nt, Human
cgagguagugaaagggaguca

SEQ ID NO: 565225 - RNA, 23 nt, Human
cgaguguccuucacccccaucuu

SEQ ID NO: 565226 - RNA, 24 nt, Human
cucacaaagauccagaguccccac

SEQ ID NO: 565227 - RNA, 24 nt, Human
cucgcaaguccucaggucgauugc

SEQ ID NO: 565228 - RNA, 22 nt, Human
cucucaggucccugaguuggcc

SEQ ID NO: 565229 - RNA, 18 nt, Human
cugcuccugcugccucug

SEQ ID NO: 565230 - RNA, 19 nt, Human
cugcuccugcugccucugc

SEQ ID NO: 565231 - RNA, 21 nt, Human
cugcugccucugcugcuguuc

SEQ ID NO: 565232 - RNA, 22 nt, Human
cugcugccucugcugcuguucc

SEQ ID NO: 565233 - RNA, 19 nt, Human
cuguuccucccguugccgc

SEQ ID NO: 565234 - RNA, 20 nt, Human
cuucuugaguuugcuggaga

SEQ ID NO: 565235 - RNA, 22 nt, Human
cuuuucuccuucuuauuccuuu

SEQ ID NO: 565236 - RNA, 26 nt, Human
cuuuucuccuucuuauuccuuuuucu

SEQ ID NO: 565237 - RNA, 19 nt, Human
gagcagaaagagaagucga

SEQ ID NO: 565238 - RNA, 24 nt, Human
gaucuuucuuauuucuuccucagu

SEQ ID NO: 565239 - RNA, 19 nt, Human
gcagagucagggauuggag

SEQ ID NO: 565240 - RNA, 21 nt, Human
gccaucuucucccuccgaccc

SEQ ID NO: 565241 - RNA, 19 nt, Human
ggagauuccucauucugcc

SEQ ID NO: 565242 - RNA, 23 nt, Human
ggauuucugcaacacaacaaucc

SEQ ID NO: 565243 - RNA, 18 nt, Human
ggcccaagggggcagcaa

SEQ ID NO: 565244 - RNA, 22 nt, Human
ggcuuuucuccuucuuauuccu

SEQ ID NO: 565245 - RNA, 20 nt, Human
uaaaauuccagagacaguac

SEQ ID NO: 565246 - RNA, 22 nt, Human
uaaagccaccggagcccaaggg

SEQ ID NO: 565247 - RNA, 23 nt, Human
uaccucuagcccugucuuugccc

SEQ ID NO: 565248 - RNA, 25 nt, Human
uaguucccgaguguccuucaccccc

SEQ ID NO: 565249 - RNA, 25 nt, Human
uccagaguccccacagucaacuccc

SEQ ID NO: 565250 - RNA, 18 nt, Human
uccagcugcagcugcugc

SEQ ID NO: 565251 - RNA, 19 nt, Human
ucccguugccgccgggcug

SEQ ID NO: 565252 - RNA, 24 nt, Human
ucccuccgacccugaacccuguuu

SEQ ID NO: 565253 - RNA, 20 nt, Human
ucccugaguuggccccaggu

SEQ ID NO: 565254 - RNA, 19 nt, Human
ucccugcagaucuuucuua

SEQ ID NO: 565255 - RNA, 18 nt, Human
uccuccugcuccugcugc

SEQ ID NO: 565256 - RNA, 21 nt, Human
uccugcuccugcugccucugc

SEQ ID NO: 565257 - RNA, 25 nt, Human
uccugcuccugcugccucugcugcu

SEQ ID NO: 565258 - RNA, 20 nt, Human
uccugcugccucugcugcug

SEQ ID NO: 565259 - RNA, 18 nt, Human
ucugcucccuuuuccgug

SEQ ID NO: 565260 - RNA, 22 nt, Human
ugaaagccaucuucucccuccg

SEQ ID NO: 565261 - RNA, 18 nt, Human
ugaaagggagucaggccu

SEQ ID NO: 565262 - RNA, 18 nt, Human
ugaccaggggcuuuggcc

SEQ ID NO: 565263 - RNA, 20 nt, Human
ugccccacaacuccagcagc

SEQ ID NO: 565264 - RNA, 18 nt, Human
ugccccagccuccugguc

SEQ ID NO: 565265 - RNA, 24 nt, Human
ugccccagcgcuuccuuuucaucc

SEQ ID NO: 565266 - RNA, 19 nt, Human
ugggaugacuguguggaag

SEQ ID NO: 565267 - RNA, 18 nt, Human
ugggcagcgagucggcgc

SEQ ID NO: 565268 - RNA, 24 nt, Human
uguccuucacccccaucuuccaaa

SEQ ID NO: 565269 - RNA, 18 nt, Human
uguggagcagaaagagaa

SEQ ID NO: 565270 - RNA, 19 nt, Human
uuacuguuuuccagugugu

SEQ ID NO: 565271 - RNA, 23 nt, Human
uuccaaaucaucucugguuucac

SEQ ID NO: 565272 - RNA, 23 nt, Human
uuccagagcucuggcugaccagg

SEQ ID NO: 565273 - RNA, 19 nt, Human
uuuccguguagccugccgu

SEQ ID NO: 565274 - RNA, 18 nt, Human
aaacacaggccagcugag

SEQ ID NO: 565275 - RNA, 19 nt, Human
aaagagaaaacccaagucu

SEQ ID NO: 565276 - RNA, 22 nt, Human
aaccaguaaaccaagcaacccu

SEQ ID NO: 565277 - RNA, 18 nt, Human
aagcaacccuggacuucu

SEQ ID NO: 565278 - RNA, 23 nt, Human
agaugaacacugcugccugaagc

SEQ ID NO: 565279 - RNA, 18 nt, Human
agauucaugccccaaaca

SEQ ID NO: 565280 - RNA, 21 nt, Human
agcauccaccuuccugcccca

SEQ ID NO: 565281 - RNA, 18 nt, Human
auccaccuuccugcccca

SEQ ID NO: 565282 - RNA, 18 nt, Human
caacucccacagcuccau

SEQ ID NO: 565283 - RNA, 18 nt, Human
caagaggacagaugggga

SEQ ID NO: 565284 - RNA, 19 nt, Human
caagcugcagccucuaaac

SEQ ID NO: 565285 - RNA, 18 nt, Human
caccaaagagaaaaccca

SEQ ID NO: 565286 - RNA, 23 nt, Human
cagacaaggaggagaggagagau

SEQ ID NO: 565287 - RNA, 24 nt, Human
cagagugccaacucccacagcucc

SEQ ID NO: 565288 - RNA, 20 nt, Human
cagaugagggagcgccuucc

SEQ ID NO: 565289 - RNA, 19 nt, Human
caguuccuuuugcaaagau

SEQ ID NO: 565290 - RNA, 26 nt, Human
ccaauuucccuccugauuguagcuca

SEQ ID NO: 565291 - RNA, 18 nt, Human
ccaugacaacagcaucca

SEQ ID NO: 565292 - RNA, 22 nt, Human
ccugcagacccugggaagggcu

SEQ ID NO: 565293 - RNA, 23 nt, Human
ccuuccugccccaacacuguucc

SEQ ID NO: 565294 - RNA, 23 nt, Human
cgauggaagaagucucagagucu

SEQ ID NO: 565295 - RNA, 21 nt, Human
cgccuuggcucuguguugccu

SEQ ID NO: 565296 - RNA, 23 nt, Human
cuccaugacaacagcauccaccu

SEQ ID NO: 565297 - RNA, 18 nt, Human
cugccaggagcugcacug

SEQ ID NO: 565298 - RNA, 23 nt, Human
cuggagcuuuucuucuccugugu

SEQ ID NO: 565299 - RNA, 21 nt, Human
cuuggcucuguguugccuacc

SEQ ID NO: 565300 - RNA, 24 nt, Human
gacacggugccaauuuacugccaa

SEQ ID NO: 565301 - RNA, 26 nt, Human
gccaacucccacagcuccaugacaac

SEQ ID NO: 565302 - RNA, 20 nt, Human
gccugaagcucagggcagcu

SEQ ID NO: 565303 - RNA, 23 nt, Human
gcuccaugacaacagcauccacc

SEQ ID NO: 565304 - RNA, 21 nt, Human
ggaagaaaccccuccucugga

SEQ ID NO: 565305 - RNA, 21 nt, Human
ggaaucccuucagaggcccuu

SEQ ID NO: 565306 - RNA, 21 nt, Human
gggcagcugcccacagugagg

SEQ ID NO: 565307 - RNA, 23 nt, Human
ggugcuuucagauuucuuauaaa

SEQ ID NO: 565308 - RNA, 18 nt, Human
uaaaccaguaaaccaagc

SEQ ID NO: 565309 - RNA, 24 nt, Human
uaaaccaguaaaccaagcaacccu

SEQ ID NO: 565310 - RNA, 22 nt, Human
uacuugaaucccaggaaacagu

SEQ ID NO: 565311 - RNA, 26 nt, Human
uagaaaccaccaaagagaaaacccaa

SEQ ID NO: 565312 - RNA, 22 nt, Human
uccuggagcuuuucuucuccug

SEQ ID NO: 565313 - RNA, 20 nt, Human
ugaaggagaaaagaaguugu

SEQ ID NO: 565314 - RNA, 24 nt, Human
ugacacggugccaauuuacugcca

SEQ ID NO: 565315 - RNA, 18 nt, Human
ugcccgguuugucaacag

SEQ ID NO: 565316 - RNA, 19 nt, Human
ugccugaagcucagggcag

SEQ ID NO: 565317 - RNA, 21 nt, Human
uggaaaccagacaacuggcca

SEQ ID NO: 565318 - RNA, 18 nt, Human
uggaagaagucucagagu

SEQ ID NO: 565319 - RNA, 18 nt, Human
uggagggcagauggacug

SEQ ID NO: 565320 - RNA, 22 nt, Human
uggccagagaugaacacugcug

SEQ ID NO: 565321 - RNA, 24 nt, Human
ugggaagggcugaucugaauccug

SEQ ID NO: 565322 - RNA, 24 nt, Human
uggggacagggauccuggagcuuu

SEQ ID NO: 565323 - RNA, 22 nt, Human
ugucagaggugcuuucagauuu

SEQ ID NO: 565324 - RNA, 21 nt, Human
uguucugguugcauacuugaa

SEQ ID NO: 565325 - RNA, 20 nt, Human
uuccaauuucccuccugauu

SEQ ID NO: 565326 - RNA, 18 nt, Human
uucccuccugauuguagc

SEQ ID NO: 565327 - RNA, 20 nt, Human
uuccgucuggcuuccagcac

SEQ ID NO: 565328 - RNA, 18 nt, Human
uugcauacuugaauccca

SEQ ID NO: 565329 - RNA, 24 nt, Human
uuggcccagaugagggagcgccuu

SEQ ID NO: 565330 - RNA, 21 nt, Human
uuuuuugacagaaguaaaaau

SEQ ID NO: 565331 - RNA, 18 nt, Human
uuuuuuuuuuuuuuuuug

SEQ ID NO: 565332 - RNA, 22 nt, Human
uuuuuuuuuuuuuuuuugacag

SEQ ID NO: 565333 - RNA, 21 nt, Human
aaagcugacagccacaaaaca

SEQ ID NO: 565334 - RNA, 24 nt, Human
aaagcugacagccacaaaacaauc

SEQ ID NO: 565335 - RNA, 19 nt, Human
aauaggccaccugcaggcc

SEQ ID NO: 565336 - RNA, 23 nt, Human
accacggggaaagcugacagcca

SEQ ID NO: 565337 - RNA, 20 nt, Human
agaaacuggauagaugauuu

SEQ ID NO: 565338 - RNA, 21 nt, Human
agaccacggggaaagcugaca

SEQ ID NO: 565339 - RNA, 20 nt, Human
agaguggacugguguggcca

SEQ ID NO: 565340 - RNA, 20 nt, Human
agcagagccaccagagauaa

SEQ ID NO: 565341 - RNA, 18 nt, Human
aggagagggcggaucugg

SEQ ID NO: 565342 - RNA, 18 nt, Human
aguauuuaagaaauccug

SEQ ID NO: 565343 - RNA, 21 nt, Human
augcagccacaaacucagacc

SEQ ID NO: 565344 - RNA, 21 nt, Human
caaaauaggccaccugcaggc

SEQ ID NO: 565345 - RNA, 22 nt, Human
caccagagauaaaaaugcagcc

SEQ ID NO: 565346 - RNA, 19 nt, Human
ccacaaacucagaccacgg

SEQ ID NO: 565347 - RNA, 23 nt, Human
ccaccugcaggccucaugcaaaa

SEQ ID NO: 565348 - RNA, 20 nt, Human
ccucgaaugacaaucaguuu

SEQ ID NO: 565349 - RNA, 23 nt, Human
gaagccccccauuugcucugcuc

SEQ ID NO: 565350 - RNA, 24 nt, Human
gcaguuuccagucucugcagcugc

SEQ ID NO: 565351 - RNA, 24 nt, Human
gccuugaaggcaguuuccagucuc

SEQ ID NO: 565352 - RNA, 20 nt, Human
ggcggaucuggggugugguc

SEQ ID NO: 565353 - RNA, 28 nt, Human
uaaaaaugcagccacaaacucagaccac

SEQ ID NO: 565354 - RNA, 19 nt, Human
ucaccgucugagucaaaau

SEQ ID NO: 565355 - RNA, 22 nt, Human
ucagaccacggggaaagcugac

SEQ ID NO: 565356 - RNA, 19 nt, Human
uccucgaaugacaaucagu

SEQ ID NO: 565357 - RNA, 24 nt, Human
uccucgaaugacaaucaguuuuau

SEQ ID NO: 565358 - RNA, 24 nt, Human
ucucugcagcugcgggaugagggu

SEQ ID NO: 565359 - RNA, 20 nt, Human
ucugcgccgccguagcagag

SEQ ID NO: 565360 - RNA, 23 nt, Human
ugaccagccguggccuugaaggc

SEQ ID NO: 565361 - RNA, 22 nt, Human
ugcagccacaaacucagaccac

SEQ ID NO: 565362 - RNA, 19 nt, Human
ugcucugcucagccucucu

SEQ ID NO: 565363 - RNA, 19 nt, Human
ugcuuuuuucaccgucuga

SEQ ID NO: 565364 - RNA, 18 nt, Human
acccagacgguguccugg

SEQ ID NO: 565365 - RNA, 19 nt, Human
acccugccgcccugcacgg

SEQ ID NO: 565366 - RNA, 19 nt, Human
agaacuccuccagcuucuu

SEQ ID NO: 565367 - RNA, 23 nt, Human
agacgguguccuggguggacgcc

SEQ ID NO: 565368 - RNA, 22 nt, Human
agcagggcccgcacaacacgag

SEQ ID NO: 565369 - RNA, 26 nt, Human
agccacgguggggaagcugaauuugc

SEQ ID NO: 565370 - RNA, 19 nt, Human
auggccguguggggcucag

SEQ ID NO: 565371 - RNA, 24 nt, Human
caccacguugaccugugugaggau

SEQ ID NO: 565372 - RNA, 20 nt, Human
cagaccaggcccugggaggg

SEQ ID NO: 565373 - RNA, 19 nt, Human
cagcccugccagccuucug

SEQ ID NO: 565374 - RNA, 21 nt, Human
cagcgucuccuccaccuucuc

SEQ ID NO: 565375 - RNA, 18 nt, Human
cagcucagccuugcgcuu

SEQ ID NO: 565376 - RNA, 20 nt, Human
ccagcccugccagccuucug

SEQ ID NO: 565377 - RNA, 22 nt, Human
ccagcccugccagccuucugau

SEQ ID NO: 565378 - RNA, 18 nt, Human
cccccaaggaagguuccu

SEQ ID NO: 565379 - RNA, 22 nt, Human
cccccgggaagggcugcugccc

SEQ ID NO: 565380 - RNA, 21 nt, Human
cccggucauguucuuucuucc

SEQ ID NO: 565381 - RNA, 21 nt, Human
cccuccaggaucagcugcuuc

SEQ ID NO: 565382 - RNA, 18 nt, Human
cccugggaggggacuggg

SEQ ID NO: 565383 - RNA, 24 nt, Human
ccuccagcuucuucuuggggccgc

SEQ ID NO: 565384 - RNA, 24 nt, Human
ccuccaguuugaucucacacucuc

SEQ ID NO: 565385 - RNA, 26 nt, Human
ccugcagccugaaucuuggccagggc

SEQ ID NO: 565386 - RNA, 21 nt, Human
ccugccagccuucugucgcuu

SEQ ID NO: 565387 - RNA, 19 nt, Human
ccuucugucgcuucagcgu

SEQ ID NO: 565388 - RNA, 21 nt, Human
cgcaccacguugaccugugug

SEQ ID NO: 565389 - RNA, 21 nt, Human
cgggaagggcugcugccccca

SEQ ID NO: 565390 - RNA, 18 nt, Human
cucagccuugcgcuuggc

SEQ ID NO: 565391 - RNA, 25 nt, Human
cucagccuugcgcuuggccuccagg

SEQ ID NO: 565392 - RNA, 23 nt, Human
cuccuccagcuucuucuugaucu

SEQ ID NO: 565393 - RNA, 20 nt, Human
cucgguggauguagaucuug

SEQ ID NO: 565394 - RNA, 21 nt, Human
cugacccugccgcccugcacg

SEQ ID NO: 565395 - RNA, 23 nt, Human
cugagugggacccagacgguguc

SEQ ID NO: 565396 - RNA, 20 nt, Human
gagcagggcccgcacaacac

SEQ ID NO: 565397 - RNA, 19 nt, Human
gaggggacugggccugagu

SEQ ID NO: 565398 - RNA, 24 nt, Human
gaucucacacucucuucgcaccac

SEQ ID NO: 565399 - RNA, 24 nt, Human
gcccccaaggaagguuccuccgac

SEQ ID NO: 565400 - RNA, 25 nt, Human
gcccgcacaacacgagcgcccacca

SEQ ID NO: 565401 - RNA, 21 nt, Human
gcuucaucauggagugcagag

SEQ ID NO: 565402 - RNA, 20 nt, Human
ggaagguuccuccgacccuc

SEQ ID NO: 565403 - RNA, 22 nt, Human
ggaagucaaaagacccguuuau

SEQ ID NO: 565404 - RNA, 21 nt, Human
gggaagggaccagccaguggu

SEQ ID NO: 565405 - RNA, 21 nt, Human
ucagcgucuccuccaccuucu

SEQ ID NO: 565406 - RNA, 19 nt, Human
ucagggaagggaccagcca

SEQ ID NO: 565407 - RNA, 26 nt, Human
ucuuggggagcccggggguguugugg

SEQ ID NO: 565408 - RNA, 20 nt, Human
ucuuucuuccccugcagccu

SEQ ID NO: 565409 - RNA, 24 nt, Human
ugaggaucuguagcaccucggccu

SEQ ID NO: 565410 - RNA, 20 nt, Human
ugagugggacccagacggug

SEQ ID NO: 565411 - RNA, 21 nt, Human
uggccuccaggucaggguccu

SEQ ID NO: 565412 - RNA, 21 nt, Human
uggggaagcugaauuugcgca

SEQ ID NO: 565413 - RNA, 21 nt, Human
uggggcucagaccaggcccug

SEQ ID NO: 565414 - RNA, 19 nt, Human
uggggucacaaccucccgg

SEQ ID NO: 565415 - RNA, 19 nt, Human
uguggggcucagaccaggc

SEQ ID NO: 565416 - RNA, 19 nt, Human
uucaucauggagugcagag

SEQ ID NO: 565417 - RNA, 20 nt, Human
uuccuccgacccucagcucc

SEQ ID NO: 565418 - RNA, 20 nt, Human
uucugcuucaucauggagug

SEQ ID NO: 565419 - RNA, 19 nt, Human
uuggccagcucagccuugc

SEQ ID NO: 565420 - RNA, 18 nt, Human
aaguagcugggauuacag

SEQ ID NO: 565421 - RNA, 19 nt, Human
aaguagcugggauuacagc

SEQ ID NO: 565422 - RNA, 24 nt, Human
agcgauucuucugccucagccucc

SEQ ID NO: 565423 - RNA, 22 nt, Human
caagcgauucuucugccucagc

SEQ ID NO: 565424 - RNA, 27 nt, Human
caagcgauucuucugccucagccuccc

SEQ ID NO: 565425 - RNA, 23 nt, Human
cccaaguagcugggauuacagcu

SEQ ID NO: 565426 - RNA, 23 nt, Human
cccggguucaagcgauucuucug

SEQ ID NO: 565427 - RNA, 24 nt, Human
ccgccucccggguucaagcgauuc

SEQ ID NO: 565428 - RNA, 24 nt, Human
ccucccggguucaagcgauucuuc

SEQ ID NO: 565429 - RNA, 20 nt, Human
cucaaccuccgccucccggg

SEQ ID NO: 565430 - RNA, 22 nt, Human
cucaaccuccgccucccggguu

SEQ ID NO: 565431 - RNA, 24 nt, Human
cucagccucccaaguagcugggau

SEQ ID NO: 565432 - RNA, 19 nt, Human
cuggaggcagacaguucac

SEQ ID NO: 565433 - RNA, 24 nt, Human
gcgauucuucugccucagccuccc

SEQ ID NO: 565434 - RNA, 24 nt, Human
gcucaaccuccgccucccggguuc

SEQ ID NO: 565435 - RNA, 24 nt, Human
guugcucaaccuccgccucccggg

SEQ ID NO: 565436 - RNA, 18 nt, Human
ucagccucccaaguagcu

SEQ ID NO: 565437 - RNA, 20 nt, Human
ucagccucccaaguagcugg

SEQ ID NO: 565438 - RNA, 22 nt, Human
ucccaaguagcugggauuacag

SEQ ID NO: 565439 - RNA, 20 nt, Human
ucccggguucaagcgauucu

SEQ ID NO: 565440 - RNA, 24 nt, Human
ucccggguucaagcgauucuucug

SEQ ID NO: 565441 - RNA, 24 nt, Human
ucugccucagccucccaaguagcu

SEQ ID NO: 565442 - RNA, 24 nt, Human
ugccucagccucccaaguagcugg

SEQ ID NO: 565443 - RNA, 23 nt, Human
uucaagcgauucuucugccucag

SEQ ID NO: 565444 - RNA, 24 nt, Human
uucaagcgauucuucugccucagc

SEQ ID NO: 565445 - RNA, 23 nt, Human
uugcucaaccuccgccucccggg

SEQ ID NO: 565446 - RNA, 22 nt, Human
uuuacaaagugggcacaggggc

SEQ ID NO: 565447 - RNA, 25 nt, Human
aaaaagccccaaacagaacaccucc

SEQ ID NO: 565448 - RNA, 18 nt, Human
aaaagccccaaacagaac

SEQ ID NO: 565449 - RNA, 18 nt, Human
aaagaggagaggcugugc

SEQ ID NO: 565450 - RNA, 23 nt, Human
aacaauagaaggaacauccugaa

SEQ ID NO: 565451 - RNA, 22 nt, Human
acaauagaaggaacauccugaa

SEQ ID NO: 565452 - RNA, 27 nt, Human
agaaaacaauagaaggaaccgguaccc

SEQ ID NO: 565453 - RNA, 24 nt, Human
agcagucuaaaaagccccaaacag

SEQ ID NO: 565454 - RNA, 21 nt, Human
auggauucagggaagggcuga

SEQ ID NO: 565455 - RNA, 18 nt, Human
caaccagcugagcagcag

SEQ ID NO: 565456 - RNA, 19 nt, Human
caauagaaggaacauccug

SEQ ID NO: 565457 - RNA, 24 nt, Human
cagcagcagucuaaaaagccccaa

SEQ ID NO: 565458 - RNA, 18 nt, Human
cauccugaauucuagagu

SEQ ID NO: 565459 - RNA, 19 nt, Human
cauccugaauucuagaguu

SEQ ID NO: 565460 - RNA, 19 nt, Human
cccuaccugccugucuagc

SEQ ID NO: 565461 - RNA, 20 nt, Human
ccugccugucuagcuuucuc

SEQ ID NO: 565462 - RNA, 19 nt, Human
ccuuggaauaagccaaaaa

SEQ ID NO: 565463 - RNA, 24 nt, Human
cuaaaaagccccaaacagaacacc

SEQ ID NO: 565464 - RNA, 20 nt, Human
cuagcucuugacuuagcuua

SEQ ID NO: 565465 - RNA, 19 nt, Human
cuuucuaguaugugccaaa

SEQ ID NO: 565466 - RNA, 21 nt, Human
gcacaggaugacuagggaaug

SEQ ID NO: 565467 - RNA, 19 nt, Human
gccaaaaaaaacauaacuc

SEQ ID NO: 565468 - RNA, 18 nt, Human
gcuguggugaggcacagg

SEQ ID NO: 565469 - RNA, 22 nt, Human
uaagaaaacaauagaaggaaca

SEQ ID NO: 565470 - RNA, 21 nt, Human
uaccccuuggaauaagccaaa

SEQ ID NO: 565471 - RNA, 23 nt, Human
uagaacaaaaguacaauugggca

SEQ ID NO: 565472 - RNA, 22 nt, Human
uaggaucacgcucaccucacga

SEQ ID NO: 565473 - RNA, 23 nt, Human
uauguccugggaucaggggugcu

SEQ ID NO: 565474 - RNA, 18 nt, Human
ucagggaagggcugaggc

SEQ ID NO: 565475 - RNA, 19 nt, Human
ucuaagcaagcugugguga

SEQ ID NO: 565476 - RNA, 18 nt, Human
ucuccuccccuccccaca

SEQ ID NO: 565477 - RNA, 20 nt, Human
ucugaauuggggcccagggg

SEQ ID NO: 565478 - RNA, 21 nt, Human
ucugguucuucagcguccucg

SEQ ID NO: 565479 - RNA, 18 nt, Human
ugaauuggggcccagggg

SEQ ID NO: 565480 - RNA, 21 nt, Human
ugaauuggggcccaggggacu

SEQ ID NO: 565481 - RNA, 20 nt, Human
uggcuaagaaaacaauagaa

SEQ ID NO: 565482 - RNA, 22 nt, Human
ugggcaucuuuccuuauguccu

SEQ ID NO: 565483 - RNA, 18 nt, Human
uggggagggaaaaggagu

SEQ ID NO: 565484 - RNA, 22 nt, Human
ugugccaaaaaaaacauaacuc

SEQ ID NO: 565485 - RNA, 22 nt, Human
uuaccccuuggaauaagccaaa

SEQ ID NO: 565486 - RNA, 26 nt, Human
uuaguccauucuccuaaguaaagccu

SEQ ID NO: 565487 - RNA, 19 nt, Human
uucagggaagggcugaggc

SEQ ID NO: 565488 - RNA, 22 nt, Human
uucuccuccccuccccacagcc

SEQ ID NO: 565489 - RNA, 19 nt, Human
uuucuggcuuaccccuugg

SEQ ID NO: 565490 - RNA, 24 nt, Human
uuuucuggcuuaccccuuggaaua

SEQ ID NO: 565491 - RNA, 22 nt, Human
uuuuuuuuuuuuuuuuucccuu

SEQ ID NO: 565492 - RNA, 19 nt, Human
acacgcauucucagguccc

SEQ ID NO: 565493 - RNA, 18 nt, Human
agagcucauacugcugcc

SEQ ID NO: 565494 - RNA, 18 nt, Human
agcaugggaugcaggaga

SEQ ID NO: 565495 - RNA, 19 nt, Human
aggagaaagcagaggcagg

SEQ ID NO: 565496 - RNA, 19 nt, Human
agguccccacuggugggga

SEQ ID NO: 565497 - RNA, 20 nt, Human
aucgaggacagcaggccaca

SEQ ID NO: 565498 - RNA, 19 nt, Human
caagcagugugcuaugcga

SEQ ID NO: 565499 - RNA, 19 nt, Human
cacaggcggggaucugugg

SEQ ID NO: 565500 - RNA, 18 nt, Human
cagaggccgagucgaggu

SEQ ID NO: 565501 - RNA, 22 nt, Human
caugccagcagucacauguggc

SEQ ID NO: 565502 - RNA, 24 nt, Human
ccaauacuggaggccuuacccagu

SEQ ID NO: 565503 - RNA, 21 nt, Human
cccaccaccccugucuguacc

SEQ ID NO: 565504 - RNA, 21 nt, Human
ccgagucgaggugggggucag

SEQ ID NO: 565505 - RNA, 21 nt, Human
ccucuggaagagccaucaccu

SEQ ID NO: 565506 - RNA, 24 nt, Human
ccucuguaucaacaauacccacuu

SEQ ID NO: 565507 - RNA, 20 nt, Human
ccugucuguaccagcaaggu

SEQ ID NO: 565508 - RNA, 28 nt, Human
ccugucuguaccagcaagguacagaguu

SEQ ID NO: 565509 - RNA, 20 nt, Human
ccuuuguucucuggcaggga

SEQ ID NO: 565510 - RNA, 24 nt, Human
ccuuuguucucuggcagggaaggc

SEQ ID NO: 565511 - RNA, 18 nt, Human
gaagagagggaaggcaag

SEQ ID NO: 565512 - RNA, 23 nt, Human
gcaagaucucggccuggggucug

SEQ ID NO: 565513 - RNA, 18 nt, Human
ggaauuccuuucacugcu

SEQ ID NO: 565514 - RNA, 21 nt, Human
gugccuacugcaguggacaac

SEQ ID NO: 565515 - RNA, 21 nt, Human
uacagagcugacacuaggggc

SEQ ID NO: 565516 - RNA, 22 nt, Human
uaccaacacgggggaagagagg

SEQ ID NO: 565517 - RNA, 19 nt, Human
uacccacuucugcucagag

SEQ ID NO: 565518 - RNA, 20 nt, Human
uaguccagugcaagggcggg

SEQ ID NO: 565519 - RNA, 18 nt, Human
ucagagcucauacugcug

SEQ ID NO: 565520 - RNA, 19 nt, Human
ucagguccccacugguggg

SEQ ID NO: 565521 - RNA, 21 nt, Human
ucauagagccuggcugcccac

SEQ ID NO: 565522 - RNA, 23 nt, Human
uccagugcaagggcgggggcugg

SEQ ID NO: 565523 - RNA, 19 nt, Human
uccccuggagcagggcuga

SEQ ID NO: 565524 - RNA, 23 nt, Human
uccggucuaucgaggacagcagg

SEQ ID NO: 565525 - RNA, 24 nt, Human
uccugugaccuucgauuucuggcu

SEQ ID NO: 565526 - RNA, 28 nt, Human
ucuaggacaaggaauuagaacccaaccu

SEQ ID NO: 565527 - RNA, 19 nt, Human
ucuaucgaggacagcaggc

SEQ ID NO: 565528 - RNA, 24 nt, Human
ugacaacuuccugugaccuucgau

SEQ ID NO: 565529 - RNA, 20 nt, Human
ugaccagcagaacucucuug

SEQ ID NO: 565530 - RNA, 19 nt, Human
ugaugaugaaaaccuuucu

SEQ ID NO: 565531 - RNA, 18 nt, Human
ugcacugccaucucagcc

SEQ ID NO: 565532 - RNA, 23 nt, Human
ugcaguggacaacaauacagccc

SEQ ID NO: 565533 - RNA, 21 nt, Human
ugccagcagucacauguggcc

SEQ ID NO: 565534 - RNA, 22 nt, Human
uggcagaggccgagucgaggug

SEQ ID NO: 565535 - RNA, 20 nt, Human
uggcagggaaggcagcuggc

SEQ ID NO: 565536 - RNA, 18 nt, Human
uggcugcccaccaccccu

SEQ ID NO: 565537 - RNA, 23 nt, Human
uggcugcccaccaccccugucug

SEQ ID NO: 565538 - RNA, 19 nt, Human
uguggccggugccuacugc

SEQ ID NO: 565539 - RNA, 21 nt, Human
uuagaacccaacacacaaaac

SEQ ID NO: 565540 - RNA, 24 nt, Human
uucagaccaugacccugcuuagca

SEQ ID NO: 565541 - RNA, 19 nt, Human
uugaaaguucucguggcaa

SEQ ID NO: 565542 - RNA, 21 nt, Human
uuucuggcucuggggugugcc

SEQ ID NO: 565543 - RNA, 24 nt, Human
aaagugcugggauuacaggcguga

SEQ ID NO: 565544 - RNA, 24 nt, Human
aaaguguugggauuacagguguga

SEQ ID NO: 565545 - RNA, 18 nt, Human
aagcaaaaauaaaguuga

SEQ ID NO: 565546 - RNA, 20 nt, Human
aagcaaaaauaaaguugaug

SEQ ID NO: 565547 - RNA, 20 nt, Human
aaguagcugggauuacaggc

SEQ ID NO: 565548 - RNA, 25 nt, Human
aaguagcugggauuacaggcgucca

SEQ ID NO: 565549 - RNA, 24 nt, Human
aagugaucugcccgccucagccuc

SEQ ID NO: 565550 - RNA, 19 nt, Human
aagugcugggauuacaggc

SEQ ID NO: 565551 - RNA, 19 nt, Human
aagugcugggauuacaggc

SEQ ID NO: 565552 - RNA, 26 nt, Human
aagugcugggauuacaggcgugagcc

SEQ ID NO: 565553 - RNA, 23 nt, Human
aaguguuaggauuacagguguga

SEQ ID NO: 565554 - RNA, 26 nt, Human
aaguguuaggauuacaggugugagcc

SEQ ID NO: 565555 - RNA, 21 nt, Human
aaguguugggauuacaggugu

SEQ ID NO: 565556 - RNA, 26 nt, Human
aaguguugggauuacaggugugagcc

SEQ ID NO: 565557 - RNA, 24 nt, Human
accauguuacccaggcuggucuug

SEQ ID NO: 565558 - RNA, 25 nt, Human
accauguuacccaggcuggucuuga

SEQ ID NO: 565559 - RNA, 20 nt, Human
accgugccuggccagaaaca

SEQ ID NO: 565560 - RNA, 21 nt, Human
acugcaaccucugccuccugg

SEQ ID NO: 565561 - RNA, 22 nt, Human
acugcaaccucugccuccuggg

SEQ ID NO: 565562 - RNA, 21 nt, Human
acugugucgcccaggcuguag

SEQ ID NO: 565563 - RNA, 23 nt, Human
acugugucgcccaggcuguagcg

SEQ ID NO: 565564 - RNA, 18 nt, Human
agacagggucuuacugug

SEQ ID NO: 565565 - RNA, 22 nt, Human
agcaaagacuauuaauacccau

SEQ ID NO: 565566 - RNA, 18 nt, Human
agccucccgaauagcugg

SEQ ID NO: 565567 - RNA, 20 nt, Human
agcgcaguggcgugaucaug

SEQ ID NO: 565568 - RNA, 24 nt, Human
agcgcaguggcgugaucaugacuc

SEQ ID NO: 565569 - RNA, 23 nt, Human
aggcgugagccaccgugccuggc

SEQ ID NO: 565570 - RNA, 18 nt, Human
aggcuguagcgcaguggc

SEQ ID NO: 565571 - RNA, 22 nt, Human
aggcuuaggugauccucuuacc

SEQ ID NO: 565572 - RNA, 28 nt, Human
aggugauccacccaucugggucggccuc

SEQ ID NO: 565573 - RNA, 24 nt, Human
agguguuucgccauguuggccagg

SEQ ID NO: 565574 - RNA, 23 nt, Human
agugcagaggcacgaucuuggcu

SEQ ID NO: 565575 - RNA, 18 nt, Human
agugcugggauuacaggc

SEQ ID NO: 565576 - RNA, 20 nt, Human
auggcucuuuuuuagcuucu

SEQ ID NO: 565577 - RNA, 24 nt, Human
augggauuucaccauguuacccag

SEQ ID NO: 565578 - RNA, 19 nt, Human
augggguuucaccauguug

SEQ ID NO: 565579 - RNA, 20 nt, Human
augggguuucaccauguugu

SEQ ID NO: 565580 - RNA, 24 nt, Human
auuuuuguauuuuuaguagagaca

SEQ ID NO: 565581 - RNA, 24 nt, Human
caaagugcugggauuacaggcgug

SEQ ID NO: 565582 - RNA, 24 nt, Human
caaaguguugggauuacaggugug

SEQ ID NO: 565583 - RNA, 24 nt, Human
caaguguuaggauuacagguguga

SEQ ID NO: 565584 - RNA, 23 nt, Human
cacacauuuuuaaaaaaagagaa

SEQ ID NO: 565585 - RNA, 24 nt, Human
caccacaccagacgauaaacacac

SEQ ID NO: 565586 - RNA, 23 nt, Human
caccauguuacccaggcuggucu

SEQ ID NO: 565587 - RNA, 24 nt, Human
caccauguuacccaggcuggucuu

SEQ ID NO: 565588 - RNA, 27 nt, Human
caccauguuacccaggcuggucuugaa

SEQ ID NO: 565589 - RNA, 24 nt, Human
caccauguugucaaggcuggucuc

SEQ ID NO: 565590 - RNA, 22 nt, Human
cagagaugggguuucaccaugu

SEQ ID NO: 565591 - RNA, 24 nt, Human
cagggucuuacugugucgcccagg

SEQ ID NO: 565592 - RNA, 24 nt, Human
cagguguuucgccauguuggccag

SEQ ID NO: 565593 - RNA, 23 nt, Human
caugcaccaccauggucggcuaa

SEQ ID NO: 565594 - RNA, 24 nt, Human
cauguuacccaggcuggucuugaa

SEQ ID NO: 565595 - RNA, 24 nt, Human
cauguuggccaggcuggucucgaa

SEQ ID NO: 565596 - RNA, 22 nt, Human
ccaaagugcugggauuacaggc

SEQ ID NO: 565597 - RNA, 22 nt, Human
ccaaagugcugggauuacaggc

SEQ ID NO: 565598 - RNA, 24 nt, Human
ccaaagugcugggauuacaggcgu

SEQ ID NO: 565599 - RNA, 21 nt, Human
ccaaaguguugggauuacagg

SEQ ID NO: 565600 - RNA, 21 nt, Human
ccaaaguguugggauuacagg

SEQ ID NO: 565601 - RNA, 24 nt, Human
ccaaaguguugggauuacaggugu

SEQ ID NO: 565602 - RNA, 22 nt, Human
ccaaguagcugggauuacaggc

SEQ ID NO: 565603 - RNA, 24 nt, Human
ccaaguagcugggauuacaggcgu

SEQ ID NO: 565604 - RNA, 19 nt, Human
ccaaguguuaggauuacag

SEQ ID NO: 565605 - RNA, 23 nt, Human
ccaaguguuaggauuacaggugu

SEQ ID NO: 565606 - RNA, 24 nt, Human
ccaggcuggucuugaacuccuggg

SEQ ID NO: 565607 - RNA, 18 nt, Human
ccaucacccagguuggag

SEQ ID NO: 565608 - RNA, 19 nt, Human
ccauguuggccaggcuggu

SEQ ID NO: 565609 - RNA, 22 nt, Human
ccauguuggccaggcuggucuc

SEQ ID NO: 565610 - RNA, 23 nt, Human
ccauguuggccaggcuggucucg

SEQ ID NO: 565611 - RNA, 23 nt, Human
cccaaguagcugggauuacaggc

SEQ ID NO: 565612 - RNA, 23 nt, Human
cccaaguagcugggauuacaggc

SEQ ID NO: 565613 - RNA, 24 nt, Human
cccaaguguuaggauuacaggugu

SEQ ID NO: 565614 - RNA, 21 nt, Human
cccaggcuguagcgcaguggc

SEQ ID NO: 565615 - RNA, 21 nt, Human
cccagguuggagugcagaggc

SEQ ID NO: 565616 - RNA, 24 nt, Human
cccgaauagcugggacuacaggca

SEQ ID NO: 565617 - RNA, 19 nt, Human
ccucugccuccuggguuca

SEQ ID NO: 565618 - RNA, 26 nt, Human
ccucuuaccucagccucccgaauagc

SEQ ID NO: 565619 - RNA, 23 nt, Human
ccugaccucaggugauccaccca

SEQ ID NO: 565620 - RNA, 24 nt, Human
ccugaccucaggugauccacccau

SEQ ID NO: 565621 - RNA, 22 nt, Human
ccuggguuuaagugaucugccc

SEQ ID NO: 565622 - RNA, 22 nt, Human
ccuggguuuaagugaucugccc

SEQ ID NO: 565623 - RNA, 27 nt, Human
cgccauguuggccaggcuggucucgaa

SEQ ID NO: 565624 - RNA, 24 nt, Human
cgccucagccuccccaaguguuag

SEQ ID NO: 565625 - RNA, 24 nt, Human
cuaccagagaugggguuucaccau

SEQ ID NO: 565626 - RNA, 21 nt, Human
cuaggccucccaaagugcugg

SEQ ID NO: 565627 - RNA, 24 nt, Human
cucagccucccaaguagcugggau

SEQ ID NO: 565628 - RNA, 18 nt, Human
cuccaucacccagguugg

SEQ ID NO: 565629 - RNA, 24 nt, Human
cucccgaauagcugggacuacagg

SEQ ID NO: 565630 - RNA, 20 nt, Human
cuccugaccucaugaucugc

SEQ ID NO: 565631 - RNA, 19 nt, Human
cucuaguuuuacugaaagg

SEQ ID NO: 565632 - RNA, 23 nt, Human
cugcaaccucugccuccuggguu

SEQ ID NO: 565633 - RNA, 24 nt, Human
cugcaaccucugccuccuggguuc

SEQ ID NO: 565634 - RNA, 24 nt, Human
cugcccgccucagccuccccaagu

SEQ ID NO: 565635 - RNA, 19 nt, Human
cuggucuugaacuccuggg

SEQ ID NO: 565636 - RNA, 21 nt, Human
cuuacugugucgcccaggcug

SEQ ID NO: 565637 - RNA, 24 nt, Human
gaauagcugggacuacaggcaugc

SEQ ID NO: 565638 - RNA, 22 nt, Human
gaccucaggugauccacccauc

SEQ ID NO: 565639 - RNA, 18 nt, Human
gagaugggguuucaccau

SEQ ID NO: 565640 - RNA, 23 nt, Human
gagaugggguuucaccauguugu

SEQ ID NO: 565641 - RNA, 22 nt, Human
gaugggguuucaccauguuguc

SEQ ID NO: 565642 - RNA, 21 nt, Human
gauuacaggcguccaccacca

SEQ ID NO: 565643 - RNA, 18 nt, Human
gauuacaggcgugagcca

SEQ ID NO: 565644 - RNA, 20 nt, Human
gauuacaggcgugagccacc

SEQ ID NO: 565645 - RNA, 21 nt, Human
gauuacaggcgugagccaccg

SEQ ID NO: 565646 - RNA, 18 nt, Human
gauuacaggugugagcca

SEQ ID NO: 565647 - RNA, 18 nt, Human
gauuacaggugugagcca

SEQ ID NO: 565648 - RNA, 21 nt, Human
gauuacaggugugagccacca

SEQ ID NO: 565649 - RNA, 22 nt, Human
gauuacaggugugagccaccac

SEQ ID NO: 565650 - RNA, 22 nt, Human
gauuacaggugugagccacugc

SEQ ID NO: 565651 - RNA, 22 nt, Human
gauuacaggugugagccacugc

SEQ ID NO: 565652 - RNA, 21 nt, Human
gauuauucugccucagccucc

SEQ ID NO: 565653 - RNA, 18 nt, Human
gcccggccuaauuuuugu

SEQ ID NO: 565654 - RNA, 22 nt, Human
gcccgguuaauuuuuuauauuu

SEQ ID NO: 565655 - RNA, 24 nt, Human
gcgauuauucugccucagccuccc

SEQ ID NO: 565656 - RNA, 23 nt, Human
gcuggucucaaacuccugaccuc

SEQ ID NO: 565657 - RNA, 23 nt, Human
gcuggucucgaacuccugaccuc

SEQ ID NO: 565658 - RNA, 21 nt, Human
gcuuacugcaaccucugccuc

SEQ ID NO: 565659 - RNA, 24 nt, Human
ggacuacaggcaugcaccaccaug

SEQ ID NO: 565660 - RNA, 22 nt, Human
ggagauggagucuugcuccauc

SEQ ID NO: 565661 - RNA, 22 nt, Human
ggauuacaggugugagccacca

SEQ ID NO: 565662 - RNA, 24 nt, Human
ggcuggucucaaacuccugaccuc

SEQ ID NO: 565663 - RNA, 24 nt, Human
ggcuggucucgaacuccugaccuc

SEQ ID NO: 565664 - RNA, 18 nt, Human
ggcuggucuugaacuccu

SEQ ID NO: 565665 - RNA, 22 nt, Human
ggcuguagcgcaguggcgugau

SEQ ID NO: 565666 - RNA, 23 nt, Human
ggcuuaggugauccucuuaccuc

SEQ ID NO: 565667 - RNA, 22 nt, Human
gggauuucaccauguuacccag

SEQ ID NO: 565668 - RNA, 24 nt, Human
ggguuuaagugaucugcccgccuc

SEQ ID NO: 565669 - RNA, 19 nt, Human
ggucucgaacuccugaccu

SEQ ID NO: 565670 - RNA, 22 nt, Human
gguguuucgccauguuggccag

SEQ ID NO: 565671 - RNA, 23 nt, Human
gguguuucgccauguuggccagg

SEQ ID NO: 565672 - RNA, 18 nt, Human
guagcugggauuacaggc

SEQ ID NO: 565673 - RNA, 24 nt, Human
gugauccucuuaccucagccuccc

SEQ ID NO: 565674 - RNA, 24 nt, Human
gugaucugcccgccucagccuccc

SEQ ID NO: 565675 - RNA, 21 nt, Human
uaaaaaaagagaauuucccac

SEQ ID NO: 565676 - RNA, 24 nt, Human
uaauuuuuguauuuuuaguagaga

SEQ ID NO: 565677 - RNA, 24 nt, Human
uaauuuuuuauauuucuaccagag

SEQ ID NO: 565678 - RNA, 27 nt, Human
uacacauaauuaagcaaaaauaaaguu

SEQ ID NO: 565679 - RNA, 22 nt, Human
uacaggcgugagccaccgugcc

SEQ ID NO: 565680 - RNA, 22 nt, Human
uacaggcgugagccaccgugcc

SEQ ID NO: 565681 - RNA, 23 nt, Human
uacaggcgugagccaccgugccu

SEQ ID NO: 565682 - RNA, 22 nt, Human
uacaggugugagccaccacacc

SEQ ID NO: 565683 - RNA, 19 nt, Human
uacaggugugagccacugc

SEQ ID NO: 565684 - RNA, 23 nt, Human
uacaggugugagccacugcgccc

SEQ ID NO: 565685 - RNA, 24 nt, Human
uaccagagaugggguuucaccaug

SEQ ID NO: 565686 - RNA, 25 nt, Human
uaccagagaugggguuucaccaugu

SEQ ID NO: 565687 - RNA, 24 nt, Human
uacccaggcuggucuugaacuccu

SEQ ID NO: 565688 - RNA, 26 nt, Human
uaccucagccucccgaauagcuggga

SEQ ID NO: 565689 - RNA, 21 nt, Human
uacugcaaccucugccuccug

SEQ ID NO: 565690 - RNA, 23 nt, Human
uacugcaaccucugccuccuggg

SEQ ID NO: 565691 - RNA, 23 nt, Human
uagagacagguguuucgccaugu

SEQ ID NO: 565692 - RNA, 22 nt, Human
uagauaugggauuucaccaugu

SEQ ID NO: 565693 - RNA, 18 nt, Human
uaggauuacaggugugag

SEQ ID NO: 565694 - RNA, 19 nt, Human
uaggauuacaggugugagc

SEQ ID NO: 565695 - RNA, 22 nt, Human
uaggauuacaggugugagccac

SEQ ID NO: 565696 - RNA, 24 nt, Human
uaggauuacaggugugagccacca

SEQ ID NO: 565697 - RNA, 25 nt, Human
uaguagagacagguguuucgccaug

SEQ ID NO: 565698 - RNA, 20 nt, Human
uaugaaaaacaaaggaaaag

SEQ ID NO: 565699 - RNA, 18 nt, Human
ucacccagguuggagugc

SEQ ID NO: 565700 - RNA, 20 nt, Human
ucagccucccaaguagcugg

SEQ ID NO: 565701 - RNA, 18 nt, Human
ucagccucccgaauagcu

SEQ ID NO: 565702 - RNA, 20 nt, Human
ucagccucccgaauagcugg

SEQ ID NO: 565703 - RNA, 24 nt, Human
uccaucacccagguuggagugcag

SEQ ID NO: 565704 - RNA, 24 nt, Human
ucccaaagugcugggauuacaggc

SEQ ID NO: 565705 - RNA, 23 nt, Human
ucccaaaguguugggauuacagg

SEQ ID NO: 565706 - RNA, 24 nt, Human
ucccaaguagcugggauuacaggc

SEQ ID NO: 565707 - RNA, 19 nt, Human
uccccaaguguuaggauua

SEQ ID NO: 565708 - RNA, 23 nt, Human
uccccaaguguuaggauuacagg

SEQ ID NO: 565709 - RNA, 24 nt, Human
ucccgaauagcugggacuacaggc

SEQ ID NO: 565710 - RNA, 22 nt, Human
uccuggguucaagcgauuauuc

SEQ ID NO: 565711 - RNA, 24 nt, Human
uccuggguucaagcgauuauucug

SEQ ID NO: 565712 - RNA, 22 nt, Human
ucgccauguuggccaggcuggu

SEQ ID NO: 565713 - RNA, 24 nt, Human
ucgccauguuggccaggcuggucu

SEQ ID NO: 565714 - RNA, 21 nt, Human
ucucgaacuccugaccucaug

SEQ ID NO: 565715 - RNA, 22 nt, Human
ucugcccgccucagccucccca

SEQ ID NO: 565716 - RNA, 24 nt, Human
ucugccucagccucccaaguagcu

SEQ ID NO: 565717 - RNA, 19 nt, Human
ucuuacugugucgcccagg

SEQ ID NO: 565718 - RNA, 23 nt, Human
ucuugcuccaucacccagguugg

SEQ ID NO: 565719 - RNA, 24 nt, Human
ucuugcuccaucacccagguugga

SEQ ID NO: 565720 - RNA, 22 nt, Human
ucuuuuuuuugagacagggucu

SEQ ID NO: 565721 - RNA, 21 nt, Human
ugaccucaggugauccaccca

SEQ ID NO: 565722 - RNA, 24 nt, Human
ugaccucaggugauccacccaucu

SEQ ID NO: 565723 - RNA, 24 nt, Human
ugaucugcccaccuaggccuccca

SEQ ID NO: 565724 - RNA, 24 nt, Human
ugccucagccucccaaguagcugg

SEQ ID NO: 565725 - RNA, 22 nt, Human
ugcuccaucacccagguuggag

SEQ ID NO: 565726 - RNA, 24 nt, Human
ugcuccaucacccagguuggagug

SEQ ID NO: 565727 - RNA, 24 nt, Human
ugcugggauuacaggcgugagcca

SEQ ID NO: 565728 - RNA, 23 nt, Human
uggagugcagaggcacgaucuug

SEQ ID NO: 565729 - RNA, 24 nt, Human
uggagugcagaggcacgaucuugg

SEQ ID NO: 565730 - RNA, 24 nt, Human
uggccaggcuggucucgaacuccu

SEQ ID NO: 565731 - RNA, 21 nt, Human
ugggacuacaggcaugcacca

SEQ ID NO: 565732 - RNA, 24 nt, Human
ugggacuacaggcaugcaccacca

SEQ ID NO: 565733 - RNA, 18 nt, Human
ugggauuacaggcgucca

SEQ ID NO: 565734 - RNA, 21 nt, Human
ugggauuacaggcguccacca

SEQ ID NO: 565735 - RNA, 24 nt, Human
ugggauuacaggcguccaccacca

SEQ ID NO: 565736 - RNA, 25 nt, Human
ugggauuacaggcguccaccaccau

SEQ ID NO: 565737 - RNA, 18 nt, Human
ugggauuacaggcgugag

SEQ ID NO: 565738 - RNA, 21 nt, Human
ugggauuacaggcgugagcca

SEQ ID NO: 565739 - RNA, 22 nt, Human
ugggauuacaggcgugagccac

SEQ ID NO: 565740 - RNA, 23 nt, Human
ugggauuacaggcgugagccacc

SEQ ID NO: 565741 - RNA, 23 nt, Human
ugggauuacaggcgugagccacc

SEQ ID NO: 565742 - RNA, 24 nt, Human
ugggauuacaggcgugagccaccg

SEQ ID NO: 565743 - RNA, 18 nt, Human
ugggauuacaggugugag

SEQ ID NO: 565744 - RNA, 19 nt, Human
ugggauuacaggugugagc

SEQ ID NO: 565745 - RNA, 21 nt, Human
ugggauuacaggugugagcca

SEQ ID NO: 565746 - RNA, 22 nt, Human
ugggauuacaggugugagccac

SEQ ID NO: 565747 - RNA, 22 nt, Human
ugggauuacaggugugagccac

SEQ ID NO: 565748 - RNA, 24 nt, Human
ugggauuacaggugugagccacug

SEQ ID NO: 565749 - RNA, 24 nt, Human
ugggauuucaccauguuacccagg

SEQ ID NO: 565750 - RNA, 23 nt, Human
ugggguuucaccauguugucaag

SEQ ID NO: 565751 - RNA, 24 nt, Human
uggguuuaagugaucugcccgccu

SEQ ID NO: 565752 - RNA, 24 nt, Human
ugucauggcucuuuuuuagcuucu

SEQ ID NO: 565753 - RNA, 19 nt, Human
ugugucgcccaggcuguag

SEQ ID NO: 565754 - RNA, 24 nt, Human
uuacugcaaccucugccuccuggg

SEQ ID NO: 565755 - RNA, 25 nt, Human
uuacugcaaccucugccuccugggu

SEQ ID NO: 565756 - RNA, 25 nt, Human
uuaguagagacagguguuucgccau

SEQ ID NO: 565757 - RNA, 23 nt, Human
uucaagcgauuauucugccucag

SEQ ID NO: 565758 - RNA, 28 nt, Human
uucucuaguuuuacugaaagguagaaua

SEQ ID NO: 565759 - RNA, 19 nt, Human
uucuuuuuuuugagacagg

SEQ ID NO: 565760 - RNA, 20 nt, Human
uucuuuuuuuugagacaggg

SEQ ID NO: 565761 - RNA, 22 nt, Human
uugagacagggucuuacugugu

SEQ ID NO: 565762 - RNA, 24 nt, Human
uugcuccaucacccagguuggagu

SEQ ID NO: 565763 - RNA, 21 nt, Human
uugggauuacaggugugagcc

SEQ ID NO: 565764 - RNA, 24 nt, Human
uuguagauaugggauuucaccaug

SEQ ID NO: 565765 - RNA, 23 nt, Human
uuuaagugaucugcccgccucag

SEQ ID NO: 565766 - RNA, 21 nt, Human
uuucaccauguugucaaggcu

SEQ ID NO: 565767 - RNA, 24 nt, Human
uuucgccauguuggccaggcuggu

SEQ ID NO: 565768 - RNA, 24 nt, Human
uuucuaccagagaugggguuucac

SEQ ID NO: 565769 - RNA, 24 nt, Human
uuuguagauaugggauuucaccau

SEQ ID NO: 565770 - RNA, 23 nt, Human
uuuuuaguagagacagguguuuc

SEQ ID NO: 565771 - RNA, 20 nt, Human
uuuuuguauuuuuaguagag

SEQ ID NO: 565772 - RNA, 20 nt, Human
aaagagguuccuguuccucc

SEQ ID NO: 565773 - RNA, 22 nt, Human
acauuugacaguuugggcauau

SEQ ID NO: 565774 - RNA, 21 nt, Human
agcgcuccagccacaaggaaa

SEQ ID NO: 565775 - RNA, 19 nt, Human
aggaaacaauuuggauuuu

SEQ ID NO: 565776 - RNA, 20 nt, Human
aggaauagggacgaauacau

SEQ ID NO: 565777 - RNA, 19 nt, Human
auaguuaaggaauagggac

SEQ ID NO: 565778 - RNA, 26 nt, Human
caacuuuccuucucucacugaaauaa

SEQ ID NO: 565779 - RNA, 19 nt, Human
cccuuucuuuuauagcucc

SEQ ID NO: 565780 - RNA, 19 nt, Human
ccuccagcacgaggauggg

SEQ ID NO: 565781 - RNA, 20 nt, Human
ccuccagcacgaggaugggg

SEQ ID NO: 565782 - RNA, 25 nt, Human
cgcuccagccacaaggaaacggcuc

SEQ ID NO: 565783 - RNA, 29 nt, Human
cuagugguccucuaaauccugcuccuucc

SEQ ID NO: 565784 - RNA, 18 nt, Human
cuccugaaagagguuccu

SEQ ID NO: 565785 - RNA, 25 nt, Human
ggaaaccacccucccuccgaccuuc

SEQ ID NO: 565786 - RNA, 18 nt, Human
guuaggaaacaauuugga

SEQ ID NO: 565787 - RNA, 18 nt, Human
uaaaauauaggugacuau

SEQ ID NO: 565788 - RNA, 19 nt, Human
uaaauccugcuccuucccc

SEQ ID NO: 565789 - RNA, 24 nt, Human
uaaauccugcuccuuccccgaggc

SEQ ID NO: 565790 - RNA, 23 nt, Human
uagcuccugaaagagguuccuuc

SEQ ID NO: 565791 - RNA, 22 nt, Human
ucccuccgaccuuccccggcuc

SEQ ID NO: 565792 - RNA, 24 nt, Human
ucccuccgaccuuccccggcuccc

SEQ ID NO: 565793 - RNA, 20 nt, Human
ugaaauaaaaauacauaguu

SEQ ID NO: 565794 - RNA, 21 nt, Human
uuugcuguuuuagagguaucu

SEQ ID NO: 565795 - RNA, 22 nt, Human
uuuuuuuuuuuuugggaguacu

SEQ ID NO: 565796 - RNA, 18 nt, Human
uuuuuuuuuuuuuuuuug

SEQ ID NO: 565797 - RNA, 24 nt, Human
uuuuuuuuuuuuuuuuuuuuuggg

SEQ ID NO: 565798 - RNA, 20 nt, Human
acaagcaguguucgcgggcc

SEQ ID NO: 565799 - RNA, 24 nt, Human
caguguucgcgggcaccuccagga

SEQ ID NO: 565800 - RNA, 23 nt, Human
ccaccgccgccaccuagguccug

SEQ ID NO: 565801 - RNA, 22 nt, Human
cugcuucguccucuccgguugc

SEQ ID NO: 565802 - RNA, 20 nt, Human
gcccaggcgacaagcagugu

SEQ ID NO: 565803 - RNA, 25 nt, Human
uaccaccgccgccaccuagguccug

SEQ ID NO: 565804 - RNA, 24 nt, Human
ucaaaaauugucuugcauuuucuc

SEQ ID NO: 565805 - RNA, 24 nt, Human
uccaguaucaaaaauugucuugca

SEQ ID NO: 565806 - RNA, 18 nt, Human
ugcagccgguaccaccgc

SEQ ID NO: 565807 - RNA, 24 nt, Human
ugcuucguccucuccgguugccca

SEQ ID NO: 565808 - RNA, 18 nt, Human
uugcauuuucucaucagc

SEQ ID NO: 565809 - RNA, 24 nt, Human
aacacaaaaccagaauuuauugaa

SEQ ID NO: 565810 - RNA, 23 nt, Human
aagaacuuaaaagaauacaacuu

SEQ ID NO: 565811 - RNA, 18 nt, Human
aauaagccugaagggaag

SEQ ID NO: 565812 - RNA, 18 nt, Human
acagaagaaaacacaaaa

SEQ ID NO: 565813 - RNA, 24 nt, Human
acagaagaaaacacaaaaccagaa

SEQ ID NO: 565814 - RNA, 22 nt, Human
acagacagcucuaccuaacugg

SEQ ID NO: 565815 - RNA, 25 nt, Human
acuucacacucaaacaauaagccug

SEQ ID NO: 565816 - RNA, 21 nt, Human
agaagaaaacacaaaaccaga

SEQ ID NO: 565817 - RNA, 22 nt, Human
agaagaaaacacaaaaccagaa

SEQ ID NO: 565818 - RNA, 24 nt, Human
agacauggaaguugucuccaaacc

SEQ ID NO: 565819 - RNA, 20 nt, Human
agagcccuacaugagaaagc

SEQ ID NO: 565820 - RNA, 21 nt, Human
agcagaaaugccagaugcaga

SEQ ID NO: 565821 - RNA, 18 nt, Human
agccuggggaugaggacu

SEQ ID NO: 565822 - RNA, 22 nt, Human
agcucacuuaucugagccuaaa

SEQ ID NO: 565823 - RNA, 19 nt, Human
aggaggaagaggagggcug

SEQ ID NO: 565824 - RNA, 23 nt, Human
aggaggaggaagaggagggcugg

SEQ ID NO: 565825 - RNA, 19 nt, Human
aggaggaggaggaagagga

SEQ ID NO: 565826 - RNA, 22 nt, Human
aggaggaggaggaggaagagga

SEQ ID NO: 565827 - RNA, 28 nt, Human
aggagggcugguagggggaggugucaug

SEQ ID NO: 565828 - RNA, 23 nt, Human
aggcaaaaggcagcagcucagag

SEQ ID NO: 565829 - RNA, 22 nt, Human
aggcagggcagggugaagagga

SEQ ID NO: 565830 - RNA, 23 nt, Human
aggcagggcagggugaagaggau

SEQ ID NO: 565831 - RNA, 22 nt, Human
agugagagagagcggcucuaca

SEQ ID NO: 565832 - RNA, 23 nt, Human
auaaaaccuccagaaucugggcc

SEQ ID NO: 565833 - RNA, 21 nt, Human
auaagccugaagggaagaagu

SEQ ID NO: 565834 - RNA, 21 nt, Human
augggagggugaacagacagc

SEQ ID NO: 565835 - RNA, 21 nt, Human
caaaaggcagcagcucagaga

SEQ ID NO: 565836 - RNA, 22 nt, Human
caaaauaauaacaaauaccaca

SEQ ID NO: 565837 - RNA, 26 nt, Human
caaauucuuagaacauagcacaugau

SEQ ID NO: 565838 - RNA, 19 nt, Human
cacacccgccccuguuccc

SEQ ID NO: 565839 - RNA, 18 nt, Human
cacccgccccuguuccca

SEQ ID NO: 565840 - RNA, 19 nt, Human
caccuucuggaccuacccu

SEQ ID NO: 565841 - RNA, 18 nt, Human
cacucaaacaauaagccu

SEQ ID NO: 565842 - RNA, 22 nt, Human
cacugaccaccucccacaggag

SEQ ID NO: 565843 - RNA, 23 nt, Human
cacugcugccaacuguccugcuc

SEQ ID NO: 565844 - RNA, 19 nt, Human
cagaauuuauugaaaguag

SEQ ID NO: 565845 - RNA, 19 nt, Human
cagcagcucagagagcagg

SEQ ID NO: 565846 - RNA, 23 nt, Human
caggcagggcagggugaagagga

SEQ ID NO: 565847 - RNA, 26 nt, Human
cagggauaaacauaaaacacugcucc

SEQ ID NO: 565848 - RNA, 24 nt, Human
cauggaaugaggccaccaagcaaa

SEQ ID NO: 565849 - RNA, 22 nt, Human
ccacaagcagacuucagaacua

SEQ ID NO: 565850 - RNA, 20 nt, Human
ccacuaacuagggagguaga

SEQ ID NO: 565851 - RNA, 23 nt, Human
ccagcaagcagugacugggauca

SEQ ID NO: 565852 - RNA, 18 nt, Human
ccaggcacaggcacacau

SEQ ID NO: 565853 - RNA, 24 nt, Human
ccagugagagagagcggcucuaca

SEQ ID NO: 565854 - RNA, 19 nt, Human
ccccccaccuucuggaccu

SEQ ID NO: 565855 - RNA, 19 nt, Human
cccggucucaagcauagag

SEQ ID NO: 565856 - RNA, 20 nt, Human
ccggucucaagcauagagag

SEQ ID NO: 565857 - RNA, 23 nt, Human
ccuccagaaucugggcccuacag

SEQ ID NO: 565858 - RNA, 20 nt, Human
ccuucaagccuggggaugag

SEQ ID NO: 565859 - RNA, 24 nt, Human
cgccacccaauucaaacuccacag

SEQ ID NO: 565860 - RNA, 18 nt, Human
cgcccccucaacugcagg

SEQ ID NO: 565861 - RNA, 22 nt, Human
cuacaugagaaagccaugugcc

SEQ ID NO: 565862 - RNA, 25 nt, Human
cucaaacaauaagccugagguaccc

SEQ ID NO: 565863 - RNA, 20 nt, Human
cucauggcccagagcucacu

SEQ ID NO: 565864 - RNA, 21 nt, Human
cucuacagucaaccgccaccc

SEQ ID NO: 565865 - RNA, 26 nt, Human
cugacucugcuuaacaaaguccaugc

SEQ ID NO: 565866 - RNA, 22 nt, Human
cugagcaaaaccucgcugugcc

SEQ ID NO: 565867 - RNA, 23 nt, Human
cuguacaguuccccccaccuucu

SEQ ID NO: 565868 - RNA, 20 nt, Human
cuguccugcucugcugaucu

SEQ ID NO: 565869 - RNA, 21 nt, Human
cuucgcccccucaacugcagg

SEQ ID NO: 565870 - RNA, 18 nt, Human
gaaagaucccuaaguccc

SEQ ID NO: 565871 - RNA, 21 nt, Human
gaagaaaacacaaaaccagaa

SEQ ID NO: 565872 - RNA, 24 nt, Human
gagggcugguagggggagguguca

SEQ ID NO: 565873 - RNA, 23 nt, Human
gcaaaaccucgcugugccaguga

SEQ ID NO: 565874 - RNA, 22 nt, Human
gcaagacauggaaguugucucc

SEQ ID NO: 565875 - RNA, 19 nt, Human
gcagcucagagagcaggga

SEQ ID NO: 565876 - RNA, 21 nt, Human
gccagaugcagagguucucug

SEQ ID NO: 565877 - RNA, 20 nt, Human
gcggucccgagacaagggcu

SEQ ID NO: 565878 - RNA, 22 nt, Human
gcucucugaagucuacagacuu

SEQ ID NO: 565879 - RNA, 25 nt, Human
gcuuaacaaaguccaugccccaggc

SEQ ID NO: 565880 - RNA, 18 nt, Human
ggaggaggaggaagagga

SEQ ID NO: 565881 - RNA, 21 nt, Human
ggaggaggaggaagaggaggg

SEQ ID NO: 565882 - RNA, 23 nt, Human
ggaggaggaggaggaagaggagg

SEQ ID NO: 565883 - RNA, 20 nt, Human
ggaggauucagcugggagac

SEQ ID NO: 565884 - RNA, 22 nt, Human
ggaggcagucuuccugagaaca

SEQ ID NO: 565885 - RNA, 18 nt, Human
ggcugagcaaaaccucgc

SEQ ID NO: 565886 - RNA, 18 nt, Human
ggcugguagggggaggug

SEQ ID NO: 565887 - RNA, 21 nt, Human
guagacggacauguucccuac

SEQ ID NO: 565888 - RNA, 19 nt, Human
guggaggcagucuuccuga

SEQ ID NO: 565889 - RNA, 20 nt, Human
uaaaauggucuuguugcaaa

SEQ ID NO: 565890 - RNA, 24 nt, Human
uaacaaaguccaugccccaggcac

SEQ ID NO: 565891 - RNA, 19 nt, Human
uacaguuccccccaccuuc

SEQ ID NO: 565892 - RNA, 21 nt, Human
uaccacagagagcccuacaug

SEQ ID NO: 565893 - RNA, 24 nt, Human
uacucagaacaauauauacaaaaa

SEQ ID NO: 565894 - RNA, 19 nt, Human
uacugaggucacugcugcc

SEQ ID NO: 565895 - RNA, 22 nt, Human
ucaaagauaccauuacucagaa

SEQ ID NO: 565896 - RNA, 24 nt, Human
ucaaauucuuagaacauagcacau

SEQ ID NO: 565897 - RNA, 21 nt, Human
ucacugcugccaacuguccug

SEQ ID NO: 565898 - RNA, 18 nt, Human
ucagagagcagggaggau

SEQ ID NO: 565899 - RNA, 18 nt, Human
ucagcugggaugggaggg

SEQ ID NO: 565900 - RNA, 21 nt, Human
uccaugccccaggcacaggca

SEQ ID NO: 565901 - RNA, 19 nt, Human
ucccuacugaggucacugc

SEQ ID NO: 565902 - RNA, 21 nt, Human
ucccuuauccaaauuuccacu

SEQ ID NO: 565903 - RNA, 18 nt, Human
uccugcucugcugaucug

SEQ ID NO: 565904 - RNA, 22 nt, Human
ucuccaaaccaguauuuggucu

SEQ ID NO: 565905 - RNA, 22 nt, Human
ugaacagacagcucuaccuaac

SEQ ID NO: 565906 - RNA, 26 nt, Human
ugaagaggauguugaguugcaggagg

SEQ ID NO: 565907 - RNA, 21 nt, Human
ugagaacacaggguucuucuu

SEQ ID NO: 565908 - RNA, 19 nt, Human
ugagugcgagaggguagac

SEQ ID NO: 565909 - RNA, 20 nt, Human
ugaucuguacaguucccccc

SEQ ID NO: 565910 - RNA, 18 nt, Human
ugccuucaagccugggga

SEQ ID NO: 565911 - RNA, 21 nt, Human
ugcucuggaacuucacacuca

SEQ ID NO: 565912 - RNA, 19 nt, Human
uggagaaugaggaccucac

SEQ ID NO: 565913 - RNA, 21 nt, Human
uggccaaugacauaaaaccuc

SEQ ID NO: 565914 - RNA, 18 nt, Human
ugggaagcuuccauggca

SEQ ID NO: 565915 - RNA, 18 nt, Human
ugggaugggagggugaac

SEQ ID NO: 565916 - RNA, 22 nt, Human
uggguagcggugguggaggcag

SEQ ID NO: 565917 - RNA, 18 nt, Human
ugguagggggagguguca

SEQ ID NO: 565918 - RNA, 23 nt, Human
ugguagggggaggugucaugagu

SEQ ID NO: 565919 - RNA, 19 nt, Human
ugguggaggcagucuuccu

SEQ ID NO: 565920 - RNA, 22 nt, Human
uguacaguuccccccaccuucu

SEQ ID NO: 565921 - RNA, 22 nt, Human
uguccugcucugcugaucugua

SEQ ID NO: 565922 - RNA, 19 nt, Human
ugugccagugagagagagc

SEQ ID NO: 565923 - RNA, 23 nt, Human
uguucccaugaaccccauaagag

SEQ ID NO: 565924 - RNA, 22 nt, Human
uguucccuacugaggucacugc

SEQ ID NO: 565925 - RNA, 22 nt, Human
uuacucagaacaauauauacaa

SEQ ID NO: 565926 - RNA, 20 nt, Human
uuagaacauagcacaugauu

SEQ ID NO: 565927 - RNA, 20 nt, Human
uuagagacaguuauucugug

SEQ ID NO: 565928 - RNA, 21 nt, Human
uucacacucaaacaauaagcc

SEQ ID NO: 565929 - RNA, 21 nt, Human
uucagggucccagaagugccc

SEQ ID NO: 565930 - RNA, 18 nt, Human
uuccauggcauggcccca

SEQ ID NO: 565931 - RNA, 18 nt, Human
uuggucuucaguaaacag

SEQ ID NO: 565932 - RNA, 19 nt, Human
cagacgaccuucacuguca

SEQ ID NO: 565933 - RNA, 22 nt, Human
cagcagucucauucccccggga

SEQ ID NO: 565934 - RNA, 20 nt, Human
cccaugcagguuugugacca

SEQ ID NO: 565935 - RNA, 23 nt, Human
cgcuaugcauauguaaacauauu

SEQ ID NO: 565936 - RNA, 23 nt, Human
cuuuaaggucauucggaaaaaag

SEQ ID NO: 565937 - RNA, 19 nt, Human
gaccacuccaguuggaaac

SEQ ID NO: 565938 - RNA, 28 nt, Human
ggaacagacggcccagcgcuguaaugac

SEQ ID NO: 565939 - RNA, 24 nt, Human
ggaaggcucuugggcguuggagag

SEQ ID NO: 565940 - RNA, 18 nt, Human
ggaggaaggcucuugggc

SEQ ID NO: 565941 - RNA, 21 nt, Human
guccuugaugauuuuuuuuuc

SEQ ID NO: 565942 - RNA, 22 nt, Human
guccuugaugauuuuuuuuucc

SEQ ID NO: 565943 - RNA, 24 nt, Human
gugccuagaaggaacagacggccc

SEQ ID NO: 565944 - RNA, 24 nt, Human
uaaaaggccacuauugccauggua

SEQ ID NO: 565945 - RNA, 19 nt, Human
uagaaggaacagacggccc

SEQ ID NO: 565946 - RNA, 23 nt, Human
uccucuggcuacguucaguccga

SEQ ID NO: 565947 - RNA, 21 nt, Human
ugugggcagggcgugagcggc

SEQ ID NO: 565948 - RNA, 22 nt, Human
uuuguccuugaugauuuuuuuu

SEQ ID NO: 565949 - RNA, 18 nt, Human
aaaaaaaaaaaccccaaa

SEQ ID NO: 565950 - RNA, 19 nt, Human
aaaaaaaaccccaaaaucc

SEQ ID NO: 565951 - RNA, 27 nt, Human
aaaaaaccccaaaauccccaaucuuga

SEQ ID NO: 565952 - RNA, 25 nt, Human
aaaauaggagcccauguaaaaaaaa

SEQ ID NO: 565953 - RNA, 18 nt, Human
aaaccaacuuacauuaga

SEQ ID NO: 565954 - RNA, 23 nt, Human
aaacugaaaucucccuuuuacca

SEQ ID NO: 565955 - RNA, 22 nt, Human
aaagaaaaaagcguaucauaga

SEQ ID NO: 565956 - RNA, 24 nt, Human
aaauacuaaaaaaaaaaaccccaa

SEQ ID NO: 565957 - RNA, 22 nt, Human
aaauccccaaucuugaaaccaa

SEQ ID NO: 565958 - RNA, 21 nt, Human
aaccccaaaauccccaaucuu

SEQ ID NO: 565959 - RNA, 21 nt, Human
aauacugucuuaaagguucua

SEQ ID NO: 565960 - RNA, 23 nt, Human
aaugcaagacaguaggggaaaaa

SEQ ID NO: 565961 - RNA, 24 nt, Human
aauguuauuuuuuuaaaugaaacu

SEQ ID NO: 565962 - RNA, 21 nt, Human
acaaagaacagaacucacagu

SEQ ID NO: 565963 - RNA, 23 nt, Human
acagugaugguggccucccucuu

SEQ ID NO: 565964 - RNA, 27 nt, Human
accccaaaauccccaaucuugaaacca

SEQ ID NO: 565965 - RNA, 18 nt, Human
acuagugugcccguuuug

SEQ ID NO: 565966 - RNA, 22 nt, Human
agaacucacaguuugaacagaa

SEQ ID NO: 565967 - RNA, 20 nt, Human
aggagcccauguaaaaaaaa

SEQ ID NO: 565968 - RNA, 22 nt, Human
auaacugauucagaaagauaaa

SEQ ID NO: 565969 - RNA, 21 nt, Human
auauguacauauguauauaua

SEQ ID NO: 565970 - RNA, 24 nt, Human
caaagaacagaacucacaguuuga

SEQ ID NO: 565971 - RNA, 21 nt, Human
caaaucaaacucuacuaacac

SEQ ID NO: 565972 - RNA, 25 nt, Human
ccauguaaaaaaaaaaaaauccacu

SEQ ID NO: 565973 - RNA, 27 nt, Human
ccccaaaauccccaaucuugaaaccaa

SEQ ID NO: 565974 - RNA, 20 nt, Human
cgggggugacuagugugccc

SEQ ID NO: 565975 - RNA, 19 nt, Human
cuaaaaaaaaaaaccccaa

SEQ ID NO: 565976 - RNA, 20 nt, Human
cuagaggaggauauguggua

SEQ ID NO: 565977 - RNA, 21 nt, Human
cucacaaagaacagaacucac

SEQ ID NO: 565978 - RNA, 25 nt, Human
gaccacagccaucgcccgucuccca

SEQ ID NO: 565979 - RNA, 19 nt, Human
guguaaugaaagaaaaaag

SEQ ID NO: 565980 - RNA, 23 nt, Human
uaaaaaaaaaaaccccaaaaucc

SEQ ID NO: 565981 - RNA, 24 nt, Human
uaaaaaaaaaaaccccaaaauccc

SEQ ID NO: 565982 - RNA, 22 nt, Human
uaaaaagauaacucccauagca

SEQ ID NO: 565983 - RNA, 28 nt, Human
uaaaacaguacuaauuuuaaguuuuaaa

SEQ ID NO: 565984 - RNA, 21 nt, Human
uaaaauguaaaaaaccugaaa

SEQ ID NO: 565985 - RNA, 20 nt, Human
uaaagguucuauugcucuuc

SEQ ID NO: 565986 - RNA, 19 nt, Human
uaauuucuaacuuguguua

SEQ ID NO: 565987 - RNA, 18 nt, Human
uacauauguauauauaua

SEQ ID NO: 565988 - RNA, 23 nt, Human
uacuaaaaaaaaaaaccccaaaa

SEQ ID NO: 565989 - RNA, 25 nt, Human
uaggagcccauguaaaaaaaaaaaa

SEQ ID NO: 565990 - RNA, 18 nt, Human
uaggggaaaaaauaggag

SEQ ID NO: 565991 - RNA, 18 nt, Human
uauguacauauguauaua

SEQ ID NO: 565992 - RNA, 18 nt, Human
uauguacauauguauaua

SEQ ID NO: 565993 - RNA, 20 nt, Human
uauguacauauguauauaua

SEQ ID NO: 565994 - RNA, 24 nt, Human
ucaaacucuacuaacacagcacau

SEQ ID NO: 565995 - RNA, 24 nt, Human
ucaagugcaagauuaucauaugau

SEQ ID NO: 565996 - RNA, 20 nt, Human
ucacaaagaacagaacucac

SEQ ID NO: 565997 - RNA, 22 nt, Human
ucagaaagauaaaugaaccuug

SEQ ID NO: 565998 - RNA, 22 nt, Human
uccaauauauguaaaauuucuc

SEQ ID NO: 565999 - RNA, 23 nt, Human
ucccauagcaauauuuguuuacu

SEQ ID NO: 566000 - RNA, 24 nt, Human
ucccauagcaauauuuguuuacuc

SEQ ID NO: 566001 - RNA, 27 nt, Human
uccccaaucuugaaaccaacuuacauu

SEQ ID NO: 566002 - RNA, 21 nt, Human
ucgcugcgcucgguuggauuc

SEQ ID NO: 566003 - RNA, 24 nt, Human
ucuccaagauggcggaggcagcuu

SEQ ID NO: 566004 - RNA, 24 nt, Human
ugaaaaauguuucuuccacugaaa

SEQ ID NO: 566005 - RNA, 24 nt, Human
ugaaaauacacuucuaauuuuaua

SEQ ID NO: 566006 - RNA, 20 nt, Human
ugaaauuacaaacaaaaaaa

SEQ ID NO: 566007 - RNA, 20 nt, Human
ugagguuaguuuauaacuuu

SEQ ID NO: 566008 - RNA, 26 nt, Human
ugcuucacaccuuuaauacugucuua

SEQ ID NO: 566009 - RNA, 21 nt, Human
uggauguccuucagcuagggu

SEQ ID NO: 566010 - RNA, 18 nt, Human
uguacauauguauauaua

SEQ ID NO: 566011 - RNA, 19 nt, Human
uguacauauguauauauau

SEQ ID NO: 566012 - RNA, 19 nt, Human
uguacauauguauauauau

SEQ ID NO: 566013 - RNA, 20 nt, Human
uuaaagguucuauugcucuu

SEQ ID NO: 566014 - RNA, 18 nt, Human
uuaaaucuccacauucag

SEQ ID NO: 566015 - RNA, 25 nt, Human
uucuauaaauacuaaaaaaaaaaac

SEQ ID NO: 566016 - RNA, 23 nt, Human
uuuaauacugucuuaaagguucu

SEQ ID NO: 566017 - RNA, 21 nt, Human
uuuacaguauauauagaauuu

SEQ ID NO: 566018 - RNA, 21 nt, Human
aaagccccuaaaugccucaca

SEQ ID NO: 566019 - RNA, 20 nt, Human
aaagguacaggaaaaggaga

SEQ ID NO: 566020 - RNA, 22 nt, Human
aagagcaccuucaagguucacc

SEQ ID NO: 566021 - RNA, 24 nt, Human
aaggaagauggaagauacuggaaa

SEQ ID NO: 566022 - RNA, 22 nt, Human
acauggagaaacagguauucaa

SEQ ID NO: 566023 - RNA, 18 nt, Human
agacaauguccaugcccu

SEQ ID NO: 566024 - RNA, 22 nt, Human
agaguagaugugaaguggcagg

SEQ ID NO: 566025 - RNA, 18 nt, Human
aggaagauggaagauacu

SEQ ID NO: 566026 - RNA, 23 nt, Human
aggcaagaaaagcagcacugcag

SEQ ID NO: 566027 - RNA, 21 nt, Human
aggcacacaggaagugguaga

SEQ ID NO: 566028 - RNA, 24 nt, Human
aggcauacuccaccuuuuacuaaa

SEQ ID NO: 566029 - RNA, 22 nt, Human
caagaaaagcagcacugcaggu

SEQ ID NO: 566030 - RNA, 22 nt, Human
caagcuaaggucugaggcuggc

SEQ ID NO: 566031 - RNA, 22 nt, Human
caaggaggcaguauacugugcc

SEQ ID NO: 566032 - RNA, 21 nt, Human
caccuucaagguucacccaca

SEQ ID NO: 566033 - RNA, 23 nt, Human
cagagacaauguccaugcccuca

SEQ ID NO: 566034 - RNA, 20 nt, Human
cagaucacucugaggccucc

SEQ ID NO: 566035 - RNA, 20 nt, Human
cccacaaacucaguccucuu

SEQ ID NO: 566036 - RNA, 22 nt, Human
cccucaggauggcuugguccac

SEQ ID NO: 566037 - RNA, 19 nt, Human
ccuauggccuucccaaugg

SEQ ID NO: 566038 - RNA, 25 nt, Human
ccucaagcugcuucaagcuaagguc

SEQ ID NO: 566039 - RNA, 21 nt, Human
ccugaaagccccuaaaugccu

SEQ ID NO: 566040 - RNA, 22 nt, Human
ccuucaagguucacccacaaac

SEQ ID NO: 566041 - RNA, 24 nt, Human
ccuuuuacuaaauuccugaaagcc

SEQ ID NO: 566042 - RNA, 18 nt, Human
cucccuccauccuccuac

SEQ ID NO: 566043 - RNA, 21 nt, Human
cucccuccauccuccuaccuc

SEQ ID NO: 566044 - RNA, 23 nt, Human
cucgggccaaagggaggaaaugg

SEQ ID NO: 566045 - RNA, 20 nt, Human
cucuccguuccuuugaguaa

SEQ ID NO: 566046 - RNA, 25 nt, Human
cuggaaaggcauacuccaccuuuua

SEQ ID NO: 566047 - RNA, 20 nt, Human
cuggccucaagcugcuucaa

SEQ ID NO: 566048 - RNA, 19 nt, Human
gaagaguagaugugaagug

SEQ ID NO: 566049 - RNA, 19 nt, Human
gacagaucacucugaggcc

SEQ ID NO: 566050 - RNA, 19 nt, Human
gccaggguugaggccacag

SEQ ID NO: 566051 - RNA, 19 nt, Human
ggagaaacagguauucaau

SEQ ID NO: 566052 - RNA, 18 nt, Human
ggaguagcuauaauugcc

SEQ ID NO: 566053 - RNA, 23 nt, Human
guagcagccucccuccauccucc

SEQ ID NO: 566054 - RNA, 24 nt, Human
guccacaaaauggagaaauggggc

SEQ ID NO: 566055 - RNA, 18 nt, Human
guuguggggaguggagcu

SEQ ID NO: 566056 - RNA, 25 nt, Human
uaauugccaggguugaggccacagu

SEQ ID NO: 566057 - RNA, 20 nt, Human
uacuaaauuccugaaagccc

SEQ ID NO: 566058 - RNA, 23 nt, Human
uagaguagcagccucccuccauc

SEQ ID NO: 566059 - RNA, 22 nt, Human
uagcagccucccuccauccucc

SEQ ID NO: 566060 - RNA, 18 nt, Human
uauauauauguauauaua

SEQ ID NO: 566061 - RNA, 24 nt, Human
uauauguauauauauuuauguaca

SEQ ID NO: 566062 - RNA, 24 nt, Human
uauguacacagacacaaggguaua

SEQ ID NO: 566063 - RNA, 19 nt, Human
uauguauauauauauguau

SEQ ID NO: 566064 - RNA, 22 nt, Human
uauguauauauauauguauaua

SEQ ID NO: 566065 - RNA, 19 nt, Human
uauguauauauauuuaugu

SEQ ID NO: 566066 - RNA, 20 nt, Human
uauguauauauauuuaugua

SEQ ID NO: 566067 - RNA, 18 nt, Human
ucacuaagguguuggaaa

SEQ ID NO: 566068 - RNA, 22 nt, Human
ucagagguccuaaggguuuucc

SEQ ID NO: 566069 - RNA, 18 nt, Human
uccacaaaauggagaaau

SEQ ID NO: 566070 - RNA, 28 nt, Human
ucccuccauccuccuaccucgggccaaa

SEQ ID NO: 566071 - RNA, 21 nt, Human
uccuuugaguauguugugggg

SEQ ID NO: 566072 - RNA, 24 nt, Human
ugaaguggcaggauccagaggcac

SEQ ID NO: 566073 - RNA, 19 nt, Human
uggaaagggcaagaaggua

SEQ ID NO: 566074 - RNA, 23 nt, Human
uggagaaacagguauucaaugca

SEQ ID NO: 566075 - RNA, 23 nt, Human
uggcggcagcucugccgucuucc

SEQ ID NO: 566076 - RNA, 20 nt, Human
uggcuugguccacaaaaugg

SEQ ID NO: 566077 - RNA, 22 nt, Human
uguauauauauauguauauaua

SEQ ID NO: 566078 - RNA, 21 nt, Human
ugugaaguggcaggauccaga

SEQ ID NO: 566079 - RNA, 20 nt, Human
uguggggaguggagcucgga

SEQ ID NO: 566080 - RNA, 19 nt, Human
uuacuaaauuccugaaagc

SEQ ID NO: 566081 - RNA, 24 nt, Human
uuccggguccccgcaggggggucc

SEQ ID NO: 566082 - RNA, 23 nt, Human
uuccuagagucuaggcaagaaaa

SEQ ID NO: 566083 - RNA, 22 nt, Human
uuguggggaguggagcucggau

SEQ ID NO: 566084 - RNA, 20 nt, Human
uuuauguacacagacacaag

SEQ ID NO: 566085 - RNA, 21 nt, Human
uuuuuuuuuuuuguacaaagu

SEQ ID NO: 566086 - RNA, 23 nt, Human
uuuuuuuuuuuuuuuguacaaag

SEQ ID NO: 566087 - RNA, 19 nt, Human
uuuuuuuuuuuuuuuuugu

SEQ ID NO: 566088 - RNA, 21 nt, Human
uuuuuuuuuuuuuuuuuuugg

SEQ ID NO: 566089 - RNA, 24 nt, Human
aaacaaccucaaagacaccccgag

SEQ ID NO: 566090 - RNA, 18 nt, Human
aaauuuuacagaaaccug

SEQ ID NO: 566091 - RNA, 23 nt, Human
aacccugucaucuguuaaucucu

SEQ ID NO: 566092 - RNA, 18 nt, Human
aacuugcuguuuccacaa

SEQ ID NO: 566093 - RNA, 19 nt, Human
aagaagagacaguccaaua

SEQ ID NO: 566094 - RNA, 18 nt, Human
aagaccuuccagcuccac

SEQ ID NO: 566095 - RNA, 24 nt, Human
acaaggccagcucagggcucacca

SEQ ID NO: 566096 - RNA, 22 nt, Human
acauacaucaaggugugucucc

SEQ ID NO: 566097 - RNA, 22 nt, Human
acauucauaacugcaagcuaaa

SEQ ID NO: 566098 - RNA, 18 nt, Human
acauugucagacuuggaa

SEQ ID NO: 566099 - RNA, 22 nt, Human
accaaaccucagaaaacaggga

SEQ ID NO: 566100 - RNA, 25 nt, Human
accccgagccuuugaacggagcccu

SEQ ID NO: 566101 - RNA, 18 nt, Human
accuuugcuuugucagga

SEQ ID NO: 566102 - RNA, 19 nt, Human
acugagcccugagaguagg

SEQ ID NO: 566103 - RNA, 21 nt, Human
agagagaagcugaggguucuc

SEQ ID NO: 566104 - RNA, 22 nt, Human
agaggaggacggaaagggggcc

SEQ ID NO: 566105 - RNA, 18 nt, Human
agcacauuuucauuggcu

SEQ ID NO: 566106 - RNA, 18 nt, Human
agccgaacagcggcucgg

SEQ ID NO: 566107 - RNA, 24 nt, Human
aggaagcuuugacccaaggcacca

SEQ ID NO: 566108 - RNA, 24 nt, Human
aggcaacagcucuguggcaaaaca

SEQ ID NO: 566109 - RNA, 18 nt, Human
aggcagagagaagcugag

SEQ ID NO: 566110 - RNA, 19 nt, Human
aggcagagagaagcugagg

SEQ ID NO: 566111 - RNA, 20 nt, Human
aggcagagagaagcugaggg

SEQ ID NO: 566112 - RNA, 21 nt, Human
aggggugagacccggucuguu

SEQ ID NO: 566113 - RNA, 22 nt, Human
agguaaaaaaagagguuuccag

SEQ ID NO: 566114 - RNA, 24 nt, Human
auguaacacaucaccuccaagacu

SEQ ID NO: 566115 - RNA, 21 nt, Human
auuauauacacaaaacucauc

SEQ ID NO: 566116 - RNA, 27 nt, Human
auuguacuuauugccagaauuuaccuu

SEQ ID NO: 566117 - RNA, 19 nt, Human
caaaacagggcucccugcc

SEQ ID NO: 566118 - RNA, 24 nt, Human
caaaacagggcucccugcccugcu

SEQ ID NO: 566119 - RNA, 23 nt, Human
caaaugugaaccacaccucuuuu

SEQ ID NO: 566120 - RNA, 25 nt, Human
caaccuuccaugaggaucuucaaaa

SEQ ID NO: 566121 - RNA, 23 nt, Human
caagcuaaacaaauuccugcugg

SEQ ID NO: 566122 - RNA, 23 nt, Human
caauuugcuuucucaaaacaaaa

SEQ ID NO: 566123 - RNA, 23 nt, Human
caccaauuugcuuucucaaaaca

SEQ ID NO: 566124 - RNA, 19 nt, Human
caccagcauguccuguggc

SEQ ID NO: 566125 - RNA, 24 nt, Human
cagacauccagaccagaaaaccau

SEQ ID NO: 566126 - RNA, 23 nt, Human
cagaggcagagagaagcugaggg

SEQ ID NO: 566127 - RNA, 18 nt, Human
cagggcucaccagcaugu

SEQ ID NO: 566128 - RNA, 22 nt, Human
ccagcuccacauaccacccuuc

SEQ ID NO: 566129 - RNA, 20 nt, Human
cccacagccugaaaugcuuu

SEQ ID NO: 566130 - RNA, 21 nt, Human
cccagcuugauaaacaaccuc

SEQ ID NO: 566131 - RNA, 23 nt, Human
ccgagccuuugaacggagcccuc

SEQ ID NO: 566132 - RNA, 19 nt, Human
ccucaaggacgucgaccaa

SEQ ID NO: 566133 - RNA, 23 nt, Human
ccugugagcacuacaguacugaa

SEQ ID NO: 566134 - RNA, 18 nt, Human
ccuucgugaggaucugca

SEQ ID NO: 566135 - RNA, 23 nt, Human
ccuuguuuguaaucucuuccaca

SEQ ID NO: 566136 - RNA, 21 nt, Human
cgcccucggcuccggccaucc

SEQ ID NO: 566137 - RNA, 19 nt, Human
cuacaagaagagacagucc

SEQ ID NO: 566138 - RNA, 26 nt, Human
cucguccuccucaaggacgucgacca

SEQ ID NO: 566139 - RNA, 19 nt, Human
cucugcacaaggccagcuc

SEQ ID NO: 566140 - RNA, 26 nt, Human
cucuuccacagucugucucuuccaaa

SEQ ID NO: 566141 - RNA, 24 nt, Human
cuggggugcagguacuacaggcau

SEQ ID NO: 566142 - RNA, 21 nt, Human
cugguucuucucccucugggg

SEQ ID NO: 566143 - RNA, 22 nt, Human
cuguggccacaagaccuuccag

SEQ ID NO: 566144 - RNA, 24 nt, Human
gaaaacagggacgugaaagaagga

SEQ ID NO: 566145 - RNA, 24 nt, Human
gaccaggcuugaggaagcuuugac

SEQ ID NO: 566146 - RNA, 24 nt, Human
gacugucaggaaagaccuugguua

SEQ ID NO: 566147 - RNA, 19 nt, Human
gacuuccccucaaaugugg

SEQ ID NO: 566148 - RNA, 21 nt, Human
gaggaagcuuugacccaaggc

SEQ ID NO: 566149 - RNA, 19 nt, Human
gcauguccuguggccacaa

SEQ ID NO: 566150 - RNA, 19 nt, Human
gccuagagaaaacaagccc

SEQ ID NO: 566151 - RNA, 22 nt, Human
gccuuguuuguaaucucuucca

SEQ ID NO: 566152 - RNA, 22 nt, Human
gcucuguggcaaaacacacaca

SEQ ID NO: 566153 - RNA, 19 nt, Human
gcugaguuaacugaucggu

SEQ ID NO: 566154 - RNA, 23 nt, Human
ggaggacggaaagggggccaaaa

SEQ ID NO: 566155 - RNA, 24 nt, Human
gggaagcacauuuucauuggcuug

SEQ ID NO: 566156 - RNA, 19 nt, Human
gggcaaauguucuccagga

SEQ ID NO: 566157 - RNA, 22 nt, Human
gucucuuccaaaacagggcucc

SEQ ID NO: 566158 - RNA, 19 nt, Human
gugcagguacuacaggcau

SEQ ID NO: 566159 - RNA, 19 nt, Human
guggcaaaacacacacauc

SEQ ID NO: 566160 - RNA, 21 nt, Human
uaaagagaaugaagggagcgc

SEQ ID NO: 566161 - RNA, 25 nt, Human
uaauauguuggccaaaaucagucuc

SEQ ID NO: 566162 - RNA, 22 nt, Human
uaauguaacacaucaccuccaa

SEQ ID NO: 566163 - RNA, 21 nt, Human
uacacagaugcuggacacaua

SEQ ID NO: 566164 - RNA, 24 nt, Human
uagaaucaugaacgaaaauuucac

SEQ ID NO: 566165 - RNA, 19 nt, Human
uagagaaaacaagccccaa

SEQ ID NO: 566166 - RNA, 21 nt, Human
uaggagcacuucucggagucg

SEQ ID NO: 566167 - RNA, 25 nt, Human
uaguaccuuucauaaaacaagcccu

SEQ ID NO: 566168 - RNA, 19 nt, Human
uagugcaaccuugcaaaaa

SEQ ID NO: 566169 - RNA, 22 nt, Human
uagugcaaccuugcaaaaaggg

SEQ ID NO: 566170 - RNA, 28 nt, Human
uauauacacaaaacucaucauucgugca

SEQ ID NO: 566171 - RNA, 20 nt, Human
uaucaagaaauccagaggac

SEQ ID NO: 566172 - RNA, 19 nt, Human
ucaggaaagaccuuggucc

SEQ ID NO: 566173 - RNA, 25 nt, Human
uccacacgguggcuacugcagcuaa

SEQ ID NO: 566174 - RNA, 25 nt, Human
uccacagucugucucuuccaaaaca

SEQ ID NO: 566175 - RNA, 21 nt, Human
uccaggaagcccugugagcac

SEQ ID NO: 566176 - RNA, 19 nt, Human
ucgaaacauugucagacuu

SEQ ID NO: 566177 - RNA, 22 nt, Human
ucgcugccgcccaggacagcgc

SEQ ID NO: 566178 - RNA, 20 nt, Human
ucggcuccggccauccucaa

SEQ ID NO: 566179 - RNA, 24 nt, Human
ucggcuccggccauccucaacugu

SEQ ID NO: 566180 - RNA, 22 nt, Human
ucuccagcuccucguccuccuc

SEQ ID NO: 566181 - RNA, 25 nt, Human
ucuguuaaucucuccgccugugaca

SEQ ID NO: 566182 - RNA, 21 nt, Human
ucuucaaaaaaaagaucucau

SEQ ID NO: 566183 - RNA, 22 nt, Human
ugaaaggacuuccccucaaaug

SEQ ID NO: 566184 - RNA, 21 nt, Human
ugaauacacagaugcuggaca

SEQ ID NO: 566185 - RNA, 25 nt, Human
ugaccaaaccucagaaaacagggac

SEQ ID NO: 566186 - RNA, 18 nt, Human
ugagaagauuaaaaguuu

SEQ ID NO: 566187 - RNA, 23 nt, Human
ugagacccggucuguuuucuagg

SEQ ID NO: 566188 - RNA, 24 nt, Human
ugaguuaacugaucgguacuauug

SEQ ID NO: 566189 - RNA, 22 nt, Human
ugcagcuaaagagaaugaaggg

SEQ ID NO: 566190 - RNA, 21 nt, Human
ugccagaacuccuuaaaagca

SEQ ID NO: 566191 - RNA, 18 nt, Human
ugccagaauuuaccuuug

SEQ ID NO: 566192 - RNA, 18 nt, Human
ugccagaauuuaccuuug

SEQ ID NO: 566193 - RNA, 21 nt, Human
uggccccacagccugaaaugc

SEQ ID NO: 566194 - RNA, 19 nt, Human
ugggaagcacauuuucauu

SEQ ID NO: 566195 - RNA, 24 nt, Human
ugguccuccagaggcagagagaag

SEQ ID NO: 566196 - RNA, 21 nt, Human
ugguggccccacagccugaaa

SEQ ID NO: 566197 - RNA, 24 nt, Human
ugucaggaaagaccuugguccucc

SEQ ID NO: 566198 - RNA, 26 nt, Human
uguccuguggccacaagaccuuccag

SEQ ID NO: 566199 - RNA, 20 nt, Human
ugugacuuccaugacauuca

SEQ ID NO: 566200 - RNA, 24 nt, Human
uuaaagagaucucauaucaacuga

SEQ ID NO: 566201 - RNA, 21 nt, Human
uuccaguuaaugugaaagaag

SEQ ID NO: 566202 - RNA, 22 nt, Human
uucguaaaccaccaagauuuca

SEQ ID NO: 566203 - RNA, 20 nt, Human
uucuacaaaaaugcacauac

SEQ ID NO: 566204 - RNA, 27 nt, Human
uucuaggugacgggaagagagccuucc

SEQ ID NO: 566205 - RNA, 24 nt, Human
uugaacggagcccucugcacaaag

SEQ ID NO: 566206 - RNA, 24 nt, Human
uugauauaugcuuaugaauauccc

SEQ ID NO: 566207 - RNA, 24 nt, Human
uugggccuagagaaaacaagcccc

SEQ ID NO: 566208 - RNA, 21 nt, Human
uuucacaggggugagacccgg

SEQ ID NO: 566209 - RNA, 26 nt, Human
uuugagaagauuaaaaguuuuccgga

SEQ ID NO: 566210 - RNA, 19 nt, Human
uuugcauaaaacaugcauu

SEQ ID NO: 566211 - RNA, 23 nt, Human
aaaaaaaaaaaaaacagcacuag

SEQ ID NO: 566212 - RNA, 21 nt, Human
aaaaaaaaaaaacagcacuag

SEQ ID NO: 566213 - RNA, 24 nt, Human
aacaucccagaacuucagaccagg

SEQ ID NO: 566214 - RNA, 23 nt, Human
aagcacauuacaauaaucuuuca

SEQ ID NO: 566215 - RNA, 19 nt, Human
aagugacaucagaugaaag

SEQ ID NO: 566216 - RNA, 24 nt, Human
aauccugggcucaagagauccucc

SEQ ID NO: 566217 - RNA, 22 nt, Human
aaugcaaucuauugaugucauc

SEQ ID NO: 566218 - RNA, 24 nt, Human
accuaagaaugcagugacugaaau

SEQ ID NO: 566219 - RNA, 23 nt, Human
acuaccaaauuuugaagcuuaau

SEQ ID NO: 566220 - RNA, 22 nt, Human
caagagauccuccugccucagc

SEQ ID NO: 566221 - RNA, 19 nt, Human
cacccauuccuuguggcuu

SEQ ID NO: 566222 - RNA, 20 nt, Human
cacccauuccuuguggcuua

SEQ ID NO: 566223 - RNA, 18 nt, Human
cagcugggacuacaggug

SEQ ID NO: 566224 - RNA, 19 nt, Human
caugaaaagugacaucaga

SEQ ID NO: 566225 - RNA, 24 nt, Human
ccugagcagcugggacuacaggug

SEQ ID NO: 566226 - RNA, 20 nt, Human
ccugggcucaagagauccuc

SEQ ID NO: 566227 - RNA, 21 nt, Human
ccugggcucaagagauccucc

SEQ ID NO: 566228 - RNA, 18 nt, Human
cucaagagauccuccugc

SEQ ID NO: 566229 - RNA, 23 nt, Human
cugccucagccuccugagcagcu

SEQ ID NO: 566230 - RNA, 20 nt, Human
cuuaauguauucauugccaa

SEQ ID NO: 566231 - RNA, 21 nt, Human
gaaagcugagaucugugaaag

SEQ ID NO: 566232 - RNA, 19 nt, Human
gaccagguuaagggggcca

SEQ ID NO: 566233 - RNA, 24 nt, Human
gagcagcugggacuacaggugugc

SEQ ID NO: 566234 - RNA, 21 nt, Human
gauccuccugccucagccucc

SEQ ID NO: 566235 - RNA, 21 nt, Human
gccacacuccacagcugaugu

SEQ ID NO: 566236 - RNA, 21 nt, Human
gccuccugagcagcugggacu

SEQ ID NO: 566237 - RNA, 22 nt, Human
ggccaaugagaagaucaugaaa

SEQ ID NO: 566238 - RNA, 22 nt, Human
gggcucaagagauccuccugcc

SEQ ID NO: 566239 - RNA, 18 nt, Human
gugaauaagagaacuucg

SEQ ID NO: 566240 - RNA, 22 nt, Human
uagagauggaaucuugcuaugu

SEQ ID NO: 566241 - RNA, 23 nt, Human
uaucaguaccaacccacuuuaau

SEQ ID NO: 566242 - RNA, 23 nt, Human
ucaguuuuuccaaguaaguccac

SEQ ID NO: 566243 - RNA, 22 nt, Human
uccacagaccauuugauaggcu

SEQ ID NO: 566244 - RNA, 24 nt, Human
uccugagcagcugggacuacaggu

SEQ ID NO: 566245 - RNA, 18 nt, Human
uccugggcucaagagauc

SEQ ID NO: 566246 - RNA, 23 nt, Human
ucuauugaugucaucauauuugg

SEQ ID NO: 566247 - RNA, 23 nt, Human
ucuugcuauguuguccacgaugg

SEQ ID NO: 566248 - RNA, 24 nt, Human
ucuugcuauguuguccacgaugga

SEQ ID NO: 566249 - RNA, 21 nt, Human
ugaaaacaucccagaacuuca

SEQ ID NO: 566250 - RNA, 18 nt, Human
ugaaaauagaaaaaucaa

SEQ ID NO: 566251 - RNA, 20 nt, Human
ugaaaauagaaaaaucaaac

SEQ ID NO: 566252 - RNA, 19 nt, Human
ugaaaugucuguucuaaaa

SEQ ID NO: 566253 - RNA, 22 nt, Human
ugagaagaucaugaaaagugac

SEQ ID NO: 566254 - RNA, 24 nt, Human
ugccucagccuccugagcagcugg

SEQ ID NO: 566255 - RNA, 22 nt, Human
ugcuaaaaaaaaaaaaaaaaaa

SEQ ID NO: 566256 - RNA, 30 nt, Human
ugcuaaaaaaaaaaaaaaaaaaaaacagcu

SEQ ID NO: 566257 - RNA, 18 nt, Human
uggaaucuugcuauguug

SEQ ID NO: 566258 - RNA, 19 nt, Human
uggaaucuugcuauguugu

SEQ ID NO: 566259 - RNA, 20 nt, Human
ugggacuacaggugugcacc

SEQ ID NO: 566260 - RNA, 21 nt, Human
ugggacuacaggugugcaccg

SEQ ID NO: 566261 - RNA, 24 nt, Human
ugggacuacaggugugcaccgcca

SEQ ID NO: 566262 - RNA, 24 nt, Human
ugggcucaagagauccuccugccu

SEQ ID NO: 566263 - RNA, 19 nt, Human
uucaaaauccugggcucaa

SEQ ID NO: 566264 - RNA, 18 nt, Human
acucgcuccaggugacau

SEQ ID NO: 566265 - RNA, 22 nt, Human
agggcuagugcgcgccacugcc

SEQ ID NO: 566266 - RNA, 24 nt, Human
cagagucugagaacagagguuaag

SEQ ID NO: 566267 - RNA, 19 nt, Human
cccgcccagcccucguguc

SEQ ID NO: 566268 - RNA, 21 nt, Human
cccgcccagcccucguguccc

SEQ ID NO: 566269 - RNA, 23 nt, Human
ccgcgcgcuacucgcuccaggug

SEQ ID NO: 566270 - RNA, 22 nt, Human
ccuguacaguauuuauuguucc

SEQ ID NO: 566271 - RNA, 19 nt, Human
cugagaacagagguuaaga

SEQ ID NO: 566272 - RNA, 22 nt, Human
cugugugucuguccugcauccc

SEQ ID NO: 566273 - RNA, 21 nt, Human
cuuuuccagagucugagaaca

SEQ ID NO: 566274 - RNA, 21 nt, Human
gcgagggcuagugcgcgccac

SEQ ID NO: 566275 - RNA, 18 nt, Human
ggagacaggccggcuucc

SEQ ID NO: 566276 - RNA, 19 nt, Human
ggcuagugcgcgccacugc

SEQ ID NO: 566277 - RNA, 18 nt, Human
gugcggcgcgagggcuag

SEQ ID NO: 566278 - RNA, 23 nt, Human
ucacugagugucugugugucugu

SEQ ID NO: 566279 - RNA, 20 nt, Human
ucccuaggucugaaggcgga

SEQ ID NO: 566280 - RNA, 23 nt, Human
ucccuaggucugaaggcggagac

SEQ ID NO: 566281 - RNA, 18 nt, Human
ucgugucccgugcggcgc

SEQ ID NO: 566282 - RNA, 22 nt, Human
ucucccuaggucugaaggcgga

SEQ ID NO: 566283 - RNA, 26 nt, Human
ugagaacagagguuaagaccucuccc

SEQ ID NO: 566284 - RNA, 21 nt, Human
ugagauguggagggaaugcga

SEQ ID NO: 566285 - RNA, 18 nt, Human
aaaauaggaauuguucuc

SEQ ID NO: 566286 - RNA, 19 nt, Human
aaagauuagaaagaacaug

SEQ ID NO: 566287 - RNA, 19 nt, Human
aacuagaaaacuaaaacag

SEQ ID NO: 566288 - RNA, 21 nt, Human
aagcauaaucacaugauacac

SEQ ID NO: 566289 - RNA, 20 nt, Human
acaaaacauaggauuaacaa

SEQ ID NO: 566290 - RNA, 25 nt, Human
accaauauauucagaccaacaaaga

SEQ ID NO: 566291 - RNA, 20 nt, Human
acuagaaaaaagacauagug

SEQ ID NO: 566292 - RNA, 21 nt, Human
agaaaaaagacauaguggaaa

SEQ ID NO: 566293 - RNA, 27 nt, Human
agaaaaaagacauaguggaaaaauuuu

SEQ ID NO: 566294 - RNA, 29 nt, Human
agaaaaaagacauaguggaaaaauuuuug

SEQ ID NO: 566295 - RNA, 21 nt, Human
agaccaacaaagauuagaaag

SEQ ID NO: 566296 - RNA, 18 nt, Human
caaccgaagcagccgcgg

SEQ ID NO: 566297 - RNA, 18 nt, Human
caacuagaaaacuaaaac

SEQ ID NO: 566298 - RNA, 22 nt, Human
cacaauauaacagguagauaag

SEQ ID NO: 566299 - RNA, 21 nt, Human
cacagccgcggccgcccgcuc

SEQ ID NO: 566300 - RNA, 24 nt, Human
cacauacauagaaaaauuagcaca

SEQ ID NO: 566301 - RNA, 24 nt, Human
cacaucacauacauagaaaaauua

SEQ ID NO: 566302 - RNA, 21 nt, Human
cagaaaggggaagucucccuc

SEQ ID NO: 566303 - RNA, 22 nt, Human
cagccgcggcuacugguucccc

SEQ ID NO: 566304 - RNA, 21 nt, Human
ccaacaaagauuagaaagaac

SEQ ID NO: 566305 - RNA, 23 nt, Human
ccaccgaccgcggcaaccgaagc

SEQ ID NO: 566306 - RNA, 19 nt, Human
ccgcggccgcccgcuccuc

SEQ ID NO: 566307 - RNA, 21 nt, Human
ccgcggcuacugguuccccgc

SEQ ID NO: 566308 - RNA, 25 nt, Human
cgcccgcuccuccgcgccggcucca

SEQ ID NO: 566309 - RNA, 18 nt, Human
cuccuccgcgccggcucc

SEQ ID NO: 566310 - RNA, 25 nt, Human
cucguaacacucuacaaauacaauc

SEQ ID NO: 566311 - RNA, 20 nt, Human
gaaaggggaagucucccuca

SEQ ID NO: 566312 - RNA, 19 nt, Human
gaccgcggcaaccgaagca

SEQ ID NO: 566313 - RNA, 21 nt, Human
uaaaacaagggcaugaaaaag

SEQ ID NO: 566314 - RNA, 20 nt, Human
uaacaaaaccauacgaaagc

SEQ ID NO: 566315 - RNA, 22 nt, Human
uaacagguagauaagaaaaaaa

SEQ ID NO: 566316 - RNA, 22 nt, Human
uauaacaaaaccauacgaaagc

SEQ ID NO: 566317 - RNA, 18 nt, Human
ucaagcuccuaaaaugaa

SEQ ID NO: 566318 - RNA, 19 nt, Human
ugagagagaaaaaaauaag

SEQ ID NO: 566319 - RNA, 18 nt, Human
ugucaaguaaaaauuuaa

SEQ ID NO: 566320 - RNA, 27 nt, Human
ugucagagauauucaacuagaaaacua

SEQ ID NO: 566321 - RNA, 18 nt, Human
ugucuucuuuuauuaaua

SEQ ID NO: 566322 - RNA, 24 nt, Human
uuagcacaauauaacagguagaua

SEQ ID NO: 566323 - RNA, 23 nt, Human
uuuuuggccuuguagagcucauc

SEQ ID NO: 566324 - RNA, 23 nt, Human
aaaaacaaaaacaaaaaaaacac

SEQ ID NO: 566325 - RNA, 22 nt, Human
aaaaacacaaaauugcugccac

SEQ ID NO: 566326 - RNA, 19 nt, Human
aaaaagccuuuacauggca

SEQ ID NO: 566327 - RNA, 22 nt, Human
aaaaagccuuuacauggcauuc

SEQ ID NO: 566328 - RNA, 21 nt, Human
aaaacaaaaacaaaaaaaaca

SEQ ID NO: 566329 - RNA, 24 nt, Human
aaaacaaaaacaaaaacaaaaaaa

SEQ ID NO: 566330 - RNA, 19 nt, Human
aaacacggggggggggggg

SEQ ID NO: 566331 - RNA, 25 nt, Human
aaagccuauguacaaguaagaaccu

SEQ ID NO: 566332 - RNA, 22 nt, Human
aaagugaggucuuaaccaaaaa

SEQ ID NO: 566333 - RNA, 24 nt, Human
aaauaaaaacacaaaauugcugcc

SEQ ID NO: 566334 - RNA, 21 nt, Human
aaucuguacagcaggggccug

SEQ ID NO: 566335 - RNA, 21 nt, Human
acagugacaaugaauaggcac

SEQ ID NO: 566336 - RNA, 26 nt, Human
acuguaaauacacauaugugugucca

SEQ ID NO: 566337 - RNA, 21 nt, Human
agcaggaaagccuauguacaa

SEQ ID NO: 566338 - RNA, 19 nt, Human
aguaugaaggcagcucaaa

SEQ ID NO: 566339 - RNA, 22 nt, Human
auuagccgucuccaaaauaaaa

SEQ ID NO: 566340 - RNA, 22 nt, Human
caaaaacaaaaaaaacacgggg

SEQ ID NO: 566341 - RNA, 23 nt, Human
caaaacaaaaacaaaaacaaaaa

SEQ ID NO: 566342 - RNA, 26 nt, Human
caaaacaaaaacaaaaacaaaaaaaa

SEQ ID NO: 566343 - RNA, 19 nt, Human
caauuuucagagcaaggac

SEQ ID NO: 566344 - RNA, 23 nt, Human
cacaaacuuagcauucuucuagg

SEQ ID NO: 566345 - RNA, 23 nt, Human
cucaaaugaugaacuaagguacc

SEQ ID NO: 566346 - RNA, 18 nt, Human
cugcacuguaaauacaca

SEQ ID NO: 566347 - RNA, 23 nt, Human
cuuaaggcaguuuuaaaagugag

SEQ ID NO: 566348 - RNA, 23 nt, Human
cuugauuuaccaauuuucagagc

SEQ ID NO: 566349 - RNA, 25 nt, Human
gcauucaaaacaaaaacaaaaacaa

SEQ ID NO: 566350 - RNA, 21 nt, Human
gccgucuccaaaauaaaaaca

SEQ ID NO: 566351 - RNA, 18 nt, Human
ggggggggggggggucac

SEQ ID NO: 566352 - RNA, 22 nt, Human
gggggggggggggucacuuaaa

SEQ ID NO: 566353 - RNA, 24 nt, Human
ggggggggggggucacuuaaaucu

SEQ ID NO: 566354 - RNA, 22 nt, Human
gggggggggggucacuuaaauc

SEQ ID NO: 566355 - RNA, 19 nt, Human
gucuccaaaauaaaaacac

SEQ ID NO: 566356 - RNA, 22 nt, Human
uaaaaacacaaaauugcugcca

SEQ ID NO: 566357 - RNA, 18 nt, Human
uaaauuauguacccaaaa

SEQ ID NO: 566358 - RNA, 24 nt, Human
uaagaauauauaacuccucccugg

SEQ ID NO: 566359 - RNA, 22 nt, Human
uaccauuagccgucuccaaaau

SEQ ID NO: 566360 - RNA, 23 nt, Human
uacuacagaacuauuuacacugc

SEQ ID NO: 566361 - RNA, 23 nt, Human
uagccgucuccaaaauaaaaaca

SEQ ID NO: 566362 - RNA, 18 nt, Human
uauguacccaaaaucugu

SEQ ID NO: 566363 - RNA, 23 nt, Human
uauuuauacuuaaggcaguuuua

SEQ ID NO: 566364 - RNA, 21 nt, Human
ucacagaguuaguccauaagg

SEQ ID NO: 566365 - RNA, 21 nt, Human
uccaaaauaaaaacacaaaau

SEQ ID NO: 566366 - RNA, 24 nt, Human
uccuaccauuagccgucuccaaaa

SEQ ID NO: 566367 - RNA, 24 nt, Human
ucucuuggacugacuaaaagagcu

SEQ ID NO: 566368 - RNA, 22 nt, Human
ucuuggacugacuaaaagagcu

SEQ ID NO: 566369 - RNA, 18 nt, Human
ugaauaggcacucaauac

SEQ ID NO: 566370 - RNA, 19 nt, Human
ugaauaggcacucaauaca

SEQ ID NO: 566371 - RNA, 23 nt, Human
ugcacuguaaauacacauaugug

SEQ ID NO: 566372 - RNA, 20 nt, Human
ugcugccacauguucagcag

SEQ ID NO: 566373 - RNA, 26 nt, Human
uuaaccucuacuacagaacuauuuac

SEQ ID NO: 566374 - RNA, 20 nt, Human
uuacaggcugaaggaaggcu

SEQ ID NO: 566375 - RNA, 23 nt, Human
uuccuaccauuagccgucuccaa

SEQ ID NO: 566376 - RNA, 23 nt, Human
uucuaggaauggaaaacuugccc

SEQ ID NO: 566377 - RNA, 21 nt, Human
uuguuuugucuuauaagaaua

SEQ ID NO: 566378 - RNA, 21 nt, Human
uuuauugagacaagguaaaca

SEQ ID NO: 566379 - RNA, 19 nt, Human
uaaaaagugcauauguugg

SEQ ID NO: 566380 - RNA, 24 nt, Human
uaaauguaaaaagugcauauguug

SEQ ID NO: 566381 - RNA, 18 nt, Human
acuaccuuuaauacuagu

SEQ ID NO: 566382 - RNA, 19 nt, Human
agccagaccagcccccucc

SEQ ID NO: 566383 - RNA, 21 nt, Human
agguaagaaaacaaaaaaugc

SEQ ID NO: 566384 - RNA, 22 nt, Human
cacagcauauauuugagaaaac

SEQ ID NO: 566385 - RNA, 21 nt, Human
cacagccagaccagcccccuc

SEQ ID NO: 566386 - RNA, 25 nt, Human
cagagagaacauuaaaguacaaaga

SEQ ID NO: 566387 - RNA, 19 nt, Human
cagcccccucccaucugcc

SEQ ID NO: 566388 - RNA, 18 nt, Human
ccaacgcaggauacaaac

SEQ ID NO: 566389 - RNA, 22 nt, Human
ccagaccagcccccucccaucu

SEQ ID NO: 566390 - RNA, 19 nt, Human
ccuaugguccucugagccu

SEQ ID NO: 566391 - RNA, 22 nt, Human
gacugugacgguggccacagcc

SEQ ID NO: 566392 - RNA, 21 nt, Human
gcuuugguaaacuaccuuuaa

SEQ ID NO: 566393 - RNA, 23 nt, Human
ggacucuuaaagcucucucccaa

SEQ ID NO: 566394 - RNA, 22 nt, Human
ggcggccagcccaggaccuggg

SEQ ID NO: 566395 - RNA, 25 nt, Human
uaaaauucaaaauaucaaagaccuc

SEQ ID NO: 566396 - RNA, 19 nt, Human
uaucggacuaaacauaaau

SEQ ID NO: 566397 - RNA, 24 nt, Human
uaugugcuuuugggcacacauagu

SEQ ID NO: 566398 - RNA, 20 nt, Human
uccuaugguccucugagccu

SEQ ID NO: 566399 - RNA, 19 nt, Human
uccuggacugugacggugg

SEQ ID NO: 566400 - RNA, 18 nt, Human
ugagaaaagugauucagu

SEQ ID NO: 566401 - RNA, 20 nt, Human
ugagaccaacgcaggauaca

SEQ ID NO: 566402 - RNA, 20 nt, Human
uuguaucucucuugaaagac

SEQ ID NO: 566403 - RNA, 21 nt, Human
aaccaguaguguucuauaacc

SEQ ID NO: 566404 - RNA, 24 nt, Human
aacuccuuucuucagggcugcauu

SEQ ID NO: 566405 - RNA, 21 nt, Human
aagagccauccaugcucuugc

SEQ ID NO: 566406 - RNA, 19 nt, Human
accaguaguguucuauaac

SEQ ID NO: 566407 - RNA, 21 nt, Human
accuucauuuucauuuaagaa

SEQ ID NO: 566408 - RNA, 19 nt, Human
acucaauugcauagugcuu

SEQ ID NO: 566409 - RNA, 19 nt, Human
acugcugcuguuaccuuca

SEQ ID NO: 566410 - RNA, 23 nt, Human
agaagugaguggcuaggcccagc

SEQ ID NO: 566411 - RNA, 18 nt, Human
agaggaucugaugcgagg

SEQ ID NO: 566412 - RNA, 23 nt, Human
agaugaugauaagagccauccau

SEQ ID NO: 566413 - RNA, 24 nt, Human
agcuuagcuugggucuucuggcuc

SEQ ID NO: 566414 - RNA, 18 nt, Human
aggagcuucugcugagga

SEQ ID NO: 566415 - RNA, 19 nt, Human
aggcucaaagcgcggcgca

SEQ ID NO: 566416 - RNA, 22 nt, Human
agucugaguguguuuauagccu

SEQ ID NO: 566417 - RNA, 25 nt, Human
agugugcucaagaggggaggauucc

SEQ ID NO: 566418 - RNA, 22 nt, Human
aguuaccuuauuccuaaauaac

SEQ ID NO: 566419 - RNA, 26 nt, Human
auaacuaauuacuccuaacauagcag

SEQ ID NO: 566420 - RNA, 19 nt, Human
aucucuuuaauuuuacugg

SEQ ID NO: 566421 - RNA, 21 nt, Human
auggccuagaggcucaaagcg

SEQ ID NO: 566422 - RNA, 24 nt, Human
auuuucugagucuuuuccauuaug

SEQ ID NO: 566423 - RNA, 21 nt, Human
caaaauaccuuaagaguuugg

SEQ ID NO: 566424 - RNA, 22 nt, Human
caaaauaccuuaagaguuuggc

SEQ ID NO: 566425 - RNA, 20 nt, Human
caagaggggaggauucccag

SEQ ID NO: 566426 - RNA, 22 nt, Human
cacaauuauuuuuuuccugcaa

SEQ ID NO: 566427 - RNA, 20 nt, Human
cacugcauaccauacuaggu

SEQ ID NO: 566428 - RNA, 23 nt, Human
cagagugugcucaagaggggagg

SEQ ID NO: 566429 - RNA, 18 nt, Human
cagcacagaggaucugau

SEQ ID NO: 566430 - RNA, 22 nt, Human
caucagagugagcaagagguga

SEQ ID NO: 566431 - RNA, 19 nt, Human
cauccuguugcuuuuguug

SEQ ID NO: 566432 - RNA, 23 nt, Human
caugaacacuagguggaaucaac

SEQ ID NO: 566433 - RNA, 23 nt, Human
caugcaaauacugcuuauucccu

SEQ ID NO: 566434 - RNA, 24 nt, Human
ccaagcccagccugcuucuuuacu

SEQ ID NO: 566435 - RNA, 21 nt, Human
ccagaucacacacuuacacag

SEQ ID NO: 566436 - RNA, 21 nt, Human
ccagcucacggggcaggagau

SEQ ID NO: 566437 - RNA, 25 nt, Human
ccaguaguguucuauaaccacaauu

SEQ ID NO: 566438 - RNA, 27 nt, Human
ccauaccauugcuucacaugcaccgua

SEQ ID NO: 566439 - RNA, 23 nt, Human
ccaugguccuugcucggccuucc

SEQ ID NO: 566440 - RNA, 22 nt, Human
ccuaacauagcagcuuaaaaua

SEQ ID NO: 566441 - RNA, 19 nt, Human
ccuccuuccucucuuaacu

SEQ ID NO: 566442 - RNA, 21 nt, Human
ccuccuuccucucuuaacucc

SEQ ID NO: 566443 - RNA, 21 nt, Human
ccugccacaugggccucuccc

SEQ ID NO: 566444 - RNA, 22 nt, Human
ccuucugcaaacaauuuuccca

SEQ ID NO: 566445 - RNA, 20 nt, Human
cuaggcccagcucacggggc

SEQ ID NO: 566446 - RNA, 24 nt, Human
cucuuuaauuuuacuggggggccg

SEQ ID NO: 566447 - RNA, 22 nt, Human
cuucagggcugcauuuuucucc

SEQ ID NO: 566448 - RNA, 21 nt, Human
gaaagacugggaggcucagaa

SEQ ID NO: 566449 - RNA, 20 nt, Human
gaagucugaguguguuuaua

SEQ ID NO: 566450 - RNA, 21 nt, Human
gagaacagauaggguggagug

SEQ ID NO: 566451 - RNA, 20 nt, Human
gagcagucugcugcuggaga

SEQ ID NO: 566452 - RNA, 23 nt, Human
gccacugcauaccauacuaggua

SEQ ID NO: 566453 - RNA, 18 nt, Human
ggcaggagaucacacgug

SEQ ID NO: 566454 - RNA, 19 nt, Human
ggccuagaggcucaaagcg

SEQ ID NO: 566455 - RNA, 19 nt, Human
ggcucaaagcgcggcgcac

SEQ ID NO: 566456 - RNA, 24 nt, Human
gguccuugcucggccuuccacguc

SEQ ID NO: 566457 - RNA, 25 nt, Human
guagcuccuccuuccucucuuaacu

SEQ ID NO: 566458 - RNA, 24 nt, Human
uaauauaaauguauuaguuaccuu

SEQ ID NO: 566459 - RNA, 22 nt, Human
uaccuuauuccuaaauaacuaa

SEQ ID NO: 566460 - RNA, 18 nt, Human
uacuuaaaaagaagucaa

SEQ ID NO: 566461 - RNA, 20 nt, Human
uaguuaccuuauuccuaaau

SEQ ID NO: 566462 - RNA, 24 nt, Human
uaguucucuuuaucucuucgggcc

SEQ ID NO: 566463 - RNA, 19 nt, Human
uaucaugguaucugugggu

SEQ ID NO: 566464 - RNA, 18 nt, Human
uccagguguagcuuagcu

SEQ ID NO: 566465 - RNA, 23 nt, Human
uccuccuuccucucuuaacuccu

SEQ ID NO: 566466 - RNA, 21 nt, Human
uccugggauuacaaagucaca

SEQ ID NO: 566467 - RNA, 18 nt, Human
ucugcuuccagagaagua

SEQ ID NO: 566468 - RNA, 23 nt, Human
ucugugacugcuauucaccucag

SEQ ID NO: 566469 - RNA, 23 nt, Human
ugaacacuagguggaaucagggg

SEQ ID NO: 566470 - RNA, 24 nt, Human
ugagacauaguagcuccuccuucc

SEQ ID NO: 566471 - RNA, 20 nt, Human
ugcauagugcuuggugaggc

SEQ ID NO: 566472 - RNA, 19 nt, Human
ugcuuggugaggcaguuuc

SEQ ID NO: 566473 - RNA, 21 nt, Human
ugcuuuuguuggcuucugucu

SEQ ID NO: 566474 - RNA, 20 nt, Human
uggaaucagggggguccucu

SEQ ID NO: 566475 - RNA, 21 nt, Human
uggaggggugucuucuggugg

SEQ ID NO: 566476 - RNA, 18 nt, Human
uggccaaagacuuccuca

SEQ ID NO: 566477 - RNA, 23 nt, Human
uggguggaaaugaaaauguuggc

SEQ ID NO: 566478 - RNA, 23 nt, Human
ugguaucugugggucaggaaucc

SEQ ID NO: 566479 - RNA, 25 nt, Human
ugguaucugugggucaggaauccag

SEQ ID NO: 566480 - RNA, 18 nt, Human
uggugggcacucaauugc

SEQ ID NO: 566481 - RNA, 22 nt, Human
uguauuaguuaccuuauuccua

SEQ ID NO: 566482 - RNA, 22 nt, Human
uucacuuacucccagauaucac

SEQ ID NO: 566483 - RNA, 18 nt, Human
uuccagaucacacacuua

SEQ ID NO: 566484 - RNA, 21 nt, Human
uucccuuuuccugggauuaca

SEQ ID NO: 566485 - RNA, 20 nt, Human
uugcauagugcuuggugagg

SEQ ID NO: 566486 - RNA, 21 nt, Human
uuggauuuccuaaauguaaua

SEQ ID NO: 566487 - RNA, 19 nt, Human
uuggcaauaaagccuuuuc

SEQ ID NO: 566488 - RNA, 20 nt, Human
uuggcuucugucugucagaa

SEQ ID NO: 566489 - RNA, 20 nt, Human
uuucaacucacuuagcagca

SEQ ID NO: 566490 - RNA, 22 nt, Human
uuuccugggauuacaaagucac

SEQ ID NO: 566491 - RNA, 24 nt, Human
uuuguuggcuucugucugucagaa

SEQ ID NO: 566492 - RNA, 23 nt, Human
aaauaauaagcaaaauacaucag

SEQ ID NO: 566493 - RNA, 21 nt, Human
aacuaacuuaagcugacccug

SEQ ID NO: 566494 - RNA, 23 nt, Human
acggcggcggcccggcucuccuc

SEQ ID NO: 566495 - RNA, 21 nt, Human
agccgcgcaguccuucagcuc

SEQ ID NO: 566496 - RNA, 22 nt, Human
aguauacacucucuuuauuaug

SEQ ID NO: 566497 - RNA, 20 nt, Human
caccgugcaaugccacaggu

SEQ ID NO: 566498 - RNA, 20 nt, Human
cgcccuucuuccuugggcuu

SEQ ID NO: 566499 - RNA, 26 nt, Human
cggacggcggcaacggcccaguuacc

SEQ ID NO: 566500 - RNA, 24 nt, Human
cggcggcccggcucuccucucagg

SEQ ID NO: 566501 - RNA, 22 nt, Human
cuggcugaggauaaucccuucu

SEQ ID NO: 566502 - RNA, 19 nt, Human
ggcugcagagacggcggcg

SEQ ID NO: 566503 - RNA, 18 nt, Human
gucugaagcaagucgagg

SEQ ID NO: 566504 - RNA, 25 nt, Human
uaauaagcaaaauacaucaggaauu

SEQ ID NO: 566505 - RNA, 23 nt, Human
uaaucccuucuguccacugcacc

SEQ ID NO: 566506 - RNA, 23 nt, Human
uccucucaggcggcggccauguu

SEQ ID NO: 566507 - RNA, 23 nt, Human
ucugguuccgcccuucuuccuug

SEQ ID NO: 566508 - RNA, 21 nt, Human
ucuugcucugugucgucugaa

SEQ ID NO: 566509 - RNA, 20 nt, Human
ugcaaugccacaggucauga

SEQ ID NO: 566510 - RNA, 19 nt, Human
ugcagagacggcggcggcc

SEQ ID NO: 566511 - RNA, 18 nt, Human
uugcucugugucgucuga

SEQ ID NO: 566512 - RNA, 22 nt, Human
aaacuucucuucagguaggucc

SEQ ID NO: 566513 - RNA, 18 nt, Human
aaagcauguacccuucau

SEQ ID NO: 566514 - RNA, 18 nt, Human
aacaaagcaacuccaucu

SEQ ID NO: 566515 - RNA, 22 nt, Human
aaccaaaauacuuucauaaaca

SEQ ID NO: 566516 - RNA, 31 nt, Human
aagcacaguaaaauauucaguaauucaugcc

SEQ ID NO: 566517 - RNA, 23 nt, Human
aagcugcacauacacaugugguu

SEQ ID NO: 566518 - RNA, 22 nt, Human
aauacaaggaaacaccuacuga

SEQ ID NO: 566519 - RNA, 20 nt, Human
acaaaguaaggccuagagac

SEQ ID NO: 566520 - RNA, 20 nt, Human
acaguaaaauauucaguaau

SEQ ID NO: 566521 - RNA, 23 nt, Human
agagaccauuuauaguuguuugc

SEQ ID NO: 566522 - RNA, 18 nt, Human
agagacccaggcggcgcg

SEQ ID NO: 566523 - RNA, 18 nt, Human
agaguuguuuuucuaggg

SEQ ID NO: 566524 - RNA, 21 nt, Human
agaguuguuuuucuaggggac

SEQ ID NO: 566525 - RNA, 21 nt, Human
aggcacaaaagaggguaacaa

SEQ ID NO: 566526 - RNA, 18 nt, Human
agguccugaggcuugaaa

SEQ ID NO: 566527 - RNA, 21 nt, Human
auguaaagcugcacauacaca

SEQ ID NO: 566528 - RNA, 19 nt, Human
auugcaaauugcacuugac

SEQ ID NO: 566529 - RNA, 21 nt, Human
auugcaaauugcacuugacag

SEQ ID NO: 566530 - RNA, 21 nt, Human
caaagcaacuccaucuguagc

SEQ ID NO: 566531 - RNA, 23 nt, Human
caaaguaaggccuagagaccauu

SEQ ID NO: 566532 - RNA, 26 nt, Human
caaccggacuaacucagggagccaaa

SEQ ID NO: 566533 - RNA, 25 nt, Human
caaggaaacaccuacugaauagaac

SEQ ID NO: 566534 - RNA, 23 nt, Human
cacaaaagacaauacaaggaaac

SEQ ID NO: 566535 - RNA, 25 nt, Human
cacaaaagacaauacaaggaaacac

SEQ ID NO: 566536 - RNA, 19 nt, Human
cacacaguccuugagccca

SEQ ID NO: 566537 - RNA, 19 nt, Human
caccacaacaauggaaaac

SEQ ID NO: 566538 - RNA, 25 nt, Human
caccuacggaugagguagagaccca

SEQ ID NO: 566539 - RNA, 22 nt, Human
cacguaaaauaaaauguaaagc

SEQ ID NO: 566540 - RNA, 21 nt, Human
cagggccacaccuacggauga

SEQ ID NO: 566541 - RNA, 23 nt, Human
caguggacccaugguuuuuaaau

SEQ ID NO: 566542 - RNA, 19 nt, Human
caucuguagccucuguccu

SEQ ID NO: 566543 - RNA, 21 nt, Human
caugaauaaaaucuuaaauuc

SEQ ID NO: 566544 - RNA, 22 nt, Human
ccaucuguagccucuguccuuu

SEQ ID NO: 566545 - RNA, 23 nt, Human
cccaugguuuuuaaauaugaggc

SEQ ID NO: 566546 - RNA, 21 nt, Human
cccuucgguucgcagccccgg

SEQ ID NO: 566547 - RNA, 19 nt, Human
ccuacggaugagguagaga

SEQ ID NO: 566548 - RNA, 19 nt, Human
ccuugagcccaaaagugaa

SEQ ID NO: 566549 - RNA, 22 nt, Human
cggcgcggagcgagcccuucgg

SEQ ID NO: 566550 - RNA, 25 nt, Human
cugccacaccaucagggccacaccu

SEQ ID NO: 566551 - RNA, 19 nt, Human
gacaauacaaggaaacacc

SEQ ID NO: 566552 - RNA, 19 nt, Human
gagcccuucgguucgcagc

SEQ ID NO: 566553 - RNA, 21 nt, Human
gcacaacuugagcuacaagaa

SEQ ID NO: 566554 - RNA, 21 nt, Human
gccacaccuacggaugaggua

SEQ ID NO: 566555 - RNA, 23 nt, Human
ggccgcggcgaucgcaaacaacc

SEQ ID NO: 566556 - RNA, 19 nt, Human
guagaguuguuuuucuagg

SEQ ID NO: 566557 - RNA, 21 nt, Human
guagaguuguuuuucuagggg

SEQ ID NO: 566558 - RNA, 19 nt, Human
guccagagccugccacacc

SEQ ID NO: 566559 - RNA, 22 nt, Human
uaaaaaggcacaaaagagggua

SEQ ID NO: 566560 - RNA, 23 nt, Human
uaaaaaggcacaaaagaggguug

SEQ ID NO: 566561 - RNA, 20 nt, Human
uaaaugaaagaaaacaaacc

SEQ ID NO: 566562 - RNA, 23 nt, Human
uaacaguggacccaugguuuuua

SEQ ID NO: 566563 - RNA, 23 nt, Human
uaacucagggagccaaagagcga

SEQ ID NO: 566564 - RNA, 22 nt, Human
uacuguguucaaaugaauguuu

SEQ ID NO: 566565 - RNA, 24 nt, Human
uagagacccaggcggcgcggagcg

SEQ ID NO: 566566 - RNA, 23 nt, Human
uauaaugaauaaggcugcaaaau

SEQ ID NO: 566567 - RNA, 24 nt, Human
ucaacuagaaccacauuuggucac

SEQ ID NO: 566568 - RNA, 18 nt, Human
ucaagaauugauauaagc

SEQ ID NO: 566569 - RNA, 23 nt, Human
ucacauucaaacagucuccaaaa

SEQ ID NO: 566570 - RNA, 19 nt, Human
ucagggccacaccuacgga

SEQ ID NO: 566571 - RNA, 23 nt, Human
ucucaagaauugauauaagccaa

SEQ ID NO: 566572 - RNA, 18 nt, Human
ucugucgagcaauucaug

SEQ ID NO: 566573 - RNA, 23 nt, Human
ugaaaagaagucaacuagaacca

SEQ ID NO: 566574 - RNA, 20 nt, Human
ugaaaugcagcauaugcgau

SEQ ID NO: 566575 - RNA, 24 nt, Human
ugaggcaauuaaaugaaagaaaac

SEQ ID NO: 566576 - RNA, 24 nt, Human
ugagguagagacccaggcggcgcg

SEQ ID NO: 566577 - RNA, 24 nt, Human
ugauauaagccaaagugaaaagaa

SEQ ID NO: 566578 - RNA, 20 nt, Human
ugcacauacacaugugguuu

SEQ ID NO: 566579 - RNA, 19 nt, Human
uggcaaaauaaaaaggcac

SEQ ID NO: 566580 - RNA, 19 nt, Human
uggcaaaauaaaaaggcac

SEQ ID NO: 566581 - RNA, 19 nt, Human
uggcaaaauaaaaaggcac

SEQ ID NO: 566582 - RNA, 19 nt, Human
uguagaguuguuuuucuag

SEQ ID NO: 566583 - RNA, 18 nt, Human
uguguucaaaugaauguu

SEQ ID NO: 566584 - RNA, 21 nt, Human
uucuaugccaugcacaugaau

SEQ ID NO: 566585 - RNA, 18 nt, Human
uuuauuucuucauaagca

SEQ ID NO: 566586 - RNA, 25 nt, Human
aaauaaccaagagggaaaauuaaac

SEQ ID NO: 566587 - RNA, 24 nt, Human
aaccaagagggaaaauuaaaccca

SEQ ID NO: 566588 - RNA, 21 nt, Human
aagagccagaauucuaagaua

SEQ ID NO: 566589 - RNA, 22 nt, Human
accaguauuuaaaauacaugca

SEQ ID NO: 566590 - RNA, 20 nt, Human
agaaauccagaacaaacagc

SEQ ID NO: 566591 - RNA, 21 nt, Human
agaacaaacagcauaugaaug

SEQ ID NO: 566592 - RNA, 30 nt, Human
augaaggaaaaugcauggauugaaaccucu

SEQ ID NO: 566593 - RNA, 21 nt, Human
caagaggaguuaacuggggca

SEQ ID NO: 566594 - RNA, 23 nt, Human
cagaauucuaagauauagccaag

SEQ ID NO: 566595 - RNA, 18 nt, Human
gcuuuuacaauauagacu

SEQ ID NO: 566596 - RNA, 23 nt, Human
guaauaauccuuucuacuccucu

SEQ ID NO: 566597 - RNA, 20 nt, Human
uaacaagaggaguuaacugg

SEQ ID NO: 566598 - RNA, 19 nt, Human
uaaccaagagggaaaauua

SEQ ID NO: 566599 - RNA, 18 nt, Human
uaacuggggcagguuaga

SEQ ID NO: 566600 - RNA, 24 nt, Human
uaauaagacucugcacuuuugaaa

SEQ ID NO: 566601 - RNA, 25 nt, Human
uacagaagagauuuaugcuuuuuau

SEQ ID NO: 566602 - RNA, 20 nt, Human
ucccugugguuuauaaaagu

SEQ ID NO: 566603 - RNA, 18 nt, Human
uugcuguacauuuucuug

SEQ ID NO: 566604 - RNA, 19 nt, Human
uuuaagcauucccuuugug

SEQ ID NO: 566605 - RNA, 23 nt, Human
uuuaggcuuuuacaauauagacu

SEQ ID NO: 566606 - RNA, 23 nt, Human
uuugcuguacauuuucuuggcau

SEQ ID NO: 566607 - RNA, 25 nt, Human
aaaaaguccuaaccaaaaaaaaucc

SEQ ID NO: 566608 - RNA, 19 nt, Human
aaaguacuuuuauucacuu

SEQ ID NO: 566609 - RNA, 20 nt, Human
aagaaaaauuugugacucuc

SEQ ID NO: 566610 - RNA, 22 nt, Human
aagcaaagaggacaaaaccuaa

SEQ ID NO: 566611 - RNA, 18 nt, Human
acaaaaccuaaaagcuca

SEQ ID NO: 566612 - RNA, 23 nt, Human
acuaguuuacaggggcaagcauu

SEQ ID NO: 566613 - RNA, 22 nt, Human
agcaaagaggacaaaaccuaaa

SEQ ID NO: 566614 - RNA, 23 nt, Human
agcaaagaggacaaaaccuaaaa

SEQ ID NO: 566615 - RNA, 19 nt, Human
agggaggcuaagcgagguu

SEQ ID NO: 566616 - RNA, 27 nt, Human
aguaaaaaggaacuucaaaaaaagucc

SEQ ID NO: 566617 - RNA, 18 nt, Human
augagaaacaugauuuga

SEQ ID NO: 566618 - RNA, 21 nt, Human
caaaaaaaguccuaaccaaaa

SEQ ID NO: 566619 - RNA, 25 nt, Human
caaaaaaaguccuaaccaaaaaaaa

SEQ ID NO: 566620 - RNA, 23 nt, Human
ccaaaugaugcaugaaaucaagu

SEQ ID NO: 566621 - RNA, 18 nt, Human
ccagcaauaacagcccgg

SEQ ID NO: 566622 - RNA, 19 nt, Human
ccucuguccuaagugaaua

SEQ ID NO: 566623 - RNA, 18 nt, Human
ccuguggcagaacucuag

SEQ ID NO: 566624 - RNA, 22 nt, Human
cucacuaguuuacaggggcaag

SEQ ID NO: 566625 - RNA, 21 nt, Human
cucaggcugaaacacugaaga

SEQ ID NO: 566626 - RNA, 20 nt, Human
gauuccagcaauaacagccc

SEQ ID NO: 566627 - RNA, 20 nt, Human
guccuaaccaaaaaaaaucc

SEQ ID NO: 566628 - RNA, 21 nt, Human
uacacauuagcaggaagggag

SEQ ID NO: 566629 - RNA, 25 nt, Human
uaccucuguccuaagugaauaaucu

SEQ ID NO: 566630 - RNA, 19 nt, Human
ucacaccuaaguaaaaagg

SEQ ID NO: 566631 - RNA, 20 nt, Human
ucuggguaugagaaacauga

SEQ ID NO: 566632 - RNA, 20 nt, Human
ucuugcaggcauucagaagc

SEQ ID NO: 566633 - RNA, 18 nt, Human
ugaaaacacuaaaccacu

SEQ ID NO: 566634 - RNA, 22 nt, Human
ugaaaacacuaaaccacuauau

SEQ ID NO: 566635 - RNA, 21 nt, Human
ugaaaucaagucaaaauuggg

SEQ ID NO: 566636 - RNA, 21 nt, Human
ugagaaacaugauuugaaaac

SEQ ID NO: 566637 - RNA, 23 nt, Human
ugaugaggaugaugaagcaaaug

SEQ ID NO: 566638 - RNA, 23 nt, Human
ugcuacuccucacuauauuaugu

SEQ ID NO: 566639 - RNA, 24 nt, Human
uggauuccuuccaucuaaagacuu

SEQ ID NO: 566640 - RNA, 23 nt, Human
uggcagaacucuagaucugacuu

SEQ ID NO: 566641 - RNA, 20 nt, Human
uggggaagcaaagaggacaa

SEQ ID NO: 566642 - RNA, 21 nt, Human
uggguaucuuuuaucuguuuc

SEQ ID NO: 566643 - RNA, 21 nt, Human
uucucuugaugaggaugauga

SEQ ID NO: 566644 - RNA, 24 nt, Human
uugaaaacacuaaaccacuauauu

SEQ ID NO: 566645 - RNA, 22 nt, Human
uuugaaaacacuaaaccacuau

SEQ ID NO: 566646 - RNA, 25 nt, Human
agcaaaaaucacuuuacguacucau

SEQ ID NO: 566647 - RNA, 21 nt, Human
auuacaugcauaaaacuauaa

SEQ ID NO: 566648 - RNA, 23 nt, Human
cauacugaaaauguuuacauuua

SEQ ID NO: 566649 - RNA, 21 nt, Human
uacacagagagcaaaaaucac

SEQ ID NO: 566650 - RNA, 25 nt, Human
aaaaaacaaaaucuuccccaccgcu

SEQ ID NO: 566651 - RNA, 19 nt, Human
aaaccaauccugagauccu

SEQ ID NO: 566652 - RNA, 26 nt, Human
aaaccaauccugagauccuaagcugg

SEQ ID NO: 566653 - RNA, 21 nt, Human
aaagcacacccaggugugcua

SEQ ID NO: 566654 - RNA, 21 nt, Human
aacaaaaucuuccccaccgcu

SEQ ID NO: 566655 - RNA, 21 nt, Human
aacuagaacuuggaacucugg

SEQ ID NO: 566656 - RNA, 21 nt, Human
aagaacacuuaagaacagccc

SEQ ID NO: 566657 - RNA, 20 nt, Human
aaggacgacaaugucacugu

SEQ ID NO: 566658 - RNA, 18 nt, Human
aaguacccaucaauuacu

SEQ ID NO: 566659 - RNA, 20 nt, Human
aaguagcugggacuacaggc

SEQ ID NO: 566660 - RNA, 22 nt, Human
aaguagcugggacuacaggcau

SEQ ID NO: 566661 - RNA, 24 nt, Human
aaguagcugggacuacaggcaugc

SEQ ID NO: 566662 - RNA, 18 nt, Human
aaucguucacuagcugcu

SEQ ID NO: 566663 - RNA, 18 nt, Human
aaugcaaacaaaccauga

SEQ ID NO: 566664 - RNA, 18 nt, Human
acaaagccagccaggacc

SEQ ID NO: 566665 - RNA, 26 nt, Human
acacagaaaauaaagaaaagggaccc

SEQ ID NO: 566666 - RNA, 20 nt, Human
acaccugcuaguugcucuuc

SEQ ID NO: 566667 - RNA, 18 nt, Human
acaggauuccuagucucu

SEQ ID NO: 566668 - RNA, 18 nt, Human
accauguuggucaggcug

SEQ ID NO: 566669 - RNA, 24 nt, Human
acccaguuaauuuuuguauuuuua

SEQ ID NO: 566670 - RNA, 18 nt, Human
accggacacaagguucua

SEQ ID NO: 566671 - RNA, 20 nt, Human
accugcccacaucuugaagc

SEQ ID NO: 566672 - RNA, 23 nt, Human
acucacgaucguaugaauuugcu

SEQ ID NO: 566673 - RNA, 22 nt, Human
agaaaaaacaaaaucuucccca

SEQ ID NO: 566674 - RNA, 21 nt, Human
agaagguagcagaggcucaga

SEQ ID NO: 566675 - RNA, 18 nt, Human
agccggugguccccagca

SEQ ID NO: 566676 - RNA, 22 nt, Human
agccuggacaacguagugaaac

SEQ ID NO: 566677 - RNA, 20 nt, Human
agcguaaugcugagagccgg

SEQ ID NO: 566678 - RNA, 23 nt, Human
aggaguccaagaccagccuggac

SEQ ID NO: 566679 - RNA, 24 nt, Human
aggauugcuugaggccaggagucc

SEQ ID NO: 566680 - RNA, 24 nt, Human
aggcugaggugggaggauugcuug

SEQ ID NO: 566681 - RNA, 25 nt, Human
aggcuggagugcaguggcgcgaucu

SEQ ID NO: 566682 - RNA, 24 nt, Human
aggggccgggugcaguggcucacg

SEQ ID NO: 566683 - RNA, 23 nt, Human
aggugggaggauugcuugaggcc

SEQ ID NO: 566684 - RNA, 19 nt, Human
agguucuagaagcuagcuu

SEQ ID NO: 566685 - RNA, 22 nt, Human
aguagagaugggguuucaccau

SEQ ID NO: 566686 - RNA, 19 nt, Human
agugacaggacaacucaga

SEQ ID NO: 566687 - RNA, 20 nt, Human
agugcaguggcgcgaucucg

SEQ ID NO: 566688 - RNA, 24 nt, Human
agugcaguggcgcgaucucgacuc

SEQ ID NO: 566689 - RNA, 19 nt, Human
aguggcucacgccuauaau

SEQ ID NO: 566690 - RNA, 24 nt, Human
aguggcucacgccuauaauuuugg

SEQ ID NO: 566691 - RNA, 18 nt, Human
augcaccuauacccaaaa

SEQ ID NO: 566692 - RNA, 19 nt, Human
augcgcaccacugcaccca

SEQ ID NO: 566693 - RNA, 21 nt, Human
augggguuucaccauguuggu

SEQ ID NO: 566694 - RNA, 24 nt, Human
augggguuucaccauguuggucag

SEQ ID NO: 566695 - RNA, 21 nt, Human
auucuccugccucagccuccc

SEQ ID NO: 566696 - RNA, 23 nt, Human
auugccacaaagcacacccaggu

SEQ ID NO: 566697 - RNA, 24 nt, Human
auuuuuguauuuuuaguagagaug

SEQ ID NO: 566698 - RNA, 20 nt, Human
caaacaaaccaugauuccca

SEQ ID NO: 566699 - RNA, 20 nt, Human
caaacaacaucuaaccagca

SEQ ID NO: 566700 - RNA, 25 nt, Human
caaagagaugcccacagcguaaugc

SEQ ID NO: 566701 - RNA, 21 nt, Human
caaaguagucugaggcaaggc

SEQ ID NO: 566702 - RNA, 19 nt, Human
caaauccuaagccugccca

SEQ ID NO: 566703 - RNA, 19 nt, Human
caacucuucagauacagga

SEQ ID NO: 566704 - RNA, 22 nt, Human
caagcaauucuccugccucagc

SEQ ID NO: 566705 - RNA, 27 nt, Human
caagcaauucuccugccucagccuccc

SEQ ID NO: 566706 - RNA, 25 nt, Human
caaggcaaagaaauacaaacugagc

SEQ ID NO: 566707 - RNA, 23 nt, Human
cacauaacgucccucauaguuaa

SEQ ID NO: 566708 - RNA, 18 nt, Human
caccauguuggucaggcu

SEQ ID NO: 566709 - RNA, 24 nt, Human
caccgaggcuggagugcaguggcg

SEQ ID NO: 566710 - RNA, 19 nt, Human
caccugcuaguugcucuuc

SEQ ID NO: 566711 - RNA, 23 nt, Human
cacugaaacuaggccugggcaac

SEQ ID NO: 566712 - RNA, 18 nt, Human
cacugcaaccucugccuc

SEQ ID NO: 566713 - RNA, 21 nt, Human
cacugcaaccucugccuccca

SEQ ID NO: 566714 - RNA, 24 nt, Human
cacugcacccaguuaauuuuugua

SEQ ID NO: 566715 - RNA, 18 nt, Human
cacuucacaccuggaaca

SEQ ID NO: 566716 - RNA, 21 nt, Human
cagaaaaugcuugaugcccac

SEQ ID NO: 566717 - RNA, 22 nt, Human
cagaaucagaacuacuagacac

SEQ ID NO: 566718 - RNA, 19 nt, Human
cagcaugccuucaagguuu

SEQ ID NO: 566719 - RNA, 21 nt, Human
cagcuccagauuccucugccu

SEQ ID NO: 566720 - RNA, 18 nt, Human
caggaguccaagaccagc

SEQ ID NO: 566721 - RNA, 27 nt, Human
caggcccaaagacaaagccagccagga

SEQ ID NO: 566722 - RNA, 22 nt, Human
caucaaaucaguaccaagacga

SEQ ID NO: 566723 - RNA, 18 nt, Human
ccaaagacaaagccagcc

SEQ ID NO: 566724 - RNA, 18 nt, Human
ccacugcacccaguuaau

SEQ ID NO: 566725 - RNA, 21 nt, Human
ccaggcccaaagacaaagccc

SEQ ID NO: 566726 - RNA, 18 nt, Human
ccaucacugggccugcca

SEQ ID NO: 566727 - RNA, 19 nt, Human
cccaaagagaugcccacag

SEQ ID NO: 566728 - RNA, 23 nt, Human
cccaagaaauggauaauguagau

SEQ ID NO: 566729 - RNA, 23 nt, Human
cccaaguagcugggacuacaggc

SEQ ID NO: 566730 - RNA, 24 nt, Human
cccaaguagcugggacuacaggca

SEQ ID NO: 566731 - RNA, 23 nt, Human
cccagaaaaugcuugaugcccac

SEQ ID NO: 566732 - RNA, 24 nt, Human
cccaggguucaagcaauucuccug

SEQ ID NO: 566733 - RNA, 21 nt, Human
ccccagaaaaugcuugaugcc

SEQ ID NO: 566734 - RNA, 22 nt, Human
ccucauaguuaagucucuugcu

SEQ ID NO: 566735 - RNA, 19 nt, Human
ccucauccauagaagcaga

SEQ ID NO: 566736 - RNA, 25 nt, Human
ccucccaggguucaagcaauucucc

SEQ ID NO: 566737 - RNA, 23 nt, Human
ccugccucagccucccaaguagc

SEQ ID NO: 566738 - RNA, 24 nt, Human
ccugccucagccucccaaguagcu

SEQ ID NO: 566739 - RNA, 25 nt, Human
cgacaaugucacugugccuggcuuu

SEQ ID NO: 566740 - RNA, 21 nt, Human
cggugguccccagcauugguc

SEQ ID NO: 566741 - RNA, 22 nt, Human
cguggaaaugcaccuauaccca

SEQ ID NO: 566742 - RNA, 22 nt, Human
cuaaaauauuaaagggucauua

SEQ ID NO: 566743 - RNA, 24 nt, Human
cuagaaucauacuaaugcaaacaa

SEQ ID NO: 566744 - RNA, 22 nt, Human
cucacgaucguaugaauuugcu

SEQ ID NO: 566745 - RNA, 24 nt, Human
cucacgccuauaauuuuggcacuu

SEQ ID NO: 566746 - RNA, 24 nt, Human
cucacugcaaccucugccucccag

SEQ ID NO: 566747 - RNA, 24 nt, Human
cucacugcaaccucugccucccag

SEQ ID NO: 566748 - RNA, 24 nt, Human
cucagccucccaaguagcugggac

SEQ ID NO: 566749 - RNA, 23 nt, Human
cucuucuaaaaugacagcuccag

SEQ ID NO: 566750 - RNA, 18 nt, Human
cucuugguggcaaucugc

SEQ ID NO: 566751 - RNA, 21 nt, Human
cugaaaguaagcauccaaugg

SEQ ID NO: 566752 - RNA, 25 nt, Human
cugcaaccucugccucccaggguuc

SEQ ID NO: 566753 - RNA, 21 nt, Human
cugcuuuuuaauuccaauccu

SEQ ID NO: 566754 - RNA, 19 nt, Human
cuggaacacaaguguuauu

SEQ ID NO: 566755 - RNA, 25 nt, Human
cuggcuagaaaaaacaaaaucuucc

SEQ ID NO: 566756 - RNA, 21 nt, Human
cuugcucugucaccgaggcug

SEQ ID NO: 566757 - RNA, 24 nt, Human
cuugcucugucaccgaggcuggag

SEQ ID NO: 566758 - RNA, 21 nt, Human
gaaaagguuagggaggcaaau

SEQ ID NO: 566759 - RNA, 20 nt, Human
gaaaguaagcauccaauggu

SEQ ID NO: 566760 - RNA, 23 nt, Human
gacagcuccagauuccucugccu

SEQ ID NO: 566761 - RNA, 22 nt, Human
gaccugaccaccuguauccucu

SEQ ID NO: 566762 - RNA, 25 nt, Human
gacuacaggcaugcgcaccacugca

SEQ ID NO: 566763 - RNA, 24 nt, Human
gagaugggguuucaccauguuggu

SEQ ID NO: 566764 - RNA, 22 nt, Human
gaggugggaggauugcuugagg

SEQ ID NO: 566765 - RNA, 20 nt, Human
gcaaggcaaagaaauacaaa

SEQ ID NO: 566766 - RNA, 19 nt, Human
gcacuuuaggaggcugagg

SEQ ID NO: 566767 - RNA, 22 nt, Human
gcacuuuaggaggcugaggugg

SEQ ID NO: 566768 - RNA, 23 nt, Human
gcacuuuaggaggcugagguggg

SEQ ID NO: 566769 - RNA, 24 nt, Human
gccacugaaacuaggccugggcaa

SEQ ID NO: 566770 - RNA, 19 nt, Human
gccugcccaggcccaaaga

SEQ ID NO: 566771 - RNA, 20 nt, Human
gccuggacaacguagugaaa

SEQ ID NO: 566772 - RNA, 19 nt, Human
gcuggagugcaguggcgcg

SEQ ID NO: 566773 - RNA, 19 nt, Human
gcuuugaccuaucacucau

SEQ ID NO: 566774 - RNA, 19 nt, Human
ggaacacaaguguuauugc

SEQ ID NO: 566775 - RNA, 22 nt, Human
ggacuacaggcaugcgcaccac

SEQ ID NO: 566776 - RNA, 20 nt, Human
ggagauggcuguuuggggag

SEQ ID NO: 566777 - RNA, 21 nt, Human
ggauaaaaccaauccugaggg

SEQ ID NO: 566778 - RNA, 23 nt, Human
ggcacuuuaggaggcugaggugg

SEQ ID NO: 566779 - RNA, 19 nt, Human
ggccgggugcaguggcuca

SEQ ID NO: 566780 - RNA, 18 nt, Human
gggaaaucuagugcaaca

SEQ ID NO: 566781 - RNA, 20 nt, Human
ggggcugcuaggcgcuagca

SEQ ID NO: 566782 - RNA, 22 nt, Human
gggguuucaccauguuggucag

SEQ ID NO: 566783 - RNA, 24 nt, Human
gggugcaguggcucacgccuauaa

SEQ ID NO: 566784 - RNA, 23 nt, Human
guagagaugggguuucaccaugu

SEQ ID NO: 566785 - RNA, 25 nt, Human
gucacacagaaaauaaagaaaauaa

SEQ ID NO: 566786 - RNA, 21 nt, Human
gucaggcuggacaaggcuuuu

SEQ ID NO: 566787 - RNA, 21 nt, Human
uaaaaccaauccugagauccu

SEQ ID NO: 566788 - RNA, 26 nt, Human
uaaaaggcacaacuagaacuuggaac

SEQ ID NO: 566789 - RNA, 22 nt, Human
uaaaaugacagcuccagauucc

SEQ ID NO: 566790 - RNA, 23 nt, Human
uaaacccaagaaauggauaaugu

SEQ ID NO: 566791 - RNA, 21 nt, Human
uaaaguacccaucaauuacuc

SEQ ID NO: 566792 - RNA, 24 nt, Human
uaacgucccucauaguuaagucuc

SEQ ID NO: 566793 - RNA, 18 nt, Human
uaacuggauaacuggaau

SEQ ID NO: 566794 - RNA, 25 nt, Human
uaacuucuugcucugcugagacacc

SEQ ID NO: 566795 - RNA, 22 nt, Human
uaagaacagccccucagucuga

SEQ ID NO: 566796 - RNA, 23 nt, Human
uaagauucacauaacgucccuca

SEQ ID NO: 566797 - RNA, 19 nt, Human
uaagccugcccaggcccaa

SEQ ID NO: 566798 - RNA, 19 nt, Human
uaagcuggcuagaaaaaac

SEQ ID NO: 566799 - RNA, 24 nt, Human
uaauuuuuguauuuuuaguagaga

SEQ ID NO: 566800 - RNA, 26 nt, Human
uacaauaaugguuaaugaaggcuuua

SEQ ID NO: 566801 - RNA, 26 nt, Human
uacaggcaugcgcaccacugcaccca

SEQ ID NO: 566802 - RNA, 26 nt, Human
uacuagacaccugcaacucuucagau

SEQ ID NO: 566803 - RNA, 23 nt, Human
uagaaaaaacaaaaucuucccca

SEQ ID NO: 566804 - RNA, 20 nt, Human
uagaagcagaagguagcaga

SEQ ID NO: 566805 - RNA, 26 nt, Human
uagaaucauacuaaugcaaacaaagu

SEQ ID NO: 566806 - RNA, 22 nt, Human
uagagaugggguuucaccaugu

SEQ ID NO: 566807 - RNA, 18 nt, Human
uagcugcuuccaucacug

SEQ ID NO: 566808 - RNA, 22 nt, Human
uaggaggcugaggugggaggau

SEQ ID NO: 566809 - RNA, 24 nt, Human
uaggaggcugaggugggaggauug

SEQ ID NO: 566810 - RNA, 24 nt, Human
uaguagagaugggguuucaccaug

SEQ ID NO: 566811 - RNA, 26 nt, Human
uaguagagaugggguuucaccauguu

SEQ ID NO: 566812 - RNA, 21 nt, Human
ucaacaaccccuccauacucu

SEQ ID NO: 566813 - RNA, 21 nt, Human
ucacacagaaaauaaagaaaa

SEQ ID NO: 566814 - RNA, 22 nt, Human
ucaccugaaaguaagcauccaa

SEQ ID NO: 566815 - RNA, 18 nt, Human
ucacugcaaccucugccu

SEQ ID NO: 566816 - RNA, 19 nt, Human
ucacugcaaccucugccuc

SEQ ID NO: 566817 - RNA, 24 nt, Human
ucacugcaaccucugccucccagg

SEQ ID NO: 566818 - RNA, 24 nt, Human
ucacugcaaccucugccucccagg

SEQ ID NO: 566819 - RNA, 25 nt, Human
ucacugcaaccucugccucccaggg

SEQ ID NO: 566820 - RNA, 21 nt, Human
ucagaaauaaaccggacacaa

SEQ ID NO: 566821 - RNA, 20 nt, Human
ucagccucccaaguagcugg

SEQ ID NO: 566822 - RNA, 19 nt, Human
ucagccuucaaggucagaa

SEQ ID NO: 566823 - RNA, 24 nt, Human
ucccaaguagcugggacuacaggc

SEQ ID NO: 566824 - RNA, 22 nt, Human
ucccaggguucaagcaauucuc

SEQ ID NO: 566825 - RNA, 24 nt, Human
ucccaggguucaagcaauucuccc

SEQ ID NO: 566826 - RNA, 25 nt, Human
uccccagaaaaugcuugaugcccac

SEQ ID NO: 566827 - RNA, 20 nt, Human
uccuaagccugcccaggccc

SEQ ID NO: 566828 - RNA, 23 nt, Human
ucguacuuguccuuuaagccacg

SEQ ID NO: 566829 - RNA, 22 nt, Human
ucguaugaauuugcuuccaaaa

SEQ ID NO: 566830 - RNA, 26 nt, Human
ucuccugccucagccucccaaguagc

SEQ ID NO: 566831 - RNA, 18 nt, Human
ucuugcucugucaccgaa

SEQ ID NO: 566832 - RNA, 23 nt, Human
ucuugcucugucaccgaggcugg

SEQ ID NO: 566833 - RNA, 24 nt, Human
ucuugcucugucaccgaggcugga

SEQ ID NO: 566834 - RNA, 23 nt, Human
ugaaacaucuauuucuacaaaaa

SEQ ID NO: 566835 - RNA, 19 nt, Human
ugaacaggacacugaccug

SEQ ID NO: 566836 - RNA, 22 nt, Human
ugagauggagucuugcucuguc

SEQ ID NO: 566837 - RNA, 21 nt, Human
ugaggcaaggcaaagaaauac

SEQ ID NO: 566838 - RNA, 20 nt, Human
ugaggugggaggauugcuug

SEQ ID NO: 566839 - RNA, 23 nt, Human
ugaggugggaggauugcuugagg

SEQ ID NO: 566840 - RNA, 24 nt, Human
ugaggugggaggauugcuugaggc

SEQ ID NO: 566841 - RNA, 26 nt, Human
ugaggugggaggauugcuugaggcca

SEQ ID NO: 566842 - RNA, 21 nt, Human
ugcaacaaccccuugccggag

SEQ ID NO: 566843 - RNA, 22 nt, Human
ugcagacaauaaacagggaucu

SEQ ID NO: 566844 - RNA, 18 nt, Human
ugcccaggcccaaagaca

SEQ ID NO: 566845 - RNA, 24 nt, Human
ugccucagccucccaaguagcugg

SEQ ID NO: 566846 - RNA, 21 nt, Human
ugcgcaccacugcacccaguu

SEQ ID NO: 566847 - RNA, 24 nt, Human
ugcucugucaccgaggcuggagug

SEQ ID NO: 566848 - RNA, 20 nt, Human
uggaaaugcaccuauaccca

SEQ ID NO: 566849 - RNA, 19 nt, Human
uggaacucuggggaaaucu

SEQ ID NO: 566850 - RNA, 20 nt, Human
uggaacucuggggaaaucua

SEQ ID NO: 566851 - RNA, 21 nt, Human
uggagucuugcucugucaccg

SEQ ID NO: 566852 - RNA, 23 nt, Human
uggagugcaguggcgcgaucucg

SEQ ID NO: 566853 - RNA, 24 nt, Human
uggcaaaguagucugaggcaaggc

SEQ ID NO: 566854 - RNA, 19 nt, Human
uggcaaucugcugaagcca

SEQ ID NO: 566855 - RNA, 24 nt, Human
uggcucacgccuauaauuuuggca

SEQ ID NO: 566856 - RNA, 23 nt, Human
ugggacuacaggcaugcgcacca

SEQ ID NO: 566857 - RNA, 26 nt, Human
ugggacuacaggcaugcgcaccacug

SEQ ID NO: 566858 - RNA, 23 nt, Human
uggggagauggcuguuuggggag

SEQ ID NO: 566859 - RNA, 24 nt, Human
ugggguuucaccauguuggucagg

SEQ ID NO: 566860 - RNA, 23 nt, Human
uguauaaagaacacuuaagaaca

SEQ ID NO: 566861 - RNA, 21 nt, Human
ugucaccgaggcuggagugca

SEQ ID NO: 566862 - RNA, 25 nt, Human
ugucauauuccccagaaaaugcuug

SEQ ID NO: 566863 - RNA, 28 nt, Human
uuaaugcacuaggcauuagcaaagggaa

SEQ ID NO: 566864 - RNA, 23 nt, Human
uuaauuuuuguauuuuuaguaga

SEQ ID NO: 566865 - RNA, 18 nt, Human
uuaguagagaugggguuu

SEQ ID NO: 566866 - RNA, 22 nt, Human
uuaguagagaugggguuucacc

SEQ ID NO: 566867 - RNA, 24 nt, Human
uuaguagagaugggguuucaccau

SEQ ID NO: 566868 - RNA, 19 nt, Human
uucaaauaggggccgggug

SEQ ID NO: 566869 - RNA, 21 nt, Human
uucaagcaauucuccugccuc

SEQ ID NO: 566870 - RNA, 24 nt, Human
uucaagcaauucuccugccucagc

SEQ ID NO: 566871 - RNA, 20 nt, Human
uucaaggucagaaauaaacc

SEQ ID NO: 566872 - RNA, 23 nt, Human
uucuagaagcuagcuuuuacaaa

SEQ ID NO: 566873 - RNA, 22 nt, Human
uucuugcucugcugagacaccu

SEQ ID NO: 566874 - RNA, 21 nt, Human
uugagauggagucuugcucug

SEQ ID NO: 566875 - RNA, 23 nt, Human
uugcuugaggccaggaguccaag

SEQ ID NO: 566876 - RNA, 22 nt, Human
uuggcacuuuaggaggcugagg

SEQ ID NO: 566877 - RNA, 24 nt, Human
uuguacaaguguccccuucuuccu

SEQ ID NO: 566878 - RNA, 23 nt, Human
uuguauuuuuaguagagaugggg

SEQ ID NO: 566879 - RNA, 21 nt, Human
uuucaccauguuggucaggcu

SEQ ID NO: 566880 - RNA, 24 nt, Human
uuuuuaguagagaugggguuucac

SEQ ID NO: 566881 - RNA, 20 nt, Human
uuuuuguauuuuuaguagag

SEQ ID NO: 566882 - RNA, 27 nt, Human
uuuuuuuuuuuuuuuuuuuuuuugggg

SEQ ID NO: 566883 - RNA, 23 nt, Human
aaaaauuuuuuuaaaacaagagg

SEQ ID NO: 566884 - RNA, 24 nt, Human
accagcccacacacucgcacacac

SEQ ID NO: 566885 - RNA, 18 nt, Human
acgagagccgggcguggc

SEQ ID NO: 566886 - RNA, 19 nt, Human
agacgucggggucgucggc

SEQ ID NO: 566887 - RNA, 24 nt, Human
agagcagacccuggcagaucagga

SEQ ID NO: 566888 - RNA, 21 nt, Human
aggccacaggcccacagugcc

SEQ ID NO: 566889 - RNA, 20 nt, Human
agugcccauugagugagacc

SEQ ID NO: 566890 - RNA, 19 nt, Human
augacacccuggucagugc

SEQ ID NO: 566891 - RNA, 18 nt, Human
auggagccguccuccucu

SEQ ID NO: 566892 - RNA, 20 nt, Human
auucacacaccagcccacac

SEQ ID NO: 566893 - RNA, 26 nt, Human
caagagguuuuccuuugcucuggccc

SEQ ID NO: 566894 - RNA, 28 nt, Human
cacacacucgcacacacucacacgcaca

SEQ ID NO: 566895 - RNA, 21 nt, Human
caccagcccacacacucgcac

SEQ ID NO: 566896 - RNA, 21 nt, Human
cagccgaggcacgggcagcag

SEQ ID NO: 566897 - RNA, 22 nt, Human
caucucguaaauggagccgucc

SEQ ID NO: 566898 - RNA, 21 nt, Human
ccaaaacacucugaaaaaaau

SEQ ID NO: 566899 - RNA, 20 nt, Human
ccaaagcugcgccaucagca

SEQ ID NO: 566900 - RNA, 21 nt, Human
ccaaagcugcgccaucagcag

SEQ ID NO: 566901 - RNA, 24 nt, Human
ccaagcccuaaaacuccuccccaa

SEQ ID NO: 566902 - RNA, 23 nt, Human
ccagagcuccaauauguacagac

SEQ ID NO: 566903 - RNA, 22 nt, Human
ccagauguguccucccucuccc

SEQ ID NO: 566904 - RNA, 22 nt, Human
ccagcccacacacucgcacaca

SEQ ID NO: 566905 - RNA, 20 nt, Human
ccauuuccuccagauguguc

SEQ ID NO: 566906 - RNA, 26 nt, Human
cccaagcccuaaaacuccuccccaaa

SEQ ID NO: 566907 - RNA, 18 nt, Human
ccccaagcccuaaaacuc

SEQ ID NO: 566908 - RNA, 21 nt, Human
ccccaagcccuaaaacuccuc

SEQ ID NO: 566909 - RNA, 18 nt, Human
ccccucagccuccuccug

SEQ ID NO: 566910 - RNA, 21 nt, Human
cccgucuggcuuguccuccuc

SEQ ID NO: 566911 - RNA, 19 nt, Human
cccgugcagguccuagagc

SEQ ID NO: 566912 - RNA, 25 nt, Human
cccucagccuccuccuggucacucc

SEQ ID NO: 566913 - RNA, 24 nt, Human
cccuggucagugcccacccagagc

SEQ ID NO: 566914 - RNA, 18 nt, Human
ccgccggagaugauggcc

SEQ ID NO: 566915 - RNA, 22 nt, Human
ccuaaaacuccuccccaaaaca

SEQ ID NO: 566916 - RNA, 23 nt, Human
ccugcagcugugcccucugaggg

SEQ ID NO: 566917 - RNA, 24 nt, Human
ccugugaucuuggggaugccuucc

SEQ ID NO: 566918 - RNA, 22 nt, Human
cgcacacacucacacgcacaca

SEQ ID NO: 566919 - RNA, 27 nt, Human
cgcacacacucacacgcacacacccuu

SEQ ID NO: 566920 - RNA, 24 nt, Human
cgcuagggcccaaacaagugauac

SEQ ID NO: 566921 - RNA, 22 nt, Human
cucacacgcacacacccuucca

SEQ ID NO: 566922 - RNA, 21 nt, Human
cucagcccggggccccucagc

SEQ ID NO: 566923 - RNA, 23 nt, Human
cucccucuccccaagcccuaaaa

SEQ ID NO: 566924 - RNA, 19 nt, Human
cucgcugugcuccaaagcu

SEQ ID NO: 566925 - RNA, 25 nt, Human
cugugcuccaaagcugcgccaucag

SEQ ID NO: 566926 - RNA, 21 nt, Human
gacccuggcagaucaggaggc

SEQ ID NO: 566927 - RNA, 19 nt, Human
gaggaugcccuucuugcgg

SEQ ID NO: 566928 - RNA, 24 nt, Human
gaguccaggcccauccacaagucc

SEQ ID NO: 566929 - RNA, 18 nt, Human
gcaguugugagguuuugu

SEQ ID NO: 566930 - RNA, 27 nt, Human
gcccuaaaacuccuccccaaaacacuc

SEQ ID NO: 566931 - RNA, 21 nt, Human
gccugcagcugugcccucuga

SEQ ID NO: 566932 - RNA, 20 nt, Human
gcgggucagcucucggccca

SEQ ID NO: 566933 - RNA, 26 nt, Human
ggcccaaacaagugauacugggcuug

SEQ ID NO: 566934 - RNA, 21 nt, Human
gguuuuguguuuuuugcuuuu

SEQ ID NO: 566935 - RNA, 21 nt, Human
uacugcaagaggaugcccuuc

SEQ ID NO: 566936 - RNA, 21 nt, Human
uagauauucacacaccagccc

SEQ ID NO: 566937 - RNA, 23 nt, Human
uagcccugcccgccggagaugau

SEQ ID NO: 566938 - RNA, 23 nt, Human
uauguacagacuuuauuuauaca

SEQ ID NO: 566939 - RNA, 22 nt, Human
uauucacacaccagcccacaca

SEQ ID NO: 566940 - RNA, 19 nt, Human
ucacacgcacacacccuuc

SEQ ID NO: 566941 - RNA, 23 nt, Human
uccaggaggggcguguggcugcc

SEQ ID NO: 566942 - RNA, 20 nt, Human
uccccaaaacacucugaaaa

SEQ ID NO: 566943 - RNA, 22 nt, Human
uccccaaaacacucugaaaaaa

SEQ ID NO: 566944 - RNA, 18 nt, Human
uccuccccaaaacacucu

SEQ ID NO: 566945 - RNA, 18 nt, Human
uccuugcggugggcgucg

SEQ ID NO: 566946 - RNA, 26 nt, Human
ucgcacacacucacacgcacacaccc

SEQ ID NO: 566947 - RNA, 22 nt, Human
ucgcugugcuccaaagcugcgc

SEQ ID NO: 566948 - RNA, 21 nt, Human
ucucggcccacguggcugucg

SEQ ID NO: 566949 - RNA, 24 nt, Human
ucugaaaaaaauuuuuuuaaaaca

SEQ ID NO: 566950 - RNA, 18 nt, Human
ugaagcaggaguaugaac

SEQ ID NO: 566951 - RNA, 18 nt, Human
ugaggggagaggggaggc

SEQ ID NO: 566952 - RNA, 21 nt, Human
ugccaaaguugcgguagcccu

SEQ ID NO: 566953 - RNA, 23 nt, Human
ugcccagagcgcugccaaaguug

SEQ ID NO: 566954 - RNA, 21 nt, Human
ugccuuggagucccgcuaggg

SEQ ID NO: 566955 - RNA, 20 nt, Human
ugcggugggcgucgcgggcc

SEQ ID NO: 566956 - RNA, 20 nt, Human
ugucaggggccaggaugcug

SEQ ID NO: 566957 - RNA, 21 nt, Human
ugucaggggccaggaugcugg

SEQ ID NO: 566958 - RNA, 22 nt, Human
uugcgggucagcucucggccca

SEQ ID NO: 566959 - RNA, 18 nt, Human
uugugagguuuuguguuu

SEQ ID NO: 566960 - RNA, 19 nt, Human
uuuuguguuuuuugcuuuu

SEQ ID NO: 566961 - RNA, 20 nt, Human
aaaaaccauuacauuucucu

SEQ ID NO: 566962 - RNA, 20 nt, Human
aaaacacaucuguccuaaca

SEQ ID NO: 566963 - RNA, 18 nt, Human
aaaccaagaaaacuggca

SEQ ID NO: 566964 - RNA, 24 nt, Human
aaauacucaaggccacagaaguac

SEQ ID NO: 566965 - RNA, 20 nt, Human
aacuccucccccuaccccau

SEQ ID NO: 566966 - RNA, 23 nt, Human
aacuguaugaggcugcuucucca

SEQ ID NO: 566967 - RNA, 29 nt, Human
aagaaaccaagaaaacuggcagugggcac

SEQ ID NO: 566968 - RNA, 21 nt, Human
aagaaaggggagagaaaacgu

SEQ ID NO: 566969 - RNA, 22 nt, Human
aauuaccuuaccuauaaaaccu

SEQ ID NO: 566970 - RNA, 26 nt, Human
acaaagcagcauaaaaccaauuaaaa

SEQ ID NO: 566971 - RNA, 20 nt, Human
acauucaaaacacaucuguu

SEQ ID NO: 566972 - RNA, 21 nt, Human
accgcgaagagagaagaaagg

SEQ ID NO: 566973 - RNA, 18 nt, Human
agaaaccaagaaaacugg

SEQ ID NO: 566974 - RNA, 19 nt, Human
agaaagacgggagcgaagg

SEQ ID NO: 566975 - RNA, 22 nt, Human
agaagaaaggggagagaaaacg

SEQ ID NO: 566976 - RNA, 25 nt, Human
agaagaaaggggagagaaaacguca

SEQ ID NO: 566977 - RNA, 29 nt, Human
agacagaaacuggucacaaaagggacccc

SEQ ID NO: 566978 - RNA, 22 nt, Human
agacgggagcgaagguggagcu

SEQ ID NO: 566979 - RNA, 19 nt, Human
agagaagaaaggggagaga

SEQ ID NO: 566980 - RNA, 20 nt, Human
agauauaaacucagguuacc

SEQ ID NO: 566981 - RNA, 18 nt, Human
agggcacccgcagcagcc

SEQ ID NO: 566982 - RNA, 18 nt, Human
augaagaucagcaugaau

SEQ ID NO: 566983 - RNA, 23 nt, Human
auucaaaacacaucuguccuaac

SEQ ID NO: 566984 - RNA, 21 nt, Human
caaaacacaucuguccuaaca

SEQ ID NO: 566985 - RNA, 20 nt, Human
caaaaucaacuguaugaggc

SEQ ID NO: 566986 - RNA, 21 nt, Human
caaccccuagcagaaguacca

SEQ ID NO: 566987 - RNA, 19 nt, Human
caacuccucccccuacccc

SEQ ID NO: 566988 - RNA, 21 nt, Human
caagaaaacuggcagucaaga

SEQ ID NO: 566989 - RNA, 23 nt, Human
caauugucuaugaaaauucaagc

SEQ ID NO: 566990 - RNA, 20 nt, Human
cacaacagcaucuuuuuaaa

SEQ ID NO: 566991 - RNA, 23 nt, Human
cacacacaggccggaugcacccu

SEQ ID NO: 566992 - RNA, 18 nt, Human
cacacauauagucagaug

SEQ ID NO: 566993 - RNA, 24 nt, Human
cacauacacaaaaucaacuguaug

SEQ ID NO: 566994 - RNA, 21 nt, Human
cacccugccggaacucugagc

SEQ ID NO: 566995 - RNA, 22 nt, Human
cagaaacuggucacaaaaacca

SEQ ID NO: 566996 - RNA, 22 nt, Human
caggccggaugcacccugccgg

SEQ ID NO: 566997 - RNA, 24 nt, Human
cauguaaucuacaguauacucucc

SEQ ID NO: 566998 - RNA, 21 nt, Human
cauuauagucauuuuauugcu

SEQ ID NO: 566999 - RNA, 20 nt, Human
cauucaaaacacaucugucc

SEQ ID NO: 567000 - RNA, 21 nt, Human
ccaauuagguugaaacaaauu

SEQ ID NO: 567001 - RNA, 25 nt, Human
ccaauuagguugaaacaaauuuuag

SEQ ID NO: 567002 - RNA, 22 nt, Human
ccccacaacuccucccccuacc

SEQ ID NO: 567003 - RNA, 18 nt, Human
cccggguaccggcuuccc

SEQ ID NO: 567004 - RNA, 23 nt, Human
cccuagcagaaguaccagcugcu

SEQ ID NO: 567005 - RNA, 21 nt, Human
cccugccucgcgccacacaca

SEQ ID NO: 567006 - RNA, 23 nt, Human
ccgagaucaaagcgguguuucca

SEQ ID NO: 567007 - RNA, 19 nt, Human
ccuaagaauauccccuuuu

SEQ ID NO: 567008 - RNA, 22 nt, Human
ccucccccuaccccauucccaa

SEQ ID NO: 567009 - RNA, 23 nt, Human
ccucgcgccacacacaggccgga

SEQ ID NO: 567010 - RNA, 23 nt, Human
ccugccggaacucugagccucca

SEQ ID NO: 567011 - RNA, 23 nt, Human
ccuggugcagccgacuggaucca

SEQ ID NO: 567012 - RNA, 26 nt, Human
cgacgccgcaaccgcgaagagagaag

SEQ ID NO: 567013 - RNA, 24 nt, Human
cggaaauaaaauuuuagaagauca

SEQ ID NO: 567014 - RNA, 22 nt, Human
cggggugaagcccuaaagagcc

SEQ ID NO: 567015 - RNA, 22 nt, Human
cgucagcgcuggggccaggacc

SEQ ID NO: 567016 - RNA, 24 nt, Human
cucccccuaccccauucccaauca

SEQ ID NO: 567017 - RNA, 21 nt, Human
cuuacaguugagccuuuuaaa

SEQ ID NO: 567018 - RNA, 24 nt, Human
cuucuccagcuuaguggacaaaua

SEQ ID NO: 567019 - RNA, 20 nt, Human
gaaagcugugucacuacugc

SEQ ID NO: 567020 - RNA, 20 nt, Human
gaaaugcacauuauuccccc

SEQ ID NO: 567021 - RNA, 23 nt, Human
gagaagaaaggggagagaaaacg

SEQ ID NO: 567022 - RNA, 25 nt, Human
ggccaggacccggguaccggcuucc

SEQ ID NO: 567023 - RNA, 21 nt, Human
gguaaugaagaucagcaugaa

SEQ ID NO: 567024 - RNA, 21 nt, Human
ggugcagccgacuggauccag

SEQ ID NO: 567025 - RNA, 24 nt, Human
guaaaauuuucucaaaacuuuuua

SEQ ID NO: 567026 - RNA, 25 nt, Human
guaaaauuuucucaaaacuuuuuaa

SEQ ID NO: 567027 - RNA, 25 nt, Human
guuaccaauuagguugaaacaaauu

SEQ ID NO: 567028 - RNA, 21 nt, Human
uaaaaaauacucaaggccaca

SEQ ID NO: 567029 - RNA, 21 nt, Human
uaaaaaauacucaaggccagu

SEQ ID NO: 567030 - RNA, 21 nt, Human
uaaaagaaggauuuccuguuu

SEQ ID NO: 567031 - RNA, 28 nt, Human
uaacaaagcagcauaaaaccaauuaaaa

SEQ ID NO: 567032 - RNA, 19 nt, Human
uaagaaaccaagaaaacug

SEQ ID NO: 567033 - RNA, 21 nt, Human
uacaacccaaaucaaaguuga

SEQ ID NO: 567034 - RNA, 26 nt, Human
uacacugagaaguguuaaaaucauua

SEQ ID NO: 567035 - RNA, 19 nt, Human
uacaugcagacagaaacug

SEQ ID NO: 567036 - RNA, 22 nt, Human
uaccuauaaaaccuuccauuua

SEQ ID NO: 567037 - RNA, 30 nt, Human
uaccugucccgcaccgccgagaucaaagcu

SEQ ID NO: 567038 - RNA, 25 nt, Human
uacugcuuucugcuuucaauggcuu

SEQ ID NO: 567039 - RNA, 21 nt, Human
uagauacagacuucuuuaacc

SEQ ID NO: 567040 - RNA, 25 nt, Human
uagcaacacagcacaguaaaauuuu

SEQ ID NO: 567041 - RNA, 21 nt, Human
uaggugaccccaaauauuuau

SEQ ID NO: 567042 - RNA, 24 nt, Human
uauaaugguacauucaaaacacau

SEQ ID NO: 567043 - RNA, 19 nt, Human
ucaaaacacaucuguccua

SEQ ID NO: 567044 - RNA, 23 nt, Human
ucaaaacacaucuguccuaacaa

SEQ ID NO: 567045 - RNA, 22 nt, Human
ucaauggcuaggugaccccaaa

SEQ ID NO: 567046 - RNA, 23 nt, Human
uccaaauuacaugcagacagaaa

SEQ ID NO: 567047 - RNA, 18 nt, Human
ucccccacaacuccuccc

SEQ ID NO: 567048 - RNA, 24 nt, Human
ucccccacaacuccucccccuacc

SEQ ID NO: 567049 - RNA, 22 nt, Human
ucucaaaauguacugaauucac

SEQ ID NO: 567050 - RNA, 18 nt, Human
ucuucauuacauuccuuu

SEQ ID NO: 567051 - RNA, 20 nt, Human
ugaaaugcacauuauucccc

SEQ ID NO: 567052 - RNA, 24 nt, Human
ugaaaugcacauuauucccccaca

SEQ ID NO: 567053 - RNA, 28 nt, Human
ugaaaugcacauuauucccccacaacuc

SEQ ID NO: 567054 - RNA, 18 nt, Human
ugaagcccuaaagagcca

SEQ ID NO: 567055 - RNA, 20 nt, Human
ugaagggaaagcugugucac

SEQ ID NO: 567056 - RNA, 19 nt, Human
ugaauguauuugagaaauc

SEQ ID NO: 567057 - RNA, 22 nt, Human
ugagaaauccaaauuacaugca

SEQ ID NO: 567058 - RNA, 23 nt, Human
ugcagacagaaacuggucacaaa

SEQ ID NO: 567059 - RNA, 24 nt, Human
ugccaagaaaaugauuauuuuucc

SEQ ID NO: 567060 - RNA, 19 nt, Human
ugcgacgccgcaaccgcga

SEQ ID NO: 567061 - RNA, 18 nt, Human
ugcugaaucuucauuaca

SEQ ID NO: 567062 - RNA, 21 nt, Human
uggcuaggugaccccaaauau

SEQ ID NO: 567063 - RNA, 23 nt, Human
uguacugaauucacauaugugua

SEQ ID NO: 567064 - RNA, 23 nt, Human
uuacaaaaauacaaaaauagcug

SEQ ID NO: 567065 - RNA, 19 nt, Human
uuacauuccuuucaaaagg

SEQ ID NO: 567066 - RNA, 19 nt, Human
uuaguaaaagaaggauuuc

SEQ ID NO: 567067 - RNA, 21 nt, Human
uucacauauguguaucaccau

SEQ ID NO: 567068 - RNA, 21 nt, Human
uucaggauagacacacauaua

SEQ ID NO: 567069 - RNA, 21 nt, Human
uuccaccgagaugcauuuaug

SEQ ID NO: 567070 - RNA, 22 nt, Human
uuccuuucaaaaggcaucuaaa

SEQ ID NO: 567071 - RNA, 21 nt, Human
uucggggugaagcccuaaaga

SEQ ID NO: 567072 - RNA, 21 nt, Human
uuuaaaaaauacucaaggcca

SEQ ID NO: 567073 - RNA, 23 nt, Human
agauccccuggccuugcugaggu

SEQ ID NO: 567074 - RNA, 19 nt, Human
caacuugugccucccaucc

SEQ ID NO: 567075 - RNA, 21 nt, Human
ccgguaggacagaaucucuuu

SEQ ID NO: 567076 - RNA, 21 nt, Human
uaacacaacgugcagaucccc

SEQ ID NO: 567077 - RNA, 24 nt, Human
uaaguaguggaaaaacuuuuauac

SEQ ID NO: 567078 - RNA, 19 nt, Human
ugcaaaauggggcagugga

SEQ ID NO: 567079 - RNA, 23 nt, Human
ugcaaaauggggcaguggacuga

SEQ ID NO: 567080 - RNA, 22 nt, Human
ugcagauccccuggccuugcug

SEQ ID NO: 567081 - RNA, 21 nt, Human
ugcccaaucacaacuugugcc

SEQ ID NO: 567082 - RNA, 22 nt, Human
uggggcaguggacugacaggcu

SEQ ID NO: 567083 - RNA, 25 nt, Human
aaaaaaacauagauaguaaagcuga

SEQ ID NO: 567084 - RNA, 21 nt, Human
aaaaagaaaaaaaaaaagucc

SEQ ID NO: 567085 - RNA, 21 nt, Human
aaaauauacuaucccggccaa

SEQ ID NO: 567086 - RNA, 21 nt, Human
aaagggagucacaccggcugc

SEQ ID NO: 567087 - RNA, 20 nt, Human
aacauaaugaaaccccgucu

SEQ ID NO: 567088 - RNA, 21 nt, Human
aacauaaugaaaccccgucuc

SEQ ID NO: 567089 - RNA, 19 nt, Human
aacauggugaaaccccauc

SEQ ID NO: 567090 - RNA, 20 nt, Human
aacauggugaaaccccaucu

SEQ ID NO: 567091 - RNA, 21 nt, Human
aacauggugaaaccccaucuc

SEQ ID NO: 567092 - RNA, 21 nt, Human
aacauggugaaaccccaucuc

SEQ ID NO: 567093 - RNA, 19 nt, Human
aacugcacagcccagaccu

SEQ ID NO: 567094 - RNA, 24 nt, Human
aagcgugguggcucaugucuguaa

SEQ ID NO: 567095 - RNA, 18 nt, Human
aaggagagauccugggaa

SEQ ID NO: 567096 - RNA, 20 nt, Human
aaggagagauccugggaauu

SEQ ID NO: 567097 - RNA, 24 nt, Human
aaucccacacccucucuugacacc

SEQ ID NO: 567098 - RNA, 26 nt, Human
aauguauguauacauacacacagugu

SEQ ID NO: 567099 - RNA, 18 nt, Human
aauugcuugaaccuggga

SEQ ID NO: 567100 - RNA, 24 nt, Human
aauugcuugaaccugggaggcaga

SEQ ID NO: 567101 - RNA, 23 nt, Human
aauuucucacccuggacuucuac

SEQ ID NO: 567102 - RNA, 18 nt, Human
acaccacugcacuccagc

SEQ ID NO: 567103 - RNA, 20 nt, Human
acaccacugcacuccagccu

SEQ ID NO: 567104 - RNA, 24 nt, Human
acagagugagacuccaucucaaaa

SEQ ID NO: 567105 - RNA, 19 nt, Human
accacugcacuccagccug

SEQ ID NO: 567106 - RNA, 24 nt, Human
accacugcacuccagccuggguga

SEQ ID NO: 567107 - RNA, 24 nt, Human
accccaucucuacuaaaaauacaa

SEQ ID NO: 567108 - RNA, 24 nt, Human
acuccagccugggugacagaguga

SEQ ID NO: 567109 - RNA, 24 nt, Human
acugcacuccagccugggugacag

SEQ ID NO: 567110 - RNA, 26 nt, Human
acugcacuccagccugggugacagag

SEQ ID NO: 567111 - RNA, 21 nt, Human
agaaaaaaagaaaaaaaaaaa

SEQ ID NO: 567112 - RNA, 20 nt, Human
agaaaagaaaaaagaaaaaa

SEQ ID NO: 567113 - RNA, 21 nt, Human
agaaaagaaaaaagaaaaaaa

SEQ ID NO: 567114 - RNA, 22 nt, Human
agagaaggcagcaaucaguagg

SEQ ID NO: 567115 - RNA, 20 nt, Human
agagguugcagugagccaag

SEQ ID NO: 567116 - RNA, 23 nt, Human
agagguugcagugagccaagauc

SEQ ID NO: 567117 - RNA, 24 nt, Human
agagguugcagugagccaagauca

SEQ ID NO: 567118 - RNA, 24 nt, Human
agcacuuugggaggcugagguggg

SEQ ID NO: 567119 - RNA, 18 nt, Human
agcagcaggcagaggcuu

SEQ ID NO: 567120 - RNA, 24 nt, Human
agccuggccaacauaaugaaaccc

SEQ ID NO: 567121 - RNA, 24 nt, Human
agccugggugacagagugagacuc

SEQ ID NO: 567122 - RNA, 21 nt, Human
aggaguuggagaccagccugg

SEQ ID NO: 567123 - RNA, 24 nt, Human
aggcagagguugcagugagccaag

SEQ ID NO: 567124 - RNA, 22 nt, Human
aggcaggagaauugcuugaacc

SEQ ID NO: 567125 - RNA, 24 nt, Human
aggcaggagaauugcuugaaccug

SEQ ID NO: 567126 - RNA, 19 nt, Human
aggcagggggaggaacugc

SEQ ID NO: 567127 - RNA, 21 nt, Human
aggcgggcagaucacuuuagg

SEQ ID NO: 567128 - RNA, 26 nt, Human
aggcgggcagaucacuuuaggucagg

SEQ ID NO: 567129 - RNA, 21 nt, Human
aggcugaggcaggagaauugc

SEQ ID NO: 567130 - RNA, 24 nt, Human
aggcugaggcaggagaauugcuug

SEQ ID NO: 567131 - RNA, 19 nt, Human
aggcugagguggguggauc

SEQ ID NO: 567132 - RNA, 19 nt, Human
agggagggaaauggguuga

SEQ ID NO: 567133 - RNA, 20 nt, Human
agggagggaaauggguugag

SEQ ID NO: 567134 - RNA, 24 nt, Human
agguggguggaucacaaggucaag

SEQ ID NO: 567135 - RNA, 20 nt, Human
aguacagagaacuuagagga

SEQ ID NO: 567136 - RNA, 19 nt, Human
aguugggugugguggcgug

SEQ ID NO: 567137 - RNA, 23 nt, Human
aguugggugugguggcgugugcc

SEQ ID NO: 567138 - RNA, 20 nt, Human
auaagggguagggagggaaa

SEQ ID NO: 567139 - RNA, 24 nt, Human
aucacaccacugcacuccagccug

SEQ ID NO: 567140 - RNA, 22 nt, Human
aucccagcacuuugggaggcca

SEQ ID NO: 567141 - RNA, 19 nt, Human
augccuguaaucccagcac

SEQ ID NO: 567142 - RNA, 19 nt, Human
augucuguaaucccagcac

SEQ ID NO: 567143 - RNA, 23 nt, Human
auugcaauagcagcaggcagagg

SEQ ID NO: 567144 - RNA, 24 nt, Human
caacauggugaaaccccaucucua

SEQ ID NO: 567145 - RNA, 24 nt, Human
caaggcgggcagaucacuuuaggu

SEQ ID NO: 567146 - RNA, 26 nt, Human
caaggcgggcagaucacuuuagguca

SEQ ID NO: 567147 - RNA, 26 nt, Human
cacacaguuuccauaaaaaaacauag

SEQ ID NO: 567148 - RNA, 21 nt, Human
cacaccacugcacuccagccu

SEQ ID NO: 567149 - RNA, 18 nt, Human
cacacccucucuugacac

SEQ ID NO: 567150 - RNA, 18 nt, Human
cacagcccagaccuggga

SEQ ID NO: 567151 - RNA, 26 nt, Human
caccacugcacuccagccugggugac

SEQ ID NO: 567152 - RNA, 22 nt, Human
cacuccagccugggugacagag

SEQ ID NO: 567153 - RNA, 22 nt, Human
cacuccagccugggugacagag

SEQ ID NO: 567154 - RNA, 24 nt, Human
cacuccagccugggugacagagug

SEQ ID NO: 567155 - RNA, 19 nt, Human
cacugcacuccagccuggg

SEQ ID NO: 567156 - RNA, 19 nt, Human
cacugcacuccagccuggg

SEQ ID NO: 567157 - RNA, 19 nt, Human
cacugcacuccagccuggg

SEQ ID NO: 567158 - RNA, 22 nt, Human
cacugcacuccagccuggguga

SEQ ID NO: 567159 - RNA, 24 nt, Human
cacugcacuccagccugggugaca

SEQ ID NO: 567160 - RNA, 24 nt, Human
cacugcacuccagccugggugaca

SEQ ID NO: 567161 - RNA, 19 nt, Human
cacuggguuccuuugaguu

SEQ ID NO: 567162 - RNA, 27 nt, Human
cagaucacuuuaggucaggaguuggag

SEQ ID NO: 567163 - RNA, 24 nt, Human
cagcacuuugggaggccaaggcgg

SEQ ID NO: 567164 - RNA, 21 nt, Human
cagcacuuugggaggcugagg

SEQ ID NO: 567165 - RNA, 24 nt, Human
cagcacuuugggaggcugaggugg

SEQ ID NO: 567166 - RNA, 24 nt, Human
cagcuacuugggaggcugaggcag

SEQ ID NO: 567167 - RNA, 22 nt, Human
cauagauaguaaagcugauuaa

SEQ ID NO: 567168 - RNA, 20 nt, Human
caugccuguaaucccagcac

SEQ ID NO: 567169 - RNA, 24 nt, Human
caugccuguaaucccagcacuuug

SEQ ID NO: 567170 - RNA, 24 nt, Human
caugucuguaaucccagcacuuug

SEQ ID NO: 567171 - RNA, 20 nt, Human
ccacugcacuccagccuggg

SEQ ID NO: 567172 - RNA, 20 nt, Human
ccacugcacuccagccuggg

SEQ ID NO: 567173 - RNA, 20 nt, Human
ccacugcacuccagccuggg

SEQ ID NO: 567174 - RNA, 21 nt, Human
ccacugcacuccagccugggu

SEQ ID NO: 567175 - RNA, 24 nt, Human
ccacugcacuccagccugggugac

SEQ ID NO: 567176 - RNA, 25 nt, Human
ccacugcacuccagccugggugaca

SEQ ID NO: 567177 - RNA, 19 nt, Human
ccagaaagggagucacacc

SEQ ID NO: 567178 - RNA, 20 nt, Human
ccagaaagggagucacaccg

SEQ ID NO: 567179 - RNA, 21 nt, Human
ccaucucaaaaaaaaaaagaa

SEQ ID NO: 567180 - RNA, 19 nt, Human
ccauuacacuccacuuaac

SEQ ID NO: 567181 - RNA, 24 nt, Human
cccggccaagcgugguggcucaug

SEQ ID NO: 567182 - RNA, 24 nt, Human
ccuagcccuagcuccacucugggc

SEQ ID NO: 567183 - RNA, 23 nt, Human
ccuggccaacauaaugaaacccc

SEQ ID NO: 567184 - RNA, 24 nt, Human
ccuggccaacauaaugaaaccccg

SEQ ID NO: 567185 - RNA, 22 nt, Human
ccuggccaacauggugaaaccc

SEQ ID NO: 567186 - RNA, 23 nt, Human
ccuggccaacauggugaaacccc

SEQ ID NO: 567187 - RNA, 24 nt, Human
ccuggccaacauggugaaacccca

SEQ ID NO: 567188 - RNA, 25 nt, Human
ccugggaggcagagguugcagugag

SEQ ID NO: 567189 - RNA, 22 nt, Human
ccugggucccaaucccacaccc

SEQ ID NO: 567190 - RNA, 22 nt, Human
ccugggugacagagugagacuc

SEQ ID NO: 567191 - RNA, 22 nt, Human
ccuguaaucccagcacuuuggg

SEQ ID NO: 567192 - RNA, 20 nt, Human
ccuguaauucuguggguccc

SEQ ID NO: 567193 - RNA, 18 nt, Human
ccuguagucccagcuacu

SEQ ID NO: 567194 - RNA, 21 nt, Human
ccuguagucccagcuacuugg

SEQ ID NO: 567195 - RNA, 23 nt, Human
ccuguccuauugguaccagcacc

SEQ ID NO: 567196 - RNA, 19 nt, Human
cgcugggugugguggcuca

SEQ ID NO: 567197 - RNA, 24 nt, Human
cggccaagcgugguggcucauguc

SEQ ID NO: 567198 - RNA, 24 nt, Human
cgggcagaucacuuuaggucagga

SEQ ID NO: 567199 - RNA, 18 nt, Human
cuagauuaaguaaaaaaa

SEQ ID NO: 567200 - RNA, 19 nt, Human
cuagcuagauuaaguaaaa

SEQ ID NO: 567201 - RNA, 24 nt, Human
cucaugccuguaaucccagcacuu

SEQ ID NO: 567202 - RNA, 23 nt, Human
cucaugucuguaaucccagcacu

SEQ ID NO: 567203 - RNA, 24 nt, Human
cucaugucuguaaucccagcacuu

SEQ ID NO: 567204 - RNA, 19 nt, Human
cuccaucucaaaaaaaaaa

SEQ ID NO: 567205 - RNA, 25 nt, Human
cucccaauauugagaugaaaccugc

SEQ ID NO: 567206 - RNA, 20 nt, Human
cugaagaguccugaagauaa

SEQ ID NO: 567207 - RNA, 23 nt, Human
cuggccaacauggugaaacccca

SEQ ID NO: 567208 - RNA, 21 nt, Human
cugggucccaaucccacaccc

SEQ ID NO: 567209 - RNA, 19 nt, Human
cuugacaccuagcccuagc

SEQ ID NO: 567210 - RNA, 24 nt, Human
cuugacaccuagcccuagcuccac

SEQ ID NO: 567211 - RNA, 22 nt, Human
gaagauaagggguagggaggga

SEQ ID NO: 567212 - RNA, 24 nt, Human
gacagagugagacuccaucucaaa

SEQ ID NO: 567213 - RNA, 23 nt, Human
gagaauugcuugaaccugggagg

SEQ ID NO: 567214 - RNA, 22 nt, Human
gagguggguggaucacaagguc

SEQ ID NO: 567215 - RNA, 18 nt, Human
gagguugcagugagccaa

SEQ ID NO: 567216 - RNA, 20 nt, Human
gagucacaccggcugcuacc

SEQ ID NO: 567217 - RNA, 18 nt, Human
gaucacuuuaggucagga

SEQ ID NO: 567218 - RNA, 23 nt, Human
gaucacuuuaggucaggaguugg

SEQ ID NO: 567219 - RNA, 24 nt, Human
gaucacuuuaggucaggaguugga

SEQ ID NO: 567220 - RNA, 23 nt, Human
gcacuccagccugggugacagag

SEQ ID NO: 567221 - RNA, 21 nt, Human
gccaacauaaugaaaccccgu

SEQ ID NO: 567222 - RNA, 24 nt, Human
gccaacauggugaaaccccaucuc

SEQ ID NO: 567223 - RNA, 20 nt, Human
gccaagaucacaccacugca

SEQ ID NO: 567224 - RNA, 22 nt, Human
gcugggugugguggcucaugcc

SEQ ID NO: 567225 - RNA, 25 nt, Human
gcuucccuguaacuucccuguaauu

SEQ ID NO: 567226 - RNA, 24 nt, Human
ggagacaauccuggccaacauggu

SEQ ID NO: 567227 - RNA, 25 nt, Human
ggcagaucacuuuaggucaggaguu

SEQ ID NO: 567228 - RNA, 18 nt, Human
gggagggaaauggguuga

SEQ ID NO: 567229 - RNA, 19 nt, Human
gggagggaaauggguugag

SEQ ID NO: 567230 - RNA, 19 nt, Human
ggguagggagggaaauggg

SEQ ID NO: 567231 - RNA, 18 nt, Human
gguagggagggaaauggg

SEQ ID NO: 567232 - RNA, 18 nt, Human
gguggaucacaaggucaa

SEQ ID NO: 567233 - RNA, 24 nt, Human
gguggcucaugccuguaaucccag

SEQ ID NO: 567234 - RNA, 24 nt, Human
gguggcucaugucuguaaucccag

SEQ ID NO: 567235 - RNA, 23 nt, Human
ggugugguggcucaugccuguaa

SEQ ID NO: 567236 - RNA, 18 nt, Human
gucaagagauggagacaa

SEQ ID NO: 567237 - RNA, 20 nt, Human
gucaagagauggagacaauc

SEQ ID NO: 567238 - RNA, 23 nt, Human
gucucgcugggugugguggcuca

SEQ ID NO: 567239 - RNA, 23 nt, Human
guggcucaugccuguaaucccag

SEQ ID NO: 567240 - RNA, 23 nt, Human
guggcucaugucuguaaucccag

SEQ ID NO: 567241 - RNA, 23 nt, Human
uaaaaauuccuagugacagccca

SEQ ID NO: 567242 - RNA, 22 nt, Human
uaacugagaaccaacugaguac

SEQ ID NO: 567243 - RNA, 23 nt, Human
uagcagcaggcagaggcuuuugg

SEQ ID NO: 567244 - RNA, 26 nt, Human
uagcuagauuaaguaaaaaaaaaaaa

SEQ ID NO: 567245 - RNA, 23 nt, Human
ucacaccacugcacuccagccug

SEQ ID NO: 567246 - RNA, 20 nt, Human
ucaggaguuggagaccagcc

SEQ ID NO: 567247 - RNA, 22 nt, Human
ucaugccuguaaucccagcacu

SEQ ID NO: 567248 - RNA, 23 nt, Human
uccagccugggugacagagugag

SEQ ID NO: 567249 - RNA, 24 nt, Human
uccagccugggugacagagugaga

SEQ ID NO: 567250 - RNA, 19 nt, Human
uccaucucaaaaaaaaaaa

SEQ ID NO: 567251 - RNA, 24 nt, Human
uccaucucaaaaaaaaaaagaaaa

SEQ ID NO: 567252 - RNA, 19 nt, Human
ucccaagguucuggaucuc

SEQ ID NO: 567253 - RNA, 21 nt, Human
ucccaaucccacacccucucu

SEQ ID NO: 567254 - RNA, 25 nt, Human
ucccuguaauucugugggucccuug

SEQ ID NO: 567255 - RNA, 27 nt, Human
ucccuguaauucugugggucccuugua

SEQ ID NO: 567256 - RNA, 25 nt, Human
ucccuguaauucugugggucccuuu

SEQ ID NO: 567257 - RNA, 23 nt, Human
uccugaagauaagggguagggag

SEQ ID NO: 567258 - RNA, 24 nt, Human
ucucgcugggugugguggcucaug

SEQ ID NO: 567259 - RNA, 21 nt, Human
ucucuacuaaaaauacaaaaa

SEQ ID NO: 567260 - RNA, 21 nt, Human
ucucuugacaccuagcccuag

SEQ ID NO: 567261 - RNA, 21 nt, Human
ugaaaaacauaaucucuauaa

SEQ ID NO: 567262 - RNA, 19 nt, Human
ugaaaccccaucucuacua

SEQ ID NO: 567263 - RNA, 24 nt, Human
ugaaccugggaggcagagguugca

SEQ ID NO: 567264 - RNA, 22 nt, Human
ugaagcccuucuacaaaauucc

SEQ ID NO: 567265 - RNA, 21 nt, Human
ugacagcccacuccuucucag

SEQ ID NO: 567266 - RNA, 24 nt, Human
ugaggcaggagaauugcuugaacc

SEQ ID NO: 567267 - RNA, 25 nt, Human
ugaggcaggagaauugcuugaaccu

SEQ ID NO: 567268 - RNA, 19 nt, Human
ugagguggguggaucacaa

SEQ ID NO: 567269 - RNA, 21 nt, Human
ugagguggguggaucacaagg

SEQ ID NO: 567270 - RNA, 24 nt, Human
ugagguggguggaucacaagguca

SEQ ID NO: 567271 - RNA, 23 nt, Human
ugagguggguggaucacaagguu

SEQ ID NO: 567272 - RNA, 20 nt, Human
ugauuggccagguuggcuca

SEQ ID NO: 567273 - RNA, 25 nt, Human
ugcacagcccagaccugggagggag

SEQ ID NO: 567274 - RNA, 23 nt, Human
ugccuguaaucccagcacuuugg

SEQ ID NO: 567275 - RNA, 24 nt, Human
ugccuguagucccagcuacuuggg

SEQ ID NO: 567276 - RNA, 24 nt, Human
uggccaacauggugaaaccccauc

SEQ ID NO: 567277 - RNA, 24 nt, Human
uggcgugugccuguagucccagcu

SEQ ID NO: 567278 - RNA, 24 nt, Human
uggcucaugccuguaaucccagca

SEQ ID NO: 567279 - RNA, 24 nt, Human
uggcucaugucuguaaucccagca

SEQ ID NO: 567280 - RNA, 24 nt, Human
ugggaggcagagguugcagugagc

SEQ ID NO: 567281 - RNA, 24 nt, Human
ugggaggccaaggcgggcagauca

SEQ ID NO: 567282 - RNA, 19 nt, Human
ugggaggcugaggcaggag

SEQ ID NO: 567283 - RNA, 22 nt, Human
ugggaggcugaggcaggagaau

SEQ ID NO: 567284 - RNA, 20 nt, Human
ugggaggcugaggugggugg

SEQ ID NO: 567285 - RNA, 23 nt, Human
ugggaggcugagguggguggauc

SEQ ID NO: 567286 - RNA, 24 nt, Human
ugggaggcugagguggguggauca

SEQ ID NO: 567287 - RNA, 24 nt, Human
ugggagggagggauccagggaagg

SEQ ID NO: 567288 - RNA, 18 nt, Human
ugggugugguggcgugug

SEQ ID NO: 567289 - RNA, 18 nt, Human
ugggugugguggcucaug

SEQ ID NO: 567290 - RNA, 24 nt, Human
ugguggcgugugccuguaguccca

SEQ ID NO: 567291 - RNA, 24 nt, Human
ugguggcucaugccuguaauccca

SEQ ID NO: 567292 - RNA, 24 nt, Human
ugguggcucaugucuguaauccca

SEQ ID NO: 567293 - RNA, 25 nt, Human
uguauacauacacacaguuuccaua

SEQ ID NO: 567294 - RNA, 23 nt, Human
ugucuguaaucccagcacuuugg

SEQ ID NO: 567295 - RNA, 23 nt, Human
ugucuguaaucccagcacuuugg

SEQ ID NO: 567296 - RNA, 24 nt, Human
ugucuguaaucccagcacuuuggg

SEQ ID NO: 567297 - RNA, 23 nt, Human
uuaaaaucuuccuguccuauugg

SEQ ID NO: 567298 - RNA, 21 nt, Human
uuagcucugaagaguccugaa

SEQ ID NO: 567299 - RNA, 20 nt, Human
uuaguugggugugguggcgu

SEQ ID NO: 567300 - RNA, 22 nt, Human
uuaguugggugugguggcgugu

SEQ ID NO: 567301 - RNA, 24 nt, Human
uuaguugggugugguggcgugugc

SEQ ID NO: 567302 - RNA, 24 nt, Human
uugaaccugggaggcagagguugc

SEQ ID NO: 567303 - RNA, 20 nt, Human
uugcagugagccaagaucac

SEQ ID NO: 567304 - RNA, 24 nt, Human
uugcuugaaccugggaggcagagg

SEQ ID NO: 567305 - RNA, 23 nt, Human
uugggaggcugaggcaggagaau

SEQ ID NO: 567306 - RNA, 25 nt, Human
uugggaggcugagguggguggauca

SEQ ID NO: 567307 - RNA, 21 nt, Human
uugguuccuauuguuuccugg

SEQ ID NO: 567308 - RNA, 24 nt, Human
uuuggccaguaugacucacauggu

SEQ ID NO: 567309 - RNA, 22 nt, Human
aaacaaaagguauaaacaggga

SEQ ID NO: 567310 - RNA, 31 nt, Human
aacaagaaaaaagucuguacauguuugguaa

SEQ ID NO: 567311 - RNA, 20 nt, Human
aaguacaccuccuaaaauaa

SEQ ID NO: 567312 - RNA, 20 nt, Human
aauaacaagaaaaaagucug

SEQ ID NO: 567313 - RNA, 27 nt, Human
acaacccagguguccaucgagagguca

SEQ ID NO: 567314 - RNA, 23 nt, Human
acaaugaauaaaaccaccuaaga

SEQ ID NO: 567315 - RNA, 18 nt, Human
acgcaggguauacauacg

SEQ ID NO: 567316 - RNA, 20 nt, Human
agagaauaauaacaagaaaa

SEQ ID NO: 567317 - RNA, 20 nt, Human
agcuuuauuuauaacagccc

SEQ ID NO: 567318 - RNA, 25 nt, Human
auaauaacaagaaaaaagucuguac

SEQ ID NO: 567319 - RNA, 23 nt, Human
auacuaaaauccucagaugcuca

SEQ ID NO: 567320 - RNA, 19 nt, Human
auacugaguaaaauaugcc

SEQ ID NO: 567321 - RNA, 22 nt, Human
augaagcaguacucagcaauga

SEQ ID NO: 567322 - RNA, 19 nt, Human
augggcucuacauucugga

SEQ ID NO: 567323 - RNA, 18 nt, Human
caaaauaacuauacugag

SEQ ID NO: 567324 - RNA, 18 nt, Human
cacacaaauacagugggc

SEQ ID NO: 567325 - RNA, 25 nt, Human
cacauccuccugcacaguuuaaauc

SEQ ID NO: 567326 - RNA, 23 nt, Human
cagccccaaacuggaaacaaccc

SEQ ID NO: 567327 - RNA, 20 nt, Human
cagguguccaucgagagguc

SEQ ID NO: 567328 - RNA, 25 nt, Human
cauuguacacuuuugauacgugcag

SEQ ID NO: 567329 - RNA, 23 nt, Human
ccaaacuggaaacaacccaggug

SEQ ID NO: 567330 - RNA, 18 nt, Human
ccgccgcguucccgccac

SEQ ID NO: 567331 - RNA, 20 nt, Human
ccgccgcguucccgccacgc

SEQ ID NO: 567332 - RNA, 19 nt, Human
ccgcguucccgccacgcaa

SEQ ID NO: 567333 - RNA, 21 nt, Human
ccggacgcaagggccggcgcc

SEQ ID NO: 567334 - RNA, 27 nt, Human
cucaacaaugaauaaaaccaccuaaga

SEQ ID NO: 567335 - RNA, 19 nt, Human
cuuuugauacgugcaguuu

SEQ ID NO: 567336 - RNA, 23 nt, Human
gaacuugaagucagaccccucga

SEQ ID NO: 567337 - RNA, 19 nt, Human
gccgccgcguucccgccac

SEQ ID NO: 567338 - RNA, 23 nt, Human
uaaaaaauggugcaguauuugca

SEQ ID NO: 567339 - RNA, 18 nt, Human
uaaaauccucagaugcuc

SEQ ID NO: 567340 - RNA, 19 nt, Human
uaacagcuuuauuuauaac

SEQ ID NO: 567341 - RNA, 19 nt, Human
uacaaagugaaaaugaaga

SEQ ID NO: 567342 - RNA, 20 nt, Human
uacaauguaaaugcugugga

SEQ ID NO: 567343 - RNA, 19 nt, Human
uagaauucuaggacaugca

SEQ ID NO: 567344 - RNA, 20 nt, Human
uauacauacgccaacacauu

SEQ ID NO: 567345 - RNA, 23 nt, Human
uauauuacccaauacaauguaaa

SEQ ID NO: 567346 - RNA, 19 nt, Human
uauuugcauauaaccuacc

SEQ ID NO: 567347 - RNA, 26 nt, Human
ucacuagauuacuuauauuacccaau

SEQ ID NO: 567348 - RNA, 21 nt, Human
ucacugccgccgcguucccgc

SEQ ID NO: 567349 - RNA, 24 nt, Human
uccuggcugaggucgaacgccggg

SEQ ID NO: 567350 - RNA, 20 nt, Human
ugaauaaaaccaccuaagaa

SEQ ID NO: 567351 - RNA, 20 nt, Human
ugaauccacagauguggaac

SEQ ID NO: 567352 - RNA, 21 nt, Human
ugaggauacuaaaauccucag

SEQ ID NO: 567353 - RNA, 23 nt, Human
ugaguaaaauaugccugaccaaa

SEQ ID NO: 567354 - RNA, 23 nt, Human
ugcaguauuugcauauaaccuac

SEQ ID NO: 567355 - RNA, 22 nt, Human
ugcauauaaccuacccacaucc

SEQ ID NO: 567356 - RNA, 25 nt, Human
uggaacacacaaauacagugggcug

SEQ ID NO: 567357 - RNA, 18 nt, Human
uggcugaggucgaacgcc

SEQ ID NO: 567358 - RNA, 21 nt, Human
ugggcucuacauucuggagac

SEQ ID NO: 567359 - RNA, 23 nt, Human
uggguccguuccucacuucaguu

SEQ ID NO: 567360 - RNA, 18 nt, Human
ugucauaaaguugucccc

SEQ ID NO: 567361 - RNA, 23 nt, Human
uguggugauaguuuuacgcaggg

SEQ ID NO: 567362 - RNA, 23 nt, Human
uuaaaucaucacuagauuacuua

SEQ ID NO: 567363 - RNA, 26 nt, Human
uuacauagaauucuaggacaugcaaa

SEQ ID NO: 567364 - RNA, 19 nt, Human
uugguugaauccacagaug

SEQ ID NO: 567365 - RNA, 21 nt, Human
uuuacauagaauucuaggaca

SEQ ID NO: 567366 - RNA, 22 nt, Human
aaauggucgccaaguccaaaga

SEQ ID NO: 567367 - RNA, 19 nt, Human
aagagaaaugcacagcagc

SEQ ID NO: 567368 - RNA, 20 nt, Human
aagcagaaugugcuaaugua

SEQ ID NO: 567369 - RNA, 19 nt, Human
aagcagcaauaaagaucaa

SEQ ID NO: 567370 - RNA, 19 nt, Human
aauaugaaaaaaaaaauag

SEQ ID NO: 567371 - RNA, 20 nt, Human
acugaccugcccucccuggc

SEQ ID NO: 567372 - RNA, 24 nt, Human
agaaaacauuguguguggccacuu

SEQ ID NO: 567373 - RNA, 24 nt, Human
agaucugaucauuacauugcccag

SEQ ID NO: 567374 - RNA, 23 nt, Human
agcaauaaagaucaagaaaaucc

SEQ ID NO: 567375 - RNA, 23 nt, Human
auccuugguuaauuaucuuugau

SEQ ID NO: 567376 - RNA, 24 nt, Human
auccuugguuaauuaucuuugauu

SEQ ID NO: 567377 - RNA, 20 nt, Human
augcccacaagcuaacagaa

SEQ ID NO: 567378 - RNA, 22 nt, Human
augcccacaagcuaacagaaaa

SEQ ID NO: 567379 - RNA, 25 nt, Human
caaacagauacuguuucgugcgcag

SEQ ID NO: 567380 - RNA, 22 nt, Human
caagcuaacagaaaauacagua

SEQ ID NO: 567381 - RNA, 24 nt, Human
caccaccucuuaacaauggacauu

SEQ ID NO: 567382 - RNA, 18 nt, Human
cagaaaauacaguauuga

SEQ ID NO: 567383 - RNA, 24 nt, Human
cagagcgggcagagauugaauccc

SEQ ID NO: 567384 - RNA, 23 nt, Human
cagcaauaaagaucaagaaaauc

SEQ ID NO: 567385 - RNA, 28 nt, Human
cagcaauaaagaucaagaaaauccccaa

SEQ ID NO: 567386 - RNA, 19 nt, Human
cagcugaagcgaagcgcgg

SEQ ID NO: 567387 - RNA, 21 nt, Human
cagcuuuaagaaugccaaaaa

SEQ ID NO: 567388 - RNA, 20 nt, Human
caguagacgcugcucaccac

SEQ ID NO: 567389 - RNA, 22 nt, Human
cauucugucauugcagccugau

SEQ ID NO: 567390 - RNA, 23 nt, Human
cauuguguguggccacuuaagaa

SEQ ID NO: 567391 - RNA, 21 nt, Human
ccagcuagcagcugaagcgaa

SEQ ID NO: 567392 - RNA, 21 nt, Human
ccagcuuuaagaaugccaaaa

SEQ ID NO: 567393 - RNA, 26 nt, Human
cccaacuuuucuaauaaccgcuauac

SEQ ID NO: 567394 - RNA, 21 nt, Human
cccacugaccugcccucccug

SEQ ID NO: 567395 - RNA, 18 nt, Human
ccccucgccacccuccgc

SEQ ID NO: 567396 - RNA, 22 nt, Human
cccuccgcggucgccucccuug

SEQ ID NO: 567397 - RNA, 18 nt, Human
ccggaccggcccggcccc

SEQ ID NO: 567398 - RNA, 19 nt, Human
ccuccgcggucgccucccu

SEQ ID NO: 567399 - RNA, 22 nt, Human
cgcccagccgggugccaggcac

SEQ ID NO: 567400 - RNA, 19 nt, Human
cgcggucgccucccuuggg

SEQ ID NO: 567401 - RNA, 25 nt, Human
cucaccacauucugucauugcagcc

SEQ ID NO: 567402 - RNA, 19 nt, Human
cugaaauggucgccaaguc

SEQ ID NO: 567403 - RNA, 19 nt, Human
cugcccucccuggcggucc

SEQ ID NO: 567404 - RNA, 21 nt, Human
gaaaugcacagcagccuaaaa

SEQ ID NO: 567405 - RNA, 20 nt, Human
gagaaaacauuguguguggc

SEQ ID NO: 567406 - RNA, 20 nt, Human
gagguaucacugccaagaga

SEQ ID NO: 567407 - RNA, 18 nt, Human
gaucugcccacugaccug

SEQ ID NO: 567408 - RNA, 19 nt, Human
gccccggggcugcgggucc

SEQ ID NO: 567409 - RNA, 18 nt, Human
ggucgccucccuugggcc

SEQ ID NO: 567410 - RNA, 24 nt, Human
guguggccacuuaagauuaugccu

SEQ ID NO: 567411 - RNA, 22 nt, Human
uaagcagcaauaaagaucaaga

SEQ ID NO: 567412 - RNA, 24 nt, Human
uaagcauguuagaaaaccugaaga

SEQ ID NO: 567413 - RNA, 21 nt, Human
uacauggguuuauuaaaguuu

SEQ ID NO: 567414 - RNA, 24 nt, Human
uaugcaaaaugugaaauauauaau

SEQ ID NO: 567415 - RNA, 19 nt, Human
uccaaagaagcgaucgaag

SEQ ID NO: 567416 - RNA, 21 nt, Human
ucccuugggccagcuagcagc

SEQ ID NO: 567417 - RNA, 21 nt, Human
ucccuugggccagcuagcagc

SEQ ID NO: 567418 - RNA, 26 nt, Human
ucgccacccuccgcggucgccucccu

SEQ ID NO: 567419 - RNA, 23 nt, Human
ugaaauauauaauucaaaaugcc

SEQ ID NO: 567420 - RNA, 19 nt, Human
ugagcgccagggaaaagga

SEQ ID NO: 567421 - RNA, 18 nt, Human
ugucaaagguagauaggc

SEQ ID NO: 567422 - RNA, 22 nt, Human
uuaacccauuagcaauaaccug

SEQ ID NO: 567423 - RNA, 18 nt, Human
uucaaacccccaaaacau

SEQ ID NO: 567424 - RNA, 23 nt, Human
aaguaaaauuuugauacuaccuc

SEQ ID NO: 567425 - RNA, 20 nt, Human
aagugcauaucaggagauaa

SEQ ID NO: 567426 - RNA, 21 nt, Human
acuaaaaaaaaaaaaaaaacc

SEQ ID NO: 567427 - RNA, 18 nt, Human
agacagaaacuguaagcc

SEQ ID NO: 567428 - RNA, 24 nt, Human
caacauuaauucacuaaacaacca

SEQ ID NO: 567429 - RNA, 20 nt, Human
cacuaaacaaccaaagaagu

SEQ ID NO: 567430 - RNA, 22 nt, Human
cagaaugaaugauagcaaacac

SEQ ID NO: 567431 - RNA, 22 nt, Human
cagacuaaaaaaaaaaaaaaaa

SEQ ID NO: 567432 - RNA, 20 nt, Human
cuaaaaacagucuucagaac

SEQ ID NO: 567433 - RNA, 23 nt, Human
cuucccaaaaagacuagggaguu

SEQ ID NO: 567434 - RNA, 22 nt, Human
gauuuuucaaguuccagaugac

SEQ ID NO: 567435 - RNA, 21 nt, Human
guuaaccaauaaaugaguucc

SEQ ID NO: 567436 - RNA, 22 nt, Human
uaaaaaaaaaaaaaaaacccaa

SEQ ID NO: 567437 - RNA, 22 nt, Human
uaaaauaaaugugcuaagguuc

SEQ ID NO: 567438 - RNA, 24 nt, Human
uagcaggcauaucuuaacuacuuc

SEQ ID NO: 567439 - RNA, 22 nt, Human
uaugcacuagacaguguaugua

SEQ ID NO: 567440 - RNA, 24 nt, Human
uauggaacaaucuaaaaaaaaaac

SEQ ID NO: 567441 - RNA, 20 nt, Human
uauuuuggguuuucuuguuu

SEQ ID NO: 567442 - RNA, 21 nt, Human
ugaguuccauucaggcauuau

SEQ ID NO: 567443 - RNA, 26 nt, Human
uggaacaaucuaaaaaaaaaacacuu

SEQ ID NO: 567444 - RNA, 18 nt, Human
uuuaaagugcauaucagg

SEQ ID NO: 567445 - RNA, 21 nt, Human
uuuuaugguuuuaggcaaaua

SEQ ID NO: 567446 - RNA, 22 nt, Human
aaaaaaaaaaaaaaacccacaa

SEQ ID NO: 567447 - RNA, 25 nt, Human
aaaaaaaaacccacaagauuaucaa

SEQ ID NO: 567448 - RNA, 26 nt, Human
aaaaaaaacuaggagcauauucaaaa

SEQ ID NO: 567449 - RNA, 22 nt, Human
aaaaaaagaaaaaaaagcccaa

SEQ ID NO: 567450 - RNA, 20 nt, Human
aaaaacaacucuaccugacc

SEQ ID NO: 567451 - RNA, 21 nt, Human
aaaaacaacucuaccugacca

SEQ ID NO: 567452 - RNA, 22 nt, Human
aaaaaggcauucuuauuaggcc

SEQ ID NO: 567453 - RNA, 19 nt, Human
aaaagcccaacaacaacaa

SEQ ID NO: 567454 - RNA, 20 nt, Human
aaaagcccaacaacaacaac

SEQ ID NO: 567455 - RNA, 20 nt, Human
aaaauaguacauacuggaca

SEQ ID NO: 567456 - RNA, 19 nt, Human
aaacugcucauagucuuug

SEQ ID NO: 567457 - RNA, 23 nt, Human
aaacuuugauuaugcacaaagca

SEQ ID NO: 567458 - RNA, 25 nt, Human
aacaaaaacaacucuaccugaccac

SEQ ID NO: 567459 - RNA, 21 nt, Human
aacagaacugccaauagcaau

SEQ ID NO: 567460 - RNA, 20 nt, Human
aaccugaauucaucauuggc

SEQ ID NO: 567461 - RNA, 21 nt, Human
aagaacuaaggacauauaguu

SEQ ID NO: 567462 - RNA, 24 nt, Human
aagcaaagccaaaauaucagaaga

SEQ ID NO: 567463 - RNA, 25 nt, Human
aauguuauuuuucuugccaaaguuc

SEQ ID NO: 567464 - RNA, 22 nt, Human
aauuagaacacugcucaaagug

SEQ ID NO: 567465 - RNA, 24 nt, Human
acaacaacaaaaacaacucuaccu

SEQ ID NO: 567466 - RNA, 19 nt, Human
acaagacaacuaagaagcc

SEQ ID NO: 567467 - RNA, 26 nt, Human
acacaaaucugggcaagucugggagc

SEQ ID NO: 567468 - RNA, 25 nt, Human
acacuacaaaacagaaggagguguc

SEQ ID NO: 567469 - RNA, 25 nt, Human
accaaaaaaaaaaaaagaaaaaaaa

SEQ ID NO: 567470 - RNA, 24 nt, Human
accaaaagagaccaaaaaaaaaaa

SEQ ID NO: 567471 - RNA, 21 nt, Human
accaggauacacuacaaaaca

SEQ ID NO: 567472 - RNA, 22 nt, Human
agaaauuggaaguggcugaacu

SEQ ID NO: 567473 - RNA, 24 nt, Human
agaaauuggaaguggcugaacuuu

SEQ ID NO: 567474 - RNA, 19 nt, Human
agacacuucgacaccaaug

SEQ ID NO: 567475 - RNA, 24 nt, Human
agaccucuguauuugaaacaguuu

SEQ ID NO: 567476 - RNA, 21 nt, Human
agcacccuaaaaaaaaacuag

SEQ ID NO: 567477 - RNA, 19 nt, Human
agccaaaauaucagaagaa

SEQ ID NO: 567478 - RNA, 22 nt, Human
agcccaacaacaacaacaaaaa

SEQ ID NO: 567479 - RNA, 19 nt, Human
agcuauuucccuaccagga

SEQ ID NO: 567480 - RNA, 18 nt, Human
auauaacuuagcaaugaa

SEQ ID NO: 567481 - RNA, 23 nt, Human
auauauccucauccauguguaca

SEQ ID NO: 567482 - RNA, 21 nt, Human
aucaaggcccucacauacuaa

SEQ ID NO: 567483 - RNA, 21 nt, Human
aucauuaagcaaagccaaaau

SEQ ID NO: 567484 - RNA, 24 nt, Human
aucauuggcaauauuacauaacaa

SEQ ID NO: 567485 - RNA, 22 nt, Human
aucauuuucuugccuuuacaag

SEQ ID NO: 567486 - RNA, 19 nt, Human
aucugcaaacuauuucccc

SEQ ID NO: 567487 - RNA, 21 nt, Human
caaaaacaacucuaccugacc

SEQ ID NO: 567488 - RNA, 22 nt, Human
caaaaacaacucuaccugacca

SEQ ID NO: 567489 - RNA, 20 nt, Human
caaaauaaagacuguggcaa

SEQ ID NO: 567490 - RNA, 24 nt, Human
caaaauaaagacuguggcaaauaa

SEQ ID NO: 567491 - RNA, 21 nt, Human
caaauaaagacaagacaacua

SEQ ID NO: 567492 - RNA, 19 nt, Human
caacaaaaacaacucuacc

SEQ ID NO: 567493 - RNA, 21 nt, Human
caacaacaaaaacaacucuac

SEQ ID NO: 567494 - RNA, 25 nt, Human
caacaacaacaaaaacaacucuacc

SEQ ID NO: 567495 - RNA, 26 nt, Human
caacaacaacaacaaaaacaacucua

SEQ ID NO: 567496 - RNA, 24 nt, Human
caacuaagaagcauuuuccaccau

SEQ ID NO: 567497 - RNA, 21 nt, Human
caaguuaaaccaacagaacca

SEQ ID NO: 567498 - RNA, 20 nt, Human
caaguuuugcagacauaaug

SEQ ID NO: 567499 - RNA, 23 nt, Human
caaucguauuugaauguucaggu

SEQ ID NO: 567500 - RNA, 22 nt, Human
caaugacaucugaaggcagcac

SEQ ID NO: 567501 - RNA, 22 nt, Human
caaugcugagggugcuuucaga

SEQ ID NO: 567502 - RNA, 25 nt, Human
caccaguagccaauauuucaugauc

SEQ ID NO: 567503 - RNA, 18 nt, Human
cacccccaccccaccaaa

SEQ ID NO: 567504 - RNA, 19 nt, Human
cacuacaaaacagaaggag

SEQ ID NO: 567505 - RNA, 24 nt, Human
cacugaaacugcagauaucaaugc

SEQ ID NO: 567506 - RNA, 24 nt, Human
cacugcuaacacuuaaaggaauua

SEQ ID NO: 567507 - RNA, 25 nt, Human
cagaaaagguccauuggauacagug

SEQ ID NO: 567508 - RNA, 23 nt, Human
cagcacccuaaaaaaaaacuagg

SEQ ID NO: 567509 - RNA, 28 nt, Human
caggagaaacaucaaugacaucugaagg

SEQ ID NO: 567510 - RNA, 18 nt, Human
caggagcagaugccccca

SEQ ID NO: 567511 - RNA, 19 nt, Human
caguaacagagagucucca

SEQ ID NO: 567512 - RNA, 23 nt, Human
caguggcuuccaaguucggcugc

SEQ ID NO: 567513 - RNA, 24 nt, Human
caucaaaaaaaaaaaaaaacccac

SEQ ID NO: 567514 - RNA, 21 nt, Human
cauuagugaauaaagaacaga

SEQ ID NO: 567515 - RNA, 18 nt, Human
ccaaaucaaaacauaacu

SEQ ID NO: 567516 - RNA, 23 nt, Human
ccacauucacagaaaaugacacc

SEQ ID NO: 567517 - RNA, 26 nt, Human
ccaguggcaauaaguacaauacacaa

SEQ ID NO: 567518 - RNA, 26 nt, Human
ccaugcaucaaaaaaaaaaaaaaacc

SEQ ID NO: 567519 - RNA, 20 nt, Human
cccaccccaccaaaagagac

SEQ ID NO: 567520 - RNA, 26 nt, Human
cccaugcaucaaaaaaaaaaaaaaaa

SEQ ID NO: 567521 - RNA, 27 nt, Human
cccaugcaucaaaaaaaaaaaaaaacc

SEQ ID NO: 567522 - RNA, 25 nt, Human
ccccaccccaccaaaagagaccaaa

SEQ ID NO: 567523 - RNA, 26 nt, Human
cccccaccccaccaaaagagaccaaa

SEQ ID NO: 567524 - RNA, 25 nt, Human
ccgacacuaacacauauaacuuagc

SEQ ID NO: 567525 - RNA, 21 nt, Human
cgaaagggacugucggaagua

SEQ ID NO: 567526 - RNA, 23 nt, Human
cgcggaaauguagagagcaguag

SEQ ID NO: 567527 - RNA, 21 nt, Human
cgugccaguguagucuguguu

SEQ ID NO: 567528 - RNA, 20 nt, Human
cuauuuccccgacacuaaca

SEQ ID NO: 567529 - RNA, 20 nt, Human
cucacauacuaaugauuucc

SEQ ID NO: 567530 - RNA, 21 nt, Human
cucccguuucacugucacagg

SEQ ID NO: 567531 - RNA, 30 nt, Human
cuccggggucguaguugagcacuaggcggg

SEQ ID NO: 567532 - RNA, 18 nt, Human
cugcagcucuucuuuuaa

SEQ ID NO: 567533 - RNA, 19 nt, Human
cugggaagaaagcugcaga

SEQ ID NO: 567534 - RNA, 19 nt, Human
cuuuauauagcagggcauc

SEQ ID NO: 567535 - RNA, 18 nt, Human
gaaacuugugcuaaaaac

SEQ ID NO: 567536 - RNA, 20 nt, Human
gaacagcacccuaaaaaaaa

SEQ ID NO: 567537 - RNA, 23 nt, Human
gaccaaaaaaaaaaaaagaaaaa

SEQ ID NO: 567538 - RNA, 18 nt, Human
gagggggaauuuuuuuuc

SEQ ID NO: 567539 - RNA, 18 nt, Human
gcaaguuaaaccaacaga

SEQ ID NO: 567540 - RNA, 18 nt, Human
gcaucaaaaaaaaaaaaa

SEQ ID NO: 567541 - RNA, 19 nt, Human
gcggaguacuuccucaaca

SEQ ID NO: 567542 - RNA, 24 nt, Human
ggagcauauucaaaauaaagacug

SEQ ID NO: 567543 - RNA, 24 nt, Human
gggcugugcucuuucaagcaacug

SEQ ID NO: 567544 - RNA, 19 nt, Human
gggucuccggggucguagu

SEQ ID NO: 567545 - RNA, 19 nt, Human
uaaaaaggcauucuuauua

SEQ ID NO: 567546 - RNA, 22 nt, Human
uaaaacuguagcuauuucccua

SEQ ID NO: 567547 - RNA, 22 nt, Human
uaaacugaaacauacuuugugc

SEQ ID NO: 567548 - RNA, 24 nt, Human
uaaauaagcacugucaaagcugca

SEQ ID NO: 567549 - RNA, 18 nt, Human
uaagcaaagccaaaauau

SEQ ID NO: 567550 - RNA, 21 nt, Human
uaagcaaagccaaaauaucag

SEQ ID NO: 567551 - RNA, 23 nt, Human
uaagcaaagccaaaauaucagaa

SEQ ID NO: 567552 - RNA, 23 nt, Human
uacaauacacaaaucugggcaag

SEQ ID NO: 567553 - RNA, 27 nt, Human
uauaccaaaucuaucuauugaaagccc

SEQ ID NO: 567554 - RNA, 20 nt, Human
uaucagaagaacagucaacu

SEQ ID NO: 567555 - RNA, 26 nt, Human
uaucccgugccaguguagucuguguu

SEQ ID NO: 567556 - RNA, 21 nt, Human
ucaaugccuguggaacauaag

SEQ ID NO: 567557 - RNA, 23 nt, Human
ucacugucacucucugaucugga

SEQ ID NO: 567558 - RNA, 23 nt, Human
ucagaauaaaacuacucuccuuc

SEQ ID NO: 567559 - RNA, 20 nt, Human
ucaguuguggguucugaggu

SEQ ID NO: 567560 - RNA, 24 nt, Human
ucauaagacacugcuaacacuuaa

SEQ ID NO: 567561 - RNA, 23 nt, Human
ucauuggcaauauuacauaacaa

SEQ ID NO: 567562 - RNA, 24 nt, Human
ucccaugcaucaaaaaaaaaaaaa

SEQ ID NO: 567563 - RNA, 24 nt, Human
uccccauaaaaauuaaccggaaga

SEQ ID NO: 567564 - RNA, 22 nt, Human
uccuccuagcuucaaccuaccu

SEQ ID NO: 567565 - RNA, 25 nt, Human
ucuguauuugaaacaguuucuaagc

SEQ ID NO: 567566 - RNA, 18 nt, Human
ugaagugcaggacuggug

SEQ ID NO: 567567 - RNA, 20 nt, Human
ugacaccaggauacacuaca

SEQ ID NO: 567568 - RNA, 19 nt, Human
ugacucacuugucuucccc

SEQ ID NO: 567569 - RNA, 18 nt, Human
ugagaauaccagcauaaa

SEQ ID NO: 567570 - RNA, 23 nt, Human
ugcacaaagcauggccauaaaca

SEQ ID NO: 567571 - RNA, 18 nt, Human
ugcaucaaaaaaaaaaaa

SEQ ID NO: 567572 - RNA, 22 nt, Human
ugcugagggugcuuucagacau

SEQ ID NO: 567573 - RNA, 24 nt, Human
uggaaagcaaauaaagacaagaca

SEQ ID NO: 567574 - RNA, 25 nt, Human
uggaaagcaaauaaagacaagacaa

SEQ ID NO: 567575 - RNA, 27 nt, Human
uggaaagcaaauaaagacaagacaacu

SEQ ID NO: 567576 - RNA, 20 nt, Human
uggcagguggaguugguggg

SEQ ID NO: 567577 - RNA, 19 nt, Human
uggcuacugugucacaaac

SEQ ID NO: 567578 - RNA, 18 nt, Human
ugggaagaaagcugcaga

SEQ ID NO: 567579 - RNA, 24 nt, Human
ugggcaagucugggagcauuauuc

SEQ ID NO: 567580 - RNA, 20 nt, Human
uguagcaaauguccgcaaac

SEQ ID NO: 567581 - RNA, 18 nt, Human
ugucaaagcugcagcucu

SEQ ID NO: 567582 - RNA, 20 nt, Human
ugucaaagcugcagcucuuc

SEQ ID NO: 567583 - RNA, 21 nt, Human
ugucacaaacggguggcaggc

SEQ ID NO: 567584 - RNA, 22 nt, Human
uguccgcaaacacagcacgaaa

SEQ ID NO: 567585 - RNA, 24 nt, Human
ugugcuaaaaacaaccugaauuca

SEQ ID NO: 567586 - RNA, 19 nt, Human
ugugucacaaacggguggc

SEQ ID NO: 567587 - RNA, 24 nt, Human
uguuauauacucgcauaguuuuuu

SEQ ID NO: 567588 - RNA, 22 nt, Human
uuaaccggaagaagugcauuua

SEQ ID NO: 567589 - RNA, 19 nt, Human
uuauaaguaggcaaaccau

SEQ ID NO: 567590 - RNA, 22 nt, Human
uucaacacaaaacuguuacaaa

SEQ ID NO: 567591 - RNA, 23 nt, Human
uuccuuacauuuaaucauaaacu

SEQ ID NO: 567592 - RNA, 21 nt, Human
uucuccaugucuuguacuagg

SEQ ID NO: 567593 - RNA, 19 nt, Human
uugccaaccucccaugcau

SEQ ID NO: 567594 - RNA, 18 nt, Human
uuucaugaucagaaaugg

SEQ ID NO: 567595 - RNA, 21 nt, Human
uuuuuuucauaauacugcuga

SEQ ID NO: 567596 - RNA, 24 nt, Human
aaagugcugggauuacagguguga

SEQ ID NO: 567597 - RNA, 20 nt, Human
aagccagagcuggucaggga

SEQ ID NO: 567598 - RNA, 18 nt, Human
aagugcugggauuacagg

SEQ ID NO: 567599 - RNA, 19 nt, Human
aagugcugggauuacaggu

SEQ ID NO: 567600 - RNA, 26 nt, Human
aagugcugggauuacaggugugagcc

SEQ ID NO: 567601 - RNA, 23 nt, Human
accauguuggucaggcuggucuc

SEQ ID NO: 567602 - RNA, 21 nt, Human
acccggccccuuauccacaaa

SEQ ID NO: 567603 - RNA, 22 nt, Human
acugcaaucuccaucuccuggg

SEQ ID NO: 567604 - RNA, 19 nt, Human
agaagccagagcuggucag

SEQ ID NO: 567605 - RNA, 21 nt, Human
agcucucugcuccagcuucuc

SEQ ID NO: 567606 - RNA, 25 nt, Human
aggcuggagugcaguggcaucaucu

SEQ ID NO: 567607 - RNA, 24 nt, Human
aggugauccacucaccuuggccuc

SEQ ID NO: 567608 - RNA, 27 nt, Human
augggguuucauuucaccauguuggga

SEQ ID NO: 567609 - RNA, 30 nt, Human
augggguuucauuucaccauguuggucagg

SEQ ID NO: 567610 - RNA, 19 nt, Human
auuucaccauguuggucag

SEQ ID NO: 567611 - RNA, 20 nt, Human
auuucaccauguuggucagg

SEQ ID NO: 567612 - RNA, 26 nt, Human
caaacuucugaccucaggugauccaa

SEQ ID NO: 567613 - RNA, 24 nt, Human
caaagugcugggauuacaggugug

SEQ ID NO: 567614 - RNA, 25 nt, Human
caacagaccucucauucuacuuccc

SEQ ID NO: 567615 - RNA, 22 nt, Human
caagcgauucuccugucucagc

SEQ ID NO: 567616 - RNA, 22 nt, Human
caccaccacgccuggcuaauuu

SEQ ID NO: 567617 - RNA, 21 nt, Human
caccauguuggucaggcuggu

SEQ ID NO: 567618 - RNA, 24 nt, Human
caccauguuggucaggcuggucuc

SEQ ID NO: 567619 - RNA, 22 nt, Human
cagaccucucauucuacuuccc

SEQ ID NO: 567620 - RNA, 18 nt, Human
cagccucccgaguaaccg

SEQ ID NO: 567621 - RNA, 26 nt, Human
caggagcagaagccagagcuggucag

SEQ ID NO: 567622 - RNA, 19 nt, Human
cagggagguaggaugaggu

SEQ ID NO: 567623 - RNA, 23 nt, Human
caugcaccaccacgccuggcuaa

SEQ ID NO: 567624 - RNA, 28 nt, Human
cauucuacuucccccagguaacuccuua

SEQ ID NO: 567625 - RNA, 20 nt, Human
ccaaagugcugggauuacag

SEQ ID NO: 567626 - RNA, 21 nt, Human
ccaaagugcugggauuacagg

SEQ ID NO: 567627 - RNA, 21 nt, Human
ccaaagugcugggauuacagg

SEQ ID NO: 567628 - RNA, 24 nt, Human
ccaaagugcugggauuacaggugu

SEQ ID NO: 567629 - RNA, 24 nt, Human
ccacaaauuuggauugagcuacag

SEQ ID NO: 567630 - RNA, 24 nt, Human
cccgaguaaccgggacuacaggca

SEQ ID NO: 567631 - RNA, 25 nt, Human
ccuauacucaugccagcucucugcu

SEQ ID NO: 567632 - RNA, 23 nt, Human
ccuggguucaagcgauucuccug

SEQ ID NO: 567633 - RNA, 24 nt, Human
cgcucuguagcccaggcuggagug

SEQ ID NO: 567634 - RNA, 21 nt, Human
cgggacuacaggcaugcacca

SEQ ID NO: 567635 - RNA, 24 nt, Human
cuacugcaaucuccaucuccuggg

SEQ ID NO: 567636 - RNA, 24 nt, Human
cucaggugauccacucaccuuggc

SEQ ID NO: 567637 - RNA, 21 nt, Human
cuccuggguucaagcgauucu

SEQ ID NO: 567638 - RNA, 21 nt, Human
cucgcucuguagcccaggcug

SEQ ID NO: 567639 - RNA, 21 nt, Human
cucucauucuacuucccccag

SEQ ID NO: 567640 - RNA, 23 nt, Human
cugaccucaggugauccacucac

SEQ ID NO: 567641 - RNA, 19 nt, Human
cugucucagccucccgagu

SEQ ID NO: 567642 - RNA, 19 nt, Human
cuuauccacaaauuuggau

SEQ ID NO: 567643 - RNA, 22 nt, Human
cuuucauagcauuccccuuugg

SEQ ID NO: 567644 - RNA, 19 nt, Human
gaaaauguguccuuccucc

SEQ ID NO: 567645 - RNA, 23 nt, Human
gaccucaggugauccacucaccu

SEQ ID NO: 567646 - RNA, 27 nt, Human
gagaugggguuucauuucaccaugucg

SEQ ID NO: 567647 - RNA, 30 nt, Human
gagaugggguuucauuucaccauguugguu

SEQ ID NO: 567648 - RNA, 20 nt, Human
gagcagaagccagagcuggu

SEQ ID NO: 567649 - RNA, 24 nt, Human
gaguaaccgggacuacaggcaugc

SEQ ID NO: 567650 - RNA, 18 nt, Human
gauuacaggugugagcca

SEQ ID NO: 567651 - RNA, 22 nt, Human
gauuacaggugugagccacugc

SEQ ID NO: 567652 - RNA, 23 nt, Human
gauuacaggugugagccacugca

SEQ ID NO: 567653 - RNA, 21 nt, Human
gauucuccugucucagccucc

SEQ ID NO: 567654 - RNA, 18 nt, Human
gcaucaucuuggccuacu

SEQ ID NO: 567655 - RNA, 22 nt, Human
gccacugcacccggccccuuau

SEQ ID NO: 567656 - RNA, 23 nt, Human
gcccaggcuggagugcaguggca

SEQ ID NO: 567657 - RNA, 24 nt, Human
gcccaggcuggagugcaguggcau

SEQ ID NO: 567658 - RNA, 24 nt, Human
gcgauucuccugucucagccuccc

SEQ ID NO: 567659 - RNA, 22 nt, Human
gcucuguagcccaggcuggagu

SEQ ID NO: 567660 - RNA, 20 nt, Human
gcuggagugcaguggcauca

SEQ ID NO: 567661 - RNA, 24 nt, Human
ggcuggucucaaacuucugaccuc

SEQ ID NO: 567662 - RNA, 23 nt, Human
gggacuacaggcaugcaccacca

SEQ ID NO: 567663 - RNA, 19 nt, Human
ggucucaaacuucugaccu

SEQ ID NO: 567664 - RNA, 24 nt, Human
gugauccacucaccuuggccuccc

SEQ ID NO: 567665 - RNA, 24 nt, Human
uaauuuuuauauuuuuaguugaga

SEQ ID NO: 567666 - RNA, 22 nt, Human
uacaggcaugcaccaccacgcc

SEQ ID NO: 567667 - RNA, 19 nt, Human
uacaggugugagccacugc

SEQ ID NO: 567668 - RNA, 23 nt, Human
uacaggugugagccacugcaccc

SEQ ID NO: 567669 - RNA, 18 nt, Human
uagcccaggcuggagugc

SEQ ID NO: 567670 - RNA, 30 nt, Human
uaguugagaugggguuucauuucaccaugg

SEQ ID NO: 567671 - RNA, 22 nt, Human
uauucccaacagaccucucauu

SEQ ID NO: 567672 - RNA, 21 nt, Human
ucagccucccgaguaaccggg

SEQ ID NO: 567673 - RNA, 23 nt, Human
ucccaaagugcugggauuacagg

SEQ ID NO: 567674 - RNA, 24 nt, Human
ucccgaguaaccgggacuacaggc

SEQ ID NO: 567675 - RNA, 21 nt, Human
uccuggguucaagcgauucuc

SEQ ID NO: 567676 - RNA, 24 nt, Human
uccuggguucaagcgauucuccug

SEQ ID NO: 567677 - RNA, 22 nt, Human
uccuuccuccuucccuauacuc

SEQ ID NO: 567678 - RNA, 24 nt, Human
ucuccuggguucaagcgauucucc

SEQ ID NO: 567679 - RNA, 24 nt, Human
ucuccugucucagccucccgagua

SEQ ID NO: 567680 - RNA, 23 nt, Human
ucucgcucuguagcccaggcugg

SEQ ID NO: 567681 - RNA, 24 nt, Human
ucucgcucuguagcccaggcugga

SEQ ID NO: 567682 - RNA, 24 nt, Human
ucuguagcccaggcuggagugcag

SEQ ID NO: 567683 - RNA, 23 nt, Human
ugaaaauguguccuuccuccuuc

SEQ ID NO: 567684 - RNA, 20 nt, Human
ugaccucaggugauccacuc

SEQ ID NO: 567685 - RNA, 24 nt, Human
ugauccacucaccuuggccuccca

SEQ ID NO: 567686 - RNA, 21 nt, Human
ugcuccagcuucucuuggccc

SEQ ID NO: 567687 - RNA, 24 nt, Human
ugcugggauuacaggugugagcca

SEQ ID NO: 567688 - RNA, 23 nt, Human
uggagugcaguggcaucaucuug

SEQ ID NO: 567689 - RNA, 24 nt, Human
uggagugcaguggcaucaucuugg

SEQ ID NO: 567690 - RNA, 20 nt, Human
uggcaucaucuuggccuacu

SEQ ID NO: 567691 - RNA, 18 nt, Human
ugggauuacaggugugag

SEQ ID NO: 567692 - RNA, 19 nt, Human
ugggauuacaggugugagc

SEQ ID NO: 567693 - RNA, 21 nt, Human
ugggauuacaggugugagcca

SEQ ID NO: 567694 - RNA, 22 nt, Human
ugggauuacaggugugagccac

SEQ ID NO: 567695 - RNA, 22 nt, Human
ugggauuacaggugugagccac

SEQ ID NO: 567696 - RNA, 24 nt, Human
ugggauuacaggugugagccacug

SEQ ID NO: 567697 - RNA, 30 nt, Human
ugggguuucauuucaccauguuggucaggg

SEQ ID NO: 567698 - RNA, 23 nt, Human
uggguucaagcgauucuccuguc

SEQ ID NO: 567699 - RNA, 24 nt, Human
uggguucaagcgauucuccugucu

SEQ ID NO: 567700 - RNA, 24 nt, Human
uggucaggcuggucucaaacuucu

SEQ ID NO: 567701 - RNA, 24 nt, Human
ugucucagccucccgaguaaccgg

SEQ ID NO: 567702 - RNA, 18 nt, Human
uuaguugagaugggguuu

SEQ ID NO: 567703 - RNA, 21 nt, Human
uuaguugagaugggguuucau

SEQ ID NO: 567704 - RNA, 30 nt, Human
uuaguugagaugggguuucauuucaccauu

SEQ ID NO: 567705 - RNA, 23 nt, Human
uucaagcgauucuccugucucag

SEQ ID NO: 567706 - RNA, 18 nt, Human
uuggccucccaaagugcu

SEQ ID NO: 567707 - RNA, 24 nt, Human
uuucaccauguuggucaggcuggu

SEQ ID NO: 567708 - RNA, 24 nt, Human
uuuuuaguugagaugggguuucau

SEQ ID NO: 567709 - RNA, 27 nt, Human
aaaaaaaaaaaaaaaaaaaagacagaa

SEQ ID NO: 567710 - RNA, 25 nt, Human
aaaaaaaaaaaaaaagacagaaaag

SEQ ID NO: 567711 - RNA, 19 nt, Human
aacacggugaaaccccguc

SEQ ID NO: 567712 - RNA, 20 nt, Human
aacacggugaaaccccgucu

SEQ ID NO: 567713 - RNA, 21 nt, Human
aacacggugaaaccccgucuc

SEQ ID NO: 567714 - RNA, 24 nt, Human
acagaacaagacucugccucaaaa

SEQ ID NO: 567715 - RNA, 24 nt, Human
accccgucucuacuaaaaauacaa

SEQ ID NO: 567716 - RNA, 28 nt, Human
acucugccucaaaaaaaaaaaaaaaaaa

SEQ ID NO: 567717 - RNA, 18 nt, Human
acugcacgccagccuggg

SEQ ID NO: 567718 - RNA, 24 nt, Human
acugcacgccagccugggcgacag

SEQ ID NO: 567719 - RNA, 19 nt, Human
agacagaaaagucccaauu

SEQ ID NO: 567720 - RNA, 24 nt, Human
agagcuugcagugagccgagaucg

SEQ ID NO: 567721 - RNA, 24 nt, Human
agaugggcggaucacgaggucagg

SEQ ID NO: 567722 - RNA, 24 nt, Human
agcacuuugggaggccgagauggg

SEQ ID NO: 567723 - RNA, 24 nt, Human
agccugggcgacagaacaagacuc

SEQ ID NO: 567724 - RNA, 21 nt, Human
aggcagagcuugcagugagcc

SEQ ID NO: 567725 - RNA, 24 nt, Human
aggcagagcuugcagugagccgag

SEQ ID NO: 567726 - RNA, 24 nt, Human
aggcaggagaauggcgugaacccg

SEQ ID NO: 567727 - RNA, 21 nt, Human
aggccgagaugggcggaucac

SEQ ID NO: 567728 - RNA, 18 nt, Human
aggcugaggcaggagaau

SEQ ID NO: 567729 - RNA, 21 nt, Human
agggcccagugucugcaugua

SEQ ID NO: 567730 - RNA, 21 nt, Human
auacauacaaugguacuaccu

SEQ ID NO: 567731 - RNA, 24 nt, Human
aucgcgccacugcacgccagccug

SEQ ID NO: 567732 - RNA, 25 nt, Human
caaaaaaaauuggccgggcguggug

SEQ ID NO: 567733 - RNA, 20 nt, Human
caagaugagcaccauccucc

SEQ ID NO: 567734 - RNA, 23 nt, Human
caagaugagcaccauccuccauu

SEQ ID NO: 567735 - RNA, 24 nt, Human
cacgccuguaaucccagcacuuug

SEQ ID NO: 567736 - RNA, 20 nt, Human
cacugcacgccagccugggc

SEQ ID NO: 567737 - RNA, 23 nt, Human
cacugcacgccagccugggcgac

SEQ ID NO: 567738 - RNA, 24 nt, Human
cacugcacgccagccugggcgaca

SEQ ID NO: 567739 - RNA, 24 nt, Human
cagaaggcugggcacgguggcuca

SEQ ID NO: 567740 - RNA, 19 nt, Human
cagcaauagcaccuuccca

SEQ ID NO: 567741 - RNA, 24 nt, Human
cagcacuuugggaggccgagaugg

SEQ ID NO: 567742 - RNA, 28 nt, Human
cagcacuuugggaggccgagaugggcgg

SEQ ID NO: 567743 - RNA, 24 nt, Human
cagcuacucaggaggcugaggcag

SEQ ID NO: 567744 - RNA, 21 nt, Human
ccacugcacgccagccugggc

SEQ ID NO: 567745 - RNA, 21 nt, Human
ccacugcacgccagccugggc

SEQ ID NO: 567746 - RNA, 24 nt, Human
ccacugcacgccagccugggcgac

SEQ ID NO: 567747 - RNA, 24 nt, Human
ccgcuccgccgcacuucuccggcc

SEQ ID NO: 567748 - RNA, 23 nt, Human
ccugacuaacacggugaaacccc

SEQ ID NO: 567749 - RNA, 24 nt, Human
ccugacuaacacggugaaaccccg

SEQ ID NO: 567750 - RNA, 21 nt, Human
ccuguagucccagcuacucag

SEQ ID NO: 567751 - RNA, 22 nt, Human
ccuguagucccagcuacucagg

SEQ ID NO: 567752 - RNA, 24 nt, Human
cgagaccauccugacuaacacggu

SEQ ID NO: 567753 - RNA, 24 nt, Human
cgagaugggcggaucacgagguca

SEQ ID NO: 567754 - RNA, 23 nt, Human
cgccuguaaucccagcacuuugg

SEQ ID NO: 567755 - RNA, 24 nt, Human
cgccuguaaucccagcacuuuggg

SEQ ID NO: 567756 - RNA, 24 nt, Human
cgccuguagucccagcuacucagg

SEQ ID NO: 567757 - RNA, 18 nt, Human
cucaaaaaaaaaaaaaaa

SEQ ID NO: 567758 - RNA, 22 nt, Human
cucacgccuguaaucccagcac

SEQ ID NO: 567759 - RNA, 24 nt, Human
cucacgccuguaaucccagcacuu

SEQ ID NO: 567760 - RNA, 22 nt, Human
cuccauuuauccuuguauuucc

SEQ ID NO: 567761 - RNA, 19 nt, Human
cucugccucaaaaaaaaaa

SEQ ID NO: 567762 - RNA, 22 nt, Human
cucugccucaaaaaaaaaaaaa

SEQ ID NO: 567763 - RNA, 18 nt, Human
cugacuaacacggugaaa

SEQ ID NO: 567764 - RNA, 19 nt, Human
cuugcagugagccgagauc

SEQ ID NO: 567765 - RNA, 21 nt, Human
cuugcagugagccgagaucgc

SEQ ID NO: 567766 - RNA, 20 nt, Human
gaacccgggaggcagagcuu

SEQ ID NO: 567767 - RNA, 23 nt, Human
gacagaacaagacucugccucaa

SEQ ID NO: 567768 - RNA, 23 nt, Human
gagaucgcgccacugcacgccag

SEQ ID NO: 567769 - RNA, 18 nt, Human
gagcuugcagugagccga

SEQ ID NO: 567770 - RNA, 24 nt, Human
gccacugcacgccagccugggcga

SEQ ID NO: 567771 - RNA, 20 nt, Human
gccgagaucgcgccacugca

SEQ ID NO: 567772 - RNA, 19 nt, Human
gccgggcgugguggcgggc

SEQ ID NO: 567773 - RNA, 21 nt, Human
gccgggcgugguggcgggcgc

SEQ ID NO: 567774 - RNA, 22 nt, Human
gcugaggcaggagaauggcgug

SEQ ID NO: 567775 - RNA, 19 nt, Human
gcugggcacgguggcucac

SEQ ID NO: 567776 - RNA, 23 nt, Human
ggcacgguggcucacgccuguaa

SEQ ID NO: 567777 - RNA, 21 nt, Human
ggcggaucacgaggucaggag

SEQ ID NO: 567778 - RNA, 18 nt, Human
ggcgugguggcgggcgcc

SEQ ID NO: 567779 - RNA, 18 nt, Human
gggcacgguggcucacgc

SEQ ID NO: 567780 - RNA, 24 nt, Human
gggcgugguggcgggcgccuguag

SEQ ID NO: 567781 - RNA, 24 nt, Human
gguggcgggcgccuguagucccag

SEQ ID NO: 567782 - RNA, 23 nt, Human
gguggcucacgccuguaauccca

SEQ ID NO: 567783 - RNA, 24 nt, Human
gguggcucacgccuguaaucccag

SEQ ID NO: 567784 - RNA, 23 nt, Human
uaaauagaacagaaggcugggca

SEQ ID NO: 567785 - RNA, 22 nt, Human
uaacacggugaaaccccgucuc

SEQ ID NO: 567786 - RNA, 24 nt, Human
uaacacggugaaaccccgucucua

SEQ ID NO: 567787 - RNA, 21 nt, Human
uaccuucaccaacuuuuucau

SEQ ID NO: 567788 - RNA, 22 nt, Human
ucaaaaaaaaaaaaaaaaaaaa

SEQ ID NO: 567789 - RNA, 18 nt, Human
ucacgaggucaggagauc

SEQ ID NO: 567790 - RNA, 24 nt, Human
ucacgaggucaggagaucgagacc

SEQ ID NO: 567791 - RNA, 20 nt, Human
uccgcgcgccgccgcgcccg

SEQ ID NO: 567792 - RNA, 23 nt, Human
ucgcgccacugcacgccagccug

SEQ ID NO: 567793 - RNA, 20 nt, Human
ucggccuaaacaguaauaaa

SEQ ID NO: 567794 - RNA, 22 nt, Human
ucucuacuaaaaauacaaaaaa

SEQ ID NO: 567795 - RNA, 23 nt, Human
ucugccucaaaaaaaaaaaaaaa

SEQ ID NO: 567796 - RNA, 22 nt, Human
ugagccgagaucgcgccacugc

SEQ ID NO: 567797 - RNA, 23 nt, Human
ugaggcaggagaauggcgugaac

SEQ ID NO: 567798 - RNA, 24 nt, Human
ugaggcaggagaauggcgugaacc

SEQ ID NO: 567799 - RNA, 25 nt, Human
ugaggcaggagaauggcgugaaccc

SEQ ID NO: 567800 - RNA, 25 nt, Human
ugcacgccagccugggcgacagaac

SEQ ID NO: 567801 - RNA, 24 nt, Human
uggcucacgccuguaaucccagca

SEQ ID NO: 567802 - RNA, 19 nt, Human
ugggaggccgagaugggcg

SEQ ID NO: 567803 - RNA, 24 nt, Human
ugggaggccgagaugggcggauca

SEQ ID NO: 567804 - RNA, 24 nt, Human
ugguggcgggcgccuguaguccca

SEQ ID NO: 567805 - RNA, 23 nt, Human
uuaagcagcaauagcaccuuccc

SEQ ID NO: 567806 - RNA, 21 nt, Human
uuaauauuaacauacauacaa

SEQ ID NO: 567807 - RNA, 20 nt, Human
uucuccgcgcgccgccgcgc

SEQ ID NO: 567808 - RNA, 18 nt, Human
uugcagugagccgagauc

SEQ ID NO: 567809 - RNA, 19 nt, Human
uugcagugagccgagaucg

SEQ ID NO: 567810 - RNA, 22 nt, Human
uugcagugagccgagaucgcgc

SEQ ID NO: 567811 - RNA, 22 nt, Human
aaaaguccaaaauuauauagaa

SEQ ID NO: 567812 - RNA, 23 nt, Human
aacaaggggagccuccgccacca

SEQ ID NO: 567813 - RNA, 23 nt, Human
aacuaaauguuuuaacucucaaa

SEQ ID NO: 567814 - RNA, 21 nt, Human
aacuccagaggcaaaaaaaaa

SEQ ID NO: 567815 - RNA, 19 nt, Human
accccggagcccgcagccc

SEQ ID NO: 567816 - RNA, 21 nt, Human
acuccagaggcaaaaaaaaaa

SEQ ID NO: 567817 - RNA, 18 nt, Human
acugcuaucuccgcgcgc

SEQ ID NO: 567818 - RNA, 21 nt, Human
aggcgccaccuccgggucgcc

SEQ ID NO: 567819 - RNA, 24 nt, Human
aguccugcucccccggcuugggga

SEQ ID NO: 567820 - RNA, 24 nt, Human
aucacaaaacuuaucuccauaagg

SEQ ID NO: 567821 - RNA, 23 nt, Human
caaauagaaaacauacacaucua

SEQ ID NO: 567822 - RNA, 22 nt, Human
cacgcagguaucguggccuccg

SEQ ID NO: 567823 - RNA, 19 nt, Human
cagaggcaaaaaaaaaaaa

SEQ ID NO: 567824 - RNA, 22 nt, Human
caggcuccgggaggacaaacaa

SEQ ID NO: 567825 - RNA, 21 nt, Human
caggugaguuuucuccuccuu

SEQ ID NO: 567826 - RNA, 23 nt, Human
ccacacugcuaucuccgcgcgca

SEQ ID NO: 567827 - RNA, 22 nt, Human
ccagaggcaaaaaaaaaaaaaa

SEQ ID NO: 567828 - RNA, 18 nt, Human
ccccggagcccgcagccc

SEQ ID NO: 567829 - RNA, 21 nt, Human
ccccggagcccgcagccccag

SEQ ID NO: 567830 - RNA, 18 nt, Human
ccccucgcgagcggaagc

SEQ ID NO: 567831 - RNA, 24 nt, Human
ccccucgcgagcggaagcgcaggc

SEQ ID NO: 567832 - RNA, 21 nt, Human
ccgcgcgcacucucucuuccc

SEQ ID NO: 567833 - RNA, 22 nt, Human
ccgcgugccugcucaaguccuu

SEQ ID NO: 567834 - RNA, 27 nt, Human
cgcagaagaaccccacgccaggcuccg

SEQ ID NO: 567835 - RNA, 18 nt, Human
cgcgagcggaagcgcagg

SEQ ID NO: 567836 - RNA, 22 nt, Human
cgcgcacucucucuucccgcag

SEQ ID NO: 567837 - RNA, 22 nt, Human
cgcuggccgcccgugcccuccg

SEQ ID NO: 567838 - RNA, 21 nt, Human
cuucccgcagaagaaccccac

SEQ ID NO: 567839 - RNA, 19 nt, Human
gacacgcuccucuccagcu

SEQ ID NO: 567840 - RNA, 22 nt, Human
gacuccucgcguguuuccacac

SEQ ID NO: 567841 - RNA, 18 nt, Human
gaguuuucuccuccagga

SEQ ID NO: 567842 - RNA, 18 nt, Human
gccgcccgugcccuccga

SEQ ID NO: 567843 - RNA, 21 nt, Human
gggaggacaaacaaggggagc

SEQ ID NO: 567844 - RNA, 24 nt, Human
uagaaaacauacacaucuauuaca

SEQ ID NO: 567845 - RNA, 23 nt, Human
uaucuccaauuucccccaugaga

SEQ ID NO: 567846 - RNA, 24 nt, Human
uaucuccaauuucccccaugagaa

SEQ ID NO: 567847 - RNA, 19 nt, Human
uccagaggcaaaaaaaaaa

SEQ ID NO: 567848 - RNA, 19 nt, Human
uccagaggcaaaaaaaaaa

SEQ ID NO: 567849 - RNA, 23 nt, Human
uccagaggcaaaaaaaaaaaaaa

SEQ ID NO: 567850 - RNA, 26 nt, Human
uccagaggcaaaaaaaaaaaaaauua

SEQ ID NO: 567851 - RNA, 23 nt, Human
uccgcgcgcacucucucuucccg

SEQ ID NO: 567852 - RNA, 25 nt, Human
uccgcgcgcacucucucuucccgca

SEQ ID NO: 567853 - RNA, 23 nt, Human
ucucaaauguuuuaacucucaaa

SEQ ID NO: 567854 - RNA, 24 nt, Human
ucuccaauuucccccaugagaauc

SEQ ID NO: 567855 - RNA, 18 nt, Human
ugaccccggagcccgcag

SEQ ID NO: 567856 - RNA, 18 nt, Human
ugcggccggcggaggcgc

SEQ ID NO: 567857 - RNA, 21 nt, Human
uuaagacaacaguuaacagaa

SEQ ID NO: 567858 - RNA, 25 nt, Human
uuuaaacuccagaggcaaaaaaaaa

SEQ ID NO: 567859 - RNA, 19 nt, Human
aaaaccaagcuacaggucc

SEQ ID NO: 567860 - RNA, 22 nt, Human
aaacaugcagagggcuuggagu

SEQ ID NO: 567861 - RNA, 22 nt, Human
aacucaucagagaaugucccag

SEQ ID NO: 567862 - RNA, 23 nt, Human
acaacaaaaaggcgguagucagg

SEQ ID NO: 567863 - RNA, 24 nt, Human
acacagaaaauuauuuucuuuaau

SEQ ID NO: 567864 - RNA, 18 nt, Human
acauagcucucuuucaca

SEQ ID NO: 567865 - RNA, 25 nt, Human
accaggaagcuuaagggguggccca

SEQ ID NO: 567866 - RNA, 18 nt, Human
agacaaugacugaagcuc

SEQ ID NO: 567867 - RNA, 18 nt, Human
agccaggucgcggugagg

SEQ ID NO: 567868 - RNA, 21 nt, Human
agucagguacugaaugcccuc

SEQ ID NO: 567869 - RNA, 19 nt, Human
cacucaauaaagaaguaca

SEQ ID NO: 567870 - RNA, 22 nt, Human
cagccgagggccagcccgcgcc

SEQ ID NO: 567871 - RNA, 18 nt, Human
cagguacugaaugcccuc

SEQ ID NO: 567872 - RNA, 19 nt, Human
cagguacugaaugcccucc

SEQ ID NO: 567873 - RNA, 18 nt, Human
caggugggugaucuucuc

SEQ ID NO: 567874 - RNA, 19 nt, Human
cccuccagacuaaccaagg

SEQ ID NO: 567875 - RNA, 21 nt, Human
cccuccagacuaaccaaggag

SEQ ID NO: 567876 - RNA, 26 nt, Human
ccuccucgcucagcaccagccgaggg

SEQ ID NO: 567877 - RNA, 21 nt, Human
ccucgcucagcaccagccgag

SEQ ID NO: 567878 - RNA, 20 nt, Human
cgcccgaaccgccuccucgc

SEQ ID NO: 567879 - RNA, 22 nt, Human
cgggguucagccggaaguccac

SEQ ID NO: 567880 - RNA, 19 nt, Human
cucgguuaaggcguggagc

SEQ ID NO: 567881 - RNA, 18 nt, Human
cugaagcucagccagguc

SEQ ID NO: 567882 - RNA, 18 nt, Human
cuucaccacgggguucag

SEQ ID NO: 567883 - RNA, 22 nt, Human
gaaugcccuccagacuaaccaa

SEQ ID NO: 567884 - RNA, 20 nt, Human
gacugaagcucagccagguc

SEQ ID NO: 567885 - RNA, 19 nt, Human
gcccgaaccgccuccucgc

SEQ ID NO: 567886 - RNA, 21 nt, Human
gccuccucgcucagcaccagc

SEQ ID NO: 567887 - RNA, 21 nt, Human
gguggcccagcuucucggcag

SEQ ID NO: 567888 - RNA, 26 nt, Human
guacugaaugcccuccagacuaacca

SEQ ID NO: 567889 - RNA, 25 nt, Human
uaguagagauugagacucuccaaug

SEQ ID NO: 567890 - RNA, 21 nt, Human
ucaaccuucaccacgggguuc

SEQ ID NO: 567891 - RNA, 21 nt, Human
ucagccggaaguccacaucca

SEQ ID NO: 567892 - RNA, 20 nt, Human
ucaggcucaaccuucaccac

SEQ ID NO: 567893 - RNA, 21 nt, Human
ucaucagagaaugucccaggu

SEQ ID NO: 567894 - RNA, 22 nt, Human
uccaaaaauccuaaauaauuac

SEQ ID NO: 567895 - RNA, 21 nt, Human
uccacgagcucgguuaaggcg

SEQ ID NO: 567896 - RNA, 18 nt, Human
uccugaauacauuccaaa

SEQ ID NO: 567897 - RNA, 21 nt, Human
ucggugcacuuggcucugggg

SEQ ID NO: 567898 - RNA, 23 nt, Human
ugaaugcccuccagacuaaccaa

SEQ ID NO: 567899 - RNA, 21 nt, Human
ugcagucagguacugaaugcc

SEQ ID NO: 567900 - RNA, 22 nt, Human
ugcuggagcuuggggagcaggu

SEQ ID NO: 567901 - RNA, 20 nt, Human
uggccaaggccucggugcac

SEQ ID NO: 567902 - RNA, 19 nt, Human
uggcccagcuucucggcag

SEQ ID NO: 567903 - RNA, 22 nt, Human
ugguguggucugcccucuuucc

SEQ ID NO: 567904 - RNA, 19 nt, Human
uguaguagagauugagacu

SEQ ID NO: 567905 - RNA, 19 nt, Human
uuaaacucaucagagaaug

SEQ ID NO: 567906 - RNA, 24 nt, Human
uuccaaaaauccuaaauaauuacc

SEQ ID NO: 567907 - RNA, 24 nt, Human
uuccaggaauagacaaugacugaa

SEQ ID NO: 567908 - RNA, 19 nt, Human
uuguaguagagauugagac

SEQ ID NO: 567909 - RNA, 25 nt, Human
uuuaauuaucauacauagcucucuu

SEQ ID NO: 567910 - RNA, 21 nt, Human
uuuagaaaaccaagcuacagg

SEQ ID NO: 567911 - RNA, 21 nt, Human
aagcaaccaaggaguuagaac

SEQ ID NO: 567912 - RNA, 24 nt, Human
aagcaaccaaggaguuagaacuca

SEQ ID NO: 567913 - RNA, 19 nt, Human
acaaacaugucguacagcc

SEQ ID NO: 567914 - RNA, 19 nt, Human
aggaacucgcagucccccu

SEQ ID NO: 567915 - RNA, 18 nt, Human
aggucuugcggcaccaac

SEQ ID NO: 567916 - RNA, 23 nt, Human
caacucccgggcucgcugcaccu

SEQ ID NO: 567917 - RNA, 23 nt, Human
caccaccggcuggucuuccucag

SEQ ID NO: 567918 - RNA, 23 nt, Human
cagacaugacccgagcgcucucc

SEQ ID NO: 567919 - RNA, 20 nt, Human
ccccugggcagacaugaccc

SEQ ID NO: 567920 - RNA, 21 nt, Human
ccccugggcagacaugacccg

SEQ ID NO: 567921 - RNA, 19 nt, Human
cccgagcgcucuccagccu

SEQ ID NO: 567922 - RNA, 19 nt, Human
cccgagcugugucuggugg

SEQ ID NO: 567923 - RNA, 22 nt, Human
cccggcgguggcgguccgcucu

SEQ ID NO: 567924 - RNA, 22 nt, Human
ccgccagcccgaagcggccgga

SEQ ID NO: 567925 - RNA, 23 nt, Human
ccuacaauuacacaggcccgagc

SEQ ID NO: 567926 - RNA, 20 nt, Human
ccucccggcgguggcggucc

SEQ ID NO: 567927 - RNA, 25 nt, Human
cuccagccgccagcccgaagcggcc

SEQ ID NO: 567928 - RNA, 22 nt, Human
cucgcagucccccugggcagac

SEQ ID NO: 567929 - RNA, 26 nt, Human
cugauguaauaaugcugauuucucuc

SEQ ID NO: 567930 - RNA, 23 nt, Human
cugcgggccgugaucagccacgc

SEQ ID NO: 567931 - RNA, 24 nt, Human
gccauggcaaucacugcugagugu

SEQ ID NO: 567932 - RNA, 26 nt, Human
gcucugugccauggcaaucacugcug

SEQ ID NO: 567933 - RNA, 24 nt, Human
gcugagugucuucuccuacaauua

SEQ ID NO: 567934 - RNA, 19 nt, Human
ggaacucgcagucccccug

SEQ ID NO: 567935 - RNA, 25 nt, Human
gucugccggguagaggcugcgggcc

SEQ ID NO: 567936 - RNA, 26 nt, Human
uaaacuucuuaaaaauuggguuuguu

SEQ ID NO: 567937 - RNA, 23 nt, Human
uagaacucagaugguuuucuucu

SEQ ID NO: 567938 - RNA, 19 nt, Human
ucccccugggcagacauga

SEQ ID NO: 567939 - RNA, 20 nt, Human
uccuacaauuacacaggccc

SEQ ID NO: 567940 - RNA, 22 nt, Human
ucuccagccgccagcccgaagc

SEQ ID NO: 567941 - RNA, 18 nt, Human
uguaacagcaacaaugac

SEQ ID NO: 567942 - RNA, 23 nt, Human
ugucguacagcagccucccggcg

SEQ ID NO: 567943 - RNA, 21 nt, Human
uuacacaggcccgagcugugu

SEQ ID NO: 567944 - RNA, 23 nt, Human
uuagaacucagaugguuuucuuc

SEQ ID NO: 567945 - RNA, 20 nt, Human
uuuaggaugauuuuuauuua

SEQ ID NO: 567946 - RNA, 18 nt, Human
uaaauaacagccugggua

SEQ ID NO: 567947 - RNA, 20 nt, Human
uaaauaacagccuggguauc

SEQ ID NO: 567948 - RNA, 21 nt, Human
ugggguaauaaucaguucaug

SEQ ID NO: 567949 - RNA, 21 nt, Human
uucacgaaacggguguaacag

SEQ ID NO: 567950 - RNA, 21 nt, Human
aagugggggcaauaugaagug

SEQ ID NO: 567951 - RNA, 18 nt, Human
agcggguacuaaugcugc

SEQ ID NO: 567952 - RNA, 21 nt, Human
agcggguacuaaugcugcaca

SEQ ID NO: 567953 - RNA, 19 nt, Human
cagcacucgaaacaagaaa

SEQ ID NO: 567954 - RNA, 21 nt, Human
cgacucccgcggcucgggccu

SEQ ID NO: 567955 - RNA, 18 nt, Human
cuaaugcugcacacagac

SEQ ID NO: 567956 - RNA, 22 nt, Human
gauccgucaaaguguuuucccu

SEQ ID NO: 567957 - RNA, 20 nt, Human
gggucagucagcacucgaaa

SEQ ID NO: 567958 - RNA, 21 nt, Human
uccgucaaaguguuuucccuu

SEQ ID NO: 567959 - RNA, 23 nt, Human
ucugacaaaaacgauccgucaaa

SEQ ID NO: 567960 - RNA, 18 nt, Human
ugaggggagaaaagggga

SEQ ID NO: 567961 - RNA, 21 nt, Human
uuaaugaauaauguaaacuug

SEQ ID NO: 567962 - RNA, 21 nt, Human
uucacacgcacaaaaugaaau

SEQ ID NO: 567963 - RNA, 19 nt, Human
uuuaacacagcaagguaga

SEQ ID NO: 567964 - RNA, 21 nt, Human
uuucccuuucacacgcacaaa

SEQ ID NO: 567965 - RNA, 25 nt, Human
uuugaacuacauuuauuuuucaaca

SEQ ID NO: 567966 - RNA, 18 nt, Human
aaaagccuccccgccccc

SEQ ID NO: 567967 - RNA, 23 nt, Human
aaagccuccccgcccccccaccu

SEQ ID NO: 567968 - RNA, 18 nt, Human
aacagaaacggaagccau

SEQ ID NO: 567969 - RNA, 21 nt, Human
aagccuccccgcccccccacc

SEQ ID NO: 567970 - RNA, 21 nt, Human
aauacagguagaauucacaug

SEQ ID NO: 567971 - RNA, 23 nt, Human
acaacagaaacggaagccaugag

SEQ ID NO: 567972 - RNA, 18 nt, Human
acacugcagaccacaaac

SEQ ID NO: 567973 - RNA, 19 nt, Human
acgacacugcagaccacaa

SEQ ID NO: 567974 - RNA, 19 nt, Human
acucaagggagagaacaac

SEQ ID NO: 567975 - RNA, 21 nt, Human
acucaagggagagaacaacag

SEQ ID NO: 567976 - RNA, 19 nt, Human
agucagacccaggagacag

SEQ ID NO: 567977 - RNA, 26 nt, Human
aguuaugugcuuuguuccuauagcuu

SEQ ID NO: 567978 - RNA, 21 nt, Human
auggcagcagccgccgcgggc

SEQ ID NO: 567979 - RNA, 19 nt, Human
caacagaaacggaagccau

SEQ ID NO: 567980 - RNA, 22 nt, Human
caccucagccucacgacacugc

SEQ ID NO: 567981 - RNA, 22 nt, Human
cauaaaccccauaccaccccug

SEQ ID NO: 567982 - RNA, 18 nt, Human
ccaaaagcugccaggaca

SEQ ID NO: 567983 - RNA, 23 nt, Human
ccacucagacccuuacccggccg

SEQ ID NO: 567984 - RNA, 20 nt, Human
ccaggagacagauuugugug

SEQ ID NO: 567985 - RNA, 18 nt, Human
cccauaccacugcuguca

SEQ ID NO: 567986 - RNA, 23 nt, Human
cccauaccacugcugucauucca

SEQ ID NO: 567987 - RNA, 27 nt, Human
cccauaccacugcugucauuccaaaag

SEQ ID NO: 567988 - RNA, 22 nt, Human
ccgccgcggcccccgaaggcgc

SEQ ID NO: 567989 - RNA, 24 nt, Human
ccgccgcggcccccgaaggcgcuc

SEQ ID NO: 567990 - RNA, 25 nt, Human
ccgccgcggcccccgaaggcgcucu

SEQ ID NO: 567991 - RNA, 25 nt, Human
ccuauagcuuugaaguucauccacc

SEQ ID NO: 567992 - RNA, 23 nt, Human
ccuccccgcccccccaccuuaaa

SEQ ID NO: 567993 - RNA, 18 nt, Human
cgaaggcgcucuggccug

SEQ ID NO: 567994 - RNA, 21 nt, Human
cgacacugcagaccacaaacc

SEQ ID NO: 567995 - RNA, 22 nt, Human
cgcggcccccgaaggcgcucug

SEQ ID NO: 567996 - RNA, 22 nt, Human
cucaagggagagaacaacagaa

SEQ ID NO: 567997 - RNA, 21 nt, Human
cugcagaccacaaacccggcg

SEQ ID NO: 567998 - RNA, 26 nt, Human
gaaaaaagccuccccgcccccccacc

SEQ ID NO: 567999 - RNA, 24 nt, Human
gagaacaacagaaacggaagccgg

SEQ ID NO: 568000 - RNA, 19 nt, Human
ggcugcaaacuccuggccu

SEQ ID NO: 568001 - RNA, 19 nt, Human
gugguccagcccuggaaua

SEQ ID NO: 568002 - RNA, 23 nt, Human
uauuucaaguuuguaacaaaaua

SEQ ID NO: 568003 - RNA, 21 nt, Human
ucagugaaaaagauuaaagug

SEQ ID NO: 568004 - RNA, 24 nt, Human
ugcuuuguuccuauagcuuugaag

SEQ ID NO: 568005 - RNA, 18 nt, Human
uggaaggucucaggucuu

SEQ ID NO: 568006 - RNA, 23 nt, Human
uggaaguuaucaagugguccagc

SEQ ID NO: 568007 - RNA, 18 nt, Human
uggaauacagguagaauu

SEQ ID NO: 568008 - RNA, 19 nt, Human
uggcagcagccgccgcggg

SEQ ID NO: 568009 - RNA, 24 nt, Human
uggcaggagauccacucagacccu

SEQ ID NO: 568010 - RNA, 20 nt, Human
uggcaucaagucaugaaggc

SEQ ID NO: 568011 - RNA, 24 nt, Human
uggguagcagucagacccaggaga

SEQ ID NO: 568012 - RNA, 22 nt, Human
ugguccagcccuggaauacagg

SEQ ID NO: 568013 - RNA, 24 nt, Human
uuauagcaucauaaaccccauacc

SEQ ID NO: 568014 - RNA, 19 nt, Human
uuccgccgcggcccccgaa

SEQ ID NO: 568015 - RNA, 21 nt, Human
aaaaacacacagagccacgug

SEQ ID NO: 568016 - RNA, 20 nt, Human
aagagaaaaaagaaccucaa

SEQ ID NO: 568017 - RNA, 23 nt, Human
acaauuuuuaaaaacacacagag

SEQ ID NO: 568018 - RNA, 19 nt, Human
acuccgccagccucccacc

SEQ ID NO: 568019 - RNA, 25 nt, Human
agaaaaaagaaccucaaaaucagug

SEQ ID NO: 568020 - RNA, 23 nt, Human
agcugguggagcaggcgccuccc

SEQ ID NO: 568021 - RNA, 18 nt, Human
agugacgcgacaggaaga

SEQ ID NO: 568022 - RNA, 19 nt, Human
aucacaccuuccuccugaa

SEQ ID NO: 568023 - RNA, 18 nt, Human
cacacagagccacguggg

SEQ ID NO: 568024 - RNA, 22 nt, Human
caccaagagaaaaaagaaccuc

SEQ ID NO: 568025 - RNA, 23 nt, Human
caccaagagaaaaaagaaccuca

SEQ ID NO: 568026 - RNA, 18 nt, Human
cagcugguggagcaggcg

SEQ ID NO: 568027 - RNA, 18 nt, Human
ccagcugguggagcaggc

SEQ ID NO: 568028 - RNA, 19 nt, Human
ccagcugguggagcaggcg

SEQ ID NO: 568029 - RNA, 19 nt, Human
cgacaggaagaauucggac

SEQ ID NO: 568030 - RNA, 19 nt, Human
cggcccguggcgcccuucg

SEQ ID NO: 568031 - RNA, 23 nt, Human
cugggcacaaagugcuucuuggu

SEQ ID NO: 568032 - RNA, 20 nt, Human
cuggugcuuggcgauuacaa

SEQ ID NO: 568033 - RNA, 22 nt, Human
cugguggagcaggcgccucccu

SEQ ID NO: 568034 - RNA, 19 nt, Human
gagaaaaaagaaccucaaa

SEQ ID NO: 568035 - RNA, 21 nt, Human
ggacugggcuguacggugcgc

SEQ ID NO: 568036 - RNA, 19 nt, Human
guggacugggcuguacggu

SEQ ID NO: 568037 - RNA, 21 nt, Human
gugggucaccuauugucacca

SEQ ID NO: 568038 - RNA, 22 nt, Human
ucacaccuuccuccugaacgug

SEQ ID NO: 568039 - RNA, 23 nt, Human
ucaccaagagaaaaaagaaccuc

SEQ ID NO: 568040 - RNA, 18 nt, Human
ucccugagacccgggcug

SEQ ID NO: 568041 - RNA, 21 nt, Human
ugacggcaucacaccuuccuc

SEQ ID NO: 568042 - RNA, 22 nt, Human
ugcuucaggaacuuucugggca

SEQ ID NO: 568043 - RNA, 21 nt, Human
uggagcaggcgccucccugcc

SEQ ID NO: 568044 - RNA, 21 nt, Human
ugucaccaagagaaaaaagaa

SEQ ID NO: 568045 - RNA, 25 nt, Human
uuacaaacacccaccagcuggugga

SEQ ID NO: 568046 - RNA, 24 nt, Human
uugucaccaagagaaaaaagaacc

SEQ ID NO: 568047 - RNA, 18 nt, Human
uuuuuuuuuuuuuuucug

SEQ ID NO: 568048 - RNA, 20 nt, Human
uuuuuuuuuuuuuuucugcu

SEQ ID NO: 568049 - RNA, 23 nt, Human
aaacguugaggcugcagugagcc

SEQ ID NO: 568050 - RNA, 23 nt, Human
aaaucucagaagugcaaugaacc

SEQ ID NO: 568051 - RNA, 22 nt, Human
aacaacaaacaauaauaacaau

SEQ ID NO: 568052 - RNA, 20 nt, Human
aacaauaacaaagaaauaac

SEQ ID NO: 568053 - RNA, 21 nt, Human
aagcagauaaauaaaugagca

SEQ ID NO: 568054 - RNA, 20 nt, Human
acaaaaauaaaaaaacguuu

SEQ ID NO: 568055 - RNA, 24 nt, Human
acagagcaagacccugccucaaaa

SEQ ID NO: 568056 - RNA, 21 nt, Human
agguugggacaggaggaauag

SEQ ID NO: 568057 - RNA, 19 nt, Human
agugcaggugugcgauggg

SEQ ID NO: 568058 - RNA, 21 nt, Human
caaugaaccucuaagaaguuu

SEQ ID NO: 568059 - RNA, 27 nt, Human
cacaacaauaacaaagaaauaacaaca

SEQ ID NO: 568060 - RNA, 23 nt, Human
cacaccgccauuugagggaacac

SEQ ID NO: 568061 - RNA, 22 nt, Human
cacuguagccuugaucucccag

SEQ ID NO: 568062 - RNA, 23 nt, Human
caggcgaacucucuucacaccgc

SEQ ID NO: 568063 - RNA, 26 nt, Human
ccagagcauacauuuaaaauguacag

SEQ ID NO: 568064 - RNA, 28 nt, Human
ccucaaaauaaauaaacaguaaacacaa

SEQ ID NO: 568065 - RNA, 22 nt, Human
ccucucucucucucucucuccc

SEQ ID NO: 568066 - RNA, 18 nt, Human
ccuugaucucccaggcca

SEQ ID NO: 568067 - RNA, 24 nt, Human
cgaaggggggucagggcugcagug

SEQ ID NO: 568068 - RNA, 22 nt, Human
cgacaacuccaaguuguaaaca

SEQ ID NO: 568069 - RNA, 18 nt, Human
cucccugaaaggaucucc

SEQ ID NO: 568070 - RNA, 23 nt, Human
cucucucccugaaaggaucucca

SEQ ID NO: 568071 - RNA, 19 nt, Human
cugcagugagccugggaga

SEQ ID NO: 568072 - RNA, 20 nt, Human
cuguugcaccaggacuggag

SEQ ID NO: 568073 - RNA, 22 nt, Human
gaaugcaaccaagcaaaaauaa

SEQ ID NO: 568074 - RNA, 20 nt, Human
gacaggaggaauagcauggg

SEQ ID NO: 568075 - RNA, 19 nt, Human
gaggacacugaggcucagg

SEQ ID NO: 568076 - RNA, 21 nt, Human
gaggaucacuucagcucaaaa

SEQ ID NO: 568077 - RNA, 20 nt, Human
gcacagaauuauaacuaaug

SEQ ID NO: 568078 - RNA, 24 nt, Human
gcucaaaacguugaggcugcagug

SEQ ID NO: 568079 - RNA, 21 nt, Human
gcucacuguagccuugaucuc

SEQ ID NO: 568080 - RNA, 22 nt, Human
gcucacuguagccuugaucucc

SEQ ID NO: 568081 - RNA, 19 nt, Human
ggaagcagaggcgagagga

SEQ ID NO: 568082 - RNA, 21 nt, Human
ggaauagcaugggccgaaggg

SEQ ID NO: 568083 - RNA, 24 nt, Human
ggcugcagugagccugggagacag

SEQ ID NO: 568084 - RNA, 24 nt, Human
ggggggucagggcugcagugggcc

SEQ ID NO: 568085 - RNA, 19 nt, Human
ggucgcggcucacuguagc

SEQ ID NO: 568086 - RNA, 23 nt, Human
uaaacaguaaacacaacaauaac

SEQ ID NO: 568087 - RNA, 24 nt, Human
uaaaugagcagacaacuaagauca

SEQ ID NO: 568088 - RNA, 20 nt, Human
uaacaggugccaucuagugu

SEQ ID NO: 568089 - RNA, 24 nt, Human
uacuauucuggaaauuauauaugu

SEQ ID NO: 568090 - RNA, 24 nt, Human
uauuaagcacaaaaauaaaaaaac

SEQ ID NO: 568091 - RNA, 23 nt, Human
ucacuguagccuugaucucccag

SEQ ID NO: 568092 - RNA, 24 nt, Human
ucacuguagccuugaucucccagg

SEQ ID NO: 568093 - RNA, 23 nt, Human
ucacuucaucggaugccagagcu

SEQ ID NO: 568094 - RNA, 19 nt, Human
uccaagaaugcaaccaagc

SEQ ID NO: 568095 - RNA, 24 nt, Human
ucccaggccaggaccucccagguu

SEQ ID NO: 568096 - RNA, 18 nt, Human
ucucaaguaaaauggaag

SEQ ID NO: 568097 - RNA, 21 nt, Human
ucucaaguaaaauggaagacu

SEQ ID NO: 568098 - RNA, 21 nt, Human
ucucccaggccaggaccuccc

SEQ ID NO: 568099 - RNA, 18 nt, Human
ucugucuucuccucucuc

SEQ ID NO: 568100 - RNA, 20 nt, Human
ucugucuucuccucucucuc

SEQ ID NO: 568101 - RNA, 22 nt, Human
ucugucuucuccucucucucuc

SEQ ID NO: 568102 - RNA, 21 nt, Human
ucuuuauuuggcaaaugagga

SEQ ID NO: 568103 - RNA, 20 nt, Human
ugaaaggaucuccaucuguu

SEQ ID NO: 568104 - RNA, 19 nt, Human
ugaggacacugaggcucag

SEQ ID NO: 568105 - RNA, 18 nt, Human
ugaggcugcagugagccu

SEQ ID NO: 568106 - RNA, 18 nt, Human
ugaggcugcagugagccu

SEQ ID NO: 568107 - RNA, 22 nt, Human
ugaguuacuauucuggaaauua

SEQ ID NO: 568108 - RNA, 19 nt, Human
ugcaggugugcgauggguc

SEQ ID NO: 568109 - RNA, 19 nt, Human
ugcucacaauucaaacuuu

SEQ ID NO: 568110 - RNA, 25 nt, Human
ugggacaggaggaauagcaugggcc

SEQ ID NO: 568111 - RNA, 19 nt, Human
ugggucgcggcucacugua

SEQ ID NO: 568112 - RNA, 19 nt, Human
uguagccuugaucucccag

SEQ ID NO: 568113 - RNA, 20 nt, Human
uguccaagaaugcaaccaag

SEQ ID NO: 568114 - RNA, 22 nt, Human
uguccaagaaugcaaccaagca

SEQ ID NO: 568115 - RNA, 24 nt, Human
uguuuguuuaaagcauagaaguac

SEQ ID NO: 568116 - RNA, 25 nt, Human
uuaguagaaacacuaauuguaugaa

SEQ ID NO: 568117 - RNA, 26 nt, Human
uucuucagugaaaccugggaucuggc

SEQ ID NO: 568118 - RNA, 23 nt, Human
uuggcaaaugaggacacugaggc

SEQ ID NO: 568119 - RNA, 24 nt, Human
uugggacaggaggaauagcauggg

SEQ ID NO: 568120 - RNA, 20 nt, Human
uuugaacuacaauuuaaaac

SEQ ID NO: 568121 - RNA, 18 nt, Human
aaacacauaccaaaaaca

SEQ ID NO: 568122 - RNA, 23 nt, Human
aaacacauaccaaaaacacagcc

SEQ ID NO: 568123 - RNA, 23 nt, Human
acaauauaaugaaaaaguagaac

SEQ ID NO: 568124 - RNA, 22 nt, Human
acacagccacaaauaccaaaaa

SEQ ID NO: 568125 - RNA, 20 nt, Human
acauaccaaaaacacagcca

SEQ ID NO: 568126 - RNA, 23 nt, Human
accaaaaacaaaaaccagcucag

SEQ ID NO: 568127 - RNA, 18 nt, Human
accaaaaacacagccaca

SEQ ID NO: 568128 - RNA, 22 nt, Human
agaacaaccaaucuuuauuaga

SEQ ID NO: 568129 - RNA, 24 nt, Human
agccacaaauaccaaaaacaaaaa

SEQ ID NO: 568130 - RNA, 19 nt, Human
auacugaacuccuguaacc

SEQ ID NO: 568131 - RNA, 23 nt, Human
caaaaacaaaaaccagcucaagu

SEQ ID NO: 568132 - RNA, 19 nt, Human
caaaaacacagccacaaau

SEQ ID NO: 568133 - RNA, 23 nt, Human
caaaaacacagccacaaauacca

SEQ ID NO: 568134 - RNA, 26 nt, Human
caaaaacacagccacaaauaccaaaa

SEQ ID NO: 568135 - RNA, 30 nt, Human
caaaaacacagccacaaauaccaaaaacag

SEQ ID NO: 568136 - RNA, 22 nt, Human
caacaauauaaugaaaaaguag

SEQ ID NO: 568137 - RNA, 24 nt, Human
cacagccacaaauaccaaaaacaa

SEQ ID NO: 568138 - RNA, 20 nt, Human
cacauaccaaaaacacagcc

SEQ ID NO: 568139 - RNA, 21 nt, Human
cacauaccaaaaacacagcca

SEQ ID NO: 568140 - RNA, 20 nt, Human
cagccacaaauaccaaaaac

SEQ ID NO: 568141 - RNA, 23 nt, Human
ccaaaaacaaaaaccagcucaag

SEQ ID NO: 568142 - RNA, 22 nt, Human
ccaaaacacauuuuggauuugg

SEQ ID NO: 568143 - RNA, 20 nt, Human
gaaaacacaguaaacacaua

SEQ ID NO: 568144 - RNA, 22 nt, Human
uaaacacauaccaaaaacacag

SEQ ID NO: 568145 - RNA, 24 nt, Human
uacaauaaauaucaacaauauaau

SEQ ID NO: 568146 - RNA, 19 nt, Human
uaccaaaaacaaaaaccag

SEQ ID NO: 568147 - RNA, 21 nt, Human
uaccaaaaacacagccacaaa

SEQ ID NO: 568148 - RNA, 30 nt, Human
uaccaaaaacacagccacaaauaccaaaaa

SEQ ID NO: 568149 - RNA, 23 nt, Human
uaguuuccaaauacugaacuccu

SEQ ID NO: 568150 - RNA, 24 nt, Human
uaguuuccaaauacugaacuccuu

SEQ ID NO: 568151 - RNA, 21 nt, Human
ugggaaaacacaguaaacaca

SEQ ID NO: 568152 - RNA, 27 nt, Human
aaagaagaaaaucauacaaccaaaggg

SEQ ID NO: 568153 - RNA, 18 nt, Human
aaauauccuggcuccugg

SEQ ID NO: 568154 - RNA, 25 nt, Human
aagaacaggggcaggagcagaagga

SEQ ID NO: 568155 - RNA, 20 nt, Human
aagagccccaugagcuaaga

SEQ ID NO: 568156 - RNA, 23 nt, Human
aaggagcuuaguaaugggagggg

SEQ ID NO: 568157 - RNA, 23 nt, Human
aauguguguguguguacgcaugu

SEQ ID NO: 568158 - RNA, 18 nt, Human
acccugggaacagagcug

SEQ ID NO: 568159 - RNA, 24 nt, Human
accucccugccccacccugggaac

SEQ ID NO: 568160 - RNA, 23 nt, Human
acgccaggaucaaaccgccuggc

SEQ ID NO: 568161 - RNA, 18 nt, Human
acuacucccccaaccccc

SEQ ID NO: 568162 - RNA, 19 nt, Human
acugucacagaggcugggg

SEQ ID NO: 568163 - RNA, 18 nt, Human
agaaauauacaccacuga

SEQ ID NO: 568164 - RNA, 21 nt, Human
agccagccuccuccugacccc

SEQ ID NO: 568165 - RNA, 24 nt, Human
agcucgguucccauuuccugccuc

SEQ ID NO: 568166 - RNA, 21 nt, Human
agcuguggcagccgcagcccu

SEQ ID NO: 568167 - RNA, 18 nt, Human
aggcuggguccagcugug

SEQ ID NO: 568168 - RNA, 21 nt, Human
agggcccacgggagggucggg

SEQ ID NO: 568169 - RNA, 23 nt, Human
aggggcaggagcagaaggagcuu

SEQ ID NO: 568170 - RNA, 19 nt, Human
agguggaugggccgagcuc

SEQ ID NO: 568171 - RNA, 19 nt, Human
auccaugucaaauguaguu

SEQ ID NO: 568172 - RNA, 19 nt, Human
auccuggcuccuggcucug

SEQ ID NO: 568173 - RNA, 22 nt, Human
auccuggcuccuggcucuguuc

SEQ ID NO: 568174 - RNA, 25 nt, Human
caacauuguaaacauacacggucua

SEQ ID NO: 568175 - RNA, 18 nt, Human
caacccccaccucccugc

SEQ ID NO: 568176 - RNA, 21 nt, Human
caacccccaccucccugcccc

SEQ ID NO: 568177 - RNA, 19 nt, Human
cacagcaucacaccacagg

SEQ ID NO: 568178 - RNA, 22 nt, Human
cacagcaucacaccacagggcc

SEQ ID NO: 568179 - RNA, 20 nt, Human
caccacagggcccacgggag

SEQ ID NO: 568180 - RNA, 18 nt, Human
caccucccugccccaccc

SEQ ID NO: 568181 - RNA, 20 nt, Human
caccucccugccccacccuu

SEQ ID NO: 568182 - RNA, 19 nt, Human
cacugaacaccgagcacau

SEQ ID NO: 568183 - RNA, 19 nt, Human
cagaaggagcuuaguaaug

SEQ ID NO: 568184 - RNA, 21 nt, Human
caggaucaaaccgccuggcca

SEQ ID NO: 568185 - RNA, 19 nt, Human
caggggcaggagcagaagg

SEQ ID NO: 568186 - RNA, 22 nt, Human
caguaugggggcuggaucuuag

SEQ ID NO: 568187 - RNA, 18 nt, Human
ccagucugugugaugcag

SEQ ID NO: 568188 - RNA, 20 nt, Human
cccaaaccauaggugggagc

SEQ ID NO: 568189 - RNA, 23 nt, Human
cccacuacucccccaacccccac

SEQ ID NO: 568190 - RNA, 19 nt, Human
ccccaacccccaccucccu

SEQ ID NO: 568191 - RNA, 18 nt, Human
cccccaacccccaccucc

SEQ ID NO: 568192 - RNA, 20 nt, Human
cccccaacccccaccucccu

SEQ ID NO: 568193 - RNA, 22 nt, Human
cccccaacccccaccucccugc

SEQ ID NO: 568194 - RNA, 20 nt, Human
cccccuaacucagccucugc

SEQ ID NO: 568195 - RNA, 22 nt, Human
cccugccccacccugggaacag

SEQ ID NO: 568196 - RNA, 18 nt, Human
ccgcaggucuccgggcgc

SEQ ID NO: 568197 - RNA, 26 nt, Human
ccgugccccacuacucccccaacccc

SEQ ID NO: 568198 - RNA, 23 nt, Human
ccuaacucagccucugcuucagc

SEQ ID NO: 568199 - RNA, 22 nt, Human
ccucccugccccacccugggaa

SEQ ID NO: 568200 - RNA, 18 nt, Human
ccugcagccaugucucuc

SEQ ID NO: 568201 - RNA, 22 nt, Human
ccugcaguuggggaggagaggc

SEQ ID NO: 568202 - RNA, 23 nt, Human
ccugcggguaaauauccuggcuc

SEQ ID NO: 568203 - RNA, 18 nt, Human
ccugucagcccaggcugg

SEQ ID NO: 568204 - RNA, 21 nt, Human
ccuuugaucaggacacagagc

SEQ ID NO: 568205 - RNA, 21 nt, Human
cggggaagggagaaugcagug

SEQ ID NO: 568206 - RNA, 24 nt, Human
cuaaucccaggaaugguucucagc

SEQ ID NO: 568207 - RNA, 20 nt, Human
cuacucccccaacccccacc

SEQ ID NO: 568208 - RNA, 19 nt, Human
cucauggagggggagaagu

SEQ ID NO: 568209 - RNA, 20 nt, Human
cucccccaacccccaccucc

SEQ ID NO: 568210 - RNA, 22 nt, Human
cucgguucccauuuccugccuc

SEQ ID NO: 568211 - RNA, 18 nt, Human
cugagaccuugguccugu

SEQ ID NO: 568212 - RNA, 19 nt, Human
cuuauaaagagccccauga

SEQ ID NO: 568213 - RNA, 20 nt, Human
gaaaggcagcucuaauccca

SEQ ID NO: 568214 - RNA, 20 nt, Human
gagaggcagcgagccugggg

SEQ ID NO: 568215 - RNA, 19 nt, Human
gagcaggcaggcacgcucc

SEQ ID NO: 568216 - RNA, 18 nt, Human
gagcucccagccaacccu

SEQ ID NO: 568217 - RNA, 22 nt, Human
gaggcuggguggccaggagcac

SEQ ID NO: 568218 - RNA, 19 nt, Human
gccucuaccccccaacucc

SEQ ID NO: 568219 - RNA, 18 nt, Human
gcugcuggaggcgaggcc

SEQ ID NO: 568220 - RNA, 19 nt, Human
ggaccggggcggggaaggg

SEQ ID NO: 568221 - RNA, 19 nt, Human
ggagaggaucaugucccuu

SEQ ID NO: 568222 - RNA, 22 nt, Human
ggagcacuguccucuagccccc

SEQ ID NO: 568223 - RNA, 18 nt, Human
ggagggcucuggucuaca

SEQ ID NO: 568224 - RNA, 21 nt, Human
ggagggggaggggccaaggcc

SEQ ID NO: 568225 - RNA, 18 nt, Human
ggccgagcucccagccaa

SEQ ID NO: 568226 - RNA, 23 nt, Human
gggaagggagaaugcagugaacu

SEQ ID NO: 568227 - RNA, 20 nt, Human
gggcuggaucuuaggagccg

SEQ ID NO: 568228 - RNA, 24 nt, Human
guauguacauggggaaccugugug

SEQ ID NO: 568229 - RNA, 21 nt, Human
guaugugcauguauguacaug

SEQ ID NO: 568230 - RNA, 22 nt, Human
guguguaaaugugugugugugu

SEQ ID NO: 568231 - RNA, 21 nt, Human
uaaauguguguguguguacgc

SEQ ID NO: 568232 - RNA, 20 nt, Human
uaacucagccucugcuucag

SEQ ID NO: 568233 - RNA, 20 nt, Human
uaaggagaggaucauguccc

SEQ ID NO: 568234 - RNA, 23 nt, Human
uaaucccaggaaugguucucagc

SEQ ID NO: 568235 - RNA, 20 nt, Human
uacagccagccuccuccuga

SEQ ID NO: 568236 - RNA, 20 nt, Human
uagauccuccgcaggucucc

SEQ ID NO: 568237 - RNA, 18 nt, Human
uaugugcauguauguaca

SEQ ID NO: 568238 - RNA, 20 nt, Human
uaugugcauguauguacaug

SEQ ID NO: 568239 - RNA, 21 nt, Human
uaugugcauguauguacaugg

SEQ ID NO: 568240 - RNA, 19 nt, Human
ucacagaggcugggggcag

SEQ ID NO: 568241 - RNA, 18 nt, Human
ucagucgggucugccggu

SEQ ID NO: 568242 - RNA, 20 nt, Human
ucccccaacccccaccuccc

SEQ ID NO: 568243 - RNA, 21 nt, Human
ucccccaacccccaccucccu

SEQ ID NO: 568244 - RNA, 25 nt, Human
ucccccaacccccaccucccugccc

SEQ ID NO: 568245 - RNA, 21 nt, Human
ucccuuggggcgugugcccca

SEQ ID NO: 568246 - RNA, 24 nt, Human
uccgagccuuuuauuacugucucc

SEQ ID NO: 568247 - RNA, 19 nt, Human
uccugucagcccaggcugg

SEQ ID NO: 568248 - RNA, 19 nt, Human
ucugucaguaugggggcug

SEQ ID NO: 568249 - RNA, 21 nt, Human
ucuuaggagccgugccccacu

SEQ ID NO: 568250 - RNA, 20 nt, Human
ugagaacaaggcugggucca

SEQ ID NO: 568251 - RNA, 24 nt, Human
ugagaacaaggcuggguccagcug

SEQ ID NO: 568252 - RNA, 19 nt, Human
ugagcgaagaacaggggca

SEQ ID NO: 568253 - RNA, 21 nt, Human
ugagcgaagaacaggggcagg

SEQ ID NO: 568254 - RNA, 18 nt, Human
ugagggcagagcuucuug

SEQ ID NO: 568255 - RNA, 23 nt, Human
ugaguaugugcauguauguacau

SEQ ID NO: 568256 - RNA, 18 nt, Human
ugcagggagaacagggag

SEQ ID NO: 568257 - RNA, 19 nt, Human
ugcagggagaacagggagg

SEQ ID NO: 568258 - RNA, 19 nt, Human
ugcaguuggggaggagagg

SEQ ID NO: 568259 - RNA, 22 nt, Human
ugccccacuacucccccaaccc

SEQ ID NO: 568260 - RNA, 23 nt, Human
ugccccacuacucccccaacccc

SEQ ID NO: 568261 - RNA, 19 nt, Human
ugccucuaccccccaacuc

SEQ ID NO: 568262 - RNA, 20 nt, Human
ugccugggccacagccucua

SEQ ID NO: 568263 - RNA, 27 nt, Human
ugccugggccacagccucuacucuggc

SEQ ID NO: 568264 - RNA, 21 nt, Human
ugcguguguaaaugugugugu

SEQ ID NO: 568265 - RNA, 24 nt, Human
ugcguguguaaaugugugugugug

SEQ ID NO: 568266 - RNA, 26 nt, Human
ugcguguguaaaugugugugugugua

SEQ ID NO: 568267 - RNA, 20 nt, Human
uggaacagguauggccccca

SEQ ID NO: 568268 - RNA, 23 nt, Human
uggaggcgaggccugccuggggc

SEQ ID NO: 568269 - RNA, 22 nt, Human
uggcuccuggcucuguucuccu

SEQ ID NO: 568270 - RNA, 19 nt, Human
uggggacgcauaggcagcu

SEQ ID NO: 568271 - RNA, 23 nt, Human
uggggaggagaggcagcgagccu

SEQ ID NO: 568272 - RNA, 18 nt, Human
uggggcugcuggaggcga

SEQ ID NO: 568273 - RNA, 23 nt, Human
ugggggcagguggggcugcugga

SEQ ID NO: 568274 - RNA, 24 nt, Human
ugggggcuggaucuuaggagccgu

SEQ ID NO: 568275 - RNA, 21 nt, Human
uguaaacauacacggucuaua

SEQ ID NO: 568276 - RNA, 23 nt, Human
ugucagcccaggcuggggacgca

SEQ ID NO: 568277 - RNA, 21 nt, Human
ugugaugcagugggccuucgg

SEQ ID NO: 568278 - RNA, 22 nt, Human
ugugcugagaccuugguccugu

SEQ ID NO: 568279 - RNA, 19 nt, Human
uguguaaaugugugugugu

SEQ ID NO: 568280 - RNA, 19 nt, Human
uguguaaaugugugugugu

SEQ ID NO: 568281 - RNA, 21 nt, Human
uguguacgcauguuugaguau

SEQ ID NO: 568282 - RNA, 19 nt, Human
ugugugcaaguauguacaa

SEQ ID NO: 568283 - RNA, 28 nt, Human
uguguguacgcauguuugaguaugugca

SEQ ID NO: 568284 - RNA, 19 nt, Human
uguguguguguacgcaugu

SEQ ID NO: 568285 - RNA, 18 nt, Human
uguguguguguguacgca

SEQ ID NO: 568286 - RNA, 18 nt, Human
uucuccuuugcgccaugc

SEQ ID NO: 568287 - RNA, 19 nt, Human
uucuccuuugcgccaugcu

SEQ ID NO: 568288 - RNA, 23 nt, Human
uugcgccaugcuccccacuuccc

SEQ ID NO: 568289 - RNA, 21 nt, Human
uuggggaggagaggcagcgag

SEQ ID NO: 568290 - RNA, 19 nt, Human
aaaagaacacaagucagaa

SEQ ID NO: 568291 - RNA, 19 nt, Human
aaacagcaaucacaacagc

SEQ ID NO: 568292 - RNA, 20 nt, Human
aaaguccucuagaugggccc

SEQ ID NO: 568293 - RNA, 21 nt, Human
aagaacacaagucagaauuua

SEQ ID NO: 568294 - RNA, 21 nt, Human
aagccagauccauuuaggaga

SEQ ID NO: 568295 - RNA, 23 nt, Human
aagggugcacaguggcacagugg

SEQ ID NO: 568296 - RNA, 20 nt, Human
aaguccucuagaugggcccu

SEQ ID NO: 568297 - RNA, 21 nt, Human
acaaacagcaaucacaacagc

SEQ ID NO: 568298 - RNA, 20 nt, Human
acucaagggugcacaguggc

SEQ ID NO: 568299 - RNA, 21 nt, Human
agaggacagguuaaggcugcc

SEQ ID NO: 568300 - RNA, 18 nt, Human
aggucugugggaaagcuu

SEQ ID NO: 568301 - RNA, 24 nt, Human
auggcggcaaggggaccagggcac

SEQ ID NO: 568302 - RNA, 18 nt, Human
caacagcauccacauggc

SEQ ID NO: 568303 - RNA, 24 nt, Human
cacucccgccucuucucuccgaga

SEQ ID NO: 568304 - RNA, 25 nt, Human
cacucccgccucuucucuccgagaa

SEQ ID NO: 568305 - RNA, 21 nt, Human
cagauccauuuaggagauaac

SEQ ID NO: 568306 - RNA, 19 nt, Human
cagccuccaggaaaagcca

SEQ ID NO: 568307 - RNA, 19 nt, Human
caguugcuucccuggcuug

SEQ ID NO: 568308 - RNA, 22 nt, Human
cccccaaaguccucuagauggg

SEQ ID NO: 568309 - RNA, 23 nt, Human
cccucugauaccaucuuccaacc

SEQ ID NO: 568310 - RNA, 22 nt, Human
ccgcagcaggggcaggggcugu

SEQ ID NO: 568311 - RNA, 23 nt, Human
ccuccaggaaaagccagauccau

SEQ ID NO: 568312 - RNA, 30 nt, Human
ccucgccgcgccgcagcaggggcaggggcu

SEQ ID NO: 568313 - RNA, 20 nt, Human
ccucuaggugggccagggag

SEQ ID NO: 568314 - RNA, 24 nt, Human
ccucuaggugggccagggaggucu

SEQ ID NO: 568315 - RNA, 23 nt, Human
ccugacccuggcccggagacaga

SEQ ID NO: 568316 - RNA, 27 nt, Human
ccugacccuggcccggagaccgguucc

SEQ ID NO: 568317 - RNA, 20 nt, Human
ccugcaggacucgcugggag

SEQ ID NO: 568318 - RNA, 20 nt, Human
cgagaucauccuucuggcca

SEQ ID NO: 568319 - RNA, 21 nt, Human
cggagacagacugcccaggca

SEQ ID NO: 568320 - RNA, 23 nt, Human
cggaggccgcgccuggguccggu

SEQ ID NO: 568321 - RNA, 23 nt, Human
cggcgugcugggacacucugggu

SEQ ID NO: 568322 - RNA, 22 nt, Human
cugauggcccccaaaguccucu

SEQ ID NO: 568323 - RNA, 19 nt, Human
cuggagugggucugcucag

SEQ ID NO: 568324 - RNA, 24 nt, Human
cuugaaaucacccugguccuagca

SEQ ID NO: 568325 - RNA, 21 nt, Human
gaagagaaaggaaugacaaag

SEQ ID NO: 568326 - RNA, 23 nt, Human
gacagaaaugggaucuaagucua

SEQ ID NO: 568327 - RNA, 21 nt, Human
gacccuggcccggagacagac

SEQ ID NO: 568328 - RNA, 23 nt, Human
gaccuaagaaucuuccugggagc

SEQ ID NO: 568329 - RNA, 18 nt, Human
gaggccgcgccugggucc

SEQ ID NO: 568330 - RNA, 19 nt, Human
gagggucccugacccuggc

SEQ ID NO: 568331 - RNA, 21 nt, Human
gauguacaggaagagaaagga

SEQ ID NO: 568332 - RNA, 19 nt, Human
gcccggagacagacugccc

SEQ ID NO: 568333 - RNA, 24 nt, Human
gccgcgccgcagcaggggcagggg

SEQ ID NO: 568334 - RNA, 21 nt, Human
gcgggcuggggagggacaguu

SEQ ID NO: 568335 - RNA, 20 nt, Human
gcucagcaggacuggagccu

SEQ ID NO: 568336 - RNA, 18 nt, Human
gcugccagaggcagaggg

SEQ ID NO: 568337 - RNA, 22 nt, Human
ggaaaagccagauccauuuagg

SEQ ID NO: 568338 - RNA, 21 nt, Human
ggcaggggcuguggcuguggc

SEQ ID NO: 568339 - RNA, 21 nt, Human
ggcuguggcuguggcggaggc

SEQ ID NO: 568340 - RNA, 22 nt, Human
gggcaggggcuguggcuguggc

SEQ ID NO: 568341 - RNA, 23 nt, Human
gggcaggggcuguggcuguggcg

SEQ ID NO: 568342 - RNA, 22 nt, Human
gggcuguggcuguggcggaggc

SEQ ID NO: 568343 - RNA, 25 nt, Human
uaacuaacauucccgccugugacac

SEQ ID NO: 568344 - RNA, 22 nt, Human
uacaaacagcaaucacaacagc

SEQ ID NO: 568345 - RNA, 22 nt, Human
uacaggaagagaaaggaaugac

SEQ ID NO: 568346 - RNA, 22 nt, Human
uaggggagacccaaggccuguu

SEQ ID NO: 568347 - RNA, 24 nt, Human
ucagaauuuagaacugaaguaccu

SEQ ID NO: 568348 - RNA, 21 nt, Human
ucagggucccaguugcuuccc

SEQ ID NO: 568349 - RNA, 21 nt, Human
uccacauggcggcaaggggac

SEQ ID NO: 568350 - RNA, 21 nt, Human
ucccgccucuucucuccgaga

SEQ ID NO: 568351 - RNA, 26 nt, Human
ucccggcgugcugggacacucugggu

SEQ ID NO: 568352 - RNA, 25 nt, Human
ucccugacccuggcccggagacaga

SEQ ID NO: 568353 - RNA, 19 nt, Human
ucccuggcuugaaaucacc

SEQ ID NO: 568354 - RNA, 19 nt, Human
ugaagacgaaaagaacaca

SEQ ID NO: 568355 - RNA, 20 nt, Human
ugacaggaaaggcaacaugg

SEQ ID NO: 568356 - RNA, 18 nt, Human
ugaccaagaaagccucua

SEQ ID NO: 568357 - RNA, 18 nt, Human
ugaccagguccacucccg

SEQ ID NO: 568358 - RNA, 18 nt, Human
ugcgcaccuaguccgcgc

SEQ ID NO: 568359 - RNA, 21 nt, Human
ugcugggacacucuggguucc

SEQ ID NO: 568360 - RNA, 20 nt, Human
ugggccagggaggucuguga

SEQ ID NO: 568361 - RNA, 25 nt, Human
uggggagggacaguuuucagggucc

SEQ ID NO: 568362 - RNA, 20 nt, Human
ugugauugacaggaaaggca

SEQ ID NO: 568363 - RNA, 18 nt, Human
uuagaacugaaguaccug

SEQ ID NO: 568364 - RNA, 20 nt, Human
aaaaaaucaggguagaaaca

SEQ ID NO: 568365 - RNA, 19 nt, Human
aaaaauauauuccuuuggu

SEQ ID NO: 568366 - RNA, 24 nt, Human
aaagacaguguauugcuaacaaaa

SEQ ID NO: 568367 - RNA, 21 nt, Human
aaagagcacauuaaacuaaaa

SEQ ID NO: 568368 - RNA, 24 nt, Human
aaagugcugggauuacaggcguga

SEQ ID NO: 568369 - RNA, 19 nt, Human
aacaacaacaacaaaaggc

SEQ ID NO: 568370 - RNA, 21 nt, Human
aacaacaacaacaacaaaagg

SEQ ID NO: 568371 - RNA, 19 nt, Human
aacacugguauuuucuuua

SEQ ID NO: 568372 - RNA, 18 nt, Human
aacccaggaacuggagga

SEQ ID NO: 568373 - RNA, 21 nt, Human
aagaaaaaaaucaggguagaa

SEQ ID NO: 568374 - RNA, 21 nt, Human
aagcaaauaguggccaaagau

SEQ ID NO: 568375 - RNA, 19 nt, Human
aagcacuuugggaggcuga

SEQ ID NO: 568376 - RNA, 24 nt, Human
aagcacuuugggaggcugaggugg

SEQ ID NO: 568377 - RNA, 22 nt, Human
aagccaggugugauggcacaca

SEQ ID NO: 568378 - RNA, 18 nt, Human
aagugagagaaucguguu

SEQ ID NO: 568379 - RNA, 19 nt, Human
aagugcugggauuacaggc

SEQ ID NO: 568380 - RNA, 19 nt, Human
aagugcugggauuacaggc

SEQ ID NO: 568381 - RNA, 23 nt, Human
aauuguuuuacuuuuaaucuugu

SEQ ID NO: 568382 - RNA, 21 nt, Human
acaaugcaagaaaagauucaa

SEQ ID NO: 568383 - RNA, 23 nt, Human
acagaagacuacucauauaaaca

SEQ ID NO: 568384 - RNA, 20 nt, Human
acaggguuucaccauuuugg

SEQ ID NO: 568385 - RNA, 21 nt, Human
acaggguuucaccauuuuggu

SEQ ID NO: 568386 - RNA, 24 nt, Human
acaggguuucaccauuuuggucag

SEQ ID NO: 568387 - RNA, 23 nt, Human
accauuuuggucaggcuggucuc

SEQ ID NO: 568388 - RNA, 23 nt, Human
accucagccucccaaagugcugg

SEQ ID NO: 568389 - RNA, 22 nt, Human
accuccuccuccaccgcccgcg

SEQ ID NO: 568390 - RNA, 18 nt, Human
accuguaauucuauuucc

SEQ ID NO: 568391 - RNA, 24 nt, Human
accuguaauucuauuuccuauggg

SEQ ID NO: 568392 - RNA, 24 nt, Human
accuugugaucugcccaccucagc

SEQ ID NO: 568393 - RNA, 21 nt, Human
acuccagccugggugauggag

SEQ ID NO: 568394 - RNA, 21 nt, Human
acuccagccugggugauggag

SEQ ID NO: 568395 - RNA, 23 nt, Human
acuccagccugggugauggagug

SEQ ID NO: 568396 - RNA, 24 nt, Human
acuccagccugggugauggagugg

SEQ ID NO: 568397 - RNA, 20 nt, Human
acugcacccggccuuaccag

SEQ ID NO: 568398 - RNA, 24 nt, Human
acuggacuccagccugggugaugg

SEQ ID NO: 568399 - RNA, 26 nt, Human
acuggacuccagccugggugauggag

SEQ ID NO: 568400 - RNA, 26 nt, Human
agacagaacuagcuuuguugcguuuc

SEQ ID NO: 568401 - RNA, 27 nt, Human
agauacccaugaaaagaaaaaaaucag

SEQ ID NO: 568402 - RNA, 20 nt, Human
agauuagaaccauuaaaaua

SEQ ID NO: 568403 - RNA, 24 nt, Human
agcacuuugggaggcugagguggg

SEQ ID NO: 568404 - RNA, 22 nt, Human
agcacuuuuuucauauuuacau

SEQ ID NO: 568405 - RNA, 24 nt, Human
agcgauucucucgccucagcuucc

SEQ ID NO: 568406 - RNA, 20 nt, Human
aggaaccguagaggcccugc

SEQ ID NO: 568407 - RNA, 24 nt, Human
aggaucacuugagcucaggaguuu

SEQ ID NO: 568408 - RNA, 18 nt, Human
aggcaggagggauggcuu

SEQ ID NO: 568409 - RNA, 20 nt, Human
aggcaggagggauggcuugg

SEQ ID NO: 568410 - RNA, 24 nt, Human
aggcgagcggaggcggaggccaag

SEQ ID NO: 568411 - RNA, 23 nt, Human
aggcugaggcagaggaucacuug

SEQ ID NO: 568412 - RNA, 19 nt, Human
aggcugaggcaggagggau

SEQ ID NO: 568413 - RNA, 25 nt, Human
aggcugaggcaggagggauggcuug

SEQ ID NO: 568414 - RNA, 24 nt, Human
aggcugagguggaaggaucauuug

SEQ ID NO: 568415 - RNA, 24 nt, Human
aggcugaggugggaggaucacuug

SEQ ID NO: 568416 - RNA, 25 nt, Human
aggcuggagugcaguggugugaucu

SEQ ID NO: 568417 - RNA, 24 nt, Human
aggugcaguggcucgcaccuguca

SEQ ID NO: 568418 - RNA, 18 nt, Human
aggugggaggaucacuug

SEQ ID NO: 568419 - RNA, 23 nt, Human
aggugggaggaucacuugagccu

SEQ ID NO: 568420 - RNA, 24 nt, Human
aggugugauggcacacaccuguag

SEQ ID NO: 568421 - RNA, 19 nt, Human
aguagcugggauuacaggc

SEQ ID NO: 568422 - RNA, 19 nt, Human
agucauuacaaaaaaaaaa

SEQ ID NO: 568423 - RNA, 18 nt, Human
aguccugcuccacaagga

SEQ ID NO: 568424 - RNA, 19 nt, Human
agugcaguggugugaucuc

SEQ ID NO: 568425 - RNA, 21 nt, Human
agugcaguggugugaucucag

SEQ ID NO: 568426 - RNA, 23 nt, Human
agugcaguggugugaucucagcu

SEQ ID NO: 568427 - RNA, 24 nt, Human
agugcaguggugugaucucagcuc

SEQ ID NO: 568428 - RNA, 18 nt, Human
agugcugggauuacaggc

SEQ ID NO: 568429 - RNA, 24 nt, Human
aguggugugaucucagcucacugc

SEQ ID NO: 568430 - RNA, 24 nt, Human
aucacaccacuggacuccagccug

SEQ ID NO: 568431 - RNA, 20 nt, Human
aucacuugagcucaggaguu

SEQ ID NO: 568432 - RNA, 24 nt, Human
aucacuugagcucaggaguuugag

SEQ ID NO: 568433 - RNA, 19 nt, Human
augaaacaaaaauauacaa

SEQ ID NO: 568434 - RNA, 23 nt, Human
augcaccuauagucccagccaca

SEQ ID NO: 568435 - RNA, 19 nt, Human
auuacaggcgcaugccacc

SEQ ID NO: 568436 - RNA, 24 nt, Human
caaagugcugggauuacaggcgug

SEQ ID NO: 568437 - RNA, 21 nt, Human
caacaacaaaaggcuaucuau

SEQ ID NO: 568438 - RNA, 18 nt, Human
caacaacaacaacaacaa

SEQ ID NO: 568439 - RNA, 20 nt, Human
caacaacaacaacaacaaaa

SEQ ID NO: 568440 - RNA, 20 nt, Human
caagcgauucucucgccuca

SEQ ID NO: 568441 - RNA, 25 nt, Human
cacaagcaaauaguggccaaagaug

SEQ ID NO: 568442 - RNA, 23 nt, Human
cacaccuguaguuccagcuacug

SEQ ID NO: 568443 - RNA, 21 nt, Human
cacaugggaggcugaggugga

SEQ ID NO: 568444 - RNA, 19 nt, Human
caccacgucuggcuaauuu

SEQ ID NO: 568445 - RNA, 19 nt, Human
caccauauggcuucaaaaa

SEQ ID NO: 568446 - RNA, 21 nt, Human
caccauuuuggucaggcuggu

SEQ ID NO: 568447 - RNA, 24 nt, Human
caccauuuuggucaggcuggucuc

SEQ ID NO: 568448 - RNA, 19 nt, Human
caccggauccggauccggc

SEQ ID NO: 568449 - RNA, 23 nt, Human
caccuauagucccagccacaugg

SEQ ID NO: 568450 - RNA, 24 nt, Human
caccuauagucccagccacauggg

SEQ ID NO: 568451 - RNA, 20 nt, Human
caccuccuccuccaccgccc

SEQ ID NO: 568452 - RNA, 19 nt, Human
caccucgccucugcccccu

SEQ ID NO: 568453 - RNA, 22 nt, Human
caccuguaguuccagcuacugg

SEQ ID NO: 568454 - RNA, 23 nt, Human
caccuguaguuccagcuacuggg

SEQ ID NO: 568455 - RNA, 20 nt, Human
caccugucauccaagcacuu

SEQ ID NO: 568456 - RNA, 21 nt, Human
cacugcaaccuuugccucccg

SEQ ID NO: 568457 - RNA, 23 nt, Human
cacugcaaccuuugccucccggg

SEQ ID NO: 568458 - RNA, 22 nt, Human
cacuggacuccagccuggguga

SEQ ID NO: 568459 - RNA, 21 nt, Human
cagaagacuacucauauaaac

SEQ ID NO: 568460 - RNA, 22 nt, Human
cagacguggcagcgccaacgcc

SEQ ID NO: 568461 - RNA, 21 nt, Human
cagaucaguucgucuguauag

SEQ ID NO: 568462 - RNA, 24 nt, Human
cagccacaugggaggcugaggugg

SEQ ID NO: 568463 - RNA, 20 nt, Human
cagcuuccugaguagcuggg

SEQ ID NO: 568464 - RNA, 19 nt, Human
caggaaccguagaggcccu

SEQ ID NO: 568465 - RNA, 24 nt, Human
caggguuucaccauuuuggucagg

SEQ ID NO: 568466 - RNA, 24 nt, Human
cauauguaaucccagauacucugg

SEQ ID NO: 568467 - RNA, 24 nt, Human
caugccaccacgucuggcuaauuu

SEQ ID NO: 568468 - RNA, 18 nt, Human
caugugauaaacagccuu

SEQ ID NO: 568469 - RNA, 22 nt, Human
ccaaagugcugggauuacaggc

SEQ ID NO: 568470 - RNA, 22 nt, Human
ccaaagugcugggauuacaggc

SEQ ID NO: 568471 - RNA, 24 nt, Human
ccaaagugcugggauuacaggcgu

SEQ ID NO: 568472 - RNA, 20 nt, Human
ccacagaaaaauguaaagcc

SEQ ID NO: 568473 - RNA, 19 nt, Human
ccacugcacccggccuuac

SEQ ID NO: 568474 - RNA, 19 nt, Human
ccacugcacccggccuuac

SEQ ID NO: 568475 - RNA, 20 nt, Human
ccacuggacuccagccuggg

SEQ ID NO: 568476 - RNA, 21 nt, Human
ccacuggacuccagccugggu

SEQ ID NO: 568477 - RNA, 23 nt, Human
ccacuggacuccagccuggguga

SEQ ID NO: 568478 - RNA, 23 nt, Human
ccacuggacuccagccuggguga

SEQ ID NO: 568479 - RNA, 24 nt, Human
ccacuggacuccagccugggugau

SEQ ID NO: 568480 - RNA, 19 nt, Human
ccauacucuugacuaccaa

SEQ ID NO: 568481 - RNA, 24 nt, Human
ccauuuuugaaaaaacuuagaggc

SEQ ID NO: 568482 - RNA, 24 nt, Human
ccccaccuccuccuccaccgcccg

SEQ ID NO: 568483 - RNA, 21 nt, Human
ccccugcgcucuagccugggc

SEQ ID NO: 568484 - RNA, 24 nt, Human
ccccugcgcucuagccugggcaac

SEQ ID NO: 568485 - RNA, 21 nt, Human
cccgcgccacaguugggaacc

SEQ ID NO: 568486 - RNA, 20 nt, Human
cccggguucaagcgauucuc

SEQ ID NO: 568487 - RNA, 19 nt, Human
cccugcgcucuagccuggg

SEQ ID NO: 568488 - RNA, 19 nt, Human
cccugcgcucuagccuggg

SEQ ID NO: 568489 - RNA, 20 nt, Human
cccugcgcucuagccugggc

SEQ ID NO: 568490 - RNA, 19 nt, Human
ccggcuucagcgccagccc

SEQ ID NO: 568491 - RNA, 21 nt, Human
ccguagaggcccugcggucgg

SEQ ID NO: 568492 - RNA, 23 nt, Human
ccucccggguucaagcgauucuc

SEQ ID NO: 568493 - RNA, 23 nt, Human
ccugaguagcugggauuacaggc

SEQ ID NO: 568494 - RNA, 23 nt, Human
ccugaguagcugggauuacaggc

SEQ ID NO: 568495 - RNA, 24 nt, Human
ccugcgcucuagccugggcaacag

SEQ ID NO: 568496 - RNA, 19 nt, Human
ccugggcaacauagacucc

SEQ ID NO: 568497 - RNA, 20 nt, Human
ccugggugauggagugggac

SEQ ID NO: 568498 - RNA, 21 nt, Human
ccugggugauggagugggaca

SEQ ID NO: 568499 - RNA, 22 nt, Human
ccuguaguuccagcuacugggg

SEQ ID NO: 568500 - RNA, 24 nt, Human
cgcaccugucauccaagcacuuug

SEQ ID NO: 568501 - RNA, 25 nt, Human
cgcaggcgagcggaggcggaggcca

SEQ ID NO: 568502 - RNA, 23 nt, Human
cgccaggcuggagugcaguggug

SEQ ID NO: 568503 - RNA, 24 nt, Human
cgccaggcuggagugcaguggugu

SEQ ID NO: 568504 - RNA, 22 nt, Human
cgcccgcgccacaguugggaac

SEQ ID NO: 568505 - RNA, 22 nt, Human
cgccucagcuuccugaguagcu

SEQ ID NO: 568506 - RNA, 22 nt, Human
cuaguacaauacauuaaguauu

SEQ ID NO: 568507 - RNA, 24 nt, Human
cucacugcaaccuuugccucccgg

SEQ ID NO: 568508 - RNA, 24 nt, Human
cucagcuuccugaguagcugggau

SEQ ID NO: 568509 - RNA, 22 nt, Human
cuccugaccuugugaucugccc

SEQ ID NO: 568510 - RNA, 23 nt, Human
cucucucugucgccaggcuggag

SEQ ID NO: 568511 - RNA, 23 nt, Human
cucucugucgccaggcuggagug

SEQ ID NO: 568512 - RNA, 18 nt, Human
cucuugacuaccaagaaa

SEQ ID NO: 568513 - RNA, 18 nt, Human
cugaagugccaaccuugu

SEQ ID NO: 568514 - RNA, 22 nt, Human
cugaguagcugggauuacaggc

SEQ ID NO: 568515 - RNA, 23 nt, Human
cugcaaccuuugccucccggguu

SEQ ID NO: 568516 - RNA, 24 nt, Human
cugcaaccuuugccucccggguuc

SEQ ID NO: 568517 - RNA, 20 nt, Human
cugcacccggccuuaccagg

SEQ ID NO: 568518 - RNA, 23 nt, Human
cugcauggagggaaauccaaaau

SEQ ID NO: 568519 - RNA, 23 nt, Human
cugcgcucuagccugggcaacag

SEQ ID NO: 568520 - RNA, 20 nt, Human
cuggaggaugcagugagcua

SEQ ID NO: 568521 - RNA, 18 nt, Human
cuggaggcugaggcagag

SEQ ID NO: 568522 - RNA, 24 nt, Human
cuggagugcaguggugugaucuca

SEQ ID NO: 568523 - RNA, 23 nt, Human
cuucugaaaagacagaacuagcu

SEQ ID NO: 568524 - RNA, 23 nt, Human
cuugagcucaggaguuugagacc

SEQ ID NO: 568525 - RNA, 23 nt, Human
gaccccacagaaaaauguaaagc

SEQ ID NO: 568526 - RNA, 22 nt, Human
gaccuugugaucugcccaccuc

SEQ ID NO: 568527 - RNA, 24 nt, Human
gaccuugugaucugcccaccucag

SEQ ID NO: 568528 - RNA, 18 nt, Human
gagauugaagcggcagug

SEQ ID NO: 568529 - RNA, 24 nt, Human
gagcccaggagauugaagcggcag

SEQ ID NO: 568530 - RNA, 20 nt, Human
gaggcggaggccaaggcgcc

SEQ ID NO: 568531 - RNA, 24 nt, Human
gaggcggaggccaaggcgccaccc

SEQ ID NO: 568532 - RNA, 26 nt, Human
gaguagcugggauuacaggcgcaugc

SEQ ID NO: 568533 - RNA, 24 nt, Human
gaucacuugagcucaggaguuuga

SEQ ID NO: 568534 - RNA, 24 nt, Human
gaucauuugagcccaggagauuga

SEQ ID NO: 568535 - RNA, 24 nt, Human
gauggcacacaccuguaguuccag

SEQ ID NO: 568536 - RNA, 18 nt, Human
gauuacaggcgcaugcca

SEQ ID NO: 568537 - RNA, 18 nt, Human
gauuacaggcgugagcca

SEQ ID NO: 568538 - RNA, 19 nt, Human
gauuacaggcgugagccac

SEQ ID NO: 568539 - RNA, 23 nt, Human
gauuacaggcgugagccacugca

SEQ ID NO: 568540 - RNA, 18 nt, Human
gcauggagggaaauccaa

SEQ ID NO: 568541 - RNA, 19 nt, Human
gccagccccaccuccuccu

SEQ ID NO: 568542 - RNA, 24 nt, Human
gccccugcgcucuagccugggcaa

SEQ ID NO: 568543 - RNA, 23 nt, Human
gccucagcuuccugaguagcugg

SEQ ID NO: 568544 - RNA, 24 nt, Human
gccucagcuuccugaguagcuggg

SEQ ID NO: 568545 - RNA, 23 nt, Human
gcgagaccuugucucaacaacaa

SEQ ID NO: 568546 - RNA, 24 nt, Human
gcgauucucucgccucagcuuccu

SEQ ID NO: 568547 - RNA, 21 nt, Human
gcgccagccccaccuccuccu

SEQ ID NO: 568548 - RNA, 21 nt, Human
gcuugaacccaggaacuggag

SEQ ID NO: 568549 - RNA, 22 nt, Human
gcuugggcaauauaguaagacc

SEQ ID NO: 568550 - RNA, 21 nt, Human
ggaaaggguaggucauccaca

SEQ ID NO: 568551 - RNA, 20 nt, Human
ggacagugucucuuuaaaaa

SEQ ID NO: 568552 - RNA, 24 nt, Human
ggacuccagccugggugauggagu

SEQ ID NO: 568553 - RNA, 18 nt, Human
ggaggaugcagugagcua

SEQ ID NO: 568554 - RNA, 24 nt, Human
ggaggaugcagugagcuaugauca

SEQ ID NO: 568555 - RNA, 26 nt, Human
ggaggaugcagugagcuauggcuagg

SEQ ID NO: 568556 - RNA, 21 nt, Human
ggaggcugaggcagaggauca

SEQ ID NO: 568557 - RNA, 23 nt, Human
ggaggcugaggcaggagggaugg

SEQ ID NO: 568558 - RNA, 22 nt, Human
ggaucacuugagcucaggaguu

SEQ ID NO: 568559 - RNA, 21 nt, Human
ggcaugcaccuauagucccag

SEQ ID NO: 568560 - RNA, 18 nt, Human
ggccaggugcaguggcuc

SEQ ID NO: 568561 - RNA, 22 nt, Human
ggcuggagugcaguggugugau

SEQ ID NO: 568562 - RNA, 23 nt, Human
ggcuggucucaaacuccugaccu

SEQ ID NO: 568563 - RNA, 22 nt, Human
ggcuugggcaauauaguaagac

SEQ ID NO: 568564 - RNA, 20 nt, Human
ggucucaaacuccugaccuu

SEQ ID NO: 568565 - RNA, 24 nt, Human
gguggcaugcaccuauagucccag

SEQ ID NO: 568566 - RNA, 18 nt, Human
guagcugggauuacaggc

SEQ ID NO: 568567 - RNA, 20 nt, Human
gugauaaacagccuuauuca

SEQ ID NO: 568568 - RNA, 24 nt, Human
gugaucugcccaccucagccuccc

SEQ ID NO: 568569 - RNA, 19 nt, Human
gugguacuuuuuaucuaca

SEQ ID NO: 568570 - RNA, 18 nt, Human
uaaaagacaguguauugc

SEQ ID NO: 568571 - RNA, 18 nt, Human
uaaaauuacagaucacca

SEQ ID NO: 568572 - RNA, 18 nt, Human
uaaacuuucaguaaaaca

SEQ ID NO: 568573 - RNA, 21 nt, Human
uaaacuuucaguaaaacauuu

SEQ ID NO: 568574 - RNA, 21 nt, Human
uaacuccuuauuacccauacu

SEQ ID NO: 568575 - RNA, 24 nt, Human
uaauuuuucuuuuuuuuaguagag

SEQ ID NO: 568576 - RNA, 25 nt, Human
uaauuuuucuuuuuuuuaguagaga

SEQ ID NO: 568577 - RNA, 21 nt, Human
uacagaucaccauuguccuca

SEQ ID NO: 568578 - RNA, 19 nt, Human
uacaggcgcaugccaccac

SEQ ID NO: 568579 - RNA, 19 nt, Human
uacaggcgugagccacugc

SEQ ID NO: 568580 - RNA, 23 nt, Human
uacaggcgugagccacugcaccc

SEQ ID NO: 568581 - RNA, 18 nt, Human
uaccaagaaaggaagcca

SEQ ID NO: 568582 - RNA, 22 nt, Human
uaccaagaaaggaagccaaacu

SEQ ID NO: 568583 - RNA, 22 nt, Human
uaccaggcuaauuuuuaaaaac

SEQ ID NO: 568584 - RNA, 20 nt, Human
uaccuguaauucuauuuccu

SEQ ID NO: 568585 - RNA, 19 nt, Human
uacucuggaggcugaggca

SEQ ID NO: 568586 - RNA, 19 nt, Human
uacugugcuucaucaaauc

SEQ ID NO: 568587 - RNA, 20 nt, Human
uagagacaggguuucaccau

SEQ ID NO: 568588 - RNA, 21 nt, Human
uagaggcccugcggucggccg

SEQ ID NO: 568589 - RNA, 18 nt, Human
uagccugggcaacagcga

SEQ ID NO: 568590 - RNA, 20 nt, Human
uagcugggugugguggcaug

SEQ ID NO: 568591 - RNA, 19 nt, Human
uaguagagacaggguuuca

SEQ ID NO: 568592 - RNA, 20 nt, Human
uauaguaagaccccacagaa

SEQ ID NO: 568593 - RNA, 19 nt, Human
uauggaggucacucggcug

SEQ ID NO: 568594 - RNA, 22 nt, Human
uaugugggaaacaauacacccc

SEQ ID NO: 568595 - RNA, 21 nt, Human
ucaacaacaacaacaacaaaa

SEQ ID NO: 568596 - RNA, 23 nt, Human
ucacaccacuggacuccagccug

SEQ ID NO: 568597 - RNA, 20 nt, Human
ucacucggcugcagcaacaa

SEQ ID NO: 568598 - RNA, 24 nt, Human
ucacugcaaccuuugccucccggg

SEQ ID NO: 568599 - RNA, 25 nt, Human
ucacugcaaccuuugccucccgggu

SEQ ID NO: 568600 - RNA, 18 nt, Human
ucacuugagccuaggagu

SEQ ID NO: 568601 - RNA, 18 nt, Human
ucagccucccaaagugcu

SEQ ID NO: 568602 - RNA, 20 nt, Human
ucagcuuccugaguagcugg

SEQ ID NO: 568603 - RNA, 18 nt, Human
uccagccugggugaugga

SEQ ID NO: 568604 - RNA, 19 nt, Human
uccagccugggugauggag

SEQ ID NO: 568605 - RNA, 24 nt, Human
uccagccugggugauggaguggga

SEQ ID NO: 568606 - RNA, 24 nt, Human
ucccaaagugcugggauuacaggc

SEQ ID NO: 568607 - RNA, 20 nt, Human
ucccccaccagugugcacag

SEQ ID NO: 568608 - RNA, 21 nt, Human
ucccggguucaagcgauucuc

SEQ ID NO: 568609 - RNA, 24 nt, Human
ucccggguucaagcgauucucucg

SEQ ID NO: 568610 - RNA, 24 nt, Human
uccugaguagcugggauuacaggc

SEQ ID NO: 568611 - RNA, 24 nt, Human
ucgccaggcuggagugcaguggug

SEQ ID NO: 568612 - RNA, 20 nt, Human
ucgccucugcccccucacgc

SEQ ID NO: 568613 - RNA, 23 nt, Human
ucucucucugucgccaggcugga

SEQ ID NO: 568614 - RNA, 23 nt, Human
ucucucugucgccaggcuggagu

SEQ ID NO: 568615 - RNA, 21 nt, Human
ucugcccaccucagccuccca

SEQ ID NO: 568616 - RNA, 21 nt, Human
ucugucgccaggcuggagugc

SEQ ID NO: 568617 - RNA, 23 nt, Human
ucugucgccaggcuggagugcag

SEQ ID NO: 568618 - RNA, 23 nt, Human
ucuuuaaaaaaugugggccaggu

SEQ ID NO: 568619 - RNA, 21 nt, Human
ugaaacaaaaauauacaaaac

SEQ ID NO: 568620 - RNA, 22 nt, Human
ugaaacaaaaauauacaaaaca

SEQ ID NO: 568621 - RNA, 27 nt, Human
ugaaacaaaaauauacaaaacaugaga

SEQ ID NO: 568622 - RNA, 23 nt, Human
ugaccuugugaucugcccaccuc

SEQ ID NO: 568623 - RNA, 22 nt, Human
ugagauggagucucucucuguc

SEQ ID NO: 568624 - RNA, 22 nt, Human
ugagcccaggagauugaagcgg

SEQ ID NO: 568625 - RNA, 24 nt, Human
ugagccuaggaguuaagagaccag

SEQ ID NO: 568626 - RNA, 23 nt, Human
ugaggcagaggaucacuugagcu

SEQ ID NO: 568627 - RNA, 24 nt, Human
ugaggcagaggaucacuugagcuc

SEQ ID NO: 568628 - RNA, 18 nt, Human
ugaggcaggagggauggc

SEQ ID NO: 568629 - RNA, 25 nt, Human
ugaggcaggagggauggcuugaacc

SEQ ID NO: 568630 - RNA, 26 nt, Human
ugaggcaggagggauggcuugaaccc

SEQ ID NO: 568631 - RNA, 24 nt, Human
ugagguggaaggaucauuugagcc

SEQ ID NO: 568632 - RNA, 19 nt, Human
ugaggugggaggaucacuu

SEQ ID NO: 568633 - RNA, 21 nt, Human
ugaggugggaggaucacuuga

SEQ ID NO: 568634 - RNA, 23 nt, Human
ugaggugggaggaucacuugagc

SEQ ID NO: 568635 - RNA, 24 nt, Human
ugaggugggaggaucacuugagcc

SEQ ID NO: 568636 - RNA, 23 nt, Human
ugauaaacagccuuauucaaugu

SEQ ID NO: 568637 - RNA, 24 nt, Human
ugaucugcccaccucagccuccca

SEQ ID NO: 568638 - RNA, 23 nt, Human
ugauggcacacaccuguaguucc

SEQ ID NO: 568639 - RNA, 23 nt, Human
ugauggcacacaccuguaguucc

SEQ ID NO: 568640 - RNA, 21 nt, Human
ugcaccuauagucccagccac

SEQ ID NO: 568641 - RNA, 24 nt, Human
ugcaccuauagucccagccacaug

SEQ ID NO: 568642 - RNA, 22 nt, Human
ugcaguggugugaucucagcuc

SEQ ID NO: 568643 - RNA, 18 nt, Human
ugcauacugugcuucauc

SEQ ID NO: 568644 - RNA, 20 nt, Human
ugcggucggcgcuccuagcc

SEQ ID NO: 568645 - RNA, 24 nt, Human
ugcugggauuacaggcgugagcca

SEQ ID NO: 568646 - RNA, 19 nt, Human
uggagggaaauccaaaauc

SEQ ID NO: 568647 - RNA, 19 nt, Human
uggagugcaguggugugau

SEQ ID NO: 568648 - RNA, 24 nt, Human
uggagugcaguggugugaucucag

SEQ ID NO: 568649 - RNA, 23 nt, Human
uggagugggacagugucucuuua

SEQ ID NO: 568650 - RNA, 19 nt, Human
uggcacacaccuguaguuc

SEQ ID NO: 568651 - RNA, 24 nt, Human
ugggaggcugagguggaaggauca

SEQ ID NO: 568652 - RNA, 19 nt, Human
ugggaggcugaggugggag

SEQ ID NO: 568653 - RNA, 24 nt, Human
ugggaggcugaggugggaggauca

SEQ ID NO: 568654 - RNA, 21 nt, Human
ugggauuacaggcgcaugcca

SEQ ID NO: 568655 - RNA, 22 nt, Human
ugggauuacaggcgcaugccac

SEQ ID NO: 568656 - RNA, 24 nt, Human
ugggauuacaggcgcaugccacca

SEQ ID NO: 568657 - RNA, 19 nt, Human
ugggauuacaggcgugagc

SEQ ID NO: 568658 - RNA, 21 nt, Human
ugggauuacaggcgugagcca

SEQ ID NO: 568659 - RNA, 22 nt, Human
ugggauuacaggcgugagccac

SEQ ID NO: 568660 - RNA, 22 nt, Human
ugggauuacaggcgugagccac

SEQ ID NO: 568661 - RNA, 24 nt, Human
ugggauuacaggcgugagccacug

SEQ ID NO: 568662 - RNA, 26 nt, Human
ugggauuacaggcgugagccacugca

SEQ ID NO: 568663 - RNA, 22 nt, Human
ugggcaauauaguaagacccca

SEQ ID NO: 568664 - RNA, 24 nt, Human
uggucaggcuggucucaaacuccu

SEQ ID NO: 568665 - RNA, 18 nt, Human
uggugugagucaauggga

SEQ ID NO: 568666 - RNA, 24 nt, Human
uggugugaucucagcucacugcaa

SEQ ID NO: 568667 - RNA, 18 nt, Human
ugugcugguuacaggaac

SEQ ID NO: 568668 - RNA, 22 nt, Human
uguggugauugugccccugcgc

SEQ ID NO: 568669 - RNA, 19 nt, Human
uuagcugggugugguggca

SEQ ID NO: 568670 - RNA, 22 nt, Human
uuagcugggugugguggcaugc

SEQ ID NO: 568671 - RNA, 24 nt, Human
uuaguagagacaggguuucaccau

SEQ ID NO: 568672 - RNA, 23 nt, Human
uucaagcgauucucucgccucag

SEQ ID NO: 568673 - RNA, 22 nt, Human
uucacaagcaaauaguggccaa

SEQ ID NO: 568674 - RNA, 19 nt, Human
uucagcgccagccccaccu

SEQ ID NO: 568675 - RNA, 22 nt, Human
uuggaagugagagaaucguguu

SEQ ID NO: 568676 - RNA, 25 nt, Human
uugggaggcugaggugggaggauca

SEQ ID NO: 568677 - RNA, 24 nt, Human
uuguuuuguuuugagauggagucu

SEQ ID NO: 568678 - RNA, 19 nt, Human
uuuaugcaugugauaaaca

SEQ ID NO: 568679 - RNA, 24 nt, Human
uuucaccauuuuggucaggcuggu

SEQ ID NO: 568680 - RNA, 22 nt, Human
uuucuuuuuuuuaguagagaca

SEQ ID NO: 568681 - RNA, 24 nt, Human
uuuuuaguagagacaggguuucac

SEQ ID NO: 568682 - RNA, 23 nt, Human
uuuuuuaguagagacaggguuuc

SEQ ID NO: 568683 - RNA, 19 nt, Human
aaagugcugggauuacaga

SEQ ID NO: 568684 - RNA, 24 nt, Human
aaagugcugggauuacagacguga

SEQ ID NO: 568685 - RNA, 21 nt, Human
aagcagauagguucaaaucug

SEQ ID NO: 568686 - RNA, 19 nt, Human
aaguagcugggauuacagg

SEQ ID NO: 568687 - RNA, 19 nt, Human
aagugcugggauuacagac

SEQ ID NO: 568688 - RNA, 26 nt, Human
aagugcugggauuacagacgugagcc

SEQ ID NO: 568689 - RNA, 24 nt, Human
accauguuggccaggcuggucucg

SEQ ID NO: 568690 - RNA, 24 nt, Human
acggggccucaccauguuggccag

SEQ ID NO: 568691 - RNA, 21 nt, Human
acgugagccacagcacccagc

SEQ ID NO: 568692 - RNA, 24 nt, Human
aggugauccgcccaccucggccuc

SEQ ID NO: 568693 - RNA, 24 nt, Human
agugcugggauuacagacgugagc

SEQ ID NO: 568694 - RNA, 24 nt, Human
caaagugcugggauuacagacgug

SEQ ID NO: 568695 - RNA, 21 nt, Human
caccauguuggccaggcuggu

SEQ ID NO: 568696 - RNA, 24 nt, Human
caccauguuggccaggcuggucuc

SEQ ID NO: 568697 - RNA, 27 nt, Human
caccauguuggccaggcuggucucgaa

SEQ ID NO: 568698 - RNA, 24 nt, Human
caccucggccucccaaagugcugg

SEQ ID NO: 568699 - RNA, 18 nt, Human
cacugcaaccucugccuc

SEQ ID NO: 568700 - RNA, 21 nt, Human
cacugcaaccucugccuccca

SEQ ID NO: 568701 - RNA, 19 nt, Human
cagauagguucaaaucugc

SEQ ID NO: 568702 - RNA, 19 nt, Human
cagcacccagccgggacug

SEQ ID NO: 568703 - RNA, 22 nt, Human
caggcgauucuccugccucagc

SEQ ID NO: 568704 - RNA, 21 nt, Human
caggcgauucuccugccuuag

SEQ ID NO: 568705 - RNA, 24 nt, Human
cauguuggccaggcuggucucgaa

SEQ ID NO: 568706 - RNA, 22 nt, Human
ccaaagugcugggauuacagac

SEQ ID NO: 568707 - RNA, 24 nt, Human
ccaaagugcugggauuacagacgu

SEQ ID NO: 568708 - RNA, 21 nt, Human
ccaaguagcugggauuacagg

SEQ ID NO: 568709 - RNA, 22 nt, Human
cccaaguagcugggauuacagg

SEQ ID NO: 568710 - RNA, 23 nt, Human
cccaaguagcugggauuacaggu

SEQ ID NO: 568711 - RNA, 24 nt, Human
cccaaguagcugggauuacaggug

SEQ ID NO: 568712 - RNA, 23 nt, Human
cccagguucaggcgauucuccug

SEQ ID NO: 568713 - RNA, 23 nt, Human
cccagguucaggcgauucuccug

SEQ ID NO: 568714 - RNA, 24 nt, Human
cccgaccucaggugauccgcccac

SEQ ID NO: 568715 - RNA, 24 nt, Human
ccucccagguucaggcgauucucc

SEQ ID NO: 568716 - RNA, 18 nt, Human
cgaccucaggugauccgc

SEQ ID NO: 568717 - RNA, 24 nt, Human
cggaguuucguguuguugcccagg

SEQ ID NO: 568718 - RNA, 24 nt, Human
cguguuguugcccaggcuagagug

SEQ ID NO: 568719 - RNA, 24 nt, Human
cucacugcaaccucugccucccag

SEQ ID NO: 568720 - RNA, 24 nt, Human
cucacugcaaccucugccucccag

SEQ ID NO: 568721 - RNA, 24 nt, Human
cucagccucccaaguagcugggau

SEQ ID NO: 568722 - RNA, 23 nt, Human
cucccagguucaggcgauucucc

SEQ ID NO: 568723 - RNA, 23 nt, Human
cuccugccuuagucucccagguu

SEQ ID NO: 568724 - RNA, 23 nt, Human
cugcaaccucugccucccagguu

SEQ ID NO: 568725 - RNA, 24 nt, Human
cugcaaccucugccucccagguuc

SEQ ID NO: 568726 - RNA, 23 nt, Human
cugccucagccucccaaguagcu

SEQ ID NO: 568727 - RNA, 23 nt, Human
cugcuugcucucuucacuuccgg

SEQ ID NO: 568728 - RNA, 23 nt, Human
cuggugcuuggagcggaagggaa

SEQ ID NO: 568729 - RNA, 24 nt, Human
gaccucaggugauccgcccaccuc

SEQ ID NO: 568730 - RNA, 18 nt, Human
gauuacagacgugagcca

SEQ ID NO: 568731 - RNA, 23 nt, Human
gauuacagacgugagccacagca

SEQ ID NO: 568732 - RNA, 21 nt, Human
gauucuccugccucagccucc

SEQ ID NO: 568733 - RNA, 22 nt, Human
gcaaccucugccucccagguuc

SEQ ID NO: 568734 - RNA, 20 nt, Human
gccucagccucccaaguagc

SEQ ID NO: 568735 - RNA, 22 nt, Human
gccuuagucucccagguucagg

SEQ ID NO: 568736 - RNA, 24 nt, Human
gcgauucuccugccucagccuccc

SEQ ID NO: 568737 - RNA, 24 nt, Human
gcuagagugcaauggugccgucug

SEQ ID NO: 568738 - RNA, 21 nt, Human
gcucacugcaaccucugccuc

SEQ ID NO: 568739 - RNA, 23 nt, Human
gcuggucucgaacucccgaccuc

SEQ ID NO: 568740 - RNA, 23 nt, Human
ggaguuucguguuguugcccagg

SEQ ID NO: 568741 - RNA, 18 nt, Human
ggccucaccauguuggcc

SEQ ID NO: 568742 - RNA, 22 nt, Human
gggccucaccauguuggccagg

SEQ ID NO: 568743 - RNA, 23 nt, Human
ggggccucaccauguuggccagg

SEQ ID NO: 568744 - RNA, 23 nt, Human
guagagacggggccucaccaugu

SEQ ID NO: 568745 - RNA, 18 nt, Human
guagcugggauuacaggu

SEQ ID NO: 568746 - RNA, 24 nt, Human
gugauccgcccaccucggccuccc

SEQ ID NO: 568747 - RNA, 22 nt, Human
uagagacggggccucaccaugu

SEQ ID NO: 568748 - RNA, 24 nt, Human
uaguagagacggggccucaccaug

SEQ ID NO: 568749 - RNA, 26 nt, Human
uaguagagacggggccucaccauguu

SEQ ID NO: 568750 - RNA, 19 nt, Human
ucacugcaaccucugccuc

SEQ ID NO: 568751 - RNA, 24 nt, Human
ucacugcaaccucugccucccagg

SEQ ID NO: 568752 - RNA, 25 nt, Human
ucacugcaaccucugccucccaggu

SEQ ID NO: 568753 - RNA, 18 nt, Human
ucacugguauucccccgu

SEQ ID NO: 568754 - RNA, 18 nt, Human
ucagccucccaaguagcu

SEQ ID NO: 568755 - RNA, 20 nt, Human
ucagccucccaaguagcugg

SEQ ID NO: 568756 - RNA, 18 nt, Human
ucccaaagugcugggauu

SEQ ID NO: 568757 - RNA, 24 nt, Human
ucccaaagugcugggauuacagac

SEQ ID NO: 568758 - RNA, 23 nt, Human
ucccaaguagcugggauuacagg

SEQ ID NO: 568759 - RNA, 24 nt, Human
ucccaaguagcugggauuacaggu

SEQ ID NO: 568760 - RNA, 19 nt, Human
ucccagguucaggcgauuc

SEQ ID NO: 568761 - RNA, 21 nt, Human
ucccagguucaggcgauucuc

SEQ ID NO: 568762 - RNA, 21 nt, Human
ucccagguucaggcgauucuc

SEQ ID NO: 568763 - RNA, 24 nt, Human
ucccagguucaggcgauucuccug

SEQ ID NO: 568764 - RNA, 24 nt, Human
ucccagguucaggcgauucuccug

SEQ ID NO: 568765 - RNA, 18 nt, Human
ucggccucccaaagugcu

SEQ ID NO: 568766 - RNA, 22 nt, Human
ucguguuguugcccaggcuaga

SEQ ID NO: 568767 - RNA, 24 nt, Human
ucguguuguugcccaggcuagagu

SEQ ID NO: 568768 - RNA, 19 nt, Human
ucucccagguucaggcgau

SEQ ID NO: 568769 - RNA, 26 nt, Human
ucuccugccucagccucccaaguagc

SEQ ID NO: 568770 - RNA, 22 nt, Human
ucucuucacuuccggcggggau

SEQ ID NO: 568771 - RNA, 21 nt, Human
ugagaagcgagggcaacacga

SEQ ID NO: 568772 - RNA, 24 nt, Human
ugauccgcccaccucggccuccca

SEQ ID NO: 568773 - RNA, 21 nt, Human
ugcccaggcuagagugcaaug

SEQ ID NO: 568774 - RNA, 24 nt, Human
ugccucagccucccaaguagcugg

SEQ ID NO: 568775 - RNA, 21 nt, Human
ugccuuagucucccagguuca

SEQ ID NO: 568776 - RNA, 25 nt, Human
ugcugggauuacagacgugagccac

SEQ ID NO: 568777 - RNA, 23 nt, Human
uggccaggcuggucucgaacucc

SEQ ID NO: 568778 - RNA, 18 nt, Human
ugggauuacagacgugag

SEQ ID NO: 568779 - RNA, 19 nt, Human
ugggauuacagacgugagc

SEQ ID NO: 568780 - RNA, 21 nt, Human
ugggauuacagacgugagcca

SEQ ID NO: 568781 - RNA, 22 nt, Human
ugggauuacagacgugagccac

SEQ ID NO: 568782 - RNA, 26 nt, Human
ugggauuacagacgugagccacagca

SEQ ID NO: 568783 - RNA, 27 nt, Human
ugggauuacagacgugagccacagcac

SEQ ID NO: 568784 - RNA, 19 nt, Human
ugggauuacaggugccacc

SEQ ID NO: 568785 - RNA, 20 nt, Human
ugggauuacaggugccacca

SEQ ID NO: 568786 - RNA, 19 nt, Human
uggucucgaacucccgacc

SEQ ID NO: 568787 - RNA, 20 nt, Human
uguugcccaggcuagagugc

SEQ ID NO: 568788 - RNA, 22 nt, Human
uguugcccaggcuagagugcaa

SEQ ID NO: 568789 - RNA, 21 nt, Human
uuacaggugccaccaagcacg

SEQ ID NO: 568790 - RNA, 24 nt, Human
uuaguagagacggggccucaccau

SEQ ID NO: 568791 - RNA, 18 nt, Human
uucaggcgauucuccugc

SEQ ID NO: 568792 - RNA, 21 nt, Human
uucaggcgauucuccugccuc

SEQ ID NO: 568793 - RNA, 23 nt, Human
uucaggcgauucuccugccucag

SEQ ID NO: 568794 - RNA, 23 nt, Human
uuguauuuuuaguagagacgggg

SEQ ID NO: 568795 - RNA, 23 nt, Human
uuguugcccaggcuagagugcaa

SEQ ID NO: 568796 - RNA, 24 nt, Human
uuucguguuguugcccaggcuaga

SEQ ID NO: 568797 - RNA, 24 nt, Human
uuuuuaguagagacggggccucac

SEQ ID NO: 568798 - RNA, 21 nt, Human
uuuuuguauuuuuaguagaga

SEQ ID NO: 568799 - RNA, 21 nt, Human
uuuuuuguauuuuuaguagag

SEQ ID NO: 568800 - RNA, 24 nt, Human
uuuuuuguauuuuuaguagagacg

SEQ ID NO: 568801 - RNA, 20 nt, Human
aaagcaaccggcacagcccu

SEQ ID NO: 568802 - RNA, 24 nt, Human
aaauagccgagaaaucaacauuuu

SEQ ID NO: 568803 - RNA, 21 nt, Human
aacuaguaagucacuaaaaag

SEQ ID NO: 568804 - RNA, 25 nt, Human
aacugugucugggggacaugguaga

SEQ ID NO: 568805 - RNA, 21 nt, Human
aagcaaccggcacagcccucc

SEQ ID NO: 568806 - RNA, 24 nt, Human
agaagacugccauaaaucaacaaa

SEQ ID NO: 568807 - RNA, 20 nt, Human
aggcauuuccuuggaggcuc

SEQ ID NO: 568808 - RNA, 19 nt, Human
auuacuauaauuccuacaa

SEQ ID NO: 568809 - RNA, 22 nt, Human
auuaggcuaaacaacaagcacc

SEQ ID NO: 568810 - RNA, 19 nt, Human
caaaacauuuugaugcuaa

SEQ ID NO: 568811 - RNA, 25 nt, Human
caacaagcaccugucagcaguggaa

SEQ ID NO: 568812 - RNA, 24 nt, Human
cacuccagccgcgccaccgccugc

SEQ ID NO: 568813 - RNA, 21 nt, Human
cauguaccacaaaaucagaga

SEQ ID NO: 568814 - RNA, 20 nt, Human
ccaaaacauuuugaugcuaa

SEQ ID NO: 568815 - RNA, 25 nt, Human
cccaaacuauuuuucuucugucugc

SEQ ID NO: 568816 - RNA, 19 nt, Human
cccaugguccacuguaauc

SEQ ID NO: 568817 - RNA, 19 nt, Human
cccgcggcacuccagccgc

SEQ ID NO: 568818 - RNA, 23 nt, Human
ccgaaaggccaaguaauguggug

SEQ ID NO: 568819 - RNA, 23 nt, Human
ccgccugccuaagcgcgccgccc

SEQ ID NO: 568820 - RNA, 24 nt, Human
ccgccugccuaagcgcgccgcccu

SEQ ID NO: 568821 - RNA, 22 nt, Human
ccgcgccaccgccugccuaagc

SEQ ID NO: 568822 - RNA, 22 nt, Human
ccucucagggaaaugugaaaau

SEQ ID NO: 568823 - RNA, 21 nt, Human
cgcgccaccgccugccuaagc

SEQ ID NO: 568824 - RNA, 18 nt, Human
cucauugucauugcuguu

SEQ ID NO: 568825 - RNA, 24 nt, Human
cuccccgcggcacuccagccgcgc

SEQ ID NO: 568826 - RNA, 20 nt, Human
cugagguuuuuuuuuuuuuu

SEQ ID NO: 568827 - RNA, 21 nt, Human
cuggccgagaugcggcugcag

SEQ ID NO: 568828 - RNA, 20 nt, Human
gagguuuuuuuuuuuuuuuc

SEQ ID NO: 568829 - RNA, 20 nt, Human
uaaaauauugugccaggucc

SEQ ID NO: 568830 - RNA, 24 nt, Human
uaaauauccacauuaggcuaaaca

SEQ ID NO: 568831 - RNA, 23 nt, Human
uaccacaaaaucagagaagacac

SEQ ID NO: 568832 - RNA, 22 nt, Human
uaccacaaaaucagagaagacu

SEQ ID NO: 568833 - RNA, 22 nt, Human
uacuggaauuaaacaaaggcca

SEQ ID NO: 568834 - RNA, 20 nt, Human
ucagagaagacacgaggaca

SEQ ID NO: 568835 - RNA, 18 nt, Human
ucagugaaauagccgaga

SEQ ID NO: 568836 - RNA, 25 nt, Human
uccacuuagaauaguuacauguucc

SEQ ID NO: 568837 - RNA, 23 nt, Human
uccccgcggcacuccagccgcgc

SEQ ID NO: 568838 - RNA, 18 nt, Human
ucucccgcauguccuccg

SEQ ID NO: 568839 - RNA, 22 nt, Human
ugaugcuaaaaaauauacaaga

SEQ ID NO: 568840 - RNA, 24 nt, Human
ugccaaauaauuaaauuuaaaaua

SEQ ID NO: 568841 - RNA, 25 nt, Human
ugcggcugcagaaagcaaccggcac

SEQ ID NO: 568842 - RNA, 22 nt, Human
uggcuucuguaucccauggucc

SEQ ID NO: 568843 - RNA, 22 nt, Human
ugucugggggacaugguagaga

SEQ ID NO: 568844 - RNA, 22 nt, Human
aaacacaaaccacagcugaucc

SEQ ID NO: 568845 - RNA, 23 nt, Human
aaacagaacuacagaagauaguc

SEQ ID NO: 568846 - RNA, 19 nt, Human
aaaccacagcugauccuga

SEQ ID NO: 568847 - RNA, 21 nt, Human
aaacccucuaucucuagauuu

SEQ ID NO: 568848 - RNA, 21 nt, Human
aaagaaaccacauuguaagag

SEQ ID NO: 568849 - RNA, 18 nt, Human
aaagggaggcagggaggg

SEQ ID NO: 568850 - RNA, 22 nt, Human
aaauaaggaaagaaagcaucau

SEQ ID NO: 568851 - RNA, 19 nt, Human
aaaucuggccaaaaaaauc

SEQ ID NO: 568852 - RNA, 22 nt, Human
aagaagaaagagagggacaaga

SEQ ID NO: 568853 - RNA, 19 nt, Human
aagaaggaaagaagaaaga

SEQ ID NO: 568854 - RNA, 21 nt, Human
aagaauauguauugaaccuuc

SEQ ID NO: 568855 - RNA, 21 nt, Human
aagcaacagccugggaaaaca

SEQ ID NO: 568856 - RNA, 19 nt, Human
aagcaucaucaauagagag

SEQ ID NO: 568857 - RNA, 24 nt, Human
aagcugacuccucuuucuucaaga

SEQ ID NO: 568858 - RNA, 21 nt, Human
aagguugcuccauuccaacug

SEQ ID NO: 568859 - RNA, 18 nt, Human
aaguaaucauaaaaaucu

SEQ ID NO: 568860 - RNA, 19 nt, Human
aaucuggccaaaaaaaucc

SEQ ID NO: 568861 - RNA, 24 nt, Human
aaucuugcagaccaggccuugcua

SEQ ID NO: 568862 - RNA, 25 nt, Human
acagaacuacagaagauagucagaa

SEQ ID NO: 568863 - RNA, 23 nt, Human
accacagcugauccugaugcauu

SEQ ID NO: 568864 - RNA, 24 nt, Human
acuucacacacuaagaacacccaa

SEQ ID NO: 568865 - RNA, 23 nt, Human
agaaacacacucucuuggacaua

SEQ ID NO: 568866 - RNA, 19 nt, Human
agaaagagagggacaagaa

SEQ ID NO: 568867 - RNA, 20 nt, Human
agaagaaagagagggacaag

SEQ ID NO: 568868 - RNA, 19 nt, Human
agagaacaagcacagcuga

SEQ ID NO: 568869 - RNA, 23 nt, Human
agagccggcgaggcauuaaauaa

SEQ ID NO: 568870 - RNA, 20 nt, Human
agauuacacuuuuauaagcc

SEQ ID NO: 568871 - RNA, 19 nt, Human
agcuuguuuuaaggccagu

SEQ ID NO: 568872 - RNA, 21 nt, Human
aggaagccuuuuaacuauaga

SEQ ID NO: 568873 - RNA, 24 nt, Human
agggaagaaggaaagaagaaagag

SEQ ID NO: 568874 - RNA, 22 nt, Human
agguugcuccauuccaacuggu

SEQ ID NO: 568875 - RNA, 18 nt, Human
aguucaugccagaaaacu

SEQ ID NO: 568876 - RNA, 20 nt, Human
aguugccucauaguguuuau

SEQ ID NO: 568877 - RNA, 24 nt, Human
auauguauugaaccuucucuugaa

SEQ ID NO: 568878 - RNA, 21 nt, Human
aucaccaucuccccagcucug

SEQ ID NO: 568879 - RNA, 23 nt, Human
auugaaccuucucuugaacagaa

SEQ ID NO: 568880 - RNA, 24 nt, Human
auugaagaugccccugcaugaaua

SEQ ID NO: 568881 - RNA, 19 nt, Human
caaaaggaggcugguauuu

SEQ ID NO: 568882 - RNA, 22 nt, Human
caaaccacagcugauccugaug

SEQ ID NO: 568883 - RNA, 20 nt, Human
caaacccucuaucucuagau

SEQ ID NO: 568884 - RNA, 26 nt, Human
caaagcugacaauaucugaaaagccc

SEQ ID NO: 568885 - RNA, 23 nt, Human
caagacuccccaaagaaaccaca

SEQ ID NO: 568886 - RNA, 24 nt, Human
caagcacagcugacauuucuuugu

SEQ ID NO: 568887 - RNA, 20 nt, Human
caagcuuuaacucagcacca

SEQ ID NO: 568888 - RNA, 22 nt, Human
cacaaaccacagcugauccuga

SEQ ID NO: 568889 - RNA, 20 nt, Human
cagagaacaagcacagcuga

SEQ ID NO: 568890 - RNA, 23 nt, Human
cagcccugacugaacaaagccaa

SEQ ID NO: 568891 - RNA, 21 nt, Human
ccagaaaacugucuccugcaa

SEQ ID NO: 568892 - RNA, 27 nt, Human
ccaggaauuuccaauaagaaaagaggg

SEQ ID NO: 568893 - RNA, 22 nt, Human
ccaugcaguuguccaucaccau

SEQ ID NO: 568894 - RNA, 21 nt, Human
cccaagagcuuguuuuaaggc

SEQ ID NO: 568895 - RNA, 24 nt, Human
cccaaucuucccaugacacguuug

SEQ ID NO: 568896 - RNA, 19 nt, Human
ccgaucaauuagaaaacca

SEQ ID NO: 568897 - RNA, 22 nt, Human
cugacaauaucugaaaagcccu

SEQ ID NO: 568898 - RNA, 20 nt, Human
cuggaauguacuguacuacc

SEQ ID NO: 568899 - RNA, 20 nt, Human
cuucacacacuaagaacacc

SEQ ID NO: 568900 - RNA, 20 nt, Human
cuugaacagaaugacgagcc

SEQ ID NO: 568901 - RNA, 18 nt, Human
gaaagaagaaagagaggg

SEQ ID NO: 568902 - RNA, 18 nt, Human
gaccauuuuagaugcuuu

SEQ ID NO: 568903 - RNA, 21 nt, Human
gagaaagagagagggacaaaa

SEQ ID NO: 568904 - RNA, 20 nt, Human
gauaaagaaacagugagaaa

SEQ ID NO: 568905 - RNA, 21 nt, Human
gcagggagggaagaaggaaag

SEQ ID NO: 568906 - RNA, 21 nt, Human
gcuccugcucgcccucuuuuc

SEQ ID NO: 568907 - RNA, 21 nt, Human
ggaaaacagagaacaagcaca

SEQ ID NO: 568908 - RNA, 18 nt, Human
gggaaaacagagaacaag

SEQ ID NO: 568909 - RNA, 22 nt, Human
gggaagaaggaaagaagaaaga

SEQ ID NO: 568910 - RNA, 19 nt, Human
guaaaacacagaaguaaaa

SEQ ID NO: 568911 - RNA, 23 nt, Human
uaaaaagauagauuacacuuuua

SEQ ID NO: 568912 - RNA, 18 nt, Human
uaaaacacaaaccacagc

SEQ ID NO: 568913 - RNA, 20 nt, Human
uaaaacacaaaccacagcug

SEQ ID NO: 568914 - RNA, 21 nt, Human
uaaaacacaaaccacagcuga

SEQ ID NO: 568915 - RNA, 25 nt, Human
uaaaagaauacaauccuggaaugua

SEQ ID NO: 568916 - RNA, 18 nt, Human
uaaauaaaaaucaagcuu

SEQ ID NO: 568917 - RNA, 24 nt, Human
uaacuauagagaaagagagaggga

SEQ ID NO: 568918 - RNA, 21 nt, Human
uaagaacacccaaucuuccca

SEQ ID NO: 568919 - RNA, 23 nt, Human
uaagccuaaguaaucauaaaaau

SEQ ID NO: 568920 - RNA, 27 nt, Human
uaauauagaugaggaagccuuuuaacu

SEQ ID NO: 568921 - RNA, 21 nt, Human
uacaaaacuaauaaauucaau

SEQ ID NO: 568922 - RNA, 23 nt, Human
uacaaaacuaauaaauucaauga

SEQ ID NO: 568923 - RNA, 24 nt, Human
ucauaaaauguccuuggaauacaa

SEQ ID NO: 568924 - RNA, 18 nt, Human
uccaucaccaucucccca

SEQ ID NO: 568925 - RNA, 18 nt, Human
uccccugauaaagaaaca

SEQ ID NO: 568926 - RNA, 26 nt, Human
ucccuuuuuaacaacuuuuuccacaa

SEQ ID NO: 568927 - RNA, 18 nt, Human
ucuaaaucaagcauggaa

SEQ ID NO: 568928 - RNA, 23 nt, Human
ucucaaaaauucaggggaagagu

SEQ ID NO: 568929 - RNA, 23 nt, Human
ucuugaacagaaugacgagccuu

SEQ ID NO: 568930 - RNA, 21 nt, Human
ugaagauuuuuaauuuaaagg

SEQ ID NO: 568931 - RNA, 24 nt, Human
ugacaauaucugaaaagcccuggc

SEQ ID NO: 568932 - RNA, 22 nt, Human
ugacaauggcuuguggaacaac

SEQ ID NO: 568933 - RNA, 19 nt, Human
ugagaaagcagcagguccc

SEQ ID NO: 568934 - RNA, 22 nt, Human
ugccacaccgcccagguuuacc

SEQ ID NO: 568935 - RNA, 18 nt, Human
ugcuccauuccaacuggu

SEQ ID NO: 568936 - RNA, 21 nt, Human
uggaauuacagcccacauuua

SEQ ID NO: 568937 - RNA, 21 nt, Human
uggccaaaaaaauccgaucaa

SEQ ID NO: 568938 - RNA, 20 nt, Human
uggcuccuaaguaaugaccu

SEQ ID NO: 568939 - RNA, 21 nt, Human
uggcuccuaaguaaugaccuu

SEQ ID NO: 568940 - RNA, 18 nt, Human
ugggaagguuggaggagg

SEQ ID NO: 568941 - RNA, 24 nt, Human
ugggcuccugcucgcccucuuuuc

SEQ ID NO: 568942 - RNA, 23 nt, Human
uucaaaauaaauucccaaugauc

SEQ ID NO: 568943 - RNA, 22 nt, Human
uucaggggaagagucaguaugu

SEQ ID NO: 568944 - RNA, 19 nt, Human
uugacacacaaauugggaa

SEQ ID NO: 568945 - RNA, 25 nt, Human
uugcagaccaggccuugcuagaguu

SEQ ID NO: 568946 - RNA, 24 nt, Human
uuuuccacaugggcuccugcucgc

SEQ ID NO: 568947 - RNA, 19 nt, Human
aaagaacucccauuacuca

SEQ ID NO: 568948 - RNA, 20 nt, Human
aacuccucucuucaaugcua

SEQ ID NO: 568949 - RNA, 24 nt, Human
aauaaauaaaguuacuauuaaacu

SEQ ID NO: 568950 - RNA, 19 nt, Human
aauuuuuuuucugcuuuua

SEQ ID NO: 568951 - RNA, 22 nt, Human
acaggaaaccaaccccuuuuca

SEQ ID NO: 568952 - RNA, 25 nt, Human
acaguggugucuacuggauaaagag

SEQ ID NO: 568953 - RNA, 19 nt, Human
accccgucuaacugcagcu

SEQ ID NO: 568954 - RNA, 25 nt, Human
acucacacacacaccagcacacaca

SEQ ID NO: 568955 - RNA, 19 nt, Human
acuuugguaagugcuuugg

SEQ ID NO: 568956 - RNA, 18 nt, Human
agaaaagauuccccugga

SEQ ID NO: 568957 - RNA, 26 nt, Human
agaaaagauuccccuggagcuacaga

SEQ ID NO: 568958 - RNA, 23 nt, Human
agaacuaaaccaucauuuauaac

SEQ ID NO: 568959 - RNA, 20 nt, Human
agaaugcacacuccccaugc

SEQ ID NO: 568960 - RNA, 20 nt, Human
agccacugaugagcuaggcc

SEQ ID NO: 568961 - RNA, 19 nt, Human
agcuaggcccacugucuag

SEQ ID NO: 568962 - RNA, 22 nt, Human
agcuggucucuuccgugacaca

SEQ ID NO: 568963 - RNA, 23 nt, Human
agggaagagauaagccuccaaga

SEQ ID NO: 568964 - RNA, 18 nt, Human
aguacaguggugucuacu

SEQ ID NO: 568965 - RNA, 24 nt, Human
auauauauacaggaaaccaacccc

SEQ ID NO: 568966 - RNA, 24 nt, Human
augaaugaccuauauguacaaaug

SEQ ID NO: 568967 - RNA, 21 nt, Human
auguauguacguguguauaua

SEQ ID NO: 568968 - RNA, 21 nt, Human
auguguguguuccuggcaccc

SEQ ID NO: 568969 - RNA, 23 nt, Human
caacuauacgaguuucagcuucc

SEQ ID NO: 568970 - RNA, 18 nt, Human
caagcagaggccaugaaa

SEQ ID NO: 568971 - RNA, 24 nt, Human
caagcagaggccaugaaagaacuc

SEQ ID NO: 568972 - RNA, 21 nt, Human
caauaucacaaaaaacacagg

SEQ ID NO: 568973 - RNA, 22 nt, Human
cacacacaccagcacacacagu

SEQ ID NO: 568974 - RNA, 19 nt, Human
caccagcacacacaguccc

SEQ ID NO: 568975 - RNA, 22 nt, Human
cacgugccucuggcugcuggag

SEQ ID NO: 568976 - RNA, 24 nt, Human
cagaaugcacacuccccaugcgcu

SEQ ID NO: 568977 - RNA, 21 nt, Human
caggcaucuggccagggaaga

SEQ ID NO: 568978 - RNA, 19 nt, Human
cauggaauuaaugacaggg

SEQ ID NO: 568979 - RNA, 24 nt, Human
ccaauucuaaaaguaaaaauaaac

SEQ ID NO: 568980 - RNA, 19 nt, Human
ccagcacacacagucccca

SEQ ID NO: 568981 - RNA, 26 nt, Human
ccagcacacacaguccccaauuuaaa

SEQ ID NO: 568982 - RNA, 20 nt, Human
ccgcuuuauagaauaaaauc

SEQ ID NO: 568983 - RNA, 26 nt, Human
ccuggcaccccggguuagaccucaga

SEQ ID NO: 568984 - RNA, 19 nt, Human
cgucuaacugcagcucugu

SEQ ID NO: 568985 - RNA, 20 nt, Human
cucaaaaaucauucccuugu

SEQ ID NO: 568986 - RNA, 23 nt, Human
cucacacacacaccagcacacac

SEQ ID NO: 568987 - RNA, 22 nt, Human
cuuggcaaaaagaauugccaga

SEQ ID NO: 568988 - RNA, 18 nt, Human
gaaauggaauuuuuuuuc

SEQ ID NO: 568989 - RNA, 23 nt, Human
gaauugccagauucaaccagggc

SEQ ID NO: 568990 - RNA, 18 nt, Human
gaguugagcaggugaugc

SEQ ID NO: 568991 - RNA, 20 nt, Human
gaguuucagcuucccgcuug

SEQ ID NO: 568992 - RNA, 21 nt, Human
gcagaggccaugaaagaacuc

SEQ ID NO: 568993 - RNA, 22 nt, Human
gcccaaggcuuuauuuaccagc

SEQ ID NO: 568994 - RNA, 19 nt, Human
gcugauacagauggugguu

SEQ ID NO: 568995 - RNA, 25 nt, Human
ggaccaauucuaaaaguaaaaauaa

SEQ ID NO: 568996 - RNA, 21 nt, Human
gggaauaaauaggcauuugua

SEQ ID NO: 568997 - RNA, 21 nt, Human
guauauacauacauauauaua

SEQ ID NO: 568998 - RNA, 22 nt, Human
guauauauguauauauaugaaa

SEQ ID NO: 568999 - RNA, 25 nt, Human
gucaccucuuaaauaugcuggauuc

SEQ ID NO: 569000 - RNA, 24 nt, Human
guguauauacauacauauauauac

SEQ ID NO: 569001 - RNA, 21 nt, Human
uaaaaguaaaaauaaacaccc

SEQ ID NO: 569002 - RNA, 22 nt, Human
uaagaagucgcuugcccaaggc

SEQ ID NO: 569003 - RNA, 20 nt, Human
uaagcaacuccucucuucaa

SEQ ID NO: 569004 - RNA, 22 nt, Human
uaagugcuuuggcacgggccac

SEQ ID NO: 569005 - RNA, 22 nt, Human
uacguguguauauacauacaua

SEQ ID NO: 569006 - RNA, 22 nt, Human
uagaauaaaauccuucaguucc

SEQ ID NO: 569007 - RNA, 25 nt, Human
uagaauaaaauccuucaguuccauc

SEQ ID NO: 569008 - RNA, 22 nt, Human
uauauacauacauauauauaca

SEQ ID NO: 569009 - RNA, 22 nt, Human
uauauacauacauauauauaca

SEQ ID NO: 569010 - RNA, 27 nt, Human
uauauacauacauauauauacaggaaa

SEQ ID NO: 569011 - RNA, 20 nt, Human
uauauauaugaauguaugua

SEQ ID NO: 569012 - RNA, 26 nt, Human
uauaugaauguauguacguguguaua

SEQ ID NO: 569013 - RNA, 19 nt, Human
uauauguauauauaugaau

SEQ ID NO: 569014 - RNA, 20 nt, Human
uauguacguguguauauaca

SEQ ID NO: 569015 - RNA, 21 nt, Human
uauguauauauaugaauguau

SEQ ID NO: 569016 - RNA, 24 nt, Human
uauguauauauaugaauguaugua

SEQ ID NO: 569017 - RNA, 18 nt, Human
uauguauauauguauaua

SEQ ID NO: 569018 - RNA, 20 nt, Human
uauguauauauguauauaua

SEQ ID NO: 569019 - RNA, 22 nt, Human
uauguauauauguauauauaug

SEQ ID NO: 569020 - RNA, 20 nt, Human
uauguauauauguauauauu

SEQ ID NO: 569021 - RNA, 22 nt, Human
uauuaaacugaucacauauggu

SEQ ID NO: 569022 - RNA, 26 nt, Human
ucaaugcuacacacaggccuuaacac

SEQ ID NO: 569023 - RNA, 24 nt, Human
ucagaaggggccacucacacaagu

SEQ ID NO: 569024 - RNA, 24 nt, Human
ucccuuguuuucaagggcucuucu

SEQ ID NO: 569025 - RNA, 18 nt, Human
ucuaugcugggauggagg

SEQ ID NO: 569026 - RNA, 19 nt, Human
ucugaucaggcaucuggcc

SEQ ID NO: 569027 - RNA, 19 nt, Human
ucuuagucaucaucacuuu

SEQ ID NO: 569028 - RNA, 21 nt, Human
ugaguucugaucuaagaaguc

SEQ ID NO: 569029 - RNA, 24 nt, Human
ugccacuuagcuugauaacgacuc

SEQ ID NO: 569030 - RNA, 24 nt, Human
ugcuggagagauucagaaggggcc

SEQ ID NO: 569031 - RNA, 18 nt, Human
ugcugggauggaggaugu

SEQ ID NO: 569032 - RNA, 22 nt, Human
ugcuuuggcacgggccacuguu

SEQ ID NO: 569033 - RNA, 25 nt, Human
uggauaaagagcccauucuaggcac

SEQ ID NO: 569034 - RNA, 19 nt, Human
uggcaaaaagaauugccag

SEQ ID NO: 569035 - RNA, 23 nt, Human
ugggauggaggauguguguguuc

SEQ ID NO: 569036 - RNA, 19 nt, Human
uguacguguguauauacau

SEQ ID NO: 569037 - RNA, 20 nt, Human
uguauauacauacauauaua

SEQ ID NO: 569038 - RNA, 19 nt, Human
uguauauauguauauauau

SEQ ID NO: 569039 - RNA, 29 nt, Human
uguauauauguauauauaugaauguaugu

SEQ ID NO: 569040 - RNA, 21 nt, Human
uguaugaaugaccuauaugua

SEQ ID NO: 569041 - RNA, 18 nt, Human
uguguauauacauacaua

SEQ ID NO: 569042 - RNA, 22 nt, Human
uguguauauacauacauauagu

SEQ ID NO: 569043 - RNA, 22 nt, Human
uguguauauacauacauauaua

SEQ ID NO: 569044 - RNA, 25 nt, Human
uguguauauacauacauauauauag

SEQ ID NO: 569045 - RNA, 23 nt, Human
uguguguguguuucuauauauuu

SEQ ID NO: 569046 - RNA, 23 nt, Human
uguuccuggcaccccggguuaga

SEQ ID NO: 569047 - RNA, 25 nt, Human
uuccccuggagcuacagagaaaaga

SEQ ID NO: 569048 - RNA, 22 nt, Human
uuucaagggcucuucuuucuug

SEQ ID NO: 569049 - RNA, 20 nt, Human
aggaauuugacugaaaaguu

SEQ ID NO: 569050 - RNA, 19 nt, Human
agggcuccuacccuuggcu

SEQ ID NO: 569051 - RNA, 18 nt, Human
caagaccagggucccagc

SEQ ID NO: 569052 - RNA, 24 nt, Human
caggcuuuauuccagccucuuuuu

SEQ ID NO: 569053 - RNA, 21 nt, Human
ccuacccuuggcuccagcaau

SEQ ID NO: 569054 - RNA, 22 nt, Human
gaggccuccaggaaggaaccgg

SEQ ID NO: 569055 - RNA, 19 nt, Human
gccgcagucgcuugggcag

SEQ ID NO: 569056 - RNA, 23 nt, Human
ggacaggaggccuccaggaagga

SEQ ID NO: 569057 - RNA, 19 nt, Human
gugcugggguccccgagga

SEQ ID NO: 569058 - RNA, 22 nt, Human
uacccuuggcuccagcaaugcu

SEQ ID NO: 569059 - RNA, 19 nt, Human
ucccauccugggcuccuag

SEQ ID NO: 569060 - RNA, 23 nt, Human
uccccgaggacaggaggccucca

SEQ ID NO: 569061 - RNA, 24 nt, Human
uccugggcuccuaguguagggcuc

SEQ ID NO: 569062 - RNA, 18 nt, Human
ugcugggguccccgagga

SEQ ID NO: 569063 - RNA, 23 nt, Human
uugaggaauuugacugaaaaguu

SEQ ID NO: 569064 - RNA, 21 nt, Human
cugagggguggauggcuggag

SEQ ID NO: 569065 - RNA, 19 nt, Human
gagggguggauggcuggag

SEQ ID NO: 569066 - RNA, 24 nt, Human
gagggguggauggcuggagcuggg

SEQ ID NO: 569067 - RNA, 18 nt, Human
ggugacguugaagaaaag

SEQ ID NO: 569068 - RNA, 23 nt, Human
ugaagaaaagggcugaggggugg

SEQ ID NO: 569069 - RNA, 22 nt, Human
ugacguugaagaaaagggcuga

SEQ ID NO: 569070 - RNA, 18 nt, Human
uggauggcuggagcuggg

SEQ ID NO: 569071 - RNA, 22 nt, Human
aaaaacauuuccagagagaaca

SEQ ID NO: 569072 - RNA, 21 nt, Human
agagagaacacuuuauaccau

SEQ ID NO: 569073 - RNA, 21 nt, Human
aguacaaaaaugacagcugaa

SEQ ID NO: 569074 - RNA, 23 nt, Human
cacagucgggagugucuggugcc

SEQ ID NO: 569075 - RNA, 19 nt, Human
caccgguccuucccaggcu

SEQ ID NO: 569076 - RNA, 19 nt, Human
cagccucucuggaaaaggc

SEQ ID NO: 569077 - RNA, 24 nt, Human
ccugcagugaaaacgaacagaggc

SEQ ID NO: 569078 - RNA, 18 nt, Human
cuucccaggcuuccuaag

SEQ ID NO: 569079 - RNA, 19 nt, Human
gcaaagagaagccuaagaa

SEQ ID NO: 569080 - RNA, 22 nt, Human
gcacaccgguccuucccaggcu

SEQ ID NO: 569081 - RNA, 18 nt, Human
gcuggcugggcggggaga

SEQ ID NO: 569082 - RNA, 25 nt, Human
uaccauaaaauaaacuuguauaauu

SEQ ID NO: 569083 - RNA, 24 nt, Human
uauaucgaauuccgcacaaaauau

SEQ ID NO: 569084 - RNA, 22 nt, Human
ucccaggcuuccuaagagcagg

SEQ ID NO: 569085 - RNA, 22 nt, Human
ucgcaaagagaagccuaagaau

SEQ ID NO: 569086 - RNA, 21 nt, Human
ucuggaaaaggcugcuggcug

SEQ ID NO: 569087 - RNA, 18 nt, Human
ugccugguccugcaguga

SEQ ID NO: 569088 - RNA, 19 nt, Human
uucccaggcuuccuaagag

SEQ ID NO: 569089 - RNA, 21 nt, Human
aacccuccgcucgccuccgcu

SEQ ID NO: 569090 - RNA, 23 nt, Human
acaccacugcacucagccuaggc

SEQ ID NO: 569091 - RNA, 21 nt, Human
acccuccgcucgccuccgcug

SEQ ID NO: 569092 - RNA, 20 nt, Human
acugcacucagccuaggcag

SEQ ID NO: 569093 - RNA, 23 nt, Human
acugcacucagccuaggcagcag

SEQ ID NO: 569094 - RNA, 24 nt, Human
agcagagugagacuccgccgcggg

SEQ ID NO: 569095 - RNA, 24 nt, Human
agccuaggcagcagagugagacuc

SEQ ID NO: 569096 - RNA, 24 nt, Human
aggaggucaaggcugcagugcgcc

SEQ ID NO: 569097 - RNA, 22 nt, Human
aggccgaggugaggaucgcuug

SEQ ID NO: 569098 - RNA, 20 nt, Human
aguguaguggcgcgugccug

SEQ ID NO: 569099 - RNA, 19 nt, Human
aucacaccacugcacucag

SEQ ID NO: 569100 - RNA, 22 nt, Human
cacugcacucagccuaggcagc

SEQ ID NO: 569101 - RNA, 20 nt, Human
cagaaaagcagccuugccag

SEQ ID NO: 569102 - RNA, 21 nt, Human
cagcagagugagacuccgccg

SEQ ID NO: 569103 - RNA, 18 nt, Human
ccacugcacucagccuag

SEQ ID NO: 569104 - RNA, 19 nt, Human
ccacugcacucagccuagg

SEQ ID NO: 569105 - RNA, 20 nt, Human
ccacugcacucagccuaggc

SEQ ID NO: 569106 - RNA, 23 nt, Human
ccacugcacucagccuaggcagc

SEQ ID NO: 569107 - RNA, 21 nt, Human
ccgcucgccuccgcugcuacc

SEQ ID NO: 569108 - RNA, 19 nt, Human
ccuguagucccagcuacuc

SEQ ID NO: 569109 - RNA, 21 nt, Human
ccuguagucccagcuacucgg

SEQ ID NO: 569110 - RNA, 24 nt, Human
ccuguagucccagcuacucgguag

SEQ ID NO: 569111 - RNA, 21 nt, Human
cuuguggacaagucugacugu

SEQ ID NO: 569112 - RNA, 22 nt, Human
gcgccucgaucacaccacugca

SEQ ID NO: 569113 - RNA, 24 nt, Human
gcucaggaggucaaggcugcagug

SEQ ID NO: 569114 - RNA, 18 nt, Human
ggaaacccuccgcucgcc

SEQ ID NO: 569115 - RNA, 21 nt, Human
uaccacuuuuaccgcggccag

SEQ ID NO: 569116 - RNA, 24 nt, Human
uaguggcgcgugccuguaguccca

SEQ ID NO: 569117 - RNA, 21 nt, Human
uccgcugcuaccacuuuuacc

SEQ ID NO: 569118 - RNA, 18 nt, Human
ucgcuugagcucaggagg

SEQ ID NO: 569119 - RNA, 18 nt, Human
ucuuguggacaagucuga

SEQ ID NO: 569120 - RNA, 24 nt, Human
ugcacucagccuaggcagcagagu

SEQ ID NO: 569121 - RNA, 23 nt, Human
ugccuguagucccagcuacucgg

SEQ ID NO: 569122 - RNA, 24 nt, Human
uggcgcgugccuguagucccagcu

SEQ ID NO: 569123 - RNA, 21 nt, Human
uuagcacagaaaagcagccuu

SEQ ID NO: 569124 - RNA, 19 nt, Human
aaaccaccgcucccccucc

SEQ ID NO: 569125 - RNA, 22 nt, Human
aaaccgucaggauuugaaucug

SEQ ID NO: 569126 - RNA, 24 nt, Human
acuucaccucuucaucgaccccag

SEQ ID NO: 569127 - RNA, 22 nt, Human
agggagccucucaggggguggc

SEQ ID NO: 569128 - RNA, 23 nt, Human
agggaguggggacccugcaugcu

SEQ ID NO: 569129 - RNA, 23 nt, Human
augcagcuuucuuucauuugguc

SEQ ID NO: 569130 - RNA, 23 nt, Human
caaagcugcuccucuuccccaga

SEQ ID NO: 569131 - RNA, 20 nt, Human
caccccuccuuccagggcca

SEQ ID NO: 569132 - RNA, 21 nt, Human
caccccuccuuccagggccca

SEQ ID NO: 569133 - RNA, 19 nt, Human
ccaccccuccuuccagggc

SEQ ID NO: 569134 - RNA, 19 nt, Human
ccacgcccaguagcaccug

SEQ ID NO: 569135 - RNA, 19 nt, Human
ccagcuccgccugacaacc

SEQ ID NO: 569136 - RNA, 20 nt, Human
cccaugcuggacuggaaggg

SEQ ID NO: 569137 - RNA, 23 nt, Human
ccccagagagggaguggggaccc

SEQ ID NO: 569138 - RNA, 21 nt, Human
cccccggggucuucuggcagg

SEQ ID NO: 569139 - RNA, 19 nt, Human
ccccuuccaggcaaagcug

SEQ ID NO: 569140 - RNA, 19 nt, Human
cccugcaugcugcccccuc

SEQ ID NO: 569141 - RNA, 22 nt, Human
cccugcaugcugcccccucccc

SEQ ID NO: 569142 - RNA, 22 nt, Human
cccugcaugcugcccccucccc

SEQ ID NO: 569143 - RNA, 20 nt, Human
ccgcucccccuccuaggagg

SEQ ID NO: 569144 - RNA, 20 nt, Human
ccuccccgcccccggggucu

SEQ ID NO: 569145 - RNA, 21 nt, Human
ccuugcggcgggagccagggc

SEQ ID NO: 569146 - RNA, 22 nt, Human
cgaccccagagagggagugggg

SEQ ID NO: 569147 - RNA, 22 nt, Human
cggggucuucuggcaggacugg

SEQ ID NO: 569148 - RNA, 20 nt, Human
cuaaagccugagcuagaaac

SEQ ID NO: 569149 - RNA, 22 nt, Human
cuaaagccugagcuagaaacca

SEQ ID NO: 569150 - RNA, 25 nt, Human
cuccccuaccagcuccgccugacaa

SEQ ID NO: 569151 - RNA, 22 nt, Human
cucucugauccuaaagccugag

SEQ ID NO: 569152 - RNA, 21 nt, Human
cucuuccccagacccaugcug

SEQ ID NO: 569153 - RNA, 24 nt, Human
cugauccuaaagccugagcuagaa

SEQ ID NO: 569154 - RNA, 18 nt, Human
cugcaugcugcccccucc

SEQ ID NO: 569155 - RNA, 20 nt, Human
cugcucucugauccuaaagc

SEQ ID NO: 569156 - RNA, 18 nt, Human
gccccuuccaggcaaagc

SEQ ID NO: 569157 - RNA, 19 nt, Human
gccccuuccaggcaaagcu

SEQ ID NO: 569158 - RNA, 18 nt, Human
gcggcgggagccagggcc

SEQ ID NO: 569159 - RNA, 21 nt, Human
gcgguccacgcccaguagcac

SEQ ID NO: 569160 - RNA, 21 nt, Human
gcucuggggggcagcuccccu

SEQ ID NO: 569161 - RNA, 18 nt, Human
gcugcccccuccccgccc

SEQ ID NO: 569162 - RNA, 22 nt, Human
gcuuucuuucauuuggucacuu

SEQ ID NO: 569163 - RNA, 21 nt, Human
ggacuggaagggaggggacug

SEQ ID NO: 569164 - RNA, 21 nt, Human
ggccccuuccaggcaaagcug

SEQ ID NO: 569165 - RNA, 22 nt, Human
uagaaaccaccgcucccccucc

SEQ ID NO: 569166 - RNA, 21 nt, Human
uccccagacccaugcuggacu

SEQ ID NO: 569167 - RNA, 20 nt, Human
ugcugcucucugauccuaaa

SEQ ID NO: 569168 - RNA, 24 nt, Human
ugggagcugugggggccgaggcag

SEQ ID NO: 569169 - RNA, 22 nt, Human
uggggaagggagccucucaggg

SEQ ID NO: 569170 - RNA, 21 nt, Human
uucaccucuucaucgacccca

SEQ ID NO: 569171 - RNA, 20 nt, Human
uucgcagaucaaguaaacgg

SEQ ID NO: 569172 - RNA, 24 nt, Human
uucuggcaggacuggggaagggag

SEQ ID NO: 569173 - RNA, 26 nt, Human
aaccuucaacccuggauccagcagcc

SEQ ID NO: 569174 - RNA, 22 nt, Human
aauacauucccagcagcugccu

SEQ ID NO: 569175 - RNA, 23 nt, Human
aauguccaguuauccuuggaugg

SEQ ID NO: 569176 - RNA, 21 nt, Human
accagcaccgccguccgcacc

SEQ ID NO: 569177 - RNA, 19 nt, Human
acccccggccauccuccuc

SEQ ID NO: 569178 - RNA, 19 nt, Human
acccuggauccagcagccu

SEQ ID NO: 569179 - RNA, 24 nt, Human
accuaauuuuucuccucccugcaa

SEQ ID NO: 569180 - RNA, 20 nt, Human
auacauucccagcagcugcc

SEQ ID NO: 569181 - RNA, 26 nt, Human
auccugcuuaugucucacugauucca

SEQ ID NO: 569182 - RNA, 21 nt, Human
aucucugucucaauuuggaag

SEQ ID NO: 569183 - RNA, 20 nt, Human
auugucucuuuuuccccagu

SEQ ID NO: 569184 - RNA, 21 nt, Human
caacccuggauccagcagccu

SEQ ID NO: 569185 - RNA, 22 nt, Human
caccagcaccgccguccgcacc

SEQ ID NO: 569186 - RNA, 20 nt, Human
caccgccgccgccgcccucu

SEQ ID NO: 569187 - RNA, 22 nt, Human
caccgccguccgcaccggcgcc

SEQ ID NO: 569188 - RNA, 18 nt, Human
caccggcgccagcacccc

SEQ ID NO: 569189 - RNA, 25 nt, Human
ccaccagcaccgccguccgcaccgg

SEQ ID NO: 569190 - RNA, 27 nt, Human
ccagcagccucuuuucauccauuuccc

SEQ ID NO: 569191 - RNA, 28 nt, Human
ccagcagccucuuuucauccauuucccg

SEQ ID NO: 569192 - RNA, 21 nt, Human
ccccggccauccuccucccac

SEQ ID NO: 569193 - RNA, 20 nt, Human
ccccucgccgccauuuugac

SEQ ID NO: 569194 - RNA, 19 nt, Human
cccuggauccagcagccuc

SEQ ID NO: 569195 - RNA, 22 nt, Human
cccuggaugaauacucuaguuu

SEQ ID NO: 569196 - RNA, 18 nt, Human
ccgcccucuccucuccug

SEQ ID NO: 569197 - RNA, 23 nt, Human
ccgccgccgccaccagcaccgcc

SEQ ID NO: 569198 - RNA, 19 nt, Human
ccgccgccgcccucuccuc

SEQ ID NO: 569199 - RNA, 19 nt, Human
ccgccgccgccgccaccag

SEQ ID NO: 569200 - RNA, 27 nt, Human
ccgcugccgucgccuccgccgccgccg

SEQ ID NO: 569201 - RNA, 19 nt, Human
ccgcugcugcugccgcugg

SEQ ID NO: 569202 - RNA, 18 nt, Human
ccucccaccgccgccgcc

SEQ ID NO: 569203 - RNA, 23 nt, Human
ccucccaccgccgccgccgcccu

SEQ ID NO: 569204 - RNA, 21 nt, Human
ccucccgccgcugcugcugcc

SEQ ID NO: 569205 - RNA, 22 nt, Human
ccuggauccagcagccucuuuu

SEQ ID NO: 569206 - RNA, 20 nt, Human
ccuucacuucucuguucuug

SEQ ID NO: 569207 - RNA, 19 nt, Human
ccuuugcuuccuucccgug

SEQ ID NO: 569208 - RNA, 22 nt, Human
cgccagcacccccggccauccu

SEQ ID NO: 569209 - RNA, 25 nt, Human
cucccgccgcugcugcugccgcugg

SEQ ID NO: 569210 - RNA, 22 nt, Human
cuccgccgccgccgccaccagc

SEQ ID NO: 569211 - RNA, 20 nt, Human
cuccucccgccgcugcugcu

SEQ ID NO: 569212 - RNA, 21 nt, Human
cuccuuagauacugucuucuc

SEQ ID NO: 569213 - RNA, 21 nt, Human
cucuguucuugguuugcuucg

SEQ ID NO: 569214 - RNA, 23 nt, Human
cugguauauauuucuaaagccuc

SEQ ID NO: 569215 - RNA, 20 nt, Human
gcauggaaccuaauuuuucu

SEQ ID NO: 569216 - RNA, 24 nt, Human
gccgccgccgccaccagcaccgcc

SEQ ID NO: 569217 - RNA, 18 nt, Human
gccgucgccuccgccgcc

SEQ ID NO: 569218 - RNA, 21 nt, Human
gccgucgccuccgccgccgcc

SEQ ID NO: 569219 - RNA, 18 nt, Human
gcgccagcacccccggcc

SEQ ID NO: 569220 - RNA, 21 nt, Human
gcuuuuggaagacacuacuuc

SEQ ID NO: 569221 - RNA, 19 nt, Human
ggaagcuuuccucaaaugu

SEQ ID NO: 569222 - RNA, 20 nt, Human
guucuucagaguauaauccc

SEQ ID NO: 569223 - RNA, 19 nt, Human
uagauccuucacuucucug

SEQ ID NO: 569224 - RNA, 20 nt, Human
uauauuucuaaagccacuau

SEQ ID NO: 569225 - RNA, 23 nt, Human
ucaaauguccaguuauccuugga

SEQ ID NO: 569226 - RNA, 23 nt, Human
ucaacccuggauccagcagccuc

SEQ ID NO: 569227 - RNA, 21 nt, Human
ucaauuuggaagcuuuccuca

SEQ ID NO: 569228 - RNA, 24 nt, Human
ucccaccgccgccgccgcccucuc

SEQ ID NO: 569229 - RNA, 19 nt, Human
ucccagcagcugccugagu

SEQ ID NO: 569230 - RNA, 22 nt, Human
uccccaguguucugaaaaagaa

SEQ ID NO: 569231 - RNA, 22 nt, Human
ucccggucugggcuagacugaa

SEQ ID NO: 569232 - RNA, 21 nt, Human
uccucccgccgcugcugcugc

SEQ ID NO: 569233 - RNA, 19 nt, Human
uccuucccguguuggagcc

SEQ ID NO: 569234 - RNA, 21 nt, Human
ucuaaaagcuccuguuuuuac

SEQ ID NO: 569235 - RNA, 20 nt, Human
ucucaauaccaucugauucc

SEQ ID NO: 569236 - RNA, 24 nt, Human
ucucuguucuugguuugcuucguc

SEQ ID NO: 569237 - RNA, 20 nt, Human
ucuucucuucacuuuucucu

SEQ ID NO: 569238 - RNA, 25 nt, Human
ugaaaaagaaacuuuuuauauagaa

SEQ ID NO: 569239 - RNA, 22 nt, Human
ugaaaaucucaauaccaucuga

SEQ ID NO: 569240 - RNA, 23 nt, Human
ugaaccuucaacccuggauccag

SEQ ID NO: 569241 - RNA, 30 nt, Human
ugaaccuucaacccuggauccagcagccuu

SEQ ID NO: 569242 - RNA, 20 nt, Human
ugaugcgugggaucucccuu

SEQ ID NO: 569243 - RNA, 21 nt, Human
ugauuucuuccgagacaccuc

SEQ ID NO: 569244 - RNA, 26 nt, Human
uggcucaggcuccgggacugcuccag

SEQ ID NO: 569245 - RNA, 19 nt, Human
uguuuggcuaaauauagga

SEQ ID NO: 569246 - RNA, 22 nt, Human
uucauugucugcuuccuccagg

SEQ ID NO: 569247 - RNA, 22 nt, Human
uuccccucgccgccauuuugac

SEQ ID NO: 569248 - RNA, 22 nt, Human
uugcauggaaccuaauuuuucu

SEQ ID NO: 569249 - RNA, 21 nt, Human
uuggaagcuuuccucaaaugu

SEQ ID NO: 569250 - RNA, 22 nt, Human
uuggagacuuucacccucccgg

SEQ ID NO: 569251 - RNA, 30 nt, Human
uugucugcuuccuccaggacuuuguucuuu

SEQ ID NO: 569252 - RNA, 18 nt, Human
uuuggcuaaauauaggau

SEQ ID NO: 569253 - RNA, 19 nt, Human
uuugucuccacucaucucu

SEQ ID NO: 569254 - RNA, 24 nt, Human
aaagugcugggauuacagguguga

SEQ ID NO: 569255 - RNA, 26 nt, Human
aaccccaaaggaccacacuuuggcac

SEQ ID NO: 569256 - RNA, 19 nt, Human
aacuucuguuuccuccucu

SEQ ID NO: 569257 - RNA, 18 nt, Human
aagaagacuggcaacuuc

SEQ ID NO: 569258 - RNA, 27 nt, Human
aagcauuucagaaguuuuuccuuacgg

SEQ ID NO: 569259 - RNA, 22 nt, Human
aagcuuucaaagcacucaguuu

SEQ ID NO: 569260 - RNA, 19 nt, Human
aaguagcugggauuacaga

SEQ ID NO: 569261 - RNA, 26 nt, Human
aaguagcugggauuacagacgaaugc

SEQ ID NO: 569262 - RNA, 23 nt, Human
aagucaguucuaugacuagcuuu

SEQ ID NO: 569263 - RNA, 18 nt, Human
aagugcugggauuacagg

SEQ ID NO: 569264 - RNA, 19 nt, Human
aagugcugggauuacaggu

SEQ ID NO: 569265 - RNA, 26 nt, Human
aagugcugggauuacaggugugagcc

SEQ ID NO: 569266 - RNA, 24 nt, Human
aauuuuuguauuuuaguagagacg

SEQ ID NO: 569267 - RNA, 23 nt, Human
acagaacaugguggaagugaugc

SEQ ID NO: 569268 - RNA, 18 nt, Human
acagacgaaugccaccau

SEQ ID NO: 569269 - RNA, 25 nt, Human
acagcagaagaaccaccuagcugaa

SEQ ID NO: 569270 - RNA, 22 nt, Human
accauguuggccaggcuggucu

SEQ ID NO: 569271 - RNA, 24 nt, Human
acggugucucaccauguuggccag

SEQ ID NO: 569272 - RNA, 20 nt, Human
agaagacuggcaacuucugu

SEQ ID NO: 569273 - RNA, 21 nt, Human
agcugcauuuacacaaaaguu

SEQ ID NO: 569274 - RNA, 20 nt, Human
aggcauuuagugaugcagca

SEQ ID NO: 569275 - RNA, 25 nt, Human
aggcuggagugcaguggagugaucu

SEQ ID NO: 569276 - RNA, 26 nt, Human
agggaacagcagaagaaccaccuagc

SEQ ID NO: 569277 - RNA, 23 nt, Human
agugcaguggagugaucuuggcu

SEQ ID NO: 569278 - RNA, 24 nt, Human
agugcaguggagugaucuuggcuc

SEQ ID NO: 569279 - RNA, 19 nt, Human
aucaaguagcugggauuac

SEQ ID NO: 569280 - RNA, 21 nt, Human
caaaggaccacacuuuggcac

SEQ ID NO: 569281 - RNA, 18 nt, Human
caaagucaguucuaugac

SEQ ID NO: 569282 - RNA, 24 nt, Human
caaagugcugggauuacaggugug

SEQ ID NO: 569283 - RNA, 20 nt, Human
caaccucuaucuccuggguu

SEQ ID NO: 569284 - RNA, 23 nt, Human
caaccucuaucuccuggguucaa

SEQ ID NO: 569285 - RNA, 18 nt, Human
caacuucuguuuccuccu

SEQ ID NO: 569286 - RNA, 22 nt, Human
caagcaauucuuuugccucagc

SEQ ID NO: 569287 - RNA, 18 nt, Human
caccaugucuggcuaauu

SEQ ID NO: 569288 - RNA, 24 nt, Human
caccaugucuggcuaauuuuugua

SEQ ID NO: 569289 - RNA, 21 nt, Human
caccauguuggccaggcuggu

SEQ ID NO: 569290 - RNA, 23 nt, Human
caccauguuggccaggcuggucu

SEQ ID NO: 569291 - RNA, 24 nt, Human
caccauguuggccaggcuggucuu

SEQ ID NO: 569292 - RNA, 27 nt, Human
caccauguuggccaggcuggucuugaa

SEQ ID NO: 569293 - RNA, 21 nt, Human
caccuagcugaacucagcaac

SEQ ID NO: 569294 - RNA, 24 nt, Human
caccucggccucccaaagugcugg

SEQ ID NO: 569295 - RNA, 19 nt, Human
cagcaauaguuaacagcac

SEQ ID NO: 569296 - RNA, 24 nt, Human
cauguuggccaggcuggucuugaa

SEQ ID NO: 569297 - RNA, 24 nt, Human
cauucugucgcccaggcuggagug

SEQ ID NO: 569298 - RNA, 21 nt, Human
ccaaagugcugggauuacagg

SEQ ID NO: 569299 - RNA, 21 nt, Human
ccaaagugcugggauuacagg

SEQ ID NO: 569300 - RNA, 24 nt, Human
ccaaagugcugggauuacaggugu

SEQ ID NO: 569301 - RNA, 19 nt, Human
ccucuggaugacuccaguc

SEQ ID NO: 569302 - RNA, 19 nt, Human
ccugaccucaagugaucug

SEQ ID NO: 569303 - RNA, 24 nt, Human
ccugaccucaagugaucugcccac

SEQ ID NO: 569304 - RNA, 21 nt, Human
ccuggguucaagcaauucuuu

SEQ ID NO: 569305 - RNA, 18 nt, Human
ccuuguguaguccucuuc

SEQ ID NO: 569306 - RNA, 24 nt, Human
cggugucucaccauguuggccagg

SEQ ID NO: 569307 - RNA, 24 nt, Human
cucaagugaucugcccaccucggc

SEQ ID NO: 569308 - RNA, 24 nt, Human
cucauucugucgcccaggcuggag

SEQ ID NO: 569309 - RNA, 24 nt, Human
cucauugcaaccucuaucuccugg

SEQ ID NO: 569310 - RNA, 21 nt, Human
cuccuggguucaagcaauucu

SEQ ID NO: 569311 - RNA, 23 nt, Human
cugggcucauaugagagaaaucu

SEQ ID NO: 569312 - RNA, 24 nt, Human
gaccucaagugaucugcccaccuc

SEQ ID NO: 569313 - RNA, 24 nt, Human
gagccaccacauccagcccaucua

SEQ ID NO: 569314 - RNA, 18 nt, Human
gauuacagacgaaugcca

SEQ ID NO: 569315 - RNA, 24 nt, Human
gauuacagacgaaugccaccaugu

SEQ ID NO: 569316 - RNA, 18 nt, Human
gauuacaggugugagcca

SEQ ID NO: 569317 - RNA, 21 nt, Human
gauuacaggugugagccacca

SEQ ID NO: 569318 - RNA, 22 nt, Human
gauuacaggugugagccaccac

SEQ ID NO: 569319 - RNA, 22 nt, Human
gcaaccucuaucuccuggguuc

SEQ ID NO: 569320 - RNA, 22 nt, Human
gccucuggaugacuccagucuu

SEQ ID NO: 569321 - RNA, 21 nt, Human
gcucauugcaaccucuaucuc

SEQ ID NO: 569322 - RNA, 23 nt, Human
gcuggucuugaacuccugaccuc

SEQ ID NO: 569323 - RNA, 21 nt, Human
gcuuuugggagcccugggcuc

SEQ ID NO: 569324 - RNA, 21 nt, Human
ggagcugcauuuacacaaaag

SEQ ID NO: 569325 - RNA, 23 nt, Human
ggagucuucccauauaaggcacu

SEQ ID NO: 569326 - RNA, 24 nt, Human
ggaugacuccagucuuaguagucc

SEQ ID NO: 569327 - RNA, 19 nt, Human
ggcuggagugcaguggagu

SEQ ID NO: 569328 - RNA, 24 nt, Human
ggcuggucuugaacuccugaccuc

SEQ ID NO: 569329 - RNA, 20 nt, Human
gggccucuggaugacuccag

SEQ ID NO: 569330 - RNA, 19 nt, Human
ggucuugaacuccugaccu

SEQ ID NO: 569331 - RNA, 23 nt, Human
ggugucucaccauguuggccagg

SEQ ID NO: 569332 - RNA, 24 nt, Human
gugaucugcccaccucggccuccc

SEQ ID NO: 569333 - RNA, 20 nt, Human
uaacagcacaugugacggaa

SEQ ID NO: 569334 - RNA, 23 nt, Human
uaauuuuuguauuuuaguagaga

SEQ ID NO: 569335 - RNA, 20 nt, Human
uacacgugacauuaucucac

SEQ ID NO: 569336 - RNA, 24 nt, Human
uacaggugugagccaccacaucca

SEQ ID NO: 569337 - RNA, 18 nt, Human
uacauggauagggggcaa

SEQ ID NO: 569338 - RNA, 21 nt, Human
uaccaaagugauuugcugucc

SEQ ID NO: 569339 - RNA, 26 nt, Human
uacuuuuucaucuauuuguuuuuggu

SEQ ID NO: 569340 - RNA, 22 nt, Human
uagagacggugucucaccaugu

SEQ ID NO: 569341 - RNA, 24 nt, Human
uaguagagacggugucucaccaug

SEQ ID NO: 569342 - RNA, 20 nt, Human
uauccuguaggcucucuguu

SEQ ID NO: 569343 - RNA, 22 nt, Human
uaugacuuuaaccaacagaaca

SEQ ID NO: 569344 - RNA, 21 nt, Human
uauuuguuuuauguaaucuaa

SEQ ID NO: 569345 - RNA, 20 nt, Human
ucaaagaugaaccccaaagg

SEQ ID NO: 569346 - RNA, 22 nt, Human
ucaaagcauuucagaaguuuac

SEQ ID NO: 569347 - RNA, 24 nt, Human
ucauucugucgcccaggcuggagu

SEQ ID NO: 569348 - RNA, 24 nt, Human
ucauugcaaccucuaucuccuggg

SEQ ID NO: 569349 - RNA, 18 nt, Human
uccaagcuggucuaugac

SEQ ID NO: 569350 - RNA, 23 nt, Human
ucccaaagugcugggauuacagg

SEQ ID NO: 569351 - RNA, 21 nt, Human
uccuggguucaagcaauucuu

SEQ ID NO: 569352 - RNA, 24 nt, Human
uccuggguucaagcaauucuuuug

SEQ ID NO: 569353 - RNA, 18 nt, Human
uccuucauggcauccuuc

SEQ ID NO: 569354 - RNA, 23 nt, Human
ucgcccaggcuggagugcagugg

SEQ ID NO: 569355 - RNA, 18 nt, Human
ucggccucccaaagugcu

SEQ ID NO: 569356 - RNA, 24 nt, Human
ucuaucuccuggguucaagcaauu

SEQ ID NO: 569357 - RNA, 24 nt, Human
ucucaccauguuggccaggcuggu

SEQ ID NO: 569358 - RNA, 23 nt, Human
ucucauucugucgcccaggcugg

SEQ ID NO: 569359 - RNA, 24 nt, Human
ucucauucugucgcccaggcugga

SEQ ID NO: 569360 - RNA, 24 nt, Human
ucuccuggguucaagcaauucuuu

SEQ ID NO: 569361 - RNA, 22 nt, Human
ucugucgcccaggcuggagugc

SEQ ID NO: 569362 - RNA, 24 nt, Human
ucugucgcccaggcuggagugcag

SEQ ID NO: 569363 - RNA, 21 nt, Human
ucuugaacuccugaccucaag

SEQ ID NO: 569364 - RNA, 24 nt, Human
ucuugagacaauugcuuuugggag

SEQ ID NO: 569365 - RNA, 18 nt, Human
ugaccucaagugaucugc

SEQ ID NO: 569366 - RNA, 18 nt, Human
ugagacagagucucauuc

SEQ ID NO: 569367 - RNA, 22 nt, Human
ugagacagagucucauucuguc

SEQ ID NO: 569368 - RNA, 18 nt, Human
ugagagaaaucucugcag

SEQ ID NO: 569369 - RNA, 24 nt, Human
ugaucugcccaccucggccuccca

SEQ ID NO: 569370 - RNA, 20 nt, Human
ugauuugcuguccucaaagu

SEQ ID NO: 569371 - RNA, 20 nt, Human
ugcaaccucuaucuccuggg

SEQ ID NO: 569372 - RNA, 22 nt, Human
ugcaguggagugaucuuggcuc

SEQ ID NO: 569373 - RNA, 21 nt, Human
ugcgagggaagugguuuuggg

SEQ ID NO: 569374 - RNA, 23 nt, Human
ugcgagggaagugguuuuggggu

SEQ ID NO: 569375 - RNA, 24 nt, Human
ugcugggauuacaggugugagcca

SEQ ID NO: 569376 - RNA, 18 nt, Human
uggaagauucuggauugc

SEQ ID NO: 569377 - RNA, 19 nt, Human
uggaagauucuggauugcu

SEQ ID NO: 569378 - RNA, 20 nt, Human
uggagugcaguggagugauc

SEQ ID NO: 569379 - RNA, 23 nt, Human
uggagugcaguggagugaucuug

SEQ ID NO: 569380 - RNA, 24 nt, Human
uggagugcaguggagugaucuugg

SEQ ID NO: 569381 - RNA, 24 nt, Human
uggccaggcuggucuugaacuccu

SEQ ID NO: 569382 - RNA, 24 nt, Human
ugggauuacagacgaaugccacca

SEQ ID NO: 569383 - RNA, 25 nt, Human
ugggauuacagacgaaugccaccau

SEQ ID NO: 569384 - RNA, 18 nt, Human
ugggauuacaggugugag

SEQ ID NO: 569385 - RNA, 19 nt, Human
ugggauuacaggugugagc

SEQ ID NO: 569386 - RNA, 22 nt, Human
ugggauuacaggugugagccac

SEQ ID NO: 569387 - RNA, 23 nt, Human
ugggauuacaggugugagccacc

SEQ ID NO: 569388 - RNA, 24 nt, Human
ugggauuacaggugugagccacca

SEQ ID NO: 569389 - RNA, 24 nt, Human
uggggccucuggaugacuccaguc

SEQ ID NO: 569390 - RNA, 20 nt, Human
uguuuccuccucuugagaca

SEQ ID NO: 569391 - RNA, 24 nt, Human
uuaguagagacggugucucaccau

SEQ ID NO: 569392 - RNA, 19 nt, Human
uuagugaugcagcaauagu

SEQ ID NO: 569393 - RNA, 24 nt, Human
uuaugcuaaacauggagcugcauu

SEQ ID NO: 569394 - RNA, 22 nt, Human
uucagaggaaagcugcgaggga

SEQ ID NO: 569395 - RNA, 18 nt, Human
uucugucgcccaggcugg

SEQ ID NO: 569396 - RNA, 22 nt, Human
uugaacuuuaauucacaacgau

SEQ ID NO: 569397 - RNA, 24 nt, Human
uugcaaccucuaucuccuggguuc

SEQ ID NO: 569398 - RNA, 20 nt, Human
uugcuuuguuuuaaagcuuu

SEQ ID NO: 569399 - RNA, 25 nt, Human
uuuaaccaacagaacaugguggaag

SEQ ID NO: 569400 - RNA, 28 nt, Human
uuugccucagccuucgcaucaaguagcu

SEQ ID NO: 569401 - RNA, 18 nt, Human
uuuuugguuuuuuguuuu

SEQ ID NO: 569402 - RNA, 19 nt, Human
uuuuuguauuuuaguagag

SEQ ID NO: 569403 - RNA, 18 nt, Human
aaacaaguccuuaacuga

SEQ ID NO: 569404 - RNA, 18 nt, Human
aaccaaacucugagaaau

SEQ ID NO: 569405 - RNA, 19 nt, Human
acaaugaaagugggaacca

SEQ ID NO: 569406 - RNA, 22 nt, Human
cagcgaaauauuuugaacagaa

SEQ ID NO: 569407 - RNA, 22 nt, Human
cucaagauggguagaauuucaa

SEQ ID NO: 569408 - RNA, 18 nt, Human
gaaaaauaaauuuugcua

SEQ ID NO: 569409 - RNA, 24 nt, Human
uaccauccauuucuuacacauggc

SEQ ID NO: 569410 - RNA, 22 nt, Human
uccccggugaauaccauccauu

SEQ ID NO: 569411 - RNA, 21 nt, Human
ugaaaaaaaguuuacaauuag

SEQ ID NO: 569412 - RNA, 21 nt, Human
ugauuuguauaagcauuccuu

SEQ ID NO: 569413 - RNA, 19 nt, Human
uggcaauuacaaaaccaca

SEQ ID NO: 569414 - RNA, 18 nt, Human
uucacaaguauaaaauaa

SEQ ID NO: 569415 - RNA, 21 nt, Human
aaaaacccugauucagagugc

SEQ ID NO: 569416 - RNA, 19 nt, Human
aaaagagugauggcaucca

SEQ ID NO: 569417 - RNA, 22 nt, Human
aaacagggaaaguucaucuucc

SEQ ID NO: 569418 - RNA, 25 nt, Human
aaaccauagcagcccuacggcacca

SEQ ID NO: 569419 - RNA, 23 nt, Human
aaauagaaaccaguuccagaacc

SEQ ID NO: 569420 - RNA, 22 nt, Human
aaaugcaccccaagucccaaaa

SEQ ID NO: 569421 - RNA, 24 nt, Human
aaauggaaaaaaauauauauuuug

SEQ ID NO: 569422 - RNA, 19 nt, Human
aacaguucucuagacuuuc

SEQ ID NO: 569423 - RNA, 19 nt, Human
aacauuuagucccuucuac

SEQ ID NO: 569424 - RNA, 19 nt, Human
aaguccugggaccuggaaa

SEQ ID NO: 569425 - RNA, 22 nt, Human
acagagaagaacugggcuuaca

SEQ ID NO: 569426 - RNA, 22 nt, Human
accccaagucccaaaaguugac

SEQ ID NO: 569427 - RNA, 20 nt, Human
agaaaaugcaccccaagucc

SEQ ID NO: 569428 - RNA, 26 nt, Human
agaaaccaguuccagaaccaaaguug

SEQ ID NO: 569429 - RNA, 22 nt, Human
agaaauacaaacaagagauuuc

SEQ ID NO: 569430 - RNA, 19 nt, Human
agaacagacuccugugugg

SEQ ID NO: 569431 - RNA, 20 nt, Human
agauacagccaaagaagaac

SEQ ID NO: 569432 - RNA, 25 nt, Human
agggagucacuauuuaacacuuucu

SEQ ID NO: 569433 - RNA, 18 nt, Human
aguuuguggaggauuggu

SEQ ID NO: 569434 - RNA, 22 nt, Human
auaacacuacaggacuauccac

SEQ ID NO: 569435 - RNA, 22 nt, Human
caaaaaaaaaauuuacaaaaag

SEQ ID NO: 569436 - RNA, 22 nt, Human
caaccagguuucauaauugugc

SEQ ID NO: 569437 - RNA, 22 nt, Human
caacuccuaauuaguucuuccc

SEQ ID NO: 569438 - RNA, 23 nt, Human
caccccaagucccaaaaguugac

SEQ ID NO: 569439 - RNA, 23 nt, Human
cacuacaggacuauccaccuaac

SEQ ID NO: 569440 - RNA, 20 nt, Human
cacuguauguggagaaaaga

SEQ ID NO: 569441 - RNA, 22 nt, Human
caggaucuaugauuaguaaccu

SEQ ID NO: 569442 - RNA, 22 nt, Human
cauuucuugagaaaaugaaguc

SEQ ID NO: 569443 - RNA, 21 nt, Human
ccaaaauagcugcaucuggac

SEQ ID NO: 569444 - RNA, 21 nt, Human
ccauucaaaccauagcagccc

SEQ ID NO: 569445 - RNA, 20 nt, Human
cccaagucccaaaaguugac

SEQ ID NO: 569446 - RNA, 25 nt, Human
cccaagucccaaaaguugacuaaaa

SEQ ID NO: 569447 - RNA, 23 nt, Human
cccaggaguacauaguuuauaaa

SEQ ID NO: 569448 - RNA, 19 nt, Human
cccagggugugaguguggc

SEQ ID NO: 569449 - RNA, 20 nt, Human
cccaggugagcuaucagcgg

SEQ ID NO: 569450 - RNA, 25 nt, Human
ccccaagucccaaaaguugacuaaa

SEQ ID NO: 569451 - RNA, 22 nt, Human
ccuaaccugucuccaucucuug

SEQ ID NO: 569452 - RNA, 20 nt, Human
ccugggaccuggaaagaggc

SEQ ID NO: 569453 - RNA, 22 nt, Human
ccugguuccccucuaugguccu

SEQ ID NO: 569454 - RNA, 19 nt, Human
cuaguauguaaagcaauga

SEQ ID NO: 569455 - RNA, 21 nt, Human
cucaaauaauuacaaacaguu

SEQ ID NO: 569456 - RNA, 25 nt, Human
gaaaauauuucaacaaacuucuaaa

SEQ ID NO: 569457 - RNA, 22 nt, Human
gaaaccaguuccagaaccaaag

SEQ ID NO: 569458 - RNA, 18 nt, Human
gaacaacaguuggcaaca

SEQ ID NO: 569459 - RNA, 19 nt, Human
gcaaaguccugggaccugg

SEQ ID NO: 569460 - RNA, 21 nt, Human
gcagaucauaaauaaggucaa

SEQ ID NO: 569461 - RNA, 24 nt, Human
gcugaaaagaugacuucuaaauca

SEQ ID NO: 569462 - RNA, 21 nt, Human
gggucauccccacuuuugcug

SEQ ID NO: 569463 - RNA, 23 nt, Human
guagugauggaaggagagaagga

SEQ ID NO: 569464 - RNA, 20 nt, Human
gugcaugugauaggagauac

SEQ ID NO: 569465 - RNA, 20 nt, Human
guggauggcuggaacaacag

SEQ ID NO: 569466 - RNA, 20 nt, Human
uaaaaagaugaguugcucau

SEQ ID NO: 569467 - RNA, 22 nt, Human
uaaaagauuucaaaucuuccca

SEQ ID NO: 569468 - RNA, 20 nt, Human
uaaaaggaaacugauuugac

SEQ ID NO: 569469 - RNA, 24 nt, Human
uaaaauaguaaacaaaccaacauu

SEQ ID NO: 569470 - RNA, 21 nt, Human
uaacugacaacuuaguuuucc

SEQ ID NO: 569471 - RNA, 18 nt, Human
uaauaauaaaaacuaacu

SEQ ID NO: 569472 - RNA, 20 nt, Human
uaauacacacaaaucaucac

SEQ ID NO: 569473 - RNA, 23 nt, Human
uacaaucaaguccuaacuauacc

SEQ ID NO: 569474 - RNA, 18 nt, Human
uacagucauucaaaaacc

SEQ ID NO: 569475 - RNA, 22 nt, Human
uaccugaagaaauacaaacaag

SEQ ID NO: 569476 - RNA, 21 nt, Human
uacggcaccaugcuuuucucu

SEQ ID NO: 569477 - RNA, 22 nt, Human
uagaaaccaguuccagaaccaa

SEQ ID NO: 569478 - RNA, 24 nt, Human
uagaaugucaaaauguauauuauu

SEQ ID NO: 569479 - RNA, 20 nt, Human
uagcagaucauaaauaaggu

SEQ ID NO: 569480 - RNA, 24 nt, Human
uaggagauaccaaaauagcugcau

SEQ ID NO: 569481 - RNA, 24 nt, Human
uaugaaacaagacuacauccuuag

SEQ ID NO: 569482 - RNA, 19 nt, Human
uauguaaagcaaugaauga

SEQ ID NO: 569483 - RNA, 23 nt, Human
ucaacaaacuucuaaaagauuuc

SEQ ID NO: 569484 - RNA, 21 nt, Human
ucacaaaucucaucaagcucu

SEQ ID NO: 569485 - RNA, 18 nt, Human
ucacacggcugaaaagau

SEQ ID NO: 569486 - RNA, 19 nt, Human
ucaccuccccacuuggcug

SEQ ID NO: 569487 - RNA, 22 nt, Human
ucagaaucaguucaguaacuau

SEQ ID NO: 569488 - RNA, 19 nt, Human
ucaugguuagguggauuca

SEQ ID NO: 569489 - RNA, 24 nt, Human
uccauuuccuacaccuagggacag

SEQ ID NO: 569490 - RNA, 21 nt, Human
uccuaguuagagcaguguuac

SEQ ID NO: 569491 - RNA, 22 nt, Human
ucuaacuuucccaauuaguuaa

SEQ ID NO: 569492 - RNA, 23 nt, Human
ucuaugauuaguaaccugugaac

SEQ ID NO: 569493 - RNA, 25 nt, Human
ucugucaccuccccacuuggcugaa

SEQ ID NO: 569494 - RNA, 23 nt, Human
ucugugagaaaaugcaccccaag

SEQ ID NO: 569495 - RNA, 21 nt, Human
ugaaaauaaguuaacauacaa

SEQ ID NO: 569496 - RNA, 21 nt, Human
ugaaauggugaaaauauuuca

SEQ ID NO: 569497 - RNA, 18 nt, Human
ugaauggauaaaucacca

SEQ ID NO: 569498 - RNA, 18 nt, Human
ugacuucuaaaucagacu

SEQ ID NO: 569499 - RNA, 23 nt, Human
ugagaaaaugaagucuuccuuuu

SEQ ID NO: 569500 - RNA, 21 nt, Human
ugaguacaaauccacagcuua

SEQ ID NO: 569501 - RNA, 23 nt, Human
ugaguacuaucacuuaucacaaa

SEQ ID NO: 569502 - RNA, 18 nt, Human
ugauaggagauaccaaaa

SEQ ID NO: 569503 - RNA, 26 nt, Human
ugcaacaacuaugaaacaagacuaca

SEQ ID NO: 569504 - RNA, 22 nt, Human
ugcuauugccaccucagaacag

SEQ ID NO: 569505 - RNA, 22 nt, Human
uggcaguuggaauggaacuuuc

SEQ ID NO: 569506 - RNA, 18 nt, Human
uggcugaaucuuuuucuu

SEQ ID NO: 569507 - RNA, 22 nt, Human
uggcugaaucuuuuucuuccau

SEQ ID NO: 569508 - RNA, 18 nt, Human
uggcuggaacaacaguug

SEQ ID NO: 569509 - RNA, 18 nt, Human
uguaaagcaaugaaugaa

SEQ ID NO: 569510 - RNA, 20 nt, Human
uguaaagcaaugaaugaaaa

SEQ ID NO: 569511 - RNA, 20 nt, Human
ugucucaggcuacuuuacug

SEQ ID NO: 569512 - RNA, 23 nt, Human
ugugaguguggcugcugcaugcu

SEQ ID NO: 569513 - RNA, 24 nt, Human
uuaaaaucaguaucuaagucagaa

SEQ ID NO: 569514 - RNA, 24 nt, Human
uuacaagugaaggacauucauggu

SEQ ID NO: 569515 - RNA, 25 nt, Human
uuacaagugaaggacauucaugguu

SEQ ID NO: 569516 - RNA, 26 nt, Human
uuagcagaucauaaauaaggucaaga

SEQ ID NO: 569517 - RNA, 23 nt, Human
uuauagaaaaacccugauucaga

SEQ ID NO: 569518 - RNA, 26 nt, Human
uugaaaauaaucacuauuugugagcu

SEQ ID NO: 569519 - RNA, 21 nt, Human
uuggcuauugagcacagcuga

SEQ ID NO: 569520 - RNA, 28 nt, Human
uuguggaggauuggucgaggggugggau

SEQ ID NO: 569521 - RNA, 18 nt, Human
uuuaaucaagggagucac

SEQ ID NO: 569522 - RNA, 20 nt, Human
uuuagagcagauacuggcau

SEQ ID NO: 569523 - RNA, 21 nt, Human
uuuuuuuuuuucaaaaagaac

SEQ ID NO: 569524 - RNA, 24 nt, Human
aaaauuuuauccgcuuucccauau

SEQ ID NO: 569525 - RNA, 18 nt, Human
aagaacacccacaccccc

SEQ ID NO: 569526 - RNA, 21 nt, Human
aaggugcuccagcgcaccaag

SEQ ID NO: 569527 - RNA, 20 nt, Human
acaaacacaggcugugggcu

SEQ ID NO: 569528 - RNA, 19 nt, Human
acacaggcugugggcugga

SEQ ID NO: 569529 - RNA, 18 nt, Human
acccagggauguggcagc

SEQ ID NO: 569530 - RNA, 22 nt, Human
accccagggccccugcuguccu

SEQ ID NO: 569531 - RNA, 20 nt, Human
accugggaugggguggggac

SEQ ID NO: 569532 - RNA, 18 nt, Human
agacugugcucccuuugg

SEQ ID NO: 569533 - RNA, 24 nt, Human
agauagccgaugucuuauuagagc

SEQ ID NO: 569534 - RNA, 19 nt, Human
agcugggugcagacugugc

SEQ ID NO: 569535 - RNA, 19 nt, Human
aggaaccaaguguguccac

SEQ ID NO: 569536 - RNA, 25 nt, Human
aucauaaacccagggauguggcagc

SEQ ID NO: 569537 - RNA, 20 nt, Human
augacucgggaagcuguggu

SEQ ID NO: 569538 - RNA, 24 nt, Human
auuuggucuccaggugucaccuuu

SEQ ID NO: 569539 - RNA, 21 nt, Human
ccaagugagggaguuagggac

SEQ ID NO: 569540 - RNA, 21 nt, Human
cccacacccccuuguuacccu

SEQ ID NO: 569541 - RNA, 18 nt, Human
ccccagggccccugcugu

SEQ ID NO: 569542 - RNA, 25 nt, Human
cccugcauuuggucuccagguguca

SEQ ID NO: 569543 - RNA, 21 nt, Human
ccugcaggcaagcuaaaccag

SEQ ID NO: 569544 - RNA, 21 nt, Human
ccuucccgcagcuucuucuug

SEQ ID NO: 569545 - RNA, 22 nt, Human
ccuuucgagcagcgccucccag

SEQ ID NO: 569546 - RNA, 21 nt, Human
cgagcagcgccucccaguggc

SEQ ID NO: 569547 - RNA, 19 nt, Human
cuaaaaccccagggccccu

SEQ ID NO: 569548 - RNA, 19 nt, Human
cugaugggaugagagcugg

SEQ ID NO: 569549 - RNA, 24 nt, Human
cugauuuggaauuuaacauucucc

SEQ ID NO: 569550 - RNA, 20 nt, Human
cugggaugggguggggacag

SEQ ID NO: 569551 - RNA, 18 nt, Human
cuggguugugaagggucu

SEQ ID NO: 569552 - RNA, 19 nt, Human
cugugacuucccugugacc

SEQ ID NO: 569553 - RNA, 22 nt, Human
cuuggcuuugugaggaaacgag

SEQ ID NO: 569554 - RNA, 18 nt, Human
cuuuucucaaacuuuccu

SEQ ID NO: 569555 - RNA, 18 nt, Human
gaaccgaguguguccagg

SEQ ID NO: 569556 - RNA, 18 nt, Human
gaagggucucaaguccaa

SEQ ID NO: 569557 - RNA, 21 nt, Human
gagcagcgccucccaguggcc

SEQ ID NO: 569558 - RNA, 21 nt, Human
gauccuugauucagacaguuu

SEQ ID NO: 569559 - RNA, 24 nt, Human
gaugggugggacuguguuggccag

SEQ ID NO: 569560 - RNA, 21 nt, Human
gcaaggcugaaaagaacaccc

SEQ ID NO: 569561 - RNA, 25 nt, Human
gcaaggcugaaaagaacacccacac

SEQ ID NO: 569562 - RNA, 22 nt, Human
gcagcgccucccaguggccgga

SEQ ID NO: 569563 - RNA, 18 nt, Human
gcagcugcagcgggcuug

SEQ ID NO: 569564 - RNA, 18 nt, Human
gcagcugcagcgggcuug

SEQ ID NO: 569565 - RNA, 18 nt, Human
gcagcugcagcgggcuug

SEQ ID NO: 569566 - RNA, 18 nt, Human
gcagcugcagcgggcuug

SEQ ID NO: 569567 - RNA, 18 nt, Human
gcagcugcagcgggcuug

SEQ ID NO: 569568 - RNA, 19 nt, Human
gcuaaaaccccagggcccc

SEQ ID NO: 569569 - RNA, 22 nt, Human
ggaauuuaacauucuccaaaca

SEQ ID NO: 569570 - RNA, 23 nt, Human
ggaccuggguucagccagguggu

SEQ ID NO: 569571 - RNA, 24 nt, Human
ggaccuggguucagccagguggug

SEQ ID NO: 569572 - RNA, 21 nt, Human
ggaguuagggacuugggaggg

SEQ ID NO: 569573 - RNA, 20 nt, Human
ggccagaggcuaaaacccca

SEQ ID NO: 569574 - RNA, 18 nt, Human
gggaagcugugguuggcc

SEQ ID NO: 569575 - RNA, 19 nt, Human
ggggaccuggguucagcca

SEQ ID NO: 569576 - RNA, 21 nt, Human
gggugggacuguguuggccag

SEQ ID NO: 569577 - RNA, 21 nt, Human
ggugcagacugugcuccccgg

SEQ ID NO: 569578 - RNA, 18 nt, Human
gucaccuuucugccaugu

SEQ ID NO: 569579 - RNA, 20 nt, Human
gugaccucugcaguacuccu

SEQ ID NO: 569580 - RNA, 21 nt, Human
guuggcccugauuucuucuuu

SEQ ID NO: 569581 - RNA, 24 nt, Human
uaguauuuugcagaugcuuuucuc

SEQ ID NO: 569582 - RNA, 19 nt, Human
ucccaguggccggaagcuu

SEQ ID NO: 569583 - RNA, 23 nt, Human
ucucaaguccaagugagggaguu

SEQ ID NO: 569584 - RNA, 18 nt, Human
ucuccaggugucaccuuu

SEQ ID NO: 569585 - RNA, 18 nt, Human
ucugcaguacuccuuacc

SEQ ID NO: 569586 - RNA, 19 nt, Human
ucuucuguucuucacgccc

SEQ ID NO: 569587 - RNA, 25 nt, Human
ugaaaagaacacccacacccccuug

SEQ ID NO: 569588 - RNA, 22 nt, Human
ugaagggucucaaguccaagug

SEQ ID NO: 569589 - RNA, 21 nt, Human
ugaaugacucgggaagcugug

SEQ ID NO: 569590 - RNA, 18 nt, Human
ugacuucccugugaccuc

SEQ ID NO: 569591 - RNA, 18 nt, Human
ugagggaguuagggacuu

SEQ ID NO: 569592 - RNA, 19 nt, Human
ugaugggaugagagcuggg

SEQ ID NO: 569593 - RNA, 20 nt, Human
ugcauuuggucuccaggugu

SEQ ID NO: 569594 - RNA, 24 nt, Human
ugccaccuggugaaugacucggga

SEQ ID NO: 569595 - RNA, 22 nt, Human
uggcagaaagggggaacccaca

SEQ ID NO: 569596 - RNA, 19 nt, Human
uggccagaggcugagagga

SEQ ID NO: 569597 - RNA, 19 nt, Human
uggcuuugugaggaaacga

SEQ ID NO: 569598 - RNA, 19 nt, Human
uggcuuugugaggaaacga

SEQ ID NO: 569599 - RNA, 20 nt, Human
ugggaugagagcugggugca

SEQ ID NO: 569600 - RNA, 18 nt, Human
ugggaugggguggggaca

SEQ ID NO: 569601 - RNA, 19 nt, Human
ugggguggggacagacaau

SEQ ID NO: 569602 - RNA, 24 nt, Human
ugggugcagacugugcucccuuug

SEQ ID NO: 569603 - RNA, 21 nt, Human
ugucuucuguucuucacgccc

SEQ ID NO: 569604 - RNA, 19 nt, Human
ugugaagggucucaagucc

SEQ ID NO: 569605 - RNA, 24 nt, Human
uguggcagcugcagcgggcuuggc

SEQ ID NO: 569606 - RNA, 24 nt, Human
uguggcagcugcagcgggcuuggc

SEQ ID NO: 569607 - RNA, 24 nt, Human
uguggcagcugcagcgggcuuggc

SEQ ID NO: 569608 - RNA, 24 nt, Human
uguggcagcugcagcgggcuuggc

SEQ ID NO: 569609 - RNA, 24 nt, Human
uguggcagcugcagcgggcuuggc

SEQ ID NO: 569610 - RNA, 26 nt, Human
ugugguuggcccugauuucuucuuug

SEQ ID NO: 569611 - RNA, 19 nt, Human
uuacaaacacaggcugugg

SEQ ID NO: 569612 - RNA, 23 nt, Human
uuccaguccaaugaaaauuuuau

SEQ ID NO: 569613 - RNA, 24 nt, Human
uucccauauaaaaauucuucccac

SEQ ID NO: 569614 - RNA, 19 nt, Human
uucccgcagcuucuucuug

SEQ ID NO: 569615 - RNA, 22 nt, Human
uugugaagggucucaaguccaa

SEQ ID NO: 569616 - RNA, 27 nt, Human
uuguuuuugggucggggaccuggguuc

SEQ ID NO: 569617 - RNA, 18 nt, Human
aaagacaggguuucccua

SEQ ID NO: 569618 - RNA, 19 nt, Human
aaagugcugggauuacagg

SEQ ID NO: 569619 - RNA, 22 nt, Human
aaagugcugggauuacaggcag

SEQ ID NO: 569620 - RNA, 18 nt, Human
aagugcugggauuacagg

SEQ ID NO: 569621 - RNA, 19 nt, Human
aagugcugggauuacaggc

SEQ ID NO: 569622 - RNA, 23 nt, Human
aagugcugggauuacaggcagcc

SEQ ID NO: 569623 - RNA, 18 nt, Human
agaugccggagggugacc

SEQ ID NO: 569624 - RNA, 18 nt, Human
agcaggaggcagggugcc

SEQ ID NO: 569625 - RNA, 21 nt, Human
agcaggaggcagggugccugg

SEQ ID NO: 569626 - RNA, 19 nt, Human
aggagaaagagguccccua

SEQ ID NO: 569627 - RNA, 25 nt, Human
aggcagccaugcccagccagggcag

SEQ ID NO: 569628 - RNA, 19 nt, Human
aggcagggugccugggcca

SEQ ID NO: 569629 - RNA, 26 nt, Human
aggcagggugccugggccaggcuucc

SEQ ID NO: 569630 - RNA, 24 nt, Human
agggauccucccaccucagccucc

SEQ ID NO: 569631 - RNA, 19 nt, Human
auaaauuuacaguucuuga

SEQ ID NO: 569632 - RNA, 27 nt, Human
caaagugcugggauuacaggcagccau

SEQ ID NO: 569633 - RNA, 21 nt, Human
caccuaugauacauaaauuua

SEQ ID NO: 569634 - RNA, 24 nt, Human
caccucagccucccaaagugcugg

SEQ ID NO: 569635 - RNA, 20 nt, Human
cagcacuacuggggagagau

SEQ ID NO: 569636 - RNA, 20 nt, Human
cauuuuuaugcacaacuuuc

SEQ ID NO: 569637 - RNA, 19 nt, Human
ccaaagugcugggauuaca

SEQ ID NO: 569638 - RNA, 23 nt, Human
ccaaagugcugggauuacaggca

SEQ ID NO: 569639 - RNA, 24 nt, Human
cccaaagugcugggauuacaggca

SEQ ID NO: 569640 - RNA, 18 nt, Human
ccugggcucaagggaucc

SEQ ID NO: 569641 - RNA, 19 nt, Human
ccuuugggaaauguggucc

SEQ ID NO: 569642 - RNA, 22 nt, Human
cgcgcgcccuccacuccgggcc

SEQ ID NO: 569643 - RNA, 19 nt, Human
cucaagggauccucccacc

SEQ ID NO: 569644 - RNA, 24 nt, Human
cucaagggauccucccaccucagc

SEQ ID NO: 569645 - RNA, 20 nt, Human
cuccacuccgggccagaccc

SEQ ID NO: 569646 - RNA, 23 nt, Human
cuccugggcucaagggauccucc

SEQ ID NO: 569647 - RNA, 24 nt, Human
gaacuccugggcucaagggauccu

SEQ ID NO: 569648 - RNA, 18 nt, Human
gagcaggaggcagggugc

SEQ ID NO: 569649 - RNA, 18 nt, Human
gauuacaggcagccaugc

SEQ ID NO: 569650 - RNA, 23 nt, Human
gcuggucuggaacuccugggcuc

SEQ ID NO: 569651 - RNA, 19 nt, Human
ggagggugaccagcacuac

SEQ ID NO: 569652 - RNA, 18 nt, Human
ggauuacaggcagccaug

SEQ ID NO: 569653 - RNA, 21 nt, Human
ggccgagcgggagggcuggga

SEQ ID NO: 569654 - RNA, 22 nt, Human
uauauugcccaggcuggucugg

SEQ ID NO: 569655 - RNA, 23 nt, Human
uauauugcccaggcuggucugga

SEQ ID NO: 569656 - RNA, 24 nt, Human
uauauugcccaggcuggucuggaa

SEQ ID NO: 569657 - RNA, 19 nt, Human
uauugcccaggcuggucug

SEQ ID NO: 569658 - RNA, 18 nt, Human
ucagccucccaaagugcu

SEQ ID NO: 569659 - RNA, 24 nt, Human
ucccaaagugcugggauuacaggc

SEQ ID NO: 569660 - RNA, 27 nt, Human
uccucccaccucagccucccaaagugc

SEQ ID NO: 569661 - RNA, 18 nt, Human
uccugggcucaagggauc

SEQ ID NO: 569662 - RNA, 24 nt, Human
uccugggcucaagggauccuccca

SEQ ID NO: 569663 - RNA, 19 nt, Human
ucuccugggucaccuccaa

SEQ ID NO: 569664 - RNA, 21 nt, Human
ucuggaacuccugggcucaag

SEQ ID NO: 569665 - RNA, 24 nt, Human
ugcccaggcuggucuggaacuccu

SEQ ID NO: 569666 - RNA, 28 nt, Human
ugcccaggcuggucuggaacuccugggc

SEQ ID NO: 569667 - RNA, 21 nt, Human
ugcugggauuacaggcagcca

SEQ ID NO: 569668 - RNA, 22 nt, Human
ugggagagaugcaugccaaagg

SEQ ID NO: 569669 - RNA, 18 nt, Human
ugggauuacaggcagcca

SEQ ID NO: 569670 - RNA, 19 nt, Human
ugggauuacaggcagccau

SEQ ID NO: 569671 - RNA, 24 nt, Human
ugggauuacaggcagccaugccca

SEQ ID NO: 569672 - RNA, 23 nt, Human
uuguaaagacaggguuucccuau

SEQ ID NO: 569673 - RNA, 23 nt, Human
uuucccuauauugcccaggcugg

SEQ ID NO: 569674 - RNA, 21 nt, Human
uuuuuuuuuguaaagacaggg

SEQ ID NO: 569675 - RNA, 26 nt, Human
aaaaaaaaaaaaaguggccuggggga

SEQ ID NO: 569676 - RNA, 24 nt, Human
aaaaacaaaaaaauguuaacugag

SEQ ID NO: 569677 - RNA, 30 nt, Human
aaaaaugaugaaaacaucucaucgcacaaa

SEQ ID NO: 569678 - RNA, 19 nt, Human
aaaacaaacaaaaaaaagc

SEQ ID NO: 569679 - RNA, 21 nt, Human
aaacaaacaaaaaaaagcuga

SEQ ID NO: 569680 - RNA, 27 nt, Human
aaacacuaagaguugcaagaaagaacu

SEQ ID NO: 569681 - RNA, 26 nt, Human
aaacaggacagucauauaccccaaga

SEQ ID NO: 569682 - RNA, 21 nt, Human
aaaccugguuucaauucaugc

SEQ ID NO: 569683 - RNA, 23 nt, Human
aaagauccggaguucagauauac

SEQ ID NO: 569684 - RNA, 22 nt, Human
aaagcgagacucuugucuaaaa

SEQ ID NO: 569685 - RNA, 23 nt, Human
aaaugcugaacaucagcacagcu

SEQ ID NO: 569686 - RNA, 18 nt, Human
aacuuacaauuccuucaa

SEQ ID NO: 569687 - RNA, 18 nt, Human
aacuucuaucucccaauc

SEQ ID NO: 569688 - RNA, 19 nt, Human
aagaaagaacucaauucaa

SEQ ID NO: 569689 - RNA, 23 nt, Human
aagagcaagacccugucucaaaa

SEQ ID NO: 569690 - RNA, 21 nt, Human
aagaguugcaagaaagaacuc

SEQ ID NO: 569691 - RNA, 22 nt, Human
aagcugaguaugguggcacgug

SEQ ID NO: 569692 - RNA, 24 nt, Human
aauucaagaccagccugggcaaca

SEQ ID NO: 569693 - RNA, 24 nt, Human
acuacuguacuccugccugggcaa

SEQ ID NO: 569694 - RNA, 18 nt, Human
acugaaguaaaaaacgug

SEQ ID NO: 569695 - RNA, 19 nt, Human
acuguacuccugccugggc

SEQ ID NO: 569696 - RNA, 22 nt, Human
acuguacuccugccugggcaag

SEQ ID NO: 569697 - RNA, 24 nt, Human
acuguacuccugccugggcaagag

SEQ ID NO: 569698 - RNA, 24 nt, Human
agaaaaaaaaaaaaaguggccugg

SEQ ID NO: 569699 - RNA, 20 nt, Human
agaaaugaauaaauaauuca

SEQ ID NO: 569700 - RNA, 21 nt, Human
agacaaaggcugugaaaacau

SEQ ID NO: 569701 - RNA, 25 nt, Human
agacaaaggcugugaaaacauguag

SEQ ID NO: 569702 - RNA, 23 nt, Human
agacugaggcaggaggauccuug

SEQ ID NO: 569703 - RNA, 21 nt, Human
agacuguuuccuauuacaauu

SEQ ID NO: 569704 - RNA, 22 nt, Human
agcaagagaaugcuaagaggga

SEQ ID NO: 569705 - RNA, 23 nt, Human
agcacuuugggaggcugaggugg

SEQ ID NO: 569706 - RNA, 20 nt, Human
agccaaaaauaggaaauaaa

SEQ ID NO: 569707 - RNA, 24 nt, Human
agccugggcaacaaagcgagacuc

SEQ ID NO: 569708 - RNA, 23 nt, Human
agcugaguaugguggcacgugcc

SEQ ID NO: 569709 - RNA, 20 nt, Human
aggaaauaaaaagauccgga

SEQ ID NO: 569710 - RNA, 23 nt, Human
aggaauucaagaccagccugggc

SEQ ID NO: 569711 - RNA, 21 nt, Human
aggauccuugagcccuggagg

SEQ ID NO: 569712 - RNA, 22 nt, Human
aggcaggaggauccuugagccc

SEQ ID NO: 569713 - RNA, 24 nt, Human
aggcaggaggauccuugagcccug

SEQ ID NO: 569714 - RNA, 21 nt, Human
aggcugagguggaagaguugc

SEQ ID NO: 569715 - RNA, 24 nt, Human
aggcugagguggaagaguugcuug

SEQ ID NO: 569716 - RNA, 24 nt, Human
aguuuggcagugaacauuaugcag

SEQ ID NO: 569717 - RNA, 19 nt, Human
auacagaaaugugaaggcc

SEQ ID NO: 569718 - RNA, 24 nt, Human
caaaagcacacugggugaaacuaa

SEQ ID NO: 569719 - RNA, 24 nt, Human
caagccaguaaucucagcacuuug

SEQ ID NO: 569720 - RNA, 21 nt, Human
cacagcucagugcacauccuc

SEQ ID NO: 569721 - RNA, 22 nt, Human
cacagcucagugcacauccucu

SEQ ID NO: 569722 - RNA, 23 nt, Human
caccagccagcaggggaaaagga

SEQ ID NO: 569723 - RNA, 18 nt, Human
caccccccuuccuuccuu

SEQ ID NO: 569724 - RNA, 24 nt, Human
cagcacuuugggaggcugaggugg

SEQ ID NO: 569725 - RNA, 23 nt, Human
caggggaaaaggagaaauccacc

SEQ ID NO: 569726 - RNA, 25 nt, Human
ccaaaagcacacugggugaaacuaa

SEQ ID NO: 569727 - RNA, 19 nt, Human
ccagaaagaugguuuuacu

SEQ ID NO: 569728 - RNA, 22 nt, Human
cccagaaaccuuaaauauagac

SEQ ID NO: 569729 - RNA, 24 nt, Human
ccccccuuccuuccuuacaaauuc

SEQ ID NO: 569730 - RNA, 23 nt, Human
ccugucucaaaagaaaaaaaaaa

SEQ ID NO: 569731 - RNA, 24 nt, Human
ccugucucaaaagaaaaaaaaaaa

SEQ ID NO: 569732 - RNA, 18 nt, Human
cuaaaacaaacaaaaaaa

SEQ ID NO: 569733 - RNA, 25 nt, Human
cuaaaacaaacaaaaaaaagcugag

SEQ ID NO: 569734 - RNA, 18 nt, Human
cucaaaagaaaaaaaaaa

SEQ ID NO: 569735 - RNA, 24 nt, Human
cucaagccaguaaucucagcacuu

SEQ ID NO: 569736 - RNA, 20 nt, Human
cucagugcacauccucuuua

SEQ ID NO: 569737 - RNA, 22 nt, Human
cuccuggguuauggcuggacgc

SEQ ID NO: 569738 - RNA, 22 nt, Human
cuggaggucaaggcugcaguca

SEQ ID NO: 569739 - RNA, 24 nt, Human
gaaaacaucucaucgcacaaaacu

SEQ ID NO: 569740 - RNA, 25 nt, Human
gaaaaccugguuucaauucaugccg

SEQ ID NO: 569741 - RNA, 18 nt, Human
gacccugucucaaaagaa

SEQ ID NO: 569742 - RNA, 20 nt, Human
gagaaaauguucauugggug

SEQ ID NO: 569743 - RNA, 24 nt, Human
gagauaccuaaagugaaaaacaaa

SEQ ID NO: 569744 - RNA, 24 nt, Human
gagguggaagaguugcuugagccc

SEQ ID NO: 569745 - RNA, 22 nt, Human
ggaaaaggagaaauccaccugc

SEQ ID NO: 569746 - RNA, 21 nt, Human
ggaaacaaaaaugaugaaaac

SEQ ID NO: 569747 - RNA, 23 nt, Human
ggaggggugggugcaguggcuca

SEQ ID NO: 569748 - RNA, 21 nt, Human
ggccagaaagaugguuuuacu

SEQ ID NO: 569749 - RNA, 23 nt, Human
ggugcaguggcucaagccaguaa

SEQ ID NO: 569750 - RNA, 23 nt, Human
gucucugacagucaccagccagc

SEQ ID NO: 569751 - RNA, 19 nt, Human
gucuggaggggugggugca

SEQ ID NO: 569752 - RNA, 20 nt, Human
uaaaacaaacaaaaaaaagc

SEQ ID NO: 569753 - RNA, 18 nt, Human
uaaaguagucuggagggg

SEQ ID NO: 569754 - RNA, 20 nt, Human
uaagacugaugacuaggagc

SEQ ID NO: 569755 - RNA, 18 nt, Human
uaagaguugcaagaaaga

SEQ ID NO: 569756 - RNA, 22 nt, Human
uaaguagauuuggcagaggaga

SEQ ID NO: 569757 - RNA, 22 nt, Human
uaccuaaagugaaaaacaaaaa

SEQ ID NO: 569758 - RNA, 19 nt, Human
uaggagcacaucuauggau

SEQ ID NO: 569759 - RNA, 24 nt, Human
uaggaucuuucuuaauaaagcuuc

SEQ ID NO: 569760 - RNA, 22 nt, Human
uauuauacagaaaugugaaggc

SEQ ID NO: 569761 - RNA, 21 nt, Human
ucagccucacauuuagagacu

SEQ ID NO: 569762 - RNA, 18 nt, Human
ucauuuagacauuugccc

SEQ ID NO: 569763 - RNA, 22 nt, Human
uccagagaccaucugcuccaaa

SEQ ID NO: 569764 - RNA, 23 nt, Human
uccccaaaucacaagucugauuc

SEQ ID NO: 569765 - RNA, 21 nt, Human
uccggaguucagauauacuga

SEQ ID NO: 569766 - RNA, 23 nt, Human
ucuauggagaagcccugaaguug

SEQ ID NO: 569767 - RNA, 22 nt, Human
ucuggaggggugggugcagugg

SEQ ID NO: 569768 - RNA, 22 nt, Human
ugaaguaaaaaacguguuagag

SEQ ID NO: 569769 - RNA, 18 nt, Human
ugaaguugcucuccccaa

SEQ ID NO: 569770 - RNA, 23 nt, Human
ugagcccaggaauucaagaccag

SEQ ID NO: 569771 - RNA, 19 nt, Human
ugaggcaggaggauccuug

SEQ ID NO: 569772 - RNA, 23 nt, Human
ugaggcaggaggauccuugagcc

SEQ ID NO: 569773 - RNA, 24 nt, Human
ugaggcaggaggauccuugagccc

SEQ ID NO: 569774 - RNA, 20 nt, Human
ugauggggucucugacaguu

SEQ ID NO: 569775 - RNA, 18 nt, Human
ugauucaagaaaaggaaa

SEQ ID NO: 569776 - RNA, 23 nt, Human
ugccuguagucccacuuaguugg

SEQ ID NO: 569777 - RNA, 24 nt, Human
ugccuguagucccacuuaguuggg

SEQ ID NO: 569778 - RNA, 20 nt, Human
ugcucuccccaaaucacaag

SEQ ID NO: 569779 - RNA, 20 nt, Human
uggagaacucaaaaucccau

SEQ ID NO: 569780 - RNA, 23 nt, Human
uggaguggaaguguagggagaaa

SEQ ID NO: 569781 - RNA, 18 nt, Human
uggcagaggagagaaaug

SEQ ID NO: 569782 - RNA, 19 nt, Human
uggcagaggagagaaauga

SEQ ID NO: 569783 - RNA, 20 nt, Human
ugggaggcugagguggaaga

SEQ ID NO: 569784 - RNA, 21 nt, Human
ugggaggcugagguggaagag

SEQ ID NO: 569785 - RNA, 24 nt, Human
ugggaggcugagguggaagaguug

SEQ ID NO: 569786 - RNA, 18 nt, Human
ugggugaaacuaaaccac

SEQ ID NO: 569787 - RNA, 19 nt, Human
uggguucacccaguuuauu

SEQ ID NO: 569788 - RNA, 24 nt, Human
ugguggcacgugccuguaguccca

SEQ ID NO: 569789 - RNA, 19 nt, Human
uuaugauagaaaacaaacu

SEQ ID NO: 569790 - RNA, 19 nt, Human
uucaaagaaaagaaaaagc

SEQ ID NO: 569791 - RNA, 20 nt, Human
uucaagaaaaggaaacaaaa

SEQ ID NO: 569792 - RNA, 25 nt, Human
uucugauguuacuccuggguuaugg

SEQ ID NO: 569793 - RNA, 24 nt, Human
uugcccuagugaaugagggagcaa

SEQ ID NO: 569794 - RNA, 25 nt, Human
uuggcagugaacauuaugcagauuc

SEQ ID NO: 569795 - RNA, 19 nt, Human
uugggaggcugagguggaa

SEQ ID NO: 569796 - RNA, 23 nt, Human
uuucaugccaccccccuuccuuc

SEQ ID NO: 569797 - RNA, 23 nt, Human
aaaacaagaccaaaagguggaaa

SEQ ID NO: 569798 - RNA, 21 nt, Human
aaacaaauguaguguauacac

SEQ ID NO: 569799 - RNA, 18 nt, Human
aaacaagaccaaaaggug

SEQ ID NO: 569800 - RNA, 19 nt, Human
aagauuaaaaacaagacca

SEQ ID NO: 569801 - RNA, 22 nt, Human
accaaaagguggaaauuuuaaa

SEQ ID NO: 569802 - RNA, 18 nt, Human
caagauuaaaaacaagac

SEQ ID NO: 569803 - RNA, 24 nt, Human
cacaagauuaaaaacaagggacau

SEQ ID NO: 569804 - RNA, 19 nt, Human
cauuacuuucuacuucugc

SEQ ID NO: 569805 - RNA, 18 nt, Human
ccaagaaaucuugcacaa

SEQ ID NO: 569806 - RNA, 23 nt, Human
ccgaaauauccucuucaucagag

SEQ ID NO: 569807 - RNA, 24 nt, Human
cuagaaaauucauuuuucucagaa

SEQ ID NO: 569808 - RNA, 22 nt, Human
cuucauguauuacuugcucuuc

SEQ ID NO: 569809 - RNA, 23 nt, Human
cuugcucuucuuccucaggucug

SEQ ID NO: 569810 - RNA, 19 nt, Human
gaggaaaauauaaaggcuc

SEQ ID NO: 569811 - RNA, 21 nt, Human
gcgauauaacuucagacucau

SEQ ID NO: 569812 - RNA, 21 nt, Human
uacuugcucuucuuccucagg

SEQ ID NO: 569813 - RNA, 24 nt, Human
uauccucuucaucagagaggacca

SEQ ID NO: 569814 - RNA, 22 nt, Human
ucacccgaaauauccucuucau

SEQ ID NO: 569815 - RNA, 19 nt, Human
ugauuuagaacguuuucgu

SEQ ID NO: 569816 - RNA, 18 nt, Human
uggcaaacucucacuacu

SEQ ID NO: 569817 - RNA, 22 nt, Human
ugggguaucaugcacaagauua

SEQ ID NO: 569818 - RNA, 23 nt, Human
uuucaucaucuucauguauuacu

SEQ ID NO: 569819 - RNA, 23 nt, Human
aaaaaauagaacucucucagaga

SEQ ID NO: 569820 - RNA, 24 nt, Human
aaaaauucuaacccaaaacaacuc

SEQ ID NO: 569821 - RNA, 22 nt, Human
aaacauguaacaaagaguauaa

SEQ ID NO: 569822 - RNA, 24 nt, Human
aaacauguaacaaagaguauaaaa

SEQ ID NO: 569823 - RNA, 28 nt, Human
aaauagaacucucucagagaacuauaaa

SEQ ID NO: 569824 - RNA, 21 nt, Human
aacaaaaccaaaaaauagaac

SEQ ID NO: 569825 - RNA, 25 nt, Human
aacaguacaaaaagaaaaauucuaa

SEQ ID NO: 569826 - RNA, 24 nt, Human
aacccauucaaaauccaaacauac

SEQ ID NO: 569827 - RNA, 22 nt, Human
aagaaaaauucuaacccaaaac

SEQ ID NO: 569828 - RNA, 18 nt, Human
aagaaaacacaaaacaaa

SEQ ID NO: 569829 - RNA, 21 nt, Human
aagaaaacacaaaacaaaacc

SEQ ID NO: 569830 - RNA, 24 nt, Human
aagacugcuuuaaacacccuucgg

SEQ ID NO: 569831 - RNA, 21 nt, Human
aagaguaccucugcugcauuu

SEQ ID NO: 569832 - RNA, 21 nt, Human
aagggacagaagaguaccucu

SEQ ID NO: 569833 - RNA, 18 nt, Human
acaucgaggaagugcuaa

SEQ ID NO: 569834 - RNA, 26 nt, Human
acaugacaaaaaccugacuauauaaa

SEQ ID NO: 569835 - RNA, 18 nt, Human
acuuaaaaguuccuagug

SEQ ID NO: 569836 - RNA, 23 nt, Human
acuuuuauaguaguccagcccuu

SEQ ID NO: 569837 - RNA, 24 nt, Human
agaaaacacaaaacaaaaccaaaa

SEQ ID NO: 569838 - RNA, 20 nt, Human
agcacccagaacaggaaacg

SEQ ID NO: 569839 - RNA, 27 nt, Human
aguacaaaaagaaaaauucuaacccaa

SEQ ID NO: 569840 - RNA, 20 nt, Human
augcaaaagaaaacacaaaa

SEQ ID NO: 569841 - RNA, 19 nt, Human
caaaaaauagaacucucuc

SEQ ID NO: 569842 - RNA, 19 nt, Human
caaaaaauagaacucucuc

SEQ ID NO: 569843 - RNA, 23 nt, Human
caaaaaauagaacucucucagag

SEQ ID NO: 569844 - RNA, 24 nt, Human
caaaagaaaacacaaaacaaaacc

SEQ ID NO: 569845 - RNA, 22 nt, Human
caaaagaauuccuuuucuuaaa

SEQ ID NO: 569846 - RNA, 26 nt, Human
caaaaugcaaaagaaaacacaaaaca

SEQ ID NO: 569847 - RNA, 22 nt, Human
caaaaugcaaaagaaaacacag

SEQ ID NO: 569848 - RNA, 18 nt, Human
caacagccuagacaguac

SEQ ID NO: 569849 - RNA, 18 nt, Human
caugacaaaaaccugacu

SEQ ID NO: 569850 - RNA, 18 nt, Human
cccuucggcauggccuga

SEQ ID NO: 569851 - RNA, 18 nt, Human
cgagaaaacaaaucccau

SEQ ID NO: 569852 - RNA, 19 nt, Human
cggaagggacagaagagua

SEQ ID NO: 569853 - RNA, 22 nt, Human
cuaaauacugauacaaacaugu

SEQ ID NO: 569854 - RNA, 23 nt, Human
cucaaaugguuuuccacuaaaua

SEQ ID NO: 569855 - RNA, 18 nt, Human
cuuaaaaaaaaaaaaaaa

SEQ ID NO: 569856 - RNA, 21 nt, Human
gaaaacacaaaacaaaaccaa

SEQ ID NO: 569857 - RNA, 20 nt, Human
gaaguugugcaucccgacuc

SEQ ID NO: 569858 - RNA, 22 nt, Human
gauaagucggugguugaaguug

SEQ ID NO: 569859 - RNA, 26 nt, Human
gauuuuuuucugucaagagccagaga

SEQ ID NO: 569860 - RNA, 19 nt, Human
gcaguagcacccagaacag

SEQ ID NO: 569861 - RNA, 21 nt, Human
gggaaaggagcgaccugcaag

SEQ ID NO: 569862 - RNA, 24 nt, Human
uaauaaauuacaugacaaaaaccu

SEQ ID NO: 569863 - RNA, 23 nt, Human
uacaaaaugcaaaagaaaacaca

SEQ ID NO: 569864 - RNA, 27 nt, Human
uacaaaaugcaaaagaaaacacaaaac

SEQ ID NO: 569865 - RNA, 18 nt, Human
uacaugacaaaaaccuga

SEQ ID NO: 569866 - RNA, 19 nt, Human
uagauuccuagcuucaguu

SEQ ID NO: 569867 - RNA, 23 nt, Human
uagauuccuagcuucaguuuuua

SEQ ID NO: 569868 - RNA, 20 nt, Human
uauauacacaaaagaauucc

SEQ ID NO: 569869 - RNA, 25 nt, Human
uauccacggcugggaaaggagcgac

SEQ ID NO: 569870 - RNA, 19 nt, Human
uccacggcugggaaaggag

SEQ ID NO: 569871 - RNA, 19 nt, Human
uccccauuccucaaaaugg

SEQ ID NO: 569872 - RNA, 25 nt, Human
uccuuuucuuaaaaaaaaaaaaaaa

SEQ ID NO: 569873 - RNA, 23 nt, Human
ucggugguugaaguugugcaucc

SEQ ID NO: 569874 - RNA, 19 nt, Human
ugaaauggcugaacuaaac

SEQ ID NO: 569875 - RNA, 26 nt, Human
ugaaauggcugaacuaaacccgggug

SEQ ID NO: 569876 - RNA, 18 nt, Human
ugaggaaaucagcauucc

SEQ ID NO: 569877 - RNA, 22 nt, Human
ugcaaaagaaaacacaaaacaa

SEQ ID NO: 569878 - RNA, 22 nt, Human
ugcaagacugcuuuaaacaccc

SEQ ID NO: 569879 - RNA, 24 nt, Human
ugccgagaaaacaaaucccauuuu

SEQ ID NO: 569880 - RNA, 21 nt, Human
ugucucaaaugugaacucacu

SEQ ID NO: 569881 - RNA, 22 nt, Human
uguuuuaaagaaacaguacaaa

SEQ ID NO: 569882 - RNA, 21 nt, Human
uuaaaaaaaaaaaaaaaaaaa

SEQ ID NO: 569883 - RNA, 22 nt, Human
uuaaaaaaaaaaaaaaaaaagg

SEQ ID NO: 569884 - RNA, 21 nt, Human
uucaaaauccaaacauacaaa

SEQ ID NO: 569885 - RNA, 20 nt, Human
uuuuccacuaaauacugaua

SEQ ID NO: 569886 - RNA, 20 nt, Human
uuuuuauccacggcugggaa

SEQ ID NO: 569887 - RNA, 24 nt, Human
uuuuuauuccaauguggacaggga

SEQ ID NO: 569888 - RNA, 18 nt, Human
aaaacucuuccaugacuc

SEQ ID NO: 569889 - RNA, 19 nt, Human
aaacaggaagagauucaag

SEQ ID NO: 569890 - RNA, 18 nt, Human
aaaccuaggagggugaug

SEQ ID NO: 569891 - RNA, 19 nt, Human
aaagaugggugggagcugg

SEQ ID NO: 569892 - RNA, 21 nt, Human
aacacaacauggggcaguggc

SEQ ID NO: 569893 - RNA, 25 nt, Human
aagacuuuuuccccccauaucucaa

SEQ ID NO: 569894 - RNA, 26 nt, Human
acaaucaggcuuuuuuuuuuuucuuu

SEQ ID NO: 569895 - RNA, 18 nt, Human
acgagaggaccccuucug

SEQ ID NO: 569896 - RNA, 26 nt, Human
agacaagaggaaagguaagggggacc

SEQ ID NO: 569897 - RNA, 20 nt, Human
agccaguguagagagaacca

SEQ ID NO: 569898 - RNA, 23 nt, Human
aggcagucaguggagagaaaagc

SEQ ID NO: 569899 - RNA, 22 nt, Human
auauaaggcaacuugccaacac

SEQ ID NO: 569900 - RNA, 18 nt, Human
aucccaaacuccaaugug

SEQ ID NO: 569901 - RNA, 24 nt, Human
auggucaaauacuuccaagaugcc

SEQ ID NO: 569902 - RNA, 19 nt, Human
auuuuguuuuuguugaggg

SEQ ID NO: 569903 - RNA, 24 nt, Human
caaaggucacuguauuuuucuagg

SEQ ID NO: 569904 - RNA, 18 nt, Human
caagaugcccuugagauc

SEQ ID NO: 569905 - RNA, 22 nt, Human
caauauagacacaaaacaaagc

SEQ ID NO: 569906 - RNA, 24 nt, Human
cacacacaaugcuacucaaaccca

SEQ ID NO: 569907 - RNA, 21 nt, Human
cacacuacauucauacagaaa

SEQ ID NO: 569908 - RNA, 20 nt, Human
caggcuuuuuuuuuuuucuu

SEQ ID NO: 569909 - RNA, 19 nt, Human
cauuccgucagcccacacc

SEQ ID NO: 569910 - RNA, 19 nt, Human
ccaauguaggcccagcuca

SEQ ID NO: 569911 - RNA, 19 nt, Human
ccagcuccagguguuagaa

SEQ ID NO: 569912 - RNA, 23 nt, Human
cccacacuacauucauacagaaa

SEQ ID NO: 569913 - RNA, 23 nt, Human
ccccauaucucaagaaaugguca

SEQ ID NO: 569914 - RNA, 26 nt, Human
cccgccgccaccacuucuccacugcc

SEQ ID NO: 569915 - RNA, 23 nt, Human
ccgucagcccacaccucagucgu

SEQ ID NO: 569916 - RNA, 21 nt, Human
ccuucuguccccacuuagauc

SEQ ID NO: 569917 - RNA, 20 nt, Human
cgcccgccgcccgccgccac

SEQ ID NO: 569918 - RNA, 21 nt, Human
cuaggagggugauguaugaug

SEQ ID NO: 569919 - RNA, 21 nt, Human
cuagguuuggaaaggggaguc

SEQ ID NO: 569920 - RNA, 22 nt, Human
cuagguuuggaaaggggagucu

SEQ ID NO: 569921 - RNA, 24 nt, Human
cucaaacccacacuacauucauac

SEQ ID NO: 569922 - RNA, 23 nt, Human
cucauggcugcuccuuugccgcc

SEQ ID NO: 569923 - RNA, 20 nt, Human
cuccagguguuagaaccaug

SEQ ID NO: 569924 - RNA, 19 nt, Human
cucuuccaugacuccucag

SEQ ID NO: 569925 - RNA, 21 nt, Human
gaaauggucaaauacuuccaa

SEQ ID NO: 569926 - RNA, 19 nt, Human
gcaaaaccuuaaauaagaa

SEQ ID NO: 569927 - RNA, 20 nt, Human
gcuggaggggaggacgagag

SEQ ID NO: 569928 - RNA, 28 nt, Human
gcuuuuuuuuuuuucuuuuuccuuuuaa

SEQ ID NO: 569929 - RNA, 19 nt, Human
ggaagggggguagcaacag

SEQ ID NO: 569930 - RNA, 21 nt, Human
ggaccccuucuguccccacuu

SEQ ID NO: 569931 - RNA, 22 nt, Human
ggcugcuccuuugccgcccgcc

SEQ ID NO: 569932 - RNA, 20 nt, Human
gggaggacgagaggaccccu

SEQ ID NO: 569933 - RNA, 22 nt, Human
gggcuguggggaggugaguuag

SEQ ID NO: 569934 - RNA, 20 nt, Human
ggggcaguggcucacacugg

SEQ ID NO: 569935 - RNA, 18 nt, Human
guaaaaaauaaaaaagcc

SEQ ID NO: 569936 - RNA, 21 nt, Human
guaaaaaauaaaaaagcccaa

SEQ ID NO: 569937 - RNA, 22 nt, Human
gugaaacuuugaaacuauccag

SEQ ID NO: 569938 - RNA, 21 nt, Human
gugaacaaaaugcaaaaccuu

SEQ ID NO: 569939 - RNA, 18 nt, Human
guuuguuuuuuuuuuccu

SEQ ID NO: 569940 - RNA, 19 nt, Human
uaaaaaagcccaauucugc

SEQ ID NO: 569941 - RNA, 25 nt, Human
uaaauaagaaccaucagcugacauu

SEQ ID NO: 569942 - RNA, 24 nt, Human
uagguucuaacauaaaaccaaaag

SEQ ID NO: 569943 - RNA, 20 nt, Human
uaugauguguugcacgugga

SEQ ID NO: 569944 - RNA, 23 nt, Human
ucaaacccacacuacauucauac

SEQ ID NO: 569945 - RNA, 18 nt, Human
ucaaaggucacuguauuu

SEQ ID NO: 569946 - RNA, 22 nt, Human
ucaguggagagaaaagccuggg

SEQ ID NO: 569947 - RNA, 20 nt, Human
uccccagagacaagaggaaa

SEQ ID NO: 569948 - RNA, 26 nt, Human
uccuuugccgcccgccgcccgccgcc

SEQ ID NO: 569949 - RNA, 23 nt, Human
ugacaggcagucaguggagagaa

SEQ ID NO: 569950 - RNA, 18 nt, Human
ugagaaagggaucuuggg

SEQ ID NO: 569951 - RNA, 19 nt, Human
ugcacguggagggcagcag

SEQ ID NO: 569952 - RNA, 18 nt, Human
uggagggaggggaagggg

SEQ ID NO: 569953 - RNA, 18 nt, Human
ugggagcuggcuggaaau

SEQ ID NO: 569954 - RNA, 23 nt, Human
ugguguuuuuaaucccaaacucc

SEQ ID NO: 569955 - RNA, 21 nt, Human
uguaggcccagcuccaggugu

SEQ ID NO: 569956 - RNA, 20 nt, Human
uguaugauguguugcacgug

SEQ ID NO: 569957 - RNA, 20 nt, Human
ugugggaucaauauagacac

SEQ ID NO: 569958 - RNA, 18 nt, Human
uuccccagagacaagagg

SEQ ID NO: 569959 - RNA, 19 nt, Human
uuccgucagcccacaccuc

SEQ ID NO: 569960 - RNA, 18 nt, Human
uugaaggauaugaagacu

SEQ ID NO: 569961 - RNA, 21 nt, Human
uugaaggauaugaagacuggg

SEQ ID NO: 569962 - RNA, 20 nt, Human
uugccgcccgccgcccgccg

SEQ ID NO: 569963 - RNA, 25 nt, Human
uuuaaaaacucuuccaugacuccuc

SEQ ID NO: 569964 - RNA, 18 nt, Human
uuuccaauguaggcccag

SEQ ID NO: 569965 - RNA, 21 nt, Human
uuucuuagacaucuaagaaug

SEQ ID NO: 569966 - RNA, 23 nt, Human
uuuuuuuuuuucuuuuuccuuuu

SEQ ID NO: 569967 - RNA, 18 nt, Human
uuuuuuuuuuuucuuuuu

SEQ ID NO: 569968 - RNA, 22 nt, Human
aaaaaaaaaagaaaaaaaagaa

SEQ ID NO: 569969 - RNA, 19 nt, Human
aaaaaaaagaaaaaaaaga

SEQ ID NO: 569970 - RNA, 21 nt, Human
aaaaaaacuaacuagagagca

SEQ ID NO: 569971 - RNA, 22 nt, Human
aaaaaaacuaacuagagagcac

SEQ ID NO: 569972 - RNA, 28 nt, Human
aaaaauauauaauucuuuggaaacuguc

SEQ ID NO: 569973 - RNA, 27 nt, Human
aaaacacaugcauccggggauaccucc

SEQ ID NO: 569974 - RNA, 28 nt, Human
aaacagacugacacacacgccggacccc

SEQ ID NO: 569975 - RNA, 22 nt, Human
aaagaaagaaaaagaaagaaaa

SEQ ID NO: 569976 - RNA, 24 nt, Human
aacaauaacaaaagaacacacagc

SEQ ID NO: 569977 - RNA, 19 nt, Human
aagaaaaagaaagaaaaga

SEQ ID NO: 569978 - RNA, 21 nt, Human
aagaaagaaaaagaaagaaaa

SEQ ID NO: 569979 - RNA, 21 nt, Human
aagaaagaaaagauaaaaaga

SEQ ID NO: 569980 - RNA, 23 nt, Human
aagauuuuggcaucuugcagcuu

SEQ ID NO: 569981 - RNA, 24 nt, Human
aagcauuuuaaaccaacugugguc

SEQ ID NO: 569982 - RNA, 19 nt, Human
acaauaacaacaauaacaa

SEQ ID NO: 569983 - RNA, 21 nt, Human
acacacacgcacacacacauc

SEQ ID NO: 569984 - RNA, 22 nt, Human
acaugcauccggggauaccucc

SEQ ID NO: 569985 - RNA, 26 nt, Human
acucccaaaaaaacuaacuagagagc

SEQ ID NO: 569986 - RNA, 21 nt, Human
agaaaaaaaagaaaaaaagaa

SEQ ID NO: 569987 - RNA, 26 nt, Human
agaaaaaaaagaaaaaaagaaaagaa

SEQ ID NO: 569988 - RNA, 25 nt, Human
agaaaaagaaagaaaagauaaaaag

SEQ ID NO: 569989 - RNA, 23 nt, Human
agaaaagaaagaaaaagaaagaa

SEQ ID NO: 569990 - RNA, 20 nt, Human
aggcgaaacaaaacuuaccc

SEQ ID NO: 569991 - RNA, 23 nt, Human
aggggaaggaggggucugcaggg

SEQ ID NO: 569992 - RNA, 20 nt, Human
agguauaaacacuauaaaaa

SEQ ID NO: 569993 - RNA, 23 nt, Human
aguuacugaguaacaacaauaac

SEQ ID NO: 569994 - RNA, 21 nt, Human
auagugcaaccuguggaagca

SEQ ID NO: 569995 - RNA, 20 nt, Human
auuaccuugaccagaaaccc

SEQ ID NO: 569996 - RNA, 24 nt, Human
auucacauuuguacauuaccauuu

SEQ ID NO: 569997 - RNA, 19 nt, Human
caaaaaaaaaaaaaaagaa

SEQ ID NO: 569998 - RNA, 21 nt, Human
caaaaaaacuaacuagagagc

SEQ ID NO: 569999 - RNA, 21 nt, Human
caaaagaacacacagcagaag

SEQ ID NO: 570000 - RNA, 18 nt, Human
caaacagacugacacaca

SEQ ID NO: 570001 - RNA, 31 nt, Human
caaacagacugacacacacgcacacacacag

SEQ ID NO: 570002 - RNA, 23 nt, Human
caaccuguggaagcaaaaaaaaa

SEQ ID NO: 570003 - RNA, 22 nt, Human
caccaucagcacugcugauuuu

SEQ ID NO: 570004 - RNA, 31 nt, Human
cagaacaaaaauuagaaaauaaccugaaugg

SEQ ID NO: 570005 - RNA, 25 nt, Human
cagcuugagauaaacucuacgucuu

SEQ ID NO: 570006 - RNA, 23 nt, Human
cagggcagggagaaggggaagga

SEQ ID NO: 570007 - RNA, 23 nt, Human
cagguuuguccuuacucccaaaa

SEQ ID NO: 570008 - RNA, 18 nt, Human
caucccccucugcucacc

SEQ ID NO: 570009 - RNA, 19 nt, Human
caucuugcagcuuuuuacc

SEQ ID NO: 570010 - RNA, 19 nt, Human
ccaaaaaaacuaacuagag

SEQ ID NO: 570011 - RNA, 22 nt, Human
ccaaagacaugcacugucagaa

SEQ ID NO: 570012 - RNA, 25 nt, Human
cccaaaaaaacuaacuagagagcac

SEQ ID NO: 570013 - RNA, 23 nt, Human
cccagguauaaacacuauaaaaa

SEQ ID NO: 570014 - RNA, 21 nt, Human
ccuugaccagaaacccagggc

SEQ ID NO: 570015 - RNA, 21 nt, Human
cuaacuagagagcacaacuga

SEQ ID NO: 570016 - RNA, 24 nt, Human
cucaaguguuuccucauugucuac

SEQ ID NO: 570017 - RNA, 20 nt, Human
cucucuguuacucgacuccu

SEQ ID NO: 570018 - RNA, 21 nt, Human
cugaaugcaugauaugcaacc

SEQ ID NO: 570019 - RNA, 18 nt, Human
gagaaggggaaggagggg

SEQ ID NO: 570020 - RNA, 18 nt, Human
gagaaggggaaggagggg

SEQ ID NO: 570021 - RNA, 18 nt, Human
gaguaacaacaauaacaa

SEQ ID NO: 570022 - RNA, 19 nt, Human
gauaccucccacagcaaug

SEQ ID NO: 570023 - RNA, 18 nt, Human
ggaagcaaaaaaaaaaaa

SEQ ID NO: 570024 - RNA, 21 nt, Human
gggaaggaggggucugcaggg

SEQ ID NO: 570025 - RNA, 23 nt, Human
gggaaggaggggucugcaggguu

SEQ ID NO: 570026 - RNA, 18 nt, Human
gggcagggagaaggggaa

SEQ ID NO: 570027 - RNA, 25 nt, Human
ggggaaggaggggucugcaggguuu

SEQ ID NO: 570028 - RNA, 22 nt, Human
ggggauaccucccacagcaaug

SEQ ID NO: 570029 - RNA, 27 nt, Human
guaacaacaauaacaacaauaacaaaa

SEQ ID NO: 570030 - RNA, 20 nt, Human
uaaaaagaccaacugucccc

SEQ ID NO: 570031 - RNA, 24 nt, Human
uaaaaaugcaauaaccaaugcugu

SEQ ID NO: 570032 - RNA, 19 nt, Human
uaaaccaacuguggucugu

SEQ ID NO: 570033 - RNA, 19 nt, Human
uaacaacaauaacaaaaga

SEQ ID NO: 570034 - RNA, 23 nt, Human
uaacaacaauaacaaaagaacac

SEQ ID NO: 570035 - RNA, 24 nt, Human
uaacaacaauaacaaaagaacaca

SEQ ID NO: 570036 - RNA, 22 nt, Human
uaacacacucacaaacagacug

SEQ ID NO: 570037 - RNA, 25 nt, Human
uaccaccaucagcacugcugauuuu

SEQ ID NO: 570038 - RNA, 21 nt, Human
uaccuugaccagaaacccagg

SEQ ID NO: 570039 - RNA, 20 nt, Human
uagccuuuaacacacucaca

SEQ ID NO: 570040 - RNA, 20 nt, Human
uauauuuauagacucaaaac

SEQ ID NO: 570041 - RNA, 23 nt, Human
ucauuucaugcuuuaauaaaccu

SEQ ID NO: 570042 - RNA, 22 nt, Human
ucugcucacccgaaguaaaagc

SEQ ID NO: 570043 - RNA, 20 nt, Human
ugaaaaaaauauauaauucu

SEQ ID NO: 570044 - RNA, 24 nt, Human
ugacacacacgcacacacacaucc

SEQ ID NO: 570045 - RNA, 20 nt, Human
ugaccagaaacccagggcag

SEQ ID NO: 570046 - RNA, 22 nt, Human
ugagugacaaagcaaauuaaga

SEQ ID NO: 570047 - RNA, 23 nt, Human
ugcaaccuguggaagcaaaaaaa

SEQ ID NO: 570048 - RNA, 21 nt, Human
uguacuuccuucuaaaacuac

SEQ ID NO: 570049 - RNA, 19 nt, Human
uguccuuacucccaaaaaa

SEQ ID NO: 570050 - RNA, 19 nt, Human
uuccagguuuguccuuacu

SEQ ID NO: 570051 - RNA, 22 nt, Human
uucuuuggaaacugucccugau

SEQ ID NO: 570052 - RNA, 19 nt, Human
uuggaaacugucccugauu

SEQ ID NO: 570053 - RNA, 21 nt, Human
uuuaacacacucacaaacaga

SEQ ID NO: 570054 - RNA, 22 nt, Human
uuucaguuuugcuaucuauucc

SEQ ID NO: 570055 - RNA, 26 nt, Human
uuuuaugcaaaugauaugcuucaaca

SEQ ID NO: 570056 - RNA, 18 nt, Human
aaaaaagucugcaccuuc

SEQ ID NO: 570057 - RNA, 21 nt, Human
aaaaaagucugcaccuuccau

SEQ ID NO: 570058 - RNA, 20 nt, Human
aaaaguauccugaaccagga

SEQ ID NO: 570059 - RNA, 18 nt, Human
aaaauugccaauacaacc

SEQ ID NO: 570060 - RNA, 25 nt, Human
aaacaagagacagaaauaagggacc

SEQ ID NO: 570061 - RNA, 23 nt, Human
aaacaagagacagaagggacccc

SEQ ID NO: 570062 - RNA, 21 nt, Human
aaacagacaaaaaaugcaucc

SEQ ID NO: 570063 - RNA, 21 nt, Human
aaacagcaucaguuccucagu

SEQ ID NO: 570064 - RNA, 21 nt, Human
aacacauaagcagguguacca

SEQ ID NO: 570065 - RNA, 21 nt, Human
aacaggaugcuuuaguuccuc

SEQ ID NO: 570066 - RNA, 21 nt, Human
aacaugcuucaaagaauaaga

SEQ ID NO: 570067 - RNA, 24 nt, Human
aaccaggaagaaaaaacaagagac

SEQ ID NO: 570068 - RNA, 18 nt, Human
aacuagcccacagacccc

SEQ ID NO: 570069 - RNA, 21 nt, Human
aagaaacaaaaucacacacag

SEQ ID NO: 570070 - RNA, 18 nt, Human
aagcaaacaaacagcauc

SEQ ID NO: 570071 - RNA, 26 nt, Human
aagcaggcaggucuagaguugucaca

SEQ ID NO: 570072 - RNA, 25 nt, Human
aagucaacuuuaugacuggauauaa

SEQ ID NO: 570073 - RNA, 18 nt, Human
aauuuacaaaugaaccag

SEQ ID NO: 570074 - RNA, 25 nt, Human
acaaaacaggaugcuuuaguuccuc

SEQ ID NO: 570075 - RNA, 26 nt, Human
acagacaaaaaaugcauccaccuaaa

SEQ ID NO: 570076 - RNA, 24 nt, Human
accaauauaaaaaucuggcccaga

SEQ ID NO: 570077 - RNA, 19 nt, Human
accccauucuuugagggcu

SEQ ID NO: 570078 - RNA, 21 nt, Human
acccuuaaaaugcaaguuuau

SEQ ID NO: 570079 - RNA, 27 nt, Human
agacaaaaaaugcauccaaccccgggg

SEQ ID NO: 570080 - RNA, 18 nt, Human
agacagaaauaaugaucu

SEQ ID NO: 570081 - RNA, 20 nt, Human
agacagaaauaaugaucugg

SEQ ID NO: 570082 - RNA, 20 nt, Human
agacccaggaagccgagcgg

SEQ ID NO: 570083 - RNA, 23 nt, Human
agcaggauaucuuuaauauucau

SEQ ID NO: 570084 - RNA, 20 nt, Human
agcaggcaggucuagaguug

SEQ ID NO: 570085 - RNA, 19 nt, Human
aggaagaaaaaacaagaga

SEQ ID NO: 570086 - RNA, 22 nt, Human
aggaagaaaaaacaagagacag

SEQ ID NO: 570087 - RNA, 21 nt, Human
aguaaacagacaaaaaaugca

SEQ ID NO: 570088 - RNA, 21 nt, Human
aguauccugaaccaggaagaa

SEQ ID NO: 570089 - RNA, 24 nt, Human
agugcaaagaaccaacauugaucu

SEQ ID NO: 570090 - RNA, 21 nt, Human
agugcugcuuaacaaaagaaa

SEQ ID NO: 570091 - RNA, 27 nt, Human
auagaacaaacagauguuugaacaaag

SEQ ID NO: 570092 - RNA, 18 nt, Human
aucuggacagauacaaaa

SEQ ID NO: 570093 - RNA, 19 nt, Human
caaaagaaacaaaaucaca

SEQ ID NO: 570094 - RNA, 21 nt, Human
caaacaaacagcaucaguucc

SEQ ID NO: 570095 - RNA, 18 nt, Human
caaagaauaagaagagaa

SEQ ID NO: 570096 - RNA, 20 nt, Human
caacaugcuucaaagaauaa

SEQ ID NO: 570097 - RNA, 24 nt, Human
caagcaaguugccacauucuuugu

SEQ ID NO: 570098 - RNA, 18 nt, Human
cacagagucacacauucu

SEQ ID NO: 570099 - RNA, 18 nt, Human
cacaugcauuugugagau

SEQ ID NO: 570100 - RNA, 23 nt, Human
caccagugcaaagaaccaacauu

SEQ ID NO: 570101 - RNA, 22 nt, Human
cagaaagaccagaauggaaaua

SEQ ID NO: 570102 - RNA, 19 nt, Human
caggaguuaagagugucau

SEQ ID NO: 570103 - RNA, 21 nt, Human
cagucuauaaauuaaaacuga

SEQ ID NO: 570104 - RNA, 25 nt, Human
ccaggaagaaaaaacaagagacaga

SEQ ID NO: 570105 - RNA, 22 nt, Human
ccccuuaaaaaaguauccugaa

SEQ ID NO: 570106 - RNA, 22 nt, Human
ccgcccggacccuccaacggcu

SEQ ID NO: 570107 - RNA, 21 nt, Human
ccuaugcaguccccacagagu

SEQ ID NO: 570108 - RNA, 22 nt, Human
ccuccuuuuaggcacaagcaag

SEQ ID NO: 570109 - RNA, 19 nt, Human
cggccgggagcgagaacgg

SEQ ID NO: 570110 - RNA, 21 nt, Human
cgggaggacggacgagcggcg

SEQ ID NO: 570111 - RNA, 18 nt, Human
cuccucucggaaacuucc

SEQ ID NO: 570112 - RNA, 25 nt, Human
cucggaaacuuccaaaaaagucugc

SEQ ID NO: 570113 - RNA, 19 nt, Human
cugaaaaccaauauaaaaa

SEQ ID NO: 570114 - RNA, 20 nt, Human
cugaaccaggaagaaaaaac

SEQ ID NO: 570115 - RNA, 22 nt, Human
cugcuuaacaaaagaaacaaaa

SEQ ID NO: 570116 - RNA, 22 nt, Human
cuuaacaaaagaaacaaaauca

SEQ ID NO: 570117 - RNA, 22 nt, Human
gaaaaaacaagagacagaaaua

SEQ ID NO: 570118 - RNA, 20 nt, Human
gaagagaaauuuaaaagccc

SEQ ID NO: 570119 - RNA, 19 nt, Human
gaaggaccguauucuggga

SEQ ID NO: 570120 - RNA, 18 nt, Human
gcagaaucucaccagugc

SEQ ID NO: 570121 - RNA, 22 nt, Human
gcagaaucucaccagugcaaag

SEQ ID NO: 570122 - RNA, 23 nt, Human
gccaagaaggacuggaagacuuc

SEQ ID NO: 570123 - RNA, 23 nt, Human
gcccagaaagaccagaauggaaa

SEQ ID NO: 570124 - RNA, 23 nt, Human
gcggcggcgucgacgacuuccac

SEQ ID NO: 570125 - RNA, 24 nt, Human
ggacagauacaaaacaggaugcuu

SEQ ID NO: 570126 - RNA, 25 nt, Human
ggguuuaggaaggaccguauucugg

SEQ ID NO: 570127 - RNA, 18 nt, Human
guccccacagagucacac

SEQ ID NO: 570128 - RNA, 24 nt, Human
uaaacagacaaaaaaugcauccac

SEQ ID NO: 570129 - RNA, 25 nt, Human
uaaauaucccuucauuuacagaacc

SEQ ID NO: 570130 - RNA, 24 nt, Human
uaacaaaagaaacaaaaucacaca

SEQ ID NO: 570131 - RNA, 25 nt, Human
uaacaaaagaaacaaaaucacacac

SEQ ID NO: 570132 - RNA, 18 nt, Human
uaacagguuuuauuauau

SEQ ID NO: 570133 - RNA, 20 nt, Human
uaaguuaaaauugccaauac

SEQ ID NO: 570134 - RNA, 22 nt, Human
uaaucaagaugucuaauggcac

SEQ ID NO: 570135 - RNA, 20 nt, Human
uacaacccuuaaaaugcaag

SEQ ID NO: 570136 - RNA, 23 nt, Human
uagaacaaacagauguuugaaca

SEQ ID NO: 570137 - RNA, 28 nt, Human
uagaacaaacagauguuugaacaaagac

SEQ ID NO: 570138 - RNA, 18 nt, Human
uagaagcaaacaaacagc

SEQ ID NO: 570139 - RNA, 20 nt, Human
uagacauuuacugaaaacca

SEQ ID NO: 570140 - RNA, 25 nt, Human
uaucauagaagcaaacaaacagcau

SEQ ID NO: 570141 - RNA, 20 nt, Human
ucaaagaauaagaagagaaa

SEQ ID NO: 570142 - RNA, 20 nt, Human
uccacacgagcgggccuccg

SEQ ID NO: 570143 - RNA, 22 nt, Human
ucccacaugagucauucacgcc

SEQ ID NO: 570144 - RNA, 29 nt, Human
ucucaaccccuuaaaaaaguauccucccc

SEQ ID NO: 570145 - RNA, 20 nt, Human
ucucaccagugcaaagaacc

SEQ ID NO: 570146 - RNA, 23 nt, Human
ugaaaaaggcaauuucugggguu

SEQ ID NO: 570147 - RNA, 23 nt, Human
ugaaaaccaauauaaaaaucugg

SEQ ID NO: 570148 - RNA, 23 nt, Human
ugaacaacaguagcaaguuuaaa

SEQ ID NO: 570149 - RNA, 21 nt, Human
ugaaccaggaagaaaaaacaa

SEQ ID NO: 570150 - RNA, 25 nt, Human
ugacuggagauagaacaaacagaug

SEQ ID NO: 570151 - RNA, 23 nt, Human
ugacuggauauaaaaagucagga

SEQ ID NO: 570152 - RNA, 21 nt, Human
ugagaagagcaguaaacagac

SEQ ID NO: 570153 - RNA, 23 nt, Human
ugagaagagcaguaaacagacaa

SEQ ID NO: 570154 - RNA, 21 nt, Human
ugauagaguucucagaaagca

SEQ ID NO: 570155 - RNA, 25 nt, Human
ugcauccaccuaaauaaaaaaauuc

SEQ ID NO: 570156 - RNA, 18 nt, Human
ugccaaagcuuacaucag

SEQ ID NO: 570157 - RNA, 27 nt, Human
uggcaccagucaaaagagugccaaagc

SEQ ID NO: 570158 - RNA, 24 nt, Human
ugucaguauuaagcuacuggacuc

SEQ ID NO: 570159 - RNA, 24 nt, Human
ugugacugauuauuaaacaaccug

SEQ ID NO: 570160 - RNA, 22 nt, Human
uguuaaaaguuuucacaugcag

SEQ ID NO: 570161 - RNA, 19 nt, Human
uuaaaaugcaaguuuauug

SEQ ID NO: 570162 - RNA, 20 nt, Human
uuaagagugucaugcagcag

SEQ ID NO: 570163 - RNA, 20 nt, Human
uuaggcacaagcaaguugcc

SEQ ID NO: 570164 - RNA, 24 nt, Human
uucauuaaaagaacuuacuguuga

SEQ ID NO: 570165 - RNA, 21 nt, Human
uucuaguuccaauuccuccuu

SEQ ID NO: 570166 - RNA, 21 nt, Human
uuggaaaaucuucaauucuca

SEQ ID NO: 570167 - RNA, 22 nt, Human
uuuaacuagcccacagacccca

SEQ ID NO: 570168 - RNA, 20 nt, Human
aaaaacaaaaaaguacugug

SEQ ID NO: 570169 - RNA, 22 nt, Human
aaaagcuaugaugacaaaucuc

SEQ ID NO: 570170 - RNA, 24 nt, Human
aaaaugcugggauuacagguguga

SEQ ID NO: 570171 - RNA, 23 nt, Human
aaacaaaaauagagcugguaaau

SEQ ID NO: 570172 - RNA, 27 nt, Human
aaacaaaaauagagcugguaaaucuag

SEQ ID NO: 570173 - RNA, 26 nt, Human
aaaugcugggauuacaggugugagcc

SEQ ID NO: 570174 - RNA, 18 nt, Human
aaaugucuuuuuaaaugu

SEQ ID NO: 570175 - RNA, 20 nt, Human
aacucaauaccagcccucca

SEQ ID NO: 570176 - RNA, 18 nt, Human
aagcagagccuggggaag

SEQ ID NO: 570177 - RNA, 22 nt, Human
aaugucuagagaaaaugaaaac

SEQ ID NO: 570178 - RNA, 18 nt, Human
acaggguuucaccauguu

SEQ ID NO: 570179 - RNA, 21 nt, Human
acaggguuucaccauguuggc

SEQ ID NO: 570180 - RNA, 24 nt, Human
acaggguuucaccauguuggccag

SEQ ID NO: 570181 - RNA, 26 nt, Human
accagcccuccacaccucggcagcac

SEQ ID NO: 570182 - RNA, 18 nt, Human
accauguuggccaggcug

SEQ ID NO: 570183 - RNA, 24 nt, Human
acucugucguccaggcuggagugc

SEQ ID NO: 570184 - RNA, 23 nt, Human
acuugcugccuagaaaaggcugc

SEQ ID NO: 570185 - RNA, 19 nt, Human
agcaggagguuccaggugu

SEQ ID NO: 570186 - RNA, 22 nt, Human
agccagaagccagcgggggcca

SEQ ID NO: 570187 - RNA, 26 nt, Human
agcugguccacguccugcacagugcc

SEQ ID NO: 570188 - RNA, 21 nt, Human
aggcugcaggucccuuccagu

SEQ ID NO: 570189 - RNA, 25 nt, Human
aggcuggagugcaguggcgcgaucu

SEQ ID NO: 570190 - RNA, 21 nt, Human
agguagacaggcccaguuucc

SEQ ID NO: 570191 - RNA, 25 nt, Human
aggucuggaugcugggcacuacggg

SEQ ID NO: 570192 - RNA, 24 nt, Human
aggugauccaccugccucggccuc

SEQ ID NO: 570193 - RNA, 23 nt, Human
aguagcugggauuacaggcaugu

SEQ ID NO: 570194 - RNA, 20 nt, Human
agugcaguggcgcgaucucg

SEQ ID NO: 570195 - RNA, 24 nt, Human
agugcaguggcgcgaucucgacuc

SEQ ID NO: 570196 - RNA, 23 nt, Human
aucagcgacaaugcacccaggaa

SEQ ID NO: 570197 - RNA, 18 nt, Human
aucucacucugucgucca

SEQ ID NO: 570198 - RNA, 19 nt, Human
aucugcggcgacucuccuc

SEQ ID NO: 570199 - RNA, 21 nt, Human
augaagccuggaagauacgcu

SEQ ID NO: 570200 - RNA, 18 nt, Human
augacaaaucuccaaaca

SEQ ID NO: 570201 - RNA, 20 nt, Human
auucuuaacagcuuugacgu

SEQ ID NO: 570202 - RNA, 24 nt, Human
auuuuuguauuuuuaguagagaca

SEQ ID NO: 570203 - RNA, 19 nt, Human
caaaagcuaugaugacaaa

SEQ ID NO: 570204 - RNA, 24 nt, Human
caaaaugcugggauuacaggugug

SEQ ID NO: 570205 - RNA, 22 nt, Human
caaagcagccgugucccgagga

SEQ ID NO: 570206 - RNA, 24 nt, Human
caaagcagccgugucccgaggaac

SEQ ID NO: 570207 - RNA, 20 nt, Human
caaccaggcggacacgagaa

SEQ ID NO: 570208 - RNA, 19 nt, Human
caagaggauggaaagaacc

SEQ ID NO: 570209 - RNA, 22 nt, Human
caagcgaaucuccugccucagc

SEQ ID NO: 570210 - RNA, 22 nt, Human
cacaugccguguugccagugcc

SEQ ID NO: 570211 - RNA, 24 nt, Human
caccaugcccggcuaauuuuugua

SEQ ID NO: 570212 - RNA, 21 nt, Human
caccauguuggccaggcuggu

SEQ ID NO: 570213 - RNA, 24 nt, Human
caccauguuggccaggcuggucuc

SEQ ID NO: 570214 - RNA, 27 nt, Human
caccauguuggccaggcuggucucaaa

SEQ ID NO: 570215 - RNA, 23 nt, Human
caccugccucggccucccaaaau

SEQ ID NO: 570216 - RNA, 24 nt, Human
cacucugucguccaggcuggagug

SEQ ID NO: 570217 - RNA, 22 nt, Human
cagccagaagccagcgggggcc

SEQ ID NO: 570218 - RNA, 22 nt, Human
cagccuccaagcacacuaaccu

SEQ ID NO: 570219 - RNA, 20 nt, Human
cagccuccugaguagcuggg

SEQ ID NO: 570220 - RNA, 21 nt, Human
cagcgacaaugcacccaggaa

SEQ ID NO: 570221 - RNA, 20 nt, Human
cagcgggggccaggcggggu

SEQ ID NO: 570222 - RNA, 24 nt, Human
caggguuucaccauguuggccagg

SEQ ID NO: 570223 - RNA, 22 nt, Human
caggugauccaccugccucggc

SEQ ID NO: 570224 - RNA, 19 nt, Human
cauggugcaaggacagacu

SEQ ID NO: 570225 - RNA, 24 nt, Human
cauguuggccaggcuggucucaaa

SEQ ID NO: 570226 - RNA, 21 nt, Human
ccaaaaugcugggauuacagg

SEQ ID NO: 570227 - RNA, 21 nt, Human
ccaaaaugcugggauuacagg

SEQ ID NO: 570228 - RNA, 24 nt, Human
ccaaaaugcugggauuacaggugu

SEQ ID NO: 570229 - RNA, 25 nt, Human
ccagcaggagguuccaggugucccu

SEQ ID NO: 570230 - RNA, 20 nt, Human
ccaggcggggucugcaggcu

SEQ ID NO: 570231 - RNA, 21 nt, Human
ccaggcggggucugcaggcug

SEQ ID NO: 570232 - RNA, 18 nt, Human
ccaggcuggagugcagug

SEQ ID NO: 570233 - RNA, 24 nt, Human
ccaucagauguuccugaagcccag

SEQ ID NO: 570234 - RNA, 22 nt, Human
cccacaggcggcgcuauggcuc

SEQ ID NO: 570235 - RNA, 20 nt, Human
cccucugugaccaucucugc

SEQ ID NO: 570236 - RNA, 21 nt, Human
ccugaccucaggugauccacc

SEQ ID NO: 570237 - RNA, 23 nt, Human
ccugaccucaggugauccaccug

SEQ ID NO: 570238 - RNA, 23 nt, Human
ccugaccucaggugauccaccug

SEQ ID NO: 570239 - RNA, 23 nt, Human
ccugaguagcugggauuacaggc

SEQ ID NO: 570240 - RNA, 24 nt, Human
ccugaguagcugggauuacaggca

SEQ ID NO: 570241 - RNA, 23 nt, Human
ccugaguucaagcgaaucucccc

SEQ ID NO: 570242 - RNA, 23 nt, Human
ccugaguucaagcgaaucuccug

SEQ ID NO: 570243 - RNA, 24 nt, Human
ccugccucggccucccaaaaugcu

SEQ ID NO: 570244 - RNA, 27 nt, Human
cgagaaacagaugauaacauggugcaa

SEQ ID NO: 570245 - RNA, 22 nt, Human
cgcugccggacgcugguucgcc

SEQ ID NO: 570246 - RNA, 26 nt, Human
cggcagcacucguggguccuccucaa

SEQ ID NO: 570247 - RNA, 24 nt, Human
cguccaggcuggagugcaguggcg

SEQ ID NO: 570248 - RNA, 23 nt, Human
cgugugccguugcuaugcaaagc

SEQ ID NO: 570249 - RNA, 21 nt, Human
cuaaaaauuuaaaccuuccag

SEQ ID NO: 570250 - RNA, 19 nt, Human
cuaaagguagacaggccca

SEQ ID NO: 570251 - RNA, 22 nt, Human
cucaauaccagcccuccacacc

SEQ ID NO: 570252 - RNA, 24 nt, Human
cucacucugucguccaggcuggag

SEQ ID NO: 570253 - RNA, 19 nt, Human
cucacuguaaccuccgucu

SEQ ID NO: 570254 - RNA, 24 nt, Human
cucagccuccugaguagcugggau

SEQ ID NO: 570255 - RNA, 21 nt, Human
cuccacaccucggcagcacuc

SEQ ID NO: 570256 - RNA, 27 nt, Human
cuccucugugcugggcagcagcucccc

SEQ ID NO: 570257 - RNA, 22 nt, Human
cuccugccucagccuccugagu

SEQ ID NO: 570258 - RNA, 22 nt, Human
cucucacaccgcagcuagguca

SEQ ID NO: 570259 - RNA, 19 nt, Human
cucucucacaccgcagcua

SEQ ID NO: 570260 - RNA, 22 nt, Human
cucugugcugggcagcagcucc

SEQ ID NO: 570261 - RNA, 23 nt, Human
cugaguagcugggauuacaggca

SEQ ID NO: 570262 - RNA, 24 nt, Human
cugaguagcugggauuacaggcau

SEQ ID NO: 570263 - RNA, 23 nt, Human
cugccucagccuccugaguagcu

SEQ ID NO: 570264 - RNA, 22 nt, Human
cugcugcccucugugaccaucu

SEQ ID NO: 570265 - RNA, 23 nt, Human
cugcugcccucugugaccaucuc

SEQ ID NO: 570266 - RNA, 23 nt, Human
cugguccacguccugcacagugc

SEQ ID NO: 570267 - RNA, 18 nt, Human
gaagcagagccuggggaa

SEQ ID NO: 570268 - RNA, 19 nt, Human
gaagccaacccagcugcuu

SEQ ID NO: 570269 - RNA, 24 nt, Human
gaccucaggugauccaccugccuc

SEQ ID NO: 570270 - RNA, 22 nt, Human
gaguagcugggauuacaggcau

SEQ ID NO: 570271 - RNA, 25 nt, Human
gaguagcugggauuacaggcaugug

SEQ ID NO: 570272 - RNA, 18 nt, Human
gauuacaggcaugugcca

SEQ ID NO: 570273 - RNA, 24 nt, Human
gauuacaggcaugugccaccaugc

SEQ ID NO: 570274 - RNA, 18 nt, Human
gauuacaggugugagcca

SEQ ID NO: 570275 - RNA, 21 nt, Human
gauuacaggugugagccacca

SEQ ID NO: 570276 - RNA, 22 nt, Human
gauuacaggugugagccaccac

SEQ ID NO: 570277 - RNA, 21 nt, Human
gcagagccuggggaaggucug

SEQ ID NO: 570278 - RNA, 23 nt, Human
gccaagcuccuucuucaucguag

SEQ ID NO: 570279 - RNA, 22 nt, Human
gccaugcucucucacaccgcag

SEQ ID NO: 570280 - RNA, 22 nt, Human
gcccggcuaauuuuuguauuuu

SEQ ID NO: 570281 - RNA, 20 nt, Human
gccucagccuccugaguagc

SEQ ID NO: 570282 - RNA, 24 nt, Human
gcgaaucuccugccucagccuccu

SEQ ID NO: 570283 - RNA, 21 nt, Human
gcgggggccaggcggggucug

SEQ ID NO: 570284 - RNA, 19 nt, Human
gcuggagugcaguggcgcg

SEQ ID NO: 570285 - RNA, 23 nt, Human
gcuggucucaaacuccugaccuc

SEQ ID NO: 570286 - RNA, 24 nt, Human
ggauuacaggcaugugccaccaug

SEQ ID NO: 570287 - RNA, 24 nt, Human
ggcuggucucaaacuccugaccuc

SEQ ID NO: 570288 - RNA, 18 nt, Human
gggacccgcaguaaaaug

SEQ ID NO: 570289 - RNA, 21 nt, Human
gggcagcaaggcacgccugug

SEQ ID NO: 570290 - RNA, 24 nt, Human
gggggcagcaaggcacgccuguga

SEQ ID NO: 570291 - RNA, 22 nt, Human
ggguuucaccauguuggccagg

SEQ ID NO: 570292 - RNA, 18 nt, Human
guagcugggauuacaggc

SEQ ID NO: 570293 - RNA, 20 nt, Human
guagcugggauuacaggcau

SEQ ID NO: 570294 - RNA, 30 nt, Human
gugaauucuauaaacuuuucugaacaaaag

SEQ ID NO: 570295 - RNA, 24 nt, Human
gugauccaccugccucggccuccc

SEQ ID NO: 570296 - RNA, 22 nt, Human
gugugccguugcuaugcaaagc

SEQ ID NO: 570297 - RNA, 24 nt, Human
uaaauguaauuaaaauauauuuua

SEQ ID NO: 570298 - RNA, 21 nt, Human
uaaccuccgucuccugaguuc

SEQ ID NO: 570299 - RNA, 19 nt, Human
uaagaaacaucgacaguuc

SEQ ID NO: 570300 - RNA, 23 nt, Human
uaaguccuguucucagaagccaa

SEQ ID NO: 570301 - RNA, 24 nt, Human
uaauuuuuguauuuuuaguagaga

SEQ ID NO: 570302 - RNA, 23 nt, Human
uacaggcaugugccaccaugccc

SEQ ID NO: 570303 - RNA, 23 nt, Human
uacaggugugagccaccacgccc

SEQ ID NO: 570304 - RNA, 20 nt, Human
uaccuuaguauuuuguaaau

SEQ ID NO: 570305 - RNA, 18 nt, Human
uagacauaucauccgcaa

SEQ ID NO: 570306 - RNA, 22 nt, Human
uagagacaggguuucaccaugu

SEQ ID NO: 570307 - RNA, 24 nt, Human
uaguagagacaggguuucaccaug

SEQ ID NO: 570308 - RNA, 26 nt, Human
uaguagagacaggguuucaccauguu

SEQ ID NO: 570309 - RNA, 18 nt, Human
uauauaaacggugugaga

SEQ ID NO: 570310 - RNA, 18 nt, Human
uaugaagcuucucaggca

SEQ ID NO: 570311 - RNA, 24 nt, Human
ucacucugucguccaggcuggagu

SEQ ID NO: 570312 - RNA, 21 nt, Human
ucacuggaccagccagaagcc

SEQ ID NO: 570313 - RNA, 19 nt, Human
ucacuguaaccuccgucuc

SEQ ID NO: 570314 - RNA, 20 nt, Human
ucacuguaaccuccgucucc

SEQ ID NO: 570315 - RNA, 22 nt, Human
ucacuguaaccuccgucuccug

SEQ ID NO: 570316 - RNA, 25 nt, Human
ucacuguaaccuccgucuccugagu

SEQ ID NO: 570317 - RNA, 20 nt, Human
ucagaagccaacccagcugc

SEQ ID NO: 570318 - RNA, 20 nt, Human
ucagccuccugaguagcugg

SEQ ID NO: 570319 - RNA, 21 nt, Human
ucaggugauccaccugccucg

SEQ ID NO: 570320 - RNA, 23 nt, Human
uccaagcacacuaaccucagcca

SEQ ID NO: 570321 - RNA, 24 nt, Human
uccaccugccucggccucccaaaa

SEQ ID NO: 570322 - RNA, 19 nt, Human
uccagcugguccacguccu

SEQ ID NO: 570323 - RNA, 18 nt, Human
uccaguccugucccugcu

SEQ ID NO: 570324 - RNA, 23 nt, Human
ucccaaaaugcugggauuacagg

SEQ ID NO: 570325 - RNA, 20 nt, Human
ucccaaagcagccguguccc

SEQ ID NO: 570326 - RNA, 19 nt, Human
ucccuuccaguccuguccc

SEQ ID NO: 570327 - RNA, 24 nt, Human
uccugaguagcugggauuacaggc

SEQ ID NO: 570328 - RNA, 21 nt, Human
uccugaguucaagcgaaucuc

SEQ ID NO: 570329 - RNA, 24 nt, Human
uccugaguucaagcgaaucuccug

SEQ ID NO: 570330 - RNA, 20 nt, Human
uccugcuuaacuugcugccu

SEQ ID NO: 570331 - RNA, 18 nt, Human
ucggccucccaaaaugcu

SEQ ID NO: 570332 - RNA, 24 nt, Human
ucguccaggcuggagugcaguggc

SEQ ID NO: 570333 - RNA, 18 nt, Human
ucgugccacgugugccgu

SEQ ID NO: 570334 - RNA, 18 nt, Human
ucuauaaacuuuucugaa

SEQ ID NO: 570335 - RNA, 23 nt, Human
ucucacucugucguccaggcugg

SEQ ID NO: 570336 - RNA, 24 nt, Human
ucucacucugucguccaggcugga

SEQ ID NO: 570337 - RNA, 18 nt, Human
ucugcuggaaucgugcca

SEQ ID NO: 570338 - RNA, 24 nt, Human
ucugucguccaggcuggagugcag

SEQ ID NO: 570339 - RNA, 24 nt, Human
ugaccucaggugauccaccugccu

SEQ ID NO: 570340 - RNA, 18 nt, Human
ugagacagaaucucacuc

SEQ ID NO: 570341 - RNA, 22 nt, Human
ugagacagaaucucacucuguc

SEQ ID NO: 570342 - RNA, 24 nt, Human
ugagguagggucaacagugauguc

SEQ ID NO: 570343 - RNA, 18 nt, Human
ugcacagugcugcagggg

SEQ ID NO: 570344 - RNA, 24 nt, Human
ugcccggcuaauuuuuguauuuuu

SEQ ID NO: 570345 - RNA, 24 nt, Human
ugccucagccuccugaguagcugg

SEQ ID NO: 570346 - RNA, 21 nt, Human
ugccucggccucccaaaaugc

SEQ ID NO: 570347 - RNA, 24 nt, Human
ugccucggccucccaaaaugcugg

SEQ ID NO: 570348 - RNA, 21 nt, Human
ugcggcgacucuccucugugc

SEQ ID NO: 570349 - RNA, 19 nt, Human
ugcuaagaaacaucgacag

SEQ ID NO: 570350 - RNA, 24 nt, Human
ugcugggauuacaggugugagcca

SEQ ID NO: 570351 - RNA, 22 nt, Human
uggaaucagcgacaaugcaccc

SEQ ID NO: 570352 - RNA, 23 nt, Human
uggagugcaguggcgcgaucucg

SEQ ID NO: 570353 - RNA, 24 nt, Human
uggccaggcuggucucaaacuccu

SEQ ID NO: 570354 - RNA, 24 nt, Human
uggcgcgaucucgacucacuguaa

SEQ ID NO: 570355 - RNA, 25 nt, Human
ugggauggcgccucugguuucaugg

SEQ ID NO: 570356 - RNA, 18 nt, Human
ugggauuacaggcaugug

SEQ ID NO: 570357 - RNA, 21 nt, Human
ugggauuacaggcaugugcca

SEQ ID NO: 570358 - RNA, 22 nt, Human
ugggauuacaggcaugugccac

SEQ ID NO: 570359 - RNA, 24 nt, Human
ugggauuacaggcaugugccacca

SEQ ID NO: 570360 - RNA, 18 nt, Human
ugggauuacaggugugag

SEQ ID NO: 570361 - RNA, 19 nt, Human
ugggauuacaggugugagc

SEQ ID NO: 570362 - RNA, 22 nt, Human
ugggauuacaggugugagccac

SEQ ID NO: 570363 - RNA, 23 nt, Human
ugggauuacaggugugagccacc

SEQ ID NO: 570364 - RNA, 24 nt, Human
ugggauuacaggugugagccacca

SEQ ID NO: 570365 - RNA, 19 nt, Human
ugucguccaggcuggagug

SEQ ID NO: 570366 - RNA, 18 nt, Human
ugucuagagaaaaugaaa

SEQ ID NO: 570367 - RNA, 21 nt, Human
ugugagccaccacgcccggcc

SEQ ID NO: 570368 - RNA, 24 nt, Human
uuaguagagacaggguuucaccau

SEQ ID NO: 570369 - RNA, 21 nt, Human
uucauggaaaaaugucuuuuu

SEQ ID NO: 570370 - RNA, 24 nt, Human
uuucaccauguuggccaggcuggu

SEQ ID NO: 570371 - RNA, 24 nt, Human
uuuuuaguagagacaggguuucac

SEQ ID NO: 570372 - RNA, 20 nt, Human
uuuuuguauuuuuaguagag

SEQ ID NO: 570373 - RNA, 20 nt, Human
aacccaguucugccuaguga

SEQ ID NO: 570374 - RNA, 24 nt, Human
aagagccuggagaaggucugaaac

SEQ ID NO: 570375 - RNA, 24 nt, Human
acaaagcaucaaacccaguucugc

SEQ ID NO: 570376 - RNA, 25 nt, Human
accuuccugagacauacuuucguca

SEQ ID NO: 570377 - RNA, 23 nt, Human
agaaaauguacagacauaaguau

SEQ ID NO: 570378 - RNA, 22 nt, Human
augcacaaaugugcuuuuaauu

SEQ ID NO: 570379 - RNA, 21 nt, Human
cauagcuccucuggccagcua

SEQ ID NO: 570380 - RNA, 24 nt, Human
cauccugugagagcuccuaagagc

SEQ ID NO: 570381 - RNA, 18 nt, Human
ccuccuugaaaagagccu

SEQ ID NO: 570382 - RNA, 22 nt, Human
ccucuggccagcuacuuaauuc

SEQ ID NO: 570383 - RNA, 19 nt, Human
cuccuaagagcugcaccau

SEQ ID NO: 570384 - RNA, 22 nt, Human
cuggcuugacugguuaauucau

SEQ ID NO: 570385 - RNA, 18 nt, Human
gaaaagagccuggagaag

SEQ ID NO: 570386 - RNA, 21 nt, Human
gagaaggucugaaacuuacaa

SEQ ID NO: 570387 - RNA, 23 nt, Human
gagacaaugagaggagucggggc

SEQ ID NO: 570388 - RNA, 19 nt, Human
gcacagauaugcugaacac

SEQ ID NO: 570389 - RNA, 21 nt, Human
ggcuugacaguccucuggcuu

SEQ ID NO: 570390 - RNA, 18 nt, Human
guaaaauauuccuuagag

SEQ ID NO: 570391 - RNA, 24 nt, Human
uauaugaaggacugaggaggggag

SEQ ID NO: 570392 - RNA, 23 nt, Human
ugaaaagagccuggagaaggucc

SEQ ID NO: 570393 - RNA, 25 nt, Human
ugacaaagcaucaaacccaguucug

SEQ ID NO: 570394 - RNA, 21 nt, Human
ugcugaacacauccugugaga

SEQ ID NO: 570395 - RNA, 21 nt, Human
ugugagagcuccuaagagcug

SEQ ID NO: 570396 - RNA, 24 nt, Human
uugacaguccucuggcuugacugg

SEQ ID NO: 570397 - RNA, 20 nt, Human
uuggcuugacaguccucugg

SEQ ID NO: 570398 - RNA, 19 nt, Human
acagaccccagcuccagcc

SEQ ID NO: 570399 - RNA, 18 nt, Human
acccgcaccacaagacau

SEQ ID NO: 570400 - RNA, 21 nt, Human
accugggucuggcccuggcag

SEQ ID NO: 570401 - RNA, 24 nt, Human
agacggaaaaugcaucucccaaga

SEQ ID NO: 570402 - RNA, 21 nt, Human
agcacccacccucacaguggc

SEQ ID NO: 570403 - RNA, 19 nt, Human
agccagugccuacaacagg

SEQ ID NO: 570404 - RNA, 18 nt, Human
agcccaguccccacccag

SEQ ID NO: 570405 - RNA, 26 nt, Human
agccucacccucccccugugagccag

SEQ ID NO: 570406 - RNA, 20 nt, Human
aggaaggaggccugccccuu

SEQ ID NO: 570407 - RNA, 19 nt, Human
aggcaggggugggaggggu

SEQ ID NO: 570408 - RNA, 22 nt, Human
aggcgcccccucaccuggcucu

SEQ ID NO: 570409 - RNA, 24 nt, Human
cacagcccaguccccacccaggag

SEQ ID NO: 570410 - RNA, 22 nt, Human
cacccacccucacaguggccug

SEQ ID NO: 570411 - RNA, 18 nt, Human
caccugccuggcuccugc

SEQ ID NO: 570412 - RNA, 18 nt, Human
caggggccggcaaggcag

SEQ ID NO: 570413 - RNA, 18 nt, Human
caggggccggcaaggcag

SEQ ID NO: 570414 - RNA, 24 nt, Human
caggggccggcaaggcaggggugg

SEQ ID NO: 570415 - RNA, 19 nt, Human
cauccugggggacagaggc

SEQ ID NO: 570416 - RNA, 20 nt, Human
cauccugggggacagaggcu

SEQ ID NO: 570417 - RNA, 20 nt, Human
ccaccugggucuggcccugg

SEQ ID NO: 570418 - RNA, 22 nt, Human
ccaccugggucuggcccuggca

SEQ ID NO: 570419 - RNA, 23 nt, Human
ccccaccugggucuggcccuggc

SEQ ID NO: 570420 - RNA, 21 nt, Human
ccccagcuccagccacaggcu

SEQ ID NO: 570421 - RNA, 22 nt, Human
cccccugugagccagacggaaa

SEQ ID NO: 570422 - RNA, 19 nt, Human
cccgcaccacaagacaucc

SEQ ID NO: 570423 - RNA, 20 nt, Human
cccgcaccacaagacauccu

SEQ ID NO: 570424 - RNA, 24 nt, Human
cccgcaccacaagacauccugggg

SEQ ID NO: 570425 - RNA, 21 nt, Human
cccucacaguggccugggcag

SEQ ID NO: 570426 - RNA, 20 nt, Human
cccucaccuggcucugcugu

SEQ ID NO: 570427 - RNA, 18 nt, Human
cccucccuagccagugcc

SEQ ID NO: 570428 - RNA, 19 nt, Human
cccuccucccuccucucuc

SEQ ID NO: 570429 - RNA, 20 nt, Human
cccugggcacagcccagucc

SEQ ID NO: 570430 - RNA, 18 nt, Human
ccgccagguucccuccuc

SEQ ID NO: 570431 - RNA, 24 nt, Human
ccgccgccgccgcuaccgccgccg

SEQ ID NO: 570432 - RNA, 18 nt, Human
ccgccgcuaccgccgccg

SEQ ID NO: 570433 - RNA, 20 nt, Human
ccgccgcuaccgccgccggg

SEQ ID NO: 570434 - RNA, 21 nt, Human
ccucacaguggccugggcagg

SEQ ID NO: 570435 - RNA, 24 nt, Human
ccucacaguggccugggcaggggc

SEQ ID NO: 570436 - RNA, 25 nt, Human
ccucacccucccccugugagccaga

SEQ ID NO: 570437 - RNA, 18 nt, Human
ccuccucccuccucucuc

SEQ ID NO: 570438 - RNA, 19 nt, Human
ccuccucucucagggucac

SEQ ID NO: 570439 - RNA, 22 nt, Human
ccuggcaggcgcccccucaccu

SEQ ID NO: 570440 - RNA, 19 nt, Human
cgagaacaaagacaucacc

SEQ ID NO: 570441 - RNA, 20 nt, Human
cggcugggagcagccuccac

SEQ ID NO: 570442 - RNA, 21 nt, Human
cggcugggagcagccuccacg

SEQ ID NO: 570443 - RNA, 22 nt, Human
cucacccucccccugugagcca

SEQ ID NO: 570444 - RNA, 22 nt, Human
cucagggucaccagugugugaa

SEQ ID NO: 570445 - RNA, 19 nt, Human
cugccuggcuccugcugcc

SEQ ID NO: 570446 - RNA, 18 nt, Human
gagaacaaagacaucacc

SEQ ID NO: 570447 - RNA, 21 nt, Human
gagaacaaagacaucaccugc

SEQ ID NO: 570448 - RNA, 20 nt, Human
gagccgguuuuuuuuuuuuu

SEQ ID NO: 570449 - RNA, 19 nt, Human
gcaaagccucacccucccc

SEQ ID NO: 570450 - RNA, 20 nt, Human
gcaaagccucacccuccccc

SEQ ID NO: 570451 - RNA, 22 nt, Human
gcagaacggccgacccgcacca

SEQ ID NO: 570452 - RNA, 22 nt, Human
gcccugggcacagcccaguccc

SEQ ID NO: 570453 - RNA, 21 nt, Human
gcuguggaucucccuguggac

SEQ ID NO: 570454 - RNA, 22 nt, Human
gggcaggggcuggggugcaaag

SEQ ID NO: 570455 - RNA, 22 nt, Human
gggccggcaaggcagggguggg

SEQ ID NO: 570456 - RNA, 24 nt, Human
guggccugggcaggggcuggggug

SEQ ID NO: 570457 - RNA, 22 nt, Human
uagguaaacagaccccagcucc

SEQ ID NO: 570458 - RNA, 20 nt, Human
ucacaguggccugggcaggg

SEQ ID NO: 570459 - RNA, 22 nt, Human
uccccacccaggagcauauccu

SEQ ID NO: 570460 - RNA, 24 nt, Human
ucucucagggucaccaguguguga

SEQ ID NO: 570461 - RNA, 22 nt, Human
ucugcugugggagccgagaaca

SEQ ID NO: 570462 - RNA, 18 nt, Human
uggcccuggcaggcgccc

SEQ ID NO: 570463 - RNA, 24 nt, Human
uggccugggcaggggcuggggugc

SEQ ID NO: 570464 - RNA, 21 nt, Human
ugggcaggggcuggggugcaa

SEQ ID NO: 570465 - RNA, 20 nt, Human
ugggggacagaggcccuggg

SEQ ID NO: 570466 - RNA, 22 nt, Human
uucccuccucccuccucucuca

SEQ ID NO: 570467 - RNA, 21 nt, Human
aaaaacaaaugauccaaccca

SEQ ID NO: 570468 - RNA, 20 nt, Human
aaaaggaaacaaaaggaaca

SEQ ID NO: 570469 - RNA, 24 nt, Human
aaaauacaacaaaaaaagcugcug

SEQ ID NO: 570470 - RNA, 19 nt, Human
aaacagaacagaaacuuga

SEQ ID NO: 570471 - RNA, 21 nt, Human
aaacaggugcagaggaccaga

SEQ ID NO: 570472 - RNA, 22 nt, Human
aaaccauagaaaucucagguua

SEQ ID NO: 570473 - RNA, 24 nt, Human
aacaaacgagucauacaaaagaaa

SEQ ID NO: 570474 - RNA, 19 nt, Human
aacauggugaaaccccauc

SEQ ID NO: 570475 - RNA, 20 nt, Human
aacauggugaaaccccaucu

SEQ ID NO: 570476 - RNA, 20 nt, Human
aacauggugaaaccccaucu

SEQ ID NO: 570477 - RNA, 21 nt, Human
aacauggugaaaccccaucuc

SEQ ID NO: 570478 - RNA, 22 nt, Human
aaccccagaaauauacaaaaca

SEQ ID NO: 570479 - RNA, 24 nt, Human
aaccuggccaacauggugaaaccc

SEQ ID NO: 570480 - RNA, 23 nt, Human
aagaacaaacgagucauacaaaa

SEQ ID NO: 570481 - RNA, 23 nt, Human
aagaggcugaggcaggagaauca

SEQ ID NO: 570482 - RNA, 21 nt, Human
aagcagaaucguaaagccaag

SEQ ID NO: 570483 - RNA, 25 nt, Human
aaggaaacaaaaggaacaauacaca

SEQ ID NO: 570484 - RNA, 23 nt, Human
aaggaaacagaacagaaacuuga

SEQ ID NO: 570485 - RNA, 19 nt, Human
aaguacacaaaaaaaauua

SEQ ID NO: 570486 - RNA, 18 nt, Human
aauaacaaaacaauguug

SEQ ID NO: 570487 - RNA, 24 nt, Human
aaucauuugaacccaggaggcgga

SEQ ID NO: 570488 - RNA, 24 nt, Human
aaucauuugaacccaggaggcgga

SEQ ID NO: 570489 - RNA, 22 nt, Human
acaaagcaacaggcacugcuag

SEQ ID NO: 570490 - RNA, 23 nt, Human
acaaagcaacaggcacugcuagg

SEQ ID NO: 570491 - RNA, 24 nt, Human
acaaagcaacaggcacugcuaggg

SEQ ID NO: 570492 - RNA, 25 nt, Human
acaaagcaacaggcacugcuagggg

SEQ ID NO: 570493 - RNA, 24 nt, Human
acaacaaaaaaagcugcugcugaa

SEQ ID NO: 570494 - RNA, 22 nt, Human
accacugcacuccagccugggc

SEQ ID NO: 570495 - RNA, 24 nt, Human
accccaucucuacuaaaaauacaa

SEQ ID NO: 570496 - RNA, 20 nt, Human
accgcagaauccaacucucc

SEQ ID NO: 570497 - RNA, 22 nt, Human
acuccagccugggcaacaguga

SEQ ID NO: 570498 - RNA, 24 nt, Human
acugcacuccagccugggcaacag

SEQ ID NO: 570499 - RNA, 22 nt, Human
agaaaggaaggaaacagaacag

SEQ ID NO: 570500 - RNA, 21 nt, Human
agaaucguaaagccaaggaca

SEQ ID NO: 570501 - RNA, 18 nt, Human
agagucucuaucuccacu

SEQ ID NO: 570502 - RNA, 24 nt, Human
agcauuuugggaggcugaggaggg

SEQ ID NO: 570503 - RNA, 22 nt, Human
agcgggaagcaaccuuaaacau

SEQ ID NO: 570504 - RNA, 23 nt, Human
agcugggugugguggcaggugcc

SEQ ID NO: 570505 - RNA, 19 nt, Human
aggaaggaaacagaacaga

SEQ ID NO: 570506 - RNA, 24 nt, Human
aggaggcggagauugcacugaacu

SEQ ID NO: 570507 - RNA, 23 nt, Human
aggagggugaucacuugagucca

SEQ ID NO: 570508 - RNA, 20 nt, Human
aggaguuugagaccaaccug

SEQ ID NO: 570509 - RNA, 25 nt, Human
aggauaagugaaaaacagaucuguu

SEQ ID NO: 570510 - RNA, 18 nt, Human
aggcaggagaaucauuug

SEQ ID NO: 570511 - RNA, 23 nt, Human
aggcaggagaaucauuugaaccc

SEQ ID NO: 570512 - RNA, 24 nt, Human
aggcaggagaaucauuugaaccca

SEQ ID NO: 570513 - RNA, 20 nt, Human
aggcggagauugcacugaac

SEQ ID NO: 570514 - RNA, 24 nt, Human
aggcggagauugcacugaacugag

SEQ ID NO: 570515 - RNA, 20 nt, Human
aggcugaggcaggagaauca

SEQ ID NO: 570516 - RNA, 24 nt, Human
aggcugaggcaggagaaucauuug

SEQ ID NO: 570517 - RNA, 24 nt, Human
aggggcucaugcccauagucccag

SEQ ID NO: 570518 - RNA, 21 nt, Human
agucugcauggcccauaaaca

SEQ ID NO: 570519 - RNA, 24 nt, Human
auugcaccacugcacuccagccug

SEQ ID NO: 570520 - RNA, 28 nt, Human
auugcaccacugcacuccagccugggca

SEQ ID NO: 570521 - RNA, 21 nt, Human
auugcacugaacugagauugc

SEQ ID NO: 570522 - RNA, 18 nt, Human
caacaaacuuuccucccu

SEQ ID NO: 570523 - RNA, 24 nt, Human
caacauggugaaaccccaucucua

SEQ ID NO: 570524 - RNA, 23 nt, Human
caacccauaccaccaacuaauaa

SEQ ID NO: 570525 - RNA, 27 nt, Human
caacccauaccaccaacuaauaaagaa

SEQ ID NO: 570526 - RNA, 21 nt, Human
caacuaccauuuuacucaagu

SEQ ID NO: 570527 - RNA, 18 nt, Human
caccaacaaccaacggcg

SEQ ID NO: 570528 - RNA, 23 nt, Human
caccaacaaccaacggcgggggc

SEQ ID NO: 570529 - RNA, 24 nt, Human
caccccaccagucugcauggccca

SEQ ID NO: 570530 - RNA, 20 nt, Human
cacuccagccugggcaacag

SEQ ID NO: 570531 - RNA, 21 nt, Human
cacuccagccugggcaacagu

SEQ ID NO: 570532 - RNA, 22 nt, Human
cacuccagccugggcaacagug

SEQ ID NO: 570533 - RNA, 18 nt, Human
cacugcacuccagccugg

SEQ ID NO: 570534 - RNA, 19 nt, Human
cacugcacuccagccuggg

SEQ ID NO: 570535 - RNA, 21 nt, Human
cacugcacuccagccugggca

SEQ ID NO: 570536 - RNA, 23 nt, Human
cacugcacuccagccugggcaac

SEQ ID NO: 570537 - RNA, 24 nt, Human
cacugcacuccagccugggcaaca

SEQ ID NO: 570538 - RNA, 25 nt, Human
cacugcacuccagccugggcaacaa

SEQ ID NO: 570539 - RNA, 25 nt, Human
cacugcacuccagccugggcaacag

SEQ ID NO: 570540 - RNA, 19 nt, Human
cacugcuaggggucuuagg

SEQ ID NO: 570541 - RNA, 21 nt, Human
cagaacagaaacuugacccau

SEQ ID NO: 570542 - RNA, 19 nt, Human
cagcagcaccgcagaaucc

SEQ ID NO: 570543 - RNA, 22 nt, Human
cagcagcaccgcagaauccaac

SEQ ID NO: 570544 - RNA, 23 nt, Human
cagcauuuugggaggcugaggag

SEQ ID NO: 570545 - RNA, 24 nt, Human
cagcauuuugggaggcugaggagg

SEQ ID NO: 570546 - RNA, 24 nt, Human
caugcccauagucccagcauuuug

SEQ ID NO: 570547 - RNA, 18 nt, Human
cauggcccauaaacaggu

SEQ ID NO: 570548 - RNA, 18 nt, Human
ccaacuaauaaagaacaa

SEQ ID NO: 570549 - RNA, 18 nt, Human
ccacucacaaagcaacag

SEQ ID NO: 570550 - RNA, 20 nt, Human
ccacugcacuccagccuggg

SEQ ID NO: 570551 - RNA, 21 nt, Human
ccacugcacuccagccugggc

SEQ ID NO: 570552 - RNA, 23 nt, Human
ccacugcacuccagccugggcaa

SEQ ID NO: 570553 - RNA, 24 nt, Human
ccacugcacuccagccugggcaac

SEQ ID NO: 570554 - RNA, 18 nt, Human
ccauaaacaggugcagag

SEQ ID NO: 570555 - RNA, 24 nt, Human
cccuugcuuuaacauuuuugagga

SEQ ID NO: 570556 - RNA, 23 nt, Human
ccuggccaacauggugaaacccc

SEQ ID NO: 570557 - RNA, 24 nt, Human
ccuggccaacauggugaaacccca

SEQ ID NO: 570558 - RNA, 22 nt, Human
ccuguaccuagcuacucaagag

SEQ ID NO: 570559 - RNA, 24 nt, Human
cucaugcccauagucccagcauuu

SEQ ID NO: 570560 - RNA, 23 nt, Human
cuggccaacauggugaaacccca

SEQ ID NO: 570561 - RNA, 18 nt, Human
cuuaaacauuuuaaaccc

SEQ ID NO: 570562 - RNA, 20 nt, Human
gagaacuuugaaaaauauug

SEQ ID NO: 570563 - RNA, 23 nt, Human
gagaaucauuugaacccaggagg

SEQ ID NO: 570564 - RNA, 18 nt, Human
gagagaagaacaucuugc

SEQ ID NO: 570565 - RNA, 23 nt, Human
gagauugcaccacugcacuccag

SEQ ID NO: 570566 - RNA, 23 nt, Human
gagauugcacugaacugagauug

SEQ ID NO: 570567 - RNA, 21 nt, Human
gaggcugaggagggugaucac

SEQ ID NO: 570568 - RNA, 21 nt, Human
gaucacuugaguccaggaguu

SEQ ID NO: 570569 - RNA, 24 nt, Human
gaucacuugaguccaggaguuuga

SEQ ID NO: 570570 - RNA, 22 nt, Human
gcaggagaaucauuugaaccca

SEQ ID NO: 570571 - RNA, 24 nt, Human
gccaacauggugaaaccccaucuc

SEQ ID NO: 570572 - RNA, 20 nt, Human
gcugaagucaugucuauuuu

SEQ ID NO: 570573 - RNA, 22 nt, Human
gcuguugaaggucaggcgcagg

SEQ ID NO: 570574 - RNA, 19 nt, Human
ggaauuaacagccuuucuu

SEQ ID NO: 570575 - RNA, 22 nt, Human
ggagauugcacugaacugagau

SEQ ID NO: 570576 - RNA, 24 nt, Human
ggagauugcacugaacugagauug

SEQ ID NO: 570577 - RNA, 18 nt, Human
ggauaagugaaaaacaga

SEQ ID NO: 570578 - RNA, 21 nt, Human
ggcgggggcgggcaggagaga

SEQ ID NO: 570579 - RNA, 21 nt, Human
gggcaaaaaaaaagauccccu

SEQ ID NO: 570580 - RNA, 20 nt, Human
gggcaggagagaagaacauc

SEQ ID NO: 570581 - RNA, 24 nt, Human
gggcucaugcccauagucccagca

SEQ ID NO: 570582 - RNA, 22 nt, Human
guaauaacaaaacaauguugga

SEQ ID NO: 570583 - RNA, 22 nt, Human
gugaaaaacagaucuguuccca

SEQ ID NO: 570584 - RNA, 23 nt, Human
uaaagaacaaacgagucauacaa

SEQ ID NO: 570585 - RNA, 24 nt, Human
uaaagaacaaacgagucauacaaa

SEQ ID NO: 570586 - RNA, 25 nt, Human
uaaagaacaaacgagucauacaaaa

SEQ ID NO: 570587 - RNA, 25 nt, Human
uaagugaaauaauacaaagucccuu

SEQ ID NO: 570588 - RNA, 26 nt, Human
uaauaaagaacaaacgagucauacaa

SEQ ID NO: 570589 - RNA, 24 nt, Human
uaccaccaacuaauaaagaacaaa

SEQ ID NO: 570590 - RNA, 21 nt, Human
uaccuaaguaguuuuaaaaac

SEQ ID NO: 570591 - RNA, 23 nt, Human
uaccuaaguaguuuuaaaaacaa

SEQ ID NO: 570592 - RNA, 18 nt, Human
uaccuagcuacucaagag

SEQ ID NO: 570593 - RNA, 18 nt, Human
uagaaaggaaggaaacag

SEQ ID NO: 570594 - RNA, 24 nt, Human
uagcuacucaagaggcugaggcag

SEQ ID NO: 570595 - RNA, 22 nt, Human
uaugugcagcuuuuuguaugug

SEQ ID NO: 570596 - RNA, 19 nt, Human
uauuuuacauacacaucuu

SEQ ID NO: 570597 - RNA, 19 nt, Human
ucacuugaguccaggaguu

SEQ ID NO: 570598 - RNA, 21 nt, Human
ucagcagcaccgcagaaucca

SEQ ID NO: 570599 - RNA, 20 nt, Human
ucaugcccauagucccagca

SEQ ID NO: 570600 - RNA, 22 nt, Human
uccagccugggcaacagugaga

SEQ ID NO: 570601 - RNA, 18 nt, Human
uccccuacuuguaauaac

SEQ ID NO: 570602 - RNA, 22 nt, Human
ucucaaaauacaacaaaaaaag

SEQ ID NO: 570603 - RNA, 22 nt, Human
ucucuacuaaaaauacaaaaaa

SEQ ID NO: 570604 - RNA, 21 nt, Human
ucuuaggcuaacaucugccac

SEQ ID NO: 570605 - RNA, 19 nt, Human
ugaaaccccaucucuacua

SEQ ID NO: 570606 - RNA, 24 nt, Human
ugagaccaaccuggccaacauggu

SEQ ID NO: 570607 - RNA, 20 nt, Human
ugaggcaggagaaucauuug

SEQ ID NO: 570608 - RNA, 24 nt, Human
ugaggcaggagaaucauuugaacc

SEQ ID NO: 570609 - RNA, 25 nt, Human
ugaggcaggagaaucauuugaaccc

SEQ ID NO: 570610 - RNA, 19 nt, Human
ugaguuaagaacacuaaca

SEQ ID NO: 570611 - RNA, 23 nt, Human
ugaucacuugaguccaggaguuu

SEQ ID NO: 570612 - RNA, 21 nt, Human
ugcaccacugcacuccagccu

SEQ ID NO: 570613 - RNA, 24 nt, Human
uggccaacauggugaaaccccauc

SEQ ID NO: 570614 - RNA, 19 nt, Human
ugggaggcugaggagggug

SEQ ID NO: 570615 - RNA, 23 nt, Human
ugggaggcugaggagggugauca

SEQ ID NO: 570616 - RNA, 22 nt, Human
ugugguggcaggugccuguacc

SEQ ID NO: 570617 - RNA, 24 nt, Human
uuagcugggugugguggcaggugc

SEQ ID NO: 570618 - RNA, 22 nt, Human
uugaguccaggaguuugagacc

SEQ ID NO: 570619 - RNA, 23 nt, Human
uugcaccacugcacuccagccug

SEQ ID NO: 570620 - RNA, 21 nt, Human
uuggaaugaagcagcuccuaa

SEQ ID NO: 570621 - RNA, 21 nt, Human
uuuaggaaguacacaaaaaaa

SEQ ID NO: 570622 - RNA, 19 nt, Human
uuucuacauauuaacuaca

SEQ ID NO: 570623 - RNA, 20 nt, Human
aaaagccagccccagcuacc

SEQ ID NO: 570624 - RNA, 18 nt, Human
aaauauuaaaaguagcuu

SEQ ID NO: 570625 - RNA, 21 nt, Human
aagaacaggagggacagaggc

SEQ ID NO: 570626 - RNA, 18 nt, Human
aagcagcgccggacaaga

SEQ ID NO: 570627 - RNA, 25 nt, Human
aagccagccccagcuaccgcgccua

SEQ ID NO: 570628 - RNA, 19 nt, Human
agaaggcugcccgcgcccc

SEQ ID NO: 570629 - RNA, 22 nt, Human
agcaacaaaacaugacaauuau

SEQ ID NO: 570630 - RNA, 22 nt, Human
aggagggacagaggcuucgggc

SEQ ID NO: 570631 - RNA, 20 nt, Human
caaaauacagaaauauucug

SEQ ID NO: 570632 - RNA, 24 nt, Human
caaaauacagaaauauucugugca

SEQ ID NO: 570633 - RNA, 21 nt, Human
cacaauagcaacaaaacauga

SEQ ID NO: 570634 - RNA, 23 nt, Human
caggccuccgacccagucagaag

SEQ ID NO: 570635 - RNA, 19 nt, Human
cccucaaaagccagcccca

SEQ ID NO: 570636 - RNA, 20 nt, Human
cccucaaaagccagccccag

SEQ ID NO: 570637 - RNA, 23 nt, Human
ccgcgccccucaaaagccagccc

SEQ ID NO: 570638 - RNA, 18 nt, Human
cggaggggcuaagcagcg

SEQ ID NO: 570639 - RNA, 18 nt, Human
cuuucugcccagcuucuc

SEQ ID NO: 570640 - RNA, 24 nt, Human
gaacaggagggacagaggcuucgg

SEQ ID NO: 570641 - RNA, 21 nt, Human
gacaagaacaggagggacaga

SEQ ID NO: 570642 - RNA, 25 nt, Human
uaauucaucacaguauacuuauuuc

SEQ ID NO: 570643 - RNA, 22 nt, Human
uaucaaguaaaagaauuaaaua

SEQ ID NO: 570644 - RNA, 19 nt, Human
ugacuacgcggaggggcua

SEQ ID NO: 570645 - RNA, 19 nt, Human
ugcccgcgccccucaaaag

SEQ ID NO: 570646 - RNA, 21 nt, Human
ugugcaauaaauuuguuguca

SEQ ID NO: 570647 - RNA, 19 nt, Human
aaaaaacaaguagaaaaau

SEQ ID NO: 570648 - RNA, 21 nt, Human
aaaaacgacuaacuuucaccc

SEQ ID NO: 570649 - RNA, 20 nt, Human
aaaagaagaccaaaaacgaa

SEQ ID NO: 570650 - RNA, 22 nt, Human
aaaagcaagcucaacggacaca

SEQ ID NO: 570651 - RNA, 19 nt, Human
aaacaaaagucugaaacaa

SEQ ID NO: 570652 - RNA, 26 nt, Human
aaacaaaagucugaaacaaucuuaau

SEQ ID NO: 570653 - RNA, 25 nt, Human
aaacaccacccaucauagcacaaau

SEQ ID NO: 570654 - RNA, 26 nt, Human
aaaucaaugugcauuucugaagcuag

SEQ ID NO: 570655 - RNA, 18 nt, Human
aacaaaagucugaaacaa

SEQ ID NO: 570656 - RNA, 23 nt, Human
aaccaaaagugaaagaugauaaa

SEQ ID NO: 570657 - RNA, 24 nt, Human
aagauguuuaaaaacagaggaaaa

SEQ ID NO: 570658 - RNA, 18 nt, Human
aagcacacaaacaaaagu

SEQ ID NO: 570659 - RNA, 25 nt, Human
aagcaggagacaaaauucacuaagg

SEQ ID NO: 570660 - RNA, 20 nt, Human
aagccgacaucucugagucc

SEQ ID NO: 570661 - RNA, 24 nt, Human
aaucaaaaaugaaaagaagaccaa

SEQ ID NO: 570662 - RNA, 18 nt, Human
acacaaacaacugugucc

SEQ ID NO: 570663 - RNA, 20 nt, Human
acaccacuguauuccagucu

SEQ ID NO: 570664 - RNA, 24 nt, Human
acaccacuguauuccagucugggc

SEQ ID NO: 570665 - RNA, 23 nt, Human
accacuguauuccagucugggca

SEQ ID NO: 570666 - RNA, 24 nt, Human
accacuguauuccagucugggcaa

SEQ ID NO: 570667 - RNA, 23 nt, Human
acuaagggaacucacucaaaugg

SEQ ID NO: 570668 - RNA, 24 nt, Human
acuccccuucccaccccaauagac

SEQ ID NO: 570669 - RNA, 22 nt, Human
acuguauuccagucugggcaag

SEQ ID NO: 570670 - RNA, 24 nt, Human
acuguauuccagucugggcaagag

SEQ ID NO: 570671 - RNA, 24 nt, Human
agcacacaaacaaaagucugaaac

SEQ ID NO: 570672 - RNA, 19 nt, Human
agcaggagacaaaauucac

SEQ ID NO: 570673 - RNA, 22 nt, Human
agguugaggcugcagugagccg

SEQ ID NO: 570674 - RNA, 18 nt, Human
auaaaacaccauuggaua

SEQ ID NO: 570675 - RNA, 21 nt, Human
auaccuaagauguuuaaaaac

SEQ ID NO: 570676 - RNA, 27 nt, Human
auagaacagugauuguuacaaacacca

SEQ ID NO: 570677 - RNA, 19 nt, Human
aucuggaaacaaggguugu

SEQ ID NO: 570678 - RNA, 24 nt, Human
augcuuuuugaaagaccuguucuc

SEQ ID NO: 570679 - RNA, 20 nt, Human
augugcauuucugaagcuag

SEQ ID NO: 570680 - RNA, 25 nt, Human
auuuuggugcuuuuucaaggugaaa

SEQ ID NO: 570681 - RNA, 24 nt, Human
caaaugacuuaguaaucuaauaug

SEQ ID NO: 570682 - RNA, 18 nt, Human
caacagugccccagagca

SEQ ID NO: 570683 - RNA, 25 nt, Human
caauccccaggucagcaucuuuaau

SEQ ID NO: 570684 - RNA, 24 nt, Human
cacacaaacaaaagucugaaacaa

SEQ ID NO: 570685 - RNA, 21 nt, Human
cacaccacuguauuccagucu

SEQ ID NO: 570686 - RNA, 19 nt, Human
cacauccucaacagugccc

SEQ ID NO: 570687 - RNA, 23 nt, Human
caccacccaucauagcacaaauc

SEQ ID NO: 570688 - RNA, 19 nt, Human
caccggcagcgaagaggag

SEQ ID NO: 570689 - RNA, 20 nt, Human
cacuccccuucccaccccaa

SEQ ID NO: 570690 - RNA, 22 nt, Human
cacuguauuccagucugggcaa

SEQ ID NO: 570691 - RNA, 22 nt, Human
cacuguauuccagucugggcaa

SEQ ID NO: 570692 - RNA, 23 nt, Human
cacuguauuccagucugggcaag

SEQ ID NO: 570693 - RNA, 24 nt, Human
caggcuccagguucagaagagaga

SEQ ID NO: 570694 - RNA, 22 nt, Human
caguucaaauaaacuacugucu

SEQ ID NO: 570695 - RNA, 22 nt, Human
cauaaccaguucaaauaaacua

SEQ ID NO: 570696 - RNA, 22 nt, Human
caucaacgcaagcacacaaaca

SEQ ID NO: 570697 - RNA, 23 nt, Human
caucaacgcaagcacacaaacaa

SEQ ID NO: 570698 - RNA, 21 nt, Human
ccaaaagugaaagaugauaaa

SEQ ID NO: 570699 - RNA, 21 nt, Human
ccacuguauuccagucugggc

SEQ ID NO: 570700 - RNA, 24 nt, Human
ccacuguauuccagucugggcaag

SEQ ID NO: 570701 - RNA, 18 nt, Human
cccaccggcagcgaagag

SEQ ID NO: 570702 - RNA, 18 nt, Human
cccaggagaguugcugcc

SEQ ID NO: 570703 - RNA, 25 nt, Human
ccccaggucagcaucuuuaauucac

SEQ ID NO: 570704 - RNA, 24 nt, Human
cccuucccaccccaauagacacaa

SEQ ID NO: 570705 - RNA, 21 nt, Human
ccgcagggaucuccgaagcuc

SEQ ID NO: 570706 - RNA, 18 nt, Human
cggugcccaccggcagcg

SEQ ID NO: 570707 - RNA, 21 nt, Human
cuacacaaacaacuguguccc

SEQ ID NO: 570708 - RNA, 22 nt, Human
cuauaaauaagccgacaucucu

SEQ ID NO: 570709 - RNA, 24 nt, Human
cucaaauggaaaugaguucaugga

SEQ ID NO: 570710 - RNA, 20 nt, Human
cucaagaaaagccguacacc

SEQ ID NO: 570711 - RNA, 24 nt, Human
cuccauucaucucacaauucccca

SEQ ID NO: 570712 - RNA, 18 nt, Human
cugaagcuaguaagaaaa

SEQ ID NO: 570713 - RNA, 19 nt, Human
cuggaaacaaggguuguuu

SEQ ID NO: 570714 - RNA, 21 nt, Human
gaacacucuuacaucccaaag

SEQ ID NO: 570715 - RNA, 21 nt, Human
gcaaagcaaaacauugcucuu

SEQ ID NO: 570716 - RNA, 21 nt, Human
gcaacuaaggcagcacuuaac

SEQ ID NO: 570717 - RNA, 25 nt, Human
gcacacaaacaaaagucugaaacaa

SEQ ID NO: 570718 - RNA, 21 nt, Human
gcuuuuugaaagaccuguucu

SEQ ID NO: 570719 - RNA, 21 nt, Human
gggggcuggggcuccuaggcc

SEQ ID NO: 570720 - RNA, 24 nt, Human
ggucaagaaaagggggcuggggcu

SEQ ID NO: 570721 - RNA, 18 nt, Human
gucaagaaaagggggcug

SEQ ID NO: 570722 - RNA, 24 nt, Human
guccaggagguugaggcugcagug

SEQ ID NO: 570723 - RNA, 21 nt, Human
guuacuuuguuuauuaacaug

SEQ ID NO: 570724 - RNA, 19 nt, Human
uaaaaacagaggaaaacca

SEQ ID NO: 570725 - RNA, 22 nt, Human
uaaaguagauaaagcaaauucc

SEQ ID NO: 570726 - RNA, 24 nt, Human
uacauaaauacagcuuacauacua

SEQ ID NO: 570727 - RNA, 23 nt, Human
uacuaaacuagcaacuaaggcag

SEQ ID NO: 570728 - RNA, 21 nt, Human
uagaacagugauuguuacaaa

SEQ ID NO: 570729 - RNA, 23 nt, Human
uagaacgaauucuaaccgacuaa

SEQ ID NO: 570730 - RNA, 21 nt, Human
uagcacaaaucaaugugcauu

SEQ ID NO: 570731 - RNA, 21 nt, Human
uagcaugucuucacccacuug

SEQ ID NO: 570732 - RNA, 24 nt, Human
uaguaguuguagcaugucuucacc

SEQ ID NO: 570733 - RNA, 18 nt, Human
ucaaauggaaaugaguuc

SEQ ID NO: 570734 - RNA, 23 nt, Human
ucaaauuucuuucauuaucaacu

SEQ ID NO: 570735 - RNA, 19 nt, Human
ucaacgcaagcacacaaac

SEQ ID NO: 570736 - RNA, 21 nt, Human
ucaacggacacacaugaugaa

SEQ ID NO: 570737 - RNA, 21 nt, Human
ucaagaaaagggggcuggggc

SEQ ID NO: 570738 - RNA, 23 nt, Human
ucacaccacuguauuccagucug

SEQ ID NO: 570739 - RNA, 20 nt, Human
ucacucaaauggaaaugagu

SEQ ID NO: 570740 - RNA, 23 nt, Human
ucagaagauuguugauacguggc

SEQ ID NO: 570741 - RNA, 23 nt, Human
uccagcccaaauuuacgaaaggu

SEQ ID NO: 570742 - RNA, 21 nt, Human
uccauaaccaguucaaauaaa

SEQ ID NO: 570743 - RNA, 24 nt, Human
uccauuauuacauuagaugaaaaa

SEQ ID NO: 570744 - RNA, 21 nt, Human
ucccaaagucaccuuccauaa

SEQ ID NO: 570745 - RNA, 20 nt, Human
uccccaacuaucacugcucc

SEQ ID NO: 570746 - RNA, 24 nt, Human
uccccaggucagcaucuuuaauuc

SEQ ID NO: 570747 - RNA, 20 nt, Human
ucccgcgggaccgcagggau

SEQ ID NO: 570748 - RNA, 21 nt, Human
uccucuaaucaaaaaugaaaa

SEQ ID NO: 570749 - RNA, 18 nt, Human
ugaaagaugauaaaguuu

SEQ ID NO: 570750 - RNA, 20 nt, Human
ugaaauaaaacaccauugga

SEQ ID NO: 570751 - RNA, 19 nt, Human
ugaaugaacuaucuaugga

SEQ ID NO: 570752 - RNA, 20 nt, Human
ugacuaaccuagaauauuua

SEQ ID NO: 570753 - RNA, 19 nt, Human
ugauuaacaaaaaaacaag

SEQ ID NO: 570754 - RNA, 18 nt, Human
ugccccagagcacucaca

SEQ ID NO: 570755 - RNA, 21 nt, Human
ugccccagagcacucacacag

SEQ ID NO: 570756 - RNA, 23 nt, Human
ugccccagagcacucacacagaa

SEQ ID NO: 570757 - RNA, 18 nt, Human
uggaaaugaguucaugga

SEQ ID NO: 570758 - RNA, 21 nt, Human
uggauaaguaguggagauucu

SEQ ID NO: 570759 - RNA, 19 nt, Human
uggcuucaagcaauuccua

SEQ ID NO: 570760 - RNA, 27 nt, Human
uggucaagaaaagggggcuggggcucc

SEQ ID NO: 570761 - RNA, 21 nt, Human
uggugggggacaauuuaaacu

SEQ ID NO: 570762 - RNA, 21 nt, Human
uguuauguuccuacacaaaca

SEQ ID NO: 570763 - RNA, 24 nt, Human
uguucacaccacuguauuccaguc

SEQ ID NO: 570764 - RNA, 21 nt, Human
uuaaauauuuuaauguuacuu

SEQ ID NO: 570765 - RNA, 23 nt, Human
uuacauaaauacagcuuacauac

SEQ ID NO: 570766 - RNA, 23 nt, Human
uuaucuggaaacaaggguuguuu

SEQ ID NO: 570767 - RNA, 22 nt, Human
uucaaguaagagcaauaguaaa

SEQ ID NO: 570768 - RNA, 21 nt, Human
uucacccuuuuacauguucca

SEQ ID NO: 570769 - RNA, 20 nt, Human
uucacgauggggccucucca

SEQ ID NO: 570770 - RNA, 24 nt, Human
uuccaguaagaaguucaagaguac

SEQ ID NO: 570771 - RNA, 19 nt, Human
uugaaaaaaaguuuucaag

SEQ ID NO: 570772 - RNA, 19 nt, Human
uuggcucugaaaauguauu

SEQ ID NO: 570773 - RNA, 21 nt, Human
uuguuacaaacaccacccauc

SEQ ID NO: 570774 - RNA, 18 nt, Human
uuuaauaggaucuuuuca

SEQ ID NO: 570775 - RNA, 23 nt, Human
uuugcauuuauagaagaaggugg

SEQ ID NO: 570776 - RNA, 20 nt, Human
aaagagagcuggguguggug

SEQ ID NO: 570777 - RNA, 19 nt, Human
aaagucaccagggugaaaa

SEQ ID NO: 570778 - RNA, 18 nt, Human
aaccaagaaagagagcug

SEQ ID NO: 570779 - RNA, 19 nt, Human
aacccaaaacaagaaagau

SEQ ID NO: 570780 - RNA, 19 nt, Human
aacuuauaggacaguccuu

SEQ ID NO: 570781 - RNA, 18 nt, Human
aagaaagagagcugggug

SEQ ID NO: 570782 - RNA, 22 nt, Human
aagaagcuuauucucucuaagc

SEQ ID NO: 570783 - RNA, 18 nt, Human
aagagaaggaagaucuga

SEQ ID NO: 570784 - RNA, 23 nt, Human
aagaguuucuuccaaagucacca

SEQ ID NO: 570785 - RNA, 18 nt, Human
aaggcccuggaaagacug

SEQ ID NO: 570786 - RNA, 20 nt, Human
aaguacaaaacaccucuuuu

SEQ ID NO: 570787 - RNA, 22 nt, Human
aaugaugaaaaaccaagaaaga

SEQ ID NO: 570788 - RNA, 24 nt, Human
acagagcaagaaagggcuucagag

SEQ ID NO: 570789 - RNA, 25 nt, Human
acagagcaagaaagggcuucagaga

SEQ ID NO: 570790 - RNA, 18 nt, Human
acucugccaggggcuccu

SEQ ID NO: 570791 - RNA, 18 nt, Human
agaaaacaacccaaaaca

SEQ ID NO: 570792 - RNA, 19 nt, Human
agaagcuuauucucucuaa

SEQ ID NO: 570793 - RNA, 23 nt, Human
agagaaaacaacccaaaacaaga

SEQ ID NO: 570794 - RNA, 19 nt, Human
agagagaaaacaacccaaa

SEQ ID NO: 570795 - RNA, 21 nt, Human
agagagagagagagagaaaac

SEQ ID NO: 570796 - RNA, 20 nt, Human
agaguuguaguuucaccacc

SEQ ID NO: 570797 - RNA, 23 nt, Human
agcugggugugguggcacgugcc

SEQ ID NO: 570798 - RNA, 24 nt, Human
agguucucauaagauuaacaauuu

SEQ ID NO: 570799 - RNA, 23 nt, Human
aguggaccccacuccuaggcaac

SEQ ID NO: 570800 - RNA, 23 nt, Human
auacaugaaaugaugaaaaacca

SEQ ID NO: 570801 - RNA, 19 nt, Human
aucauccaugagaucuccc

SEQ ID NO: 570802 - RNA, 24 nt, Human
auugugugugugugugugugugug

SEQ ID NO: 570803 - RNA, 24 nt, Human
cacugcccuauauccuagacaaca

SEQ ID NO: 570804 - RNA, 19 nt, Human
cagguaguuguagggcacu

SEQ ID NO: 570805 - RNA, 24 nt, Human
caguggaccccacuccuaggcaac

SEQ ID NO: 570806 - RNA, 19 nt, Human
caugucucuaagaagagag

SEQ ID NO: 570807 - RNA, 20 nt, Human
ccaagaagcuuauucucucu

SEQ ID NO: 570808 - RNA, 20 nt, Human
ccacugcuuuuucgagcugg

SEQ ID NO: 570809 - RNA, 21 nt, Human
ccccgggaggcuugaaggauc

SEQ ID NO: 570810 - RNA, 21 nt, Human
ccuguggucccagcuccccgg

SEQ ID NO: 570811 - RNA, 24 nt, Human
cgccugagccuaagaguuugaggc

SEQ ID NO: 570812 - RNA, 25 nt, Human
cucauaagauuaacaauuuaaauaa

SEQ ID NO: 570813 - RNA, 19 nt, Human
cuccuaggcaaccuggcca

SEQ ID NO: 570814 - RNA, 20 nt, Human
cuugauguaggcccgcugca

SEQ ID NO: 570815 - RNA, 20 nt, Human
gagaucucccggagccuggg

SEQ ID NO: 570816 - RNA, 24 nt, Human
gagcacacgugagaguuguaguuu

SEQ ID NO: 570817 - RNA, 22 nt, Human
gagcugggugugguggcacgug

SEQ ID NO: 570818 - RNA, 24 nt, Human
gaucgccugagccuaagaguuuga

SEQ ID NO: 570819 - RNA, 18 nt, Human
gcaguauucaagaguuuc

SEQ ID NO: 570820 - RNA, 27 nt, Human
ggcaacacaagcauccuuaggaagaga

SEQ ID NO: 570821 - RNA, 19 nt, Human
ggcccuggaaagacugaag

SEQ ID NO: 570822 - RNA, 22 nt, Human
guaaguacaaaacaccucuuuu

SEQ ID NO: 570823 - RNA, 23 nt, Human
gugagcugcuuccacugcuuuuu

SEQ ID NO: 570824 - RNA, 21 nt, Human
gugugugugugugugugugug

SEQ ID NO: 570825 - RNA, 25 nt, Human
uaagcuuuugaauuugcagcaacuu

SEQ ID NO: 570826 - RNA, 23 nt, Human
uacaacuuauaggacaguccuuu

SEQ ID NO: 570827 - RNA, 20 nt, Human
uacaguaaucauccaugaga

SEQ ID NO: 570828 - RNA, 18 nt, Human
uaccauggcucuguacaa

SEQ ID NO: 570829 - RNA, 24 nt, Human
uagauugauagauugaggcaacac

SEQ ID NO: 570830 - RNA, 20 nt, Human
uauccuagacaacaugguua

SEQ ID NO: 570831 - RNA, 18 nt, Human
uccaguguaaguuuauug

SEQ ID NO: 570832 - RNA, 20 nt, Human
uccccgggaggcuugaagga

SEQ ID NO: 570833 - RNA, 22 nt, Human
uccucagacccaaaguggagcu

SEQ ID NO: 570834 - RNA, 22 nt, Human
ucuggaguacuguggaggguga

SEQ ID NO: 570835 - RNA, 20 nt, Human
ucugugaauagccacugccc

SEQ ID NO: 570836 - RNA, 22 nt, Human
ucuuccaaagucaccaggguga

SEQ ID NO: 570837 - RNA, 18 nt, Human
ugaaaagccauucuacua

SEQ ID NO: 570838 - RNA, 22 nt, Human
ugaggcagcguggacucugcca

SEQ ID NO: 570839 - RNA, 27 nt, Human
ugcagcaacuuaauugugugugugugu

SEQ ID NO: 570840 - RNA, 23 nt, Human
ugccuguggucccagcuccccgg

SEQ ID NO: 570841 - RNA, 23 nt, Human
ugccuguggucccagcuccccgg

SEQ ID NO: 570842 - RNA, 24 nt, Human
ugccuguggucccagcuccccggg

SEQ ID NO: 570843 - RNA, 24 nt, Human
uggcacgugccuguggucccagcu

SEQ ID NO: 570844 - RNA, 18 nt, Human
ugggugugguggcacgug

SEQ ID NO: 570845 - RNA, 24 nt, Human
ugguggcacgugccugugguccca

SEQ ID NO: 570846 - RNA, 23 nt, Human
uguaaguacaaaacaccucuuuu

SEQ ID NO: 570847 - RNA, 20 nt, Human
ugugguggcacgugccugug

SEQ ID NO: 570848 - RNA, 21 nt, Human
ugugguggcacgugccugugg

SEQ ID NO: 570849 - RNA, 18 nt, Human
ugugugugugugugugug

SEQ ID NO: 570850 - RNA, 18 nt, Human
ugugugugugugugugug

SEQ ID NO: 570851 - RNA, 18 nt, Human
ugugugugugugugugug

SEQ ID NO: 570852 - RNA, 18 nt, Human
ugugugugugugugugug

SEQ ID NO: 570853 - RNA, 18 nt, Human
ugugugugugugugugug

SEQ ID NO: 570854 - RNA, 18 nt, Human
ugugugugugugugugug

SEQ ID NO: 570855 - RNA, 18 nt, Human
ugugugugugugugugug

SEQ ID NO: 570856 - RNA, 18 nt, Human
ugugugugugugugugug

SEQ ID NO: 570857 - RNA, 20 nt, Human
ugugugugugugugugugug

SEQ ID NO: 570858 - RNA, 21 nt, Human
ugugugugugugugugugugu

SEQ ID NO: 570859 - RNA, 21 nt, Human
ugugugugugugugugugugu

SEQ ID NO: 570860 - RNA, 21 nt, Human
ugugugugugugugugugugu

SEQ ID NO: 570861 - RNA, 21 nt, Human
ugugugugugugugugugugu

SEQ ID NO: 570862 - RNA, 21 nt, Human
ugugugugugugugugugugu

SEQ ID NO: 570863 - RNA, 21 nt, Human
ugugugugugugugugugugu

SEQ ID NO: 570864 - RNA, 21 nt, Human
ugugugugugugugugugugu

SEQ ID NO: 570865 - RNA, 21 nt, Human
ugugugugugugugugugugu

SEQ ID NO: 570866 - RNA, 21 nt, Human
ugugugugugugugugugugu

SEQ ID NO: 570867 - RNA, 21 nt, Human
ugugugugugugugugugugu

SEQ ID NO: 570868 - RNA, 21 nt, Human
ugugugugugugugugugugu

SEQ ID NO: 570869 - RNA, 21 nt, Human
ugugugugugugugugugugu

SEQ ID NO: 570870 - RNA, 21 nt, Human
ugugugugugugugugugugu

SEQ ID NO: 570871 - RNA, 21 nt, Human
ugugugugugugugugugugu

SEQ ID NO: 570872 - RNA, 22 nt, Human
ugugugugugugugugugugug

SEQ ID NO: 570873 - RNA, 22 nt, Human
ugugugugugugugugugugug

SEQ ID NO: 570874 - RNA, 22 nt, Human
ugugugugugugugugugugug

SEQ ID NO: 570875 - RNA, 22 nt, Human
ugugugugugugugugugugug

SEQ ID NO: 570876 - RNA, 20 nt, Human
uguguguguguguguguuug

SEQ ID NO: 570877 - RNA, 25 nt, Human
uucaagaguuucuuccaaagucacc

SEQ ID NO: 570878 - RNA, 21 nt, Human
uuguaguuucaccaccaagaa

SEQ ID NO: 570879 - RNA, 25 nt, Human
uuuaaauaaauauuugauagaacau

SEQ ID NO: 570880 - RNA, 23 nt, Human
aaacaaguaaaucagaaagcuua

SEQ ID NO: 570881 - RNA, 24 nt, Human
aaacgaagccagccuggaccauag

SEQ ID NO: 570882 - RNA, 21 nt, Human
aaagaaaacagacccuccuaa

SEQ ID NO: 570883 - RNA, 21 nt, Human
aagcagaagccccaaaguuca

SEQ ID NO: 570884 - RNA, 23 nt, Human
aaggugcaguugaauucaguggg

SEQ ID NO: 570885 - RNA, 23 nt, Human
aaucagaaagcuuauuuucuauu

SEQ ID NO: 570886 - RNA, 21 nt, Human
acacuuauauaaaaagaaaac

SEQ ID NO: 570887 - RNA, 21 nt, Human
acugccuggaggcucuguauu

SEQ ID NO: 570888 - RNA, 23 nt, Human
agaaaaacaaacugugcuuuaaa

SEQ ID NO: 570889 - RNA, 22 nt, Human
agaagccccaaaguucacauua

SEQ ID NO: 570890 - RNA, 19 nt, Human
augaagcagaagccccaaa

SEQ ID NO: 570891 - RNA, 23 nt, Human
caaaggcuccuuggaaaaacgaa

SEQ ID NO: 570892 - RNA, 22 nt, Human
caagaagauuccuucuaacuga

SEQ ID NO: 570893 - RNA, 21 nt, Human
caagaugccaacaucggugug

SEQ ID NO: 570894 - RNA, 18 nt, Human
cagaaagcuuauuuucua

SEQ ID NO: 570895 - RNA, 21 nt, Human
cagaagccccaaaguucacau

SEQ ID NO: 570896 - RNA, 19 nt, Human
caucggggugggugcaggc

SEQ ID NO: 570897 - RNA, 20 nt, Human
caucggggugggugcaggcu

SEQ ID NO: 570898 - RNA, 20 nt, Human
cauuuuucaguagcaggacc

SEQ ID NO: 570899 - RNA, 24 nt, Human
ccguucguggcaauuguucucaac

SEQ ID NO: 570900 - RNA, 26 nt, Human
ccuuggaaaaacgaagccagccugga

SEQ ID NO: 570901 - RNA, 22 nt, Human
cuuucacucuccuuuugaccuu

SEQ ID NO: 570902 - RNA, 25 nt, Human
gaaaacagacccuccuaacauguaa

SEQ ID NO: 570903 - RNA, 20 nt, Human
gccagccauuuuucaguagc

SEQ ID NO: 570904 - RNA, 18 nt, Human
gcuucaucggggugggug

SEQ ID NO: 570905 - RNA, 22 nt, Human
ggagcuucaucggggugggugc

SEQ ID NO: 570906 - RNA, 21 nt, Human
ggccagccauuuuucaguagc

SEQ ID NO: 570907 - RNA, 19 nt, Human
gggcuugccuaaggccagc

SEQ ID NO: 570908 - RNA, 22 nt, Human
gugaagcgcuggauauuuacca

SEQ ID NO: 570909 - RNA, 18 nt, Human
gugacagaaaaacaaacu

SEQ ID NO: 570910 - RNA, 23 nt, Human
uaaaaagaaaacagacccuccua

SEQ ID NO: 570911 - RNA, 23 nt, Human
uaaaaaugaagcagaagccccaa

SEQ ID NO: 570912 - RNA, 24 nt, Human
uaagacacacuuauauaaaaagaa

SEQ ID NO: 570913 - RNA, 20 nt, Human
uaccagauaauugaacucac

SEQ ID NO: 570914 - RNA, 21 nt, Human
uagagugcauucuugcacucu

SEQ ID NO: 570915 - RNA, 19 nt, Human
uauagagugcauucuugca

SEQ ID NO: 570916 - RNA, 23 nt, Human
ucaggugaagcgcuggauauuua

SEQ ID NO: 570917 - RNA, 22 nt, Human
ucccguggagcuucaucggggu

SEQ ID NO: 570918 - RNA, 20 nt, Human
uccuuggaaaaacgaagcca

SEQ ID NO: 570919 - RNA, 19 nt, Human
ucuaugaggaacuagauuc

SEQ ID NO: 570920 - RNA, 21 nt, Human
ucuugcacucuauaggugaca

SEQ ID NO: 570921 - RNA, 22 nt, Human
ugaaacauaagaucuaugagga

SEQ ID NO: 570922 - RNA, 24 nt, Human
ugaagcagaagccccaaaguucac

SEQ ID NO: 570923 - RNA, 31 nt, Human
ugacagaaaaacaaacugugcuuuaaauacu

SEQ ID NO: 570924 - RNA, 20 nt, Human
ugagcucucaguuacaguuc

SEQ ID NO: 570925 - RNA, 21 nt, Human
uggaaaaacgaagccagccug

SEQ ID NO: 570926 - RNA, 22 nt, Human
uuauauaaaaagaaaacagacc

SEQ ID NO: 570927 - RNA, 19 nt, Human
uugcacucuauaggugaca

SEQ ID NO: 570928 - RNA, 22 nt, Human
uuuaaaauauaucuaagacaca

SEQ ID NO: 570929 - RNA, 20 nt, Human
uuugcucccguggagcuuca

SEQ ID NO: 570930 - RNA, 23 nt, Human
aaaaaaaaaaaaaaaaauccaaa

SEQ ID NO: 570931 - RNA, 20 nt, Human
aaacaggaggcagcacuagg

SEQ ID NO: 570932 - RNA, 24 nt, Human
aaacaggaggcagcacuaggucca

SEQ ID NO: 570933 - RNA, 21 nt, Human
aacaaugacuggccugggccc

SEQ ID NO: 570934 - RNA, 20 nt, Human
aagagauucaggauuaccac

SEQ ID NO: 570935 - RNA, 20 nt, Human
aagcacccaaauguagauca

SEQ ID NO: 570936 - RNA, 18 nt, Human
accugccccucucuggcc

SEQ ID NO: 570937 - RNA, 24 nt, Human
accugccccucucuggccucuguc

SEQ ID NO: 570938 - RNA, 24 nt, Human
acuacguaauucaaaagacagcug

SEQ ID NO: 570939 - RNA, 27 nt, Human
acuccaaaaaaaaaaaaaaaaauccaa

SEQ ID NO: 570940 - RNA, 19 nt, Human
acucccuuuuuucuuagca

SEQ ID NO: 570941 - RNA, 21 nt, Human
agacuagguucuagaccaaaa

SEQ ID NO: 570942 - RNA, 24 nt, Human
agguucuagaccaaaaugucaccc

SEQ ID NO: 570943 - RNA, 21 nt, Human
auacccuuccccacuccaaaa

SEQ ID NO: 570944 - RNA, 24 nt, Human
auaugugcacauacauuagacacu

SEQ ID NO: 570945 - RNA, 23 nt, Human
aucaaugucacucaaauauuuua

SEQ ID NO: 570946 - RNA, 22 nt, Human
caaaucucagaaacaagcaccc

SEQ ID NO: 570947 - RNA, 20 nt, Human
caacaaaaugguccuguacu

SEQ ID NO: 570948 - RNA, 27 nt, Human
caaguaaacuucagucagacucccucu

SEQ ID NO: 570949 - RNA, 20 nt, Human
cacccaaauguagaucaccc

SEQ ID NO: 570950 - RNA, 21 nt, Human
caccccucuuucggcacuucc

SEQ ID NO: 570951 - RNA, 22 nt, Human
cacccugcugaagcucaaauca

SEQ ID NO: 570952 - RNA, 22 nt, Human
cagaaacaagcacccaaaugua

SEQ ID NO: 570953 - RNA, 24 nt, Human
cagcaacaaugacuggccugggcc

SEQ ID NO: 570954 - RNA, 24 nt, Human
ccacuccaaaaaaaaaaaaaaaaa

SEQ ID NO: 570955 - RNA, 23 nt, Human
ccagaagacaggccuaucacuaa

SEQ ID NO: 570956 - RNA, 23 nt, Human
ccagcgacaucggcggcggcuuu

SEQ ID NO: 570957 - RNA, 20 nt, Human
ccauguuauacuucucugca

SEQ ID NO: 570958 - RNA, 28 nt, Human
ccccacuccaaaaaaaaaaaaaaaaauc

SEQ ID NO: 570959 - RNA, 21 nt, Human
cccuuuuuucuuagcaagccc

SEQ ID NO: 570960 - RNA, 24 nt, Human
ccuccuaaaacuucugagcacccc

SEQ ID NO: 570961 - RNA, 23 nt, Human
ccuggagugagaggucaggguga

SEQ ID NO: 570962 - RNA, 21 nt, Human
cgaguucccaacaccccucuu

SEQ ID NO: 570963 - RNA, 18 nt, Human
cuaccugccccucucugg

SEQ ID NO: 570964 - RNA, 23 nt, Human
cuccuuggcacgaagguucccga

SEQ ID NO: 570965 - RNA, 28 nt, Human
cucucuggccucugucuugggagagauc

SEQ ID NO: 570966 - RNA, 24 nt, Human
cugaggcugcugcuaugcaggucu

SEQ ID NO: 570967 - RNA, 18 nt, Human
cuggagauacugcaggau

SEQ ID NO: 570968 - RNA, 21 nt, Human
gaagaugagcagaucaaaucc

SEQ ID NO: 570969 - RNA, 19 nt, Human
gauuuuaaacauuuuccuc

SEQ ID NO: 570970 - RNA, 22 nt, Human
gccagcaacaaugacuggccug

SEQ ID NO: 570971 - RNA, 18 nt, Human
gcccuuucuuuccaagua

SEQ ID NO: 570972 - RNA, 21 nt, Human
gccuacgcugagaguuucucc

SEQ ID NO: 570973 - RNA, 23 nt, Human
gccuccuuuauacccuuccccac

SEQ ID NO: 570974 - RNA, 22 nt, Human
gcugcuaccgucuucuucgacu

SEQ ID NO: 570975 - RNA, 19 nt, Human
ggagaggguggacaagacu

SEQ ID NO: 570976 - RNA, 19 nt, Human
guccuguacucuaggagcu

SEQ ID NO: 570977 - RNA, 22 nt, Human
gucucaaucaauaaauuuccac

SEQ ID NO: 570978 - RNA, 22 nt, Human
gucucucucucuccuuuaccaa

SEQ ID NO: 570979 - RNA, 23 nt, Human
guugggguagaagaucucaaaga

SEQ ID NO: 570980 - RNA, 18 nt, Human
uaaaacuucugagcaccc

SEQ ID NO: 570981 - RNA, 22 nt, Human
uaaaugguauacuuggaagagc

SEQ ID NO: 570982 - RNA, 19 nt, Human
uacccuuccccacuccaaa

SEQ ID NO: 570983 - RNA, 23 nt, Human
uaccugccccucucuggccucug

SEQ ID NO: 570984 - RNA, 20 nt, Human
uagaagaucucaaagacucc

SEQ ID NO: 570985 - RNA, 18 nt, Human
uagaggaacuaccauguu

SEQ ID NO: 570986 - RNA, 21 nt, Human
uagaucacccugcugaagcuc

SEQ ID NO: 570987 - RNA, 19 nt, Human
uaggaaaaugaugaguugg

SEQ ID NO: 570988 - RNA, 20 nt, Human
uaucaucauuuuuacucccu

SEQ ID NO: 570989 - RNA, 19 nt, Human
uaucuaccacuugggaacu

SEQ ID NO: 570990 - RNA, 25 nt, Human
uccaaauucaaacaagucuucugaa

SEQ ID NO: 570991 - RNA, 20 nt, Human
uccagcauccagucuuggag

SEQ ID NO: 570992 - RNA, 25 nt, Human
uccccacuccaaaaaaaaaaaaaaa

SEQ ID NO: 570993 - RNA, 24 nt, Human
ucggcggcggcugcgggcuucccc

SEQ ID NO: 570994 - RNA, 19 nt, Human
ucuaccugccccucucugg

SEQ ID NO: 570995 - RNA, 20 nt, Human
ucuaugagauccagcaucca

SEQ ID NO: 570996 - RNA, 20 nt, Human
ucucaaagacuccagauuag

SEQ ID NO: 570997 - RNA, 21 nt, Human
ucucaaagacuccagauuaga

SEQ ID NO: 570998 - RNA, 22 nt, Human
ucuccuuuaccaagacagcugc

SEQ ID NO: 570999 - RNA, 19 nt, Human
ucucuggccucugucuugc

SEQ ID NO: 571000 - RNA, 21 nt, Human
ucuugcuuaaggggaaagaau

SEQ ID NO: 571001 - RNA, 22 nt, Human
ugaaacucaaacccuagugcug

SEQ ID NO: 571002 - RNA, 19 nt, Human
ugaagcaugaaacucaaac

SEQ ID NO: 571003 - RNA, 21 nt, Human
ugacuuuugagacuuguaugg

SEQ ID NO: 571004 - RNA, 21 nt, Human
ugagaugauaaccucaacuca

SEQ ID NO: 571005 - RNA, 19 nt, Human
ugagcagaucaaaucccuu

SEQ ID NO: 571006 - RNA, 19 nt, Human
ugagggcauucaacugaag

SEQ ID NO: 571007 - RNA, 21 nt, Human
ugaguugggguagaagaucuc

SEQ ID NO: 571008 - RNA, 21 nt, Human
ugcaaagggcucaugagacua

SEQ ID NO: 571009 - RNA, 18 nt, Human
ugccccucucuggccucu

SEQ ID NO: 571010 - RNA, 19 nt, Human
ugccuuggaggccagcaac

SEQ ID NO: 571011 - RNA, 18 nt, Human
uggacaagacuccaggac

SEQ ID NO: 571012 - RNA, 22 nt, Human
ugguuucuaaauucugcuucuu

SEQ ID NO: 571013 - RNA, 19 nt, Human
uguagcuggguaagacaca

SEQ ID NO: 571014 - RNA, 21 nt, Human
ugugcacauacauuagacacu

SEQ ID NO: 571015 - RNA, 26 nt, Human
uguuguaaauucuccugggggugacc

SEQ ID NO: 571016 - RNA, 24 nt, Human
uuaccacuuucaaauauauccacu

SEQ ID NO: 571017 - RNA, 20 nt, Human
uuagaaugcuacagggcugc

SEQ ID NO: 571018 - RNA, 27 nt, Human
uucaaacaagucuucugaauuaucuac

SEQ ID NO: 571019 - RNA, 18 nt, Human
uuccccgggacgccaccc

SEQ ID NO: 571020 - RNA, 23 nt, Human
uuccccgggacgccacccucuuu

SEQ ID NO: 571021 - RNA, 18 nt, Human
uucuggagauacugcagg

SEQ ID NO: 571022 - RNA, 21 nt, Human
aaaaaaaaaaaaaaaggcaag

SEQ ID NO: 571023 - RNA, 20 nt, Human
aaaaauacacaccauggaac

SEQ ID NO: 571024 - RNA, 23 nt, Human
aaaagaacaagccugcuaacuug

SEQ ID NO: 571025 - RNA, 19 nt, Human
aaaaggaaaacauggcaaa

SEQ ID NO: 571026 - RNA, 20 nt, Human
aaaauacacaccauggaaca

SEQ ID NO: 571027 - RNA, 21 nt, Human
aaaauaccaacucauggaaug

SEQ ID NO: 571028 - RNA, 19 nt, Human
aaauaaaaauacacaccau

SEQ ID NO: 571029 - RNA, 19 nt, Human
aaauacacaccauggaaca

SEQ ID NO: 571030 - RNA, 20 nt, Human
aacauacagauggcacaaga

SEQ ID NO: 571031 - RNA, 22 nt, Human
aagaaaaggaaaacauggcaaa

SEQ ID NO: 571032 - RNA, 23 nt, Human
aagaaaaggaaaacauggcaaaa

SEQ ID NO: 571033 - RNA, 18 nt, Human
aagcuccuuccaacaaag

SEQ ID NO: 571034 - RNA, 19 nt, Human
acaagacagcucugaccuc

SEQ ID NO: 571035 - RNA, 23 nt, Human
accacaaggaguaagaacuguaa

SEQ ID NO: 571036 - RNA, 24 nt, Human
acccaggucacuauuggauccagc

SEQ ID NO: 571037 - RNA, 22 nt, Human
accugcucauaguuaagggaua

SEQ ID NO: 571038 - RNA, 18 nt, Human
acucagcccauuaaguga

SEQ ID NO: 571039 - RNA, 22 nt, Human
acuugaucuuucuucccacagu

SEQ ID NO: 571040 - RNA, 20 nt, Human
agaaaaccauuuacuaucca

SEQ ID NO: 571041 - RNA, 24 nt, Human
agaaaaccauuuacuauccaauua

SEQ ID NO: 571042 - RNA, 24 nt, Human
agaaaaggaaaacauggcaaaaaa

SEQ ID NO: 571043 - RNA, 24 nt, Human
agaaaaggggaucaagcuuaacgc

SEQ ID NO: 571044 - RNA, 23 nt, Human
agacagcucugaccucaggcccc

SEQ ID NO: 571045 - RNA, 20 nt, Human
aggcauagaagaaaauuugg

SEQ ID NO: 571046 - RNA, 21 nt, Human
aggccccgugcugaacaagag

SEQ ID NO: 571047 - RNA, 19 nt, Human
agggaaggucaggacccaa

SEQ ID NO: 571048 - RNA, 18 nt, Human
auaguuaagggauagggc

SEQ ID NO: 571049 - RNA, 23 nt, Human
aucccagcccuugacuuccccaa

SEQ ID NO: 571050 - RNA, 23 nt, Human
augcuaaaaaauauauggccaaa

SEQ ID NO: 571051 - RNA, 25 nt, Human
auggaacacugacaauugaguacca

SEQ ID NO: 571052 - RNA, 22 nt, Human
auuaagugacaaccaggaaaaa

SEQ ID NO: 571053 - RNA, 18 nt, Human
auuccuugcaaaagaaca

SEQ ID NO: 571054 - RNA, 19 nt, Human
caaagcaccaaggcuaaag

SEQ ID NO: 571055 - RNA, 21 nt, Human
caaagcaccaaggcuaaagac

SEQ ID NO: 571056 - RNA, 22 nt, Human
caagcuuuuuacucagcccauu

SEQ ID NO: 571057 - RNA, 18 nt, Human
cacaguauagcaaaggga

SEQ ID NO: 571058 - RNA, 20 nt, Human
cacaguauagcaaagggaau

SEQ ID NO: 571059 - RNA, 19 nt, Human
cacaucaggaaaguaaggc

SEQ ID NO: 571060 - RNA, 22 nt, Human
cacuagaaauaaauguuccaug

SEQ ID NO: 571061 - RNA, 18 nt, Human
cagcaauggaacuagaaa

SEQ ID NO: 571062 - RNA, 22 nt, Human
cagcccauuaagugacaaccag

SEQ ID NO: 571063 - RNA, 25 nt, Human
cagcccuugacuuccccaaacucaa

SEQ ID NO: 571064 - RNA, 26 nt, Human
cagggcacagaaacaaugcaugcuaa

SEQ ID NO: 571065 - RNA, 22 nt, Human
caucauaguuguaucuacugcu

SEQ ID NO: 571066 - RNA, 19 nt, Human
caugcuaaaaaauauaugg

SEQ ID NO: 571067 - RNA, 23 nt, Human
ccauuagacaacaugauuauuuc

SEQ ID NO: 571068 - RNA, 21 nt, Human
cccaaaaauaaaaauacacac

SEQ ID NO: 571069 - RNA, 19 nt, Human
ccccgugcugaacaagagu

SEQ ID NO: 571070 - RNA, 18 nt, Human
cccugaauccagaguacc

SEQ ID NO: 571071 - RNA, 18 nt, Human
cucauaaccaaugagugg

SEQ ID NO: 571072 - RNA, 18 nt, Human
cugccagccuucuuucag

SEQ ID NO: 571073 - RNA, 20 nt, Human
cuguauaugcacucuacacu

SEQ ID NO: 571074 - RNA, 25 nt, Human
cuuuuuauuccaggauuuagccuua

SEQ ID NO: 571075 - RNA, 25 nt, Human
gaaaaggaaaacauggcaaaaaaaa

SEQ ID NO: 571076 - RNA, 19 nt, Human
gaauuaauguggucucugc

SEQ ID NO: 571077 - RNA, 24 nt, Human
gaauuaauguggucucugcuuggu

SEQ ID NO: 571078 - RNA, 22 nt, Human
gcacaagacagcucugaccuca

SEQ ID NO: 571079 - RNA, 20 nt, Human
ggguauaacucuuuauaacc

SEQ ID NO: 571080 - RNA, 21 nt, Human
guauaugcacucuacacuaaa

SEQ ID NO: 571081 - RNA, 18 nt, Human
guuaagggauagggcacc

SEQ ID NO: 571082 - RNA, 20 nt, Human
uaaaaauacacaccauggaa

SEQ ID NO: 571083 - RNA, 22 nt, Human
uaaaauaaauaucccaaaaggu

SEQ ID NO: 571084 - RNA, 18 nt, Human
uaaaccggaccacaccug

SEQ ID NO: 571085 - RNA, 20 nt, Human
uaacaaaauaccagauuccc

SEQ ID NO: 571086 - RNA, 21 nt, Human
uaacaagaaaaggggaucaag

SEQ ID NO: 571087 - RNA, 19 nt, Human
uaaccacugugaccccauc

SEQ ID NO: 571088 - RNA, 27 nt, Human
uaaccacugugaccccaucugucuggc

SEQ ID NO: 571089 - RNA, 21 nt, Human
uaagccauauuaaggggguug

SEQ ID NO: 571090 - RNA, 19 nt, Human
uaagugacaaccaggaaaa

SEQ ID NO: 571091 - RNA, 20 nt, Human
uaagugugaauucuccaacc

SEQ ID NO: 571092 - RNA, 18 nt, Human
uacaggauuaucuaugac

SEQ ID NO: 571093 - RNA, 19 nt, Human
uagaagacaagacgucugu

SEQ ID NO: 571094 - RNA, 22 nt, Human
uagcaguuagaacuaaaaauac

SEQ ID NO: 571095 - RNA, 19 nt, Human
uaucaugaagggaaaaggu

SEQ ID NO: 571096 - RNA, 23 nt, Human
uaucaugaagggaaaagguuugu

SEQ ID NO: 571097 - RNA, 19 nt, Human
uauccacagucauguggaa

SEQ ID NO: 571098 - RNA, 22 nt, Human
uaugacaucaguuacucaauaa

SEQ ID NO: 571099 - RNA, 19 nt, Human
ucagaacauacagauggca

SEQ ID NO: 571100 - RNA, 21 nt, Human
ucagcccauuaagugacaacc

SEQ ID NO: 571101 - RNA, 24 nt, Human
ucaggaaaguaaggccaggaaggu

SEQ ID NO: 571102 - RNA, 23 nt, Human
ucccaaaaauaaaaauacacacc

SEQ ID NO: 571103 - RNA, 19 nt, Human
uccccaaacucaauuuccg

SEQ ID NO: 571104 - RNA, 20 nt, Human
ucccuuuagacccccacuaa

SEQ ID NO: 571105 - RNA, 25 nt, Human
uccucauaaccaaugaguggcagaa

SEQ ID NO: 571106 - RNA, 25 nt, Human
ucuauggauguuaucaugaagggaa

SEQ ID NO: 571107 - RNA, 19 nt, Human
ugaccccaucugucuggca

SEQ ID NO: 571108 - RNA, 21 nt, Human
ugauauguugguuucuuaaga

SEQ ID NO: 571109 - RNA, 24 nt, Human
uggaacacugacaauugaguacca

SEQ ID NO: 571110 - RNA, 21 nt, Human
uggauccagcuuucugggucc

SEQ ID NO: 571111 - RNA, 23 nt, Human
uggcacaagacagcucugaccuc

SEQ ID NO: 571112 - RNA, 23 nt, Human
uggcagaaccaagaccgaaaguc

SEQ ID NO: 571113 - RNA, 20 nt, Human
ugggaggaagggaaggucaa

SEQ ID NO: 571114 - RNA, 21 nt, Human
ugggaggaagggaaggucagg

SEQ ID NO: 571115 - RNA, 19 nt, Human
ugguaauaucuugcugauu

SEQ ID NO: 571116 - RNA, 24 nt, Human
uguaaauauccacagucaugugga

SEQ ID NO: 571117 - RNA, 21 nt, Human
uuaagaaagaugaagaacaaa

SEQ ID NO: 571118 - RNA, 19 nt, Human
uucuuucagugauauguug

SEQ ID NO: 571119 - RNA, 20 nt, Human
uuugcaaaaacucuaguccc

SEQ ID NO: 571120 - RNA, 18 nt, Human
aaaaccagaggaaggagg

SEQ ID NO: 571121 - RNA, 23 nt, Human
aaaauggagaugaauguuacaga

SEQ ID NO: 571122 - RNA, 24 nt, Human
aaacagccaugggccaggcugcag

SEQ ID NO: 571123 - RNA, 18 nt, Human
aaacccgcaaucugcucc

SEQ ID NO: 571124 - RNA, 24 nt, Human
aaccuuuuuaaaaaauggagauga

SEQ ID NO: 571125 - RNA, 21 nt, Human
aaguggcucacgcuccugugg

SEQ ID NO: 571126 - RNA, 18 nt, Human
acacaggccagcucaagc

SEQ ID NO: 571127 - RNA, 20 nt, Human
acaccuccagacccagccaa

SEQ ID NO: 571128 - RNA, 23 nt, Human
acccgcaaucugcuccagauuca

SEQ ID NO: 571129 - RNA, 21 nt, Human
accuccagacccagccaagaa

SEQ ID NO: 571130 - RNA, 22 nt, Human
agaaaccuuuuuaaaaaaugga

SEQ ID NO: 571131 - RNA, 22 nt, Human
agcacgugugcucgggacacag

SEQ ID NO: 571132 - RNA, 20 nt, Human
agcugcagugccaccugcug

SEQ ID NO: 571133 - RNA, 20 nt, Human
aggaaagguuuauuguggug

SEQ ID NO: 571134 - RNA, 19 nt, Human
aggcaguggagggacacag

SEQ ID NO: 571135 - RNA, 20 nt, Human
agguggguggugcaggcagu

SEQ ID NO: 571136 - RNA, 20 nt, Human
agguggucaugggaagccag

SEQ ID NO: 571137 - RNA, 21 nt, Human
agucagggccagagcccuucc

SEQ ID NO: 571138 - RNA, 22 nt, Human
aguggcucacgcuccuguggug

SEQ ID NO: 571139 - RNA, 18 nt, Human
auaaaaacaucugauguc

SEQ ID NO: 571140 - RNA, 24 nt, Human
auggcugccacuuccaggccccga

SEQ ID NO: 571141 - RNA, 18 nt, Human
cacaggcccugguguucc

SEQ ID NO: 571142 - RNA, 18 nt, Human
cacgacgcucaccgcggc

SEQ ID NO: 571143 - RNA, 19 nt, Human
cacuacccugucccaagcc

SEQ ID NO: 571144 - RNA, 18 nt, Human
cacugcacucuggaggug

SEQ ID NO: 571145 - RNA, 22 nt, Human
cacugcacucuggaggugggug

SEQ ID NO: 571146 - RNA, 24 nt, Human
cacugcacucuggagguggguggu

SEQ ID NO: 571147 - RNA, 20 nt, Human
cagcaacagcuguggguggg

SEQ ID NO: 571148 - RNA, 21 nt, Human
cagcagaggcucccugaccgg

SEQ ID NO: 571149 - RNA, 18 nt, Human
caggccccgagagacagg

SEQ ID NO: 571150 - RNA, 19 nt, Human
ccagaagcaccugcggcag

SEQ ID NO: 571151 - RNA, 18 nt, Human
ccagacccagccaagaac

SEQ ID NO: 571152 - RNA, 21 nt, Human
ccagagcccuucccuccagga

SEQ ID NO: 571153 - RNA, 21 nt, Human
cccagaagcaccugcggcaga

SEQ ID NO: 571154 - RNA, 26 nt, Human
cccagaagcaccugcggcagaggcgc

SEQ ID NO: 571155 - RNA, 25 nt, Human
cccccagcacccucaaaagcugggg

SEQ ID NO: 571156 - RNA, 24 nt, Human
ccccccacgccagcugucucagcc

SEQ ID NO: 571157 - RNA, 22 nt, Human
ccuccagacccagccaagaacu

SEQ ID NO: 571158 - RNA, 24 nt, Human
ccuccagacccagccaagaacuac

SEQ ID NO: 571159 - RNA, 23 nt, Human
ccugcggcagaggcgcacgggaa

SEQ ID NO: 571160 - RNA, 19 nt, Human
ccuguggugagggcagggu

SEQ ID NO: 571161 - RNA, 21 nt, Human
ccuguggugagggcagggugc

SEQ ID NO: 571162 - RNA, 18 nt, Human
cuacccccagcacccuca

SEQ ID NO: 571163 - RNA, 24 nt, Human
cuauaauaauaauauaaaauaaaa

SEQ ID NO: 571164 - RNA, 22 nt, Human
cuccgaggggucagcaagagca

SEQ ID NO: 571165 - RNA, 18 nt, Human
cugcagugccaccugcug

SEQ ID NO: 571166 - RNA, 21 nt, Human
cugcagugccaccugcugggu

SEQ ID NO: 571167 - RNA, 19 nt, Human
cugcaucccaagugggcac

SEQ ID NO: 571168 - RNA, 18 nt, Human
cugcaugucccuucacau

SEQ ID NO: 571169 - RNA, 20 nt, Human
cugcuuuucagguuguuucc

SEQ ID NO: 571170 - RNA, 18 nt, Human
cuggaggccggcgcagcu

SEQ ID NO: 571171 - RNA, 18 nt, Human
cugucccaagccgagggg

SEQ ID NO: 571172 - RNA, 18 nt, Human
cuguggugagggcagggu

SEQ ID NO: 571173 - RNA, 19 nt, Human
cuucccuccaggaacugau

SEQ ID NO: 571174 - RNA, 21 nt, Human
gaaaacagccaugggccaggc

SEQ ID NO: 571175 - RNA, 22 nt, Human
gagcacaggcccugguguuccu

SEQ ID NO: 571176 - RNA, 23 nt, Human
gagcacaggcccugguguuccug

SEQ ID NO: 571177 - RNA, 18 nt, Human
gaggaugggugcccagaa

SEQ ID NO: 571178 - RNA, 23 nt, Human
gaggcgcacgggaagcccggggc

SEQ ID NO: 571179 - RNA, 19 nt, Human
gagggcagggugcuccaca

SEQ ID NO: 571180 - RNA, 19 nt, Human
gagggcagggugcuccaca

SEQ ID NO: 571181 - RNA, 20 nt, Human
gcagaggaugggugcccaga

SEQ ID NO: 571182 - RNA, 20 nt, Human
gcagcucugggaguggggaa

SEQ ID NO: 571183 - RNA, 18 nt, Human
gcaguggagggacacagg

SEQ ID NO: 571184 - RNA, 25 nt, Human
gccugcuuuucagguuguuucccau

SEQ ID NO: 571185 - RNA, 20 nt, Human
gcgcagcuuggggcccccca

SEQ ID NO: 571186 - RNA, 22 nt, Human
gcuuggggccccccacgccagc

SEQ ID NO: 571187 - RNA, 24 nt, Human
ggaggccugccugcuuuucagguu

SEQ ID NO: 571188 - RNA, 18 nt, Human
ggccguggggccgucaga

SEQ ID NO: 571189 - RNA, 21 nt, Human
ggcugcggucagcacgugugc

SEQ ID NO: 571190 - RNA, 18 nt, Human
gggaagcccggggcccag

SEQ ID NO: 571191 - RNA, 20 nt, Human
gggccaggcugcagucuggu

SEQ ID NO: 571192 - RNA, 20 nt, Human
ggggucagcaagagcaacug

SEQ ID NO: 571193 - RNA, 20 nt, Human
gggguccuagcuccgcugca

SEQ ID NO: 571194 - RNA, 28 nt, Human
gugcggcgcuugcuccgaggggucagca

SEQ ID NO: 571195 - RNA, 18 nt, Human
guggaggaagggucugaa

SEQ ID NO: 571196 - RNA, 22 nt, Human
ucacguaacuuuacugcagccg

SEQ ID NO: 571197 - RNA, 19 nt, Human
ucagagaaaccuuuuuaaa

SEQ ID NO: 571198 - RNA, 21 nt, Human
ucagauaccagugcuggggag

SEQ ID NO: 571199 - RNA, 21 nt, Human
ucagcaagagcaacugauggc

SEQ ID NO: 571200 - RNA, 21 nt, Human
uccacagacaccuccagaccc

SEQ ID NO: 571201 - RNA, 24 nt, Human
uccacagacaccuccagacccagc

SEQ ID NO: 571202 - RNA, 27 nt, Human
uccacagacaccuccagacccagccaa

SEQ ID NO: 571203 - RNA, 18 nt, Human
uccagauucaagcaguaa

SEQ ID NO: 571204 - RNA, 19 nt, Human
ucccaagugggcacgugga

SEQ ID NO: 571205 - RNA, 22 nt, Human
uccucuugagcugcccuugccc

SEQ ID NO: 571206 - RNA, 22 nt, Human
uccuugggaaaacagccauggg

SEQ ID NO: 571207 - RNA, 18 nt, Human
ugagcagcucugggagug

SEQ ID NO: 571208 - RNA, 19 nt, Human
ugagggcagggugcuccac

SEQ ID NO: 571209 - RNA, 23 nt, Human
ugccaagcgccugguccuguccu

SEQ ID NO: 571210 - RNA, 19 nt, Human
ugcccagaagcaccugcgg

SEQ ID NO: 571211 - RNA, 22 nt, Human
ugcccagaagcaccugcggcag

SEQ ID NO: 571212 - RNA, 23 nt, Human
ugccucaguccuacccccagcac

SEQ ID NO: 571213 - RNA, 19 nt, Human
ugcggcgcuugcuccgagg

SEQ ID NO: 571214 - RNA, 24 nt, Human
ugcuccgaggggucagcaagagca

SEQ ID NO: 571215 - RNA, 22 nt, Human
uggagggacacaggccagcuca

SEQ ID NO: 571216 - RNA, 18 nt, Human
uggcugccacuuccaggc

SEQ ID NO: 571217 - RNA, 23 nt, Human
uggcugccacuuccaggccccga

SEQ ID NO: 571218 - RNA, 21 nt, Human
ugggaguggggaaaaaagacg

SEQ ID NO: 571219 - RNA, 19 nt, Human
ugggccaggcugcagucug

SEQ ID NO: 571220 - RNA, 21 nt, Human
uggguugggugugucugaugu

SEQ ID NO: 571221 - RNA, 18 nt, Human
ugguaccaccuucuauaa

SEQ ID NO: 571222 - RNA, 23 nt, Human
uggugcaggcaguggagggacac

SEQ ID NO: 571223 - RNA, 24 nt, Human
uguacagucgacugcaaaugaaac

SEQ ID NO: 571224 - RNA, 23 nt, Human
ugucccaagccgagggggccggu

SEQ ID NO: 571225 - RNA, 20 nt, Human
ugugggugggcuggaggccg

SEQ ID NO: 571226 - RNA, 21 nt, Human
uuacugcagccgagguccagg

SEQ ID NO: 571227 - RNA, 20 nt, Human
uuauaaacccgcaaucugcu

SEQ ID NO: 571228 - RNA, 23 nt, Human
uucaaaaccagaggaaggagguu

SEQ ID NO: 571229 - RNA, 24 nt, Human
uucaaaaccagaggaaggagguuc

SEQ ID NO: 571230 - RNA, 25 nt, Human
uuccaggccccgagagacaggccuc

SEQ ID NO: 571231 - RNA, 25 nt, Human
uucccauguucagcuuggacugcag

SEQ ID NO: 571232 - RNA, 18 nt, Human
uucucagauaaaaagcag

SEQ ID NO: 571233 - RNA, 24 nt, Human
uucucagauaaaaagcaguuuuau

SEQ ID NO: 571234 - RNA, 25 nt, Human
aaaagacccugcccguuuaaaaucc

SEQ ID NO: 571235 - RNA, 21 nt, Human
aaacaauaucuuugcuccagc

SEQ ID NO: 571236 - RNA, 26 nt, Human
aaacaucaccaacuugggcacaauuc

SEQ ID NO: 571237 - RNA, 19 nt, Human
aaaugagaggaaaaaagac

SEQ ID NO: 571238 - RNA, 19 nt, Human
aagcaggcaacaaacagca

SEQ ID NO: 571239 - RNA, 23 nt, Human
aauccaaaaccauaaacucuccu

SEQ ID NO: 571240 - RNA, 26 nt, Human
acaaacagcaugaaaggaaaagcuga

SEQ ID NO: 571241 - RNA, 22 nt, Human
accagaugacucugggagugaa

SEQ ID NO: 571242 - RNA, 21 nt, Human
acuaaaaugggaagaggugac

SEQ ID NO: 571243 - RNA, 18 nt, Human
agaguaaaaauaaaggcg

SEQ ID NO: 571244 - RNA, 18 nt, Human
agcacagaauacagggga

SEQ ID NO: 571245 - RNA, 19 nt, Human
agggacagcagaagaggga

SEQ ID NO: 571246 - RNA, 18 nt, Human
agucaauuccaaguacug

SEQ ID NO: 571247 - RNA, 18 nt, Human
auaaacucuccuucaaac

SEQ ID NO: 571248 - RNA, 20 nt, Human
auaaacucuccuucaaacaa

SEQ ID NO: 571249 - RNA, 24 nt, Human
auaagucgauuuuauacucaaagu

SEQ ID NO: 571250 - RNA, 23 nt, Human
aucuuugcuccagcagaagcauc

SEQ ID NO: 571251 - RNA, 22 nt, Human
auugcaaccugaccagaugacu

SEQ ID NO: 571252 - RNA, 21 nt, Human
caacaaacagcaugaaaggaa

SEQ ID NO: 571253 - RNA, 21 nt, Human
cacacaggcuuugacaauuaa

SEQ ID NO: 571254 - RNA, 21 nt, Human
cagaagcauccugggauuagu

SEQ ID NO: 571255 - RNA, 20 nt, Human
caggcaacaaacagcaugaa

SEQ ID NO: 571256 - RNA, 23 nt, Human
ccacccaggucaaaggcucaugu

SEQ ID NO: 571257 - RNA, 22 nt, Human
ccugcccguuuaaaauccaaaa

SEQ ID NO: 571258 - RNA, 19 nt, Human
cucagaaaggggugaagcu

SEQ ID NO: 571259 - RNA, 20 nt, Human
cugaccagaugacucuggga

SEQ ID NO: 571260 - RNA, 20 nt, Human
cuuucugccccacccagguc

SEQ ID NO: 571261 - RNA, 20 nt, Human
gaaggccucucuuguccaca

SEQ ID NO: 571262 - RNA, 24 nt, Human
gaaggccucucuuguccacaaaaa

SEQ ID NO: 571263 - RNA, 21 nt, Human
gcacagaauacaggggaacug

SEQ ID NO: 571264 - RNA, 22 nt, Human
gcaggaaguugcuguuuggucc

SEQ ID NO: 571265 - RNA, 22 nt, Human
ggcaacaaacagcaugaaagga

SEQ ID NO: 571266 - RNA, 23 nt, Human
ggcuggcuuugccuuccaaauuu

SEQ ID NO: 571267 - RNA, 20 nt, Human
gggagaauucuucauuuuuc

SEQ ID NO: 571268 - RNA, 18 nt, Human
guaaaggaaagccuuuuc

SEQ ID NO: 571269 - RNA, 23 nt, Human
guccuggaaguguaaaggaaagc

SEQ ID NO: 571270 - RNA, 21 nt, Human
uaaacaucaccaacuugggca

SEQ ID NO: 571271 - RNA, 20 nt, Human
uaaaccgaggcacuagacaa

SEQ ID NO: 571272 - RNA, 24 nt, Human
uaaaccgaggcacuagacaaggaa

SEQ ID NO: 571273 - RNA, 24 nt, Human
uacuaaaaugggaagaggugacuc

SEQ ID NO: 571274 - RNA, 23 nt, Human
uacuaaucauuaauaagucgauu

SEQ ID NO: 571275 - RNA, 21 nt, Human
uagacugaagugacccagaug

SEQ ID NO: 571276 - RNA, 18 nt, Human
uauacuggacagccccug

SEQ ID NO: 571277 - RNA, 20 nt, Human
uauuaaguaagcucaguguc

SEQ ID NO: 571278 - RNA, 20 nt, Human
ucaaacaauaucuuugcucc

SEQ ID NO: 571279 - RNA, 24 nt, Human
uccacaaaaaugagaggaaaaaag

SEQ ID NO: 571280 - RNA, 21 nt, Human
uccucauauugcaaccugaca

SEQ ID NO: 571281 - RNA, 21 nt, Human
uccuuguucacuucuccagcc

SEQ ID NO: 571282 - RNA, 23 nt, Human
ucucccagugauaggguggaagu

SEQ ID NO: 571283 - RNA, 23 nt, Human
ucucuuguccacaaaaaugagag

SEQ ID NO: 571284 - RNA, 20 nt, Human
ugaaaggaaaagcugagugg

SEQ ID NO: 571285 - RNA, 20 nt, Human
ugaaguagacugaagugacc

SEQ ID NO: 571286 - RNA, 18 nt, Human
ugacaagucacuucuggg

SEQ ID NO: 571287 - RNA, 22 nt, Human
ugcaacaagcaggcaacaaaca

SEQ ID NO: 571288 - RNA, 23 nt, Human
ugcaacaagcaggcaacaaacag

SEQ ID NO: 571289 - RNA, 19 nt, Human
ugcuccagcagaagcaucc

SEQ ID NO: 571290 - RNA, 25 nt, Human
uggaaguguaaaggaaagccuuuuu

SEQ ID NO: 571291 - RNA, 20 nt, Human
uggaaguguguggcaggaag

SEQ ID NO: 571292 - RNA, 24 nt, Human
uggaaguguguggcaggaaguugg

SEQ ID NO: 571293 - RNA, 24 nt, Human
ugggaaaauaaauuugacuccuug

SEQ ID NO: 571294 - RNA, 24 nt, Human
ugggagauggaguuugugguuccc

SEQ ID NO: 571295 - RNA, 24 nt, Human
ugguccuggaaguguaaaggaaag

SEQ ID NO: 571296 - RNA, 19 nt, Human
uguuugguccuggaagugu

SEQ ID NO: 571297 - RNA, 18 nt, Human
uucaaaguucuauuggga

SEQ ID NO: 571298 - RNA, 24 nt, Human
uuucugccccacccaggucaaagg

SEQ ID NO: 571299 - RNA, 22 nt, Human
uuuuaagucuugacaagucacu

SEQ ID NO: 571300 - RNA, 18 nt, Human
aaaaacuaaagcaaacgu

SEQ ID NO: 571301 - RNA, 19 nt, Human
aaaaacuaaagcaaacguu

SEQ ID NO: 571302 - RNA, 18 nt, Human
aaagcaggggcaggaggc

SEQ ID NO: 571303 - RNA, 23 nt, Human
aaagcuucauccuuacucagcag

SEQ ID NO: 571304 - RNA, 21 nt, Human
aacucugccagcgaggcaaag

SEQ ID NO: 571305 - RNA, 18 nt, Human
aagaacacaugauuuauu

SEQ ID NO: 571306 - RNA, 18 nt, Human
aagacaacucgucaucaa

SEQ ID NO: 571307 - RNA, 22 nt, Human
aagaggcugacuuugaucuugg

SEQ ID NO: 571308 - RNA, 24 nt, Human
aagcaccuccccugaguggagccc

SEQ ID NO: 571309 - RNA, 22 nt, Human
aaggagguggaaggagacaggc

SEQ ID NO: 571310 - RNA, 22 nt, Human
aaguccuggagagaggguggcc

SEQ ID NO: 571311 - RNA, 27 nt, Human
acaaaacagaugaaaaaacuaaagcaa

SEQ ID NO: 571312 - RNA, 23 nt, Human
acacacacacacacacacacaca

SEQ ID NO: 571313 - RNA, 23 nt, Human
acacacacacacacacacacaca

SEQ ID NO: 571314 - RNA, 23 nt, Human
acacacacacacacacacacaca

SEQ ID NO: 571315 - RNA, 23 nt, Human
acacacacacacacacacacaca

SEQ ID NO: 571316 - RNA, 23 nt, Human
acacacacacacacacacacaca

SEQ ID NO: 571317 - RNA, 23 nt, Human
acacacacacacacacacacaca

SEQ ID NO: 571318 - RNA, 23 nt, Human
acacacacacacacacacacaca

SEQ ID NO: 571319 - RNA, 23 nt, Human
acacacacacacacacacacaca

SEQ ID NO: 571320 - RNA, 23 nt, Human
acacacacacacacacacacaca

SEQ ID NO: 571321 - RNA, 23 nt, Human
acacacacacacacacacacaca

SEQ ID NO: 571322 - RNA, 23 nt, Human
acacacacacacacacacacaca

SEQ ID NO: 571323 - RNA, 23 nt, Human
acacacacacacacacacacaca

SEQ ID NO: 571324 - RNA, 23 nt, Human
acacacacacacacacacacaca

SEQ ID NO: 571325 - RNA, 23 nt, Human
acacacacacacacacacacagu

SEQ ID NO: 571326 - RNA, 21 nt, Human
acacacacacacacacacacg

SEQ ID NO: 571327 - RNA, 25 nt, Human
acacacacacacacacacggagaag

SEQ ID NO: 571328 - RNA, 23 nt, Human
acaccugcuccagcccugggaac

SEQ ID NO: 571329 - RNA, 22 nt, Human
accaaggccuggucccugugcu

SEQ ID NO: 571330 - RNA, 23 nt, Human
accagaagcaggaacugaggcug

SEQ ID NO: 571331 - RNA, 20 nt, Human
acccaugccucauccccaga

SEQ ID NO: 571332 - RNA, 23 nt, Human
acccucacucccuaacacacaca

SEQ ID NO: 571333 - RNA, 18 nt, Human
acccugggcucagaaucc

SEQ ID NO: 571334 - RNA, 24 nt, Human
accgacuacagacaucugugggug

SEQ ID NO: 571335 - RNA, 33 nt, Human
acucccuaacacacacacacacacacacacagu

SEQ ID NO: 571336 - RNA, 26 nt, Human
agaaggcccugcaccucccucagccc

SEQ ID NO: 571337 - RNA, 26 nt, Human
agacaggcaggugcggaaauccaggc

SEQ ID NO: 571338 - RNA, 23 nt, Human
agagccgaggcagggaggggccc

SEQ ID NO: 571339 - RNA, 22 nt, Human
agaggguggcccaggugagcag

SEQ ID NO: 571340 - RNA, 21 nt, Human
agccgaggcagggaggggccc

SEQ ID NO: 571341 - RNA, 21 nt, Human
agcucagcuaccccuggcccc

SEQ ID NO: 571342 - RNA, 22 nt, Human
aggaacaaaacagaugaaaaaa

SEQ ID NO: 571343 - RNA, 22 nt, Human
aggaacaaaacagaugaaaaaa

SEQ ID NO: 571344 - RNA, 19 nt, Human
aggcaagcggggagaggag

SEQ ID NO: 571345 - RNA, 21 nt, Human
aggcaagcggggagaggaggu

SEQ ID NO: 571346 - RNA, 24 nt, Human
aggcaagcggggagaggagguggc

SEQ ID NO: 571347 - RNA, 19 nt, Human
aggcaccccaacagagaag

SEQ ID NO: 571348 - RNA, 22 nt, Human
aggcagagagguagagacagag

SEQ ID NO: 571349 - RNA, 20 nt, Human
aggcaggggucagagaaggc

SEQ ID NO: 571350 - RNA, 23 nt, Human
aggcgguguccugcugggagccg

SEQ ID NO: 571351 - RNA, 20 nt, Human
agggggcagacaagagugag

SEQ ID NO: 571352 - RNA, 24 nt, Human
aggggucagagaaggcccugcacc

SEQ ID NO: 571353 - RNA, 24 nt, Human
agggguuggagaaggggcugaacc

SEQ ID NO: 571354 - RNA, 19 nt, Human
agguagagacagagaagga

SEQ ID NO: 571355 - RNA, 18 nt, Human
agugugguuccaggaggg

SEQ ID NO: 571356 - RNA, 18 nt, Human
agugugguuccaggaggg

SEQ ID NO: 571357 - RNA, 18 nt, Human
auaaggcaccccaacaga

SEQ ID NO: 571358 - RNA, 20 nt, Human
augaagcaagacacaguccc

SEQ ID NO: 571359 - RNA, 20 nt, Human
auggcacccggcuuccggac

SEQ ID NO: 571360 - RNA, 19 nt, Human
caaaggccaagcuugaccu

SEQ ID NO: 571361 - RNA, 22 nt, Human
caaagucucccaaauacugugc

SEQ ID NO: 571362 - RNA, 20 nt, Human
caacagagaagggcagggag

SEQ ID NO: 571363 - RNA, 19 nt, Human
caacuccuuucucccuucc

SEQ ID NO: 571364 - RNA, 25 nt, Human
caacuucccgagcuccagcccuccu

SEQ ID NO: 571365 - RNA, 20 nt, Human
caagacacagucccacucug

SEQ ID NO: 571366 - RNA, 20 nt, Human
caauacauagccaggagucu

SEQ ID NO: 571367 - RNA, 20 nt, Human
cacacacacacacacacaca

SEQ ID NO: 571368 - RNA, 20 nt, Human
cacacacacacacacacaca

SEQ ID NO: 571369 - RNA, 20 nt, Human
cacacacacacacacacaca

SEQ ID NO: 571370 - RNA, 20 nt, Human
cacacacacacacacacaca

SEQ ID NO: 571371 - RNA, 20 nt, Human
cacacacacacacacacaca

SEQ ID NO: 571372 - RNA, 20 nt, Human
cacacacacacacacacaca

SEQ ID NO: 571373 - RNA, 20 nt, Human
cacacacacacacacacaca

SEQ ID NO: 571374 - RNA, 20 nt, Human
cacacacacacacacacaca

SEQ ID NO: 571375 - RNA, 20 nt, Human
cacacacacacacacacaca

SEQ ID NO: 571376 - RNA, 20 nt, Human
cacacacacacacacacaca

SEQ ID NO: 571377 - RNA, 20 nt, Human
cacacacacacacacacaca

SEQ ID NO: 571378 - RNA, 20 nt, Human
cacacacacacacacacaca

SEQ ID NO: 571379 - RNA, 20 nt, Human
cacacacacacacacacaca

SEQ ID NO: 571380 - RNA, 20 nt, Human
cacacacacacacacacaca

SEQ ID NO: 571381 - RNA, 20 nt, Human
cacacacacacacacacaca

SEQ ID NO: 571382 - RNA, 20 nt, Human
cacacacacacacacacaca

SEQ ID NO: 571383 - RNA, 20 nt, Human
cacacacacacacacacaca

SEQ ID NO: 571384 - RNA, 20 nt, Human
cacacacacacacacacaca

SEQ ID NO: 571385 - RNA, 20 nt, Human
cacacacacacacacacaca

SEQ ID NO: 571386 - RNA, 20 nt, Human
cacacacacacacacacaca

SEQ ID NO: 571387 - RNA, 22 nt, Human
cacacacacacacacacacaca

SEQ ID NO: 571388 - RNA, 22 nt, Human
cacacacacacacacacacaca

SEQ ID NO: 571389 - RNA, 22 nt, Human
cacacacacacacacacacaca

SEQ ID NO: 571390 - RNA, 22 nt, Human
cacacacacacacacacacaca

SEQ ID NO: 571391 - RNA, 22 nt, Human
cacacacacacacacacacaca

SEQ ID NO: 571392 - RNA, 22 nt, Human
cacacacacacacacacacaca

SEQ ID NO: 571393 - RNA, 22 nt, Human
cacacacacacacacacacaca

SEQ ID NO: 571394 - RNA, 22 nt, Human
cacacacacacacacacacaca

SEQ ID NO: 571395 - RNA, 26 nt, Human
cacacacacacacacacacacacaca

SEQ ID NO: 571396 - RNA, 26 nt, Human
cacacacacacacacacacacacaca

SEQ ID NO: 571397 - RNA, 26 nt, Human
cacacacacacacacacacacacaca

SEQ ID NO: 571398 - RNA, 26 nt, Human
cacacacacacacacacacacacaca

SEQ ID NO: 571399 - RNA, 26 nt, Human
cacacacacacacacacacacacaca

SEQ ID NO: 571400 - RNA, 26 nt, Human
cacacacacacacacacacacacaca

SEQ ID NO: 571401 - RNA, 26 nt, Human
cacacacacacacacacacacacaca

SEQ ID NO: 571402 - RNA, 26 nt, Human
cacacacacacacacacacacacaca

SEQ ID NO: 571403 - RNA, 26 nt, Human
cacacacacacacacacacacacaca

SEQ ID NO: 571404 - RNA, 26 nt, Human
cacacacacacacacacacacacaca

SEQ ID NO: 571405 - RNA, 26 nt, Human
cacacacacacacacacacacacaca

SEQ ID NO: 571406 - RNA, 26 nt, Human
cacacacacacacacacacacacaca

SEQ ID NO: 571407 - RNA, 26 nt, Human
cacacacacacacacacacacacaca

SEQ ID NO: 571408 - RNA, 26 nt, Human
cacacacacacacacacacacacaca

SEQ ID NO: 571409 - RNA, 26 nt, Human
cacacacacacacacacacacacacg

SEQ ID NO: 571410 - RNA, 27 nt, Human
cacacacacacacacacacggagaaga

SEQ ID NO: 571411 - RNA, 20 nt, Human
caccagcugacaaguccugg

SEQ ID NO: 571412 - RNA, 19 nt, Human
cacggcacagugugucccc

SEQ ID NO: 571413 - RNA, 21 nt, Human
cacucuggcucuguggggacc

SEQ ID NO: 571414 - RNA, 21 nt, Human
cagaaaaaccagcucccccuc

SEQ ID NO: 571415 - RNA, 18 nt, Human
cagaagcaggaacugagg

SEQ ID NO: 571416 - RNA, 22 nt, Human
cagccaggaccugcucgaaaac

SEQ ID NO: 571417 - RNA, 19 nt, Human
cagcccaguucucuuccca

SEQ ID NO: 571418 - RNA, 20 nt, Human
cagcggguggagggguacac

SEQ ID NO: 571419 - RNA, 19 nt, Human
caggauaaggcaccccaac

SEQ ID NO: 571420 - RNA, 20 nt, Human
caggcacucuggcucugugg

SEQ ID NO: 571421 - RNA, 23 nt, Human
cagggcugggggaugggaacagg

SEQ ID NO: 571422 - RNA, 24 nt, Human
caggggcaggaggcucaaagcuuc

SEQ ID NO: 571423 - RNA, 21 nt, Human
caggggccuugcugagccagu

SEQ ID NO: 571424 - RNA, 21 nt, Human
caguauccugggcaaagaggg

SEQ ID NO: 571425 - RNA, 23 nt, Human
cagugccagaaacggcccuggcc

SEQ ID NO: 571426 - RNA, 20 nt, Human
ccagccucccagugccagaa

SEQ ID NO: 571427 - RNA, 18 nt, Human
ccaggcaguggcccaagc

SEQ ID NO: 571428 - RNA, 25 nt, Human
cccaacccuggguugggaccuggaa

SEQ ID NO: 571429 - RNA, 18 nt, Human
cccaagcuuaugaagggg

SEQ ID NO: 571430 - RNA, 21 nt, Human
cccaggaaggacaacuucccg

SEQ ID NO: 571431 - RNA, 22 nt, Human
cccccucuuccuucucccuccc

SEQ ID NO: 571432 - RNA, 21 nt, Human
ccccucaggcuggguuccuac

SEQ ID NO: 571433 - RNA, 21 nt, Human
ccccucuuccuucucccuccc

SEQ ID NO: 571434 - RNA, 31 nt, Human
cccuaacacacacacacacacacacacacag

SEQ ID NO: 571435 - RNA, 24 nt, Human
cccucacucccuaacacacacaca

SEQ ID NO: 571436 - RNA, 20 nt, Human
ccucaggcacucuggcucug

SEQ ID NO: 571437 - RNA, 18 nt, Human
ccucaucugucucccagg

SEQ ID NO: 571438 - RNA, 21 nt, Human
ccucaucugucucccagguuc

SEQ ID NO: 571439 - RNA, 19 nt, Human
ccuccagaaaaaccagcuc

SEQ ID NO: 571440 - RNA, 22 nt, Human
ccuccagaaaaaccagcucccc

SEQ ID NO: 571441 - RNA, 23 nt, Human
ccuccagaaaaaccagcuccccc

SEQ ID NO: 571442 - RNA, 20 nt, Human
ccucccaguugggaggaccu

SEQ ID NO: 571443 - RNA, 19 nt, Human
ccucgggccccacuugccc

SEQ ID NO: 571444 - RNA, 19 nt, Human
ccucgggccccacuugccc

SEQ ID NO: 571445 - RNA, 24 nt, Human
ccucugggggaaccuccagaaaaa

SEQ ID NO: 571446 - RNA, 21 nt, Human
ccugcccaccagacucggaaa

SEQ ID NO: 571447 - RNA, 21 nt, Human
ccuggguugggaccuggaagc

SEQ ID NO: 571448 - RNA, 22 nt, Human
cggaaagcuuugggggcaggag

SEQ ID NO: 571449 - RNA, 24 nt, Human
cggcagaagaaggagcacggcaca

SEQ ID NO: 571450 - RNA, 19 nt, Human
cggcccuggcccaggaagg

SEQ ID NO: 571451 - RNA, 20 nt, Human
cggcuuccggacgcaaaccu

SEQ ID NO: 571452 - RNA, 18 nt, Human
cggguucagaacccucua

SEQ ID NO: 571453 - RNA, 20 nt, Human
cuauacccaugccucauccc

SEQ ID NO: 571454 - RNA, 24 nt, Human
cuauggcacccggcuuccggacgc

SEQ ID NO: 571455 - RNA, 22 nt, Human
cucaacccaacccuggguuggg

SEQ ID NO: 571456 - RNA, 21 nt, Human
cucauccccagagcacuugcc

SEQ ID NO: 571457 - RNA, 26 nt, Human
cuccaacuccuuucucccuuccuaua

SEQ ID NO: 571458 - RNA, 18 nt, Human
cuccuggaacuggcagga

SEQ ID NO: 571459 - RNA, 23 nt, Human
cuccuggaacuggcaggacccag

SEQ ID NO: 571460 - RNA, 21 nt, Human
cucuguggggaccucccuugg

SEQ ID NO: 571461 - RNA, 18 nt, Human
cucuuccuucucccuccc

SEQ ID NO: 571462 - RNA, 19 nt, Human
cugagagacccucacuccc

SEQ ID NO: 571463 - RNA, 24 nt, Human
cugaguggagcccaggagaagacc

SEQ ID NO: 571464 - RNA, 22 nt, Human
cuggggaagccuuuccuggccc

SEQ ID NO: 571465 - RNA, 24 nt, Human
cuggucccugugcucuugaccuuc

SEQ ID NO: 571466 - RNA, 18 nt, Human
cugugggugagacagacg

SEQ ID NO: 571467 - RNA, 21 nt, Human
cuucccgagcuccagcccucc

SEQ ID NO: 571468 - RNA, 20 nt, Human
cuuccuucucccucccuggg

SEQ ID NO: 571469 - RNA, 18 nt, Human
cuugagaaucuggggaag

SEQ ID NO: 571470 - RNA, 26 nt, Human
gaaaaaccagcucccccucuuccuuc

SEQ ID NO: 571471 - RNA, 23 nt, Human
gaaagcuuugggggcaggagggc

SEQ ID NO: 571472 - RNA, 21 nt, Human
gaagaugccuggggacuuggg

SEQ ID NO: 571473 - RNA, 22 nt, Human
gaagguagggggcagacaagag

SEQ ID NO: 571474 - RNA, 18 nt, Human
gacccagggccuuuaagc

SEQ ID NO: 571475 - RNA, 19 nt, Human
gaccuggaagccgagggaa

SEQ ID NO: 571476 - RNA, 20 nt, Human
gacuuggugagaacugggag

SEQ ID NO: 571477 - RNA, 18 nt, Human
gagaaggaggggcuggga

SEQ ID NO: 571478 - RNA, 22 nt, Human
gagccagggcacagggucggga

SEQ ID NO: 571479 - RNA, 23 nt, Human
gagccagggcugggggaugggaa

SEQ ID NO: 571480 - RNA, 19 nt, Human
gagcuccagcccuccucag

SEQ ID NO: 571481 - RNA, 23 nt, Human
gagcugggcguggcggcagaaga

SEQ ID NO: 571482 - RNA, 20 nt, Human
gagggaagguagggggcaga

SEQ ID NO: 571483 - RNA, 21 nt, Human
gcaccccaacagagaagggcc

SEQ ID NO: 571484 - RNA, 23 nt, Human
gcagaagaaggagcacggcacag

SEQ ID NO: 571485 - RNA, 20 nt, Human
gcauggggagaagaggcuga

SEQ ID NO: 571486 - RNA, 21 nt, Human
gccagccucccagugccagaa

SEQ ID NO: 571487 - RNA, 18 nt, Human
gccagcugccccugcuca

SEQ ID NO: 571488 - RNA, 24 nt, Human
gcucccccucuuccuucucccucc

SEQ ID NO: 571489 - RNA, 24 nt, Human
gcugaauucauacagcucaaucug

SEQ ID NO: 571490 - RNA, 18 nt, Human
gcugacaaguccuggaga

SEQ ID NO: 571491 - RNA, 25 nt, Human
gcugagccagucuccucaucugucu

SEQ ID NO: 571492 - RNA, 23 nt, Human
ggaagccgagggaaugacaacuc

SEQ ID NO: 571493 - RNA, 23 nt, Human
ggaaggagguggaaggagacagg

SEQ ID NO: 571494 - RNA, 24 nt, Human
ggagacaggcaggugcggaaaucc

SEQ ID NO: 571495 - RNA, 18 nt, Human
ggagcccaggagaagacc

SEQ ID NO: 571496 - RNA, 18 nt, Human
ggaugggaacaggaggca

SEQ ID NO: 571497 - RNA, 20 nt, Human
ggcagaaagcaggggcagga

SEQ ID NO: 571498 - RNA, 23 nt, Human
ggcagagugcagggcaggugggg

SEQ ID NO: 571499 - RNA, 23 nt, Human
ggcaggagggcugcuggggccug

SEQ ID NO: 571500 - RNA, 21 nt, Human
ggcccaaagccgggcuuggaa

SEQ ID NO: 571501 - RNA, 19 nt, Human
ggcugggagaccuggaggc

SEQ ID NO: 571502 - RNA, 24 nt, Human
gggaaggagguggaaggagacagg

SEQ ID NO: 571503 - RNA, 19 nt, Human
gggaccuggaagccgaggg

SEQ ID NO: 571504 - RNA, 20 nt, Human
gggaggaccuaggagccagg

SEQ ID NO: 571505 - RNA, 19 nt, Human
gggcauggccugggucucg

SEQ ID NO: 571506 - RNA, 20 nt, Human
gggcguggcggcagaagaag

SEQ ID NO: 571507 - RNA, 19 nt, Human
ggggcugggagaccuggag

SEQ ID NO: 571508 - RNA, 23 nt, Human
gguagagacagagaaggaggggc

SEQ ID NO: 571509 - RNA, 24 nt, Human
gucaaggagagggcacuugaccca

SEQ ID NO: 571510 - RNA, 19 nt, Human
gucaucaacagcacugacu

SEQ ID NO: 571511 - RNA, 21 nt, Human
guccugcugggagcucagccu

SEQ ID NO: 571512 - RNA, 24 nt, Human
gugauucaaguagugugguuccag

SEQ ID NO: 571513 - RNA, 21 nt, Human
guggagcagccgaagugcccc

SEQ ID NO: 571514 - RNA, 19 nt, Human
uaaggcaccccaacagaga

SEQ ID NO: 571515 - RNA, 21 nt, Human
uaaggcaccccaacagagaag

SEQ ID NO: 571516 - RNA, 28 nt, Human
uaaggcaccccaacagagaagggcaggg

SEQ ID NO: 571517 - RNA, 19 nt, Human
uaaguguccaagauccagg

SEQ ID NO: 571518 - RNA, 23 nt, Human
uacacagaggcacagacauggcc

SEQ ID NO: 571519 - RNA, 20 nt, Human
ucaaagucucccaaauacug

SEQ ID NO: 571520 - RNA, 19 nt, Human
ucagagcccgcucagccag

SEQ ID NO: 571521 - RNA, 20 nt, Human
ucagcuaccccuggccccag

SEQ ID NO: 571522 - RNA, 18 nt, Human
ucaugaagcaagacacag

SEQ ID NO: 571523 - RNA, 23 nt, Human
uccaagauuucuguguagggaac

SEQ ID NO: 571524 - RNA, 27 nt, Human
ucccucagcccgcagcggguggagggg

SEQ ID NO: 571525 - RNA, 23 nt, Human
uccugggcaaagagggcagagug

SEQ ID NO: 571526 - RNA, 25 nt, Human
uccuguggcuuccccucaggcuggg

SEQ ID NO: 571527 - RNA, 19 nt, Human
ucgaaaaccaggcaguucc

SEQ ID NO: 571528 - RNA, 26 nt, Human
ucugggagaggagacaggcaggugcg

SEQ ID NO: 571529 - RNA, 26 nt, Human
ucugugggugagacagacggcaggac

SEQ ID NO: 571530 - RNA, 24 nt, Human
ucuugucuccaacuccuuucuccc

SEQ ID NO: 571531 - RNA, 21 nt, Human
ugacccaacucugccagcgag

SEQ ID NO: 571532 - RNA, 20 nt, Human
ugacucaaggaacaaaacag

SEQ ID NO: 571533 - RNA, 18 nt, Human
ugagacccgcugaauuca

SEQ ID NO: 571534 - RNA, 27 nt, Human
ugaguggagcccaggagaagaccagaa

SEQ ID NO: 571535 - RNA, 19 nt, Human
ugcaggcgguguccugcug

SEQ ID NO: 571536 - RNA, 20 nt, Human
ugcaggcgguguccugcugg

SEQ ID NO: 571537 - RNA, 21 nt, Human
ugccucugccucauccuggag

SEQ ID NO: 571538 - RNA, 20 nt, Human
ugccuggggacuugggccca

SEQ ID NO: 571539 - RNA, 23 nt, Human
ugcugggucccaggcaguggccc

SEQ ID NO: 571540 - RNA, 21 nt, Human
uggagcccaggagaagaccag

SEQ ID NO: 571541 - RNA, 19 nt, Human
uggagucagcccaguucuc

SEQ ID NO: 571542 - RNA, 21 nt, Human
uggagugagacccgcugaauu

SEQ ID NO: 571543 - RNA, 18 nt, Human
uggcucaggauaaggcac

SEQ ID NO: 571544 - RNA, 19 nt, Human
ugggaaggagguggaagga

SEQ ID NO: 571545 - RNA, 21 nt, Human
ugggaaggagguggaaggaga

SEQ ID NO: 571546 - RNA, 21 nt, Human
ugggagaccuggaggccugag

SEQ ID NO: 571547 - RNA, 18 nt, Human
ugggcaaagagggcagag

SEQ ID NO: 571548 - RNA, 19 nt, Human
uggggaagccuuuccuggc

SEQ ID NO: 571549 - RNA, 19 nt, Human
ugggggaugggaacaggag

SEQ ID NO: 571550 - RNA, 19 nt, Human
ugggggcaggagggcugcu

SEQ ID NO: 571551 - RNA, 23 nt, Human
ugggggcaggagggcugcugggg

SEQ ID NO: 571552 - RNA, 24 nt, Human
ugggucccaggcaguggcccaagc

SEQ ID NO: 571553 - RNA, 20 nt, Human
ugguagaagagccaccuggg

SEQ ID NO: 571554 - RNA, 27 nt, Human
ugucccgggagccagggcacagggucg

SEQ ID NO: 571555 - RNA, 22 nt, Human
ugugcucuugaccuucaucuca

SEQ ID NO: 571556 - RNA, 23 nt, Human
uucggacaggagggccucugggg

SEQ ID NO: 571557 - RNA, 23 nt, Human
uugggaccuggaagccgagggaa

SEQ ID NO: 571558 - RNA, 21 nt, Human
uugggcccacauucacaccga

SEQ ID NO: 571559 - RNA, 18 nt, Human
uuuuuuuuuuuuuuuuug

SEQ ID NO: 571560 - RNA, 22 nt, Human
aaagaaggggaggggccgggag

SEQ ID NO: 571561 - RNA, 18 nt, Human
aaagggcuaggccucugg

SEQ ID NO: 571562 - RNA, 24 nt, Human
aaagugguuuggaacccccaauca

SEQ ID NO: 571563 - RNA, 19 nt, Human
accaccaaauggugaagag

SEQ ID NO: 571564 - RNA, 20 nt, Human
accugccuccuggagauggg

SEQ ID NO: 571565 - RNA, 23 nt, Human
agacaaagaaggggaggggccgg

SEQ ID NO: 571566 - RNA, 23 nt, Human
agcaacagcagucuauccucucg

SEQ ID NO: 571567 - RNA, 20 nt, Human
agggcauggggccagccccg

SEQ ID NO: 571568 - RNA, 24 nt, Human
aggggaggggccgggagagggucg

SEQ ID NO: 571569 - RNA, 21 nt, Human
agucagcucugcagcuggugg

SEQ ID NO: 571570 - RNA, 24 nt, Human
agugguuuggaacccccaaucauu

SEQ ID NO: 571571 - RNA, 21 nt, Human
caaagguacugagcccagaga

SEQ ID NO: 571572 - RNA, 23 nt, Human
caaagguacugagcccagagaca

SEQ ID NO: 571573 - RNA, 22 nt, Human
cacacaugcccaucaaggaccc

SEQ ID NO: 571574 - RNA, 21 nt, Human
caccgugccccgagucucagc

SEQ ID NO: 571575 - RNA, 22 nt, Human
cagcaacagcagucuauccucu

SEQ ID NO: 571576 - RNA, 18 nt, Human
cagcucgucagagcccca

SEQ ID NO: 571577 - RNA, 23 nt, Human
cagcugccucuagcuucaugucc

SEQ ID NO: 571578 - RNA, 18 nt, Human
cagggcaaagguacugag

SEQ ID NO: 571579 - RNA, 18 nt, Human
caguaagugaagacucuc

SEQ ID NO: 571580 - RNA, 19 nt, Human
cagugcuucaccgugcccc

SEQ ID NO: 571581 - RNA, 25 nt, Human
caucacacaugcccaucaaggaccc

SEQ ID NO: 571582 - RNA, 19 nt, Human
ccaagggagaagaaagugg

SEQ ID NO: 571583 - RNA, 18 nt, Human
ccacgccuggcccugacu

SEQ ID NO: 571584 - RNA, 19 nt, Human
ccccaaggccagacuccac

SEQ ID NO: 571585 - RNA, 18 nt, Human
ccccagggcuuccuccac

SEQ ID NO: 571586 - RNA, 23 nt, Human
ccccagugucuccgcgccucucc

SEQ ID NO: 571587 - RNA, 25 nt, Human
cccugaguuccaggaggcgugaccc

SEQ ID NO: 571588 - RNA, 24 nt, Human
ccgugccccgagucucagcggucc

SEQ ID NO: 571589 - RNA, 22 nt, Human
ccuccacaauugaugaguccac

SEQ ID NO: 571590 - RNA, 19 nt, Human
ccuccaucuggcucccgag

SEQ ID NO: 571591 - RNA, 19 nt, Human
ccuggagaugggggugggg

SEQ ID NO: 571592 - RNA, 23 nt, Human
cgagcggguguuggcucugaggc

SEQ ID NO: 571593 - RNA, 19 nt, Human
cgccaccuccaucuggcuc

SEQ ID NO: 571594 - RNA, 19 nt, Human
cgccagacccagccagacc

SEQ ID NO: 571595 - RNA, 24 nt, Human
cgccucucccuccacccagucuca

SEQ ID NO: 571596 - RNA, 21 nt, Human
cgcgccucucccuccacccag

SEQ ID NO: 571597 - RNA, 18 nt, Human
cgucagagccccaguguc

SEQ ID NO: 571598 - RNA, 19 nt, Human
cucccgagcgccagaccca

SEQ ID NO: 571599 - RNA, 21 nt, Human
cucccgagcgccagacccagc

SEQ ID NO: 571600 - RNA, 24 nt, Human
cugaaugcacagaaacuugggguc

SEQ ID NO: 571601 - RNA, 21 nt, Human
cugcuauuaaccagagugcaa

SEQ ID NO: 571602 - RNA, 21 nt, Human
cugcugcuauuaaccagagug

SEQ ID NO: 571603 - RNA, 22 nt, Human
cugggagacugcuccuucccca

SEQ ID NO: 571604 - RNA, 22 nt, Human
cugggcuguccaagugagccug

SEQ ID NO: 571605 - RNA, 21 nt, Human
cuuagagccccaaggccagac

SEQ ID NO: 571606 - RNA, 22 nt, Human
gaauagagucggcaaggucccc

SEQ ID NO: 571607 - RNA, 20 nt, Human
gagaggugcgagcgcggggg

SEQ ID NO: 571608 - RNA, 23 nt, Human
gagcagacccagggcugggagac

SEQ ID NO: 571609 - RNA, 18 nt, Human
gagucagcucugcagcug

SEQ ID NO: 571610 - RNA, 25 nt, Human
gccgggagaggugcgagcgcggggg

SEQ ID NO: 571611 - RNA, 19 nt, Human
gccucugguggggaggggg

SEQ ID NO: 571612 - RNA, 22 nt, Human
gcugccucuagcuucaugucca

SEQ ID NO: 571613 - RNA, 18 nt, Human
ggagaugggggugggggg

SEQ ID NO: 571614 - RNA, 18 nt, Human
ggagaugggggugggggg

SEQ ID NO: 571615 - RNA, 19 nt, Human
ggagcugacauucuuggaa

SEQ ID NO: 571616 - RNA, 19 nt, Human
ggcagccuuggggagcgcc

SEQ ID NO: 571617 - RNA, 22 nt, Human
ggcucccauggccccuaucgcc

SEQ ID NO: 571618 - RNA, 18 nt, Human
gggaggggccgggagagg

SEQ ID NO: 571619 - RNA, 21 nt, Human
ggggagcagacccagggcugg

SEQ ID NO: 571620 - RNA, 20 nt, Human
ggggaggggccgggagaggg

SEQ ID NO: 571621 - RNA, 24 nt, Human
gucgagcggguguuggcucugagg

SEQ ID NO: 571622 - RNA, 23 nt, Human
gugcgagcgcggggguccaccgg

SEQ ID NO: 571623 - RNA, 25 nt, Human
gugggacucacaggagggagaggua

SEQ ID NO: 571624 - RNA, 21 nt, Human
guuuggaacccccaaucauuc

SEQ ID NO: 571625 - RNA, 18 nt, Human
uagcuucauguccaauuc

SEQ ID NO: 571626 - RNA, 21 nt, Human
uaggauuuggagcuauagaga

SEQ ID NO: 571627 - RNA, 23 nt, Human
ucacacagaaacacucugggggc

SEQ ID NO: 571628 - RNA, 19 nt, Human
ucagagucagcucugcagc

SEQ ID NO: 571629 - RNA, 22 nt, Human
uccacugcugcugccucuggcu

SEQ ID NO: 571630 - RNA, 20 nt, Human
uccaggaggcgugacccccc

SEQ ID NO: 571631 - RNA, 19 nt, Human
ucccauggccccuaucgcc

SEQ ID NO: 571632 - RNA, 27 nt, Human
uccccaggguccccagggcuuccucca

SEQ ID NO: 571633 - RNA, 19 nt, Human
ucccugaguuccaggaggc

SEQ ID NO: 571634 - RNA, 22 nt, Human
ucuucagagucagcucugcagc

SEQ ID NO: 571635 - RNA, 24 nt, Human
ucuucagagucagcucugcagcug

SEQ ID NO: 571636 - RNA, 18 nt, Human
ugaagacucucuucagag

SEQ ID NO: 571637 - RNA, 21 nt, Human
ugaagugauaugguccagggc

SEQ ID NO: 571638 - RNA, 18 nt, Human
ugagaggguuucacacag

SEQ ID NO: 571639 - RNA, 23 nt, Human
ugagaggguuucacacagaaaca

SEQ ID NO: 571640 - RNA, 22 nt, Human
ugagccugacuucccuuccaag

SEQ ID NO: 571641 - RNA, 22 nt, Human
ugaggcuuguccuaggagcugg

SEQ ID NO: 571642 - RNA, 21 nt, Human
ugcaaaagacaaagaagggga

SEQ ID NO: 571643 - RNA, 21 nt, Human
ugcaaaagacaaagaagggga

SEQ ID NO: 571644 - RNA, 19 nt, Human
ugcagcugguggagucauc

SEQ ID NO: 571645 - RNA, 24 nt, Human
ugccucuagcuucauguccaauuc

SEQ ID NO: 571646 - RNA, 20 nt, Human
ugcuucaccgugccccgagu

SEQ ID NO: 571647 - RNA, 21 nt, Human
uggagauggggguggggggag

SEQ ID NO: 571648 - RNA, 21 nt, Human
uggcucccgagcgccagaccc

SEQ ID NO: 571649 - RNA, 21 nt, Human
uggggagcagacccagggcug

SEQ ID NO: 571650 - RNA, 24 nt, Human
ugggggccuucggugacaaaaggg

SEQ ID NO: 571651 - RNA, 19 nt, Human
uguccuaggagcuggcugg

SEQ ID NO: 571652 - RNA, 22 nt, Human
uucauccuaagcuaccuuaaaa

SEQ ID NO: 571653 - RNA, 23 nt, Human
aaaaaccuccagggagcccaaag

SEQ ID NO: 571654 - RNA, 23 nt, Human
aaaaaccuccagggagcccaaag

SEQ ID NO: 571655 - RNA, 19 nt, Human
aaaacaaggccucaaaccc

SEQ ID NO: 571656 - RNA, 19 nt, Human
aaaacaaggccucaaaccc

SEQ ID NO: 571657 - RNA, 19 nt, Human
aaacccgcaggggcucaga

SEQ ID NO: 571658 - RNA, 19 nt, Human
aaacccgcaggggcucaga

SEQ ID NO: 571659 - RNA, 18 nt, Human
aaaggagggaaagggucc

SEQ ID NO: 571660 - RNA, 18 nt, Human
aaaggagggaaagggucc

SEQ ID NO: 571661 - RNA, 20 nt, Human
aaaggccgggucuggagggc

SEQ ID NO: 571662 - RNA, 20 nt, Human
aaaggccgggucuggagggc

SEQ ID NO: 571663 - RNA, 19 nt, Human
aacaacuuccagaagcuga

SEQ ID NO: 571664 - RNA, 21 nt, Human
aacaaucuaacaggccaagug

SEQ ID NO: 571665 - RNA, 21 nt, Human
aacaaucuaacaggccaagug

SEQ ID NO: 571666 - RNA, 19 nt, Human
aaccagaaaggccgggucu

SEQ ID NO: 571667 - RNA, 19 nt, Human
aaccagaaaggccgggucu

SEQ ID NO: 571668 - RNA, 20 nt, Human
aagagaccugggcagggacg

SEQ ID NO: 571669 - RNA, 20 nt, Human
aagagaccugggcagggacg

SEQ ID NO: 571670 - RNA, 20 nt, Human
aagcugccccuucaaaggcc

SEQ ID NO: 571671 - RNA, 20 nt, Human
aagcugccccuucaaaggcc

SEQ ID NO: 571672 - RNA, 19 nt, Human
aagggcaaacucuccaagc

SEQ ID NO: 571673 - RNA, 19 nt, Human
aagggcaaacucuccaagc

SEQ ID NO: 571674 - RNA, 19 nt, Human
acaacuuccagaagcugcc

SEQ ID NO: 571675 - RNA, 19 nt, Human
acaacuuccagaagcugcc

SEQ ID NO: 571676 - RNA, 21 nt, Human
acacagguguccugccgccgc

SEQ ID NO: 571677 - RNA, 20 nt, Human
accccacccaccacgugcug

SEQ ID NO: 571678 - RNA, 18 nt, Human
accuccucauccugaaaa

SEQ ID NO: 571679 - RNA, 22 nt, Human
acucccuucuucaggagugcca

SEQ ID NO: 571680 - RNA, 22 nt, Human
acucccuucuucaggagugcca

SEQ ID NO: 571681 - RNA, 20 nt, Human
acuggcucucagcacuaaaa

SEQ ID NO: 571682 - RNA, 23 nt, Human
agacaagagcugcaggggacguc

SEQ ID NO: 571683 - RNA, 23 nt, Human
agacaagagcugcaggggacguc

SEQ ID NO: 571684 - RNA, 19 nt, Human
agacaagagcugcaggugu

SEQ ID NO: 571685 - RNA, 19 nt, Human
agacaagagcugcaggugu

SEQ ID NO: 571686 - RNA, 23 nt, Human
agacaagggcaaacucuccaagc

SEQ ID NO: 571687 - RNA, 23 nt, Human
agacaagggcaaacucuccaagc

SEQ ID NO: 571688 - RNA, 18 nt, Human
agaugcagaucagguggg

SEQ ID NO: 571689 - RNA, 18 nt, Human
agaugcagaucagguggg

SEQ ID NO: 571690 - RNA, 19 nt, Human
agauggagguugucuucuc

SEQ ID NO: 571691 - RNA, 19 nt, Human
agauggagguugucuucuc

SEQ ID NO: 571692 - RNA, 22 nt, Human
agcagaaugaacagagucucuu

SEQ ID NO: 571693 - RNA, 22 nt, Human
agcagaaugaacagagucucuu

SEQ ID NO: 571694 - RNA, 22 nt, Human
agcaggcagcuuggcaugcagg

SEQ ID NO: 571695 - RNA, 22 nt, Human
agcaggcagcuuggcaugcagg

SEQ ID NO: 571696 - RNA, 19 nt, Human
agcugccccuucaaaggcc

SEQ ID NO: 571697 - RNA, 19 nt, Human
agcugccccuucaaaggcc

SEQ ID NO: 571698 - RNA, 21 nt, Human
aggagaaaacaacuuccagaa

SEQ ID NO: 571699 - RNA, 21 nt, Human
aggagaaaacaacuuccagaa

SEQ ID NO: 571700 - RNA, 22 nt, Human
aggagaaaacaacuuccagaag

SEQ ID NO: 571701 - RNA, 22 nt, Human
aggagaaaacaacuuccagaag

SEQ ID NO: 571702 - RNA, 21 nt, Human
agguguccugccgccagcccc

SEQ ID NO: 571703 - RNA, 23 nt, Human
agucaagguucuucaagccacag

SEQ ID NO: 571704 - RNA, 23 nt, Human
agucaagguucuucaagccacag

SEQ ID NO: 571705 - RNA, 24 nt, Human
augcaaacaaagaugcagaucagg

SEQ ID NO: 571706 - RNA, 24 nt, Human
augcaaacaaagaugcagaucagg

SEQ ID NO: 571707 - RNA, 20 nt, Human
caaaagggccugagcggcga

SEQ ID NO: 571708 - RNA, 21 nt, Human
caacaaggagaaaccccacuc

SEQ ID NO: 571709 - RNA, 21 nt, Human
caacaaggagaaaccccacuc

SEQ ID NO: 571710 - RNA, 18 nt, Human
caacuuccagaagcugcc

SEQ ID NO: 571711 - RNA, 18 nt, Human
caacuuccagaagcugcc

SEQ ID NO: 571712 - RNA, 19 nt, Human
caagccacaggcguucucg

SEQ ID NO: 571713 - RNA, 19 nt, Human
caagccacaggcguucucg

SEQ ID NO: 571714 - RNA, 22 nt, Human
caaugcccaccugugccugcug

SEQ ID NO: 571715 - RNA, 22 nt, Human
caaugcccaccugugccugcug

SEQ ID NO: 571716 - RNA, 20 nt, Human
cacaccuaacccucaucucc

SEQ ID NO: 571717 - RNA, 20 nt, Human
cacaccuaacccucaucucc

SEQ ID NO: 571718 - RNA, 25 nt, Human
cacuaaaaacaaggccucaaacccg

SEQ ID NO: 571719 - RNA, 25 nt, Human
cacuaaaaacaaggccucaaacccg

SEQ ID NO: 571720 - RNA, 22 nt, Human
cacucaggacuucccaccccgc

SEQ ID NO: 571721 - RNA, 21 nt, Human
cagcccccaggcuuggccucc

SEQ ID NO: 571722 - RNA, 23 nt, Human
cagcgcagccugcacaggacuuc

SEQ ID NO: 571723 - RNA, 23 nt, Human
cagcgcagccugcacaggacuuc

SEQ ID NO: 571724 - RNA, 18 nt, Human
cagcgcagucacgcuccc

SEQ ID NO: 571725 - RNA, 18 nt, Human
cagcugcaccccacccac

SEQ ID NO: 571726 - RNA, 20 nt, Human
cagggguuaaccagaaaggc

SEQ ID NO: 571727 - RNA, 20 nt, Human
cagggguuaaccagaaaggc

SEQ ID NO: 571728 - RNA, 19 nt, Human
cagggucugagucgggagg

SEQ ID NO: 571729 - RNA, 19 nt, Human
cagggucugagucgggagg

SEQ ID NO: 571730 - RNA, 23 nt, Human
caggguuccaggccuguggccuc

SEQ ID NO: 571731 - RNA, 22 nt, Human
cagguguccugccgccagcccc

SEQ ID NO: 571732 - RNA, 21 nt, Human
cauccugaaaacccuuugccc

SEQ ID NO: 571733 - RNA, 21 nt, Human
cauccugucuugaccuccuca

SEQ ID NO: 571734 - RNA, 21 nt, Human
cauccugucuugaccuccuca

SEQ ID NO: 571735 - RNA, 19 nt, Human
caugacaaggcagccaggc

SEQ ID NO: 571736 - RNA, 19 nt, Human
caugacaaggcagccaggc

SEQ ID NO: 571737 - RNA, 24 nt, Human
caugggccucccucccuuccaggg

SEQ ID NO: 571738 - RNA, 20 nt, Human
ccaaaggagggaaagggucc

SEQ ID NO: 571739 - RNA, 20 nt, Human
ccaaaggagggaaagggucc

SEQ ID NO: 571740 - RNA, 19 nt, Human
ccaagcagaggagaaaaca

SEQ ID NO: 571741 - RNA, 19 nt, Human
ccaagcagaggagaaaaca

SEQ ID NO: 571742 - RNA, 18 nt, Human
ccaccacagcucucccag

SEQ ID NO: 571743 - RNA, 18 nt, Human
ccaccacagcucucccag

SEQ ID NO: 571744 - RNA, 23 nt, Human
ccacccgcccccagcccccaggc

SEQ ID NO: 571745 - RNA, 23 nt, Human
ccaccugugccugcugaucugga

SEQ ID NO: 571746 - RNA, 23 nt, Human
ccaccugugccugcugaucugga

SEQ ID NO: 571747 - RNA, 18 nt, Human
ccagaccagcugcacccc

SEQ ID NO: 571748 - RNA, 18 nt, Human
ccagcccauauucccacc

SEQ ID NO: 571749 - RNA, 18 nt, Human
ccagcccauauucccacc

SEQ ID NO: 571750 - RNA, 23 nt, Human
ccagcccccaggcuuggccuccc

SEQ ID NO: 571751 - RNA, 21 nt, Human
ccagcugcaccccacccacca

SEQ ID NO: 571752 - RNA, 20 nt, Human
ccaggccuguggccucuguc

SEQ ID NO: 571753 - RNA, 22 nt, Human
ccaggcugcugcuggacuggac

SEQ ID NO: 571754 - RNA, 22 nt, Human
ccaggcugcugcuggacuggac

SEQ ID NO: 571755 - RNA, 22 nt, Human
ccaggcuuggccucccaugggc

SEQ ID NO: 571756 - RNA, 21 nt, Human
cccaaaggagggaaagggucc

SEQ ID NO: 571757 - RNA, 21 nt, Human
cccaaaggagggaaagggucc

SEQ ID NO: 571758 - RNA, 18 nt, Human
cccaagagacaagagacc

SEQ ID NO: 571759 - RNA, 18 nt, Human
cccaagagacaagagacc

SEQ ID NO: 571760 - RNA, 21 nt, Human
cccacccgcccccagccccca

SEQ ID NO: 571761 - RNA, 18 nt, Human
cccaccuugccucuuccc

SEQ ID NO: 571762 - RNA, 24 nt, Human
cccacuugcccccaacacccacag

SEQ ID NO: 571763 - RNA, 24 nt, Human
cccacuugcccccaacacccacag

SEQ ID NO: 571764 - RNA, 19 nt, Human
cccaggacuccuaguucag

SEQ ID NO: 571765 - RNA, 19 nt, Human
cccaggacuccuaguucag

SEQ ID NO: 571766 - RNA, 24 nt, Human
ccccaacacccacagaugaacucg

SEQ ID NO: 571767 - RNA, 24 nt, Human
ccccaacacccacagaugaacucg

SEQ ID NO: 571768 - RNA, 19 nt, Human
ccccaccuugccucuuccc

SEQ ID NO: 571769 - RNA, 22 nt, Human
ccccacuugcccccaacaccca

SEQ ID NO: 571770 - RNA, 22 nt, Human
ccccacuugcccccaacaccca

SEQ ID NO: 571771 - RNA, 22 nt, Human
cccccacuugcccccaacaccc

SEQ ID NO: 571772 - RNA, 22 nt, Human
cccccacuugcccccaacaccc

SEQ ID NO: 571773 - RNA, 24 nt, Human
cccccagcccccaggcuuggccuc

SEQ ID NO: 571774 - RNA, 19 nt, Human
cccccaggcuuggccuccc

SEQ ID NO: 571775 - RNA, 25 nt, Human
cccgcccccagcccccaggcuuggc

SEQ ID NO: 571776 - RNA, 26 nt, Human
cccuaagaugccagguugagggccuc

SEQ ID NO: 571777 - RNA, 26 nt, Human
cccuaagaugccagguugagggccuc

SEQ ID NO: 571778 - RNA, 19 nt, Human
cccugcagcagugccagcc

SEQ ID NO: 571779 - RNA, 19 nt, Human
cccugcagcagugccagcc

SEQ ID NO: 571780 - RNA, 20 nt, Human
cccuggaaguggcagggaga

SEQ ID NO: 571781 - RNA, 20 nt, Human
cccuggaaguggcagggaga

SEQ ID NO: 571782 - RNA, 21 nt, Human
cccuuugcccagaguuugacc

SEQ ID NO: 571783 - RNA, 23 nt, Human
ccgaccuaucaguuccuucccaa

SEQ ID NO: 571784 - RNA, 21 nt, Human
ccuagguccuugcuucucaaa

SEQ ID NO: 571785 - RNA, 21 nt, Human
ccuagguccuugcuucucaaa

SEQ ID NO: 571786 - RNA, 18 nt, Human
ccucaagcucuggggccu

SEQ ID NO: 571787 - RNA, 18 nt, Human
ccucaagcucuggggccu

SEQ ID NO: 571788 - RNA, 24 nt, Human
ccucauccugaaaacccuuugccc

SEQ ID NO: 571789 - RNA, 18 nt, Human
ccuccagggagcccaaag

SEQ ID NO: 571790 - RNA, 18 nt, Human
ccuccagggagcccaaag

SEQ ID NO: 571791 - RNA, 22 nt, Human
ccucccucccuuccaggguucc

SEQ ID NO: 571792 - RNA, 19 nt, Human
ccugcacaggacuucagcc

SEQ ID NO: 571793 - RNA, 19 nt, Human
ccugcacaggacuucagcc

SEQ ID NO: 571794 - RNA, 19 nt, Human
ccugccgccagcccccagg

SEQ ID NO: 571795 - RNA, 20 nt, Human
ccuuugcccagaguuugacc

SEQ ID NO: 571796 - RNA, 22 nt, Human
cggaggacauccccagccuagg

SEQ ID NO: 571797 - RNA, 18 nt, Human
cguccacggcacacagga

SEQ ID NO: 571798 - RNA, 18 nt, Human
cguccacggcacacagga

SEQ ID NO: 571799 - RNA, 24 nt, Human
cuagguccuugcuucucaaacucu

SEQ ID NO: 571800 - RNA, 24 nt, Human
cuagguccuugcuucucaaacucu

SEQ ID NO: 571801 - RNA, 18 nt, Human
cucaaacccgcaggggcu

SEQ ID NO: 571802 - RNA, 18 nt, Human
cucaaacccgcaggggcu

SEQ ID NO: 571803 - RNA, 22 nt, Human
cucacugugagcucugauuugg

SEQ ID NO: 571804 - RNA, 21 nt, Human
cuccacagaugaggagaaggu

SEQ ID NO: 571805 - RNA, 21 nt, Human
cuccacagaugaggagaaggu

SEQ ID NO: 571806 - RNA, 26 nt, Human
cuccuagcgcccugcgcagcgcaguc

SEQ ID NO: 571807 - RNA, 22 nt, Human
cugagcggcgacaaugccuccu

SEQ ID NO: 571808 - RNA, 23 nt, Human
cugcacaggacuucagcccccac

SEQ ID NO: 571809 - RNA, 23 nt, Human
cugcacaggacuucagcccccac

SEQ ID NO: 571810 - RNA, 24 nt, Human
cugcugguccucgggcuccuacau

SEQ ID NO: 571811 - RNA, 24 nt, Human
cugcugguccucgggcuccuacau

SEQ ID NO: 571812 - RNA, 22 nt, Human
cugcuguaagcuaucuauccag

SEQ ID NO: 571813 - RNA, 19 nt, Human
cugcuguucucugggccaa

SEQ ID NO: 571814 - RNA, 19 nt, Human
cuggcucucagcacuaaaa

SEQ ID NO: 571815 - RNA, 19 nt, Human
cuggcucucagcacuaaaa

SEQ ID NO: 571816 - RNA, 21 nt, Human
cugggccaccucucccgcagc

SEQ ID NO: 571817 - RNA, 21 nt, Human
cugggccaccucucccgcagc

SEQ ID NO: 571818 - RNA, 27 nt, Human
cugggcccugcagagggccgcauccag

SEQ ID NO: 571819 - RNA, 27 nt, Human
cugggcccugcagagggccgcauccag

SEQ ID NO: 571820 - RNA, 24 nt, Human
cuucaggagugccaugcagacucu

SEQ ID NO: 571821 - RNA, 24 nt, Human
cuucaggagugccaugcagacucu

SEQ ID NO: 571822 - RNA, 23 nt, Human
cuugcccccaacacccacagaug

SEQ ID NO: 571823 - RNA, 23 nt, Human
cuugcccccaacacccacagaug

SEQ ID NO: 571824 - RNA, 18 nt, Human
cuugcuggguacugucca

SEQ ID NO: 571825 - RNA, 19 nt, Human
cuugcuggguacuguccca

SEQ ID NO: 571826 - RNA, 25 nt, Human
cuuggccucccaugggccucccucc

SEQ ID NO: 571827 - RNA, 20 nt, Human
cuuugggcguuggccuggga

SEQ ID NO: 571828 - RNA, 20 nt, Human
cuuugggcguuggccuggga

SEQ ID NO: 571829 - RNA, 22 nt, Human
gaaaccccacuccagggcacaa

SEQ ID NO: 571830 - RNA, 22 nt, Human
gaaaccccacuccagggcacaa

SEQ ID NO: 571831 - RNA, 20 nt, Human
gaacacaggcucagaucccu

SEQ ID NO: 571832 - RNA, 20 nt, Human
gaacacaggcucagaucccu

SEQ ID NO: 571833 - RNA, 23 nt, Human
gacaagagaccugggcagggacg

SEQ ID NO: 571834 - RNA, 23 nt, Human
gacaagagaccugggcagggacg

SEQ ID NO: 571835 - RNA, 21 nt, Human
gaccuaucaguuccuucccaa

SEQ ID NO: 571836 - RNA, 20 nt, Human
gaccuaucaguuccuucccu

SEQ ID NO: 571837 - RNA, 20 nt, Human
gaccuaucaguuccuucccu

SEQ ID NO: 571838 - RNA, 24 nt, Human
gaggagaaaacaacuuccagaagc

SEQ ID NO: 571839 - RNA, 23 nt, Human
gcaaugcccaccugugccugcug

SEQ ID NO: 571840 - RNA, 23 nt, Human
gcaaugcccaccugugccugcug

SEQ ID NO: 571841 - RNA, 20 nt, Human
gccccaggcccucuccuggu

SEQ ID NO: 571842 - RNA, 20 nt, Human
gccccaggcccucuccuggu

SEQ ID NO: 571843 - RNA, 20 nt, Human
gccgcugcugguccacagac

SEQ ID NO: 571844 - RNA, 20 nt, Human
gccgcugcugguccacagac

SEQ ID NO: 571845 - RNA, 22 nt, Human
gccuugggauacgagcagaaug

SEQ ID NO: 571846 - RNA, 22 nt, Human
gccuugggauacgagcagaaug

SEQ ID NO: 571847 - RNA, 18 nt, Human
gcuaaaaugcagggucug

SEQ ID NO: 571848 - RNA, 18 nt, Human
gcuaaaaugcagggucug

SEQ ID NO: 571849 - RNA, 19 nt, Human
ggagcuggcuggcuacaaa

SEQ ID NO: 571850 - RNA, 19 nt, Human
ggagcuggcuggcuacaaa

SEQ ID NO: 571851 - RNA, 18 nt, Human
ggcaggagaucugccuga

SEQ ID NO: 571852 - RNA, 18 nt, Human
ggcaggagaucugccuga

SEQ ID NO: 571853 - RNA, 20 nt, Human
ggcucagaaaauaccuggca

SEQ ID NO: 571854 - RNA, 20 nt, Human
ggcucagaaaauaccuggca

SEQ ID NO: 571855 - RNA, 23 nt, Human
gggacggagcacucaggacuucc

SEQ ID NO: 571856 - RNA, 21 nt, Human
gggacggagcacucagggacu

SEQ ID NO: 571857 - RNA, 24 nt, Human
gggacggagcacucagggacuucc

SEQ ID NO: 571858 - RNA, 24 nt, Human
gggcacaaggcagguggggccagc

SEQ ID NO: 571859 - RNA, 24 nt, Human
gggcacaaggcagguggggccagc

SEQ ID NO: 571860 - RNA, 18 nt, Human
gggcagcaacuggcucuc

SEQ ID NO: 571861 - RNA, 18 nt, Human
gggcagcaacuggcucuc

SEQ ID NO: 571862 - RNA, 18 nt, Human
gggcagcaggcagcuugg

SEQ ID NO: 571863 - RNA, 18 nt, Human
gggcagcaggcagcuugg

SEQ ID NO: 571864 - RNA, 24 nt, Human
gggcaggagaucugccugaguuug

SEQ ID NO: 571865 - RNA, 24 nt, Human
gggcaggagaucugccugaguuug

SEQ ID NO: 571866 - RNA, 23 nt, Human
gggccucaggugucucuggagau

SEQ ID NO: 571867 - RNA, 23 nt, Human
gggccucaggugucucuggagau

SEQ ID NO: 571868 - RNA, 21 nt, Human
gugacugcaggucccacuccc

SEQ ID NO: 571869 - RNA, 21 nt, Human
guggggucuggggcacugagu

SEQ ID NO: 571870 - RNA, 21 nt, Human
guggggucuggggcacugagu

SEQ ID NO: 571871 - RNA, 19 nt, Human
uaacaggccaagugucucc

SEQ ID NO: 571872 - RNA, 19 nt, Human
uaacaggccaagugucucc

SEQ ID NO: 571873 - RNA, 19 nt, Human
uaccugaggaccaagcagu

SEQ ID NO: 571874 - RNA, 19 nt, Human
uaccugaggaccaagcagu

SEQ ID NO: 571875 - RNA, 19 nt, Human
uacugcucugagcaguggu

SEQ ID NO: 571876 - RNA, 19 nt, Human
uacugcucugagcaguggu

SEQ ID NO: 571877 - RNA, 18 nt, Human
uacugcuguaagcuaucu

SEQ ID NO: 571878 - RNA, 23 nt, Human
uacugcuguaagcuaucuaucca

SEQ ID NO: 571879 - RNA, 24 nt, Human
uagccuuaggaguaguaaaguggc

SEQ ID NO: 571880 - RNA, 24 nt, Human
uagccuuaggaguaguaaaguggc

SEQ ID NO: 571881 - RNA, 24 nt, Human
uagggugaggccuagacucugcau

SEQ ID NO: 571882 - RNA, 24 nt, Human
uagggugaggccuagacucugcau

SEQ ID NO: 571883 - RNA, 20 nt, Human
ucaagcucuggggccucagg

SEQ ID NO: 571884 - RNA, 20 nt, Human
ucaagcucuggggccucagg

SEQ ID NO: 571885 - RNA, 25 nt, Human
ucagcacuaaaaacaaggccucaaa

SEQ ID NO: 571886 - RNA, 25 nt, Human
ucagcacuaaaaacaaggccucaaa

SEQ ID NO: 571887 - RNA, 19 nt, Human
uccaagacagacaagggca

SEQ ID NO: 571888 - RNA, 24 nt, Human
uccaagacagacaagggcaaacuc

SEQ ID NO: 571889 - RNA, 24 nt, Human
uccaagacagacaagggcaaacuc

SEQ ID NO: 571890 - RNA, 20 nt, Human
ucccaagagacaagagaccc

SEQ ID NO: 571891 - RNA, 19 nt, Human
ucccaccaguccagggacc

SEQ ID NO: 571892 - RNA, 19 nt, Human
ucccaccaguccagggacc

SEQ ID NO: 571893 - RNA, 19 nt, Human
ucccuggaaguggcaggga

SEQ ID NO: 571894 - RNA, 19 nt, Human
ucccuggaaguggcaggga

SEQ ID NO: 571895 - RNA, 19 nt, Human
uccugaaaacccuuugccc

SEQ ID NO: 571896 - RNA, 19 nt, Human
uccugaaaacccuuugccc

SEQ ID NO: 571897 - RNA, 24 nt, Human
uccuucccaagagacaagagaccc

SEQ ID NO: 571898 - RNA, 23 nt, Human
ucucugggccaccucucccgcag

SEQ ID NO: 571899 - RNA, 23 nt, Human
ucucugggccaccucucccgcag

SEQ ID NO: 571900 - RNA, 21 nt, Human
ucuggggccucaggugucucu

SEQ ID NO: 571901 - RNA, 21 nt, Human
ucuggggccucaggugucucu

SEQ ID NO: 571902 - RNA, 19 nt, Human
ugacagagcugacgugacu

SEQ ID NO: 571903 - RNA, 20 nt, Human
ugacagagcugacgugacuu

SEQ ID NO: 571904 - RNA, 20 nt, Human
ugacagagcugacgugacuu

SEQ ID NO: 571905 - RNA, 22 nt, Human
ugaccaaccaggccuugggaua

SEQ ID NO: 571906 - RNA, 22 nt, Human
ugaccaaccaggccuugggaua

SEQ ID NO: 571907 - RNA, 23 nt, Human
ugaccuccucauccugaaaaccc

SEQ ID NO: 571908 - RNA, 23 nt, Human
ugaccuccucauccugaaaaccc

SEQ ID NO: 571909 - RNA, 20 nt, Human
ugacugcaggucccacuccc

SEQ ID NO: 571910 - RNA, 22 nt, Human
ugaggaccuggggcagcaggca

SEQ ID NO: 571911 - RNA, 22 nt, Human
ugaggaccuggggcagcaggca

SEQ ID NO: 571912 - RNA, 18 nt, Human
ugaggugaggaccugggg

SEQ ID NO: 571913 - RNA, 18 nt, Human
ugaggugaggaccugggg

SEQ ID NO: 571914 - RNA, 18 nt, Human
ugaggugaggaccugggg

SEQ ID NO: 571915 - RNA, 18 nt, Human
ugaggugaggaccugggg

SEQ ID NO: 571916 - RNA, 21 nt, Human
ugaguuggcuugcuccacaga

SEQ ID NO: 571917 - RNA, 21 nt, Human
ugaguuggcuugcuccacaga

SEQ ID NO: 571918 - RNA, 21 nt, Human
ugcacaggacuucagccccca

SEQ ID NO: 571919 - RNA, 21 nt, Human
ugcacaggacuucagccccca

SEQ ID NO: 571920 - RNA, 25 nt, Human
ugccagcccauauucccaccacagc

SEQ ID NO: 571921 - RNA, 25 nt, Human
ugccagcccauauucccaccacagc

SEQ ID NO: 571922 - RNA, 20 nt, Human
ugcccccaacacccacagau

SEQ ID NO: 571923 - RNA, 22 nt, Human
ugccucaagcucuggggccuca

SEQ ID NO: 571924 - RNA, 22 nt, Human
ugccucaagcucuggggccuca

SEQ ID NO: 571925 - RNA, 20 nt, Human
ugcucggcccacccgccccc

SEQ ID NO: 571926 - RNA, 23 nt, Human
ugcugggugggcaugaggagggu

SEQ ID NO: 571927 - RNA, 20 nt, Human
ugcugguccacagaccacac

SEQ ID NO: 571928 - RNA, 20 nt, Human
ugcugguccacagaccacac

SEQ ID NO: 571929 - RNA, 19 nt, Human
uggagggcugggcacaccu

SEQ ID NO: 571930 - RNA, 19 nt, Human
uggagggcugggcacaccu

SEQ ID NO: 571931 - RNA, 20 nt, Human
uggccucugucccuugcugg

SEQ ID NO: 571932 - RNA, 19 nt, Human
uggccugggagcuggcugg

SEQ ID NO: 571933 - RNA, 19 nt, Human
uggccugggagcuggcugg

SEQ ID NO: 571934 - RNA, 22 nt, Human
ugggaaaccaggacagcugguc

SEQ ID NO: 571935 - RNA, 22 nt, Human
ugggaaaccaggacagcugguc

SEQ ID NO: 571936 - RNA, 23 nt, Human
uggggucuggggcacugaguugg

SEQ ID NO: 571937 - RNA, 23 nt, Human
uggggucuggggcacugaguugg

SEQ ID NO: 571938 - RNA, 19 nt, Human
ugggugggcaugaggaggg

SEQ ID NO: 571939 - RNA, 20 nt, Human
ugucuugaccuccucauccu

SEQ ID NO: 571940 - RNA, 20 nt, Human
ugucuugaccuccucauccu

SEQ ID NO: 571941 - RNA, 21 nt, Human
uguuugugcacaucagagaag

SEQ ID NO: 571942 - RNA, 21 nt, Human
uguuugugcacaucagagaag

SEQ ID NO: 571943 - RNA, 21 nt, Human
uuaaccagaaaggccgggucu

SEQ ID NO: 571944 - RNA, 21 nt, Human
uuaaccagaaaggccgggucu

SEQ ID NO: 571945 - RNA, 27 nt, Human
uuauaggaaucagcugggggucuugcu

SEQ ID NO: 571946 - RNA, 27 nt, Human
uuauaggaaucagcugggggucuugcu

SEQ ID NO: 571947 - RNA, 20 nt, Human
uucaacaaggagaaacccca

SEQ ID NO: 571948 - RNA, 20 nt, Human
uucaacaaggagaaacccca

SEQ ID NO: 571949 - RNA, 23 nt, Human
uucaacaaggagaaaccccacuc

SEQ ID NO: 571950 - RNA, 23 nt, Human
uucaacaaggagaaaccccacuc

SEQ ID NO: 571951 - RNA, 21 nt, Human
uucagcccccacuugccccca

SEQ ID NO: 571952 - RNA, 21 nt, Human
uucagcccccacuugccccca

SEQ ID NO: 571953 - RNA, 21 nt, Human
uucccaccacagcucucccag

SEQ ID NO: 571954 - RNA, 21 nt, Human
uucccaccacagcucucccag

SEQ ID NO: 571955 - RNA, 19 nt, Human
uucccaccaguccagggac

SEQ ID NO: 571956 - RNA, 19 nt, Human
uucccaccaguccagggac

SEQ ID NO: 571957 - RNA, 24 nt, Human
uucccaccaguccagggaccacag

SEQ ID NO: 571958 - RNA, 24 nt, Human
uucccaccaguccagggaccacag

SEQ ID NO: 571959 - RNA, 24 nt, Human
uugcugggugggcaugaggagggu

SEQ ID NO: 571960 - RNA, 24 nt, Human
uuugcacagcagcugugagugccg

SEQ ID NO: 571961 - RNA, 24 nt, Human
uuugcacagcagcugugagugccg

SEQ ID NO: 571962 - RNA, 23 nt, Human
aaacaacuggccugaggucucca

SEQ ID NO: 571963 - RNA, 21 nt, Human
aagccaccaggggccagguag

SEQ ID NO: 571964 - RNA, 18 nt, Human
acagcaucaucacugacc

SEQ ID NO: 571965 - RNA, 20 nt, Human
accaggggccagguaguaaa

SEQ ID NO: 571966 - RNA, 20 nt, Human
acccacccuaacuuccuucu

SEQ ID NO: 571967 - RNA, 23 nt, Human
accuccauuuuacagacuggagg

SEQ ID NO: 571968 - RNA, 19 nt, Human
accucgaucauccagggag

SEQ ID NO: 571969 - RNA, 23 nt, Human
acgccagcccgggagggcagucu

SEQ ID NO: 571970 - RNA, 19 nt, Human
acuccgugggacgccagcc

SEQ ID NO: 571971 - RNA, 24 nt, Human
acuccgugggacgccagcccggga

SEQ ID NO: 571972 - RNA, 20 nt, Human
acugaccagcagaucagugg

SEQ ID NO: 571973 - RNA, 18 nt, Human
agaagggagggggugcug

SEQ ID NO: 571974 - RNA, 24 nt, Human
agagaggggggcccgaggggcagg

SEQ ID NO: 571975 - RNA, 20 nt, Human
aggagcuaccggagaaggga

SEQ ID NO: 571976 - RNA, 18 nt, Human
aggcaacccuaggaccag

SEQ ID NO: 571977 - RNA, 22 nt, Human
aggcagggguaggagcuaccgg

SEQ ID NO: 571978 - RNA, 26 nt, Human
aggccacagcaucaucacugaccagc

SEQ ID NO: 571979 - RNA, 18 nt, Human
agggauagagccaagggg

SEQ ID NO: 571980 - RNA, 23 nt, Human
aggggcagcagagaggggggccc

SEQ ID NO: 571981 - RNA, 22 nt, Human
agggugcugugugucuuucggg

SEQ ID NO: 571982 - RNA, 21 nt, Human
agguacuaccugugaccacug

SEQ ID NO: 571983 - RNA, 27 nt, Human
agguaguaaauccuugucggguggacc

SEQ ID NO: 571984 - RNA, 22 nt, Human
agguggcaguggucccaggagg

SEQ ID NO: 571985 - RNA, 20 nt, Human
aguggccacggugggcugga

SEQ ID NO: 571986 - RNA, 27 nt, Human
aucauccagggaggcuuguccugcagu

SEQ ID NO: 571987 - RNA, 21 nt, Human
augacauuucccagacucccu

SEQ ID NO: 571988 - RNA, 24 nt, Human
auggggaugaggguugggcagggg

SEQ ID NO: 571989 - RNA, 21 nt, Human
caaggccggggagacauuuag

SEQ ID NO: 571990 - RNA, 25 nt, Human
cacagcaucaucacugaccagcaga

SEQ ID NO: 571991 - RNA, 21 nt, Human
cacuccuccaguucccaccuc

SEQ ID NO: 571992 - RNA, 23 nt, Human
cagacuggaggcuggaggguaaa

SEQ ID NO: 571993 - RNA, 24 nt, Human
cagagcuacagaacaucgaugcug

SEQ ID NO: 571994 - RNA, 20 nt, Human
cagcagagaggggggcccga

SEQ ID NO: 571995 - RNA, 21 nt, Human
caggacaacccuagaugugga

SEQ ID NO: 571996 - RNA, 20 nt, Human
caggacuagaaagaaaaguc

SEQ ID NO: 571997 - RNA, 19 nt, Human
caggcaacccuaggaccag

SEQ ID NO: 571998 - RNA, 22 nt, Human
caggccacagcaucaucacuga

SEQ ID NO: 571999 - RNA, 22 nt, Human
caggucacagaggccuggcuga

SEQ ID NO: 572000 - RNA, 22 nt, Human
cauaaaaugggcaacauuuuaa

SEQ ID NO: 572001 - RNA, 22 nt, Human
ccacagcaucaucacugaccag

SEQ ID NO: 572002 - RNA, 21 nt, Human
ccagauucugguaguugaagg

SEQ ID NO: 572003 - RNA, 18 nt, Human
ccccugagaagaugggga

SEQ ID NO: 572004 - RNA, 23 nt, Human
cccgcacaggcagggguaggagc

SEQ ID NO: 572005 - RNA, 19 nt, Human
cccuaggaccagguacuac

SEQ ID NO: 572006 - RNA, 18 nt, Human
cccucggccugugggcag

SEQ ID NO: 572007 - RNA, 18 nt, Human
cccugaggagaagccaug

SEQ ID NO: 572008 - RNA, 18 nt, Human
ccucccagugcuuggguc

SEQ ID NO: 572009 - RNA, 18 nt, Human
ccugaggucagggcuggg

SEQ ID NO: 572010 - RNA, 21 nt, Human
cgcugggaguuccuggaaauu

SEQ ID NO: 572011 - RNA, 19 nt, Human
cuagccaacagccccuccc

SEQ ID NO: 572012 - RNA, 21 nt, Human
cuagccaacagccccucccag

SEQ ID NO: 572013 - RNA, 23 nt, Human
cuauuggcuggcacggaccgugg

SEQ ID NO: 572014 - RNA, 23 nt, Human
cucccgaguucuucacgauugga

SEQ ID NO: 572015 - RNA, 19 nt, Human
cuggaagccuccugcaccc

SEQ ID NO: 572016 - RNA, 21 nt, Human
cugggcuggagggagacacug

SEQ ID NO: 572017 - RNA, 20 nt, Human
cuguaucccuaucaagguca

SEQ ID NO: 572018 - RNA, 22 nt, Human
cuucuggaagccuccugcaccc

SEQ ID NO: 572019 - RNA, 25 nt, Human
gacucuuguucagagcuacugggga

SEQ ID NO: 572020 - RNA, 18 nt, Human
gaggucagggcugggcug

SEQ ID NO: 572021 - RNA, 19 nt, Human
gcagagggagccuaguucu

SEQ ID NO: 572022 - RNA, 22 nt, Human
gcagcccacuccuccaguuccc

SEQ ID NO: 572023 - RNA, 22 nt, Human
gccacagcaucaucacugacca

SEQ ID NO: 572024 - RNA, 22 nt, Human
gcccacuccuccaguucccacc

SEQ ID NO: 572025 - RNA, 19 nt, Human
gcccgaggggcaggggggc

SEQ ID NO: 572026 - RNA, 21 nt, Human
gcggcugagacuccgugggac

SEQ ID NO: 572027 - RNA, 23 nt, Human
gcuuuuaggcuaaugggcucugc

SEQ ID NO: 572028 - RNA, 21 nt, Human
ggacucaacuaccaggugccu

SEQ ID NO: 572029 - RNA, 25 nt, Human
ggagaagccaugucacauccuugga

SEQ ID NO: 572030 - RNA, 19 nt, Human
ggagaagggagggggugcu

SEQ ID NO: 572031 - RNA, 20 nt, Human
ggagguuguggucuccuucu

SEQ ID NO: 572032 - RNA, 21 nt, Human
ggcagaaaaacgcaggugggg

SEQ ID NO: 572033 - RNA, 20 nt, Human
ggcagggauagagccaaggg

SEQ ID NO: 572034 - RNA, 20 nt, Human
ggcagggguugcccugagga

SEQ ID NO: 572035 - RNA, 18 nt, Human
ggcccggguggcgggggg

SEQ ID NO: 572036 - RNA, 21 nt, Human
ggccggggagacauuuaggcu

SEQ ID NO: 572037 - RNA, 20 nt, Human
ggcgccaggggcagcagaga

SEQ ID NO: 572038 - RNA, 22 nt, Human
gggcagggauagagccaagggg

SEQ ID NO: 572039 - RNA, 20 nt, Human
gggcuggaguccaggucuuc

SEQ ID NO: 572040 - RNA, 19 nt, Human
ggggaugaggguugggcag

SEQ ID NO: 572041 - RNA, 26 nt, Human
gguggcgggggcagccauuuuaagaa

SEQ ID NO: 572042 - RNA, 19 nt, Human
gguggggcuugcuccaccc

SEQ ID NO: 572043 - RNA, 18 nt, Human
gguguggggguggcagga

SEQ ID NO: 572044 - RNA, 18 nt, Human
gguuguggucuccuucug

SEQ ID NO: 572045 - RNA, 26 nt, Human
guggcagaaaaacgcagguggggcuu

SEQ ID NO: 572046 - RNA, 19 nt, Human
uaaaccagcuacaaguggc

SEQ ID NO: 572047 - RNA, 22 nt, Human
uaacucauaaaaugggcaacau

SEQ ID NO: 572048 - RNA, 19 nt, Human
uacaaguggcucuuguuuu

SEQ ID NO: 572049 - RNA, 23 nt, Human
uaccaggugccuuccacaggccu

SEQ ID NO: 572050 - RNA, 24 nt, Human
uacccucacccugucccucggccu

SEQ ID NO: 572051 - RNA, 20 nt, Human
uaggccccaggacuagaaag

SEQ ID NO: 572052 - RNA, 19 nt, Human
ucacauccuuggaucaaag

SEQ ID NO: 572053 - RNA, 22 nt, Human
uccaggucuucuaucuccuggg

SEQ ID NO: 572054 - RNA, 19 nt, Human
ucggaggcagcaccgaggg

SEQ ID NO: 572055 - RNA, 22 nt, Human
ucuagccaacagccccucccag

SEQ ID NO: 572056 - RNA, 20 nt, Human
ucuccaguggccacgguggg

SEQ ID NO: 572057 - RNA, 23 nt, Human
ucucccgaguucuucacgauugg

SEQ ID NO: 572058 - RNA, 18 nt, Human
ugaagugggagaggggca

SEQ ID NO: 572059 - RNA, 23 nt, Human
ugcagccaagguucuggaucuga

SEQ ID NO: 572060 - RNA, 22 nt, Human
ugcccaagggaggcccgggugg

SEQ ID NO: 572061 - RNA, 18 nt, Human
ugcuucuccagcucuucc

SEQ ID NO: 572062 - RNA, 24 nt, Human
ugcuuggguccuaauuacaacaac

SEQ ID NO: 572063 - RNA, 19 nt, Human
uggcacggaccguggcaga

SEQ ID NO: 572064 - RNA, 20 nt, Human
uggcagaaaaacgcaggugg

SEQ ID NO: 572065 - RNA, 24 nt, Human
uggccugaggucuccaguggccac

SEQ ID NO: 572066 - RNA, 23 nt, Human
uggcuggacucuuguucagagcu

SEQ ID NO: 572067 - RNA, 22 nt, Human
ugggcagggauagagccaaggg

SEQ ID NO: 572068 - RNA, 19 nt, Human
ugggcuggagggagacacu

SEQ ID NO: 572069 - RNA, 25 nt, Human
ugggcuggaguccaggucuucuauc

SEQ ID NO: 572070 - RNA, 21 nt, Human
uggggucaaggguaaauggcc

SEQ ID NO: 572071 - RNA, 22 nt, Human
uggucagggguaagucuuaggc

SEQ ID NO: 572072 - RNA, 26 nt, Human
uguccggaaggaggguaacgcgaggg

SEQ ID NO: 572073 - RNA, 20 nt, Human
ugugggcaggaagguggugg

SEQ ID NO: 572074 - RNA, 24 nt, Human
uguugugucagagaccccaagugc

SEQ ID NO: 572075 - RNA, 24 nt, Human
uuagcucuuccggcuacuuuggga

SEQ ID NO: 572076 - RNA, 25 nt, Human
uuccacaggccacagcaucaucacu

SEQ ID NO: 572077 - RNA, 21 nt, Human
uucuugguguggggguggcag

SEQ ID NO: 572078 - RNA, 24 nt, Human
uugcagcccacuccuccaguuccc

SEQ ID NO: 572079 - RNA, 18 nt, Human
uugugucagagaccccaa

SEQ ID NO: 572080 - RNA, 21 nt, Human
aaaggagcccuccccgccucc

SEQ ID NO: 572081 - RNA, 18 nt, Human
aaagggagguggaggcug

SEQ ID NO: 572082 - RNA, 20 nt, Human
aagcagagccaggcucugga

SEQ ID NO: 572083 - RNA, 23 nt, Human
accacucccucuccugucccccc

SEQ ID NO: 572084 - RNA, 24 nt, Human
acccauguguccccucucccaccc

SEQ ID NO: 572085 - RNA, 20 nt, Human
acgauaggcccuggggggcc

SEQ ID NO: 572086 - RNA, 18 nt, Human
agaagcacaggagagcac

SEQ ID NO: 572087 - RNA, 22 nt, Human
agaagcacaggagagcacguug

SEQ ID NO: 572088 - RNA, 20 nt, Human
agaggagguggcugcugggg

SEQ ID NO: 572089 - RNA, 21 nt, Human
agcaccuuucugaugggaucc

SEQ ID NO: 572090 - RNA, 24 nt, Human
agcacguuggggagcauguuuccu

SEQ ID NO: 572091 - RNA, 22 nt, Human
agccacagcacaaagcagagcc

SEQ ID NO: 572092 - RNA, 18 nt, Human
agccaggaaggccccagg

SEQ ID NO: 572093 - RNA, 21 nt, Human
agccaggaaggccccaggagc

SEQ ID NO: 572094 - RNA, 24 nt, Human
agccugguggggugaaggggaccc

SEQ ID NO: 572095 - RNA, 21 nt, Human
aggcucucccacgauaggccc

SEQ ID NO: 572096 - RNA, 18 nt, Human
aggggagggauggggugg

SEQ ID NO: 572097 - RNA, 21 nt, Human
agggggagacggacuggaggc

SEQ ID NO: 572098 - RNA, 25 nt, Human
agguggaggcuguugaguguccggg

SEQ ID NO: 572099 - RNA, 22 nt, Human
auauaaggcagccccaauucca

SEQ ID NO: 572100 - RNA, 18 nt, Human
auccugcccaggcucucc

SEQ ID NO: 572101 - RNA, 19 nt, Human
auccugcccaggcucuccc

SEQ ID NO: 572102 - RNA, 22 nt, Human
caaaacagaagcacaggagagc

SEQ ID NO: 572103 - RNA, 22 nt, Human
caaaugaaucacuuucugggcc

SEQ ID NO: 572104 - RNA, 24 nt, Human
caagauagguacauccauguguca

SEQ ID NO: 572105 - RNA, 18 nt, Human
cacagcacaaagcagagc

SEQ ID NO: 572106 - RNA, 20 nt, Human
cacagcacaaagcagagcca

SEQ ID NO: 572107 - RNA, 18 nt, Human
caccucacccuuggccac

SEQ ID NO: 572108 - RNA, 24 nt, Human
cacuuucugggccagagccaggaa

SEQ ID NO: 572109 - RNA, 25 nt, Human
caggagacugcugguucugguuuug

SEQ ID NO: 572110 - RNA, 23 nt, Human
caggcucucccacgauaggcccu

SEQ ID NO: 572111 - RNA, 19 nt, Human
cauuccagauaggaagacc

SEQ ID NO: 572112 - RNA, 19 nt, Human
ccacagcacaaagcagagc

SEQ ID NO: 572113 - RNA, 26 nt, Human
ccaccccauccucuuggcucccucua

SEQ ID NO: 572114 - RNA, 21 nt, Human
ccaggagcugugaggguagaa

SEQ ID NO: 572115 - RNA, 21 nt, Human
ccaggggugguuaugguucag

SEQ ID NO: 572116 - RNA, 23 nt, Human
cccacccaucaccaagauaggua

SEQ ID NO: 572117 - RNA, 24 nt, Human
cccaccccauccucuuggcucccu

SEQ ID NO: 572118 - RNA, 25 nt, Human
cccagagugcagaauugagcucugg

SEQ ID NO: 572119 - RNA, 19 nt, Human
cccagcagccccacccccu

SEQ ID NO: 572120 - RNA, 18 nt, Human
ccccacccaucaccaaga

SEQ ID NO: 572121 - RNA, 20 nt, Human
cccccacccaucaccaagau

SEQ ID NO: 572122 - RNA, 24 nt, Human
ccccuccagacaggagaaugaggu

SEQ ID NO: 572123 - RNA, 20 nt, Human
ccucaccacucccucuccug

SEQ ID NO: 572124 - RNA, 21 nt, Human
ccucacccuuggccacguccc

SEQ ID NO: 572125 - RNA, 20 nt, Human
ccuccagacaggagaaugag

SEQ ID NO: 572126 - RNA, 19 nt, Human
ccuccccgccuccuucccc

SEQ ID NO: 572127 - RNA, 23 nt, Human
ccuccccgccuccuuccccaggc

SEQ ID NO: 572128 - RNA, 26 nt, Human
ccuggcccccaccccauccucuuggc

SEQ ID NO: 572129 - RNA, 21 nt, Human
cuccuuccccaggccaggaag

SEQ ID NO: 572130 - RNA, 21 nt, Human
cugacgcuugaggcuucaccu

SEQ ID NO: 572131 - RNA, 22 nt, Human
cugacgcuugaggcuucaccuu

SEQ ID NO: 572132 - RNA, 24 nt, Human
cugggccagagccaggaaggcccc

SEQ ID NO: 572133 - RNA, 19 nt, Human
gacuggaggcucagggcac

SEQ ID NO: 572134 - RNA, 21 nt, Human
gagcugugaggguagaaaggg

SEQ ID NO: 572135 - RNA, 19 nt, Human
gaggcuguugaguguccgg

SEQ ID NO: 572136 - RNA, 18 nt, Human
gagguggaggcuguugag

SEQ ID NO: 572137 - RNA, 20 nt, Human
gcacaaagcagagccaggcu

SEQ ID NO: 572138 - RNA, 18 nt, Human
gcagaaagaaaaccauga

SEQ ID NO: 572139 - RNA, 22 nt, Human
gcagccccacccccucggagcc

SEQ ID NO: 572140 - RNA, 22 nt, Human
gcagggggacaaaacagaagca

SEQ ID NO: 572141 - RNA, 21 nt, Human
gccagagccaggaaggcccca

SEQ ID NO: 572142 - RNA, 24 nt, Human
gcccccaccccauccucuuggcuc

SEQ ID NO: 572143 - RNA, 20 nt, Human
gccugaggcugggaaugaug

SEQ ID NO: 572144 - RNA, 18 nt, Human
ggacuggaggcucagggc

SEQ ID NO: 572145 - RNA, 22 nt, Human
ggagagacaucccuggaaggag

SEQ ID NO: 572146 - RNA, 19 nt, Human
ggagcccuccccgccuccu

SEQ ID NO: 572147 - RNA, 22 nt, Human
ggagggaacaaggcaggagacu

SEQ ID NO: 572148 - RNA, 19 nt, Human
ggcacuggagguagaaagg

SEQ ID NO: 572149 - RNA, 19 nt, Human
ggccagacagauggguagg

SEQ ID NO: 572150 - RNA, 18 nt, Human
ggccugagggccagggag

SEQ ID NO: 572151 - RNA, 26 nt, Human
gggccagagccaggaaggccccagga

SEQ ID NO: 572152 - RNA, 19 nt, Human
ggggacccccggaaggggg

SEQ ID NO: 572153 - RNA, 19 nt, Human
gguaaacacacauauaagg

SEQ ID NO: 572154 - RNA, 19 nt, Human
gguagaaagggagguggag

SEQ ID NO: 572155 - RNA, 20 nt, Human
gguggaggcuguugaguguc

SEQ ID NO: 572156 - RNA, 20 nt, Human
guuggggagcauguuuccuc

SEQ ID NO: 572157 - RNA, 18 nt, Human
uaagccacagcacaaagc

SEQ ID NO: 572158 - RNA, 21 nt, Human
uagaaaggagcccuccccgcc

SEQ ID NO: 572159 - RNA, 23 nt, Human
ucaguggcaaccacuggggucug

SEQ ID NO: 572160 - RNA, 20 nt, Human
uccagacaggagaaugaggu

SEQ ID NO: 572161 - RNA, 25 nt, Human
ucccacgauaggcccuggggggccc

SEQ ID NO: 572162 - RNA, 21 nt, Human
ucccagcagccccacccccuc

SEQ ID NO: 572163 - RNA, 22 nt, Human
uccccgccuccuuccccaggcc

SEQ ID NO: 572164 - RNA, 21 nt, Human
uccccuccggcuaagccacag

SEQ ID NO: 572165 - RNA, 19 nt, Human
ucugaugggauccugccca

SEQ ID NO: 572166 - RNA, 22 nt, Human
ucugggccagagccaggaaggc

SEQ ID NO: 572167 - RNA, 18 nt, Human
ucuucaguggcaaccacu

SEQ ID NO: 572168 - RNA, 19 nt, Human
ugagggccagggagggaac

SEQ ID NO: 572169 - RNA, 22 nt, Human
ugaggguagaaagggaggugga

SEQ ID NO: 572170 - RNA, 19 nt, Human
ugauuggaucugguuugga

SEQ ID NO: 572171 - RNA, 22 nt, Human
uggaaggagggccugagggcca

SEQ ID NO: 572172 - RNA, 19 nt, Human
uggacacccaugugucccc

SEQ ID NO: 572173 - RNA, 19 nt, Human
uggagguagaaaggagccc

SEQ ID NO: 572174 - RNA, 19 nt, Human
uggcuggucacuuuggcau

SEQ ID NO: 572175 - RNA, 21 nt, Human
ugggguggcuggucacuuugg

SEQ ID NO: 572176 - RNA, 22 nt, Human
ugguucaggaccuggcugcagg

SEQ ID NO: 572177 - RNA, 26 nt, Human
uguguccccucucccacccuguccaa

SEQ ID NO: 572178 - RNA, 26 nt, Human
uuccccaggccaggaagggguaaaca

SEQ ID NO: 572179 - RNA, 20 nt, Human
uucuuggcccccacccaucu

SEQ ID NO: 572180 - RNA, 20 nt, Human
uuucccaggggugguuaugg

SEQ ID NO: 572181 - RNA, 22 nt, Human
uuuggagcucagcaccucccac

SEQ ID NO: 572182 - RNA, 21 nt, Human
aaaagaagaugagcuggagaa

SEQ ID NO: 572183 - RNA, 18 nt, Human
aaaagacucugaagggaa

SEQ ID NO: 572184 - RNA, 24 nt, Human
aaaagcugcaauauuccagauucu

SEQ ID NO: 572185 - RNA, 23 nt, Human
aaagacucugaagggaaccagga

SEQ ID NO: 572186 - RNA, 23 nt, Human
aagcagcccucugauggaccccc

SEQ ID NO: 572187 - RNA, 20 nt, Human
aaguccuccagagccuucuc

SEQ ID NO: 572188 - RNA, 26 nt, Human
acaaagacaacagaagcuaacccgag

SEQ ID NO: 572189 - RNA, 19 nt, Human
accagugucuuuacuggac

SEQ ID NO: 572190 - RNA, 21 nt, Human
acccggggaccccugcccagc

SEQ ID NO: 572191 - RNA, 20 nt, Human
acuagggaagggaagcagag

SEQ ID NO: 572192 - RNA, 20 nt, Human
acuagggaagggaagcagag

SEQ ID NO: 572193 - RNA, 24 nt, Human
agaggaaaaauguccauggcacag

SEQ ID NO: 572194 - RNA, 21 nt, Human
agagucaucaucaggccaaaa

SEQ ID NO: 572195 - RNA, 19 nt, Human
agcccucugauggacccag

SEQ ID NO: 572196 - RNA, 19 nt, Human
aggaaaaauguccauggca

SEQ ID NO: 572197 - RNA, 20 nt, Human
aggaggcgucucagagcucc

SEQ ID NO: 572198 - RNA, 22 nt, Human
agggaagggaagcagaggagga

SEQ ID NO: 572199 - RNA, 21 nt, Human
aucaggccaaaaagacucuga

SEQ ID NO: 572200 - RNA, 22 nt, Human
caaacaccagcagccagauacc

SEQ ID NO: 572201 - RNA, 18 nt, Human
cacccggggaccccugcc

SEQ ID NO: 572202 - RNA, 20 nt, Human
cacgcucucccccguccaag

SEQ ID NO: 572203 - RNA, 18 nt, Human
cacugcaccaggcccagc

SEQ ID NO: 572204 - RNA, 25 nt, Human
cacugcaccaggcccagcaugccuc

SEQ ID NO: 572205 - RNA, 22 nt, Human
cagcacuaggggccacgucaga

SEQ ID NO: 572206 - RNA, 22 nt, Human
cagcagccagauaccaccaagc

SEQ ID NO: 572207 - RNA, 22 nt, Human
ccagagaacacgucaacgucag

SEQ ID NO: 572208 - RNA, 24 nt, Human
ccagauaccaccaagcuagucacc

SEQ ID NO: 572209 - RNA, 18 nt, Human
ccagauucuuaaauucuc

SEQ ID NO: 572210 - RNA, 18 nt, Human
ccggaggaaagacuaggg

SEQ ID NO: 572211 - RNA, 19 nt, Human
ccggucugcccugcugggg

SEQ ID NO: 572212 - RNA, 25 nt, Human
ccguacgccuucagcacacgcgugg

SEQ ID NO: 572213 - RNA, 19 nt, Human
cgaaaccguaccaugcccc

SEQ ID NO: 572214 - RNA, 24 nt, Human
cgaaaccguaccaugccccgcuaa

SEQ ID NO: 572215 - RNA, 21 nt, Human
cgcucucccccguccaaggug

SEQ ID NO: 572216 - RNA, 20 nt, Human
cgucaaauuaguagugacaa

SEQ ID NO: 572217 - RNA, 19 nt, Human
cuccccacccacacacuca

SEQ ID NO: 572218 - RNA, 20 nt, Human
cuccccacccacacacucaa

SEQ ID NO: 572219 - RNA, 18 nt, Human
cuuccuaagcauacguga

SEQ ID NO: 572220 - RNA, 27 nt, Human
gaaaccguaccaugccccgcuaagaca

SEQ ID NO: 572221 - RNA, 20 nt, Human
gacaacagaagcuaacccga

SEQ ID NO: 572222 - RNA, 18 nt, Human
gaccccugcccagcuccc

SEQ ID NO: 572223 - RNA, 23 nt, Human
gagaaacucuguugagcugcuaa

SEQ ID NO: 572224 - RNA, 18 nt, Human
gagcaggccgagaaacuc

SEQ ID NO: 572225 - RNA, 20 nt, Human
gagcaggccgagaaacucug

SEQ ID NO: 572226 - RNA, 25 nt, Human
gccaaacaccagcagccagauacca

SEQ ID NO: 572227 - RNA, 20 nt, Human
gcccuugcuguggaaagaug

SEQ ID NO: 572228 - RNA, 26 nt, Human
gcgugggacaggaggcguccugaggg

SEQ ID NO: 572229 - RNA, 22 nt, Human
gcuguggaaagaugcuacugaa

SEQ ID NO: 572230 - RNA, 21 nt, Human
ggaaaaccauccacaaagaca

SEQ ID NO: 572231 - RNA, 22 nt, Human
ggaagcagaggaggaacgaagg

SEQ ID NO: 572232 - RNA, 20 nt, Human
ggaagggaagcagaggagga

SEQ ID NO: 572233 - RNA, 19 nt, Human
ggaccccugcccagcuccc

SEQ ID NO: 572234 - RNA, 21 nt, Human
ggagagcgugggacaggaggc

SEQ ID NO: 572235 - RNA, 19 nt, Human
ggccgguggguaucauggg

SEQ ID NO: 572236 - RNA, 24 nt, Human
gggaagcagaggaggaacgaaggg

SEQ ID NO: 572237 - RNA, 24 nt, Human
gggacaggaggcgucucagagcuc

SEQ ID NO: 572238 - RNA, 20 nt, Human
gucagaccccaggcugcagc

SEQ ID NO: 572239 - RNA, 21 nt, Human
gucaggccgcuccaggaaaac

SEQ ID NO: 572240 - RNA, 22 nt, Human
gucugcaucacaggguaucacc

SEQ ID NO: 572241 - RNA, 18 nt, Human
uaagcauacgugaccacg

SEQ ID NO: 572242 - RNA, 18 nt, Human
uaagccaaacaccagcag

SEQ ID NO: 572243 - RNA, 23 nt, Human
uaccaccaagcuagucaccacuu

SEQ ID NO: 572244 - RNA, 19 nt, Human
ucaggcacgaaaccguacc

SEQ ID NO: 572245 - RNA, 18 nt, Human
ucaggccaaaaagacucu

SEQ ID NO: 572246 - RNA, 20 nt, Human
ucaucaggccaaaaagacuc

SEQ ID NO: 572247 - RNA, 22 nt, Human
uccccagaggaaaaauguccau

SEQ ID NO: 572248 - RNA, 21 nt, Human
uccccgguccggucugcccug

SEQ ID NO: 572249 - RNA, 18 nt, Human
ucccuaaggacacggcug

SEQ ID NO: 572250 - RNA, 22 nt, Human
ucgccauaacaucuccaaccau

SEQ ID NO: 572251 - RNA, 24 nt, Human
ucgccauaacaucuccaaccaugc

SEQ ID NO: 572252 - RNA, 22 nt, Human
ucgccgaucugggagcaggccg

SEQ ID NO: 572253 - RNA, 20 nt, Human
ugauggacccagucagugca

SEQ ID NO: 572254 - RNA, 22 nt, Human
ugauuuucuucauuuccgucuu

SEQ ID NO: 572255 - RNA, 19 nt, Human
uggaaagaugcuacugaaa

SEQ ID NO: 572256 - RNA, 22 nt, Human
uggaaagaugcuacugaaagua

SEQ ID NO: 572257 - RNA, 23 nt, Human
uggacgcgaacaucccuaaggac

SEQ ID NO: 572258 - RNA, 23 nt, Human
uggagaacgaagcagcccucuga

SEQ ID NO: 572259 - RNA, 24 nt, Human
uggcaaccaauuuaugcucaaguu

SEQ ID NO: 572260 - RNA, 22 nt, Human
ugggaccagagaacacgucaac

SEQ ID NO: 572261 - RNA, 23 nt, Human
ugggagcaggccgagaaacucug

SEQ ID NO: 572262 - RNA, 23 nt, Human
uggggcaugucugcaucacaggg

SEQ ID NO: 572263 - RNA, 21 nt, Human
uucacauguaggcagugaagc

SEQ ID NO: 572264 - RNA, 26 nt, Human
aacagcacaagacaacaucagcaaac

SEQ ID NO: 572265 - RNA, 22 nt, Human
aacuccgaaagagaaggcacag

SEQ ID NO: 572266 - RNA, 23 nt, Human
aagcaaaauaugaacuuauagga

SEQ ID NO: 572267 - RNA, 20 nt, Human
aagcgauguacuuaagggcc

SEQ ID NO: 572268 - RNA, 24 nt, Human
aagggccucaggcggucgagaggc

SEQ ID NO: 572269 - RNA, 20 nt, Human
acaaagagagacccagcggc

SEQ ID NO: 572270 - RNA, 21 nt, Human
acaaguccacaaagagagacc

SEQ ID NO: 572271 - RNA, 20 nt, Human
acacaggcccagaggccgaa

SEQ ID NO: 572272 - RNA, 27 nt, Human
acagcacaagacaacaucagcaaacca

SEQ ID NO: 572273 - RNA, 23 nt, Human
agacaacaucagcaaacccuggc

SEQ ID NO: 572274 - RNA, 19 nt, Human
agaggcaacguggcuucca

SEQ ID NO: 572275 - RNA, 22 nt, Human
agcaaacccuggcgcaccuaac

SEQ ID NO: 572276 - RNA, 24 nt, Human
agcacggaacaacuccgaaagaga

SEQ ID NO: 572277 - RNA, 23 nt, Human
aggaagagagagacucguggcaa

SEQ ID NO: 572278 - RNA, 22 nt, Human
auucucuauccuuccccucacc

SEQ ID NO: 572279 - RNA, 25 nt, Human
caaagagagacccagcggcccagca

SEQ ID NO: 572280 - RNA, 23 nt, Human
caagacaacaucagcaaacccug

SEQ ID NO: 572281 - RNA, 23 nt, Human
cacagacacacaggcccagaggc

SEQ ID NO: 572282 - RNA, 25 nt, Human
cacagacacacaggcccagaggccu

SEQ ID NO: 572283 - RNA, 21 nt, Human
caccccugcgagcaaaguggc

SEQ ID NO: 572284 - RNA, 21 nt, Human
cagacacacaggcccagaggc

SEQ ID NO: 572285 - RNA, 27 nt, Human
cagcacaagacaacaucagcaaacccu

SEQ ID NO: 572286 - RNA, 21 nt, Human
cagccuccugggcaccaccag

SEQ ID NO: 572287 - RNA, 23 nt, Human
caggcggucgagaggcaacgugg

SEQ ID NO: 572288 - RNA, 24 nt, Human
ccagccaguggagaaggggaagca

SEQ ID NO: 572289 - RNA, 21 nt, Human
ccaugaucaaacacagaugcc

SEQ ID NO: 572290 - RNA, 20 nt, Human
ccccgagcccgggggauccc

SEQ ID NO: 572291 - RNA, 21 nt, Human
ccccucaccccugcgagcaaa

SEQ ID NO: 572292 - RNA, 22 nt, Human
cgagcaaaguggccuuucccaa

SEQ ID NO: 572293 - RNA, 20 nt, Human
cgauguacuuaagggccucc

SEQ ID NO: 572294 - RNA, 26 nt, Human
cuccugcuccagguacaagacaucgg

SEQ ID NO: 572295 - RNA, 18 nt, Human
cuccugggcaccaccaga

SEQ ID NO: 572296 - RNA, 24 nt, Human
cuuaagggccucaggcggucgaga

SEQ ID NO: 572297 - RNA, 24 nt, Human
gagcucacagacacacaggcccag

SEQ ID NO: 572298 - RNA, 18 nt, Human
gaggacgcagauguggca

SEQ ID NO: 572299 - RNA, 18 nt, Human
gccucucguugcuuuuaa

SEQ ID NO: 572300 - RNA, 18 nt, Human
gccugguguccgggucac

SEQ ID NO: 572301 - RNA, 21 nt, Human
gcguaugccugguguccgggu

SEQ ID NO: 572302 - RNA, 20 nt, Human
ggaagcacgugggagcacgg

SEQ ID NO: 572303 - RNA, 23 nt, Human
ggaucaggcuuuucugggacagu

SEQ ID NO: 572304 - RNA, 24 nt, Human
ggucgagaggcaacguggcuucca

SEQ ID NO: 572305 - RNA, 19 nt, Human
ggucugcuggagccaagag

SEQ ID NO: 572306 - RNA, 18 nt, Human
guaugccugguguccggg

SEQ ID NO: 572307 - RNA, 19 nt, Human
uaaaaagcuggcucaaagc

SEQ ID NO: 572308 - RNA, 24 nt, Human
uaaaaauagauucucuauccuucc

SEQ ID NO: 572309 - RNA, 23 nt, Human
uagccagguugagcucacagaca

SEQ ID NO: 572310 - RNA, 21 nt, Human
ucaaacacagaugcccgaguu

SEQ ID NO: 572311 - RNA, 18 nt, Human
ucaaagcaaaauaugaac

SEQ ID NO: 572312 - RNA, 21 nt, Human
ucacagacacacaggcccaga

SEQ ID NO: 572313 - RNA, 22 nt, Human
uccagguacaaguccacaaaga

SEQ ID NO: 572314 - RNA, 21 nt, Human
uccgcggcacgcgucccucuc

SEQ ID NO: 572315 - RNA, 19 nt, Human
ucgcggccagcuuccaggu

SEQ ID NO: 572316 - RNA, 24 nt, Human
ucguugcuuuuaacaguccagcca

SEQ ID NO: 572317 - RNA, 24 nt, Human
ugagcucacagacacacaggccca

SEQ ID NO: 572318 - RNA, 22 nt, Human
ugcuuuuaacaguccagccaga

SEQ ID NO: 572319 - RNA, 24 nt, Human
ugggacagugggucugcuggagcc

SEQ ID NO: 572320 - RNA, 19 nt, Human
ugggagugacucugccuuu

SEQ ID NO: 572321 - RNA, 21 nt, Human
ugggcaggaagagagagacuc

SEQ ID NO: 572322 - RNA, 20 nt, Human
uuuaacaguccagccagaga

SEQ ID NO: 572323 - RNA, 20 nt, Human
aaaccagguuugcagcgaag

SEQ ID NO: 572324 - RNA, 18 nt, Human
aaacggcaggccugguaa

SEQ ID NO: 572325 - RNA, 19 nt, Human
aaacuugcaagggcuaaua

SEQ ID NO: 572326 - RNA, 20 nt, Human
aaagauggugacaguuuggu

SEQ ID NO: 572327 - RNA, 24 nt, Human
aaagugcugggauuacaggcguga

SEQ ID NO: 572328 - RNA, 21 nt, Human
aagaauauggcagggccaccc

SEQ ID NO: 572329 - RNA, 20 nt, Human
aagagaaggugaguagagaa

SEQ ID NO: 572330 - RNA, 21 nt, Human
aagaggaaggcgggaggaaga

SEQ ID NO: 572331 - RNA, 24 nt, Human
aagcaauucauccgccucagccuc

SEQ ID NO: 572332 - RNA, 19 nt, Human
aagugcugggauuacaggc

SEQ ID NO: 572333 - RNA, 19 nt, Human
aagugcugggauuacaggc

SEQ ID NO: 572334 - RNA, 26 nt, Human
aagugcugggauuacaggcgugagcc

SEQ ID NO: 572335 - RNA, 18 nt, Human
acaaaaacaaguuaaccu

SEQ ID NO: 572336 - RNA, 21 nt, Human
acacacacacacaaugacaca

SEQ ID NO: 572337 - RNA, 25 nt, Human
acacacacacacacacacaaugaca

SEQ ID NO: 572338 - RNA, 23 nt, Human
acacacacacacacacacacaca

SEQ ID NO: 572339 - RNA, 23 nt, Human
acacacacacacacacacacaca

SEQ ID NO: 572340 - RNA, 29 nt, Human
acacacacacacacacacacacaaugaca

SEQ ID NO: 572341 - RNA, 24 nt, Human
acacacacacacacacacacacag

SEQ ID NO: 572342 - RNA, 22 nt, Human
acacagcuguguagcugcaaac

SEQ ID NO: 572343 - RNA, 18 nt, Human
acaguuuggugcaaagau

SEQ ID NO: 572344 - RNA, 29 nt, Human
acaugcgcacgcaaacacacacacacaca

SEQ ID NO: 572345 - RNA, 23 nt, Human
accauguuggucaagcuggucuu

SEQ ID NO: 572346 - RNA, 21 nt, Human
acccaccucaggauccuccaa

SEQ ID NO: 572347 - RNA, 21 nt, Human
acccagcucuuccaaaugcca

SEQ ID NO: 572348 - RNA, 18 nt, Human
accuucugcugcaaagau

SEQ ID NO: 572349 - RNA, 19 nt, Human
acgaagcccuaauggaccc

SEQ ID NO: 572350 - RNA, 26 nt, Human
acuacuguucaccauguuaauacauu

SEQ ID NO: 572351 - RNA, 27 nt, Human
acucugcugcccaggcuggagugccgu

SEQ ID NO: 572352 - RNA, 22 nt, Human
agaauuuucccaauccucuuac

SEQ ID NO: 572353 - RNA, 21 nt, Human
agcaauucauccgccucagcc

SEQ ID NO: 572354 - RNA, 24 nt, Human
agcuggucuuaaacgccugaccuc

SEQ ID NO: 572355 - RNA, 22 nt, Human
agcugugcuguuggaauugaug

SEQ ID NO: 572356 - RNA, 19 nt, Human
aggaagaauauggcagggc

SEQ ID NO: 572357 - RNA, 23 nt, Human
aggcgugagccaccgugcccggc

SEQ ID NO: 572358 - RNA, 18 nt, Human
aguagcugggauuacagg

SEQ ID NO: 572359 - RNA, 23 nt, Human
aguagcugggauuacaggcgcgc

SEQ ID NO: 572360 - RNA, 24 nt, Human
agugccguggcacaaucuuggcuc

SEQ ID NO: 572361 - RNA, 18 nt, Human
agugcugggauuacaggc

SEQ ID NO: 572362 - RNA, 19 nt, Human
auagagauccaccucccuu

SEQ ID NO: 572363 - RNA, 21 nt, Human
aucaacaggggcccuaagaga

SEQ ID NO: 572364 - RNA, 21 nt, Human
aucacaaaaacugaagucgga

SEQ ID NO: 572365 - RNA, 25 nt, Human
augcgcacgcaaacacacacacaca

SEQ ID NO: 572366 - RNA, 27 nt, Human
augcgcacgcaaacacacacacacaca

SEQ ID NO: 572367 - RNA, 21 nt, Human
augggguuucaccauguuggu

SEQ ID NO: 572368 - RNA, 25 nt, Human
augggguuucaccauguuggucaag

SEQ ID NO: 572369 - RNA, 24 nt, Human
auggugacaguuuggugcaaagau

SEQ ID NO: 572370 - RNA, 21 nt, Human
auuccgaggagggagcaaggc

SEQ ID NO: 572371 - RNA, 24 nt, Human
caaagugcugggauuacaggcgug

SEQ ID NO: 572372 - RNA, 22 nt, Human
caaguuaaccuaugaacacaag

SEQ ID NO: 572373 - RNA, 23 nt, Human
cacaaaaacugaagucggaaaag

SEQ ID NO: 572374 - RNA, 19 nt, Human
cacacaaugacacauggug

SEQ ID NO: 572375 - RNA, 24 nt, Human
cacacacacacaaugacacauggu

SEQ ID NO: 572376 - RNA, 20 nt, Human
cacacacacacacacacaca

SEQ ID NO: 572377 - RNA, 20 nt, Human
cacacacacacacacacaca

SEQ ID NO: 572378 - RNA, 20 nt, Human
cacacacacacacacacaca

SEQ ID NO: 572379 - RNA, 20 nt, Human
cacacacacacacacacaca

SEQ ID NO: 572380 - RNA, 22 nt, Human
cacacacacacacacacacaca

SEQ ID NO: 572381 - RNA, 26 nt, Human
cacacacacacacacacacacacaau

SEQ ID NO: 572382 - RNA, 24 nt, Human
caccacgcccagcuaauuuuugua

SEQ ID NO: 572383 - RNA, 24 nt, Human
caccauguuggucaagcuggucuu

SEQ ID NO: 572384 - RNA, 24 nt, Human
cacccaagaccucaccuaucguuu

SEQ ID NO: 572385 - RNA, 19 nt, Human
caccugaacagucacggca

SEQ ID NO: 572386 - RNA, 20 nt, Human
cacgagaaauuuguuuuaaa

SEQ ID NO: 572387 - RNA, 24 nt, Human
cacgagaaauuuguuuuaaaguug

SEQ ID NO: 572388 - RNA, 18 nt, Human
cacgcaaacacacacaca

SEQ ID NO: 572389 - RNA, 24 nt, Human
cacucugcugcccaggcuggagug

SEQ ID NO: 572390 - RNA, 20 nt, Human
cagacucuaaaacucaaaga

SEQ ID NO: 572391 - RNA, 20 nt, Human
cagccuccugaguagcuggg

SEQ ID NO: 572392 - RNA, 20 nt, Human
caggauccuccaaguuagcc

SEQ ID NO: 572393 - RNA, 22 nt, Human
cagucacggcagaacaagagca

SEQ ID NO: 572394 - RNA, 19 nt, Human
caucacccaccucaggauc

SEQ ID NO: 572395 - RNA, 21 nt, Human
cauugcaaccucugccuccug

SEQ ID NO: 572396 - RNA, 20 nt, Human
ccaaagugcugggauuacag

SEQ ID NO: 572397 - RNA, 22 nt, Human
ccaaagugcugggauuacaggc

SEQ ID NO: 572398 - RNA, 22 nt, Human
ccaaagugcugggauuacaggc

SEQ ID NO: 572399 - RNA, 24 nt, Human
ccaaagugcugggauuacaggcgu

SEQ ID NO: 572400 - RNA, 20 nt, Human
ccaccacgcccagcuaauuu

SEQ ID NO: 572401 - RNA, 26 nt, Human
ccacccaagaccucaccuaucguuua

SEQ ID NO: 572402 - RNA, 21 nt, Human
ccaccucccuuccccaacucc

SEQ ID NO: 572403 - RNA, 22 nt, Human
cccaacucccucccacccaaga

SEQ ID NO: 572404 - RNA, 21 nt, Human
cccucccacccaagaccucac

SEQ ID NO: 572405 - RNA, 23 nt, Human
ccgccucagccuccugaguagcu

SEQ ID NO: 572406 - RNA, 22 nt, Human
ccgugcccggccaacagccaag

SEQ ID NO: 572407 - RNA, 23 nt, Human
ccugaguagcugggauuacaggc

SEQ ID NO: 572408 - RNA, 24 nt, Human
ccugaguagcugggauuacaggcg

SEQ ID NO: 572409 - RNA, 21 nt, Human
ccugccuggaguucuucuucu

SEQ ID NO: 572410 - RNA, 22 nt, Human
ccuggaguucuucuucugcuuc

SEQ ID NO: 572411 - RNA, 22 nt, Human
ccuggauucaagcaauucaucc

SEQ ID NO: 572412 - RNA, 24 nt, Human
cgccucagccuccugaguagcugg

SEQ ID NO: 572413 - RNA, 24 nt, Human
cgccugaccucgugaucgaccugc

SEQ ID NO: 572414 - RNA, 21 nt, Human
cgcgcgccaccacgcccagcu

SEQ ID NO: 572415 - RNA, 19 nt, Human
cguggcacaaucuuggcuc

SEQ ID NO: 572416 - RNA, 23 nt, Human
cucagccuccugaguagcuggga

SEQ ID NO: 572417 - RNA, 24 nt, Human
cucauugcaaccucugccuccugg

SEQ ID NO: 572418 - RNA, 22 nt, Human
cugaguagcugggauuacaggc

SEQ ID NO: 572419 - RNA, 22 nt, Human
cugcaaacggaaaccacucucu

SEQ ID NO: 572420 - RNA, 23 nt, Human
cugccucagccucccaaagugcu

SEQ ID NO: 572421 - RNA, 24 nt, Human
cugccucagccucccaaagugcug

SEQ ID NO: 572422 - RNA, 29 nt, Human
cuuagcuccagcccugcgaaccgguuccg

SEQ ID NO: 572423 - RNA, 22 nt, Human
cuuccccaacucccucccaccc

SEQ ID NO: 572424 - RNA, 20 nt, Human
cuuucagcaucacccaccuc

SEQ ID NO: 572425 - RNA, 18 nt, Human
gaacaucuaacaacuguu

SEQ ID NO: 572426 - RNA, 22 nt, Human
gacccugcucucuccucuacac

SEQ ID NO: 572427 - RNA, 22 nt, Human
gaccucgugaucgaccugccuc

SEQ ID NO: 572428 - RNA, 24 nt, Human
gaccucgugaucgaccugccucag

SEQ ID NO: 572429 - RNA, 20 nt, Human
gagacuuagcuccagcccug

SEQ ID NO: 572430 - RNA, 18 nt, Human
gagagagucucacucugc

SEQ ID NO: 572431 - RNA, 24 nt, Human
gagaugggguuucaccauguuggu

SEQ ID NO: 572432 - RNA, 19 nt, Human
gauccaccucccuucccca

SEQ ID NO: 572433 - RNA, 18 nt, Human
gauuacaggcgcgcgcca

SEQ ID NO: 572434 - RNA, 18 nt, Human
gauuacaggcgugagcca

SEQ ID NO: 572435 - RNA, 21 nt, Human
gauuacaggcgugagccaccg

SEQ ID NO: 572436 - RNA, 24 nt, Human
gauuacaggcgugagccaccgugc

SEQ ID NO: 572437 - RNA, 21 nt, Human
gcaaagauggugacaguuggg

SEQ ID NO: 572438 - RNA, 24 nt, Human
gcaauucauccgccucagccuccu

SEQ ID NO: 572439 - RNA, 25 nt, Human
gcacgcaaacacacacacacacaca

SEQ ID NO: 572440 - RNA, 23 nt, Human
gcagacauucuuuuucccuaaaa

SEQ ID NO: 572441 - RNA, 21 nt, Human
gccguggcacaaucuuggcuc

SEQ ID NO: 572442 - RNA, 24 nt, Human
gcgcacgcaaacacacacacacac

SEQ ID NO: 572443 - RNA, 29 nt, Human
gcgcacgcaaacacacacacacacacaca

SEQ ID NO: 572444 - RNA, 18 nt, Human
gcgcgccaccacgcccag

SEQ ID NO: 572445 - RNA, 18 nt, Human
gcggugaaacggcaggcc

SEQ ID NO: 572446 - RNA, 21 nt, Human
gcucauugcaaccucugccuc

SEQ ID NO: 572447 - RNA, 18 nt, Human
gcuucuuucuccuggagc

SEQ ID NO: 572448 - RNA, 18 nt, Human
gcuuucagcaucacccac

SEQ ID NO: 572449 - RNA, 21 nt, Human
gcuuucagcaucacccaccuc

SEQ ID NO: 572450 - RNA, 18 nt, Human
ggaggauggaagcuggag

SEQ ID NO: 572451 - RNA, 20 nt, Human
ggagggagcaaggcgugggg

SEQ ID NO: 572452 - RNA, 24 nt, Human
ggauucaagcaauucauccgccuc

SEQ ID NO: 572453 - RNA, 18 nt, Human
ggccugcagaggucgcug

SEQ ID NO: 572454 - RNA, 22 nt, Human
gggguuucaccauguuggucaa

SEQ ID NO: 572455 - RNA, 19 nt, Human
guagagaugggguuucacc

SEQ ID NO: 572456 - RNA, 21 nt, Human
guagagaugggguuucaccau

SEQ ID NO: 572457 - RNA, 22 nt, Human
guagagaugggguuucaccaug

SEQ ID NO: 572458 - RNA, 18 nt, Human
guagcugggauuacaggc

SEQ ID NO: 572459 - RNA, 24 nt, Human
guagugaccuucugcugcaaagau

SEQ ID NO: 572460 - RNA, 24 nt, Human
gugaucgaccugccucagccuccc

SEQ ID NO: 572461 - RNA, 18 nt, Human
guuuuaaaguugaaucac

SEQ ID NO: 572462 - RNA, 18 nt, Human
uaaaaccagguuugcagc

SEQ ID NO: 572463 - RNA, 24 nt, Human
uacaggcgcgcgccaccacgccca

SEQ ID NO: 572464 - RNA, 23 nt, Human
uacaggcgugagccaccgugccc

SEQ ID NO: 572465 - RNA, 19 nt, Human
uagaauuuucccaauccuc

SEQ ID NO: 572466 - RNA, 22 nt, Human
uagagaugggguuucaccaugu

SEQ ID NO: 572467 - RNA, 24 nt, Human
uauaaucaccccccuuccccacag

SEQ ID NO: 572468 - RNA, 22 nt, Human
uaucugaguagucacuuuucag

SEQ ID NO: 572469 - RNA, 22 nt, Human
ucaccccccuuccccacaggau

SEQ ID NO: 572470 - RNA, 24 nt, Human
ucacucugcugcccaggcuggagu

SEQ ID NO: 572471 - RNA, 26 nt, Human
ucagcaucacccaccucaggauccuc

SEQ ID NO: 572472 - RNA, 20 nt, Human
ucagccuccugaguagcugg

SEQ ID NO: 572473 - RNA, 19 nt, Human
ucauugcaaccucugccuc

SEQ ID NO: 572474 - RNA, 23 nt, Human
ucauugcaaccucugccuccugg

SEQ ID NO: 572475 - RNA, 26 nt, Human
uccaaagucuuauucagugacaagga

SEQ ID NO: 572476 - RNA, 20 nt, Human
uccaccucccuuccccaacu

SEQ ID NO: 572477 - RNA, 21 nt, Human
uccaccucccuuccccaacuc

SEQ ID NO: 572478 - RNA, 24 nt, Human
ucccaaagugcugggauuacaggc

SEQ ID NO: 572479 - RNA, 19 nt, Human
ucccuauaaucaccccccu

SEQ ID NO: 572480 - RNA, 19 nt, Human
uccuccaaguuagcugugc

SEQ ID NO: 572481 - RNA, 24 nt, Human
uccugaguagcugggauuacaggc

SEQ ID NO: 572482 - RNA, 19 nt, Human
uccuggauucaagcaauuc

SEQ ID NO: 572483 - RNA, 19 nt, Human
ucgaccugccucagccucc

SEQ ID NO: 572484 - RNA, 24 nt, Human
ucgcugaccauuccgaggagggag

SEQ ID NO: 572485 - RNA, 21 nt, Human
ucgcuuggcacacaccccagg

SEQ ID NO: 572486 - RNA, 23 nt, Human
ucucacucugcugcccaggcugg

SEQ ID NO: 572487 - RNA, 24 nt, Human
ucucacucugcugcccaggcugga

SEQ ID NO: 572488 - RNA, 24 nt, Human
ucugccuccuggauucaagcaauu

SEQ ID NO: 572489 - RNA, 19 nt, Human
ucuuaccaacucuccugcc

SEQ ID NO: 572490 - RNA, 19 nt, Human
ucuuauucagugacaagag

SEQ ID NO: 572491 - RNA, 21 nt, Human
ucuucuucugcuucuuucucc

SEQ ID NO: 572492 - RNA, 18 nt, Human
ugaaacggcaggccuggu

SEQ ID NO: 572493 - RNA, 21 nt, Human
ugaaggagcaauaaaaccagg

SEQ ID NO: 572494 - RNA, 20 nt, Human
ugacuugguacgucuuccuu

SEQ ID NO: 572495 - RNA, 18 nt, Human
ugagaaaaauagauuugg

SEQ ID NO: 572496 - RNA, 19 nt, Human
ugagaaaaauagauuugga

SEQ ID NO: 572497 - RNA, 23 nt, Human
ugagaacaucuaacaacuguuca

SEQ ID NO: 572498 - RNA, 19 nt, Human
ugcaaacggaaaccacucu

SEQ ID NO: 572499 - RNA, 23 nt, Human
ugccagggccugcagaggucgcu

SEQ ID NO: 572500 - RNA, 21 nt, Human
ugcccaggcuggagugccgug

SEQ ID NO: 572501 - RNA, 24 nt, Human
ugcccaggcuggagugccguggca

SEQ ID NO: 572502 - RNA, 21 nt, Human
ugcccggccaacagccaaguu

SEQ ID NO: 572503 - RNA, 24 nt, Human
ugccucagccucccaaagugcugg

SEQ ID NO: 572504 - RNA, 24 nt, Human
ugcugggauuacaggcgugagcca

SEQ ID NO: 572505 - RNA, 20 nt, Human
uggaggauggaagcuggaga

SEQ ID NO: 572506 - RNA, 24 nt, Human
uggagugccguggcacaaucuugg

SEQ ID NO: 572507 - RNA, 20 nt, Human
uggauggaauuagagcuggg

SEQ ID NO: 572508 - RNA, 21 nt, Human
uggauucaagcaauucauccg

SEQ ID NO: 572509 - RNA, 18 nt, Human
uggcacaaucuuggcuca

SEQ ID NO: 572510 - RNA, 22 nt, Human
ugggauuacaggcgcgcgccac

SEQ ID NO: 572511 - RNA, 24 nt, Human
ugggauuacaggcgcgcgccacca

SEQ ID NO: 572512 - RNA, 18 nt, Human
ugggauuacaggcgugag

SEQ ID NO: 572513 - RNA, 21 nt, Human
ugggauuacaggcgugagcca

SEQ ID NO: 572514 - RNA, 22 nt, Human
ugggauuacaggcgugagccac

SEQ ID NO: 572515 - RNA, 23 nt, Human
ugggauuacaggcgugagccacc

SEQ ID NO: 572516 - RNA, 23 nt, Human
ugggauuacaggcgugagccacc

SEQ ID NO: 572517 - RNA, 24 nt, Human
ugggauuacaggcgugagccaccg

SEQ ID NO: 572518 - RNA, 24 nt, Human
ugggguuucaccauguuggucaag

SEQ ID NO: 572519 - RNA, 24 nt, Human
uggugcaaagauggugacaguugg

SEQ ID NO: 572520 - RNA, 25 nt, Human
uggugucaacuuguuaacacaacga

SEQ ID NO: 572521 - RNA, 20 nt, Human
uguacaaaaacaaguuaacc

SEQ ID NO: 572522 - RNA, 24 nt, Human
uguagagaugggguuucaccaugu

SEQ ID NO: 572523 - RNA, 19 nt, Human
uuagcugugcuguuggaau

SEQ ID NO: 572524 - RNA, 18 nt, Human
uucagcaucacccaccuc

SEQ ID NO: 572525 - RNA, 23 nt, Human
uuccccaacucccucccacccaa

SEQ ID NO: 572526 - RNA, 22 nt, Human
uugaugccuuuggguuuuuucc

SEQ ID NO: 572527 - RNA, 23 nt, Human
uugcaaccucugccuccuggauu

SEQ ID NO: 572528 - RNA, 24 nt, Human
uugcaaccucugccuccuggauuc

SEQ ID NO: 572529 - RNA, 19 nt, Human
uuggcacacaccccaggag

SEQ ID NO: 572530 - RNA, 24 nt, Human
uuguagagaugggguuucaccaug

SEQ ID NO: 572531 - RNA, 23 nt, Human
uuuacaagaaacucaauuuuaag

SEQ ID NO: 572532 - RNA, 21 nt, Human
uuucaccauguuggucaagcu

SEQ ID NO: 572533 - RNA, 24 nt, Human
uuuguagagaugggguuucaccau

SEQ ID NO: 572534 - RNA, 23 nt, Human
uuuuuguagagaugggguuucac

SEQ ID NO: 572535 - RNA, 22 nt, Human
aacacauuccugacaagugaca

SEQ ID NO: 572536 - RNA, 18 nt, Human
acgcaguuucccuguggu

SEQ ID NO: 572537 - RNA, 22 nt, Human
augaacgucucccaggacaaag

SEQ ID NO: 572538 - RNA, 24 nt, Human
cagaagaguccggcagcugcagcg

SEQ ID NO: 572539 - RNA, 26 nt, Human
cagcaguaccauauaaauacguugau

SEQ ID NO: 572540 - RNA, 22 nt, Human
cgcgucacagcaguaccauaua

SEQ ID NO: 572541 - RNA, 24 nt, Human
cucuauuuauauauauauauauau

SEQ ID NO: 572542 - RNA, 18 nt, Human
gguaaaaacacauuccug

SEQ ID NO: 572543 - RNA, 20 nt, Human
uaaaaacacauuccugacaa

SEQ ID NO: 572544 - RNA, 19 nt, Human
uaaauagauuccaauauga

SEQ ID NO: 572545 - RNA, 24 nt, Human
uagcaguuaaauagauuccaauau

SEQ ID NO: 572546 - RNA, 22 nt, Human
uauuuauauauauauauauaua

SEQ ID NO: 572547 - RNA, 19 nt, Human
ucucccaggacaaagcugc

SEQ ID NO: 572548 - RNA, 19 nt, Human
ugcgugcccacggugcugc

SEQ ID NO: 572549 - RNA, 19 nt, Human
uuuauauauauauauauau

SEQ ID NO: 572550 - RNA, 20 nt, Human
aaaaacaaacauaugacaaa

SEQ ID NO: 572551 - RNA, 21 nt, Human
aaaaacaaacauaugacaaaa

SEQ ID NO: 572552 - RNA, 23 nt, Human
aaacaaaaacaaacauaugacaa

SEQ ID NO: 572553 - RNA, 21 nt, Human
caacccucccgccaagugacu

SEQ ID NO: 572554 - RNA, 20 nt, Human
cguccaacccucccgccaag

SEQ ID NO: 572555 - RNA, 18 nt, Human
ggugguagguaugugagu

SEQ ID NO: 572556 - RNA, 19 nt, Human
gugaguucucccuaaacug

SEQ ID NO: 572557 - RNA, 33 nt, Human
uaauguuucaaacaaaaacaaacauaugacaac

SEQ ID NO: 572558 - RNA, 24 nt, Human
uguuuuuuguauucuccuauauuu

SEQ ID NO: 572559 - RNA, 21 nt, Human
uuccuuggggauggccgucca

SEQ ID NO: 572560 - RNA, 24 nt, Human
aagaggucuagaugagcugcuggc

SEQ ID NO: 572561 - RNA, 26 nt, Human
aagcauaauguuccugaacccuccac

SEQ ID NO: 572562 - RNA, 19 nt, Human
agcugcuggccauuuaggg

SEQ ID NO: 572563 - RNA, 21 nt, Human
ccugaacccuccacucccaga

SEQ ID NO: 572564 - RNA, 18 nt, Human
ggcuugacauaaugggac

SEQ ID NO: 572565 - RNA, 20 nt, Human
ggugagggaggcauuugagg

SEQ ID NO: 572566 - RNA, 21 nt, Human
ggugagggaggcauuugaggg

SEQ ID NO: 572567 - RNA, 20 nt, Human
ugaacccuccacucccagau

SEQ ID NO: 572568 - RNA, 27 nt, Human
uuaggggugagggaggcauuugagggc

SEQ ID NO: 572569 - RNA, 23 nt, Human
aaaaugcuguuuuaucuacauuu

SEQ ID NO: 572570 - RNA, 24 nt, Human
aaacagacccaacgccauccaggc

SEQ ID NO: 572571 - RNA, 18 nt, Human
aaacccuccaaguccucc

SEQ ID NO: 572572 - RNA, 19 nt, Human
aaacuggguugcaggagug

SEQ ID NO: 572573 - RNA, 24 nt, Human
aaagugcugggauuacagguguga

SEQ ID NO: 572574 - RNA, 19 nt, Human
aaagugcugggauuaccgg

SEQ ID NO: 572575 - RNA, 24 nt, Human
aaagugcugggauuaccgguguga

SEQ ID NO: 572576 - RNA, 22 nt, Human
aaccaucagagaaaccacaaaa

SEQ ID NO: 572577 - RNA, 21 nt, Human
aacuugucucacuuccuucug

SEQ ID NO: 572578 - RNA, 19 nt, Human
aagaacuugucucacuucc

SEQ ID NO: 572579 - RNA, 19 nt, Human
aagcaaguaagucacauga

SEQ ID NO: 572580 - RNA, 24 nt, Human
aagcaauccacccgccccagccuc

SEQ ID NO: 572581 - RNA, 21 nt, Human
aagcaccacgcuacaaagagc

SEQ ID NO: 572582 - RNA, 23 nt, Human
aagcaggcaccucugugagcaac

SEQ ID NO: 572583 - RNA, 24 nt, Human
aaguagcugagauuacaggcaugu

SEQ ID NO: 572584 - RNA, 25 nt, Human
aaguagcugagauuacaggcaugug

SEQ ID NO: 572585 - RNA, 25 nt, Human
aagucacagcugcacuagccccuga

SEQ ID NO: 572586 - RNA, 24 nt, Human
aagugaucugcccaccuuggucuc

SEQ ID NO: 572587 - RNA, 18 nt, Human
aagugcugggauuacagg

SEQ ID NO: 572588 - RNA, 19 nt, Human
aagugcugggauuacaggu

SEQ ID NO: 572589 - RNA, 26 nt, Human
aagugcugggauuacaggugugagcc

SEQ ID NO: 572590 - RNA, 18 nt, Human
aagugcugggauuaccgg

SEQ ID NO: 572591 - RNA, 26 nt, Human
aagugcugggauuaccggugugagcc

SEQ ID NO: 572592 - RNA, 18 nt, Human
aaugcucuugauggcauc

SEQ ID NO: 572593 - RNA, 25 nt, Human
acagaagcaccacgcuacaaagagc

SEQ ID NO: 572594 - RNA, 18 nt, Human
acaggguuucaccauguu

SEQ ID NO: 572595 - RNA, 19 nt, Human
acaggguuucaccauguug

SEQ ID NO: 572596 - RNA, 24 nt, Human
acaggguuucaccauguugcccag

SEQ ID NO: 572597 - RNA, 18 nt, Human
acaggguuuugccauguu

SEQ ID NO: 572598 - RNA, 21 nt, Human
acaggguuuugccauguuggu

SEQ ID NO: 572599 - RNA, 23 nt, Human
acaggguuuugccauguugguca

SEQ ID NO: 572600 - RNA, 24 nt, Human
acaggguuuugccauguuggucag

SEQ ID NO: 572601 - RNA, 24 nt, Human
accauguugcccaggcuggucuug

SEQ ID NO: 572602 - RNA, 25 nt, Human
accauguugcccaggcuggucuuga

SEQ ID NO: 572603 - RNA, 22 nt, Human
acccaacgccauccaggcuuug

SEQ ID NO: 572604 - RNA, 24 nt, Human
acgaguucuuccaggcuugggaaa

SEQ ID NO: 572605 - RNA, 24 nt, Human
agaaauacgcaucacuuucaguuc

SEQ ID NO: 572606 - RNA, 23 nt, Human
agaagucuguccuaucauggacu

SEQ ID NO: 572607 - RNA, 23 nt, Human
agacaggguuucaccauguugcc

SEQ ID NO: 572608 - RNA, 18 nt, Human
agacaggguuuugccaug

SEQ ID NO: 572609 - RNA, 19 nt, Human
agauuacaggcaugugcca

SEQ ID NO: 572610 - RNA, 21 nt, Human
agcaauccacccgccccagcc

SEQ ID NO: 572611 - RNA, 23 nt, Human
agcaauccacccgccccagccuc

SEQ ID NO: 572612 - RNA, 22 nt, Human
agccauauuuugaaagaaaucu

SEQ ID NO: 572613 - RNA, 20 nt, Human
aggaaaagauaaguugcuga

SEQ ID NO: 572614 - RNA, 19 nt, Human
aggaauuuggaguugacag

SEQ ID NO: 572615 - RNA, 20 nt, Human
aggaguagauuccauuucaa

SEQ ID NO: 572616 - RNA, 21 nt, Human
aggagucaauccucucaaacc

SEQ ID NO: 572617 - RNA, 25 nt, Human
aggcuggagugcaguggcaggaucu

SEQ ID NO: 572618 - RNA, 24 nt, Human
aguaauucucgugccucagccucc

SEQ ID NO: 572619 - RNA, 22 nt, Human
aguagagacaggguuuugccau

SEQ ID NO: 572620 - RNA, 23 nt, Human
agugcaguggcaggaucuuggcu

SEQ ID NO: 572621 - RNA, 24 nt, Human
agugcaguggcaggaucuuggcuc

SEQ ID NO: 572622 - RNA, 22 nt, Human
auaaaaugcuguuuuaucuaca

SEQ ID NO: 572623 - RNA, 22 nt, Human
aucuauuucuuccaaauuccaa

SEQ ID NO: 572624 - RNA, 27 nt, Human
augcuguuugacagcauuugugaacca

SEQ ID NO: 572625 - RNA, 23 nt, Human
auggcagaaggggaagcaggcac

SEQ ID NO: 572626 - RNA, 21 nt, Human
auuguuaaugaguagcaauau

SEQ ID NO: 572627 - RNA, 24 nt, Human
auuuuuguauuuuuaguagagaca

SEQ ID NO: 572628 - RNA, 24 nt, Human
caaagugcugggauuacaggugug

SEQ ID NO: 572629 - RNA, 27 nt, Human
caaagugcugggauuaccggugugagc

SEQ ID NO: 572630 - RNA, 23 nt, Human
caaccuccaccucccggguucaa

SEQ ID NO: 572631 - RNA, 27 nt, Human
caaguaauucucgugccucagccuccc

SEQ ID NO: 572632 - RNA, 26 nt, Human
caauccugaaggaucauuucaccaaa

SEQ ID NO: 572633 - RNA, 24 nt, Human
caccaugccuggcuaauuuuugua

SEQ ID NO: 572634 - RNA, 24 nt, Human
caccauguugcccaggcuggucuu

SEQ ID NO: 572635 - RNA, 27 nt, Human
caccauguugcccaggcuggucuugaa

SEQ ID NO: 572636 - RNA, 23 nt, Human
cacccgccccagccucccaaagu

SEQ ID NO: 572637 - RNA, 24 nt, Human
cacugagaugggccaccaccccag

SEQ ID NO: 572638 - RNA, 21 nt, Human
cacugcaaccuccaccucccg

SEQ ID NO: 572639 - RNA, 23 nt, Human
cacugcaaccuccaccucccggg

SEQ ID NO: 572640 - RNA, 20 nt, Human
cacuuucaguuccagaccac

SEQ ID NO: 572641 - RNA, 20 nt, Human
cagaaccaucagagaaacca

SEQ ID NO: 572642 - RNA, 24 nt, Human
cagaaccaucagagaaaccacaaa

SEQ ID NO: 572643 - RNA, 20 nt, Human
caggaucuuggcucacugca

SEQ ID NO: 572644 - RNA, 23 nt, Human
caggcaugaaaacaguauucauc

SEQ ID NO: 572645 - RNA, 24 nt, Human
caggguuucaccauguugcccagg

SEQ ID NO: 572646 - RNA, 24 nt, Human
caggguuuugccauguuggucagg

SEQ ID NO: 572647 - RNA, 23 nt, Human
cauaucuuaagggcccugggaaa

SEQ ID NO: 572648 - RNA, 19 nt, Human
caucuacaguuccuuccuc

SEQ ID NO: 572649 - RNA, 20 nt, Human
cauguugcccaggcuggucu

SEQ ID NO: 572650 - RNA, 23 nt, Human
cauguugcccaggcuggucuuga

SEQ ID NO: 572651 - RNA, 24 nt, Human
cauguugcccaggcuggucuugaa

SEQ ID NO: 572652 - RNA, 18 nt, Human
ccaaagugcugggauuac

SEQ ID NO: 572653 - RNA, 21 nt, Human
ccaaagugcugggauuacagg

SEQ ID NO: 572654 - RNA, 21 nt, Human
ccaaagugcugggauuacagg

SEQ ID NO: 572655 - RNA, 24 nt, Human
ccaaagugcugggauuacaggugu

SEQ ID NO: 572656 - RNA, 21 nt, Human
ccaaagugcugggauuaccgg

SEQ ID NO: 572657 - RNA, 24 nt, Human
ccaaagugcugggauuaccggugu

SEQ ID NO: 572658 - RNA, 23 nt, Human
ccaaguagcugagauuacaggca

SEQ ID NO: 572659 - RNA, 24 nt, Human
ccaaguagcugagauuacaggcau

SEQ ID NO: 572660 - RNA, 26 nt, Human
ccacccgccccagccucccaaagugc

SEQ ID NO: 572661 - RNA, 19 nt, Human
ccaccgugcccagccacaa

SEQ ID NO: 572662 - RNA, 24 nt, Human
ccaccucccggguucaaguaauuc

SEQ ID NO: 572663 - RNA, 24 nt, Human
ccaccuuggucucccaaagugcug

SEQ ID NO: 572664 - RNA, 23 nt, Human
ccagaaccaucagagaaaccaca

SEQ ID NO: 572665 - RNA, 21 nt, Human
ccaggcuguaaacagacccaa

SEQ ID NO: 572666 - RNA, 19 nt, Human
ccauguuggucaggcuggu

SEQ ID NO: 572667 - RNA, 19 nt, Human
cccaaguagcugagauuac

SEQ ID NO: 572668 - RNA, 24 nt, Human
cccaaguagcugagauuacaggca

SEQ ID NO: 572669 - RNA, 20 nt, Human
cccggguucaaguaauucuc

SEQ ID NO: 572670 - RNA, 20 nt, Human
cccggguucaaguaauucuc

SEQ ID NO: 572671 - RNA, 24 nt, Human
ccgccccagccucccaaagugcug

SEQ ID NO: 572672 - RNA, 19 nt, Human
ccucaccucucacauuuag

SEQ ID NO: 572673 - RNA, 19 nt, Human
ccucugugagcaacagaag

SEQ ID NO: 572674 - RNA, 24 nt, Human
ccugacuucaagugaucugcccac

SEQ ID NO: 572675 - RNA, 19 nt, Human
ccugcagcuuccucaccuc

SEQ ID NO: 572676 - RNA, 22 nt, Human
ccuggcaucaagcaauccaccc

SEQ ID NO: 572677 - RNA, 19 nt, Human
cgugaauugaaugcucuug

SEQ ID NO: 572678 - RNA, 19 nt, Human
cuaaaagaacuugucucac

SEQ ID NO: 572679 - RNA, 20 nt, Human
cuaggucucaacagugggcu

SEQ ID NO: 572680 - RNA, 21 nt, Human
cuaugaaaguccuagauggca

SEQ ID NO: 572681 - RNA, 26 nt, Human
cucaacagugggcuuacucaguagac

SEQ ID NO: 572682 - RNA, 24 nt, Human
cucacugcaaccuccaccucccgg

SEQ ID NO: 572683 - RNA, 21 nt, Human
cucccaaguagcugagauuac

SEQ ID NO: 572684 - RNA, 23 nt, Human
cuccuggcaucaagcaauccacc

SEQ ID NO: 572685 - RNA, 25 nt, Human
cucgugccucagccucccaaguagc

SEQ ID NO: 572686 - RNA, 20 nt, Human
cucuguugcccaggcuggag

SEQ ID NO: 572687 - RNA, 20 nt, Human
cugaagccugcagugacugu

SEQ ID NO: 572688 - RNA, 23 nt, Human
cugcaaccuccaccucccggguu

SEQ ID NO: 572689 - RNA, 24 nt, Human
cugcaaccuccaccucccggguuc

SEQ ID NO: 572690 - RNA, 19 nt, Human
cuguugcccaggcuggagu

SEQ ID NO: 572691 - RNA, 18 nt, Human
cuuaaaguaagacaacag

SEQ ID NO: 572692 - RNA, 19 nt, Human
cuucuguguaacuucuaca

SEQ ID NO: 572693 - RNA, 18 nt, Human
cuugucucacuuccuucu

SEQ ID NO: 572694 - RNA, 25 nt, Human
gaccacugcaauaaaccaaauacaa

SEQ ID NO: 572695 - RNA, 24 nt, Human
gacuucaagugaucugcccaccuu

SEQ ID NO: 572696 - RNA, 20 nt, Human
gagacaggguuucaccaugu

SEQ ID NO: 572697 - RNA, 18 nt, Human
gauuacaggcaugugcca

SEQ ID NO: 572698 - RNA, 24 nt, Human
gauuacaggcaugugccaccaugc

SEQ ID NO: 572699 - RNA, 18 nt, Human
gauuacaggugugagcca

SEQ ID NO: 572700 - RNA, 21 nt, Human
gauuacaggugugagccaccg

SEQ ID NO: 572701 - RNA, 24 nt, Human
gauuacaggugugagccaccgugc

SEQ ID NO: 572702 - RNA, 18 nt, Human
gauuaccggugugagcca

SEQ ID NO: 572703 - RNA, 22 nt, Human
gauuaccggugugagccacugc

SEQ ID NO: 572704 - RNA, 23 nt, Human
gauuaccggugugagccacugca

SEQ ID NO: 572705 - RNA, 23 nt, Human
gcaacagaagcaccacgcuacaa

SEQ ID NO: 572706 - RNA, 20 nt, Human
gccauguuggucaggcuggu

SEQ ID NO: 572707 - RNA, 23 nt, Human
gccauguuggucaggcuggucuc

SEQ ID NO: 572708 - RNA, 23 nt, Human
gcccagaaccaucagagaaacca

SEQ ID NO: 572709 - RNA, 20 nt, Human
gcccaggcuggagugcagug

SEQ ID NO: 572710 - RNA, 23 nt, Human
gccccagccucccaaagugcugg

SEQ ID NO: 572711 - RNA, 25 nt, Human
gcucuguugcccaggcuggagugca

SEQ ID NO: 572712 - RNA, 24 nt, Human
ggcuggucucaaacuccugacuuc

SEQ ID NO: 572713 - RNA, 18 nt, Human
ggcuggucuugaacuccu

SEQ ID NO: 572714 - RNA, 22 nt, Human
ggguuuugccauguuggucagg

SEQ ID NO: 572715 - RNA, 24 nt, Human
guaauucucgugccucagccuccc

SEQ ID NO: 572716 - RNA, 23 nt, Human
guagagacaggguuuugccaugu

SEQ ID NO: 572717 - RNA, 18 nt, Human
gucacguuguacuuuuau

SEQ ID NO: 572718 - RNA, 21 nt, Human
gugaauugaaugcucuugaug

SEQ ID NO: 572719 - RNA, 24 nt, Human
gugcaguggcaggaucuuggcuca

SEQ ID NO: 572720 - RNA, 22 nt, Human
gugccucagccucccaaguagc

SEQ ID NO: 572721 - RNA, 23 nt, Human
gugccucagccucccaaguagcu

SEQ ID NO: 572722 - RNA, 24 nt, Human
guuucaccauguugcccaggcugg

SEQ ID NO: 572723 - RNA, 22 nt, Human
uaaaagaacuugucucacuucc

SEQ ID NO: 572724 - RNA, 20 nt, Human
uaacaugguucauacuguag

SEQ ID NO: 572725 - RNA, 23 nt, Human
uaaguugcugaagccugcaguga

SEQ ID NO: 572726 - RNA, 20 nt, Human
uaauucucgugccucagccu

SEQ ID NO: 572727 - RNA, 22 nt, Human
uaauuuaaaaguacuuuuaaau

SEQ ID NO: 572728 - RNA, 24 nt, Human
uaauuuuuguauuuuuaguagaga

SEQ ID NO: 572729 - RNA, 22 nt, Human
uacaggcaugugccaccaugcc

SEQ ID NO: 572730 - RNA, 24 nt, Human
uacaggugugagccaccgugccca

SEQ ID NO: 572731 - RNA, 22 nt, Human
uaccccaucaauccugaaggau

SEQ ID NO: 572732 - RNA, 24 nt, Human
uaccggugugagccacugcaccca

SEQ ID NO: 572733 - RNA, 22 nt, Human
uagagacaggguuuugccaugu

SEQ ID NO: 572734 - RNA, 23 nt, Human
uaggccccuccacuucuaguucu

SEQ ID NO: 572735 - RNA, 24 nt, Human
uaguagagacaggguuuugccaug

SEQ ID NO: 572736 - RNA, 21 nt, Human
uauuaccccaucaauccugaa

SEQ ID NO: 572737 - RNA, 23 nt, Human
ucacugcaaccuccaccucccgg

SEQ ID NO: 572738 - RNA, 24 nt, Human
ucacugcaaccuccaccucccggg

SEQ ID NO: 572739 - RNA, 25 nt, Human
ucacugcaaccuccaccucccgggu

SEQ ID NO: 572740 - RNA, 27 nt, Human
ucacugcaaccuccaccucccggguuc

SEQ ID NO: 572741 - RNA, 21 nt, Human
ucagccucccaaguagcugag

SEQ ID NO: 572742 - RNA, 19 nt, Human
uccacauggcuggggaggc

SEQ ID NO: 572743 - RNA, 21 nt, Human
uccacccgccccagccuccca

SEQ ID NO: 572744 - RNA, 21 nt, Human
uccaugagaaggaacuucuca

SEQ ID NO: 572745 - RNA, 23 nt, Human
ucccaaagugcugggauuacagg

SEQ ID NO: 572746 - RNA, 21 nt, Human
ucccaaagugcugggauuacc

SEQ ID NO: 572747 - RNA, 23 nt, Human
ucccaaagugcugggauuaccgg

SEQ ID NO: 572748 - RNA, 24 nt, Human
ucccaaguagcugagauuacaggc

SEQ ID NO: 572749 - RNA, 24 nt, Human
ucccacugguggcuggaaaacugg

SEQ ID NO: 572750 - RNA, 21 nt, Human
ucccggguucaaguaauucuc

SEQ ID NO: 572751 - RNA, 24 nt, Human
ucccggguucaaguaauucucgug

SEQ ID NO: 572752 - RNA, 19 nt, Human
uccugaaggaucauuucac

SEQ ID NO: 572753 - RNA, 22 nt, Human
ucucacuuccuucuggccucca

SEQ ID NO: 572754 - RNA, 21 nt, Human
ucucuaggccccuccacuucu

SEQ ID NO: 572755 - RNA, 18 nt, Human
ucuguugcccaggcugga

SEQ ID NO: 572756 - RNA, 24 nt, Human
ucuguugcccaggcuggagugcag

SEQ ID NO: 572757 - RNA, 21 nt, Human
ucuugaacuccuggcaucaag

SEQ ID NO: 572758 - RNA, 23 nt, Human
ucuugcucuguugcccaggcugg

SEQ ID NO: 572759 - RNA, 24 nt, Human
ucuugcucuguugcccaggcugga

SEQ ID NO: 572760 - RNA, 21 nt, Human
ucuuuggguuucacucagcuu

SEQ ID NO: 572761 - RNA, 19 nt, Human
ugaaacccuccaaguccuc

SEQ ID NO: 572762 - RNA, 22 nt, Human
ugaagucuugaaacccuccaag

SEQ ID NO: 572763 - RNA, 21 nt, Human
ugaaugcucuugauggcaucu

SEQ ID NO: 572764 - RNA, 18 nt, Human
ugacuucaagugaucugc

SEQ ID NO: 572765 - RNA, 21 nt, Human
ugacuucaagugaucugccca

SEQ ID NO: 572766 - RNA, 21 nt, Human
ugagauuacaggcaugugcca

SEQ ID NO: 572767 - RNA, 22 nt, Human
ugagauuacaggcaugugccac

SEQ ID NO: 572768 - RNA, 24 nt, Human
ugagauuacaggcaugugccacca

SEQ ID NO: 572769 - RNA, 24 nt, Human
ugaucugcccaccuuggucuccca

SEQ ID NO: 572770 - RNA, 22 nt, Human
ugcaguggcaggaucuuggcuc

SEQ ID NO: 572771 - RNA, 24 nt, Human
ugccauguuggucaggcuggucuc

SEQ ID NO: 572772 - RNA, 22 nt, Human
ugcccagaaccaucagagaaac

SEQ ID NO: 572773 - RNA, 25 nt, Human
ugcccagaaccaucagagaaaccac

SEQ ID NO: 572774 - RNA, 18 nt, Human
ugcccaggcuggagugca

SEQ ID NO: 572775 - RNA, 21 nt, Human
ugcccaggcuggagugcagug

SEQ ID NO: 572776 - RNA, 22 nt, Human
ugcccaggcuggagugcagugg

SEQ ID NO: 572777 - RNA, 24 nt, Human
ugcccaggcuggagugcaguggca

SEQ ID NO: 572778 - RNA, 24 nt, Human
ugcccaggcuggucuugaacuccu

SEQ ID NO: 572779 - RNA, 24 nt, Human
ugccucagccucccaaguagcuga

SEQ ID NO: 572780 - RNA, 18 nt, Human
ugcuauuuucagcccauc

SEQ ID NO: 572781 - RNA, 23 nt, Human
ugcugcauuuauuaacucuuuca

SEQ ID NO: 572782 - RNA, 24 nt, Human
ugcugggauuacaggugugagcca

SEQ ID NO: 572783 - RNA, 26 nt, Human
uggaaaacuggguugcaggacagagg

SEQ ID NO: 572784 - RNA, 23 nt, Human
uggagugcaguggcaggaucuug

SEQ ID NO: 572785 - RNA, 24 nt, Human
uggagugcaguggcaggaucuugg

SEQ ID NO: 572786 - RNA, 19 nt, Human
uggcaguuucuuaaaguaa

SEQ ID NO: 572787 - RNA, 20 nt, Human
uggcaucaagcaauccaccc

SEQ ID NO: 572788 - RNA, 18 nt, Human
uggccuccaugguuuccu

SEQ ID NO: 572789 - RNA, 18 nt, Human
ugggauuacaggugugag

SEQ ID NO: 572790 - RNA, 21 nt, Human
ugggauuacaggugugagcca

SEQ ID NO: 572791 - RNA, 22 nt, Human
ugggauuacaggugugagccac

SEQ ID NO: 572792 - RNA, 23 nt, Human
ugggauuacaggugugagccacc

SEQ ID NO: 572793 - RNA, 23 nt, Human
ugggauuacaggugugagccacc

SEQ ID NO: 572794 - RNA, 24 nt, Human
ugggauuacaggugugagccaccg

SEQ ID NO: 572795 - RNA, 19 nt, Human
ugggauuaccggugugagc

SEQ ID NO: 572796 - RNA, 22 nt, Human
ugggauuaccggugugagccac

SEQ ID NO: 572797 - RNA, 22 nt, Human
ugggauuaccggugugagccac

SEQ ID NO: 572798 - RNA, 24 nt, Human
ugggauuaccggugugagccacug

SEQ ID NO: 572799 - RNA, 24 nt, Human
uggucaggcuggucucaaacuccu

SEQ ID NO: 572800 - RNA, 22 nt, Human
uggugaauccuuuccagaaggu

SEQ ID NO: 572801 - RNA, 24 nt, Human
uguaaacagacccaacgccaucca

SEQ ID NO: 572802 - RNA, 24 nt, Human
ugucucacuuccuucuggccucca

SEQ ID NO: 572803 - RNA, 18 nt, Human
ugugucucagggaauagg

SEQ ID NO: 572804 - RNA, 24 nt, Human
uuaaaaucuguuguuuaguguagc

SEQ ID NO: 572805 - RNA, 21 nt, Human
uuaaaguaagacaacagugaa

SEQ ID NO: 572806 - RNA, 24 nt, Human
uuaguagagacaggguuuugccau

SEQ ID NO: 572807 - RNA, 24 nt, Human
uucaaauuuucuccugcagcuucc

SEQ ID NO: 572808 - RNA, 23 nt, Human
uucaaguaauucucgugccucag

SEQ ID NO: 572809 - RNA, 20 nt, Human
uucaagugaucugcccaccu

SEQ ID NO: 572810 - RNA, 24 nt, Human
uucaagugaucugcccaccuuggu

SEQ ID NO: 572811 - RNA, 24 nt, Human
uucaagugaucugcccaccuuggu

SEQ ID NO: 572812 - RNA, 23 nt, Human
uucucuaacuaugaaaguccuag

SEQ ID NO: 572813 - RNA, 21 nt, Human
uucuuugcucguccaugagaa

SEQ ID NO: 572814 - RNA, 25 nt, Human
uugaagccaggcauugaguuucucu

SEQ ID NO: 572815 - RNA, 23 nt, Human
uugaggcagucuugcucuguugc

SEQ ID NO: 572816 - RNA, 24 nt, Human
uugccauguuggucaggcuggucu

SEQ ID NO: 572817 - RNA, 18 nt, Human
uugguuuuuuggauuugu

SEQ ID NO: 572818 - RNA, 19 nt, Human
uugucucacuuccuucugg

SEQ ID NO: 572819 - RNA, 21 nt, Human
uuuaucuacauuuaaaaucug

SEQ ID NO: 572820 - RNA, 19 nt, Human
uuucaagaaaucaccuucu

SEQ ID NO: 572821 - RNA, 23 nt, Human
uuucaccauguugcccaggcugg

SEQ ID NO: 572822 - RNA, 24 nt, Human
uuucaccauguugcccaggcuggu

SEQ ID NO: 572823 - RNA, 18 nt, Human
uuucuugaugcuuucaag

SEQ ID NO: 572824 - RNA, 24 nt, Human
uuugguuuuuuggauuuguuuuuu

SEQ ID NO: 572825 - RNA, 25 nt, Human
uuuugagacaggguuucaccauguu

SEQ ID NO: 572826 - RNA, 23 nt, Human
uuuugccauguuggucaggcugg

SEQ ID NO: 572827 - RNA, 21 nt, Human
uuuuuaguagagacaggguuu

SEQ ID NO: 572828 - RNA, 24 nt, Human
uuuuuaguagagacaggguuuugc

SEQ ID NO: 572829 - RNA, 24 nt, Human
uuuuugagacaggguuucaccaug

SEQ ID NO: 572830 - RNA, 20 nt, Human
uuuuuguauuuuuaguagag

SEQ ID NO: 572831 - RNA, 20 nt, Human
aaacagagccugcaucuccc

SEQ ID NO: 572832 - RNA, 20 nt, Human
aaacuggucccccuucuucc

SEQ ID NO: 572833 - RNA, 23 nt, Human
aaagcugaaagcagcucuagcua

SEQ ID NO: 572834 - RNA, 23 nt, Human
aaaggccuucucaaguagcgucc

SEQ ID NO: 572835 - RNA, 23 nt, Human
aaccaaaaacuaaaucauaacag

SEQ ID NO: 572836 - RNA, 22 nt, Human
aacccacucaaaucaaaaccaa

SEQ ID NO: 572837 - RNA, 26 nt, Human
aacuggucccccuucuucccagcccc

SEQ ID NO: 572838 - RNA, 24 nt, Human
aagcagagacucugggccauaauc

SEQ ID NO: 572839 - RNA, 19 nt, Human
aagcagcucuagcuaacca

SEQ ID NO: 572840 - RNA, 23 nt, Human
aagcagcucuagcuaaccaaccc

SEQ ID NO: 572841 - RNA, 26 nt, Human
aagcgcuaggauuacaggcauaagcc

SEQ ID NO: 572842 - RNA, 22 nt, Human
aagucacccuguggggaaaggc

SEQ ID NO: 572843 - RNA, 24 nt, Human
aagugauccuccugccuuggccuc

SEQ ID NO: 572844 - RNA, 24 nt, Human
aaucauaacaguaaaaauaugacc

SEQ ID NO: 572845 - RNA, 18 nt, Human
acauacggcuuccaacuc

SEQ ID NO: 572846 - RNA, 21 nt, Human
acaucccugcugcugcuccug

SEQ ID NO: 572847 - RNA, 18 nt, Human
accuggcaccuucucccu

SEQ ID NO: 572848 - RNA, 19 nt, Human
acuacauugcccagggugg

SEQ ID NO: 572849 - RNA, 23 nt, Human
agcagaaagguggaauccccaac

SEQ ID NO: 572850 - RNA, 20 nt, Human
agccaccacaccuggccccc

SEQ ID NO: 572851 - RNA, 22 nt, Human
agccucaagugauccuccugcc

SEQ ID NO: 572852 - RNA, 19 nt, Human
agcugcugaucagcucuac

SEQ ID NO: 572853 - RNA, 21 nt, Human
aggaaaagcugaaagcagcuc

SEQ ID NO: 572854 - RNA, 21 nt, Human
aggcuggccgaggacugcagg

SEQ ID NO: 572855 - RNA, 20 nt, Human
aggucccugacccucuccaa

SEQ ID NO: 572856 - RNA, 18 nt, Human
aucaugcuauaacacucc

SEQ ID NO: 572857 - RNA, 22 nt, Human
augaccagcaaacaacgaaaga

SEQ ID NO: 572858 - RNA, 19 nt, Human
auuugauuuucuuucuuuu

SEQ ID NO: 572859 - RNA, 19 nt, Human
caaaaacuaaaucauaaca

SEQ ID NO: 572860 - RNA, 24 nt, Human
caaagcgcuaggauuacaggcaua

SEQ ID NO: 572861 - RNA, 24 nt, Human
caaccaacccacucaaaucaaaac

SEQ ID NO: 572862 - RNA, 18 nt, Human
caacccacucaaaucaaa

SEQ ID NO: 572863 - RNA, 24 nt, Human
caacccacucaaaucaaaaccaaa

SEQ ID NO: 572864 - RNA, 23 nt, Human
caagcacccacaagcagagacuc

SEQ ID NO: 572865 - RNA, 22 nt, Human
caagugauccuccugccuuggc

SEQ ID NO: 572866 - RNA, 27 nt, Human
caagugauccuccugccuuggccuccc

SEQ ID NO: 572867 - RNA, 27 nt, Human
caagugauccuccugccuuggccuccc

SEQ ID NO: 572868 - RNA, 18 nt, Human
cacaaauauacccuugga

SEQ ID NO: 572869 - RNA, 21 nt, Human
cacaguuuccuacgggagacc

SEQ ID NO: 572870 - RNA, 23 nt, Human
caccuggcccccauauucgagcc

SEQ ID NO: 572871 - RNA, 18 nt, Human
cacuacauugcccagggu

SEQ ID NO: 572872 - RNA, 22 nt, Human
cacuacauugcccagggugguc

SEQ ID NO: 572873 - RNA, 22 nt, Human
cagagcaaaggacauccuggcc

SEQ ID NO: 572874 - RNA, 18 nt, Human
cagcaagggggccaacca

SEQ ID NO: 572875 - RNA, 24 nt, Human
caucucacuccagaaccaguuuca

SEQ ID NO: 572876 - RNA, 22 nt, Human
caucucccagccuugccccacc

SEQ ID NO: 572877 - RNA, 18 nt, Human
ccaaacuggucccccuuc

SEQ ID NO: 572878 - RNA, 24 nt, Human
ccaaagcgcuaggauuacaggcau

SEQ ID NO: 572879 - RNA, 23 nt, Human
ccaaccaacccacucaaaucaaa

SEQ ID NO: 572880 - RNA, 19 nt, Human
ccaaccccccucuaaaccc

SEQ ID NO: 572881 - RNA, 22 nt, Human
ccaaccccccucuaaacccccu

SEQ ID NO: 572882 - RNA, 19 nt, Human
ccacucaaaucaaaaccaa

SEQ ID NO: 572883 - RNA, 21 nt, Human
ccagcaagggggccaaccaac

SEQ ID NO: 572884 - RNA, 26 nt, Human
ccagccuugccccaccuggucccaca

SEQ ID NO: 572885 - RNA, 21 nt, Human
cccagccccuuuuguaccucc

SEQ ID NO: 572886 - RNA, 19 nt, Human
ccccagccgagcucaucuc

SEQ ID NO: 572887 - RNA, 24 nt, Human
cccccugacauacauacggcuucc

SEQ ID NO: 572888 - RNA, 22 nt, Human
ccccucuaaacccccugacaua

SEQ ID NO: 572889 - RNA, 21 nt, Human
ccccuucuucccagccccuuu

SEQ ID NO: 572890 - RNA, 22 nt, Human
ccgaugaucaugcuauaacacu

SEQ ID NO: 572891 - RNA, 18 nt, Human
ccuagccucaagugaucc

SEQ ID NO: 572892 - RNA, 23 nt, Human
ccuagccucaagugauccuccug

SEQ ID NO: 572893 - RNA, 21 nt, Human
ccucaagaucuccggugccuc

SEQ ID NO: 572894 - RNA, 20 nt, Human
ccucaagugauccuccugcc

SEQ ID NO: 572895 - RNA, 21 nt, Human
ccucaagugauccuccugccu

SEQ ID NO: 572896 - RNA, 21 nt, Human
ccuccagcuccgagaaggcgc

SEQ ID NO: 572897 - RNA, 24 nt, Human
ccuccugccuuggccucccaaagc

SEQ ID NO: 572898 - RNA, 23 nt, Human
ccuggcaccuucucccuugggga

SEQ ID NO: 572899 - RNA, 24 nt, Human
ccuguggggaaaggccuucucaag

SEQ ID NO: 572900 - RNA, 22 nt, Human
cgagccuaauguuccuuuggga

SEQ ID NO: 572901 - RNA, 27 nt, Human
cgcuaggauuacaggcauaagccacca

SEQ ID NO: 572902 - RNA, 23 nt, Human
cuauacaucccugcugcugcucc

SEQ ID NO: 572903 - RNA, 24 nt, Human
cucaagugauccuccugccuuggc

SEQ ID NO: 572904 - RNA, 21 nt, Human
cucacugaagaugggccucca

SEQ ID NO: 572905 - RNA, 18 nt, Human
cucaggucccugacccuc

SEQ ID NO: 572906 - RNA, 19 nt, Human
cucccaccugccuggccgc

SEQ ID NO: 572907 - RNA, 21 nt, Human
cuccgagaaggcgcucagcag

SEQ ID NO: 572908 - RNA, 20 nt, Human
cuccugcugaccuggcaccu

SEQ ID NO: 572909 - RNA, 21 nt, Human
cuccuuuugucuccaggaaaa

SEQ ID NO: 572910 - RNA, 19 nt, Human
cucgcuccaccuuccagcc

SEQ ID NO: 572911 - RNA, 23 nt, Human
cugccuuggccucccaaagcgcu

SEQ ID NO: 572912 - RNA, 26 nt, Human
cuuuugucuccaggaaaagcugaaag

SEQ ID NO: 572913 - RNA, 19 nt, Human
gagccugcaucucccagcc

SEQ ID NO: 572914 - RNA, 22 nt, Human
gagugugacccagagcccuggg

SEQ ID NO: 572915 - RNA, 21 nt, Human
gaugccaacccccaaaagaaa

SEQ ID NO: 572916 - RNA, 21 nt, Human
gaugccaggcacaagcugcug

SEQ ID NO: 572917 - RNA, 18 nt, Human
gauuacaggcauaagcca

SEQ ID NO: 572918 - RNA, 21 nt, Human
gauuacaggcauaagccacca

SEQ ID NO: 572919 - RNA, 18 nt, Human
gccuuggccucccaaagc

SEQ ID NO: 572920 - RNA, 21 nt, Human
gcuaaccaaccccccucuaaa

SEQ ID NO: 572921 - RNA, 22 nt, Human
ggacuuaggguagacacugugg

SEQ ID NO: 572922 - RNA, 19 nt, Human
ggauuacaggcauaagcca

SEQ ID NO: 572923 - RNA, 22 nt, Human
ggauuacaggcauaagccacca

SEQ ID NO: 572924 - RNA, 22 nt, Human
gggggcauccacuucucgcucc

SEQ ID NO: 572925 - RNA, 22 nt, Human
ggucccccuucuucccagcccc

SEQ ID NO: 572926 - RNA, 22 nt, Human
guaaagaggaugccaaccccca

SEQ ID NO: 572927 - RNA, 21 nt, Human
gucccccuucuucccagcccc

SEQ ID NO: 572928 - RNA, 27 nt, Human
uaaaaauaugaccagcaaacaacgaaa

SEQ ID NO: 572929 - RNA, 23 nt, Human
uaacacuccuuuugucuccagga

SEQ ID NO: 572930 - RNA, 24 nt, Human
uaacuccuagccucaagugauccu

SEQ ID NO: 572931 - RNA, 22 nt, Human
uacaggcauaagccaccacacc

SEQ ID NO: 572932 - RNA, 24 nt, Human
uacauugcccaggguggucucuaa

SEQ ID NO: 572933 - RNA, 23 nt, Human
uagacacugugggacccagagca

SEQ ID NO: 572934 - RNA, 20 nt, Human
uagccucaagugauccuccu

SEQ ID NO: 572935 - RNA, 24 nt, Human
uagccucaagugauccuccugccu

SEQ ID NO: 572936 - RNA, 22 nt, Human
uaggauuacaggcauaagccac

SEQ ID NO: 572937 - RNA, 24 nt, Human
uaggauuacaggcauaagccacca

SEQ ID NO: 572938 - RNA, 24 nt, Human
uaggauuacaggcauaagccacca

SEQ ID NO: 572939 - RNA, 21 nt, Human
uaggguagacacugugggacc

SEQ ID NO: 572940 - RNA, 23 nt, Human
ucaaaaccaaaaacuaaaucaua

SEQ ID NO: 572941 - RNA, 20 nt, Human
ucagcucaggucccugaccc

SEQ ID NO: 572942 - RNA, 19 nt, Human
ucaucucacuccagaacca

SEQ ID NO: 572943 - RNA, 24 nt, Human
ucccaaagcgcuaggauuacaggc

SEQ ID NO: 572944 - RNA, 18 nt, Human
ucccacacuccuugcagg

SEQ ID NO: 572945 - RNA, 19 nt, Human
ucccagcagguggaucaag

SEQ ID NO: 572946 - RNA, 19 nt, Human
ucccugcugcugcuccugc

SEQ ID NO: 572947 - RNA, 26 nt, Human
uccuuugggaaacaacugaguaaagg

SEQ ID NO: 572948 - RNA, 20 nt, Human
ucuacauuugauuuucuuuc

SEQ ID NO: 572949 - RNA, 19 nt, Human
ucucacuacauugcccagg

SEQ ID NO: 572950 - RNA, 20 nt, Human
ucucacuacauugcccaggg

SEQ ID NO: 572951 - RNA, 21 nt, Human
ucucccagccuugccccaccu

SEQ ID NO: 572952 - RNA, 24 nt, Human
ucucgcuccaccuuccagccuggg

SEQ ID NO: 572953 - RNA, 21 nt, Human
ucucuguccuggagccagaaa

SEQ ID NO: 572954 - RNA, 23 nt, Human
ucuucccagccccuuuuguaccu

SEQ ID NO: 572955 - RNA, 19 nt, Human
ugacccagagcccuggggg

SEQ ID NO: 572956 - RNA, 20 nt, Human
ugaccuggcaccuucucccu

SEQ ID NO: 572957 - RNA, 24 nt, Human
ugaggucucacuacauugcccagg

SEQ ID NO: 572958 - RNA, 21 nt, Human
ugaucaugcuauaacacuccu

SEQ ID NO: 572959 - RNA, 23 nt, Human
ugcaaacagagccugcaucuccc

SEQ ID NO: 572960 - RNA, 18 nt, Human
ugccaggcacaagcugcu

SEQ ID NO: 572961 - RNA, 20 nt, Human
ugccucaagaucuccggugc

SEQ ID NO: 572962 - RNA, 24 nt, Human
ugccucaagaucuccggugccuca

SEQ ID NO: 572963 - RNA, 21 nt, Human
ugccuuggccucccaaagcgc

SEQ ID NO: 572964 - RNA, 23 nt, Human
ugccuuggccucccaaagcgcua

SEQ ID NO: 572965 - RNA, 20 nt, Human
uggaucaagcacccacaagc

SEQ ID NO: 572966 - RNA, 20 nt, Human
uggcccccauauucgagccu

SEQ ID NO: 572967 - RNA, 22 nt, Human
uggcugauuucuggcauucucu

SEQ ID NO: 572968 - RNA, 20 nt, Human
ugggcacugcaucacuuuau

SEQ ID NO: 572969 - RNA, 21 nt, Human
uggucccacaguuuccuacgg

SEQ ID NO: 572970 - RNA, 22 nt, Human
uucccagccccuuuuguaccuc

SEQ ID NO: 572971 - RNA, 22 nt, Human
uucuaagagaugaggucucacu

SEQ ID NO: 572972 - RNA, 29 nt, Human
uuuuuuuuuucuaagagaugaggucucaa

SEQ ID NO: 572973 - RNA, 18 nt, Human
aaacacuaggaaacaagu

SEQ ID NO: 572974 - RNA, 24 nt, Human
aaacauaauaugauauauaauugc

SEQ ID NO: 572975 - RNA, 22 nt, Human
aagaaccccaaccuauaaccuu

SEQ ID NO: 572976 - RNA, 18 nt, Human
aaguguggcagggugacc

SEQ ID NO: 572977 - RNA, 21 nt, Human
acaacaccuuauacuaggagc

SEQ ID NO: 572978 - RNA, 21 nt, Human
acuguuaucauuauauaaucc

SEQ ID NO: 572979 - RNA, 25 nt, Human
agacauuaaaugauuacaaaacacu

SEQ ID NO: 572980 - RNA, 20 nt, Human
agauauauacuacaugugac

SEQ ID NO: 572981 - RNA, 22 nt, Human
agcaagagcaguauuaggucua

SEQ ID NO: 572982 - RNA, 20 nt, Human
caaaaaguucuaagaacccc

SEQ ID NO: 572983 - RNA, 22 nt, Human
caaacaccacauaagacuacuu

SEQ ID NO: 572984 - RNA, 23 nt, Human
cacgguagcgucgagccuuuuuu

SEQ ID NO: 572985 - RNA, 22 nt, Human
cagcgcagaccggcuuucucag

SEQ ID NO: 572986 - RNA, 19 nt, Human
ccaccgaggaacagcgcag

SEQ ID NO: 572987 - RNA, 21 nt, Human
ccgcucguuuuauucgccggc

SEQ ID NO: 572988 - RNA, 22 nt, Human
ccggccccucccgacaaccucc

SEQ ID NO: 572989 - RNA, 20 nt, Human
ccucccgacaaccucccugg

SEQ ID NO: 572990 - RNA, 21 nt, Human
ccucuaaauucuacuuccgga

SEQ ID NO: 572991 - RNA, 22 nt, Human
cuacaacccacugggaguggcu

SEQ ID NO: 572992 - RNA, 22 nt, Human
cucugaacuaaaaaggagccug

SEQ ID NO: 572993 - RNA, 24 nt, Human
cucuguuggcuguuuuuugaagaa

SEQ ID NO: 572994 - RNA, 21 nt, Human
cugacauccuaagcaaaaugu

SEQ ID NO: 572995 - RNA, 21 nt, Human
gacagacucuuaacagaagcc

SEQ ID NO: 572996 - RNA, 20 nt, Human
gcuacugacauccuaagcaa

SEQ ID NO: 572997 - RNA, 20 nt, Human
ggaaugguggcccgcaagga

SEQ ID NO: 572998 - RNA, 23 nt, Human
ggagacauuagcuuuuaaaaugu

SEQ ID NO: 572999 - RNA, 20 nt, Human
ggccaacacacaccacaaaa

SEQ ID NO: 573000 - RNA, 22 nt, Human
ggucacuuaaaguccaacuuga

SEQ ID NO: 573001 - RNA, 20 nt, Human
gucucuaacauggucucugg

SEQ ID NO: 573002 - RNA, 22 nt, Human
guguggcagggugacccaggac

SEQ ID NO: 573003 - RNA, 20 nt, Human
uaaaaaggagccugacccuu

SEQ ID NO: 573004 - RNA, 24 nt, Human
uaaaaugagcccaagugaaucauu

SEQ ID NO: 573005 - RNA, 24 nt, Human
uaaacuguuaucauuauauaaucc

SEQ ID NO: 573006 - RNA, 23 nt, Human
uaacaacaccuuauacuaggagc

SEQ ID NO: 573007 - RNA, 23 nt, Human
uaacaagcuuacuuaaaaacuaa

SEQ ID NO: 573008 - RNA, 21 nt, Human
uaagaaccccaaccuauaacc

SEQ ID NO: 573009 - RNA, 25 nt, Human
uaagaaccccaaccuauaaccuuga

SEQ ID NO: 573010 - RNA, 22 nt, Human
uaagacacagcaagagcaguau

SEQ ID NO: 573011 - RNA, 21 nt, Human
uaauaagacacagcaagagca

SEQ ID NO: 573012 - RNA, 21 nt, Human
uacaacccacugggaguggcu

SEQ ID NO: 573013 - RNA, 23 nt, Human
uaccuauacccugcaacuccggu

SEQ ID NO: 573014 - RNA, 22 nt, Human
uacuacaugugacuaaaauaag

SEQ ID NO: 573015 - RNA, 21 nt, Human
ucauucagugauuuuucacuc

SEQ ID NO: 573016 - RNA, 21 nt, Human
uccacauuaaaaauauaagau

SEQ ID NO: 573017 - RNA, 22 nt, Human
ucuaaauucuacuuccggaaug

SEQ ID NO: 573018 - RNA, 18 nt, Human
ucucugaacuaaaaagga

SEQ ID NO: 573019 - RNA, 22 nt, Human
ucugagucgcucuaggccaaca

SEQ ID NO: 573020 - RNA, 21 nt, Human
ucuguaacaacaccuuauacu

SEQ ID NO: 573021 - RNA, 20 nt, Human
ugacaaugaacugcucugaa

SEQ ID NO: 573022 - RNA, 23 nt, Human
ugaguauuaaucuuuaaugcauu

SEQ ID NO: 573023 - RNA, 21 nt, Human
ugccacagaaacacuaggaaa

SEQ ID NO: 573024 - RNA, 24 nt, Human
ugccacagaaacacuaggaaacaa

SEQ ID NO: 573025 - RNA, 18 nt, Human
uggcugcagacauuaaau

SEQ ID NO: 573026 - RNA, 21 nt, Human
uggucacuuaaaguccaacuu

SEQ ID NO: 573027 - RNA, 18 nt, Human
uuaacagaagcccugagg

SEQ ID NO: 573028 - RNA, 21 nt, Human
uuaacagaagcccugaggcuc

SEQ ID NO: 573029 - RNA, 22 nt, Human
uuacaauuaaaucauucaguga

SEQ ID NO: 573030 - RNA, 19 nt, Human
uucagugauuuuucacuca

SEQ ID NO: 573031 - RNA, 22 nt, Human
uucucagacagacucuuaacag

SEQ ID NO: 573032 - RNA, 25 nt, Human
uuuacaauuaaaucauucagugauu

SEQ ID NO: 573033 - RNA, 22 nt, Human
uuugucucuguuggcuguuuuu

SEQ ID NO: 573034 - RNA, 24 nt, Human
aaagcuaacggaggaauacucaca

SEQ ID NO: 573035 - RNA, 18 nt, Human
aaccugcucuuucucccu

SEQ ID NO: 573036 - RNA, 19 nt, Human
aaccugcucuuucucccug

SEQ ID NO: 573037 - RNA, 24 nt, Human
aagagaaaacaucacugaaaaaga

SEQ ID NO: 573038 - RNA, 23 nt, Human
aagagacaggguggggccccuca

SEQ ID NO: 573039 - RNA, 21 nt, Human
aagcagauacucccaaccuua

SEQ ID NO: 573040 - RNA, 23 nt, Human
agaagagaaaacaucacugaaaa

SEQ ID NO: 573041 - RNA, 21 nt, Human
agggagaagagaaaacaucac

SEQ ID NO: 573042 - RNA, 21 nt, Human
agggugcucuguggaggaugg

SEQ ID NO: 573043 - RNA, 21 nt, Human
aguuugggcuacuucugugcu

SEQ ID NO: 573044 - RNA, 23 nt, Human
auggagcuugggggauucuuucc

SEQ ID NO: 573045 - RNA, 22 nt, Human
cacaaccccuacucaggacagg

SEQ ID NO: 573046 - RNA, 19 nt, Human
cacccaccuguuuggggcu

SEQ ID NO: 573047 - RNA, 20 nt, Human
cauagcucuaagagaugggu

SEQ ID NO: 573048 - RNA, 19 nt, Human
caucacccacccugcggcc

SEQ ID NO: 573049 - RNA, 19 nt, Human
ccacaugccucagggagcu

SEQ ID NO: 573050 - RNA, 20 nt, Human
ccagaggcgguugcuccuuc

SEQ ID NO: 573051 - RNA, 21 nt, Human
ccagaggcgguugcuccuucu

SEQ ID NO: 573052 - RNA, 19 nt, Human
ccaggaagguguggacaag

SEQ ID NO: 573053 - RNA, 18 nt, Human
ccugcaaggucugugggu

SEQ ID NO: 573054 - RNA, 21 nt, Human
ccugcaaggucuguggguucu

SEQ ID NO: 573055 - RNA, 20 nt, Human
cgaccaauggcaaaggccuu

SEQ ID NO: 573056 - RNA, 20 nt, Human
cucaagacuuugccuaaaau

SEQ ID NO: 573057 - RNA, 23 nt, Human
cuccugaggaagcuaccacuggc

SEQ ID NO: 573058 - RNA, 18 nt, Human
cuggcaggggaggaggca

SEQ ID NO: 573059 - RNA, 23 nt, Human
cugggagaggaggagggguccuc

SEQ ID NO: 573060 - RNA, 23 nt, Human
cuggggauggaggaggagaggga

SEQ ID NO: 573061 - RNA, 18 nt, Human
gacagguucauggugggg

SEQ ID NO: 573062 - RNA, 22 nt, Human
gacggcccuuggcuucagagcc

SEQ ID NO: 573063 - RNA, 23 nt, Human
gagcuggaggaaacugagcggcu

SEQ ID NO: 573064 - RNA, 21 nt, Human
gaggagggguccucuaugaug

SEQ ID NO: 573065 - RNA, 18 nt, Human
gaggcgguugcuccuucu

SEQ ID NO: 573066 - RNA, 21 nt, Human
gcaaaggccuuguguucccug

SEQ ID NO: 573067 - RNA, 18 nt, Human
gcagagggaagaguuugg

SEQ ID NO: 573068 - RNA, 18 nt, Human
gcccuuggcuucagagcc

SEQ ID NO: 573069 - RNA, 27 nt, Human
ggaaagaggcugacagguucauggugg

SEQ ID NO: 573070 - RNA, 24 nt, Human
ggacuggauuugagcuguccagag

SEQ ID NO: 573071 - RNA, 21 nt, Human
ggauuugagcuguccagaggu

SEQ ID NO: 573072 - RNA, 24 nt, Human
ggcaggggaggaggcagaggaaag

SEQ ID NO: 573073 - RNA, 21 nt, Human
ggcugcggagacacgugagca

SEQ ID NO: 573074 - RNA, 28 nt, Human
ggggauggaggaggagagggaugcccag

SEQ ID NO: 573075 - RNA, 18 nt, Human
gguggggccccucaaggc

SEQ ID NO: 573076 - RNA, 23 nt, Human
uaagaauggccccauagcucuaa

SEQ ID NO: 573077 - RNA, 20 nt, Human
ucagagccgggcuggcaccg

SEQ ID NO: 573078 - RNA, 19 nt, Human
uccacggcacugccaggac

SEQ ID NO: 573079 - RNA, 21 nt, Human
uccacggcacugccaggacug

SEQ ID NO: 573080 - RNA, 21 nt, Human
uccugaggaagcuaccacugg

SEQ ID NO: 573081 - RNA, 19 nt, Human
ucuaccgacucucuucacc

SEQ ID NO: 573082 - RNA, 24 nt, Human
ucucuggguagucacgcuagggcu

SEQ ID NO: 573083 - RNA, 19 nt, Human
ucugaccagcccagcccac

SEQ ID NO: 573084 - RNA, 21 nt, Human
ugaaaaagaaggugucgggga

SEQ ID NO: 573085 - RNA, 20 nt, Human
ugacagguucaugguggggg

SEQ ID NO: 573086 - RNA, 22 nt, Human
ugagaacugggagaggaggagg

SEQ ID NO: 573087 - RNA, 23 nt, Human
ugagcggcucucacgcuuacuca

SEQ ID NO: 573088 - RNA, 18 nt, Human
uggaagaggauguccgga

SEQ ID NO: 573089 - RNA, 20 nt, Human
uggaagaggauguccggaug

SEQ ID NO: 573090 - RNA, 19 nt, Human
uggaggaggagagggaugc

SEQ ID NO: 573091 - RNA, 19 nt, Human
uggcaggggaggaggcaga

SEQ ID NO: 573092 - RNA, 20 nt, Human
uggcaggggaggaggcagag

SEQ ID NO: 573093 - RNA, 23 nt, Human
uggcaggggaggaggcagaggaa

SEQ ID NO: 573094 - RNA, 22 nt, Human
uggccaggcuccugaggaagcu

SEQ ID NO: 573095 - RNA, 23 nt, Human
ugggaaagaggcugacagguuca

SEQ ID NO: 573096 - RNA, 18 nt, Human
ugggaaaugucuauuagc

SEQ ID NO: 573097 - RNA, 19 nt, Human
ugggagaggaggagggguc

SEQ ID NO: 573098 - RNA, 21 nt, Human
ugggagaggaggagggguccu

SEQ ID NO: 573099 - RNA, 21 nt, Human
uggggauggaggaggagaggg

SEQ ID NO: 573100 - RNA, 20 nt, Human
uuagcuuaggacucuucuca

SEQ ID NO: 573101 - RNA, 22 nt, Human
uucccgagccggcugcggagac

SEQ ID NO: 573102 - RNA, 25 nt, Human
uucucagccuucuccaucacccacc

SEQ ID NO: 573103 - RNA, 18 nt, Human
uucugaccagcccagccc

SEQ ID NO: 573104 - RNA, 18 nt, Human
uuugaugaaagagacagg

SEQ ID NO: 573105 - RNA, 18 nt, Human
uuuguaaacauuagaccu

SEQ ID NO: 573106 - RNA, 19 nt, Human
aaacaaaccaaccacugug

SEQ ID NO: 573107 - RNA, 19 nt, Human
aagcaugauuaaaccagug

SEQ ID NO: 573108 - RNA, 19 nt, Human
acccugaagcauauuaugg

SEQ ID NO: 573109 - RNA, 25 nt, Human
agaauucagugaaaaccugcuccca

SEQ ID NO: 573110 - RNA, 24 nt, Human
agaccaucagcauauacaacauca

SEQ ID NO: 573111 - RNA, 19 nt, Human
auguggauacccugugugc

SEQ ID NO: 573112 - RNA, 22 nt, Human
cacacgccgaggacugcagagc

SEQ ID NO: 573113 - RNA, 20 nt, Human
caccuucuuucucuuucccc

SEQ ID NO: 573114 - RNA, 25 nt, Human
caccuucuuucucuuuccccugccc

SEQ ID NO: 573115 - RNA, 23 nt, Human
cagugggggggccacaguuugcc

SEQ ID NO: 573116 - RNA, 24 nt, Human
ccagcaaggcuaacuaaaucaaac

SEQ ID NO: 573117 - RNA, 22 nt, Human
ccccagccaagcugcccggggc

SEQ ID NO: 573118 - RNA, 22 nt, Human
ccccggaagccuagccccagcc

SEQ ID NO: 573119 - RNA, 21 nt, Human
ccccugcccaggcccuaaguu

SEQ ID NO: 573120 - RNA, 23 nt, Human
cccucagaauucagugaaaaccu

SEQ ID NO: 573121 - RNA, 23 nt, Human
cuaacucaacaauguagcugcag

SEQ ID NO: 573122 - RNA, 19 nt, Human
cuuucucuuuccccugccc

SEQ ID NO: 573123 - RNA, 19 nt, Human
gcccaugaaagccacaaag

SEQ ID NO: 573124 - RNA, 20 nt, Human
gcccuaaguuaggguuccca

SEQ ID NO: 573125 - RNA, 19 nt, Human
gccuuggaggacaugcaga

SEQ ID NO: 573126 - RNA, 23 nt, Human
uaaaaacaaaacaaaccaaccac

SEQ ID NO: 573127 - RNA, 18 nt, Human
uaaaccagugcagaaaaa

SEQ ID NO: 573128 - RNA, 20 nt, Human
uaacaaagacuucuggucag

SEQ ID NO: 573129 - RNA, 24 nt, Human
uaacuaaaucaaacugugguuuaa

SEQ ID NO: 573130 - RNA, 19 nt, Human
uacaacaucaucacuaacu

SEQ ID NO: 573131 - RNA, 19 nt, Human
ucaccuucuuucucuuucc

SEQ ID NO: 573132 - RNA, 22 nt, Human
ucccugcccaugaaagccacaa

SEQ ID NO: 573133 - RNA, 19 nt, Human
ucucucaccuucuuucucu

SEQ ID NO: 573134 - RNA, 23 nt, Human
ugaaagccacaaagagauuucuu

SEQ ID NO: 573135 - RNA, 21 nt, Human
ugacagugggggggccacagu

SEQ ID NO: 573136 - RNA, 24 nt, Human
ugcaggguaacauguggauacccu

SEQ ID NO: 573137 - RNA, 21 nt, Human
ugccuuggaggacaugcagag

SEQ ID NO: 573138 - RNA, 27 nt, Human
uguagcugcaggguaacauguggauac

SEQ ID NO: 573139 - RNA, 19 nt, Human
uuugccaaacuuugccuug

SEQ ID NO: 573140 - RNA, 21 nt, Human
uuuguaauccaguuaagacca

SEQ ID NO: 573141 - RNA, 18 nt, Human
uuuuacacacccugaagc

SEQ ID NO: 573142 - RNA, 24 nt, Human
aacagaauuuuccuuaaaguggag

SEQ ID NO: 573143 - RNA, 24 nt, Human
aaccaauucuccugccccagccuc

SEQ ID NO: 573144 - RNA, 20 nt, Human
aacuuuuuuuuuuuuuuaaa

SEQ ID NO: 573145 - RNA, 19 nt, Human
aagugaaaccagucacaaa

SEQ ID NO: 573146 - RNA, 18 nt, Human
aagugcugggauuacagg

SEQ ID NO: 573147 - RNA, 19 nt, Human
aagugcugggauuacaggc

SEQ ID NO: 573148 - RNA, 19 nt, Human
aagugcugggauuacaggc

SEQ ID NO: 573149 - RNA, 23 nt, Human
aagugcugggauuacaggcguga

SEQ ID NO: 573150 - RNA, 26 nt, Human
aagugcugggauuacaggcgugagcc

SEQ ID NO: 573151 - RNA, 24 nt, Human
aauuuuguauuuuuaguagagaug

SEQ ID NO: 573152 - RNA, 22 nt, Human
acucuuguugcccaggcuggag

SEQ ID NO: 573153 - RNA, 20 nt, Human
acugcaacucccggcauguc

SEQ ID NO: 573154 - RNA, 25 nt, Human
aggcuggagugcaguggcacaaucu

SEQ ID NO: 573155 - RNA, 24 nt, Human
aggugauccgccugccuuggccuc

SEQ ID NO: 573156 - RNA, 23 nt, Human
aguagcugggauuacaggcaugu

SEQ ID NO: 573157 - RNA, 20 nt, Human
agucacaaaaggacaaauac

SEQ ID NO: 573158 - RNA, 20 nt, Human
agugcaguggcacaaucucg

SEQ ID NO: 573159 - RNA, 24 nt, Human
agugcaguggcacaaucucggcuc

SEQ ID NO: 573160 - RNA, 18 nt, Human
agugcugggauuacaggc

SEQ ID NO: 573161 - RNA, 20 nt, Human
augggguuucuccauguuug

SEQ ID NO: 573162 - RNA, 21 nt, Human
augggguuucuccauguuugu

SEQ ID NO: 573163 - RNA, 24 nt, Human
augggguuucuccauguuugucag

SEQ ID NO: 573164 - RNA, 18 nt, Human
augugccaccacgcccag

SEQ ID NO: 573165 - RNA, 21 nt, Human
caaacagaauuuuccuuaaag

SEQ ID NO: 573166 - RNA, 20 nt, Human
caaccuccgccuccuggguu

SEQ ID NO: 573167 - RNA, 24 nt, Human
caagugcugggauuacaggcguga

SEQ ID NO: 573168 - RNA, 24 nt, Human
cacucuuguugcccaggcuggagu

SEQ ID NO: 573169 - RNA, 21 nt, Human
cacugcaaccuccgccuccug

SEQ ID NO: 573170 - RNA, 23 nt, Human
cacugcaaccuccgccuccuggg

SEQ ID NO: 573171 - RNA, 20 nt, Human
cagccuccugaguagcuggg

SEQ ID NO: 573172 - RNA, 22 nt, Human
caucaguuccuucugaagcccu

SEQ ID NO: 573173 - RNA, 24 nt, Human
caucuuaaagacuuuaugcuaagu

SEQ ID NO: 573174 - RNA, 19 nt, Human
ccaagugcugggauuacag

SEQ ID NO: 573175 - RNA, 21 nt, Human
ccaagugcugggauuacaggc

SEQ ID NO: 573176 - RNA, 24 nt, Human
ccaagugcugggauuacaggcgug

SEQ ID NO: 573177 - RNA, 21 nt, Human
ccaauucuccugccccagccu

SEQ ID NO: 573178 - RNA, 20 nt, Human
ccaccacgcccagcuaauuu

SEQ ID NO: 573179 - RNA, 18 nt, Human
ccaccaugcccggcugca

SEQ ID NO: 573180 - RNA, 22 nt, Human
ccaguaauuacgaagggucaca

SEQ ID NO: 573181 - RNA, 22 nt, Human
cccaagugcugggauuacaggc

SEQ ID NO: 573182 - RNA, 24 nt, Human
cccaagugcugggauuacaggcgu

SEQ ID NO: 573183 - RNA, 24 nt, Human
ccgccuccuggguucaaccaauuc

SEQ ID NO: 573184 - RNA, 18 nt, Human
ccucccaagugcugggau

SEQ ID NO: 573185 - RNA, 19 nt, Human
ccuccgccuccuggguuca

SEQ ID NO: 573186 - RNA, 24 nt, Human
ccuccuggguucaaccaauucucc

SEQ ID NO: 573187 - RNA, 18 nt, Human
ccugaccucaggugaucc

SEQ ID NO: 573188 - RNA, 21 nt, Human
ccugaccucaggugauccgcc

SEQ ID NO: 573189 - RNA, 23 nt, Human
ccugaccucaggugauccgccug

SEQ ID NO: 573190 - RNA, 23 nt, Human
ccugaguagcugggauuacaggc

SEQ ID NO: 573191 - RNA, 24 nt, Human
ccugaguagcugggauuacaggca

SEQ ID NO: 573192 - RNA, 23 nt, Human
ccugccccagccuccugaguagc

SEQ ID NO: 573193 - RNA, 24 nt, Human
ccugccccagccuccugaguagcu

SEQ ID NO: 573194 - RNA, 21 nt, Human
ccugccuuggccucccaagug

SEQ ID NO: 573195 - RNA, 23 nt, Human
ccugccuuggccucccaagugcu

SEQ ID NO: 573196 - RNA, 23 nt, Human
ccuggguucaaccaauucuccug

SEQ ID NO: 573197 - RNA, 24 nt, Human
cgaaacacuggaaacauggaugca

SEQ ID NO: 573198 - RNA, 18 nt, Human
cgccuccuggguucaacc

SEQ ID NO: 573199 - RNA, 24 nt, Human
cuaaaaaaaccgaaacacuggaaa

SEQ ID NO: 573200 - RNA, 24 nt, Human
cuaauuuuguauuuuuaguagaga

SEQ ID NO: 573201 - RNA, 24 nt, Human
cucacugcaaccuccgccuccugg

SEQ ID NO: 573202 - RNA, 20 nt, Human
cucccggcauguccccuuua

SEQ ID NO: 573203 - RNA, 26 nt, Human
cuccugaccucaggugauccgccugc

SEQ ID NO: 573204 - RNA, 21 nt, Human
cuccuggguucaaccaauucu

SEQ ID NO: 573205 - RNA, 18 nt, Human
cucuuguugcccaggcug

SEQ ID NO: 573206 - RNA, 23 nt, Human
cugaguagcugggauuacaggca

SEQ ID NO: 573207 - RNA, 24 nt, Human
cugaguagcugggauuacaggcau

SEQ ID NO: 573208 - RNA, 24 nt, Human
cugcaaccuccgccuccuggguuc

SEQ ID NO: 573209 - RNA, 23 nt, Human
cuuggccucccaagugcugggau

SEQ ID NO: 573210 - RNA, 24 nt, Human
cuuguugcccaggcuggagugcag

SEQ ID NO: 573211 - RNA, 19 nt, Human
gaaaaaggacuaaauguua

SEQ ID NO: 573212 - RNA, 22 nt, Human
gaaacacuggaaacauggaugc

SEQ ID NO: 573213 - RNA, 26 nt, Human
gaagaagccaauauggaaaaaggacu

SEQ ID NO: 573214 - RNA, 23 nt, Human
gaccucaggugauccgccugccu

SEQ ID NO: 573215 - RNA, 22 nt, Human
gagacagaguuucacucuuguu

SEQ ID NO: 573216 - RNA, 18 nt, Human
gagaugggguuucuccau

SEQ ID NO: 573217 - RNA, 24 nt, Human
gagaugggguuucuccauguuugu

SEQ ID NO: 573218 - RNA, 22 nt, Human
gaguagcugggauuacaggcau

SEQ ID NO: 573219 - RNA, 25 nt, Human
gaguagcugggauuacaggcaugug

SEQ ID NO: 573220 - RNA, 18 nt, Human
gauuacaggcaugugcca

SEQ ID NO: 573221 - RNA, 18 nt, Human
gauuacaggcgugagcca

SEQ ID NO: 573222 - RNA, 21 nt, Human
gauuacaggcgugagccacca

SEQ ID NO: 573223 - RNA, 24 nt, Human
gauuacaggcgugagccaccaugc

SEQ ID NO: 573224 - RNA, 19 nt, Human
gcccaggcuggagugcagu

SEQ ID NO: 573225 - RNA, 20 nt, Human
gcccaggcuggagugcagug

SEQ ID NO: 573226 - RNA, 19 nt, Human
gcgugagccaccaugcccg

SEQ ID NO: 573227 - RNA, 19 nt, Human
gcuggagugcaguggcaca

SEQ ID NO: 573228 - RNA, 23 nt, Human
gcugguguuuaacuccugaccuc

SEQ ID NO: 573229 - RNA, 18 nt, Human
ggaagauggaaaacuucu

SEQ ID NO: 573230 - RNA, 20 nt, Human
ggaucacacagugaagaaaa

SEQ ID NO: 573231 - RNA, 19 nt, Human
ggauuacaggcaugugcca

SEQ ID NO: 573232 - RNA, 24 nt, Human
ggauuacaggcgugagccaccaug

SEQ ID NO: 573233 - RNA, 24 nt, Human
ggcugguguuuaacuccugaccuc

SEQ ID NO: 573234 - RNA, 21 nt, Human
gggaucacacagugaagaaaa

SEQ ID NO: 573235 - RNA, 21 nt, Human
ggggaaggggagguggggagu

SEQ ID NO: 573236 - RNA, 20 nt, Human
guagcugggauuacaggcau

SEQ ID NO: 573237 - RNA, 26 nt, Human
gucacauuuuuguucagcuuugcccc

SEQ ID NO: 573238 - RNA, 25 nt, Human
uaaaaaaaccgaaacacuggaaaca

SEQ ID NO: 573239 - RNA, 24 nt, Human
uaaaagacaaccaguuuuaagaac

SEQ ID NO: 573240 - RNA, 22 nt, Human
uaaauguuaaaaaaaaaaaaaa

SEQ ID NO: 573241 - RNA, 24 nt, Human
uaagaacacugucaggcaagcuac

SEQ ID NO: 573242 - RNA, 19 nt, Human
uaagugaaaccagucacaa

SEQ ID NO: 573243 - RNA, 24 nt, Human
uacaggcaugugccaccacgccca

SEQ ID NO: 573244 - RNA, 23 nt, Human
uacaggcgugagccaccaugccc

SEQ ID NO: 573245 - RNA, 24 nt, Human
uaguagagaugggguuucuccaug

SEQ ID NO: 573246 - RNA, 23 nt, Human
ucacucuuguugcccaggcugga

SEQ ID NO: 573247 - RNA, 23 nt, Human
ucacugcaaccuccgccuccugg

SEQ ID NO: 573248 - RNA, 24 nt, Human
ucacugcaaccuccgccuccuggg

SEQ ID NO: 573249 - RNA, 25 nt, Human
ucacugcaaccuccgccuccugggu

SEQ ID NO: 573250 - RNA, 18 nt, Human
ucaguuccuucugaagcc

SEQ ID NO: 573251 - RNA, 22 nt, Human
ucaucaguuccuucugaagccc

SEQ ID NO: 573252 - RNA, 25 nt, Human
uccaugacaaugacuucuuccugag

SEQ ID NO: 573253 - RNA, 27 nt, Human
uccauguccaugacaaugacuucuucc

SEQ ID NO: 573254 - RNA, 23 nt, Human
ucccaagugcugggauuacaggc

SEQ ID NO: 573255 - RNA, 24 nt, Human
ucccaagugcugggauuacaggcg

SEQ ID NO: 573256 - RNA, 24 nt, Human
uccugaguagcugggauuacaggc

SEQ ID NO: 573257 - RNA, 21 nt, Human
uccuggguucaaccaauucuc

SEQ ID NO: 573258 - RNA, 24 nt, Human
uccuggguucaaccaauucuccug

SEQ ID NO: 573259 - RNA, 22 nt, Human
uccuugacuccaugcuuagcuc

SEQ ID NO: 573260 - RNA, 28 nt, Human
ucuaaaaaaaccgaaacacuggaaacaa

SEQ ID NO: 573261 - RNA, 23 nt, Human
ucucauggaaguccaaguucauc

SEQ ID NO: 573262 - RNA, 24 nt, Human
ucuccugccccagccuccugagua

SEQ ID NO: 573263 - RNA, 19 nt, Human
ucucgguugaggacaauca

SEQ ID NO: 573264 - RNA, 22 nt, Human
ucuuguugcccaggcuggagug

SEQ ID NO: 573265 - RNA, 18 nt, Human
ugaccucaggugauccgc

SEQ ID NO: 573266 - RNA, 24 nt, Human
ugaccucaggugauccgccugccu

SEQ ID NO: 573267 - RNA, 18 nt, Human
ugagaaauaugaguagug

SEQ ID NO: 573268 - RNA, 20 nt, Human
ugaggguacugcaacucccg

SEQ ID NO: 573269 - RNA, 22 nt, Human
ugcaguggcacaaucucggcuc

SEQ ID NO: 573270 - RNA, 18 nt, Human
ugcauauuuaaaaauggg

SEQ ID NO: 573271 - RNA, 18 nt, Human
ugcccaggcuggagugca

SEQ ID NO: 573272 - RNA, 21 nt, Human
ugcccaggcuggagugcagug

SEQ ID NO: 573273 - RNA, 22 nt, Human
ugcccaggcuggagugcagugg

SEQ ID NO: 573274 - RNA, 24 nt, Human
ugcccaggcuggagugcaguggca

SEQ ID NO: 573275 - RNA, 24 nt, Human
ugccccagccuccugaguagcugg

SEQ ID NO: 573276 - RNA, 24 nt, Human
ugcugggauuacaggcgugagcca

SEQ ID NO: 573277 - RNA, 24 nt, Human
ugcuuagcucuuucagacuuccca

SEQ ID NO: 573278 - RNA, 18 nt, Human
uggaaaaaggacuaaaug

SEQ ID NO: 573279 - RNA, 25 nt, Human
uggaaaaaggacuaaauguuaaaaa

SEQ ID NO: 573280 - RNA, 23 nt, Human
uggagugcaguggcacaaucucg

SEQ ID NO: 573281 - RNA, 24 nt, Human
uggagugcaguggcacaaucucgg

SEQ ID NO: 573282 - RNA, 24 nt, Human
uggcacaaucucggcucacugcaa

SEQ ID NO: 573283 - RNA, 20 nt, Human
uggcuggacaacaaugagaa

SEQ ID NO: 573284 - RNA, 22 nt, Human
uggcuguugcuaggggaagggg

SEQ ID NO: 573285 - RNA, 18 nt, Human
ugggauuacaggcaugug

SEQ ID NO: 573286 - RNA, 21 nt, Human
ugggauuacaggcaugugcca

SEQ ID NO: 573287 - RNA, 22 nt, Human
ugggauuacaggcaugugccac

SEQ ID NO: 573288 - RNA, 24 nt, Human
ugggauuacaggcaugugccacca

SEQ ID NO: 573289 - RNA, 18 nt, Human
ugggauuacaggcgugag

SEQ ID NO: 573290 - RNA, 22 nt, Human
ugggauuacaggcgugagccac

SEQ ID NO: 573291 - RNA, 23 nt, Human
ugggauuacaggcgugagccacc

SEQ ID NO: 573292 - RNA, 24 nt, Human
ugggauuacaggcgugagccacca

SEQ ID NO: 573293 - RNA, 25 nt, Human
ugggauuacaggcgugagccaccau

SEQ ID NO: 573294 - RNA, 20 nt, Human
uggguucaaccaauucuccu

SEQ ID NO: 573295 - RNA, 21 nt, Human
uguauuuuuaguagagauggg

SEQ ID NO: 573296 - RNA, 23 nt, Human
ugucaggcugguguuuaacuccu

SEQ ID NO: 573297 - RNA, 24 nt, Human
uguccaugacaaugacuucuuccu

SEQ ID NO: 573298 - RNA, 19 nt, Human
ugugaggcucucuucucuu

SEQ ID NO: 573299 - RNA, 21 nt, Human
uuaaaaaaaaaaaaagccaac

SEQ ID NO: 573300 - RNA, 22 nt, Human
uuaaaaaaaaaaaaagccaacu

SEQ ID NO: 573301 - RNA, 18 nt, Human
uuaguagagaugggguuu

SEQ ID NO: 573302 - RNA, 24 nt, Human
uuaguagagaugggguuucuccau

SEQ ID NO: 573303 - RNA, 24 nt, Human
uucacucuuguugcccaggcugga

SEQ ID NO: 573304 - RNA, 23 nt, Human
uuguauuuuuaguagagaugggg

SEQ ID NO: 573305 - RNA, 22 nt, Human
uuguucagcuuugcccagugcu

SEQ ID NO: 573306 - RNA, 24 nt, Human
uuucacucuuguugcccaggcugg

SEQ ID NO: 573307 - RNA, 21 nt, Human
uuucuaaaaaaaccgaaacac

SEQ ID NO: 573308 - RNA, 19 nt, Human
uuuuguauuuuuaguagag

SEQ ID NO: 573309 - RNA, 20 nt, Human
uuuuguauuuuuaguagaga

SEQ ID NO: 573310 - RNA, 22 nt, Human
uuuuuaguagagaugggguuuc

SEQ ID NO: 573311 - RNA, 19 nt, Human
aaaaaaaaaaaacagagac

SEQ ID NO: 573312 - RNA, 20 nt, Human
aaacugaagauggaaagggu

SEQ ID NO: 573313 - RNA, 23 nt, Human
aaagaaaaccuaacgggcucagg

SEQ ID NO: 573314 - RNA, 18 nt, Human
aagcaggagaaucgcuug

SEQ ID NO: 573315 - RNA, 22 nt, Human
aagcaggagaaucgcuugaacc

SEQ ID NO: 573316 - RNA, 23 nt, Human
acagcacaagccucuucuguaca

SEQ ID NO: 573317 - RNA, 21 nt, Human
acaguuauaccacuuugcacc

SEQ ID NO: 573318 - RNA, 26 nt, Human
accagguuaaaaaaaaaaaacagaga

SEQ ID NO: 573319 - RNA, 18 nt, Human
acgcacagucagggccca

SEQ ID NO: 573320 - RNA, 21 nt, Human
acuccaggccgacugccugau

SEQ ID NO: 573321 - RNA, 23 nt, Human
agcagguggcaccuguucccucc

SEQ ID NO: 573322 - RNA, 23 nt, Human
agcaguggacgcacagucagggc

SEQ ID NO: 573323 - RNA, 24 nt, Human
agcccuagcucugcaagagccuug

SEQ ID NO: 573324 - RNA, 22 nt, Human
aggcagggcucaacucugacgg

SEQ ID NO: 573325 - RNA, 21 nt, Human
aggccuccugcugcugcccca

SEQ ID NO: 573326 - RNA, 24 nt, Human
aggcugaagcaggagaaucgcuug

SEQ ID NO: 573327 - RNA, 26 nt, Human
agggaaguuguggggaugaccuucgg

SEQ ID NO: 573328 - RNA, 21 nt, Human
agggauggcucugggcagagc

SEQ ID NO: 573329 - RNA, 21 nt, Human
aguacacagcccgccugccuu

SEQ ID NO: 573330 - RNA, 19 nt, Human
agucagggcccaguacaca

SEQ ID NO: 573331 - RNA, 18 nt, Human
auguaaauacauauacac

SEQ ID NO: 573332 - RNA, 22 nt, Human
auucccuggcccagggcaggca

SEQ ID NO: 573333 - RNA, 22 nt, Human
auuugcacacaguuauaccacc

SEQ ID NO: 573334 - RNA, 26 nt, Human
cacacaguuauaccacuuugcaccac

SEQ ID NO: 573335 - RNA, 19 nt, Human
cacagcccgccugccuuuc

SEQ ID NO: 573336 - RNA, 22 nt, Human
caccaagaaaagaaaaccuaac

SEQ ID NO: 573337 - RNA, 23 nt, Human
caccaagaaaagaaaaccuaacg

SEQ ID NO: 573338 - RNA, 24 nt, Human
caccacagcacaagccucuucugu

SEQ ID NO: 573339 - RNA, 20 nt, Human
caccaccaagaaaagaaaac

SEQ ID NO: 573340 - RNA, 23 nt, Human
caccuguucccuccugccaccca

SEQ ID NO: 573341 - RNA, 25 nt, Human
cacuguuuugaaguguaaugcccca

SEQ ID NO: 573342 - RNA, 21 nt, Human
cagacuccaggccgacugccu

SEQ ID NO: 573343 - RNA, 24 nt, Human
cagagcaugucguugaggcacuuu

SEQ ID NO: 573344 - RNA, 19 nt, Human
cagaggacauuuggagucc

SEQ ID NO: 573345 - RNA, 22 nt, Human
cagcaaggauggccugugacug

SEQ ID NO: 573346 - RNA, 20 nt, Human
caggccuccugcugcugccc

SEQ ID NO: 573347 - RNA, 18 nt, Human
cagggaaaaugucucccc

SEQ ID NO: 573348 - RNA, 20 nt, Human
cagggaaaaugucuccccca

SEQ ID NO: 573349 - RNA, 21 nt, Human
cagggauaaaucgaacccacc

SEQ ID NO: 573350 - RNA, 24 nt, Human
cauuuggaguccccaauauuuuuc

SEQ ID NO: 573351 - RNA, 22 nt, Human
ccaccaagaaaagaaaaccuaa

SEQ ID NO: 573352 - RNA, 23 nt, Human
ccagcagguggcaccuguucccu

SEQ ID NO: 573353 - RNA, 19 nt, Human
ccagguuaaaaaaaaaaaa

SEQ ID NO: 573354 - RNA, 18 nt, Human
cccccaggccuccugcug

SEQ ID NO: 573355 - RNA, 19 nt, Human
ccccggcauggccuucccu

SEQ ID NO: 573356 - RNA, 25 nt, Human
ccccuucagagcccuagcucugcaa

SEQ ID NO: 573357 - RNA, 18 nt, Human
ccccuugggcugauuucu

SEQ ID NO: 573358 - RNA, 20 nt, Human
cccgggguccagagcccagg

SEQ ID NO: 573359 - RNA, 22 nt, Human
cccgggguccagagcccagggc

SEQ ID NO: 573360 - RNA, 22 nt, Human
cccuucucagcaaggcucucug

SEQ ID NO: 573361 - RNA, 22 nt, Human
ccgcucggagcgaccgcggcag

SEQ ID NO: 573362 - RNA, 23 nt, Human
ccucaucugugacauucucucug

SEQ ID NO: 573363 - RNA, 20 nt, Human
ccuccugccacccaccuuau

SEQ ID NO: 573364 - RNA, 19 nt, Human
ccuccugcugcugccccag

SEQ ID NO: 573365 - RNA, 21 nt, Human
ccucgugugcccgggguccag

SEQ ID NO: 573366 - RNA, 23 nt, Human
ccugggagucguucaaacugaag

SEQ ID NO: 573367 - RNA, 22 nt, Human
ccuguaaucccagcuacuccgg

SEQ ID NO: 573368 - RNA, 23 nt, Human
ccuguaaucccagcuacuccgga

SEQ ID NO: 573369 - RNA, 28 nt, Human
ccugugacuggaggacagaccggggucc

SEQ ID NO: 573370 - RNA, 26 nt, Human
ccuuguuaugccaaggcaaugcuaaa

SEQ ID NO: 573371 - RNA, 23 nt, Human
cucaugaaaccucccuggcgggg

SEQ ID NO: 573372 - RNA, 22 nt, Human
cuccaggccgacugccugauuu

SEQ ID NO: 573373 - RNA, 20 nt, Human
cuccauugcccaugcucucc

SEQ ID NO: 573374 - RNA, 21 nt, Human
cucccuagaguguuuucucuu

SEQ ID NO: 573375 - RNA, 24 nt, Human
cucugggcagagccguugccuucc

SEQ ID NO: 573376 - RNA, 24 nt, Human
cugaagauggaaagggugagaagg

SEQ ID NO: 573377 - RNA, 18 nt, Human
cugccuuucgugugauug

SEQ ID NO: 573378 - RNA, 18 nt, Human
cuguacaaaaagugugug

SEQ ID NO: 573379 - RNA, 24 nt, Human
cuucccucuugugcuuuggggcag

SEQ ID NO: 573380 - RNA, 18 nt, Human
gaagagaccagccgcugc

SEQ ID NO: 573381 - RNA, 21 nt, Human
gaccucaaaccuccuauuugc

SEQ ID NO: 573382 - RNA, 22 nt, Human
gagcagcaaggauggccuguga

SEQ ID NO: 573383 - RNA, 22 nt, Human
gagcagcuucagcccaaucccu

SEQ ID NO: 573384 - RNA, 22 nt, Human
gaggacgugcacuggguucugc

SEQ ID NO: 573385 - RNA, 25 nt, Human
gcaccuguucccuccugccacccac

SEQ ID NO: 573386 - RNA, 19 nt, Human
gcccaugcucucccugccu

SEQ ID NO: 573387 - RNA, 18 nt, Human
gcucuucuccugcuuuuc

SEQ ID NO: 573388 - RNA, 22 nt, Human
gcuggguguguuggcacgugcc

SEQ ID NO: 573389 - RNA, 19 nt, Human
ggaaguuguggggaugggg

SEQ ID NO: 573390 - RNA, 22 nt, Human
ggaaguuguggggauggggugg

SEQ ID NO: 573391 - RNA, 22 nt, Human
ggaggacgugcacuggguucug

SEQ ID NO: 573392 - RNA, 23 nt, Human
ggagucguucaaacugaagaugg

SEQ ID NO: 573393 - RNA, 19 nt, Human
ggaugcugcugccaguagc

SEQ ID NO: 573394 - RNA, 21 nt, Human
ggcagggauaaaucgaaccca

SEQ ID NO: 573395 - RNA, 18 nt, Human
gggaaguagcaaaaggga

SEQ ID NO: 573396 - RNA, 21 nt, Human
gggagcagcaaggauggccug

SEQ ID NO: 573397 - RNA, 24 nt, Human
gggaucauuggugggucuccauug

SEQ ID NO: 573398 - RNA, 20 nt, Human
ggggaucauuggugggucuc

SEQ ID NO: 573399 - RNA, 25 nt, Human
ggggaucauuggugggucuccauug

SEQ ID NO: 573400 - RNA, 20 nt, Human
gguuggggaucauugguggg

SEQ ID NO: 573401 - RNA, 18 nt, Human
guggagcagcuucagccc

SEQ ID NO: 573402 - RNA, 22 nt, Human
gugggcucuucuccugcuuuuc

SEQ ID NO: 573403 - RNA, 21 nt, Human
guggggauggggugggcaggg

SEQ ID NO: 573404 - RNA, 24 nt, Human
guuggcacgugccuguaaucccag

SEQ ID NO: 573405 - RNA, 24 nt, Human
uaaauacauauacacauaugugug

SEQ ID NO: 573406 - RNA, 22 nt, Human
uaaggagccauucccuggccca

SEQ ID NO: 573407 - RNA, 26 nt, Human
uaaggagccauucccuggcccagggc

SEQ ID NO: 573408 - RNA, 20 nt, Human
uacauauacacauaugugug

SEQ ID NO: 573409 - RNA, 18 nt, Human
uagccuggugagguaggg

SEQ ID NO: 573410 - RNA, 25 nt, Human
uauacacauauguguguauauuaca

SEQ ID NO: 573411 - RNA, 32 nt, Human
uauauguaaauacauauacacauauguguggc

SEQ ID NO: 573412 - RNA, 26 nt, Human
uauguaaauacauauacacauaugug

SEQ ID NO: 573413 - RNA, 21 nt, Human
ucagcccaaucccuccauccu

SEQ ID NO: 573414 - RNA, 23 nt, Human
ucagcccaaucccuccauccucc

SEQ ID NO: 573415 - RNA, 19 nt, Human
ucagcccaggcagggcuca

SEQ ID NO: 573416 - RNA, 28 nt, Human
ucccuccauccucccaccaccgggcaaa

SEQ ID NO: 573417 - RNA, 19 nt, Human
ucccucuugugcuuugggg

SEQ ID NO: 573418 - RNA, 22 nt, Human
ucccucuugugcuuuggggcag

SEQ ID NO: 573419 - RNA, 24 nt, Human
ucuccauugcccaugcucucccug

SEQ ID NO: 573420 - RNA, 19 nt, Human
ucuccugcuuuucacugaa

SEQ ID NO: 573421 - RNA, 18 nt, Human
ucucugcaaaugucacaa

SEQ ID NO: 573422 - RNA, 24 nt, Human
ucucugggcagccuucacuggccc

SEQ ID NO: 573423 - RNA, 20 nt, Human
ucucuugcucucccccuugg

SEQ ID NO: 573424 - RNA, 21 nt, Human
ucuugagcaccuucagccaga

SEQ ID NO: 573425 - RNA, 23 nt, Human
ucuugcucucccccuugggcuga

SEQ ID NO: 573426 - RNA, 24 nt, Human
ugaagcaggagaaucgcuugaacc

SEQ ID NO: 573427 - RNA, 24 nt, Human
ugaggcacuuuuguacccagaggc

SEQ ID NO: 573428 - RNA, 22 nt, Human
ugagguggagcagcuucagccc

SEQ ID NO: 573429 - RNA, 24 nt, Human
ugaugugcucucgggaugcugcug

SEQ ID NO: 573430 - RNA, 26 nt, Human
ugcaccaccaagaaaagaaaaccuaa

SEQ ID NO: 573431 - RNA, 22 nt, Human
ugcacuggguucugcuaugugc

SEQ ID NO: 573432 - RNA, 18 nt, Human
ugcagugggcucuucucc

SEQ ID NO: 573433 - RNA, 20 nt, Human
ugcagugggcucuucuccug

SEQ ID NO: 573434 - RNA, 21 nt, Human
ugccugauuuuccuccccccc

SEQ ID NO: 573435 - RNA, 19 nt, Human
ugccuguaaucccagcuac

SEQ ID NO: 573436 - RNA, 24 nt, Human
ugccuguaaucccagcuacuccgg

SEQ ID NO: 573437 - RNA, 19 nt, Human
ugcugcugccccaggugga

SEQ ID NO: 573438 - RNA, 24 nt, Human
ugcuuuaccugcccccuucucagc

SEQ ID NO: 573439 - RNA, 23 nt, Human
uggaaaauaccugcaggaagagc

SEQ ID NO: 573440 - RNA, 22 nt, Human
uggaguccccaauauuuuuccu

SEQ ID NO: 573441 - RNA, 18 nt, Human
uggcacagcagauggaaa

SEQ ID NO: 573442 - RNA, 21 nt, Human
uggcacgugccuguaauccca

SEQ ID NO: 573443 - RNA, 20 nt, Human
uggcccagggcaggcagcca

SEQ ID NO: 573444 - RNA, 23 nt, Human
uggcccagggcaggcagccaggu

SEQ ID NO: 573445 - RNA, 23 nt, Human
uggcggggagggggcaggggcag

SEQ ID NO: 573446 - RNA, 22 nt, Human
uggcuggguguguuggcacgug

SEQ ID NO: 573447 - RNA, 19 nt, Human
ugggauuuccagagcaugu

SEQ ID NO: 573448 - RNA, 24 nt, Human
ugggauuuccagagcaugucguug

SEQ ID NO: 573449 - RNA, 21 nt, Human
ugggcugauuucuaaaggguc

SEQ ID NO: 573450 - RNA, 18 nt, Human
uguacaaaaagugugugu

SEQ ID NO: 573451 - RNA, 22 nt, Human
uguccagcagguggcaccuguu

SEQ ID NO: 573452 - RNA, 24 nt, Human
uguguguauaucauucugaauagu

SEQ ID NO: 573453 - RNA, 24 nt, Human
uguuggcacgugccuguaauccca

SEQ ID NO: 573454 - RNA, 19 nt, Human
uuagauaucaaccucagac

SEQ ID NO: 573455 - RNA, 22 nt, Human
uuaugccaaggcaaugcuaaaa

SEQ ID NO: 573456 - RNA, 24 nt, Human
uucagcccaaucccuccauccucc

SEQ ID NO: 573457 - RNA, 23 nt, Human
uuccagagcaugucguugaggca

SEQ ID NO: 573458 - RNA, 23 nt, Human
uucccuccccuucagagcccuag

SEQ ID NO: 573459 - RNA, 21 nt, Human
uucuguggcagaucaaccugg

SEQ ID NO: 573460 - RNA, 18 nt, Human
uugcucucccccuugggc

SEQ ID NO: 573461 - RNA, 23 nt, Human
uuggaccucaaaccuccuauuug

SEQ ID NO: 573462 - RNA, 21 nt, Human
uuggcacgugccuguaauccc

SEQ ID NO: 573463 - RNA, 22 nt, Human
uugggcugauuucuaaaggguc

SEQ ID NO: 573464 - RNA, 21 nt, Human
uuggggaaguagcaaaaggga

SEQ ID NO: 573465 - RNA, 23 nt, Human
aaagugcucgauuauagguguga

SEQ ID NO: 573466 - RNA, 23 nt, Human
aacucucagucucaagcaacccu

SEQ ID NO: 573467 - RNA, 19 nt, Human
aagagggaaaggaaagagg

SEQ ID NO: 573468 - RNA, 24 nt, Human
aagugauccuccugucuuggccuc

SEQ ID NO: 573469 - RNA, 23 nt, Human
aaugacaaccagaacuuauuuuu

SEQ ID NO: 573470 - RNA, 23 nt, Human
acaccaccaugucuggcucauuu

SEQ ID NO: 573471 - RNA, 18 nt, Human
accugggaaggaaggccc

SEQ ID NO: 573472 - RNA, 21 nt, Human
acgucaguguccugaguagcu

SEQ ID NO: 573473 - RNA, 21 nt, Human
agacagaaggcagaaagcauc

SEQ ID NO: 573474 - RNA, 24 nt, Human
agacagaaggcagaaagcaucaag

SEQ ID NO: 573475 - RNA, 20 nt, Human
aggaaggcccacuaggcaag

SEQ ID NO: 573476 - RNA, 21 nt, Human
aggcuggagugcaguggggca

SEQ ID NO: 573477 - RNA, 19 nt, Human
aggugagggcaggauuccu

SEQ ID NO: 573478 - RNA, 23 nt, Human
aguagcuggaacuacaggcaugc

SEQ ID NO: 573479 - RNA, 23 nt, Human
agugcaguggggcauucauggcu

SEQ ID NO: 573480 - RNA, 23 nt, Human
agugccguggugcauucacagcu

SEQ ID NO: 573481 - RNA, 19 nt, Human
aguggcugggacuacaggc

SEQ ID NO: 573482 - RNA, 21 nt, Human
aguggcugggacuacaggcau

SEQ ID NO: 573483 - RNA, 19 nt, Human
aucauacuaaagagaagac

SEQ ID NO: 573484 - RNA, 23 nt, Human
aucgcagccuccaacucucaguc

SEQ ID NO: 573485 - RNA, 22 nt, Human
caagcgauccuccugccucagc

SEQ ID NO: 573486 - RNA, 27 nt, Human
caagcgauccuccugccucagccuucu

SEQ ID NO: 573487 - RNA, 22 nt, Human
caagugauccuccugucuuggc

SEQ ID NO: 573488 - RNA, 27 nt, Human
caagugauccuccugucuuggccuccc

SEQ ID NO: 573489 - RNA, 23 nt, Human
caccaugucuggcucauuucuuc

SEQ ID NO: 573490 - RNA, 21 nt, Human
cacucugagaacuuacccagg

SEQ ID NO: 573491 - RNA, 23 nt, Human
cacuucccugggcaaguuggaaa

SEQ ID NO: 573492 - RNA, 21 nt, Human
caggaucuugcuacauugccc

SEQ ID NO: 573493 - RNA, 24 nt, Human
caggaucuugcuacauugcccagg

SEQ ID NO: 573494 - RNA, 21 nt, Human
caguggggcauucauggcuca

SEQ ID NO: 573495 - RNA, 18 nt, Human
caucaagcucucuguuua

SEQ ID NO: 573496 - RNA, 23 nt, Human
caucaccugagacagaaggcaga

SEQ ID NO: 573497 - RNA, 20 nt, Human
ccaaagugcucgauuauagg

SEQ ID NO: 573498 - RNA, 23 nt, Human
ccaaagugcucgauuauaggugu

SEQ ID NO: 573499 - RNA, 20 nt, Human
ccacccguggacagcuggau

SEQ ID NO: 573500 - RNA, 25 nt, Human
ccagaacuuauuuuuuuugagaugg

SEQ ID NO: 573501 - RNA, 20 nt, Human
cccuaauuucuuuccucauu

SEQ ID NO: 573502 - RNA, 23 nt, Human
ccguggugcccagccgacaacca

SEQ ID NO: 573503 - RNA, 20 nt, Human
ccucagccuucugaguggcu

SEQ ID NO: 573504 - RNA, 24 nt, Human
ccuccugccucagccuucugagug

SEQ ID NO: 573505 - RNA, 26 nt, Human
ccuccugucuuggccucccaaagugc

SEQ ID NO: 573506 - RNA, 18 nt, Human
ccugagacagaaggcaga

SEQ ID NO: 573507 - RNA, 24 nt, Human
ccugccucagccuucugaguggcu

SEQ ID NO: 573508 - RNA, 18 nt, Human
ccuggccucaagugaucc

SEQ ID NO: 573509 - RNA, 21 nt, Human
ccuggccucaagugauccucc

SEQ ID NO: 573510 - RNA, 22 nt, Human
ccuggccucaagugauccuccu

SEQ ID NO: 573511 - RNA, 23 nt, Human
ccuggccucaagugauccuccug

SEQ ID NO: 573512 - RNA, 22 nt, Human
ccugucuuggccucccaaagug

SEQ ID NO: 573513 - RNA, 24 nt, Human
ccugucuuggccucccaaagugcu

SEQ ID NO: 573514 - RNA, 18 nt, Human
ccuuggguaucuucugca

SEQ ID NO: 573515 - RNA, 25 nt, Human
cgcccaggcuggagugcaguggggc

SEQ ID NO: 573516 - RNA, 24 nt, Human
cguucugucgcccaggcuggagug

SEQ ID NO: 573517 - RNA, 20 nt, Human
cuaaagagaagacaggaaaa

SEQ ID NO: 573518 - RNA, 21 nt, Human
cucaagcaacccuccuacguc

SEQ ID NO: 573519 - RNA, 26 nt, Human
cucaagcaacccuccuacgucagugu

SEQ ID NO: 573520 - RNA, 20 nt, Human
cucaagcgauccuccugccu

SEQ ID NO: 573521 - RNA, 24 nt, Human
cucaagcgauccuccugccucagc

SEQ ID NO: 573522 - RNA, 24 nt, Human
cucagccuucugaguggcugggac

SEQ ID NO: 573523 - RNA, 20 nt, Human
cucaucgcagccuccaacuc

SEQ ID NO: 573524 - RNA, 24 nt, Human
cucguucugucgcccaggcuggag

SEQ ID NO: 573525 - RNA, 19 nt, Human
cucuguuuaucccaauuca

SEQ ID NO: 573526 - RNA, 23 nt, Human
cuuggucucaagcgauccuccug

SEQ ID NO: 573527 - RNA, 21 nt, Human
gaaaaggacaggacccgcaga

SEQ ID NO: 573528 - RNA, 19 nt, Human
gacaagagggaaaggaaag

SEQ ID NO: 573529 - RNA, 24 nt, Human
gacuacaggcauacaccaccaugu

SEQ ID NO: 573530 - RNA, 23 nt, Human
gagaagacaggaaaacaccagua

SEQ ID NO: 573531 - RNA, 24 nt, Human
gaguggcugggacuacaggcauac

SEQ ID NO: 573532 - RNA, 24 nt, Human
gccucagccuucugaguggcuggg

SEQ ID NO: 573533 - RNA, 24 nt, Human
gcgauccuccugccucagccuucu

SEQ ID NO: 573534 - RNA, 18 nt, Human
ggaaggaaggcccacuag

SEQ ID NO: 573535 - RNA, 24 nt, Human
ggacuacaggcauacaccaccaug

SEQ ID NO: 573536 - RNA, 19 nt, Human
ggccucaagugauccuccu

SEQ ID NO: 573537 - RNA, 24 nt, Human
ggccucaagugauccuccugucuu

SEQ ID NO: 573538 - RNA, 22 nt, Human
gggucucguucugucgcccagg

SEQ ID NO: 573539 - RNA, 21 nt, Human
guagagacaggaucuugcuac

SEQ ID NO: 573540 - RNA, 18 nt, Human
gugcucgauuauaggugu

SEQ ID NO: 573541 - RNA, 21 nt, Human
uacaggcaugcaccaccacac

SEQ ID NO: 573542 - RNA, 21 nt, Human
uacccagggugacucagcugu

SEQ ID NO: 573543 - RNA, 22 nt, Human
uagagacaggaucuugcuacau

SEQ ID NO: 573544 - RNA, 29 nt, Human
ucaaugacaaccagaacuuauuuuuuuug

SEQ ID NO: 573545 - RNA, 23 nt, Human
ucagccuucugaguggcugggac

SEQ ID NO: 573546 - RNA, 24 nt, Human
ucaucgcagccuccaacucucagu

SEQ ID NO: 573547 - RNA, 22 nt, Human
ucccaaagugcucgauuauagg

SEQ ID NO: 573548 - RNA, 23 nt, Human
ucccugggcaaguuggaaaaggg

SEQ ID NO: 573549 - RNA, 24 nt, Human
uccugaguagcuggaacuacaggc

SEQ ID NO: 573550 - RNA, 23 nt, Human
ucgcccaggcuggagugcagugg

SEQ ID NO: 573551 - RNA, 24 nt, Human
ucguucugucgcccaggcuggagu

SEQ ID NO: 573552 - RNA, 23 nt, Human
ucucguucugucgcccaggcugg

SEQ ID NO: 573553 - RNA, 24 nt, Human
ucucguucugucgcccaggcugga

SEQ ID NO: 573554 - RNA, 23 nt, Human
ucugaguggcugggacuacaggc

SEQ ID NO: 573555 - RNA, 24 nt, Human
ucugaguggcugggacuacaggca

SEQ ID NO: 573556 - RNA, 24 nt, Human
ucugucgcccaggcuggagugcag

SEQ ID NO: 573557 - RNA, 23 nt, Human
ucuuguuuuguugccuaggcuug

SEQ ID NO: 573558 - RNA, 20 nt, Human
ugagacaaaaucauccuucc

SEQ ID NO: 573559 - RNA, 22 nt, Human
ugagauggggucucguucuguc

SEQ ID NO: 573560 - RNA, 18 nt, Human
ugccuaggcuugucucag

SEQ ID NO: 573561 - RNA, 24 nt, Human
ugccucagccuucugaguggcugg

SEQ ID NO: 573562 - RNA, 19 nt, Human
ugcuacauugcccaggcuu

SEQ ID NO: 573563 - RNA, 21 nt, Human
uggaacuacaggcaugcacca

SEQ ID NO: 573564 - RNA, 24 nt, Human
uggaacuacaggcaugcaccacca

SEQ ID NO: 573565 - RNA, 19 nt, Human
uggaaggaagagcaacugg

SEQ ID NO: 573566 - RNA, 21 nt, Human
uggagauggcacacagagggc

SEQ ID NO: 573567 - RNA, 24 nt, Human
uggagauggcacacagagggcuug

SEQ ID NO: 573568 - RNA, 19 nt, Human
uggagugcaguggggcauu

SEQ ID NO: 573569 - RNA, 24 nt, Human
uggagugcaguggggcauucaugg

SEQ ID NO: 573570 - RNA, 18 nt, Human
uggccucaagugauccuc

SEQ ID NO: 573571 - RNA, 20 nt, Human
uggccucaagugauccuccu

SEQ ID NO: 573572 - RNA, 24 nt, Human
uggccucaagugauccuccugucu

SEQ ID NO: 573573 - RNA, 24 nt, Human
uggcucaucgcagccuccaacucu

SEQ ID NO: 573574 - RNA, 21 nt, Human
ugggacuacaggcauacacca

SEQ ID NO: 573575 - RNA, 24 nt, Human
ugggacuacaggcauacaccacca

SEQ ID NO: 573576 - RNA, 24 nt, Human
uggggucucguucugucgcccagg

SEQ ID NO: 573577 - RNA, 24 nt, Human
uggucucaagcgauccuccugccu

SEQ ID NO: 573578 - RNA, 23 nt, Human
ugucucuaguggagacugagggg

SEQ ID NO: 573579 - RNA, 21 nt, Human
uguuuuguugccuaggcuugu

SEQ ID NO: 573580 - RNA, 23 nt, Human
uuaaacuuuuuguagagacagag

SEQ ID NO: 573581 - RNA, 21 nt, Human
uugagauggggucucguucug

SEQ ID NO: 573582 - RNA, 24 nt, Human
uugagggaucauacuaaagagaag

SEQ ID NO: 573583 - RNA, 18 nt, Human
uugcccaggcuugagugc

SEQ ID NO: 573584 - RNA, 23 nt, Human
uugcccaggcuugagugccgugg

SEQ ID NO: 573585 - RNA, 24 nt, Human
uugcccaggcuugagugccguggu

SEQ ID NO: 573586 - RNA, 19 nt, Human
uuguagagacagagucuug

SEQ ID NO: 573587 - RNA, 24 nt, Human
uuguagagacaggaucuugcuaca

SEQ ID NO: 573588 - RNA, 20 nt, Human
uuuguagagacagagucuug

SEQ ID NO: 573589 - RNA, 23 nt, Human
uuuuggaccuuggguaucuucug

SEQ ID NO: 573590 - RNA, 18 nt, Human
uuuuuugagauggggucu

SEQ ID NO: 573591 - RNA, 22 nt, Human
aagcaauuuucaaaagcagaaa

SEQ ID NO: 573592 - RNA, 24 nt, Human
acaagcaauuuucaaaagcagaaa

SEQ ID NO: 573593 - RNA, 21 nt, Human
acuaaaaucaaacaugcauca

SEQ ID NO: 573594 - RNA, 30 nt, Human
cagaaacucacauucauaaaacuuuauacc

SEQ ID NO: 573595 - RNA, 19 nt, Human
cggcuaacaucgaagccau

SEQ ID NO: 573596 - RNA, 21 nt, Human
uacaagcaauuuucaaaagca

SEQ ID NO: 573597 - RNA, 24 nt, Human
uacuacuaaaaucaaacaugcauc

SEQ ID NO: 573598 - RNA, 24 nt, Human
ucauccuaaaacacuuugcaaugc

SEQ ID NO: 573599 - RNA, 20 nt, Human
aaaaaaauaaauaaaaacua

SEQ ID NO: 573600 - RNA, 25 nt, Human
aaaaaugcauauuccugggccccau

SEQ ID NO: 573601 - RNA, 23 nt, Human
aaaauagcagcaccuguggagga

SEQ ID NO: 573602 - RNA, 22 nt, Human
aaacaggagccggagcucacaa

SEQ ID NO: 573603 - RNA, 21 nt, Human
aaagaagagaaauggaagggc

SEQ ID NO: 573604 - RNA, 18 nt, Human
aaagcuaaacaggagccg

SEQ ID NO: 573605 - RNA, 21 nt, Human
aacaaacaaacacuuaaagca

SEQ ID NO: 573606 - RNA, 18 nt, Human
aacuacuaaagaacuagc

SEQ ID NO: 573607 - RNA, 28 nt, Human
aagcaagagcuaaaaaaaaagggacccc

SEQ ID NO: 573608 - RNA, 19 nt, Human
accgucacaccaaaauaaa

SEQ ID NO: 573609 - RNA, 25 nt, Human
agaaaagccaauuugaaauguuuaa

SEQ ID NO: 573610 - RNA, 20 nt, Human
agcaagagcuaaaaaaaaaa

SEQ ID NO: 573611 - RNA, 20 nt, Human
aggauaaagaacauucuaau

SEQ ID NO: 573612 - RNA, 27 nt, Human
caaaauagcagcaccuguggaggagcc

SEQ ID NO: 573613 - RNA, 18 nt, Human
caaagcaggugacagagc

SEQ ID NO: 573614 - RNA, 23 nt, Human
caccaaaauaaaacaugcgcuaa

SEQ ID NO: 573615 - RNA, 25 nt, Human
caccaaaauaaaacaugcgcuaaug

SEQ ID NO: 573616 - RNA, 21 nt, Human
cacgacaccagcaaauacaua

SEQ ID NO: 573617 - RNA, 22 nt, Human
cagaagaaaguccuuuuccguc

SEQ ID NO: 573618 - RNA, 22 nt, Human
cagccugaggaaaguccguguu

SEQ ID NO: 573619 - RNA, 18 nt, Human
cagggcaggaaugcacuu

SEQ ID NO: 573620 - RNA, 24 nt, Human
ccaauauuuacacgacaccagcaa

SEQ ID NO: 573621 - RNA, 22 nt, Human
ccagggcaggaaugcacuuucc

SEQ ID NO: 573622 - RNA, 21 nt, Human
ccccauccccaaauuuggguu

SEQ ID NO: 573623 - RNA, 19 nt, Human
ccguguuuaggagggccaa

SEQ ID NO: 573624 - RNA, 20 nt, Human
cgucacaccaaaauaaaaca

SEQ ID NO: 573625 - RNA, 22 nt, Human
cuagcauuuuccgguauuguag

SEQ ID NO: 573626 - RNA, 18 nt, Human
cucacaaaauagcagcac

SEQ ID NO: 573627 - RNA, 28 nt, Human
cuccaaguacaguugagggacaacuuac

SEQ ID NO: 573628 - RNA, 21 nt, Human
cugagguuagaaccggggucc

SEQ ID NO: 573629 - RNA, 21 nt, Human
cuuuuggucccaccgguggcc

SEQ ID NO: 573630 - RNA, 18 nt, Human
gaaauguuuaacuacuaa

SEQ ID NO: 573631 - RNA, 20 nt, Human
gaauacagcugagguugaac

SEQ ID NO: 573632 - RNA, 21 nt, Human
gaauuuaugugcuuacaucua

SEQ ID NO: 573633 - RNA, 18 nt, Human
gacacuguugggauggcu

SEQ ID NO: 573634 - RNA, 20 nt, Human
gacauaggaaaaggucaccu

SEQ ID NO: 573635 - RNA, 18 nt, Human
gaccccaaauaaguuuuc

SEQ ID NO: 573636 - RNA, 22 nt, Human
ggaaauacagaaggagaaaagc

SEQ ID NO: 573637 - RNA, 18 nt, Human
ggaagaaaacagaagaaa

SEQ ID NO: 573638 - RNA, 20 nt, Human
ggaagaaaacagaagaaagg

SEQ ID NO: 573639 - RNA, 20 nt, Human
ggcacaugagcagaauacuu

SEQ ID NO: 573640 - RNA, 18 nt, Human
gggggcacaugagcagaa

SEQ ID NO: 573641 - RNA, 18 nt, Human
ggguagaccccaaauaag

SEQ ID NO: 573642 - RNA, 20 nt, Human
gguauggaaauacagaagga

SEQ ID NO: 573643 - RNA, 23 nt, Human
ggucaccagggcaggaaugcacu

SEQ ID NO: 573644 - RNA, 18 nt, Human
guggcucucaugcaaacc

SEQ ID NO: 573645 - RNA, 21 nt, Human
uaaaaaaaaaauuuccauuua

SEQ ID NO: 573646 - RNA, 19 nt, Human
uaaaacaugcgcuaaugga

SEQ ID NO: 573647 - RNA, 19 nt, Human
uaaacaggagccggagcuc

SEQ ID NO: 573648 - RNA, 23 nt, Human
uaaagaacauucuaauaaaaaaa

SEQ ID NO: 573649 - RNA, 23 nt, Human
uaaauaaaaacuagcauuuuccg

SEQ ID NO: 573650 - RNA, 21 nt, Human
uacuuuugggggcacaugagc

SEQ ID NO: 573651 - RNA, 21 nt, Human
uagcacggucaaagaagagaa

SEQ ID NO: 573652 - RNA, 19 nt, Human
uaggaagcacuacuuaaaa

SEQ ID NO: 573653 - RNA, 23 nt, Human
ucacaaaauagcagcaccugugg

SEQ ID NO: 573654 - RNA, 23 nt, Human
ucuugaaccagccugaggaaagu

SEQ ID NO: 573655 - RNA, 21 nt, Human
ugaaaaugcccuggggacccu

SEQ ID NO: 573656 - RNA, 23 nt, Human
ugaagggugucaaauuguuguga

SEQ ID NO: 573657 - RNA, 18 nt, Human
ugacagagcacacuuugg

SEQ ID NO: 573658 - RNA, 19 nt, Human
ugacagagcacacuuuggg

SEQ ID NO: 573659 - RNA, 21 nt, Human
ugacagagcacacuuugggaa

SEQ ID NO: 573660 - RNA, 24 nt, Human
ugacagagcacacuuugggaagca

SEQ ID NO: 573661 - RNA, 20 nt, Human
ugagauaacaaacaaacacu

SEQ ID NO: 573662 - RNA, 19 nt, Human
ugagcagaauacuuugugg

SEQ ID NO: 573663 - RNA, 21 nt, Human
ugcaaaccauuuaggaagcac

SEQ ID NO: 573664 - RNA, 23 nt, Human
ugccaugaaaaugcccuggggac

SEQ ID NO: 573665 - RNA, 25 nt, Human
ugcccuggggacccucugacgacac

SEQ ID NO: 573666 - RNA, 20 nt, Human
ugcuuacaucuauacagaaa

SEQ ID NO: 573667 - RNA, 19 nt, Human
uggaaauacagaaggagaa

SEQ ID NO: 573668 - RNA, 18 nt, Human
uggagugggggcagaggg

SEQ ID NO: 573669 - RNA, 24 nt, Human
ugggaagcacugcuggaguggggg

SEQ ID NO: 573670 - RNA, 23 nt, Human
ugggaagggcagaugacuuuuua

SEQ ID NO: 573671 - RNA, 18 nt, Human
ugggggcagagggguacu

SEQ ID NO: 573672 - RNA, 22 nt, Human
ugggguagaccccaaauaaguu

SEQ ID NO: 573673 - RNA, 23 nt, Human
ugguauggaaauacagaaggaga

SEQ ID NO: 573674 - RNA, 19 nt, Human
uggucucagagugcuuguc

SEQ ID NO: 573675 - RNA, 20 nt, Human
aaaaauguccauucuuggcc

SEQ ID NO: 573676 - RNA, 20 nt, Human
aaaguuuucccaaauagcac

SEQ ID NO: 573677 - RNA, 19 nt, Human
aacauggugagacccuguc

SEQ ID NO: 573678 - RNA, 20 nt, Human
aacauggugagacccugucu

SEQ ID NO: 573679 - RNA, 28 nt, Human
acagagcaagacucugucugucucaaaa

SEQ ID NO: 573680 - RNA, 19 nt, Human
acccagugggguugugauu

SEQ ID NO: 573681 - RNA, 24 nt, Human
acggagaaaaagcugucgggcgac

SEQ ID NO: 573682 - RNA, 24 nt, Human
acugcacuccagccugggugacag

SEQ ID NO: 573683 - RNA, 26 nt, Human
acugcacuccagccugggugacagag

SEQ ID NO: 573684 - RNA, 18 nt, Human
agaaaaagcugucgggcg

SEQ ID NO: 573685 - RNA, 24 nt, Human
agagcuugcagugacccgagauug

SEQ ID NO: 573686 - RNA, 20 nt, Human
agcaagggaaaagaucucga

SEQ ID NO: 573687 - RNA, 24 nt, Human
agcacuuugggaggccgaggucgg

SEQ ID NO: 573688 - RNA, 24 nt, Human
agccugggugacagagcaagacuc

SEQ ID NO: 573689 - RNA, 23 nt, Human
agcugggcaugguggcaggugcc

SEQ ID NO: 573690 - RNA, 21 nt, Human
aggcagagcuugcagugaccc

SEQ ID NO: 573691 - RNA, 24 nt, Human
aggcagagcuugcagugacccgag

SEQ ID NO: 573692 - RNA, 21 nt, Human
aggcaggagaauggcaugaac

SEQ ID NO: 573693 - RNA, 24 nt, Human
aggcaggagaauggcaugaacuug

SEQ ID NO: 573694 - RNA, 21 nt, Human
aggccgaggucggcggaucac

SEQ ID NO: 573695 - RNA, 24 nt, Human
aggcgcaguggcucacgccuguaa

SEQ ID NO: 573696 - RNA, 19 nt, Human
aggcugaggcaggagaaug

SEQ ID NO: 573697 - RNA, 24 nt, Human
aggucggcggaucacgaggucaga

SEQ ID NO: 573698 - RNA, 19 nt, Human
aguagguaaggccccagga

SEQ ID NO: 573699 - RNA, 24 nt, Human
aguggcucacgccuguaauuccag

SEQ ID NO: 573700 - RNA, 21 nt, Human
auguagccucucagggugcua

SEQ ID NO: 573701 - RNA, 21 nt, Human
auuaagaccauucagccaaga

SEQ ID NO: 573702 - RNA, 24 nt, Human
auugcgccacugcacuccagccug

SEQ ID NO: 573703 - RNA, 25 nt, Human
auuuacauuugcugccaccuuuaau

SEQ ID NO: 573704 - RNA, 21 nt, Human
auuuuugauauacaaaacuua

SEQ ID NO: 573705 - RNA, 23 nt, Human
caacucgcauacuacggagaaaa

SEQ ID NO: 573706 - RNA, 24 nt, Human
caagaccauccuggcuaacauggu

SEQ ID NO: 573707 - RNA, 25 nt, Human
caagcacaaaauccaugggauaccu

SEQ ID NO: 573708 - RNA, 20 nt, Human
caagucuaagucuaggaaau

SEQ ID NO: 573709 - RNA, 24 nt, Human
cacgccuguaauuccagcacuuug

SEQ ID NO: 573710 - RNA, 22 nt, Human
cacuccagccugggugacagag

SEQ ID NO: 573711 - RNA, 23 nt, Human
cacuccagccugggugacagagc

SEQ ID NO: 573712 - RNA, 19 nt, Human
cacugcacuccagccuggg

SEQ ID NO: 573713 - RNA, 19 nt, Human
cacugcacuccagccuggg

SEQ ID NO: 573714 - RNA, 22 nt, Human
cacugcacuccagccuggguga

SEQ ID NO: 573715 - RNA, 23 nt, Human
cacugcacuccagccugggugac

SEQ ID NO: 573716 - RNA, 24 nt, Human
cacugcacuccagccugggugaca

SEQ ID NO: 573717 - RNA, 24 nt, Human
cacugcacuccagccugggugaca

SEQ ID NO: 573718 - RNA, 18 nt, Human
cacugugccucuaaucaa

SEQ ID NO: 573719 - RNA, 25 nt, Human
cagcacuuugggaggccgaggucgg

SEQ ID NO: 573720 - RNA, 24 nt, Human
cagcuacuugggaggcugaggcag

SEQ ID NO: 573721 - RNA, 19 nt, Human
cagcugccugcccacucgc

SEQ ID NO: 573722 - RNA, 20 nt, Human
caugguggcaggugccugua

SEQ ID NO: 573723 - RNA, 22 nt, Human
caugguggcaggugccuguagu

SEQ ID NO: 573724 - RNA, 19 nt, Human
ccaagcacaaaauccaugg

SEQ ID NO: 573725 - RNA, 20 nt, Human
ccaccuuuaauagcacugau

SEQ ID NO: 573726 - RNA, 20 nt, Human
ccacugcacuccagccuggg

SEQ ID NO: 573727 - RNA, 20 nt, Human
ccacugcacuccagccuggg

SEQ ID NO: 573728 - RNA, 21 nt, Human
ccacugcacuccagccugggu

SEQ ID NO: 573729 - RNA, 21 nt, Human
ccacugcacuccagccugggu

SEQ ID NO: 573730 - RNA, 23 nt, Human
ccacugcacuccagccuggguga

SEQ ID NO: 573731 - RNA, 24 nt, Human
ccacugcacuccagccugggugac

SEQ ID NO: 573732 - RNA, 20 nt, Human
cccugagcucugccuguacc

SEQ ID NO: 573733 - RNA, 22 nt, Human
ccugcccacucgcucuuuucuu

SEQ ID NO: 573734 - RNA, 22 nt, Human
ccuggcuaacauggugagaccc

SEQ ID NO: 573735 - RNA, 22 nt, Human
ccuggcuaacauggugagaccc

SEQ ID NO: 573736 - RNA, 23 nt, Human
ccuggcuaacauggugagacccu

SEQ ID NO: 573737 - RNA, 22 nt, Human
ccugggugacagagcaagacuc

SEQ ID NO: 573738 - RNA, 22 nt, Human
ccuguaauuccagcacuuuggg

SEQ ID NO: 573739 - RNA, 22 nt, Human
ccuguaccauggcuuccaggag

SEQ ID NO: 573740 - RNA, 21 nt, Human
ccuguagucccagcuacuugg

SEQ ID NO: 573741 - RNA, 20 nt, Human
ccuuucuucuccaccccgca

SEQ ID NO: 573742 - RNA, 27 nt, Human
cgaggucggcggaucacgaggucagau

SEQ ID NO: 573743 - RNA, 26 nt, Human
cgccacugcacuccagccugggugac

SEQ ID NO: 573744 - RNA, 23 nt, Human
cgccuguaauuccagcacuuugg

SEQ ID NO: 573745 - RNA, 22 nt, Human
cggcggaucacgaggucagauc

SEQ ID NO: 573746 - RNA, 20 nt, Human
cucaaaaaaaaaaaguccau

SEQ ID NO: 573747 - RNA, 21 nt, Human
cucaaaaaaaaaaaguccauc

SEQ ID NO: 573748 - RNA, 24 nt, Human
cucacgccuguaauuccagcacuu

SEQ ID NO: 573749 - RNA, 23 nt, Human
cuccaccccgcaucuacccgguu

SEQ ID NO: 573750 - RNA, 18 nt, Human
cucgagccgccuccugga

SEQ ID NO: 573751 - RNA, 24 nt, Human
cucuacugaaaaaaaaaaaauuag

SEQ ID NO: 573752 - RNA, 21 nt, Human
cugccaccuuuaauagcacug

SEQ ID NO: 573753 - RNA, 20 nt, Human
cugcccacucgcucuuuucu

SEQ ID NO: 573754 - RNA, 22 nt, Human
cugcugcugcugcuucugcaaa

SEQ ID NO: 573755 - RNA, 24 nt, Human
cuggcuaacauggugagacccugu

SEQ ID NO: 573756 - RNA, 21 nt, Human
cuugcagugacccgagauugc

SEQ ID NO: 573757 - RNA, 24 nt, Human
cuuggccaggcgcaguggcucacg

SEQ ID NO: 573758 - RNA, 18 nt, Human
gaacagcucgagccgccu

SEQ ID NO: 573759 - RNA, 20 nt, Human
gaacuugggaggcagagcuu

SEQ ID NO: 573760 - RNA, 23 nt, Human
gagauugcgccacugcacuccag

SEQ ID NO: 573761 - RNA, 18 nt, Human
gagcuugcagugacccga

SEQ ID NO: 573762 - RNA, 24 nt, Human
gcacuccagccugggugacagagc

SEQ ID NO: 573763 - RNA, 19 nt, Human
gccacugcacuccagccug

SEQ ID NO: 573764 - RNA, 24 nt, Human
gccacugcacuccagccuggguga

SEQ ID NO: 573765 - RNA, 20 nt, Human
gcgcaguggcucacgccugu

SEQ ID NO: 573766 - RNA, 24 nt, Human
gcuaacauggugagacccugucuc

SEQ ID NO: 573767 - RNA, 19 nt, Human
ggcaugaacuugggaggca

SEQ ID NO: 573768 - RNA, 18 nt, Human
ggcggaucacgaggucag

SEQ ID NO: 573769 - RNA, 23 nt, Human
gucaaacaugacccagugggguu

SEQ ID NO: 573770 - RNA, 27 nt, Human
gucuucugcugcugcugcuucugcaaa

SEQ ID NO: 573771 - RNA, 24 nt, Human
guuguacugcgguggaaucccagg

SEQ ID NO: 573772 - RNA, 22 nt, Human
uaacauggugagacccugucuc

SEQ ID NO: 573773 - RNA, 24 nt, Human
uaacauggugagacccugucucua

SEQ ID NO: 573774 - RNA, 18 nt, Human
uaaggguuuuuaauguuu

SEQ ID NO: 573775 - RNA, 21 nt, Human
uacgaacagcucgagccgccu

SEQ ID NO: 573776 - RNA, 23 nt, Human
uacugaaaaaaaaaaaauuagcu

SEQ ID NO: 573777 - RNA, 19 nt, Human
uagguaagcuuauauggca

SEQ ID NO: 573778 - RNA, 25 nt, Human
uaguagguaaggccccaggaucucc

SEQ ID NO: 573779 - RNA, 22 nt, Human
ucacgccuguaauuccagcacu

SEQ ID NO: 573780 - RNA, 18 nt, Human
ucaguugaggaauaggga

SEQ ID NO: 573781 - RNA, 24 nt, Human
uccagccugggugacagagcaaga

SEQ ID NO: 573782 - RNA, 21 nt, Human
ucucuacugaaaaaaaaaaaa

SEQ ID NO: 573783 - RNA, 18 nt, Human
ucugucccaagcacaaaa

SEQ ID NO: 573784 - RNA, 24 nt, Human
ucugucugucucaaaaaaaaaaag

SEQ ID NO: 573785 - RNA, 18 nt, Human
ucuucagucgauuccgcu

SEQ ID NO: 573786 - RNA, 21 nt, Human
ucuuuggggaucgagcuuccu

SEQ ID NO: 573787 - RNA, 22 nt, Human
ugacccgagauugcgccacugc

SEQ ID NO: 573788 - RNA, 23 nt, Human
ugaggcaggagaauggcaugaac

SEQ ID NO: 573789 - RNA, 23 nt, Human
ugaggcaggagaauggcaugaac

SEQ ID NO: 573790 - RNA, 25 nt, Human
ugaggcaggagaauggcaugaacuu

SEQ ID NO: 573791 - RNA, 23 nt, Human
ugccuguagucccagcuacuugg

SEQ ID NO: 573792 - RNA, 24 nt, Human
ugccuguagucccagcuacuuggg

SEQ ID NO: 573793 - RNA, 23 nt, Human
ugcgguggaaucccaggcagagc

SEQ ID NO: 573794 - RNA, 19 nt, Human
uggaaucccaggcagagcc

SEQ ID NO: 573795 - RNA, 18 nt, Human
uggcaugaacuugggagg

SEQ ID NO: 573796 - RNA, 24 nt, Human
uggccaggcgcaguggcucacgcc

SEQ ID NO: 573797 - RNA, 22 nt, Human
uggcucacgccuguaauuccag

SEQ ID NO: 573798 - RNA, 24 nt, Human
uggcucacgccuguaauuccagca

SEQ ID NO: 573799 - RNA, 18 nt, Human
ugggaggccgaggucggc

SEQ ID NO: 573800 - RNA, 19 nt, Human
ugggaggccgaggucggcg

SEQ ID NO: 573801 - RNA, 24 nt, Human
ugggaggccgaggucggcggauca

SEQ ID NO: 573802 - RNA, 18 nt, Human
ugggaggcugaggcagga

SEQ ID NO: 573803 - RNA, 24 nt, Human
ugggaggcugaggcaggagaaugg

SEQ ID NO: 573804 - RNA, 24 nt, Human
ugguggcaggugccuguaguccca

SEQ ID NO: 573805 - RNA, 21 nt, Human
ugugucuucugcugcugcugc

SEQ ID NO: 573806 - RNA, 24 nt, Human
uuagcugggcaugguggcaggugc

SEQ ID NO: 573807 - RNA, 26 nt, Human
uucagcuauuuuuguguugacauuuu

SEQ ID NO: 573808 - RNA, 21 nt, Human
uucugcugcugcugcuucugc

SEQ ID NO: 573809 - RNA, 23 nt, Human
uucuuuggggaucgagcuuccua

SEQ ID NO: 573810 - RNA, 23 nt, Human
uucuuuuucacugugccucuaau

SEQ ID NO: 573811 - RNA, 22 nt, Human
uugcagugacccgagauugcgc

SEQ ID NO: 573812 - RNA, 23 nt, Human
uugcgccacugcacuccagccug

SEQ ID NO: 573813 - RNA, 25 nt, Human
uugggaggccgaggucggcggauca

SEQ ID NO: 573814 - RNA, 20 nt, Human
uuuaauagcacugaugaaaa

SEQ ID NO: 573815 - RNA, 18 nt, Human
uuuguuaaaauauuaagg

SEQ ID NO: 573816 - RNA, 22 nt, Human
uuuguuaaaauauuaaggguuu

SEQ ID NO: 573817 - RNA, 23 nt, Human
aaaaauagcagaaguaucaaagc

SEQ ID NO: 573818 - RNA, 30 nt, Human
aaaaaugugucuuugcauuuccagcccucc

SEQ ID NO: 573819 - RNA, 25 nt, Human
aaaauccaugggcacaccugaauga

SEQ ID NO: 573820 - RNA, 19 nt, Human
aaguaucaaagccauuggc

SEQ ID NO: 573821 - RNA, 20 nt, Human
aauuguguguaagcucaaaa

SEQ ID NO: 573822 - RNA, 27 nt, Human
acagagcaagacuuccgucuauuaaaa

SEQ ID NO: 573823 - RNA, 18 nt, Human
accauuugcccagugaau

SEQ ID NO: 573824 - RNA, 23 nt, Human
accgcacuccagccugcaugaca

SEQ ID NO: 573825 - RNA, 24 nt, Human
accgcacuccagccugcaugacag

SEQ ID NO: 573826 - RNA, 26 nt, Human
accgcacuccagccugcaugacagag

SEQ ID NO: 573827 - RNA, 19 nt, Human
acgcaguuucaccagcugg

SEQ ID NO: 573828 - RNA, 19 nt, Human
acgguguguaccgcacccc

SEQ ID NO: 573829 - RNA, 24 nt, Human
agcuacucaggaggcugagguggg

SEQ ID NO: 573830 - RNA, 23 nt, Human
agcuaggcgugguggcacacgcc

SEQ ID NO: 573831 - RNA, 21 nt, Human
agcugggcaugguggcauacc

SEQ ID NO: 573832 - RNA, 24 nt, Human
aggaauucaagaccagccugggaa

SEQ ID NO: 573833 - RNA, 24 nt, Human
aggcgugguggcacacgccugugg

SEQ ID NO: 573834 - RNA, 24 nt, Human
aggcugaggugggaggaucacuug

SEQ ID NO: 573835 - RNA, 23 nt, Human
aggguguugggagcuggcaagcu

SEQ ID NO: 573836 - RNA, 18 nt, Human
aggugggaggaucacuug

SEQ ID NO: 573837 - RNA, 23 nt, Human
aggugggaggaucacuugagccc

SEQ ID NO: 573838 - RNA, 24 nt, Human
agucgugguggcucaugccuauaa

SEQ ID NO: 573839 - RNA, 23 nt, Human
aguuucaccagcuggaugugcag

SEQ ID NO: 573840 - RNA, 24 nt, Human
aucgcaccaccgcacuccagccug

SEQ ID NO: 573841 - RNA, 18 nt, Human
caaaauccaugggcacac

SEQ ID NO: 573842 - RNA, 24 nt, Human
caaaugaagauuaacaaaugccag

SEQ ID NO: 573843 - RNA, 24 nt, Human
caacacuuugggagggcaaggugg

SEQ ID NO: 573844 - RNA, 20 nt, Human
caaccgggcaggcaaaauua

SEQ ID NO: 573845 - RNA, 23 nt, Human
cacagcacugagcauacuuagua

SEQ ID NO: 573846 - RNA, 27 nt, Human
caccaccgcacuccagccugcaugaca

SEQ ID NO: 573847 - RNA, 27 nt, Human
caccaggaaggguguugggagcuggca

SEQ ID NO: 573848 - RNA, 20 nt, Human
caccccuaccaggaauuauc

SEQ ID NO: 573849 - RNA, 18 nt, Human
caccgcacuccagccugc

SEQ ID NO: 573850 - RNA, 18 nt, Human
cacgccuguggucucagc

SEQ ID NO: 573851 - RNA, 23 nt, Human
cacuccagccugcaugacagagc

SEQ ID NO: 573852 - RNA, 19 nt, Human
cacuuugggagggcaaggu

SEQ ID NO: 573853 - RNA, 24 nt, Human
cagcuacucaggaggcugaggugg

SEQ ID NO: 573854 - RNA, 20 nt, Human
cagcuggaugugcagagaau

SEQ ID NO: 573855 - RNA, 22 nt, Human
caguacgucacgcacacacccc

SEQ ID NO: 573856 - RNA, 24 nt, Human
caugccuauaaucccaacacuuug

SEQ ID NO: 573857 - RNA, 19 nt, Human
ccacagugccuagaucuag

SEQ ID NO: 573858 - RNA, 26 nt, Human
ccacagugccuagaucuagaccucaa

SEQ ID NO: 573859 - RNA, 18 nt, Human
ccaccgcacuccagccug

SEQ ID NO: 573860 - RNA, 19 nt, Human
ccaccgcacuccagccugc

SEQ ID NO: 573861 - RNA, 24 nt, Human
ccaccgcacuccagccugcaugac

SEQ ID NO: 573862 - RNA, 25 nt, Human
ccaccgcacuccagccugcaugaca

SEQ ID NO: 573863 - RNA, 23 nt, Human
ccagccugcaugacagagcaaga

SEQ ID NO: 573864 - RNA, 20 nt, Human
ccaggagguugaggcugcag

SEQ ID NO: 573865 - RNA, 20 nt, Human
cccaagaguucgaggcugca

SEQ ID NO: 573866 - RNA, 25 nt, Human
cccaaggaaagauauacuguaaaau

SEQ ID NO: 573867 - RNA, 24 nt, Human
ccccuguagucucagcuacucugg

SEQ ID NO: 573868 - RNA, 20 nt, Human
ccggcaguggguaccgcgga

SEQ ID NO: 573869 - RNA, 22 nt, Human
ccuauaaucccaacacuuuggg

SEQ ID NO: 573870 - RNA, 22 nt, Human
ccuauaaucccaacacuuuggg

SEQ ID NO: 573871 - RNA, 20 nt, Human
ccugcaugacagagcaagac

SEQ ID NO: 573872 - RNA, 21 nt, Human
ccugcaugacagagcaagacu

SEQ ID NO: 573873 - RNA, 19 nt, Human
ccuguagucucagcuacuc

SEQ ID NO: 573874 - RNA, 25 nt, Human
ccuguagucucagcuacucuggugg

SEQ ID NO: 573875 - RNA, 21 nt, Human
cgcaccaccgcacuccagccu

SEQ ID NO: 573876 - RNA, 24 nt, Human
cgccuguggucucagcuacucagg

SEQ ID NO: 573877 - RNA, 21 nt, Human
cggcaguggguaccgcggagg

SEQ ID NO: 573878 - RNA, 22 nt, Human
cggcaguggguaccgcggaggc

SEQ ID NO: 573879 - RNA, 18 nt, Human
cggguagcgcggaggccg

SEQ ID NO: 573880 - RNA, 21 nt, Human
cucaaaauccaugggcacacc

SEQ ID NO: 573881 - RNA, 23 nt, Human
cucaaaauccaugggcacaccug

SEQ ID NO: 573882 - RNA, 24 nt, Human
cucaugccuauaaucccaacacuu

SEQ ID NO: 573883 - RNA, 22 nt, Human
cugcagugagcuaugaucgcac

SEQ ID NO: 573884 - RNA, 24 nt, Human
cugcggccggguagcgcggaggcc

SEQ ID NO: 573885 - RNA, 25 nt, Human
cuggccagucgugguggcucaugcc

SEQ ID NO: 573886 - RNA, 21 nt, Human
cugggcaugguggcauacccc

SEQ ID NO: 573887 - RNA, 18 nt, Human
cugguggcugacacagga

SEQ ID NO: 573888 - RNA, 22 nt, Human
cuggugggccugugaauugugu

SEQ ID NO: 573889 - RNA, 23 nt, Human
cuugaagcccaagaguucgaggc

SEQ ID NO: 573890 - RNA, 23 nt, Human
cuugagcccaggagguugaggcu

SEQ ID NO: 573891 - RNA, 21 nt, Human
gaauuguguguaagcucaaaa

SEQ ID NO: 573892 - RNA, 21 nt, Human
gaggugggaggaucacuugag

SEQ ID NO: 573893 - RNA, 19 nt, Human
gaguaccgcgcaggccggc

SEQ ID NO: 573894 - RNA, 24 nt, Human
gaucacuugagcccaggagguuga

SEQ ID NO: 573895 - RNA, 18 nt, Human
gcacacaccccuaccagg

SEQ ID NO: 573896 - RNA, 20 nt, Human
gcaccaccgcacuccagccu

SEQ ID NO: 573897 - RNA, 24 nt, Human
gcacuccagccugcaugacagagc

SEQ ID NO: 573898 - RNA, 23 nt, Human
gcggaggccggcagugaguaccg

SEQ ID NO: 573899 - RNA, 23 nt, Human
gcggaggccggcaguggguaccg

SEQ ID NO: 573900 - RNA, 19 nt, Human
gcugacacaggaggauugc

SEQ ID NO: 573901 - RNA, 18 nt, Human
ggaacaacacagagaagg

SEQ ID NO: 573902 - RNA, 19 nt, Human
ggauuuccacagcucgaaa

SEQ ID NO: 573903 - RNA, 22 nt, Human
ggccacaauauagcuuuuaacc

SEQ ID NO: 573904 - RNA, 21 nt, Human
ggccagucgugguggcucaug

SEQ ID NO: 573905 - RNA, 23 nt, Human
ggguagcgcggaggccggcaguu

SEQ ID NO: 573906 - RNA, 24 nt, Human
gguggcacacgccuguggucucag

SEQ ID NO: 573907 - RNA, 19 nt, Human
gguggcucaugccuauaau

SEQ ID NO: 573908 - RNA, 23 nt, Human
gguggcucaugccuauaauccca

SEQ ID NO: 573909 - RNA, 24 nt, Human
guaccgcggaggccggcagugagu

SEQ ID NO: 573910 - RNA, 19 nt, Human
guauugcucuuugagaaag

SEQ ID NO: 573911 - RNA, 24 nt, Human
gucuaaaaaaauagcagaaguauc

SEQ ID NO: 573912 - RNA, 24 nt, Human
gugaauaguaaucuaaggcccaag

SEQ ID NO: 573913 - RNA, 24 nt, Human
guggcacacgccuguggucucagc

SEQ ID NO: 573914 - RNA, 19 nt, Human
guggguaccgcggaggccg

SEQ ID NO: 573915 - RNA, 22 nt, Human
uaaaacaaaaacaaauaccauu

SEQ ID NO: 573916 - RNA, 24 nt, Human
uaaaacaaaaacaaauaccauuug

SEQ ID NO: 573917 - RNA, 18 nt, Human
uaagcucaaaagcaucac

SEQ ID NO: 573918 - RNA, 20 nt, Human
uaagcucaaaagcaucacuc

SEQ ID NO: 573919 - RNA, 19 nt, Human
uaccgcaccccaggaaggc

SEQ ID NO: 573920 - RNA, 22 nt, Human
uagcuaggcgugguggcacacg

SEQ ID NO: 573921 - RNA, 18 nt, Human
uccacagugccuagaucu

SEQ ID NO: 573922 - RNA, 19 nt, Human
ucccaggaauucaagacca

SEQ ID NO: 573923 - RNA, 20 nt, Human
ucccuggcuucuugacuuuu

SEQ ID NO: 573924 - RNA, 18 nt, Human
ucuaaaaaaauagcagaa

SEQ ID NO: 573925 - RNA, 19 nt, Human
ugagaaaguuuauuggcac

SEQ ID NO: 573926 - RNA, 19 nt, Human
ugaggugggaggaucacuu

SEQ ID NO: 573927 - RNA, 22 nt, Human
ugaggugggaggaucacuugag

SEQ ID NO: 573928 - RNA, 24 nt, Human
ugaggugggaggaucacuugagcc

SEQ ID NO: 573929 - RNA, 23 nt, Human
ugccuauaaucccaacacuuugg

SEQ ID NO: 573930 - RNA, 19 nt, Human
ugcuuaagcuaagaccuuu

SEQ ID NO: 573931 - RNA, 19 nt, Human
ugcuugguucagauagugg

SEQ ID NO: 573932 - RNA, 21 nt, Human
uggcacacgccuguggucuca

SEQ ID NO: 573933 - RNA, 24 nt, Human
uggcacacgccuguggucucagcu

SEQ ID NO: 573934 - RNA, 21 nt, Human
uggcucaugccuauaauccca

SEQ ID NO: 573935 - RNA, 24 nt, Human
uggcugacacaggaggauugcuug

SEQ ID NO: 573936 - RNA, 24 nt, Human
ugggagggcaagguggaaggauug

SEQ ID NO: 573937 - RNA, 19 nt, Human
ugggcacaccugaaugaca

SEQ ID NO: 573938 - RNA, 24 nt, Human
ugguggcacacgccuguggucuca

SEQ ID NO: 573939 - RNA, 24 nt, Human
ugguggcucaugccuauaauccca

SEQ ID NO: 573940 - RNA, 20 nt, Human
ugucuaaaaaaauagcagaa

SEQ ID NO: 573941 - RNA, 21 nt, Human
ugucuugggccacaauauagc

SEQ ID NO: 573942 - RNA, 22 nt, Human
ugugauaagaaugacuuaauuu

SEQ ID NO: 573943 - RNA, 23 nt, Human
ugugauaagaaugacuuaauuug

SEQ ID NO: 573944 - RNA, 19 nt, Human
uguguaccgcaccccagga

SEQ ID NO: 573945 - RNA, 24 nt, Human
uguguaccgcaccccaggaaggcu

SEQ ID NO: 573946 - RNA, 18 nt, Human
uuagcuaggcgugguggc

SEQ ID NO: 573947 - RNA, 24 nt, Human
uuagcuaggcgugguggcacacgc

SEQ ID NO: 573948 - RNA, 22 nt, Human
uucagauaguggugaauuacua

SEQ ID NO: 573949 - RNA, 23 nt, Human
uugaagcccaagaguucgaggcu

SEQ ID NO: 573950 - RNA, 19 nt, Human
uugcugaauuaacggugug

SEQ ID NO: 573951 - RNA, 24 nt, Human
uugggagggcaagguggaaggauu

SEQ ID NO: 573952 - RNA, 21 nt, Human
aaaaaacaaucacacagauga

SEQ ID NO: 573953 - RNA, 18 nt, Human
aaacagaguccagcugca

SEQ ID NO: 573954 - RNA, 20 nt, Human
aaagaacacacauggcagag

SEQ ID NO: 573955 - RNA, 22 nt, Human
aaagcugggaggaucuuguuag

SEQ ID NO: 573956 - RNA, 21 nt, Human
aagcaauguuacaugauccaa

SEQ ID NO: 573957 - RNA, 23 nt, Human
aauaauaguuacugguguuugag

SEQ ID NO: 573958 - RNA, 22 nt, Human
acccaacaacauucagcaaaac

SEQ ID NO: 573959 - RNA, 21 nt, Human
accccacuuuccucuguccaa

SEQ ID NO: 573960 - RNA, 19 nt, Human
acugggaacaaacugaggu

SEQ ID NO: 573961 - RNA, 19 nt, Human
agaaagcugggaggaucuu

SEQ ID NO: 573962 - RNA, 21 nt, Human
agaaaggagcaguauagaaaa

SEQ ID NO: 573963 - RNA, 23 nt, Human
agacccacaagcucaggccaaau

SEQ ID NO: 573964 - RNA, 25 nt, Human
agagcagguggagcuagccaaggug

SEQ ID NO: 573965 - RNA, 22 nt, Human
agaggggcaguggguucaugag

SEQ ID NO: 573966 - RNA, 20 nt, Human
agcagguggagcuagccaag

SEQ ID NO: 573967 - RNA, 24 nt, Human
aggcauuuaguacagguucuggca

SEQ ID NO: 573968 - RNA, 20 nt, Human
aggcuguagaaagcccauca

SEQ ID NO: 573969 - RNA, 21 nt, Human
aggggaaaaaacaaucacaca

SEQ ID NO: 573970 - RNA, 24 nt, Human
agguucuggcauaugggccaguuc

SEQ ID NO: 573971 - RNA, 18 nt, Human
auucgcgguuauucccuu

SEQ ID NO: 573972 - RNA, 24 nt, Human
auuuccaccuuaaaauugacaggg

SEQ ID NO: 573973 - RNA, 20 nt, Human
caaccuuuaagaccucuauu

SEQ ID NO: 573974 - RNA, 23 nt, Human
cagcugcacagagcauucgcggu

SEQ ID NO: 573975 - RNA, 21 nt, Human
caguuucaaaccaugagagga

SEQ ID NO: 573976 - RNA, 18 nt, Human
caucaagaaaaugcaaac

SEQ ID NO: 573977 - RNA, 23 nt, Human
caucaagaaaaugcaaacucuug

SEQ ID NO: 573978 - RNA, 24 nt, Human
ccucuaagcccacugggaacaaac

SEQ ID NO: 573979 - RNA, 19 nt, Human
cuaaagaacacacauggca

SEQ ID NO: 573980 - RNA, 19 nt, Human
cuccggcugcugcuagugc

SEQ ID NO: 573981 - RNA, 21 nt, Human
cugaacagacccacaagcuca

SEQ ID NO: 573982 - RNA, 23 nt, Human
gaaacagaguccagcugcacaga

SEQ ID NO: 573983 - RNA, 18 nt, Human
gaacacacauggcagaga

SEQ ID NO: 573984 - RNA, 20 nt, Human
gaacaggcauaaaaagcaaa

SEQ ID NO: 573985 - RNA, 24 nt, Human
gaacuaaucauaguuuucucauac

SEQ ID NO: 573986 - RNA, 20 nt, Human
gaagaagauucuucuacuaa

SEQ ID NO: 573987 - RNA, 26 nt, Human
gagcaguauagaaaagagauuaaaua

SEQ ID NO: 573988 - RNA, 19 nt, Human
ggauaagcaucagaaagga

SEQ ID NO: 573989 - RNA, 19 nt, Human
ggcaguggguucaugagaa

SEQ ID NO: 573990 - RNA, 22 nt, Human
ggccaggauugaaggcaggcau

SEQ ID NO: 573991 - RNA, 20 nt, Human
uaaaauaaaacuaaagaaca

SEQ ID NO: 573992 - RNA, 20 nt, Human
uaaagaacacacauggcaga

SEQ ID NO: 573993 - RNA, 20 nt, Human
uaagcccacugggaacaaac

SEQ ID NO: 573994 - RNA, 28 nt, Human
uaagggaaguaucuguggaaauuuucuc

SEQ ID NO: 573995 - RNA, 18 nt, Human
uacugaaaggagacuaag

SEQ ID NO: 573996 - RNA, 21 nt, Human
uacugaaaggagacuaagcaa

SEQ ID NO: 573997 - RNA, 18 nt, Human
uagaagaagauucuucua

SEQ ID NO: 573998 - RNA, 19 nt, Human
uaugaaagauuccuuacug

SEQ ID NO: 573999 - RNA, 21 nt, Human
uauugccaaauacugaaagga

SEQ ID NO: 574000 - RNA, 20 nt, Human
ucagaacaggcauaaaaagc

SEQ ID NO: 574001 - RNA, 23 nt, Human
ucagguccucccucuaagcccac

SEQ ID NO: 574002 - RNA, 23 nt, Human
ucccucuaagcccacugggaaca

SEQ ID NO: 574003 - RNA, 20 nt, Human
ucccugaugaggcaagggcu

SEQ ID NO: 574004 - RNA, 18 nt, Human
uccggcugcugcuagugc

SEQ ID NO: 574005 - RNA, 21 nt, Human
ugaaaggauaagcaucagaaa

SEQ ID NO: 574006 - RNA, 25 nt, Human
ugaacagacccacaagcucaggcca

SEQ ID NO: 574007 - RNA, 25 nt, Human
ugaacagacccacaagcucaggcca

SEQ ID NO: 574008 - RNA, 23 nt, Human
ugagaggagacagucugaacagu

SEQ ID NO: 574009 - RNA, 21 nt, Human
ugaggaaaaugcagaggggca

SEQ ID NO: 574010 - RNA, 21 nt, Human
ugaggaaaaugcagaggggca

SEQ ID NO: 574011 - RNA, 23 nt, Human
ugcaguuucaaaccaugagagga

SEQ ID NO: 574012 - RNA, 21 nt, Human
ugcgcccgggugcuuuccgcc

SEQ ID NO: 574013 - RNA, 23 nt, Human
ugcggcaccggcuccggcugcgc

SEQ ID NO: 574014 - RNA, 21 nt, Human
ugcuaccaaugauacagaguu

SEQ ID NO: 574015 - RNA, 22 nt, Human
uggaaucagucaucagguccuc

SEQ ID NO: 574016 - RNA, 18 nt, Human
uggauaugaaaugucuac

SEQ ID NO: 574017 - RNA, 23 nt, Human
uggcuuaggacaaguguggagaa

SEQ ID NO: 574018 - RNA, 23 nt, Human
uguagaaagcccaucauccuuag

SEQ ID NO: 574019 - RNA, 19 nt, Human
ugucaugcaaggguaaaaa

SEQ ID NO: 574020 - RNA, 19 nt, Human
uucccuuguucuaucauuu

SEQ ID NO: 574021 - RNA, 22 nt, Human
uucuucuuucuuuuauugccaa

SEQ ID NO: 574022 - RNA, 21 nt, Human
uugauuaaaaugaaaauguca

SEQ ID NO: 574023 - RNA, 22 nt, Human
aaacccacagcgagaccuacac

SEQ ID NO: 574024 - RNA, 21 nt, Human
aagaugggagcagcuggggga

SEQ ID NO: 574025 - RNA, 21 nt, Human
acugugucuguuuuauccugg

SEQ ID NO: 574026 - RNA, 21 nt, Human
acuucuaagagcacagaagag

SEQ ID NO: 574027 - RNA, 23 nt, Human
agaacaucgcuuugaaucuacag

SEQ ID NO: 574028 - RNA, 22 nt, Human
agcagugcuggcucuuggcccu

SEQ ID NO: 574029 - RNA, 19 nt, Human
agguccggaggcugcaggu

SEQ ID NO: 574030 - RNA, 20 nt, Human
cacugugucuguuuuauccu

SEQ ID NO: 574031 - RNA, 22 nt, Human
cagcacaguagccugccuacag

SEQ ID NO: 574032 - RNA, 22 nt, Human
cagcagugcuggcucuuggccc

SEQ ID NO: 574033 - RNA, 18 nt, Human
caggucagggggcugcgc

SEQ ID NO: 574034 - RNA, 21 nt, Human
cauaaaacagagcgcaaacaa

SEQ ID NO: 574035 - RNA, 19 nt, Human
ccaagaaauuccagcaaga

SEQ ID NO: 574036 - RNA, 22 nt, Human
cccacagcgagaccuacacagg

SEQ ID NO: 574037 - RNA, 21 nt, Human
cccauaaaacagagcgcaaac

SEQ ID NO: 574038 - RNA, 27 nt, Human
ccccagcaaacccacagcgagaccuac

SEQ ID NO: 574039 - RNA, 25 nt, Human
ccccuuuucaucacccccuuggucc

SEQ ID NO: 574040 - RNA, 18 nt, Human
cccuccccuuuucaucac

SEQ ID NO: 574041 - RNA, 18 nt, Human
ccucucuugggcaggagc

SEQ ID NO: 574042 - RNA, 23 nt, Human
ccucucuugggcaggagcuccgc

SEQ ID NO: 574043 - RNA, 19 nt, Human
ccucuggcucccucagucc

SEQ ID NO: 574044 - RNA, 21 nt, Human
cucccucaguccugguagauu

SEQ ID NO: 574045 - RNA, 22 nt, Human
cucuuggcccugucacuguguc

SEQ ID NO: 574046 - RNA, 22 nt, Human
cuggggccccacagccccucuc

SEQ ID NO: 574047 - RNA, 24 nt, Human
gagcagcagccagggcugccggga

SEQ ID NO: 574048 - RNA, 20 nt, Human
gaggguggggcgagcagcag

SEQ ID NO: 574049 - RNA, 30 nt, Human
gcagcagccagggcugccgggaugggagcc

SEQ ID NO: 574050 - RNA, 19 nt, Human
gccccacagccccucucuu

SEQ ID NO: 574051 - RNA, 22 nt, Human
gcgcaaacaaaucacccagcag

SEQ ID NO: 574052 - RNA, 19 nt, Human
ggagaagccgcccaagaaa

SEQ ID NO: 574053 - RNA, 20 nt, Human
ggcaugacaccaaggccagc

SEQ ID NO: 574054 - RNA, 19 nt, Human
ggccggguccgcgcugccg

SEQ ID NO: 574055 - RNA, 18 nt, Human
ggcugcgcggaaggggug

SEQ ID NO: 574056 - RNA, 20 nt, Human
ggggcgagcagcagccaggg

SEQ ID NO: 574057 - RNA, 22 nt, Human
guggagaagccgcccaagaaau

SEQ ID NO: 574058 - RNA, 19 nt, Human
guuacugcugaacucccua

SEQ ID NO: 574059 - RNA, 18 nt, Human
uaagagcacagaagagaa

SEQ ID NO: 574060 - RNA, 23 nt, Human
uccccagcaaacccacagcgaga

SEQ ID NO: 574061 - RNA, 18 nt, Human
ucccucaguccugguaga

SEQ ID NO: 574062 - RNA, 21 nt, Human
ucccucaguccugguagauuc

SEQ ID NO: 574063 - RNA, 24 nt, Human
uccgcgcugcagcgagguccggag

SEQ ID NO: 574064 - RNA, 19 nt, Human
ugagcuguggcugcaucuc

SEQ ID NO: 574065 - RNA, 20 nt, Human
ugcgcggaaggggugcgcgc

SEQ ID NO: 574066 - RNA, 24 nt, Human
uggcugcaucucauacagaagcug

SEQ ID NO: 574067 - RNA, 22 nt, Human
aaacuacagggcaucgacauaa

SEQ ID NO: 574068 - RNA, 22 nt, Human
acacagggcuucaccaagccaa

SEQ ID NO: 574069 - RNA, 22 nt, Human
agaauaguacuauuuugaaaca

SEQ ID NO: 574070 - RNA, 18 nt, Human
aggggaacaggccacaau

SEQ ID NO: 574071 - RNA, 24 nt, Human
agugugaaagcaaaacagguacau

SEQ ID NO: 574072 - RNA, 22 nt, Human
auaaaacccaaggggaacaggc

SEQ ID NO: 574073 - RNA, 19 nt, Human
auaaacaaaaacaaaucag

SEQ ID NO: 574074 - RNA, 25 nt, Human
caaagcagccacacugaaagaaauc

SEQ ID NO: 574075 - RNA, 23 nt, Human
cacacagggcuucaccaagccaa

SEQ ID NO: 574076 - RNA, 20 nt, Human
cagcccgccagcccgccuug

SEQ ID NO: 574077 - RNA, 18 nt, Human
ccaagccaaagcagccac

SEQ ID NO: 574078 - RNA, 18 nt, Human
ccagcccgccagcccgcc

SEQ ID NO: 574079 - RNA, 20 nt, Human
ccagcccgccagcccgccuu

SEQ ID NO: 574080 - RNA, 20 nt, Human
ccgccuugggucgccucuuc

SEQ ID NO: 574081 - RNA, 24 nt, Human
cgacauaaacaaaaacaaaucaga

SEQ ID NO: 574082 - RNA, 22 nt, Human
cgccucuucucccacuuccugc

SEQ ID NO: 574083 - RNA, 21 nt, Human
cucuucucccacuuccugcug

SEQ ID NO: 574084 - RNA, 20 nt, Human
cugcaggcugauucucucau

SEQ ID NO: 574085 - RNA, 22 nt, Human
gauguccaaucuaccacacagg

SEQ ID NO: 574086 - RNA, 22 nt, Human
gccagguccugcaugaauccaa

SEQ ID NO: 574087 - RNA, 21 nt, Human
gggcaucgacauaaacaaaaa

SEQ ID NO: 574088 - RNA, 23 nt, Human
gggcaucgacauaaacaaaaaca

SEQ ID NO: 574089 - RNA, 18 nt, Human
gugaaagcaaaacaggua

SEQ ID NO: 574090 - RNA, 19 nt, Human
uaauaaaaauguugaccau

SEQ ID NO: 574091 - RNA, 18 nt, Human
uacaacaaagacaaauaa

SEQ ID NO: 574092 - RNA, 18 nt, Human
uacuauuuugaaacagcc

SEQ ID NO: 574093 - RNA, 22 nt, Human
uaguacuauuuugaaacagcca

SEQ ID NO: 574094 - RNA, 23 nt, Human
uaucugaaaauauuccauuuuau

SEQ ID NO: 574095 - RNA, 25 nt, Human
uccuuuggacuuaggugaauucuaa

SEQ ID NO: 574096 - RNA, 19 nt, Human
ucucucaugggaggucagg

SEQ ID NO: 574097 - RNA, 19 nt, Human
ugaaacagccaauauagua

SEQ ID NO: 574098 - RNA, 21 nt, Human
ugaaagaaaucugccaggucc

SEQ ID NO: 574099 - RNA, 23 nt, Human
ugaauguuguggcacaaugacug

SEQ ID NO: 574100 - RNA, 21 nt, Human
ugagaaauggaaaguugcuag

SEQ ID NO: 574101 - RNA, 22 nt, Human
ugagaacuuuuuuuaccuaaug

SEQ ID NO: 574102 - RNA, 22 nt, Human
ugagguaaguccauaauccauc

SEQ ID NO: 574103 - RNA, 18 nt, Human
uggcacaaugacuggaca

SEQ ID NO: 574104 - RNA, 25 nt, Human
uguaaugccuuuauugagaacuuuu

SEQ ID NO: 574105 - RNA, 22 nt, Human
uuuccaaaaaaaguaacuugca

SEQ ID NO: 574106 - RNA, 22 nt, Human
aaaaaaauaaaacaaagaggcc

SEQ ID NO: 574107 - RNA, 22 nt, Human
aaaauaaaacaaagaggccgca

SEQ ID NO: 574108 - RNA, 21 nt, Human
aaaaucauaauugcaauaugg

SEQ ID NO: 574109 - RNA, 21 nt, Human
aaaggacaucccuuugaccca

SEQ ID NO: 574110 - RNA, 19 nt, Human
aacaagagaauucagcaga

SEQ ID NO: 574111 - RNA, 25 nt, Human
aacaagagaauucagcagagaccug

SEQ ID NO: 574112 - RNA, 26 nt, Human
aaccacggugacaaagcucccucgcc

SEQ ID NO: 574113 - RNA, 18 nt, Human
aagaaagaggcauuuagc

SEQ ID NO: 574114 - RNA, 24 nt, Human
aagaaagaggcauuuagcagagga

SEQ ID NO: 574115 - RNA, 19 nt, Human
aagaucacccucaaaacca

SEQ ID NO: 574116 - RNA, 18 nt, Human
aagcgcuaucuacaugug

SEQ ID NO: 574117 - RNA, 20 nt, Human
aaggucacucagucacucua

SEQ ID NO: 574118 - RNA, 24 nt, Human
acaaaaccacucauuucuaaaguc

SEQ ID NO: 574119 - RNA, 23 nt, Human
acaagagcuuccccucucagaca

SEQ ID NO: 574120 - RNA, 19 nt, Human
acagacccagaugacacga

SEQ ID NO: 574121 - RNA, 24 nt, Human
accccauacaccaacauggaauaa

SEQ ID NO: 574122 - RNA, 18 nt, Human
acccucaaugcugagaaa

SEQ ID NO: 574123 - RNA, 23 nt, Human
acgauggaacgugaauacugaag

SEQ ID NO: 574124 - RNA, 24 nt, Human
acgcugaacucacacgugcccggc

SEQ ID NO: 574125 - RNA, 20 nt, Human
acuacacuaacagacccaga

SEQ ID NO: 574126 - RNA, 24 nt, Human
agaaaaagcacgcgucaauaucac

SEQ ID NO: 574127 - RNA, 23 nt, Human
agaacacagaugaaaccaaaagg

SEQ ID NO: 574128 - RNA, 23 nt, Human
agacaaagguggauaagagggac

SEQ ID NO: 574129 - RNA, 18 nt, Human
agacacauacacaaaacc

SEQ ID NO: 574130 - RNA, 22 nt, Human
agacacauacacaaaaccacuc

SEQ ID NO: 574131 - RNA, 18 nt, Human
agacagaugcagcagcgg

SEQ ID NO: 574132 - RNA, 19 nt, Human
agacccagaugacacgaug

SEQ ID NO: 574133 - RNA, 25 nt, Human
agaccuggacauuuuaaaccagugg

SEQ ID NO: 574134 - RNA, 21 nt, Human
agcaagaucacccucaaaacc

SEQ ID NO: 574135 - RNA, 21 nt, Human
augcagcagcgggaggaaggg

SEQ ID NO: 574136 - RNA, 19 nt, Human
auucgcauaauuacccacc

SEQ ID NO: 574137 - RNA, 21 nt, Human
caaagaaaaagcacgcgucaa

SEQ ID NO: 574138 - RNA, 20 nt, Human
caaagcucccucgcccaaag

SEQ ID NO: 574139 - RNA, 20 nt, Human
caacaacugccacaggcccc

SEQ ID NO: 574140 - RNA, 19 nt, Human
caacagagcacuccauccu

SEQ ID NO: 574141 - RNA, 23 nt, Human
caaccacggugacaaagcucccc

SEQ ID NO: 574142 - RNA, 24 nt, Human
cacauacacaaaaccacucauuuc

SEQ ID NO: 574143 - RNA, 20 nt, Human
caccgcggagcagcagcgcu

SEQ ID NO: 574144 - RNA, 18 nt, Human
cacgcugcauccuaaggc

SEQ ID NO: 574145 - RNA, 21 nt, Human
cacugaauagcugaaaggcuc

SEQ ID NO: 574146 - RNA, 21 nt, Human
cagaaugugcauaaaagucuc

SEQ ID NO: 574147 - RNA, 21 nt, Human
cagacacauacacaaaaccac

SEQ ID NO: 574148 - RNA, 25 nt, Human
cagagcacuccauccuauuuuaccc

SEQ ID NO: 574149 - RNA, 22 nt, Human
cagagcagcagaaguacuuuuc

SEQ ID NO: 574150 - RNA, 19 nt, Human
cagaggagguuggagagcu

SEQ ID NO: 574151 - RNA, 22 nt, Human
cauacgccuaaucgagaaauca

SEQ ID NO: 574152 - RNA, 22 nt, Human
cauggaauaaauggaagcacua

SEQ ID NO: 574153 - RNA, 18 nt, Human
cauuuugccacccugcuc

SEQ ID NO: 574154 - RNA, 18 nt, Human
ccaaagugcuauuacagg

SEQ ID NO: 574155 - RNA, 24 nt, Human
ccacgcugaacucacacgugcccg

SEQ ID NO: 574156 - RNA, 21 nt, Human
cccaaaugaucaacagagcac

SEQ ID NO: 574157 - RNA, 19 nt, Human
cccaaccacggugacaaag

SEQ ID NO: 574158 - RNA, 21 nt, Human
cccacaguuccaaagugcuau

SEQ ID NO: 574159 - RNA, 21 nt, Human
ccccagcuugaugaacaccau

SEQ ID NO: 574160 - RNA, 21 nt, Human
ccccggaacuccuccgugcac

SEQ ID NO: 574161 - RNA, 18 nt, Human
ccccguacagaaccuguc

SEQ ID NO: 574162 - RNA, 20 nt, Human
cccucaaaaccagcuugugg

SEQ ID NO: 574163 - RNA, 21 nt, Human
ccgcaggguuaggggcauagg

SEQ ID NO: 574164 - RNA, 18 nt, Human
ccuauccaacguuuagga

SEQ ID NO: 574165 - RNA, 19 nt, Human
ccuuuuccauuuugccacc

SEQ ID NO: 574166 - RNA, 21 nt, Human
cggagcagcagcgcucaacuc

SEQ ID NO: 574167 - RNA, 19 nt, Human
cucaaaucaaagaaaaagc

SEQ ID NO: 574168 - RNA, 21 nt, Human
cucaaaucaaagaaaaagcac

SEQ ID NO: 574169 - RNA, 22 nt, Human
cucaaugcugagaaauuacucc

SEQ ID NO: 574170 - RNA, 18 nt, Human
cuccugggcccagaaguu

SEQ ID NO: 574171 - RNA, 18 nt, Human
cugaaacucuccccgucu

SEQ ID NO: 574172 - RNA, 20 nt, Human
cuggcccccggaacuccucc

SEQ ID NO: 574173 - RNA, 24 nt, Human
cuguaccucaaaucaaagaaaaag

SEQ ID NO: 574174 - RNA, 20 nt, Human
cuuaaacuagaagcugcagc

SEQ ID NO: 574175 - RNA, 20 nt, Human
gaaaaaaauaaaacaaagag

SEQ ID NO: 574176 - RNA, 22 nt, Human
gacaaagcucccucgcccaaag

SEQ ID NO: 574177 - RNA, 19 nt, Human
gacccagugagcagcugga

SEQ ID NO: 574178 - RNA, 23 nt, Human
gcugcugcuggugaaguagaaca

SEQ ID NO: 574179 - RNA, 21 nt, Human
gcuuucccugggaccaacaga

SEQ ID NO: 574180 - RNA, 24 nt, Human
ggacagggaaacauucgcauaauu

SEQ ID NO: 574181 - RNA, 23 nt, Human
ggaguuaggugggucaaagcuga

SEQ ID NO: 574182 - RNA, 24 nt, Human
ggucacuacacuaacagacccaga

SEQ ID NO: 574183 - RNA, 24 nt, Human
ggucauucuugcugcugugggugu

SEQ ID NO: 574184 - RNA, 20 nt, Human
ggugugaguaaaaugcuuag

SEQ ID NO: 574185 - RNA, 23 nt, Human
gugaaguaaauuaaacaugcccc

SEQ ID NO: 574186 - RNA, 19 nt, Human
guguuucaagacaucuguu

SEQ ID NO: 574187 - RNA, 18 nt, Human
uaagauggaggccuccgc

SEQ ID NO: 574188 - RNA, 21 nt, Human
uaaggcacaaaucagguaacc

SEQ ID NO: 574189 - RNA, 26 nt, Human
uacaauaaaacacauagacacugaag

SEQ ID NO: 574190 - RNA, 23 nt, Human
uacaccaacauggaauaaaugga

SEQ ID NO: 574191 - RNA, 24 nt, Human
uacacuaacagacccagaugacac

SEQ ID NO: 574192 - RNA, 19 nt, Human
uacuaagauggaggccucc

SEQ ID NO: 574193 - RNA, 25 nt, Human
uacuucagaacacagaugaaaccaa

SEQ ID NO: 574194 - RNA, 22 nt, Human
uagcaaauucuaagaauucaua

SEQ ID NO: 574195 - RNA, 23 nt, Human
uagcugaaaggcucgcugaaauc

SEQ ID NO: 574196 - RNA, 21 nt, Human
uagcuuggaauuuaaguuucu

SEQ ID NO: 574197 - RNA, 22 nt, Human
uaucucaagaacaagggcagcc

SEQ ID NO: 574198 - RNA, 21 nt, Human
uauuauaacuuuuaaaauugc

SEQ ID NO: 574199 - RNA, 24 nt, Human
ucaaagguccuuuucuccuuuucu

SEQ ID NO: 574200 - RNA, 22 nt, Human
ucaacaucuguguugguaaacu

SEQ ID NO: 574201 - RNA, 23 nt, Human
ucaauaaacuucucaacaucugu

SEQ ID NO: 574202 - RNA, 22 nt, Human
ucacuacacuaacagacccaga

SEQ ID NO: 574203 - RNA, 24 nt, Human
ucagaacacagaugaaaccaaaag

SEQ ID NO: 574204 - RNA, 22 nt, Human
ucagugccuuucaauaaacuuc

SEQ ID NO: 574205 - RNA, 23 nt, Human
uccucaaaagaaaauuuccuugc

SEQ ID NO: 574206 - RNA, 18 nt, Human
uccugcuguguguauggc

SEQ ID NO: 574207 - RNA, 20 nt, Human
uccugggcccagaaguuguc

SEQ ID NO: 574208 - RNA, 19 nt, Human
uccuuggaaguauggaagg

SEQ ID NO: 574209 - RNA, 20 nt, Human
ucuugcccacgcugaacuca

SEQ ID NO: 574210 - RNA, 25 nt, Human
ugaaguaaauuaaacaugccccucg

SEQ ID NO: 574211 - RNA, 25 nt, Human
ugaauaucaucagacacauacacaa

SEQ ID NO: 574212 - RNA, 18 nt, Human
ugaaugacagaaugugca

SEQ ID NO: 574213 - RNA, 19 nt, Human
ugaauuaacgcugcugcug

SEQ ID NO: 574214 - RNA, 21 nt, Human
ugacagaaugugcauaaaagu

SEQ ID NO: 574215 - RNA, 22 nt, Human
ugagauguaucaagaauacauc

SEQ ID NO: 574216 - RNA, 19 nt, Human
ugagccuagacaaaggugg

SEQ ID NO: 574217 - RNA, 22 nt, Human
ugcagcagcgggaggaagggcu

SEQ ID NO: 574218 - RNA, 19 nt, Human
ugcauaaaagucucuugcc

SEQ ID NO: 574219 - RNA, 19 nt, Human
ugccucagggaauuuucca

SEQ ID NO: 574220 - RNA, 20 nt, Human
ugccucagggaauuuuccag

SEQ ID NO: 574221 - RNA, 21 nt, Human
ugccucagggaauuuuccagu

SEQ ID NO: 574222 - RNA, 25 nt, Human
ugcuauuacagguggaauaucuggu

SEQ ID NO: 574223 - RNA, 18 nt, Human
uggaagaaagaggcauuu

SEQ ID NO: 574224 - RNA, 24 nt, Human
uggcaaaaugacucagacccacaa

SEQ ID NO: 574225 - RNA, 21 nt, Human
uggcaagaaaugagaggaguu

SEQ ID NO: 574226 - RNA, 24 nt, Human
uggcaagaaaugagaggaguucaa

SEQ ID NO: 574227 - RNA, 23 nt, Human
uggccagugaguuuugccucagg

SEQ ID NO: 574228 - RNA, 21 nt, Human
ugucuucuauauucucuccca

SEQ ID NO: 574229 - RNA, 23 nt, Human
uguggaaugggggcuacccuuuu

SEQ ID NO: 574230 - RNA, 25 nt, Human
uguggaaugggggcuacccuuuuua

SEQ ID NO: 574231 - RNA, 23 nt, Human
uuagagcaagaucacccucaaaa

SEQ ID NO: 574232 - RNA, 19 nt, Human
uucaaaacccauacgcccu

SEQ ID NO: 574233 - RNA, 19 nt, Human
uucacuuuaaguuauaugc

SEQ ID NO: 574234 - RNA, 18 nt, Human
uuccucauaaacgguucc

SEQ ID NO: 574235 - RNA, 23 nt, Human
uuccugaguggggaaaaccgcug

SEQ ID NO: 574236 - RNA, 21 nt, Human
uuccuuuuccauuuugccacc

SEQ ID NO: 574237 - RNA, 18 nt, Human
uuggaaguauggaaggag

SEQ ID NO: 574238 - RNA, 29 nt, Human
uuggagagcuaugaauucaacaaggaaga

SEQ ID NO: 574239 - RNA, 23 nt, Human
uuucauuguggucuggucagauu

SEQ ID NO: 574240 - RNA, 19 nt, Human
uuuuuaauagcaaauucua

SEQ ID NO: 574241 - RNA, 24 nt, Human
aaaaaacaacaacaaaaaagcaau

SEQ ID NO: 574242 - RNA, 23 nt, Human
aaaaauuucuggaauauuaguac

SEQ ID NO: 574243 - RNA, 23 nt, Human
aaaaugcaacacaauucuuugaa

SEQ ID NO: 574244 - RNA, 21 nt, Human
aaacagcagaaaacaggagga

SEQ ID NO: 574245 - RNA, 18 nt, Human
aaacaggaggaacuuagg

SEQ ID NO: 574246 - RNA, 25 nt, Human
aaacaggcauucuucuacacaaaca

SEQ ID NO: 574247 - RNA, 19 nt, Human
aaacuugaaaaguguggca

SEQ ID NO: 574248 - RNA, 21 nt, Human
aaagauuuaagcaguagacac

SEQ ID NO: 574249 - RNA, 22 nt, Human
aaagcuagguugaauaggacug

SEQ ID NO: 574250 - RNA, 19 nt, Human
aaaguauacauuacccagg

SEQ ID NO: 574251 - RNA, 19 nt, Human
aacagauaaaacuccaaau

SEQ ID NO: 574252 - RNA, 18 nt, Human
aacuuaggccaucaaugg

SEQ ID NO: 574253 - RNA, 23 nt, Human
aagcauuuauacacaugaaaaug

SEQ ID NO: 574254 - RNA, 24 nt, Human
aaugcaacacaauucuuugaaagg

SEQ ID NO: 574255 - RNA, 23 nt, Human
acauacuccaaaauccccauaau

SEQ ID NO: 574256 - RNA, 18 nt, Human
acccugacaggaaccgcu

SEQ ID NO: 574257 - RNA, 19 nt, Human
accucaacaaagaugguac

SEQ ID NO: 574258 - RNA, 18 nt, Human
agaaaacaggaggaacuu

SEQ ID NO: 574259 - RNA, 21 nt, Human
agaaaacaggaggaacuuagg

SEQ ID NO: 574260 - RNA, 18 nt, Human
agaauaaaaacagccuga

SEQ ID NO: 574261 - RNA, 19 nt, Human
agcaaacaacaaagacugc

SEQ ID NO: 574262 - RNA, 25 nt, Human
agccaccagcgccaccgccacagcc

SEQ ID NO: 574263 - RNA, 22 nt, Human
agcgccaccgccacagccaccu

SEQ ID NO: 574264 - RNA, 20 nt, Human
agggaagaagcaaacaacaa

SEQ ID NO: 574265 - RNA, 22 nt, Human
agggaagaagcaaacaacaaag

SEQ ID NO: 574266 - RNA, 21 nt, Human
auaaaacuugaaaaguguggc

SEQ ID NO: 574267 - RNA, 24 nt, Human
auaaagccuauaagaaaaagaaau

SEQ ID NO: 574268 - RNA, 23 nt, Human
auacacauauacagcuucauaug

SEQ ID NO: 574269 - RNA, 24 nt, Human
auaguuccugaaaauuaaugcauc

SEQ ID NO: 574270 - RNA, 22 nt, Human
aucaaacagcagaaaacaggag

SEQ ID NO: 574271 - RNA, 23 nt, Human
auuaaucaaaaguauacauuacc

SEQ ID NO: 574272 - RNA, 19 nt, Human
caaacagcagaaaacagga

SEQ ID NO: 574273 - RNA, 27 nt, Human
caaagaacacaccaaauaccggggccc

SEQ ID NO: 574274 - RNA, 20 nt, Human
caaauaacuguacuggauaa

SEQ ID NO: 574275 - RNA, 24 nt, Human
caacaaagaugguacuuuaagcau

SEQ ID NO: 574276 - RNA, 22 nt, Human
cagaauaaaaacagccugagua

SEQ ID NO: 574277 - RNA, 21 nt, Human
cagagacuauaugaauguucc

SEQ ID NO: 574278 - RNA, 22 nt, Human
cagauaucagcauucgaaagcu

SEQ ID NO: 574279 - RNA, 20 nt, Human
cagcagaaaacaggaggaaa

SEQ ID NO: 574280 - RNA, 24 nt, Human
caggauaaccauacaucaaguacu

SEQ ID NO: 574281 - RNA, 22 nt, Human
cagguggaccacccagggggcc

SEQ ID NO: 574282 - RNA, 23 nt, Human
caguaaaaaaacaacaacaaaaa

SEQ ID NO: 574283 - RNA, 22 nt, Human
caguagacacaagucacaugaa

SEQ ID NO: 574284 - RNA, 24 nt, Human
ccaacuucaaaaugacauacuaac

SEQ ID NO: 574285 - RNA, 18 nt, Human
ccacccagggggcccgcc

SEQ ID NO: 574286 - RNA, 21 nt, Human
ccagcgccaccgccacagcca

SEQ ID NO: 574287 - RNA, 22 nt, Human
cccccaacaauguauccccgaa

SEQ ID NO: 574288 - RNA, 20 nt, Human
ccccgaaaauaaacugccaa

SEQ ID NO: 574289 - RNA, 23 nt, Human
ccgccacagccaccuccgcugua

SEQ ID NO: 574290 - RNA, 21 nt, Human
ccgccgccgccgccgcagcca

SEQ ID NO: 574291 - RNA, 25 nt, Human
ccgccgccgccgccgcagccaccag

SEQ ID NO: 574292 - RNA, 18 nt, Human
ccgcugccgccgccgccg

SEQ ID NO: 574293 - RNA, 22 nt, Human
ccuaagcaggaccuacccaacc

SEQ ID NO: 574294 - RNA, 20 nt, Human
ccuauaugcaaaaguggaau

SEQ ID NO: 574295 - RNA, 24 nt, Human
cgccgcugccgccgccgccgccgg

SEQ ID NO: 574296 - RNA, 22 nt, Human
cgcgauuugcagguggaccacc

SEQ ID NO: 574297 - RNA, 18 nt, Human
cuucagaauaaauaauau

SEQ ID NO: 574298 - RNA, 23 nt, Human
gaaauuucaggauaaccauacau

SEQ ID NO: 574299 - RNA, 22 nt, Human
gagaaagugcugaaagggcucu

SEQ ID NO: 574300 - RNA, 23 nt, Human
gaugagaaagugcugaaagggcu

SEQ ID NO: 574301 - RNA, 18 nt, Human
gccacagccaccuccgcu

SEQ ID NO: 574302 - RNA, 18 nt, Human
ggaugguaguccuccuua

SEQ ID NO: 574303 - RNA, 21 nt, Human
uaaaacagauaaaacuccaaa

SEQ ID NO: 574304 - RNA, 20 nt, Human
uaaaagucauuaugaaacac

SEQ ID NO: 574305 - RNA, 19 nt, Human
uaaaauaauucauuaguaa

SEQ ID NO: 574306 - RNA, 25 nt, Human
uaaagauuuaagcaguagacacaag

SEQ ID NO: 574307 - RNA, 20 nt, Human
uaacauaggacauacuaacc

SEQ ID NO: 574308 - RNA, 21 nt, Human
uaacauaggacauacuaacca

SEQ ID NO: 574309 - RNA, 19 nt, Human
uaacuaaagagaaugugca

SEQ ID NO: 574310 - RNA, 20 nt, Human
uaacuaaagagaaugugcau

SEQ ID NO: 574311 - RNA, 26 nt, Human
uaacuaaagagaaugugcauacacau

SEQ ID NO: 574312 - RNA, 19 nt, Human
uaacugaaggaaaauauaa

SEQ ID NO: 574313 - RNA, 28 nt, Human
uaagaaaaagaaaugucuucccuccccc

SEQ ID NO: 574314 - RNA, 18 nt, Human
uaagcaggaccuacccaa

SEQ ID NO: 574315 - RNA, 21 nt, Human
uaagcaggaccuacccaacca

SEQ ID NO: 574316 - RNA, 24 nt, Human
uaauacauauuuucaugcaugugg

SEQ ID NO: 574317 - RNA, 18 nt, Human
uaccugcagaauaaaaac

SEQ ID NO: 574318 - RNA, 21 nt, Human
uacguauuauaauuuaucaug

SEQ ID NO: 574319 - RNA, 19 nt, Human
uagaaugccauuucagcag

SEQ ID NO: 574320 - RNA, 21 nt, Human
uagacaaagaacacaccaaaa

SEQ ID NO: 574321 - RNA, 23 nt, Human
uagacaaagaacacaccaaauac

SEQ ID NO: 574322 - RNA, 18 nt, Human
uagagaucaaacagcaga

SEQ ID NO: 574323 - RNA, 23 nt, Human
uagggaagaagcaaacaacaaag

SEQ ID NO: 574324 - RNA, 22 nt, Human
uauuaaccauuacauuguuuuu

SEQ ID NO: 574325 - RNA, 21 nt, Human
ucaaaacacuuaccugcagaa

SEQ ID NO: 574326 - RNA, 23 nt, Human
ucauauguuauauaaaacuugaa

SEQ ID NO: 574327 - RNA, 23 nt, Human
ucauguacauacuccaaaauccc

SEQ ID NO: 574328 - RNA, 23 nt, Human
uccacaaaauacauacacauaua

SEQ ID NO: 574329 - RNA, 20 nt, Human
ucccccaacaauguaucccc

SEQ ID NO: 574330 - RNA, 21 nt, Human
ucccccaacaauguauccccg

SEQ ID NO: 574331 - RNA, 22 nt, Human
ucccccaacaauguauccccga

SEQ ID NO: 574332 - RNA, 21 nt, Human
uccccgaaaauaaacugccaa

SEQ ID NO: 574333 - RNA, 25 nt, Human
uccuaagcaggaccuacccaaccac

SEQ ID NO: 574334 - RNA, 25 nt, Human
uccuuaaacagcacagacucaaucu

SEQ ID NO: 574335 - RNA, 21 nt, Human
ucuccauuaagcauuuacaug

SEQ ID NO: 574336 - RNA, 18 nt, Human
ucuuucucugaauccuga

SEQ ID NO: 574337 - RNA, 24 nt, Human
ugaaaacagucuccauuaagcauu

SEQ ID NO: 574338 - RNA, 21 nt, Human
ugaaaaguguggcacauuucu

SEQ ID NO: 574339 - RNA, 24 nt, Human
ugaaacacacauucuuuuaacuga

SEQ ID NO: 574340 - RNA, 24 nt, Human
ugaaaucaaagcuaagcuugacaa

SEQ ID NO: 574341 - RNA, 19 nt, Human
ugaaggacugacaaaacag

SEQ ID NO: 574342 - RNA, 20 nt, Human
ugacaggaaccgcucgagcg

SEQ ID NO: 574343 - RNA, 19 nt, Human
ugagcauaaagccuauaag

SEQ ID NO: 574344 - RNA, 26 nt, Human
ugauuuaaaauauaacugaaggaaaa

SEQ ID NO: 574345 - RNA, 21 nt, Human
ugcagaauaaaaacagccuga

SEQ ID NO: 574346 - RNA, 24 nt, Human
uggaaagaguggcagaaaccccuc

SEQ ID NO: 574347 - RNA, 22 nt, Human
uggcagaaaccccucuccccca

SEQ ID NO: 574348 - RNA, 23 nt, Human
uggcagaaaccccucucccccaa

SEQ ID NO: 574349 - RNA, 25 nt, Human
ugggugcauuuaaaaugcaacacaa

SEQ ID NO: 574350 - RNA, 19 nt, Human
uguaaaacagauaaaacuc

SEQ ID NO: 574351 - RNA, 25 nt, Human
uuaaaguaugucuuaggaaaaccaa

SEQ ID NO: 574352 - RNA, 23 nt, Human
uucauauguuauauaaaacuuga

SEQ ID NO: 574353 - RNA, 20 nt, Human
uuuuagaaaaguuaugugcc

SEQ ID NO: 574354 - RNA, 18 nt, Human
aaaagaaaagacguagcc

SEQ ID NO: 574355 - RNA, 24 nt, Human
aaaagaacaguucucaaauauugc

SEQ ID NO: 574356 - RNA, 26 nt, Human
aagaaaaaaaaagaacaguucucaaa

SEQ ID NO: 574357 - RNA, 20 nt, Human
acaguuugaagagacuaaau

SEQ ID NO: 574358 - RNA, 25 nt, Human
accgcugugcaacucaacgcugcgc

SEQ ID NO: 574359 - RNA, 22 nt, Human
acuaaaagcauacuaaaaacac

SEQ ID NO: 574360 - RNA, 18 nt, Human
agaacaguucucaaauau

SEQ ID NO: 574361 - RNA, 24 nt, Human
aggcaaaagaaaagacguagccaa

SEQ ID NO: 574362 - RNA, 21 nt, Human
augaaacagaggaggaccaaa

SEQ ID NO: 574363 - RNA, 20 nt, Human
auggaauaugcuguauaucc

SEQ ID NO: 574364 - RNA, 24 nt, Human
cauacuaaaaacacuuuaucguca

SEQ ID NO: 574365 - RNA, 28 nt, Human
cauagaacguucaucaaggcaaaagaaa

SEQ ID NO: 574366 - RNA, 22 nt, Human
ccccaguuacaagagacuaaaa

SEQ ID NO: 574367 - RNA, 19 nt, Human
ccuaaaaaaaaaacacugc

SEQ ID NO: 574368 - RNA, 21 nt, Human
cuaaaagcauacuaaaaacac

SEQ ID NO: 574369 - RNA, 18 nt, Human
uaaaaacacuuuaucguc

SEQ ID NO: 574370 - RNA, 19 nt, Human
uaaauacacauccuaaaug

SEQ ID NO: 574371 - RNA, 20 nt, Human
uaaauacacauccuaaaugg

SEQ ID NO: 574372 - RNA, 24 nt, Human
uaaaugcauuaaauacacauccua

SEQ ID NO: 574373 - RNA, 18 nt, Human
uacaagagacuaaaagca

SEQ ID NO: 574374 - RNA, 22 nt, Human
uagaacguucaucaaggcaaaa

SEQ ID NO: 574375 - RNA, 24 nt, Human
uagccaacaauggaaagauggcac

SEQ ID NO: 574376 - RNA, 23 nt, Human
uauacacaguuugaagagacuaa

SEQ ID NO: 574377 - RNA, 24 nt, Human
uccuaaaaaaaaaacacugcuucu

SEQ ID NO: 574378 - RNA, 22 nt, Human
ugaagagacuaaaugccagaga

SEQ ID NO: 574379 - RNA, 19 nt, Human
ugagaauaccgcugugcaa

SEQ ID NO: 574380 - RNA, 20 nt, Human
uggcacacacaagaaaaaaa

SEQ ID NO: 574381 - RNA, 24 nt, Human
uggcacacacaagaaaaaaaaaga

SEQ ID NO: 574382 - RNA, 19 nt, Human
uguggccggcacuguggcc

SEQ ID NO: 574383 - RNA, 19 nt, Human
uugaagagacuaaaugcca

SEQ ID NO: 574384 - RNA, 21 nt, Human
aagacagccagccagucaccu

SEQ ID NO: 574385 - RNA, 19 nt, Human
aagagccaccucuucacuc

SEQ ID NO: 574386 - RNA, 22 nt, Human
accucuuggaaaacuucuccug

SEQ ID NO: 574387 - RNA, 24 nt, Human
agaagaaaaugagccugaaguuga

SEQ ID NO: 574388 - RNA, 21 nt, Human
agccagugagggacugcagga

SEQ ID NO: 574389 - RNA, 22 nt, Human
aggcaaguaaacgaaaccaaag

SEQ ID NO: 574390 - RNA, 24 nt, Human
agguggcuugugagggcagccagu

SEQ ID NO: 574391 - RNA, 19 nt, Human
augaaccucuuggaaaacu

SEQ ID NO: 574392 - RNA, 21 nt, Human
auggccucucaugccacuccu

SEQ ID NO: 574393 - RNA, 24 nt, Human
auggccucucaugccacuccucag

SEQ ID NO: 574394 - RNA, 20 nt, Human
caagacagccagccagucac

SEQ ID NO: 574395 - RNA, 22 nt, Human
caagacagccagccagucaccu

SEQ ID NO: 574396 - RNA, 21 nt, Human
caaguaaacgaaaccaaaggc

SEQ ID NO: 574397 - RNA, 19 nt, Human
cacuccuuaagccagagga

SEQ ID NO: 574398 - RNA, 21 nt, Human
cagaggacaccacaaagacac

SEQ ID NO: 574399 - RNA, 22 nt, Human
cagugcugggaauaaguccaga

SEQ ID NO: 574400 - RNA, 27 nt, Human
ccagaccauuucccucaagagccaccu

SEQ ID NO: 574401 - RNA, 24 nt, Human
ccagaggacaccacaaagacacag

SEQ ID NO: 574402 - RNA, 24 nt, Human
ccucaagagccaccucuucacucc

SEQ ID NO: 574403 - RNA, 24 nt, Human
ccucuucacuccuuaagccagagg

SEQ ID NO: 574404 - RNA, 19 nt, Human
cucagaguagaaaaugcag

SEQ ID NO: 574405 - RNA, 18 nt, Human
cugggacugaugcaagac

SEQ ID NO: 574406 - RNA, 26 nt, Human
cuuggaaaacuucuccugucccacuu

SEQ ID NO: 574407 - RNA, 20 nt, Human
gccagucaccuccgccuccc

SEQ ID NO: 574408 - RNA, 19 nt, Human
gccugggacugaugcaaga

SEQ ID NO: 574409 - RNA, 24 nt, Human
uagcagucacugaacuccucaaac

SEQ ID NO: 574410 - RNA, 22 nt, Human
uaggcaaguaaacgaaaccaaa

SEQ ID NO: 574411 - RNA, 24 nt, Human
uaggcaaguaaacgaaaccaaagg

SEQ ID NO: 574412 - RNA, 24 nt, Human
ucaauagcagucacugaacuccuc

SEQ ID NO: 574413 - RNA, 21 nt, Human
uccagaccauuucccucaaga

SEQ ID NO: 574414 - RNA, 22 nt, Human
ucccacuucugucacccuccag

SEQ ID NO: 574415 - RNA, 18 nt, Human
ucccaugaaccucuugga

SEQ ID NO: 574416 - RNA, 19 nt, Human
uccucagguggcuugugag

SEQ ID NO: 574417 - RNA, 18 nt, Human
ucugucacccuccagcuc

SEQ ID NO: 574418 - RNA, 18 nt, Human
ugagaagaaaaugagccu

SEQ ID NO: 574419 - RNA, 20 nt, Human
ugagggcagccagugagggg

SEQ ID NO: 574420 - RNA, 19 nt, Human
ugccugaaacagugcuggg

SEQ ID NO: 574421 - RNA, 24 nt, Human
uggaaaacuucuccugucccacuu

SEQ ID NO: 574422 - RNA, 23 nt, Human
uggguucacuuuaccauauuuug

SEQ ID NO: 574423 - RNA, 23 nt, Human
uuaauggccucucaugccacucc

SEQ ID NO: 574424 - RNA, 27 nt, Human
uucacuccuuaagccagaggacaccac

SEQ ID NO: 574425 - RNA, 18 nt, Human
aaaggcaucuucuacaaa

SEQ ID NO: 574426 - RNA, 22 nt, Human
aagcaguuagaacauaccuuga

SEQ ID NO: 574427 - RNA, 23 nt, Human
aaguagguggcuacucaguccau

SEQ ID NO: 574428 - RNA, 24 nt, Human
aauuuaaaacucuggaaacaauuu

SEQ ID NO: 574429 - RNA, 21 nt, Human
aggaagaaaggcaucuucuac

SEQ ID NO: 574430 - RNA, 24 nt, Human
aggaauuuuuggaaaaagaaaauc

SEQ ID NO: 574431 - RNA, 23 nt, Human
aggcacauaaauaauuuaaaacu

SEQ ID NO: 574432 - RNA, 20 nt, Human
aguuagauccaucuugggag

SEQ ID NO: 574433 - RNA, 23 nt, Human
auacaguucacuuuuaaucauuc

SEQ ID NO: 574434 - RNA, 21 nt, Human
aucuucuacaaacccuauuca

SEQ ID NO: 574435 - RNA, 19 nt, Human
caaaggcuaggcuaaaagc

SEQ ID NO: 574436 - RNA, 25 nt, Human
caacaggcacauaaauaauuuaaaa

SEQ ID NO: 574437 - RNA, 24 nt, Human
caauggcagaugaugccaaaguca

SEQ ID NO: 574438 - RNA, 18 nt, Human
cacaccugagaccgcccc

SEQ ID NO: 574439 - RNA, 24 nt, Human
caucaauggcagaugaugccaaag

SEQ ID NO: 574440 - RNA, 18 nt, Human
ccgccccagcccgcggcg

SEQ ID NO: 574441 - RNA, 19 nt, Human
ccgcgaggcgaaacggguc

SEQ ID NO: 574442 - RNA, 23 nt, Human
ccuucuauguacaucuguccuag

SEQ ID NO: 574443 - RNA, 23 nt, Human
cuaauacaauacaaugaaccaaa

SEQ ID NO: 574444 - RNA, 24 nt, Human
cucauuucugucaaaggcuaggcu

SEQ ID NO: 574445 - RNA, 25 nt, Human
gcauaggcuccaaagcaugaccugc

SEQ ID NO: 574446 - RNA, 18 nt, Human
gcccgaugauugagcaga

SEQ ID NO: 574447 - RNA, 19 nt, Human
gcuaaaagcuuuuugaggg

SEQ ID NO: 574448 - RNA, 19 nt, Human
gcuuuuugagggucacacu

SEQ ID NO: 574449 - RNA, 23 nt, Human
ggaagaaaggcaucuucuacaaa

SEQ ID NO: 574450 - RNA, 28 nt, Human
ggacacaguaaagaguuaaccgguaccc

SEQ ID NO: 574451 - RNA, 27 nt, Human
gugcauaggcuccaaagcaugaccugc

SEQ ID NO: 574452 - RNA, 20 nt, Human
guggaagugaugacagcucc

SEQ ID NO: 574453 - RNA, 23 nt, Human
uaacccagcuuccucggggacac

SEQ ID NO: 574454 - RNA, 21 nt, Human
uaagaaacuuaauuacuaguu

SEQ ID NO: 574455 - RNA, 19 nt, Human
uaauacaauacaaugaacc

SEQ ID NO: 574456 - RNA, 23 nt, Human
uacaauacaaugaaccaaacagg

SEQ ID NO: 574457 - RNA, 24 nt, Human
uacaugcuguuccucccagcaagg

SEQ ID NO: 574458 - RNA, 20 nt, Human
ucacacucguuccuuuugua

SEQ ID NO: 574459 - RNA, 23 nt, Human
ucaccaaaugaaaguaauugugc

SEQ ID NO: 574460 - RNA, 24 nt, Human
ucaguugccaugccuaacaaaccc

SEQ ID NO: 574461 - RNA, 25 nt, Human
uccaaaaaacaguuucuucccauuu

SEQ ID NO: 574462 - RNA, 20 nt, Human
ucucuaaacaacgcgaggug

SEQ ID NO: 574463 - RNA, 24 nt, Human
ucuucuacaaacccuauucaaaag

SEQ ID NO: 574464 - RNA, 19 nt, Human
ugaaaucaucaaaauacaa

SEQ ID NO: 574465 - RNA, 21 nt, Human
ugaccagagcuucggcacacc

SEQ ID NO: 574466 - RNA, 22 nt, Human
ugcuaccaaguccucuuugaag

SEQ ID NO: 574467 - RNA, 24 nt, Human
uggaagcaguuagaacauaccuug

SEQ ID NO: 574468 - RNA, 19 nt, Human
uggaagucaccaaaugaaa

SEQ ID NO: 574469 - RNA, 19 nt, Human
uggcagaugaugccaaagu

SEQ ID NO: 574470 - RNA, 23 nt, Human
uggccagcucuuuaaaaaguuua

SEQ ID NO: 574471 - RNA, 22 nt, Human
uguccuagugcuuuugaguguu

SEQ ID NO: 574472 - RNA, 18 nt, Human
uuacaugcuguuccuccc

SEQ ID NO: 574473 - RNA, 23 nt, Human
uuacaugcuguuccucccagcaa

SEQ ID NO: 574474 - RNA, 18 nt, Human
uuagaacauaccuugaga

SEQ ID NO: 574475 - RNA, 18 nt, Human
uuccucccagcaaggccc

SEQ ID NO: 574476 - RNA, 20 nt, Human
uuccucccagcaaggcccca

SEQ ID NO: 574477 - RNA, 20 nt, Human
uucggcacaccugagaccgc

SEQ ID NO: 574478 - RNA, 19 nt, Human
uuuuguauuaacuuuuauu

SEQ ID NO: 574479 - RNA, 27 nt, Human
aaaaaagccaaacauccuuaacuuaag

SEQ ID NO: 574480 - RNA, 22 nt, Human
aaaaagaagaaaagaaagaaaa

SEQ ID NO: 574481 - RNA, 23 nt, Human
aaaagaagaaaagaaagaaaaag

SEQ ID NO: 574482 - RNA, 24 nt, Human
aaaauaaaaaagaagaaaagaaga

SEQ ID NO: 574483 - RNA, 23 nt, Human
aaaauaaaaaucgcuagauggag

SEQ ID NO: 574484 - RNA, 22 nt, Human
aaaauuccuuuaaaaaaaaagc

SEQ ID NO: 574485 - RNA, 20 nt, Human
aaacauccuuaacuuaagaa

SEQ ID NO: 574486 - RNA, 19 nt, Human
aaagaagaaaagaaagaaa

SEQ ID NO: 574487 - RNA, 19 nt, Human
aagaaaaaggaagagacac

SEQ ID NO: 574488 - RNA, 18 nt, Human
aagaagaaaagaaagaaa

SEQ ID NO: 574489 - RNA, 20 nt, Human
aagaagaaaagaaagaaaaa

SEQ ID NO: 574490 - RNA, 21 nt, Human
aagaagaaaagaaagaaaaag

SEQ ID NO: 574491 - RNA, 23 nt, Human
aagaagaaaagaaagaaaaagga

SEQ ID NO: 574492 - RNA, 25 nt, Human
aagaagaaaagaaagaaaaaggaag

SEQ ID NO: 574493 - RNA, 21 nt, Human
aaggaagagacacuuaaaaaa

SEQ ID NO: 574494 - RNA, 20 nt, Human
agaaaaaagccaaacauccu

SEQ ID NO: 574495 - RNA, 23 nt, Human
agaaaagaaagaaaaaggaagag

SEQ ID NO: 574496 - RNA, 26 nt, Human
agaagaaaagaaagaaaaaggaagag

SEQ ID NO: 574497 - RNA, 19 nt, Human
agaagcggcggguggaugg

SEQ ID NO: 574498 - RNA, 20 nt, Human
aggaagagacacuuaaaaaa

SEQ ID NO: 574499 - RNA, 23 nt, Human
cagccucaguaucuagaaaugau

SEQ ID NO: 574500 - RNA, 26 nt, Human
cauccuuaacuuaagaaacuuaagga

SEQ ID NO: 574501 - RNA, 21 nt, Human
cucugcgcuaggacccuaaac

SEQ ID NO: 574502 - RNA, 21 nt, Human
cugcaaagcaaugccaaaaaa

SEQ ID NO: 574503 - RNA, 19 nt, Human
cuggcuauucuugcacucc

SEQ ID NO: 574504 - RNA, 24 nt, Human
gaacauaugucaaaaucggaaaug

SEQ ID NO: 574505 - RNA, 23 nt, Human
ggaguuuucacaauuccuaaguc

SEQ ID NO: 574506 - RNA, 19 nt, Human
ggaugggaagauaucaacu

SEQ ID NO: 574507 - RNA, 22 nt, Human
ggcaggaauauaaagaaccuca

SEQ ID NO: 574508 - RNA, 24 nt, Human
uaaaaaauuaaagaaaaaagccaa

SEQ ID NO: 574509 - RNA, 18 nt, Human
uagaaaggaggcuaacug

SEQ ID NO: 574510 - RNA, 22 nt, Human
uaggacccuaaacuguauguua

SEQ ID NO: 574511 - RNA, 18 nt, Human
uauaaagaaccucaauaa

SEQ ID NO: 574512 - RNA, 22 nt, Human
uauaaugauggggugaaaaguu

SEQ ID NO: 574513 - RNA, 18 nt, Human
ucaguacauucuuugugg

SEQ ID NO: 574514 - RNA, 19 nt, Human
uccacugccacagaacuag

SEQ ID NO: 574515 - RNA, 20 nt, Human
ucugcaaagcaaugccaaaa

SEQ ID NO: 574516 - RNA, 19 nt, Human
ucugcgcuaggacccuaaa

SEQ ID NO: 574517 - RNA, 25 nt, Human
ugaaaaauuucuuagacauccacuu

SEQ ID NO: 574518 - RNA, 19 nt, Human
ugaaagaagggauaugcag

SEQ ID NO: 574519 - RNA, 23 nt, Human
ugcacuccuaacauaggaaaaug

SEQ ID NO: 574520 - RNA, 20 nt, Human
ugguauaaugauggggugaa

SEQ ID NO: 574521 - RNA, 19 nt, Human
uuaaagaaaaaagccaaac

SEQ ID NO: 574522 - RNA, 19 nt, Human
acuggauucuguuuuuaau

SEQ ID NO: 574523 - RNA, 18 nt, Human
ccgccucuguaccuucgc

SEQ ID NO: 574524 - RNA, 19 nt, Human
ccuggcgaaaaaggaaucc

SEQ ID NO: 574525 - RNA, 19 nt, Human
cgccuggacgacugaggag

SEQ ID NO: 574526 - RNA, 24 nt, Human
ugggggaggaaagcauauuguuug

SEQ ID NO: 574527 - RNA, 18 nt, Human
ugaguaaagagaaagaga

SEQ ID NO: 574528 - RNA, 25 nt, Human
ugaguaaagagaaagagagaaggaa

SEQ ID NO: 574529 - RNA, 21 nt, Human
ugcccccccggcaucccccuc

SEQ ID NO: 574530 - RNA, 20 nt, Human
aaaaaacacuuccauuugcu

SEQ ID NO: 574531 - RNA, 20 nt, Human
aaagugcuggguuuacaggc

SEQ ID NO: 574532 - RNA, 24 nt, Human
aaagugcuggguuuacaggcguga

SEQ ID NO: 574533 - RNA, 22 nt, Human
aacaaaaagcaggcugggaaaa

SEQ ID NO: 574534 - RNA, 20 nt, Human
aacacaauaccuauaaaaac

SEQ ID NO: 574535 - RNA, 24 nt, Human
aaccucggacugaagaccuugcca

SEQ ID NO: 574536 - RNA, 21 nt, Human
aacucaugaccucaagugauc

SEQ ID NO: 574537 - RNA, 18 nt, Human
aagaaacaaaaagcaggc

SEQ ID NO: 574538 - RNA, 21 nt, Human
aagcaggcugggaaaagugac

SEQ ID NO: 574539 - RNA, 23 nt, Human
aagcaggcugggaaaagugacuc

SEQ ID NO: 574540 - RNA, 23 nt, Human
aagucaauucugaauugacucua

SEQ ID NO: 574541 - RNA, 21 nt, Human
aauaaacauaaaaaaacugag

SEQ ID NO: 574542 - RNA, 26 nt, Human
acucaaacucaagucaauucugaauu

SEQ ID NO: 574543 - RNA, 18 nt, Human
acugaagacuuugugaca

SEQ ID NO: 574544 - RNA, 21 nt, Human
agaaacaaaaagcaggcuggg

SEQ ID NO: 574545 - RNA, 18 nt, Human
aguaaccucggacugaag

SEQ ID NO: 574546 - RNA, 21 nt, Human
auaaaaaaacugagaauuuca

SEQ ID NO: 574547 - RNA, 21 nt, Human
cauaaacaauaaaaaauuuaa

SEQ ID NO: 574548 - RNA, 19 nt, Human
cauuauggauucuccaaug

SEQ ID NO: 574549 - RNA, 21 nt, Human
ccacacgccuggcccaauccu

SEQ ID NO: 574550 - RNA, 18 nt, Human
ccucuuaacauaaacacc

SEQ ID NO: 574551 - RNA, 27 nt, Human
ccuggucugcgcggaugucgggcggcc

SEQ ID NO: 574552 - RNA, 24 nt, Human
cuaaagugcuggguuuacaggcgu

SEQ ID NO: 574553 - RNA, 24 nt, Human
cucaagugaucuauccaccuuggg

SEQ ID NO: 574554 - RNA, 20 nt, Human
cugaagacuuugugacaauc

SEQ ID NO: 574555 - RNA, 18 nt, Human
cugaccaccaaaggcucu

SEQ ID NO: 574556 - RNA, 20 nt, Human
cuugacugaagaccuugcca

SEQ ID NO: 574557 - RNA, 18 nt, Human
cuuguaagaccuccuuca

SEQ ID NO: 574558 - RNA, 20 nt, Human
cuuguaagaccuccuucauu

SEQ ID NO: 574559 - RNA, 23 nt, Human
gaccucaagugaucuauccaccu

SEQ ID NO: 574560 - RNA, 19 nt, Human
gacuguugccuaaaaaccu

SEQ ID NO: 574561 - RNA, 18 nt, Human
gguuuuuguuaaagaaac

SEQ ID NO: 574562 - RNA, 21 nt, Human
uaaaaaaacugagaauuucac

SEQ ID NO: 574563 - RNA, 18 nt, Human
uaagaaauacuuaggaau

SEQ ID NO: 574564 - RNA, 24 nt, Human
uaagucaacucaaacucaagucaa

SEQ ID NO: 574565 - RNA, 20 nt, Human
uaaugcuucaacugaauguu

SEQ ID NO: 574566 - RNA, 21 nt, Human
uacaggcgugagccacacgcc

SEQ ID NO: 574567 - RNA, 21 nt, Human
uacaggcgugagccacacgcc

SEQ ID NO: 574568 - RNA, 22 nt, Human
uacaggcgugagccacacgccu

SEQ ID NO: 574569 - RNA, 22 nt, Human
uauccaccuugggcuccuaaag

SEQ ID NO: 574570 - RNA, 19 nt, Human
ucaacucaaacucaaguca

SEQ ID NO: 574571 - RNA, 20 nt, Human
ucaauccacgggauccgcuu

SEQ ID NO: 574572 - RNA, 27 nt, Human
uccauaaacaauaaaaaauuuaaacga

SEQ ID NO: 574573 - RNA, 21 nt, Human
ucccuauaccauggauugcuu

SEQ ID NO: 574574 - RNA, 24 nt, Human
uccuaaagugcuggguuuacaggc

SEQ ID NO: 574575 - RNA, 24 nt, Human
uccucuuccguguuuuuuccucac

SEQ ID NO: 574576 - RNA, 22 nt, Human
ucuacugucaauccuugauggu

SEQ ID NO: 574577 - RNA, 19 nt, Human
ugaccucaagugaucuauc

SEQ ID NO: 574578 - RNA, 19 nt, Human
ugacuccuuugcuuuccuc

SEQ ID NO: 574579 - RNA, 21 nt, Human
uggccaggcugaucucaaacu

SEQ ID NO: 574580 - RNA, 18 nt, Human
uggguuuacaggcgugag

SEQ ID NO: 574581 - RNA, 19 nt, Human
uggguuuacaggcgugagc

SEQ ID NO: 574582 - RNA, 22 nt, Human
uggguuuacaggcgugagccac

SEQ ID NO: 574583 - RNA, 23 nt, Human
uggguuuacaggcgugagccaca

SEQ ID NO: 574584 - RNA, 26 nt, Human
uguaagaccuccuucauuauggauuc

SEQ ID NO: 574585 - RNA, 19 nt, Human
uguacaguuccuuuccagu

SEQ ID NO: 574586 - RNA, 21 nt, Human
ugugagguuucucuccuguau

SEQ ID NO: 574587 - RNA, 21 nt, Human
uguugccuaaaaaccuugcaa

SEQ ID NO: 574588 - RNA, 19 nt, Human
uguuggccaggcugaucuc

SEQ ID NO: 574589 - RNA, 22 nt, Human
uguuuugcaauggcuguaauau

SEQ ID NO: 574590 - RNA, 18 nt, Human
uuaagucaacucaaacuc

SEQ ID NO: 574591 - RNA, 23 nt, Human
uuacacuuguaagaccuccuuca

SEQ ID NO: 574592 - RNA, 23 nt, Human
uuacacuuguacaguuccuuucc

SEQ ID NO: 574593 - RNA, 21 nt, Human
uuacugaagacuuugugacaa

SEQ ID NO: 574594 - RNA, 19 nt, Human
uuccguguuuuuuccucac

SEQ ID NO: 574595 - RNA, 19 nt, Human
uugggcuccuaaagugcug

SEQ ID NO: 574596 - RNA, 22 nt, Human
uuguacaguuccuuuccagugu

SEQ ID NO: 574597 - RNA, 24 nt, Human
uuugcacaaugcaauagcagcacc

SEQ ID NO: 574598 - RNA, 21 nt, Human
uuuguaagauuucucuccugu

SEQ ID NO: 574599 - RNA, 19 nt, Human
uuuguaagguuucucucca

SEQ ID NO: 574600 - RNA, 19 nt, Human
uuuguaugguuucucucca

SEQ ID NO: 574601 - RNA, 24 nt, Human
uuuguuaaagaaacaaaaagcagg

SEQ ID NO: 574602 - RNA, 21 nt, Human
aaaaaaaaaaaaaaaagccua

SEQ ID NO: 574603 - RNA, 25 nt, Human
aaaaaaaaaaagccuacuuuaaaga

SEQ ID NO: 574604 - RNA, 19 nt, Human
aaaaaaaacaaaaagacac

SEQ ID NO: 574605 - RNA, 24 nt, Human
aaaaaacaaaaagacacaccuuac

SEQ ID NO: 574606 - RNA, 18 nt, Human
aaaauaagaucuucucca

SEQ ID NO: 574607 - RNA, 22 nt, Human
aaaaugcuuuacccccaaacug

SEQ ID NO: 574608 - RNA, 18 nt, Human
aaacaaaacaaaacccaa

SEQ ID NO: 574609 - RNA, 22 nt, Human
aaacaauguucccccacccccc

SEQ ID NO: 574610 - RNA, 23 nt, Human
aaacuaguuuuauuuuaaaauua

SEQ ID NO: 574611 - RNA, 23 nt, Human
aaagauauauucucuuuugagcc

SEQ ID NO: 574612 - RNA, 21 nt, Human
aaauacugaaaauuggacucc

SEQ ID NO: 574613 - RNA, 22 nt, Human
aaaucuuucuucccccagaaag

SEQ ID NO: 574614 - RNA, 24 nt, Human
aacaauguucccccaccccccaaa

SEQ ID NO: 574615 - RNA, 18 nt, Human
aaccaccccaucccaccc

SEQ ID NO: 574616 - RNA, 22 nt, Human
aaccagaaagcuucccuccacc

SEQ ID NO: 574617 - RNA, 20 nt, Human
aacuuuccuucauaaaagac

SEQ ID NO: 574618 - RNA, 20 nt, Human
aagaucuucuccacccuuaa

SEQ ID NO: 574619 - RNA, 20 nt, Human
aagcuacccacccacauuca

SEQ ID NO: 574620 - RNA, 20 nt, Human
acaaaacaaaacccaaacaa

SEQ ID NO: 574621 - RNA, 23 nt, Human
acaauguucccccaccccccaaa

SEQ ID NO: 574622 - RNA, 18 nt, Human
accaccccaucccacccc

SEQ ID NO: 574623 - RNA, 18 nt, Human
accugaagaguucugaug

SEQ ID NO: 574624 - RNA, 24 nt, Human
agaaaacaauuuucaugcuuaaaa

SEQ ID NO: 574625 - RNA, 26 nt, Human
agaaaacaauuuucaugcuuaaaaac

SEQ ID NO: 574626 - RNA, 18 nt, Human
agaaaggagcacaaugua

SEQ ID NO: 574627 - RNA, 23 nt, Human
agaauggcauauaaaccaaucaa

SEQ ID NO: 574628 - RNA, 21 nt, Human
agcacaaccugagaacuaccc

SEQ ID NO: 574629 - RNA, 23 nt, Human
aggccauuggcuugauuacugag

SEQ ID NO: 574630 - RNA, 26 nt, Human
auauuauguucucauuugaaaacaca

SEQ ID NO: 574631 - RNA, 23 nt, Human
caaaacaaaacccaaacaauguu

SEQ ID NO: 574632 - RNA, 20 nt, Human
caaaggccauuggcuugauu

SEQ ID NO: 574633 - RNA, 21 nt, Human
caaccaccccaucccaccccg

SEQ ID NO: 574634 - RNA, 18 nt, Human
caccccaucccaccccgg

SEQ ID NO: 574635 - RNA, 21 nt, Human
cagaauaaaaaaaaccuuuuc

SEQ ID NO: 574636 - RNA, 18 nt, Human
caugauuuaaaaaauaag

SEQ ID NO: 574637 - RNA, 19 nt, Human
caugucacaaagcagucug

SEQ ID NO: 574638 - RNA, 24 nt, Human
ccagauaccuacacuauuugugag

SEQ ID NO: 574639 - RNA, 20 nt, Human
cccaaaagauuauuaaucca

SEQ ID NO: 574640 - RNA, 21 nt, Human
cccaaacaauguucccccacc

SEQ ID NO: 574641 - RNA, 24 nt, Human
cccagaugcuaccacaggucaaau

SEQ ID NO: 574642 - RNA, 24 nt, Human
ccccaucccaccccggguaugcag

SEQ ID NO: 574643 - RNA, 21 nt, Human
cccccaccccccaaagcuagc

SEQ ID NO: 574644 - RNA, 20 nt, Human
ccccuucccuuccugacaaa

SEQ ID NO: 574645 - RNA, 24 nt, Human
cccuggccacagucccuuccaaaa

SEQ ID NO: 574646 - RNA, 18 nt, Human
cccuugaaauaacuuuuu

SEQ ID NO: 574647 - RNA, 21 nt, Human
cucaaaauggcaaauugaagu

SEQ ID NO: 574648 - RNA, 24 nt, Human
cucccaggauucauggugcauuaa

SEQ ID NO: 574649 - RNA, 19 nt, Human
cuccugcugcauacccaca

SEQ ID NO: 574650 - RNA, 22 nt, Human
cugagauaugcaaaaccuacau

SEQ ID NO: 574651 - RNA, 21 nt, Human
gacagaagcuacccacccaca

SEQ ID NO: 574652 - RNA, 18 nt, Human
gaucucuaucccaauauc

SEQ ID NO: 574653 - RNA, 18 nt, Human
uaaaaaaaacaaaaagac

SEQ ID NO: 574654 - RNA, 19 nt, Human
uaaaaaaaacaaaaagaca

SEQ ID NO: 574655 - RNA, 19 nt, Human
uacaguuaugccaucccuu

SEQ ID NO: 574656 - RNA, 20 nt, Human
uaccaaaauccaauuagcag

SEQ ID NO: 574657 - RNA, 20 nt, Human
uagucucccaggauucaugg

SEQ ID NO: 574658 - RNA, 19 nt, Human
uauagcauaacaauucaug

SEQ ID NO: 574659 - RNA, 22 nt, Human
uauaguaaguuugucuucgaug

SEQ ID NO: 574660 - RNA, 19 nt, Human
uauuuuauucuacccuccc

SEQ ID NO: 574661 - RNA, 23 nt, Human
uauuuuauucuacccucccaaaa

SEQ ID NO: 574662 - RNA, 22 nt, Human
ucaaaaaaaaaaaaaaaagccu

SEQ ID NO: 574663 - RNA, 19 nt, Human
ucaauccaaugaaaguagc

SEQ ID NO: 574664 - RNA, 24 nt, Human
ucacacuauaacauucccaaggca

SEQ ID NO: 574665 - RNA, 24 nt, Human
ucagaaaacaauuuucaugcuuaa

SEQ ID NO: 574666 - RNA, 22 nt, Human
uccacauaacaaagugcugcuc

SEQ ID NO: 574667 - RNA, 18 nt, Human
uccacaucaugcccuaug

SEQ ID NO: 574668 - RNA, 28 nt, Human
uccaguauucucaaaaaaaaaaaaaaaa

SEQ ID NO: 574669 - RNA, 19 nt, Human
ucccccaccccccaaagcu

SEQ ID NO: 574670 - RNA, 22 nt, Human
uccccgggagccaucuggauca

SEQ ID NO: 574671 - RNA, 19 nt, Human
ucuaccagacuaauaaauc

SEQ ID NO: 574672 - RNA, 22 nt, Human
ucuaccagacuaauaaauccac

SEQ ID NO: 574673 - RNA, 22 nt, Human
ucuacccucccaaaagauuauu

SEQ ID NO: 574674 - RNA, 23 nt, Human
ucuagcacaaccugagaacuacc

SEQ ID NO: 574675 - RNA, 18 nt, Human
ucucaaaaaaaaaaaaaa

SEQ ID NO: 574676 - RNA, 19 nt, Human
ucucaaaaaaaaaaaaaaa

SEQ ID NO: 574677 - RNA, 20 nt, Human
ucuguacuugaguaguguuu

SEQ ID NO: 574678 - RNA, 19 nt, Human
ucuuccuggugcugguacc

SEQ ID NO: 574679 - RNA, 22 nt, Human
ucuuugacuuagaagccaacau

SEQ ID NO: 574680 - RNA, 19 nt, Human
ugaaauuuagucaucaguu

SEQ ID NO: 574681 - RNA, 23 nt, Human
ugagaacuacccuggccacaguc

SEQ ID NO: 574682 - RNA, 19 nt, Human
ugagccuacuuucccccaa

SEQ ID NO: 574683 - RNA, 18 nt, Human
ugagguaagaacuaccaa

SEQ ID NO: 574684 - RNA, 23 nt, Human
ugagguaagaacuaccaaaaucc

SEQ ID NO: 574685 - RNA, 22 nt, Human
ugagugaguguucuuaccugag

SEQ ID NO: 574686 - RNA, 20 nt, Human
ugcauuaaaaaggauauuca

SEQ ID NO: 574687 - RNA, 19 nt, Human
ugcuuuacccccaaacugc

SEQ ID NO: 574688 - RNA, 19 nt, Human
ugguauagcauaacaauuc

SEQ ID NO: 574689 - RNA, 20 nt, Human
uuaaaaaaaacaaaaagaca

SEQ ID NO: 574690 - RNA, 24 nt, Human
uuaaaaaaaacaaaaagacacacc

SEQ ID NO: 574691 - RNA, 25 nt, Human
uuagucuuugacuuagaagccaaca

SEQ ID NO: 574692 - RNA, 20 nt, Human
uucccuuccugacaaaggcc

SEQ ID NO: 574693 - RNA, 20 nt, Human
uuucaaaaauuaauacugua

SEQ ID NO: 574694 - RNA, 19 nt, Human
uuugaaaaauuuggaccau

SEQ ID NO: 574695 - RNA, 24 nt, Human
uuuugguuugcagucuguacuuga

SEQ ID NO: 574696 - RNA, 22 nt, Human
aaaaaacccaacuggucaaccc

SEQ ID NO: 574697 - RNA, 19 nt, Human
aaaaacaaaaaaggaaaca

SEQ ID NO: 574698 - RNA, 22 nt, Human
aaaaagccagaagugaaaagug

SEQ ID NO: 574699 - RNA, 25 nt, Human
aaaaaggaaacaagaaagaaaaaga

SEQ ID NO: 574700 - RNA, 23 nt, Human
aaaacccugaauccaaguccugc

SEQ ID NO: 574701 - RNA, 28 nt, Human
aaaagaaacaaaaacaagcaaccaaaaa

SEQ ID NO: 574702 - RNA, 26 nt, Human
aaacaaaaaaggaaacaagagggacc

SEQ ID NO: 574703 - RNA, 20 nt, Human
aaacaaaaacaagcaaccaa

SEQ ID NO: 574704 - RNA, 21 nt, Human
aaacaaaaacaagcaaccaaa

SEQ ID NO: 574705 - RNA, 25 nt, Human
aaacaagaaagaaaaagaaacaaaa

SEQ ID NO: 574706 - RNA, 24 nt, Human
aaacacuaccugugaaaugaauuc

SEQ ID NO: 574707 - RNA, 21 nt, Human
aaacccaacuggucaacccuu

SEQ ID NO: 574708 - RNA, 24 nt, Human
aaagaaacaaaaacaagcaaccaa

SEQ ID NO: 574709 - RNA, 21 nt, Human
aaagcagaaaaaucacuuuca

SEQ ID NO: 574710 - RNA, 20 nt, Human
aaagcucucucguaccuccc

SEQ ID NO: 574711 - RNA, 26 nt, Human
aaagcucucucguaccuccccugcuu

SEQ ID NO: 574712 - RNA, 21 nt, Human
aaaguauauacucccauucua

SEQ ID NO: 574713 - RNA, 23 nt, Human
aaauguaaaaaaucuguacuuug

SEQ ID NO: 574714 - RNA, 23 nt, Human
aacaaaaaaggaaacaagaaaga

SEQ ID NO: 574715 - RNA, 20 nt, Human
aacaaguuuaaacuguucug

SEQ ID NO: 574716 - RNA, 22 nt, Human
aacaguaccaguaacuaguaac

SEQ ID NO: 574717 - RNA, 23 nt, Human
aaccaucuggaccaaccugucga

SEQ ID NO: 574718 - RNA, 22 nt, Human
aaccugcggccagacuguccag

SEQ ID NO: 574719 - RNA, 18 nt, Human
aacuaaagauucuuggcu

SEQ ID NO: 574720 - RNA, 19 nt, Human
aacuggucaacccuucccu

SEQ ID NO: 574721 - RNA, 21 nt, Human
aagaaacaaaaacaagcaacc

SEQ ID NO: 574722 - RNA, 18 nt, Human
aagaaagaaaaagaaaca

SEQ ID NO: 574723 - RNA, 19 nt, Human
aagaaagaaaaagaaacaa

SEQ ID NO: 574724 - RNA, 22 nt, Human
aagaaagaaaaagaaacaaaaa

SEQ ID NO: 574725 - RNA, 21 nt, Human
aagcaggggcucugaagaugu

SEQ ID NO: 574726 - RNA, 26 nt, Human
aaggugcuuucuccugucugcaacua

SEQ ID NO: 574727 - RNA, 21 nt, Human
aauggcugcuggugcuggcga

SEQ ID NO: 574728 - RNA, 24 nt, Human
acaagaaagaaaaagaaacaaaaa

SEQ ID NO: 574729 - RNA, 21 nt, Human
acagaaugaacaaauguggca

SEQ ID NO: 574730 - RNA, 22 nt, Human
acagaggaaaaccuuucugaca

SEQ ID NO: 574731 - RNA, 28 nt, Human
acccugaauccaaguccugcaaaggcug

SEQ ID NO: 574732 - RNA, 20 nt, Human
accugugaaaugaauuccuu

SEQ ID NO: 574733 - RNA, 24 nt, Human
acuggucaacccuucccuuccccc

SEQ ID NO: 574734 - RNA, 23 nt, Human
agaaagaaaaagaaacaaaaaca

SEQ ID NO: 574735 - RNA, 18 nt, Human
agaagccaagaaccaagu

SEQ ID NO: 574736 - RNA, 20 nt, Human
agaagcugcuggcaaagugc

SEQ ID NO: 574737 - RNA, 21 nt, Human
agaaugggggcaaaacagaga

SEQ ID NO: 574738 - RNA, 20 nt, Human
agacacuaugaggcugugcc

SEQ ID NO: 574739 - RNA, 20 nt, Human
agacagcaguaauccaaaca

SEQ ID NO: 574740 - RNA, 24 nt, Human
agacagcaguaauccaaacaaggg

SEQ ID NO: 574741 - RNA, 23 nt, Human
agaccgggaucuugagagguggu

SEQ ID NO: 574742 - RNA, 25 nt, Human
agagauccucauccuuugggcacuu

SEQ ID NO: 574743 - RNA, 19 nt, Human
agaggccucugacacaggc

SEQ ID NO: 574744 - RNA, 20 nt, Human
agcagaggugacuggcuucu

SEQ ID NO: 574745 - RNA, 27 nt, Human
aggaaaaagguaaagcagaagggaccc

SEQ ID NO: 574746 - RNA, 18 nt, Human
aggaaaugucagaaggga

SEQ ID NO: 574747 - RNA, 19 nt, Human
aggagcggagcaggggcug

SEQ ID NO: 574748 - RNA, 18 nt, Human
agucacuagagaaggauu

SEQ ID NO: 574749 - RNA, 20 nt, Human
agugccuucuugcugugcuu

SEQ ID NO: 574750 - RNA, 18 nt, Human
aguucuggcuccuguucu

SEQ ID NO: 574751 - RNA, 18 nt, Human
caaaaacaagcaaccaaa

SEQ ID NO: 574752 - RNA, 18 nt, Human
caacaagaguugcuagag

SEQ ID NO: 574753 - RNA, 26 nt, Human
caacagcagcugacuaucuagcacua

SEQ ID NO: 574754 - RNA, 21 nt, Human
caacccuucccuucccccucc

SEQ ID NO: 574755 - RNA, 21 nt, Human
caagaaagaaaaagaaacaaa

SEQ ID NO: 574756 - RNA, 21 nt, Human
caagaaccaagucagggcuuu

SEQ ID NO: 574757 - RNA, 19 nt, Human
caaguuacuacccaacuga

SEQ ID NO: 574758 - RNA, 19 nt, Human
cacaaugaacaggugaggc

SEQ ID NO: 574759 - RNA, 21 nt, Human
caccugcucuuuuuucccucc

SEQ ID NO: 574760 - RNA, 21 nt, Human
cacugcugcugcugcuguucu

SEQ ID NO: 574761 - RNA, 20 nt, Human
cacuucaccuuggcuuucac

SEQ ID NO: 574762 - RNA, 19 nt, Human
cagaagugaaaagugaaaa

SEQ ID NO: 574763 - RNA, 19 nt, Human
cagaauggaguccgguguc

SEQ ID NO: 574764 - RNA, 18 nt, Human
caggugaggcaccugaga

SEQ ID NO: 574765 - RNA, 19 nt, Human
cagguugaacagaaugaac

SEQ ID NO: 574766 - RNA, 25 nt, Human
caucacugcugcugcugcuguucuc

SEQ ID NO: 574767 - RNA, 25 nt, Human
caucucagguguaaacucaccugcu

SEQ ID NO: 574768 - RNA, 22 nt, Human
caucuggaccaaccugucgauc

SEQ ID NO: 574769 - RNA, 19 nt, Human
ccaagcagauugcuuggca

SEQ ID NO: 574770 - RNA, 19 nt, Human
ccagagaggcacucccuuc

SEQ ID NO: 574771 - RNA, 22 nt, Human
ccagcaggugcuguaguugcac

SEQ ID NO: 574772 - RNA, 18 nt, Human
ccagcccucggcccuggc

SEQ ID NO: 574773 - RNA, 21 nt, Human
ccaucacugcugcugcugcug

SEQ ID NO: 574774 - RNA, 19 nt, Human
ccaucacugcuuucuucug

SEQ ID NO: 574775 - RNA, 20 nt, Human
ccauguugcagguuuggcag

SEQ ID NO: 574776 - RNA, 22 nt, Human
ccggcauuaaacuuuucucagu

SEQ ID NO: 574777 - RNA, 27 nt, Human
ccugagauuagagcaggaccggggucc

SEQ ID NO: 574778 - RNA, 20 nt, Human
ccugcauugcugcugcugcu

SEQ ID NO: 574779 - RNA, 23 nt, Human
ccugcgauggaugaaaccggggc

SEQ ID NO: 574780 - RNA, 21 nt, Human
ccuggaccuuguccacccccu

SEQ ID NO: 574781 - RNA, 21 nt, Human
ccugggucaagaugaagaggc

SEQ ID NO: 574782 - RNA, 24 nt, Human
ccugucuguccaucagauugcuuu

SEQ ID NO: 574783 - RNA, 20 nt, Human
ccuuggcuuucacacucuuc

SEQ ID NO: 574784 - RNA, 20 nt, Human
ccuugggccacaaaaaagcc

SEQ ID NO: 574785 - RNA, 21 nt, Human
cgcaaaaaacccaacugguca

SEQ ID NO: 574786 - RNA, 22 nt, Human
cgcaaaaaacccaacuggucaa

SEQ ID NO: 574787 - RNA, 20 nt, Human
cggcagcggcagcugcugcc

SEQ ID NO: 574788 - RNA, 18 nt, Human
cggcggcagcggcagcug

SEQ ID NO: 574789 - RNA, 22 nt, Human
cuaaucuggaaugugacuuaac

SEQ ID NO: 574790 - RNA, 27 nt, Human
cuagcagucugcccuucaccacccucu

SEQ ID NO: 574791 - RNA, 21 nt, Human
cucguaccuccccugcuucca

SEQ ID NO: 574792 - RNA, 19 nt, Human
cucuagcagucugcccuuc

SEQ ID NO: 574793 - RNA, 28 nt, Human
cucugucugagccuggacugccuccucc

SEQ ID NO: 574794 - RNA, 19 nt, Human
cugaguaaaacccugaauc

SEQ ID NO: 574795 - RNA, 25 nt, Human
cugcaaaggcugaauaaucuaugaa

SEQ ID NO: 574796 - RNA, 21 nt, Human
cugcccuucaccacccucucc

SEQ ID NO: 574797 - RNA, 23 nt, Human
cugcccuucaccacccucuccug

SEQ ID NO: 574798 - RNA, 22 nt, Human
cuggcuucugcuccaagagauc

SEQ ID NO: 574799 - RNA, 22 nt, Human
cuggucaacccuucccuucccc

SEQ ID NO: 574800 - RNA, 24 nt, Human
cuggucaagauugaggcaguguau

SEQ ID NO: 574801 - RNA, 20 nt, Human
cuuacuaggaccugcuuuga

SEQ ID NO: 574802 - RNA, 19 nt, Human
cuuagaaucuucaaggcuc

SEQ ID NO: 574803 - RNA, 21 nt, Human
cuuuccuucccauguugcagg

SEQ ID NO: 574804 - RNA, 24 nt, Human
cuuuccuuuuccaccugcucuuuu

SEQ ID NO: 574805 - RNA, 25 nt, Human
gaaaacgagcccugggagagaccug

SEQ ID NO: 574806 - RNA, 21 nt, Human
gaaaauauacuccuuaucccc

SEQ ID NO: 574807 - RNA, 18 nt, Human
gaacagcaauguuuagga

SEQ ID NO: 574808 - RNA, 19 nt, Human
gaauucucaccugcaucuc

SEQ ID NO: 574809 - RNA, 18 nt, Human
gacacaggcauggauuuu

SEQ ID NO: 574810 - RNA, 19 nt, Human
gaccugaaauggcugcugg

SEQ ID NO: 574811 - RNA, 19 nt, Human
gacugcggggaggacgacg

SEQ ID NO: 574812 - RNA, 21 nt, Human
gacuuagacuuacuauacaag

SEQ ID NO: 574813 - RNA, 22 nt, Human
gagguucuuucauauuagucuc

SEQ ID NO: 574814 - RNA, 18 nt, Human
gcaacaggucucuuuaaa

SEQ ID NO: 574815 - RNA, 19 nt, Human
gcaaccaaaaaaccuuuag

SEQ ID NO: 574816 - RNA, 27 nt, Human
gcacauuuaguucuuuucauuugucug

SEQ ID NO: 574817 - RNA, 21 nt, Human
gcagccuucuuaucucuuagc

SEQ ID NO: 574818 - RNA, 23 nt, Human
gccacaaaaaagccagaagugaa

SEQ ID NO: 574819 - RNA, 18 nt, Human
gcugaagcuggaacacag

SEQ ID NO: 574820 - RNA, 20 nt, Human
gcugaggaaagcaggggcuc

SEQ ID NO: 574821 - RNA, 23 nt, Human
gcuggaacacagauauuaauccu

SEQ ID NO: 574822 - RNA, 21 nt, Human
ggcaaagugcucgagggugga

SEQ ID NO: 574823 - RNA, 26 nt, Human
ggcauggauuuugguuguucagcugg

SEQ ID NO: 574824 - RNA, 24 nt, Human
ggccugcauugcugcugcugcuuc

SEQ ID NO: 574825 - RNA, 19 nt, Human
ggcugcacuucaccuuggc

SEQ ID NO: 574826 - RNA, 18 nt, Human
ggcuggugaugggacacu

SEQ ID NO: 574827 - RNA, 25 nt, Human
ggggagggaguuacagccacugggg

SEQ ID NO: 574828 - RNA, 22 nt, Human
guaaagcagaaaaaucacuuuc

SEQ ID NO: 574829 - RNA, 19 nt, Human
guauugugugugugugugu

SEQ ID NO: 574830 - RNA, 23 nt, Human
gucaacccuucccuucccccucc

SEQ ID NO: 574831 - RNA, 24 nt, Human
gugauguggggguggggugggcag

SEQ ID NO: 574832 - RNA, 23 nt, Human
gugcuguaguugcacugaccugg

SEQ ID NO: 574833 - RNA, 18 nt, Human
guggccucuucucccagc

SEQ ID NO: 574834 - RNA, 22 nt, Human
gugggcuggugaugggacacuu

SEQ ID NO: 574835 - RNA, 23 nt, Human
guggggugggcagugguggguag

SEQ ID NO: 574836 - RNA, 30 nt, Human
gugguacuuuucgcaccuggauucuuccua

SEQ ID NO: 574837 - RNA, 22 nt, Human
gugguggguaguagaauggggg

SEQ ID NO: 574838 - RNA, 19 nt, Human
guuccugggguuuuaaggc

SEQ ID NO: 574839 - RNA, 21 nt, Human
uaaaaacaaaaaaggaaacaa

SEQ ID NO: 574840 - RNA, 21 nt, Human
uaaaaaucccugauaccuuuc

SEQ ID NO: 574841 - RNA, 23 nt, Human
uaaacccuuccuggauugcccaa

SEQ ID NO: 574842 - RNA, 25 nt, Human
uaaagcagaaaaaucacuuucauca

SEQ ID NO: 574843 - RNA, 23 nt, Human
uaagaugaauggcuuuccacuug

SEQ ID NO: 574844 - RNA, 19 nt, Human
uaagaugaugucauccugu

SEQ ID NO: 574845 - RNA, 21 nt, Human
uaagugcaaacuugucacaaa

SEQ ID NO: 574846 - RNA, 22 nt, Human
uacaguagaagccaagaaccaa

SEQ ID NO: 574847 - RNA, 27 nt, Human
uagaagaugcccucuucaccucuggag

SEQ ID NO: 574848 - RNA, 27 nt, Human
uagcauggaaucaauuccaaaacucuc

SEQ ID NO: 574849 - RNA, 20 nt, Human
uagcucaaaucacccaauca

SEQ ID NO: 574850 - RNA, 21 nt, Human
uagcucaaaucacccaaucac

SEQ ID NO: 574851 - RNA, 22 nt, Human
uauacuccuuauccccaauccu

SEQ ID NO: 574852 - RNA, 21 nt, Human
uaugaaggacaaauacaacug

SEQ ID NO: 574853 - RNA, 24 nt, Human
uaugaggcugugccuggcuugggg

SEQ ID NO: 574854 - RNA, 25 nt, Human
uaugaggcugugccuggcuuggggu

SEQ ID NO: 574855 - RNA, 21 nt, Human
uauugagaaagggcuguggug

SEQ ID NO: 574856 - RNA, 24 nt, Human
ucaagaugaagaggcacaauaugg

SEQ ID NO: 574857 - RNA, 22 nt, Human
ucacaauuucuucagucacuag

SEQ ID NO: 574858 - RNA, 20 nt, Human
ucacacucuucuuuucugcc

SEQ ID NO: 574859 - RNA, 24 nt, Human
ucacugcugcugcugcuguucuca

SEQ ID NO: 574860 - RNA, 25 nt, Human
ucacugcuuucuucugaaccuucug

SEQ ID NO: 574861 - RNA, 18 nt, Human
ucagaacucugggaaucu

SEQ ID NO: 574862 - RNA, 21 nt, Human
ucagacagcaguaauccaaac

SEQ ID NO: 574863 - RNA, 18 nt, Human
ucagcagaggugacuggc

SEQ ID NO: 574864 - RNA, 22 nt, Human
ucaggccagaacucugcccaua

SEQ ID NO: 574865 - RNA, 23 nt, Human
ucagguguaaacucaccugcuuc

SEQ ID NO: 574866 - RNA, 20 nt, Human
uccaaaacucucaaccucuu

SEQ ID NO: 574867 - RNA, 21 nt, Human
uccaaaaggacgcaaaaaacc

SEQ ID NO: 574868 - RNA, 22 nt, Human
ucccagagaggcacucccuuca

SEQ ID NO: 574869 - RNA, 23 nt, Human
ucccagagaggcacucccuucac

SEQ ID NO: 574870 - RNA, 19 nt, Human
uccccugcuuccaguuccu

SEQ ID NO: 574871 - RNA, 20 nt, Human
ucgcagauuuguauuaacca

SEQ ID NO: 574872 - RNA, 20 nt, Human
ucuaaaacaggaaaaauguc

SEQ ID NO: 574873 - RNA, 24 nt, Human
ucuaaaauguaaaaaaucuguacu

SEQ ID NO: 574874 - RNA, 20 nt, Human
ucucccagcucacaggggcc

SEQ ID NO: 574875 - RNA, 27 nt, Human
ucucccagcucacaggggccucuucuu

SEQ ID NO: 574876 - RNA, 18 nt, Human
ucuccuaaucuggaaugu

SEQ ID NO: 574877 - RNA, 19 nt, Human
ucucuaaacggacuuaaaa

SEQ ID NO: 574878 - RNA, 19 nt, Human
ucugugauggagaaaugac

SEQ ID NO: 574879 - RNA, 19 nt, Human
ucugugcuuugaccaguug

SEQ ID NO: 574880 - RNA, 18 nt, Human
ucugugguuucacucccc

SEQ ID NO: 574881 - RNA, 20 nt, Human
ugaaacggcaugggggagau

SEQ ID NO: 574882 - RNA, 20 nt, Human
ugaacaaauguggcauuggu

SEQ ID NO: 574883 - RNA, 21 nt, Human
ugaacagaaugaacaaaugug

SEQ ID NO: 574884 - RNA, 19 nt, Human
ugaagauguggagaaguuc

SEQ ID NO: 574885 - RNA, 22 nt, Human
ugacaggaaaaagguaaagcag

SEQ ID NO: 574886 - RNA, 24 nt, Human
ugagagcugaggaaagcaggggcu

SEQ ID NO: 574887 - RNA, 20 nt, Human
ugaggcugugccuggcuugg

SEQ ID NO: 574888 - RNA, 21 nt, Human
ugagggaagacuuccucuuga

SEQ ID NO: 574889 - RNA, 18 nt, Human
ugaguuuugagggcugcc

SEQ ID NO: 574890 - RNA, 19 nt, Human
ugauguggggguggggugg

SEQ ID NO: 574891 - RNA, 19 nt, Human
ugcaaugcuucuucuuuac

SEQ ID NO: 574892 - RNA, 18 nt, Human
ugcagcagcugcggcggc

SEQ ID NO: 574893 - RNA, 21 nt, Human
uggaauggucccuccaacuga

SEQ ID NO: 574894 - RNA, 18 nt, Human
uggaccuuguccaccccc

SEQ ID NO: 574895 - RNA, 19 nt, Human
uggacugccuccucuagca

SEQ ID NO: 574896 - RNA, 19 nt, Human
uggcaauaucuguuuuagg

SEQ ID NO: 574897 - RNA, 22 nt, Human
uggcgauguaacuaaagauucu

SEQ ID NO: 574898 - RNA, 21 nt, Human
uggcuccacuuuuuucuccuu

SEQ ID NO: 574899 - RNA, 19 nt, Human
uggcugaagcuggaacaca

SEQ ID NO: 574900 - RNA, 20 nt, Human
uggcuguugcucuggugggg

SEQ ID NO: 574901 - RNA, 19 nt, Human
uggcuugggguggucuugg

SEQ ID NO: 574902 - RNA, 22 nt, Human
ugggagagaagaggaaaagaga

SEQ ID NO: 574903 - RNA, 25 nt, Human
ugggcccuuguggauggcugacaac

SEQ ID NO: 574904 - RNA, 18 nt, Human
uggggugggcaguggugg

SEQ ID NO: 574905 - RNA, 22 nt, Human
uggugagaugguucuucucaga

SEQ ID NO: 574906 - RNA, 23 nt, Human
ugguggguaguagaaugggggca

SEQ ID NO: 574907 - RNA, 24 nt, Human
ugguggguaguagaaugggggcaa

SEQ ID NO: 574908 - RNA, 24 nt, Human
uguaacaacacagggggucccaga

SEQ ID NO: 574909 - RNA, 23 nt, Human
uguaagugcaaacuugucacaaa

SEQ ID NO: 574910 - RNA, 19 nt, Human
uguacauacacguaugugu

SEQ ID NO: 574911 - RNA, 21 nt, Human
uguauugugugugugugugua

SEQ ID NO: 574912 - RNA, 21 nt, Human
ugucacaaauucacaaagucu

SEQ ID NO: 574913 - RNA, 21 nt, Human
ugucagaagggagacagcuuc

SEQ ID NO: 574914 - RNA, 20 nt, Human
ugucugagccuggacugccu

SEQ ID NO: 574915 - RNA, 21 nt, Human
ugugaagcauugcauucaggc

SEQ ID NO: 574916 - RNA, 19 nt, Human
uguguacauacacguaugu

SEQ ID NO: 574917 - RNA, 25 nt, Human
uguguacauacacguauguguaaag

SEQ ID NO: 574918 - RNA, 24 nt, Human
uguguguacauacacguaugugua

SEQ ID NO: 574919 - RNA, 21 nt, Human
uguguguguguguacauacac

SEQ ID NO: 574920 - RNA, 21 nt, Human
uguguguguguguacauacac

SEQ ID NO: 574921 - RNA, 20 nt, Human
uguguguguguguguacaua

SEQ ID NO: 574922 - RNA, 20 nt, Human
uguuaggacuagugauggag

SEQ ID NO: 574923 - RNA, 23 nt, Human
uguucagcuuuuaagaugaaugg

SEQ ID NO: 574924 - RNA, 21 nt, Human
uguuggagaaggugcuuucuc

SEQ ID NO: 574925 - RNA, 20 nt, Human
uguuggaggcacuggggggg

SEQ ID NO: 574926 - RNA, 23 nt, Human
uuacaguguaucucuuucuaguc

SEQ ID NO: 574927 - RNA, 24 nt, Human
uuagagcaggaccuguuggagaag

SEQ ID NO: 574928 - RNA, 20 nt, Human
uuagugccuucuugcugugc

SEQ ID NO: 574929 - RNA, 24 nt, Human
uuagugccuucuugcugugcuucu

SEQ ID NO: 574930 - RNA, 20 nt, Human
uucaccuuggcuuucacacu

SEQ ID NO: 574931 - RNA, 18 nt, Human
uucacggacuacauucac

SEQ ID NO: 574932 - RNA, 21 nt, Human
uucacggacuacauucacugu

SEQ ID NO: 574933 - RNA, 18 nt, Human
uucacugucucagggcag

SEQ ID NO: 574934 - RNA, 21 nt, Human
uucccauguugcagguuuggc

SEQ ID NO: 574935 - RNA, 22 nt, Human
uucccauguugcagguuuggca

SEQ ID NO: 574936 - RNA, 23 nt, Human
uucccauguugcagguuuggcag

SEQ ID NO: 574937 - RNA, 20 nt, Human
uuccuaguuauagucuguuc

SEQ ID NO: 574938 - RNA, 23 nt, Human
uuccugccaguuccagugugggg

SEQ ID NO: 574939 - RNA, 27 nt, Human
uuccugggguuuuaaggcuagaagcug

SEQ ID NO: 574940 - RNA, 23 nt, Human
uuccuuaccaaaaauuucaauuu

SEQ ID NO: 574941 - RNA, 27 nt, Human
uugcugcugcugcuucuucugcuguug

SEQ ID NO: 574942 - RNA, 23 nt, Human
uugcuggaauuguugcacugcac

SEQ ID NO: 574943 - RNA, 21 nt, Human
uuggccuugggccacaaaaaa

SEQ ID NO: 574944 - RNA, 18 nt, Human
uugggccacaaaaaagcc

SEQ ID NO: 574945 - RNA, 25 nt, Human
uuuccagauguucccuuagccauuc

SEQ ID NO: 574946 - RNA, 22 nt, Human
uuucuaccugcaacagcagcug

SEQ ID NO: 574947 - RNA, 22 nt, Human
uuucugugguuucacuccccuu

SEQ ID NO: 574948 - RNA, 22 nt, Human
uuuguaagugcaaacuugucac

SEQ ID NO: 574949 - RNA, 21 nt, Human
uuuguuauaauuagaagcugu

SEQ ID NO: 574950 - RNA, 25 nt, Human
aaaaauaagugagaguugugacaac

SEQ ID NO: 574951 - RNA, 19 nt, Human
aaccuuuugaggccaucca

SEQ ID NO: 574952 - RNA, 20 nt, Human
aaccuuuugaggccauccaa

SEQ ID NO: 574953 - RNA, 18 nt, Human
aagcagccagggccacag

SEQ ID NO: 574954 - RNA, 21 nt, Human
aagcagccagggccacaggag

SEQ ID NO: 574955 - RNA, 24 nt, Human
aagcagcgagggccacaggaguca

SEQ ID NO: 574956 - RNA, 19 nt, Human
acauggccacuccucucac

SEQ ID NO: 574957 - RNA, 18 nt, Human
accucgccgcguuagcgg

SEQ ID NO: 574958 - RNA, 23 nt, Human
acgacuguguaguuccuccccaa

SEQ ID NO: 574959 - RNA, 24 nt, Human
acuccgcuccagccccgguacugc

SEQ ID NO: 574960 - RNA, 22 nt, Human
agaaaugauccucuucagucca

SEQ ID NO: 574961 - RNA, 22 nt, Human
agacuaaugacuccaugcccuc

SEQ ID NO: 574962 - RNA, 24 nt, Human
agauccgaugcaauuuugggaagg

SEQ ID NO: 574963 - RNA, 19 nt, Human
aguuccuccccaaaauaau

SEQ ID NO: 574964 - RNA, 24 nt, Human
caagcucuuaucuuagaaagcaca

SEQ ID NO: 574965 - RNA, 19 nt, Human
cacuccgcuccagccccgg

SEQ ID NO: 574966 - RNA, 19 nt, Human
cacuccgcuccagccccgg

SEQ ID NO: 574967 - RNA, 20 nt, Human
cacuccgcuccagccccggu

SEQ ID NO: 574968 - RNA, 18 nt, Human
cagcagacagcuucacuc

SEQ ID NO: 574969 - RNA, 21 nt, Human
cagcagacagcuucacuccgc

SEQ ID NO: 574970 - RNA, 22 nt, Human
caggaaaggggcugaguucuga

SEQ ID NO: 574971 - RNA, 22 nt, Human
ccaacuugaaaacaccugaacc

SEQ ID NO: 574972 - RNA, 23 nt, Human
ccagccccgguacugcggucugu

SEQ ID NO: 574973 - RNA, 24 nt, Human
ccagccccgguacugcggucugug

SEQ ID NO: 574974 - RNA, 20 nt, Human
cccgugucccuguguuuacu

SEQ ID NO: 574975 - RNA, 24 nt, Human
cccgugucccuguguuuacugccu

SEQ ID NO: 574976 - RNA, 21 nt, Human
ccggacagugaccucacgaac

SEQ ID NO: 574977 - RNA, 18 nt, Human
ccgugucccuguguuuac

SEQ ID NO: 574978 - RNA, 19 nt, Human
ccucacauggccacuccuc

SEQ ID NO: 574979 - RNA, 18 nt, Human
ccucugaguguggacgcu

SEQ ID NO: 574980 - RNA, 18 nt, Human
ccucuuacagcagacagc

SEQ ID NO: 574981 - RNA, 18 nt, Human
ccuguguuuacugccuua

SEQ ID NO: 574982 - RNA, 25 nt, Human
cgcuccagccccgguacugcggucu

SEQ ID NO: 574983 - RNA, 22 nt, Human
cucucacagcagacagcuucac

SEQ ID NO: 574984 - RNA, 24 nt, Human
cucucaggacuagcauucuggcag

SEQ ID NO: 574985 - RNA, 24 nt, Human
cucucgggacuagcauucuggcag

SEQ ID NO: 574986 - RNA, 21 nt, Human
cuuagaaguaaaaucaggaaa

SEQ ID NO: 574987 - RNA, 27 nt, Human
gaaagcacagacacguuuagcucaggg

SEQ ID NO: 574988 - RNA, 19 nt, Human
gacuguguaguuccucccc

SEQ ID NO: 574989 - RNA, 21 nt, Human
gagugaaagaagauggagacc

SEQ ID NO: 574990 - RNA, 22 nt, Human
gagugccugcagaccugugggc

SEQ ID NO: 574991 - RNA, 22 nt, Human
gccccgguacugcggucugugg

SEQ ID NO: 574992 - RNA, 24 nt, Human
gcuccagccccgguacugcggucu

SEQ ID NO: 574993 - RNA, 19 nt, Human
ggaccuggauagcccgaug

SEQ ID NO: 574994 - RNA, 21 nt, Human
ggacgcugucccccgugucuc

SEQ ID NO: 574995 - RNA, 23 nt, Human
ggccacaggagucaaagaagaug

SEQ ID NO: 574996 - RNA, 19 nt, Human
ggccacaggagugaaagaa

SEQ ID NO: 574997 - RNA, 23 nt, Human
ggccacaggagugaaagaagaug

SEQ ID NO: 574998 - RNA, 21 nt, Human
gggaaggguugguaauaaacc

SEQ ID NO: 574999 - RNA, 19 nt, Human
gucuggucaugauaugaga

SEQ ID NO: 575000 - RNA, 19 nt, Human
gucuggucgugauaugaga

SEQ ID NO: 575001 - RNA, 19 nt, Human
gugccugcagaccuguggg

SEQ ID NO: 575002 - RNA, 22 nt, Human
guguaaagcagccagggccaca

SEQ ID NO: 575003 - RNA, 22 nt, Human
guguaaagcagcgagggccaca

SEQ ID NO: 575004 - RNA, 26 nt, Human
uaaaaaauaagugagaguugugacaa

SEQ ID NO: 575005 - RNA, 26 nt, Human
uaaaaaauaauugagaguugugacaa

SEQ ID NO: 575006 - RNA, 26 nt, Human
uaacuugaaaacaauuuugaguauuu

SEQ ID NO: 575007 - RNA, 21 nt, Human
uaauaaaccaaaacucaaucu

SEQ ID NO: 575008 - RNA, 23 nt, Human
uaauaaaccaaaacucuaucuau

SEQ ID NO: 575009 - RNA, 18 nt, Human
uaauucguccuuggagaa

SEQ ID NO: 575010 - RNA, 19 nt, Human
uaauucguccuuggagaau

SEQ ID NO: 575011 - RNA, 20 nt, Human
uaccuugaaaucagauaauc

SEQ ID NO: 575012 - RNA, 26 nt, Human
uagaaagcacagacacguuuagcuca

SEQ ID NO: 575013 - RNA, 21 nt, Human
uagaacagauuguguaaagca

SEQ ID NO: 575014 - RNA, 18 nt, Human
uagcccgaugauucgcac

SEQ ID NO: 575015 - RNA, 18 nt, Human
uagcucaggguagugcaa

SEQ ID NO: 575016 - RNA, 20 nt, Human
ucaagaaccuuuugaggcca

SEQ ID NO: 575017 - RNA, 18 nt, Human
ucacuccgcuccagcccc

SEQ ID NO: 575018 - RNA, 21 nt, Human
ucacuccgcuccagccccggu

SEQ ID NO: 575019 - RNA, 23 nt, Human
ucacuccgcuccagccccgguac

SEQ ID NO: 575020 - RNA, 22 nt, Human
uccaaaguguguuugugagacu

SEQ ID NO: 575021 - RNA, 22 nt, Human
uccaaguuuuuguccuucagua

SEQ ID NO: 575022 - RNA, 25 nt, Human
ucccccgugucccuguguuuacugc

SEQ ID NO: 575023 - RNA, 25 nt, Human
ucccccgugucuccauguuuacugc

SEQ ID NO: 575024 - RNA, 20 nt, Human
uccgcuccagccccgguacu

SEQ ID NO: 575025 - RNA, 18 nt, Human
uccucuuagaaguaaaau

SEQ ID NO: 575026 - RNA, 19 nt, Human
uccuuggagaaucacagug

SEQ ID NO: 575027 - RNA, 20 nt, Human
ugaggggaagaggcccaggg

SEQ ID NO: 575028 - RNA, 24 nt, Human
ugccugcagaccugugggcagcca

SEQ ID NO: 575029 - RNA, 19 nt, Human
ugcuaacuugaaaacaauu

SEQ ID NO: 575030 - RNA, 23 nt, Human
ugcugucuuaagacagaagaaag

SEQ ID NO: 575031 - RNA, 23 nt, Human
ugcugucuuaagauagaagaaag

SEQ ID NO: 575032 - RNA, 24 nt, Human
uggcugcuccaugaaauccaaggg

SEQ ID NO: 575033 - RNA, 24 nt, Human
uggcugcuccaugaaaucuaaggg

SEQ ID NO: 575034 - RNA, 18 nt, Human
ugggaaggguuaguaaua

SEQ ID NO: 575035 - RNA, 18 nt, Human
ugggaaggguugguaaua

SEQ ID NO: 575036 - RNA, 20 nt, Human
ugggaaugggaugagaucua

SEQ ID NO: 575037 - RNA, 22 nt, Human
ugggaaugggaugagaucuagu

SEQ ID NO: 575038 - RNA, 20 nt, Human
ugucccuguguuuacugccu

SEQ ID NO: 575039 - RNA, 21 nt, Human
uguggcccaggcccucugagu

SEQ ID NO: 575040 - RNA, 18 nt, Human
uuagaaguaaaaucagga

SEQ ID NO: 575041 - RNA, 19 nt, Human
uuccucuuagaaguaaaau

SEQ ID NO: 575042 - RNA, 19 nt, Human
uuguguaaagcagccaggg

SEQ ID NO: 575043 - RNA, 20 nt, Human
aaaaaaaaaauaauaaaagg

SEQ ID NO: 575044 - RNA, 21 nt, Human
aaagaggcacucagggguggg

SEQ ID NO: 575045 - RNA, 19 nt, Human
aacaugaugaaaccccauc

SEQ ID NO: 575046 - RNA, 20 nt, Human
aacaugaugaaaccccaucu

SEQ ID NO: 575047 - RNA, 21 nt, Human
aacaugaugaaaccccaucuc

SEQ ID NO: 575048 - RNA, 21 nt, Human
aacaugaugaaaccccaucuc

SEQ ID NO: 575049 - RNA, 22 nt, Human
aaccacaagcauggaccagccc

SEQ ID NO: 575050 - RNA, 18 nt, Human
aaccagaacaugccacaa

SEQ ID NO: 575051 - RNA, 25 nt, Human
aacucagcucucccuaccucuccua

SEQ ID NO: 575052 - RNA, 18 nt, Human
aagcaggguauucacgca

SEQ ID NO: 575053 - RNA, 24 nt, Human
aagggccaggugcgguggcucaug

SEQ ID NO: 575054 - RNA, 18 nt, Human
aaggggcuuagagacaaa

SEQ ID NO: 575055 - RNA, 18 nt, Human
aaguauuuagcacuaaac

SEQ ID NO: 575056 - RNA, 23 nt, Human
aaucauaucacagggguauugag

SEQ ID NO: 575057 - RNA, 21 nt, Human
acaaaaaacagacuuuauuga

SEQ ID NO: 575058 - RNA, 18 nt, Human
acaccagaguucuuggaa

SEQ ID NO: 575059 - RNA, 24 nt, Human
acagagcgagacuccaucucaaaa

SEQ ID NO: 575060 - RNA, 18 nt, Human
acagcauuccagccuggg

SEQ ID NO: 575061 - RNA, 19 nt, Human
acagcauuccagccugggc

SEQ ID NO: 575062 - RNA, 24 nt, Human
acagcauuccagccugggcgacag

SEQ ID NO: 575063 - RNA, 26 nt, Human
acagcauuccagccugggcgacagag

SEQ ID NO: 575064 - RNA, 18 nt, Human
acccagagaccugggaaa

SEQ ID NO: 575065 - RNA, 18 nt, Human
accccaucucuacuaaaa

SEQ ID NO: 575066 - RNA, 21 nt, Human
accuggaagcaaagaaggccc

SEQ ID NO: 575067 - RNA, 24 nt, Human
acuugaggucaggaguucgagacc

SEQ ID NO: 575068 - RNA, 21 nt, Human
agaacucccaagguggcucac

SEQ ID NO: 575069 - RNA, 23 nt, Human
agacaggcaaggccuuaagucca

SEQ ID NO: 575070 - RNA, 22 nt, Human
agacggggguugcagugagccg

SEQ ID NO: 575071 - RNA, 19 nt, Human
agacuugcuccagucgcug

SEQ ID NO: 575072 - RNA, 20 nt, Human
agagaccugggaaauggggg

SEQ ID NO: 575073 - RNA, 24 nt, Human
agaguaggcccaaaaguugggggu

SEQ ID NO: 575074 - RNA, 23 nt, Human
agcagaagcauagcugguggggg

SEQ ID NO: 575075 - RNA, 18 nt, Human
agcaggcaugguggugcu

SEQ ID NO: 575076 - RNA, 25 nt, Human
agcccaggcugggguacccagagac

SEQ ID NO: 575077 - RNA, 24 nt, Human
agccuggccaacaugaugaaaccc

SEQ ID NO: 575078 - RNA, 24 nt, Human
agccugggcgacagagcgagacuc

SEQ ID NO: 575079 - RNA, 23 nt, Human
aggcacucagggguggggggguc

SEQ ID NO: 575080 - RNA, 18 nt, Human
aggcaggagauucgcuug

SEQ ID NO: 575081 - RNA, 24 nt, Human
aggcaggagauucgcuugaacccg

SEQ ID NO: 575082 - RNA, 18 nt, Human
aggcagguggaucacuug

SEQ ID NO: 575083 - RNA, 22 nt, Human
aggcagguggaucacuugaggu

SEQ ID NO: 575084 - RNA, 26 nt, Human
aggcagguggaucacuugaggucagg

SEQ ID NO: 575085 - RNA, 24 nt, Human
aggcaugguggugcuugccuguaa

SEQ ID NO: 575086 - RNA, 26 nt, Human
aggcccaaaaguuggggguugcuucg

SEQ ID NO: 575087 - RNA, 24 nt, Human
aggcugaggcaggagauucgcuug

SEQ ID NO: 575088 - RNA, 22 nt, Human
aggggucugggagcccacaggg

SEQ ID NO: 575089 - RNA, 24 nt, Human
aggugcgguggcucaugccuguaa

SEQ ID NO: 575090 - RNA, 22 nt, Human
agguggaucacuugaggucagg

SEQ ID NO: 575091 - RNA, 19 nt, Human
agucagaacucagcucucc

SEQ ID NO: 575092 - RNA, 21 nt, Human
agucaugugcaugaguaugua

SEQ ID NO: 575093 - RNA, 24 nt, Human
aucacuugaggucaggaguucgag

SEQ ID NO: 575094 - RNA, 24 nt, Human
aucuugcuacagcauuccagccug

SEQ ID NO: 575095 - RNA, 19 nt, Human
augccuguaaucccagcac

SEQ ID NO: 575096 - RNA, 24 nt, Human
caaaccggaaaagcacagcaucca

SEQ ID NO: 575097 - RNA, 24 nt, Human
caaaccggaaaagcacagcaucca

SEQ ID NO: 575098 - RNA, 24 nt, Human
caaggcagguggaucacuugaggu

SEQ ID NO: 575099 - RNA, 26 nt, Human
caaggcagguggaucacuugagguca

SEQ ID NO: 575100 - RNA, 19 nt, Human
cacagcauccaagcagggu

SEQ ID NO: 575101 - RNA, 19 nt, Human
cacagggcauagacagggu

SEQ ID NO: 575102 - RNA, 23 nt, Human
cacuugaggucaggaguucgaga

SEQ ID NO: 575103 - RNA, 24 nt, Human
cagcacuuugaaaggccaaggcag

SEQ ID NO: 575104 - RNA, 20 nt, Human
cagcccccagccagaccccc

SEQ ID NO: 575105 - RNA, 24 nt, Human
cagcuacucagaaggcugaggcag

SEQ ID NO: 575106 - RNA, 23 nt, Human
cagcuggguggucuuagcacagg

SEQ ID NO: 575107 - RNA, 18 nt, Human
cagcuuccagacuugcuc

SEQ ID NO: 575108 - RNA, 24 nt, Human
cagguggaucacuugaggucagga

SEQ ID NO: 575109 - RNA, 24 nt, Human
caucccuucagccuccugcauccu

SEQ ID NO: 575110 - RNA, 21 nt, Human
caucucaaaaacaaacaaaau

SEQ ID NO: 575111 - RNA, 20 nt, Human
caugccuguaaucccagcac

SEQ ID NO: 575112 - RNA, 23 nt, Human
cauuccagccugggcgacagagc

SEQ ID NO: 575113 - RNA, 18 nt, Human
ccagagcacagagcguug

SEQ ID NO: 575114 - RNA, 23 nt, Human
ccaguccagguaacaugggggca

SEQ ID NO: 575115 - RNA, 22 nt, Human
cccaggcugggguacccagaga

SEQ ID NO: 575116 - RNA, 23 nt, Human
ccccagggaauuucuuagaaccc

SEQ ID NO: 575117 - RNA, 23 nt, Human
cccccagccagacccccugaggc

SEQ ID NO: 575118 - RNA, 23 nt, Human
cccccagguuccuuugaugggcc

SEQ ID NO: 575119 - RNA, 21 nt, Human
cccgggagacggggguugcag

SEQ ID NO: 575120 - RNA, 21 nt, Human
cccuaccucuccuagccucaa

SEQ ID NO: 575121 - RNA, 19 nt, Human
cccugaccuggaagcaaag

SEQ ID NO: 575122 - RNA, 23 nt, Human
ccuaccucuccuagccucaauuc

SEQ ID NO: 575123 - RNA, 19 nt, Human
ccuccugcauccuccccca

SEQ ID NO: 575124 - RNA, 18 nt, Human
ccugcauccucccccagg

SEQ ID NO: 575125 - RNA, 18 nt, Human
ccugcgauggggaugggg

SEQ ID NO: 575126 - RNA, 20 nt, Human
ccugcgauggggauggggga

SEQ ID NO: 575127 - RNA, 24 nt, Human
ccuggccaacaugaugaaacccca

SEQ ID NO: 575128 - RNA, 22 nt, Human
ccugggcgacagagcgagacuc

SEQ ID NO: 575129 - RNA, 20 nt, Human
ccuguaaucccagcacuuug

SEQ ID NO: 575130 - RNA, 21 nt, Human
ccuguaaucccagcuacucag

SEQ ID NO: 575131 - RNA, 22 nt, Human
ccuguaaucccagcuacucaga

SEQ ID NO: 575132 - RNA, 21 nt, Human
ccuucugcuauauucacaguc

SEQ ID NO: 575133 - RNA, 21 nt, Human
cgagaccagccuggccaacau

SEQ ID NO: 575134 - RNA, 24 nt, Human
cgggagacggggguugcagugagc

SEQ ID NO: 575135 - RNA, 21 nt, Human
cuacagcauuccagccugggc

SEQ ID NO: 575136 - RNA, 21 nt, Human
cucagcucucccuaccucucc

SEQ ID NO: 575137 - RNA, 24 nt, Human
cucaugccuguaaucccagcacuu

SEQ ID NO: 575138 - RNA, 19 nt, Human
cuccagcaauagugggaca

SEQ ID NO: 575139 - RNA, 18 nt, Human
cuccaggucaucggccug

SEQ ID NO: 575140 - RNA, 26 nt, Human
cucccccagcccaggcugggguaccc

SEQ ID NO: 575141 - RNA, 23 nt, Human
cugcuguccacuaaccacaagca

SEQ ID NO: 575142 - RNA, 21 nt, Human
cuuaaguccaguaggccaaac

SEQ ID NO: 575143 - RNA, 19 nt, Human
gaaagaggcacucaggggu

SEQ ID NO: 575144 - RNA, 26 nt, Human
gaaccagagcacagagcguuggagaa

SEQ ID NO: 575145 - RNA, 20 nt, Human
gaccuggaagcaaagaaggc

SEQ ID NO: 575146 - RNA, 24 nt, Human
gaucacuugaggucaggaguucga

SEQ ID NO: 575147 - RNA, 20 nt, Human
gcauuccagccugggcgaca

SEQ ID NO: 575148 - RNA, 24 nt, Human
gcauuccagccugggcgacagagc

SEQ ID NO: 575149 - RNA, 24 nt, Human
gccaacaugaugaaaccccaucuc

SEQ ID NO: 575150 - RNA, 19 nt, Human
gcccccaaagaaaauucag

SEQ ID NO: 575151 - RNA, 18 nt, Human
gcccuaggaugagaaccc

SEQ ID NO: 575152 - RNA, 18 nt, Human
gcuacagcauuccagccu

SEQ ID NO: 575153 - RNA, 22 nt, Human
gcuacagcauuccagccugggc

SEQ ID NO: 575154 - RNA, 24 nt, Human
gcuacagcauuccagccugggcga

SEQ ID NO: 575155 - RNA, 18 nt, Human
gcuugccuguaaucccag

SEQ ID NO: 575156 - RNA, 22 nt, Human
ggaaaagcacagcauccaagca

SEQ ID NO: 575157 - RNA, 20 nt, Human
ggagcugaaagaggcacuca

SEQ ID NO: 575158 - RNA, 22 nt, Human
ggaucacuugaggucaggaguu

SEQ ID NO: 575159 - RNA, 18 nt, Human
ggccaggugcgguggcuc

SEQ ID NO: 575160 - RNA, 25 nt, Human
gggccaggggcaguuccccagggaa

SEQ ID NO: 575161 - RNA, 18 nt, Human
ggggguugcagugagccg

SEQ ID NO: 575162 - RNA, 22 nt, Human
gggguugcagugagccgaaauc

SEQ ID NO: 575163 - RNA, 23 nt, Human
gguggcucaugccuguaauccca

SEQ ID NO: 575164 - RNA, 24 nt, Human
gguggcucaugccuguaaucccag

SEQ ID NO: 575165 - RNA, 24 nt, Human
gguggugcuugccuguaaucccag

SEQ ID NO: 575166 - RNA, 19 nt, Human
gugcaucccuucagccucc

SEQ ID NO: 575167 - RNA, 24 nt, Human
guugcagugagccgaaaucuugcu

SEQ ID NO: 575168 - RNA, 18 nt, Human
uaagagcacagugagaga

SEQ ID NO: 575169 - RNA, 23 nt, Human
uaagagcacagugagagaaaugc

SEQ ID NO: 575170 - RNA, 21 nt, Human
uaaugaaugcccccaaagaaa

SEQ ID NO: 575171 - RNA, 21 nt, Human
uacagcauuccagccugggcg

SEQ ID NO: 575172 - RNA, 19 nt, Human
uaccauguccagccuccag

SEQ ID NO: 575173 - RNA, 21 nt, Human
uagaaccagagcacagagcgu

SEQ ID NO: 575174 - RNA, 22 nt, Human
uagcaagacaauacaccaccgg

SEQ ID NO: 575175 - RNA, 20 nt, Human
uagcugaggacacagccacu

SEQ ID NO: 575176 - RNA, 23 nt, Human
uaggaacugugacucccucuccc

SEQ ID NO: 575177 - RNA, 18 nt, Human
uaggcccaaaaguugggg

SEQ ID NO: 575178 - RNA, 23 nt, Human
uagggggucaggaaaauagcagg

SEQ ID NO: 575179 - RNA, 26 nt, Human
uauaaauaaccaccuucucagagcag

SEQ ID NO: 575180 - RNA, 21 nt, Human
ucagaacucagcucucccuac

SEQ ID NO: 575181 - RNA, 22 nt, Human
ucagcucucccuaccucuccua

SEQ ID NO: 575182 - RNA, 22 nt, Human
ucaugccuguaaucccagcacu

SEQ ID NO: 575183 - RNA, 23 nt, Human
uccacauauauaaauccuuaggu

SEQ ID NO: 575184 - RNA, 22 nt, Human
uccagccuccagcaauaguggg

SEQ ID NO: 575185 - RNA, 21 nt, Human
uccagccugggcgacagagcg

SEQ ID NO: 575186 - RNA, 23 nt, Human
uccagccugggcgacagagcgag

SEQ ID NO: 575187 - RNA, 24 nt, Human
uccagccugggcgacagagcgaga

SEQ ID NO: 575188 - RNA, 21 nt, Human
ucccuucagccuccugcaucc

SEQ ID NO: 575189 - RNA, 20 nt, Human
uccuuaggucagggcuucug

SEQ ID NO: 575190 - RNA, 23 nt, Human
ucgcuugaacccgggagacgggg

SEQ ID NO: 575191 - RNA, 20 nt, Human
ucucccccagcccaggcugg

SEQ ID NO: 575192 - RNA, 23 nt, Human
ucucccccagcccaggcuggggu

SEQ ID NO: 575193 - RNA, 19 nt, Human
ucuccuagccucaauucag

SEQ ID NO: 575194 - RNA, 22 nt, Human
ucucuacuaaaaauaaaaaauu

SEQ ID NO: 575195 - RNA, 20 nt, Human
ucuguagcugaggacacagc

SEQ ID NO: 575196 - RNA, 19 nt, Human
ugaaaccccaucucuacua

SEQ ID NO: 575197 - RNA, 24 nt, Human
ugaaaggccaaggcagguggauca

SEQ ID NO: 575198 - RNA, 21 nt, Human
ugacucaaagcucaggggucu

SEQ ID NO: 575199 - RNA, 18 nt, Human
ugagaggccagggaaacc

SEQ ID NO: 575200 - RNA, 24 nt, Human
ugaggcaggagauucgcuugaacc

SEQ ID NO: 575201 - RNA, 25 nt, Human
ugaggcaggagauucgcuugaaccc

SEQ ID NO: 575202 - RNA, 18 nt, Human
ugaggcuacaaacuguga

SEQ ID NO: 575203 - RNA, 19 nt, Human
ugaugccacugacucaaag

SEQ ID NO: 575204 - RNA, 20 nt, Human
ugaugccacugacucaaagc

SEQ ID NO: 575205 - RNA, 18 nt, Human
ugcacaggugaagucaga

SEQ ID NO: 575206 - RNA, 23 nt, Human
ugcaucccuucagccuccugcau

SEQ ID NO: 575207 - RNA, 23 nt, Human
ugcccuggagaaaggggcuuaga

SEQ ID NO: 575208 - RNA, 23 nt, Human
ugccuguaaucccagcacuuuga

SEQ ID NO: 575209 - RNA, 19 nt, Human
ugccuguaaucccagcuac

SEQ ID NO: 575210 - RNA, 20 nt, Human
ugcucagccgucuccuggcu

SEQ ID NO: 575211 - RNA, 19 nt, Human
ugcuuucucauugaagcag

SEQ ID NO: 575212 - RNA, 24 nt, Human
uggaucacuugaggucaggaguuc

SEQ ID NO: 575213 - RNA, 27 nt, Human
uggaucacuugaggucaggaguucgag

SEQ ID NO: 575214 - RNA, 20 nt, Human
uggcucagaacaaggcacuc

SEQ ID NO: 575215 - RNA, 22 nt, Human
uggcucaugccuguaaucccag

SEQ ID NO: 575216 - RNA, 24 nt, Human
uggcucaugccuguaaucccagca

SEQ ID NO: 575217 - RNA, 19 nt, Human
ugggaaaugggggagaguc

SEQ ID NO: 575218 - RNA, 22 nt, Human
ugggaaaugggggagagucaug

SEQ ID NO: 575219 - RNA, 22 nt, Human
ugggagugaguauguccauguu

SEQ ID NO: 575220 - RNA, 22 nt, Human
ugguggggggaguaggaacugu

SEQ ID NO: 575221 - RNA, 24 nt, Human
ugguggugcuugccuguaauccca

SEQ ID NO: 575222 - RNA, 28 nt, Human
ugguuuuugggacuaugaucaguacacu

SEQ ID NO: 575223 - RNA, 25 nt, Human
ugugccucuucuaggucagacacca

SEQ ID NO: 575224 - RNA, 20 nt, Human
uucagccuccugcauccucc

SEQ ID NO: 575225 - RNA, 18 nt, Human
uugcagugagccgaaauc

SEQ ID NO: 575226 - RNA, 19 nt, Human
uugcagugagccgaaaucu

SEQ ID NO: 575227 - RNA, 24 nt, Human
aaaaacacacccucacaagaugcc

SEQ ID NO: 575228 - RNA, 23 nt, Human
aaagacuaggaaaauuugcagga

SEQ ID NO: 575229 - RNA, 22 nt, Human
aaagcgcucccguacccagcca

SEQ ID NO: 575230 - RNA, 24 nt, Human
aacacagcacucaccacuucaaca

SEQ ID NO: 575231 - RNA, 18 nt, Human
aacuacauaaaagaaguc

SEQ ID NO: 575232 - RNA, 20 nt, Human
aacuccgccccaggcucggc

SEQ ID NO: 575233 - RNA, 21 nt, Human
acacagcacucaccacuucaa

SEQ ID NO: 575234 - RNA, 20 nt, Human
acggcgggggcggcugcggc

SEQ ID NO: 575235 - RNA, 21 nt, Human
acuauuaccucuauuuguacc

SEQ ID NO: 575236 - RNA, 23 nt, Human
acugggaaaaacacacccucaca

SEQ ID NO: 575237 - RNA, 18 nt, Human
agaacuacauaaaagaag

SEQ ID NO: 575238 - RNA, 23 nt, Human
agaccacaguugagggagaauuu

SEQ ID NO: 575239 - RNA, 19 nt, Human
agccaaauaauaaaacuuc

SEQ ID NO: 575240 - RNA, 23 nt, Human
agcgcaacugagacgcuaauacu

SEQ ID NO: 575241 - RNA, 21 nt, Human
agcucaaaacacagcacucac

SEQ ID NO: 575242 - RNA, 21 nt, Human
aguacccauuuagcccauggc

SEQ ID NO: 575243 - RNA, 20 nt, Human
agucccugacuccggaaaca

SEQ ID NO: 575244 - RNA, 22 nt, Human
caaagcgcucccguacccagcc

SEQ ID NO: 575245 - RNA, 18 nt, Human
caagguucaugcaugugu

SEQ ID NO: 575246 - RNA, 19 nt, Human
caccaaaaggagaaaacau

SEQ ID NO: 575247 - RNA, 21 nt, Human
caccacuucaacagcagcuca

SEQ ID NO: 575248 - RNA, 24 nt, Human
cacgggccgaaggaaugcagacca

SEQ ID NO: 575249 - RNA, 21 nt, Human
cacugggaaaaacacacccuc

SEQ ID NO: 575250 - RNA, 24 nt, Human
cagcgcaacugagacgcuaauacu

SEQ ID NO: 575251 - RNA, 18 nt, Human
cagcucaaagucaaaugg

SEQ ID NO: 575252 - RNA, 23 nt, Human
cauuuuuaaaauuaucuaaacaa

SEQ ID NO: 575253 - RNA, 19 nt, Human
ccaaagcgcucccguaccc

SEQ ID NO: 575254 - RNA, 22 nt, Human
ccccagucagcccaaacuccgc

SEQ ID NO: 575255 - RNA, 19 nt, Human
cccgccccagaucagccca

SEQ ID NO: 575256 - RNA, 22 nt, Human
cccggcugcagcgcaacugaga

SEQ ID NO: 575257 - RNA, 22 nt, Human
cccucacaagaugccuauccau

SEQ ID NO: 575258 - RNA, 22 nt, Human
ccuuggcguacaugaggggcag

SEQ ID NO: 575259 - RNA, 20 nt, Human
cucacaagaugccuauccau

SEQ ID NO: 575260 - RNA, 19 nt, Human
gaaaaacacacccucacaa

SEQ ID NO: 575261 - RNA, 19 nt, Human
gcagcggcggcgucuugcc

SEQ ID NO: 575262 - RNA, 23 nt, Human
gccaaauaauaaaacuucuaaua

SEQ ID NO: 575263 - RNA, 22 nt, Human
gcucggccuccuccuuccuccc

SEQ ID NO: 575264 - RNA, 20 nt, Human
ggaaaaacacacccucacaa

SEQ ID NO: 575265 - RNA, 21 nt, Human
ggaaaaacacacccucacaag

SEQ ID NO: 575266 - RNA, 22 nt, Human
ggaggauauacuaggaccugag

SEQ ID NO: 575267 - RNA, 24 nt, Human
guccagccccagucagcccaaacu

SEQ ID NO: 575268 - RNA, 22 nt, Human
uaaaauuaucuaaacaaauugg

SEQ ID NO: 575269 - RNA, 22 nt, Human
uagcaccaaaaggagaaaacau

SEQ ID NO: 575270 - RNA, 21 nt, Human
uaguagcuagaacuaaaaaac

SEQ ID NO: 575271 - RNA, 24 nt, Human
uauggacugacaaaaaaaauuacc

SEQ ID NO: 575272 - RNA, 18 nt, Human
uauguucccuuuuuuggc

SEQ ID NO: 575273 - RNA, 19 nt, Human
ucaaaacacagcacucacc

SEQ ID NO: 575274 - RNA, 20 nt, Human
ucaaaacacagcacucacca

SEQ ID NO: 575275 - RNA, 21 nt, Human
ucaaaacacagcacucaccac

SEQ ID NO: 575276 - RNA, 25 nt, Human
ucagcccacgggccgaaggaaugca

SEQ ID NO: 575277 - RNA, 20 nt, Human
ucuaguacccauuuagccca

SEQ ID NO: 575278 - RNA, 19 nt, Human
ugaggggcaguuguuguuc

SEQ ID NO: 575279 - RNA, 22 nt, Human
ugcgcucagcugcagucccuga

SEQ ID NO: 575280 - RNA, 24 nt, Human
uggacugacaaaaaaaauuaccaa

SEQ ID NO: 575281 - RNA, 23 nt, Human
uuagcaccaaaaggagaaaacau

SEQ ID NO: 575282 - RNA, 22 nt, Human
uuccuccccggcugcagcgcaa

SEQ ID NO: 575283 - RNA, 26 nt, Human
uugagucaguggucagauggggcagu

SEQ ID NO: 575284 - RNA, 20 nt, Human
aaagccugcgugaagguggu

SEQ ID NO: 575285 - RNA, 24 nt, Human
aagccucuucuuuugcaggcccug

SEQ ID NO: 575286 - RNA, 25 nt, Human
agcugagcagccucccggaaaccuc

SEQ ID NO: 575287 - RNA, 18 nt, Human
aucacacugaacaagcau

SEQ ID NO: 575288 - RNA, 22 nt, Human
aucugaagccuaaagaaagcca

SEQ ID NO: 575289 - RNA, 24 nt, Human
cagcugagcagccucccggaaacc

SEQ ID NO: 575290 - RNA, 19 nt, Human
caggaaguacugcaggaac

SEQ ID NO: 575291 - RNA, 21 nt, Human
ccaugccacagcuccaacacg

SEQ ID NO: 575292 - RNA, 19 nt, Human
cccaacaugugagcagggu

SEQ ID NO: 575293 - RNA, 18 nt, Human
ccucccuggugaccaggc

SEQ ID NO: 575294 - RNA, 20 nt, Human
cucccggaaaccuccuaacc

SEQ ID NO: 575295 - RNA, 22 nt, Human
cuuccugggaucugaagccuaa

SEQ ID NO: 575296 - RNA, 22 nt, Human
gagcagccucccggaaaccucc

SEQ ID NO: 575297 - RNA, 25 nt, Human
gcaacuguucacagccccucacuca

SEQ ID NO: 575298 - RNA, 19 nt, Human
gcaggacagggacaggucc

SEQ ID NO: 575299 - RNA, 18 nt, Human
gccaugccacagcuccaa

SEQ ID NO: 575300 - RNA, 21 nt, Human
gcccauuccucaaccuggaca

SEQ ID NO: 575301 - RNA, 19 nt, Human
ggagccauggucaguccug

SEQ ID NO: 575302 - RNA, 19 nt, Human
gggccggggagggaggggg

SEQ ID NO: 575303 - RNA, 20 nt, Human
gggccggggagggagggggu

SEQ ID NO: 575304 - RNA, 19 nt, Human
ggggagggugcacaaggca

SEQ ID NO: 575305 - RNA, 18 nt, Human
gugacgccaugccacagc

SEQ ID NO: 575306 - RNA, 19 nt, Human
guuugggggccaaaaucaa

SEQ ID NO: 575307 - RNA, 18 nt, Human
uccugggaucugaagccu

SEQ ID NO: 575308 - RNA, 18 nt, Human
ucuccaggaaguacugca

SEQ ID NO: 575309 - RNA, 21 nt, Human
ucuuccugggaucugaagccu

SEQ ID NO: 575310 - RNA, 24 nt, Human
ugaacaagcauuuuauuccaggga

SEQ ID NO: 575311 - RNA, 19 nt, Human
ugacaaggugggccagaac

SEQ ID NO: 575312 - RNA, 22 nt, Human
ugcuucucccucuucuccagga

SEQ ID NO: 575313 - RNA, 18 nt, Human
uggaagccucugacaagg

SEQ ID NO: 575314 - RNA, 24 nt, Human
uggaagccucugacaaggugggcc

SEQ ID NO: 575315 - RNA, 19 nt, Human
ugggaucugaagccuaaag

SEQ ID NO: 575316 - RNA, 24 nt, Human
ugggaucugaagccuaaagaaagc

SEQ ID NO: 575317 - RNA, 22 nt, Human
uggggagggugcacaaggcagc

SEQ ID NO: 575318 - RNA, 22 nt, Human
ugugagcaggguggaagccucu

SEQ ID NO: 575319 - RNA, 26 nt, Human
ugugcaggacagggacaggggaacgc

SEQ ID NO: 575320 - RNA, 23 nt, Human
uguuccuacaaccacagugacgu

SEQ ID NO: 575321 - RNA, 25 nt, Human
uucacagccccucacucagccuccc

SEQ ID NO: 575322 - RNA, 19 nt, Human
uucagcccauuccucaacc

SEQ ID NO: 575323 - RNA, 19 nt, Human
aaacugacaguuggaacuc

SEQ ID NO: 575324 - RNA, 19 nt, Human
aagcaaaauccuucaccau

SEQ ID NO: 575325 - RNA, 19 nt, Human
aaucaagguaacagggcca

SEQ ID NO: 575326 - RNA, 20 nt, Human
accacuaaacauuaaaaggg

SEQ ID NO: 575327 - RNA, 18 nt, Human
agagauguguuucuuguc

SEQ ID NO: 575328 - RNA, 26 nt, Human
agcagcauguggcacacagaguugac

SEQ ID NO: 575329 - RNA, 21 nt, Human
caaaauccuucaccaugugau

SEQ ID NO: 575330 - RNA, 23 nt, Human
caauguuuaccuucagcauccca

SEQ ID NO: 575331 - RNA, 23 nt, Human
cacacagaguugacaaacugaca

SEQ ID NO: 575332 - RNA, 19 nt, Human
caccuuacaaccacaggau

SEQ ID NO: 575333 - RNA, 21 nt, Human
cacuaaacauuaaaagggccc

SEQ ID NO: 575334 - RNA, 21 nt, Human
cagaacuuaguagggccaucu

SEQ ID NO: 575335 - RNA, 19 nt, Human
caggauccucaaaaaagaa

SEQ ID NO: 575336 - RNA, 21 nt, Human
cagggccaaagguguccaggc

SEQ ID NO: 575337 - RNA, 19 nt, Human
caguaaauacuguagucac

SEQ ID NO: 575338 - RNA, 20 nt, Human
cauugcuuccucagaagcaa

SEQ ID NO: 575339 - RNA, 19 nt, Human
cauuguguugcagaaauac

SEQ ID NO: 575340 - RNA, 23 nt, Human
ccaucugucgauaagcuuucacu

SEQ ID NO: 575341 - RNA, 23 nt, Human
cugucuuucaccaugcuugguuc

SEQ ID NO: 575342 - RNA, 23 nt, Human
cuucagaaaaugccucacucucu

SEQ ID NO: 575343 - RNA, 20 nt, Human
cuugaaucaagguaacaggg

SEQ ID NO: 575344 - RNA, 19 nt, Human
cuugucuuuuaguuugauu

SEQ ID NO: 575345 - RNA, 21 nt, Human
gcuuccucagaagcaaaaucc

SEQ ID NO: 575346 - RNA, 22 nt, Human
guagagagcagcauguggcaca

SEQ ID NO: 575347 - RNA, 19 nt, Human
uaaaguagaaugaaacuca

SEQ ID NO: 575348 - RNA, 28 nt, Human
uaacagggccaaagguguccaggcugaa

SEQ ID NO: 575349 - RNA, 21 nt, Human
uaacaugcagagguuuuccuu

SEQ ID NO: 575350 - RNA, 22 nt, Human
uaaguggagguuaggaguagcu

SEQ ID NO: 575351 - RNA, 19 nt, Human
uacauuguguugcagaaau

SEQ ID NO: 575352 - RNA, 19 nt, Human
uagagagcagcauguggca

SEQ ID NO: 575353 - RNA, 20 nt, Human
uaguagguuccacuugcucu

SEQ ID NO: 575354 - RNA, 19 nt, Human
uccacuguccagaucugcc

SEQ ID NO: 575355 - RNA, 18 nt, Human
ucuaccaaaggaaccuua

SEQ ID NO: 575356 - RNA, 18 nt, Human
ucuuucuuuugguuugua

SEQ ID NO: 575357 - RNA, 24 nt, Human
ugagaaguauuucuguggcuacac

SEQ ID NO: 575358 - RNA, 24 nt, Human
ugauugaagauaacaugcagaggu

SEQ ID NO: 575359 - RNA, 26 nt, Human
ugccucacucucuuccuugaucuuca

SEQ ID NO: 575360 - RNA, 19 nt, Human
ugcucugucaccacuaaac

SEQ ID NO: 575361 - RNA, 19 nt, Human
uguccagaucugccaaagu

SEQ ID NO: 575362 - RNA, 18 nt, Human
ugucuaguaggaaagaua

SEQ ID NO: 575363 - RNA, 22 nt, Human
uuacaagucuuucuuuugguuu

SEQ ID NO: 575364 - RNA, 22 nt, Human
uuauaauaacauaaaaaugaga

SEQ ID NO: 575365 - RNA, 21 nt, Human
uucaaagcaauaaugaaagga

SEQ ID NO: 575366 - RNA, 19 nt, Human
uucacuucuaccaaaggaa

SEQ ID NO: 575367 - RNA, 27 nt, Human
uugcagaaauaccugucuuucaccaug

SEQ ID NO: 575368 - RNA, 21 nt, Human
uuuccacuguccagaucugcc

SEQ ID NO: 575369 - RNA, 19 nt, Human
aaacaugauuuauuacuuu

SEQ ID NO: 575370 - RNA, 21 nt, Human
aaagaacaggaagggccuggg

SEQ ID NO: 575371 - RNA, 22 nt, Human
aaauuuacugucaccuggaccu

SEQ ID NO: 575372 - RNA, 18 nt, Human
aacuccugcagccauccc

SEQ ID NO: 575373 - RNA, 19 nt, Human
aagaaauggaacagaagca

SEQ ID NO: 575374 - RNA, 21 nt, Human
aagaacaaaaaaaaaucugca

SEQ ID NO: 575375 - RNA, 23 nt, Human
aagaucacgccauugcauuccag

SEQ ID NO: 575376 - RNA, 23 nt, Human
aagccagagcugagcagcuguga

SEQ ID NO: 575377 - RNA, 24 nt, Human
aaucacccgaacccaggaggcgga

SEQ ID NO: 575378 - RNA, 20 nt, Human
acaagcgcgaaacuccaucu

SEQ ID NO: 575379 - RNA, 24 nt, Human
acccaggaggcggagguugcagug

SEQ ID NO: 575380 - RNA, 22 nt, Human
agaacaaaaaaaaaucugcaaa

SEQ ID NO: 575381 - RNA, 21 nt, Human
agaaugacaggagggggccgu

SEQ ID NO: 575382 - RNA, 18 nt, Human
agcaagaucagguuuccu

SEQ ID NO: 575383 - RNA, 20 nt, Human
agcaaggaggggcguagggc

SEQ ID NO: 575384 - RNA, 20 nt, Human
agcacuuuggguggcuaagg

SEQ ID NO: 575385 - RNA, 24 nt, Human
agccugggcaaugagacaaaaccc

SEQ ID NO: 575386 - RNA, 20 nt, Human
aggaguuugagaccagccug

SEQ ID NO: 575387 - RNA, 24 nt, Human
aggcaccugagguugccgggagcc

SEQ ID NO: 575388 - RNA, 18 nt, Human
aggcaggagaaucacccg

SEQ ID NO: 575389 - RNA, 18 nt, Human
aggcaggagaaucacccg

SEQ ID NO: 575390 - RNA, 24 nt, Human
aggcaggagaaucacccgaaccca

SEQ ID NO: 575391 - RNA, 18 nt, Human
aggcagggccaacggccu

SEQ ID NO: 575392 - RNA, 18 nt, Human
aggcccaggagggucgag

SEQ ID NO: 575393 - RNA, 24 nt, Human
aggcggagguugcagugagccaag

SEQ ID NO: 575394 - RNA, 19 nt, Human
aggcugaggcaggagaauc

SEQ ID NO: 575395 - RNA, 19 nt, Human
aggcugcugguggugggga

SEQ ID NO: 575396 - RNA, 21 nt, Human
agggagguagguucuacucag

SEQ ID NO: 575397 - RNA, 22 nt, Human
aggggcguagggcaaagaacag

SEQ ID NO: 575398 - RNA, 21 nt, Human
aggggcuccagagcccgaagc

SEQ ID NO: 575399 - RNA, 24 nt, Human
aggggcucuugggcagggaaggug

SEQ ID NO: 575400 - RNA, 20 nt, Human
agggggccgugccauggagc

SEQ ID NO: 575401 - RNA, 22 nt, Human
auacagguaugcaaugcauaau

SEQ ID NO: 575402 - RNA, 24 nt, Human
aucacgccauugcauuccagccug

SEQ ID NO: 575403 - RNA, 23 nt, Human
auggaacccagcagcuggcacug

SEQ ID NO: 575404 - RNA, 24 nt, Human
auugcauuccagccugggcaacaa

SEQ ID NO: 575405 - RNA, 22 nt, Human
caacuccuucagccuagacacc

SEQ ID NO: 575406 - RNA, 25 nt, Human
caagacucccaaccaggcugaucca

SEQ ID NO: 575407 - RNA, 24 nt, Human
caaugagacaaaaccccgucucua

SEQ ID NO: 575408 - RNA, 24 nt, Human
caauuaugcucuuuauuuuuaaau

SEQ ID NO: 575409 - RNA, 24 nt, Human
cacccauguaauuccagcacuuug

SEQ ID NO: 575410 - RNA, 18 nt, Human
caccuggaccucauccug

SEQ ID NO: 575411 - RNA, 20 nt, Human
cacugggucuaguuugggga

SEQ ID NO: 575412 - RNA, 26 nt, Human
cagaagccagagcugagcagugggca

SEQ ID NO: 575413 - RNA, 22 nt, Human
cagacagcggggagaaguuggg

SEQ ID NO: 575414 - RNA, 18 nt, Human
cagcaaggaggggcguag

SEQ ID NO: 575415 - RNA, 20 nt, Human
cagcacuuuggguggcuaag

SEQ ID NO: 575416 - RNA, 23 nt, Human
cagcacuuuggguggcuaaggca

SEQ ID NO: 575417 - RNA, 22 nt, Human
cagcgacaaccggcugcccaaa

SEQ ID NO: 575418 - RNA, 24 nt, Human
cagcuacucgggaggcugaggcag

SEQ ID NO: 575419 - RNA, 20 nt, Human
caggagauguuacugcuggg

SEQ ID NO: 575420 - RNA, 19 nt, Human
caggauucaaaugcuuucc

SEQ ID NO: 575421 - RNA, 22 nt, Human
caggggcuccagagcccgaagc

SEQ ID NO: 575422 - RNA, 23 nt, Human
caucuagauuuuuaaaaauaauu

SEQ ID NO: 575423 - RNA, 19 nt, Human
cauggagccaagacuccca

SEQ ID NO: 575424 - RNA, 22 nt, Human
cauuccagccugggcaacaagc

SEQ ID NO: 575425 - RNA, 18 nt, Human
cauugcauuccagccugg

SEQ ID NO: 575426 - RNA, 19 nt, Human
cauugcauuccagccuggg

SEQ ID NO: 575427 - RNA, 24 nt, Human
cauugcauuccagccugggcaaca

SEQ ID NO: 575428 - RNA, 20 nt, Human
ccagaccgagguaguuucug

SEQ ID NO: 575429 - RNA, 20 nt, Human
ccauugcauuccagccuggg

SEQ ID NO: 575430 - RNA, 21 nt, Human
ccauugcauuccagccugggc

SEQ ID NO: 575431 - RNA, 22 nt, Human
ccauugcauuccagccugggca

SEQ ID NO: 575432 - RNA, 23 nt, Human
ccauugcauuccagccugggcaa

SEQ ID NO: 575433 - RNA, 24 nt, Human
ccauugcauuccagccugggcaac

SEQ ID NO: 575434 - RNA, 23 nt, Human
cccacacagggagcgcgcaggau

SEQ ID NO: 575435 - RNA, 21 nt, Human
cccgcggucccagcuacucgg

SEQ ID NO: 575436 - RNA, 22 nt, Human
cccgucucuacaaaaaaauaca

SEQ ID NO: 575437 - RNA, 22 nt, Human
ccguuagugauggcugaucgag

SEQ ID NO: 575438 - RNA, 24 nt, Human
ccuacagagcaggguuacccuaaa

SEQ ID NO: 575439 - RNA, 24 nt, Human
ccuccccucuuuccaggauucaaa

SEQ ID NO: 575440 - RNA, 21 nt, Human
ccugcagaugcgccagggccc

SEQ ID NO: 575441 - RNA, 23 nt, Human
ccugggcaaugagacaaaacccc

SEQ ID NO: 575442 - RNA, 24 nt, Human
ccugggcaaugagacaaaaccccg

SEQ ID NO: 575443 - RNA, 23 nt, Human
ccuucagccuagacacccugauc

SEQ ID NO: 575444 - RNA, 22 nt, Human
cgagggugguuucugguucacc

SEQ ID NO: 575445 - RNA, 22 nt, Human
cggagccaccuggaggucucug

SEQ ID NO: 575446 - RNA, 24 nt, Human
cgggaggcugaggcaggagaauca

SEQ ID NO: 575447 - RNA, 19 nt, Human
cuacaaaaaaauacaaaaa

SEQ ID NO: 575448 - RNA, 19 nt, Human
cuacagcuuucucugucug

SEQ ID NO: 575449 - RNA, 18 nt, Human
cuagagucccuccccucu

SEQ ID NO: 575450 - RNA, 22 nt, Human
cuagagucccuccccucuuucc

SEQ ID NO: 575451 - RNA, 20 nt, Human
cucaagaacaaaaaaaaauc

SEQ ID NO: 575452 - RNA, 24 nt, Human
cucacccauguaauuccagcacuu

SEQ ID NO: 575453 - RNA, 22 nt, Human
cuggagcccacacagggagcgc

SEQ ID NO: 575454 - RNA, 18 nt, Human
cuggggaccagucagggg

SEQ ID NO: 575455 - RNA, 19 nt, Human
gaacaaaaaaaaaucugca

SEQ ID NO: 575456 - RNA, 18 nt, Human
gaccugggcgaggaaggc

SEQ ID NO: 575457 - RNA, 18 nt, Human
gacuaagaaauggaacag

SEQ ID NO: 575458 - RNA, 21 nt, Human
gagagugucagcucagguaga

SEQ ID NO: 575459 - RNA, 24 nt, Human
gagccacugggucuaguuugggga

SEQ ID NO: 575460 - RNA, 19 nt, Human
gaggcuggacacgguagcu

SEQ ID NO: 575461 - RNA, 22 nt, Human
gagguugcagugagccaagauc

SEQ ID NO: 575462 - RNA, 19 nt, Human
gaugcgccagggcccgagu

SEQ ID NO: 575463 - RNA, 22 nt, Human
gcaggagaaucacccgaaccca

SEQ ID NO: 575464 - RNA, 22 nt, Human
gccauugcauuccagccugggc

SEQ ID NO: 575465 - RNA, 24 nt, Human
gccauugcauuccagccugggcaa

SEQ ID NO: 575466 - RNA, 25 nt, Human
gcccugggacuccucuggaauccca

SEQ ID NO: 575467 - RNA, 23 nt, Human
gcugcuggugguggggagaucca

SEQ ID NO: 575468 - RNA, 22 nt, Human
ggaggcggagguugcagugagc

SEQ ID NO: 575469 - RNA, 20 nt, Human
ggagguugcagugagccaag

SEQ ID NO: 575470 - RNA, 24 nt, Human
ggagguugcagugagccaagauca

SEQ ID NO: 575471 - RNA, 24 nt, Human
ggcaaggggaccaccuggagccca

SEQ ID NO: 575472 - RNA, 19 nt, Human
ggcuccuguaggcaagggg

SEQ ID NO: 575473 - RNA, 21 nt, Human
gggccuggguuugggagaagc

SEQ ID NO: 575474 - RNA, 23 nt, Human
ggggaccagucaggggcucuugg

SEQ ID NO: 575475 - RNA, 20 nt, Human
ggggagaggcagguguucug

SEQ ID NO: 575476 - RNA, 24 nt, Human
ggggcguagggcaaagaacaggaa

SEQ ID NO: 575477 - RNA, 23 nt, Human
guagggcaaagaacaggaagagg

SEQ ID NO: 575478 - RNA, 23 nt, Human
guuagugauggcugaucgagggu

SEQ ID NO: 575479 - RNA, 19 nt, Human
uaagaguagccucauccag

SEQ ID NO: 575480 - RNA, 22 nt, Human
uaccuggcgguuuacagaagcc

SEQ ID NO: 575481 - RNA, 21 nt, Human
uagagucccuccccucuuucc

SEQ ID NO: 575482 - RNA, 22 nt, Human
uagcucacccauguaauuccag

SEQ ID NO: 575483 - RNA, 24 nt, Human
uagcucacccauguaauuccagca

SEQ ID NO: 575484 - RNA, 26 nt, Human
uaguuuggggaaacccgggggugggu

SEQ ID NO: 575485 - RNA, 23 nt, Human
ucacgccauugcauuccagccug

SEQ ID NO: 575486 - RNA, 19 nt, Human
ucaucgaaggggcggggaa

SEQ ID NO: 575487 - RNA, 19 nt, Human
uccaacuccugcagccauc

SEQ ID NO: 575488 - RNA, 20 nt, Human
uccaccuccgaccggagcca

SEQ ID NO: 575489 - RNA, 20 nt, Human
uccagccugggcaacaagcg

SEQ ID NO: 575490 - RNA, 25 nt, Human
ucccugcagcgacaaccggcugccc

SEQ ID NO: 575491 - RNA, 22 nt, Human
uccuucagccuagacacccuga

SEQ ID NO: 575492 - RNA, 25 nt, Human
ucgggaggcugaggcaggagaauca

SEQ ID NO: 575493 - RNA, 19 nt, Human
ucuacucaggagauguuac

SEQ ID NO: 575494 - RNA, 22 nt, Human
ugagacaaaaccccgucucuac

SEQ ID NO: 575495 - RNA, 20 nt, Human
ugaggcaggagaaucacccg

SEQ ID NO: 575496 - RNA, 21 nt, Human
ugaggcaggagaaucacccga

SEQ ID NO: 575497 - RNA, 24 nt, Human
ugaggcaggagaaucacccgaacc

SEQ ID NO: 575498 - RNA, 25 nt, Human
ugaggcaggagaaucacccgaaccc

SEQ ID NO: 575499 - RNA, 18 nt, Human
ugaggcuuggaggggagc

SEQ ID NO: 575500 - RNA, 20 nt, Human
ugauagcaagaucagguuuc

SEQ ID NO: 575501 - RNA, 27 nt, Human
ugauuggcagacacccucagcuccucu

SEQ ID NO: 575502 - RNA, 21 nt, Human
ugcaaaucugcacaaucgcac

SEQ ID NO: 575503 - RNA, 19 nt, Human
ugcauuccagccugggcaa

SEQ ID NO: 575504 - RNA, 22 nt, Human
ugcauuccagccugggcaacaa

SEQ ID NO: 575505 - RNA, 19 nt, Human
ugcccggagcgggcugaaa

SEQ ID NO: 575506 - RNA, 22 nt, Human
uggcacacacccgcggucccag

SEQ ID NO: 575507 - RNA, 21 nt, Human
uggcacuggacguuugccagg

SEQ ID NO: 575508 - RNA, 18 nt, Human
ugggagaagccuaggagu

SEQ ID NO: 575509 - RNA, 19 nt, Human
ugggagaagccuaggagug

SEQ ID NO: 575510 - RNA, 22 nt, Human
ugggcagggaaggugggggcuc

SEQ ID NO: 575511 - RNA, 23 nt, Human
ugguggcacacacccgcgguccc

SEQ ID NO: 575512 - RNA, 18 nt, Human
ugugguggcacacacccg

SEQ ID NO: 575513 - RNA, 23 nt, Human
uuacugcugggcguggcuugcgg

SEQ ID NO: 575514 - RNA, 25 nt, Human
uuacugcugggcguggcuugcgggg

SEQ ID NO: 575515 - RNA, 21 nt, Human
uucccuccaacuccugcagcc

SEQ ID NO: 575516 - RNA, 20 nt, Human
uugcagugagccaagaucac

SEQ ID NO: 575517 - RNA, 26 nt, Human
uuuaagcagcagcaauugauagcaag

SEQ ID NO: 575518 - RNA, 26 nt, Human
aaaaaaaaaaauuaaagugcuucagg

SEQ ID NO: 575519 - RNA, 24 nt, Human
aaaacggacagucucccccaagua

SEQ ID NO: 575520 - RNA, 18 nt, Human
aaacggacagucuccccc

SEQ ID NO: 575521 - RNA, 20 nt, Human
aacccgaaccgagacccggc

SEQ ID NO: 575522 - RNA, 22 nt, Human
aacccuugcccuggccuagggg

SEQ ID NO: 575523 - RNA, 18 nt, Human
aagaugaccucaucugug

SEQ ID NO: 575524 - RNA, 21 nt, Human
aaugaggaagagacuuuguaa

SEQ ID NO: 575525 - RNA, 19 nt, Human
aaugucagaggugggaaag

SEQ ID NO: 575526 - RNA, 26 nt, Human
acaaucuuggccuuaggugucccugg

SEQ ID NO: 575527 - RNA, 21 nt, Human
acaggcagcucugccaggccu

SEQ ID NO: 575528 - RNA, 19 nt, Human
acccccacccccaggaucc

SEQ ID NO: 575529 - RNA, 19 nt, Human
accggaggccgaccgccgg

SEQ ID NO: 575530 - RNA, 21 nt, Human
agacaggcagcucugccaggc

SEQ ID NO: 575531 - RNA, 21 nt, Human
agacccggcagcgcccggacg

SEQ ID NO: 575532 - RNA, 18 nt, Human
agcgcaacaccagcagaa

SEQ ID NO: 575533 - RNA, 20 nt, Human
aggaaggucacugucagggg

SEQ ID NO: 575534 - RNA, 21 nt, Human
aggcagcucugccaggccucu

SEQ ID NO: 575535 - RNA, 23 nt, Human
agggagggaaugucagagguggg

SEQ ID NO: 575536 - RNA, 25 nt, Human
aguuacaggaacagaccaaaaaaaa

SEQ ID NO: 575537 - RNA, 21 nt, Human
aucaccacccucuaaucucag

SEQ ID NO: 575538 - RNA, 25 nt, Human
aucuguggacacaaucgguuccucu

SEQ ID NO: 575539 - RNA, 21 nt, Human
caagacaggcagcucugccag

SEQ ID NO: 575540 - RNA, 20 nt, Human
caagacaggcagcucugccg

SEQ ID NO: 575541 - RNA, 23 nt, Human
cacagcuucuucccccaucccuc

SEQ ID NO: 575542 - RNA, 22 nt, Human
cacggucaaguguuuuccagcc

SEQ ID NO: 575543 - RNA, 27 nt, Human
cagaccaaaaaaaaaaaaauuaaagug

SEQ ID NO: 575544 - RNA, 20 nt, Human
cagagggucccgacaccucc

SEQ ID NO: 575545 - RNA, 25 nt, Human
cagcagaaaacggacagucuccccc

SEQ ID NO: 575546 - RNA, 22 nt, Human
cagcagcgugcucacuugggcc

SEQ ID NO: 575547 - RNA, 24 nt, Human
cagccaugcccgcccacuucacag

SEQ ID NO: 575548 - RNA, 19 nt, Human
cagcgcaacaccagcagaa

SEQ ID NO: 575549 - RNA, 18 nt, Human
cagugaaacggugagugg

SEQ ID NO: 575550 - RNA, 18 nt, Human
ccagggcgguugccaguu

SEQ ID NO: 575551 - RNA, 19 nt, Human
cccaaccccugagacagga

SEQ ID NO: 575552 - RNA, 25 nt, Human
cccacaggaacucggggaauacugg

SEQ ID NO: 575553 - RNA, 24 nt, Human
cccacccccaggauccccuccccc

SEQ ID NO: 575554 - RNA, 25 nt, Human
ccccaucccucaucagcagacacaa

SEQ ID NO: 575555 - RNA, 24 nt, Human
cccccacccccaggauccccuccc

SEQ ID NO: 575556 - RNA, 20 nt, Human
cccccaggauccccuccccc

SEQ ID NO: 575557 - RNA, 22 nt, Human
ccccccacaggaacucggggaa

SEQ ID NO: 575558 - RNA, 22 nt, Human
ccccccggcaucccgccuccgg

SEQ ID NO: 575559 - RNA, 20 nt, Human
cccccggugccggaccccgc

SEQ ID NO: 575560 - RNA, 26 nt, Human
cccgcaccgccccggcagcgcaacac

SEQ ID NO: 575561 - RNA, 21 nt, Human
cccggugccggaccccgcacc

SEQ ID NO: 575562 - RNA, 23 nt, Human
ccgccccccggcaucccgccucc

SEQ ID NO: 575563 - RNA, 19 nt, Human
ccgccccggcagcgcaaca

SEQ ID NO: 575564 - RNA, 19 nt, Human
ccgccgccccccggcaucc

SEQ ID NO: 575565 - RNA, 23 nt, Human
ccgccgccccccggcaucccgcc

SEQ ID NO: 575566 - RNA, 23 nt, Human
ccgccgccccccggcaucccgcc

SEQ ID NO: 575567 - RNA, 24 nt, Human
ccgccgccccccggcaucccgccu

SEQ ID NO: 575568 - RNA, 21 nt, Human
ccgcgcgcggcggcagcggca

SEQ ID NO: 575569 - RNA, 18 nt, Human
ccggggcaacgaacccga

SEQ ID NO: 575570 - RNA, 19 nt, Human
ccggggcaacgaacccgaa

SEQ ID NO: 575571 - RNA, 19 nt, Human
ccggucccggcaccggggc

SEQ ID NO: 575572 - RNA, 24 nt, Human
ccuccacaggcagcguggucgcuc

SEQ ID NO: 575573 - RNA, 21 nt, Human
ccucuggagcccaagcccggg

SEQ ID NO: 575574 - RNA, 23 nt, Human
ccucugggggcguugggucucug

SEQ ID NO: 575575 - RNA, 23 nt, Human
ccuggcccuguccccaaccccug

SEQ ID NO: 575576 - RNA, 27 nt, Human
ccuggcccuguccccaaccccugagac

SEQ ID NO: 575577 - RNA, 21 nt, Human
cgaauccuggucgccggcgcc

SEQ ID NO: 575578 - RNA, 22 nt, Human
cgaauccuggucgccggcgccg

SEQ ID NO: 575579 - RNA, 22 nt, Human
cgcaacaccagcagaaaacgga

SEQ ID NO: 575580 - RNA, 24 nt, Human
cgcccgguaccggcccggaucccc

SEQ ID NO: 575581 - RNA, 21 nt, Human
cggcaccggggcaacgaaccc

SEQ ID NO: 575582 - RNA, 22 nt, Human
cggcagcgcaacaccagcagaa

SEQ ID NO: 575583 - RNA, 21 nt, Human
cggcccggauccccugccagc

SEQ ID NO: 575584 - RNA, 24 nt, Human
cggcggcagcggcacggccgggaa

SEQ ID NO: 575585 - RNA, 26 nt, Human
cggugccggaccccgcaccgccccgg

SEQ ID NO: 575586 - RNA, 24 nt, Human
cuagggguggggccagcccccccc

SEQ ID NO: 575587 - RNA, 21 nt, Human
cucugccaggccucuucaccc

SEQ ID NO: 575588 - RNA, 21 nt, Human
cugcagcaaucgcagguagcc

SEQ ID NO: 575589 - RNA, 22 nt, Human
cuggagcccaagcccgggccgc

SEQ ID NO: 575590 - RNA, 20 nt, Human
cuggcccuguccccaacccc

SEQ ID NO: 575591 - RNA, 18 nt, Human
gaacaaacccccaccccc

SEQ ID NO: 575592 - RNA, 25 nt, Human
gaaccgagacccggcagcgcccgga

SEQ ID NO: 575593 - RNA, 18 nt, Human
gaaugaggaagagacuuu

SEQ ID NO: 575594 - RNA, 20 nt, Human
gacuuuguaaacucagaacc

SEQ ID NO: 575595 - RNA, 20 nt, Human
gauaacuggcguugaaguug

SEQ ID NO: 575596 - RNA, 22 nt, Human
gcagggcccgggccgugggugg

SEQ ID NO: 575597 - RNA, 19 nt, Human
gcaucucagaaccggaggg

SEQ ID NO: 575598 - RNA, 24 nt, Human
gcccacuucacagcuucuuccccc

SEQ ID NO: 575599 - RNA, 21 nt, Human
gcccggauccccugccagcuc

SEQ ID NO: 575600 - RNA, 19 nt, Human
gcccuggccuagggguggg

SEQ ID NO: 575601 - RNA, 23 nt, Human
ggaacaaacccccacccccagga

SEQ ID NO: 575602 - RNA, 18 nt, Human
ggagcccaagcccgggcc

SEQ ID NO: 575603 - RNA, 21 nt, Human
ggcaacgaacccgaaccgaga

SEQ ID NO: 575604 - RNA, 18 nt, Human
ggcccuguccccaacccc

SEQ ID NO: 575605 - RNA, 18 nt, Human
ggcccuguccccaacccc

SEQ ID NO: 575606 - RNA, 23 nt, Human
gggcagcgcccgguaccggcccg

SEQ ID NO: 575607 - RNA, 21 nt, Human
gggccgugggugagaaggggg

SEQ ID NO: 575608 - RNA, 24 nt, Human
gguggggccagccccccccacagg

SEQ ID NO: 575609 - RNA, 21 nt, Human
uaaguuacaggaacagaccaa

SEQ ID NO: 575610 - RNA, 20 nt, Human
uaccggcccggauccccugc

SEQ ID NO: 575611 - RNA, 19 nt, Human
uagcagggcccgggccgug

SEQ ID NO: 575612 - RNA, 20 nt, Human
uaggguggguccagaggguc

SEQ ID NO: 575613 - RNA, 22 nt, Human
uaguuggaaaauaaguuacagg

SEQ ID NO: 575614 - RNA, 19 nt, Human
uauccagugaaacggugag

SEQ ID NO: 575615 - RNA, 18 nt, Human
ucacuacaaucuuggccu

SEQ ID NO: 575616 - RNA, 22 nt, Human
ucacuacaaucuuggccuuagg

SEQ ID NO: 575617 - RNA, 19 nt, Human
ucagcagcgugcucacucc

SEQ ID NO: 575618 - RNA, 18 nt, Human
ucccagccaugcccgccc

SEQ ID NO: 575619 - RNA, 23 nt, Human
ucccucaucagcagacacaagac

SEQ ID NO: 575620 - RNA, 23 nt, Human
ucccuccugaacaggcauuuaau

SEQ ID NO: 575621 - RNA, 20 nt, Human
ucgccggcgccgccgccccc

SEQ ID NO: 575622 - RNA, 20 nt, Human
ucgguuccuccacaggcagc

SEQ ID NO: 575623 - RNA, 18 nt, Human
ucucugaccucuggugcc

SEQ ID NO: 575624 - RNA, 24 nt, Human
ugaccucuggugccucaaucuccc

SEQ ID NO: 575625 - RNA, 20 nt, Human
ugagaagggggcugcagccu

SEQ ID NO: 575626 - RNA, 18 nt, Human
ugagacaggaaggucacu

SEQ ID NO: 575627 - RNA, 19 nt, Human
ugagaggagcuguucagca

SEQ ID NO: 575628 - RNA, 21 nt, Human
ugcccuggccuaggggugggg

SEQ ID NO: 575629 - RNA, 19 nt, Human
ugccucaaucucccgcuuc

SEQ ID NO: 575630 - RNA, 22 nt, Human
ugcucacuugggccuugaaagc

SEQ ID NO: 575631 - RNA, 20 nt, Human
uggaaaauaaguuacaggaa

SEQ ID NO: 575632 - RNA, 24 nt, Human
uggacacaaucgguuccuccacag

SEQ ID NO: 575633 - RNA, 19 nt, Human
uggagcccaagcccgggcc

SEQ ID NO: 575634 - RNA, 24 nt, Human
uggagcccaagcccgggccgcccc

SEQ ID NO: 575635 - RNA, 20 nt, Human
uggcccuguccccaaccccu

SEQ ID NO: 575636 - RNA, 19 nt, Human
ugggaaagaacucaacggg

SEQ ID NO: 575637 - RNA, 20 nt, Human
ugggaaagaacucaacggga

SEQ ID NO: 575638 - RNA, 19 nt, Human
ugggagcccggaccggagg

SEQ ID NO: 575639 - RNA, 22 nt, Human
ugucagaggugggaaagaacuc

SEQ ID NO: 575640 - RNA, 27 nt, Human
uuacaggaacagaccaaaaaaaaaaaa

SEQ ID NO: 575641 - RNA, 22 nt, Human
uucacagcuucuucccccaucc

SEQ ID NO: 575642 - RNA, 24 nt, Human
uugaaagcgcucugcucgccccgg

SEQ ID NO: 575643 - RNA, 18 nt, Human
uuucucccuccugaacag

SEQ ID NO: 575644 - RNA, 24 nt, Human
uuuuuuuuuuucucccuccugaac

SEQ ID NO: 575645 - RNA, 25 nt, Human
uuuuuuuuuuuuucucccuccuccc

SEQ ID NO: 575646 - RNA, 26 nt, Human
uuuuuuuuuuuuuucucccuccccca

SEQ ID NO: 575647 - RNA, 24 nt, Human
aaagugcugggauuacaggcgcga

SEQ ID NO: 575648 - RNA, 24 nt, Human
aacgauucuccugccucagccucc

SEQ ID NO: 575649 - RNA, 20 nt, Human
aagaaacugcacaacuucca

SEQ ID NO: 575650 - RNA, 24 nt, Human
aagcaaacgugugaacacauucuu

SEQ ID NO: 575651 - RNA, 18 nt, Human
aagugcugggauuacagg

SEQ ID NO: 575652 - RNA, 19 nt, Human
aagugcugggauuacaggc

SEQ ID NO: 575653 - RNA, 26 nt, Human
aagugcugggauuacaggcgcgagcc

SEQ ID NO: 575654 - RNA, 24 nt, Human
acccgggcuggagugcaauggcau

SEQ ID NO: 575655 - RNA, 24 nt, Human
accucgugaucugcccaccuuggc

SEQ ID NO: 575656 - RNA, 24 nt, Human
acuguaacccgggcuggagugcaa

SEQ ID NO: 575657 - RNA, 22 nt, Human
agaaagccucacacuguaaccc

SEQ ID NO: 575658 - RNA, 20 nt, Human
agaagugcagaggggacugu

SEQ ID NO: 575659 - RNA, 22 nt, Human
agacuacaggugccauccacca

SEQ ID NO: 575660 - RNA, 23 nt, Human
agcaaacgugugaacacauucuu

SEQ ID NO: 575661 - RNA, 19 nt, Human
agccuccugaguagcuaag

SEQ ID NO: 575662 - RNA, 19 nt, Human
aggguaggucguguguguc

SEQ ID NO: 575663 - RNA, 20 nt, Human
aggugccauccaccacgccc

SEQ ID NO: 575664 - RNA, 23 nt, Human
agguucaaacgauucuccugccu

SEQ ID NO: 575665 - RNA, 24 nt, Human
agugcaauggcaugaucuuggcuc

SEQ ID NO: 575666 - RNA, 18 nt, Human
agugcugggauuacaggc

SEQ ID NO: 575667 - RNA, 23 nt, Human
auuugcauaauaguaaacaucac

SEQ ID NO: 575668 - RNA, 23 nt, Human
caaacacagaagagaaaagccga

SEQ ID NO: 575669 - RNA, 20 nt, Human
caaacgauucuccugccuca

SEQ ID NO: 575670 - RNA, 22 nt, Human
caaacgauucuccugccucagc

SEQ ID NO: 575671 - RNA, 24 nt, Human
caaagugcugggauuacaggcgcg

SEQ ID NO: 575672 - RNA, 27 nt, Human
caacaaugauccuguaaggaacauuaa

SEQ ID NO: 575673 - RNA, 23 nt, Human
caaccuccaccucccagguucaa

SEQ ID NO: 575674 - RNA, 18 nt, Human
cacaggcuuccaggagag

SEQ ID NO: 575675 - RNA, 21 nt, Human
cacugcaaccuccaccuccca

SEQ ID NO: 575676 - RNA, 21 nt, Human
cacugcacucgaccgcccuga

SEQ ID NO: 575677 - RNA, 20 nt, Human
cagacucaggaggaagacag

SEQ ID NO: 575678 - RNA, 23 nt, Human
cagcaggcaaacacagaagagaa

SEQ ID NO: 575679 - RNA, 18 nt, Human
cagccucaccucuacgaa

SEQ ID NO: 575680 - RNA, 20 nt, Human
cagccuccugaguagcuaag

SEQ ID NO: 575681 - RNA, 19 nt, Human
caggucaguucaacaacaa

SEQ ID NO: 575682 - RNA, 23 nt, Human
cauccaccacgcccaacuaauuu

SEQ ID NO: 575683 - RNA, 19 nt, Human
ccaaagugcugggauuaca

SEQ ID NO: 575684 - RNA, 22 nt, Human
ccaaagugcugggauuacaggc

SEQ ID NO: 575685 - RNA, 23 nt, Human
ccaaagugcugggauuacaggcg

SEQ ID NO: 575686 - RNA, 20 nt, Human
ccaccacgcccaacuaauuu

SEQ ID NO: 575687 - RNA, 24 nt, Human
ccaccucccagguucaaacgauuc

SEQ ID NO: 575688 - RNA, 24 nt, Human
ccacugcacucgaccgcccugagc

SEQ ID NO: 575689 - RNA, 21 nt, Human
ccauccaccacgcccaacuaa

SEQ ID NO: 575690 - RNA, 19 nt, Human
cccacagagaagugcagag

SEQ ID NO: 575691 - RNA, 21 nt, Human
cccggcaccagcaaguacacu

SEQ ID NO: 575692 - RNA, 24 nt, Human
ccuauguuuaccagguuggucucg

SEQ ID NO: 575693 - RNA, 24 nt, Human
ccucccagguucaaacgauucucc

SEQ ID NO: 575694 - RNA, 24 nt, Human
ccugaguagcuaagacuacaggug

SEQ ID NO: 575695 - RNA, 22 nt, Human
ccugcaacuagagggucugauc

SEQ ID NO: 575696 - RNA, 20 nt, Human
ccugcagcucugcaauguuu

SEQ ID NO: 575697 - RNA, 23 nt, Human
ccugccucagccuccugaguagc

SEQ ID NO: 575698 - RNA, 24 nt, Human
ccugccucagccuccugaguagcu

SEQ ID NO: 575699 - RNA, 24 nt, Human
cucacugcaaccuccaccucccag

SEQ ID NO: 575700 - RNA, 20 nt, Human
cuccucaccucgugaucugc

SEQ ID NO: 575701 - RNA, 24 nt, Human
cuccugaguagcuaagacuacagg

SEQ ID NO: 575702 - RNA, 22 nt, Human
cuccugccucagccuccugagu

SEQ ID NO: 575703 - RNA, 22 nt, Human
cucuacgaagcucccugcagag

SEQ ID NO: 575704 - RNA, 23 nt, Human
cugcaaccuccaccucccagguu

SEQ ID NO: 575705 - RNA, 24 nt, Human
cugcaaccuccaccucccagguuc

SEQ ID NO: 575706 - RNA, 25 nt, Human
cugcagaggccaugaaacagccugg

SEQ ID NO: 575707 - RNA, 24 nt, Human
cuggagcagaccugaugggaaggg

SEQ ID NO: 575708 - RNA, 24 nt, Human
cuggagugcaauggcaugaucuug

SEQ ID NO: 575709 - RNA, 24 nt, Human
cuuccaggagagccaggagucagg

SEQ ID NO: 575710 - RNA, 22 nt, Human
gaaacagccugggggugggcag

SEQ ID NO: 575711 - RNA, 24 nt, Human
gagaaaagccgaaucccugugaca

SEQ ID NO: 575712 - RNA, 20 nt, Human
gagauaggguuucccuaugu

SEQ ID NO: 575713 - RNA, 20 nt, Human
gagcagaccugaugggaagg

SEQ ID NO: 575714 - RNA, 19 nt, Human
gagcuuuuuuuccugcaac

SEQ ID NO: 575715 - RNA, 20 nt, Human
gauaggguuucccuauguuu

SEQ ID NO: 575716 - RNA, 18 nt, Human
gauuacaggcgcgagcca

SEQ ID NO: 575717 - RNA, 22 nt, Human
gauuacaggcgcgagccacugc

SEQ ID NO: 575718 - RNA, 23 nt, Human
gauuacaggcgcgagccacugca

SEQ ID NO: 575719 - RNA, 22 nt, Human
gcaaccuccaccucccagguuc

SEQ ID NO: 575720 - RNA, 24 nt, Human
gccccacagagaagugcagagggg

SEQ ID NO: 575721 - RNA, 24 nt, Human
gcucugcaauguuuggggaagaag

SEQ ID NO: 575722 - RNA, 19 nt, Human
gcuggagugcaauggcaug

SEQ ID NO: 575723 - RNA, 24 nt, Human
ggggugggcaggaagcccgggggg

SEQ ID NO: 575724 - RNA, 27 nt, Human
ggggugggcaggaagcccggggggcag

SEQ ID NO: 575725 - RNA, 24 nt, Human
guuguuguuuuguuuuuguuuuua

SEQ ID NO: 575726 - RNA, 22 nt, Human
uaaaaagcaaauaaguuaaauu

SEQ ID NO: 575727 - RNA, 23 nt, Human
uaaacaucacacguaaguucaca

SEQ ID NO: 575728 - RNA, 24 nt, Human
uaagacuacaggugccauccacca

SEQ ID NO: 575729 - RNA, 18 nt, Human
uaaggaacauuaauucuu

SEQ ID NO: 575730 - RNA, 21 nt, Human
uacaggcgcgagccacugcac

SEQ ID NO: 575731 - RNA, 23 nt, Human
uagaagagauaggguuucccuau

SEQ ID NO: 575732 - RNA, 22 nt, Human
uagccaggcuggagcagaccug

SEQ ID NO: 575733 - RNA, 23 nt, Human
uagccaggcuggagcagaccuga

SEQ ID NO: 575734 - RNA, 18 nt, Human
uagcuaagacuacaggug

SEQ ID NO: 575735 - RNA, 24 nt, Human
uaggguuucccuauguuuaccagg

SEQ ID NO: 575736 - RNA, 18 nt, Human
uauccuaaugcgauugcu

SEQ ID NO: 575737 - RNA, 28 nt, Human
uauuuuuuuuuuuuuagaagagauaggg

SEQ ID NO: 575738 - RNA, 19 nt, Human
ucaaacgauucuccugccu

SEQ ID NO: 575739 - RNA, 19 nt, Human
ucacacuguaacccgggcu

SEQ ID NO: 575740 - RNA, 24 nt, Human
ucacacuguaacccgggcuggagu

SEQ ID NO: 575741 - RNA, 19 nt, Human
ucacggauggaaaggcacu

SEQ ID NO: 575742 - RNA, 24 nt, Human
ucacugcaaccuccaccucccagg

SEQ ID NO: 575743 - RNA, 25 nt, Human
ucacugcaaccuccaccucccaggu

SEQ ID NO: 575744 - RNA, 27 nt, Human
ucacugcaaccuccaccucccagguuc

SEQ ID NO: 575745 - RNA, 18 nt, Human
ucagguugaacguggcug

SEQ ID NO: 575746 - RNA, 24 nt, Human
ucagguugaacguggcugagaaau

SEQ ID NO: 575747 - RNA, 22 nt, Human
ucaucagguugaacguggcuga

SEQ ID NO: 575748 - RNA, 20 nt, Human
uccaggagagccaggaguca

SEQ ID NO: 575749 - RNA, 24 nt, Human
ucccaaagugcugggauuacaggc

SEQ ID NO: 575750 - RNA, 21 nt, Human
ucccagguucaaacgauucuc

SEQ ID NO: 575751 - RNA, 24 nt, Human
ucccagguucaaacgauucuccug

SEQ ID NO: 575752 - RNA, 21 nt, Human
ucccugcagaggccaugaaac

SEQ ID NO: 575753 - RNA, 19 nt, Human
ucccugugacacuggcucc

SEQ ID NO: 575754 - RNA, 18 nt, Human
ucccugugacacuggcuu

SEQ ID NO: 575755 - RNA, 24 nt, Human
uccugaguagcuaagacuacaggu

SEQ ID NO: 575756 - RNA, 23 nt, Human
ucugcccggcaccagcaaguaca

SEQ ID NO: 575757 - RNA, 18 nt, Human
ugaaacagccugggggug

SEQ ID NO: 575758 - RNA, 23 nt, Human
ugaacguggcugagaaauccacc

SEQ ID NO: 575759 - RNA, 18 nt, Human
ugagaugaugccuggagg

SEQ ID NO: 575760 - RNA, 19 nt, Human
ugagguggucugaagcaga

SEQ ID NO: 575761 - RNA, 24 nt, Human
ugaucugcccaccuuggccuccca

SEQ ID NO: 575762 - RNA, 20 nt, Human
ugcacucgaccgcccugagc

SEQ ID NO: 575763 - RNA, 18 nt, Human
ugcagaggggacugugag

SEQ ID NO: 575764 - RNA, 23 nt, Human
ugccucagccuccugaguagcua

SEQ ID NO: 575765 - RNA, 24 nt, Human
ugccucagccuccugaguagcuaa

SEQ ID NO: 575766 - RNA, 23 nt, Human
ugcggagauacuagcaggugugu

SEQ ID NO: 575767 - RNA, 24 nt, Human
ugcugggauuacaggcgcgagcca

SEQ ID NO: 575768 - RNA, 24 nt, Human
uggaaaggcacugucuuggcccug

SEQ ID NO: 575769 - RNA, 19 nt, Human
uggagugcaauggcaugau

SEQ ID NO: 575770 - RNA, 24 nt, Human
uggagugcaauggcaugaucuugg

SEQ ID NO: 575771 - RNA, 23 nt, Human
uggcaccagccucaccucuacga

SEQ ID NO: 575772 - RNA, 19 nt, Human
uggcaugaucuuggcucac

SEQ ID NO: 575773 - RNA, 21 nt, Human
uggcaugaucuuggcucacug

SEQ ID NO: 575774 - RNA, 18 nt, Human
uggcccugaagcugcuca

SEQ ID NO: 575775 - RNA, 19 nt, Human
uggcugagaaauccaccuu

SEQ ID NO: 575776 - RNA, 19 nt, Human
ugggauuacaggcgcgagc

SEQ ID NO: 575777 - RNA, 21 nt, Human
ugggauuacaggcgcgagcca

SEQ ID NO: 575778 - RNA, 22 nt, Human
ugggauuacaggcgcgagccac

SEQ ID NO: 575779 - RNA, 22 nt, Human
ugggauuacaggcgcgagccac

SEQ ID NO: 575780 - RNA, 24 nt, Human
ugggauuacaggcgcgagccacug

SEQ ID NO: 575781 - RNA, 24 nt, Human
ugggauuacaggcgcgagccacug

SEQ ID NO: 575782 - RNA, 21 nt, Human
ugggggugggcaggaagcccg

SEQ ID NO: 575783 - RNA, 20 nt, Human
uguauuuuuuuuuuuuuaga

SEQ ID NO: 575784 - RNA, 18 nt, Human
ugugaaggagcaccacag

SEQ ID NO: 575785 - RNA, 29 nt, Human
uguuguuguuguuguuuuguuuuugauuu

SEQ ID NO: 575786 - RNA, 20 nt, Human
uguuguuuuguuuuuguuuu

SEQ ID NO: 575787 - RNA, 24 nt, Human
uuaccagguuggucucgaacuccu

SEQ ID NO: 575788 - RNA, 23 nt, Human
uuagaagagauaggguuucccua

SEQ ID NO: 575789 - RNA, 24 nt, Human
uucaaacgauucuccugccucagc

SEQ ID NO: 575790 - RNA, 19 nt, Human
uucacggauggaaaggcac

SEQ ID NO: 575791 - RNA, 22 nt, Human
uucacggauggaaaggcacugu

SEQ ID NO: 575792 - RNA, 19 nt, Human
uucccuauguuuaccaggu

SEQ ID NO: 575793 - RNA, 21 nt, Human
uuccugcaacuagagggucug

SEQ ID NO: 575794 - RNA, 18 nt, Human
uuggccucccaaagugcu

SEQ ID NO: 575795 - RNA, 19 nt, Human
uuguuguuguuuuguuuuu

SEQ ID NO: 575796 - RNA, 22 nt, Human
uuguuguuuuguuuuuguuuuu

SEQ ID NO: 575797 - RNA, 19 nt, Human
uuuuuuuuuuuagaagaga

SEQ ID NO: 575798 - RNA, 21 nt, Human
uuuuuuuuuuuuagaagagau

SEQ ID NO: 575799 - RNA, 24 nt, Human
aaacaauagaaacagaucugcuac

SEQ ID NO: 575800 - RNA, 18 nt, Human
aaccuuaaaaaaguccug

SEQ ID NO: 575801 - RNA, 22 nt, Human
aacuaacugccccaaagaccua

SEQ ID NO: 575802 - RNA, 22 nt, Human
aacuuauugucacccugacucu

SEQ ID NO: 575803 - RNA, 21 nt, Human
acaaagcaucuuuaagucucc

SEQ ID NO: 575804 - RNA, 18 nt, Human
acucucaucuccaccaac

SEQ ID NO: 575805 - RNA, 18 nt, Human
caaaagaaagaaagauaa

SEQ ID NO: 575806 - RNA, 20 nt, Human
caaauucuaacucgaaacac

SEQ ID NO: 575807 - RNA, 23 nt, Human
caccaaaauuaucuguuuuuucc

SEQ ID NO: 575808 - RNA, 23 nt, Human
caucuccaccaacaaugucuuac

SEQ ID NO: 575809 - RNA, 19 nt, Human
caugauaauuucuguuaua

SEQ ID NO: 575810 - RNA, 23 nt, Human
ccaauuucucauuaauuuuccca

SEQ ID NO: 575811 - RNA, 18 nt, Human
ccucaaaagaaagaaaga

SEQ ID NO: 575812 - RNA, 25 nt, Human
cucucaaacucucaucuccaccaac

SEQ ID NO: 575813 - RNA, 19 nt, Human
gaaacagaucugcuacaga

SEQ ID NO: 575814 - RNA, 18 nt, Human
guuggguuaagugaauuu

SEQ ID NO: 575815 - RNA, 21 nt, Human
uaaacuacaugcccuuguuuu

SEQ ID NO: 575816 - RNA, 20 nt, Human
uaauaaacaauagaaacaga

SEQ ID NO: 575817 - RNA, 26 nt, Human
uacaugcccuuguuuuuuaacaaagc

SEQ ID NO: 575818 - RNA, 26 nt, Human
uccaccaacaaugucuuacuguuugu

SEQ ID NO: 575819 - RNA, 27 nt, Human
uccaccaacaaugucuuacuguuugua

SEQ ID NO: 575820 - RNA, 20 nt, Human
ugauaaccuuaaaaaagucc

SEQ ID NO: 575821 - RNA, 19 nt, Human
aaaaaacaaacacauaaac

SEQ ID NO: 575822 - RNA, 23 nt, Human
aaaaaacaaacacauaaacaaaa

SEQ ID NO: 575823 - RNA, 19 nt, Human
aaaacaaaauaagacaaaa

SEQ ID NO: 575824 - RNA, 18 nt, Human
aaacaaaaaaagcaaaca

SEQ ID NO: 575825 - RNA, 26 nt, Human
aaacaaaaaaagcaaacaugcccugg

SEQ ID NO: 575826 - RNA, 21 nt, Human
aaacaaaacaaaauaagacaa

SEQ ID NO: 575827 - RNA, 26 nt, Human
aaacaaacacauaaacaaaaaaagca

SEQ ID NO: 575828 - RNA, 19 nt, Human
aaacaagcauaaaaaucac

SEQ ID NO: 575829 - RNA, 24 nt, Human
aaacaagcauaaaaaucacaaaaa

SEQ ID NO: 575830 - RNA, 23 nt, Human
aacaaauguggaguaggccacaa

SEQ ID NO: 575831 - RNA, 23 nt, Human
aacacauaaacaaaaaaagcaaa

SEQ ID NO: 575832 - RNA, 18 nt, Human
aagaacuuucaguucaau

SEQ ID NO: 575833 - RNA, 24 nt, Human
aagucaguucuagaucaucaccau

SEQ ID NO: 575834 - RNA, 18 nt, Human
aaguucuaggaauucuuc

SEQ ID NO: 575835 - RNA, 21 nt, Human
aaucacaugagaaacauuuaa

SEQ ID NO: 575836 - RNA, 27 nt, Human
aaucacgugaacccaggaggcggagcu

SEQ ID NO: 575837 - RNA, 21 nt, Human
aauggaauacaggaggaacug

SEQ ID NO: 575838 - RNA, 21 nt, Human
acaaaacaaaauaagacaaaa

SEQ ID NO: 575839 - RNA, 25 nt, Human
acaaacacauaaacaaaaaaagcaa

SEQ ID NO: 575840 - RNA, 24 nt, Human
acaguguaagagagaauacaacuu

SEQ ID NO: 575841 - RNA, 24 nt, Human
acagugugagacucugucucaaaa

SEQ ID NO: 575842 - RNA, 22 nt, Human
acauaaaucccaacauauucca

SEQ ID NO: 575843 - RNA, 19 nt, Human
acgccggagcccacgggga

SEQ ID NO: 575844 - RNA, 20 nt, Human
acgguguuucaccacguugg

SEQ ID NO: 575845 - RNA, 24 nt, Human
acgguguuucaccacguuggccag

SEQ ID NO: 575846 - RNA, 18 nt, Human
agagagcaacugaaacau

SEQ ID NO: 575847 - RNA, 23 nt, Human
agcaaaaggggcaggaggaagaa

SEQ ID NO: 575848 - RNA, 20 nt, Human
agcaggaaaaaaaugcauaa

SEQ ID NO: 575849 - RNA, 23 nt, Human
agccgggcgugauggugcacgcc

SEQ ID NO: 575850 - RNA, 24 nt, Human
agccugggccacagugugagacuc

SEQ ID NO: 575851 - RNA, 20 nt, Human
agcgauucuccugccucagc

SEQ ID NO: 575852 - RNA, 24 nt, Human
agcgauucuccugccucagccucc

SEQ ID NO: 575853 - RNA, 25 nt, Human
agcuggacucaccaguuucaaccug

SEQ ID NO: 575854 - RNA, 20 nt, Human
aggaaaaugugaaaucccau

SEQ ID NO: 575855 - RNA, 19 nt, Human
aggaggaagaagguacaga

SEQ ID NO: 575856 - RNA, 19 nt, Human
aggaggaagaagguacaga

SEQ ID NO: 575857 - RNA, 23 nt, Human
aggaugaaaguuggaauugcaaa

SEQ ID NO: 575858 - RNA, 22 nt, Human
aggccgagaccccaggagcaaa

SEQ ID NO: 575859 - RNA, 20 nt, Human
aguacaguggugcaaucuug

SEQ ID NO: 575860 - RNA, 24 nt, Human
aguacaguggugcaaucuuggcuc

SEQ ID NO: 575861 - RNA, 25 nt, Human
auaaauccuuccccaguuucuuuaa

SEQ ID NO: 575862 - RNA, 26 nt, Human
auaaauccuuccccaguuucuuuaaa

SEQ ID NO: 575863 - RNA, 22 nt, Human
aucauagcauuuuccagcaauu

SEQ ID NO: 575864 - RNA, 21 nt, Human
auguaagaacuuucaguucaa

SEQ ID NO: 575865 - RNA, 25 nt, Human
caaaaaaagcaaacaugcccuggug

SEQ ID NO: 575866 - RNA, 24 nt, Human
caaaacaaaauaagacaaaacuug

SEQ ID NO: 575867 - RNA, 25 nt, Human
caaaacucacuaggaaccaaucucc

SEQ ID NO: 575868 - RNA, 22 nt, Human
caaccuccacaucccagguucc

SEQ ID NO: 575869 - RNA, 20 nt, Human
caaccuucucacccgcgggc

SEQ ID NO: 575870 - RNA, 24 nt, Human
cacagugugagacucugucucaaa

SEQ ID NO: 575871 - RNA, 22 nt, Human
cacauaaacaaaaaaagcaaac

SEQ ID NO: 575872 - RNA, 19 nt, Human
caccaccacaccuaauuuu

SEQ ID NO: 575873 - RNA, 18 nt, Human
caccacguuggccaggcc

SEQ ID NO: 575874 - RNA, 21 nt, Human
caccacguuggccaggccggu

SEQ ID NO: 575875 - RNA, 24 nt, Human
caccacguuggccaggccggucuc

SEQ ID NO: 575876 - RNA, 30 nt, Human
caccuaauuuuuuguauuuuuaguagagaa

SEQ ID NO: 575877 - RNA, 26 nt, Human
cacgcccgacgcggcugaacgcaguc

SEQ ID NO: 575878 - RNA, 24 nt, Human
cacgccugugaucccagccacccg

SEQ ID NO: 575879 - RNA, 28 nt, Human
cacguuggccaggccggucucgacugaa

SEQ ID NO: 575880 - RNA, 25 nt, Human
cacugugcuggaguccagccugggc

SEQ ID NO: 575881 - RNA, 18 nt, Human
cagaggcaaacauaaauc

SEQ ID NO: 575882 - RNA, 19 nt, Human
cagcaggaaaaaaaugcau

SEQ ID NO: 575883 - RNA, 23 nt, Human
cagccaauccgcggucccggcgc

SEQ ID NO: 575884 - RNA, 22 nt, Human
cagccggccaaggccgagaccc

SEQ ID NO: 575885 - RNA, 30 nt, Human
cagccggccaaggccgagaccccaggagcc

SEQ ID NO: 575886 - RNA, 20 nt, Human
cauauuaaauugaagauaau

SEQ ID NO: 575887 - RNA, 24 nt, Human
caucccagguuccagcgauucucc

SEQ ID NO: 575888 - RNA, 18 nt, Human
cauugcucaagacuucca

SEQ ID NO: 575889 - RNA, 22 nt, Human
ccaaggccgagaccccaggagc

SEQ ID NO: 575890 - RNA, 21 nt, Human
ccacccaccucccgucgcaac

SEQ ID NO: 575891 - RNA, 27 nt, Human
ccagcgauucuccugccucagccuccc

SEQ ID NO: 575892 - RNA, 26 nt, Human
cccaacauauuccaccgaccaaacaa

SEQ ID NO: 575893 - RNA, 19 nt, Human
cccaggcuggaguacagug

SEQ ID NO: 575894 - RNA, 22 nt, Human
ccccaggagcaaagcccgcgcc

SEQ ID NO: 575895 - RNA, 22 nt, Human
cccgacagcugcgcaagccgcc

SEQ ID NO: 575896 - RNA, 22 nt, Human
cccucuguugcccaggcuggag

SEQ ID NO: 575897 - RNA, 21 nt, Human
ccggccaaggccgagacccca

SEQ ID NO: 575898 - RNA, 21 nt, Human
ccucccgucgcaaccuucuca

SEQ ID NO: 575899 - RNA, 22 nt, Human
ccucccgucgcaaccuucucac

SEQ ID NO: 575900 - RNA, 23 nt, Human
ccucccgucgcaaccuucucacc

SEQ ID NO: 575901 - RNA, 25 nt, Human
ccucuguugcccaggcuggaguaca

SEQ ID NO: 575902 - RNA, 23 nt, Human
ccugccucagccucccgaguggc

SEQ ID NO: 575903 - RNA, 20 nt, Human
ccugugaucccagccacccg

SEQ ID NO: 575904 - RNA, 22 nt, Human
ccugugaucccagccacccggg

SEQ ID NO: 575905 - RNA, 24 nt, Human
ccugugaucccagccacccgggag

SEQ ID NO: 575906 - RNA, 19 nt, Human
cgaccaaacaagcauaaaa

SEQ ID NO: 575907 - RNA, 22 nt, Human
cgaggcagccaauccgcggucc

SEQ ID NO: 575908 - RNA, 21 nt, Human
cgccugugaucccagccaccc

SEQ ID NO: 575909 - RNA, 23 nt, Human
cggccaaggccgagaccccagga

SEQ ID NO: 575910 - RNA, 24 nt, Human
cgggaggcugaggcaugagaauca

SEQ ID NO: 575911 - RNA, 24 nt, Human
cgguguuucaccacguuggccagg

SEQ ID NO: 575912 - RNA, 25 nt, Human
cuaacccugaggaaggaagaacaaa

SEQ ID NO: 575913 - RNA, 28 nt, Human
cuaauuuuuuguauuuuuaguagagacg

SEQ ID NO: 575914 - RNA, 25 nt, Human
cuagaaaacacauuccacauauuaa

SEQ ID NO: 575915 - RNA, 22 nt, Human
cuagauggagucucccucuguu

SEQ ID NO: 575916 - RNA, 21 nt, Human
cuagggcacccgaacuugggc

SEQ ID NO: 575917 - RNA, 18 nt, Human
cucaagacuuccauucag

SEQ ID NO: 575918 - RNA, 21 nt, Human
cucacuaggaaccaaucucca

SEQ ID NO: 575919 - RNA, 24 nt, Human
cucacugcaaccuccacaucccag

SEQ ID NO: 575920 - RNA, 24 nt, Human
cucccucuguugcccaggcuggag

SEQ ID NO: 575921 - RNA, 20 nt, Human
cugcaaccuccacaucccaa

SEQ ID NO: 575922 - RNA, 24 nt, Human
cugcaaccuccacaucccagguuc

SEQ ID NO: 575923 - RNA, 22 nt, Human
cugccucagccucccgaguggc

SEQ ID NO: 575924 - RNA, 20 nt, Human
cugguuuaaacaaacaaaac

SEQ ID NO: 575925 - RNA, 24 nt, Human
gaacaaacauagcagaauugccuu

SEQ ID NO: 575926 - RNA, 22 nt, Human
gaacaaauguggaguaggccac

SEQ ID NO: 575927 - RNA, 27 nt, Human
gaccaaacaagcauaaaaaucacaaaa

SEQ ID NO: 575928 - RNA, 23 nt, Human
gagcugagaucaugccacugugc

SEQ ID NO: 575929 - RNA, 22 nt, Human
gagggccggucgccggcugccg

SEQ ID NO: 575930 - RNA, 18 nt, Human
gauauaagauaaaauucu

SEQ ID NO: 575931 - RNA, 24 nt, Human
gauggugcacgccugugaucccag

SEQ ID NO: 575932 - RNA, 21 nt, Human
gcaaaagcagagcgcaacccg

SEQ ID NO: 575933 - RNA, 24 nt, Human
gccaccaauaaagaauucuaagca

SEQ ID NO: 575934 - RNA, 24 nt, Human
gcgauucuccugccucagccuccc

SEQ ID NO: 575935 - RNA, 26 nt, Human
gcuaaaccagguugccauacauaauu

SEQ ID NO: 575936 - RNA, 23 nt, Human
gcuagggcacccgaacuugggca

SEQ ID NO: 575937 - RNA, 30 nt, Human
ggaagaacaaauguggaguaggccacaaag

SEQ ID NO: 575938 - RNA, 22 nt, Human
ggagcaaagcccgcgccucccg

SEQ ID NO: 575939 - RNA, 23 nt, Human
ggagucucccucuguugcccagg

SEQ ID NO: 575940 - RNA, 21 nt, Human
ggcgaguuccacccaccuccc

SEQ ID NO: 575941 - RNA, 23 nt, Human
gggaauacaggcacgcaccacca

SEQ ID NO: 575942 - RNA, 24 nt, Human
gggcgugauggugcacgccuguga

SEQ ID NO: 575943 - RNA, 23 nt, Human
gguaauaauagaaaaaucauagc

SEQ ID NO: 575944 - RNA, 20 nt, Human
gguccagccggccaaggccc

SEQ ID NO: 575945 - RNA, 23 nt, Human
guaaaauacucuguacccuguca

SEQ ID NO: 575946 - RNA, 21 nt, Human
guauacccaaaguuuaaccca

SEQ ID NO: 575947 - RNA, 20 nt, Human
gugaagaacaaacauagcag

SEQ ID NO: 575948 - RNA, 20 nt, Human
gugugagacucugucucaaa

SEQ ID NO: 575949 - RNA, 18 nt, Human
uaaaaaagcaaaaggggc

SEQ ID NO: 575950 - RNA, 25 nt, Human
uaaaauacucuguacccugucaaaa

SEQ ID NO: 575951 - RNA, 23 nt, Human
uaaaauagauacaacauuugggc

SEQ ID NO: 575952 - RNA, 24 nt, Human
uaaaauagauacaacauuugggca

SEQ ID NO: 575953 - RNA, 21 nt, Human
uaacccaauuguugcaacccc

SEQ ID NO: 575954 - RNA, 24 nt, Human
uaauaauagaaaaaucauagcauu

SEQ ID NO: 575955 - RNA, 25 nt, Human
uaauuuuuuguauuuuuaguagagg

SEQ ID NO: 575956 - RNA, 22 nt, Human
uacagaaaucacaugagaaaca

SEQ ID NO: 575957 - RNA, 19 nt, Human
uacaguggugcaaucuugg

SEQ ID NO: 575958 - RNA, 21 nt, Human
uacccugucaaaacuccuuug

SEQ ID NO: 575959 - RNA, 18 nt, Human
uagaaaacacauuccaca

SEQ ID NO: 575960 - RNA, 19 nt, Human
uaguagagacgguguuuca

SEQ ID NO: 575961 - RNA, 24 nt, Human
uaguagagacgguguuucaccacg

SEQ ID NO: 575962 - RNA, 20 nt, Human
ucaaccuguggaaaugaaau

SEQ ID NO: 575963 - RNA, 24 nt, Human
ucaacugagaacuauuuuaaauau

SEQ ID NO: 575964 - RNA, 22 nt, Human
ucacuagaaagacgcuagcuau

SEQ ID NO: 575965 - RNA, 21 nt, Human
ucacugcaaccuccacauccc

SEQ ID NO: 575966 - RNA, 24 nt, Human
ucacugcaaccuccacaucccagg

SEQ ID NO: 575967 - RNA, 21 nt, Human
ucagccucccgaguggccggg

SEQ ID NO: 575968 - RNA, 20 nt, Human
uccacauauuaaauugaaga

SEQ ID NO: 575969 - RNA, 23 nt, Human
uccacaucccagguuccagcgau

SEQ ID NO: 575970 - RNA, 21 nt, Human
ucccagguuccagcgauucuc

SEQ ID NO: 575971 - RNA, 24 nt, Human
ucccagguuccagcgauucuccug

SEQ ID NO: 575972 - RNA, 19 nt, Human
uccccaguuucuuuaaaaa

SEQ ID NO: 575973 - RNA, 22 nt, Human
ucccggcgcuggcgaguuccac

SEQ ID NO: 575974 - RNA, 20 nt, Human
ucccucuguugcccaggcug

SEQ ID NO: 575975 - RNA, 24 nt, Human
ucccucuguugcccaggcuggagu

SEQ ID NO: 575976 - RNA, 23 nt, Human
ucucccucuguugcccaggcugg

SEQ ID NO: 575977 - RNA, 24 nt, Human
ucucccucuguugcccaggcugga

SEQ ID NO: 575978 - RNA, 26 nt, Human
ucuccugccucagccucccgaguggc

SEQ ID NO: 575979 - RNA, 18 nt, Human
ucuguugcccaggcugga

SEQ ID NO: 575980 - RNA, 20 nt, Human
ugaagaacaaacauagcaga

SEQ ID NO: 575981 - RNA, 23 nt, Human
ugaaguaagucaguucuagauca

SEQ ID NO: 575982 - RNA, 24 nt, Human
ugagauggagucuagauggagucu

SEQ ID NO: 575983 - RNA, 20 nt, Human
ugaggcaugagaaucacgug

SEQ ID NO: 575984 - RNA, 24 nt, Human
ugaggcaugagaaucacgugaacc

SEQ ID NO: 575985 - RNA, 24 nt, Human
ugauggugcacgccugugauccca

SEQ ID NO: 575986 - RNA, 18 nt, Human
ugccauacauaauucaaa

SEQ ID NO: 575987 - RNA, 21 nt, Human
ugccauuacaguuauuauucu

SEQ ID NO: 575988 - RNA, 21 nt, Human
ugcccaggcuggaguacagug

SEQ ID NO: 575989 - RNA, 24 nt, Human
ugcccaggcuggaguacaguggug

SEQ ID NO: 575990 - RNA, 20 nt, Human
ugcccuggugcuuccaaugu

SEQ ID NO: 575991 - RNA, 24 nt, Human
ugccucagccucccgaguggccgg

SEQ ID NO: 575992 - RNA, 23 nt, Human
ugccuuaguugaggcuacagugu

SEQ ID NO: 575993 - RNA, 20 nt, Human
ugcuggaguccagccugggc

SEQ ID NO: 575994 - RNA, 22 nt, Human
ugcuuccaauguauacccaaag

SEQ ID NO: 575995 - RNA, 24 nt, Human
uggaguacaguggugcaaucuugg

SEQ ID NO: 575996 - RNA, 19 nt, Human
uggagucuagauggagucu

SEQ ID NO: 575997 - RNA, 24 nt, Human
uggagucucccucuguugcccagg

SEQ ID NO: 575998 - RNA, 20 nt, Human
uggccaggccggucucgacu

SEQ ID NO: 575999 - RNA, 21 nt, Human
uggugcacgccugugauccca

SEQ ID NO: 576000 - RNA, 24 nt, Human
ugguuuaaacaaacaaaacaaaau

SEQ ID NO: 576001 - RNA, 22 nt, Human
uguaagagagaauacaacuuag

SEQ ID NO: 576002 - RNA, 19 nt, Human
ugucucaaaaaacaaacac

SEQ ID NO: 576003 - RNA, 18 nt, Human
ugugaaaucccaucucaa

SEQ ID NO: 576004 - RNA, 21 nt, Human
uuaaaaauacuuuuaguaaaa

SEQ ID NO: 576005 - RNA, 22 nt, Human
uuaacccaauuguugcaacccc

SEQ ID NO: 576006 - RNA, 20 nt, Human
uuagccgggcgugauggugc

SEQ ID NO: 576007 - RNA, 24 nt, Human
uuagccgggcgugauggugcacgc

SEQ ID NO: 576008 - RNA, 18 nt, Human
uuaguagagacgguguuu

SEQ ID NO: 576009 - RNA, 20 nt, Human
uucagaggcaaacauaaauc

SEQ ID NO: 576010 - RNA, 22 nt, Human
uucagcaggaaaaaaaugcaua

SEQ ID NO: 576011 - RNA, 18 nt, Human
uuccagcgauucuccugc

SEQ ID NO: 576012 - RNA, 18 nt, Human
uucucuuucacuagaaag

SEQ ID NO: 576013 - RNA, 24 nt, Human
uugcccaggcuggaguacaguggu

SEQ ID NO: 576014 - RNA, 23 nt, Human
uuuaaacaaacaaaacaaaauaa

SEQ ID NO: 576015 - RNA, 24 nt, Human
uuucaccacguuggccaggccggu

SEQ ID NO: 576016 - RNA, 24 nt, Human
uuuuuaguagagacgguguuucac

SEQ ID NO: 576017 - RNA, 22 nt, Human
uuuuuguauuuuuaguagagaa

SEQ ID NO: 576018 - RNA, 22 nt, Human
uuuuuuuuuuuuuugagaugga

SEQ ID NO: 576019 - RNA, 23 nt, Human
uuuuuuuuuuuuuuuuuuuuggg

SEQ ID NO: 576020 - RNA, 24 nt, Human
aagcaaacccaacccucgugauua

SEQ ID NO: 576021 - RNA, 22 nt, Human
agagagacaggcauuuuccaaa

SEQ ID NO: 576022 - RNA, 23 nt, Human
agcuaaggaagguagcaguaggu

SEQ ID NO: 576023 - RNA, 19 nt, Human
caaagcaaacccaacccuc

SEQ ID NO: 576024 - RNA, 21 nt, Human
cacgccagucauuuuauuucc

SEQ ID NO: 576025 - RNA, 25 nt, Human
caucauccuugugaagaaauggaag

SEQ ID NO: 576026 - RNA, 20 nt, Human
ccaaagcaaacccaacccuc

SEQ ID NO: 576027 - RNA, 23 nt, Human
gccagucauuuuauuuccaucau

SEQ ID NO: 576028 - RNA, 21 nt, Human
uaggugguaggaucagcaccu

SEQ ID NO: 576029 - RNA, 22 nt, Human
ucagcaccuugguuccaggcau

SEQ ID NO: 576030 - RNA, 21 nt, Human
uccuugugaagaaauggaagu

SEQ ID NO: 576031 - RNA, 31 nt, Human
uccuugugaagaaauggaagucuggagaggg

SEQ ID NO: 576032 - RNA, 19 nt, Human
ucuccggcccugcaccguc

SEQ ID NO: 576033 - RNA, 21 nt, Human
ugaaggcaaucuggccacaaa

SEQ ID NO: 576034 - RNA, 23 nt, Human
ugaugaaggcaaucuggccacaa

SEQ ID NO: 576035 - RNA, 23 nt, Human
uggagaggugaaaugaugaaggc

SEQ ID NO: 576036 - RNA, 22 nt, Human
ugguaggaucagcaccuugguu

SEQ ID NO: 576037 - RNA, 18 nt, Human
uucuuuaucauucaagua

SEQ ID NO: 576038 - RNA, 24 nt, Human
uucuuuaucauucaaguagagaga

SEQ ID NO: 576039 - RNA, 18 nt, Human
aaaaacagcuuugaccua

SEQ ID NO: 576040 - RNA, 24 nt, Human
aaauaaacuggcaaucacaagaac

SEQ ID NO: 576041 - RNA, 19 nt, Human
aacauggugaaaccccguc

SEQ ID NO: 576042 - RNA, 20 nt, Human
aacauggugaaaccccgucu

SEQ ID NO: 576043 - RNA, 21 nt, Human
aacauggugaaaccccgucuc

SEQ ID NO: 576044 - RNA, 24 nt, Human
aagcugagguaggagaauugcuug

SEQ ID NO: 576045 - RNA, 24 nt, Human
accccgucuccacuaaaaauacaa

SEQ ID NO: 576046 - RNA, 23 nt, Human
accuguaaucccagcacuuuggg

SEQ ID NO: 576047 - RNA, 24 nt, Human
acugcacuccaaugugggcaacag

SEQ ID NO: 576048 - RNA, 26 nt, Human
agaugggcagaucacuugagcucagg

SEQ ID NO: 576049 - RNA, 24 nt, Human
agcacuuugggaggcugagauggg

SEQ ID NO: 576050 - RNA, 23 nt, Human
agccaggugugguggugggugcc

SEQ ID NO: 576051 - RNA, 24 nt, Human
agccauacucuguuugaaccuaaa

SEQ ID NO: 576052 - RNA, 22 nt, Human
agccuggccaacauggugaaac

SEQ ID NO: 576053 - RNA, 24 nt, Human
agccuggccaacauggugaaaccc

SEQ ID NO: 576054 - RNA, 20 nt, Human
aggaaaagcuauaaauagug

SEQ ID NO: 576055 - RNA, 21 nt, Human
aggcugagaugggcagaucac

SEQ ID NO: 576056 - RNA, 23 nt, Human
agguaggagaauugcuugaaccc

SEQ ID NO: 576057 - RNA, 23 nt, Human
agguggcggaggcugcaaugagc

SEQ ID NO: 576058 - RNA, 24 nt, Human
agguggcggaggcugcaaugagcu

SEQ ID NO: 576059 - RNA, 24 nt, Human
agugggggauacauuaagagacug

SEQ ID NO: 576060 - RNA, 22 nt, Human
aucgugccacugcacuccaaug

SEQ ID NO: 576061 - RNA, 22 nt, Human
augaaaaaaugagugaaaaaga

SEQ ID NO: 576062 - RNA, 19 nt, Human
auggaaagcagauuaccca

SEQ ID NO: 576063 - RNA, 24 nt, Human
caacauggugaaaccccgucucca

SEQ ID NO: 576064 - RNA, 20 nt, Human
caauaucacaccagauagcc

SEQ ID NO: 576065 - RNA, 18 nt, Human
caaugugggcaacagagc

SEQ ID NO: 576066 - RNA, 24 nt, Human
cacaccagauagccucuugaaaac

SEQ ID NO: 576067 - RNA, 25 nt, Human
caccagauagccucuugaaaacucc

SEQ ID NO: 576068 - RNA, 19 nt, Human
cacugcacuccaauguggg

SEQ ID NO: 576069 - RNA, 23 nt, Human
cacugcacuccaaugugggcaac

SEQ ID NO: 576070 - RNA, 24 nt, Human
cacugcacuccaaugugggcaaca

SEQ ID NO: 576071 - RNA, 26 nt, Human
cagaaacacuaaggcaaauuugacug

SEQ ID NO: 576072 - RNA, 24 nt, Human
cagaucacuugagcucaggaguuc

SEQ ID NO: 576073 - RNA, 24 nt, Human
cagcacuuugggaggcugagaugg

SEQ ID NO: 576074 - RNA, 24 nt, Human
cauaccuguaaucccagcacuuug

SEQ ID NO: 576075 - RNA, 20 nt, Human
ccacugcacuccaauguggg

SEQ ID NO: 576076 - RNA, 20 nt, Human
ccacugcacuccaauguggg

SEQ ID NO: 576077 - RNA, 21 nt, Human
ccacugcacuccaaugugggc

SEQ ID NO: 576078 - RNA, 24 nt, Human
ccacugcacuccaaugugggcaac

SEQ ID NO: 576079 - RNA, 21 nt, Human
ccagaccacacuuugacaacc

SEQ ID NO: 576080 - RNA, 24 nt, Human
ccagaccagccuggccaacauggu

SEQ ID NO: 576081 - RNA, 21 nt, Human
cccagaccacacuuugacaac

SEQ ID NO: 576082 - RNA, 22 nt, Human
cccagaccacacuuugacaacc

SEQ ID NO: 576083 - RNA, 23 nt, Human
cccccagaccacacuuugacaac

SEQ ID NO: 576084 - RNA, 21 nt, Human
cccgucccgcggccgcagcca

SEQ ID NO: 576085 - RNA, 21 nt, Human
cccgucuccacuaaaaauaca

SEQ ID NO: 576086 - RNA, 19 nt, Human
cccuggaccucagaaagag

SEQ ID NO: 576087 - RNA, 19 nt, Human
ccgaaaucaaagcgagagc

SEQ ID NO: 576088 - RNA, 19 nt, Human
ccuauaaucccagcuacuc

SEQ ID NO: 576089 - RNA, 21 nt, Human
ccuauaaucccagcuacucgg

SEQ ID NO: 576090 - RNA, 23 nt, Human
ccuggccaacauggugaaacccc

SEQ ID NO: 576091 - RNA, 24 nt, Human
ccuggccaacauggugaaaccccg

SEQ ID NO: 576092 - RNA, 22 nt, Human
cgcgagggcggaggcgccgaaa

SEQ ID NO: 576093 - RNA, 22 nt, Human
cuaaugaccuguccuauucccu

SEQ ID NO: 576094 - RNA, 24 nt, Human
cucauaccuguaaucccagcacuu

SEQ ID NO: 576095 - RNA, 22 nt, Human
cuccucugcauacucaugaaaa

SEQ ID NO: 576096 - RNA, 19 nt, Human
cugaugacagacgaaagcu

SEQ ID NO: 576097 - RNA, 23 nt, Human
cugcaaauaaacuggcaaucaca

SEQ ID NO: 576098 - RNA, 23 nt, Human
cuugaaaacuccucugcauacuc

SEQ ID NO: 576099 - RNA, 18 nt, Human
cuuguaucugcuuuugca

SEQ ID NO: 576100 - RNA, 20 nt, Human
gaaaaaaugagugaaaaaga

SEQ ID NO: 576101 - RNA, 19 nt, Human
gaacagaaacacuaaggca

SEQ ID NO: 576102 - RNA, 18 nt, Human
gagaucgugccacugcac

SEQ ID NO: 576103 - RNA, 24 nt, Human
gagguaggagaauugcuugaaccc

SEQ ID NO: 576104 - RNA, 20 nt, Human
gaguuccagaccagccuggc

SEQ ID NO: 576105 - RNA, 21 nt, Human
gauaaaauggaguuguuccga

SEQ ID NO: 576106 - RNA, 22 nt, Human
gaucacuugagcucaggaguuc

SEQ ID NO: 576107 - RNA, 24 nt, Human
gccaacauggugaaaccccgucuc

SEQ ID NO: 576108 - RNA, 24 nt, Human
gccacugcacuccaaugugggcaa

SEQ ID NO: 576109 - RNA, 18 nt, Human
gcucacuaccccgucccg

SEQ ID NO: 576110 - RNA, 20 nt, Human
gcugagaucgugccacugca

SEQ ID NO: 576111 - RNA, 18 nt, Human
gcugcaaugagcugagau

SEQ ID NO: 576112 - RNA, 24 nt, Human
ggacgcgccuggcagcggcaggaa

SEQ ID NO: 576113 - RNA, 24 nt, Human
ggaggcugcaaugagcugagaucg

SEQ ID NO: 576114 - RNA, 23 nt, Human
ggcguuguggcucauaccuguaa

SEQ ID NO: 576115 - RNA, 18 nt, Human
ggcuaucagguuggggaa

SEQ ID NO: 576116 - RNA, 19 nt, Human
gggauacauuaagagacug

SEQ ID NO: 576117 - RNA, 22 nt, Human
gggcagaucacuugagcucagg

SEQ ID NO: 576118 - RNA, 26 nt, Human
gggcagaucacuugagcucaggaguu

SEQ ID NO: 576119 - RNA, 24 nt, Human
gguggugggugccuauaaucccag

SEQ ID NO: 576120 - RNA, 22 nt, Human
guggcucauaccuguaauccca

SEQ ID NO: 576121 - RNA, 22 nt, Human
uaaaaaaaaggaaaagcuauaa

SEQ ID NO: 576122 - RNA, 21 nt, Human
uaaaaauacaaaaauuagcca

SEQ ID NO: 576123 - RNA, 22 nt, Human
uaaguugcaaaaauugucacaa

SEQ ID NO: 576124 - RNA, 20 nt, Human
uacaauaucacaccagauag

SEQ ID NO: 576125 - RNA, 21 nt, Human
uacccauaauaucaguauuua

SEQ ID NO: 576126 - RNA, 23 nt, Human
uaccuguaaucccagcacuuugg

SEQ ID NO: 576127 - RNA, 23 nt, Human
uacucuguuugaaccuaaacuac

SEQ ID NO: 576128 - RNA, 19 nt, Human
uagccucuugaaaacuccu

SEQ ID NO: 576129 - RNA, 18 nt, Human
uauauuacccucucccca

SEQ ID NO: 576130 - RNA, 21 nt, Human
uaucugcuuuugcauucagcc

SEQ ID NO: 576131 - RNA, 19 nt, Human
ucaauuggaaaccugggaa

SEQ ID NO: 576132 - RNA, 20 nt, Human
uccaaugugggcaacagagc

SEQ ID NO: 576133 - RNA, 18 nt, Human
ucuauuugaacagaaaca

SEQ ID NO: 576134 - RNA, 23 nt, Human
ucucuccccgcgagggcggaggc

SEQ ID NO: 576135 - RNA, 26 nt, Human
ugaaaaagauaaaugauggcugggcg

SEQ ID NO: 576136 - RNA, 22 nt, Human
ugaaaccccgucuccacuaaaa

SEQ ID NO: 576137 - RNA, 24 nt, Human
ugaaaggcucuugaggccccccca

SEQ ID NO: 576138 - RNA, 24 nt, Human
ugacaaccacugcucuagacgaau

SEQ ID NO: 576139 - RNA, 22 nt, Human
ugacauauuucagaaaaauuuu

SEQ ID NO: 576140 - RNA, 18 nt, Human
ugaccuguccuauucccu

SEQ ID NO: 576141 - RNA, 22 nt, Human
ugagaaacucaacaucacagcc

SEQ ID NO: 576142 - RNA, 19 nt, Human
ugagaugggcagaucacuu

SEQ ID NO: 576143 - RNA, 22 nt, Human
ugagcugagaucgugccacugc

SEQ ID NO: 576144 - RNA, 24 nt, Human
ugagguaggagaauugcuugaacc

SEQ ID NO: 576145 - RNA, 24 nt, Human
ugccuauaaucccagcuacucggg

SEQ ID NO: 576146 - RNA, 26 nt, Human
uggaaaccugggaaauacacccuaau

SEQ ID NO: 576147 - RNA, 18 nt, Human
uggaauacaauucaauga

SEQ ID NO: 576148 - RNA, 24 nt, Human
uggccaacauggugaaaccccguc

SEQ ID NO: 576149 - RNA, 24 nt, Human
uggcggaggcugcaaugagcugag

SEQ ID NO: 576150 - RNA, 21 nt, Human
uggcucauaccuguaauccca

SEQ ID NO: 576151 - RNA, 22 nt, Human
uggcucauaccuguaaucccag

SEQ ID NO: 576152 - RNA, 24 nt, Human
uggcucauaccuguaaucccagca

SEQ ID NO: 576153 - RNA, 23 nt, Human
uggcugggcguuguggcucauac

SEQ ID NO: 576154 - RNA, 20 nt, Human
ugggaggcugagaugggcag

SEQ ID NO: 576155 - RNA, 24 nt, Human
ugggaggcugagaugggcagauca

SEQ ID NO: 576156 - RNA, 24 nt, Human
uggugggugccuauaaucccagcu

SEQ ID NO: 576157 - RNA, 24 nt, Human
ugguggugggugccuauaauccca

SEQ ID NO: 576158 - RNA, 23 nt, Human
uguccuauucccuguaaguugca

SEQ ID NO: 576159 - RNA, 28 nt, Human
ugucucacuucucuugguuuagauucuc

SEQ ID NO: 576160 - RNA, 24 nt, Human
ugucugaugacagacgaaagcugg

SEQ ID NO: 576161 - RNA, 22 nt, Human
ugucuuaguguuauaaaaacag

SEQ ID NO: 576162 - RNA, 24 nt, Human
uguggcucauaccuguaaucccag

SEQ ID NO: 576163 - RNA, 20 nt, Human
uuagauucucaauuggaaac

SEQ ID NO: 576164 - RNA, 24 nt, Human
uuagccaggugugguggugggugc

SEQ ID NO: 576165 - RNA, 24 nt, Human
uugcuugaacccagguggcggagg

SEQ ID NO: 576166 - RNA, 24 nt, Human
uuggaaaccugggaaauacacccu

SEQ ID NO: 576167 - RNA, 25 nt, Human
uugggaggcugagaugggcagauca

SEQ ID NO: 576168 - RNA, 23 nt, Human
uuugcauucagccuauuacaaua

SEQ ID NO: 576169 - RNA, 18 nt, Human
aacucaugaucccuccuc

SEQ ID NO: 576170 - RNA, 21 nt, Human
aaguaauggcaagacaauuau

SEQ ID NO: 576171 - RNA, 20 nt, Human
agaaucaggaaaagacuaac

SEQ ID NO: 576172 - RNA, 20 nt, Human
caggaaaagacuaacuuaug

SEQ ID NO: 576173 - RNA, 22 nt, Human
cagggucaacugucuaaagguc

SEQ ID NO: 576174 - RNA, 23 nt, Human
ccagugcccaaauaugucccaag

SEQ ID NO: 576175 - RNA, 23 nt, Human
cccaagauuuuuaccuaagacuu

SEQ ID NO: 576176 - RNA, 22 nt, Human
cuuggccaaaccagugcccaaa

SEQ ID NO: 576177 - RNA, 23 nt, Human
gagaauuauccaugggcaauguc

SEQ ID NO: 576178 - RNA, 18 nt, Human
ggaugaagucuacauaua

SEQ ID NO: 576179 - RNA, 20 nt, Human
guuucugauauugggaccca

SEQ ID NO: 576180 - RNA, 22 nt, Human
uaagaaucaggaaaagacuaac

SEQ ID NO: 576181 - RNA, 22 nt, Human
uacuaaaauuacacagugcaua

SEQ ID NO: 576182 - RNA, 23 nt, Human
uaggauguuugacaauugggaug

SEQ ID NO: 576183 - RNA, 24 nt, Human
uauuucaccccuucaguguugugu

SEQ ID NO: 576184 - RNA, 19 nt, Human
ucaauuccuacucuugcua

SEQ ID NO: 576185 - RNA, 24 nt, Human
ucacuucucuuuucuuucgcugga

SEQ ID NO: 576186 - RNA, 20 nt, Human
ucagagccuaaugaaacugg

SEQ ID NO: 576187 - RNA, 19 nt, Human
ucaguccagguaaaguugu

SEQ ID NO: 576188 - RNA, 23 nt, Human
ucagugaucaaauaauuagaagu

SEQ ID NO: 576189 - RNA, 23 nt, Human
uccaugggcaauguccagaaauc

SEQ ID NO: 576190 - RNA, 21 nt, Human
ucugagugguggcaacucaug

SEQ ID NO: 576191 - RNA, 19 nt, Human
ugcauguucuuguaaacuu

SEQ ID NO: 576192 - RNA, 18 nt, Human
ugcucaaaagaaagucaa

SEQ ID NO: 576193 - RNA, 26 nt, Human
ugcucaaaagaaagucaaaaaaauuc

SEQ ID NO: 576194 - RNA, 22 nt, Human
uggaagaauaaacuucugagug

SEQ ID NO: 576195 - RNA, 24 nt, Human
uggaagaauaaacuucugaguggu

SEQ ID NO: 576196 - RNA, 23 nt, Human
uggccaaaccagugcccaaauau

SEQ ID NO: 576197 - RNA, 20 nt, Human
ugucuaaaggucucaggugu

SEQ ID NO: 576198 - RNA, 21 nt, Human
uguugcacaauuuacaaucuu

SEQ ID NO: 576199 - RNA, 22 nt, Human
uuaaagugcaucauugcauguu

SEQ ID NO: 576200 - RNA, 22 nt, Human
uuaagaaucaggaaaagacuaa

SEQ ID NO: 576201 - RNA, 25 nt, Human
uuaguucaauuuucuaacauagucu

SEQ ID NO: 576202 - RNA, 21 nt, Human
uucucuuuucuuucgcuggau

SEQ ID NO: 576203 - RNA, 18 nt, Human
uugacaauugggaugaag

SEQ ID NO: 576204 - RNA, 18 nt, Human
uuguaauggcuucagagc

SEQ ID NO: 576205 - RNA, 19 nt, Human
uuuaccuaagacuuuccuc

SEQ ID NO: 576206 - RNA, 25 nt, Human
uuuagcuugagauccaucagugaga

SEQ ID NO: 576207 - RNA, 20 nt, Human
uuuaguguuaugaugcaaga

SEQ ID NO: 576208 - RNA, 20 nt, Human
uuugacaauugggaugaagu

SEQ ID NO: 576209 - RNA, 25 nt, Human
aaaacagacgccagugaaucaaugu

SEQ ID NO: 576210 - RNA, 21 nt, Human
aaacagcaacgccugagccuc

SEQ ID NO: 576211 - RNA, 25 nt, Human
aaaccaauaugauaaaaacaaaaau

SEQ ID NO: 576212 - RNA, 22 nt, Human
aaauauaaaaaauauuacuuuu

SEQ ID NO: 576213 - RNA, 24 nt, Human
aagccccuccacccucccaccccc

SEQ ID NO: 576214 - RNA, 22 nt, Human
acccccaacagcaucuauuagc

SEQ ID NO: 576215 - RNA, 18 nt, Human
agaagccccuccacccuc

SEQ ID NO: 576216 - RNA, 24 nt, Human
agaagccccuccacccucccaccc

SEQ ID NO: 576217 - RNA, 25 nt, Human
agaagccccuccacccucccacccc

SEQ ID NO: 576218 - RNA, 19 nt, Human
agaaguaaugaaaaaccaa

SEQ ID NO: 576219 - RNA, 21 nt, Human
agaaguaaugaaaaaccaaua

SEQ ID NO: 576220 - RNA, 23 nt, Human
agacaagaaacagcaacgccuga

SEQ ID NO: 576221 - RNA, 24 nt, Human
agacaagaaacagcaacgccugag

SEQ ID NO: 576222 - RNA, 20 nt, Human
agagcacguuuuccaggccc

SEQ ID NO: 576223 - RNA, 21 nt, Human
agaguaaccacuugacuugga

SEQ ID NO: 576224 - RNA, 18 nt, Human
auggguuuuucuuuacuu

SEQ ID NO: 576225 - RNA, 22 nt, Human
auuauaaaguuccugaccaaag

SEQ ID NO: 576226 - RNA, 24 nt, Human
caaagucagagcacguuuuccagg

SEQ ID NO: 576227 - RNA, 20 nt, Human
caacagcaucuauuagcuau

SEQ ID NO: 576228 - RNA, 30 nt, Human
caacagcaucuauuagcuauaacuuuaauu

SEQ ID NO: 576229 - RNA, 21 nt, Human
caacuggcuaacacuguccaa

SEQ ID NO: 576230 - RNA, 19 nt, Human
cacccccauucuuccaguc

SEQ ID NO: 576231 - RNA, 26 nt, Human
cacccccauucuuccagucugcucca

SEQ ID NO: 576232 - RNA, 18 nt, Human
cagaaguaaugaaaaacc

SEQ ID NO: 576233 - RNA, 20 nt, Human
caggcccaauggcccauuug

SEQ ID NO: 576234 - RNA, 21 nt, Human
caggccuaucuugauuuuucu

SEQ ID NO: 576235 - RNA, 22 nt, Human
caguaaagaaggaaccugucca

SEQ ID NO: 576236 - RNA, 22 nt, Human
cauuauaaaguuccugaccaaa

SEQ ID NO: 576237 - RNA, 19 nt, Human
ccccuccacccucccaccc

SEQ ID NO: 576238 - RNA, 19 nt, Human
cccuccacccucccacccc

SEQ ID NO: 576239 - RNA, 24 nt, Human
ccucccacccccauucuuccaguc

SEQ ID NO: 576240 - RNA, 23 nt, Human
gcacagaaauccuuuagaauuua

SEQ ID NO: 576241 - RNA, 20 nt, Human
gccccuccacccucccaccc

SEQ ID NO: 576242 - RNA, 19 nt, Human
ggugacaaagucagagcac

SEQ ID NO: 576243 - RNA, 19 nt, Human
uaaaauauaaaaaauauua

SEQ ID NO: 576244 - RNA, 20 nt, Human
uaaaguuccugaccaaagac

SEQ ID NO: 576245 - RNA, 18 nt, Human
uagauccuuggcagaaca

SEQ ID NO: 576246 - RNA, 18 nt, Human
uagcacagaaauccuuua

SEQ ID NO: 576247 - RNA, 19 nt, Human
uauauuggauuauuuuacu

SEQ ID NO: 576248 - RNA, 24 nt, Human
ucacaaaggagaagccccuccacc

SEQ ID NO: 576249 - RNA, 21 nt, Human
uccauuaccagaguaaccacu

SEQ ID NO: 576250 - RNA, 21 nt, Human
ucccacccccauucuuccagu

SEQ ID NO: 576251 - RNA, 24 nt, Human
uccuccaguaaagaaggaaccugu

SEQ ID NO: 576252 - RNA, 22 nt, Human
ucugcuccaacgccaagucugu

SEQ ID NO: 576253 - RNA, 19 nt, Human
ugagaacuugcaaaugaga

SEQ ID NO: 576254 - RNA, 19 nt, Human
ugcaaaugagacaagggaa

SEQ ID NO: 576255 - RNA, 19 nt, Human
ugcuccaacgccaagucug

SEQ ID NO: 576256 - RNA, 18 nt, Human
uggaagacaagaaacagc

SEQ ID NO: 576257 - RNA, 18 nt, Human
uggaagacaagaaacagc

SEQ ID NO: 576258 - RNA, 22 nt, Human
ugggaaagagccucuaacagca

SEQ ID NO: 576259 - RNA, 20 nt, Human
ugggugaauugggugacaaa

SEQ ID NO: 576260 - RNA, 25 nt, Human
uuacaacagugcuucuaagcugggu

SEQ ID NO: 576261 - RNA, 22 nt, Human
uucauguaaauagaaagcugau

SEQ ID NO: 576262 - RNA, 19 nt, Human
uuccagucugcuccaacgc

SEQ ID NO: 576263 - RNA, 18 nt, Human
uucuuccagucugcucca

SEQ ID NO: 576264 - RNA, 20 nt, Human
uugacuuggaagacaagaaa

SEQ ID NO: 576265 - RNA, 18 nt, Human
uuucucaucuuuucuugg

SEQ ID NO: 576266 - RNA, 19 nt, Human
aaaacaaaauguuuccucc

SEQ ID NO: 576267 - RNA, 23 nt, Human
aaaagacagcaagccuucaucaa

SEQ ID NO: 576268 - RNA, 21 nt, Human
aaaagugcaaaaucaaagagu

SEQ ID NO: 576269 - RNA, 24 nt, Human
aaacaaaaaaauuagaaaccaaaa

SEQ ID NO: 576270 - RNA, 18 nt, Human
aacaccaagaacaagaac

SEQ ID NO: 576271 - RNA, 26 nt, Human
aacacgcucacaacaacaaauacaga

SEQ ID NO: 576272 - RNA, 18 nt, Human
aacuugugcuacuuccuu

SEQ ID NO: 576273 - RNA, 18 nt, Human
aagaagacaaccaguucu

SEQ ID NO: 576274 - RNA, 22 nt, Human
aagcaacuaagauauccaguaa

SEQ ID NO: 576275 - RNA, 19 nt, Human
aagcaagaucuaaagcaua

SEQ ID NO: 576276 - RNA, 25 nt, Human
aagcagcaaauaugagggccuaaca

SEQ ID NO: 576277 - RNA, 26 nt, Human
aaugaaaaaacaaaaaaauuagaaac

SEQ ID NO: 576278 - RNA, 22 nt, Human
acaaagcagcaaauaugagggc

SEQ ID NO: 576279 - RNA, 24 nt, Human
acccugcaacaccgcccaagaaga

SEQ ID NO: 576280 - RNA, 23 nt, Human
acguuguggguggagaaauguug

SEQ ID NO: 576281 - RNA, 19 nt, Human
acugccacugcaugcagaa

SEQ ID NO: 576282 - RNA, 26 nt, Human
agaaaccccgaaaaagaaauacacag

SEQ ID NO: 576283 - RNA, 20 nt, Human
agaaauguaggguuagaaug

SEQ ID NO: 576284 - RNA, 25 nt, Human
agaaauucucaaauuuagcaauguc

SEQ ID NO: 576285 - RNA, 22 nt, Human
agacagcccuaaaaugcccuga

SEQ ID NO: 576286 - RNA, 28 nt, Human
agacugccacugcaugcagaaaccccga

SEQ ID NO: 576287 - RNA, 21 nt, Human
agacuguguuacauuucuugg

SEQ ID NO: 576288 - RNA, 23 nt, Human
agagucacugcuugguccaaaaa

SEQ ID NO: 576289 - RNA, 21 nt, Human
aggagaaaagguaugaaauga

SEQ ID NO: 576290 - RNA, 21 nt, Human
aggcaaauauaaacauucuga

SEQ ID NO: 576291 - RNA, 24 nt, Human
agucaugaaucuugagaagaaagu

SEQ ID NO: 576292 - RNA, 23 nt, Human
agugauuugccuguaaauguagu

SEQ ID NO: 576293 - RNA, 23 nt, Human
auaaauuuuuucuaauguuuucu

SEQ ID NO: 576294 - RNA, 24 nt, Human
augcaacccuaagaaaaaaaaauc

SEQ ID NO: 576295 - RNA, 19 nt, Human
caaaaugcacauuuccaau

SEQ ID NO: 576296 - RNA, 23 nt, Human
caacagaccaugcucccuguaac

SEQ ID NO: 576297 - RNA, 24 nt, Human
caagacagcccuaaaaugcccuga

SEQ ID NO: 576298 - RNA, 19 nt, Human
caauggaaaaaucucuaaa

SEQ ID NO: 576299 - RNA, 23 nt, Human
cacaaaauucaggugagagguuu

SEQ ID NO: 576300 - RNA, 20 nt, Human
caccaagaacaagaacauca

SEQ ID NO: 576301 - RNA, 24 nt, Human
cacugcaugcagaaaccccgaaaa

SEQ ID NO: 576302 - RNA, 24 nt, Human
cacugcuugguccaaaaaauaaaa

SEQ ID NO: 576303 - RNA, 18 nt, Human
cauguacagaaguuaauc

SEQ ID NO: 576304 - RNA, 21 nt, Human
cauuguguauaaacauuugaa

SEQ ID NO: 576305 - RNA, 19 nt, Human
cauuucuuggugaucugcc

SEQ ID NO: 576306 - RNA, 23 nt, Human
ccaaauuauccaguguauaugac

SEQ ID NO: 576307 - RNA, 27 nt, Human
ccacccgaaacaaucugcuuuagcuau

SEQ ID NO: 576308 - RNA, 20 nt, Human
ccacugcaugcagaaacccc

SEQ ID NO: 576309 - RNA, 19 nt, Human
ccccuucccuucugauccc

SEQ ID NO: 576310 - RNA, 19 nt, Human
ccuaaaaugcccugaacug

SEQ ID NO: 576311 - RNA, 21 nt, Human
ccuaaaaugcccugaacugac

SEQ ID NO: 576312 - RNA, 23 nt, Human
ccuaaaaugcccugaacugacuu

SEQ ID NO: 576313 - RNA, 21 nt, Human
cuccccuucccuucugauccc

SEQ ID NO: 576314 - RNA, 23 nt, Human
cucccuguaacaaaaccuuccaa

SEQ ID NO: 576315 - RNA, 30 nt, Human
cucuccccuucccuucugaucccucaaaaa

SEQ ID NO: 576316 - RNA, 18 nt, Human
cugcaacaccgcccaaga

SEQ ID NO: 576317 - RNA, 22 nt, Human
cuguaacaaaaccuuccaaacc

SEQ ID NO: 576318 - RNA, 23 nt, Human
cuguaacaaaaccuuccaaaccc

SEQ ID NO: 576319 - RNA, 21 nt, Human
cuuccccuaauugggcuggag

SEQ ID NO: 576320 - RNA, 29 nt, Human
gaaaaaacaaaaaaauuagaaaccaaaag

SEQ ID NO: 576321 - RNA, 21 nt, Human
gaaggcaaucuguaaauuaua

SEQ ID NO: 576322 - RNA, 23 nt, Human
ggcaaucuguaaauuauaaaugc

SEQ ID NO: 576323 - RNA, 18 nt, Human
ggcauggaagagaggaga

SEQ ID NO: 576324 - RNA, 23 nt, Human
gguacuaggugcauuacaggcau

SEQ ID NO: 576325 - RNA, 23 nt, Human
guuagaauuuuaaguuuugauuu

SEQ ID NO: 576326 - RNA, 18 nt, Human
guuucaaaauggauauac

SEQ ID NO: 576327 - RNA, 24 nt, Human
uaaaaacaaaauguuuccuccauc

SEQ ID NO: 576328 - RNA, 26 nt, Human
uaaaagacagcaagccuucaucaagg

SEQ ID NO: 576329 - RNA, 23 nt, Human
uaaaaugcccugaacugacuucc

SEQ ID NO: 576330 - RNA, 21 nt, Human
uaaauaagcaagaucuaaagc

SEQ ID NO: 576331 - RNA, 18 nt, Human
uaaauuauaaaugcaacc

SEQ ID NO: 576332 - RNA, 23 nt, Human
uaacacgcucacaacaacaaaua

SEQ ID NO: 576333 - RNA, 20 nt, Human
uaagaaaaaaaaauccuggu

SEQ ID NO: 576334 - RNA, 19 nt, Human
uaaggaugcuguguaacac

SEQ ID NO: 576335 - RNA, 25 nt, Human
uaagucuuuagccuauauuuacaua

SEQ ID NO: 576336 - RNA, 26 nt, Human
uacaaugaauuguacacugauagacc

SEQ ID NO: 576337 - RNA, 19 nt, Human
uacacagguuucaaaaugg

SEQ ID NO: 576338 - RNA, 23 nt, Human
uacuaggugcauuacaggcauac

SEQ ID NO: 576339 - RNA, 22 nt, Human
uagcuaucaaguaguuugguuu

SEQ ID NO: 576340 - RNA, 20 nt, Human
uauaacaguaugccaguaaa

SEQ ID NO: 576341 - RNA, 25 nt, Human
uauaacaguaugccaguaaaugaaa

SEQ ID NO: 576342 - RNA, 21 nt, Human
uauagcaagacagcccuaaaa

SEQ ID NO: 576343 - RNA, 22 nt, Human
uauaucaacuugcaacaaagca

SEQ ID NO: 576344 - RNA, 19 nt, Human
uaucaaguaguuugguuug

SEQ ID NO: 576345 - RNA, 19 nt, Human
uauccaguguauaugacug

SEQ ID NO: 576346 - RNA, 22 nt, Human
uaugccaguaaaugaaaaaaca

SEQ ID NO: 576347 - RNA, 19 nt, Human
ucagaguaugaaaugcaaa

SEQ ID NO: 576348 - RNA, 20 nt, Human
uccacugugaacucugguuu

SEQ ID NO: 576349 - RNA, 24 nt, Human
uccaucacaaaagcaacacauaua

SEQ ID NO: 576350 - RNA, 19 nt, Human
ucccucaaaaaaaaagugc

SEQ ID NO: 576351 - RNA, 23 nt, Human
ucccucaaaaaaaaagugcaaaa

SEQ ID NO: 576352 - RNA, 26 nt, Human
ucccuguaacaaaaccuuccaaaccc

SEQ ID NO: 576353 - RNA, 21 nt, Human
ucugaucccucaaaaaaaaag

SEQ ID NO: 576354 - RNA, 23 nt, Human
ugaaaaaacaaaaaaauuagaaa

SEQ ID NO: 576355 - RNA, 22 nt, Human
ugaacccugcaacaccgcccaa

SEQ ID NO: 576356 - RNA, 22 nt, Human
ugagguauaacaguaugccagu

SEQ ID NO: 576357 - RNA, 21 nt, Human
ugauuugagucuaauuguuuu

SEQ ID NO: 576358 - RNA, 22 nt, Human
ugcaacaccgcccaagaagaca

SEQ ID NO: 576359 - RNA, 23 nt, Human
ugcaacaccgcccaagaagacaa

SEQ ID NO: 576360 - RNA, 23 nt, Human
ugcaacccuaagaaaaaaaaauc

SEQ ID NO: 576361 - RNA, 18 nt, Human
ugcagaaaccccgaaaaa

SEQ ID NO: 576362 - RNA, 24 nt, Human
ugcagaaaccccgaaaaagaaaua

SEQ ID NO: 576363 - RNA, 20 nt, Human
ugccacaggaaauauuggag

SEQ ID NO: 576364 - RNA, 19 nt, Human
ugcuugguccaaaaaauaa

SEQ ID NO: 576365 - RNA, 21 nt, Human
uggaagagaggagaaaaggua

SEQ ID NO: 576366 - RNA, 19 nt, Human
uggagaaauaaaaagugua

SEQ ID NO: 576367 - RNA, 21 nt, Human
uggauauacuucauuuuguuu

SEQ ID NO: 576368 - RNA, 19 nt, Human
uggguggagaaauguuggc

SEQ ID NO: 576369 - RNA, 20 nt, Human
uggguggagaaauguuggcc

SEQ ID NO: 576370 - RNA, 20 nt, Human
uguugcccccuugaggucca

SEQ ID NO: 576371 - RNA, 20 nt, Human
uuacugccaaaccaacuugu

SEQ ID NO: 576372 - RNA, 22 nt, Human
uuccucuuguagugcaugugcc

SEQ ID NO: 576373 - RNA, 22 nt, Human
uucuccccacccgaaacaaucu

SEQ ID NO: 576374 - RNA, 21 nt, Human
uugagucuaauuguuuuccug

SEQ ID NO: 576375 - RNA, 24 nt, Human
uuuaacacgcucacaacaacaaau

SEQ ID NO: 576376 - RNA, 23 nt, Human
uuucuaauguuuucuguacauau

SEQ ID NO: 576377 - RNA, 23 nt, Human
uuugauauauguucaugaacacc

SEQ ID NO: 576378 - RNA, 18 nt, Human
aucuggacuagaagaaua

SEQ ID NO: 576379 - RNA, 18 nt, Human
cccccugccgacccccgc

SEQ ID NO: 576380 - RNA, 22 nt, Human
cccccugccgacccccgccgcg

SEQ ID NO: 576381 - RNA, 21 nt, Human
ccggcccccugccgacccccg

SEQ ID NO: 576382 - RNA, 19 nt, Human
cggcccccugccgaccccc

SEQ ID NO: 576383 - RNA, 20 nt, Human
uacaacaaaagcugccaggc

SEQ ID NO: 576384 - RNA, 22 nt, Human
uagaagaauaugugcuugaucu

SEQ ID NO: 576385 - RNA, 21 nt, Human
uccccaaacaggggacaucau

SEQ ID NO: 576386 - RNA, 21 nt, Human
uuuuuuuuuuuuuuuuuuugg

SEQ ID NO: 576387 - RNA, 20 nt, Human
aaaaugcuguguaauuaccc

SEQ ID NO: 576388 - RNA, 25 nt, Human
aaaugcaccuguggguucuuucaac

SEQ ID NO: 576389 - RNA, 20 nt, Human
acacuagagacaaacaucac

SEQ ID NO: 576390 - RNA, 23 nt, Human
agaacacuagagacaaacaucac

SEQ ID NO: 576391 - RNA, 22 nt, Human
aggauaacaggagagaauccac

SEQ ID NO: 576392 - RNA, 24 nt, Human
auaggauuugugcuacauuagaac

SEQ ID NO: 576393 - RNA, 21 nt, Human
caacaguacaaaaaggauuag

SEQ ID NO: 576394 - RNA, 19 nt, Human
cacuagagacaaacaucac

SEQ ID NO: 576395 - RNA, 24 nt, Human
caggauaacaggagagaauccacu

SEQ ID NO: 576396 - RNA, 22 nt, Human
ccacucuccugauuguuaauuu

SEQ ID NO: 576397 - RNA, 23 nt, Human
ccuuucauaaaaacugguccagg

SEQ ID NO: 576398 - RNA, 23 nt, Human
cuguggguucuuucaacaggcuc

SEQ ID NO: 576399 - RNA, 23 nt, Human
gaguuuuuccagucuacauggaa

SEQ ID NO: 576400 - RNA, 23 nt, Human
uaacaggagagaauccacucucc

SEQ ID NO: 576401 - RNA, 22 nt, Human
uacauuagaacacuagagacaa

SEQ ID NO: 576402 - RNA, 22 nt, Human
uagaacacuagagacaaacauc

SEQ ID NO: 576403 - RNA, 23 nt, Human
uagagacaaacaucacuugagua

SEQ ID NO: 576404 - RNA, 22 nt, Human
ucaaaaauacauaguaugauuu

SEQ ID NO: 576405 - RNA, 20 nt, Human
uccaggauaacaggagagaa

SEQ ID NO: 576406 - RNA, 21 nt, Human
ugaacagcacuuaacacauua

SEQ ID NO: 576407 - RNA, 18 nt, Human
ugcaaacuuggguacuga

SEQ ID NO: 576408 - RNA, 27 nt, Human
ugguacacuccauucuauggaaggggu

SEQ ID NO: 576409 - RNA, 18 nt, Human
uuagaacacuagagacaa

SEQ ID NO: 576410 - RNA, 19 nt, Human
uucaacaguacaaaaagga

SEQ ID NO: 576411 - RNA, 24 nt, Human
uucugcuucgcuuucaaaaugcug

SEQ ID NO: 576412 - RNA, 18 nt, Human
uuuuccagucuacaugga

SEQ ID NO: 576413 - RNA, 22 nt, Human
uuuuuacuugcaaacuugggua

SEQ ID NO: 576414 - RNA, 22 nt, Human
aagcacacauuaaaacaauuac

SEQ ID NO: 576415 - RNA, 20 nt, Human
aaguauacccaaggcuggac

SEQ ID NO: 576416 - RNA, 22 nt, Human
acagagaggacauacauuuaug

SEQ ID NO: 576417 - RNA, 21 nt, Human
auuacagagaggacauacauu

SEQ ID NO: 576418 - RNA, 19 nt, Human
cauuuggcccuuaaaaaua

SEQ ID NO: 576419 - RNA, 22 nt, Human
ccuacauaugacagcccagaau

SEQ ID NO: 576420 - RNA, 20 nt, Human
uaaaacacauaaauaccugu

SEQ ID NO: 576421 - RNA, 24 nt, Human
uaaaugcaaguauacccaaggcug

SEQ ID NO: 576422 - RNA, 18 nt, Human
uacaaaaauucaaaauau

SEQ ID NO: 576423 - RNA, 21 nt, Human
uacagagaggacauacauuua

SEQ ID NO: 576424 - RNA, 20 nt, Human
ugauagaaauauaaauguac

SEQ ID NO: 576425 - RNA, 22 nt, Human
uucaccuuaaaggucaaacaug

SEQ ID NO: 576426 - RNA, 23 nt, Human
uuuaugauuuaugcaaauuaagg

SEQ ID NO: 576427 - RNA, 22 nt, Human
uuuuuaguaggaauguuaguuu

SEQ ID NO: 576428 - RNA, 18 nt, Human
aaacaaccagagaacacg

SEQ ID NO: 576429 - RNA, 23 nt, Human
aaacaauaccucaagggucuuga

SEQ ID NO: 576430 - RNA, 20 nt, Human
aacaacgucucgggaacaac

SEQ ID NO: 576431 - RNA, 18 nt, Human
aagcuucuggcaucagca

SEQ ID NO: 576432 - RNA, 23 nt, Human
auggcacagaagcuucuggcauc

SEQ ID NO: 576433 - RNA, 20 nt, Human
caacaggaccccacucuggu

SEQ ID NO: 576434 - RNA, 21 nt, Human
caaccagagaacacguggcau

SEQ ID NO: 576435 - RNA, 24 nt, Human
cacaggggacucaacaacgucucg

SEQ ID NO: 576436 - RNA, 22 nt, Human
caccagacauugcaguuccucc

SEQ ID NO: 576437 - RNA, 22 nt, Human
cacggacacugccuguuccaac

SEQ ID NO: 576438 - RNA, 19 nt, Human
cacucugguccaccagagc

SEQ ID NO: 576439 - RNA, 18 nt, Human
cagcacgcagcccagaug

SEQ ID NO: 576440 - RNA, 24 nt, Human
cauguuuguuuucuuuauugaaag

SEQ ID NO: 576441 - RNA, 20 nt, Human
ccccacucugguccaccaga

SEQ ID NO: 576442 - RNA, 20 nt, Human
cugguccaccagagcugcac

SEQ ID NO: 576443 - RNA, 19 nt, Human
cuuccugguugacugguaa

SEQ ID NO: 576444 - RNA, 18 nt, Human
gaacaacggcccggcggg

SEQ ID NO: 576445 - RNA, 22 nt, Human
gaacuggggcucccaauucuua

SEQ ID NO: 576446 - RNA, 24 nt, Human
gaugaaacaauaccucaagggucu

SEQ ID NO: 576447 - RNA, 20 nt, Human
gcaauggcacagaagcuucu

SEQ ID NO: 576448 - RNA, 22 nt, Human
gcacgcagcccagauguccucg

SEQ ID NO: 576449 - RNA, 21 nt, Human
guugaacuggggcucccaauu

SEQ ID NO: 576450 - RNA, 20 nt, Human
ucaaacccaaguccucgaau

SEQ ID NO: 576451 - RNA, 18 nt, Human
uccaaaacaaccagagaa

SEQ ID NO: 576452 - RNA, 19 nt, Human
uccacacccacauaguacc

SEQ ID NO: 576453 - RNA, 18 nt, Human
uccucggaggacugcuca

SEQ ID NO: 576454 - RNA, 21 nt, Human
uccucggaggacugcucaugg

SEQ ID NO: 576455 - RNA, 24 nt, Human
ucgggaacaacggcccggcgggug

SEQ ID NO: 576456 - RNA, 22 nt, Human
ucucugguuucuguucuccacc

SEQ ID NO: 576457 - RNA, 23 nt, Human
ugugagacuaagcggccaggagg

SEQ ID NO: 576458 - RNA, 21 nt, Human
uguuccaacguccacacccac

SEQ ID NO: 576459 - RNA, 19 nt, Human
uuuuuugguugcacauguu

SEQ ID NO: 576460 - RNA, 21 nt, Human
uuuuuuuuuuuuuuuuugguu

SEQ ID NO: 576461 - RNA, 28 nt, Human
uuuuuuuuuuuuuuuuuuuuuuuggggg

SEQ ID NO: 576462 - RNA, 24 nt, Human
aaagugcugggauuacagguguga

SEQ ID NO: 576463 - RNA, 18 nt, Human
aaaguuccucuuccaccu

SEQ ID NO: 576464 - RNA, 30 nt, Human
aaccuaauuacaagaauugagcaagaccag

SEQ ID NO: 576465 - RNA, 22 nt, Human
aaggagucccugcaaguggagc

SEQ ID NO: 576466 - RNA, 18 nt, Human
aagugcugggauuacagg

SEQ ID NO: 576467 - RNA, 19 nt, Human
aagugcugggauuacaggu

SEQ ID NO: 576468 - RNA, 26 nt, Human
aagugcugggauuacaggugugagcc

SEQ ID NO: 576469 - RNA, 18 nt, Human
aaguucuugccaugcgca

SEQ ID NO: 576470 - RNA, 24 nt, Human
aaugacuguauuaacaagaaccua

SEQ ID NO: 576471 - RNA, 21 nt, Human
accaggcuguucuagaucuuc

SEQ ID NO: 576472 - RNA, 24 nt, Human
accucaugauccgcucgccuuggc

SEQ ID NO: 576473 - RNA, 18 nt, Human
acgggguuucaccauguu

SEQ ID NO: 576474 - RNA, 19 nt, Human
acgggguuucaccauguug

SEQ ID NO: 576475 - RNA, 24 nt, Human
acgggguuucaccauguugaccag

SEQ ID NO: 576476 - RNA, 23 nt, Human
agacagucaagaggaaaaggaaa

SEQ ID NO: 576477 - RNA, 18 nt, Human
agaugcccgccacuaagc

SEQ ID NO: 576478 - RNA, 19 nt, Human
agaugcccgccacuaagcc

SEQ ID NO: 576479 - RNA, 22 nt, Human
agaugcccgccacuaagccugg

SEQ ID NO: 576480 - RNA, 20 nt, Human
aggcaagggggaaaaagagg

SEQ ID NO: 576481 - RNA, 25 nt, Human
agggaaauaaaaggagucccugcaa

SEQ ID NO: 576482 - RNA, 23 nt, Human
aggguucaagugauucuccugcc

SEQ ID NO: 576483 - RNA, 18 nt, Human
aguagcugggacuacaga

SEQ ID NO: 576484 - RNA, 20 nt, Human
agugcaguggcaugaucucg

SEQ ID NO: 576485 - RNA, 23 nt, Human
agugcaguggcaugaucucggcu

SEQ ID NO: 576486 - RNA, 24 nt, Human
agugcaguggcaugaucucggcuc

SEQ ID NO: 576487 - RNA, 24 nt, Human
aguggcaugaucucggcucacugc

SEQ ID NO: 576488 - RNA, 19 nt, Human
auccgcucgccuuggccuc

SEQ ID NO: 576489 - RNA, 24 nt, Human
caaagugcugggauuacaggugug

SEQ ID NO: 576490 - RNA, 24 nt, Human
caagaaccuaauuacaagaauuga

SEQ ID NO: 576491 - RNA, 20 nt, Human
caagugauucuccugccuca

SEQ ID NO: 576492 - RNA, 22 nt, Human
caagugauucuccugccucagc

SEQ ID NO: 576493 - RNA, 21 nt, Human
caaguuuccaaucugugaugg

SEQ ID NO: 576494 - RNA, 18 nt, Human
caccauguugaccaggcu

SEQ ID NO: 576495 - RNA, 22 nt, Human
caccauguugaccaggcuguuc

SEQ ID NO: 576496 - RNA, 21 nt, Human
cacccagccuaaaagucauuu

SEQ ID NO: 576497 - RNA, 21 nt, Human
caccugcucugcucagcgcuc

SEQ ID NO: 576498 - RNA, 24 nt, Human
cacuaagccuggcuaauuuuugua

SEQ ID NO: 576499 - RNA, 22 nt, Human
cacugcacccagccuaaaaguc

SEQ ID NO: 576500 - RNA, 20 nt, Human
cagccuccugaguagcuggg

SEQ ID NO: 576501 - RNA, 20 nt, Human
cagcgcucagaagccaauaa

SEQ ID NO: 576502 - RNA, 25 nt, Human
cagugcaguggcaugaucucggcuc

SEQ ID NO: 576503 - RNA, 22 nt, Human
cauuucagcucuuucuuaggga

SEQ ID NO: 576504 - RNA, 21 nt, Human
ccaaagugcugggauuacagg

SEQ ID NO: 576505 - RNA, 21 nt, Human
ccaaagugcugggauuacagg

SEQ ID NO: 576506 - RNA, 24 nt, Human
ccaaagugcugggauuacaggugu

SEQ ID NO: 576507 - RNA, 19 nt, Human
ccacugcacccagccuaaa

SEQ ID NO: 576508 - RNA, 19 nt, Human
ccacugcacccagccuaaa

SEQ ID NO: 576509 - RNA, 21 nt, Human
ccacugcacccagccuaaaag

SEQ ID NO: 576510 - RNA, 24 nt, Human
ccagccugccaccacaggagccag

SEQ ID NO: 576511 - RNA, 20 nt, Human
ccaggguucaagugauucuc

SEQ ID NO: 576512 - RNA, 23 nt, Human
ccaggguucaagugauucuccug

SEQ ID NO: 576513 - RNA, 23 nt, Human
ccagugaugaagccuuaucauga

SEQ ID NO: 576514 - RNA, 23 nt, Human
cccagagaggcauaccccugaga

SEQ ID NO: 576515 - RNA, 21 nt, Human
cccaggcuggagugcagugca

SEQ ID NO: 576516 - RNA, 24 nt, Human
ccuccaggguucaagugauucucc

SEQ ID NO: 576517 - RNA, 21 nt, Human
ccucgugcccagccugccacc

SEQ ID NO: 576518 - RNA, 24 nt, Human
ccucgugcccagccugccaccaca

SEQ ID NO: 576519 - RNA, 19 nt, Human
ccucuagaaggacuauuca

SEQ ID NO: 576520 - RNA, 23 nt, Human
ccugaguagcugggacuacagau

SEQ ID NO: 576521 - RNA, 23 nt, Human
ccugccucagccuccugaguagc

SEQ ID NO: 576522 - RNA, 24 nt, Human
ccugcucugcucagcgcucagaag

SEQ ID NO: 576523 - RNA, 20 nt, Human
cgccuuggccucccaaagug

SEQ ID NO: 576524 - RNA, 27 nt, Human
cucacugcaaccuccaccuccaggguu

SEQ ID NO: 576525 - RNA, 24 nt, Human
cucagaagccaauaaucgcacuca

SEQ ID NO: 576526 - RNA, 24 nt, Human
cucagccuccugaguagcugggac

SEQ ID NO: 576527 - RNA, 18 nt, Human
cucaugauccgcucgccu

SEQ ID NO: 576528 - RNA, 19 nt, Human
cuccaggguucaagugauu

SEQ ID NO: 576529 - RNA, 23 nt, Human
cugacugguugcauuuccuccug

SEQ ID NO: 576530 - RNA, 23 nt, Human
cugccucagccuccugaguagcu

SEQ ID NO: 576531 - RNA, 24 nt, Human
cuucugaccucaugauccgcucgc

SEQ ID NO: 576532 - RNA, 21 nt, Human
cuugcuuugucacccaggcug

SEQ ID NO: 576533 - RNA, 20 nt, Human
gaccucaugauccgcucgcc

SEQ ID NO: 576534 - RNA, 20 nt, Human
gagacgggguuucaccaugu

SEQ ID NO: 576535 - RNA, 26 nt, Human
gaguagcugggacuacagaugcccgc

SEQ ID NO: 576536 - RNA, 24 nt, Human
gaugguuuccauuagauuuuguca

SEQ ID NO: 576537 - RNA, 18 nt, Human
gauuacaggugugagcca

SEQ ID NO: 576538 - RNA, 22 nt, Human
gauuacaggugugagccacugc

SEQ ID NO: 576539 - RNA, 23 nt, Human
gauuacaggugugagccacugca

SEQ ID NO: 576540 - RNA, 21 nt, Human
gauucuccugccucagccucc

SEQ ID NO: 576541 - RNA, 22 nt, Human
gcaaccuccaccuccaggguuc

SEQ ID NO: 576542 - RNA, 22 nt, Human
gccuuggccucccaaagugcug

SEQ ID NO: 576543 - RNA, 23 nt, Human
gggguuucaccauguugaccagg

SEQ ID NO: 576544 - RNA, 23 nt, Human
ggguucaagugauucuccugccu

SEQ ID NO: 576545 - RNA, 22 nt, Human
ggguuucaccauguugaccagg

SEQ ID NO: 576546 - RNA, 23 nt, Human
guagagacgggguuucaccaugu

SEQ ID NO: 576547 - RNA, 24 nt, Human
gucuugcuuugucacccaggcugg

SEQ ID NO: 576548 - RNA, 23 nt, Human
gugauucuccugccucagccucc

SEQ ID NO: 576549 - RNA, 20 nt, Human
uaaaaaacacucguaaagac

SEQ ID NO: 576550 - RNA, 21 nt, Human
uaaaaggagucccugcaagug

SEQ ID NO: 576551 - RNA, 18 nt, Human
uaacucuaaggaggaaag

SEQ ID NO: 576552 - RNA, 18 nt, Human
uaaguaacaauucagcuu

SEQ ID NO: 576553 - RNA, 24 nt, Human
uaauuuuuguauuuuuaguagaga

SEQ ID NO: 576554 - RNA, 24 nt, Human
uacaagaauugagcaagaggacau

SEQ ID NO: 576555 - RNA, 19 nt, Human
uacaggugugagccacugc

SEQ ID NO: 576556 - RNA, 24 nt, Human
uacaggugugagccacugcaccca

SEQ ID NO: 576557 - RNA, 22 nt, Human
uagagacgggguuucaccaugu

SEQ ID NO: 576558 - RNA, 24 nt, Human
uaguagagacgggguuucaccaug

SEQ ID NO: 576559 - RNA, 26 nt, Human
uaguagagacgggguuucaccauguu

SEQ ID NO: 576560 - RNA, 20 nt, Human
ucaagaggaaaaggaaacca

SEQ ID NO: 576561 - RNA, 19 nt, Human
ucaagugauucuccugccu

SEQ ID NO: 576562 - RNA, 23 nt, Human
ucacccaggcuggagugcagugc

SEQ ID NO: 576563 - RNA, 23 nt, Human
ucacugcaaccuccaccuccagg

SEQ ID NO: 576564 - RNA, 24 nt, Human
ucacugcaaccuccaccuccaggg

SEQ ID NO: 576565 - RNA, 25 nt, Human
ucacugcaaccuccaccuccagggu

SEQ ID NO: 576566 - RNA, 27 nt, Human
ucacugcaaccuccaccuccaggguuc

SEQ ID NO: 576567 - RNA, 23 nt, Human
ucagccuccugaguagcugggac

SEQ ID NO: 576568 - RNA, 24 nt, Human
uccaccuccaggguucaagugauu

SEQ ID NO: 576569 - RNA, 24 nt, Human
uccaggguucaagugauucuccug

SEQ ID NO: 576570 - RNA, 23 nt, Human
ucccaaagugcugggauuacagg

SEQ ID NO: 576571 - RNA, 22 nt, Human
uccccagagaggcauaccccug

SEQ ID NO: 576572 - RNA, 18 nt, Human
uccugaguagcugggacu

SEQ ID NO: 576573 - RNA, 24 nt, Human
ucgccuuggccucccaaagugcug

SEQ ID NO: 576574 - RNA, 22 nt, Human
ucgugcccagccugccaccaca

SEQ ID NO: 576575 - RNA, 18 nt, Human
ucuagaaggacuauucau

SEQ ID NO: 576576 - RNA, 24 nt, Human
ucuccugccucagccuccugagua

SEQ ID NO: 576577 - RNA, 22 nt, Human
ucucuagaauauagaaucucug

SEQ ID NO: 576578 - RNA, 23 nt, Human
ucuugcuuugucacccaggcugg

SEQ ID NO: 576579 - RNA, 24 nt, Human
ucuugcuuugucacccaggcugga

SEQ ID NO: 576580 - RNA, 22 nt, Human
ugaauuuauuaaguaacaauuc

SEQ ID NO: 576581 - RNA, 24 nt, Human
ugaggaacagguaucuuguguuau

SEQ ID NO: 576582 - RNA, 20 nt, Human
ugauucuccugccucagccu

SEQ ID NO: 576583 - RNA, 24 nt, Human
ugcagugcaguggcaugaucucgg

SEQ ID NO: 576584 - RNA, 25 nt, Human
ugcagugcaguggcaugaucucggg

SEQ ID NO: 576585 - RNA, 24 nt, Human
ugccucagccuccugaguagcugg

SEQ ID NO: 576586 - RNA, 20 nt, Human
ugcucaaaguuccucuucca

SEQ ID NO: 576587 - RNA, 23 nt, Human
ugcucagcgcucagaagccaaua

SEQ ID NO: 576588 - RNA, 24 nt, Human
ugcugggauuacaggugugagcca

SEQ ID NO: 576589 - RNA, 24 nt, Human
ugcuuugucacccaggcuggagug

SEQ ID NO: 576590 - RNA, 25 nt, Human
uggagugcagugcaguggcaugauc

SEQ ID NO: 576591 - RNA, 28 nt, Human
uggagugcagugcaguggcaugaucucg

SEQ ID NO: 576592 - RNA, 21 nt, Human
ugggacuacagaugcccgcca

SEQ ID NO: 576593 - RNA, 22 nt, Human
ugggacuacagaugcccgccac

SEQ ID NO: 576594 - RNA, 24 nt, Human
ugggacuacagaugcccgccacua

SEQ ID NO: 576595 - RNA, 18 nt, Human
ugggauuacaggugugag

SEQ ID NO: 576596 - RNA, 19 nt, Human
ugggauuacaggugugagc

SEQ ID NO: 576597 - RNA, 21 nt, Human
ugggauuacaggugugagcca

SEQ ID NO: 576598 - RNA, 22 nt, Human
ugggauuacaggugugagccac

SEQ ID NO: 576599 - RNA, 22 nt, Human
ugggauuacaggugugagccac

SEQ ID NO: 576600 - RNA, 24 nt, Human
ugggauuacaggugugagccacug

SEQ ID NO: 576601 - RNA, 23 nt, Human
uuaaaaaguaauuccauggaaug

SEQ ID NO: 576602 - RNA, 22 nt, Human
uuaacaagaaccuaauuacaag

SEQ ID NO: 576603 - RNA, 18 nt, Human
uuaguagagacgggguuu

SEQ ID NO: 576604 - RNA, 22 nt, Human
uuaguagagacgggguuucacc

SEQ ID NO: 576605 - RNA, 24 nt, Human
uuaguagagacgggguuucaccau

SEQ ID NO: 576606 - RNA, 21 nt, Human
uucaagugauucuccugccuc

SEQ ID NO: 576607 - RNA, 23 nt, Human
uucaagugauucuccugccucag

SEQ ID NO: 576608 - RNA, 24 nt, Human
uucaagugauucuccugccucagc

SEQ ID NO: 576609 - RNA, 26 nt, Human
uucuagaucuucugaccucaugaucc

SEQ ID NO: 576610 - RNA, 21 nt, Human
uugccaugcgcauccccucuu

SEQ ID NO: 576611 - RNA, 24 nt, Human
uugcuuugucacccaggcuggagu

SEQ ID NO: 576612 - RNA, 23 nt, Human
uuguauuuuuaguagagacgggg

SEQ ID NO: 576613 - RNA, 19 nt, Human
uuguguuauuguagaagua

SEQ ID NO: 576614 - RNA, 21 nt, Human
uuucaccauguugaccaggcu

SEQ ID NO: 576615 - RNA, 24 nt, Human
uuugucacccaggcuggagugcag

SEQ ID NO: 576616 - RNA, 21 nt, Human
uuuuguauuuuuaguagagac

SEQ ID NO: 576617 - RNA, 24 nt, Human
uuuuuaguagagacgggguuucac

SEQ ID NO: 576618 - RNA, 20 nt, Human
uuuuuguauuuuuaguagag

SEQ ID NO: 576619 - RNA, 18 nt, Human
uuuuuuuuuuuuuuuuug

SEQ ID NO: 576620 - RNA, 20 nt, Human
uuuuuuuuuuuuuuuuugcu

SEQ ID NO: 576621 - RNA, 23 nt, Human
uuuuuuuuuuuuuuuuuugcuaa

SEQ ID NO: 576622 - RNA, 23 nt, Human
aaaaauuaaaacaacacugaacu

SEQ ID NO: 576623 - RNA, 23 nt, Human
aagcaaagaggagaaagaaaaca

SEQ ID NO: 576624 - RNA, 22 nt, Human
aagccugcuggcuggcaccugg

SEQ ID NO: 576625 - RNA, 24 nt, Human
agaacaaguacucccuauauucuu

SEQ ID NO: 576626 - RNA, 21 nt, Human
agcccaguucugcggucaagu

SEQ ID NO: 576627 - RNA, 24 nt, Human
aggagcugggaacaaaagguacca

SEQ ID NO: 576628 - RNA, 22 nt, Human
caaagcggaaacucccucugcc

SEQ ID NO: 576629 - RNA, 23 nt, Human
cagaauuucagucaacuugacau

SEQ ID NO: 576630 - RNA, 22 nt, Human
cagagaugaauggaagcaaaga

SEQ ID NO: 576631 - RNA, 21 nt, Human
caucaacagcagccaacagag

SEQ ID NO: 576632 - RNA, 21 nt, Human
ccccugggcaaacccaugauc

SEQ ID NO: 576633 - RNA, 23 nt, Human
cccucugccgccgccgccgccgc

SEQ ID NO: 576634 - RNA, 23 nt, Human
ccgccgccgccgccgccgccgcc

SEQ ID NO: 576635 - RNA, 24 nt, Human
ccgccgccgccgccgccgccgccu

SEQ ID NO: 576636 - RNA, 18 nt, Human
ccgccgccgccgccuccg

SEQ ID NO: 576637 - RNA, 19 nt, Human
ccuccgggagacccuggcc

SEQ ID NO: 576638 - RNA, 20 nt, Human
ccuggcccuccggcccccug

SEQ ID NO: 576639 - RNA, 23 nt, Human
ccugggccaccugcuggguacuu

SEQ ID NO: 576640 - RNA, 23 nt, Human
cgccgccgccgccgccgccuccg

SEQ ID NO: 576641 - RNA, 19 nt, Human
cggcccccugggcaaaccc

SEQ ID NO: 576642 - RNA, 26 nt, Human
cgggguggagugcaaagcggaaacuu

SEQ ID NO: 576643 - RNA, 22 nt, Human
cuaaaugccuucuguuuacuga

SEQ ID NO: 576644 - RNA, 22 nt, Human
cucccuauauucuucauaggau

SEQ ID NO: 576645 - RNA, 20 nt, Human
cugcaucucucuacugucgc

SEQ ID NO: 576646 - RNA, 23 nt, Human
gaacaaguacucccuauauucuu

SEQ ID NO: 576647 - RNA, 25 nt, Human
gaugaauggaagcaaagaggagaaa

SEQ ID NO: 576648 - RNA, 21 nt, Human
gcacaaggucuguuuucaauu

SEQ ID NO: 576649 - RNA, 19 nt, Human
gccgccgccgccgccgccg

SEQ ID NO: 576650 - RNA, 23 nt, Human
gccgccgccgccgccgccgccgg

SEQ ID NO: 576651 - RNA, 20 nt, Human
gcugucaccaccaagccugc

SEQ ID NO: 576652 - RNA, 24 nt, Human
ggagacccuggcccuccggccccc

SEQ ID NO: 576653 - RNA, 21 nt, Human
gggaacaaaagguaccauggc

SEQ ID NO: 576654 - RNA, 18 nt, Human
gggaagguauaauuuuua

SEQ ID NO: 576655 - RNA, 24 nt, Human
gggagacccuggcccuccggcccc

SEQ ID NO: 576656 - RNA, 22 nt, Human
uaaaaucaaugacauacagcca

SEQ ID NO: 576657 - RNA, 18 nt, Human
uaaggcgagagcgaagcc

SEQ ID NO: 576658 - RNA, 19 nt, Human
uaaggcgagagcgaagccc

SEQ ID NO: 576659 - RNA, 19 nt, Human
uacuugugcaguaggaacu

SEQ ID NO: 576660 - RNA, 19 nt, Human
ucaaagggugauaagccuu

SEQ ID NO: 576661 - RNA, 23 nt, Human
ucaacagagaacaaguacucccu

SEQ ID NO: 576662 - RNA, 20 nt, Human
ucaacagcagccaacagaga

SEQ ID NO: 576663 - RNA, 21 nt, Human
ucagaguccauacaaauacag

SEQ ID NO: 576664 - RNA, 27 nt, Human
uccaucaacagcagccaacagagauga

SEQ ID NO: 576665 - RNA, 21 nt, Human
ucccucugccgccgccgccgc

SEQ ID NO: 576666 - RNA, 18 nt, Human
uccgggagacccuggccc

SEQ ID NO: 576667 - RNA, 18 nt, Human
uccucagcacaaggucug

SEQ ID NO: 576668 - RNA, 23 nt, Human
ucuuggauagcccaguucugcgg

SEQ ID NO: 576669 - RNA, 23 nt, Human
ugaaaaacaucuuggauagccca

SEQ ID NO: 576670 - RNA, 18 nt, Human
ugaaaugcccagcugcaa

SEQ ID NO: 576671 - RNA, 18 nt, Human
ugaaaugcccagcugcaa

SEQ ID NO: 576672 - RNA, 18 nt, Human
ugaauggaagcaaagagg

SEQ ID NO: 576673 - RNA, 20 nt, Human
ugcccugaaaugcccagcug

SEQ ID NO: 576674 - RNA, 22 nt, Human
ugccgcggagcugcuaccgggg

SEQ ID NO: 576675 - RNA, 25 nt, Human
ugcggucaagugugcuguaucugcc

SEQ ID NO: 576676 - RNA, 18 nt, Human
ugcuggguacuugugcag

SEQ ID NO: 576677 - RNA, 18 nt, Human
ugcuguaucugccucccu

SEQ ID NO: 576678 - RNA, 18 nt, Human
uggcaccuggaggagcug

SEQ ID NO: 576679 - RNA, 20 nt, Human
uggcaccuggaggagcuggg

SEQ ID NO: 576680 - RNA, 19 nt, Human
uugcugaacuaauacuugc

SEQ ID NO: 576681 - RNA, 21 nt, Human
uuuacugucugacuccaucaa

SEQ ID NO: 576682 - RNA, 20 nt, Human
uuucagucaacuugacauuu

SEQ ID NO: 576683 - RNA, 26 nt, Human
uuuccaccuccgggagacccuggccc

SEQ ID NO: 576684 - RNA, 18 nt, Human
uuuuuuuuuuuguagggg

SEQ ID NO: 576685 - RNA, 19 nt, Human
uuuuuuuuuuuuguagggg

SEQ ID NO: 576686 - RNA, 19 nt, Human
uuuuuuuuuuuuuuguagg

SEQ ID NO: 576687 - RNA, 22 nt, Human
uuuuuuuuuuuuuuuuguaggg

SEQ ID NO: 576688 - RNA, 24 nt, Human
aacugguacuuugggaguuuuaua

SEQ ID NO: 576689 - RNA, 25 nt, Human
aagccagcacaucucugugacaggg

SEQ ID NO: 576690 - RNA, 19 nt, Human
aagguguuguguucuugug

SEQ ID NO: 576691 - RNA, 19 nt, Human
aagugcuucugcauuacag

SEQ ID NO: 576692 - RNA, 23 nt, Human
accagccccccucccacacacac

SEQ ID NO: 576693 - RNA, 19 nt, Human
agcaggaucugaugaaacu

SEQ ID NO: 576694 - RNA, 20 nt, Human
aggcauuugccacaucuuaa

SEQ ID NO: 576695 - RNA, 19 nt, Human
aucugaaucaaauccaaag

SEQ ID NO: 576696 - RNA, 21 nt, Human
auuaaucaucauaaacuguaa

SEQ ID NO: 576697 - RNA, 18 nt, Human
auuucuuuugugcaagau

SEQ ID NO: 576698 - RNA, 20 nt, Human
caagguguuguguucuugug

SEQ ID NO: 576699 - RNA, 23 nt, Human
cacacuuuuuaauaauggguuaa

SEQ ID NO: 576700 - RNA, 20 nt, Human
cacugauuuuuuauacacgu

SEQ ID NO: 576701 - RNA, 20 nt, Human
cagccccccucccacacaca

SEQ ID NO: 576702 - RNA, 21 nt, Human
cagucagaaauuuucugcguu

SEQ ID NO: 576703 - RNA, 20 nt, Human
ccauucugaacuaaacuguc

SEQ ID NO: 576704 - RNA, 19 nt, Human
cugcugcuauuaaucauca

SEQ ID NO: 576705 - RNA, 22 nt, Human
cugguacuuugggaguuuuaua

SEQ ID NO: 576706 - RNA, 23 nt, Human
cuugaucagaacaggcaucuacu

SEQ ID NO: 576707 - RNA, 23 nt, Human
gcaaaauggaaccauuuucuguc

SEQ ID NO: 576708 - RNA, 23 nt, Human
gcaaaauggaaccauuuucuguc

SEQ ID NO: 576709 - RNA, 18 nt, Human
gccccccucccacacaca

SEQ ID NO: 576710 - RNA, 21 nt, Human
gcuuugucuuuaucuuuagua

SEQ ID NO: 576711 - RNA, 18 nt, Human
ggaucugaugaaacuaaa

SEQ ID NO: 576712 - RNA, 20 nt, Human
gguggucaggcauuugccac

SEQ ID NO: 576713 - RNA, 19 nt, Human
gguuuggaaggugccugag

SEQ ID NO: 576714 - RNA, 18 nt, Human
uaaaccagccccccuccc

SEQ ID NO: 576715 - RNA, 21 nt, Human
uaagcgaaacugaacaugcug

SEQ ID NO: 576716 - RNA, 21 nt, Human
uacaacacugggcaaaaugga

SEQ ID NO: 576717 - RNA, 22 nt, Human
uacaaugugaccaccuaaaaau

SEQ ID NO: 576718 - RNA, 28 nt, Human
uagaugagucuuuuuccugauuaggauu

SEQ ID NO: 576719 - RNA, 21 nt, Human
uauuguaaaccagccccccuc

SEQ ID NO: 576720 - RNA, 23 nt, Human
ucauucuagaaaaugugcuuugu

SEQ ID NO: 576721 - RNA, 21 nt, Human
ucuaaaauuaaggccaucagg

SEQ ID NO: 576722 - RNA, 24 nt, Human
ucucugugaguucauucuagaaaa

SEQ ID NO: 576723 - RNA, 22 nt, Human
ucugaacuaaacugucuguuuu

SEQ ID NO: 576724 - RNA, 20 nt, Human
ucuggaaaacugguacuuug

SEQ ID NO: 576725 - RNA, 24 nt, Human
ucuugaucagaacaggccgggguc

SEQ ID NO: 576726 - RNA, 20 nt, Human
ugaaacagugucaucagaac

SEQ ID NO: 576727 - RNA, 22 nt, Human
ugaugcauuuucuuauagugcu

SEQ ID NO: 576728 - RNA, 18 nt, Human
ugcuugauugacagaucu

SEQ ID NO: 576729 - RNA, 21 nt, Human
uggaaaacugguacuuuggga

SEQ ID NO: 576730 - RNA, 19 nt, Human
uggaaccauuuucuguccu

SEQ ID NO: 576731 - RNA, 19 nt, Human
uggaaggugccugagauac

SEQ ID NO: 576732 - RNA, 20 nt, Human
ugggaggcaauggucugacg

SEQ ID NO: 576733 - RNA, 21 nt, Human
ugggaggcaauggucugacgu

SEQ ID NO: 576734 - RNA, 25 nt, Human
uggucaggcauuugccacaucuuaa

SEQ ID NO: 576735 - RNA, 23 nt, Human
ugugguacaacacugggcaaaau

SEQ ID NO: 576736 - RNA, 25 nt, Human
uuaaucaucauaaacuguaaaaugu

SEQ ID NO: 576737 - RNA, 18 nt, Human
uucacacuacugcuugau

SEQ ID NO: 576738 - RNA, 25 nt, Human
uucucauauaagcgaaacugaacau

SEQ ID NO: 576739 - RNA, 23 nt, Human
uuucuggaaaacugguacuuugg

SEQ ID NO: 576740 - RNA, 22 nt, Human
uuuucacacuacugcuugauug

SEQ ID NO: 576741 - RNA, 19 nt, Human
uuuucccuuucuguaaggc

SEQ ID NO: 576742 - RNA, 23 nt, Human
aaaaaaaauucuuuuaauuaaaa

SEQ ID NO: 576743 - RNA, 24 nt, Human
acagagcgagacuuugucucaaaa

SEQ ID NO: 576744 - RNA, 19 nt, Human
acccaggcuggagugcaau

SEQ ID NO: 576745 - RNA, 24 nt, Human
acugcaauccugcuugggugacag

SEQ ID NO: 576746 - RNA, 24 nt, Human
acugucacccaggcuggagugcaa

SEQ ID NO: 576747 - RNA, 23 nt, Human
acuuccuguggaguucauaaaaa

SEQ ID NO: 576748 - RNA, 24 nt, Human
agugcaauggagcgaucuuggcuc

SEQ ID NO: 576749 - RNA, 23 nt, Human
augacagacauacuuuuauucuu

SEQ ID NO: 576750 - RNA, 21 nt, Human
auuaaaaaaaaaaaaaaagcu

SEQ ID NO: 576751 - RNA, 25 nt, Human
cacccaggcuggagugcaauggagc

SEQ ID NO: 576752 - RNA, 23 nt, Human
cacugcaauccugcuugggugac

SEQ ID NO: 576753 - RNA, 23 nt, Human
cccaggcuggagugcaauggagc

SEQ ID NO: 576754 - RNA, 21 nt, Human
gacagacauacuuuuauucuu

SEQ ID NO: 576755 - RNA, 24 nt, Human
gacagagcgagacuuugucucaaa

SEQ ID NO: 576756 - RNA, 18 nt, Human
gagauggaguuucacugu

SEQ ID NO: 576757 - RNA, 20 nt, Human
ggaguuucacugucacccag

SEQ ID NO: 576758 - RNA, 21 nt, Human
ggaguuucacugucacccagg

SEQ ID NO: 576759 - RNA, 24 nt, Human
gugacagagcgagacuuugucuca

SEQ ID NO: 576760 - RNA, 23 nt, Human
guuucacugucacccaggcugga

SEQ ID NO: 576761 - RNA, 22 nt, Human
uaaaaaaaaaaaaaaagcuuua

SEQ ID NO: 576762 - RNA, 25 nt, Human
uacuuuuauucuuuuauuuuugaga

SEQ ID NO: 576763 - RNA, 23 nt, Human
uaggagcuggaugacagacauac

SEQ ID NO: 576764 - RNA, 23 nt, Human
uauggguugcgacugccccucgu

SEQ ID NO: 576765 - RNA, 18 nt, Human
ucacccaggcuggagugc

SEQ ID NO: 576766 - RNA, 19 nt, Human
ucacugcaauccugcuugg

SEQ ID NO: 576767 - RNA, 24 nt, Human
ucacugcaauccugcuugggugac

SEQ ID NO: 576768 - RNA, 20 nt, Human
ucacugucacccaggcugga

SEQ ID NO: 576769 - RNA, 22 nt, Human
ucacugucacccaggcuggagu

SEQ ID NO: 576770 - RNA, 23 nt, Human
ucacugucacccaggcuggagug

SEQ ID NO: 576771 - RNA, 18 nt, Human
uccugcuugggugacaga

SEQ ID NO: 576772 - RNA, 21 nt, Human
uccugcuugggugacagagcg

SEQ ID NO: 576773 - RNA, 24 nt, Human
uccugcuugggugacagagcgaga

SEQ ID NO: 576774 - RNA, 24 nt, Human
ucuuuuauuuuugagauggaguuu

SEQ ID NO: 576775 - RNA, 26 nt, Human
ugaaaauguugauauacacaagcugu

SEQ ID NO: 576776 - RNA, 23 nt, Human
ugcuugggugacagagcgagacu

SEQ ID NO: 576777 - RNA, 24 nt, Human
ugcuugggugacagagcgagacuu

SEQ ID NO: 576778 - RNA, 23 nt, Human
uggagugcaauggagcgaucuug

SEQ ID NO: 576779 - RNA, 24 nt, Human
uggagugcaauggagcgaucuugg

SEQ ID NO: 576780 - RNA, 22 nt, Human
uggaguuucacugucacccagg

SEQ ID NO: 576781 - RNA, 19 nt, Human
ugggugacagagcgagacu

SEQ ID NO: 576782 - RNA, 20 nt, Human
ugucacccaggcuggagugc

SEQ ID NO: 576783 - RNA, 19 nt, Human
uguugauauacacaagcug

SEQ ID NO: 576784 - RNA, 26 nt, Human
uuaauuaaaaaaaaaaaaaaagcuuu

SEQ ID NO: 576785 - RNA, 19 nt, Human
uuucacugucacccaggcu

SEQ ID NO: 576786 - RNA, 22 nt, Human
uuucacugucacccaggcugga

SEQ ID NO: 576787 - RNA, 20 nt, Human
uuuuuuuuuuuuuuuuccau

SEQ ID NO: 576788 - RNA, 25 nt, Human
uuuuuuuuuuuuuuuuuuuccaugg

SEQ ID NO: 576789 - RNA, 24 nt, Human
aagugcuagaaaauacacacaauu

SEQ ID NO: 576790 - RNA, 21 nt, Human
aauauaugaauaaaucacugc

SEQ ID NO: 576791 - RNA, 24 nt, Human
aaucacucccuccccacccuccug

SEQ ID NO: 576792 - RNA, 21 nt, Human
aaugucagacuccagaaagga

SEQ ID NO: 576793 - RNA, 22 nt, Human
acuccuggaccucugggguugg

SEQ ID NO: 576794 - RNA, 18 nt, Human
acugcccucugccggggg

SEQ ID NO: 576795 - RNA, 22 nt, Human
agaaaggaggaguggaagggaa

SEQ ID NO: 576796 - RNA, 21 nt, Human
agacuccagaaaggaggagug

SEQ ID NO: 576797 - RNA, 20 nt, Human
agaugcaguccugagcugga

SEQ ID NO: 576798 - RNA, 19 nt, Human
agccuggaagucuggcccc

SEQ ID NO: 576799 - RNA, 21 nt, Human
agcugcaugguuuagggaguc

SEQ ID NO: 576800 - RNA, 22 nt, Human
aggaggaguggaagggaaaugg

SEQ ID NO: 576801 - RNA, 22 nt, Human
aggugcagagaccacaggaaca

SEQ ID NO: 576802 - RNA, 20 nt, Human
agucuuugggagccuuggaa

SEQ ID NO: 576803 - RNA, 18 nt, Human
agugcuagaaaauacaca

SEQ ID NO: 576804 - RNA, 18 nt, Human
augucuuuccaaguucug

SEQ ID NO: 576805 - RNA, 18 nt, Human
cacaggggccccaccucc

SEQ ID NO: 576806 - RNA, 21 nt, Human
cacucccuccccacccuccug

SEQ ID NO: 576807 - RNA, 19 nt, Human
cagaugcaguccugagcug

SEQ ID NO: 576808 - RNA, 19 nt, Human
caggcagaugcaguccuga

SEQ ID NO: 576809 - RNA, 19 nt, Human
caggugcccuggcugcccu

SEQ ID NO: 576810 - RNA, 21 nt, Human
caguccugagcuggugccccc

SEQ ID NO: 576811 - RNA, 22 nt, Human
ccaauacacaagugcuagaaaa

SEQ ID NO: 576812 - RNA, 21 nt, Human
ccccacccuccugaagcuaga

SEQ ID NO: 576813 - RNA, 26 nt, Human
cccccuugccuucgcagucgugccua

SEQ ID NO: 576814 - RNA, 24 nt, Human
cccuggcugcccuugcugccccuc

SEQ ID NO: 576815 - RNA, 26 nt, Human
ccuccccacccuccugaagcuagagg

SEQ ID NO: 576816 - RNA, 18 nt, Human
ccucuuugacacaggggc

SEQ ID NO: 576817 - RNA, 21 nt, Human
cgccucugcccugucuggcuu

SEQ ID NO: 576818 - RNA, 19 nt, Human
cuaaugucuuuccaaguuc

SEQ ID NO: 576819 - RNA, 20 nt, Human
cuagaggaagauuugcucag

SEQ ID NO: 576820 - RNA, 26 nt, Human
cuaugguuggaacugaaccggggucc

SEQ ID NO: 576821 - RNA, 21 nt, Human
cuccccacccuccugaagcua

SEQ ID NO: 576822 - RNA, 22 nt, Human
cucccuccccacccuccugaag

SEQ ID NO: 576823 - RNA, 24 nt, Human
cuggagcuggagaucagcguuagc

SEQ ID NO: 576824 - RNA, 25 nt, Human
gaacugaacccuugcaaucacguaa

SEQ ID NO: 576825 - RNA, 23 nt, Human
gacagaaaggaggugcagagacc

SEQ ID NO: 576826 - RNA, 26 nt, Human
gaccacaggaacacucaugaaaagga

SEQ ID NO: 576827 - RNA, 21 nt, Human
gagaucacuccuggaccucug

SEQ ID NO: 576828 - RNA, 23 nt, Human
gcagaugcaguccugagcuggug

SEQ ID NO: 576829 - RNA, 20 nt, Human
guaaguucuuugcuagguuu

SEQ ID NO: 576830 - RNA, 19 nt, Human
guccagggaagcuuugaag

SEQ ID NO: 576831 - RNA, 21 nt, Human
guggaggguggcagcguuugu

SEQ ID NO: 576832 - RNA, 26 nt, Human
guggaggguggcagcguuuguuugug

SEQ ID NO: 576833 - RNA, 22 nt, Human
guugggaaguggaggguggcag

SEQ ID NO: 576834 - RNA, 21 nt, Human
ucagagaucacuccuggaccu

SEQ ID NO: 576835 - RNA, 22 nt, Human
uccagggucucaucaugggagu

SEQ ID NO: 576836 - RNA, 21 nt, Human
uccccagagacacugaggugc

SEQ ID NO: 576837 - RNA, 19 nt, Human
uccucuguaguggguucca

SEQ ID NO: 576838 - RNA, 18 nt, Human
ucugccucuguuuucagu

SEQ ID NO: 576839 - RNA, 19 nt, Human
ucuuugggagccuuggaag

SEQ ID NO: 576840 - RNA, 21 nt, Human
ucuuugggagccuuggaaguc

SEQ ID NO: 576841 - RNA, 18 nt, Human
ugacaaugagcugcaugg

SEQ ID NO: 576842 - RNA, 22 nt, Human
ugagcugcaugguuuagggagu

SEQ ID NO: 576843 - RNA, 19 nt, Human
ugaguggaagcuccuuaac

SEQ ID NO: 576844 - RNA, 19 nt, Human
uggugggcugaguggaagc

SEQ ID NO: 576845 - RNA, 19 nt, Human
uguaaaaugagauggcuga

SEQ ID NO: 576846 - RNA, 19 nt, Human
uguccugucuuuguugagu

SEQ ID NO: 576847 - RNA, 18 nt, Human
uguggcuuuggacaggaa

SEQ ID NO: 576848 - RNA, 18 nt, Human
uuccagugauggcuuaug

SEQ ID NO: 576849 - RNA, 25 nt, Human
aagacucuuuccauuucaaggcacc

SEQ ID NO: 576850 - RNA, 20 nt, Human
acagagcaagacucuuucca

SEQ ID NO: 576851 - RNA, 24 nt, Human
acagcacuccagucugggcgacag

SEQ ID NO: 576852 - RNA, 26 nt, Human
acagcacuccagucugggcgacagag

SEQ ID NO: 576853 - RNA, 24 nt, Human
acccaggagguagagguugcagug

SEQ ID NO: 576854 - RNA, 24 nt, Human
acguacaguucggucaucuggagg

SEQ ID NO: 576855 - RNA, 24 nt, Human
agagguugcagugagccgagaucg

SEQ ID NO: 576856 - RNA, 23 nt, Human
aggcaaaaaccguggucugagca

SEQ ID NO: 576857 - RNA, 18 nt, Human
aggcaggagaacugcuug

SEQ ID NO: 576858 - RNA, 24 nt, Human
aggcaggagaacugcuugaaccca

SEQ ID NO: 576859 - RNA, 24 nt, Human
aggcugaggcaggagaacugcuug

SEQ ID NO: 576860 - RNA, 24 nt, Human
agguagagguugcagugagccgag

SEQ ID NO: 576861 - RNA, 24 nt, Human
agucugggcgacagagcaagacuc

SEQ ID NO: 576862 - RNA, 22 nt, Human
agucuguaaucccagcugcucg

SEQ ID NO: 576863 - RNA, 24 nt, Human
aucgcgccacagcacuccagucug

SEQ ID NO: 576864 - RNA, 23 nt, Human
auuuucacuguugcccaacugac

SEQ ID NO: 576865 - RNA, 22 nt, Human
caauccugcugucaacauuagc

SEQ ID NO: 576866 - RNA, 24 nt, Human
cacagcacuccagucugggcgaca

SEQ ID NO: 576867 - RNA, 21 nt, Human
caccuguuacacaguuuuuca

SEQ ID NO: 576868 - RNA, 23 nt, Human
cacuccagucugggcgacagagc

SEQ ID NO: 576869 - RNA, 18 nt, Human
caggcaagccaccugcau

SEQ ID NO: 576870 - RNA, 18 nt, Human
cauugcccugaguugcag

SEQ ID NO: 576871 - RNA, 20 nt, Human
ccacagcacuccagucuggg

SEQ ID NO: 576872 - RNA, 21 nt, Human
ccacagcacuccagucugggc

SEQ ID NO: 576873 - RNA, 24 nt, Human
ccacagcacuccagucugggcgac

SEQ ID NO: 576874 - RNA, 21 nt, Human
cccuagagcuuuuuuccaccu

SEQ ID NO: 576875 - RNA, 21 nt, Human
ccuagagcuuuuuuccaccuc

SEQ ID NO: 576876 - RNA, 18 nt, Human
ccugcugucaacauuagc

SEQ ID NO: 576877 - RNA, 20 nt, Human
cgcuaggcugaggcaggaga

SEQ ID NO: 576878 - RNA, 19 nt, Human
cguguaccauugcccugag

SEQ ID NO: 576879 - RNA, 21 nt, Human
cucuggggaucggacugugga

SEQ ID NO: 576880 - RNA, 22 nt, Human
cugaacucuguguccccagugg

SEQ ID NO: 576881 - RNA, 21 nt, Human
cugggcgacagagcaagacuc

SEQ ID NO: 576882 - RNA, 18 nt, Human
gacuguggacugacgagg

SEQ ID NO: 576883 - RNA, 23 nt, Human
gagaucgcgccacagcacuccag

SEQ ID NO: 576884 - RNA, 24 nt, Human
gcacuccagucugggcgacagagc

SEQ ID NO: 576885 - RNA, 22 nt, Human
gcaggagaacugcuugaaccca

SEQ ID NO: 576886 - RNA, 22 nt, Human
gccacagcacuccagucugggc

SEQ ID NO: 576887 - RNA, 24 nt, Human
gccacagcacuccagucugggcga

SEQ ID NO: 576888 - RNA, 22 nt, Human
ggagaacugcuugaacccagga

SEQ ID NO: 576889 - RNA, 18 nt, Human
ggaggaagacaacgugcu

SEQ ID NO: 576890 - RNA, 19 nt, Human
ggaggcaggagcgcuuucc

SEQ ID NO: 576891 - RNA, 22 nt, Human
ggagguagagguugcagugagc

SEQ ID NO: 576892 - RNA, 20 nt, Human
ggcaauggcggugagagccc

SEQ ID NO: 576893 - RNA, 22 nt, Human
gggaauccuuuauuucccgguu

SEQ ID NO: 576894 - RNA, 19 nt, Human
gugccacuggugaggagga

SEQ ID NO: 576895 - RNA, 18 nt, Human
guguaccauugcccugag

SEQ ID NO: 576896 - RNA, 23 nt, Human
guuaccaccagggaucucugacu

SEQ ID NO: 576897 - RNA, 19 nt, Human
guugcagugagccgagauc

SEQ ID NO: 576898 - RNA, 21 nt, Human
guugcagugagccgagaucgc

SEQ ID NO: 576899 - RNA, 18 nt, Human
ucaccuucacguacaguu

SEQ ID NO: 576900 - RNA, 20 nt, Human
ucagaaaaccauauucgcag

SEQ ID NO: 576901 - RNA, 24 nt, Human
uccagucugggcgacagagcaaga

SEQ ID NO: 576902 - RNA, 22 nt, Human
ucccggaauaaccuuuuggcuc

SEQ ID NO: 576903 - RNA, 24 nt, Human
ucuauaagccaggcucuggggcag

SEQ ID NO: 576904 - RNA, 21 nt, Human
ucuccagcuuuuucagcuggg

SEQ ID NO: 576905 - RNA, 22 nt, Human
ucucuggggaucggacugugga

SEQ ID NO: 576906 - RNA, 23 nt, Human
ucuguaaucccagcugcucgcua

SEQ ID NO: 576907 - RNA, 23 nt, Human
ugaccagucucaugugccacugg

SEQ ID NO: 576908 - RNA, 22 nt, Human
ugagccgagaucgcgccacagc

SEQ ID NO: 576909 - RNA, 24 nt, Human
ugaggcaggagaacugcuugaacc

SEQ ID NO: 576910 - RNA, 25 nt, Human
ugaggcaggagaacugcuugaaccc

SEQ ID NO: 576911 - RNA, 24 nt, Human
ugcagcagauacucauuaguuacc

SEQ ID NO: 576912 - RNA, 22 nt, Human
uggcauagacauaacuaguagu

SEQ ID NO: 576913 - RNA, 23 nt, Human
uggcauagacauaacuaguaguu

SEQ ID NO: 576914 - RNA, 21 nt, Human
ugguggcaauggcggugagag

SEQ ID NO: 576915 - RNA, 18 nt, Human
ugucuucucccuagagcu

SEQ ID NO: 576916 - RNA, 25 nt, Human
uucccgguuggggaagggggguucc

SEQ ID NO: 576917 - RNA, 18 nt, Human
uugcagugagccgagauc

SEQ ID NO: 576918 - RNA, 19 nt, Human
uugcagugagccgagaucg

SEQ ID NO: 576919 - RNA, 22 nt, Human
uugcagugagccgagaucgcgc

SEQ ID NO: 576920 - RNA, 21 nt, Human
uugcccaacugacuaaaaugc

SEQ ID NO: 576921 - RNA, 24 nt, Human
uuucccggaauaaccuuuuggcuc

SEQ ID NO: 576922 - RNA, 22 nt, Human
uuuuucagcugggcaagcuccu

SEQ ID NO: 576923 - RNA, 23 nt, Human
aaaagaaacaagauugcaaacaa

SEQ ID NO: 576924 - RNA, 25 nt, Human
aaaagaaacaagauugcaaacaaaa

SEQ ID NO: 576925 - RNA, 18 nt, Human
aaaagaacuuaguuguag

SEQ ID NO: 576926 - RNA, 18 nt, Human
aaaaggaaguagucuuca

SEQ ID NO: 576927 - RNA, 18 nt, Human
aaacagauuuugcauaug

SEQ ID NO: 576928 - RNA, 18 nt, Human
aacaacaaaacaaaaccc

SEQ ID NO: 576929 - RNA, 30 nt, Human
aacaacaaaacaaaacccuccaggaaaaaa

SEQ ID NO: 576930 - RNA, 21 nt, Human
aacaacaacaaaacaaaaccc

SEQ ID NO: 576931 - RNA, 19 nt, Human
aacaagauugcaaacaaaa

SEQ ID NO: 576932 - RNA, 29 nt, Human
aacaauuuuuuuuuucuauaggggggccc

SEQ ID NO: 576933 - RNA, 27 nt, Human
aagaaacaagauugcaaacaaaaaugu

SEQ ID NO: 576934 - RNA, 19 nt, Human
aagagcuuaaaaaaauaaa

SEQ ID NO: 576935 - RNA, 24 nt, Human
aagcaaagucuuuucaacaacaac

SEQ ID NO: 576936 - RNA, 26 nt, Human
acaaaacaaaacccuccaggaaaaac

SEQ ID NO: 576937 - RNA, 27 nt, Human
acaaaacaaaacccuccaggaaaaacu

SEQ ID NO: 576938 - RNA, 19 nt, Human
acaacaacaaaacaaaacc

SEQ ID NO: 576939 - RNA, 20 nt, Human
acaacauguacaaagcuaca

SEQ ID NO: 576940 - RNA, 22 nt, Human
acaauacaugaggaccuggagc

SEQ ID NO: 576941 - RNA, 23 nt, Human
accuuuacuucagagauugagga

SEQ ID NO: 576942 - RNA, 23 nt, Human
caaaacaaaacccuccaggaaaa

SEQ ID NO: 576943 - RNA, 21 nt, Human
caacaaaacaaaacccuccag

SEQ ID NO: 576944 - RNA, 23 nt, Human
caacaaaacaaaacccuccagga

SEQ ID NO: 576945 - RNA, 24 nt, Human
caacaacaaaacaaaacccuccag

SEQ ID NO: 576946 - RNA, 22 nt, Human
caacaacaacaaaacaaaaccc

SEQ ID NO: 576947 - RNA, 21 nt, Human
cacaauacaugaggaccugga

SEQ ID NO: 576948 - RNA, 20 nt, Human
caggaaaaacuauauggcug

SEQ ID NO: 576949 - RNA, 19 nt, Human
caguaggacuaucuucugc

SEQ ID NO: 576950 - RNA, 20 nt, Human
caguaggacuaucuucugcu

SEQ ID NO: 576951 - RNA, 25 nt, Human
caugcgcccagaaugcacacggugu

SEQ ID NO: 576952 - RNA, 27 nt, Human
ccagaaugcacacgaguaaaaaugcag

SEQ ID NO: 576953 - RNA, 20 nt, Human
cgcccagaaugcacacgagu

SEQ ID NO: 576954 - RNA, 23 nt, Human
cucacaaguaaagaaaauuuaca

SEQ ID NO: 576955 - RNA, 26 nt, Human
cucucugccaauguuacuugaaaauc

SEQ ID NO: 576956 - RNA, 24 nt, Human
gaaaaaaucuuuaauguacaaaua

SEQ ID NO: 576957 - RNA, 26 nt, Human
gaaaaucuuccaugucaaaacaacuu

SEQ ID NO: 576958 - RNA, 18 nt, Human
gcucauuuucucaguagg

SEQ ID NO: 576959 - RNA, 19 nt, Human
guaccaaaaccgccaagga

SEQ ID NO: 576960 - RNA, 23 nt, Human
gucuacccaccccugaguucagc

SEQ ID NO: 576961 - RNA, 22 nt, Human
uaaaaagaacuuaguuguagua

SEQ ID NO: 576962 - RNA, 26 nt, Human
uaaagaaaauuuacaagaaaaaacuu

SEQ ID NO: 576963 - RNA, 22 nt, Human
uaacaaaagaaacaagauugca

SEQ ID NO: 576964 - RNA, 25 nt, Human
uaacaaaaguuucaauaaaaguauu

SEQ ID NO: 576965 - RNA, 18 nt, Human
uaaccuuaggaucacagu

SEQ ID NO: 576966 - RNA, 19 nt, Human
uacaagaaaaaacuuaaca

SEQ ID NO: 576967 - RNA, 19 nt, Human
uaccaaaaccgccaaggaa

SEQ ID NO: 576968 - RNA, 21 nt, Human
uaccaaaaccgccaaggaagu

SEQ ID NO: 576969 - RNA, 19 nt, Human
uaccuuuacuucagagauu

SEQ ID NO: 576970 - RNA, 21 nt, Human
uacuguaugacuaauaaaagc

SEQ ID NO: 576971 - RNA, 21 nt, Human
uagcaggaaguuaacagagug

SEQ ID NO: 576972 - RNA, 24 nt, Human
uaggaucacagugcauggaaucca

SEQ ID NO: 576973 - RNA, 19 nt, Human
uaguagaaacagauuuugc

SEQ ID NO: 576974 - RNA, 22 nt, Human
uaguagaaacagauuuugcaua

SEQ ID NO: 576975 - RNA, 24 nt, Human
uauaugcccuuaauuaacaacaug

SEQ ID NO: 576976 - RNA, 20 nt, Human
uccaugucaaaacaacuuga

SEQ ID NO: 576977 - RNA, 18 nt, Human
ugagacaaauaagcaacc

SEQ ID NO: 576978 - RNA, 26 nt, Human
ugagacaaauaagcaaccauuugaua

SEQ ID NO: 576979 - RNA, 19 nt, Human
ugaggaacuauauacaaca

SEQ ID NO: 576980 - RNA, 20 nt, Human
ugaguguaaaauuauaugcc

SEQ ID NO: 576981 - RNA, 22 nt, Human
ugauacucacaaguaaagaaaa

SEQ ID NO: 576982 - RNA, 22 nt, Human
ugaucaaagugcucauuuucuc

SEQ ID NO: 576983 - RNA, 26 nt, Human
ugccuggacugaaccagccggggguc

SEQ ID NO: 576984 - RNA, 23 nt, Human
uggaaaaaaucuuuaauguacaa

SEQ ID NO: 576985 - RNA, 22 nt, Human
uggaauccaaauauaaacaguu

SEQ ID NO: 576986 - RNA, 20 nt, Human
uguaaaauuauaugcccuua

SEQ ID NO: 576987 - RNA, 21 nt, Human
uguaaaauuauaugcccuuaa

SEQ ID NO: 576988 - RNA, 22 nt, Human
uguacaaagcuacaaaauguca

SEQ ID NO: 576989 - RNA, 22 nt, Human
uguaguagaaacagauuuugca

SEQ ID NO: 576990 - RNA, 20 nt, Human
uguaguaucauuaacucaca

SEQ ID NO: 576991 - RNA, 18 nt, Human
ugucaaaacaacuugaca

SEQ ID NO: 576992 - RNA, 20 nt, Human
uguuggaucccucacuuuau

SEQ ID NO: 576993 - RNA, 24 nt, Human
uucuauagaaaguuucaucuagcu

SEQ ID NO: 576994 - RNA, 24 nt, Human
uugaaaaucuuccaugucaaaaca

SEQ ID NO: 576995 - RNA, 20 nt, Human
uugaguguaaaauuauaugc

SEQ ID NO: 576996 - RNA, 24 nt, Human
aaagugcugagauuucaggcguga

SEQ ID NO: 576997 - RNA, 23 nt, Human
acaucuuuaaaagaagcugagag

SEQ ID NO: 576998 - RNA, 26 nt, Human
acccuauuccuauauaaacccauccc

SEQ ID NO: 576999 - RNA, 18 nt, Human
agaagcugagagaagagu

SEQ ID NO: 577000 - RNA, 21 nt, Human
aggugcucuauuauugaaaaa

SEQ ID NO: 577001 - RNA, 21 nt, Human
auagccacuccagcuuucuua

SEQ ID NO: 577002 - RNA, 24 nt, Human
caaacccaacacacauuauuauaa

SEQ ID NO: 577003 - RNA, 24 nt, Human
caaagugcugagauuucaggcgug

SEQ ID NO: 577004 - RNA, 24 nt, Human
cagauaaacacuaacuuaauucca

SEQ ID NO: 577005 - RNA, 24 nt, Human
cagggucuugcuguguugcccagg

SEQ ID NO: 577006 - RNA, 23 nt, Human
cauuccuucuuuugcauuauuuc

SEQ ID NO: 577007 - RNA, 26 nt, Human
cauuuuauuguuuuugauaugccuca

SEQ ID NO: 577008 - RNA, 24 nt, Human
ccaaagugcugagauuucaggcgu

SEQ ID NO: 577009 - RNA, 18 nt, Human
cccauguggucagagggc

SEQ ID NO: 577010 - RNA, 19 nt, Human
ccuauauaaacccaucccc

SEQ ID NO: 577011 - RNA, 22 nt, Human
cuucauguauuuugggcucuac

SEQ ID NO: 577012 - RNA, 22 nt, Human
cuugcuguguugcccaggcugg

SEQ ID NO: 577013 - RNA, 25 nt, Human
cuuucaguuuuugcuucauguauuu

SEQ ID NO: 577014 - RNA, 24 nt, Human
cuuuuugcuucuccauuccuucuu

SEQ ID NO: 577015 - RNA, 21 nt, Human
ggaauccucccacuucggccu

SEQ ID NO: 577016 - RNA, 24 nt, Human
gucuugcuguguugcccaggcugg

SEQ ID NO: 577017 - RNA, 23 nt, Human
uaaaagaagcugagagaagagua

SEQ ID NO: 577018 - RNA, 23 nt, Human
uaacuaaacagaauaggcuucag

SEQ ID NO: 577019 - RNA, 20 nt, Human
uacucuuuaucuccaguaac

SEQ ID NO: 577020 - RNA, 19 nt, Human
uaggcuucagauaaacacu

SEQ ID NO: 577021 - RNA, 23 nt, Human
uauauuuguuuuccauccuuuua

SEQ ID NO: 577022 - RNA, 19 nt, Human
ucagauaaacacuaacuua

SEQ ID NO: 577023 - RNA, 19 nt, Human
ucagugguugcucuagggc

SEQ ID NO: 577024 - RNA, 21 nt, Human
ucauuguaacauuuuacucuu

SEQ ID NO: 577025 - RNA, 19 nt, Human
uccaacucuuuuuauggac

SEQ ID NO: 577026 - RNA, 20 nt, Human
uccaacucuuuuuauggacu

SEQ ID NO: 577027 - RNA, 26 nt, Human
uccaaggaauccucccacuucggccu

SEQ ID NO: 577028 - RNA, 20 nt, Human
uccgguauuagaauagccac

SEQ ID NO: 577029 - RNA, 18 nt, Human
ucuugcuguguugcccag

SEQ ID NO: 577030 - RNA, 19 nt, Human
ucuugcuguguugcccagg

SEQ ID NO: 577031 - RNA, 23 nt, Human
ucuugcuguguugcccaggcugg

SEQ ID NO: 577032 - RNA, 24 nt, Human
ucuugcuguguugcccaggcuggu

SEQ ID NO: 577033 - RNA, 21 nt, Human
ugaaguggaaucagacuuguu

SEQ ID NO: 577034 - RNA, 24 nt, Human
ugcccaggcuggucuugaauuccu

SEQ ID NO: 577035 - RNA, 24 nt, Human
ugcuguguugcccaggcuggucuu

SEQ ID NO: 577036 - RNA, 24 nt, Human
uguguugcccaggcuggucuugaa

SEQ ID NO: 577037 - RNA, 19 nt, Human
uguuauuuugauauaggaa

SEQ ID NO: 577038 - RNA, 18 nt, Human
uguugcccaggcuggucu

SEQ ID NO: 577039 - RNA, 22 nt, Human
uguugcccaggcuggucuugaa

SEQ ID NO: 577040 - RNA, 21 nt, Human
uuacaaacccaacacacauua

SEQ ID NO: 577041 - RNA, 22 nt, Human
uucagauaaacacuaacuuaau

SEQ ID NO: 577042 - RNA, 21 nt, Human
uucccaacuuuucauuguuuu

SEQ ID NO: 577043 - RNA, 21 nt, Human
uucuaaagugugucucaaaua

SEQ ID NO: 577044 - RNA, 23 nt, Human
uuuacauuuaauaauauuuuuga

SEQ ID NO: 577045 - RNA, 24 nt, Human
aacccuuuguuuccuggggacuuc

SEQ ID NO: 577046 - RNA, 23 nt, Human
auuguuuucuguuaccaccugag

SEQ ID NO: 577047 - RNA, 21 nt, Human
caagguaaacaguuuacaguc

SEQ ID NO: 577048 - RNA, 19 nt, Human
caccugagggucaugcuuc

SEQ ID NO: 577049 - RNA, 24 nt, Human
cagcaugacaccagcuuaccuccc

SEQ ID NO: 577050 - RNA, 25 nt, Human
cagcaugggacagaugcugacaauc

SEQ ID NO: 577051 - RNA, 21 nt, Human
caugacaccagcuuaccuccc

SEQ ID NO: 577052 - RNA, 25 nt, Human
caugacaccagcuuaccucccugug

SEQ ID NO: 577053 - RNA, 22 nt, Human
ccucgcccugaguuuuccuucc

SEQ ID NO: 577054 - RNA, 23 nt, Human
ccucuccggagcuuggcggggac

SEQ ID NO: 577055 - RNA, 20 nt, Human
ccugcuaugcauccagggag

SEQ ID NO: 577056 - RNA, 25 nt, Human
ccuuccccagcaacauuccuucucu

SEQ ID NO: 577057 - RNA, 20 nt, Human
cggggacagccucuuccugg

SEQ ID NO: 577058 - RNA, 24 nt, Human
cuccuaguguccugaaugacagcu

SEQ ID NO: 577059 - RNA, 21 nt, Human
cugcugagcuuaacccgcugu

SEQ ID NO: 577060 - RNA, 21 nt, Human
cugggugauugucccugaagu

SEQ ID NO: 577061 - RNA, 20 nt, Human
cuuccccagcaacauuccuu

SEQ ID NO: 577062 - RNA, 22 nt, Human
cuuggcggggacagccucuucc

SEQ ID NO: 577063 - RNA, 19 nt, Human
gaaugucaugaacuuaaaa

SEQ ID NO: 577064 - RNA, 27 nt, Human
gcccugaguuuuccuuccccagcaacc

SEQ ID NO: 577065 - RNA, 18 nt, Human
gcuguucaacuucugcau

SEQ ID NO: 577066 - RNA, 18 nt, Human
gugauugugugccuuugg

SEQ ID NO: 577067 - RNA, 24 nt, Human
uacacagagugaaacuccagauau

SEQ ID NO: 577068 - RNA, 23 nt, Human
uaccaggugcucaaagauguuuc

SEQ ID NO: 577069 - RNA, 25 nt, Human
ucaacaucucagcuaaugacuaacc

SEQ ID NO: 577070 - RNA, 22 nt, Human
ucaccugcuaugcauccaggga

SEQ ID NO: 577071 - RNA, 23 nt, Human
uccccagcaacauuccuucucua

SEQ ID NO: 577072 - RNA, 20 nt, Human
ucccugggugauugucccug

SEQ ID NO: 577073 - RNA, 23 nt, Human
ucccugggugauugucccugaag

SEQ ID NO: 577074 - RNA, 18 nt, Human
uccuggggacuucugcuc

SEQ ID NO: 577075 - RNA, 21 nt, Human
ucuguaccaggugcucaaaga

SEQ ID NO: 577076 - RNA, 23 nt, Human
ugacuaacccuuuguuuccuggg

SEQ ID NO: 577077 - RNA, 20 nt, Human
uggauaugggcacaaugacc

SEQ ID NO: 577078 - RNA, 19 nt, Human
ugugacaagcagcauggga

SEQ ID NO: 577079 - RNA, 22 nt, Human
uuaguuauuaguucccugggug

SEQ ID NO: 577080 - RNA, 20 nt, Human
uuccagguuggguacaaugu

SEQ ID NO: 577081 - RNA, 22 nt, Human
uuccagguuggguacaauguuu

SEQ ID NO: 577082 - RNA, 21 nt, Human
uuccccagcaacauuccuucu

SEQ ID NO: 577083 - RNA, 22 nt, Human
uuccccagcaacauuccuucuc

SEQ ID NO: 577084 - RNA, 22 nt, Human
uuccuggggacuucugcucuac

SEQ ID NO: 577085 - RNA, 28 nt, Human
uuccugguuagagguucugggguucacc

SEQ ID NO: 577086 - RNA, 22 nt, Human
uuucuguuaccaccugaggguc

SEQ ID NO: 577087 - RNA, 23 nt, Human
uuuuccagguuggguacaauguu

SEQ ID NO: 577088 - RNA, 23 nt, Human
uuuuggccagccuccccaauccc

SEQ ID NO: 577089 - RNA, 23 nt, Human
aaaguacacaagacagcggacac

SEQ ID NO: 577090 - RNA, 19 nt, Human
acaagacagcggacacgaa

SEQ ID NO: 577091 - RNA, 21 nt, Human
acaaggacgugacaucagaac

SEQ ID NO: 577092 - RNA, 20 nt, Human
accugauuacaacacuaaca

SEQ ID NO: 577093 - RNA, 27 nt, Human
caucagaacaagaagucuauaaguccc

SEQ ID NO: 577094 - RNA, 19 nt, Human
ccaguaucacugaucugau

SEQ ID NO: 577095 - RNA, 25 nt, Human
ccaguaucacugaucugauauuuac

SEQ ID NO: 577096 - RNA, 20 nt, Human
ccuucuauaguccugucaag

SEQ ID NO: 577097 - RNA, 22 nt, Human
cggacacgaaaaaauccaugua

SEQ ID NO: 577098 - RNA, 18 nt, Human
cuaaagaacaucuacaua

SEQ ID NO: 577099 - RNA, 22 nt, Human
uacaacacuaacaccaguauca

SEQ ID NO: 577100 - RNA, 24 nt, Human
ucagaacaagaagucuauaagucc

SEQ ID NO: 577101 - RNA, 26 nt, Human
ugaaaaguagaauucaugaacuaaaa

SEQ ID NO: 577102 - RNA, 20 nt, Human
ugaacaaggacgugacauca

SEQ ID NO: 577103 - RNA, 24 nt, Human
uuacaacacuaacaccaguaucac

SEQ ID NO: 577104 - RNA, 19 nt, Human
uucaagagaugaaaauaac

SEQ ID NO: 577105 - RNA, 21 nt, Human
uugaaaaguagaauucaugaa

SEQ ID NO: 577106 - RNA, 21 nt, Human
aaaacaaauacuuccugggca

SEQ ID NO: 577107 - RNA, 22 nt, Human
agaggaagaaaaaagagaaaaa

SEQ ID NO: 577108 - RNA, 19 nt, Human
cagaggaagaaaaaagaga

SEQ ID NO: 577109 - RNA, 24 nt, Human
cauaaauuuuuccaaaaacccgcu

SEQ ID NO: 577110 - RNA, 22 nt, Human
ccacgccauuccagaaaacucc

SEQ ID NO: 577111 - RNA, 18 nt, Human
ccugccgcagcucacggc

SEQ ID NO: 577112 - RNA, 19 nt, Human
cgaagucagaggaagaaaa

SEQ ID NO: 577113 - RNA, 18 nt, Human
cgugggagcugccugcgc

SEQ ID NO: 577114 - RNA, 21 nt, Human
cugccugcgcuuccgugaacg

SEQ ID NO: 577115 - RNA, 21 nt, Human
gaagaaaaaagagaaaaaugg

SEQ ID NO: 577116 - RNA, 18 nt, Human
ggagcaaacuggugaucc

SEQ ID NO: 577117 - RNA, 20 nt, Human
guuauuuuccuggacuucuu

SEQ ID NO: 577118 - RNA, 26 nt, Human
uaagaauggcaaaacaaauacuuccu

SEQ ID NO: 577119 - RNA, 19 nt, Human
uaaggguuuuaagcacagc

SEQ ID NO: 577120 - RNA, 19 nt, Human
uaggguacuuagagaguga

SEQ ID NO: 577121 - RNA, 19 nt, Human
uauguauuuuaauggagaa

SEQ ID NO: 577122 - RNA, 23 nt, Human
uaugugccacgccauuccagaaa

SEQ ID NO: 577123 - RNA, 19 nt, Human
ucuccagccguccugccgc

SEQ ID NO: 577124 - RNA, 21 nt, Human
ugagaaaugcuucaauaugug

SEQ ID NO: 577125 - RNA, 19 nt, Human
ugccacgccauuccagaaa

SEQ ID NO: 577126 - RNA, 24 nt, Human
uuaggacaguaagagcuccaaagg

SEQ ID NO: 577127 - RNA, 24 nt, Human
aaagugcugggauuacagguguga

SEQ ID NO: 577128 - RNA, 24 nt, Human
aaggaguuucaccauguuggccag

SEQ ID NO: 577129 - RNA, 18 nt, Human
aagugcugggauuacagg

SEQ ID NO: 577130 - RNA, 19 nt, Human
aagugcugggauuacaggu

SEQ ID NO: 577131 - RNA, 26 nt, Human
aagugcugggauuacaggugugagcc

SEQ ID NO: 577132 - RNA, 18 nt, Human
accauguuggccaggcug

SEQ ID NO: 577133 - RNA, 24 nt, Human
aggaguuucaccauguuggccagg

SEQ ID NO: 577134 - RNA, 24 nt, Human
aggugauccaccugccucagccuc

SEQ ID NO: 577135 - RNA, 24 nt, Human
caaagugcugggauuacaggugug

SEQ ID NO: 577136 - RNA, 21 nt, Human
caccauguuggccaggcuggu

SEQ ID NO: 577137 - RNA, 24 nt, Human
caccauguuggccaggcuggucuc

SEQ ID NO: 577138 - RNA, 27 nt, Human
caccauguuggccaggcuggucucaaa

SEQ ID NO: 577139 - RNA, 23 nt, Human
caccugccucagccucccaaagu

SEQ ID NO: 577140 - RNA, 22 nt, Human
caggugauccaccugccucagc

SEQ ID NO: 577141 - RNA, 24 nt, Human
cauguuggccaggcuggucucaaa

SEQ ID NO: 577142 - RNA, 21 nt, Human
ccaaagugcugggauuacagg

SEQ ID NO: 577143 - RNA, 21 nt, Human
ccaaagugcugggauuacagg

SEQ ID NO: 577144 - RNA, 24 nt, Human
ccaaagugcugggauuacaggugu

SEQ ID NO: 577145 - RNA, 26 nt, Human
ccaccugccucagccucccaaagugc

SEQ ID NO: 577146 - RNA, 18 nt, Human
ccacugcacccagcuggg

SEQ ID NO: 577147 - RNA, 18 nt, Human
ccacugcacccagcuggg

SEQ ID NO: 577148 - RNA, 19 nt, Human
ccacugcacccagcugggu

SEQ ID NO: 577149 - RNA, 21 nt, Human
ccugaccucaggugauccacc

SEQ ID NO: 577150 - RNA, 23 nt, Human
ccugaccucaggugauccaccug

SEQ ID NO: 577151 - RNA, 23 nt, Human
ccugaccucaggugauccaccug

SEQ ID NO: 577152 - RNA, 24 nt, Human
ccugccucagccucccaaagugcu

SEQ ID NO: 577153 - RNA, 23 nt, Human
cucaggugauccaccugccucag

SEQ ID NO: 577154 - RNA, 24 nt, Human
cugccucagccucccaaagugcug

SEQ ID NO: 577155 - RNA, 23 nt, Human
cuguauuuuuaguggggaaggag

SEQ ID NO: 577156 - RNA, 24 nt, Human
gaccucaggugauccaccugccuc

SEQ ID NO: 577157 - RNA, 18 nt, Human
gauuacaggugugagcca

SEQ ID NO: 577158 - RNA, 19 nt, Human
gauuacaggugugagccac

SEQ ID NO: 577159 - RNA, 23 nt, Human
gauuacaggugugagccacugca

SEQ ID NO: 577160 - RNA, 23 nt, Human
gcuggucucaaacuccugaccuc

SEQ ID NO: 577161 - RNA, 22 nt, Human
ggaguuucaccauguuggccag

SEQ ID NO: 577162 - RNA, 23 nt, Human
ggaguuucaccauguuggccagg

SEQ ID NO: 577163 - RNA, 24 nt, Human
ggcuggucucaaacuccugaccuc

SEQ ID NO: 577164 - RNA, 24 nt, Human
ggugauccaccugccucagccucc

SEQ ID NO: 577165 - RNA, 18 nt, Human
gugauccaccugccucag

SEQ ID NO: 577166 - RNA, 24 nt, Human
gugauccaccugccucagccuccc

SEQ ID NO: 577167 - RNA, 19 nt, Human
uacaggugugagccacugc

SEQ ID NO: 577168 - RNA, 24 nt, Human
uacaggugugagccacugcaccca

SEQ ID NO: 577169 - RNA, 24 nt, Human
uaguggggaaggaguuucaccaug

SEQ ID NO: 577170 - RNA, 22 nt, Human
ucaggugauccaccugccucag

SEQ ID NO: 577171 - RNA, 23 nt, Human
ucccaaagugcugggauuacagg

SEQ ID NO: 577172 - RNA, 22 nt, Human
ucucauggagugaggcagaguu

SEQ ID NO: 577173 - RNA, 24 nt, Human
ugaccucaggugauccaccugccu

SEQ ID NO: 577174 - RNA, 24 nt, Human
ugccucagccucccaaagugcugg

SEQ ID NO: 577175 - RNA, 24 nt, Human
ugcugggauuacaggugugagcca

SEQ ID NO: 577176 - RNA, 24 nt, Human
uggccaggcuggucucaaacuccu

SEQ ID NO: 577177 - RNA, 18 nt, Human
ugggauuacaggugugag

SEQ ID NO: 577178 - RNA, 19 nt, Human
ugggauuacaggugugagc

SEQ ID NO: 577179 - RNA, 21 nt, Human
ugggauuacaggugugagcca

SEQ ID NO: 577180 - RNA, 22 nt, Human
ugggauuacaggugugagccac

SEQ ID NO: 577181 - RNA, 22 nt, Human
ugggauuacaggugugagccac

SEQ ID NO: 577182 - RNA, 24 nt, Human
ugggauuacaggugugagccacug

SEQ ID NO: 577183 - RNA, 22 nt, Human
uguuauggaucaucucauggag

SEQ ID NO: 577184 - RNA, 24 nt, Human
uuaguggggaaggaguuucaccau

SEQ ID NO: 577185 - RNA, 18 nt, Human
uucuguauuuuuaguggg

SEQ ID NO: 577186 - RNA, 24 nt, Human
uuucaccauguuggccaggcuggu

SEQ ID NO: 577187 - RNA, 24 nt, Human
uuuuuaguggggaaggaguuucac

SEQ ID NO: 577188 - RNA, 25 nt, Human
aaaaaauuguagagaugggggucuc

SEQ ID NO: 577189 - RNA, 19 nt, Human
aacccagacagaucacagc

SEQ ID NO: 577190 - RNA, 25 nt, Human
aagcaguccuccugccucagccucu

SEQ ID NO: 577191 - RNA, 19 nt, Human
acuauguugcccagguugg

SEQ ID NO: 577192 - RNA, 19 nt, Human
acugcagcccugaacuccu

SEQ ID NO: 577193 - RNA, 20 nt, Human
agaaaaaccaugaacccaga

SEQ ID NO: 577194 - RNA, 22 nt, Human
agaaaaaccaugaacccagaca

SEQ ID NO: 577195 - RNA, 24 nt, Human
aggccccacacccacccucugccu

SEQ ID NO: 577196 - RNA, 18 nt, Human
aggcuggagugcaguggc

SEQ ID NO: 577197 - RNA, 20 nt, Human
aggcuggagugcaguggcuu

SEQ ID NO: 577198 - RNA, 23 nt, Human
aguagcuggaaccgcagguaugu

SEQ ID NO: 577199 - RNA, 21 nt, Human
aguccuccugccucagccucu

SEQ ID NO: 577200 - RNA, 23 nt, Human
agugcaguggcuugaucguaccu

SEQ ID NO: 577201 - RNA, 24 nt, Human
caaagugcgaggauuacagucgug

SEQ ID NO: 577202 - RNA, 22 nt, Human
caagcaguccuccugccucagc

SEQ ID NO: 577203 - RNA, 26 nt, Human
caagcgacccuuagccugagccuccc

SEQ ID NO: 577204 - RNA, 24 nt, Human
cacagcaguacugcccaaaugaga

SEQ ID NO: 577205 - RNA, 22 nt, Human
cacuauguugcccagguugguc

SEQ ID NO: 577206 - RNA, 19 nt, Human
cagagcucagggucccuug

SEQ ID NO: 577207 - RNA, 20 nt, Human
cagcccugaacuccugggcu

SEQ ID NO: 577208 - RNA, 27 nt, Human
cagcccugaacuccugggcucaagcag

SEQ ID NO: 577209 - RNA, 26 nt, Human
caguggaccauccaucucucccagga

SEQ ID NO: 577210 - RNA, 21 nt, Human
ccagcccgauggcucccugcc

SEQ ID NO: 577211 - RNA, 21 nt, Human
ccagcccgauggcucccuggc

SEQ ID NO: 577212 - RNA, 19 nt, Human
cccacacccacccucugcc

SEQ ID NO: 577213 - RNA, 22 nt, Human
cccacacccacccucugccuuc

SEQ ID NO: 577214 - RNA, 18 nt, Human
cccugaacuccugggcuc

SEQ ID NO: 577215 - RNA, 27 nt, Human
ccucccagaaucuuccugcugguccaa

SEQ ID NO: 577216 - RNA, 24 nt, Human
ccuccugccucagccucuugagua

SEQ ID NO: 577217 - RNA, 20 nt, Human
ccugggcucaagcaguccuc

SEQ ID NO: 577218 - RNA, 23 nt, Human
ccugggcucaagcaguccuccug

SEQ ID NO: 577219 - RNA, 19 nt, Human
ccuuccauccuugcagcug

SEQ ID NO: 577220 - RNA, 24 nt, Human
ccuuccauccuugcagcuggguug

SEQ ID NO: 577221 - RNA, 22 nt, Human
cgauggcucccugccucaaagc

SEQ ID NO: 577222 - RNA, 24 nt, Human
cucacugcagcccugaacuccugg

SEQ ID NO: 577223 - RNA, 22 nt, Human
cucccugccucaaagcagugga

SEQ ID NO: 577224 - RNA, 20 nt, Human
cucucagcuucaagcgaccc

SEQ ID NO: 577225 - RNA, 20 nt, Human
cucugucgcccaggcuggag

SEQ ID NO: 577226 - RNA, 23 nt, Human
cucugucgcccaggcuggagugc

SEQ ID NO: 577227 - RNA, 23 nt, Human
cugccucagccucuugaguagcu

SEQ ID NO: 577228 - RNA, 18 nt, Human
cugccucugcugcccacc

SEQ ID NO: 577229 - RNA, 22 nt, Human
cugcugcccaccuggaaguggc

SEQ ID NO: 577230 - RNA, 21 nt, Human
cuugcucugucgcccaggcug

SEQ ID NO: 577231 - RNA, 24 nt, Human
gaucguaccucacugcagcccuga

SEQ ID NO: 577232 - RNA, 19 nt, Human
gauuacagucgugagcccc

SEQ ID NO: 577233 - RNA, 24 nt, Human
gauuacagucgugagcccccaugc

SEQ ID NO: 577234 - RNA, 20 nt, Human
gcacagcaguacugcccaaa

SEQ ID NO: 577235 - RNA, 23 nt, Human
gcagugaccucccagaaucuucc

SEQ ID NO: 577236 - RNA, 19 nt, Human
gcccaggcuggagugcagu

SEQ ID NO: 577237 - RNA, 19 nt, Human
gcccuugugggcucagggg

SEQ ID NO: 577238 - RNA, 21 nt, Human
gcccuugugggcucagggguu

SEQ ID NO: 577239 - RNA, 24 nt, Human
gccucaaagcaguggaccauccau

SEQ ID NO: 577240 - RNA, 21 nt, Human
gcucagggucccuugcugucc

SEQ ID NO: 577241 - RNA, 19 nt, Human
gcuggagugcaguggcuug

SEQ ID NO: 577242 - RNA, 20 nt, Human
ggcucaggggucgcaguggu

SEQ ID NO: 577243 - RNA, 18 nt, Human
ggcuggagugcaguggcu

SEQ ID NO: 577244 - RNA, 18 nt, Human
gggcagcaaggggagcuc

SEQ ID NO: 577245 - RNA, 24 nt, Human
gggggucucacuauguugcccagg

SEQ ID NO: 577246 - RNA, 22 nt, Human
gggucucacuauguugcccagg

SEQ ID NO: 577247 - RNA, 23 nt, Human
guagagaugggggucucacuaug

SEQ ID NO: 577248 - RNA, 24 nt, Human
gugaagccucaggccccacaccca

SEQ ID NO: 577249 - RNA, 21 nt, Human
gugcaguggcuugaucguacc

SEQ ID NO: 577250 - RNA, 27 nt, Human
gugggcucaggggucgcaguggugguc

SEQ ID NO: 577251 - RNA, 20 nt, Human
uacagguauguaccgccaca

SEQ ID NO: 577252 - RNA, 23 nt, Human
uaccucacugcagcccugaacuc

SEQ ID NO: 577253 - RNA, 24 nt, Human
uaccucacugcagcccugaacucc

SEQ ID NO: 577254 - RNA, 19 nt, Human
uauguugcccagguugguc

SEQ ID NO: 577255 - RNA, 24 nt, Human
uauguugcccagguuggucuugaa

SEQ ID NO: 577256 - RNA, 24 nt, Human
ucacugcagcccugaacuccuggg

SEQ ID NO: 577257 - RNA, 23 nt, Human
ucagccucuugaguagcuggaac

SEQ ID NO: 577258 - RNA, 22 nt, Human
ucagggucccuugcuguccucu

SEQ ID NO: 577259 - RNA, 18 nt, Human
uccucagcaucuuaccug

SEQ ID NO: 577260 - RNA, 22 nt, Human
uccugggcucaagcaguccucc

SEQ ID NO: 577261 - RNA, 22 nt, Human
uccugggcucaagcaguccucc

SEQ ID NO: 577262 - RNA, 24 nt, Human
uccugggcucaagcaguccuccug

SEQ ID NO: 577263 - RNA, 22 nt, Human
ucgcagugguggucacacuggg

SEQ ID NO: 577264 - RNA, 24 nt, Human
ucgcccaggcuggagugcaguggc

SEQ ID NO: 577265 - RNA, 18 nt, Human
ucucacuauguugcccag

SEQ ID NO: 577266 - RNA, 19 nt, Human
ucucacuauguugcccagg

SEQ ID NO: 577267 - RNA, 19 nt, Human
ucucacuauguugcccagg

SEQ ID NO: 577268 - RNA, 23 nt, Human
ucucacuauguugcccagguugg

SEQ ID NO: 577269 - RNA, 24 nt, Human
ucucacuauguugcccagguuggu

SEQ ID NO: 577270 - RNA, 21 nt, Human
ucucagcuucaagcgacccuu

SEQ ID NO: 577271 - RNA, 26 nt, Human
ucuccugugcgucucucagaaugcug

SEQ ID NO: 577272 - RNA, 24 nt, Human
ucugucgcccaggcuggagugcag

SEQ ID NO: 577273 - RNA, 24 nt, Human
ucuugaguagcuggaaccgcaggu

SEQ ID NO: 577274 - RNA, 23 nt, Human
ucuugcucugucgcccaggcugg

SEQ ID NO: 577275 - RNA, 24 nt, Human
ucuugcucugucgcccaggcugga

SEQ ID NO: 577276 - RNA, 20 nt, Human
ugaacccagacagaucacag

SEQ ID NO: 577277 - RNA, 24 nt, Human
ugaacuccugggcucaagcagucc

SEQ ID NO: 577278 - RNA, 25 nt, Human
ugaacuccugggcucaagcaguccu

SEQ ID NO: 577279 - RNA, 23 nt, Human
ugaagccucaggccccacaccca

SEQ ID NO: 577280 - RNA, 20 nt, Human
ugaccucccagaaucuuccu

SEQ ID NO: 577281 - RNA, 23 nt, Human
ugagaaaaaccaugaacccagac

SEQ ID NO: 577282 - RNA, 22 nt, Human
ugagagcagugaccucccagaa

SEQ ID NO: 577283 - RNA, 21 nt, Human
ugcacagcaguacugcccaaa

SEQ ID NO: 577284 - RNA, 24 nt, Human
ugccucagccucuugaguagcugg

SEQ ID NO: 577285 - RNA, 20 nt, Human
ugccuuccauccuugcagcu

SEQ ID NO: 577286 - RNA, 21 nt, Human
ugcucugcccuugugggcuca

SEQ ID NO: 577287 - RNA, 20 nt, Human
uggaaccgcagguauguaca

SEQ ID NO: 577288 - RNA, 18 nt, Human
uggaaggaaaaguguucu

SEQ ID NO: 577289 - RNA, 19 nt, Human
uggaccauccaucucuccc

SEQ ID NO: 577290 - RNA, 19 nt, Human
uggagugcaguggcuugau

SEQ ID NO: 577291 - RNA, 19 nt, Human
uggagugcaguggcuugau

SEQ ID NO: 577292 - RNA, 28 nt, Human
uggagugcaguggcuugauggcucuagc

SEQ ID NO: 577293 - RNA, 26 nt, Human
uggcuuggucuccugugcgucucuca

SEQ ID NO: 577294 - RNA, 24 nt, Human
ugggcucaagcaguccuccugccu

SEQ ID NO: 577295 - RNA, 25 nt, Human
uguagagaugggggucucacuaugu

SEQ ID NO: 577296 - RNA, 22 nt, Human
uucagaccacauggaaggaaaa

SEQ ID NO: 577297 - RNA, 18 nt, Human
uugcccagguuggucuug

SEQ ID NO: 577298 - RNA, 24 nt, Human
uugcucugucgcccaggcuggagu

SEQ ID NO: 577299 - RNA, 24 nt, Human
uuguagagaugggggucucacuau

SEQ ID NO: 577300 - RNA, 25 nt, Human
uuguagagaugggggucucacuaug

SEQ ID NO: 577301 - RNA, 19 nt, Human
aaacaacaugaugccaaac

SEQ ID NO: 577302 - RNA, 25 nt, Human
aaacccauuuuauuccaguaaaacu

SEQ ID NO: 577303 - RNA, 21 nt, Human
aaagacauauccuaacugaag

SEQ ID NO: 577304 - RNA, 20 nt, Human
aagaagaaaaauaauuuaga

SEQ ID NO: 577305 - RNA, 20 nt, Human
aaggcaguuaguaaacuaca

SEQ ID NO: 577306 - RNA, 26 nt, Human
acaaaacagaauuuauacaaacacac

SEQ ID NO: 577307 - RNA, 22 nt, Human
acacacacacacaacagaauua

SEQ ID NO: 577308 - RNA, 19 nt, Human
acugaagcauacccacaau

SEQ ID NO: 577309 - RNA, 18 nt, Human
agagacuaacauaagaau

SEQ ID NO: 577310 - RNA, 21 nt, Human
aggcaggaagccugaccaagc

SEQ ID NO: 577311 - RNA, 22 nt, Human
aggcaggaagccugaccaagca

SEQ ID NO: 577312 - RNA, 24 nt, Human
auaaaacaacaugaugccaaaccc

SEQ ID NO: 577313 - RNA, 20 nt, Human
auaacacacacacacacaac

SEQ ID NO: 577314 - RNA, 19 nt, Human
augcuuuauaagcauaaaa

SEQ ID NO: 577315 - RNA, 20 nt, Human
auguaaaacauuuauacagu

SEQ ID NO: 577316 - RNA, 23 nt, Human
auuaagaaccaugcaauuuuaag

SEQ ID NO: 577317 - RNA, 24 nt, Human
cacacacacaacagaauuacagua

SEQ ID NO: 577318 - RNA, 20 nt, Human
caccuuuuugaaaaauguca

SEQ ID NO: 577319 - RNA, 24 nt, Human
cauauaacacacacacacacaaca

SEQ ID NO: 577320 - RNA, 21 nt, Human
cccacagaagucauaaagaaa

SEQ ID NO: 577321 - RNA, 22 nt, Human
cccacagaagucauaaagaaaa

SEQ ID NO: 577322 - RNA, 22 nt, Human
ccuaaggucaaaaacagaaaaa

SEQ ID NO: 577323 - RNA, 23 nt, Human
cgggagagucugucucuguaaug

SEQ ID NO: 577324 - RNA, 26 nt, Human
cucucuguagauaacauacaugagag

SEQ ID NO: 577325 - RNA, 18 nt, Human
cuucauggcuaauaaugg

SEQ ID NO: 577326 - RNA, 19 nt, Human
gaccacaguuaugugcuug

SEQ ID NO: 577327 - RNA, 18 nt, Human
uaaaacaacaugaugcca

SEQ ID NO: 577328 - RNA, 19 nt, Human
uaacugaagcauacccaca

SEQ ID NO: 577329 - RNA, 19 nt, Human
uaacugaagcauacccaca

SEQ ID NO: 577330 - RNA, 19 nt, Human
uaaggaagacaacguaaua

SEQ ID NO: 577331 - RNA, 26 nt, Human
uaaggucaaaaacagaaaaauauaaa

SEQ ID NO: 577332 - RNA, 18 nt, Human
uagauaacauacaugaga

SEQ ID NO: 577333 - RNA, 22 nt, Human
uaugugcuugugcauaugcaug

SEQ ID NO: 577334 - RNA, 21 nt, Human
ucucuguaaugauccucucug

SEQ ID NO: 577335 - RNA, 20 nt, Human
ugccugaaaaacuauuuugg

SEQ ID NO: 577336 - RNA, 20 nt, Human
ugccugaaaaacuauuuugu

SEQ ID NO: 577337 - RNA, 22 nt, Human
ugcuuuauaagcauaaaacaac

SEQ ID NO: 577338 - RNA, 19 nt, Human
uguauguacauuuaucaua

SEQ ID NO: 577339 - RNA, 18 nt, Human
ugugcauaugcauguaua

SEQ ID NO: 577340 - RNA, 21 nt, Human
ugugcauaugcauguauagau

SEQ ID NO: 577341 - RNA, 23 nt, Human
uguggcccaugucucgggagagu

SEQ ID NO: 577342 - RNA, 22 nt, Human
uguuacaaaacagaauuuauac

SEQ ID NO: 577343 - RNA, 24 nt, Human
uguuaugaaccaugcaacaugaaa

SEQ ID NO: 577344 - RNA, 25 nt, Human
uguuugauuauuacucuguguuaca

SEQ ID NO: 577345 - RNA, 18 nt, Human
uuacagcacuuaaaaaag

SEQ ID NO: 577346 - RNA, 22 nt, Human
uuagaaaacuucauauaccuaa

SEQ ID NO: 577347 - RNA, 18 nt, Human
uuccuaugugacaaagau

SEQ ID NO: 577348 - RNA, 28 nt, Human
uuuaucauauaacacacacacacacagu

SEQ ID NO: 577349 - RNA, 20 nt, Human
uuuuuuuuuuuuuuuuccau

SEQ ID NO: 577350 - RNA, 26 nt, Human
aagcgauucucgugccucagccuccc

SEQ ID NO: 577351 - RNA, 22 nt, Human
aaucucugcucacugcaaccuc

SEQ ID NO: 577352 - RNA, 18 nt, Human
acaggguuucaccauguu

SEQ ID NO: 577353 - RNA, 19 nt, Human
acaggguuucaccauguug

SEQ ID NO: 577354 - RNA, 19 nt, Human
accauguugcccaagaugg

SEQ ID NO: 577355 - RNA, 23 nt, Human
accucagccucccauagugcugg

SEQ ID NO: 577356 - RNA, 18 nt, Human
acuacagccacaugccac

SEQ ID NO: 577357 - RNA, 18 nt, Human
acucuguaguccaaacug

SEQ ID NO: 577358 - RNA, 24 nt, Human
acuggaguacaguggcgcaaucuc

SEQ ID NO: 577359 - RNA, 21 nt, Human
acuucuccagguuuuccauua

SEQ ID NO: 577360 - RNA, 23 nt, Human
agacaggguuucaccauguugcc

SEQ ID NO: 577361 - RNA, 24 nt, Human
agcgauucucgugccucagccucc

SEQ ID NO: 577362 - RNA, 19 nt, Human
aguacaguggcgcaaucuc

SEQ ID NO: 577363 - RNA, 22 nt, Human
aguccaaacuggaguacagugg

SEQ ID NO: 577364 - RNA, 18 nt, Human
agugcugggauuacaggc

SEQ ID NO: 577365 - RNA, 22 nt, Human
agugcugggauuacaggcauga

SEQ ID NO: 577366 - RNA, 24 nt, Human
auagugcugggauuacaggcauga

SEQ ID NO: 577367 - RNA, 22 nt, Human
caacugcauuuuccccucucaa

SEQ ID NO: 577368 - RNA, 27 nt, Human
caauagcugugacuccuggguacaagc

SEQ ID NO: 577369 - RNA, 18 nt, Human
caccauguugcccaagau

SEQ ID NO: 577370 - RNA, 31 nt, Human
caccauguugcccaagauggugucgaacucc

SEQ ID NO: 577371 - RNA, 18 nt, Human
cacuuuaucaacccuguc

SEQ ID NO: 577372 - RNA, 21 nt, Human
cagaaauacauuacuguagca

SEQ ID NO: 577373 - RNA, 18 nt, Human
caggguuucaccauguug

SEQ ID NO: 577374 - RNA, 24 nt, Human
cauagugcugggauuacaggcaug

SEQ ID NO: 577375 - RNA, 24 nt, Human
caugccaccacgcccagcuaauuu

SEQ ID NO: 577376 - RNA, 24 nt, Human
cauguugcccaagauggugucgaa

SEQ ID NO: 577377 - RNA, 20 nt, Human
ccagggcucaagcgauucuc

SEQ ID NO: 577378 - RNA, 23 nt, Human
ccauagugcugggauuacaggca

SEQ ID NO: 577379 - RNA, 24 nt, Human
ccauagugcugggauuacaggcau

SEQ ID NO: 577380 - RNA, 19 nt, Human
cccgaguagcugggacuac

SEQ ID NO: 577381 - RNA, 24 nt, Human
ccuccguuuuccugaaaaggaaaa

SEQ ID NO: 577382 - RNA, 21 nt, Human
ccugucugaaguuucaacugc

SEQ ID NO: 577383 - RNA, 24 nt, Human
cgugccucagccucccgaguagcu

SEQ ID NO: 577384 - RNA, 21 nt, Human
cucacugcaaccuccaacucc

SEQ ID NO: 577385 - RNA, 23 nt, Human
cucacugcaaccuccaacuccag

SEQ ID NO: 577386 - RNA, 24 nt, Human
cucagccucccgaguagcugggac

SEQ ID NO: 577387 - RNA, 20 nt, Human
cuccuggguacaagcucccg

SEQ ID NO: 577388 - RNA, 25 nt, Human
cucgugccucagccucccgaguagc

SEQ ID NO: 577389 - RNA, 19 nt, Human
cuguagucugguuccugac

SEQ ID NO: 577390 - RNA, 24 nt, Human
cuucauguggagacugagucuuau

SEQ ID NO: 577391 - RNA, 24 nt, Human
gaaaaccuccaugccccgugagag

SEQ ID NO: 577392 - RNA, 21 nt, Human
gacuacagccacaugccacca

SEQ ID NO: 577393 - RNA, 24 nt, Human
gagaucugcccaccucagccuccc

SEQ ID NO: 577394 - RNA, 24 nt, Human
gagcucaggagaucugcccaccuc

SEQ ID NO: 577395 - RNA, 26 nt, Human
gaguagcugggacuacagccacaugc

SEQ ID NO: 577396 - RNA, 18 nt, Human
gauuacaggcaugagcca

SEQ ID NO: 577397 - RNA, 22 nt, Human
gauuacaggcaugagccacugc

SEQ ID NO: 577398 - RNA, 23 nt, Human
gauuacaggcaugagccacugca

SEQ ID NO: 577399 - RNA, 18 nt, Human
gcaaccuccaacuccagg

SEQ ID NO: 577400 - RNA, 24 nt, Human
gcccagcuaauuuuuuuguauuuu

SEQ ID NO: 577401 - RNA, 24 nt, Human
gcgauucucgugccucagccuccc

SEQ ID NO: 577402 - RNA, 24 nt, Human
ggagaucugcccaccucagccucc

SEQ ID NO: 577403 - RNA, 22 nt, Human
ggauuacaggcaugagccacug

SEQ ID NO: 577404 - RNA, 18 nt, Human
gguccacuguagucuggu

SEQ ID NO: 577405 - RNA, 22 nt, Human
gugccucagccucccgaguagc

SEQ ID NO: 577406 - RNA, 23 nt, Human
guuuuuugcuguuguuguuuugu

SEQ ID NO: 577407 - RNA, 22 nt, Human
uacagccacaugccaccacgcc

SEQ ID NO: 577408 - RNA, 24 nt, Human
uacagccacaugccaccacgccca

SEQ ID NO: 577409 - RNA, 22 nt, Human
uacaggcaugagccacugcacc

SEQ ID NO: 577410 - RNA, 22 nt, Human
uagcauaagaauggcauuuauu

SEQ ID NO: 577411 - RNA, 22 nt, Human
uaguagacaggguuucaccaug

SEQ ID NO: 577412 - RNA, 24 nt, Human
uagugcugggauuacaggcaugag

SEQ ID NO: 577413 - RNA, 23 nt, Human
uauuuuaguagacaggguuucac

SEQ ID NO: 577414 - RNA, 18 nt, Human
ucaagguucuccaggguc

SEQ ID NO: 577415 - RNA, 23 nt, Human
ucacugcaaccuccaacuccagg

SEQ ID NO: 577416 - RNA, 24 nt, Human
ucacugcaaccuccaacuccaggg

SEQ ID NO: 577417 - RNA, 27 nt, Human
ucacugcaaccuccaacuccagggcuc

SEQ ID NO: 577418 - RNA, 23 nt, Human
ucagccucccgaguagcugggac

SEQ ID NO: 577419 - RNA, 22 nt, Human
uccacuguagucugguuccuga

SEQ ID NO: 577420 - RNA, 24 nt, Human
ucccauagugcugggauuacaggc

SEQ ID NO: 577421 - RNA, 22 nt, Human
ucccgaguagcugggacuacag

SEQ ID NO: 577422 - RNA, 23 nt, Human
ucccgaguagcugggacuacagc

SEQ ID NO: 577423 - RNA, 23 nt, Human
ucgaaaaccuccaugccccguga

SEQ ID NO: 577424 - RNA, 23 nt, Human
ucucacucuguaguccaaacugg

SEQ ID NO: 577425 - RNA, 24 nt, Human
ucucacucuguaguccaaacugga

SEQ ID NO: 577426 - RNA, 23 nt, Human
ucucuguaaccuccguuuuccug

SEQ ID NO: 577427 - RNA, 28 nt, Human
ucucuguaaccuccguuuuggguccucc

SEQ ID NO: 577428 - RNA, 21 nt, Human
ucugcccaccucagccuccca

SEQ ID NO: 577429 - RNA, 20 nt, Human
ugaaaaggaaaaauguucuu

SEQ ID NO: 577430 - RNA, 22 nt, Human
ugacuccuggguacaagcuccc

SEQ ID NO: 577431 - RNA, 24 nt, Human
ugccucagccucccgaguagcugg

SEQ ID NO: 577432 - RNA, 19 nt, Human
uggaguacaguggcgcaau

SEQ ID NO: 577433 - RNA, 24 nt, Human
ugggacuacagccacaugccacca

SEQ ID NO: 577434 - RNA, 18 nt, Human
ugggauuacaggcaugag

SEQ ID NO: 577435 - RNA, 19 nt, Human
ugggauuacaggcaugagc

SEQ ID NO: 577436 - RNA, 21 nt, Human
ugggauuacaggcaugagcca

SEQ ID NO: 577437 - RNA, 22 nt, Human
ugggauuacaggcaugagccac

SEQ ID NO: 577438 - RNA, 22 nt, Human
ugggauuacaggcaugagccac

SEQ ID NO: 577439 - RNA, 24 nt, Human
ugggauuacaggcaugagccacug

SEQ ID NO: 577440 - RNA, 24 nt, Human
ugggauuacaggcaugagccacug

SEQ ID NO: 577441 - RNA, 20 nt, Human
ugucgaacuccugagcucag

SEQ ID NO: 577442 - RNA, 22 nt, Human
uguuuuguuuuguuuugagaug

SEQ ID NO: 577443 - RNA, 25 nt, Human
uuacauauacuuuucucuguaaccu

SEQ ID NO: 577444 - RNA, 22 nt, Human
uuaguagacaggguuucaccau

SEQ ID NO: 577445 - RNA, 23 nt, Human
uuaguagacaggguuucaccaug

SEQ ID NO: 577446 - RNA, 19 nt, Human
uucgaaaaccuccaugccc

SEQ ID NO: 577447 - RNA, 23 nt, Human
uucuccagguuuuccauuagaca

SEQ ID NO: 577448 - RNA, 20 nt, Human
uuguuguuuuguuuuguuuu

SEQ ID NO: 577449 - RNA, 23 nt, Human
uuuaguagacaggguuucaccau

SEQ ID NO: 577450 - RNA, 24 nt, Human
uuuaguagacaggguuucaccaug

SEQ ID NO: 577451 - RNA, 19 nt, Human
uuucaccauguugcccaag

SEQ ID NO: 577452 - RNA, 24 nt, Human
aacaaguuaggaaaauuaagccug

SEQ ID NO: 577453 - RNA, 22 nt, Human
cagaauucuucuaggcuucuau

SEQ ID NO: 577454 - RNA, 19 nt, Human
gaacauaaaucuucucagg

SEQ ID NO: 577455 - RNA, 23 nt, Human
ugaaauagucuaaagauaagaca

SEQ ID NO: 577456 - RNA, 19 nt, Human
aaaauguccaccaggaaac

SEQ ID NO: 577457 - RNA, 26 nt, Human
aaacagccuggggcuugcgauuggca

SEQ ID NO: 577458 - RNA, 20 nt, Human
acaagcuuggcuauuucaag

SEQ ID NO: 577459 - RNA, 20 nt, Human
acacccaaaacggacucaac

SEQ ID NO: 577460 - RNA, 21 nt, Human
acacccaaaacggacucaaca

SEQ ID NO: 577461 - RNA, 22 nt, Human
acagcaccggagagcacuguac

SEQ ID NO: 577462 - RNA, 24 nt, Human
acucugagauguuccaaaaccaau

SEQ ID NO: 577463 - RNA, 22 nt, Human
agaaagaaaccuuagauguugc

SEQ ID NO: 577464 - RNA, 18 nt, Human
agaaguggggagcggucu

SEQ ID NO: 577465 - RNA, 20 nt, Human
agacaaaaggccugaagaau

SEQ ID NO: 577466 - RNA, 22 nt, Human
agacaaaaggccugaagaauua

SEQ ID NO: 577467 - RNA, 21 nt, Human
agagcacuguacaaaaugucc

SEQ ID NO: 577468 - RNA, 24 nt, Human
agaguagaaagaaaccuuagaugu

SEQ ID NO: 577469 - RNA, 22 nt, Human
agcggucuugugggacugaguc

SEQ ID NO: 577470 - RNA, 18 nt, Human
auguuccaaaaccaauaa

SEQ ID NO: 577471 - RNA, 23 nt, Human
auuaagcaaaccccaggaggggg

SEQ ID NO: 577472 - RNA, 21 nt, Human
caccggagagcacuguacaaa

SEQ ID NO: 577473 - RNA, 21 nt, Human
cagaauugaauuggaggacac

SEQ ID NO: 577474 - RNA, 24 nt, Human
cagccuucaaucuucucuccuucu

SEQ ID NO: 577475 - RNA, 26 nt, Human
cauucggaaaucagaaucuacaaggg

SEQ ID NO: 577476 - RNA, 19 nt, Human
cccauguugcaauccuggg

SEQ ID NO: 577477 - RNA, 20 nt, Human
ccccaggagggggucauggg

SEQ ID NO: 577478 - RNA, 22 nt, Human
gacaucuuucuuugaaaguuuc

SEQ ID NO: 577479 - RNA, 20 nt, Human
gagaucugacacuaucucca

SEQ ID NO: 577480 - RNA, 23 nt, Human
gagcacucagaccccgguugaca

SEQ ID NO: 577481 - RNA, 25 nt, Human
gcaaaccccaggagggggggaacgc

SEQ ID NO: 577482 - RNA, 18 nt, Human
ggcucacugauuuucgca

SEQ ID NO: 577483 - RNA, 25 nt, Human
guacaaaauguccaccaggaaacca

SEQ ID NO: 577484 - RNA, 22 nt, Human
gucugcuuuggcuucccaggaa

SEQ ID NO: 577485 - RNA, 21 nt, Human
uacaagcuuggcuauuucaag

SEQ ID NO: 577486 - RNA, 23 nt, Human
uacacccaaaacggacucaacau

SEQ ID NO: 577487 - RNA, 26 nt, Human
uacacccaaaacggacucaacaucag

SEQ ID NO: 577488 - RNA, 18 nt, Human
ucaacaucagcuucuggc

SEQ ID NO: 577489 - RNA, 24 nt, Human
ucagcaaaucuaaccuuaccauuu

SEQ ID NO: 577490 - RNA, 19 nt, Human
ucaugggaucccugauuua

SEQ ID NO: 577491 - RNA, 23 nt, Human
uccaaaaccaauaaauccaggca

SEQ ID NO: 577492 - RNA, 22 nt, Human
ucccaggaacuuagaguuucug

SEQ ID NO: 577493 - RNA, 18 nt, Human
ucccugauuuagauguac

SEQ ID NO: 577494 - RNA, 18 nt, Human
ucccuuuaguucgcugcu

SEQ ID NO: 577495 - RNA, 20 nt, Human
ucuucagcuccuugaauagc

SEQ ID NO: 577496 - RNA, 22 nt, Human
ucuugugggacugaguccuaag

SEQ ID NO: 577497 - RNA, 19 nt, Human
ugagagaagguucaguugu

SEQ ID NO: 577498 - RNA, 20 nt, Human
ugagcacucagaccccgguu

SEQ ID NO: 577499 - RNA, 19 nt, Human
ugaguucugugagacaguc

SEQ ID NO: 577500 - RNA, 19 nt, Human
ugcugggugggagaaaucu

SEQ ID NO: 577501 - RNA, 19 nt, Human
ugcuuguucuucccgccca

SEQ ID NO: 577502 - RNA, 18 nt, Human
uggcggcggaagaggaca

SEQ ID NO: 577503 - RNA, 19 nt, Human
uggcuuggacaauacucug

SEQ ID NO: 577504 - RNA, 18 nt, Human
uggucgcgguugcagcug

SEQ ID NO: 577505 - RNA, 28 nt, Human
uguacaaaauguccaccaggaaaccaaa

SEQ ID NO: 577506 - RNA, 24 nt, Human
uucaaucuucucuccuucugaaga

SEQ ID NO: 577507 - RNA, 25 nt, Human
uucaaucuucucuccuucugaagau

SEQ ID NO: 577508 - RNA, 22 nt, Human
uugaaggccucagguucccuuu

SEQ ID NO: 577509 - RNA, 18 nt, Human
uuggaggacacauagcug

SEQ ID NO: 577510 - RNA, 19 nt, Human
uuuacuugacuucaaugag

SEQ ID NO: 577511 - RNA, 18 nt, Human
uuuuuuguacaagcuugg

SEQ ID NO: 577512 - RNA, 18 nt, Human
aaagaacagcauagauau

SEQ ID NO: 577513 - RNA, 21 nt, Human
aaaguaaguagcaggauacag

SEQ ID NO: 577514 - RNA, 18 nt, Human
aagaagggaaauacaaug

SEQ ID NO: 577515 - RNA, 23 nt, Human
aagaagggaaauacaaugcuuua

SEQ ID NO: 577516 - RNA, 18 nt, Human
acaguuaggucccugaac

SEQ ID NO: 577517 - RNA, 20 nt, Human
acuauuacuaccaacaggau

SEQ ID NO: 577518 - RNA, 21 nt, Human
acuguuguuggagacugugga

SEQ ID NO: 577519 - RNA, 21 nt, Human
agaaacauuaguaacuuaagc

SEQ ID NO: 577520 - RNA, 20 nt, Human
agaaacccucuacuuuaacc

SEQ ID NO: 577521 - RNA, 21 nt, Human
augaauguuuaccccugcugu

SEQ ID NO: 577522 - RNA, 22 nt, Human
augaggcagaauggaucacccc

SEQ ID NO: 577523 - RNA, 18 nt, Human
caagaaccccaaauaaaa

SEQ ID NO: 577524 - RNA, 22 nt, Human
caagaaccccaaauaaaauuaa

SEQ ID NO: 577525 - RNA, 19 nt, Human
cacagauuuuguaaaucca

SEQ ID NO: 577526 - RNA, 24 nt, Human
caggauuuuacacaagaaacauua

SEQ ID NO: 577527 - RNA, 22 nt, Human
ccaagcaguuuguaaaaguaag

SEQ ID NO: 577528 - RNA, 23 nt, Human
ccacuaugcaggauccaaccguc

SEQ ID NO: 577529 - RNA, 19 nt, Human
ccauacugggccuggaacu

SEQ ID NO: 577530 - RNA, 23 nt, Human
ccuuuagguagaaguccagccuu

SEQ ID NO: 577531 - RNA, 21 nt, Human
cucaagaaccccaaauaaaau

SEQ ID NO: 577532 - RNA, 18 nt, Human
cugcagaugaauguuuac

SEQ ID NO: 577533 - RNA, 18 nt, Human
gcacacugcagaugaaug

SEQ ID NO: 577534 - RNA, 22 nt, Human
gcuaaucaagaaacccucuacu

SEQ ID NO: 577535 - RNA, 23 nt, Human
ggguaauuuucuuuuaaagauau

SEQ ID NO: 577536 - RNA, 24 nt, Human
uaaccaagcaguuuguaaaaguaa

SEQ ID NO: 577537 - RNA, 22 nt, Human
uacaucacaaagcuaaucaaga

SEQ ID NO: 577538 - RNA, 21 nt, Human
uagcaggauacagaaauccuc

SEQ ID NO: 577539 - RNA, 18 nt, Human
uaggucccugaacuugua

SEQ ID NO: 577540 - RNA, 23 nt, Human
ucaaaguuuuaacuguuguugga

SEQ ID NO: 577541 - RNA, 21 nt, Human
uccacaguuaggucccugaac

SEQ ID NO: 577542 - RNA, 21 nt, Human
ucccugaacuuguacuccaga

SEQ ID NO: 577543 - RNA, 20 nt, Human
uccuuaguucuuccacaguu

SEQ ID NO: 577544 - RNA, 18 nt, Human
ugaagaagggaaauacaa

SEQ ID NO: 577545 - RNA, 24 nt, Human
ugacacagauuuuguaaauccaua

SEQ ID NO: 577546 - RNA, 26 nt, Human
ugaggcagaauggaucaccccucuca

SEQ ID NO: 577547 - RNA, 19 nt, Human
ugcaggauccaaccgucuu

SEQ ID NO: 577548 - RNA, 22 nt, Human
ugcauuugagaaucaaaguuuu

SEQ ID NO: 577549 - RNA, 19 nt, Human
ugcuuuggaguuucucagu

SEQ ID NO: 577550 - RNA, 22 nt, Human
ugcuuuggaguuucucaguaac

SEQ ID NO: 577551 - RNA, 24 nt, Human
uuacaucacaaagcuaaucaagaa

SEQ ID NO: 577552 - RNA, 23 nt, Human
uuuuaaaaauucacuuuccauuu

SEQ ID NO: 577553 - RNA, 22 nt, Human
uuuuuggcacggcucauucacu

SEQ ID NO: 577554 - RNA, 22 nt, Human
uuuuuugguagguaauuaauuu

SEQ ID NO: 577555 - RNA, 23 nt, Human
aaaaagaaaagauuuagagguuc

SEQ ID NO: 577556 - RNA, 21 nt, Human
aaaaagacaccccaccagacc

SEQ ID NO: 577557 - RNA, 24 nt, Human
aaagacaccccaccagaccugcgg

SEQ ID NO: 577558 - RNA, 22 nt, Human
aaagcagaugaaggcaggaacu

SEQ ID NO: 577559 - RNA, 21 nt, Human
aaccaggggcuucuaagccac

SEQ ID NO: 577560 - RNA, 19 nt, Human
aaccguggggcugggaggc

SEQ ID NO: 577561 - RNA, 20 nt, Human
aagacaccccaccagaccug

SEQ ID NO: 577562 - RNA, 20 nt, Human
accagggccuccccucagca

SEQ ID NO: 577563 - RNA, 21 nt, Human
accagggccuccccucagcag

SEQ ID NO: 577564 - RNA, 22 nt, Human
accagggccuccccucagcagc

SEQ ID NO: 577565 - RNA, 22 nt, Human
acccaaaaacagggcaggccag

SEQ ID NO: 577566 - RNA, 27 nt, Human
acccaaaaacagggcaggccagggagu

SEQ ID NO: 577567 - RNA, 19 nt, Human
accccaaaccaggggcuuc

SEQ ID NO: 577568 - RNA, 20 nt, Human
accccggggacgaauuugcu

SEQ ID NO: 577569 - RNA, 20 nt, Human
agacacgugcccuccuccuc

SEQ ID NO: 577570 - RNA, 18 nt, Human
agacuuggaaggagggug

SEQ ID NO: 577571 - RNA, 24 nt, Human
aggagaaaaaagacaccccaccag

SEQ ID NO: 577572 - RNA, 23 nt, Human
aggagacuuggaaggagggugag

SEQ ID NO: 577573 - RNA, 25 nt, Human
aggcaggaacugaggcaugaccagg

SEQ ID NO: 577574 - RNA, 20 nt, Human
aggccccucaagggcagccc

SEQ ID NO: 577575 - RNA, 18 nt, Human
aggccucacugcuggcuc

SEQ ID NO: 577576 - RNA, 21 nt, Human
agggagggagggaccccuggg

SEQ ID NO: 577577 - RNA, 20 nt, Human
caaaccaggggcuucuaagc

SEQ ID NO: 577578 - RNA, 22 nt, Human
caagacaucaaucgucuguuag

SEQ ID NO: 577579 - RNA, 22 nt, Human
caagccccacuuggagacaacu

SEQ ID NO: 577580 - RNA, 22 nt, Human
caccccaaaccaggggcuucua

SEQ ID NO: 577581 - RNA, 18 nt, Human
caggccagggaguggcag

SEQ ID NO: 577582 - RNA, 23 nt, Human
cagggucccgggggucuuggggg

SEQ ID NO: 577583 - RNA, 23 nt, Human
cccacaagaugcucagugccaaa

SEQ ID NO: 577584 - RNA, 23 nt, Human
ccccccgccgucgcgcguucgag

SEQ ID NO: 577585 - RNA, 21 nt, Human
ccccucaagggcagcccgggc

SEQ ID NO: 577586 - RNA, 19 nt, Human
ccccuggagaccugggauu

SEQ ID NO: 577587 - RNA, 24 nt, Human
ccguggggacucgggggccaggcg

SEQ ID NO: 577588 - RNA, 25 nt, Human
ccuccggaaagcagaugaaggcagg

SEQ ID NO: 577589 - RNA, 20 nt, Human
ccuccuccuccacccacccc

SEQ ID NO: 577590 - RNA, 21 nt, Human
cgccaagccccacuuggagac

SEQ ID NO: 577591 - RNA, 23 nt, Human
cggaaagcagaugaaggcaggaa

SEQ ID NO: 577592 - RNA, 25 nt, Human
cuccacccaccccaaaccaggggcu

SEQ ID NO: 577593 - RNA, 18 nt, Human
cuccuccacccaccccaa

SEQ ID NO: 577594 - RNA, 26 nt, Human
cuccuccacccaccccaaaccagggg

SEQ ID NO: 577595 - RNA, 19 nt, Human
cuuccccccgccgucgcgc

SEQ ID NO: 577596 - RNA, 22 nt, Human
gaaaccguggggcugggaggca

SEQ ID NO: 577597 - RNA, 19 nt, Human
gaacaaauguggccagaga

SEQ ID NO: 577598 - RNA, 19 nt, Human
gaaggagggagggagggac

SEQ ID NO: 577599 - RNA, 19 nt, Human
gaaggagggagggagggac

SEQ ID NO: 577600 - RNA, 21 nt, Human
gaaggggggcacugggguucu

SEQ ID NO: 577601 - RNA, 20 nt, Human
gacugccuggccaacagggc

SEQ ID NO: 577602 - RNA, 19 nt, Human
gagcugcacagggaccccc

SEQ ID NO: 577603 - RNA, 22 nt, Human
gagcugcacagggacccccugg

SEQ ID NO: 577604 - RNA, 25 nt, Human
gaggagaaaaaagacaccccaccag

SEQ ID NO: 577605 - RNA, 19 nt, Human
gagggcaccccaggggagg

SEQ ID NO: 577606 - RNA, 20 nt, Human
gccaccucucacugcuccug

SEQ ID NO: 577607 - RNA, 18 nt, Human
gcgcaggagacuuggaag

SEQ ID NO: 577608 - RNA, 23 nt, Human
gcgggaaggggacugccuggcca

SEQ ID NO: 577609 - RNA, 19 nt, Human
ggaaggagggagggaggga

SEQ ID NO: 577610 - RNA, 20 nt, Human
ggaaggagggcaccccaggg

SEQ ID NO: 577611 - RNA, 19 nt, Human
ggacucgggggccaggcga

SEQ ID NO: 577612 - RNA, 20 nt, Human
ggagaaaaaagacaccccac

SEQ ID NO: 577613 - RNA, 19 nt, Human
ggagacuuggaaggagggu

SEQ ID NO: 577614 - RNA, 21 nt, Human
ggcgcggagggguggaaagga

SEQ ID NO: 577615 - RNA, 21 nt, Human
gggaaggagggagggagggac

SEQ ID NO: 577616 - RNA, 20 nt, Human
gggccuccccucagcagcuu

SEQ ID NO: 577617 - RNA, 22 nt, Human
gggcgaaggggggcacuggggu

SEQ ID NO: 577618 - RNA, 22 nt, Human
uaaaaacaguaaaaccaaucaa

SEQ ID NO: 577619 - RNA, 21 nt, Human
uauaccaccgacuuuggguuc

SEQ ID NO: 577620 - RNA, 21 nt, Human
ucaaaaagaaaagauuuagag

SEQ ID NO: 577621 - RNA, 18 nt, Human
ucaggccagggucccggg

SEQ ID NO: 577622 - RNA, 19 nt, Human
ucagugccaaauggaaggu

SEQ ID NO: 577623 - RNA, 25 nt, Human
ucagugccaaauggaaggucccaag

SEQ ID NO: 577624 - RNA, 19 nt, Human
ucccaagccccuaaggagc

SEQ ID NO: 577625 - RNA, 22 nt, Human
uccguagcaauguugacccaaa

SEQ ID NO: 577626 - RNA, 22 nt, Human
ucucagccaguuaaggccccac

SEQ ID NO: 577627 - RNA, 24 nt, Human
ucucagccaguuaaggccccacaa

SEQ ID NO: 577628 - RNA, 19 nt, Human
ugaaugccugaaaccgugg

SEQ ID NO: 577629 - RNA, 19 nt, Human
ugacccaaaaacagggcag

SEQ ID NO: 577630 - RNA, 25 nt, Human
ugacccaaaaacagggcaggccagg

SEQ ID NO: 577631 - RNA, 22 nt, Human
ugcacagggacccccuggagac

SEQ ID NO: 577632 - RNA, 19 nt, Human
ugcuggcuccguagcaaug

SEQ ID NO: 577633 - RNA, 21 nt, Human
ugcuuugggaaggagggaggg

SEQ ID NO: 577634 - RNA, 18 nt, Human
uggaaaggagggaggaga

SEQ ID NO: 577635 - RNA, 20 nt, Human
uggaaaggagggaggagaaa

SEQ ID NO: 577636 - RNA, 19 nt, Human
uggaaggagggugagucau

SEQ ID NO: 577637 - RNA, 24 nt, Human
uggaaggucccaagccccuaagga

SEQ ID NO: 577638 - RNA, 21 nt, Human
uggcagggcgcggaggggugg

SEQ ID NO: 577639 - RNA, 19 nt, Human
ugggaugggggaaggaggg

SEQ ID NO: 577640 - RNA, 21 nt, Human
ugggaugggggaaggagggca

SEQ ID NO: 577641 - RNA, 22 nt, Human
ugggauuccacccgccagcccg

SEQ ID NO: 577642 - RNA, 21 nt, Human
uuaaggccccacaagaugcuc

SEQ ID NO: 577643 - RNA, 18 nt, Human
uucuaagccaccucucac

SEQ ID NO: 577644 - RNA, 20 nt, Human
uuugccggcaggcucccucg

SEQ ID NO: 577645 - RNA, 18 nt, Human
acugaagagggaacauga

SEQ ID NO: 577646 - RNA, 23 nt, Human
acuuagguuuaacugaagaggga

SEQ ID NO: 577647 - RNA, 24 nt, Human
augcaaaguuucauuuugguuuua

SEQ ID NO: 577648 - RNA, 18 nt, Human
cagugacacuucuccggg

SEQ ID NO: 577649 - RNA, 26 nt, Human
cggcgcggagcgaacgggcuaccggg

SEQ ID NO: 577650 - RNA, 24 nt, Human
uaguucaugauuuguuucuaauga

SEQ ID NO: 577651 - RNA, 22 nt, Human
uauaugcaaaguuucauuuugg

SEQ ID NO: 577652 - RNA, 23 nt, Human
uccccugcccuagcccgccaagc

SEQ ID NO: 577653 - RNA, 20 nt, Human
ugaaaaucagcagcaugcga

SEQ ID NO: 577654 - RNA, 23 nt, Human
ugauuuguuucuaaugaaaaacu

SEQ ID NO: 577655 - RNA, 27 nt, Human
aaacaagcauacaccacacacaccccu

SEQ ID NO: 577656 - RNA, 21 nt, Human
aaagaagaaaccaaaagaaaa

SEQ ID NO: 577657 - RNA, 23 nt, Human
aaaucucagaaacguacaaagcc

SEQ ID NO: 577658 - RNA, 24 nt, Human
aagaaaacaaacacaucuuuauaa

SEQ ID NO: 577659 - RNA, 20 nt, Human
aagaaaccaaaagaaaauaa

SEQ ID NO: 577660 - RNA, 20 nt, Human
aagaagaaaccaaaagaaaa

SEQ ID NO: 577661 - RNA, 22 nt, Human
aagcauacaccacacacacccc

SEQ ID NO: 577662 - RNA, 23 nt, Human
aagcauacaccacacacaccccc

SEQ ID NO: 577663 - RNA, 22 nt, Human
aauggccucuugcucuuuuucu

SEQ ID NO: 577664 - RNA, 19 nt, Human
aaugguuuuauugauucaa

SEQ ID NO: 577665 - RNA, 25 nt, Human
aauguaaagaagaaaccaaaagaaa

SEQ ID NO: 577666 - RNA, 20 nt, Human
agcaucucaucaagagucau

SEQ ID NO: 577667 - RNA, 24 nt, Human
augaaacaauaauauauuuacuac

SEQ ID NO: 577668 - RNA, 21 nt, Human
auggcuuuugggucauaucau

SEQ ID NO: 577669 - RNA, 21 nt, Human
caagagucaucaugaaacaau

SEQ ID NO: 577670 - RNA, 23 nt, Human
caauucuacaugauuuggaaaga

SEQ ID NO: 577671 - RNA, 19 nt, Human
cagaagagguuagguaaug

SEQ ID NO: 577672 - RNA, 24 nt, Human
cauuugcauacauacauauuaaug

SEQ ID NO: 577673 - RNA, 18 nt, Human
ccaguguggguuugucau

SEQ ID NO: 577674 - RNA, 23 nt, Human
cucuguugcugcuacuacuaaua

SEQ ID NO: 577675 - RNA, 23 nt, Human
cucuuuuucuuuuagaaagccuu

SEQ ID NO: 577676 - RNA, 23 nt, Human
gaaacguacaaagcccaugaaag

SEQ ID NO: 577677 - RNA, 21 nt, Human
uaaauguaaagaagaaaccaa

SEQ ID NO: 577678 - RNA, 18 nt, Human
uaauucagaguguguauu

SEQ ID NO: 577679 - RNA, 22 nt, Human
uacacugagaaaucucagaaac

SEQ ID NO: 577680 - RNA, 24 nt, Human
uacucuguugcugcuacuacuaau

SEQ ID NO: 577681 - RNA, 20 nt, Human
uaggaaacaagcauacacca

SEQ ID NO: 577682 - RNA, 18 nt, Human
ucagaguguguauuuuga

SEQ ID NO: 577683 - RNA, 23 nt, Human
ucucagaaacguacaaagcccau

SEQ ID NO: 577684 - RNA, 20 nt, Human
ugaacuggaaaucaauucua

SEQ ID NO: 577685 - RNA, 20 nt, Human
uggaaagaaaacaaacacau

SEQ ID NO: 577686 - RNA, 25 nt, Human
uguaaagaagaaaccaaaagaaaau

SEQ ID NO: 577687 - RNA, 18 nt, Human
uugaagcauccugccugu

SEQ ID NO: 577688 - RNA, 18 nt, Human
uuguauuguucguuuuca

SEQ ID NO: 577689 - RNA, 24 nt, Human
uuguuuauguuuuuccugaaguuc

SEQ ID NO: 577690 - RNA, 23 nt, Human
aagaaggaagugauguggcagag

SEQ ID NO: 577691 - RNA, 27 nt, Human
aagcgccccuuugagucuuucccaccc

SEQ ID NO: 577692 - RNA, 24 nt, Human
aagugcaccaggcuugagccccac

SEQ ID NO: 577693 - RNA, 18 nt, Human
aaugacaaaaaucaugua

SEQ ID NO: 577694 - RNA, 22 nt, Human
aaugacaaaaaucauguaggga

SEQ ID NO: 577695 - RNA, 21 nt, Human
acacacacacacacacacaca

SEQ ID NO: 577696 - RNA, 28 nt, Human
acacacacacacacgcauacgcacucuu

SEQ ID NO: 577697 - RNA, 19 nt, Human
acccugcuuaggcagggag

SEQ ID NO: 577698 - RNA, 19 nt, Human
agaaggaagugauguggca

SEQ ID NO: 577699 - RNA, 22 nt, Human
agaaggaagugauguggcagag

SEQ ID NO: 577700 - RNA, 18 nt, Human
agccugaguacguuagcu

SEQ ID NO: 577701 - RNA, 24 nt, Human
agccuggaggggggcaauuccuau

SEQ ID NO: 577702 - RNA, 19 nt, Human
agggaagaagggagugggu

SEQ ID NO: 577703 - RNA, 23 nt, Human
agggaagaagggagugggugggc

SEQ ID NO: 577704 - RNA, 23 nt, Human
agggagggugaagccuggagggg

SEQ ID NO: 577705 - RNA, 21 nt, Human
agggagugggugggcugaggg

SEQ ID NO: 577706 - RNA, 20 nt, Human
aucauaucccuccccagucc

SEQ ID NO: 577707 - RNA, 18 nt, Human
auuuucaaugaauucuga

SEQ ID NO: 577708 - RNA, 22 nt, Human
caagucgccuaggacuagggcu

SEQ ID NO: 577709 - RNA, 20 nt, Human
cacacacacacacacacaca

SEQ ID NO: 577710 - RNA, 26 nt, Human
cacacacacacacacacacacgcaua

SEQ ID NO: 577711 - RNA, 25 nt, Human
cacacacacacacacacacgcauac

SEQ ID NO: 577712 - RNA, 26 nt, Human
cacacacacacacacacgcauacgca

SEQ ID NO: 577713 - RNA, 21 nt, Human
caccuggggccucagugcuca

SEQ ID NO: 577714 - RNA, 26 nt, Human
cacguacacacacacacacacacaca

SEQ ID NO: 577715 - RNA, 23 nt, Human
cacucccguugucaggcccaggg

SEQ ID NO: 577716 - RNA, 23 nt, Human
ccaaaaaugucauggcucugccc

SEQ ID NO: 577717 - RNA, 23 nt, Human
ccaaaacaaauuuucaaugaauu

SEQ ID NO: 577718 - RNA, 20 nt, Human
ccaugaaugacaaaaaucau

SEQ ID NO: 577719 - RNA, 20 nt, Human
cccaacuauaugaccucuau

SEQ ID NO: 577720 - RNA, 21 nt, Human
cccacacagggaagaagggag

SEQ ID NO: 577721 - RNA, 22 nt, Human
ccccaaggcuucccuuguuggc

SEQ ID NO: 577722 - RNA, 18 nt, Human
ccccccacugcugacagc

SEQ ID NO: 577723 - RNA, 21 nt, Human
ccgacacagccggaggggucc

SEQ ID NO: 577724 - RNA, 22 nt, Human
ccgacacagccggagggguccu

SEQ ID NO: 577725 - RNA, 19 nt, Human
ccuagaagcccccucucag

SEQ ID NO: 577726 - RNA, 20 nt, Human
ccuguucucacccacccacc

SEQ ID NO: 577727 - RNA, 25 nt, Human
cguacacacacacacacacacacac

SEQ ID NO: 577728 - RNA, 21 nt, Human
cuagaaacccaaugccgaagg

SEQ ID NO: 577729 - RNA, 31 nt, Human
cugccucacguacacacacacacacacacag

SEQ ID NO: 577730 - RNA, 25 nt, Human
cugggaauccccugccagcuucaag

SEQ ID NO: 577731 - RNA, 23 nt, Human
cuuccuagaagcccccucucaga

SEQ ID NO: 577732 - RNA, 24 nt, Human
cuuccuagaagcccccucucagaa

SEQ ID NO: 577733 - RNA, 22 nt, Human
gaaccuguucucacccacccac

SEQ ID NO: 577734 - RNA, 18 nt, Human
gaagaagggagugggugg

SEQ ID NO: 577735 - RNA, 21 nt, Human
gaaggcuccuuuaaaccaaaa

SEQ ID NO: 577736 - RNA, 22 nt, Human
ggcugccaacaauugccccaug

SEQ ID NO: 577737 - RNA, 19 nt, Human
gggagggaggacaccuggg

SEQ ID NO: 577738 - RNA, 24 nt, Human
gggggagggaggacaccuggggcc

SEQ ID NO: 577739 - RNA, 22 nt, Human
gugggugggcugaggccuucag

SEQ ID NO: 577740 - RNA, 20 nt, Human
uacacacacacacacacaca

SEQ ID NO: 577741 - RNA, 25 nt, Human
uacacacacacacacacacacacgc

SEQ ID NO: 577742 - RNA, 24 nt, Human
uacugagccauauucccuagaaac

SEQ ID NO: 577743 - RNA, 19 nt, Human
uagaaacccaaugccgaag

SEQ ID NO: 577744 - RNA, 23 nt, Human
uaggcuuucaagaaggaagugau

SEQ ID NO: 577745 - RNA, 22 nt, Human
ucaggcccagggaggacccaug

SEQ ID NO: 577746 - RNA, 24 nt, Human
ucauggagcuuuauucagacggga

SEQ ID NO: 577747 - RNA, 19 nt, Human
ucccagacagugggggagg

SEQ ID NO: 577748 - RNA, 21 nt, Human
uccccugccagcuucaaggac

SEQ ID NO: 577749 - RNA, 23 nt, Human
ucccuccccaguccgacacagcc

SEQ ID NO: 577750 - RNA, 22 nt, Human
ucucggccagagaugagaaggc

SEQ ID NO: 577751 - RNA, 30 nt, Human
ucugccucacguacacacacacacacagug

SEQ ID NO: 577752 - RNA, 23 nt, Human
ucuuugugggcagggaggagagu

SEQ ID NO: 577753 - RNA, 23 nt, Human
ugacacagggagaagcugacauc

SEQ ID NO: 577754 - RNA, 20 nt, Human
ugagcuugcacaaggggccg

SEQ ID NO: 577755 - RNA, 18 nt, Human
ugagucuuucccacccag

SEQ ID NO: 577756 - RNA, 18 nt, Human
ugcccugagguccauggc

SEQ ID NO: 577757 - RNA, 22 nt, Human
ugccucaaccagccuauagcuc

SEQ ID NO: 577758 - RNA, 19 nt, Human
uggcccaacuauaugaccu

SEQ ID NO: 577759 - RNA, 22 nt, Human
ugggugggcugaggccuucagc

SEQ ID NO: 577760 - RNA, 23 nt, Human
uuugagucuuucccacccaggag

SEQ ID NO: 577761 - RNA, 24 nt, Human
aaacaaaaacaaacaagaaaccca

SEQ ID NO: 577762 - RNA, 25 nt, Human
aaacaagaaacccaaaacuugcaac

SEQ ID NO: 577763 - RNA, 21 nt, Human
aaacagaugagaaaugaaacu

SEQ ID NO: 577764 - RNA, 23 nt, Human
aaacucccaauggccaaagggcu

SEQ ID NO: 577765 - RNA, 24 nt, Human
aaacuugcaaccuaaacucuccgg

SEQ ID NO: 577766 - RNA, 25 nt, Human
aaagcaggaagcaaaacaaaaacaa

SEQ ID NO: 577767 - RNA, 19 nt, Human
aacacuuccagcccucccc

SEQ ID NO: 577768 - RNA, 21 nt, Human
aacacuuccagcccuccccuu

SEQ ID NO: 577769 - RNA, 19 nt, Human
aacuaugcagucacagagc

SEQ ID NO: 577770 - RNA, 19 nt, Human
aagaaacccaaaacuugca

SEQ ID NO: 577771 - RNA, 21 nt, Human
aagcaaaacaaaaacaaacaa

SEQ ID NO: 577772 - RNA, 27 nt, Human
aagcaggaagcaaaacaaaagggaccc

SEQ ID NO: 577773 - RNA, 18 nt, Human
aauaauaggagaguggaa

SEQ ID NO: 577774 - RNA, 19 nt, Human
aaugcagcccugauguacc

SEQ ID NO: 577775 - RNA, 20 nt, Human
acaaacaagaaacccaaaac

SEQ ID NO: 577776 - RNA, 20 nt, Human
acaacucaagcagccaacgg

SEQ ID NO: 577777 - RNA, 24 nt, Human
acccaaaacuugcaaccuaaacuc

SEQ ID NO: 577778 - RNA, 21 nt, Human
accccguccauggaaaaacug

SEQ ID NO: 577779 - RNA, 22 nt, Human
acccgcaagcugcccuuagucc

SEQ ID NO: 577780 - RNA, 20 nt, Human
acuggucccuggugccaaaa

SEQ ID NO: 577781 - RNA, 19 nt, Human
acuugugaaaucccucccc

SEQ ID NO: 577782 - RNA, 21 nt, Human
agaaaagacuuuucugugaga

SEQ ID NO: 577783 - RNA, 21 nt, Human
agaaacccaaaacuugcaacc

SEQ ID NO: 577784 - RNA, 24 nt, Human
agaauauaagaaacaacucaagca

SEQ ID NO: 577785 - RNA, 18 nt, Human
aggaagcaaaacaaaaac

SEQ ID NO: 577786 - RNA, 22 nt, Human
aggaagcaaaacaaaaacaaac

SEQ ID NO: 577787 - RNA, 23 nt, Human
augaaacaaacaggucucccuuc

SEQ ID NO: 577788 - RNA, 19 nt, Human
auggaaugagagaagcccu

SEQ ID NO: 577789 - RNA, 24 nt, Human
caaaaacaaacaagaaacccaaaa

SEQ ID NO: 577790 - RNA, 20 nt, Human
caaaacaaaaacaaacaaga

SEQ ID NO: 577791 - RNA, 25 nt, Human
caaaacaaaaacaaacaagaaaccc

SEQ ID NO: 577792 - RNA, 19 nt, Human
caaacaagaaacccaaaac

SEQ ID NO: 577793 - RNA, 21 nt, Human
caaacucccaauggccaaagg

SEQ ID NO: 577794 - RNA, 23 nt, Human
caagaaacccaaaacuugcaacc

SEQ ID NO: 577795 - RNA, 19 nt, Human
caagggcugaaacacagua

SEQ ID NO: 577796 - RNA, 22 nt, Human
cacaguaagguuagccacaaaa

SEQ ID NO: 577797 - RNA, 19 nt, Human
caccugaaaucaaauccau

SEQ ID NO: 577798 - RNA, 20 nt, Human
cagaggcccacaggugaaaa

SEQ ID NO: 577799 - RNA, 22 nt, Human
cagcaagggcugaaacacagua

SEQ ID NO: 577800 - RNA, 21 nt, Human
cagcauuaaaauccagccuga

SEQ ID NO: 577801 - RNA, 25 nt, Human
ccaaaacuugcaaccuaaacucucc

SEQ ID NO: 577802 - RNA, 26 nt, Human
ccaccaccccguccauggaaaaacug

SEQ ID NO: 577803 - RNA, 21 nt, Human
ccagugccuuucuagugcucu

SEQ ID NO: 577804 - RNA, 22 nt, Human
cccaaacagaugagaaaugaaa

SEQ ID NO: 577805 - RNA, 19 nt, Human
cccaaacucuaacauugua

SEQ ID NO: 577806 - RNA, 25 nt, Human
ccuaaacucuccgggaaaaaaaaaa

SEQ ID NO: 577807 - RNA, 23 nt, Human
cuagugcucuaaaaucaucuccc

SEQ ID NO: 577808 - RNA, 19 nt, Human
cucccaaacagaugagaaa

SEQ ID NO: 577809 - RNA, 23 nt, Human
cucccaaacagaugagaaaugaa

SEQ ID NO: 577810 - RNA, 19 nt, Human
cucuccgggaaaaaaaaaa

SEQ ID NO: 577811 - RNA, 20 nt, Human
cuggaaaagcagcauuaaaa

SEQ ID NO: 577812 - RNA, 19 nt, Human
cuggucccuggugccaaaa

SEQ ID NO: 577813 - RNA, 18 nt, Human
cuugugaaaucccucccc

SEQ ID NO: 577814 - RNA, 19 nt, Human
cuugugaaaucccucccca

SEQ ID NO: 577815 - RNA, 25 nt, Human
gaaaucccuccccacaccugcacuu

SEQ ID NO: 577816 - RNA, 20 nt, Human
gcagucacagagcuaacccg

SEQ ID NO: 577817 - RNA, 21 nt, Human
ggaaaaacuguguuccacaaa

SEQ ID NO: 577818 - RNA, 25 nt, Human
ggccaaagggcugugaggaagggca

SEQ ID NO: 577819 - RNA, 26 nt, Human
gggaaaaaaaaaauugcuauaaaugu

SEQ ID NO: 577820 - RNA, 23 nt, Human
gggcaaugaagagggaccuauuu

SEQ ID NO: 577821 - RNA, 22 nt, Human
ggugaugggcaaugaagaggga

SEQ ID NO: 577822 - RNA, 23 nt, Human
guggaaguuucauccuccaccac

SEQ ID NO: 577823 - RNA, 24 nt, Human
uaaagcaggaagcaaaacaaaaac

SEQ ID NO: 577824 - RNA, 23 nt, Human
uaagaaacaacucaagcagccaa

SEQ ID NO: 577825 - RNA, 22 nt, Human
uaauaggagaguggaagauggu

SEQ ID NO: 577826 - RNA, 18 nt, Human
uaauagggauucaucugu

SEQ ID NO: 577827 - RNA, 18 nt, Human
uaaugaacccaaacucua

SEQ ID NO: 577828 - RNA, 22 nt, Human
uacuggaaaagcagcauuaaaa

SEQ ID NO: 577829 - RNA, 24 nt, Human
uaggagaguggaagauggugaugg

SEQ ID NO: 577830 - RNA, 20 nt, Human
uauaaauguuaaaagacuua

SEQ ID NO: 577831 - RNA, 18 nt, Human
uaucaaagaucaaacggc

SEQ ID NO: 577832 - RNA, 19 nt, Human
uaucaaagaucaaacggca

SEQ ID NO: 577833 - RNA, 23 nt, Human
uaucaaagaucaaacggcagcaa

SEQ ID NO: 577834 - RNA, 23 nt, Human
ucauggaagaaaagacuuuucug

SEQ ID NO: 577835 - RNA, 19 nt, Human
uccauagccaauggugagg

SEQ ID NO: 577836 - RNA, 30 nt, Human
ugaaacaaacaggucucccuucuugaguag

SEQ ID NO: 577837 - RNA, 18 nt, Human
ugaacuggccguuaauaa

SEQ ID NO: 577838 - RNA, 20 nt, Human
ugagaaaugaaacaaacagg

SEQ ID NO: 577839 - RNA, 18 nt, Human
ugagagaagcccuaaccc

SEQ ID NO: 577840 - RNA, 23 nt, Human
ugagauagaacagaccaucugcu

SEQ ID NO: 577841 - RNA, 21 nt, Human
ugagggacagccaaacuccca

SEQ ID NO: 577842 - RNA, 24 nt, Human
ugaguaguggcaaaauaauaggag

SEQ ID NO: 577843 - RNA, 19 nt, Human
uggaagauggugaugggca

SEQ ID NO: 577844 - RNA, 20 nt, Human
uguacacacucaacacuucu

SEQ ID NO: 577845 - RNA, 18 nt, Human
ugucucuuccuaccuucc

SEQ ID NO: 577846 - RNA, 19 nt, Human
uucaaacugcuggauguuu

SEQ ID NO: 577847 - RNA, 25 nt, Human
uucuagugcucuaaaaucaucuccc

SEQ ID NO: 577848 - RNA, 22 nt, Human
uuuacagaauuucucaccagag

SEQ ID NO: 577849 - RNA, 19 nt, Human
uuuagaauauaagaaacaa

SEQ ID NO: 577850 - RNA, 23 nt, Human
aaaacugagcuauaucugaauaa

SEQ ID NO: 577851 - RNA, 22 nt, Human
aacugaaggaaaaaauggauaa

SEQ ID NO: 577852 - RNA, 24 nt, Human
aauuuuguguauuuuuaguagaga

SEQ ID NO: 577853 - RNA, 19 nt, Human
acccaggcuggagugcagu

SEQ ID NO: 577854 - RNA, 25 nt, Human
accucccagguucacaccauucucc

SEQ ID NO: 577855 - RNA, 24 nt, Human
accucgugauccgcccgccuuggc

SEQ ID NO: 577856 - RNA, 21 nt, Human
acugcaagcuccaccucccag

SEQ ID NO: 577857 - RNA, 22 nt, Human
aggaagauaaaagacucugcca

SEQ ID NO: 577858 - RNA, 25 nt, Human
aggcuggagugcaguggagcgaucu

SEQ ID NO: 577859 - RNA, 21 nt, Human
aggugagguugcaagauggcu

SEQ ID NO: 577860 - RNA, 18 nt, Human
aguagcugggacuacagg

SEQ ID NO: 577861 - RNA, 20 nt, Human
agugcaguggagcgaucucg

SEQ ID NO: 577862 - RNA, 24 nt, Human
agugcaguggagcgaucucgguuc

SEQ ID NO: 577863 - RNA, 23 nt, Human
aucaucuucaccauuaaacuaac

SEQ ID NO: 577864 - RNA, 19 nt, Human
auccgcccgccuuggccuc

SEQ ID NO: 577865 - RNA, 24 nt, Human
aucugucacccaggcuggagugca

SEQ ID NO: 577866 - RNA, 20 nt, Human
augggguuucacgguguuag

SEQ ID NO: 577867 - RNA, 27 nt, Human
auugaaacaaucauuuacuucaagcau

SEQ ID NO: 577868 - RNA, 18 nt, Human
caagauggcuggucucug

SEQ ID NO: 577869 - RNA, 22 nt, Human
cacaccauucuccugccucagc

SEQ ID NO: 577870 - RNA, 25 nt, Human
cacccaggcuggagugcaguggagc

SEQ ID NO: 577871 - RNA, 24 nt, Human
cacgguguuagccaggacggucuc

SEQ ID NO: 577872 - RNA, 21 nt, Human
cacugcaagcuccaccuccca

SEQ ID NO: 577873 - RNA, 19 nt, Human
caggugcccaccaccacgc

SEQ ID NO: 577874 - RNA, 21 nt, Human
caggugcccaccaccacgccc

SEQ ID NO: 577875 - RNA, 27 nt, Human
ccagauacguaaauauauuuauguaac

SEQ ID NO: 577876 - RNA, 21 nt, Human
cccaccaccacgcccagcuaa

SEQ ID NO: 577877 - RNA, 20 nt, Human
cccagguucacaccauucuc

SEQ ID NO: 577878 - RNA, 23 nt, Human
cccgaguagcugggacuacaggu

SEQ ID NO: 577879 - RNA, 24 nt, Human
cccgaguagcugggacuacaggug

SEQ ID NO: 577880 - RNA, 22 nt, Human
cccgccuuggccucccaaagug

SEQ ID NO: 577881 - RNA, 24 nt, Human
cucagccucccgaguagcugggac

SEQ ID NO: 577882 - RNA, 24 nt, Human
cuccugaccucgugauccgcccgc

SEQ ID NO: 577883 - RNA, 24 nt, Human
cugcaagcuccaccucccagguuc

SEQ ID NO: 577884 - RNA, 23 nt, Human
cugccucagccucccgaguagcu

SEQ ID NO: 577885 - RNA, 20 nt, Human
gaccucgugauccgcccgcc

SEQ ID NO: 577886 - RNA, 21 nt, Human
gaccucgugauccgcccgccu

SEQ ID NO: 577887 - RNA, 24 nt, Human
gaccucgugauccgcccgccuugg

SEQ ID NO: 577888 - RNA, 23 nt, Human
gacggucucgaucuccugaccuc

SEQ ID NO: 577889 - RNA, 22 nt, Human
gcaagcuccaccucccagguuc

SEQ ID NO: 577890 - RNA, 20 nt, Human
gccucagccucccgaguagc

SEQ ID NO: 577891 - RNA, 22 nt, Human
gccuuggccucccaaagugcug

SEQ ID NO: 577892 - RNA, 19 nt, Human
ggcuggagugcaguggagc

SEQ ID NO: 577893 - RNA, 18 nt, Human
gggguuucacgguguuag

SEQ ID NO: 577894 - RNA, 22 nt, Human
ggguuucacgguguuagccagg

SEQ ID NO: 577895 - RNA, 21 nt, Human
uaacugagaagaguaugauau

SEQ ID NO: 577896 - RNA, 24 nt, Human
uaauuuuguguauuuuuaguagag

SEQ ID NO: 577897 - RNA, 24 nt, Human
uacaggugcccaccaccacgccca

SEQ ID NO: 577898 - RNA, 19 nt, Human
uacguaaauauauuuaugu

SEQ ID NO: 577899 - RNA, 21 nt, Human
uagaaaauguguaauuuccaa

SEQ ID NO: 577900 - RNA, 20 nt, Human
uaguagagaugggguuucac

SEQ ID NO: 577901 - RNA, 22 nt, Human
uaguagagaugggguuucacgg

SEQ ID NO: 577902 - RNA, 24 nt, Human
uaguagagaugggguuucacggug

SEQ ID NO: 577903 - RNA, 22 nt, Human
uaugcacacagaagagugagua

SEQ ID NO: 577904 - RNA, 21 nt, Human
ucacaccauucuccugccuca

SEQ ID NO: 577905 - RNA, 23 nt, Human
ucacccaggcuggagugcagugg

SEQ ID NO: 577906 - RNA, 24 nt, Human
ucacgguguuagccaggacggucu

SEQ ID NO: 577907 - RNA, 19 nt, Human
ucacugcaagcuccaccuc

SEQ ID NO: 577908 - RNA, 24 nt, Human
ucacugcaagcuccaccucccagg

SEQ ID NO: 577909 - RNA, 23 nt, Human
ucagccucccgaguagcugggac

SEQ ID NO: 577910 - RNA, 20 nt, Human
ucccagguucacaccauucu

SEQ ID NO: 577911 - RNA, 21 nt, Human
ucccagguucacaccauucuc

SEQ ID NO: 577912 - RNA, 24 nt, Human
ucccagguucacaccauucuccug

SEQ ID NO: 577913 - RNA, 19 nt, Human
uccccuguuaaucaucuuc

SEQ ID NO: 577914 - RNA, 23 nt, Human
ucccgaguagcugggacuacagg

SEQ ID NO: 577915 - RNA, 24 nt, Human
ucccgaguagcugggacuacaggu

SEQ ID NO: 577916 - RNA, 22 nt, Human
uccuugccaggcuuugagauga

SEQ ID NO: 577917 - RNA, 20 nt, Human
ucggccuuaugcacacagaa

SEQ ID NO: 577918 - RNA, 24 nt, Human
ucuccugccucagccucccgagua

SEQ ID NO: 577919 - RNA, 23 nt, Human
ucucuguggcguguugagugcuc

SEQ ID NO: 577920 - RNA, 24 nt, Human
ucuggaucugucacccaggcugga

SEQ ID NO: 577921 - RNA, 20 nt, Human
ucugucacccaggcuggagu

SEQ ID NO: 577922 - RNA, 24 nt, Human
ucugucacccaggcuggagugcag

SEQ ID NO: 577923 - RNA, 18 nt, Human
ugaaggaaaaaauggaua

SEQ ID NO: 577924 - RNA, 19 nt, Human
ugaauaacugagaagagua

SEQ ID NO: 577925 - RNA, 20 nt, Human
ugagacagagucuggaucug

SEQ ID NO: 577926 - RNA, 22 nt, Human
ugagacagagucuggaucuguc

SEQ ID NO: 577927 - RNA, 25 nt, Human
ugagauuuuaauaggaagauaaaag

SEQ ID NO: 577928 - RNA, 19 nt, Human
ugaggugagguugcaagau

SEQ ID NO: 577929 - RNA, 19 nt, Human
ugcaagcuccaccucccag

SEQ ID NO: 577930 - RNA, 24 nt, Human
ugccagaaguauucuuuacuggcu

SEQ ID NO: 577931 - RNA, 24 nt, Human
ugccucagccucccgaguagcugg

SEQ ID NO: 577932 - RNA, 23 nt, Human
uggagugcaguggagcgaucucg

SEQ ID NO: 577933 - RNA, 24 nt, Human
uggagugcaguggagcgaucucgg

SEQ ID NO: 577934 - RNA, 24 nt, Human
uggaucugucacccaggcuggagu

SEQ ID NO: 577935 - RNA, 21 nt, Human
ugggacuacaggugcccacca

SEQ ID NO: 577936 - RNA, 24 nt, Human
ugggacuacaggugcccaccacca

SEQ ID NO: 577937 - RNA, 24 nt, Human
ugggguuucacgguguuagccagg

SEQ ID NO: 577938 - RNA, 20 nt, Human
uuaaaagugaaagggaaaau

SEQ ID NO: 577939 - RNA, 21 nt, Human
uuacuucaagcauuuccccug

SEQ ID NO: 577940 - RNA, 18 nt, Human
uuaguagagaugggguuu

SEQ ID NO: 577941 - RNA, 21 nt, Human
uuaguagagaugggguuucac

SEQ ID NO: 577942 - RNA, 24 nt, Human
uuaguagagaugggguuucacggu

SEQ ID NO: 577943 - RNA, 22 nt, Human
uugagacagagucuggaucugu

SEQ ID NO: 577944 - RNA, 24 nt, Human
uuuuguguauuuuuaguagagaug

SEQ ID NO: 577945 - RNA, 24 nt, Human
uuuuuaguagagaugggguuucac

SEQ ID NO: 577946 - RNA, 22 nt, Human
uuuuuuuugagacagagucugg

SEQ ID NO: 577947 - RNA, 23 nt, Human
uuuuuuuuugagacagagucugg

SEQ ID NO: 577948 - RNA, 18 nt, Human
uuuuuuuuuuuuuuuuug

SEQ ID NO: 577949 - RNA, 20 nt, Human
aaacaauaaguauucaaagu

SEQ ID NO: 577950 - RNA, 22 nt, Human
aauaagugaguggaagcuacaa

SEQ ID NO: 577951 - RNA, 22 nt, Human
aaucaaacaucuaccaauggcc

SEQ ID NO: 577952 - RNA, 20 nt, Human
caaacaucuaccaauggcca

SEQ ID NO: 577953 - RNA, 23 nt, Human
caaacaucuaccaauggccaaug

SEQ ID NO: 577954 - RNA, 18 nt, Human
caaggggagauuaucugc

SEQ ID NO: 577955 - RNA, 21 nt, Human
cauaagcaaaaaauucaaugc

SEQ ID NO: 577956 - RNA, 23 nt, Human
cccacugcaaacaaagaauugau

SEQ ID NO: 577957 - RNA, 23 nt, Human
ccuuaguuacgagugccugagag

SEQ ID NO: 577958 - RNA, 19 nt, Human
cucugaaugcaagaauaag

SEQ ID NO: 577959 - RNA, 20 nt, Human
gagcacucgacuaugcuaaa

SEQ ID NO: 577960 - RNA, 24 nt, Human
gagguugcaacuaucuuucucuag

SEQ ID NO: 577961 - RNA, 23 nt, Human
gaucuuucuuucucaaaaaccac

SEQ ID NO: 577962 - RNA, 23 nt, Human
ggugagguugcaacuaucuuucu

SEQ ID NO: 577963 - RNA, 18 nt, Human
uaacaugacauagcuugg

SEQ ID NO: 577964 - RNA, 18 nt, Human
uaagauuacccacugcaa

SEQ ID NO: 577965 - RNA, 22 nt, Human
uaagucaaucaaacaucuacca

SEQ ID NO: 577966 - RNA, 20 nt, Human
uagagagaaucuagaagaaa

SEQ ID NO: 577967 - RNA, 21 nt, Human
ucaaaguguugagugagggag

SEQ ID NO: 577968 - RNA, 18 nt, Human
ucuacaaucaucuccauc

SEQ ID NO: 577969 - RNA, 19 nt, Human
ucuacaaucaucuccaucu

SEQ ID NO: 577970 - RNA, 23 nt, Human
ucuuucucaaaaaccacauggga

SEQ ID NO: 577971 - RNA, 19 nt, Human
uucacuuuuucagcauuug

SEQ ID NO: 577972 - RNA, 23 nt, Human
uucucugcaugucuaaggaagaa

SEQ ID NO: 577973 - RNA, 22 nt, Human
uuuuuggucucuugcauacauu

SEQ ID NO: 577974 - RNA, 27 nt, Human
uuuuuggucucuugcauacauuuucuc

SEQ ID NO: 577975 - RNA, 23 nt, Human
aaauaauggaaacacaugaaauc

SEQ ID NO: 577976 - RNA, 20 nt, Human
aacaaauaauggaaacacau

SEQ ID NO: 577977 - RNA, 21 nt, Human
aacuucuaguuaccuuuuccu

SEQ ID NO: 577978 - RNA, 20 nt, Human
aagauaucagcaauaagaug

SEQ ID NO: 577979 - RNA, 23 nt, Human
aauagacaaaucccuagcauucu

SEQ ID NO: 577980 - RNA, 23 nt, Human
acagagcaugauggccuucaaaa

SEQ ID NO: 577981 - RNA, 24 nt, Human
acagauacaucugugcauguuccu

SEQ ID NO: 577982 - RNA, 19 nt, Human
agcacaguuuuucccagac

SEQ ID NO: 577983 - RNA, 18 nt, Human
agcacccugugguggugg

SEQ ID NO: 577984 - RNA, 18 nt, Human
agcuuuuuuuuuaaaagg

SEQ ID NO: 577985 - RNA, 26 nt, Human
auacagauacaucugugcauguuccu

SEQ ID NO: 577986 - RNA, 23 nt, Human
auggucuacauggguaaaaauga

SEQ ID NO: 577987 - RNA, 23 nt, Human
auugcuacugcugcuacuguugu

SEQ ID NO: 577988 - RNA, 19 nt, Human
caaaccaggaaacccugcc

SEQ ID NO: 577989 - RNA, 26 nt, Human
caacauugaaaauucuucagaaacau

SEQ ID NO: 577990 - RNA, 21 nt, Human
cacuauuucuuuguacaauaa

SEQ ID NO: 577991 - RNA, 20 nt, Human
cagcagcaagaaaaaaaauc

SEQ ID NO: 577992 - RNA, 23 nt, Human
cagcagcaagaaaaaaaauccau

SEQ ID NO: 577993 - RNA, 24 nt, Human
cagcagcaagaaaaaaaauccauu

SEQ ID NO: 577994 - RNA, 21 nt, Human
cauagaaaccaaagaauuuug

SEQ ID NO: 577995 - RNA, 26 nt, Human
ccaauauccauuuuugaguuuucuca

SEQ ID NO: 577996 - RNA, 22 nt, Human
ccagugcagcacaguuuuuccc

SEQ ID NO: 577997 - RNA, 22 nt, Human
ccugugguggugguagcuaucu

SEQ ID NO: 577998 - RNA, 18 nt, Human
cucacaaaccaggaaacc

SEQ ID NO: 577999 - RNA, 21 nt, Human
cugaauacaaacaaaagcuag

SEQ ID NO: 578000 - RNA, 22 nt, Human
cugauaucaccaugaaauucug

SEQ ID NO: 578001 - RNA, 25 nt, Human
cugaucaaaaaaauuuuguaucacu

SEQ ID NO: 578002 - RNA, 23 nt, Human
cuuguacaugacaauacuguaca

SEQ ID NO: 578003 - RNA, 21 nt, Human
gaacaauauucaaaaugacac

SEQ ID NO: 578004 - RNA, 24 nt, Human
gagaauuucacaauggggaaagga

SEQ ID NO: 578005 - RNA, 21 nt, Human
gccuuuuuuuuauuagaaagc

SEQ ID NO: 578006 - RNA, 23 nt, Human
uaaauaaccaauauuuaauuccu

SEQ ID NO: 578007 - RNA, 24 nt, Human
uaaauacuaaagaaaugaagagaa

SEQ ID NO: 578008 - RNA, 25 nt, Human
uaagaugauauccuuauauuacaga

SEQ ID NO: 578009 - RNA, 23 nt, Human
uaaggauagcaaacuaggauaag

SEQ ID NO: 578010 - RNA, 22 nt, Human
uaaucucuugaccauugaucac

SEQ ID NO: 578011 - RNA, 23 nt, Human
uacacugguagucucugguaggu

SEQ ID NO: 578012 - RNA, 21 nt, Human
uagcacccuguggugguggua

SEQ ID NO: 578013 - RNA, 21 nt, Human
uagcugugcuuuggcugcugc

SEQ ID NO: 578014 - RNA, 20 nt, Human
uauacagauacaucugugca

SEQ ID NO: 578015 - RNA, 20 nt, Human
uauagaaaaagaguuucuca

SEQ ID NO: 578016 - RNA, 22 nt, Human
uauauacagauacaucugugca

SEQ ID NO: 578017 - RNA, 24 nt, Human
uauucaaaaugacacagauugacu

SEQ ID NO: 578018 - RNA, 22 nt, Human
ucagcaauaagaugauauccuu

SEQ ID NO: 578019 - RNA, 19 nt, Human
ucagcagcaagaaaaaaaa

SEQ ID NO: 578020 - RNA, 18 nt, Human
ucaguguugccacugccg

SEQ ID NO: 578021 - RNA, 20 nt, Human
ucccaauagacaaaucccua

SEQ ID NO: 578022 - RNA, 23 nt, Human
ucugauaucaccaugaaauucug

SEQ ID NO: 578023 - RNA, 18 nt, Human
ucugcuagggacucucca

SEQ ID NO: 578024 - RNA, 23 nt, Human
ucugcuagggacucuccaaagau

SEQ ID NO: 578025 - RNA, 19 nt, Human
ugaauacaaacaaaagcua

SEQ ID NO: 578026 - RNA, 22 nt, Human
ugacaacaaauaauggaaacac

SEQ ID NO: 578027 - RNA, 19 nt, Human
ugccauugugaaaaaaauc

SEQ ID NO: 578028 - RNA, 22 nt, Human
uggcuuauuuugcaguuuggaa

SEQ ID NO: 578029 - RNA, 22 nt, Human
uguacaauaaaagauaaagugu

SEQ ID NO: 578030 - RNA, 22 nt, Human
ugugaaaaaaaucagcuuccca

SEQ ID NO: 578031 - RNA, 23 nt, Human
uuagcacccugugguggugguag

SEQ ID NO: 578032 - RNA, 21 nt, Human
uuauagaaaaagaguuucuca

SEQ ID NO: 578033 - RNA, 22 nt, Human
uugcuagcugugcuuuggcugc

SEQ ID NO: 578034 - RNA, 21 nt, Human
uuggcugcugcugagaguaaa

SEQ ID NO: 578035 - RNA, 24 nt, Human
uuguaucacuguuucuuuuagcag

SEQ ID NO: 578036 - RNA, 27 nt, Human
uuuaaagugcuauguccuucaguguug

SEQ ID NO: 578037 - RNA, 18 nt, Human
uuuucccagacuguacaa

SEQ ID NO: 578038 - RNA, 24 nt, Human
uuuuugaguuuucucaaacaaaua

SEQ ID NO: 578039 - RNA, 20 nt, Human
aaaaaaaaaauuguuuaagc

SEQ ID NO: 578040 - RNA, 23 nt, Human
aaacauaacaaaacauaaagccu

SEQ ID NO: 578041 - RNA, 20 nt, Human
aagaggccaaaagagccacc

SEQ ID NO: 578042 - RNA, 25 nt, Human
aagaggccaaaagagccacugaaau

SEQ ID NO: 578043 - RNA, 24 nt, Human
aagauaccacuuuuauuaaaaaug

SEQ ID NO: 578044 - RNA, 19 nt, Human
aaguguuggagaccaacuu

SEQ ID NO: 578045 - RNA, 23 nt, Human
acaacgaaaacacaaacauaaca

SEQ ID NO: 578046 - RNA, 20 nt, Human
acacugccucucaaaaaaua

SEQ ID NO: 578047 - RNA, 19 nt, Human
aggguuucauugccccaga

SEQ ID NO: 578048 - RNA, 23 nt, Human
aguuucucccgcagcagcaauuu

SEQ ID NO: 578049 - RNA, 21 nt, Human
auguuagccuggaacacuauu

SEQ ID NO: 578050 - RNA, 24 nt, Human
caaacauaacaaaacauaaagccu

SEQ ID NO: 578051 - RNA, 24 nt, Human
cacaaacauaacaaaacauaaagc

SEQ ID NO: 578052 - RNA, 20 nt, Human
cacaauuuagaccacaaaaa

SEQ ID NO: 578053 - RNA, 28 nt, Human
cacaauuuagaccacaaaaaaaucuugu

SEQ ID NO: 578054 - RNA, 21 nt, Human
caugaucaggguuucauugcc

SEQ ID NO: 578055 - RNA, 22 nt, Human
ccaguguggcaaagaaaaaaaa

SEQ ID NO: 578056 - RNA, 27 nt, Human
ccggcuacagcggcuccaguuucuccc

SEQ ID NO: 578057 - RNA, 22 nt, Human
ccuacuggaaaccuauauacca

SEQ ID NO: 578058 - RNA, 23 nt, Human
cgaaaacacaaacauaacaaaac

SEQ ID NO: 578059 - RNA, 23 nt, Human
cgccuggaggaagggugacucuu

SEQ ID NO: 578060 - RNA, 20 nt, Human
cgggugagggggccggcgcc

SEQ ID NO: 578061 - RNA, 19 nt, Human
cucauggauaaagaaugaa

SEQ ID NO: 578062 - RNA, 23 nt, Human
gaaaacacaaacauaacaaaaca

SEQ ID NO: 578063 - RNA, 21 nt, Human
gaaacaagacuauccccccua

SEQ ID NO: 578064 - RNA, 18 nt, Human
gacucuugucuccuccuc

SEQ ID NO: 578065 - RNA, 21 nt, Human
gaggagacuguuaaggaaagg

SEQ ID NO: 578066 - RNA, 21 nt, Human
gcaauguuauucuagccauau

SEQ ID NO: 578067 - RNA, 23 nt, Human
gcccacaauuuagaccacaaaaa

SEQ ID NO: 578068 - RNA, 21 nt, Human
gggccggcgccgccuggagga

SEQ ID NO: 578069 - RNA, 23 nt, Human
gugacucuugucuccuccucguc

SEQ ID NO: 578070 - RNA, 21 nt, Human
uaaccaucaacaacaugauca

SEQ ID NO: 578071 - RNA, 18 nt, Human
uaagugagcaaagccugg

SEQ ID NO: 578072 - RNA, 20 nt, Human
uagaucauuaacacugccuc

SEQ ID NO: 578073 - RNA, 24 nt, Human
uagccuggaacacuauuuuuucag

SEQ ID NO: 578074 - RNA, 23 nt, Human
uauaaaaaccauuuacauauggu

SEQ ID NO: 578075 - RNA, 24 nt, Human
uaugcuaaccaucaacaacaugau

SEQ ID NO: 578076 - RNA, 18 nt, Human
ucaggguuucauugcccc

SEQ ID NO: 578077 - RNA, 22 nt, Human
uccccccuaguaagaggccaaa

SEQ ID NO: 578078 - RNA, 18 nt, Human
ugaagaggcggcgguugg

SEQ ID NO: 578079 - RNA, 21 nt, Human
ugaccggcaaagcggccgccu

SEQ ID NO: 578080 - RNA, 19 nt, Human
ugaccuacuggaaaccuau

SEQ ID NO: 578081 - RNA, 28 nt, Human
uggaacacuauuuuuucaggacaaaggu

SEQ ID NO: 578082 - RNA, 18 nt, Human
uggcaaagaaaaaaaaau

SEQ ID NO: 578083 - RNA, 22 nt, Human
uguaaaaaagaagacucacucc

SEQ ID NO: 578084 - RNA, 19 nt, Human
uugguccagggaauguugc

SEQ ID NO: 578085 - RNA, 21 nt, Human
uuuacaaaggcuuucaaauuc

SEQ ID NO: 578086 - RNA, 23 nt, Human
aaaauuucucuaugcuccugcca

SEQ ID NO: 578087 - RNA, 24 nt, Human
aaacaagauuagcucaauuaugaa

SEQ ID NO: 578088 - RNA, 18 nt, Human
acauuuacucagcuggau

SEQ ID NO: 578089 - RNA, 21 nt, Human
agaaacaaggauugggaaaaa

SEQ ID NO: 578090 - RNA, 20 nt, Human
agagcuagaguggaugggcc

SEQ ID NO: 578091 - RNA, 20 nt, Human
agagguugguggggaguugc

SEQ ID NO: 578092 - RNA, 21 nt, Human
agcagugacacagacggguga

SEQ ID NO: 578093 - RNA, 18 nt, Human
agcaguucagccuagccc

SEQ ID NO: 578094 - RNA, 21 nt, Human
agcccuuggucaccacagccc

SEQ ID NO: 578095 - RNA, 26 nt, Human
aggcaaguagaggacauggacuccag

SEQ ID NO: 578096 - RNA, 21 nt, Human
aggccggaggcaaguagagga

SEQ ID NO: 578097 - RNA, 22 nt, Human
agggcuagggaaacaagauuag

SEQ ID NO: 578098 - RNA, 21 nt, Human
aggugcuaaagucagugggcc

SEQ ID NO: 578099 - RNA, 18 nt, Human
auaggccaaugagccugu

SEQ ID NO: 578100 - RNA, 22 nt, Human
aucucaaagucccucuccgcca

SEQ ID NO: 578101 - RNA, 19 nt, Human
augggacaccgauaggcca

SEQ ID NO: 578102 - RNA, 25 nt, Human
cacaucuguccacucauucauucaa

SEQ ID NO: 578103 - RNA, 18 nt, Human
caccacagcccaagaggu

SEQ ID NO: 578104 - RNA, 22 nt, Human
cagguaccaguucagacagcag

SEQ ID NO: 578105 - RNA, 23 nt, Human
cauucauucaacacacauguaug

SEQ ID NO: 578106 - RNA, 21 nt, Human
cccaugcagcagagaugagca

SEQ ID NO: 578107 - RNA, 20 nt, Human
ccccaugcagcagagaugag

SEQ ID NO: 578108 - RNA, 18 nt, Human
ccuccacggagugugagg

SEQ ID NO: 578109 - RNA, 23 nt, Human
ccuuggucaccacagcccaagag

SEQ ID NO: 578110 - RNA, 18 nt, Human
cuagccccaugcagcaga

SEQ ID NO: 578111 - RNA, 19 nt, Human
cuccuaggaccagcccuca

SEQ ID NO: 578112 - RNA, 20 nt, Human
gaguggaugggccugacccu

SEQ ID NO: 578113 - RNA, 23 nt, Human
gauaaaaauuucucuaugcuccu

SEQ ID NO: 578114 - RNA, 26 nt, Human
gcagcagagaugagcaagcauccaga

SEQ ID NO: 578115 - RNA, 18 nt, Human
gcccuaagggcauggacu

SEQ ID NO: 578116 - RNA, 18 nt, Human
gcuaaagucagugggcca

SEQ ID NO: 578117 - RNA, 22 nt, Human
ggaccucagcagguaccaguuc

SEQ ID NO: 578118 - RNA, 18 nt, Human
ggaguugcuuuagaaaca

SEQ ID NO: 578119 - RNA, 20 nt, Human
ggaugcccuaagggcaugga

SEQ ID NO: 578120 - RNA, 18 nt, Human
gggcauggacuccagcag

SEQ ID NO: 578121 - RNA, 25 nt, Human
ggucaccacagcccaagagguuggu

SEQ ID NO: 578122 - RNA, 22 nt, Human
gucagagagcagagguggagau

SEQ ID NO: 578123 - RNA, 18 nt, Human
uagccccaugcagcagag

SEQ ID NO: 578124 - RNA, 23 nt, Human
uagcucaauuaugaaaaauaacc

SEQ ID NO: 578125 - RNA, 22 nt, Human
uaggaccagcccucaucauucc

SEQ ID NO: 578126 - RNA, 28 nt, Human
uccuaggaccagcccucaucccacggug

SEQ ID NO: 578127 - RNA, 21 nt, Human
ucgcguggcuccuaggaccag

SEQ ID NO: 578128 - RNA, 18 nt, Human
ucucuaugcuccugccau

SEQ ID NO: 578129 - RNA, 22 nt, Human
ucucuguaauaagagcuagagu

SEQ ID NO: 578130 - RNA, 23 nt, Human
ugagggaccuggaaguguccaug

SEQ ID NO: 578131 - RNA, 27 nt, Human
ugagggaccuggaaguguccauguccu

SEQ ID NO: 578132 - RNA, 24 nt, Human
ugcccuaaccagauggaccucagc

SEQ ID NO: 578133 - RNA, 18 nt, Human
ugcuuuagaaacacccag

SEQ ID NO: 578134 - RNA, 20 nt, Human
uggaccucagcagguaccag

SEQ ID NO: 578135 - RNA, 20 nt, Human
uggcacauacaagcuuugug

SEQ ID NO: 578136 - RNA, 20 nt, Human
uggcuccuaggaccagcccu

SEQ ID NO: 578137 - RNA, 18 nt, Human
uggcuugaagcuuauccu

SEQ ID NO: 578138 - RNA, 24 nt, Human
ugggagaaggucagcccuuggcuu

SEQ ID NO: 578139 - RNA, 23 nt, Human
ugucagaaguggagcaaaaguca

SEQ ID NO: 578140 - RNA, 20 nt, Human
ugucauagggcugcugucuc

SEQ ID NO: 578141 - RNA, 19 nt, Human
ugucuccucuagcuccucc

SEQ ID NO: 578142 - RNA, 22 nt, Human
uguuacagaggcugugauggga

SEQ ID NO: 578143 - RNA, 18 nt, Human
uuuuauguagaugagguc

SEQ ID NO: 578144 - RNA, 21 nt, Human
agaugcuggggacacagcagg

SEQ ID NO: 578145 - RNA, 22 nt, Human
agauggaggcugcagugaacug

SEQ ID NO: 578146 - RNA, 23 nt, Human
agccaggcauggugaugcgugcc

SEQ ID NO: 578147 - RNA, 26 nt, Human
aggcauggugaugcgugccuguagcc

SEQ ID NO: 578148 - RNA, 21 nt, Human
aggccgagguggguggauugc

SEQ ID NO: 578149 - RNA, 24 nt, Human
aggccgagguggguggauugcuug

SEQ ID NO: 578150 - RNA, 23 nt, Human
auugcuugagcccaggagaugga

SEQ ID NO: 578151 - RNA, 26 nt, Human
cacagcagggauucauacugacaaga

SEQ ID NO: 578152 - RNA, 21 nt, Human
cagagcaagacacugucucuu

SEQ ID NO: 578153 - RNA, 24 nt, Human
cagcuacgugggaggccgaggugg

SEQ ID NO: 578154 - RNA, 22 nt, Human
ccaggagauggaggcugcagug

SEQ ID NO: 578155 - RNA, 21 nt, Human
ccuguagccccagcuacgugg

SEQ ID NO: 578156 - RNA, 22 nt, Human
ccuguagccccagcuacguggg

SEQ ID NO: 578157 - RNA, 23 nt, Human
cgagguggguggauugcuugagc

SEQ ID NO: 578158 - RNA, 24 nt, Human
gagguggguggauugcuugagccc

SEQ ID NO: 578159 - RNA, 22 nt, Human
gaugcuggggacacagcaggga

SEQ ID NO: 578160 - RNA, 19 nt, Human
gcagagcaagacacugucu

SEQ ID NO: 578161 - RNA, 21 nt, Human
ggacacagcagggauucauac

SEQ ID NO: 578162 - RNA, 18 nt, Human
ggaggcugcagugaacug

SEQ ID NO: 578163 - RNA, 18 nt, Human
uagaugcuggggacacag

SEQ ID NO: 578164 - RNA, 21 nt, Human
ugacaagagccaggcauggug

SEQ ID NO: 578165 - RNA, 23 nt, Human
ugccuguagccccagcuacgugg

SEQ ID NO: 578166 - RNA, 24 nt, Human
ugccuguagccccagcuacguggg

SEQ ID NO: 578167 - RNA, 22 nt, Human
ugggaggccgagguggguggau

SEQ ID NO: 578168 - RNA, 24 nt, Human
ugggaggccgagguggguggauug

SEQ ID NO: 578169 - RNA, 24 nt, Human
uggugaugcgugccuguagcccca

SEQ ID NO: 578170 - RNA, 24 nt, Human
uugcuugagcccaggagauggagg

SEQ ID NO: 578171 - RNA, 19 nt, Human
aaaaaaguggggaaaggac

SEQ ID NO: 578172 - RNA, 20 nt, Human
aaaucugaaguuuacaaaag

SEQ ID NO: 578173 - RNA, 23 nt, Human
aagagaaggcaagaccaggccca

SEQ ID NO: 578174 - RNA, 25 nt, Human
aagagacagagagggggcagcucug

SEQ ID NO: 578175 - RNA, 26 nt, Human
aauguccacuauuauaaaugaacagc

SEQ ID NO: 578176 - RNA, 21 nt, Human
acaccauuuuccacucagccu

SEQ ID NO: 578177 - RNA, 18 nt, Human
acgggguuucaucauguu

SEQ ID NO: 578178 - RNA, 23 nt, Human
acgggguuucaucauguuggcca

SEQ ID NO: 578179 - RNA, 24 nt, Human
acgggguuucaucauguuggccag

SEQ ID NO: 578180 - RNA, 20 nt, Human
acuauuauaaaugaacagca

SEQ ID NO: 578181 - RNA, 23 nt, Human
agacagagagggggcagcucugg

SEQ ID NO: 578182 - RNA, 18 nt, Human
agacagccccaagggcaa

SEQ ID NO: 578183 - RNA, 19 nt, Human
aggaagacagccccaaggg

SEQ ID NO: 578184 - RNA, 20 nt, Human
aggagaaacacuugugaagg

SEQ ID NO: 578185 - RNA, 20 nt, Human
aggcaugagccaccacgccc

SEQ ID NO: 578186 - RNA, 18 nt, Human
aggcuggagugcaguggc

SEQ ID NO: 578187 - RNA, 19 nt, Human
aguagcugggacuacaggc

SEQ ID NO: 578188 - RNA, 19 nt, Human
aguagcugggacuacaggc

SEQ ID NO: 578189 - RNA, 21 nt, Human
agugcaguggcgccauuucag

SEQ ID NO: 578190 - RNA, 18 nt, Human
aucaggaggggguccugg

SEQ ID NO: 578191 - RNA, 20 nt, Human
augagccaccacgcccggcc

SEQ ID NO: 578192 - RNA, 18 nt, Human
auugaagagacagagagg

SEQ ID NO: 578193 - RNA, 24 nt, Human
caacgugcugggauuauaggcaug

SEQ ID NO: 578194 - RNA, 20 nt, Human
caagcgauccuccuaccuca

SEQ ID NO: 578195 - RNA, 27 nt, Human
caagcgauccuccuaccucagccuccc

SEQ ID NO: 578196 - RNA, 24 nt, Human
caaguccaaacauaauuugaagug

SEQ ID NO: 578197 - RNA, 22 nt, Human
cacaccauuuuccacucagccu

SEQ ID NO: 578198 - RNA, 23 nt, Human
cacucucucucaaggggucagga

SEQ ID NO: 578199 - RNA, 20 nt, Human
cagagcucuccauaaugucc

SEQ ID NO: 578200 - RNA, 25 nt, Human
cagcagagaacagaagugaaaggga

SEQ ID NO: 578201 - RNA, 19 nt, Human
cagccucuacccaggcuca

SEQ ID NO: 578202 - RNA, 19 nt, Human
caggaggggguccuggggc

SEQ ID NO: 578203 - RNA, 20 nt, Human
caucaguggcugguggagcu

SEQ ID NO: 578204 - RNA, 24 nt, Human
caucauguuggccaggcugguccc

SEQ ID NO: 578205 - RNA, 18 nt, Human
cauguuggccaggcuggu

SEQ ID NO: 578206 - RNA, 19 nt, Human
cauguuggccaggcugguc

SEQ ID NO: 578207 - RNA, 24 nt, Human
cauguuggccaggcuggucccgaa

SEQ ID NO: 578208 - RNA, 24 nt, Human
ccaacgugcugggauuauaggcau

SEQ ID NO: 578209 - RNA, 22 nt, Human
ccagccccuucaucggcccucg

SEQ ID NO: 578210 - RNA, 24 nt, Human
ccagcgacuaccacugugaccaga

SEQ ID NO: 578211 - RNA, 20 nt, Human
cccaggcucaagcgauccuc

SEQ ID NO: 578212 - RNA, 19 nt, Human
ccccaagggcaggagaaac

SEQ ID NO: 578213 - RNA, 21 nt, Human
ccccgugugacaccugggggu

SEQ ID NO: 578214 - RNA, 23 nt, Human
cccgaguagcugggacuacaggc

SEQ ID NO: 578215 - RNA, 24 nt, Human
cccgaguagcugggacuacaggcg

SEQ ID NO: 578216 - RNA, 24 nt, Human
ccgauccgcccgccucagccuccc

SEQ ID NO: 578217 - RNA, 22 nt, Human
ccgcccgccucagccucccaac

SEQ ID NO: 578218 - RNA, 23 nt, Human
ccuaaccucgccucgugccgguu

SEQ ID NO: 578219 - RNA, 23 nt, Human
ccuaccucagccucccgaguagc

SEQ ID NO: 578220 - RNA, 23 nt, Human
ccucgccagaucacucucucuca

SEQ ID NO: 578221 - RNA, 23 nt, Human
ccucucugcugccacuucccuca

SEQ ID NO: 578222 - RNA, 21 nt, Human
ccuuauuuauuuauugagucg

SEQ ID NO: 578223 - RNA, 18 nt, Human
ccuuggucauaacuucca

SEQ ID NO: 578224 - RNA, 21 nt, Human
cgaacgccugagcucaaccga

SEQ ID NO: 578225 - RNA, 19 nt, Human
cgccucagccucccaacgu

SEQ ID NO: 578226 - RNA, 24 nt, Human
cgccucagccucccaacgugcugg

SEQ ID NO: 578227 - RNA, 19 nt, Human
cgcucagaaacucaccugg

SEQ ID NO: 578228 - RNA, 24 nt, Human
cgcucuguuacccaggcuggagug

SEQ ID NO: 578229 - RNA, 24 nt, Human
cgggguuucaucauguuggccagg

SEQ ID NO: 578230 - RNA, 19 nt, Human
cgugcgccaccaggcccgg

SEQ ID NO: 578231 - RNA, 23 nt, Human
cuaccucagccucccgaguagcu

SEQ ID NO: 578232 - RNA, 24 nt, Human
cucaagcgauccuccuaccucagc

SEQ ID NO: 578233 - RNA, 21 nt, Human
cucacagcagccucuacccag

SEQ ID NO: 578234 - RNA, 23 nt, Human
cucaccuggggucuccuggcugc

SEQ ID NO: 578235 - RNA, 24 nt, Human
cucagccucccgaguagcugggac

SEQ ID NO: 578236 - RNA, 21 nt, Human
cucgcucuguuacccaggcug

SEQ ID NO: 578237 - RNA, 24 nt, Human
cucgcucuguuacccaggcuggag

SEQ ID NO: 578238 - RNA, 19 nt, Human
cucucugcugccacuuccc

SEQ ID NO: 578239 - RNA, 22 nt, Human
cuggccucucugcugccacuuc

SEQ ID NO: 578240 - RNA, 23 nt, Human
cuuauucauauuauguaggaauc

SEQ ID NO: 578241 - RNA, 20 nt, Human
gacagccccaagggcaggag

SEQ ID NO: 578242 - RNA, 18 nt, Human
gagacgggguuucaucau

SEQ ID NO: 578243 - RNA, 24 nt, Human
gagacgggguuucaucauguuggc

SEQ ID NO: 578244 - RNA, 24 nt, Human
gaguagcugggacuacaggcgugc

SEQ ID NO: 578245 - RNA, 21 nt, Human
gauuauaggcaugagccacca

SEQ ID NO: 578246 - RNA, 22 nt, Human
gauuauaggcaugagccaccac

SEQ ID NO: 578247 - RNA, 30 nt, Human
gcacaaccugcacaucuaucguuucuucag

SEQ ID NO: 578248 - RNA, 23 nt, Human
gccaaaaucaggaggggguccug

SEQ ID NO: 578249 - RNA, 19 nt, Human
gccuauccauccuuauuca

SEQ ID NO: 578250 - RNA, 25 nt, Human
gcucuguuacccaggcuggagugca

SEQ ID NO: 578251 - RNA, 20 nt, Human
gcuggagugcaguggcgcca

SEQ ID NO: 578252 - RNA, 18 nt, Human
ggaauguggcuuuaaaaa

SEQ ID NO: 578253 - RNA, 19 nt, Human
ggacuacaggcgugcgcca

SEQ ID NO: 578254 - RNA, 22 nt, Human
ggaggggguccuggggccagcg

SEQ ID NO: 578255 - RNA, 19 nt, Human
ggauuauaggcaugagcca

SEQ ID NO: 578256 - RNA, 24 nt, Human
ggcuauauuuuuuucuauuuuugg

SEQ ID NO: 578257 - RNA, 19 nt, Human
gggccuaggcagagggagc

SEQ ID NO: 578258 - RNA, 23 nt, Human
gggguuucaucauguuggccagg

SEQ ID NO: 578259 - RNA, 21 nt, Human
guagagacgggguuucaucau

SEQ ID NO: 578260 - RNA, 22 nt, Human
guagagacgggguuucaucaug

SEQ ID NO: 578261 - RNA, 23 nt, Human
guagagacgggguuucaucaugu

SEQ ID NO: 578262 - RNA, 21 nt, Human
gugcugggauuauaggcauga

SEQ ID NO: 578263 - RNA, 18 nt, Human
uaaaaugucuuagcauaa

SEQ ID NO: 578264 - RNA, 19 nt, Human
uaaaugaacagcauaauuc

SEQ ID NO: 578265 - RNA, 23 nt, Human
uaaaugaacagcauaauucccuu

SEQ ID NO: 578266 - RNA, 21 nt, Human
uaagcagaaaaauacaaauaa

SEQ ID NO: 578267 - RNA, 25 nt, Human
uacccaggcucaagcgauccuccua

SEQ ID NO: 578268 - RNA, 21 nt, Human
uacccaggcuggagugcagug

SEQ ID NO: 578269 - RNA, 24 nt, Human
uacccaggcuggagugcaguggcg

SEQ ID NO: 578270 - RNA, 24 nt, Human
uaccucagccucccgaguagcugg

SEQ ID NO: 578271 - RNA, 20 nt, Human
uaggcagagggagcaaccga

SEQ ID NO: 578272 - RNA, 29 nt, Human
uauauuuuuuucuauuuuugguagagacg

SEQ ID NO: 578273 - RNA, 21 nt, Human
ucaaggggucaggauucagac

SEQ ID NO: 578274 - RNA, 19 nt, Human
ucaccuggggucuccuggc

SEQ ID NO: 578275 - RNA, 18 nt, Human
ucagccucccaacgugcu

SEQ ID NO: 578276 - RNA, 20 nt, Human
ucagccucccaacgugcugg

SEQ ID NO: 578277 - RNA, 23 nt, Human
ucagccucccgaguagcugggac

SEQ ID NO: 578278 - RNA, 23 nt, Human
ucauaacuuccauuccaaauucu

SEQ ID NO: 578279 - RNA, 22 nt, Human
uccaaacauaauuugaagugag

SEQ ID NO: 578280 - RNA, 24 nt, Human
ucccaacgugcugggauuauaggc

SEQ ID NO: 578281 - RNA, 24 nt, Human
ucccgaguagcugggacuacaggc

SEQ ID NO: 578282 - RNA, 21 nt, Human
uccgcccgccucagccuccca

SEQ ID NO: 578283 - RNA, 24 nt, Human
uccgcccgccucagccucccaacg

SEQ ID NO: 578284 - RNA, 26 nt, Human
uccuccuaccucagccucccgaguag

SEQ ID NO: 578285 - RNA, 21 nt, Human
uccuuauuuauuuauugaguc

SEQ ID NO: 578286 - RNA, 22 nt, Human
ucgccagaucacucucucucaa

SEQ ID NO: 578287 - RNA, 24 nt, Human
ucgcucuguuacccaggcuggagu

SEQ ID NO: 578288 - RNA, 19 nt, Human
ucucgcucuguuacccagg

SEQ ID NO: 578289 - RNA, 23 nt, Human
ucucgcucuguuacccaggcugg

SEQ ID NO: 578290 - RNA, 24 nt, Human
ucucgcucuguuacccaggcugga

SEQ ID NO: 578291 - RNA, 26 nt, Human
ucucgcucuguuacccaggcuggagu

SEQ ID NO: 578292 - RNA, 27 nt, Human
ucucgcucuguuacccaggcuggagug

SEQ ID NO: 578293 - RNA, 21 nt, Human
ucuggccucucugcugccacu

SEQ ID NO: 578294 - RNA, 24 nt, Human
ucuguuacccaggcuggagugcag

SEQ ID NO: 578295 - RNA, 20 nt, Human
ugaaagggagaagggaugag

SEQ ID NO: 578296 - RNA, 20 nt, Human
ugaagagacagagagggggc

SEQ ID NO: 578297 - RNA, 21 nt, Human
ugaagagacagagagggggca

SEQ ID NO: 578298 - RNA, 23 nt, Human
ugaagagacagagagggggcagc

SEQ ID NO: 578299 - RNA, 23 nt, Human
ugacaccuggggguaagaaccaa

SEQ ID NO: 578300 - RNA, 20 nt, Human
ugcaagucugcuuucugcag

SEQ ID NO: 578301 - RNA, 22 nt, Human
ugcaguggcgccauuucagcuc

SEQ ID NO: 578302 - RNA, 18 nt, Human
uggagugcaguggcgcca

SEQ ID NO: 578303 - RNA, 28 nt, Human
uggagugcaguggcgccauggcucuagc

SEQ ID NO: 578304 - RNA, 28 nt, Human
uggagugcaguggcgccauucuagcacg

SEQ ID NO: 578305 - RNA, 21 nt, Human
uggagugcaguggcgccauuu

SEQ ID NO: 578306 - RNA, 24 nt, Human
uggccaggcuggucccgaacgccu

SEQ ID NO: 578307 - RNA, 21 nt, Human
uggcgccauuucagcucacag

SEQ ID NO: 578308 - RNA, 18 nt, Human
ugggacuacaggcgugcg

SEQ ID NO: 578309 - RNA, 21 nt, Human
ugggacuacaggcgugcgcca

SEQ ID NO: 578310 - RNA, 22 nt, Human
ugggacuacaggcgugcgccac

SEQ ID NO: 578311 - RNA, 24 nt, Human
ugggacuacaggcgugcgccacca

SEQ ID NO: 578312 - RNA, 18 nt, Human
ugggauuauaggcaugag

SEQ ID NO: 578313 - RNA, 19 nt, Human
ugggauuauaggcaugagc

SEQ ID NO: 578314 - RNA, 22 nt, Human
ugggauuauaggcaugagccac

SEQ ID NO: 578315 - RNA, 23 nt, Human
ugggauuauaggcaugagccacc

SEQ ID NO: 578316 - RNA, 24 nt, Human
ugggauuauaggcaugagccacca

SEQ ID NO: 578317 - RNA, 18 nt, Human
uggggccagcgacuacca

SEQ ID NO: 578318 - RNA, 24 nt, Human
ugguagagacgggguuucaucaug

SEQ ID NO: 578319 - RNA, 19 nt, Human
ugugaaggguccauugaag

SEQ ID NO: 578320 - RNA, 24 nt, Human
uuacccaggcuggagugcaguggc

SEQ ID NO: 578321 - RNA, 22 nt, Human
uucuauuuuugguagagacggg

SEQ ID NO: 578322 - RNA, 21 nt, Human
uucuucaggggcuggagcugg

SEQ ID NO: 578323 - RNA, 24 nt, Human
uugguagagacgggguuucaucau

SEQ ID NO: 578324 - RNA, 18 nt, Human
uuuaaaaugaguauauau

SEQ ID NO: 578325 - RNA, 23 nt, Human
uuucaucauguuggccaggcugu

SEQ ID NO: 578326 - RNA, 22 nt, Human
uuucuucaggggcuggagcugg

SEQ ID NO: 578327 - RNA, 20 nt, Human
uuugaagugagguagguagu

SEQ ID NO: 578328 - RNA, 21 nt, Human
uuuuucuauuuuugguagaga

SEQ ID NO: 578329 - RNA, 22 nt, Human
uuuuugguagagacgggguuuc

SEQ ID NO: 578330 - RNA, 24 nt, Human
uuuuugguagagacgggguuucau

SEQ ID NO: 578331 - RNA, 21 nt, Human
uuuuuucuauuuuugguagag

SEQ ID NO: 578332 - RNA, 25 nt, Human
aaaaauaaagaaaaaccauccaugc

SEQ ID NO: 578333 - RNA, 18 nt, Human
auaaaacaaacuguacac

SEQ ID NO: 578334 - RNA, 20 nt, Human
auaguaacaaaaaaaguaaa

SEQ ID NO: 578335 - RNA, 18 nt, Human
auauauguauauauaaaa

SEQ ID NO: 578336 - RNA, 20 nt, Human
caagccaccaacucccaaau

SEQ ID NO: 578337 - RNA, 18 nt, Human
cauacauauguauauaua

SEQ ID NO: 578338 - RNA, 20 nt, Human
cauacauauguauauauaca

SEQ ID NO: 578339 - RNA, 26 nt, Human
ccccuuauggacaaagucaagccacc

SEQ ID NO: 578340 - RNA, 21 nt, Human
cuauacagauacaugugugua

SEQ ID NO: 578341 - RNA, 26 nt, Human
cuuuuuccuguuguuguccauauuaa

SEQ ID NO: 578342 - RNA, 22 nt, Human
gaagaacauaaagguuaaagaa

SEQ ID NO: 578343 - RNA, 23 nt, Human
gccccuuauggacaaagucaagc

SEQ ID NO: 578344 - RNA, 20 nt, Human
guauauauacacacauauac

SEQ ID NO: 578345 - RNA, 18 nt, Human
gugaaguggccacgcccc

SEQ ID NO: 578346 - RNA, 19 nt, Human
uaacaaaaaaaguaaagag

SEQ ID NO: 578347 - RNA, 26 nt, Human
uacauguguguauauaaacauacaua

SEQ ID NO: 578348 - RNA, 20 nt, Human
uagcuguuuuucccuacuug

SEQ ID NO: 578349 - RNA, 20 nt, Human
uaguaacaaaaaaaguaaag

SEQ ID NO: 578350 - RNA, 23 nt, Human
uaguaacaaaaaaaguaaagaga

SEQ ID NO: 578351 - RNA, 24 nt, Human
uauaaaauaaggccauguuucuaa

SEQ ID NO: 578352 - RNA, 24 nt, Human
uauaaacauacauauguauauaua

SEQ ID NO: 578353 - RNA, 24 nt, Human
uauacagauacauguguguauaua

SEQ ID NO: 578354 - RNA, 22 nt, Human
uauauaaacauacauauguaua

SEQ ID NO: 578355 - RNA, 24 nt, Human
uauauguauauauaaaacuauaca

SEQ ID NO: 578356 - RNA, 24 nt, Human
uauguauauauacacacauauacu

SEQ ID NO: 578357 - RNA, 22 nt, Human
uauguguauauauguauauaua

SEQ ID NO: 578358 - RNA, 25 nt, Human
uauugcaacugugaccaccgucacu

SEQ ID NO: 578359 - RNA, 25 nt, Human
ucacugaaaaauaaagaaaaaccau

SEQ ID NO: 578360 - RNA, 22 nt, Human
ucccuacuuguuuucuucuugc

SEQ ID NO: 578361 - RNA, 18 nt, Human
ucugcaguggucugucag

SEQ ID NO: 578362 - RNA, 18 nt, Human
ugcugaaaugcuagcuuu

SEQ ID NO: 578363 - RNA, 19 nt, Human
uguaccuguaauccugaag

SEQ ID NO: 578364 - RNA, 24 nt, Human
uguauauauacacacauauacuua

SEQ ID NO: 578365 - RNA, 22 nt, Human
uguauauauacacacauauagu

SEQ ID NO: 578366 - RNA, 20 nt, Human
uguaugucuauguguauaua

SEQ ID NO: 578367 - RNA, 19 nt, Human
ugugaaguggccacgcccc

SEQ ID NO: 578368 - RNA, 20 nt, Human
uguguauauaaacauacaua

SEQ ID NO: 578369 - RNA, 24 nt, Human
uguguauauaaacauacauaugua

SEQ ID NO: 578370 - RNA, 18 nt, Human
uguguauauauguauaua

SEQ ID NO: 578371 - RNA, 20 nt, Human
uguguauauauguauauaua

SEQ ID NO: 578372 - RNA, 22 nt, Human
uguguguauauaaacauacaua

SEQ ID NO: 578373 - RNA, 28 nt, Human
uguguguauauaaacauacauauguaua

SEQ ID NO: 578374 - RNA, 21 nt, Human
uucagaggaaaucacugaaaa

SEQ ID NO: 578375 - RNA, 31 nt, Human
aaaaauauacauugcuugccauagaccuucc

SEQ ID NO: 578376 - RNA, 21 nt, Human
acagcuucuagaggaacuccu

SEQ ID NO: 578377 - RNA, 23 nt, Human
acuucacugugagggcucuggcu

SEQ ID NO: 578378 - RNA, 20 nt, Human
agcuucuaguauggagcaag

SEQ ID NO: 578379 - RNA, 18 nt, Human
auguagacagcagggcag

SEQ ID NO: 578380 - RNA, 22 nt, Human
cagggcagaaagacauuauucu

SEQ ID NO: 578381 - RNA, 25 nt, Human
cagggcagaaagacauuauucuuua

SEQ ID NO: 578382 - RNA, 24 nt, Human
ccaggagagaagggaaacggagca

SEQ ID NO: 578383 - RNA, 20 nt, Human
gagcgucagacgcgccacag

SEQ ID NO: 578384 - RNA, 25 nt, Human
gcagggcagaaagacauuauucuuu

SEQ ID NO: 578385 - RNA, 23 nt, Human
uaggaucugacuccacuucacug

SEQ ID NO: 578386 - RNA, 22 nt, Human
uaugacaagcuccauagaaaaa

SEQ ID NO: 578387 - RNA, 19 nt, Human
uccacuucacugugagggc

SEQ ID NO: 578388 - RNA, 21 nt, Human
ucuaggaucugacuccacuuc

SEQ ID NO: 578389 - RNA, 23 nt, Human
ucuuuauaaauaaaagguucauc

SEQ ID NO: 578390 - RNA, 18 nt, Human
ugaacccaaaagaagcuu

SEQ ID NO: 578391 - RNA, 22 nt, Human
ugaacccaaaagaagcuucuag

SEQ ID NO: 578392 - RNA, 19 nt, Human
ugagggcucuggcuccacg

SEQ ID NO: 578393 - RNA, 20 nt, Human
ugccauagaccuucucugga

SEQ ID NO: 578394 - RNA, 22 nt, Human
ugccauagaccuucucuggaua

SEQ ID NO: 578395 - RNA, 23 nt, Human
uggauaaaaucagacgaaucuag

SEQ ID NO: 578396 - RNA, 23 nt, Human
uugaacccaaaagaagcuucuag

SEQ ID NO: 578397 - RNA, 22 nt, Human
uugcuugccauagaccuucucu

SEQ ID NO: 578398 - RNA, 24 nt, Human
aaagugcugggauuacaggcguga

SEQ ID NO: 578399 - RNA, 24 nt, Human
aagcagauggacacaaagucuaug

SEQ ID NO: 578400 - RNA, 21 nt, Human
aaguaguugagauuacaggca

SEQ ID NO: 578401 - RNA, 19 nt, Human
aagugcugggauuacaggc

SEQ ID NO: 578402 - RNA, 19 nt, Human
aagugcugggauuacaggc

SEQ ID NO: 578403 - RNA, 26 nt, Human
aagugcugggauuacaggcgugagcc

SEQ ID NO: 578404 - RNA, 24 nt, Human
accaucuuggccaagcuggucuug

SEQ ID NO: 578405 - RNA, 18 nt, Human
acugcgcccagcuaauuu

SEQ ID NO: 578406 - RNA, 23 nt, Human
agauuacaggcaacugcuacugc

SEQ ID NO: 578407 - RNA, 21 nt, Human
agccacagcgccuguccaauu

SEQ ID NO: 578408 - RNA, 24 nt, Human
agcuggucuugaacuccugaccuc

SEQ ID NO: 578409 - RNA, 22 nt, Human
aguagagaugggguuucaccau

SEQ ID NO: 578410 - RNA, 25 nt, Human
aguaguugagauuacaggcaacugc

SEQ ID NO: 578411 - RNA, 19 nt, Human
agugcgguggugugaucuc

SEQ ID NO: 578412 - RNA, 20 nt, Human
agugcgguggugugaucucg

SEQ ID NO: 578413 - RNA, 24 nt, Human
agugcgguggugugaucucggcuc

SEQ ID NO: 578414 - RNA, 18 nt, Human
agugcugggauuacaggc

SEQ ID NO: 578415 - RNA, 20 nt, Human
aguucaagugauucuccugc

SEQ ID NO: 578416 - RNA, 18 nt, Human
augggguuucaccaucuu

SEQ ID NO: 578417 - RNA, 20 nt, Human
augggguuucaccaucuugg

SEQ ID NO: 578418 - RNA, 24 nt, Human
auuuuuguauuuuuaguagagaug

SEQ ID NO: 578419 - RNA, 25 nt, Human
caaagcagauggacacaaagucuau

SEQ ID NO: 578420 - RNA, 24 nt, Human
caaagugcugggauuacaggcgug

SEQ ID NO: 578421 - RNA, 23 nt, Human
caagucucugguugguuguuuuu

SEQ ID NO: 578422 - RNA, 22 nt, Human
caagugauucuccugccucagc

SEQ ID NO: 578423 - RNA, 27 nt, Human
caagugauucuccugccucagccuccc

SEQ ID NO: 578424 - RNA, 24 nt, Human
caccaucuuggccaagcuggucuu

SEQ ID NO: 578425 - RNA, 20 nt, Human
cacugcaaccucugcccccc

SEQ ID NO: 578426 - RNA, 21 nt, Human
cacugcaaccucugccccccg

SEQ ID NO: 578427 - RNA, 22 nt, Human
cacuuugcuucccaggguggag

SEQ ID NO: 578428 - RNA, 18 nt, Human
cagaaacugcccaugauc

SEQ ID NO: 578429 - RNA, 22 nt, Human
ccaaagugcugggauuacaggc

SEQ ID NO: 578430 - RNA, 22 nt, Human
ccaaagugcugggauuacaggc

SEQ ID NO: 578431 - RNA, 24 nt, Human
ccaaagugcugggauuacaggcgu

SEQ ID NO: 578432 - RNA, 19 nt, Human
cccaaguaguugagauuac

SEQ ID NO: 578433 - RNA, 24 nt, Human
cccaaguaguugagauuacaggca

SEQ ID NO: 578434 - RNA, 21 nt, Human
cccaggucaaagcagauggac

SEQ ID NO: 578435 - RNA, 24 nt, Human
cccaggucaaagcagauggacaca

SEQ ID NO: 578436 - RNA, 21 nt, Human
ccccgaguucaagugauucuc

SEQ ID NO: 578437 - RNA, 24 nt, Human
ccccgaguucaagugauucuccug

SEQ ID NO: 578438 - RNA, 18 nt, Human
ccccgcgcggcgccccgc

SEQ ID NO: 578439 - RNA, 20 nt, Human
cccgaguucaagugauucuc

SEQ ID NO: 578440 - RNA, 19 nt, Human
ccguaccagccgccccgcc

SEQ ID NO: 578441 - RNA, 19 nt, Human
ccguccccuuccagccucc

SEQ ID NO: 578442 - RNA, 23 nt, Human
ccuagcccggccucgcgccgguu

SEQ ID NO: 578443 - RNA, 20 nt, Human
ccugaccucaggugauccac

SEQ ID NO: 578444 - RNA, 22 nt, Human
ccugaccucaggugauccacug

SEQ ID NO: 578445 - RNA, 23 nt, Human
ccugaccucaggugauccacugg

SEQ ID NO: 578446 - RNA, 26 nt, Human
cuacuggacaaacuugcaggcugugc

SEQ ID NO: 578447 - RNA, 19 nt, Human
cucacugcaaccucugccc

SEQ ID NO: 578448 - RNA, 22 nt, Human
cucacugcaaccucugcccccc

SEQ ID NO: 578449 - RNA, 24 nt, Human
cucacugcaaccucugccccccga

SEQ ID NO: 578450 - RNA, 21 nt, Human
cucccaaguaguugagauuac

SEQ ID NO: 578451 - RNA, 19 nt, Human
cugcaaccucugccccccg

SEQ ID NO: 578452 - RNA, 23 nt, Human
cugcaaccucugccccccgaguu

SEQ ID NO: 578453 - RNA, 24 nt, Human
cugcaaccucugccccccgaguuc

SEQ ID NO: 578454 - RNA, 23 nt, Human
cugccccccgaguucaagugauu

SEQ ID NO: 578455 - RNA, 21 nt, Human
cugccucagccucccaaguag

SEQ ID NO: 578456 - RNA, 24 nt, Human
gaccucaggugauccacuggccuc

SEQ ID NO: 578457 - RNA, 18 nt, Human
gagaugggguuucaccau

SEQ ID NO: 578458 - RNA, 24 nt, Human
gagaugggguuucaccaucuuggc

SEQ ID NO: 578459 - RNA, 22 nt, Human
gaguucaagugauucuccugcc

SEQ ID NO: 578460 - RNA, 18 nt, Human
gauuacaggcgugagcca

SEQ ID NO: 578461 - RNA, 22 nt, Human
gauuacaggcgugagccacagc

SEQ ID NO: 578462 - RNA, 21 nt, Human
gauucuccugccucagccucc

SEQ ID NO: 578463 - RNA, 22 nt, Human
gcaaccucugccccccgaguuc

SEQ ID NO: 578464 - RNA, 18 nt, Human
gcccagcuaauuuuugua

SEQ ID NO: 578465 - RNA, 22 nt, Human
gcccagcuaauuuuuguauuuu

SEQ ID NO: 578466 - RNA, 22 nt, Human
gccccccgaguucaagugauuc

SEQ ID NO: 578467 - RNA, 18 nt, Human
gcgcggggcaccccggca

SEQ ID NO: 578468 - RNA, 18 nt, Human
ggcaccccggcagcaggg

SEQ ID NO: 578469 - RNA, 18 nt, Human
gggguuucaccaucuugg

SEQ ID NO: 578470 - RNA, 22 nt, Human
ggguuucaccaucuuggccaag

SEQ ID NO: 578471 - RNA, 19 nt, Human
ggucuugaacuccugaccu

SEQ ID NO: 578472 - RNA, 24 nt, Human
gugauccacuggccucggccuccc

SEQ ID NO: 578473 - RNA, 24 nt, Human
gugauucuccugccucagccuccc

SEQ ID NO: 578474 - RNA, 22 nt, Human
guugguuguuuuuaugcagauu

SEQ ID NO: 578475 - RNA, 24 nt, Human
uaauuuuuguauuuuuaguagaga

SEQ ID NO: 578476 - RNA, 24 nt, Human
uacaggcaacugcuacugcgccca

SEQ ID NO: 578477 - RNA, 22 nt, Human
uacaggcgugagccacagcgcc

SEQ ID NO: 578478 - RNA, 23 nt, Human
uacaggcgugagccacagcgccu

SEQ ID NO: 578479 - RNA, 22 nt, Human
uaggaucagagauaaagguagg

SEQ ID NO: 578480 - RNA, 19 nt, Human
uaguagagaugggguuuca

SEQ ID NO: 578481 - RNA, 23 nt, Human
uaguagagaugggguuucaccau

SEQ ID NO: 578482 - RNA, 26 nt, Human
uaguagagaugggguuucaccaucuu

SEQ ID NO: 578483 - RNA, 18 nt, Human
uaguugagauuacaggca

SEQ ID NO: 578484 - RNA, 23 nt, Human
ucaaagcagauggacacaaaguc

SEQ ID NO: 578485 - RNA, 26 nt, Human
ucaaagcagauggacacaaagucuau

SEQ ID NO: 578486 - RNA, 18 nt, Human
ucaagugauucuccugcc

SEQ ID NO: 578487 - RNA, 18 nt, Human
ucacugcaaccucugccc

SEQ ID NO: 578488 - RNA, 21 nt, Human
ucacugcaaccucugcccccc

SEQ ID NO: 578489 - RNA, 22 nt, Human
ucacugcaaccucugccccccg

SEQ ID NO: 578490 - RNA, 24 nt, Human
ucacugcaaccucugccccccgag

SEQ ID NO: 578491 - RNA, 20 nt, Human
ucaguaucuaaugcccaggu

SEQ ID NO: 578492 - RNA, 19 nt, Human
ucaguggccccuucguucc

SEQ ID NO: 578493 - RNA, 24 nt, Human
ucccaaagugcugggauuacaggc

SEQ ID NO: 578494 - RNA, 24 nt, Human
ucccaaguaguugagauuacaggc

SEQ ID NO: 578495 - RNA, 21 nt, Human
ucccaggguggagugcggugg

SEQ ID NO: 578496 - RNA, 18 nt, Human
uccuugagagggaauaag

SEQ ID NO: 578497 - RNA, 18 nt, Human
ucggccucccaaagugcu

SEQ ID NO: 578498 - RNA, 21 nt, Human
ucuauggagccauucugguga

SEQ ID NO: 578499 - RNA, 19 nt, Human
ucuccugccucagccuccc

SEQ ID NO: 578500 - RNA, 23 nt, Human
ucuugaacuccugaccucaggug

SEQ ID NO: 578501 - RNA, 25 nt, Human
ugaacugagucucaguuuacaucua

SEQ ID NO: 578502 - RNA, 19 nt, Human
ugaccucaggugauccacu

SEQ ID NO: 578503 - RNA, 22 nt, Human
ugagauuacaggcaacugcuac

SEQ ID NO: 578504 - RNA, 22 nt, Human
ugagauuacaggcaacugcuac

SEQ ID NO: 578505 - RNA, 24 nt, Human
ugagauuacaggcaacugcuacug

SEQ ID NO: 578506 - RNA, 20 nt, Human
ugauucuccugccucagccu

SEQ ID NO: 578507 - RNA, 23 nt, Human
ugcccaggucaaagcagauggac

SEQ ID NO: 578508 - RNA, 22 nt, Human
ugccccccgaguucaagugauu

SEQ ID NO: 578509 - RNA, 24 nt, Human
ugccucagccucccaaguaguuga

SEQ ID NO: 578510 - RNA, 24 nt, Human
ugcugggauuacaggcgugagcca

SEQ ID NO: 578511 - RNA, 18 nt, Human
uggaauauuugaugggcc

SEQ ID NO: 578512 - RNA, 24 nt, Human
uggagugcgguggugugaucucgg

SEQ ID NO: 578513 - RNA, 24 nt, Human
uggccaagcuggucuugaacuccu

SEQ ID NO: 578514 - RNA, 20 nt, Human
ugggaaaggguccuugagag

SEQ ID NO: 578515 - RNA, 18 nt, Human
ugggauuacaggcgugag

SEQ ID NO: 578516 - RNA, 19 nt, Human
ugggauuacaggcgugagc

SEQ ID NO: 578517 - RNA, 21 nt, Human
ugggauuacaggcgugagcca

SEQ ID NO: 578518 - RNA, 22 nt, Human
ugggauuacaggcgugagccac

SEQ ID NO: 578519 - RNA, 22 nt, Human
ugggauuacaggcgugagccac

SEQ ID NO: 578520 - RNA, 23 nt, Human
ugggauuacaggcgugagccaca

SEQ ID NO: 578521 - RNA, 24 nt, Human
ugggauuacaggcgugagccacag

SEQ ID NO: 578522 - RNA, 24 nt, Human
ugggauuacaggcgugagccacag

SEQ ID NO: 578523 - RNA, 27 nt, Human
ugggauuacaggcgugagccacagcgc

SEQ ID NO: 578524 - RNA, 24 nt, Human
ugggguuucaccaucuuggccaag

SEQ ID NO: 578525 - RNA, 21 nt, Human
uguauuuuuaguagagauggg

SEQ ID NO: 578526 - RNA, 18 nt, Human
uuaguagagaugggguuu

SEQ ID NO: 578527 - RNA, 22 nt, Human
uuaguagagaugggguuucacc

SEQ ID NO: 578528 - RNA, 24 nt, Human
uuaguagagaugggguuucaccau

SEQ ID NO: 578529 - RNA, 22 nt, Human
uuauucaguaucuaaugcccag

SEQ ID NO: 578530 - RNA, 21 nt, Human
uucaagugauucuccugccuc

SEQ ID NO: 578531 - RNA, 23 nt, Human
uucaagugauucuccugccucag

SEQ ID NO: 578532 - RNA, 24 nt, Human
uucaagugauucuccugccucagc

SEQ ID NO: 578533 - RNA, 24 nt, Human
uucccaggguggagugcgguggug

SEQ ID NO: 578534 - RNA, 23 nt, Human
uuguauuuuuaguagagaugggg

SEQ ID NO: 578535 - RNA, 21 nt, Human
uuucaccaucuuggccaagcu

SEQ ID NO: 578536 - RNA, 24 nt, Human
uuuuuaguagagaugggguuucac

SEQ ID NO: 578537 - RNA, 20 nt, Human
uuuuuguauuuuuaguagag

SEQ ID NO: 578538 - RNA, 21 nt, Human
aacacuuaauaacaucuaagu

SEQ ID NO: 578539 - RNA, 20 nt, Human
aacagagguugggugcugca

SEQ ID NO: 578540 - RNA, 22 nt, Human
aagucaacaaugccaaaacuga

SEQ ID NO: 578541 - RNA, 23 nt, Human
aauucaggauacccccaaaucaa

SEQ ID NO: 578542 - RNA, 21 nt, Human
acagaacuuccagugaguuau

SEQ ID NO: 578543 - RNA, 25 nt, Human
agcaugccccucugcuccacucaga

SEQ ID NO: 578544 - RNA, 20 nt, Human
agucaguucuaagauaacca

SEQ ID NO: 578545 - RNA, 18 nt, Human
augaaacacagccuuccg

SEQ ID NO: 578546 - RNA, 20 nt, Human
auuacaggugauuugcugca

SEQ ID NO: 578547 - RNA, 21 nt, Human
caacccaaagcaaacugcucu

SEQ ID NO: 578548 - RNA, 20 nt, Human
cagugaccuccucucuugcc

SEQ ID NO: 578549 - RNA, 21 nt, Human
cauuucuauucuaagauauag

SEQ ID NO: 578550 - RNA, 27 nt, Human
ccccucugcuccacucagaacugagga

SEQ ID NO: 578551 - RNA, 18 nt, Human
ccgagacuucauauucaa

SEQ ID NO: 578552 - RNA, 25 nt, Human
cucuucuucagaggaccaaacuguu

SEQ ID NO: 578553 - RNA, 21 nt, Human
gaaauccuuuccgccuggagu

SEQ ID NO: 578554 - RNA, 19 nt, Human
gagacagaacuuccaguga

SEQ ID NO: 578555 - RNA, 19 nt, Human
gaucaauucagugaccucc

SEQ ID NO: 578556 - RNA, 19 nt, Human
gccacaacaucugcuuccc

SEQ ID NO: 578557 - RNA, 22 nt, Human
gccacaacaucugcuucccgag

SEQ ID NO: 578558 - RNA, 22 nt, Human
gcccuggaaggcauugccauuu

SEQ ID NO: 578559 - RNA, 19 nt, Human
gcugaaugauaguuuuucu

SEQ ID NO: 578560 - RNA, 19 nt, Human
ggagacugaauggguggga

SEQ ID NO: 578561 - RNA, 22 nt, Human
guuauuuuccugcuuucugacc

SEQ ID NO: 578562 - RNA, 23 nt, Human
ucaagaaaacaaaguuuucucau

SEQ ID NO: 578563 - RNA, 21 nt, Human
ucugccaacccaaagcaaacu

SEQ ID NO: 578564 - RNA, 19 nt, Human
ugagaaaauagcaaacuca

SEQ ID NO: 578565 - RNA, 22 nt, Human
ugccaaaacugaaauuugcauu

SEQ ID NO: 578566 - RNA, 21 nt, Human
ugccaagggcuaaaaauucag

SEQ ID NO: 578567 - RNA, 18 nt, Human
uggagacugaaugggugg

SEQ ID NO: 578568 - RNA, 25 nt, Human
uguccuuuucuccugcauccucuca

SEQ ID NO: 578569 - RNA, 23 nt, Human
uguuuguauuuccugaauccuga

SEQ ID NO: 578570 - RNA, 18 nt, Human
uuuuaaacaaguucccag

SEQ ID NO: 578571 - RNA, 26 nt, Human
aaaaaggaaaaaagaaccaaagaaaa

SEQ ID NO: 578572 - RNA, 26 nt, Human
aaaaaggagacauauagauuugaaaa

SEQ ID NO: 578573 - RNA, 20 nt, Human
aaaacauucagacuaaucaa

SEQ ID NO: 578574 - RNA, 28 nt, Human
aaaagaagaaacauuauccaacaaaaag

SEQ ID NO: 578575 - RNA, 31 nt, Human
aaaagaagaaacauuauccaacaaaaaggaa

SEQ ID NO: 578576 - RNA, 23 nt, Human
aaacaaacacaaauauuuucaca

SEQ ID NO: 578577 - RNA, 24 nt, Human
aaacauuauccaacaaaaaggaga

SEQ ID NO: 578578 - RNA, 23 nt, Human
aaagaacuuucacacaccuaaag

SEQ ID NO: 578579 - RNA, 27 nt, Human
aaagaagaaacauuauccaacaaaaag

SEQ ID NO: 578580 - RNA, 19 nt, Human
aaagugcugggauuaccgg

SEQ ID NO: 578581 - RNA, 24 nt, Human
aaagugcugggauuaccgguguga

SEQ ID NO: 578582 - RNA, 26 nt, Human
aaaucaguucuaauucauuuaugcag

SEQ ID NO: 578583 - RNA, 19 nt, Human
aacaacaacaacaaacaga

SEQ ID NO: 578584 - RNA, 22 nt, Human
aacaacaacaacaaacagauag

SEQ ID NO: 578585 - RNA, 22 nt, Human
aacacagaaacacuagaaaaca

SEQ ID NO: 578586 - RNA, 29 nt, Human
aagaagaaacauuauccaacaaaaaggaa

SEQ ID NO: 578587 - RNA, 25 nt, Human
aagcaauccucccaccucggccucc

SEQ ID NO: 578588 - RNA, 26 nt, Human
aagcaugauaugauaacaacauugua

SEQ ID NO: 578589 - RNA, 18 nt, Human
aagugcugggauuaccgg

SEQ ID NO: 578590 - RNA, 20 nt, Human
aauaucaaaaauagaaaguc

SEQ ID NO: 578591 - RNA, 23 nt, Human
aauuaccuucuaucugcuucuac

SEQ ID NO: 578592 - RNA, 20 nt, Human
acaacaacaacaaacagaua

SEQ ID NO: 578593 - RNA, 18 nt, Human
accagccgggggacagga

SEQ ID NO: 578594 - RNA, 23 nt, Human
accccuaaacaacacacuaucug

SEQ ID NO: 578595 - RNA, 23 nt, Human
accucggccucccaaagugcugg

SEQ ID NO: 578596 - RNA, 21 nt, Human
agaacuuucacacaccuaaag

SEQ ID NO: 578597 - RNA, 27 nt, Human
agacaaaacaaacacaaagccuuucgg

SEQ ID NO: 578598 - RNA, 20 nt, Human
agauauagacacaauuaacc

SEQ ID NO: 578599 - RNA, 20 nt, Human
agggggcccaaagcaucugu

SEQ ID NO: 578600 - RNA, 23 nt, Human
auagacacaauuaaccccuaaac

SEQ ID NO: 578601 - RNA, 19 nt, Human
augcauuuacuuuuauaag

SEQ ID NO: 578602 - RNA, 19 nt, Human
auguugcccagacuggucu

SEQ ID NO: 578603 - RNA, 23 nt, Human
caaacaucuucauguuuguaaug

SEQ ID NO: 578604 - RNA, 26 nt, Human
caaagugcugggauuaccggugugag

SEQ ID NO: 578605 - RNA, 19 nt, Human
caacaaaaaggagacauau

SEQ ID NO: 578606 - RNA, 28 nt, Human
caacacacuaucugauucucaaaagcaa

SEQ ID NO: 578607 - RNA, 27 nt, Human
caagcaauccucccaccucggccuccc

SEQ ID NO: 578608 - RNA, 28 nt, Human
caagcaauccucccaccucggccuccca

SEQ ID NO: 578609 - RNA, 24 nt, Human
cacagaaacacuagaaaacaguga

SEQ ID NO: 578610 - RNA, 21 nt, Human
caccuaaagauagcauuuagc

SEQ ID NO: 578611 - RNA, 19 nt, Human
cagauaggcaggggaaguc

SEQ ID NO: 578612 - RNA, 24 nt, Human
cauuaaaaagaagaaacauuaucc

SEQ ID NO: 578613 - RNA, 18 nt, Human
ccaaagugcugggauuac

SEQ ID NO: 578614 - RNA, 21 nt, Human
ccaaagugcugggauuaccgg

SEQ ID NO: 578615 - RNA, 24 nt, Human
ccaaagugcugggauuaccggugu

SEQ ID NO: 578616 - RNA, 23 nt, Human
ccagaccccggaccagccggggg

SEQ ID NO: 578617 - RNA, 22 nt, Human
cccagaccccggaccagccggg

SEQ ID NO: 578618 - RNA, 22 nt, Human
cccagacuggucuugaacucau

SEQ ID NO: 578619 - RNA, 20 nt, Human
ccccaucaccaccaaaucug

SEQ ID NO: 578620 - RNA, 22 nt, Human
cccccaucaccaccaaaucugu

SEQ ID NO: 578621 - RNA, 19 nt, Human
ccccccaucaccaccaagg

SEQ ID NO: 578622 - RNA, 26 nt, Human
ccccuaaacaacacacuaucugauuc

SEQ ID NO: 578623 - RNA, 25 nt, Human
ccgccgggcgccugaggagcugcgu

SEQ ID NO: 578624 - RNA, 19 nt, Human
ccggacgacgccgaccaca

SEQ ID NO: 578625 - RNA, 18 nt, Human
ccuaaaaaaggaaaaaag

SEQ ID NO: 578626 - RNA, 21 nt, Human
ccuaaacaacacacuaucuga

SEQ ID NO: 578627 - RNA, 26 nt, Human
ccucccaccucggccucccaaagugc

SEQ ID NO: 578628 - RNA, 24 nt, Human
ccugacgccgccgacccaacaaau

SEQ ID NO: 578629 - RNA, 19 nt, Human
cgcccagaccccggaccag

SEQ ID NO: 578630 - RNA, 24 nt, Human
cgcuauguugcccagacuggucuu

SEQ ID NO: 578631 - RNA, 27 nt, Human
cgcuauguugcccagacuggucuugaa

SEQ ID NO: 578632 - RNA, 21 nt, Human
cuaaaaaaggaaaaaagaacc

SEQ ID NO: 578633 - RNA, 24 nt, Human
cuaaaacaaaacuuuacaaacauc

SEQ ID NO: 578634 - RNA, 18 nt, Human
cuaaagauagcauuuagc

SEQ ID NO: 578635 - RNA, 22 nt, Human
cuaauucacaacuguaguaaag

SEQ ID NO: 578636 - RNA, 24 nt, Human
cucaagcaauccucccaccucggc

SEQ ID NO: 578637 - RNA, 21 nt, Human
cucuauccccccaucaccacc

SEQ ID NO: 578638 - RNA, 19 nt, Human
cucuucuccaacagcuuua

SEQ ID NO: 578639 - RNA, 21 nt, Human
gaaaaauccacaguaugaagg

SEQ ID NO: 578640 - RNA, 22 nt, Human
gaaauaaaaagcaaaacgcaau

SEQ ID NO: 578641 - RNA, 23 nt, Human
gaccagccgggggacaggagcgu

SEQ ID NO: 578642 - RNA, 18 nt, Human
gcauuaaauuacaucgug

SEQ ID NO: 578643 - RNA, 22 nt, Human
gcuucuaccucuauccccccau

SEQ ID NO: 578644 - RNA, 25 nt, Human
ggaaaaaagaaccaaagaaaaaugu

SEQ ID NO: 578645 - RNA, 19 nt, Human
ggacucagaauugaagcag

SEQ ID NO: 578646 - RNA, 22 nt, Human
ggagucucgcuauguugcccag

SEQ ID NO: 578647 - RNA, 19 nt, Human
ggcagcggagacagccgaa

SEQ ID NO: 578648 - RNA, 22 nt, Human
ggggaaaaugauucauaauaaa

SEQ ID NO: 578649 - RNA, 23 nt, Human
uaaaaaaggaaaaaagaaccaaa

SEQ ID NO: 578650 - RNA, 23 nt, Human
uaaaaagcaaaacgcaauccaac

SEQ ID NO: 578651 - RNA, 23 nt, Human
uaaaacaaaacuuuacaaacauc

SEQ ID NO: 578652 - RNA, 26 nt, Human
uaaaaggacaauaacauaucaaagaa

SEQ ID NO: 578653 - RNA, 25 nt, Human
uaaacuaauucacaacuguaguaaa

SEQ ID NO: 578654 - RNA, 20 nt, Human
uaaccccuaaacaacacacu

SEQ ID NO: 578655 - RNA, 19 nt, Human
uacaacuacacccauuuag

SEQ ID NO: 578656 - RNA, 22 nt, Human
uacacaaguacauacaugcugg

SEQ ID NO: 578657 - RNA, 26 nt, Human
uacacaaguacauacaugcuggcauu

SEQ ID NO: 578658 - RNA, 21 nt, Human
uaccggugugagcaacugcac

SEQ ID NO: 578659 - RNA, 27 nt, Human
uaccucuauccccccaucaccaccaaa

SEQ ID NO: 578660 - RNA, 18 nt, Human
uagaaaacagugaaugaa

SEQ ID NO: 578661 - RNA, 22 nt, Human
uagagauggagucucgcuaugu

SEQ ID NO: 578662 - RNA, 20 nt, Human
uagcauuaaauuacaucgug

SEQ ID NO: 578663 - RNA, 22 nt, Human
uauacacauguaacaccuuucu

SEQ ID NO: 578664 - RNA, 23 nt, Human
uauagagauggagucucgcuaug

SEQ ID NO: 578665 - RNA, 26 nt, Human
uaucaaaaauagaaagucugaguuuc

SEQ ID NO: 578666 - RNA, 27 nt, Human
uaucaaagaacuuucacacaccuaaag

SEQ ID NO: 578667 - RNA, 20 nt, Human
uauguugcccagacuggucu

SEQ ID NO: 578668 - RNA, 23 nt, Human
uauguugcccagacuggucuuga

SEQ ID NO: 578669 - RNA, 24 nt, Human
uauguugcccagacuggucuugaa

SEQ ID NO: 578670 - RNA, 18 nt, Human
ucaaaaauagaaagucug

SEQ ID NO: 578671 - RNA, 19 nt, Human
ucaaagaacuuucacacac

SEQ ID NO: 578672 - RNA, 24 nt, Human
uccaacaaaaaggagacauauaga

SEQ ID NO: 578673 - RNA, 23 nt, Human
uccaacagcuuuagauguuuuuc

SEQ ID NO: 578674 - RNA, 21 nt, Human
ucccaaagugcugggauuacc

SEQ ID NO: 578675 - RNA, 23 nt, Human
ucccaaagugcugggauuaccgg

SEQ ID NO: 578676 - RNA, 23 nt, Human
uccuaaaaaaggaaaaaagaacc

SEQ ID NO: 578677 - RNA, 23 nt, Human
ucuaccucuauccccccaucacc

SEQ ID NO: 578678 - RNA, 19 nt, Human
ucucgcuauguugcccaga

SEQ ID NO: 578679 - RNA, 23 nt, Human
ucucgcuauguugcccagacugg

SEQ ID NO: 578680 - RNA, 24 nt, Human
ucucgcuauguugcccagacuggu

SEQ ID NO: 578681 - RNA, 26 nt, Human
ucucgcuauguugcccagacuggucu

SEQ ID NO: 578682 - RNA, 21 nt, Human
ucuguuguuuuguuuuuccua

SEQ ID NO: 578683 - RNA, 23 nt, Human
ucuugaacucaugagcucaagca

SEQ ID NO: 578684 - RNA, 21 nt, Human
ugaaaacacuuauuuuacugu

SEQ ID NO: 578685 - RNA, 22 nt, Human
ugaaaacauucagacuaaucaa

SEQ ID NO: 578686 - RNA, 22 nt, Human
ugacuaaaacaaaacuuuacaa

SEQ ID NO: 578687 - RNA, 22 nt, Human
ugacugcaaagaaaaugacuaa

SEQ ID NO: 578688 - RNA, 18 nt, Human
ugagaaaaccuaaggaug

SEQ ID NO: 578689 - RNA, 23 nt, Human
ugcaaagaaaaugacuaaaacaa

SEQ ID NO: 578690 - RNA, 18 nt, Human
uggagucucgcuauguug

SEQ ID NO: 578691 - RNA, 20 nt, Human
ugggauuaccggugugagca

SEQ ID NO: 578692 - RNA, 20 nt, Human
ugggauuaccggugugagca

SEQ ID NO: 578693 - RNA, 22 nt, Human
ugggauuaccggugugagcaac

SEQ ID NO: 578694 - RNA, 22 nt, Human
ugggauuaccggugugagcaac

SEQ ID NO: 578695 - RNA, 24 nt, Human
ugggauuaccggugugagcaacug

SEQ ID NO: 578696 - RNA, 19 nt, Human
uguaacaccuuucuagugg

SEQ ID NO: 578697 - RNA, 24 nt, Human
uguaauguauuaaugcacaaaaua

SEQ ID NO: 578698 - RNA, 18 nt, Human
uuaaugcauuuccuuuuu

SEQ ID NO: 578699 - RNA, 22 nt, Human
uuaccggugugagcaacugcac

SEQ ID NO: 578700 - RNA, 23 nt, Human
uuauagagauggagucucgcuau

SEQ ID NO: 578701 - RNA, 24 nt, Human
uuauagagauggagucucgcuaug

SEQ ID NO: 578702 - RNA, 19 nt, Human
uucaacaacaacaacaaac

SEQ ID NO: 578703 - RNA, 19 nt, Human
uucacauuuccuauguuug

SEQ ID NO: 578704 - RNA, 19 nt, Human
uuccuaaaaaaggaaaaaa

SEQ ID NO: 578705 - RNA, 20 nt, Human
uugaagaacaagaauauuua

SEQ ID NO: 578706 - RNA, 23 nt, Human
uuuauaaagaaauaaaaagcaaa

SEQ ID NO: 578707 - RNA, 24 nt, Human
uuuguuuuuaacuuuacuucauaa

SEQ ID NO: 578708 - RNA, 23 nt, Human
uuuuauuuauagagauggagucu

SEQ ID NO: 578709 - RNA, 25 nt, Human
uuuuuuuuuuuuuuuuuuuacuuag

SEQ ID NO: 578710 - RNA, 21 nt, Human
aaagaaacaaauacaaaacag

SEQ ID NO: 578711 - RNA, 19 nt, Human
aaagugcugggauuacagg

SEQ ID NO: 578712 - RNA, 23 nt, Human
aaagugcugggauuacaggcgua

SEQ ID NO: 578713 - RNA, 20 nt, Human
aaccucugccuccugaguuc

SEQ ID NO: 578714 - RNA, 22 nt, Human
aagaaacaaauacaaaacagga

SEQ ID NO: 578715 - RNA, 22 nt, Human
aagucagggccaauucagagga

SEQ ID NO: 578716 - RNA, 19 nt, Human
aagugcugggauuacaggc

SEQ ID NO: 578717 - RNA, 19 nt, Human
aagugcugggauuacaggc

SEQ ID NO: 578718 - RNA, 26 nt, Human
aagugcugggauuacaggcguaagcc

SEQ ID NO: 578719 - RNA, 18 nt, Human
accauguuggccaggcug

SEQ ID NO: 578720 - RNA, 23 nt, Human
acccaucuguggaguggcuacac

SEQ ID NO: 578721 - RNA, 22 nt, Human
agaauacaauccaauucaaaag

SEQ ID NO: 578722 - RNA, 20 nt, Human
agagcuuugguuucagucuc

SEQ ID NO: 578723 - RNA, 19 nt, Human
agaggauguggcugaaggc

SEQ ID NO: 578724 - RNA, 25 nt, Human
agcaaaacacuaaaagaagagcguu

SEQ ID NO: 578725 - RNA, 19 nt, Human
agcgaucuccugccucagc

SEQ ID NO: 578726 - RNA, 23 nt, Human
agcgaucuccugccucagccucc

SEQ ID NO: 578727 - RNA, 23 nt, Human
aggcguaagccacugugccuggc

SEQ ID NO: 578728 - RNA, 25 nt, Human
aggcuggagugcaguggcaugaucu

SEQ ID NO: 578729 - RNA, 24 nt, Human
aggugaucugcccgucucagccuc

SEQ ID NO: 578730 - RNA, 22 nt, Human
aguagagauggaguuucaccau

SEQ ID NO: 578731 - RNA, 18 nt, Human
aguagcugggauuacagg

SEQ ID NO: 578732 - RNA, 20 nt, Human
agugcaguggcaugaucuug

SEQ ID NO: 578733 - RNA, 23 nt, Human
agugcaguggcaugaucuuggcu

SEQ ID NO: 578734 - RNA, 24 nt, Human
agugcaguggcaugaucuuggcuc

SEQ ID NO: 578735 - RNA, 18 nt, Human
agugcugggauuacaggc

SEQ ID NO: 578736 - RNA, 24 nt, Human
aguggcaugaucuuggcucacugc

SEQ ID NO: 578737 - RNA, 20 nt, Human
aucauuuuaggauuacugag

SEQ ID NO: 578738 - RNA, 20 nt, Human
aucauuuuaggauuacugag

SEQ ID NO: 578739 - RNA, 18 nt, Human
auggaguuucaccauguu

SEQ ID NO: 578740 - RNA, 22 nt, Human
auggaguuucaccauguuggcc

SEQ ID NO: 578741 - RNA, 26 nt, Human
auucugaucccaagagaccacccauc

SEQ ID NO: 578742 - RNA, 24 nt, Human
auuuuuguauuuuuaguagagaug

SEQ ID NO: 578743 - RNA, 22 nt, Human
caaaaggacauaaauucacaaa

SEQ ID NO: 578744 - RNA, 24 nt, Human
caaagugcugggauuacaggcgua

SEQ ID NO: 578745 - RNA, 18 nt, Human
cacagaacaaccgcugga

SEQ ID NO: 578746 - RNA, 26 nt, Human
caccagaacaauggcuguaaaggaga

SEQ ID NO: 578747 - RNA, 18 nt, Human
caccauguuggccaggcu

SEQ ID NO: 578748 - RNA, 22 nt, Human
caccauguuggccaggcuguuc

SEQ ID NO: 578749 - RNA, 24 nt, Human
caccauguuggccaggcuguucuc

SEQ ID NO: 578750 - RNA, 27 nt, Human
caccauguuggccaggcuguucucaaa

SEQ ID NO: 578751 - RNA, 18 nt, Human
cacugcaaccucugccuc

SEQ ID NO: 578752 - RNA, 21 nt, Human
cacugcaaccucugccuccug

SEQ ID NO: 578753 - RNA, 18 nt, Human
cacugcguggguggaagc

SEQ ID NO: 578754 - RNA, 24 nt, Human
cagacuuugaccauaugcuaacca

SEQ ID NO: 578755 - RNA, 24 nt, Human
cagagucuugcucuguugcccagg

SEQ ID NO: 578756 - RNA, 24 nt, Human
cagcaugccuggcuaauuuuugua

SEQ ID NO: 578757 - RNA, 19 nt, Human
caggacagggccccagcuc

SEQ ID NO: 578758 - RNA, 18 nt, Human
cagguuacauaaaaaaca

SEQ ID NO: 578759 - RNA, 20 nt, Human
cagguuacauaaaaaacaau

SEQ ID NO: 578760 - RNA, 25 nt, Human
cauaaauucacaaaccugccugggc

SEQ ID NO: 578761 - RNA, 23 nt, Human
cauguguaaccagcuuuggaaau

SEQ ID NO: 578762 - RNA, 24 nt, Human
cauguuggccaggcuguucucaaa

SEQ ID NO: 578763 - RNA, 18 nt, Human
cauucugaucccaagaga

SEQ ID NO: 578764 - RNA, 23 nt, Human
cauuuuaggauuacugagugcug

SEQ ID NO: 578765 - RNA, 22 nt, Human
ccaaagugcugggauuacaggc

SEQ ID NO: 578766 - RNA, 22 nt, Human
ccaaagugcugggauuacaggc

SEQ ID NO: 578767 - RNA, 24 nt, Human
ccaaagugcugggauuacaggcgu

SEQ ID NO: 578768 - RNA, 20 nt, Human
ccacccaucuguggaguggc

SEQ ID NO: 578769 - RNA, 26 nt, Human
ccagcgaucuccugccucagccuccc

SEQ ID NO: 578770 - RNA, 27 nt, Human
ccagcgaucuccugccucagccucccg

SEQ ID NO: 578771 - RNA, 22 nt, Human
ccauaugcuaaccagaauacaa

SEQ ID NO: 578772 - RNA, 23 nt, Human
cccgaguagcugggauuacaggu

SEQ ID NO: 578773 - RNA, 24 nt, Human
cccgaguagcugggauuacaggug

SEQ ID NO: 578774 - RNA, 21 nt, Human
ccgaguagcugggauuacagg

SEQ ID NO: 578775 - RNA, 24 nt, Human
ccgaguagcugggauuacaggugu

SEQ ID NO: 578776 - RNA, 24 nt, Human
ccgucucagccucccaaagugcug

SEQ ID NO: 578777 - RNA, 22 nt, Human
ccugaucucaggugaucugccc

SEQ ID NO: 578778 - RNA, 23 nt, Human
ccugccucagccucccgaguagc

SEQ ID NO: 578779 - RNA, 19 nt, Human
cgacuucacacagaacaac

SEQ ID NO: 578780 - RNA, 24 nt, Human
cgucucagccucccaaagugcugg

SEQ ID NO: 578781 - RNA, 21 nt, Human
cucacugcaaccucugccucc

SEQ ID NO: 578782 - RNA, 24 nt, Human
cucagccucccgaguagcugggau

SEQ ID NO: 578783 - RNA, 21 nt, Human
cucaggugaucugcccgucuc

SEQ ID NO: 578784 - RNA, 22 nt, Human
cuccgagcuguaucaacugcau

SEQ ID NO: 578785 - RNA, 23 nt, Human
cuccuauaccuacaccuguugua

SEQ ID NO: 578786 - RNA, 19 nt, Human
cuccugaguuccagcgauc

SEQ ID NO: 578787 - RNA, 25 nt, Human
cucugcauacauucccacuuuuccu

SEQ ID NO: 578788 - RNA, 23 nt, Human
cucuguugcccaggcuggagugc

SEQ ID NO: 578789 - RNA, 23 nt, Human
cugcaaccucugccuccugaguu

SEQ ID NO: 578790 - RNA, 24 nt, Human
cugcaaccucugccuccugaguuc

SEQ ID NO: 578791 - RNA, 23 nt, Human
cugccucagccucccgaguagcu

SEQ ID NO: 578792 - RNA, 24 nt, Human
cuggagugcaguggcaugaucuug

SEQ ID NO: 578793 - RNA, 21 nt, Human
cuugcucuguugcccaggcug

SEQ ID NO: 578794 - RNA, 21 nt, Human
cuuuuuuguuucuuuugagag

SEQ ID NO: 578795 - RNA, 21 nt, Human
gagacagagucuugcucuguu

SEQ ID NO: 578796 - RNA, 24 nt, Human
gaguagcugggauuacaggugugc

SEQ ID NO: 578797 - RNA, 19 nt, Human
gaucuccugccucagccuc

SEQ ID NO: 578798 - RNA, 18 nt, Human
gauuacaggcguaagcca

SEQ ID NO: 578799 - RNA, 21 nt, Human
gauuacaggcguaagccacug

SEQ ID NO: 578800 - RNA, 24 nt, Human
gauuacaggcguaagccacugugc

SEQ ID NO: 578801 - RNA, 21 nt, Human
gauuacaggugugcaccagca

SEQ ID NO: 578802 - RNA, 21 nt, Human
gauuacaggugugcaccagca

SEQ ID NO: 578803 - RNA, 22 nt, Human
gcaaaacacuaaaagaagagcg

SEQ ID NO: 578804 - RNA, 21 nt, Human
gcacauaacaaugaacucugg

SEQ ID NO: 578805 - RNA, 20 nt, Human
gcccaggcuggagugcagug

SEQ ID NO: 578806 - RNA, 24 nt, Human
gcccaggcuggagugcaguggcau

SEQ ID NO: 578807 - RNA, 23 nt, Human
gcgaucuccugccucagccuccc

SEQ ID NO: 578808 - RNA, 21 nt, Human
gcucacugcaaccucugccuc

SEQ ID NO: 578809 - RNA, 22 nt, Human
ggaguuucaccauguuggccag

SEQ ID NO: 578810 - RNA, 24 nt, Human
ggauuacaggcguaagccacugug

SEQ ID NO: 578811 - RNA, 22 nt, Human
gggagacagcuguucguuccgc

SEQ ID NO: 578812 - RNA, 18 nt, Human
guagcugggauuacaggu

SEQ ID NO: 578813 - RNA, 24 nt, Human
gugaucugcccgucucagccuccc

SEQ ID NO: 578814 - RNA, 19 nt, Human
guggaguggcuacacagcc

SEQ ID NO: 578815 - RNA, 21 nt, Human
uaaaagaagagcguucuaguu

SEQ ID NO: 578816 - RNA, 18 nt, Human
uaaagaaacaaauacaaa

SEQ ID NO: 578817 - RNA, 23 nt, Human
uaaagaaacaaauacaaaacagg

SEQ ID NO: 578818 - RNA, 20 nt, Human
uaaggaauuaucaaagauca

SEQ ID NO: 578819 - RNA, 24 nt, Human
uaauuuuuguauuuuuaguagaga

SEQ ID NO: 578820 - RNA, 23 nt, Human
uacaaaacaggauuucagcaaaa

SEQ ID NO: 578821 - RNA, 22 nt, Human
uacaauccaauucaaaagugga

SEQ ID NO: 578822 - RNA, 22 nt, Human
uacaggcguaagccacugugcc

SEQ ID NO: 578823 - RNA, 22 nt, Human
uagagauggaguuucaccaugu

SEQ ID NO: 578824 - RNA, 24 nt, Human
uaguagagauggaguuucaccaug

SEQ ID NO: 578825 - RNA, 25 nt, Human
uaguagagauggaguuucaccaugu

SEQ ID NO: 578826 - RNA, 23 nt, Human
uaguuuguuuaaggaauuaucaa

SEQ ID NO: 578827 - RNA, 20 nt, Human
uaucaaagaucauacuuggc

SEQ ID NO: 578828 - RNA, 18 nt, Human
uaugcaaaaggacauaaa

SEQ ID NO: 578829 - RNA, 19 nt, Human
ucacugcaaccucugccuc

SEQ ID NO: 578830 - RNA, 20 nt, Human
ucacugcaaccucugccucc

SEQ ID NO: 578831 - RNA, 22 nt, Human
ucacugcaaccucugccuccug

SEQ ID NO: 578832 - RNA, 24 nt, Human
ucacugcaaccucugccuccugag

SEQ ID NO: 578833 - RNA, 25 nt, Human
ucacugcaaccucugccuccugagu

SEQ ID NO: 578834 - RNA, 22 nt, Human
ucagcaaaacacuaaaagaaga

SEQ ID NO: 578835 - RNA, 20 nt, Human
ucagccucccgaguagcugg

SEQ ID NO: 578836 - RNA, 19 nt, Human
ucagggccaauucagagga

SEQ ID NO: 578837 - RNA, 27 nt, Human
uccaccagaacaauggcuguaaaggag

SEQ ID NO: 578838 - RNA, 21 nt, Human
uccauuuaauuucccaugguu

SEQ ID NO: 578839 - RNA, 24 nt, Human
ucccaaagugcugggauuacaggc

SEQ ID NO: 578840 - RNA, 23 nt, Human
ucccgaguagcugggauuacagg

SEQ ID NO: 578841 - RNA, 24 nt, Human
ucccgaguagcugggauuacaggu

SEQ ID NO: 578842 - RNA, 20 nt, Human
uccugaguuccagcgaucuc

SEQ ID NO: 578843 - RNA, 24 nt, Human
ucucacaacaagggagacagcugu

SEQ ID NO: 578844 - RNA, 24 nt, Human
ucuccugccucagccucccgagua

SEQ ID NO: 578845 - RNA, 19 nt, Human
ucuguaaugagaaagucuu

SEQ ID NO: 578846 - RNA, 24 nt, Human
ucuguugcccaggcuggagugcag

SEQ ID NO: 578847 - RNA, 23 nt, Human
ucuugcucuguugcccaggcugg

SEQ ID NO: 578848 - RNA, 24 nt, Human
ucuugcucuguugcccaggcugga

SEQ ID NO: 578849 - RNA, 20 nt, Human
ugaaccaacucaacgugcuc

SEQ ID NO: 578850 - RNA, 19 nt, Human
ugaccuccuauaccuacac

SEQ ID NO: 578851 - RNA, 26 nt, Human
ugacuaaacucuguaaugagaaaguc

SEQ ID NO: 578852 - RNA, 24 nt, Human
ugaucucaggugaucugcccgucu

SEQ ID NO: 578853 - RNA, 18 nt, Human
ugcaagugaaaagugaac

SEQ ID NO: 578854 - RNA, 22 nt, Human
ugcaguggcaugaucuuggcuc

SEQ ID NO: 578855 - RNA, 20 nt, Human
ugccaggauuuggaguaccu

SEQ ID NO: 578856 - RNA, 18 nt, Human
ugcccaggcuggagugca

SEQ ID NO: 578857 - RNA, 21 nt, Human
ugcccaggcuggagugcagug

SEQ ID NO: 578858 - RNA, 22 nt, Human
ugcccaggcuggagugcagugg

SEQ ID NO: 578859 - RNA, 24 nt, Human
ugcccaggcuggagugcaguggca

SEQ ID NO: 578860 - RNA, 24 nt, Human
ugccucagccucccgaguagcugg

SEQ ID NO: 578861 - RNA, 27 nt, Human
ugccuccugaguuccagcgaucuccuu

SEQ ID NO: 578862 - RNA, 19 nt, Human
ugccuggcccaaugugugg

SEQ ID NO: 578863 - RNA, 18 nt, Human
ugcuacguugacuaaacu

SEQ ID NO: 578864 - RNA, 24 nt, Human
ugcucuguugcccaggcuggagug

SEQ ID NO: 578865 - RNA, 24 nt, Human
ugcugggauuacaggcguaagcca

SEQ ID NO: 578866 - RNA, 19 nt, Human
uggagugcaguggcaugau

SEQ ID NO: 578867 - RNA, 24 nt, Human
uggagugcaguggcaugaucuugg

SEQ ID NO: 578868 - RNA, 24 nt, Human
uggaguuucaccauguuggccagg

SEQ ID NO: 578869 - RNA, 19 nt, Human
uggcaaaauaaaaaaauag

SEQ ID NO: 578870 - RNA, 19 nt, Human
uggcaugaucuuggcucac

SEQ ID NO: 578871 - RNA, 21 nt, Human
uggcaugaucuuggcucacug

SEQ ID NO: 578872 - RNA, 24 nt, Human
uggccaggcuguucucaaacuccu

SEQ ID NO: 578873 - RNA, 21 nt, Human
ugggauuacaggcguaagcca

SEQ ID NO: 578874 - RNA, 22 nt, Human
ugggauuacaggcguaagccac

SEQ ID NO: 578875 - RNA, 22 nt, Human
ugggauuacaggcguaagccac

SEQ ID NO: 578876 - RNA, 22 nt, Human
ugggauuacaggcguaagccac

SEQ ID NO: 578877 - RNA, 23 nt, Human
ugggauuacaggcguaagccacu

SEQ ID NO: 578878 - RNA, 24 nt, Human
ugggauuacaggcguaagccacug

SEQ ID NO: 578879 - RNA, 21 nt, Human
ugggauuacaggugugcacca

SEQ ID NO: 578880 - RNA, 21 nt, Human
ugggauuacaggugugcacca

SEQ ID NO: 578881 - RNA, 21 nt, Human
ugggauuacaggugugcacca

SEQ ID NO: 578882 - RNA, 25 nt, Human
ugggauuacaggugugcaccagcau

SEQ ID NO: 578883 - RNA, 23 nt, Human
uguaaagaaacaaauacaaaaca

SEQ ID NO: 578884 - RNA, 19 nt, Human
uguaucaacugcauucugu

SEQ ID NO: 578885 - RNA, 22 nt, Human
uguauuuuuaguagagauggag

SEQ ID NO: 578886 - RNA, 27 nt, Human
uguggcacauaacaaugaacucuggug

SEQ ID NO: 578887 - RNA, 19 nt, Human
ugugugcagcugcuguuuc

SEQ ID NO: 578888 - RNA, 22 nt, Human
ugugugcagcugcuguuucugg

SEQ ID NO: 578889 - RNA, 26 nt, Human
uuaauuaucuuuccauuuaauuuccc

SEQ ID NO: 578890 - RNA, 24 nt, Human
uuaccgaacuccuuuucuugaccu

SEQ ID NO: 578891 - RNA, 18 nt, Human
uuaguagagauggaguuu

SEQ ID NO: 578892 - RNA, 24 nt, Human
uuaguagagauggaguuucaccau

SEQ ID NO: 578893 - RNA, 19 nt, Human
uugacuaaacucuguaaug

SEQ ID NO: 578894 - RNA, 24 nt, Human
uugcucuguugcccaggcuggagu

SEQ ID NO: 578895 - RNA, 23 nt, Human
uuguauuuuuaguagagauggag

SEQ ID NO: 578896 - RNA, 23 nt, Human
uuguccaccagaacaauggcugu

SEQ ID NO: 578897 - RNA, 21 nt, Human
uuucaccauguuggccaggcu

SEQ ID NO: 578898 - RNA, 24 nt, Human
uuuuuaguagagauggaguuucac

SEQ ID NO: 578899 - RNA, 20 nt, Human
uuuuuguauuuuuaguagag

SEQ ID NO: 578900 - RNA, 25 nt, Human
aaaaaacaaaaaaaacuagcaugcc

SEQ ID NO: 578901 - RNA, 24 nt, Human
aaaaaaucauuuacccacuccaac

SEQ ID NO: 578902 - RNA, 18 nt, Human
aaacaagaagaaaacagg

SEQ ID NO: 578903 - RNA, 23 nt, Human
aaacaagaagaaaacaggaaacc

SEQ ID NO: 578904 - RNA, 28 nt, Human
aaacaagaagaaaacaggaaaccuccag

SEQ ID NO: 578905 - RNA, 19 nt, Human
aagaaaacaggaaaccucc

SEQ ID NO: 578906 - RNA, 24 nt, Human
aagaagaaaacaggaaaccuccag

SEQ ID NO: 578907 - RNA, 18 nt, Human
aagcaaagcaaaacaaaa

SEQ ID NO: 578908 - RNA, 21 nt, Human
aagugacccuccuacuucagc

SEQ ID NO: 578909 - RNA, 23 nt, Human
aaucaaaagcauuaugagcuaaa

SEQ ID NO: 578910 - RNA, 22 nt, Human
accaccaguuaaaacaagaaga

SEQ ID NO: 578911 - RNA, 19 nt, Human
acccaguaaaguacuaccu

SEQ ID NO: 578912 - RNA, 24 nt, Human
agaagaaaacaggaaaccuccagu

SEQ ID NO: 578913 - RNA, 22 nt, Human
agaggugcaacaggucagagau

SEQ ID NO: 578914 - RNA, 24 nt, Human
agcugggauuauaguagucgaguc

SEQ ID NO: 578915 - RNA, 23 nt, Human
auuguuacugauaaccuacaauc

SEQ ID NO: 578916 - RNA, 21 nt, Human
caaaaaaaacuagcaugccug

SEQ ID NO: 578917 - RNA, 27 nt, Human
caacaagcaaagcaaaacaaaaccuuu

SEQ ID NO: 578918 - RNA, 20 nt, Human
cacccugccuggcuuaauuu

SEQ ID NO: 578919 - RNA, 24 nt, Human
cagcagcugggauuauaguagugc

SEQ ID NO: 578920 - RNA, 22 nt, Human
caggucagagaugcaggaagug

SEQ ID NO: 578921 - RNA, 23 nt, Human
ccacaaaggcccuacaccucuga

SEQ ID NO: 578922 - RNA, 19 nt, Human
ccaguuaaaacaagaagaa

SEQ ID NO: 578923 - RNA, 20 nt, Human
ccaguuaaaacaagaagaaa

SEQ ID NO: 578924 - RNA, 23 nt, Human
ccaguuaaaacaagaagaaaaca

SEQ ID NO: 578925 - RNA, 26 nt, Human
ccaguuaaaacaagaagaaaacagga

SEQ ID NO: 578926 - RNA, 21 nt, Human
ccuccaguuaagaggguuuua

SEQ ID NO: 578927 - RNA, 23 nt, Human
ccuugcuauguugccuaggcugg

SEQ ID NO: 578928 - RNA, 21 nt, Human
cucaagggucagcugaggcag

SEQ ID NO: 578929 - RNA, 24 nt, Human
cuggcuuaauuucaguuuucuuaa

SEQ ID NO: 578930 - RNA, 18 nt, Human
cuuuauguguacauugau

SEQ ID NO: 578931 - RNA, 18 nt, Human
gcaaagcaaaacaaaacc

SEQ ID NO: 578932 - RNA, 19 nt, Human
gcaaagcaaaacaaaaccu

SEQ ID NO: 578933 - RNA, 21 nt, Human
gcaaagcaaaacaaaaccuuu

SEQ ID NO: 578934 - RNA, 19 nt, Human
gggcgauauuaacuugaaa

SEQ ID NO: 578935 - RNA, 18 nt, Human
guauguauguauuauguu

SEQ ID NO: 578936 - RNA, 22 nt, Human
guauuucugccucacuucacug

SEQ ID NO: 578937 - RNA, 19 nt, Human
gugcauuucgaccaguagg

SEQ ID NO: 578938 - RNA, 21 nt, Human
gugcuaauuagagugcaugag

SEQ ID NO: 578939 - RNA, 22 nt, Human
gugcuugcugcuaagauaacag

SEQ ID NO: 578940 - RNA, 21 nt, Human
guuuucuuaaaaaaaaaaaac

SEQ ID NO: 578941 - RNA, 26 nt, Human
uaaaaaaaaaaaacaaaaaaaacuag

SEQ ID NO: 578942 - RNA, 22 nt, Human
uaaaaagacacaugacugggua

SEQ ID NO: 578943 - RNA, 24 nt, Human
uaaaaagagcauccucguauguaa

SEQ ID NO: 578944 - RNA, 27 nt, Human
uaaaaagagcauccucguauguaaugg

SEQ ID NO: 578945 - RNA, 18 nt, Human
uaaaacaagaagaaaaca

SEQ ID NO: 578946 - RNA, 25 nt, Human
uaaaacaagaagaaaacaggaaacc

SEQ ID NO: 578947 - RNA, 22 nt, Human
uaacuacugcugccaccugcug

SEQ ID NO: 578948 - RNA, 19 nt, Human
uaauuccauuagaagguaa

SEQ ID NO: 578949 - RNA, 24 nt, Human
uacgugaauauacuuguguaugua

SEQ ID NO: 578950 - RNA, 24 nt, Human
uacuggaaaccaccaguuaaaaca

SEQ ID NO: 578951 - RNA, 21 nt, Human
uacuucagccgccccagcagc

SEQ ID NO: 578952 - RNA, 22 nt, Human
uagagaugggaccuugcuaugu

SEQ ID NO: 578953 - RNA, 23 nt, Human
uaugaaaaugcacucuuuucuca

SEQ ID NO: 578954 - RNA, 24 nt, Human
uauguacgugaauauacuugugua

SEQ ID NO: 578955 - RNA, 18 nt, Human
uauguugccuaggcuggc

SEQ ID NO: 578956 - RNA, 18 nt, Human
uauguugccuaggcuggc

SEQ ID NO: 578957 - RNA, 21 nt, Human
uauguugccuaggcuggcaga

SEQ ID NO: 578958 - RNA, 20 nt, Human
ucacaacaagcaaagcaaaa

SEQ ID NO: 578959 - RNA, 23 nt, Human
ucucuuaacuacugcugccaccu

SEQ ID NO: 578960 - RNA, 22 nt, Human
ucuuaaaaaaaaaaaacaaaaa

SEQ ID NO: 578961 - RNA, 24 nt, Human
ucuuaaaaaaaaaaaacaaaaaaa

SEQ ID NO: 578962 - RNA, 19 nt, Human
ugccuaggcuggcagauuu

SEQ ID NO: 578963 - RNA, 23 nt, Human
ugcugcuaagauaacagaggugc

SEQ ID NO: 578964 - RNA, 24 nt, Human
ugggaccuugcuauguugccuagg

SEQ ID NO: 578965 - RNA, 21 nt, Human
ugggauuauaguagugcgcca

SEQ ID NO: 578966 - RNA, 22 nt, Human
ugggauuauaguagugcgccac

SEQ ID NO: 578967 - RNA, 21 nt, Human
uguauguauguauuauguuau

SEQ ID NO: 578968 - RNA, 19 nt, Human
uguguguauuuauguacgu

SEQ ID NO: 578969 - RNA, 22 nt, Human
uguguguauuuauguacgugaa

SEQ ID NO: 578970 - RNA, 19 nt, Human
uugaaugaaacucaaucuu

SEQ ID NO: 578971 - RNA, 24 nt, Human
uugauguacuuuucaggagcuuau

SEQ ID NO: 578972 - RNA, 20 nt, Human
uuucucagcaugaucucucc

SEQ ID NO: 578973 - RNA, 18 nt, Human
uuuuggggaaaaaaauca

SEQ ID NO: 578974 - RNA, 24 nt, Human
aaaaaagacaaaugagggcucaaa

SEQ ID NO: 578975 - RNA, 25 nt, Human
aaaaaagacaaaugagggcucaaaa

SEQ ID NO: 578976 - RNA, 25 nt, Human
aaaaaggaauuacaguaacuuuaaa

SEQ ID NO: 578977 - RNA, 26 nt, Human
aaaaaggaauuacaguaacuuuaaaa

SEQ ID NO: 578978 - RNA, 19 nt, Human
aaugagggcucaaaaagga

SEQ ID NO: 578979 - RNA, 22 nt, Human
caaaaaagacaaaugagggcuc

SEQ ID NO: 578980 - RNA, 18 nt, Human
gauagccuuggcucaaaa

SEQ ID NO: 578981 - RNA, 24 nt, Human
uacaguaacuuuaaaaaauauauu

SEQ ID NO: 578982 - RNA, 23 nt, Human
aaacccaggccagacaugcuuga

SEQ ID NO: 578983 - RNA, 18 nt, Human
agaaagaagguggaaugu

SEQ ID NO: 578984 - RNA, 19 nt, Human
augaagcauucauggaagg

SEQ ID NO: 578985 - RNA, 18 nt, Human
augggcauggacguggcu

SEQ ID NO: 578986 - RNA, 21 nt, Human
cagcccuccugcacucucuuc

SEQ ID NO: 578987 - RNA, 19 nt, Human
ccaggccauagaccaccag

SEQ ID NO: 578988 - RNA, 19 nt, Human
cccacagaacacagggguc

SEQ ID NO: 578989 - RNA, 21 nt, Human
cccuccugcacucucuucuca

SEQ ID NO: 578990 - RNA, 19 nt, Human
ccuccugcacucucuucuc

SEQ ID NO: 578991 - RNA, 24 nt, Human
ccucuuuuuuugaaaacccaggcc

SEQ ID NO: 578992 - RNA, 20 nt, Human
ccuugcacagggaggcccuc

SEQ ID NO: 578993 - RNA, 19 nt, Human
cgcccuugaaccaauggcu

SEQ ID NO: 578994 - RNA, 18 nt, Human
cugcacucucuucucauc

SEQ ID NO: 578995 - RNA, 21 nt, Human
cuggucccucugggaugaagc

SEQ ID NO: 578996 - RNA, 23 nt, Human
cuugcaucucgcugucagcugga

SEQ ID NO: 578997 - RNA, 20 nt, Human
gaacacugaaagacccucau

SEQ ID NO: 578998 - RNA, 18 nt, Human
gaccaccaggucaugagg

SEQ ID NO: 578999 - RNA, 18 nt, Human
gcacggaaugggcaugga

SEQ ID NO: 579000 - RNA, 19 nt, Human
gcccuccugcacucucuuc

SEQ ID NO: 579001 - RNA, 19 nt, Human
gcucugcucucugucccca

SEQ ID NO: 579002 - RNA, 24 nt, Human
gggagguugcaaagagcccauggc

SEQ ID NO: 579003 - RNA, 18 nt, Human
uaaacaggaacacugaaa

SEQ ID NO: 579004 - RNA, 23 nt, Human
ucacccacagaacacagggguug

SEQ ID NO: 579005 - RNA, 21 nt, Human
ucaugaggaucccucuuuuuu

SEQ ID NO: 579006 - RNA, 19 nt, Human
uccauggcccccagcccuc

SEQ ID NO: 579007 - RNA, 24 nt, Human
ucccucuuuuuuugaaaacccagg

SEQ ID NO: 579008 - RNA, 19 nt, Human
ucccuugcacagggaggcc

SEQ ID NO: 579009 - RNA, 23 nt, Human
ucucaggaguguucuguuaauau

SEQ ID NO: 579010 - RNA, 23 nt, Human
ugaaagacccucaucuugaccca

SEQ ID NO: 579011 - RNA, 23 nt, Human
ugagccuugggccugaggacuga

SEQ ID NO: 579012 - RNA, 18 nt, Human
ugaggcccgagugugcuc

SEQ ID NO: 579013 - RNA, 19 nt, Human
ugcucugcucucugucccc

SEQ ID NO: 579014 - RNA, 20 nt, Human
uggcagcaucuuugaagggc

SEQ ID NO: 579015 - RNA, 22 nt, Human
uggcccccagcccuccugcacu

SEQ ID NO: 579016 - RNA, 21 nt, Human
ugggagggaugaggcccgagu

SEQ ID NO: 579017 - RNA, 20 nt, Human
ugggaugaagcauucaugga

SEQ ID NO: 579018 - RNA, 23 nt, Human
uguaauaacucuagggcgaacac

SEQ ID NO: 579019 - RNA, 20 nt, Human
uucaggguaaggagagcuga

SEQ ID NO: 579020 - RNA, 19 nt, Human
uuccagucugguuaguggg

SEQ ID NO: 579021 - RNA, 20 nt, Human
uuccuccauggcccccagcc

SEQ ID NO: 579022 - RNA, 19 nt, Human
uugaagggcuagaaagaag

SEQ ID NO: 579023 - RNA, 19 nt, Human
uugcacagggaggcccucu

SEQ ID NO: 579024 - RNA, 22 nt, Human
uuggcagugauaaagaaguucc

SEQ ID NO: 579025 - RNA, 22 nt, Human
uugugcuauuucuucuucaacu

SEQ ID NO: 579026 - RNA, 21 nt, Human
aaaacccaccuggcauuaccc

SEQ ID NO: 579027 - RNA, 21 nt, Human
acaaacacuuugggucuuucc

SEQ ID NO: 579028 - RNA, 19 nt, Human
acagggggaaggaagugag

SEQ ID NO: 579029 - RNA, 21 nt, Human
acauacauggauccaccaaca

SEQ ID NO: 579030 - RNA, 22 nt, Human
accacaaggagcagagacggca

SEQ ID NO: 579031 - RNA, 22 nt, Human
acggcacccgacaacggagaag

SEQ ID NO: 579032 - RNA, 22 nt, Human
agaggcuggaagccuaagagcu

SEQ ID NO: 579033 - RNA, 18 nt, Human
aggagcagagacggcacc

SEQ ID NO: 579034 - RNA, 23 nt, Human
agguuuuguagcaucuucugagc

SEQ ID NO: 579035 - RNA, 22 nt, Human
caaaaagguaaacagaagcuga

SEQ ID NO: 579036 - RNA, 19 nt, Human
caauaaccacaaggagcag

SEQ ID NO: 579037 - RNA, 23 nt, Human
caccuucacucucaaaggaaagg

SEQ ID NO: 579038 - RNA, 20 nt, Human
cagagacggcacccgacaac

SEQ ID NO: 579039 - RNA, 23 nt, Human
cagcaggccgcugugcuggacac

SEQ ID NO: 579040 - RNA, 23 nt, Human
caggagacgcgcgcagggaucac

SEQ ID NO: 579041 - RNA, 20 nt, Human
cagggcugagcaauaaccac

SEQ ID NO: 579042 - RNA, 18 nt, Human
cagggggaaggaagugag

SEQ ID NO: 579043 - RNA, 21 nt, Human
caucaguccuucuguguucuc

SEQ ID NO: 579044 - RNA, 22 nt, Human
ccacaaggagcagagacggcac

SEQ ID NO: 579045 - RNA, 19 nt, Human
cccagccauggaacacaug

SEQ ID NO: 579046 - RNA, 24 nt, Human
ccccuggggaugccagggcugagc

SEQ ID NO: 579047 - RNA, 18 nt, Human
cccgaauucucuccccuu

SEQ ID NO: 579048 - RNA, 20 nt, Human
cccuggggaugccagggcug

SEQ ID NO: 579049 - RNA, 18 nt, Human
ccucacugcugccauucc

SEQ ID NO: 579050 - RNA, 25 nt, Human
ccucccaucuaccucacugcugcca

SEQ ID NO: 579051 - RNA, 26 nt, Human
cggcacccgacaacggagaagagaug

SEQ ID NO: 579052 - RNA, 19 nt, Human
cuaauauuaauaauaccua

SEQ ID NO: 579053 - RNA, 18 nt, Human
cucagaguccagcaggcc

SEQ ID NO: 579054 - RNA, 21 nt, Human
cuccacccaccuucacucuca

SEQ ID NO: 579055 - RNA, 18 nt, Human
cugcuggaagcugagacc

SEQ ID NO: 579056 - RNA, 24 nt, Human
cuguguggcuccuaccaccccaaa

SEQ ID NO: 579057 - RNA, 19 nt, Human
gaaaccaugauuccuucuc

SEQ ID NO: 579058 - RNA, 23 nt, Human
gacccagcucucaaaacccaccu

SEQ ID NO: 579059 - RNA, 19 nt, Human
gccugugaguccugagaug

SEQ ID NO: 579060 - RNA, 23 nt, Human
gcgcagcgcggcgcacugacccg

SEQ ID NO: 579061 - RNA, 18 nt, Human
ggaaggaagugagugagg

SEQ ID NO: 579062 - RNA, 21 nt, Human
ggagaagagaugucugcagua

SEQ ID NO: 579063 - RNA, 18 nt, Human
ggcugagcaauaaccaca

SEQ ID NO: 579064 - RNA, 19 nt, Human
gggaaggaagugagugagg

SEQ ID NO: 579065 - RNA, 21 nt, Human
gggaaggaagugagugagggg

SEQ ID NO: 579066 - RNA, 21 nt, Human
guagaggcuggaagccuaaga

SEQ ID NO: 579067 - RNA, 22 nt, Human
guagaggcuggaagccuaagag

SEQ ID NO: 579068 - RNA, 24 nt, Human
gucaacuccacccaccuucacucu

SEQ ID NO: 579069 - RNA, 18 nt, Human
guggcuccuaccacccca

SEQ ID NO: 579070 - RNA, 23 nt, Human
uaaacagaagcugaugugggugg

SEQ ID NO: 579071 - RNA, 21 nt, Human
uaaccacaaggagcagagacg

SEQ ID NO: 579072 - RNA, 20 nt, Human
uaccucacugcugccauucc

SEQ ID NO: 579073 - RNA, 20 nt, Human
uacuucauuccuauaguaga

SEQ ID NO: 579074 - RNA, 23 nt, Human
uagaucccuuccugcuaauauua

SEQ ID NO: 579075 - RNA, 21 nt, Human
ucagaauuuccugccagccag

SEQ ID NO: 579076 - RNA, 22 nt, Human
ucagaguccagcaggccgcugu

SEQ ID NO: 579077 - RNA, 20 nt, Human
ucauuauuugaugccaaaaa

SEQ ID NO: 579078 - RNA, 21 nt, Human
uccaccaacauacaucagucc

SEQ ID NO: 579079 - RNA, 23 nt, Human
uccacccaccuucacucucaaag

SEQ ID NO: 579080 - RNA, 21 nt, Human
uccagauguguuuauuaggcu

SEQ ID NO: 579081 - RNA, 20 nt, Human
uccccuggggaugccagggc

SEQ ID NO: 579082 - RNA, 20 nt, Human
ucucaaaacccaccuggcau

SEQ ID NO: 579083 - RNA, 20 nt, Human
ucucacaguugcuacuggcu

SEQ ID NO: 579084 - RNA, 19 nt, Human
ucucagaguccagcaggcc

SEQ ID NO: 579085 - RNA, 21 nt, Human
ucucuccugcaugguagaggc

SEQ ID NO: 579086 - RNA, 22 nt, Human
ucucuggucaacuccacccacc

SEQ ID NO: 579087 - RNA, 20 nt, Human
ucugguuucccgaagauaag

SEQ ID NO: 579088 - RNA, 19 nt, Human
ucugugccuccugcaaguu

SEQ ID NO: 579089 - RNA, 21 nt, Human
ucuguguggcuccuaccaccc

SEQ ID NO: 579090 - RNA, 24 nt, Human
ugagaggcacuucuagaaaccaug

SEQ ID NO: 579091 - RNA, 21 nt, Human
ugagcaauaaccacaaggagc

SEQ ID NO: 579092 - RNA, 19 nt, Human
ugccuguagaaagauuucc

SEQ ID NO: 579093 - RNA, 23 nt, Human
ugcucugaucuuucccaguucuc

SEQ ID NO: 579094 - RNA, 25 nt, Human
ugcugccauuccccuggggaugcca

SEQ ID NO: 579095 - RNA, 18 nt, Human
uggaacacauguuggccu

SEQ ID NO: 579096 - RNA, 22 nt, Human
uggaagcugagaccaucagcag

SEQ ID NO: 579097 - RNA, 21 nt, Human
uggcagacaguaggcaugagg

SEQ ID NO: 579098 - RNA, 18 nt, Human
ugguagaggcuggaagcc

SEQ ID NO: 579099 - RNA, 22 nt, Human
ugguaggcaauucccagccaug

SEQ ID NO: 579100 - RNA, 19 nt, Human
ugugcuggacacauacaug

SEQ ID NO: 579101 - RNA, 24 nt, Human
uucccagccauggaacacauguug

SEQ ID NO: 579102 - RNA, 21 nt, Human
uucccgaagauaagaggcaag

SEQ ID NO: 579103 - RNA, 19 nt, Human
uucuagaaaccaugauucc

SEQ ID NO: 579104 - RNA, 21 nt, Human
uugaugccaaaaagguaaaca

SEQ ID NO: 579105 - RNA, 24 nt, Human
aagcauggcuguggccacccauac

SEQ ID NO: 579106 - RNA, 19 nt, Human
aagguuuuuaaauuaauag

SEQ ID NO: 579107 - RNA, 19 nt, Human
aaucucagaaagcauaugu

SEQ ID NO: 579108 - RNA, 19 nt, Human
acccauacacauacacaca

SEQ ID NO: 579109 - RNA, 22 nt, Human
auacacauacacacaccucaua

SEQ ID NO: 579110 - RNA, 20 nt, Human
auagagcaacaggaugcaaa

SEQ ID NO: 579111 - RNA, 26 nt, Human
cacacucaugacaaacuccauaaaaa

SEQ ID NO: 579112 - RNA, 19 nt, Human
ccaccacguggaagagcuc

SEQ ID NO: 579113 - RNA, 25 nt, Human
ccacccauacacauacacacaccuc

SEQ ID NO: 579114 - RNA, 22 nt, Human
cccauacacauacacacaccuc

SEQ ID NO: 579115 - RNA, 23 nt, Human
cccauacacauacacacaccuca

SEQ ID NO: 579116 - RNA, 24 nt, Human
cccauacacauacacacaccucau

SEQ ID NO: 579117 - RNA, 23 nt, Human
cuaugccuguggguguauauacc

SEQ ID NO: 579118 - RNA, 24 nt, Human
cucacgagcagcaaauacgaucac

SEQ ID NO: 579119 - RNA, 25 nt, Human
cuuugaaugaugcagauguuggccu

SEQ ID NO: 579120 - RNA, 24 nt, Human
gagcaacaggaugcaaauacuggg

SEQ ID NO: 579121 - RNA, 18 nt, Human
gaucacacucaugacaaa

SEQ ID NO: 579122 - RNA, 19 nt, Human
ggcuguggccacccauaca

SEQ ID NO: 579123 - RNA, 25 nt, Human
ucaaaucaaauuaaaaucuaggaag

SEQ ID NO: 579124 - RNA, 22 nt, Human
ugcauagauuccaccacgugga

SEQ ID NO: 579125 - RNA, 25 nt, Human
uggaugguuuuccagaauuaaugag

SEQ ID NO: 579126 - RNA, 22 nt, Human
uggccuuuccccaaaauaaaag

SEQ ID NO: 579127 - RNA, 24 nt, Human
uguggccacccauacacauacaca

SEQ ID NO: 579128 - RNA, 22 nt, Human
uugcauagauuccaccacgugg

SEQ ID NO: 579129 - RNA, 22 nt, Human
aaaaaguaaagugagaagaagu

SEQ ID NO: 579130 - RNA, 18 nt, Human
aaaacauucaggcaaaug

SEQ ID NO: 579131 - RNA, 22 nt, Human
aaacauucaggcaaaugaaaug

SEQ ID NO: 579132 - RNA, 19 nt, Human
aaccaaauacuuucauggg

SEQ ID NO: 579133 - RNA, 20 nt, Human
aaucauggcugaaagauccc

SEQ ID NO: 579134 - RNA, 20 nt, Human
acauuuuauauacgcacaaa

SEQ ID NO: 579135 - RNA, 23 nt, Human
accuuggguaccacugaaacagc

SEQ ID NO: 579136 - RNA, 22 nt, Human
agaggaacaaaagauacauuug

SEQ ID NO: 579137 - RNA, 23 nt, Human
agagguuucccaaaaauucacau

SEQ ID NO: 579138 - RNA, 19 nt, Human
aucugaaaggagugugggg

SEQ ID NO: 579139 - RNA, 20 nt, Human
augcauuucagaaggacacc

SEQ ID NO: 579140 - RNA, 23 nt, Human
auucauuucuccccuacccccac

SEQ ID NO: 579141 - RNA, 21 nt, Human
caaaaaguaaagugagaagaa

SEQ ID NO: 579142 - RNA, 18 nt, Human
cagaaggacaccuugggu

SEQ ID NO: 579143 - RNA, 22 nt, Human
cagcaccgagagguuucccaaa

SEQ ID NO: 579144 - RNA, 22 nt, Human
cccaugcaugagggugugugca

SEQ ID NO: 579145 - RNA, 24 nt, Human
ccccuacccccaccugccuuucug

SEQ ID NO: 579146 - RNA, 23 nt, Human
cccugcuguaggcuggcauccag

SEQ ID NO: 579147 - RNA, 19 nt, Human
cgcaacuaggacacccaug

SEQ ID NO: 579148 - RNA, 22 nt, Human
cggaaauaacugaaucuuaaug

SEQ ID NO: 579149 - RNA, 19 nt, Human
cuccuggcuguucucaagg

SEQ ID NO: 579150 - RNA, 22 nt, Human
cugcuguaggcuggcauccagc

SEQ ID NO: 579151 - RNA, 21 nt, Human
cuuuucgcugggcugacccuc

SEQ ID NO: 579152 - RNA, 25 nt, Human
gaaaugauuauaauaauuagguaag

SEQ ID NO: 579153 - RNA, 23 nt, Human
gaaugaugaggucugcaggagac

SEQ ID NO: 579154 - RNA, 20 nt, Human
gcaucagaaggcaaccaaau

SEQ ID NO: 579155 - RNA, 19 nt, Human
gcauccagcaccgagaggu

SEQ ID NO: 579156 - RNA, 19 nt, Human
gcggaaauaacugaaucuu

SEQ ID NO: 579157 - RNA, 22 nt, Human
gggugcugcuguccaaagucgg

SEQ ID NO: 579158 - RNA, 22 nt, Human
gugugugcacauguguguaugu

SEQ ID NO: 579159 - RNA, 25 nt, Human
uaaaaacugcacaaaguauguguca

SEQ ID NO: 579160 - RNA, 18 nt, Human
uaagaggaacaaaagaua

SEQ ID NO: 579161 - RNA, 24 nt, Human
uacagagggugccacagggcaugc

SEQ ID NO: 579162 - RNA, 21 nt, Human
uacuuucaugggacccucauu

SEQ ID NO: 579163 - RNA, 21 nt, Human
uaggacacccaugcaugaggg

SEQ ID NO: 579164 - RNA, 21 nt, Human
uauuguauguagcuuauuuua

SEQ ID NO: 579165 - RNA, 25 nt, Human
ucaugcuuccuccugagacauucuu

SEQ ID NO: 579166 - RNA, 18 nt, Human
uccaagugggcuccuggc

SEQ ID NO: 579167 - RNA, 22 nt, Human
ucgcugggcugacccucuacgc

SEQ ID NO: 579168 - RNA, 25 nt, Human
ucucccaguuuuaacuggacaaaca

SEQ ID NO: 579169 - RNA, 20 nt, Human
ugaaacagccauaacauugg

SEQ ID NO: 579170 - RNA, 20 nt, Human
ugaaaggaguguggggcugg

SEQ ID NO: 579171 - RNA, 22 nt, Human
ugaaaggaguguggggcugggg

SEQ ID NO: 579172 - RNA, 24 nt, Human
ugaaggaggaggaaguauacagag

SEQ ID NO: 579173 - RNA, 23 nt, Human
ugagugaucucuagggaccuucc

SEQ ID NO: 579174 - RNA, 22 nt, Human
ugcuguaggcuggcauccagca

SEQ ID NO: 579175 - RNA, 18 nt, Human
uggcaucagaaggcaacc

SEQ ID NO: 579176 - RNA, 20 nt, Human
ugggugcugcuguccaaagu

SEQ ID NO: 579177 - RNA, 19 nt, Human
ugucaacaaaauacagucu

SEQ ID NO: 579178 - RNA, 26 nt, Human
ugugcacauguguguaugucugugca

SEQ ID NO: 579179 - RNA, 19 nt, Human
ugugugcacauguguguau

SEQ ID NO: 579180 - RNA, 20 nt, Human
ugugugcacauguguguaug

SEQ ID NO: 579181 - RNA, 22 nt, Human
uguguguaugucugugcacgug

SEQ ID NO: 579182 - RNA, 19 nt, Human
uucuccccuacccccaccu

SEQ ID NO: 579183 - RNA, 20 nt, Human
uugcauacauuuuauauacg

SEQ ID NO: 579184 - RNA, 22 nt, Human
uuguauguagcuuauuuuacuu

SEQ ID NO: 579185 - RNA, 19 nt, Human
uuguuaucuccuauuucag

SEQ ID NO: 579186 - RNA, 24 nt, Human
uuucacagucuugggguuguugcu

SEQ ID NO: 579187 - RNA, 22 nt, Human
uuucuccccuacccccaccugc

SEQ ID NO: 579188 - RNA, 23 nt, Human
aaaaagaauguuucugggagcac

SEQ ID NO: 579189 - RNA, 23 nt, Human
aagaacacagacagguugaagau

SEQ ID NO: 579190 - RNA, 26 nt, Human
aagcagaggcaggcaagucaguuggg

SEQ ID NO: 579191 - RNA, 21 nt, Human
aauggaaaaaccaagucuaaa

SEQ ID NO: 579192 - RNA, 19 nt, Human
aauucaguuuaaaaaguug

SEQ ID NO: 579193 - RNA, 20 nt, Human
acccgcuccccuccauuccu

SEQ ID NO: 579194 - RNA, 18 nt, Human
agagaggcuggggccugg

SEQ ID NO: 579195 - RNA, 20 nt, Human
agauaaaaggacauucaagu

SEQ ID NO: 579196 - RNA, 24 nt, Human
agcacaugaacguucucaagaaca

SEQ ID NO: 579197 - RNA, 22 nt, Human
agcaugaaggggaauaggcagg

SEQ ID NO: 579198 - RNA, 18 nt, Human
aggaggcucucaggaggc

SEQ ID NO: 579199 - RNA, 25 nt, Human
aggcagacaaaaagaauguuucugg

SEQ ID NO: 579200 - RNA, 27 nt, Human
aggcaggcaagucaguugggggccagg

SEQ ID NO: 579201 - RNA, 25 nt, Human
aggucuguggagggcagagaagagu

SEQ ID NO: 579202 - RNA, 21 nt, Human
agguugaagaugaccaugacc

SEQ ID NO: 579203 - RNA, 24 nt, Human
agucaguugggggccagggaaggg

SEQ ID NO: 579204 - RNA, 21 nt, Human
auggcagggaggccagagagg

SEQ ID NO: 579205 - RNA, 18 nt, Human
caaaagcacacaacagag

SEQ ID NO: 579206 - RNA, 19 nt, Human
caaaagcacacaacagagu

SEQ ID NO: 579207 - RNA, 18 nt, Human
caaggacagacuccugga

SEQ ID NO: 579208 - RNA, 21 nt, Human
cacaugaacguucucaagaac

SEQ ID NO: 579209 - RNA, 19 nt, Human
cagaaagacagauguggga

SEQ ID NO: 579210 - RNA, 19 nt, Human
cagaaggacaaguaaaaug

SEQ ID NO: 579211 - RNA, 19 nt, Human
cagauaaaaggacauucaa

SEQ ID NO: 579212 - RNA, 24 nt, Human
cagcacggaggucuguggagggca

SEQ ID NO: 579213 - RNA, 26 nt, Human
cagccaagcccuuccguuaggaaguc

SEQ ID NO: 579214 - RNA, 21 nt, Human
caguugggggccagggaaggg

SEQ ID NO: 579215 - RNA, 21 nt, Human
ccagccccucuucucucaguu

SEQ ID NO: 579216 - RNA, 27 nt, Human
ccagccccucuucucucaguuuccuua

SEQ ID NO: 579217 - RNA, 21 nt, Human
ccucacuguaacuggaacauc

SEQ ID NO: 579218 - RNA, 19 nt, Human
ccucuauuacccgcucccc

SEQ ID NO: 579219 - RNA, 22 nt, Human
ccucucuauggaguuacugcca

SEQ ID NO: 579220 - RNA, 23 nt, Human
cgcacuccagccccucuucucuc

SEQ ID NO: 579221 - RNA, 22 nt, Human
cggguccaguucuggauggcuu

SEQ ID NO: 579222 - RNA, 26 nt, Human
cguuaggaaguccuggcagcacggag

SEQ ID NO: 579223 - RNA, 19 nt, Human
cuaaacucagaaagacaga

SEQ ID NO: 579224 - RNA, 19 nt, Human
cuccuggauuuccagaagc

SEQ ID NO: 579225 - RNA, 18 nt, Human
cuggaacaucaauuuucc

SEQ ID NO: 579226 - RNA, 19 nt, Human
cuuaggauccucuauuacc

SEQ ID NO: 579227 - RNA, 25 nt, Human
cuuuaugcugagauuuauucuccuc

SEQ ID NO: 579228 - RNA, 18 nt, Human
gacacaaaauauacaaua

SEQ ID NO: 579229 - RNA, 21 nt, Human
gaccaggaaaggcagacaaaa

SEQ ID NO: 579230 - RNA, 20 nt, Human
gcagcacggaggucugugga

SEQ ID NO: 579231 - RNA, 24 nt, Human
ggaaaaaccaagucuaaacucaga

SEQ ID NO: 579232 - RNA, 23 nt, Human
ggacaaguaaaauguuagccaag

SEQ ID NO: 579233 - RNA, 20 nt, Human
ggcagggaggccagagaggc

SEQ ID NO: 579234 - RNA, 27 nt, Human
gggaauaggcagggacagccgguaccc

SEQ ID NO: 579235 - RNA, 19 nt, Human
ggucccucggguccaguuc

SEQ ID NO: 579236 - RNA, 18 nt, Human
ggucuguggagggcagag

SEQ ID NO: 579237 - RNA, 19 nt, Human
gugaagcacugcugaaggc

SEQ ID NO: 579238 - RNA, 22 nt, Human
uaaacaaugaugguagaucaga

SEQ ID NO: 579239 - RNA, 18 nt, Human
uagauuccagagaaggga

SEQ ID NO: 579240 - RNA, 19 nt, Human
uagccaaggcaaugcacag

SEQ ID NO: 579241 - RNA, 26 nt, Human
uaguggguccuuccuccuaccaccau

SEQ ID NO: 579242 - RNA, 25 nt, Human
uauuuuucauauuccuguuuguaaa

SEQ ID NO: 579243 - RNA, 22 nt, Human
ucaaaagcacacaacagaguac

SEQ ID NO: 579244 - RNA, 19 nt, Human
ucagaaagacagauguggg

SEQ ID NO: 579245 - RNA, 22 nt, Human
ucagaaagacagaugugggaca

SEQ ID NO: 579246 - RNA, 21 nt, Human
ucagaaggacaaguaaaaugu

SEQ ID NO: 579247 - RNA, 19 nt, Human
ucaguugggggccagggaa

SEQ ID NO: 579248 - RNA, 21 nt, Human
uccagagaagggaggcuagaa

SEQ ID NO: 579249 - RNA, 18 nt, Human
ucuagagccagcaugaag

SEQ ID NO: 579250 - RNA, 21 nt, Human
ucuauuacccgcuccccucca

SEQ ID NO: 579251 - RNA, 23 nt, Human
ucugugagcccugcaaagucaga

SEQ ID NO: 579252 - RNA, 22 nt, Human
ugacacagucaaauguggccag

SEQ ID NO: 579253 - RNA, 20 nt, Human
ugaccaaggacagacuccug

SEQ ID NO: 579254 - RNA, 19 nt, Human
ugagaaaagagagaaguga

SEQ ID NO: 579255 - RNA, 21 nt, Human
ugagcccugcaaagucagaga

SEQ ID NO: 579256 - RNA, 18 nt, Human
ugagguaggacacaaaau

SEQ ID NO: 579257 - RNA, 19 nt, Human
uggaacaucaauuuucccc

SEQ ID NO: 579258 - RNA, 25 nt, Human
uggcagggaggccagagaggcugac

SEQ ID NO: 579259 - RNA, 28 nt, Human
ugggagcacaugaacguucucaagaaca

SEQ ID NO: 579260 - RNA, 19 nt, Human
uguggccagaccaggaaag

SEQ ID NO: 579261 - RNA, 26 nt, Human
uuaggauccucuauuacccgcucccc

SEQ ID NO: 579262 - RNA, 22 nt, Human
uuaguggguccuuccuccuacc

SEQ ID NO: 579263 - RNA, 24 nt, Human
uuccagaagcugcuugaugauucu

SEQ ID NO: 579264 - RNA, 25 nt, Human
aaacaaaacauuuuuuguccuuagu

SEQ ID NO: 579265 - RNA, 21 nt, Human
acaucuaucuauuuuagcaac

SEQ ID NO: 579266 - RNA, 21 nt, Human
agcacccgggccgaaucccac

SEQ ID NO: 579267 - RNA, 25 nt, Human
agcuaaacugaaacucuuuaucccc

SEQ ID NO: 579268 - RNA, 20 nt, Human
auaauacuuuaacuguuaac

SEQ ID NO: 579269 - RNA, 22 nt, Human
augaaaagcaaucuucauuuua

SEQ ID NO: 579270 - RNA, 21 nt, Human
auuaccgaaaaacaauuuugc

SEQ ID NO: 579271 - RNA, 23 nt, Human
auuuuuuuucuuuuaccauuuag

SEQ ID NO: 579272 - RNA, 19 nt, Human
caaaaggagcuaaacugaa

SEQ ID NO: 579273 - RNA, 18 nt, Human
caaccgcaggagcagcag

SEQ ID NO: 579274 - RNA, 20 nt, Human
caccaaccgcaggagcagcg

SEQ ID NO: 579275 - RNA, 24 nt, Human
cacccgggccgaaucccacguggc

SEQ ID NO: 579276 - RNA, 18 nt, Human
caccuacauugugcucuu

SEQ ID NO: 579277 - RNA, 23 nt, Human
cagcagcucacaagagcacccgg

SEQ ID NO: 579278 - RNA, 23 nt, Human
caugacacugaaugauauaucaa

SEQ ID NO: 579279 - RNA, 28 nt, Human
ccucccagccugaaauucaguccgagga

SEQ ID NO: 579280 - RNA, 19 nt, Human
cucuccacaaauaaaaccu

SEQ ID NO: 579281 - RNA, 27 nt, Human
cuuacauuuaaaaaguuuuuugaggaa

SEQ ID NO: 579282 - RNA, 22 nt, Human
gaaacucuuuauccccuuuguc

SEQ ID NO: 579283 - RNA, 20 nt, Human
gagcagcagcucacaagagc

SEQ ID NO: 579284 - RNA, 21 nt, Human
gcaggagcagcagcucacaag

SEQ ID NO: 579285 - RNA, 21 nt, Human
gcugauauccaguuaaccuaa

SEQ ID NO: 579286 - RNA, 20 nt, Human
ggagcagcagcucacaagag

SEQ ID NO: 579287 - RNA, 24 nt, Human
uaauauacaaucaaaaggagcuaa

SEQ ID NO: 579288 - RNA, 22 nt, Human
uacacaagaaaaacaaaacauu

SEQ ID NO: 579289 - RNA, 18 nt, Human
uagaagaaaaaguagcau

SEQ ID NO: 579290 - RNA, 23 nt, Human
ucccuuauucuguaaaaaaggaa

SEQ ID NO: 579291 - RNA, 22 nt, Human
uguuuuucaugacacugaauga

SEQ ID NO: 579292 - RNA, 23 nt, Human
uuauauugcucccucccagccug

SEQ ID NO: 579293 - RNA, 19 nt, Human
uucaaaagauaaauaauaa

SEQ ID NO: 579294 - RNA, 21 nt, Human
uucaaaagauaaauaauaauc

SEQ ID NO: 579295 - RNA, 18 nt, Human
uucacaauaaaaaagcaa

SEQ ID NO: 579296 - RNA, 23 nt, Human
uucagaaguaaaaaaaguuauaa

SEQ ID NO: 579297 - RNA, 24 nt, Human
aaaccccaucucuuaauuguucca

SEQ ID NO: 579298 - RNA, 19 nt, Human
aacacuuugggaggcugag

SEQ ID NO: 579299 - RNA, 19 nt, Human
aacaugacgaaaccccauc

SEQ ID NO: 579300 - RNA, 20 nt, Human
aacaugacgaaaccccaucu

SEQ ID NO: 579301 - RNA, 21 nt, Human
aacaugacgaaaccccaucuc

SEQ ID NO: 579302 - RNA, 27 nt, Human
agaaagcuuugaaauauuucuuuuuga

SEQ ID NO: 579303 - RNA, 18 nt, Human
agacaggcggaucacuug

SEQ ID NO: 579304 - RNA, 26 nt, Human
agacaggcggaucacuuguagccagg

SEQ ID NO: 579305 - RNA, 26 nt, Human
agccaggaguucgagaccagucuggc

SEQ ID NO: 579306 - RNA, 23 nt, Human
aggaguucgagaccagucuggcc

SEQ ID NO: 579307 - RNA, 24 nt, Human
aggcacaguggcucaugccuguaa

SEQ ID NO: 579308 - RNA, 24 nt, Human
agucuggccaacaugacgaaaccc

SEQ ID NO: 579309 - RNA, 23 nt, Human
aguggcucaugccuguaauccca

SEQ ID NO: 579310 - RNA, 23 nt, Human
aguggugcuuucuuuuccugcug

SEQ ID NO: 579311 - RNA, 20 nt, Human
auaguauuauuuacuugguc

SEQ ID NO: 579312 - RNA, 24 nt, Human
aucacuuguagccaggaguucgag

SEQ ID NO: 579313 - RNA, 19 nt, Human
augccuguaaucccaacac

SEQ ID NO: 579314 - RNA, 18 nt, Human
caaaaucguaaguggugg

SEQ ID NO: 579315 - RNA, 20 nt, Human
caacacuuugggaggcugag

SEQ ID NO: 579316 - RNA, 28 nt, Human
caacacuuugggaggcugagacaggcgg

SEQ ID NO: 579317 - RNA, 24 nt, Human
caacaugacgaaaccccaucucuu

SEQ ID NO: 579318 - RNA, 26 nt, Human
caaccaaguucuucuaacagaaaauu

SEQ ID NO: 579319 - RNA, 21 nt, Human
caagcgacgcuuaccuccucc

SEQ ID NO: 579320 - RNA, 18 nt, Human
caauuuucagauagaacu

SEQ ID NO: 579321 - RNA, 20 nt, Human
cacugugcuuauuacucuuc

SEQ ID NO: 579322 - RNA, 21 nt, Human
cagccaaaaaauuuuccuguu

SEQ ID NO: 579323 - RNA, 24 nt, Human
caggcggaucacuuguagccagga

SEQ ID NO: 579324 - RNA, 18 nt, Human
cagggagagacugccgca

SEQ ID NO: 579325 - RNA, 24 nt, Human
caugccuguaaucccaacacuuug

SEQ ID NO: 579326 - RNA, 20 nt, Human
ccagcccucaggccaggcac

SEQ ID NO: 579327 - RNA, 26 nt, Human
ccaggaguucgagaccagucgaguuc

SEQ ID NO: 579328 - RNA, 18 nt, Human
ccaguuuucuguuuuugu

SEQ ID NO: 579329 - RNA, 24 nt, Human
cccgcggcggccaggcgccaagcg

SEQ ID NO: 579330 - RNA, 23 nt, Human
ccuaaguuuguugugcucaaucc

SEQ ID NO: 579331 - RNA, 22 nt, Human
ccuguaaucccaacacuuuggg

SEQ ID NO: 579332 - RNA, 21 nt, Human
cgagaccagucuggccaacau

SEQ ID NO: 579333 - RNA, 24 nt, Human
cggaucacuuguagccaggaguuc

SEQ ID NO: 579334 - RNA, 24 nt, Human
cucaugccuguaaucccaacacuu

SEQ ID NO: 579335 - RNA, 19 nt, Human
cuccgcgcggagagagggc

SEQ ID NO: 579336 - RNA, 23 nt, Human
cucuauaauuacauuacugugcc

SEQ ID NO: 579337 - RNA, 19 nt, Human
cugaaucuuuuguuugacc

SEQ ID NO: 579338 - RNA, 23 nt, Human
cuggccaacaugacgaaacccca

SEQ ID NO: 579339 - RNA, 20 nt, Human
cuguuguccucucacuauca

SEQ ID NO: 579340 - RNA, 23 nt, Human
cuuggaggagaaagcuuugaaau

SEQ ID NO: 579341 - RNA, 20 nt, Human
cuugguucagaguuggaagu

SEQ ID NO: 579342 - RNA, 23 nt, Human
cuuguagccaggaguucgagacc

SEQ ID NO: 579343 - RNA, 21 nt, Human
cuuuuccugcuggcacugaau

SEQ ID NO: 579344 - RNA, 20 nt, Human
cuuuuuggauuuagugguug

SEQ ID NO: 579345 - RNA, 20 nt, Human
gaagucccuucuguuguccu

SEQ ID NO: 579346 - RNA, 19 nt, Human
gagggccgcacgccgccgg

SEQ ID NO: 579347 - RNA, 24 nt, Human
gaucacuuguagccaggaguucga

SEQ ID NO: 579348 - RNA, 18 nt, Human
gcccacgguguauccugc

SEQ ID NO: 579349 - RNA, 22 nt, Human
gcuuucuuuuccugcuggcacu

SEQ ID NO: 579350 - RNA, 19 nt, Human
ggaucacuuguagccagga

SEQ ID NO: 579351 - RNA, 23 nt, Human
ggaucacuuguagccaggaguuc

SEQ ID NO: 579352 - RNA, 19 nt, Human
uaacagaaaauucacuuaa

SEQ ID NO: 579353 - RNA, 22 nt, Human
uaacaguuugaaauauucuugg

SEQ ID NO: 579354 - RNA, 21 nt, Human
uaaguccauuuguaacaguuu

SEQ ID NO: 579355 - RNA, 18 nt, Human
uaaguggugguggcucuu

SEQ ID NO: 579356 - RNA, 23 nt, Human
uagcaaccaaguucuucuaacag

SEQ ID NO: 579357 - RNA, 21 nt, Human
uagcuccuggugacucacugu

SEQ ID NO: 579358 - RNA, 21 nt, Human
uauuucuuuuugaccuccgag

SEQ ID NO: 579359 - RNA, 19 nt, Human
ucacugugcuuauuacucu

SEQ ID NO: 579360 - RNA, 21 nt, Human
ucagcagaaucaacgcuuucu

SEQ ID NO: 579361 - RNA, 25 nt, Human
ucaggccaggcacaguggcucaugc

SEQ ID NO: 579362 - RNA, 22 nt, Human
uccacagaaaccuuggaugaag

SEQ ID NO: 579363 - RNA, 18 nt, Human
ucccuucuguuguccucu

SEQ ID NO: 579364 - RNA, 21 nt, Human
ucccuucuguuguccucucac

SEQ ID NO: 579365 - RNA, 22 nt, Human
ucuguagcuccuggugacucac

SEQ ID NO: 579366 - RNA, 24 nt, Human
ucuguuguccucucacuaucagaa

SEQ ID NO: 579367 - RNA, 22 nt, Human
ugaaauauucuuggaggagaaa

SEQ ID NO: 579368 - RNA, 26 nt, Human
ugagacaggcggaucacuuguagcca

SEQ ID NO: 579369 - RNA, 19 nt, Human
ugcaucauuuuucauugau

SEQ ID NO: 579370 - RNA, 18 nt, Human
ugcccgcggcggccaggc

SEQ ID NO: 579371 - RNA, 23 nt, Human
ugccuguaaucccaacacuuugg

SEQ ID NO: 579372 - RNA, 18 nt, Human
ugcucuuuccaauuuucu

SEQ ID NO: 579373 - RNA, 18 nt, Human
uggaaauccaaacauaaa

SEQ ID NO: 579374 - RNA, 22 nt, Human
uggaaccuggaagaccugucuc

SEQ ID NO: 579375 - RNA, 24 nt, Human
uggcucaugccuguaaucccaaca

SEQ ID NO: 579376 - RNA, 18 nt, Human
ugggaaccuuaauguugg

SEQ ID NO: 579377 - RNA, 24 nt, Human
ugggaggcugagacaggcggauca

SEQ ID NO: 579378 - RNA, 20 nt, Human
uguagccaggaguucgagac

SEQ ID NO: 579379 - RNA, 23 nt, Human
ugucacggacagaucuuccaguu

SEQ ID NO: 579380 - RNA, 23 nt, Human
uguggcacauguuuaauucugua

SEQ ID NO: 579381 - RNA, 18 nt, Human
uguucaucagcagaauca

SEQ ID NO: 579382 - RNA, 23 nt, Human
uguucuugguucagaguuggaag

SEQ ID NO: 579383 - RNA, 20 nt, Human
uguucuuuucaccagcccuc

SEQ ID NO: 579384 - RNA, 24 nt, Human
uguuuggucuuuucccuguucuuu

SEQ ID NO: 579385 - RNA, 24 nt, Human
uucaccagcccucaggccaggcac

SEQ ID NO: 579386 - RNA, 18 nt, Human
uuccugcuggcacugaau

SEQ ID NO: 579387 - RNA, 22 nt, Human
uucuuggaggagaaagcuuuga

SEQ ID NO: 579388 - RNA, 23 nt, Human
uucuuggaggagaaagcuuugaa

SEQ ID NO: 579389 - RNA, 25 nt, Human
uugggaggcugagacaggcggauca

SEQ ID NO: 579390 - RNA, 20 nt, Human
uuguccucucacuaucagaa

SEQ ID NO: 579391 - RNA, 24 nt, Human
uuuguaacaguuugaaauauucuu

SEQ ID NO: 579392 - RNA, 23 nt, Human
aacuuugacugaagaccuugcca

SEQ ID NO: 579393 - RNA, 20 nt, Human
aaugaagccucugccacaca

SEQ ID NO: 579394 - RNA, 24 nt, Human
caacaugcacaaaauauacaaaga

SEQ ID NO: 579395 - RNA, 22 nt, Human
cuaaaugaagccucugccacac

SEQ ID NO: 579396 - RNA, 20 nt, Human
cucuuuagcauggacucuga

SEQ ID NO: 579397 - RNA, 21 nt, Human
cugaugcuguguaggagugaa

SEQ ID NO: 579398 - RNA, 25 nt, Human
uaaauccuuggauguguuacaguuu

SEQ ID NO: 579399 - RNA, 26 nt, Human
uaaggauucucucaagaaugaaauuc

SEQ ID NO: 579400 - RNA, 20 nt, Human
uacacauuuugaugucuagu

SEQ ID NO: 579401 - RNA, 18 nt, Human
uagcauggacucugaugu

SEQ ID NO: 579402 - RNA, 19 nt, Human
ugacuccuuugcucuccuc

SEQ ID NO: 579403 - RNA, 24 nt, Human
ugacugaaaaccuugccacauuua

SEQ ID NO: 579404 - RNA, 23 nt, Human
ugccacacaguuagguguauaug

SEQ ID NO: 579405 - RNA, 25 nt, Human
uguaauaugaaaaguuuaucagcac

SEQ ID NO: 579406 - RNA, 18 nt, Human
uguaugguuucucucuga

SEQ ID NO: 579407 - RNA, 21 nt, Human
uguuacaguuuugauccuugg

SEQ ID NO: 579408 - RNA, 23 nt, Human
uguugugugaguuuuaacacauu

SEQ ID NO: 579409 - RNA, 22 nt, Human
uuagguguauaugauuucucuu

SEQ ID NO: 579410 - RNA, 22 nt, Human
uuguaugguuucucucugauau

SEQ ID NO: 579411 - RNA, 21 nt, Human
uugugacugaaaaccuugcca

SEQ ID NO: 579412 - RNA, 24 nt, Human
aaaagugaagacaaacaaacaaac

SEQ ID NO: 579413 - RNA, 23 nt, Human
aaacaaaaaaaaaaacaaaaccc

SEQ ID NO: 579414 - RNA, 25 nt, Human
aaacaaaaaaaaaaacaaaacccua

SEQ ID NO: 579415 - RNA, 21 nt, Human
aaacaaaaacagaaaagcaaa

SEQ ID NO: 579416 - RNA, 21 nt, Human
aaacagaaaagcaaaaaacag

SEQ ID NO: 579417 - RNA, 23 nt, Human
aacaaugcuggagagcauuuggc

SEQ ID NO: 579418 - RNA, 24 nt, Human
aacagaaaagcaaaaaacaguuaa

SEQ ID NO: 579419 - RNA, 19 nt, Human
aacauggugagaccccauc

SEQ ID NO: 579420 - RNA, 20 nt, Human
aacauggugagaccccaucu

SEQ ID NO: 579421 - RNA, 21 nt, Human
aacauggugagaccccaucuc

SEQ ID NO: 579422 - RNA, 23 nt, Human
aagggccuguuacuaaaccaaga

SEQ ID NO: 579423 - RNA, 22 nt, Human
aaguuuacucaaccagaccacc

SEQ ID NO: 579424 - RNA, 26 nt, Human
aauuuacuucucaucugucuccccua

SEQ ID NO: 579425 - RNA, 18 nt, Human
acaaacaaacaaacaaac

SEQ ID NO: 579426 - RNA, 24 nt, Human
acaacaggagccuaauguuuuguu

SEQ ID NO: 579427 - RNA, 21 nt, Human
acaucuguaaucccagcacuu

SEQ ID NO: 579428 - RNA, 23 nt, Human
acaucuguaaucccagcacuucg

SEQ ID NO: 579429 - RNA, 19 nt, Human
accagaccaccuugauacc

SEQ ID NO: 579430 - RNA, 28 nt, Human
agacaaacaaacaaacaaaccggacccc

SEQ ID NO: 579431 - RNA, 19 nt, Human
agacccgggaaagccggcg

SEQ ID NO: 579432 - RNA, 22 nt, Human
agccuggguaacauggugagac

SEQ ID NO: 579433 - RNA, 23 nt, Human
agccuggguaacauggugagacc

SEQ ID NO: 579434 - RNA, 24 nt, Human
agccuggguaacauggugagaccc

SEQ ID NO: 579435 - RNA, 20 nt, Human
aggaguuugagaccagccug

SEQ ID NO: 579436 - RNA, 24 nt, Human
agugacuuacaucuguaaucccag

SEQ ID NO: 579437 - RNA, 20 nt, Human
aucuagacuuggcaauaaag

SEQ ID NO: 579438 - RNA, 22 nt, Human
caaaaaaaaaaacaaaacccua

SEQ ID NO: 579439 - RNA, 24 nt, Human
caaaaacagaaaagcaaaaaacag

SEQ ID NO: 579440 - RNA, 20 nt, Human
caaaacaaaaacagaaaagc

SEQ ID NO: 579441 - RNA, 25 nt, Human
caaaacaaaaacagaaaagcaaaaa

SEQ ID NO: 579442 - RNA, 30 nt, Human
caaaacaaaaacagaaaagcaaaaaaccag

SEQ ID NO: 579443 - RNA, 28 nt, Human
caaaacccuaaaaaauacuuaaggaaga

SEQ ID NO: 579444 - RNA, 23 nt, Human
caaacaaaaaaaaaaacaaaacc

SEQ ID NO: 579445 - RNA, 26 nt, Human
caaacaaacaaacaaaaaaaaaaaca

SEQ ID NO: 579446 - RNA, 25 nt, Human
caaacaaacaaacaaacaaaaaaaa

SEQ ID NO: 579447 - RNA, 21 nt, Human
caaccagaccaccuugauacc

SEQ ID NO: 579448 - RNA, 23 nt, Human
caacugaaaguuaauauaaaaca

SEQ ID NO: 579449 - RNA, 23 nt, Human
caagauacaacaggagccuaaug

SEQ ID NO: 579450 - RNA, 21 nt, Human
cagcaaaacaaaaacagaaaa

SEQ ID NO: 579451 - RNA, 24 nt, Human
cagcacuucgggaggcgaaggcag

SEQ ID NO: 579452 - RNA, 26 nt, Human
cagcacuucgggaggcgaaggcaggu

SEQ ID NO: 579453 - RNA, 23 nt, Human
caucuguaaucccagcacuucgg

SEQ ID NO: 579454 - RNA, 24 nt, Human
caucuguaaucccagcacuucggg

SEQ ID NO: 579455 - RNA, 18 nt, Human
ccaucauucacaacugac

SEQ ID NO: 579456 - RNA, 21 nt, Human
cccuaaguacuaagacauguc

SEQ ID NO: 579457 - RNA, 24 nt, Human
ccucaacccggccagcucucuccg

SEQ ID NO: 579458 - RNA, 24 nt, Human
ccuggguaacauggugagacccca

SEQ ID NO: 579459 - RNA, 25 nt, Human
cugaacuaaagagauacuaaagauc

SEQ ID NO: 579460 - RNA, 22 nt, Human
cuucucaucugucuccccuaaa

SEQ ID NO: 579461 - RNA, 21 nt, Human
cuugaugccaaaaaauuuacc

SEQ ID NO: 579462 - RNA, 20 nt, Human
gacaaacaaacaaacaaaca

SEQ ID NO: 579463 - RNA, 18 nt, Human
gauugcuugugcccagga

SEQ ID NO: 579464 - RNA, 23 nt, Human
gcaaaacaaaaacagaaaagcaa

SEQ ID NO: 579465 - RNA, 20 nt, Human
gcccaggaguuugagaccag

SEQ ID NO: 579466 - RNA, 22 nt, Human
gcccaggaguuugagaccagcc

SEQ ID NO: 579467 - RNA, 19 nt, Human
ggaagacucauguacaaau

SEQ ID NO: 579468 - RNA, 25 nt, Human
ggcggaagcgcuuuuuuuuuuuuuu

SEQ ID NO: 579469 - RNA, 20 nt, Human
guuaguuucuggcuggggua

SEQ ID NO: 579470 - RNA, 20 nt, Human
guuguuguccuuuccuucau

SEQ ID NO: 579471 - RNA, 22 nt, Human
uaaaauuaaaaaaaaaaaaaag

SEQ ID NO: 579472 - RNA, 24 nt, Human
uaaaccaagauacaacaggagccu

SEQ ID NO: 579473 - RNA, 23 nt, Human
uaaagagauacuaaagaucagaa

SEQ ID NO: 579474 - RNA, 22 nt, Human
uaacauggugagaccccaucuc

SEQ ID NO: 579475 - RNA, 24 nt, Human
uaacauggugagaccccaucucua

SEQ ID NO: 579476 - RNA, 24 nt, Human
uaaguuaauuaagggccuguuacu

SEQ ID NO: 579477 - RNA, 25 nt, Human
uacuaaaccaagauacaacaggagc

SEQ ID NO: 579478 - RNA, 28 nt, Human
uacuaaaccaagauacaacaggagccua

SEQ ID NO: 579479 - RNA, 24 nt, Human
uacuucucaucugucuccccuaaa

SEQ ID NO: 579480 - RNA, 18 nt, Human
uaucugaaaaaaguauca

SEQ ID NO: 579481 - RNA, 21 nt, Human
ucaacagaccugggggaaaag

SEQ ID NO: 579482 - RNA, 23 nt, Human
ucagcaaaacaaaaacagaaaag

SEQ ID NO: 579483 - RNA, 18 nt, Human
ucauacagcucaacagac

SEQ ID NO: 579484 - RNA, 20 nt, Human
ucccuuacucuuuacauaaa

SEQ ID NO: 579485 - RNA, 19 nt, Human
ucuagacuuggcaauaaag

SEQ ID NO: 579486 - RNA, 22 nt, Human
ucuccccuaaaagggcaggggc

SEQ ID NO: 579487 - RNA, 26 nt, Human
ucucuccgggcggaagcgcuuuuuuu

SEQ ID NO: 579488 - RNA, 21 nt, Human
ugaaaaaaguaucaaucuaga

SEQ ID NO: 579489 - RNA, 22 nt, Human
ugaaugaaucucauacagcuca

SEQ ID NO: 579490 - RNA, 22 nt, Human
ugacuuacaucuguaaucccag

SEQ ID NO: 579491 - RNA, 24 nt, Human
ugacuuacaucuguaaucccagca

SEQ ID NO: 579492 - RNA, 20 nt, Human
ugauaucuacaaugaccucc

SEQ ID NO: 579493 - RNA, 18 nt, Human
ugcuugugcccaggaguu

SEQ ID NO: 579494 - RNA, 23 nt, Human
uggauugcuugugcccaggaguu

SEQ ID NO: 579495 - RNA, 24 nt, Human
uggauugcuugugcccaggaguuu

SEQ ID NO: 579496 - RNA, 24 nt, Human
uggcugggguagugacuuacaucu

SEQ ID NO: 579497 - RNA, 22 nt, Human
ugucugguacauguaaguguuc

SEQ ID NO: 579498 - RNA, 26 nt, Human
uugaaugaauaaaugaaguaugaaug

SEQ ID NO: 579499 - RNA, 26 nt, Human
uuuaaaggaaaauaaaucaaguaggu

SEQ ID NO: 579500 - RNA, 20 nt, Human
aaccauggcguaccgauuua

SEQ ID NO: 579501 - RNA, 19 nt, Human
aaccuccguccuacagccc

SEQ ID NO: 579502 - RNA, 19 nt, Human
acagacuucccccagggaa

SEQ ID NO: 579503 - RNA, 24 nt, Human
accaaagaacagacuucccccagg

SEQ ID NO: 579504 - RNA, 19 nt, Human
acugaagggaaaaauucca

SEQ ID NO: 579505 - RNA, 23 nt, Human
agagaaaaauuccauaccaaaga

SEQ ID NO: 579506 - RNA, 19 nt, Human
aucgaggacagcucaguca

SEQ ID NO: 579507 - RNA, 21 nt, Human
cacacucacacacaucagcca

SEQ ID NO: 579508 - RNA, 18 nt, Human
cagccggucggcagugac

SEQ ID NO: 579509 - RNA, 24 nt, Human
caucacacucacacacaucagcca

SEQ ID NO: 579510 - RNA, 18 nt, Human
caugccagguguuuguca

SEQ ID NO: 579511 - RNA, 21 nt, Human
ccgcaaggcccagccagccgg

SEQ ID NO: 579512 - RNA, 20 nt, Human
cgaaggugguuuucagugga

SEQ ID NO: 579513 - RNA, 18 nt, Human
gaagcccuugcauggccu

SEQ ID NO: 579514 - RNA, 18 nt, Human
gaagcccuugcauggccu

SEQ ID NO: 579515 - RNA, 22 nt, Human
gggaaaaauuccauaccaaaga

SEQ ID NO: 579516 - RNA, 23 nt, Human
uaccaaagaacagacuuccccca

SEQ ID NO: 579517 - RNA, 24 nt, Human
uaccaaagaagagagaaaaauucc

SEQ ID NO: 579518 - RNA, 20 nt, Human
uacuugacagguaacaucga

SEQ ID NO: 579519 - RNA, 22 nt, Human
ucccccagggaaccuccguccu

SEQ ID NO: 579520 - RNA, 22 nt, Human
uccugaacucucaggaagcccu

SEQ ID NO: 579521 - RNA, 19 nt, Human
ugggaagaacaggaguccu

SEQ ID NO: 579522 - RNA, 18 nt, Human
uugcauggccuaucgagg

SEQ ID NO: 579523 - RNA, 20 nt, Human
uuguauuaaaaauagaaggu

SEQ ID NO: 579524 - RNA, 23 nt, Human
aaucucgcccuuccuugcaaggc

SEQ ID NO: 579525 - RNA, 21 nt, Human
acccccacccccgggagacca

SEQ ID NO: 579526 - RNA, 24 nt, Human
agacccccacccccgggagaccag

SEQ ID NO: 579527 - RNA, 23 nt, Human
ccagaggguaccccccagacccc

SEQ ID NO: 579528 - RNA, 22 nt, Human
cccagacccccacccccgggag

SEQ ID NO: 579529 - RNA, 21 nt, Human
ccccagacccccacccccggg

SEQ ID NO: 579530 - RNA, 18 nt, Human
ccccagaggguacccccc

SEQ ID NO: 579531 - RNA, 25 nt, Human
ccccagaggguaccccccagacccc

SEQ ID NO: 579532 - RNA, 18 nt, Human
cccccacccccgggagac

SEQ ID NO: 579533 - RNA, 24 nt, Human
ccccccgccccgcccccgaaaucu

SEQ ID NO: 579534 - RNA, 19 nt, Human
ccccgaaaucucgcccuuc

SEQ ID NO: 579535 - RNA, 18 nt, Human
ccccgccccgcccccgaa

SEQ ID NO: 579536 - RNA, 18 nt, Human
ccccggccuaggcccgcc

SEQ ID NO: 579537 - RNA, 22 nt, Human
ccccggccuaggcccgcccccc

SEQ ID NO: 579538 - RNA, 22 nt, Human
ccccgggagaccaguccucacc

SEQ ID NO: 579539 - RNA, 21 nt, Human
cccggccuaggcccgcccccc

SEQ ID NO: 579540 - RNA, 21 nt, Human
ccgcccccgaaaucucgcccu

SEQ ID NO: 579541 - RNA, 25 nt, Human
ccgccccgcccccgaaaucucgccc

SEQ ID NO: 579542 - RNA, 26 nt, Human
ccgccccgcccccgaaaucucgcccu

SEQ ID NO: 579543 - RNA, 27 nt, Human
ccggccuaggcccgccccccgccccgc

SEQ ID NO: 579544 - RNA, 20 nt, Human
ccugggcgaguccucagccu

SEQ ID NO: 579545 - RNA, 22 nt, Human
cuggggcagugggggaaucuau

SEQ ID NO: 579546 - RNA, 21 nt, Human
gcccaggggucugagagacca

SEQ ID NO: 579547 - RNA, 21 nt, Human
ggaaucuauaaccccagaggg

SEQ ID NO: 579548 - RNA, 21 nt, Human
gguaccccccagacccccacc

SEQ ID NO: 579549 - RNA, 18 nt, Human
gguccagucagagcuggg

SEQ ID NO: 579550 - RNA, 24 nt, Human
uaaccccagaggguaccccccaga

SEQ ID NO: 579551 - RNA, 22 nt, Human
uaccccccagacccccaccccc

SEQ ID NO: 579552 - RNA, 20 nt, Human
uaggcccgccccccgccccg

SEQ ID NO: 579553 - RNA, 23 nt, Human
uccagucaaaaggauagagacau

SEQ ID NO: 579554 - RNA, 23 nt, Human
uccccaaguugggggaaguccac

SEQ ID NO: 579555 - RNA, 21 nt, Human
ugagaccccggccuaggcccg

SEQ ID NO: 579556 - RNA, 19 nt, Human
ugggguccagucagagcug

SEQ ID NO: 579557 - RNA, 19 nt, Human
cuacugcagucuuugacuc

SEQ ID NO: 579558 - RNA, 20 nt, Human
gggcgcugacaccugcccaa

SEQ ID NO: 579559 - RNA, 23 nt, Human
gugacacgggcgcugacaccugc

SEQ ID NO: 579560 - RNA, 18 nt, Human
uaccacucuacugcaguc

SEQ ID NO: 579561 - RNA, 19 nt, Human
uaccacucuacugcagucu

SEQ ID NO: 579562 - RNA, 24 nt, Human
aaaaaaacaaaacaaaacagaaaa

SEQ ID NO: 579563 - RNA, 22 nt, Human
aaaaaacaaaacaaaacagaaa

SEQ ID NO: 579564 - RNA, 24 nt, Human
aaaaauagacaauguagcacaucc

SEQ ID NO: 579565 - RNA, 20 nt, Human
aaaacaaaacaaaacagaaa

SEQ ID NO: 579566 - RNA, 18 nt, Human
aaacaaaacaaaacagaa

SEQ ID NO: 579567 - RNA, 18 nt, Human
aaacagagcuuuuucccc

SEQ ID NO: 579568 - RNA, 22 nt, Human
aaacagagcuuuuuccccaugg

SEQ ID NO: 579569 - RNA, 26 nt, Human
aaacauuuugauacaaaauuuuuuuc

SEQ ID NO: 579570 - RNA, 20 nt, Human
aaagugaaauacgcugcaaa

SEQ ID NO: 579571 - RNA, 26 nt, Human
aacacaaaaauagaacaguucacacu

SEQ ID NO: 579572 - RNA, 19 nt, Human
aaccuuaacguuuucaagc

SEQ ID NO: 579573 - RNA, 29 nt, Human
aagcaaaagaugaaauauuaagggacccc

SEQ ID NO: 579574 - RNA, 24 nt, Human
aagcaggcaaaaggcacacgcuag

SEQ ID NO: 579575 - RNA, 21 nt, Human
aaugcaaaaugccucugcagu

SEQ ID NO: 579576 - RNA, 21 nt, Human
acacaaaccaauucacaccac

SEQ ID NO: 579577 - RNA, 19 nt, Human
acacagcucuugcucuaag

SEQ ID NO: 579578 - RNA, 19 nt, Human
accacacuacagaaacgcg

SEQ ID NO: 579579 - RNA, 22 nt, Human
accagagcccagugggaaucca

SEQ ID NO: 579580 - RNA, 18 nt, Human
agacaaaugcaaaaugcc

SEQ ID NO: 579581 - RNA, 19 nt, Human
agacaaaugcaaaaugccu

SEQ ID NO: 579582 - RNA, 20 nt, Human
agagaagcaggcaaaaggca

SEQ ID NO: 579583 - RNA, 20 nt, Human
agcagcaccacugacgggau

SEQ ID NO: 579584 - RNA, 18 nt, Human
agccgcugagcagcacca

SEQ ID NO: 579585 - RNA, 22 nt, Human
aguaagcagaaaugucaacuua

SEQ ID NO: 579586 - RNA, 23 nt, Human
auaaaaucaugugcuaaacagag

SEQ ID NO: 579587 - RNA, 18 nt, Human
augauaugugaaaagacu

SEQ ID NO: 579588 - RNA, 19 nt, Human
augcaggucaggcuaccuu

SEQ ID NO: 579589 - RNA, 27 nt, Human
augugugcauacauucuaauguacaca

SEQ ID NO: 579590 - RNA, 21 nt, Human
auucacaccacacgacucuuc

SEQ ID NO: 579591 - RNA, 18 nt, Human
auucaggaaacaauuuga

SEQ ID NO: 579592 - RNA, 24 nt, Human
auuucuuccuagcaagucugcgug

SEQ ID NO: 579593 - RNA, 19 nt, Human
auuuugcuuaucaugaucc

SEQ ID NO: 579594 - RNA, 26 nt, Human
caaaaauagaacaguucacacugaaa

SEQ ID NO: 579595 - RNA, 19 nt, Human
caaaacaaaacagaaaacc

SEQ ID NO: 579596 - RNA, 20 nt, Human
caaaacagaaaaccuuaacg

SEQ ID NO: 579597 - RNA, 21 nt, Human
caaaacagaaaaccuuaacgu

SEQ ID NO: 579598 - RNA, 24 nt, Human
caaaauacacaauccucccagccu

SEQ ID NO: 579599 - RNA, 26 nt, Human
caaaauacacaauccucccagccuuc

SEQ ID NO: 579600 - RNA, 18 nt, Human
caacuuaaaggacuauga

SEQ ID NO: 579601 - RNA, 19 nt, Human
caagguucacaccgacucu

SEQ ID NO: 579602 - RNA, 21 nt, Human
cacaauccucccagccuucuc

SEQ ID NO: 579603 - RNA, 22 nt, Human
cacacgacucuucaaagaugau

SEQ ID NO: 579604 - RNA, 19 nt, Human
cagccuucucaaguuguca

SEQ ID NO: 579605 - RNA, 26 nt, Human
caguaauaauacaaacaaaaguuuaa

SEQ ID NO: 579606 - RNA, 22 nt, Human
caguagcuggugaagcccacuc

SEQ ID NO: 579607 - RNA, 23 nt, Human
ccaaaaauagacaauguagcaca

SEQ ID NO: 579608 - RNA, 19 nt, Human
ccagcagccccgaugcuaa

SEQ ID NO: 579609 - RNA, 19 nt, Human
cccuuuccuuugaacaucc

SEQ ID NO: 579610 - RNA, 18 nt, Human
cuuaaagaguucaacucu

SEQ ID NO: 579611 - RNA, 24 nt, Human
gaacauccugacacuuccuaaaua

SEQ ID NO: 579612 - RNA, 20 nt, Human
gaacuucuugacacagacaa

SEQ ID NO: 579613 - RNA, 23 nt, Human
gagcagcaccacugacgggaucc

SEQ ID NO: 579614 - RNA, 18 nt, Human
gauccaacugguauguuu

SEQ ID NO: 579615 - RNA, 19 nt, Human
gcacuuauggcacagacaa

SEQ ID NO: 579616 - RNA, 24 nt, Human
gcagccgccaaaaauagacaaugu

SEQ ID NO: 579617 - RNA, 23 nt, Human
gcuaaaguuguacaaccagguau

SEQ ID NO: 579618 - RNA, 25 nt, Human
ggaaauaaacaaauucguucaguca

SEQ ID NO: 579619 - RNA, 20 nt, Human
ggaccagagcccagugggaa

SEQ ID NO: 579620 - RNA, 20 nt, Human
ggugaacuucuugacacaga

SEQ ID NO: 579621 - RNA, 21 nt, Human
uacaaccagguauguuugccc

SEQ ID NO: 579622 - RNA, 27 nt, Human
uacacaaaccaauucacaccacacgac

SEQ ID NO: 579623 - RNA, 24 nt, Human
uagaaaauaauucaagucaguauc

SEQ ID NO: 579624 - RNA, 21 nt, Human
uagaaauaagcaaaagaugaa

SEQ ID NO: 579625 - RNA, 18 nt, Human
uagaacaguucacacuga

SEQ ID NO: 579626 - RNA, 19 nt, Human
uagcugcaagauacuaaau

SEQ ID NO: 579627 - RNA, 21 nt, Human
uagcugcaagauacuaaauac

SEQ ID NO: 579628 - RNA, 21 nt, Human
uauuucacuggcuugagaagg

SEQ ID NO: 579629 - RNA, 20 nt, Human
ucaaagagaagcaggcaaaa

SEQ ID NO: 579630 - RNA, 27 nt, Human
ucaaguuguaauaaauugaaaauaaca

SEQ ID NO: 579631 - RNA, 18 nt, Human
ucacacugaaaggucuuc

SEQ ID NO: 579632 - RNA, 18 nt, Human
ucaguaauaauacaaaca

SEQ ID NO: 579633 - RNA, 18 nt, Human
ucauccaaacacacccuu

SEQ ID NO: 579634 - RNA, 21 nt, Human
ucauccaaacacacccuuuuc

SEQ ID NO: 579635 - RNA, 18 nt, Human
uccaaacacacccuuuuc

SEQ ID NO: 579636 - RNA, 27 nt, Human
uccaaacacacccuuuucugaaaaaca

SEQ ID NO: 579637 - RNA, 19 nt, Human
uccaaccaagguucacacc

SEQ ID NO: 579638 - RNA, 22 nt, Human
uccaccacacuacagaaacgcg

SEQ ID NO: 579639 - RNA, 21 nt, Human
uccugaguguccauggaugug

SEQ ID NO: 579640 - RNA, 18 nt, Human
ucugcauuucuuccuagc

SEQ ID NO: 579641 - RNA, 21 nt, Human
ucuuccuagcaagucugcgug

SEQ ID NO: 579642 - RNA, 21 nt, Human
ugacgggauccaagggaagga

SEQ ID NO: 579643 - RNA, 22 nt, Human
ugacuugcaaaauacacaaucc

SEQ ID NO: 579644 - RNA, 24 nt, Human
ugacuugcaaaauacacaauccuc

SEQ ID NO: 579645 - RNA, 18 nt, Human
ugagaaggugaacuucuu

SEQ ID NO: 579646 - RNA, 18 nt, Human
ugaguuagaauccacaua

SEQ ID NO: 579647 - RNA, 19 nt, Human
ugaucuuaugcaggucagg

SEQ ID NO: 579648 - RNA, 22 nt, Human
ugcaaaauacacaauccuccca

SEQ ID NO: 579649 - RNA, 23 nt, Human
ugcaaauuaagcaauuucaauaa

SEQ ID NO: 579650 - RNA, 20 nt, Human
uggacagagcaggagaaacu

SEQ ID NO: 579651 - RNA, 25 nt, Human
uguaacacagucacuuaauuuuccc

SEQ ID NO: 579652 - RNA, 23 nt, Human
uguacacaaaccaauucacacca

SEQ ID NO: 579653 - RNA, 23 nt, Human
ugugagaagauuaguauaguucu

SEQ ID NO: 579654 - RNA, 22 nt, Human
ugugugcauacauucuaaugua

SEQ ID NO: 579655 - RNA, 20 nt, Human
uguuuaaugugggccacuga

SEQ ID NO: 579656 - RNA, 23 nt, Human
uuaaaaaaacaaaacaaaacaga

SEQ ID NO: 579657 - RNA, 22 nt, Human
uuaaggagaagcuucuaauuuu

SEQ ID NO: 579658 - RNA, 24 nt, Human
uucaacgacuguauuuuauagacc

SEQ ID NO: 579659 - RNA, 19 nt, Human
uucaagugaucuuaugcag

SEQ ID NO: 579660 - RNA, 18 nt, Human
uuccauggcuaaaaaucg

SEQ ID NO: 579661 - RNA, 22 nt, Human
uugauauuaaaaaaacaaaaca

SEQ ID NO: 579662 - RNA, 24 nt, Human
uuuacccuuuccuuugaacauccu

SEQ ID NO: 579663 - RNA, 23 nt, Human
aaaagauaaagaaauagauuuag

SEQ ID NO: 579664 - RNA, 18 nt, Human
aaacacacauacauaaac

SEQ ID NO: 579665 - RNA, 22 nt, Human
aacacacauacauaaacauaca

SEQ ID NO: 579666 - RNA, 26 nt, Human
aacacacauacauaaacauacauaug

SEQ ID NO: 579667 - RNA, 21 nt, Human
aauuuccuucccuuuuaaggc

SEQ ID NO: 579668 - RNA, 24 nt, Human
accacauuuuauuuaucuauucau

SEQ ID NO: 579669 - RNA, 19 nt, Human
accuuuuggcuguugugaa

SEQ ID NO: 579670 - RNA, 25 nt, Human
auccaucuccagaacuuuuuacccc

SEQ ID NO: 579671 - RNA, 18 nt, Human
augucagaauuuccuucc

SEQ ID NO: 579672 - RNA, 26 nt, Human
auuuuauuuaucuauucaucuaucca

SEQ ID NO: 579673 - RNA, 28 nt, Human
cacacauacauaaacauacauauguaca

SEQ ID NO: 579674 - RNA, 18 nt, Human
cacuaaacacucacucuc

SEQ ID NO: 579675 - RNA, 22 nt, Human
cauguucauauauauuugugug

SEQ ID NO: 579676 - RNA, 21 nt, Human
ccacuaaacacucacucucca

SEQ ID NO: 579677 - RNA, 19 nt, Human
ccgcugugaacauuggugu

SEQ ID NO: 579678 - RNA, 21 nt, Human
ccuacuuucacuucuuuugga

SEQ ID NO: 579679 - RNA, 18 nt, Human
cggcacugcacaagggaa

SEQ ID NO: 579680 - RNA, 20 nt, Human
cuaaaacucugacccacuaa

SEQ ID NO: 579681 - RNA, 24 nt, Human
cuaaaacucugacccacuaaacac

SEQ ID NO: 579682 - RNA, 21 nt, Human
cuccauugcccucuucuccca

SEQ ID NO: 579683 - RNA, 22 nt, Human
cuuuaagcuucauccauauugc

SEQ ID NO: 579684 - RNA, 18 nt, Human
cuuuuggcuguugugaau

SEQ ID NO: 579685 - RNA, 18 nt, Human
gcccucuucucccagccc

SEQ ID NO: 579686 - RNA, 23 nt, Human
guugcuuccaccuuuuggcuguu

SEQ ID NO: 579687 - RNA, 19 nt, Human
uaaaaaaaaaaaucaaaua

SEQ ID NO: 579688 - RNA, 22 nt, Human
uaaacaauagcccauuguaugu

SEQ ID NO: 579689 - RNA, 25 nt, Human
uaaacauacauauguacacauuuug

SEQ ID NO: 579690 - RNA, 23 nt, Human
uacauucacacuguugagcaccc

SEQ ID NO: 579691 - RNA, 18 nt, Human
uauaaacacacauacaua

SEQ ID NO: 579692 - RNA, 26 nt, Human
uauaaacacacauacauaaacauaca

SEQ ID NO: 579693 - RNA, 24 nt, Human
uccagaacuuuuuaccuucccaaa

SEQ ID NO: 579694 - RNA, 22 nt, Human
uccaucuccagaacuuuuuacc

SEQ ID NO: 579695 - RNA, 21 nt, Human
uccucauauaaguagaauuau

SEQ ID NO: 579696 - RNA, 24 nt, Human
uccuuaaaaaaaaaaaucaaauaa

SEQ ID NO: 579697 - RNA, 19 nt, Human
ucucugugaaacugacugc

SEQ ID NO: 579698 - RNA, 21 nt, Human
ucucugugaaacugacugcuc

SEQ ID NO: 579699 - RNA, 21 nt, Human
ucugacccacuaaacacucac

SEQ ID NO: 579700 - RNA, 23 nt, Human
ucugugaaacugacugcucuaga

SEQ ID NO: 579701 - RNA, 20 nt, Human
ucuuuuggauagauauccag

SEQ ID NO: 579702 - RNA, 18 nt, Human
ugaaacugacugcucuag

SEQ ID NO: 579703 - RNA, 20 nt, Human
ugauuugcaaaugcccuucu

SEQ ID NO: 579704 - RNA, 24 nt, Human
ugauuugcaaaugcccuucuccuc

SEQ ID NO: 579705 - RNA, 19 nt, Human
ugccaacauuuaucuucug

SEQ ID NO: 579706 - RNA, 22 nt, Human
uguggaacugcagaucauacgg

SEQ ID NO: 579707 - RNA, 23 nt, Human
uguggaacugcagaucauacggc

SEQ ID NO: 579708 - RNA, 23 nt, Human
uguguguguauuuuuucccauuu

SEQ ID NO: 579709 - RNA, 24 nt, Human
uguuuacucauaaggcagaacacg

SEQ ID NO: 579710 - RNA, 26 nt, Human
uugcuucuaaauaauagcuauccuuu

SEQ ID NO: 579711 - RNA, 22 nt, Human
uuguguguguguauuuuuuccc

SEQ ID NO: 579712 - RNA, 24 nt, Human
uuuuggcuguugugaauaaagccg

SEQ ID NO: 579713 - RNA, 20 nt, Human
uggaaugucauuucucuuua

SEQ ID NO: 579714 - RNA, 20 nt, Human
acugucuugaggauggggau

SEQ ID NO: 579715 - RNA, 20 nt, Human
agccagcagccccaaggagc

SEQ ID NO: 579716 - RNA, 24 nt, Human
aggauggggaugcaaacagugcuc

SEQ ID NO: 579717 - RNA, 23 nt, Human
auacaaaaaaucuaugcuuuacc

SEQ ID NO: 579718 - RNA, 22 nt, Human
aucuaugcuuuacccaauuuug

SEQ ID NO: 579719 - RNA, 19 nt, Human
caacgguggagcugcgcgc

SEQ ID NO: 579720 - RNA, 23 nt, Human
ccaaacagacaauggauaccuaa

SEQ ID NO: 579721 - RNA, 22 nt, Human
cccgccgcaaacgcagcagcca

SEQ ID NO: 579722 - RNA, 18 nt, Human
ccgcggccaccaccuccc

SEQ ID NO: 579723 - RNA, 19 nt, Human
cgcgcucggguguuuacgc

SEQ ID NO: 579724 - RNA, 23 nt, Human
cuaugcuuuacccaauuuugaug

SEQ ID NO: 579725 - RNA, 19 nt, Human
cucccgccgcaaacgcagc

SEQ ID NO: 579726 - RNA, 21 nt, Human
cuugaggauggggaugcaaac

SEQ ID NO: 579727 - RNA, 22 nt, Human
gaaaaauaccccuucucguggg

SEQ ID NO: 579728 - RNA, 20 nt, Human
gaccgcggccaccaccuccc

SEQ ID NO: 579729 - RNA, 21 nt, Human
ggagcugcgcgcccuccgcuc

SEQ ID NO: 579730 - RNA, 19 nt, Human
ucucgugggaccgcggcca

SEQ ID NO: 579731 - RNA, 18 nt, Human
uggagcugcgcgcccucc

SEQ ID NO: 579732 - RNA, 22 nt, Human
uguaaaacaaaaguuaugcuga

SEQ ID NO: 579733 - RNA, 20 nt, Human
aaacuccaucaaaagucgcc

SEQ ID NO: 579734 - RNA, 21 nt, Human
aacaagcaguagaauagucaa

SEQ ID NO: 579735 - RNA, 22 nt, Human
aagcaguagaauagucaacuca

SEQ ID NO: 579736 - RNA, 27 nt, Human
acaauagcagggaaggccgaggcuucc

SEQ ID NO: 579737 - RNA, 23 nt, Human
acuacgucugaugccaaagcucu

SEQ ID NO: 579738 - RNA, 20 nt, Human
acucuaaaacucaauauaga

SEQ ID NO: 579739 - RNA, 21 nt, Human
agguaaaguucagaaauuuau

SEQ ID NO: 579740 - RNA, 22 nt, Human
caaaucacuaugagaggaaacu

SEQ ID NO: 579741 - RNA, 22 nt, Human
cagcucaaccucggcugccugu

SEQ ID NO: 579742 - RNA, 22 nt, Human
caucaaaagucgccaauuguuc

SEQ ID NO: 579743 - RNA, 22 nt, Human
cgcagcucaaccucggcugccu

SEQ ID NO: 579744 - RNA, 23 nt, Human
gcuccgaagcccagcggggcuca

SEQ ID NO: 579745 - RNA, 23 nt, Human
ggaaggccgaggcuuccuacaga

SEQ ID NO: 579746 - RNA, 21 nt, Human
ggagagcacagauugcaccug

SEQ ID NO: 579747 - RNA, 19 nt, Human
guagaauagucaacucaaa

SEQ ID NO: 579748 - RNA, 19 nt, Human
uacccagcuaacaagcagu

SEQ ID NO: 579749 - RNA, 23 nt, Human
uacugugcuacggaagccugguu

SEQ ID NO: 579750 - RNA, 20 nt, Human
uccccucgugucuccccuaa

SEQ ID NO: 579751 - RNA, 18 nt, Human
uccgaagcccagcggggc

SEQ ID NO: 579752 - RNA, 18 nt, Human
ugagcuuuggcuacccag

SEQ ID NO: 579753 - RNA, 21 nt, Human
ugccaaagcucuaacucuaaa

SEQ ID NO: 579754 - RNA, 19 nt, Human
ugcuccgaagcccagcggg

SEQ ID NO: 579755 - RNA, 20 nt, Human
uacaauguuacuucagaaaa

SEQ ID NO: 579756 - RNA, 20 nt, Human
uagcaugauuaugguaauuu

SEQ ID NO: 579757 - RNA, 30 nt, Human
uagccaugcucccauuuuugaugaaagcuu

SEQ ID NO: 579758 - RNA, 26 nt, Human
ucuaugauacaauguuacuucagaaa

SEQ ID NO: 579759 - RNA, 23 nt, Human
uugcacaaacacucccucacaaa

SEQ ID NO: 579760 - RNA, 21 nt, Human
uuuugcacaaacacucccuca

SEQ ID NO: 579761 - RNA, 18 nt, Human
aaaaagaaagcacagaga

SEQ ID NO: 579762 - RNA, 24 nt, Human
aaaaagaaagcacagagauaaaaa

SEQ ID NO: 579763 - RNA, 24 nt, Human
aacauuaucacuauauauuugacu

SEQ ID NO: 579764 - RNA, 22 nt, Human
acaacaguggucucuagcaccu

SEQ ID NO: 579765 - RNA, 23 nt, Human
acuaaggcaaucuuuaucuauau

SEQ ID NO: 579766 - RNA, 21 nt, Human
agacauagcuaucacaauaua

SEQ ID NO: 579767 - RNA, 25 nt, Human
aggaugaaaauauauuuauaaagga

SEQ ID NO: 579768 - RNA, 23 nt, Human
caccaaagucuuucuccuaacca

SEQ ID NO: 579769 - RNA, 20 nt, Human
caccaugaaaaagaaagcac

SEQ ID NO: 579770 - RNA, 26 nt, Human
cagcaauaaaaacuggaauuuauaca

SEQ ID NO: 579771 - RNA, 21 nt, Human
caguagcuaggauguauauac

SEQ ID NO: 579772 - RNA, 21 nt, Human
ccgccagccggaggagcagca

SEQ ID NO: 579773 - RNA, 22 nt, Human
gcagcagcggccgcagccgcgc

SEQ ID NO: 579774 - RNA, 24 nt, Human
gcuuuucuuucuuccaccaccaaa

SEQ ID NO: 579775 - RNA, 19 nt, Human
uaaaaauacuaauggccag

SEQ ID NO: 579776 - RNA, 19 nt, Human
uaccauugcaggcagauga

SEQ ID NO: 579777 - RNA, 24 nt, Human
uagcauugaguuuuauaaaaauac

SEQ ID NO: 579778 - RNA, 21 nt, Human
uagcuaggauguauauacaca

SEQ ID NO: 579779 - RNA, 27 nt, Human
ucaguagucuuuguuuuaugcuuuucu

SEQ ID NO: 579780 - RNA, 25 nt, Human
ucauaacauccaauaaaucugcaau

SEQ ID NO: 579781 - RNA, 19 nt, Human
ucuccuaaccaccauucac

SEQ ID NO: 579782 - RNA, 22 nt, Human
ugaaaaagaaagcacagagaua

SEQ ID NO: 579783 - RNA, 18 nt, Human
uggaauuuauacaggaga

SEQ ID NO: 579784 - RNA, 22 nt, Human
uuaauaaacaccaugaaaaaga

SEQ ID NO: 579785 - RNA, 20 nt, Human
uuagaaucagaggucuaagg

SEQ ID NO: 579786 - RNA, 28 nt, Human
uucaaaaggaugaaaauauauuuauaaa

SEQ ID NO: 579787 - RNA, 22 nt, Human
uugcaggcagaugaaaaucuac

SEQ ID NO: 579788 - RNA, 18 nt, Human
aaacaguacccugaaccc

SEQ ID NO: 579789 - RNA, 19 nt, Human
aaagugcugggaauacagg

SEQ ID NO: 579790 - RNA, 24 nt, Human
aaagugcugggaauacagguguga

SEQ ID NO: 579791 - RNA, 21 nt, Human
aaauaaacaguacccugaacc

SEQ ID NO: 579792 - RNA, 19 nt, Human
aaccauuuaugaugcgucu

SEQ ID NO: 579793 - RNA, 24 nt, Human
aacccugucuguccucuguagcac

SEQ ID NO: 579794 - RNA, 26 nt, Human
aagagcucuccauuuuuuguaacacc

SEQ ID NO: 579795 - RNA, 25 nt, Human
aagcaauccuccugccuaggccucc

SEQ ID NO: 579796 - RNA, 24 nt, Human
aaguaacuaggacuacaggcacac

SEQ ID NO: 579797 - RNA, 25 nt, Human
aauuacucauuuaguguauuuccau

SEQ ID NO: 579798 - RNA, 20 nt, Human
acaagggggauccccagcac

SEQ ID NO: 579799 - RNA, 23 nt, Human
acacaucuuuagaaauacaacua

SEQ ID NO: 579800 - RNA, 25 nt, Human
accaauccaagcacuaaagacacca

SEQ ID NO: 579801 - RNA, 23 nt, Human
accucagccucccaaguaacuag

SEQ ID NO: 579802 - RNA, 27 nt, Human
acucuguugcccagacuggagugcauu

SEQ ID NO: 579803 - RNA, 18 nt, Human
acugcagccuccaccucc

SEQ ID NO: 579804 - RNA, 24 nt, Human
agacuauauaucaaguugugccag

SEQ ID NO: 579805 - RNA, 21 nt, Human
agagguaccugccacugagcc

SEQ ID NO: 579806 - RNA, 22 nt, Human
agcaagagcaaaaggugcgacc

SEQ ID NO: 579807 - RNA, 18 nt, Human
agcagggagaaacaaggu

SEQ ID NO: 579808 - RNA, 20 nt, Human
aggagugcugaaauagcagg

SEQ ID NO: 579809 - RNA, 20 nt, Human
agugcugggaauacaggugu

SEQ ID NO: 579810 - RNA, 21 nt, Human
aguguugugggacauccagcc

SEQ ID NO: 579811 - RNA, 20 nt, Human
aguucauucacuaagaauaa

SEQ ID NO: 579812 - RNA, 23 nt, Human
aucucacacaaauaaaaaaaaac

SEQ ID NO: 579813 - RNA, 19 nt, Human
aucucugucaaacucuucc

SEQ ID NO: 579814 - RNA, 25 nt, Human
augaaugcuugacauagcuuucauc

SEQ ID NO: 579815 - RNA, 19 nt, Human
augguuuucaccugacuug

SEQ ID NO: 579816 - RNA, 20 nt, Human
caaaacccugucuguccucu

SEQ ID NO: 579817 - RNA, 24 nt, Human
caaagugcugggaauacaggugug

SEQ ID NO: 579818 - RNA, 27 nt, Human
caagcaauccuccugccuaggccuccc

SEQ ID NO: 579819 - RNA, 28 nt, Human
caagcaauccuccugccuaggccuccca

SEQ ID NO: 579820 - RNA, 24 nt, Human
caagguggcagaauuucaaaacca

SEQ ID NO: 579821 - RNA, 24 nt, Human
cacacaaauaaaaaaaaacgacag

SEQ ID NO: 579822 - RNA, 21 nt, Human
caccccuuuacucacccaaca

SEQ ID NO: 579823 - RNA, 24 nt, Human
caccgcacuuggcuaauuuuugua

SEQ ID NO: 579824 - RNA, 20 nt, Human
cacucuguucauuguggcau

SEQ ID NO: 579825 - RNA, 23 nt, Human
cacucuguugcccagacuggagu

SEQ ID NO: 579826 - RNA, 24 nt, Human
cacucuguugcccagacuggagug

SEQ ID NO: 579827 - RNA, 23 nt, Human
cacugcagccuccaccuccuggg

SEQ ID NO: 579828 - RNA, 21 nt, Human
cagaguaaaucccauucuaua

SEQ ID NO: 579829 - RNA, 21 nt, Human
cagcaagagcaaaaggugcga

SEQ ID NO: 579830 - RNA, 23 nt, Human
cagcaagagcaaaaggugcgacc

SEQ ID NO: 579831 - RNA, 18 nt, Human
cagccagcauucuuaaug

SEQ ID NO: 579832 - RNA, 24 nt, Human
cagccagcauucuuaauguuuucu

SEQ ID NO: 579833 - RNA, 19 nt, Human
cagccuccaccuccugggc

SEQ ID NO: 579834 - RNA, 23 nt, Human
cagccuccaccuccugggcucag

SEQ ID NO: 579835 - RNA, 23 nt, Human
cagccucccaaguaacuaggacu

SEQ ID NO: 579836 - RNA, 21 nt, Human
cagggagaaacaagguggcag

SEQ ID NO: 579837 - RNA, 22 nt, Human
caggugauucucccaccucagc

SEQ ID NO: 579838 - RNA, 20 nt, Human
caguuccaguguuacaaggg

SEQ ID NO: 579839 - RNA, 21 nt, Human
ccaaagugcugggaauacagg

SEQ ID NO: 579840 - RNA, 24 nt, Human
ccaaagugcugggaauacaggugu

SEQ ID NO: 579841 - RNA, 18 nt, Human
ccacacauggguuuaugc

SEQ ID NO: 579842 - RNA, 18 nt, Human
ccaccacaggucccaugg

SEQ ID NO: 579843 - RNA, 24 nt, Human
ccaccuccugggcucaggugauuc

SEQ ID NO: 579844 - RNA, 24 nt, Human
cccaaguaacuaggacuacaggca

SEQ ID NO: 579845 - RNA, 26 nt, Human
cccaaucuaauugugcagagagaugu

SEQ ID NO: 579846 - RNA, 28 nt, Human
cccaccaauccaagcacuaaagaggggg

SEQ ID NO: 579847 - RNA, 18 nt, Human
cccacuacgaaugggcaa

SEQ ID NO: 579848 - RNA, 20 nt, Human
cccaggcucaagcaauccuc

SEQ ID NO: 579849 - RNA, 18 nt, Human
cccccuucuccauucuuc

SEQ ID NO: 579850 - RNA, 21 nt, Human
ccccuuuacucacccaacaaa

SEQ ID NO: 579851 - RNA, 18 nt, Human
cccugaacccagaaguuc

SEQ ID NO: 579852 - RNA, 24 nt, Human
ccuccugggcucaggugauucucc

SEQ ID NO: 579853 - RNA, 24 nt, Human
ccugggcucaggugauucucccac

SEQ ID NO: 579854 - RNA, 21 nt, Human
cuaggccucccaaagugcugg

SEQ ID NO: 579855 - RNA, 24 nt, Human
cuauauuauagcacuacaaacauc

SEQ ID NO: 579856 - RNA, 19 nt, Human
cucaaaacccugucugucc

SEQ ID NO: 579857 - RNA, 24 nt, Human
cucaagcaauccuccugccuaggc

SEQ ID NO: 579858 - RNA, 19 nt, Human
cucaccccuuuacucaccc

SEQ ID NO: 579859 - RNA, 21 nt, Human
cucacugcagccuccaccucc

SEQ ID NO: 579860 - RNA, 24 nt, Human
cucacugcagccuccaccuccugg

SEQ ID NO: 579861 - RNA, 23 nt, Human
cucaggugauucucccaccucag

SEQ ID NO: 579862 - RNA, 24 nt, Human
cucaggugauucucccaccucagc

SEQ ID NO: 579863 - RNA, 19 nt, Human
cucccuacacccccaugcc

SEQ ID NO: 579864 - RNA, 19 nt, Human
cuccugccuaggccuccca

SEQ ID NO: 579865 - RNA, 21 nt, Human
cuccugggcucaggugauucu

SEQ ID NO: 579866 - RNA, 19 nt, Human
cucuugggccuuucuucuc

SEQ ID NO: 579867 - RNA, 22 nt, Human
cugaucucacuuggccacacau

SEQ ID NO: 579868 - RNA, 23 nt, Human
cugcagccuccaccuccugggcu

SEQ ID NO: 579869 - RNA, 24 nt, Human
cugcagccuccaccuccugggcuc

SEQ ID NO: 579870 - RNA, 18 nt, Human
cugcucgaagugaggcag

SEQ ID NO: 579871 - RNA, 20 nt, Human
cuggagugcauuggcauggc

SEQ ID NO: 579872 - RNA, 19 nt, Human
cuucuugucucgcucuugg

SEQ ID NO: 579873 - RNA, 20 nt, Human
gaaacuccaucgugaggagc

SEQ ID NO: 579874 - RNA, 18 nt, Human
gaauacaggugugagcca

SEQ ID NO: 579875 - RNA, 21 nt, Human
gaauacaggugugagccacca

SEQ ID NO: 579876 - RNA, 20 nt, Human
gaauuuuauaagugcucucc

SEQ ID NO: 579877 - RNA, 25 nt, Human
gacaccaaguuaaaaacaggaagaa

SEQ ID NO: 579878 - RNA, 24 nt, Human
gaccucaugagcagggagaaacaa

SEQ ID NO: 579879 - RNA, 20 nt, Human
gagagaugugaaaaugaagc

SEQ ID NO: 579880 - RNA, 20 nt, Human
gaguauuucuuaagcuccua

SEQ ID NO: 579881 - RNA, 21 nt, Human
gauucucccaccucagccucc

SEQ ID NO: 579882 - RNA, 19 nt, Human
gcaaaaggugcgaccucau

SEQ ID NO: 579883 - RNA, 23 nt, Human
gcacuacaaacauccuuagucau

SEQ ID NO: 579884 - RNA, 21 nt, Human
gcucacugcagccuccaccuc

SEQ ID NO: 579885 - RNA, 21 nt, Human
gcugaucucacuuggccacac

SEQ ID NO: 579886 - RNA, 22 nt, Human
ggaauacaggugugagccacca

SEQ ID NO: 579887 - RNA, 20 nt, Human
ggacuacaggcacaccaccg

SEQ ID NO: 579888 - RNA, 23 nt, Human
ggagcuaccccgaacucccuaca

SEQ ID NO: 579889 - RNA, 22 nt, Human
ggcaugaaaugaauuugagaug

SEQ ID NO: 579890 - RNA, 18 nt, Human
ggcaugaagagaaggagc

SEQ ID NO: 579891 - RNA, 18 nt, Human
ggcauggcucacugcagc

SEQ ID NO: 579892 - RNA, 18 nt, Human
gggcccaaauggcagcgg

SEQ ID NO: 579893 - RNA, 22 nt, Human
gggcucaggugauucucccacc

SEQ ID NO: 579894 - RNA, 24 nt, Human
gggcucaggugauucucccaccuc

SEQ ID NO: 579895 - RNA, 21 nt, Human
guagagaugggauuuugccau

SEQ ID NO: 579896 - RNA, 23 nt, Human
gucauuccuucauuuguucauuc

SEQ ID NO: 579897 - RNA, 25 nt, Human
gucccaggcucaagcaauccuccug

SEQ ID NO: 579898 - RNA, 24 nt, Human
gugauucucccaccucagccuccc

SEQ ID NO: 579899 - RNA, 24 nt, Human
guuguagagaugggauuuugccau

SEQ ID NO: 579900 - RNA, 18 nt, Human
uaaagcagaguaaauccc

SEQ ID NO: 579901 - RNA, 20 nt, Human
uaaagcagaguaaaucccaa

SEQ ID NO: 579902 - RNA, 23 nt, Human
uaagugcucuccugauaaaaaaa

SEQ ID NO: 579903 - RNA, 18 nt, Human
uaauuuuuguauuuuugu

SEQ ID NO: 579904 - RNA, 26 nt, Human
uaauuuuuguauuuuuguuguagaga

SEQ ID NO: 579905 - RNA, 19 nt, Human
uacaggcacaccaccgcac

SEQ ID NO: 579906 - RNA, 24 nt, Human
uacaggugugagccaccacagcca

SEQ ID NO: 579907 - RNA, 21 nt, Human
uacagugagucgcagugaacc

SEQ ID NO: 579908 - RNA, 19 nt, Human
uacauucucuaggaaacac

SEQ ID NO: 579909 - RNA, 19 nt, Human
uaccccgaacucccuacac

SEQ ID NO: 579910 - RNA, 18 nt, Human
uacccugaacccagaagu

SEQ ID NO: 579911 - RNA, 22 nt, Human
uagagaugggauuuugccaugu

SEQ ID NO: 579912 - RNA, 18 nt, Human
uagcagcaagagcaaaag

SEQ ID NO: 579913 - RNA, 23 nt, Human
ucaaaacccugucuguccucugu

SEQ ID NO: 579914 - RNA, 18 nt, Human
ucaccccuuuacucaccc

SEQ ID NO: 579915 - RNA, 23 nt, Human
ucacugagugagacugaauucuu

SEQ ID NO: 579916 - RNA, 23 nt, Human
ucacugcagccuccaccuccugg

SEQ ID NO: 579917 - RNA, 24 nt, Human
ucacugcagccuccaccuccuggg

SEQ ID NO: 579918 - RNA, 25 nt, Human
ucacugcagccuccaccuccugggc

SEQ ID NO: 579919 - RNA, 27 nt, Human
ucacugcagccuccaccuccugggcuc

SEQ ID NO: 579920 - RNA, 19 nt, Human
uccagccacaggcaugaag

SEQ ID NO: 579921 - RNA, 23 nt, Human
ucccaaagugcugggaauacagg

SEQ ID NO: 579922 - RNA, 24 nt, Human
ucccaaguaacuaggacuacaggc

SEQ ID NO: 579923 - RNA, 18 nt, Human
ucccaggcucaagcaauc

SEQ ID NO: 579924 - RNA, 24 nt, Human
ucccaggcucaagcaauccuccug

SEQ ID NO: 579925 - RNA, 24 nt, Human
uccccugauuucacuuuguaauaa

SEQ ID NO: 579926 - RNA, 22 nt, Human
ucccuacacccccaugcccucc

SEQ ID NO: 579927 - RNA, 26 nt, Human
uccgaaacaucccaccaauccaagca

SEQ ID NO: 579928 - RNA, 22 nt, Human
uccuacaguguaccaggaggca

SEQ ID NO: 579929 - RNA, 23 nt, Human
uccugggcucaggugauucuccc

SEQ ID NO: 579930 - RNA, 19 nt, Human
uccuuagucauuccuucau

SEQ ID NO: 579931 - RNA, 24 nt, Human
ucucacucuguugcccagacugga

SEQ ID NO: 579932 - RNA, 26 nt, Human
ucucacucuguugcccagacuggagu

SEQ ID NO: 579933 - RNA, 27 nt, Human
ucucacucuguugcccagacuggagug

SEQ ID NO: 579934 - RNA, 23 nt, Human
ucucccaccucagccucccaagu

SEQ ID NO: 579935 - RNA, 25 nt, Human
ucucccaccucagccucccaaguaa

SEQ ID NO: 579936 - RNA, 19 nt, Human
ucucgaagucccaggcuca

SEQ ID NO: 579937 - RNA, 22 nt, Human
ucuguaguucuugcuuaacaca

SEQ ID NO: 579938 - RNA, 19 nt, Human
ucugucaaacucuuccauu

SEQ ID NO: 579939 - RNA, 23 nt, Human
ucuguccucuguagcacuuuuag

SEQ ID NO: 579940 - RNA, 23 nt, Human
ucuuggcugcccccuucuccauu

SEQ ID NO: 579941 - RNA, 25 nt, Human
ucuuuauucauuuauuuauuuauuu

SEQ ID NO: 579942 - RNA, 23 nt, Human
ugaaaccauuccaccuggcauua

SEQ ID NO: 579943 - RNA, 24 nt, Human
ugacuuguugaaaccauuccaccu

SEQ ID NO: 579944 - RNA, 20 nt, Human
ugagacagggucucacucug

SEQ ID NO: 579945 - RNA, 22 nt, Human
ugagacagggucucacucuguu

SEQ ID NO: 579946 - RNA, 19 nt, Human
ugaggcagaaguauggauu

SEQ ID NO: 579947 - RNA, 19 nt, Human
ugagucgcagugaacccag

SEQ ID NO: 579948 - RNA, 20 nt, Human
ugauucucccaccucagccu

SEQ ID NO: 579949 - RNA, 24 nt, Human
ugcccagacuggagugcauuggca

SEQ ID NO: 579950 - RNA, 21 nt, Human
ugcucugcccuuggcaugugc

SEQ ID NO: 579951 - RNA, 19 nt, Human
ugcugcagaugcaucccaa

SEQ ID NO: 579952 - RNA, 18 nt, Human
uggagugcauuggcaugg

SEQ ID NO: 579953 - RNA, 20 nt, Human
uggcauuacaaagauaaaga

SEQ ID NO: 579954 - RNA, 21 nt, Human
uggccucaaaacccugucugu

SEQ ID NO: 579955 - RNA, 18 nt, Human
ugggaauacaggugugag

SEQ ID NO: 579956 - RNA, 22 nt, Human
ugggaauacaggugugagccac

SEQ ID NO: 579957 - RNA, 24 nt, Human
ugggaauacaggugugagccacca

SEQ ID NO: 579958 - RNA, 23 nt, Human
ugggauuuugccauguuucccag

SEQ ID NO: 579959 - RNA, 23 nt, Human
ugggcaauuagcagcaagagcaa

SEQ ID NO: 579960 - RNA, 24 nt, Human
ugggcucaggugauucucccaccu

SEQ ID NO: 579961 - RNA, 25 nt, Human
uggugguauaaaggccucucaguag

SEQ ID NO: 579962 - RNA, 24 nt, Human
uguagagaugggauuuugccaugu

SEQ ID NO: 579963 - RNA, 24 nt, Human
uguagcacuuuuagaaauggccug

SEQ ID NO: 579964 - RNA, 19 nt, Human
ugugcagagagaugugaaa

SEQ ID NO: 579965 - RNA, 18 nt, Human
uuacuguacaugguggua

SEQ ID NO: 579966 - RNA, 23 nt, Human
uuauuuauuuauuuauuuuuggu

SEQ ID NO: 579967 - RNA, 22 nt, Human
uucaagggcugcuucuuccucu

SEQ ID NO: 579968 - RNA, 24 nt, Human
uucaugcauucagugaguauuucu

SEQ ID NO: 579969 - RNA, 22 nt, Human
uucauucacuaagaauaaaauu

SEQ ID NO: 579970 - RNA, 21 nt, Human
uucauuccaccacagguccca

SEQ ID NO: 579971 - RNA, 22 nt, Human
uugagacagggucucacucugu

SEQ ID NO: 579972 - RNA, 21 nt, Human
uugcccagacuggagugcauu

SEQ ID NO: 579973 - RNA, 24 nt, Human
uugcccagacuggagugcauuggc

SEQ ID NO: 579974 - RNA, 23 nt, Human
uuguagagaugggauuuugccau

SEQ ID NO: 579975 - RNA, 24 nt, Human
uuguagagaugggauuuugccaug

SEQ ID NO: 579976 - RNA, 24 nt, Human
uuuauuuauuuuugagacaggguc

SEQ ID NO: 579977 - RNA, 24 nt, Human
uuucccagucuggucucgaagucc

SEQ ID NO: 579978 - RNA, 24 nt, Human
uuucuguauaugaauuuguuaaua

SEQ ID NO: 579979 - RNA, 22 nt, Human
uuuuuguauuuuuguuguagag

SEQ ID NO: 579980 - RNA, 25 nt, Human
uuuuuguauuuuuguuguagagaug

SEQ ID NO: 579981 - RNA, 20 nt, Human
aaaaaaaaaaagcagagaaa

SEQ ID NO: 579982 - RNA, 18 nt, Human
aaaaaaaagcagagaaaa

SEQ ID NO: 579983 - RNA, 24 nt, Human
aaagugcugggauuacaggcauga

SEQ ID NO: 579984 - RNA, 24 nt, Human
aaauccauaccugauggagacagg

SEQ ID NO: 579985 - RNA, 18 nt, Human
aacaugaauacagcaaaa

SEQ ID NO: 579986 - RNA, 19 nt, Human
aaccucagaagagaugagg

SEQ ID NO: 579987 - RNA, 19 nt, Human
aagcagacuccugacauua

SEQ ID NO: 579988 - RNA, 24 nt, Human
aaguaauuuacccaccuuggccuc

SEQ ID NO: 579989 - RNA, 19 nt, Human
aagugcugggauuacaggc

SEQ ID NO: 579990 - RNA, 21 nt, Human
aagugcugggauuacaggcau

SEQ ID NO: 579991 - RNA, 26 nt, Human
aagugcugggauuacaggcaugagcc

SEQ ID NO: 579992 - RNA, 24 nt, Human
aauaaacauuaaaacacaucuaaa

SEQ ID NO: 579993 - RNA, 18 nt, Human
acaaagcuaagaguauca

SEQ ID NO: 579994 - RNA, 19 nt, Human
accugcccaacucuucagc

SEQ ID NO: 579995 - RNA, 18 nt, Human
accuguuguucaugcagg

SEQ ID NO: 579996 - RNA, 18 nt, Human
acuaugccgcccaggcaa

SEQ ID NO: 579997 - RNA, 20 nt, Human
acugaauuuauugguaagcu

SEQ ID NO: 579998 - RNA, 22 nt, Human
agagaaaauuguuuaucagagg

SEQ ID NO: 579999 - RNA, 19 nt, Human
agaguucauguucucuccu

SEQ ID NO: 580000 - RNA, 24 nt, Human
caaagugcugggauuacaggcaug

SEQ ID NO: 580001 - RNA, 23 nt, Human
caaguaauuuacccaccuuggcc

SEQ ID NO: 580002 - RNA, 24 nt, Human
cacuaugccgcccaggcaagucuc

SEQ ID NO: 580003 - RNA, 23 nt, Human
cacuuucauuuuuuuucugccac

SEQ ID NO: 580004 - RNA, 23 nt, Human
cagcaaguagaaggcucccuucu

SEQ ID NO: 580005 - RNA, 18 nt, Human
caggaagggccuuuagug

SEQ ID NO: 580006 - RNA, 24 nt, Human
caguagagacaaggucucacuaug

SEQ ID NO: 580007 - RNA, 23 nt, Human
ccaaagugcugggauuacaggca

SEQ ID NO: 580008 - RNA, 24 nt, Human
ccaaagugcugggauuacaggcau

SEQ ID NO: 580009 - RNA, 21 nt, Human
ccaacucuucagcccugaccu

SEQ ID NO: 580010 - RNA, 24 nt, Human
cccaaagugcugggauuacaggca

SEQ ID NO: 580011 - RNA, 21 nt, Human
cccaacucuucagcccugacc

SEQ ID NO: 580012 - RNA, 23 nt, Human
cccaagcagacuccugacauuaa

SEQ ID NO: 580013 - RNA, 21 nt, Human
cccaugcagauaacaaccugc

SEQ ID NO: 580014 - RNA, 23 nt, Human
ccccaccucuccacuggaaccua

SEQ ID NO: 580015 - RNA, 18 nt, Human
cuggccaaauguugcccc

SEQ ID NO: 580016 - RNA, 18 nt, Human
gagacaggaagggccuuu

SEQ ID NO: 580017 - RNA, 18 nt, Human
gauuacaggcaugagcca

SEQ ID NO: 580018 - RNA, 18 nt, Human
gauuacaggcaugagcca

SEQ ID NO: 580019 - RNA, 22 nt, Human
gauuacaggcaugagccaucac

SEQ ID NO: 580020 - RNA, 19 nt, Human
gcagauaacaaccugccca

SEQ ID NO: 580021 - RNA, 23 nt, Human
ggauuacaggcaugagccaucac

SEQ ID NO: 580022 - RNA, 24 nt, Human
guaauuuacccaccuuggccuccc

SEQ ID NO: 580023 - RNA, 21 nt, Human
uaaacaaagcacugaauuaga

SEQ ID NO: 580024 - RNA, 19 nt, Human
uaacaaccugcccaacucu

SEQ ID NO: 580025 - RNA, 20 nt, Human
uaagacauucguuguaaaca

SEQ ID NO: 580026 - RNA, 25 nt, Human
uaagucacaaaaacaugaauacagc

SEQ ID NO: 580027 - RNA, 24 nt, Human
uaauuuacccaccuuggccuccca

SEQ ID NO: 580028 - RNA, 22 nt, Human
uacaggcaugagccaucacacc

SEQ ID NO: 580029 - RNA, 22 nt, Human
uacccaccuuggccucccaaag

SEQ ID NO: 580030 - RNA, 23 nt, Human
uacccaccuuggccucccaaagu

SEQ ID NO: 580031 - RNA, 18 nt, Human
uagaaggcucccuuucag

SEQ ID NO: 580032 - RNA, 18 nt, Human
uagcaaagaaaggcuaug

SEQ ID NO: 580033 - RNA, 24 nt, Human
uaugccgcccaggcaagucucgaa

SEQ ID NO: 580034 - RNA, 23 nt, Human
uauucucauuuuacagaugagaa

SEQ ID NO: 580035 - RNA, 19 nt, Human
ucaaguaauuuacccaccu

SEQ ID NO: 580036 - RNA, 22 nt, Human
ucacaccuggccaauuuuucua

SEQ ID NO: 580037 - RNA, 26 nt, Human
ucacauuaucuccuuuacauuuuaag

SEQ ID NO: 580038 - RNA, 21 nt, Human
ucaguagagacaaggucucac

SEQ ID NO: 580039 - RNA, 26 nt, Human
ucauaauuaaaaaaaaaaagcagaga

SEQ ID NO: 580040 - RNA, 23 nt, Human
uccacuggaaccuagugacccca

SEQ ID NO: 580041 - RNA, 21 nt, Human
uccauaccugauggagacagg

SEQ ID NO: 580042 - RNA, 22 nt, Human
uccauacucgauaugaaagggg

SEQ ID NO: 580043 - RNA, 24 nt, Human
ucccaaagugcugggauuacaggc

SEQ ID NO: 580044 - RNA, 26 nt, Human
ucucacuaugccgcccaggcaagucu

SEQ ID NO: 580045 - RNA, 21 nt, Human
ucucgaacugcuggguucaag

SEQ ID NO: 580046 - RNA, 22 nt, Human
ucuucagcccugaccuggcauc

SEQ ID NO: 580047 - RNA, 20 nt, Human
ugaauacagcaaaauuucac

SEQ ID NO: 580048 - RNA, 21 nt, Human
ugaauacagcaaaauuucacu

SEQ ID NO: 580049 - RNA, 19 nt, Human
ugaauuagacagaauagau

SEQ ID NO: 580050 - RNA, 19 nt, Human
ugaccuggcaucauauuua

SEQ ID NO: 580051 - RNA, 22 nt, Human
ugagaacgaccagagauguuag

SEQ ID NO: 580052 - RNA, 20 nt, Human
ugccagguggcugcagagcg

SEQ ID NO: 580053 - RNA, 19 nt, Human
ugcccaaaauuacucaaau

SEQ ID NO: 580054 - RNA, 27 nt, Human
ugcccaacucuucagcccugaccuggc

SEQ ID NO: 580055 - RNA, 20 nt, Human
ugccccaaauccauaccuga

SEQ ID NO: 580056 - RNA, 19 nt, Human
uggcaguucuucucugacu

SEQ ID NO: 580057 - RNA, 18 nt, Human
ugggauuacaggcaugag

SEQ ID NO: 580058 - RNA, 19 nt, Human
ugggauuacaggcaugagc

SEQ ID NO: 580059 - RNA, 21 nt, Human
ugggauuacaggcaugagcca

SEQ ID NO: 580060 - RNA, 21 nt, Human
ugggauuacaggcaugagcca

SEQ ID NO: 580061 - RNA, 22 nt, Human
ugggauuacaggcaugagccau

SEQ ID NO: 580062 - RNA, 23 nt, Human
ugggauuacaggcaugagccauc

SEQ ID NO: 580063 - RNA, 24 nt, Human
ugggauuacaggcaugagccauca

SEQ ID NO: 580064 - RNA, 24 nt, Human
ugggauuacaggcaugagccauca

SEQ ID NO: 580065 - RNA, 27 nt, Human
ugggauuacaggcaugagccaucacac

SEQ ID NO: 580066 - RNA, 21 nt, Human
ugucacauuaucuccuuuaca

SEQ ID NO: 580067 - RNA, 19 nt, Human
ugucagguacuucuuauuc

SEQ ID NO: 580068 - RNA, 21 nt, Human
uguuagcuugcccaaaauuac

SEQ ID NO: 580069 - RNA, 21 nt, Human
uguuuucaguagagacaaggu

SEQ ID NO: 580070 - RNA, 22 nt, Human
uuaaaaaaaaaaagcagagaaa

SEQ ID NO: 580071 - RNA, 21 nt, Human
uuaaaaugucuuccgcaacua

SEQ ID NO: 580072 - RNA, 23 nt, Human
uucaaguaauuuacccaccuugg

SEQ ID NO: 580073 - RNA, 24 nt, Human
uucaaguaauuuacccaccuuggc

SEQ ID NO: 580074 - RNA, 18 nt, Human
uuggccucccaaagugcu

SEQ ID NO: 580075 - RNA, 21 nt, Human
uuuacccaccuuggccuccca

SEQ ID NO: 580076 - RNA, 23 nt, Human
uuucauuuuuuuucugccacauu

SEQ ID NO: 580077 - RNA, 23 nt, Human
aaaaaaaaaaaaagcagcauuug

SEQ ID NO: 580078 - RNA, 26 nt, Human
aaaaaaaagcagcauuugccugggaa

SEQ ID NO: 580079 - RNA, 22 nt, Human
aaaaaagcagcauuugccuggg

SEQ ID NO: 580080 - RNA, 20 nt, Human
aaacaaaacaucaaauggcc

SEQ ID NO: 580081 - RNA, 24 nt, Human
aaacaauaacaaaaacccugccca

SEQ ID NO: 580082 - RNA, 24 nt, Human
aaacaauaacaaaaacccugccca

SEQ ID NO: 580083 - RNA, 20 nt, Human
aaagguaucuaagacaaagg

SEQ ID NO: 580084 - RNA, 24 nt, Human
aagcaaguacauauacaaauccac

SEQ ID NO: 580085 - RNA, 18 nt, Human
aagguaucaucauuuuaa

SEQ ID NO: 580086 - RNA, 23 nt, Human
acaauaacaaaaacccugcccaa

SEQ ID NO: 580087 - RNA, 20 nt, Human
acaaucgacugaugaaaaaa

SEQ ID NO: 580088 - RNA, 23 nt, Human
agaacacaccuacaauuaacuua

SEQ ID NO: 580089 - RNA, 20 nt, Human
agagauaaagcaaguacaua

SEQ ID NO: 580090 - RNA, 19 nt, Human
aggaucuacuuuuuacaca

SEQ ID NO: 580091 - RNA, 24 nt, Human
auaaagcaaguacauauacaaauc

SEQ ID NO: 580092 - RNA, 21 nt, Human
caaaacaucaaauggccugaa

SEQ ID NO: 580093 - RNA, 19 nt, Human
caauaacaaaaacccugcc

SEQ ID NO: 580094 - RNA, 19 nt, Human
cacuauaagcaaacaaaac

SEQ ID NO: 580095 - RNA, 23 nt, Human
cagaacacaccuacaauuaacuu

SEQ ID NO: 580096 - RNA, 21 nt, Human
caucacuauaagcaaacaaaa

SEQ ID NO: 580097 - RNA, 23 nt, Human
ccauaauacauauuauuucacga

SEQ ID NO: 580098 - RNA, 22 nt, Human
cccaaaaaaaaaaaaagcagca

SEQ ID NO: 580099 - RNA, 21 nt, Human
cgacugaugaaaaaacaagcu

SEQ ID NO: 580100 - RNA, 23 nt, Human
cgacugaugaaaaaacaagcuuc

SEQ ID NO: 580101 - RNA, 23 nt, Human
cuaagacaaagguauagauaccc

SEQ ID NO: 580102 - RNA, 28 nt, Human
cuggugguggcaguugcaaguaucuuuu

SEQ ID NO: 580103 - RNA, 25 nt, Human
cuuccaaaaaaagguaucuaagaca

SEQ ID NO: 580104 - RNA, 19 nt, Human
gaacacaccuacaauuaac

SEQ ID NO: 580105 - RNA, 21 nt, Human
gaacacaucacuauaagcaaa

SEQ ID NO: 580106 - RNA, 23 nt, Human
gguggcaguugcaaguaucuuuu

SEQ ID NO: 580107 - RNA, 25 nt, Human
gucauaugugaaucaaccuuuucug

SEQ ID NO: 580108 - RNA, 23 nt, Human
uaaagcaaguacauauacaaauc

SEQ ID NO: 580109 - RNA, 24 nt, Human
uaaagcaaguacauauacaaaucc

SEQ ID NO: 580110 - RNA, 24 nt, Human
uaacaaaaacccugcccaaauauu

SEQ ID NO: 580111 - RNA, 21 nt, Human
uaagaaauauuaaaugugaua

SEQ ID NO: 580112 - RNA, 19 nt, Human
uacaaacaauaacaaaaac

SEQ ID NO: 580113 - RNA, 20 nt, Human
uacaagguaucaucauuuua

SEQ ID NO: 580114 - RNA, 25 nt, Human
uacaauuaacuuauuaaugcugaag

SEQ ID NO: 580115 - RNA, 18 nt, Human
ucagaacacaccuacaau

SEQ ID NO: 580116 - RNA, 18 nt, Human
ucccaaaaaaaaaaaaag

SEQ ID NO: 580117 - RNA, 20 nt, Human
ucccaaaaaaaaaaaaagca

SEQ ID NO: 580118 - RNA, 20 nt, Human
ucuaaaauaccuuuggauua

SEQ ID NO: 580119 - RNA, 23 nt, Human
ugaaaaaacaagcuucauauuca

SEQ ID NO: 580120 - RNA, 18 nt, Human
ugcugcacugaaggaggc

SEQ ID NO: 580121 - RNA, 24 nt, Human
uggaaaagcuaaguuuggagcuga

SEQ ID NO: 580122 - RNA, 25 nt, Human
ugguggcaguugcaaguaucuuuug

SEQ ID NO: 580123 - RNA, 22 nt, Human
uucaguaauacacagucacuau

SEQ ID NO: 580124 - RNA, 19 nt, Human
uuccaaaaaaagguaucua

SEQ ID NO: 580125 - RNA, 28 nt, Human
uugcaaguaucuuuugcugcacugaagg

SEQ ID NO: 580126 - RNA, 21 nt, Human
uuuaagaaauauuaaauguga

SEQ ID NO: 580127 - RNA, 19 nt, Human
uuuacacaaucucaguaac

SEQ ID NO: 580128 - RNA, 21 nt, Human
aaacaagucuacaccauucuu

SEQ ID NO: 580129 - RNA, 19 nt, Human
aagcuguaacuggaaccua

SEQ ID NO: 580130 - RNA, 21 nt, Human
aauaagugacaaaaacaugca

SEQ ID NO: 580131 - RNA, 22 nt, Human
aauuuauaaaacaggaaaaaag

SEQ ID NO: 580132 - RNA, 18 nt, Human
agaagugugaacuuuagg

SEQ ID NO: 580133 - RNA, 24 nt, Human
aggcaaucacuaaccugaaauaag

SEQ ID NO: 580134 - RNA, 22 nt, Human
auuguacuauaggggaaguauc

SEQ ID NO: 580135 - RNA, 25 nt, Human
caauagauauuucuucuuuaaaucc

SEQ ID NO: 580136 - RNA, 23 nt, Human
cacaaaacuauaacuaauacaga

SEQ ID NO: 580137 - RNA, 21 nt, Human
cagaguggagaguuacaagaa

SEQ ID NO: 580138 - RNA, 29 nt, Human
gaaaagcaacauaaaaaaauggagcauua

SEQ ID NO: 580139 - RNA, 19 nt, Human
gaaauaagugacaaaaaca

SEQ ID NO: 580140 - RNA, 22 nt, Human
gaggacagggucguggagucca

SEQ ID NO: 580141 - RNA, 25 nt, Human
gcgcggacagggccgaggacagggu

SEQ ID NO: 580142 - RNA, 20 nt, Human
ggggguggagcgaccggccu

SEQ ID NO: 580143 - RNA, 18 nt, Human
uaaaacaggaaaaaaggu

SEQ ID NO: 580144 - RNA, 21 nt, Human
uaaagcuguauaaaagccaug

SEQ ID NO: 580145 - RNA, 19 nt, Human
uaaaugucuagcuaaaagc

SEQ ID NO: 580146 - RNA, 23 nt, Human
uaaccugaaauaagugacaaaaa

SEQ ID NO: 580147 - RNA, 24 nt, Human
uaagugacaaaaacaugcagauga

SEQ ID NO: 580148 - RNA, 22 nt, Human
uaaguuucucaaauuauguuua

SEQ ID NO: 580149 - RNA, 21 nt, Human
uaggcaaucacuaaccugaaa

SEQ ID NO: 580150 - RNA, 18 nt, Human
uauaaaagccaugcacag

SEQ ID NO: 580151 - RNA, 23 nt, Human
uauuguacuauaggggaaguauc

SEQ ID NO: 580152 - RNA, 19 nt, Human
ucacaaaacuauaacuaau

SEQ ID NO: 580153 - RNA, 18 nt, Human
ucccuguaggggauaggc

SEQ ID NO: 580154 - RNA, 18 nt, Human
ucuauaaaaacauucaga

SEQ ID NO: 580155 - RNA, 20 nt, Human
ugaaauacuaucauauaaca

SEQ ID NO: 580156 - RNA, 26 nt, Human
ugagaaacuuguuguaaugagucugu

SEQ ID NO: 580157 - RNA, 26 nt, Human
uuacuaaagcuguauaaaagccaugc

SEQ ID NO: 580158 - RNA, 21 nt, Human
uucccagucuauggguuucug

SEQ ID NO: 580159 - RNA, 18 nt, Human
uuggcuuauaaguguuag

SEQ ID NO: 580160 - RNA, 19 nt, Human
uuguaaugagucuguacca

SEQ ID NO: 580161 - RNA, 26 nt, Human
uuuauaaaacaggaaaaaagguuauu

SEQ ID NO: 580162 - RNA, 21 nt, Human
aaaaaaaaaaaaaacaaaaaa

SEQ ID NO: 580163 - RNA, 21 nt, Human
aaaaaaaaaaaaacaaaaaaa

SEQ ID NO: 580164 - RNA, 28 nt, Human
aaaaaaaaaaaaacaaaaaaaaaggacc

SEQ ID NO: 580165 - RNA, 25 nt, Human
aaaaaaaaaaaacaaaaaaaaagga

SEQ ID NO: 580166 - RNA, 23 nt, Human
aaaaaaaaaacaaaaaaaaagga

SEQ ID NO: 580167 - RNA, 23 nt, Human
aaaacaaaaaaaaaggacaacca

SEQ ID NO: 580168 - RNA, 18 nt, Human
aaacaaaaaaaaaggaca

SEQ ID NO: 580169 - RNA, 22 nt, Human
aaacaaaaaaaaaggacaacca

SEQ ID NO: 580170 - RNA, 20 nt, Human
aaagcuuuuccauuacucag

SEQ ID NO: 580171 - RNA, 25 nt, Human
aacacaaugggaugucuauagcuaa

SEQ ID NO: 580172 - RNA, 22 nt, Human
aaccagcccaccagucccagca

SEQ ID NO: 580173 - RNA, 23 nt, Human
aagaagaaagagacauagcuuaa

SEQ ID NO: 580174 - RNA, 19 nt, Human
aagauaacacaaugggaug

SEQ ID NO: 580175 - RNA, 19 nt, Human
aagcuccucccaccucucc

SEQ ID NO: 580176 - RNA, 21 nt, Human
aagugacucaagcgaaccugu

SEQ ID NO: 580177 - RNA, 23 nt, Human
acagguauucugcaaaggagaac

SEQ ID NO: 580178 - RNA, 22 nt, Human
accagucccagcaaacucuccu

SEQ ID NO: 580179 - RNA, 23 nt, Human
acccggcaacagacccuuuuugc

SEQ ID NO: 580180 - RNA, 18 nt, Human
acuacagcugccauggcc

SEQ ID NO: 580181 - RNA, 27 nt, Human
agaaagagacauagcuuaauuacagaa

SEQ ID NO: 580182 - RNA, 24 nt, Human
agaacuugacaaggaaugcuacaa

SEQ ID NO: 580183 - RNA, 21 nt, Human
agacccuuuuugcugauauua

SEQ ID NO: 580184 - RNA, 20 nt, Human
agcaaucuaaggucccaggc

SEQ ID NO: 580185 - RNA, 19 nt, Human
aggaagugaguagcuguca

SEQ ID NO: 580186 - RNA, 21 nt, Human
aggugauccgccccccagagc

SEQ ID NO: 580187 - RNA, 26 nt, Human
augaaguucuccucuuuuccuuaaaa

SEQ ID NO: 580188 - RNA, 24 nt, Human
caacagacccuuuuugcugauauu

SEQ ID NO: 580189 - RNA, 18 nt, Human
caagaggcggccccgaag

SEQ ID NO: 580190 - RNA, 22 nt, Human
cacccacaaccacuagacaaca

SEQ ID NO: 580191 - RNA, 18 nt, Human
cacgugccggcuguucuc

SEQ ID NO: 580192 - RNA, 22 nt, Human
cagacccuuuuugcugauauua

SEQ ID NO: 580193 - RNA, 20 nt, Human
cagcugccauggccgccaag

SEQ ID NO: 580194 - RNA, 25 nt, Human
caggaaaccagcccaccagucccag

SEQ ID NO: 580195 - RNA, 23 nt, Human
ccagcaaacucuccuccgagccu

SEQ ID NO: 580196 - RNA, 21 nt, Human
ccaguucuuuaggccuuccca

SEQ ID NO: 580197 - RNA, 20 nt, Human
ccaucuucccugagaauagg

SEQ ID NO: 580198 - RNA, 21 nt, Human
cccccagagcaggaaaccagc

SEQ ID NO: 580199 - RNA, 24 nt, Human
cccccagagcaggaaaccagcccu

SEQ ID NO: 580200 - RNA, 22 nt, Human
ccccccagagcaggaaaccagc

SEQ ID NO: 580201 - RNA, 24 nt, Human
cccggcaacagacccuuuuugcug

SEQ ID NO: 580202 - RNA, 18 nt, Human
cccuauacccggugcugc

SEQ ID NO: 580203 - RNA, 19 nt, Human
cccuggaccaaggcuggac

SEQ ID NO: 580204 - RNA, 22 nt, Human
cccuggaccaaggcuggaccuu

SEQ ID NO: 580205 - RNA, 23 nt, Human
ccuagaacugaaacuacuagaac

SEQ ID NO: 580206 - RNA, 20 nt, Human
ccucucuaggaauguggaga

SEQ ID NO: 580207 - RNA, 24 nt, Human
ccucuggacucuaggaauacaugu

SEQ ID NO: 580208 - RNA, 18 nt, Human
ccuggaccaaggcuggac

SEQ ID NO: 580209 - RNA, 21 nt, Human
cgaaccuguucguucccuagg

SEQ ID NO: 580210 - RNA, 21 nt, Human
cgaaggugauccgccccccuc

SEQ ID NO: 580211 - RNA, 24 nt, Human
cgauugucggauugaggguggcac

SEQ ID NO: 580212 - RNA, 25 nt, Human
cgccccugucuccaagaggcggccc

SEQ ID NO: 580213 - RNA, 18 nt, Human
cgugccaaaggagcuguu

SEQ ID NO: 580214 - RNA, 23 nt, Human
cucacuggauggcaaacggcccu

SEQ ID NO: 580215 - RNA, 19 nt, Human
cucccaccucuccugcucc

SEQ ID NO: 580216 - RNA, 23 nt, Human
cuuucaaugugucuugcuaucau

SEQ ID NO: 580217 - RNA, 21 nt, Human
gaagaaagagacauagcuuaa

SEQ ID NO: 580218 - RNA, 25 nt, Human
gaagcuccucccaccucuccugcuc

SEQ ID NO: 580219 - RNA, 19 nt, Human
gaaggugauccgcccccca

SEQ ID NO: 580220 - RNA, 18 nt, Human
gacccggagucgccgaua

SEQ ID NO: 580221 - RNA, 21 nt, Human
gacugaggaagugaguagcug

SEQ ID NO: 580222 - RNA, 20 nt, Human
gagccugggaugaggaaagg

SEQ ID NO: 580223 - RNA, 24 nt, Human
gaggaagugaguagcugucacgug

SEQ ID NO: 580224 - RNA, 22 nt, Human
ggaaaagucaauggggaaaaug

SEQ ID NO: 580225 - RNA, 23 nt, Human
guucuccucuuuuccuuaaaacu

SEQ ID NO: 580226 - RNA, 23 nt, Human
uaaaaaaagcuacuacaaagaua

SEQ ID NO: 580227 - RNA, 21 nt, Human
uaaacuaagaagaaagagaca

SEQ ID NO: 580228 - RNA, 20 nt, Human
uaaaucaauaggcaaacacu

SEQ ID NO: 580229 - RNA, 22 nt, Human
uaacagagaugggaaaagucaa

SEQ ID NO: 580230 - RNA, 24 nt, Human
uaauuaaaaaaaaaaaaaacaaaa

SEQ ID NO: 580231 - RNA, 21 nt, Human
uacaaagauaucaauaaccau

SEQ ID NO: 580232 - RNA, 22 nt, Human
uagaacuuggcuccucucuagg

SEQ ID NO: 580233 - RNA, 18 nt, Human
uagaagcuccucccaccu

SEQ ID NO: 580234 - RNA, 21 nt, Human
uagaagcuccucccaccucuc

SEQ ID NO: 580235 - RNA, 21 nt, Human
uagcuaacugcaacguaaaug

SEQ ID NO: 580236 - RNA, 21 nt, Human
ucaauggauaucucuuuugag

SEQ ID NO: 580237 - RNA, 21 nt, Human
ucacccacaaccacuagacaa

SEQ ID NO: 580238 - RNA, 18 nt, Human
ucaccuccccucuggacu

SEQ ID NO: 580239 - RNA, 21 nt, Human
ucacuggauggcaaacggccc

SEQ ID NO: 580240 - RNA, 18 nt, Human
ucccaccucuccugcucc

SEQ ID NO: 580241 - RNA, 19 nt, Human
ucccaggcucuggguucuc

SEQ ID NO: 580242 - RNA, 22 nt, Human
ucccuagagggauugcugaucu

SEQ ID NO: 580243 - RNA, 22 nt, Human
ucccuaggcgccccugucucca

SEQ ID NO: 580244 - RNA, 21 nt, Human
ucgccaaagcugaccuaguau

SEQ ID NO: 580245 - RNA, 23 nt, Human
ucucuaggaauguggagacaggu

SEQ ID NO: 580246 - RNA, 27 nt, Human
ucuugaacguacccggcaacagacccu

SEQ ID NO: 580247 - RNA, 21 nt, Human
ugaaggaaagccuagaacuga

SEQ ID NO: 580248 - RNA, 22 nt, Human
ugacacaaagcugucucugccc

SEQ ID NO: 580249 - RNA, 24 nt, Human
ugacucaagcgaaccuguucguuc

SEQ ID NO: 580250 - RNA, 21 nt, Human
ugaggaaaggaguccugcagg

SEQ ID NO: 580251 - RNA, 18 nt, Human
ugagugggugcuaugacc

SEQ ID NO: 580252 - RNA, 20 nt, Human
ugaucugacuguucuugaag

SEQ ID NO: 580253 - RNA, 19 nt, Human
ugcugcccaugguacugca

SEQ ID NO: 580254 - RNA, 28 nt, Human
uggagacagguauucugcaaaggagaac

SEQ ID NO: 580255 - RNA, 22 nt, Human
ugggaaccauguuaaaaaucaa

SEQ ID NO: 580256 - RNA, 20 nt, Human
uggguucucagaugccaguc

SEQ ID NO: 580257 - RNA, 18 nt, Human
ugucucugcccuauaccc

SEQ ID NO: 580258 - RNA, 23 nt, Human
uuaaaacuaaauuccaucuuccc

SEQ ID NO: 580259 - RNA, 23 nt, Human
uuaaauggugcuuagguucuuua

SEQ ID NO: 580260 - RNA, 20 nt, Human
uuaacagagaugggaaaagu

SEQ ID NO: 580261 - RNA, 20 nt, Human
uuacauggugggaaccaugu

SEQ ID NO: 580262 - RNA, 22 nt, Human
uuacauggugggaaccauguuu

SEQ ID NO: 580263 - RNA, 20 nt, Human
uuccaagagagugggcuuuc

SEQ ID NO: 580264 - RNA, 18 nt, Human
uuccaguucuuuaggccu

SEQ ID NO: 580265 - RNA, 21 nt, Human
uucucguggguuaacagagau

SEQ ID NO: 580266 - RNA, 23 nt, Human
uugaacguacccggcaacagacc

SEQ ID NO: 580267 - RNA, 25 nt, Human
uuuaauaucccuuaauuuccaaaga

SEQ ID NO: 580268 - RNA, 21 nt, Human
uuuagaagcuccucccaccuc

SEQ ID NO: 580269 - RNA, 20 nt, Human
uuuccugacccuaaucccag

SEQ ID NO: 580270 - RNA, 20 nt, Human
aaaacaaaugaaaaaccaag

SEQ ID NO: 580271 - RNA, 21 nt, Human
aaacaaauaaaugucccaaga

SEQ ID NO: 580272 - RNA, 22 nt, Human
aaacaaauaaaugucccaagau

SEQ ID NO: 580273 - RNA, 21 nt, Human
aaacaaaugaaaaaccaagau

SEQ ID NO: 580274 - RNA, 19 nt, Human
aaauaaaugucccaagauc

SEQ ID NO: 580275 - RNA, 21 nt, Human
aacuuaccaccuccuucaaau

SEQ ID NO: 580276 - RNA, 21 nt, Human
aagcaaauuuuuuuaaaaucu

SEQ ID NO: 580277 - RNA, 22 nt, Human
aauaaucaaugaauguaaaagc

SEQ ID NO: 580278 - RNA, 20 nt, Human
acauagcaagagcuuuagag

SEQ ID NO: 580279 - RNA, 21 nt, Human
acauagcaagagcuuuagaga

SEQ ID NO: 580280 - RNA, 23 nt, Human
accaccuccuucaaauaaaagcg

SEQ ID NO: 580281 - RNA, 19 nt, Human
acuuucaaaaaugcaagaa

SEQ ID NO: 580282 - RNA, 20 nt, Human
agaaaaugcuauaaagcaau

SEQ ID NO: 580283 - RNA, 25 nt, Human
aucaaaauacagaagagguauucua

SEQ ID NO: 580284 - RNA, 19 nt, Human
augacauucuacuuuucca

SEQ ID NO: 580285 - RNA, 20 nt, Human
caaaauaaccuuuacuaagc

SEQ ID NO: 580286 - RNA, 22 nt, Human
caaauaaaugucccaagaucuc

SEQ ID NO: 580287 - RNA, 22 nt, Human
caaaugaaaaaccaagaugaug

SEQ ID NO: 580288 - RNA, 23 nt, Human
cagccgaguccuuugugagacuu

SEQ ID NO: 580289 - RNA, 19 nt, Human
caggauuuuuauuagggca

SEQ ID NO: 580290 - RNA, 24 nt, Human
ccuccuucaaauaaaagcgagaac

SEQ ID NO: 580291 - RNA, 21 nt, Human
cggcacugagaaaagcagcca

SEQ ID NO: 580292 - RNA, 18 nt, Human
cuaaggagaaauuaguaa

SEQ ID NO: 580293 - RNA, 24 nt, Human
gaacaauuucagcauauaaaccaa

SEQ ID NO: 580294 - RNA, 21 nt, Human
gacaacuacuucuaaugugua

SEQ ID NO: 580295 - RNA, 24 nt, Human
uaaaaaaacaaugaauaugcagga

SEQ ID NO: 580296 - RNA, 24 nt, Human
uaaaaucucaggaacuauagacau

SEQ ID NO: 580297 - RNA, 22 nt, Human
uagauuuuuaacacugugaccc

SEQ ID NO: 580298 - RNA, 25 nt, Human
uagcaacauagcaagagcuuuagag

SEQ ID NO: 580299 - RNA, 26 nt, Human
uauagcaacauagcaagagcuuuaga

SEQ ID NO: 580300 - RNA, 24 nt, Human
uauuucuuaaagcaguggagaaua

SEQ ID NO: 580301 - RNA, 20 nt, Human
ucaggaacuauagacaugau

SEQ ID NO: 580302 - RNA, 18 nt, Human
ugaaaugccaaggugaaa

SEQ ID NO: 580303 - RNA, 18 nt, Human
ugaacugaauuauuucuu

SEQ ID NO: 580304 - RNA, 20 nt, Human
ugaacugaauuauuucuuaa

SEQ ID NO: 580305 - RNA, 19 nt, Human
uguaacagauacugaaaug

SEQ ID NO: 580306 - RNA, 21 nt, Human
uguaacagauacugaaaugcc

SEQ ID NO: 580307 - RNA, 18 nt, Human
uuaacacugugacccaau

SEQ ID NO: 580308 - RNA, 21 nt, Human
uucagcauauaaaccaacaag

SEQ ID NO: 580309 - RNA, 22 nt, Human
uugugagacuucucugaagucu

SEQ ID NO: 580310 - RNA, 18 nt, Human
uuuuuuuuuuuuuuuuug

SEQ ID NO: 580311 - RNA, 18 nt, Human
uuuuuuuuuuuuuuuuug

SEQ ID NO: 580312 - RNA, 22 nt, Human
uuuuuuuuuuuuuuuuuggcag

SEQ ID NO: 580313 - RNA, 22 nt, Human
uuuuuuuuuuuuuuuuuuuggc

SEQ ID NO: 580314 - RNA, 22 nt, Human
aaauaagagauagaaacccaaa

SEQ ID NO: 580315 - RNA, 21 nt, Human
aagagauagaaacccaaauua

SEQ ID NO: 580316 - RNA, 22 nt, Human
aagcagaagagaugcauucugg

SEQ ID NO: 580317 - RNA, 22 nt, Human
acaguccauaaauaaguuaucc

SEQ ID NO: 580318 - RNA, 23 nt, Human
agagaaggcagcagcacgugagg

SEQ ID NO: 580319 - RNA, 23 nt, Human
agcagcacgugaggucaaggaca

SEQ ID NO: 580320 - RNA, 19 nt, Human
agccaacuagccauagccu

SEQ ID NO: 580321 - RNA, 19 nt, Human
agcuuauacagguuuacac

SEQ ID NO: 580322 - RNA, 18 nt, Human
aggcagagaaggcagcag

SEQ ID NO: 580323 - RNA, 23 nt, Human
aggcagcagcacgugaggucaag

SEQ ID NO: 580324 - RNA, 18 nt, Human
agggaccucaccccagag

SEQ ID NO: 580325 - RNA, 22 nt, Human
agggggugcuguuccaagauug

SEQ ID NO: 580326 - RNA, 20 nt, Human
aggucgcucagagagucuuc

SEQ ID NO: 580327 - RNA, 22 nt, Human
augaugggugucuguucuccuu

SEQ ID NO: 580328 - RNA, 29 nt, Human
augggggagauaggugcaaugaagggggc

SEQ ID NO: 580329 - RNA, 21 nt, Human
caaauaagagauagaaaccca

SEQ ID NO: 580330 - RNA, 22 nt, Human
cauuaccaagucugaccuuggc

SEQ ID NO: 580331 - RNA, 20 nt, Human
ccacuuccggacucacgccc

SEQ ID NO: 580332 - RNA, 22 nt, Human
ccggacucacgcccaguacugg

SEQ ID NO: 580333 - RNA, 20 nt, Human
ccucuggaagaaggggcagg

SEQ ID NO: 580334 - RNA, 18 nt, Human
cgcccaguacugggggca

SEQ ID NO: 580335 - RNA, 24 nt, Human
cugagucgccgagucuauggcaug

SEQ ID NO: 580336 - RNA, 30 nt, Human
cugggugaugaugggugucuguucuccuuu

SEQ ID NO: 580337 - RNA, 23 nt, Human
gaaccagaaacccaccaauccua

SEQ ID NO: 580338 - RNA, 18 nt, Human
gacacaguagaaaucugg

SEQ ID NO: 580339 - RNA, 21 nt, Human
gagaaggaggguucagccgug

SEQ ID NO: 580340 - RNA, 18 nt, Human
gaugggggagauaggugc

SEQ ID NO: 580341 - RNA, 21 nt, Human
gcaagccaacuagccauagcc

SEQ ID NO: 580342 - RNA, 21 nt, Human
gcagaagagaugcauucugga

SEQ ID NO: 580343 - RNA, 21 nt, Human
gccagccuggcacuggggcag

SEQ ID NO: 580344 - RNA, 22 nt, Human
gcucucauccccaacaguccau

SEQ ID NO: 580345 - RNA, 23 nt, Human
gcucugaaacaacuggagacagg

SEQ ID NO: 580346 - RNA, 18 nt, Human
ggauccacuugacacagu

SEQ ID NO: 580347 - RNA, 18 nt, Human
ggcaagggccguuagugc

SEQ ID NO: 580348 - RNA, 19 nt, Human
ggcaagggccguuagugcu

SEQ ID NO: 580349 - RNA, 18 nt, Human
gggaagcagaagagaugc

SEQ ID NO: 580350 - RNA, 21 nt, Human
ggggacuuaaagaagggggug

SEQ ID NO: 580351 - RNA, 19 nt, Human
gggggcacuggaggagggu

SEQ ID NO: 580352 - RNA, 20 nt, Human
gggugaugaugggugucugu

SEQ ID NO: 580353 - RNA, 21 nt, Human
ucacgcccaguacugggggca

SEQ ID NO: 580354 - RNA, 19 nt, Human
ucagggaccgggaguugag

SEQ ID NO: 580355 - RNA, 22 nt, Human
uccuuuccaagggauccacuug

SEQ ID NO: 580356 - RNA, 19 nt, Human
ugagaugggggagauaggu

SEQ ID NO: 580357 - RNA, 21 nt, Human
ugaggucaaggacauuaccaa

SEQ ID NO: 580358 - RNA, 19 nt, Human
ugcaaugaagggggcugcc

SEQ ID NO: 580359 - RNA, 18 nt, Human
ugccuaggugaucaggag

SEQ ID NO: 580360 - RNA, 20 nt, Human
uggaagaaggggcaggccag

SEQ ID NO: 580361 - RNA, 19 nt, Human
uggaggagggugaaggcag

SEQ ID NO: 580362 - RNA, 22 nt, Human
uggcaaggagagggcaagggcc

SEQ ID NO: 580363 - RNA, 19 nt, Human
ugggggcacuggaggaggg

SEQ ID NO: 580364 - RNA, 23 nt, Human
ugggggcacuggaggagggugaa

SEQ ID NO: 580365 - RNA, 22 nt, Human
uuacaaauaagagauagaaacc

SEQ ID NO: 580366 - RNA, 25 nt, Human
uuuguugccugcucucauccccaac

SEQ ID NO: 580367 - RNA, 22 nt, Human
aagacuccuguucaaguaaagg

SEQ ID NO: 580368 - RNA, 21 nt, Human
aauaucuuggccucagauggc

SEQ ID NO: 580369 - RNA, 18 nt, Human
acaaaguagccacagacc

SEQ ID NO: 580370 - RNA, 21 nt, Human
acauggacucucucucucccc

SEQ ID NO: 580371 - RNA, 21 nt, Human
acucugaagaaaguugggggg

SEQ ID NO: 580372 - RNA, 19 nt, Human
acucuuauucuagaaagga

SEQ ID NO: 580373 - RNA, 21 nt, Human
acuguggaucugugacccugg

SEQ ID NO: 580374 - RNA, 21 nt, Human
acuuguacuuugguaaggaga

SEQ ID NO: 580375 - RNA, 23 nt, Human
agcccaaguuguucuggccacac

SEQ ID NO: 580376 - RNA, 22 nt, Human
aggaaucccccccgucaauauc

SEQ ID NO: 580377 - RNA, 19 nt, Human
aggcaaaaaaagaaucaag

SEQ ID NO: 580378 - RNA, 20 nt, Human
aggcaaaaaaagaaucaaga

SEQ ID NO: 580379 - RNA, 22 nt, Human
aguuggggggccagggcuccua

SEQ ID NO: 580380 - RNA, 23 nt, Human
aguuguucuggccacaccuucuu

SEQ ID NO: 580381 - RNA, 18 nt, Human
auccugguggggggaugg

SEQ ID NO: 580382 - RNA, 18 nt, Human
caaaaaaagaaucaagac

SEQ ID NO: 580383 - RNA, 19 nt, Human
cacaccuucuuuguggcuc

SEQ ID NO: 580384 - RNA, 19 nt, Human
cacugcgcggcucagccgc

SEQ ID NO: 580385 - RNA, 22 nt, Human
cagaccgugucugguuuguauc

SEQ ID NO: 580386 - RNA, 18 nt, Human
caggacuuuuauccuggu

SEQ ID NO: 580387 - RNA, 18 nt, Human
ccccccgucaauaucuug

SEQ ID NO: 580388 - RNA, 22 nt, Human
ccccccuaccugggugcgcccg

SEQ ID NO: 580389 - RNA, 18 nt, Human
cccuaggcccuagaggac

SEQ ID NO: 580390 - RNA, 20 nt, Human
cccugggcgcugaaaauggg

SEQ ID NO: 580391 - RNA, 19 nt, Human
ccgucgguccagcagccgc

SEQ ID NO: 580392 - RNA, 23 nt, Human
ccugugcccacuccaaccucaac

SEQ ID NO: 580393 - RNA, 20 nt, Human
cgcggcucagccgccccccu

SEQ ID NO: 580394 - RNA, 24 nt, Human
cuggugguaccaugccugugccca

SEQ ID NO: 580395 - RNA, 24 nt, Human
cuguaccagcggggaggcuggugg

SEQ ID NO: 580396 - RNA, 19 nt, Human
cuucuuuguggcucagugc

SEQ ID NO: 580397 - RNA, 27 nt, Human
gaaaaugggacccaggaaucccccccg

SEQ ID NO: 580398 - RNA, 19 nt, Human
gacuuuuauccuggugggg

SEQ ID NO: 580399 - RNA, 23 nt, Human
gcaaaaaaagaaucaagacuccu

SEQ ID NO: 580400 - RNA, 19 nt, Human
gcggcucagccgccccccu

SEQ ID NO: 580401 - RNA, 23 nt, Human
ggaaucccccccgucaauaucuu

SEQ ID NO: 580402 - RNA, 20 nt, Human
ggaugccuggcaaaagccuu

SEQ ID NO: 580403 - RNA, 18 nt, Human
ggccucagauggcucccc

SEQ ID NO: 580404 - RNA, 18 nt, Human
ggcucagugccaaugugu

SEQ ID NO: 580405 - RNA, 21 nt, Human
gggcgcugaaaaugggaccca

SEQ ID NO: 580406 - RNA, 19 nt, Human
gguaaggagauagggaagg

SEQ ID NO: 580407 - RNA, 21 nt, Human
guggcggcggcgcaguucccc

SEQ ID NO: 580408 - RNA, 22 nt, Human
uaccaggauggugucuacuggg

SEQ ID NO: 580409 - RNA, 20 nt, Human
ucagauggcuccccaagguc

SEQ ID NO: 580410 - RNA, 22 nt, Human
ucagguaacugugcccuguacc

SEQ ID NO: 580411 - RNA, 22 nt, Human
uccgcacugcgcggcucagccg

SEQ ID NO: 580412 - RNA, 24 nt, Human
ucucucaggaaggccgccaugcuc

SEQ ID NO: 580413 - RNA, 18 nt, Human
ugaggagauggaagauca

SEQ ID NO: 580414 - RNA, 28 nt, Human
ugaggagauggaagaucagggcuuguau

SEQ ID NO: 580415 - RNA, 21 nt, Human
ugccugugcccacuccaaccg

SEQ ID NO: 580416 - RNA, 25 nt, Human
ugccugugcccacuccaaccucaac

SEQ ID NO: 580417 - RNA, 23 nt, Human
ugggaaagaugugacuuguacuu

SEQ ID NO: 580418 - RNA, 21 nt, Human
ugggacccaggaauccccccc

SEQ ID NO: 580419 - RNA, 19 nt, Human
ugggaggggccaggggaug

SEQ ID NO: 580420 - RNA, 25 nt, Human
ugggaggggccaggggaugccuggc

SEQ ID NO: 580421 - RNA, 18 nt, Human
ugguaaggagauagggaa

SEQ ID NO: 580422 - RNA, 20 nt, Human
uggugagaggacauggacuc

SEQ ID NO: 580423 - RNA, 23 nt, Human
ugguggggggauggggaguccag

SEQ ID NO: 580424 - RNA, 26 nt, Human
uguaccagcggggaggcuggugguac

SEQ ID NO: 580425 - RNA, 23 nt, Human
uguucuggccacaccuucuuugu

SEQ ID NO: 580426 - RNA, 20 nt, Human
uucaaguaaagggcagaggg

SEQ ID NO: 580427 - RNA, 20 nt, Human
uuccucuguccccuaggccc

SEQ ID NO: 580428 - RNA, 21 nt, Human
uucucugaugaggcaaaaaaa

SEQ ID NO: 580429 - RNA, 19 nt, Human
uucuggugagaggacaugg

SEQ ID NO: 580430 - RNA, 19 nt, Human
uucuggugagaggacaugg

SEQ ID NO: 580431 - RNA, 22 nt, Human
uugagcucauaucuuauaauaa

SEQ ID NO: 580432 - RNA, 19 nt, Human
uuguggcucagugccaaug

SEQ ID NO: 580433 - RNA, 24 nt, Human
uuuugcugaggagauggaagauca

SEQ ID NO: 580434 - RNA, 21 nt, Human
aaauggccagcgaagcguucg

SEQ ID NO: 580435 - RNA, 20 nt, Human
acagggccagccaggcuggu

SEQ ID NO: 580436 - RNA, 20 nt, Human
agccaggcugguagcuggca

SEQ ID NO: 580437 - RNA, 21 nt, Human
aggugcccaaaaaaaaguuca

SEQ ID NO: 580438 - RNA, 25 nt, Human
auccucucaaucccgcuccuccaaa

SEQ ID NO: 580439 - RNA, 20 nt, Human
caaacuguacacauaaaaac

SEQ ID NO: 580440 - RNA, 24 nt, Human
caaucccgcuccuccaaaggagca

SEQ ID NO: 580441 - RNA, 23 nt, Human
cccaugucuugugagacuuaaaa

SEQ ID NO: 580442 - RNA, 21 nt, Human
ccgauccucucaaucccgcuc

SEQ ID NO: 580443 - RNA, 18 nt, Human
ccgcuccuccaaaggagc

SEQ ID NO: 580444 - RNA, 23 nt, Human
cuacaauggugcaggcuuccuuu

SEQ ID NO: 580445 - RNA, 18 nt, Human
cucucaaucccgcuccuc

SEQ ID NO: 580446 - RNA, 28 nt, Human
cugguagcuggcagcagucucuucaucu

SEQ ID NO: 580447 - RNA, 19 nt, Human
cuucacaaaacaacauggg

SEQ ID NO: 580448 - RNA, 24 nt, Human
gacagggccagccaggcugguagc

SEQ ID NO: 580449 - RNA, 22 nt, Human
ggaguuggggcaaugagggugg

SEQ ID NO: 580450 - RNA, 20 nt, Human
gucuggcuuugagcagagcu

SEQ ID NO: 580451 - RNA, 22 nt, Human
uacaaaaacuuuguuuuucucu

SEQ ID NO: 580452 - RNA, 24 nt, Human
uacgucuggcuuugagcagagcuc

SEQ ID NO: 580453 - RNA, 23 nt, Human
ucaggugcccaaaaaaaaguuca

SEQ ID NO: 580454 - RNA, 18 nt, Human
ucucaaucccgcuccucc

SEQ ID NO: 580455 - RNA, 20 nt, Human
ucuuguuuggucuccccacc

SEQ ID NO: 580456 - RNA, 25 nt, Human
ugacaaacuguacacauaaaaacaa

SEQ ID NO: 580457 - RNA, 19 nt, Human
ugagcagagcuccuaaaug

SEQ ID NO: 580458 - RNA, 22 nt, Human
ugaggguuccugggauucaggu

SEQ ID NO: 580459 - RNA, 23 nt, Human
ugaggguuccugggauucaggug

SEQ ID NO: 580460 - RNA, 21 nt, Human
ugcccaaaaaaaaguucaggg

SEQ ID NO: 580461 - RNA, 21 nt, Human
uggacaggacagggccagcca

SEQ ID NO: 580462 - RNA, 22 nt, Human
uggacaggacagggccagccag

SEQ ID NO: 580463 - RNA, 20 nt, Human
ugggauucaggugcccaaaa

SEQ ID NO: 580464 - RNA, 19 nt, Human
uuggggcaaugagggugga

SEQ ID NO: 580465 - RNA, 25 nt, Human
uuggucuccccaccccgauccucuc

SEQ ID NO: 580466 - RNA, 23 nt, Human
uuuguuuuucucugacaaacugu

SEQ ID NO: 580467 - RNA, 19 nt, Human
uuuuuuuuuuuuuucuugc

SEQ ID NO: 580468 - RNA, 27 nt, Human
uuuuuuuuuuuuuuuuuuuucuugggg

SEQ ID NO: 580469 - RNA, 24 nt, Human
aaccacuaaucuacuuccucuaua

SEQ ID NO: 580470 - RNA, 26 nt, Human
aagcaggcacaucuuauauggccaga

SEQ ID NO: 580471 - RNA, 22 nt, Human
aauaaccagugaagaugggggc

SEQ ID NO: 580472 - RNA, 26 nt, Human
aaucccaucgccucccaccagggggc

SEQ ID NO: 580473 - RNA, 18 nt, Human
aaugcagaugacauuucu

SEQ ID NO: 580474 - RNA, 22 nt, Human
accauacaauucaccaacguaa

SEQ ID NO: 580475 - RNA, 20 nt, Human
acgggguuucuccauguugg

SEQ ID NO: 580476 - RNA, 21 nt, Human
acgggguuucuccauguuggu

SEQ ID NO: 580477 - RNA, 24 nt, Human
acgggguuucuccauguuggugcg

SEQ ID NO: 580478 - RNA, 25 nt, Human
acucugucgcccaggcuggagugca

SEQ ID NO: 580479 - RNA, 23 nt, Human
agauccaaaccacaucaauagug

SEQ ID NO: 580480 - RNA, 21 nt, Human
aggcagcuucugcucuuuuuc

SEQ ID NO: 580481 - RNA, 18 nt, Human
aguagcugggauuacagg

SEQ ID NO: 580482 - RNA, 18 nt, Human
agugaagaugggggcuag

SEQ ID NO: 580483 - RNA, 24 nt, Human
agugauucuccugccucagccucc

SEQ ID NO: 580484 - RNA, 19 nt, Human
agugcagcggcgcaaucuc

SEQ ID NO: 580485 - RNA, 19 nt, Human
aucccaucgccucccacca

SEQ ID NO: 580486 - RNA, 19 nt, Human
auggagacuguugggugca

SEQ ID NO: 580487 - RNA, 19 nt, Human
auuacaggugcgcgccacc

SEQ ID NO: 580488 - RNA, 19 nt, Human
caacaggcagcuucugcuc

SEQ ID NO: 580489 - RNA, 25 nt, Human
caagucccuuguuuagagucggagg

SEQ ID NO: 580490 - RNA, 20 nt, Human
caagugauucuccugccuca

SEQ ID NO: 580491 - RNA, 22 nt, Human
caagugauucuccugccucagc

SEQ ID NO: 580492 - RNA, 19 nt, Human
caccacacacuuugaagca

SEQ ID NO: 580493 - RNA, 21 nt, Human
caccagggggcuuacauuuca

SEQ ID NO: 580494 - RNA, 24 nt, Human
cacucugucgcccaggcuggagug

SEQ ID NO: 580495 - RNA, 19 nt, Human
cagcuucccugucacccgg

SEQ ID NO: 580496 - RNA, 21 nt, Human
cagcuucccugucacccggug

SEQ ID NO: 580497 - RNA, 23 nt, Human
ccacacacuuugaagcaaccaga

SEQ ID NO: 580498 - RNA, 20 nt, Human
ccaccacgccuggcuaauuu

SEQ ID NO: 580499 - RNA, 19 nt, Human
ccagagcaggagggagaca

SEQ ID NO: 580500 - RNA, 19 nt, Human
ccccauaaucccaucgccu

SEQ ID NO: 580501 - RNA, 22 nt, Human
cccccgcuguacacuaacugaa

SEQ ID NO: 580502 - RNA, 21 nt, Human
ccccgcuguacacuaacugaa

SEQ ID NO: 580503 - RNA, 23 nt, Human
cccgaguagcugggauuacaggu

SEQ ID NO: 580504 - RNA, 24 nt, Human
cccgaguagcugggauuacaggug

SEQ ID NO: 580505 - RNA, 23 nt, Human
cccugguucaagugauucuccuc

SEQ ID NO: 580506 - RNA, 23 nt, Human
cccugguucaagugauucuccug

SEQ ID NO: 580507 - RNA, 20 nt, Human
ccgaagcaaccacuaaucua

SEQ ID NO: 580508 - RNA, 21 nt, Human
ccgaguagcugggauuacagg

SEQ ID NO: 580509 - RNA, 24 nt, Human
ccucccugguucaagugauucucc

SEQ ID NO: 580510 - RNA, 23 nt, Human
ccugccucagccucccgaguagc

SEQ ID NO: 580511 - RNA, 24 nt, Human
ccugccucagccucccgaguagcu

SEQ ID NO: 580512 - RNA, 22 nt, Human
ccugguucaagugauucuccug

SEQ ID NO: 580513 - RNA, 20 nt, Human
cgggcucccagaugacuccu

SEQ ID NO: 580514 - RNA, 24 nt, Human
cucacucugucgcccaggcuggag

SEQ ID NO: 580515 - RNA, 24 nt, Human
cucagccucccgaguagcugggau

SEQ ID NO: 580516 - RNA, 19 nt, Human
cucccugguucaagugauu

SEQ ID NO: 580517 - RNA, 23 nt, Human
cugccucccugguucaagugauu

SEQ ID NO: 580518 - RNA, 24 nt, Human
cugguucaagugauucuccugccu

SEQ ID NO: 580519 - RNA, 21 nt, Human
cuuugaagcaaccagauguga

SEQ ID NO: 580520 - RNA, 23 nt, Human
gagacgggguuucuccauguugg

SEQ ID NO: 580521 - RNA, 24 nt, Human
gagacgggguuucuccauguuggu

SEQ ID NO: 580522 - RNA, 21 nt, Human
gaggacucugccccauaaucc

SEQ ID NO: 580523 - RNA, 24 nt, Human
gaguagcugggauuacaggugcgc

SEQ ID NO: 580524 - RNA, 18 nt, Human
gauuacaggugcgcgcca

SEQ ID NO: 580525 - RNA, 19 nt, Human
gcccaggcuggagugcagc

SEQ ID NO: 580526 - RNA, 21 nt, Human
gccccauaaucccaucgccuc

SEQ ID NO: 580527 - RNA, 24 nt, Human
gccuggcuaauuuuuuuguauuuu

SEQ ID NO: 580528 - RNA, 21 nt, Human
gcgugagccacugugcccggc

SEQ ID NO: 580529 - RNA, 25 nt, Human
gcuggagugcagcggcgcaaucucc

SEQ ID NO: 580530 - RNA, 26 nt, Human
ggcccuuggucuugacauggagacug

SEQ ID NO: 580531 - RNA, 21 nt, Human
gguaguaaauaccgcagcuuc

SEQ ID NO: 580532 - RNA, 21 nt, Human
gguucaagugauucuccugcc

SEQ ID NO: 580533 - RNA, 23 nt, Human
guagagacgggguuucuccaugu

SEQ ID NO: 580534 - RNA, 24 nt, Human
gugauucuccugccucagccuccc

SEQ ID NO: 580535 - RNA, 24 nt, Human
gugcuuucaugcuuuugauuaucu

SEQ ID NO: 580536 - RNA, 25 nt, Human
guugggugcagccgugcucugcaag

SEQ ID NO: 580537 - RNA, 23 nt, Human
uaaauaccgcagcuucccuguca

SEQ ID NO: 580538 - RNA, 22 nt, Human
uacaggugcgcgccaccacgcc

SEQ ID NO: 580539 - RNA, 21 nt, Human
uagaaggcgaaggagaagcag

SEQ ID NO: 580540 - RNA, 24 nt, Human
uaggacauuuuuaucacugcaaaa

SEQ ID NO: 580541 - RNA, 24 nt, Human
uaguagagacgggguuucuccaug

SEQ ID NO: 580542 - RNA, 21 nt, Human
uauggccagagcaggagggag

SEQ ID NO: 580543 - RNA, 19 nt, Human
ucaagugauucuccugccu

SEQ ID NO: 580544 - RNA, 24 nt, Human
ucacucugucgcccaggcuggagu

SEQ ID NO: 580545 - RNA, 18 nt, Human
ucacugcaaaagaaagac

SEQ ID NO: 580546 - RNA, 19 nt, Human
ucacugcaaacucugccuc

SEQ ID NO: 580547 - RNA, 24 nt, Human
ucacugcaaacucugccucccugg

SEQ ID NO: 580548 - RNA, 20 nt, Human
ucagccucccgaguagcugg

SEQ ID NO: 580549 - RNA, 18 nt, Human
uccacaggcaacaggcag

SEQ ID NO: 580550 - RNA, 24 nt, Human
uccacaggcaacaggcagcuucug

SEQ ID NO: 580551 - RNA, 23 nt, Human
ucccaaaugugucucgugaacca

SEQ ID NO: 580552 - RNA, 25 nt, Human
ucccaucgccucccaccagggggcu

SEQ ID NO: 580553 - RNA, 21 nt, Human
ucccgaagcaaccacuaaucu

SEQ ID NO: 580554 - RNA, 23 nt, Human
ucccgaguagcugggauuacagg

SEQ ID NO: 580555 - RNA, 24 nt, Human
ucccgaguagcugggauuacaggu

SEQ ID NO: 580556 - RNA, 21 nt, Human
ucccugguucaagugauucuc

SEQ ID NO: 580557 - RNA, 24 nt, Human
ucccugguucaagugauucuccug

SEQ ID NO: 580558 - RNA, 23 nt, Human
uccuuaguggacgugagcccccg

SEQ ID NO: 580559 - RNA, 18 nt, Human
ucgcccaggcuggagugc

SEQ ID NO: 580560 - RNA, 22 nt, Human
ucggaggaacccaacuaggaca

SEQ ID NO: 580561 - RNA, 23 nt, Human
ucucacucugucgcccaggcugg

SEQ ID NO: 580562 - RNA, 24 nt, Human
ucucacucugucgcccaggcugga

SEQ ID NO: 580563 - RNA, 26 nt, Human
ucucacucugucgcccaggcuggagu

SEQ ID NO: 580564 - RNA, 27 nt, Human
ucucacucugucgcccaggcuggagug

SEQ ID NO: 580565 - RNA, 24 nt, Human
ucuccugccucagccucccgagua

SEQ ID NO: 580566 - RNA, 24 nt, Human
ucugucgcccaggcuggagugcag

SEQ ID NO: 580567 - RNA, 21 nt, Human
ugaacuauaauuuacauacca

SEQ ID NO: 580568 - RNA, 22 nt, Human
ugaagcaaccagaugugaugag

SEQ ID NO: 580569 - RNA, 23 nt, Human
ugacauggagacuguugggugca

SEQ ID NO: 580570 - RNA, 20 nt, Human
ugauucuccugccucagccu

SEQ ID NO: 580571 - RNA, 22 nt, Human
ugccccauaaucccaucgccuc

SEQ ID NO: 580572 - RNA, 24 nt, Human
ugccucagccucccgaguagcugg

SEQ ID NO: 580573 - RNA, 21 nt, Human
ugcuaaaccguuugugaggac

SEQ ID NO: 580574 - RNA, 19 nt, Human
uggagugcagcggcgcaau

SEQ ID NO: 580575 - RNA, 23 nt, Human
ugggacaguuccacaggcaacag

SEQ ID NO: 580576 - RNA, 18 nt, Human
ugggauuacaggugcgcg

SEQ ID NO: 580577 - RNA, 22 nt, Human
ugggauuacaggugcgcgccac

SEQ ID NO: 580578 - RNA, 24 nt, Human
ugggauuacaggugcgcgccacca

SEQ ID NO: 580579 - RNA, 20 nt, Human
uggucuuaagcauauucaga

SEQ ID NO: 580580 - RNA, 23 nt, Human
ugguguuuccaggaggcccuugg

SEQ ID NO: 580581 - RNA, 21 nt, Human
uguauuuuuaguagagacggg

SEQ ID NO: 580582 - RNA, 20 nt, Human
ugucucgugaaccaucccuu

SEQ ID NO: 580583 - RNA, 18 nt, Human
ugugaggacucugcccca

SEQ ID NO: 580584 - RNA, 19 nt, Human
uguugggugcagccgugcu

SEQ ID NO: 580585 - RNA, 18 nt, Human
uuaguagagacgggguuu

SEQ ID NO: 580586 - RNA, 24 nt, Human
uuaguagagacgggguuucuccau

SEQ ID NO: 580587 - RNA, 19 nt, Human
uuaguggacgugagccccc

SEQ ID NO: 580588 - RNA, 21 nt, Human
uucaagugauucuccugccuc

SEQ ID NO: 580589 - RNA, 23 nt, Human
uucaagugauucuccugccucag

SEQ ID NO: 580590 - RNA, 24 nt, Human
uucaagugauucuccugccucagc

SEQ ID NO: 580591 - RNA, 19 nt, Human
uuggcucacgguccaguag

SEQ ID NO: 580592 - RNA, 19 nt, Human
uuggucuugacauggagac

SEQ ID NO: 580593 - RNA, 23 nt, Human
uuguauuuuuaguagagacgggg

SEQ ID NO: 580594 - RNA, 22 nt, Human
uuuaucacugcaaaagaaagac

SEQ ID NO: 580595 - RNA, 22 nt, Human
uuuuuaguagagacgggguuuc

SEQ ID NO: 580596 - RNA, 21 nt, Human
uuuuuguauuuuuaguagaga

SEQ ID NO: 580597 - RNA, 21 nt, Human
uuuuuuguauuuuuaguagag

SEQ ID NO: 580598 - RNA, 24 nt, Human
uuuuuuguauuuuuaguagagacg

SEQ ID NO: 580599 - RNA, 23 nt, Human
aaagacagccuucaggaaccaca

SEQ ID NO: 580600 - RNA, 21 nt, Human
aagaacauaccauguguauaa

SEQ ID NO: 580601 - RNA, 23 nt, Human
aauucagaauacgcuuuuuacac

SEQ ID NO: 580602 - RNA, 24 nt, Human
aguuacaaagacagccuucaggaa

SEQ ID NO: 580603 - RNA, 18 nt, Human
caaaaaguuacaaagaca

SEQ ID NO: 580604 - RNA, 23 nt, Human
cacaaagaacuacaaaaaguuac

SEQ ID NO: 580605 - RNA, 20 nt, Human
cagaauacgcuuuuuacaca

SEQ ID NO: 580606 - RNA, 24 nt, Human
cgagcagccuucacgcaaagccuc

SEQ ID NO: 580607 - RNA, 20 nt, Human
cucacaaagacuccagaacc

SEQ ID NO: 580608 - RNA, 21 nt, Human
cucacaaagacuccagaacca

SEQ ID NO: 580609 - RNA, 20 nt, Human
cuccagaaccagccgagucc

SEQ ID NO: 580610 - RNA, 21 nt, Human
gcaaagccuccuucaaagaag

SEQ ID NO: 580611 - RNA, 20 nt, Human
uaaaucaaauuaaauucugc

SEQ ID NO: 580612 - RNA, 24 nt, Human
uaaauucugcuuuuaaaaaggugc

SEQ ID NO: 580613 - RNA, 24 nt, Human
uaauauauaaaaauagauguaucc

SEQ ID NO: 580614 - RNA, 22 nt, Human
uacaaaaaguuacaaagacagc

SEQ ID NO: 580615 - RNA, 22 nt, Human
ucaaagaagucucacaaagacu

SEQ ID NO: 580616 - RNA, 21 nt, Human
ucacaaagacuccagaaccag

SEQ ID NO: 580617 - RNA, 22 nt, Human
ucacaaagacuccagaaccagc

SEQ ID NO: 580618 - RNA, 23 nt, Human
ugaagaacauaccauguguauaa

SEQ ID NO: 580619 - RNA, 20 nt, Human
aacucgcucauuuccucccu

SEQ ID NO: 580620 - RNA, 21 nt, Human
aacucgcucauuuccucccuc

SEQ ID NO: 580621 - RNA, 21 nt, Human
acaaggcaagcggcucagaac

SEQ ID NO: 580622 - RNA, 18 nt, Human
accagcuguaacaccucc

SEQ ID NO: 580623 - RNA, 24 nt, Human
acccaguccacaccacagcacgcu

SEQ ID NO: 580624 - RNA, 24 nt, Human
accccauucccaggccacugccca

SEQ ID NO: 580625 - RNA, 18 nt, Human
accguauucugauugggu

SEQ ID NO: 580626 - RNA, 24 nt, Human
acgggccccggggccgggccaucc

SEQ ID NO: 580627 - RNA, 21 nt, Human
acuuguaaacacugguuccuu

SEQ ID NO: 580628 - RNA, 21 nt, Human
acuuguaaacacugguuccuu

SEQ ID NO: 580629 - RNA, 22 nt, Human
agaaggaagggguucaacucuc

SEQ ID NO: 580630 - RNA, 18 nt, Human
agccccaccuggggagga

SEQ ID NO: 580631 - RNA, 21 nt, Human
aggagguggggccuuuggagc

SEQ ID NO: 580632 - RNA, 20 nt, Human
aggccacugcccagcagccc

SEQ ID NO: 580633 - RNA, 18 nt, Human
aggggcgccagacacagc

SEQ ID NO: 580634 - RNA, 20 nt, Human
augguagcagaggagcuggc

SEQ ID NO: 580635 - RNA, 21 nt, Human
caaaugcccaccagaagggcc

SEQ ID NO: 580636 - RNA, 19 nt, Human
cacccaguccacaccacag

SEQ ID NO: 580637 - RNA, 19 nt, Human
cacuauauagaguaaaaac

SEQ ID NO: 580638 - RNA, 20 nt, Human
cagacaggcccuggaggcag

SEQ ID NO: 580639 - RNA, 23 nt, Human
cagccccaccuggggaggaaggc

SEQ ID NO: 580640 - RNA, 21 nt, Human
cagccccuggggaucugcugg

SEQ ID NO: 580641 - RNA, 18 nt, Human
cagcuccuuggcucugcu

SEQ ID NO: 580642 - RNA, 23 nt, Human
caggcccuggaggcagaaggaag

SEQ ID NO: 580643 - RNA, 22 nt, Human
cagggccagaggagccacgcag

SEQ ID NO: 580644 - RNA, 18 nt, Human
cagggugaggcugccugc

SEQ ID NO: 580645 - RNA, 23 nt, Human
ccaaaggaaggccggucuguggg

SEQ ID NO: 580646 - RNA, 19 nt, Human
ccaggccacacuuuccucc

SEQ ID NO: 580647 - RNA, 18 nt, Human
cccagccccccaggacug

SEQ ID NO: 580648 - RNA, 22 nt, Human
cccaguccacaccacagcacgc

SEQ ID NO: 580649 - RNA, 22 nt, Human
cccccacucccccugcaaauuc

SEQ ID NO: 580650 - RNA, 20 nt, Human
cccucgggaaggacaaaaac

SEQ ID NO: 580651 - RNA, 22 nt, Human
cccuggaggcagaaggaagggg

SEQ ID NO: 580652 - RNA, 19 nt, Human
cccuggggaucugcuggug

SEQ ID NO: 580653 - RNA, 19 nt, Human
cgagaaggcaccaucuaug

SEQ ID NO: 580654 - RNA, 23 nt, Human
cgcuucagaggggcccuauucau

SEQ ID NO: 580655 - RNA, 22 nt, Human
cucacaauccaccccauuccca

SEQ ID NO: 580656 - RNA, 20 nt, Human
cucacaauccaccccauucu

SEQ ID NO: 580657 - RNA, 23 nt, Human
cuccaaaggaaggccggucugug

SEQ ID NO: 580658 - RNA, 24 nt, Human
cuccaaaggaaggccggucugugg

SEQ ID NO: 580659 - RNA, 25 nt, Human
cuccaaaggaaggccggucuguggg

SEQ ID NO: 580660 - RNA, 22 nt, Human
cuccagguggcugugguagggc

SEQ ID NO: 580661 - RNA, 23 nt, Human
cucgggaaggacaaaaacucaga

SEQ ID NO: 580662 - RNA, 24 nt, Human
cucuaagagaagcaugguucccuu

SEQ ID NO: 580663 - RNA, 21 nt, Human
cugcaagccacccugagcgca

SEQ ID NO: 580664 - RNA, 21 nt, Human
cuucuaccauugaggauacag

SEQ ID NO: 580665 - RNA, 22 nt, Human
cuucucaaccaccguauucuga

SEQ ID NO: 580666 - RNA, 19 nt, Human
cuugcagagaucuaggggc

SEQ ID NO: 580667 - RNA, 24 nt, Human
cuuggcucugcuuucagaaggcug

SEQ ID NO: 580668 - RNA, 24 nt, Human
gaaauuugugugugucccccacuc

SEQ ID NO: 580669 - RNA, 18 nt, Human
gaagggccagggacugca

SEQ ID NO: 580670 - RNA, 19 nt, Human
gagaagagagaagcagcuc

SEQ ID NO: 580671 - RNA, 24 nt, Human
gagagaagcagcuccuucucccgg

SEQ ID NO: 580672 - RNA, 18 nt, Human
gagcugauugggucaugg

SEQ ID NO: 580673 - RNA, 20 nt, Human
gaggauguuaaugacccugc

SEQ ID NO: 580674 - RNA, 20 nt, Human
gaggcagacaggcccuggag

SEQ ID NO: 580675 - RNA, 20 nt, Human
gcagcuccuuggcucugcuu

SEQ ID NO: 580676 - RNA, 24 nt, Human
gcccagcagccccuggggaucugc

SEQ ID NO: 580677 - RNA, 25 nt, Human
gcccuggaggcagaaggaagggguu

SEQ ID NO: 580678 - RNA, 20 nt, Human
gcuuguuugugcuucuacca

SEQ ID NO: 580679 - RNA, 18 nt, Human
ggaaggacaaaaacucag

SEQ ID NO: 580680 - RNA, 18 nt, Human
ggacaggugccacucagg

SEQ ID NO: 580681 - RNA, 19 nt, Human
ggauacagcgagaaggcac

SEQ ID NO: 580682 - RNA, 21 nt, Human
gggagaagagagaagcagcuc

SEQ ID NO: 580683 - RNA, 20 nt, Human
gggagguagaacugggagaa

SEQ ID NO: 580684 - RNA, 22 nt, Human
ggggaucugcuggugucagagg

SEQ ID NO: 580685 - RNA, 18 nt, Human
gugccacucagggccaga

SEQ ID NO: 580686 - RNA, 21 nt, Human
uaaacacugguuccuucucaa

SEQ ID NO: 580687 - RNA, 22 nt, Human
uaagccacccggccuacggcaa

SEQ ID NO: 580688 - RNA, 20 nt, Human
uaccugggccaggugcuggg

SEQ ID NO: 580689 - RNA, 22 nt, Human
uaccugggccaggugcugggag

SEQ ID NO: 580690 - RNA, 21 nt, Human
uacggcauuuugauauaggag

SEQ ID NO: 580691 - RNA, 23 nt, Human
ucagaggggcccuauucauggua

SEQ ID NO: 580692 - RNA, 20 nt, Human
ucagggccagaggagccacg

SEQ ID NO: 580693 - RNA, 21 nt, Human
ucagggccagaggagccacgc

SEQ ID NO: 580694 - RNA, 25 nt, Human
uccacaccacagcacgcuucugggg

SEQ ID NO: 580695 - RNA, 21 nt, Human
uccaccccauucccaggccac

SEQ ID NO: 580696 - RNA, 23 nt, Human
uccagguggcugugguagggccg

SEQ ID NO: 580697 - RNA, 21 nt, Human
ucuauaaguagcacccagucc

SEQ ID NO: 580698 - RNA, 18 nt, Human
ucucaaccaccguauucu

SEQ ID NO: 580699 - RNA, 20 nt, Human
ucugcuggugucagagggaa

SEQ ID NO: 580700 - RNA, 22 nt, Human
ucugugggcccagggugaggcu

SEQ ID NO: 580701 - RNA, 18 nt, Human
ucuugggcgucccagccc

SEQ ID NO: 580702 - RNA, 22 nt, Human
ugaagggugguauggccccgaa

SEQ ID NO: 580703 - RNA, 26 nt, Human
ugaaucacaaacaacucagggcauca

SEQ ID NO: 580704 - RNA, 22 nt, Human
ugagcaauacguuucuguuguu

SEQ ID NO: 580705 - RNA, 23 nt, Human
ugaggcugccugcccaccgcaga

SEQ ID NO: 580706 - RNA, 22 nt, Human
ugaggggacuggagagggaggg

SEQ ID NO: 580707 - RNA, 23 nt, Human
ugauauuacuuguaaacacuggu

SEQ ID NO: 580708 - RNA, 24 nt, Human
ugaucuugggcgucccagcccccc

SEQ ID NO: 580709 - RNA, 21 nt, Human
ugccugucccuguccucagag

SEQ ID NO: 580710 - RNA, 22 nt, Human
ugcuuguuugugcuucuaccau

SEQ ID NO: 580711 - RNA, 18 nt, Human
uggagagggaggggggag

SEQ ID NO: 580712 - RNA, 24 nt, Human
uggagcugauugggucaugggggc

SEQ ID NO: 580713 - RNA, 21 nt, Human
uggaggcagacaggcccugga

SEQ ID NO: 580714 - RNA, 19 nt, Human
ugggagaagagagaagcag

SEQ ID NO: 580715 - RNA, 20 nt, Human
ugggguccaggagaccgccu

SEQ ID NO: 580716 - RNA, 20 nt, Human
ugguagcagaggagcuggaa

SEQ ID NO: 580717 - RNA, 23 nt, Human
ugguagcagaggagcuggccucg

SEQ ID NO: 580718 - RNA, 23 nt, Human
uguauagauggugagcacuuucu

SEQ ID NO: 580719 - RNA, 19 nt, Human
ugucccuucaagguuguug

SEQ ID NO: 580720 - RNA, 23 nt, Human
ugugucccccacucccccugcaa

SEQ ID NO: 580721 - RNA, 20 nt, Human
ugugugugucccccacuccc

SEQ ID NO: 580722 - RNA, 21 nt, Human
uguuaccugggccaggugcug

SEQ ID NO: 580723 - RNA, 21 nt, Human
uuaaccucuaagagaagcaug

SEQ ID NO: 580724 - RNA, 22 nt, Human
uuaaugacccugcuuaaccucu

SEQ ID NO: 580725 - RNA, 19 nt, Human
uucccaggccacugcccag

SEQ ID NO: 580726 - RNA, 18 nt, Human
uuuguaagccacccggcc

SEQ ID NO: 580727 - RNA, 21 nt, Human
uuuguaagccacccggccuac

SEQ ID NO: 580728 - RNA, 23 nt, Human
uuuuuuuuuuuuuuuucuuaugg

SEQ ID NO: 580729 - RNA, 21 nt, Human
aaaaaaaaaaaaaggggcucu

SEQ ID NO: 580730 - RNA, 20 nt, Human
acacaagaggcuccccagca

SEQ ID NO: 580731 - RNA, 18 nt, Human
acgcgggccuaggcugga

SEQ ID NO: 580732 - RNA, 19 nt, Human
cagaaagggucuuucggca

SEQ ID NO: 580733 - RNA, 22 nt, Human
caguggauuucucaacaagucu

SEQ ID NO: 580734 - RNA, 19 nt, Human
cauuagaguacagaacagg

SEQ ID NO: 580735 - RNA, 19 nt, Human
ccccggcgccgggaauccc

SEQ ID NO: 580736 - RNA, 21 nt, Human
cccggcgccgggaauccccuc

SEQ ID NO: 580737 - RNA, 21 nt, Human
ccggcgccgggaauccccucc

SEQ ID NO: 580738 - RNA, 18 nt, Human
ccggcguccggauuccgu

SEQ ID NO: 580739 - RNA, 21 nt, Human
ccucuggcacugagcuccacu

SEQ ID NO: 580740 - RNA, 19 nt, Human
cggcaaaaaaaaaaaaagg

SEQ ID NO: 580741 - RNA, 20 nt, Human
cuccucuggcacugagcucc

SEQ ID NO: 580742 - RNA, 18 nt, Human
gcuggacacaagaggcuc

SEQ ID NO: 580743 - RNA, 19 nt, Human
uacuauauagccauuuucc

SEQ ID NO: 580744 - RNA, 20 nt, Human
ucacuuuccaagaagacgau

SEQ ID NO: 580745 - RNA, 22 nt, Human
ucuuucggcaaaaaaaaaaaaa

SEQ ID NO: 580746 - RNA, 20 nt, Human
uggcuagugaguaauacugc

SEQ ID NO: 580747 - RNA, 28 nt, Human
uucaacagugauacacaauauucuuccc

SEQ ID NO: 580748 - RNA, 18 nt, Human
uucacuuuccaagaagac

SEQ ID NO: 580749 - RNA, 19 nt, Human
aaaaaaaaucaaggacaga

SEQ ID NO: 580750 - RNA, 28 nt, Human
aaaaaaggaaauacuuuaaugaaaaaaa

SEQ ID NO: 580751 - RNA, 27 nt, Human
aaaaaggaaauacuuuaaugaaaaaaa

SEQ ID NO: 580752 - RNA, 22 nt, Human
aaaacaaaaucagcaaaggaaa

SEQ ID NO: 580753 - RNA, 18 nt, Human
aaagguagucucugccug

SEQ ID NO: 580754 - RNA, 19 nt, Human
aaagguagucucugccugg

SEQ ID NO: 580755 - RNA, 19 nt, Human
aaguucccagaugccaauc

SEQ ID NO: 580756 - RNA, 20 nt, Human
acagugaaaggauacaaaac

SEQ ID NO: 580757 - RNA, 20 nt, Human
agaacgucuucugauuuagg

SEQ ID NO: 580758 - RNA, 21 nt, Human
agaaggaaagcagguguucag

SEQ ID NO: 580759 - RNA, 22 nt, Human
agacacauggggugaagucagg

SEQ ID NO: 580760 - RNA, 22 nt, Human
agccaaauuuuagaaauagcuc

SEQ ID NO: 580761 - RNA, 25 nt, Human
aggaaaaaagacacauggggugaag

SEQ ID NO: 580762 - RNA, 21 nt, Human
caagggccaaccuuguaaagc

SEQ ID NO: 580763 - RNA, 23 nt, Human
cacagcaauuuuaucucaacauu

SEQ ID NO: 580764 - RNA, 19 nt, Human
cagaugccaaucaagggcc

SEQ ID NO: 580765 - RNA, 22 nt, Human
cagcugguccuucuucacaauu

SEQ ID NO: 580766 - RNA, 23 nt, Human
caggaucuuucauuucuuauccc

SEQ ID NO: 580767 - RNA, 21 nt, Human
cauaccaacuaaacaugugau

SEQ ID NO: 580768 - RNA, 21 nt, Human
ccaagaauccuccgccagugg

SEQ ID NO: 580769 - RNA, 22 nt, Human
cccccugaacuccaaguuccca

SEQ ID NO: 580770 - RNA, 19 nt, Human
cccugaacuccaaguuccc

SEQ ID NO: 580771 - RNA, 20 nt, Human
cgucuucugauuuagguggc

SEQ ID NO: 580772 - RNA, 25 nt, Human
cucuuuaauuuuaccaaucagaaua

SEQ ID NO: 580773 - RNA, 21 nt, Human
cugggguuuuuacugggagcu

SEQ ID NO: 580774 - RNA, 18 nt, Human
gaaaaaaaaucaaggaca

SEQ ID NO: 580775 - RNA, 21 nt, Human
gaaaaaaaaucaaggacagaa

SEQ ID NO: 580776 - RNA, 23 nt, Human
gaaaaaaaaucaaggacagaagg

SEQ ID NO: 580777 - RNA, 21 nt, Human
gaaaagccuaaaguaucagga

SEQ ID NO: 580778 - RNA, 21 nt, Human
gaaauuucuccaucauuucaa

SEQ ID NO: 580779 - RNA, 18 nt, Human
gaaggaaagcagguguuc

SEQ ID NO: 580780 - RNA, 25 nt, Human
gagaaaauuuucuaaacagcagcug

SEQ ID NO: 580781 - RNA, 19 nt, Human
ggaaagcagguguucagga

SEQ ID NO: 580782 - RNA, 25 nt, Human
ggaaagcagguguucaggagaaacu

SEQ ID NO: 580783 - RNA, 21 nt, Human
gugaaaggauacaaaacaaaa

SEQ ID NO: 580784 - RNA, 18 nt, Human
gugaagucaggggaaacu

SEQ ID NO: 580785 - RNA, 20 nt, Human
guuagagacugagugccugg

SEQ ID NO: 580786 - RNA, 18 nt, Human
uaacagcacuugugaaac

SEQ ID NO: 580787 - RNA, 22 nt, Human
uaagucuuugacacaugcucau

SEQ ID NO: 580788 - RNA, 20 nt, Human
uacaaaacaaaaucagcaag

SEQ ID NO: 580789 - RNA, 18 nt, Human
uacaaaauagaggaaagg

SEQ ID NO: 580790 - RNA, 23 nt, Human
uacauuaguuuacauaccaacua

SEQ ID NO: 580791 - RNA, 20 nt, Human
uacuuuauacauuauauaaa

SEQ ID NO: 580792 - RNA, 18 nt, Human
uauacacauguauauaua

SEQ ID NO: 580793 - RNA, 19 nt, Human
uauacacauguauauauau

SEQ ID NO: 580794 - RNA, 19 nt, Human
uauacacauguauauauau

SEQ ID NO: 580795 - RNA, 20 nt, Human
uauacacauguauauauaug

SEQ ID NO: 580796 - RNA, 18 nt, Human
uauauuguuuuacaguuu

SEQ ID NO: 580797 - RNA, 23 nt, Human
ucaaggcucaaucuacaccucac

SEQ ID NO: 580798 - RNA, 21 nt, Human
ucaaugcccauaaauacucag

SEQ ID NO: 580799 - RNA, 22 nt, Human
ucaaugcccauaaauacucagu

SEQ ID NO: 580800 - RNA, 19 nt, Human
ucagcaaaggaaaaaagac

SEQ ID NO: 580801 - RNA, 19 nt, Human
ucuaaacagcagcuggucc

SEQ ID NO: 580802 - RNA, 23 nt, Human
ucugucuauaauaaaaaacaaaa

SEQ ID NO: 580803 - RNA, 23 nt, Human
ugaaacacugucaaccagaaaag

SEQ ID NO: 580804 - RNA, 23 nt, Human
ugaaaggauacaaaacaaaauca

SEQ ID NO: 580805 - RNA, 18 nt, Human
ugaauuaaaaaaaggaaa

SEQ ID NO: 580806 - RNA, 25 nt, Human
ugagugccugggguuuuuacuggga

SEQ ID NO: 580807 - RNA, 23 nt, Human
ugccugggguuuuuacugggagc

SEQ ID NO: 580808 - RNA, 22 nt, Human
uggcaaucacuugccuaguucu

SEQ ID NO: 580809 - RNA, 19 nt, Human
uggggugaagucaggggaa

SEQ ID NO: 580810 - RNA, 22 nt, Human
uggggugaagucaggggaaacu

SEQ ID NO: 580811 - RNA, 23 nt, Human
ugugaacuuuauuaugcuucuga

SEQ ID NO: 580812 - RNA, 25 nt, Human
uuaaaaauacuacaucauugcuuua

SEQ ID NO: 580813 - RNA, 26 nt, Human
uuagagacugagugccugggguuuuu

SEQ ID NO: 580814 - RNA, 20 nt, Human
uuuacaaaauagaggaaagg

SEQ ID NO: 580815 - RNA, 23 nt, Human
uuucauuucuuaucccucuucca

SEQ ID NO: 580816 - RNA, 19 nt, Human
aaaaaaacaaaaacagucc

SEQ ID NO: 580817 - RNA, 20 nt, Human
aaaaaaacaaaaacagucca

SEQ ID NO: 580818 - RNA, 24 nt, Human
aaaaaaacaaaaacaguccagucg

SEQ ID NO: 580819 - RNA, 18 nt, Human
aaaaaaacaccagggaau

SEQ ID NO: 580820 - RNA, 22 nt, Human
aaaaaacaaaaacaguccaguc

SEQ ID NO: 580821 - RNA, 24 nt, Human
aaaaagaaaaggagguacagaaag

SEQ ID NO: 580822 - RNA, 19 nt, Human
aaaaauaagagugggaggg

SEQ ID NO: 580823 - RNA, 22 nt, Human
aaacagcugacgccuggauuuc

SEQ ID NO: 580824 - RNA, 19 nt, Human
aaacuguaccaucuccaac

SEQ ID NO: 580825 - RNA, 18 nt, Human
aaagaaaaagaaaaggag

SEQ ID NO: 580826 - RNA, 18 nt, Human
aaagaagaggaggggcug

SEQ ID NO: 580827 - RNA, 19 nt, Human
aacaaagaaaaagaaaagg

SEQ ID NO: 580828 - RNA, 20 nt, Human
aacaaagaaaaagaaaagga

SEQ ID NO: 580829 - RNA, 21 nt, Human
aacuuauuaaccccucaccuc

SEQ ID NO: 580830 - RNA, 19 nt, Human
aagaacacaggggaaugga

SEQ ID NO: 580831 - RNA, 21 nt, Human
aagaggaggggcuguuuuccc

SEQ ID NO: 580832 - RNA, 22 nt, Human
aagauagcggggcugcugcaaa

SEQ ID NO: 580833 - RNA, 21 nt, Human
aagcccccagcccugggccag

SEQ ID NO: 580834 - RNA, 21 nt, Human
aaggaggccaguccaagggac

SEQ ID NO: 580835 - RNA, 20 nt, Human
aaggccauccagggcccagg

SEQ ID NO: 580836 - RNA, 23 nt, Human
aauccuccccucccugucaacac

SEQ ID NO: 580837 - RNA, 19 nt, Human
aaugacgacgacagggaga

SEQ ID NO: 580838 - RNA, 23 nt, Human
acaaacccagcgcuggaggccca

SEQ ID NO: 580839 - RNA, 30 nt, Human
acaaagaaaaagaaaaggagguacagaaaa

SEQ ID NO: 580840 - RNA, 24 nt, Human
accaaaaaaacaaaaacaguccag

SEQ ID NO: 580841 - RNA, 22 nt, Human
accccauuccaccucacccccu

SEQ ID NO: 580842 - RNA, 29 nt, Human
accccauuccaccucacccccuccccagg

SEQ ID NO: 580843 - RNA, 28 nt, Human
acccucaccccucagaucccuucuccac

SEQ ID NO: 580844 - RNA, 19 nt, Human
agaagaacacaggggaaug

SEQ ID NO: 580845 - RNA, 20 nt, Human
agagcucaucaacaaagaaa

SEQ ID NO: 580846 - RNA, 20 nt, Human
agcaauugguagaaaaauaa

SEQ ID NO: 580847 - RNA, 20 nt, Human
agccagugugggaucggccc

SEQ ID NO: 580848 - RNA, 21 nt, Human
agccagugugggaucggcccc

SEQ ID NO: 580849 - RNA, 19 nt, Human
agcccccagcccugggcca

SEQ ID NO: 580850 - RNA, 22 nt, Human
aggaaggaaaggggugcuguga

SEQ ID NO: 580851 - RNA, 23 nt, Human
aggaggugggaggagaggaagga

SEQ ID NO: 580852 - RNA, 20 nt, Human
aggaugucgguccagccccg

SEQ ID NO: 580853 - RNA, 22 nt, Human
aggauuuacccccaagccccca

SEQ ID NO: 580854 - RNA, 23 nt, Human
aggccaaggccauccagggccca

SEQ ID NO: 580855 - RNA, 21 nt, Human
aggccagaacggggugggaga

SEQ ID NO: 580856 - RNA, 23 nt, Human
aggccagaacggggugggagagu

SEQ ID NO: 580857 - RNA, 20 nt, Human
aggccagggggaggccaggu

SEQ ID NO: 580858 - RNA, 19 nt, Human
aggcccagaggccaggggg

SEQ ID NO: 580859 - RNA, 22 nt, Human
aggcccuccugccuuuggaugg

SEQ ID NO: 580860 - RNA, 20 nt, Human
aggcgugaggaggggggccg

SEQ ID NO: 580861 - RNA, 22 nt, Human
agggaggaggugggaggagagg

SEQ ID NO: 580862 - RNA, 22 nt, Human
agggcccagguuuggucuuggu

SEQ ID NO: 580863 - RNA, 21 nt, Human
agggggcggggacagggaagc

SEQ ID NO: 580864 - RNA, 21 nt, Human
agguagccagugugggaucgg

SEQ ID NO: 580865 - RNA, 18 nt, Human
auaggacagcaggagcca

SEQ ID NO: 580866 - RNA, 20 nt, Human
augcuggcauugauaaggcg

SEQ ID NO: 580867 - RNA, 22 nt, Human
auuccaccucacccccucccca

SEQ ID NO: 580868 - RNA, 22 nt, Human
caaacccagcgcuggaggccca

SEQ ID NO: 580869 - RNA, 21 nt, Human
caagcccccagcccugggcca

SEQ ID NO: 580870 - RNA, 18 nt, Human
caagcuccucucucucuc

SEQ ID NO: 580871 - RNA, 21 nt, Human
cacaaguccauguucccccac

SEQ ID NO: 580872 - RNA, 23 nt, Human
cacaauccuccccucccugucaa

SEQ ID NO: 580873 - RNA, 21 nt, Human
caccccauuccaccucacccc

SEQ ID NO: 580874 - RNA, 20 nt, Human
cacccucaccccucagaucc

SEQ ID NO: 580875 - RNA, 18 nt, Human
caccgcaucaugaacugg

SEQ ID NO: 580876 - RNA, 19 nt, Human
cacggcgaggcccuccugc

SEQ ID NO: 580877 - RNA, 19 nt, Human
cagagcccucugcagauuc

SEQ ID NO: 580878 - RNA, 23 nt, Human
cagagcucaucaacaaagaaaaa

SEQ ID NO: 580879 - RNA, 21 nt, Human
cagcccugggccagcagcaac

SEQ ID NO: 580880 - RNA, 21 nt, Human
caggagccagauggucuccag

SEQ ID NO: 580881 - RNA, 19 nt, Human
caggaugucgguccagccc

SEQ ID NO: 580882 - RNA, 23 nt, Human
caggcccccaggcaugaguggag

SEQ ID NO: 580883 - RNA, 23 nt, Human
cagggaagcaacccaagcuccuc

SEQ ID NO: 580884 - RNA, 22 nt, Human
cagggcccagguuuggucuugg

SEQ ID NO: 580885 - RNA, 21 nt, Human
cagggcuguguagccagcaac

SEQ ID NO: 580886 - RNA, 24 nt, Human
caucaacaaagaaaaagaaaagga

SEQ ID NO: 580887 - RNA, 23 nt, Human
caucuucacugucuuucuggagg

SEQ ID NO: 580888 - RNA, 19 nt, Human
ccaagcuccucucucucuc

SEQ ID NO: 580889 - RNA, 23 nt, Human
ccaagcuccucucucucucucac

SEQ ID NO: 580890 - RNA, 18 nt, Human
ccaccucccaccaccccc

SEQ ID NO: 580891 - RNA, 24 nt, Human
ccaccucccaccacccccgggacc

SEQ ID NO: 580892 - RNA, 23 nt, Human
ccagagcccucugcagauuccca

SEQ ID NO: 580893 - RNA, 25 nt, Human
ccagagcccucugcagauucccaag

SEQ ID NO: 580894 - RNA, 21 nt, Human
ccagcgcuggaggcccagagg

SEQ ID NO: 580895 - RNA, 19 nt, Human
ccaucagcaaccacgauaa

SEQ ID NO: 580896 - RNA, 19 nt, Human
cccaccacccccgggaccu

SEQ ID NO: 580897 - RNA, 18 nt, Human
cccaccccauuccaccuc

SEQ ID NO: 580898 - RNA, 20 nt, Human
cccaucagcaaccacgauaa

SEQ ID NO: 580899 - RNA, 20 nt, Human
cccaucagcaaccacgauaa

SEQ ID NO: 580900 - RNA, 23 nt, Human
ccccaagcccccagcccugggcc

SEQ ID NO: 580901 - RNA, 21 nt, Human
ccccaucagcaaccacgauaa

SEQ ID NO: 580902 - RNA, 22 nt, Human
cccccaccccauuccaccucac

SEQ ID NO: 580903 - RNA, 18 nt, Human
cccccgggaccucuuguc

SEQ ID NO: 580904 - RNA, 25 nt, Human
ccccucaccucacaauccuccccuc

SEQ ID NO: 580905 - RNA, 22 nt, Human
cccgggaccucuuguccucaga

SEQ ID NO: 580906 - RNA, 21 nt, Human
cccucugcaggagggucucac

SEQ ID NO: 580907 - RNA, 23 nt, Human
cccuucuccacgcuccuuuauua

SEQ ID NO: 580908 - RNA, 22 nt, Human
ccucaccucacaauccuccccu

SEQ ID NO: 580909 - RNA, 24 nt, Human
ccugcccuugccuagcaaacagcu

SEQ ID NO: 580910 - RNA, 23 nt, Human
ccuuauagccaagacgcgccgcc

SEQ ID NO: 580911 - RNA, 26 nt, Human
cgaguagguagccaguguuguaauga

SEQ ID NO: 580912 - RNA, 19 nt, Human
cggaaggagaaagaagagg

SEQ ID NO: 580913 - RNA, 24 nt, Human
cggaaggagaaagaagaggagggg

SEQ ID NO: 580914 - RNA, 21 nt, Human
cggcgccaccucccaccaccc

SEQ ID NO: 580915 - RNA, 23 nt, Human
cggggacagggaagcaacccaag

SEQ ID NO: 580916 - RNA, 21 nt, Human
cggggugggagaguggaggca

SEQ ID NO: 580917 - RNA, 23 nt, Human
cguauuauugccucauucugcag

SEQ ID NO: 580918 - RNA, 21 nt, Human
cucagccccaggcccccaggc

SEQ ID NO: 580919 - RNA, 22 nt, Human
cucgacaaacccagcgcuggag

SEQ ID NO: 580920 - RNA, 19 nt, Human
cucgugccguccugcgcac

SEQ ID NO: 580921 - RNA, 23 nt, Human
cucucucucucucacucgacaaa

SEQ ID NO: 580922 - RNA, 18 nt, Human
cugagggcugggagguga

SEQ ID NO: 580923 - RNA, 21 nt, Human
cuggauuucacauccggcagu

SEQ ID NO: 580924 - RNA, 23 nt, Human
cugggccagcagcaaccagcuuc

SEQ ID NO: 580925 - RNA, 21 nt, Human
cuguaggugacucugaggccu

SEQ ID NO: 580926 - RNA, 22 nt, Human
cuuuggaugguacauacucuac

SEQ ID NO: 580927 - RNA, 24 nt, Human
gaaagacaaggaggugggggaagg

SEQ ID NO: 580928 - RNA, 26 nt, Human
gacagggaggccagaacgggguggga

SEQ ID NO: 580929 - RNA, 19 nt, Human
gaccacuuuccugcccuug

SEQ ID NO: 580930 - RNA, 22 nt, Human
gaccacuuuccugcccuugccu

SEQ ID NO: 580931 - RNA, 19 nt, Human
gaggagaggaaggaaaggg

SEQ ID NO: 580932 - RNA, 19 nt, Human
gaggagaggaaggaaaggg

SEQ ID NO: 580933 - RNA, 23 nt, Human
gaggccaguccaagggaccccgg

SEQ ID NO: 580934 - RNA, 26 nt, Human
gaggcccagaggccagggggaggcca

SEQ ID NO: 580935 - RNA, 23 nt, Human
gcacucugaggggggccgggugc

SEQ ID NO: 580936 - RNA, 27 nt, Human
gcacugcaguucacguuggccccgugc

SEQ ID NO: 580937 - RNA, 21 nt, Human
gcagugaagaaggcgugagga

SEQ ID NO: 580938 - RNA, 22 nt, Human
gccacccucaccccucagaucc

SEQ ID NO: 580939 - RNA, 21 nt, Human
gcuccucucucucucucacuc

SEQ ID NO: 580940 - RNA, 24 nt, Human
ggaaaggggugcugugagucucag

SEQ ID NO: 580941 - RNA, 18 nt, Human
ggaaggagaaagaagagg

SEQ ID NO: 580942 - RNA, 19 nt, Human
ggaaggagaaagaagagga

SEQ ID NO: 580943 - RNA, 18 nt, Human
ggagaaagaagaggaggg

SEQ ID NO: 580944 - RNA, 23 nt, Human
ggagaugagaacuaauuguaacc

SEQ ID NO: 580945 - RNA, 21 nt, Human
ggcagggauggggguggcuga

SEQ ID NO: 580946 - RNA, 22 nt, Human
ggcccagaggccagggggaggc

SEQ ID NO: 580947 - RNA, 22 nt, Human
ggcgugaggaggggggccaccc

SEQ ID NO: 580948 - RNA, 18 nt, Human
ggcugagggaggaggugg

SEQ ID NO: 580949 - RNA, 18 nt, Human
gggaauggaguugggggg

SEQ ID NO: 580950 - RNA, 23 nt, Human
gggaccucuuguccucagacaug

SEQ ID NO: 580951 - RNA, 24 nt, Human
gggaggaggugggaggagaggaag

SEQ ID NO: 580952 - RNA, 19 nt, Human
gguccagccccgggaacaa

SEQ ID NO: 580953 - RNA, 20 nt, Human
ggugauucacaucuucacug

SEQ ID NO: 580954 - RNA, 21 nt, Human
gguggcugagggcugggaggu

SEQ ID NO: 580955 - RNA, 26 nt, Human
gugcacucugaggggggccggguguc

SEQ ID NO: 580956 - RNA, 23 nt, Human
uaaaauaaauacuacagaagaca

SEQ ID NO: 580957 - RNA, 21 nt, Human
uaaccaaaaaaacaaaaacag

SEQ ID NO: 580958 - RNA, 26 nt, Human
uaaccaaaaaaacaaaaacaguccag

SEQ ID NO: 580959 - RNA, 22 nt, Human
uaccacucagccccaggccccc

SEQ ID NO: 580960 - RNA, 21 nt, Human
ucacaucuucacugucuuucu

SEQ ID NO: 580961 - RNA, 23 nt, Human
ucagagcucaucaacaaagaaaa

SEQ ID NO: 580962 - RNA, 20 nt, Human
ucaucaacaaagaaaaagaa

SEQ ID NO: 580963 - RNA, 22 nt, Human
uccaagggaccccggcgccacc

SEQ ID NO: 580964 - RNA, 19 nt, Human
uccacccccaucagcaacc

SEQ ID NO: 580965 - RNA, 19 nt, Human
uccaccucacccccucccc

SEQ ID NO: 580966 - RNA, 21 nt, Human
ucccaaggagaaugaggggcu

SEQ ID NO: 580967 - RNA, 20 nt, Human
uccugcccuugccuagcaaa

SEQ ID NO: 580968 - RNA, 19 nt, Human
uccugcgcacugcaguuca

SEQ ID NO: 580969 - RNA, 23 nt, Human
ucuacaaggauuguucggaaaaa

SEQ ID NO: 580970 - RNA, 25 nt, Human
ucucagaaggggcagggaugggggu

SEQ ID NO: 580971 - RNA, 20 nt, Human
ugaggaggggggccacccuc

SEQ ID NO: 580972 - RNA, 22 nt, Human
ugagggaggaggugggaggaga

SEQ ID NO: 580973 - RNA, 26 nt, Human
ugagggaggaggugggaggagaggaa

SEQ ID NO: 580974 - RNA, 23 nt, Human
ugcagggcuguguagccagcauu

SEQ ID NO: 580975 - RNA, 19 nt, Human
ugcuccagcaggauguuca

SEQ ID NO: 580976 - RNA, 18 nt, Human
ugggagggacaaugccac

SEQ ID NO: 580977 - RNA, 21 nt, Human
uggggguggcugagggcuggg

SEQ ID NO: 580978 - RNA, 22 nt, Human
uuacccccaagcccccagcccu

SEQ ID NO: 580979 - RNA, 20 nt, Human
uucaacuuuccacccccauc

SEQ ID NO: 580980 - RNA, 21 nt, Human
uuccaccucacccccucccca

SEQ ID NO: 580981 - RNA, 19 nt, Human
uucguuagucacaagucca

SEQ ID NO: 580982 - RNA, 23 nt, Human
uucuguggguuucacuggggugg

SEQ ID NO: 580983 - RNA, 22 nt, Human
uuuacccccaagcccccagccc

SEQ ID NO: 580984 - RNA, 18 nt, Human
uuucucauuucuccucgg

SEQ ID NO: 580985 - RNA, 24 nt, Human
aaacaaaaaagcaaauauguguaa

SEQ ID NO: 580986 - RNA, 20 nt, Human
aaacugcugggauuacaggu

SEQ ID NO: 580987 - RNA, 24 nt, Human
aaacugcugggauuacagguauga

SEQ ID NO: 580988 - RNA, 26 nt, Human
aaccucuucuuccacaggcucuccug

SEQ ID NO: 580989 - RNA, 19 nt, Human
acacaacccaauucaaaac

SEQ ID NO: 580990 - RNA, 23 nt, Human
acaccaccacgcccggcuaauuu

SEQ ID NO: 580991 - RNA, 18 nt, Human
acaggguuucaccauguu

SEQ ID NO: 580992 - RNA, 21 nt, Human
acaggguuucaccauguuggc

SEQ ID NO: 580993 - RNA, 24 nt, Human
acaggguuucaccauguuggccag

SEQ ID NO: 580994 - RNA, 23 nt, Human
accaaguaucaccagaaacgggc

SEQ ID NO: 580995 - RNA, 24 nt, Human
accauguuggccaggcuggucucg

SEQ ID NO: 580996 - RNA, 19 nt, Human
accccuugcccagagcugg

SEQ ID NO: 580997 - RNA, 22 nt, Human
accggguccaugcacgaagccu

SEQ ID NO: 580998 - RNA, 23 nt, Human
agaagcagugccuguuccggagc

SEQ ID NO: 580999 - RNA, 21 nt, Human
agaaggaaguggauucuagaa

SEQ ID NO: 581000 - RNA, 23 nt, Human
agaaggaaguggauucuagaagc

SEQ ID NO: 581001 - RNA, 23 nt, Human
agagauacauuuucuuuaaggcu

SEQ ID NO: 581002 - RNA, 27 nt, Human
agagauacauuuucuuuaaggcuuguc

SEQ ID NO: 581003 - RNA, 19 nt, Human
agagccuggguccuucgcc

SEQ ID NO: 581004 - RNA, 23 nt, Human
agccuuauucuccaaaacccagg

SEQ ID NO: 581005 - RNA, 20 nt, Human
aggcauacaccaccacgccc

SEQ ID NO: 581006 - RNA, 24 nt, Human
aggugaucugccugccuuggccuc

SEQ ID NO: 581007 - RNA, 21 nt, Human
agguucaagugauucuccugc

SEQ ID NO: 581008 - RNA, 22 nt, Human
agguucaagugauucuccugcc

SEQ ID NO: 581009 - RNA, 23 nt, Human
agguucaagugauucuccugccu

SEQ ID NO: 581010 - RNA, 22 nt, Human
aguagagacaggguuucaccau

SEQ ID NO: 581011 - RNA, 21 nt, Human
aguagcugggauuacaggcau

SEQ ID NO: 581012 - RNA, 23 nt, Human
agucucgcuggagugcaguggug

SEQ ID NO: 581013 - RNA, 20 nt, Human
agugcaguggugcaaucucg

SEQ ID NO: 581014 - RNA, 24 nt, Human
agugcaguggugcaaucucggcuc

SEQ ID NO: 581015 - RNA, 18 nt, Human
auguugcaucccaucuug

SEQ ID NO: 581016 - RNA, 24 nt, Human
auuuuuguauuuuuaguagagaca

SEQ ID NO: 581017 - RNA, 25 nt, Human
caaaaccagaucaacuuccugcuga

SEQ ID NO: 581018 - RNA, 18 nt, Human
caaaacccaggcccugca

SEQ ID NO: 581019 - RNA, 24 nt, Human
caaacugcugggauuacagguaug

SEQ ID NO: 581020 - RNA, 19 nt, Human
caacccaauucaaaaccag

SEQ ID NO: 581021 - RNA, 24 nt, Human
caacccaauucaaaaccagaucaa

SEQ ID NO: 581022 - RNA, 20 nt, Human
caaccuccgccucccagguu

SEQ ID NO: 581023 - RNA, 21 nt, Human
caagccuuauucuccaaaacc

SEQ ID NO: 581024 - RNA, 19 nt, Human
caaguaucaccagaaacgg

SEQ ID NO: 581025 - RNA, 20 nt, Human
caagugauucuccugccuca

SEQ ID NO: 581026 - RNA, 22 nt, Human
caagugauucuccugccucagc

SEQ ID NO: 581027 - RNA, 24 nt, Human
cacacaacccaauucaaaaccaga

SEQ ID NO: 581028 - RNA, 24 nt, Human
cacacacaacccaauucaaaacca

SEQ ID NO: 581029 - RNA, 20 nt, Human
caccacaaccuccgccuccc

SEQ ID NO: 581030 - RNA, 21 nt, Human
caccacaaccuccgccuccca

SEQ ID NO: 581031 - RNA, 22 nt, Human
caccacaaccuccgccucccag

SEQ ID NO: 581032 - RNA, 24 nt, Human
caccacgcccggcuaauuuuugua

SEQ ID NO: 581033 - RNA, 21 nt, Human
caccauguuggccaggcuggu

SEQ ID NO: 581034 - RNA, 24 nt, Human
caccauguuggccaggcuggucuc

SEQ ID NO: 581035 - RNA, 20 nt, Human
cacccucugccucugcacag

SEQ ID NO: 581036 - RNA, 21 nt, Human
cagagucucgcuggagugcag

SEQ ID NO: 581037 - RNA, 24 nt, Human
cagcuucucaagcuaccggauccu

SEQ ID NO: 581038 - RNA, 24 nt, Human
caggguuucaccauguuggccagg

SEQ ID NO: 581039 - RNA, 23 nt, Human
cauacaccaccacgcccggcuaa

SEQ ID NO: 581040 - RNA, 23 nt, Human
caucugguccugcgagaaggaag

SEQ ID NO: 581041 - RNA, 23 nt, Human
cauguuggccaggcuggucucga

SEQ ID NO: 581042 - RNA, 18 nt, Human
ccaaaacccaggcccugc

SEQ ID NO: 581043 - RNA, 21 nt, Human
ccaaacugcugggauuacagg

SEQ ID NO: 581044 - RNA, 21 nt, Human
ccaaacugcugggauuacagg

SEQ ID NO: 581045 - RNA, 22 nt, Human
ccaaacugcugggauuacaggu

SEQ ID NO: 581046 - RNA, 24 nt, Human
ccaaacugcugggauuacagguau

SEQ ID NO: 581047 - RNA, 19 nt, Human
ccaaagaggaccugaggcu

SEQ ID NO: 581048 - RNA, 24 nt, Human
ccacaaccuccgccucccagguuc

SEQ ID NO: 581049 - RNA, 22 nt, Human
ccaccacauguaaucuccuaca

SEQ ID NO: 581050 - RNA, 18 nt, Human
ccagcggcagcugcacag

SEQ ID NO: 581051 - RNA, 21 nt, Human
cccagguucaagugauucucc

SEQ ID NO: 581052 - RNA, 23 nt, Human
cccagguucaagugauucuccug

SEQ ID NO: 581053 - RNA, 20 nt, Human
ccccuugcccagagcuggcu

SEQ ID NO: 581054 - RNA, 23 nt, Human
cccgaguagcugggauuacaggc

SEQ ID NO: 581055 - RNA, 24 nt, Human
cccgaguagcugggauuacaggca

SEQ ID NO: 581056 - RNA, 22 nt, Human
cccuccacugaaccucuucuuc

SEQ ID NO: 581057 - RNA, 22 nt, Human
cccuccgccuuggcccagaggg

SEQ ID NO: 581058 - RNA, 23 nt, Human
ccgaguagcugggauuacaggca

SEQ ID NO: 581059 - RNA, 24 nt, Human
ccgaguagcugggauuacaggcau

SEQ ID NO: 581060 - RNA, 24 nt, Human
ccgccucccagguucaagugauuc

SEQ ID NO: 581061 - RNA, 18 nt, Human
ccggagcagcugccuugc

SEQ ID NO: 581062 - RNA, 24 nt, Human
ccucccagguucaagugauucucc

SEQ ID NO: 581063 - RNA, 24 nt, Human
ccugcagguaggggaucccaaagc

SEQ ID NO: 581064 - RNA, 23 nt, Human
ccugccucagccucccgaguagc

SEQ ID NO: 581065 - RNA, 18 nt, Human
ccuugcccagagcuggcu

SEQ ID NO: 581066 - RNA, 22 nt, Human
cgccucccagguucaagugauu

SEQ ID NO: 581067 - RNA, 24 nt, Human
cucaccacaaccuccgccucccag

SEQ ID NO: 581068 - RNA, 23 nt, Human
cucagccucccgaguagcuggga

SEQ ID NO: 581069 - RNA, 21 nt, Human
cucccaaacugcugggauuac

SEQ ID NO: 581070 - RNA, 20 nt, Human
cucccaggccugaagggcuc

SEQ ID NO: 581071 - RNA, 19 nt, Human
cucccagguucaagugauu

SEQ ID NO: 581072 - RNA, 20 nt, Human
cucgcuggagugcaguggug

SEQ ID NO: 581073 - RNA, 25 nt, Human
cucugaccucaggugaucugccugc

SEQ ID NO: 581074 - RNA, 18 nt, Human
cucugcacagggcacccc

SEQ ID NO: 581075 - RNA, 20 nt, Human
cugaccucaggugaucugcc

SEQ ID NO: 581076 - RNA, 19 nt, Human
cugagaauuuccucccagg

SEQ ID NO: 581077 - RNA, 23 nt, Human
cugccucagccucccgaguagcu

SEQ ID NO: 581078 - RNA, 19 nt, Human
cugccuugcugagugacag

SEQ ID NO: 581079 - RNA, 21 nt, Human
cuggguccuucgccagcugga

SEQ ID NO: 581080 - RNA, 18 nt, Human
cuucucaagcuaccggau

SEQ ID NO: 581081 - RNA, 25 nt, Human
cuugacucauuuuugagaaaggguc

SEQ ID NO: 581082 - RNA, 22 nt, Human
cuugcucugcugcagaucugaa

SEQ ID NO: 581083 - RNA, 20 nt, Human
cuuggggccaagccuuauuc

SEQ ID NO: 581084 - RNA, 20 nt, Human
cuuugcaccggguccaugcc

SEQ ID NO: 581085 - RNA, 23 nt, Human
gaaaguguggccuuuggaagggc

SEQ ID NO: 581086 - RNA, 21 nt, Human
gacagcggccucaugaccugc

SEQ ID NO: 581087 - RNA, 23 nt, Human
gaccucaggugaucugccugccu

SEQ ID NO: 581088 - RNA, 22 nt, Human
gagcugggaggaaacaaccccu

SEQ ID NO: 581089 - RNA, 23 nt, Human
gaggaaacaaccccuugcccaga

SEQ ID NO: 581090 - RNA, 24 nt, Human
gaguagcugggauuacaggcauac

SEQ ID NO: 581091 - RNA, 18 nt, Human
gauuacagguaugagcca

SEQ ID NO: 581092 - RNA, 19 nt, Human
gauuacagguaugagccac

SEQ ID NO: 581093 - RNA, 21 nt, Human
gauuacagguaugagccacug

SEQ ID NO: 581094 - RNA, 21 nt, Human
gauucuccugccucagccucc

SEQ ID NO: 581095 - RNA, 22 nt, Human
gcccggcuaauuuuuguauuuu

SEQ ID NO: 581096 - RNA, 18 nt, Human
gccuuauucuccaaaacc

SEQ ID NO: 581097 - RNA, 22 nt, Human
ggacagcggccucaugaccugc

SEQ ID NO: 581098 - RNA, 22 nt, Human
gggauguccacaauguuggcag

SEQ ID NO: 581099 - RNA, 21 nt, Human
ggguccgggcucugcccacug

SEQ ID NO: 581100 - RNA, 22 nt, Human
ggguuucaccauguuggccagg

SEQ ID NO: 581101 - RNA, 18 nt, Human
ggucucgagcucugaccu

SEQ ID NO: 581102 - RNA, 23 nt, Human
ggugagguuaucuaucuagauau

SEQ ID NO: 581103 - RNA, 18 nt, Human
guagcugggauuacaggc

SEQ ID NO: 581104 - RNA, 20 nt, Human
guagcugggauuacaggcau

SEQ ID NO: 581105 - RNA, 18 nt, Human
guccgggcucugcccacu

SEQ ID NO: 581106 - RNA, 24 nt, Human
gugauucuccugccucagccuccc

SEQ ID NO: 581107 - RNA, 25 nt, Human
gugcacacacaacccaauucaaaac

SEQ ID NO: 581108 - RNA, 18 nt, Human
guggaggggauguccaca

SEQ ID NO: 581109 - RNA, 21 nt, Human
guuccggagcagcugccuugc

SEQ ID NO: 581110 - RNA, 24 nt, Human
uaauuuuuguauuuuuaguagaga

SEQ ID NO: 581111 - RNA, 23 nt, Human
uacagguaugagccacugugccc

SEQ ID NO: 581112 - RNA, 24 nt, Human
uacagguaugagccacugugcccu

SEQ ID NO: 581113 - RNA, 18 nt, Human
uacccucugcaccaagua

SEQ ID NO: 581114 - RNA, 22 nt, Human
uagagacaggguuucaccaugu

SEQ ID NO: 581115 - RNA, 26 nt, Human
uagcaaacaccagucucaguaaccau

SEQ ID NO: 581116 - RNA, 18 nt, Human
uagcaggaucagcacaga

SEQ ID NO: 581117 - RNA, 24 nt, Human
uaguagagacaggguuucaccaug

SEQ ID NO: 581118 - RNA, 26 nt, Human
uaguagagacaggguuucaccauguu

SEQ ID NO: 581119 - RNA, 26 nt, Human
uauauauguguauaauuguguguaua

SEQ ID NO: 581120 - RNA, 22 nt, Human
uauguguauaauuguguguaua

SEQ ID NO: 581121 - RNA, 24 nt, Human
uauguguauaauuguguguauaca

SEQ ID NO: 581122 - RNA, 19 nt, Human
ucaagugauucuccugccu

SEQ ID NO: 581123 - RNA, 24 nt, Human
ucaccacaaccuccgccucccagg

SEQ ID NO: 581124 - RNA, 25 nt, Human
ucaccacaaccuccgccucccaggu

SEQ ID NO: 581125 - RNA, 27 nt, Human
ucaccacaaccuccgccucccagguuc

SEQ ID NO: 581126 - RNA, 18 nt, Human
ucagccacugagcuggga

SEQ ID NO: 581127 - RNA, 20 nt, Human
ucagccucccgaguagcugg

SEQ ID NO: 581128 - RNA, 21 nt, Human
uccaaaacccaggcccugcag

SEQ ID NO: 581129 - RNA, 21 nt, Human
uccacugaaccucuucuucca

SEQ ID NO: 581130 - RNA, 23 nt, Human
ucccaaacugcugggauuacagg

SEQ ID NO: 581131 - RNA, 24 nt, Human
ucccaaacugcugggauuacaggu

SEQ ID NO: 581132 - RNA, 24 nt, Human
ucccaggcagcagcgucccuccac

SEQ ID NO: 581133 - RNA, 20 nt, Human
ucccaggccugaagggcucu

SEQ ID NO: 581134 - RNA, 21 nt, Human
ucccagguucaagugauucuc

SEQ ID NO: 581135 - RNA, 24 nt, Human
ucccagguucaagugauucuccug

SEQ ID NO: 581136 - RNA, 24 nt, Human
ucccgaguagcugggauuacaggc

SEQ ID NO: 581137 - RNA, 23 nt, Human
uccgggcucugcccacugcuccc

SEQ ID NO: 581138 - RNA, 18 nt, Human
uccugcgagaaggaagug

SEQ ID NO: 581139 - RNA, 24 nt, Human
ucuccugccucagccucccgagua

SEQ ID NO: 581140 - RNA, 23 nt, Human
ucugaccucaggugaucugccug

SEQ ID NO: 581141 - RNA, 23 nt, Human
ucugcaccaaguaucaccagaaa

SEQ ID NO: 581142 - RNA, 24 nt, Human
ucuuccacaggcucuccugagaau

SEQ ID NO: 581143 - RNA, 23 nt, Human
ucuugcucugcugcagaucugaa

SEQ ID NO: 581144 - RNA, 21 nt, Human
ugaaaguguggccuuuggaag

SEQ ID NO: 581145 - RNA, 18 nt, Human
ugaccucaggugaucugc

SEQ ID NO: 581146 - RNA, 24 nt, Human
ugaccucaggugaucugccugccu

SEQ ID NO: 581147 - RNA, 22 nt, Human
ugacuccagugcacacacaacc

SEQ ID NO: 581148 - RNA, 20 nt, Human
ugauucuccugccucagccu

SEQ ID NO: 581149 - RNA, 20 nt, Human
ugcacccagcggcagcugca

SEQ ID NO: 581150 - RNA, 22 nt, Human
ugcacgaagccugugauugggg

SEQ ID NO: 581151 - RNA, 23 nt, Human
ugccaaagaggaccugaggcucc

SEQ ID NO: 581152 - RNA, 18 nt, Human
ugcccagagcuggcugga

SEQ ID NO: 581153 - RNA, 24 nt, Human
ugccucagccucccgaguagcugg

SEQ ID NO: 581154 - RNA, 18 nt, Human
ugccugccuuggccuccc

SEQ ID NO: 581155 - RNA, 21 nt, Human
ugccuuggccucccaaacugc

SEQ ID NO: 581156 - RNA, 24 nt, Human
ugcugggauuacagguaugagcca

SEQ ID NO: 581157 - RNA, 20 nt, Human
uggacagcggccucaugacc

SEQ ID NO: 581158 - RNA, 23 nt, Human
uggaggggucagcacgcacagcu

SEQ ID NO: 581159 - RNA, 23 nt, Human
uggagugcaguggugcaaucucg

SEQ ID NO: 581160 - RNA, 24 nt, Human
uggagugcaguggugcaaucucgg

SEQ ID NO: 581161 - RNA, 23 nt, Human
uggccaggcuggucucgagcucu

SEQ ID NO: 581162 - RNA, 21 nt, Human
uggcccagagggaacaguuua

SEQ ID NO: 581163 - RNA, 25 nt, Human
uggcccagagggaacaguuuauguu

SEQ ID NO: 581164 - RNA, 21 nt, Human
ugggauuacaggcauacacca

SEQ ID NO: 581165 - RNA, 24 nt, Human
ugggauuacaggcauacaccacca

SEQ ID NO: 581166 - RNA, 18 nt, Human
ugggauuacagguaugag

SEQ ID NO: 581167 - RNA, 21 nt, Human
ugggauuacagguaugagcca

SEQ ID NO: 581168 - RNA, 22 nt, Human
ugggauuacagguaugagccac

SEQ ID NO: 581169 - RNA, 22 nt, Human
ugggauuacagguaugagccac

SEQ ID NO: 581170 - RNA, 22 nt, Human
ugggauuacagguaugagccac

SEQ ID NO: 581171 - RNA, 23 nt, Human
ugggauuacagguaugagccacu

SEQ ID NO: 581172 - RNA, 24 nt, Human
ugggauuacagguaugagccacug

SEQ ID NO: 581173 - RNA, 24 nt, Human
uggugcaaucucggcucaccacaa

SEQ ID NO: 581174 - RNA, 23 nt, Human
uguaaaauaauguuugacuccag

SEQ ID NO: 581175 - RNA, 20 nt, Human
uguguauaauuguguguaua

SEQ ID NO: 581176 - RNA, 24 nt, Human
uuaguagagacaggguuucaccau

SEQ ID NO: 581177 - RNA, 21 nt, Human
uucaagugauucuccugccuc

SEQ ID NO: 581178 - RNA, 23 nt, Human
uucaagugauucuccugccucag

SEQ ID NO: 581179 - RNA, 24 nt, Human
uucaagugauucuccugccucagc

SEQ ID NO: 581180 - RNA, 21 nt, Human
uucccuugccuuuuaaaaggg

SEQ ID NO: 581181 - RNA, 24 nt, Human
uucuccaaaacccaggcccugcag

SEQ ID NO: 581182 - RNA, 19 nt, Human
uugacuccagugcacacac

SEQ ID NO: 581183 - RNA, 19 nt, Human
uugcugagugacagggugc

SEQ ID NO: 581184 - RNA, 19 nt, Human
uuggggugagguuaucuau

SEQ ID NO: 581185 - RNA, 22 nt, Human
uugucaccugcugacacaucug

SEQ ID NO: 581186 - RNA, 24 nt, Human
uuucaccauguuggccaggcuggu

SEQ ID NO: 581187 - RNA, 24 nt, Human
uuuuuaguagagacaggguuucac

SEQ ID NO: 581188 - RNA, 20 nt, Human
uuuuuguauuuuuaguagag

SEQ ID NO: 581189 - RNA, 21 nt, Human
aaaacccagcaauaacaauuu

SEQ ID NO: 581190 - RNA, 24 nt, Human
aaaacuuaacacauauaaaaguuu

SEQ ID NO: 581191 - RNA, 19 nt, Human
aagcauuaaaagcagaagc

SEQ ID NO: 581192 - RNA, 19 nt, Human
acccaaagaaauggaaaga

SEQ ID NO: 581193 - RNA, 19 nt, Human
aggaggaaagcucuagucu

SEQ ID NO: 581194 - RNA, 21 nt, Human
aggcaaagccagauauuggga

SEQ ID NO: 581195 - RNA, 18 nt, Human
auaugaaaggcaaagcca

SEQ ID NO: 581196 - RNA, 20 nt, Human
auccuggaggaggaaagcuc

SEQ ID NO: 581197 - RNA, 21 nt, Human
aucucuucuuguacagauguu

SEQ ID NO: 581198 - RNA, 22 nt, Human
caaagaaauggaaagaauugga

SEQ ID NO: 581199 - RNA, 27 nt, Human
caacaaaacccaaagaaauggaaagaa

SEQ ID NO: 581200 - RNA, 21 nt, Human
caagugaaacuaaauuaagua

SEQ ID NO: 581201 - RNA, 18 nt, Human
cagaagccaguaaaugag

SEQ ID NO: 581202 - RNA, 24 nt, Human
ccagugcaacaaaacccaaagaaa

SEQ ID NO: 581203 - RNA, 20 nt, Human
ccaugcacuagauccucucc

SEQ ID NO: 581204 - RNA, 23 nt, Human
cuccaaaacauccuggaggagga

SEQ ID NO: 581205 - RNA, 18 nt, Human
cuuuggggucaaaaccca

SEQ ID NO: 581206 - RNA, 19 nt, Human
gaaguuccuccuuauccuu

SEQ ID NO: 581207 - RNA, 19 nt, Human
gcaacaaaacccaaagaaa

SEQ ID NO: 581208 - RNA, 25 nt, Human
gcacuagauccucuccaaccggagg

SEQ ID NO: 581209 - RNA, 19 nt, Human
ggaacacaaugaaaaaugg

SEQ ID NO: 581210 - RNA, 21 nt, Human
ggaagaacagcagucaacaag

SEQ ID NO: 581211 - RNA, 18 nt, Human
ggaaugggaggaagaggg

SEQ ID NO: 581212 - RNA, 19 nt, Human
ggaaugggaggaagaggga

SEQ ID NO: 581213 - RNA, 19 nt, Human
ggauaaagagauauucugu

SEQ ID NO: 581214 - RNA, 24 nt, Human
ggcaggcugagugcaugcggggcc

SEQ ID NO: 581215 - RNA, 18 nt, Human
gugaaggaaaaagcagcc

SEQ ID NO: 581216 - RNA, 19 nt, Human
gugcuaugcuauaucugcc

SEQ ID NO: 581217 - RNA, 24 nt, Human
guggagguggaaugggaggaagag

SEQ ID NO: 581218 - RNA, 24 nt, Human
uaacacauauaaaaguuucaaaaa

SEQ ID NO: 581219 - RNA, 20 nt, Human
uacucugagaaugaagaacc

SEQ ID NO: 581220 - RNA, 20 nt, Human
uagccagugcaacaaaaccc

SEQ ID NO: 581221 - RNA, 19 nt, Human
ucccuggagaugcucuggc

SEQ ID NO: 581222 - RNA, 22 nt, Human
ucccuggagaugcucuggcugu

SEQ ID NO: 581223 - RNA, 22 nt, Human
uccuggaggaggaaagcucuag

SEQ ID NO: 581224 - RNA, 19 nt, Human
ugacaaaaacuacucugag

SEQ ID NO: 581225 - RNA, 26 nt, Human
ugcacuagauccucuccaaaacaucc

SEQ ID NO: 581226 - RNA, 21 nt, Human
ugcccugaaaacuuaacacau

SEQ ID NO: 581227 - RNA, 22 nt, Human
uggaaagaauuggaacacaaug

SEQ ID NO: 581228 - RNA, 19 nt, Human
uggaaugggaggaagaggg

SEQ ID NO: 581229 - RNA, 24 nt, Human
uggaggaggaaagcucuagucuuu

SEQ ID NO: 581230 - RNA, 21 nt, Human
uggcaggcugagugcaugcgg

SEQ ID NO: 581231 - RNA, 22 nt, Human
uggcaugaggaagauaaaaugg

SEQ ID NO: 581232 - RNA, 22 nt, Human
ugggaggaagagggaguccaug

SEQ ID NO: 581233 - RNA, 18 nt, Human
ugguaagaaauaccagaa

SEQ ID NO: 581234 - RNA, 20 nt, Human
uuccggaucagggcagaggg

SEQ ID NO: 581235 - RNA, 22 nt, Human
uuugugcuaugcuauaucugcc

SEQ ID NO: 581236 - RNA, 19 nt, Human
aaacgccuccacggccaag

SEQ ID NO: 581237 - RNA, 18 nt, Human
aaagugcccagaucugcc

SEQ ID NO: 581238 - RNA, 21 nt, Human
aaagugcuuucaaucccauua

SEQ ID NO: 581239 - RNA, 21 nt, Human
aagcaacaguaagaaaauaac

SEQ ID NO: 581240 - RNA, 18 nt, Human
aagcaggcaucucucuua

SEQ ID NO: 581241 - RNA, 21 nt, Human
aagcaucacaaauuaaaaaua

SEQ ID NO: 581242 - RNA, 23 nt, Human
aaguguuggaaacacauuaaacu

SEQ ID NO: 581243 - RNA, 21 nt, Human
acacagaggaaagacaaugag

SEQ ID NO: 581244 - RNA, 24 nt, Human
acaucaacuggguugaagggggac

SEQ ID NO: 581245 - RNA, 19 nt, Human
agaaaagcaucacaaauua

SEQ ID NO: 581246 - RNA, 23 nt, Human
agaaugggcacccacuccccauu

SEQ ID NO: 581247 - RNA, 28 nt, Human
agcaacaguaagaaaauaaccgguaccc

SEQ ID NO: 581248 - RNA, 20 nt, Human
agcaggcaaacacugccagg

SEQ ID NO: 581249 - RNA, 18 nt, Human
agcggcaaacgccuccac

SEQ ID NO: 581250 - RNA, 23 nt, Human
aggagccacguggggcccggagc

SEQ ID NO: 581251 - RNA, 24 nt, Human
aggcaaaugcuggaaaacccuccg

SEQ ID NO: 581252 - RNA, 24 nt, Human
aggccagaacacagaacugugauc

SEQ ID NO: 581253 - RNA, 25 nt, Human
aggcuucccuggagacgcauaaacc

SEQ ID NO: 581254 - RNA, 24 nt, Human
aggguguuuggaaacacgaucuga

SEQ ID NO: 581255 - RNA, 19 nt, Human
auuuguaaaaaaugaggug

SEQ ID NO: 581256 - RNA, 21 nt, Human
caacacucgcaauaacugagu

SEQ ID NO: 581257 - RNA, 20 nt, Human
caagucuugaacuugaacca

SEQ ID NO: 581258 - RNA, 18 nt, Human
cacaguccuguuuugggg

SEQ ID NO: 581259 - RNA, 21 nt, Human
caccaugaucuagagcacagg

SEQ ID NO: 581260 - RNA, 22 nt, Human
cacccacuccccauuucaccuc

SEQ ID NO: 581261 - RNA, 20 nt, Human
cacccaggaugugugucuuc

SEQ ID NO: 581262 - RNA, 20 nt, Human
caccugagccauuguaacca

SEQ ID NO: 581263 - RNA, 22 nt, Human
cacgagccucgcugccagugcc

SEQ ID NO: 581264 - RNA, 18 nt, Human
cacuccaaguuuuuggca

SEQ ID NO: 581265 - RNA, 21 nt, Human
cagcaacacucgcaauaacug

SEQ ID NO: 581266 - RNA, 22 nt, Human
cagcaacacucgcaauaacuga

SEQ ID NO: 581267 - RNA, 18 nt, Human
cagggucacucacuacac

SEQ ID NO: 581268 - RNA, 22 nt, Human
cauuucccucucuccccugccc

SEQ ID NO: 581269 - RNA, 21 nt, Human
ccacaggccagaacacagaac

SEQ ID NO: 581270 - RNA, 19 nt, Human
ccacgggggccuuccuuca

SEQ ID NO: 581271 - RNA, 21 nt, Human
ccagaaauuccuuguuucugg

SEQ ID NO: 581272 - RNA, 22 nt, Human
ccagaacacagaacugugauca

SEQ ID NO: 581273 - RNA, 23 nt, Human
ccagaacacagaacugugaucau

SEQ ID NO: 581274 - RNA, 21 nt, Human
ccagcggcccuucccggcccu

SEQ ID NO: 581275 - RNA, 25 nt, Human
ccagcucauucuaccacgggggccu

SEQ ID NO: 581276 - RNA, 22 nt, Human
ccaucguagagaauucgguugu

SEQ ID NO: 581277 - RNA, 22 nt, Human
cccaccagcuaagcagagggaa

SEQ ID NO: 581278 - RNA, 26 nt, Human
cccaugcgccucguggagagcaacca

SEQ ID NO: 581279 - RNA, 28 nt, Human
cccaugcgccucguggagagcaaccacg

SEQ ID NO: 581280 - RNA, 23 nt, Human
ccccauuucaccacuguacaccc

SEQ ID NO: 581281 - RNA, 23 nt, Human
cccugccacaggccagaacacag

SEQ ID NO: 581282 - RNA, 19 nt, Human
cccuguuguucugaggggc

SEQ ID NO: 581283 - RNA, 21 nt, Human
ccgaggcuucccuggagacgc

SEQ ID NO: 581284 - RNA, 18 nt, Human
ccugaccagaguugucac

SEQ ID NO: 581285 - RNA, 22 nt, Human
ccugccacaggccagaacacag

SEQ ID NO: 581286 - RNA, 20 nt, Human
cgagccucgcugccagugcc

SEQ ID NO: 581287 - RNA, 25 nt, Human
cgccucguggagagcaaccacgucu

SEQ ID NO: 581288 - RNA, 20 nt, Human
cuacuuauuuuucaagacaa

SEQ ID NO: 581289 - RNA, 21 nt, Human
cuagagcacaggagccacgug

SEQ ID NO: 581290 - RNA, 20 nt, Human
cugcccaccagcuaagcaga

SEQ ID NO: 581291 - RNA, 26 nt, Human
cuucacagucaccaguccacgcugcc

SEQ ID NO: 581292 - RNA, 21 nt, Human
gacaccugagccauuguaacc

SEQ ID NO: 581293 - RNA, 18 nt, Human
gcuaagcagagggaauga

SEQ ID NO: 581294 - RNA, 21 nt, Human
gcuccccaugcgccucgugga

SEQ ID NO: 581295 - RNA, 22 nt, Human
ggacuggguaaucccagaaauu

SEQ ID NO: 581296 - RNA, 18 nt, Human
ggagaggaggggacaucu

SEQ ID NO: 581297 - RNA, 23 nt, Human
gggcccggagcaugcggacagca

SEQ ID NO: 581298 - RNA, 20 nt, Human
guagcucaggugagcggcaa

SEQ ID NO: 581299 - RNA, 23 nt, Human
guggagagcaaccacgucuguuc

SEQ ID NO: 581300 - RNA, 19 nt, Human
guggggcccggagcaugcg

SEQ ID NO: 581301 - RNA, 20 nt, Human
gugugucuucuucuaagaga

SEQ ID NO: 581302 - RNA, 20 nt, Human
guuuuuggcauuucccucuc

SEQ ID NO: 581303 - RNA, 19 nt, Human
uaaaaauaaaaaauagcau

SEQ ID NO: 581304 - RNA, 21 nt, Human
uaaaagugcuuucaaucccau

SEQ ID NO: 581305 - RNA, 22 nt, Human
uaagaaaauaaccugaagauau

SEQ ID NO: 581306 - RNA, 21 nt, Human
uagaaaagcaucacaaauuaa

SEQ ID NO: 581307 - RNA, 19 nt, Human
ucaccacuguacacccagg

SEQ ID NO: 581308 - RNA, 21 nt, Human
uccaaccacagggcgggggag

SEQ ID NO: 581309 - RNA, 23 nt, Human
ucccggcccugccacaggccaga

SEQ ID NO: 581310 - RNA, 22 nt, Human
ucccuggagacgcauaaaccug

SEQ ID NO: 581311 - RNA, 23 nt, Human
uccguggcaucgauuccaaccac

SEQ ID NO: 581312 - RNA, 24 nt, Human
uccguggcaucgauuccaaccaca

SEQ ID NO: 581313 - RNA, 25 nt, Human
uccuucacuccaaguuuuuggcauu

SEQ ID NO: 581314 - RNA, 22 nt, Human
ucggaagccagcggcccuuccc

SEQ ID NO: 581315 - RNA, 18 nt, Human
ucuccaugugguaaaagu

SEQ ID NO: 581316 - RNA, 22 nt, Human
ucugcccaccacucuggcaccg

SEQ ID NO: 581317 - RNA, 19 nt, Human
ucugcgacaaagcuuaggg

SEQ ID NO: 581318 - RNA, 26 nt, Human
ugagcaaauggccaucguuguaauga

SEQ ID NO: 581319 - RNA, 20 nt, Human
ugagcaggcaaacacugcca

SEQ ID NO: 581320 - RNA, 19 nt, Human
ugaguagaauagauucugu

SEQ ID NO: 581321 - RNA, 23 nt, Human
ugaucaugcaaagagccgugacu

SEQ ID NO: 581322 - RNA, 23 nt, Human
ugcaaagagccgugacugaggcc

SEQ ID NO: 581323 - RNA, 22 nt, Human
ugccacaggccagaacacagaa

SEQ ID NO: 581324 - RNA, 21 nt, Human
uggagaggaggggacaucugc

SEQ ID NO: 581325 - RNA, 22 nt, Human
uggcaugaggcaaaugcuggaa

SEQ ID NO: 581326 - RNA, 22 nt, Human
uguuuugggguuuuuccaaggc

SEQ ID NO: 581327 - RNA, 23 nt, Human
uuccaaccacagggcgggggagu

SEQ ID NO: 581328 - RNA, 21 nt, Human
uucugaggggccacucugagc

SEQ ID NO: 581329 - RNA, 23 nt, Human
uuggaaacacgaucugaaauuug

SEQ ID NO: 581330 - RNA, 19 nt, Human
aaaauucuuucauuucugu

SEQ ID NO: 581331 - RNA, 20 nt, Human
aagcuccagagucccuuacu

SEQ ID NO: 581332 - RNA, 21 nt, Human
cacuccaucaguuagcaucuu

SEQ ID NO: 581333 - RNA, 18 nt, Human
cagagucccuuacucucc

SEQ ID NO: 581334 - RNA, 21 nt, Human
cagaucccagaucuacagaaa

SEQ ID NO: 581335 - RNA, 20 nt, Human
caucuuguuuacugccuucc

SEQ ID NO: 581336 - RNA, 19 nt, Human
ccaguguaccaaagauaca

SEQ ID NO: 581337 - RNA, 20 nt, Human
cccaaacuuucauuuaacau

SEQ ID NO: 581338 - RNA, 25 nt, Human
cccccugcuuccauccugaguguac

SEQ ID NO: 581339 - RNA, 18 nt, Human
ccugaugacagauggaag

SEQ ID NO: 581340 - RNA, 19 nt, Human
ccuggggauuucacuccau

SEQ ID NO: 581341 - RNA, 19 nt, Human
cuccugccccugaggccuc

SEQ ID NO: 581342 - RNA, 23 nt, Human
cuuccugccacuauaucaucgau

SEQ ID NO: 581343 - RNA, 26 nt, Human
gaaaauucuuucauuucuguuguguc

SEQ ID NO: 581344 - RNA, 20 nt, Human
ggggcagguguccagauccc

SEQ ID NO: 581345 - RNA, 21 nt, Human
uaugguucuacugcuggugac

SEQ ID NO: 581346 - RNA, 21 nt, Human
ucagagcagucuggaaucaag

SEQ ID NO: 581347 - RNA, 19 nt, Human
uccaggaggcggggccauc

SEQ ID NO: 581348 - RNA, 26 nt, Human
uccaggaggcggggccaucccguccg

SEQ ID NO: 581349 - RNA, 19 nt, Human
ucuacagaaaauucuuuca

SEQ ID NO: 581350 - RNA, 27 nt, Human
ucuccaguguaccaaagauacaguccu

SEQ ID NO: 581351 - RNA, 22 nt, Human
ucuccugaugacagauggaagu

SEQ ID NO: 581352 - RNA, 22 nt, Human
ucugcaucuccuggggauuuca

SEQ ID NO: 581353 - RNA, 20 nt, Human
ugaccucauagaagcagagu

SEQ ID NO: 581354 - RNA, 19 nt, Human
ugccuaguuugagcuccaa

SEQ ID NO: 581355 - RNA, 22 nt, Human
uggaaguccaggaggcggggcc

SEQ ID NO: 581356 - RNA, 23 nt, Human
uggaaguccaggaggcggggcca

SEQ ID NO: 581357 - RNA, 23 nt, Human
ugucauguucauuaguuccuuca

SEQ ID NO: 581358 - RNA, 24 nt, Human
uuccgagcuuuauuaaaaugucga

SEQ ID NO: 581359 - RNA, 19 nt, Human
uucuguugugucccccugc

SEQ ID NO: 581360 - RNA, 22 nt, Human
uuugagcuccaacugucacaga

SEQ ID NO: 581361 - RNA, 20 nt, Human
aaacaacagaaacuggcugg

SEQ ID NO: 581362 - RNA, 24 nt, Human
aaagugcugggagccacucacagg

SEQ ID NO: 581363 - RNA, 30 nt, Human
aaagugcugggagccacucacaggugugaa

SEQ ID NO: 581364 - RNA, 21 nt, Human
aaccccgugccucccaccugc

SEQ ID NO: 581365 - RNA, 25 nt, Human
aaccgcggccgcgggauccgcaacc

SEQ ID NO: 581366 - RNA, 18 nt, Human
aagcaguccucccuccuc

SEQ ID NO: 581367 - RNA, 25 nt, Human
aagcaguccucccuccucggccucu

SEQ ID NO: 581368 - RNA, 20 nt, Human
aagcugccucuucaacccca

SEQ ID NO: 581369 - RNA, 21 nt, Human
aagcugccucuucaaccccag

SEQ ID NO: 581370 - RNA, 29 nt, Human
aagcugccucuucaaccccagcucugccc

SEQ ID NO: 581371 - RNA, 23 nt, Human
acccugggacacacagagcuuua

SEQ ID NO: 581372 - RNA, 18 nt, Human
acgccacuguacuccagc

SEQ ID NO: 581373 - RNA, 22 nt, Human
acgccacuguacuccagccugg

SEQ ID NO: 581374 - RNA, 21 nt, Human
acugcagucccagcuacucag

SEQ ID NO: 581375 - RNA, 24 nt, Human
acuguacuccagccugggugacag

SEQ ID NO: 581376 - RNA, 21 nt, Human
agagauugguggggggagggc

SEQ ID NO: 581377 - RNA, 24 nt, Human
aggcaggaggaugucuugagcccg

SEQ ID NO: 581378 - RNA, 24 nt, Human
aggccgaggcaggaggaugucuug

SEQ ID NO: 581379 - RNA, 24 nt, Human
aucacgccacuguacuccagccug

SEQ ID NO: 581380 - RNA, 21 nt, Human
caaacaacagaaacuggcugg

SEQ ID NO: 581381 - RNA, 24 nt, Human
caaagugcugggagccacucacag

SEQ ID NO: 581382 - RNA, 24 nt, Human
caaccccagcucugccgggggcuc

SEQ ID NO: 581383 - RNA, 22 nt, Human
cacacagagcuuuacggugggg

SEQ ID NO: 581384 - RNA, 24 nt, Human
cacaggugugagccaccacgccca

SEQ ID NO: 581385 - RNA, 18 nt, Human
caccacgcccagcagagc

SEQ ID NO: 581386 - RNA, 19 nt, Human
cacuguacuccagccuggg

SEQ ID NO: 581387 - RNA, 19 nt, Human
cacuguacuccagccuggg

SEQ ID NO: 581388 - RNA, 19 nt, Human
cacuguacuccagccuggg

SEQ ID NO: 581389 - RNA, 19 nt, Human
cacuguacuccagccuggg

SEQ ID NO: 581390 - RNA, 22 nt, Human
cacuguacuccagccuggguga

SEQ ID NO: 581391 - RNA, 24 nt, Human
cacuguacuccagccugggugaca

SEQ ID NO: 581392 - RNA, 24 nt, Human
cacuguacuccagccugggugaca

SEQ ID NO: 581393 - RNA, 24 nt, Human
cagcuacucaggaggccgaggcag

SEQ ID NO: 581394 - RNA, 20 nt, Human
ccacgcccagcagagcuucg

SEQ ID NO: 581395 - RNA, 20 nt, Human
ccacuguacuccagccuggg

SEQ ID NO: 581396 - RNA, 20 nt, Human
ccacuguacuccagccuggg

SEQ ID NO: 581397 - RNA, 21 nt, Human
ccacuguacuccagccugggu

SEQ ID NO: 581398 - RNA, 21 nt, Human
ccacuguacuccagccugggu

SEQ ID NO: 581399 - RNA, 23 nt, Human
ccacuguacuccagccuggguga

SEQ ID NO: 581400 - RNA, 24 nt, Human
ccacuguacuccagccugggugac

SEQ ID NO: 581401 - RNA, 19 nt, Human
ccucccuccucggccucuc

SEQ ID NO: 581402 - RNA, 27 nt, Human
cgcgggauccgcaaccccgugccuccc

SEQ ID NO: 581403 - RNA, 18 nt, Human
cgugaugugcaggcuggu

SEQ ID NO: 581404 - RNA, 24 nt, Human
cgugaugugcaggcuggucuugaa

SEQ ID NO: 581405 - RNA, 19 nt, Human
cucacaggugugagccacc

SEQ ID NO: 581406 - RNA, 22 nt, Human
cucccaccugcccggcuaggga

SEQ ID NO: 581407 - RNA, 21 nt, Human
cugcagucccagcuacucagg

SEQ ID NO: 581408 - RNA, 19 nt, Human
gccacuguacuccagccug

SEQ ID NO: 581409 - RNA, 24 nt, Human
gccacuguacuccagccuggguga

SEQ ID NO: 581410 - RNA, 24 nt, Human
gcccgggaggucaaggcugcagug

SEQ ID NO: 581411 - RNA, 21 nt, Human
gccugggugacaggaagaccc

SEQ ID NO: 581412 - RNA, 21 nt, Human
ggcuuacaacugcagucccag

SEQ ID NO: 581413 - RNA, 23 nt, Human
gggauccgcaaccccgugccucc

SEQ ID NO: 581414 - RNA, 19 nt, Human
guacuccagccugggugac

SEQ ID NO: 581415 - RNA, 21 nt, Human
guccgaaccgcggccgcggga

SEQ ID NO: 581416 - RNA, 24 nt, Human
guggcuuacaacugcagucccagc

SEQ ID NO: 581417 - RNA, 18 nt, Human
uacuccagccugggugac

SEQ ID NO: 581418 - RNA, 20 nt, Human
uacuccagccugggugacag

SEQ ID NO: 581419 - RNA, 24 nt, Human
uacuccagccugggugacaggaag

SEQ ID NO: 581420 - RNA, 29 nt, Human
ucaaagugcugggagccacucacaggugu

SEQ ID NO: 581421 - RNA, 30 nt, Human
ucaaagugcugggagccacucacagguguu

SEQ ID NO: 581422 - RNA, 18 nt, Human
ucacaggugugagccacc

SEQ ID NO: 581423 - RNA, 19 nt, Human
ucacaggugugagccacca

SEQ ID NO: 581424 - RNA, 23 nt, Human
ucacgccacuguacuccagccug

SEQ ID NO: 581425 - RNA, 18 nt, Human
uccagccugggugacagg

SEQ ID NO: 581426 - RNA, 21 nt, Human
uccgcaaccccgugccuccca

SEQ ID NO: 581427 - RNA, 18 nt, Human
ucucaaagugcugggagc

SEQ ID NO: 581428 - RNA, 24 nt, Human
ucucgugaugugcaggcuggucuu

SEQ ID NO: 581429 - RNA, 23 nt, Human
ucuggcuucaagcaguccucccu

SEQ ID NO: 581430 - RNA, 24 nt, Human
ucuugaacuucuggcuucaagcag

SEQ ID NO: 581431 - RNA, 24 nt, Human
ugaacuucuggcuucaagcagucc

SEQ ID NO: 581432 - RNA, 24 nt, Human
ugagcccgggaggucaaggcugca

SEQ ID NO: 581433 - RNA, 19 nt, Human
uggcuucaagcaguccucc

SEQ ID NO: 581434 - RNA, 20 nt, Human
uggcuucaagcaguccuccc

SEQ ID NO: 581435 - RNA, 27 nt, Human
ugggagccacucacaggucgaccuggu

SEQ ID NO: 581436 - RNA, 21 nt, Human
ugggggcuucaaacaacagaa

SEQ ID NO: 581437 - RNA, 26 nt, Human
ugggugacaggaagacccugggacac

SEQ ID NO: 581438 - RNA, 24 nt, Human
ugugaucacgccacuguacuccag

SEQ ID NO: 581439 - RNA, 24 nt, Human
ugugcaggcuggucuugaacuucu

SEQ ID NO: 581440 - RNA, 22 nt, Human
aaaaaaaaaaaaggaacaaaag

SEQ ID NO: 581441 - RNA, 22 nt, Human
aaaaaaaaaaaaggaacaaaag

SEQ ID NO: 581442 - RNA, 22 nt, Human
aaaaaaaaaaaggaacaaaagg

SEQ ID NO: 581443 - RNA, 18 nt, Human
aaaaacaaauaaggauuu

SEQ ID NO: 581444 - RNA, 19 nt, Human
aaaagaaugcccagaggca

SEQ ID NO: 581445 - RNA, 21 nt, Human
aaaaucacgguauguuaucac

SEQ ID NO: 581446 - RNA, 21 nt, Human
aaagauuucuccuuaaccucc

SEQ ID NO: 581447 - RNA, 18 nt, Human
aaccacagacucaaaguc

SEQ ID NO: 581448 - RNA, 21 nt, Human
aagaaaaaaaaaaaaaaagga

SEQ ID NO: 581449 - RNA, 24 nt, Human
aagaaauccucacucauuacuauc

SEQ ID NO: 581450 - RNA, 25 nt, Human
aagauuucuccuuaaccuccuacua

SEQ ID NO: 581451 - RNA, 18 nt, Human
aagcaucauagcucagag

SEQ ID NO: 581452 - RNA, 21 nt, Human
aagccucuuccugaaugcucc

SEQ ID NO: 581453 - RNA, 25 nt, Human
acaagacaaaggauagagaacaaaa

SEQ ID NO: 581454 - RNA, 18 nt, Human
accaguucucagcuggug

SEQ ID NO: 581455 - RNA, 24 nt, Human
acccaggaaaggugacacaacucc

SEQ ID NO: 581456 - RNA, 25 nt, Human
acccaggaaaggugacacaacucuu

SEQ ID NO: 581457 - RNA, 21 nt, Human
accuguuucuuucaugcugug

SEQ ID NO: 581458 - RNA, 21 nt, Human
accuuuuuuuuuuuuuugcaa

SEQ ID NO: 581459 - RNA, 23 nt, Human
acuuccccacccaccccuuagug

SEQ ID NO: 581460 - RNA, 27 nt, Human
agaaaaaaaaaaaaaaaggaacaaaag

SEQ ID NO: 581461 - RNA, 19 nt, Human
agaaaaacaaggugcucag

SEQ ID NO: 581462 - RNA, 21 nt, Human
agaaaacccaaaucacccagg

SEQ ID NO: 581463 - RNA, 20 nt, Human
agaacaaaagauaguccucc

SEQ ID NO: 581464 - RNA, 26 nt, Human
agauggccuaguauauuuucuaaaac

SEQ ID NO: 581465 - RNA, 23 nt, Human
aggauuuuuauuugcaguacuuu

SEQ ID NO: 581466 - RNA, 22 nt, Human
agguuacaggcuuggaagggca

SEQ ID NO: 581467 - RNA, 18 nt, Human
aucccccacaacucagua

SEQ ID NO: 581468 - RNA, 18 nt, Human
auggagaaaacccaaauc

SEQ ID NO: 581469 - RNA, 24 nt, Human
auggccuggagguugucuucaacu

SEQ ID NO: 581470 - RNA, 29 nt, Human
auuacaaagucuacaaaaacaaauaaggg

SEQ ID NO: 581471 - RNA, 19 nt, Human
caaaagaaugcccagaggc

SEQ ID NO: 581472 - RNA, 20 nt, Human
caagacaaaggauagagaac

SEQ ID NO: 581473 - RNA, 18 nt, Human
cacccaggaaaggugaca

SEQ ID NO: 581474 - RNA, 22 nt, Human
cacccaggaaaggugacacaac

SEQ ID NO: 581475 - RNA, 18 nt, Human
caccccuuagugcuccca

SEQ ID NO: 581476 - RNA, 23 nt, Human
caccucaaagaaacacugauggg

SEQ ID NO: 581477 - RNA, 22 nt, Human
cacucuaacaagacaaaggaua

SEQ ID NO: 581478 - RNA, 24 nt, Human
cacucuaacaagacaaaggauaga

SEQ ID NO: 581479 - RNA, 21 nt, Human
cagaacaguaaaagaaaaaaa

SEQ ID NO: 581480 - RNA, 22 nt, Human
cagauggccuaguauauuuucu

SEQ ID NO: 581481 - RNA, 19 nt, Human
cagccaacaugauaagggc

SEQ ID NO: 581482 - RNA, 22 nt, Human
cauuccuagaacaaaaaaaaag

SEQ ID NO: 581483 - RNA, 24 nt, Human
cccccacaacucaguagagagguu

SEQ ID NO: 581484 - RNA, 24 nt, Human
ccuuuuuuuuuuuuuugcaauccc

SEQ ID NO: 581485 - RNA, 18 nt, Human
cuacaagcuccuugaaug

SEQ ID NO: 581486 - RNA, 19 nt, Human
cuaugugccaguucagagc

SEQ ID NO: 581487 - RNA, 20 nt, Human
cucacucauuacuaucaccg

SEQ ID NO: 581488 - RNA, 26 nt, Human
cucacucauuacuaucacuguauucc

SEQ ID NO: 581489 - RNA, 24 nt, Human
cuccauggcccauacaaggacucc

SEQ ID NO: 581490 - RNA, 23 nt, Human
cuccuacuaaaaacuaaaauuaa

SEQ ID NO: 581491 - RNA, 21 nt, Human
cugcuccuaacccaaccuguu

SEQ ID NO: 581492 - RNA, 23 nt, Human
cuguagcauuccauuccuucugc

SEQ ID NO: 581493 - RNA, 20 nt, Human
cuguggucacuccugcuggc

SEQ ID NO: 581494 - RNA, 20 nt, Human
cuuccuuuaaaaacuugcca

SEQ ID NO: 581495 - RNA, 24 nt, Human
cuugaguaaaucacacagaccucu

SEQ ID NO: 581496 - RNA, 19 nt, Human
cuuucuagcaugagcucag

SEQ ID NO: 581497 - RNA, 23 nt, Human
gagcccaccuaggccagaaccag

SEQ ID NO: 581498 - RNA, 20 nt, Human
gcagcugccuccuuuccucc

SEQ ID NO: 581499 - RNA, 28 nt, Human
gccaacuucccuaaugcaaucaccucaa

SEQ ID NO: 581500 - RNA, 23 nt, Human
gggcugagacuucggccccacag

SEQ ID NO: 581501 - RNA, 21 nt, Human
gucaaacccuaguaugaauaa

SEQ ID NO: 581502 - RNA, 18 nt, Human
gugaaccacagacucaaa

SEQ ID NO: 581503 - RNA, 22 nt, Human
guucuagagcccaccuaggcca

SEQ ID NO: 581504 - RNA, 20 nt, Human
guuucagguucugcagugcu

SEQ ID NO: 581505 - RNA, 19 nt, Human
uaaaugguucuagagccca

SEQ ID NO: 581506 - RNA, 21 nt, Human
uaacaagacaaaggauagaga

SEQ ID NO: 581507 - RNA, 19 nt, Human
uaacauacaacauaucccc

SEQ ID NO: 581508 - RNA, 21 nt, Human
uacuaugugccaguucagagc

SEQ ID NO: 581509 - RNA, 18 nt, Human
uaucccccacaacucagu

SEQ ID NO: 581510 - RNA, 23 nt, Human
ucacugagcuguccccucccugu

SEQ ID NO: 581511 - RNA, 18 nt, Human
ucacuuccccacccaccc

SEQ ID NO: 581512 - RNA, 20 nt, Human
ucacuuccccacccaccccu

SEQ ID NO: 581513 - RNA, 20 nt, Human
ucagaacaguaaaagaaaaa

SEQ ID NO: 581514 - RNA, 25 nt, Human
ucagaacaguaaaagaaaaaaaaaa

SEQ ID NO: 581515 - RNA, 27 nt, Human
ucagagcuacaagcuccuugaauggag

SEQ ID NO: 581516 - RNA, 20 nt, Human
ucccaauaaaagcaucauag

SEQ ID NO: 581517 - RNA, 23 nt, Human
ucccaauaaaagcaucauagcuc

SEQ ID NO: 581518 - RNA, 25 nt, Human
ucccagagccaacuucccuaaugca

SEQ ID NO: 581519 - RNA, 24 nt, Human
uccccacccaccccuuagugcucc

SEQ ID NO: 581520 - RNA, 20 nt, Human
uccuugaauggagaaaaccc

SEQ ID NO: 581521 - RNA, 20 nt, Human
uccuuuaaaaacuugccauu

SEQ ID NO: 581522 - RNA, 19 nt, Human
ucuccauggcccauacaag

SEQ ID NO: 581523 - RNA, 23 nt, Human
ucuccauggcccauacaaggacu

SEQ ID NO: 581524 - RNA, 22 nt, Human
ugaaccacagacucaaagucuu

SEQ ID NO: 581525 - RNA, 18 nt, Human
ugacccacucuaacaaga

SEQ ID NO: 581526 - RNA, 20 nt, Human
ugacugggcugaguagagag

SEQ ID NO: 581527 - RNA, 19 nt, Human
ugaguaaaucacacagaag

SEQ ID NO: 581528 - RNA, 19 nt, Human
ugcagugcuuauaagguag

SEQ ID NO: 581529 - RNA, 20 nt, Human
uggagaaaacccaaaucacc

SEQ ID NO: 581530 - RNA, 20 nt, Human
uggagaaaacccaaaucacc

SEQ ID NO: 581531 - RNA, 22 nt, Human
uggcaaaauaugacugggcuga

SEQ ID NO: 581532 - RNA, 21 nt, Human
uggcagugaucucucuuuggc

SEQ ID NO: 581533 - RNA, 22 nt, Human
uggcaucucaagcagcagggga

SEQ ID NO: 581534 - RNA, 27 nt, Human
uucagaacaguaaaagaaaaaaaaaaa

SEQ ID NO: 581535 - RNA, 19 nt, Human
uucuagagcccaccuaggc

SEQ ID NO: 581536 - RNA, 19 nt, Human
uuuaaagagaaagggggaa

SEQ ID NO: 581537 - RNA, 20 nt, Human
uuuuuuuuuugcaaucccag

SEQ ID NO: 581538 - RNA, 25 nt, Human
aacucgcugccgggcagcucccccg

SEQ ID NO: 581539 - RNA, 21 nt, Human
aagcauuacacuucauuccuu

SEQ ID NO: 581540 - RNA, 19 nt, Human
aaggccccugccggcuccc

SEQ ID NO: 581541 - RNA, 21 nt, Human
acccgcggcacccgggccccg

SEQ ID NO: 581542 - RNA, 18 nt, Human
acccgggccccgcggcuc

SEQ ID NO: 581543 - RNA, 24 nt, Human
agaggcccggcucccucggccccc

SEQ ID NO: 581544 - RNA, 20 nt, Human
agccccugggccgcccggcc

SEQ ID NO: 581545 - RNA, 19 nt, Human
aggggguuucgaaggcccc

SEQ ID NO: 581546 - RNA, 21 nt, Human
cacaacaguucgcuccccccg

SEQ ID NO: 581547 - RNA, 18 nt, Human
cagccgcuccccaaggac

SEQ ID NO: 581548 - RNA, 21 nt, Human
cagcggggcaaacucgcugcc

SEQ ID NO: 581549 - RNA, 24 nt, Human
ccacaacaguucgcuccccccgcc

SEQ ID NO: 581550 - RNA, 22 nt, Human
ccagcccgggcgcugcccugcc

SEQ ID NO: 581551 - RNA, 19 nt, Human
ccccaaggacuccgggccu

SEQ ID NO: 581552 - RNA, 30 nt, Human
ccccaaggacuccgggccuggguugccagg

SEQ ID NO: 581553 - RNA, 18 nt, Human
cccccgggguggcgcggc

SEQ ID NO: 581554 - RNA, 22 nt, Human
ccccgccccgggccggucccuc

SEQ ID NO: 581555 - RNA, 19 nt, Human
ccccgcguccgagaggccc

SEQ ID NO: 581556 - RNA, 23 nt, Human
ccccgguaggccacuccgcggcc

SEQ ID NO: 581557 - RNA, 23 nt, Human
cccgcggcacccgggccccgcgg

SEQ ID NO: 581558 - RNA, 24 nt, Human
cccgcggcagccccugggccgccc

SEQ ID NO: 581559 - RNA, 19 nt, Human
cccggaggagccuucugcc

SEQ ID NO: 581560 - RNA, 21 nt, Human
cccggccucgaacccgcggcc

SEQ ID NO: 581561 - RNA, 21 nt, Human
cccgggccccgcggcucgucc

SEQ ID NO: 581562 - RNA, 21 nt, Human
cccucugggggaggguccccg

SEQ ID NO: 581563 - RNA, 22 nt, Human
cccugccccgcguccgagaggc

SEQ ID NO: 581564 - RNA, 22 nt, Human
cccuucgcgggacagcggaagu

SEQ ID NO: 581565 - RNA, 19 nt, Human
ccgagaggcccggcucccu

SEQ ID NO: 581566 - RNA, 27 nt, Human
ccgcaccacaacaguucgcuccccccg

SEQ ID NO: 581567 - RNA, 18 nt, Human
ccgcggcucguccggccc

SEQ ID NO: 581568 - RNA, 18 nt, Human
ccggaagcccccuuccuc

SEQ ID NO: 581569 - RNA, 19 nt, Human
ccggcccacuccaccccug

SEQ ID NO: 581570 - RNA, 20 nt, Human
ccgggggucacccggaggag

SEQ ID NO: 581571 - RNA, 21 nt, Human
ccucccggcucgaggccccgg

SEQ ID NO: 581572 - RNA, 23 nt, Human
ccuccggaagcccccuuccuccc

SEQ ID NO: 581573 - RNA, 26 nt, Human
ccucgaacccgcggcacccgggcccc

SEQ ID NO: 581574 - RNA, 21 nt, Human
ccucgcgcggggcccggccuc

SEQ ID NO: 581575 - RNA, 21 nt, Human
cgccccgagucccgcggcagc

SEQ ID NO: 581576 - RNA, 20 nt, Human
cgccgcccgccgaacgcucc

SEQ ID NO: 581577 - RNA, 21 nt, Human
cggaagcccccuuccucccgg

SEQ ID NO: 581578 - RNA, 25 nt, Human
cggcucccgcggcucgcagggcccc

SEQ ID NO: 581579 - RNA, 24 nt, Human
cggcucgcagggccccgccggggg

SEQ ID NO: 581580 - RNA, 18 nt, Human
cucccgccuucuuucggc

SEQ ID NO: 581581 - RNA, 26 nt, Human
cuccgcaccacaacaguucgcucccc

SEQ ID NO: 581582 - RNA, 19 nt, Human
cuccgcggccgcgcuugcc

SEQ ID NO: 581583 - RNA, 19 nt, Human
cuccgggccuggguugcca

SEQ ID NO: 581584 - RNA, 22 nt, Human
gccccgagucccgcggcagccc

SEQ ID NO: 581585 - RNA, 22 nt, Human
gccgaacgcuccgcaccacaac

SEQ ID NO: 581586 - RNA, 22 nt, Human
gcggcacccgggccccgcggcu

SEQ ID NO: 581587 - RNA, 22 nt, Human
gcggccgcgcuugccgcggggc

SEQ ID NO: 581588 - RNA, 24 nt, Human
gcugcccugccccgcguccgagag

SEQ ID NO: 581589 - RNA, 23 nt, Human
ggcccacuccaccccugcagcca

SEQ ID NO: 581590 - RNA, 21 nt, Human
ggcccccggcccuccgccucc

SEQ ID NO: 581591 - RNA, 19 nt, Human
gggguguccgggagggcgu

SEQ ID NO: 581592 - RNA, 21 nt, Human
gggguuucgaaggccccugcc

SEQ ID NO: 581593 - RNA, 22 nt, Human
guguccgggagggcgucccagg

SEQ ID NO: 581594 - RNA, 19 nt, Human
uaugggcuuaaauguagua

SEQ ID NO: 581595 - RNA, 18 nt, Human
ucccagaguccgucucca

SEQ ID NO: 581596 - RNA, 20 nt, Human
ucccucggcccccggcccuc

SEQ ID NO: 581597 - RNA, 22 nt, Human
uccgggccuggguugccagggg

SEQ ID NO: 581598 - RNA, 18 nt, Human
ucgaaggccccugccggc

SEQ ID NO: 581599 - RNA, 24 nt, Human
ugagacccccgcagccgagggucc

SEQ ID NO: 581600 - RNA, 21 nt, Human
aggccguggcuggcgcggccg

SEQ ID NO: 581601 - RNA, 19 nt, Human
cagcacaaagcgcgucucc

SEQ ID NO: 581602 - RNA, 21 nt, Human
cccccgcccgcccccggcccc

SEQ ID NO: 581603 - RNA, 23 nt, Human
cccccgcccgcccccggccccgc

SEQ ID NO: 581604 - RNA, 19 nt, Human
ccccgcccgcccccggccc

SEQ ID NO: 581605 - RNA, 20 nt, Human
cccgcccccggccccgccgc

SEQ ID NO: 581606 - RNA, 19 nt, Human
cccucggcccgccccccgc

SEQ ID NO: 581607 - RNA, 21 nt, Human
ccgcgcccucggcccgccccc

SEQ ID NO: 581608 - RNA, 22 nt, Human
ccgcgcccucggcccgcccccc

SEQ ID NO: 581609 - RNA, 23 nt, Human
ccgcgcccucggcccgccccccg

SEQ ID NO: 581610 - RNA, 19 nt, Human
cggccgcccgcgcccucgg

SEQ ID NO: 581611 - RNA, 22 nt, Human
cguggcuggcgcggccggcgcc

SEQ ID NO: 581612 - RNA, 20 nt, Human
gccgcaggccguggcuggcg

SEQ ID NO: 581613 - RNA, 18 nt, Human
gcuggcgcggccggcgcc

SEQ ID NO: 581614 - RNA, 20 nt, Human
guacaaggauacgauggaag

SEQ ID NO: 581615 - RNA, 20 nt, Human
uggaagaagccacuaugggc

SEQ ID NO: 581616 - RNA, 20 nt, Human
uggaagaagccacuaugggc

SEQ ID NO: 581617 - RNA, 19 nt, Human
uggcgcggccggcgcccag

SEQ ID NO: 581618 - RNA, 19 nt, Human
aaacaagaauaaacagcug

SEQ ID NO: 581619 - RNA, 22 nt, Human
aaagcaaacaaggcugaaauac

SEQ ID NO: 581620 - RNA, 21 nt, Human
aacaaaguaaauauuacaguu

SEQ ID NO: 581621 - RNA, 20 nt, Human
aacagcgagggagaagggaa

SEQ ID NO: 581622 - RNA, 18 nt, Human
aagcaaacaaggcugaaa

SEQ ID NO: 581623 - RNA, 18 nt, Human
aagguggacagaaaagga

SEQ ID NO: 581624 - RNA, 18 nt, Human
acaaaaagucaaacaaga

SEQ ID NO: 581625 - RNA, 22 nt, Human
acacagaagagccaucuccaaa

SEQ ID NO: 581626 - RNA, 21 nt, Human
agaagagccaucuccaaagaa

SEQ ID NO: 581627 - RNA, 26 nt, Human
agacggagguagaagagaggggaccc

SEQ ID NO: 581628 - RNA, 19 nt, Human
agcaaggaauucagaagag

SEQ ID NO: 581629 - RNA, 21 nt, Human
agcucagugacugucaggaac

SEQ ID NO: 581630 - RNA, 18 nt, Human
aggaaauguugaaaauag

SEQ ID NO: 581631 - RNA, 19 nt, Human
aggaaauguugaaaauagc

SEQ ID NO: 581632 - RNA, 18 nt, Human
aggcuggggcugagccuc

SEQ ID NO: 581633 - RNA, 22 nt, Human
aguguggauucuccaagagaga

SEQ ID NO: 581634 - RNA, 18 nt, Human
auccagcaaaccgcuaac

SEQ ID NO: 581635 - RNA, 18 nt, Human
caagaaacccacagucac

SEQ ID NO: 581636 - RNA, 22 nt, Human
caagaaacccacagucacagga

SEQ ID NO: 581637 - RNA, 26 nt, Human
caagagagauggguuguuggggaggc

SEQ ID NO: 581638 - RNA, 20 nt, Human
caagcgagucuccuccgccc

SEQ ID NO: 581639 - RNA, 18 nt, Human
cacacgcgaaucacgcac

SEQ ID NO: 581640 - RNA, 22 nt, Human
cacagcucugcgugcccgcggc

SEQ ID NO: 581641 - RNA, 24 nt, Human
cacaucuaacuccucuacuaguuc

SEQ ID NO: 581642 - RNA, 21 nt, Human
cacgacacugguuuccacacg

SEQ ID NO: 581643 - RNA, 19 nt, Human
cacugaagaaaagcgagac

SEQ ID NO: 581644 - RNA, 21 nt, Human
cagacccgaucgagccagagg

SEQ ID NO: 581645 - RNA, 22 nt, Human
cagcaaggaauucagaagagaa

SEQ ID NO: 581646 - RNA, 18 nt, Human
cagcagauuuaaagugac

SEQ ID NO: 581647 - RNA, 18 nt, Human
cagccugagcggcggaga

SEQ ID NO: 581648 - RNA, 19 nt, Human
cagggucugggaggugagg

SEQ ID NO: 581649 - RNA, 24 nt, Human
caucuaacuccucuacuaguucua

SEQ ID NO: 581650 - RNA, 22 nt, Human
ccacaagccaacccguaauugc

SEQ ID NO: 581651 - RNA, 19 nt, Human
ccccgcgcgcgucccccuc

SEQ ID NO: 581652 - RNA, 23 nt, Human
ccccgcgcgcgucccccucuccu

SEQ ID NO: 581653 - RNA, 25 nt, Human
cccguaauugcaaagcaaacaaggc

SEQ ID NO: 581654 - RNA, 26 nt, Human
ccucccugcagugacuccgcgggucg

SEQ ID NO: 581655 - RNA, 18 nt, Human
ccuccgccgccucccccc

SEQ ID NO: 581656 - RNA, 18 nt, Human
cgagaagagggcugggga

SEQ ID NO: 581657 - RNA, 19 nt, Human
cgcgcgucccccucuccuc

SEQ ID NO: 581658 - RNA, 21 nt, Human
cggagguagaagagagaggga

SEQ ID NO: 581659 - RNA, 18 nt, Human
cuccggcgaaagguccuc

SEQ ID NO: 581660 - RNA, 19 nt, Human
cugcagugacuccgcgggu

SEQ ID NO: 581661 - RNA, 24 nt, Human
cuucauuugugggagggaguuggg

SEQ ID NO: 581662 - RNA, 26 nt, Human
gaacgcacccagcagcugauuuacac

SEQ ID NO: 581663 - RNA, 19 nt, Human
gaccuagaagaaacgaagu

SEQ ID NO: 581664 - RNA, 25 nt, Human
gacgguauucacccuauuucucuua

SEQ ID NO: 581665 - RNA, 20 nt, Human
gagacggagcugggggucca

SEQ ID NO: 581666 - RNA, 21 nt, Human
gagaggagaagcaguaucugg

SEQ ID NO: 581667 - RNA, 21 nt, Human
gagggaagcggaggccuuagc

SEQ ID NO: 581668 - RNA, 23 nt, Human
gaggugacauaugcaugcccaga

SEQ ID NO: 581669 - RNA, 23 nt, Human
gaguugggggagagaggagaagc

SEQ ID NO: 581670 - RNA, 20 nt, Human
gaucacucagcuaaucgugg

SEQ ID NO: 581671 - RNA, 19 nt, Human
gcagauuuaaagugacuuu

SEQ ID NO: 581672 - RNA, 20 nt, Human
gccuagagucggcccugcuc

SEQ ID NO: 581673 - RNA, 21 nt, Human
gcucaugguuaaccccuuccu

SEQ ID NO: 581674 - RNA, 21 nt, Human
ggaccuagaagaaacgaagug

SEQ ID NO: 581675 - RNA, 21 nt, Human
ggaggcucaugguuaaccccu

SEQ ID NO: 581676 - RNA, 20 nt, Human
ggaguugggggagagaggag

SEQ ID NO: 581677 - RNA, 18 nt, Human
gggaggcucaugguuaac

SEQ ID NO: 581678 - RNA, 19 nt, Human
gguagaagagagagggaag

SEQ ID NO: 581679 - RNA, 18 nt, Human
gguguggggaaccgagaa

SEQ ID NO: 581680 - RNA, 21 nt, Human
uaaccccuuccugcucgccuc

SEQ ID NO: 581681 - RNA, 27 nt, Human
uagacgguauucacccuauuucucuua

SEQ ID NO: 581682 - RNA, 22 nt, Human
uaucuggaaaggcucccuggag

SEQ ID NO: 581683 - RNA, 23 nt, Human
ucacucagcuaaucguggggugc

SEQ ID NO: 581684 - RNA, 19 nt, Human
ucagaagagaaaacuucau

SEQ ID NO: 581685 - RNA, 22 nt, Human
uccaaagaauuaaaagugggcc

SEQ ID NO: 581686 - RNA, 27 nt, Human
uccacuacuguucugcugauacaaacu

SEQ ID NO: 581687 - RNA, 19 nt, Human
ucccccucuccucccugca

SEQ ID NO: 581688 - RNA, 21 nt, Human
ucccugcagugacuccgcggg

SEQ ID NO: 581689 - RNA, 23 nt, Human
ucuaacuccucuacuaguucuaa

SEQ ID NO: 581690 - RNA, 22 nt, Human
ucuccaaagaauuaaaaguggg

SEQ ID NO: 581691 - RNA, 18 nt, Human
ucuguuugugcagcucua

SEQ ID NO: 581692 - RNA, 21 nt, Human
ugaagaaaagcgagacggagg

SEQ ID NO: 581693 - RNA, 26 nt, Human
ugaagaaaagcgagacggagguagaa

SEQ ID NO: 581694 - RNA, 23 nt, Human
ugacaguaccagcaaggaauuca

SEQ ID NO: 581695 - RNA, 23 nt, Human
ugagaccucaggagggaagcgga

SEQ ID NO: 581696 - RNA, 24 nt, Human
ugcaaagcaaacaaggcugaaaua

SEQ ID NO: 581697 - RNA, 20 nt, Human
ugcagcagauuuaaagugac

SEQ ID NO: 581698 - RNA, 23 nt, Human
ugcaugcccagagaucuacccaa

SEQ ID NO: 581699 - RNA, 24 nt, Human
ugcaugcccagagaucuacccaaa

SEQ ID NO: 581700 - RNA, 18 nt, Human
ugcccuagaucacucagc

SEQ ID NO: 581701 - RNA, 20 nt, Human
ugcccuagaucacucagcua

SEQ ID NO: 581702 - RNA, 26 nt, Human
ugcuuuauucuuucugcagcagauuu

SEQ ID NO: 581703 - RNA, 19 nt, Human
uggcaccguagccacaagc

SEQ ID NO: 581704 - RNA, 20 nt, Human
uggcaccguagccacaagcc

SEQ ID NO: 581705 - RNA, 21 nt, Human
ugggaggcucaugguuaaccc

SEQ ID NO: 581706 - RNA, 20 nt, Human
ugggagggaguugggggaga

SEQ ID NO: 581707 - RNA, 20 nt, Human
ugggagugggcaccaggaag

SEQ ID NO: 581708 - RNA, 21 nt, Human
uggggaaacuaagacuuagag

SEQ ID NO: 581709 - RNA, 18 nt, Human
ugucugugaaauauaagg

SEQ ID NO: 581710 - RNA, 23 nt, Human
uucaaaauaaaggaaacuaaucu

SEQ ID NO: 581711 - RNA, 26 nt, Human
uucaaaauaaaggaaacuaaucugau

SEQ ID NO: 581712 - RNA, 22 nt, Human
uucaacagcagccaagauuuaa

SEQ ID NO: 581713 - RNA, 20 nt, Human
uucugcagcagauuuaaagu

SEQ ID NO: 581714 - RNA, 23 nt, Human
uuggagaugaaaauuuguucccu

SEQ ID NO: 581715 - RNA, 18 nt, Human
uuuguacaaaaagucaaa

SEQ ID NO: 581716 - RNA, 21 nt, Human
uuuguacaaaaagucaaacaa

SEQ ID NO: 581717 - RNA, 21 nt, Human
uuugugggagggaguuggggg

SEQ ID NO: 581718 - RNA, 24 nt, Human
aacaaggagacacagguaggagga

SEQ ID NO: 581719 - RNA, 21 nt, Human
aaccacaugacugaguuugag

SEQ ID NO: 581720 - RNA, 24 nt, Human
acacagcagucuccagaucgucug

SEQ ID NO: 581721 - RNA, 22 nt, Human
accuguaguuccgugggucccg

SEQ ID NO: 581722 - RNA, 22 nt, Human
acucacacacacauaccacaca

SEQ ID NO: 581723 - RNA, 23 nt, Human
aggugggucagagucuggccagg

SEQ ID NO: 581724 - RNA, 18 nt, Human
agucugauccaugccugc

SEQ ID NO: 581725 - RNA, 25 nt, Human
augcacacucacacacacauaccac

SEQ ID NO: 581726 - RNA, 18 nt, Human
caaagacaagcuugugca

SEQ ID NO: 581727 - RNA, 22 nt, Human
caagccuagcugugcguccccu

SEQ ID NO: 581728 - RNA, 23 nt, Human
cacacauaccacacaaagacaag

SEQ ID NO: 581729 - RNA, 21 nt, Human
cacacucacacacacauacca

SEQ ID NO: 581730 - RNA, 25 nt, Human
cagcuccugagcucagcaggacccu

SEQ ID NO: 581731 - RNA, 21 nt, Human
caggaccccaaaacaaggaga

SEQ ID NO: 581732 - RNA, 27 nt, Human
caggaccccaaaacaaggagacacagg

SEQ ID NO: 581733 - RNA, 18 nt, Human
ccaaaacaaggagacaca

SEQ ID NO: 581734 - RNA, 21 nt, Human
ccaacugaugccucgugcccc

SEQ ID NO: 581735 - RNA, 23 nt, Human
ccacacaaagacaagcuugugca

SEQ ID NO: 581736 - RNA, 19 nt, Human
ccccaaaacaaggagacac

SEQ ID NO: 581737 - RNA, 20 nt, Human
cccucaacacacagcagucu

SEQ ID NO: 581738 - RNA, 21 nt, Human
ccucaacacacagcagucucc

SEQ ID NO: 581739 - RNA, 21 nt, Human
ccucagcccagccccaggagu

SEQ ID NO: 581740 - RNA, 24 nt, Human
cggccuuuaugcugggccugggcu

SEQ ID NO: 581741 - RNA, 21 nt, Human
cucacccugccccacaccugu

SEQ ID NO: 581742 - RNA, 19 nt, Human
cucuucccaacugaugccu

SEQ ID NO: 581743 - RNA, 21 nt, Human
cugacucugcccccuggacac

SEQ ID NO: 581744 - RNA, 21 nt, Human
cugcugcacuggcaaggugac

SEQ ID NO: 581745 - RNA, 24 nt, Human
cuucccaacugaugccucgugccc

SEQ ID NO: 581746 - RNA, 19 nt, Human
cuuuaugcugggccugggc

SEQ ID NO: 581747 - RNA, 18 nt, Human
gagacacagguaggagga

SEQ ID NO: 581748 - RNA, 22 nt, Human
gagucuggaguggggaaugggg

SEQ ID NO: 581749 - RNA, 18 nt, Human
gccccuagcuugcagucu

SEQ ID NO: 581750 - RNA, 19 nt, Human
gccugcugcacuggcaagg

SEQ ID NO: 581751 - RNA, 25 nt, Human
gccugggcuggggggccuggggaca

SEQ ID NO: 581752 - RNA, 24 nt, Human
gccuuuaugcugggccugggcugg

SEQ ID NO: 581753 - RNA, 19 nt, Human
ggacaacuggagucuggag

SEQ ID NO: 581754 - RNA, 21 nt, Human
ggacugaggcugggucagagu

SEQ ID NO: 581755 - RNA, 19 nt, Human
ggggaaugggguaguuugg

SEQ ID NO: 581756 - RNA, 23 nt, Human
gggggccccccaacacggccuuu

SEQ ID NO: 581757 - RNA, 22 nt, Human
gggggccuggggacaucccgau

SEQ ID NO: 581758 - RNA, 21 nt, Human
ggggugccccucaccccagcu

SEQ ID NO: 581759 - RNA, 28 nt, Human
gucaggaccccaaaacaaggggcucuuc

SEQ ID NO: 581760 - RNA, 22 nt, Human
uaaaaaaaaguaccagguacaa

SEQ ID NO: 581761 - RNA, 18 nt, Human
uaacuuggcuuucagaga

SEQ ID NO: 581762 - RNA, 19 nt, Human
uaccacacaaagacaagcu

SEQ ID NO: 581763 - RNA, 19 nt, Human
uagcuugcagucugaucca

SEQ ID NO: 581764 - RNA, 23 nt, Human
ucaacacacagcagucuccagau

SEQ ID NO: 581765 - RNA, 22 nt, Human
ucacacacacauaccacacaaa

SEQ ID NO: 581766 - RNA, 20 nt, Human
uccacgcucacccugcccca

SEQ ID NO: 581767 - RNA, 21 nt, Human
uccgcgucccuucuuccacgc

SEQ ID NO: 581768 - RNA, 20 nt, Human
uccugagcucagcaggaccc

SEQ ID NO: 581769 - RNA, 21 nt, Human
uccugagcucagcaggacccu

SEQ ID NO: 581770 - RNA, 19 nt, Human
ucguaucuucccucaacac

SEQ ID NO: 581771 - RNA, 22 nt, Human
ucuucagucaggaccccaaaac

SEQ ID NO: 581772 - RNA, 21 nt, Human
ugacucugcccccuggacacc

SEQ ID NO: 581773 - RNA, 23 nt, Human
ugagaggaggcaccccagugcuu

SEQ ID NO: 581774 - RNA, 25 nt, Human
ugagaggaggcaccccagugcuugg

SEQ ID NO: 581775 - RNA, 19 nt, Human
ugagguaggugggucagag

SEQ ID NO: 581776 - RNA, 27 nt, Human
ugagguaggugggucagagucuggcca

SEQ ID NO: 581777 - RNA, 22 nt, Human
ugcaaagcgcacccccauccgc

SEQ ID NO: 581778 - RNA, 20 nt, Human
ugcacacucacacacacaua

SEQ ID NO: 581779 - RNA, 23 nt, Human
ugcacacucacacacacauacca

SEQ ID NO: 581780 - RNA, 19 nt, Human
ugcagcuccugagcucagc

SEQ ID NO: 581781 - RNA, 24 nt, Human
ugccccuagcuugcagucugaucc

SEQ ID NO: 581782 - RNA, 22 nt, Human
ugccucgugccccuagcuugca

SEQ ID NO: 581783 - RNA, 26 nt, Human
ugcuuguuccccucagcccagcccca

SEQ ID NO: 581784 - RNA, 18 nt, Human
ugcuuuguuuuuucaagu

SEQ ID NO: 581785 - RNA, 22 nt, Human
ugcuuuguuuuuucaaguuuca

SEQ ID NO: 581786 - RNA, 19 nt, Human
ugggccugggcuggggggc

SEQ ID NO: 581787 - RNA, 21 nt, Human
ugugcacacacacauacgcag

SEQ ID NO: 581788 - RNA, 24 nt, Human
ugugcacacacacauacgcauaac

SEQ ID NO: 581789 - RNA, 23 nt, Human
ugugcacacacacauacgcauag

SEQ ID NO: 581790 - RNA, 26 nt, Human
ugugugcauacaugcacacucacaca

SEQ ID NO: 581791 - RNA, 26 nt, Human
ugugugcauacaugcacacucacaca

SEQ ID NO: 581792 - RNA, 24 nt, Human
uuaggacugaggcugggucagagu

SEQ ID NO: 581793 - RNA, 19 nt, Human
uuccccucagcccagcccc

SEQ ID NO: 581794 - RNA, 21 nt, Human
uuccccucagcccagccccag

SEQ ID NO: 581795 - RNA, 18 nt, Human
aaaacugauaaaaaggag

SEQ ID NO: 581796 - RNA, 19 nt, Human
aaacuggccucuuucucca

SEQ ID NO: 581797 - RNA, 20 nt, Human
aacuuccucccccagaucuu

SEQ ID NO: 581798 - RNA, 23 nt, Human
aacuuccucccccagaucuucca

SEQ ID NO: 581799 - RNA, 20 nt, Human
accauaguccuaccaccuaa

SEQ ID NO: 581800 - RNA, 21 nt, Human
accuaaagaacacucacugac

SEQ ID NO: 581801 - RNA, 23 nt, Human
acuuccucccccagaucuuccau

SEQ ID NO: 581802 - RNA, 22 nt, Human
agaaaagagaacagacagaaga

SEQ ID NO: 581803 - RNA, 23 nt, Human
agacagaagauaagagaagagaa

SEQ ID NO: 581804 - RNA, 26 nt, Human
agacagaagauaagagaagagggacc

SEQ ID NO: 581805 - RNA, 22 nt, Human
agagaaaagagaacagacagaa

SEQ ID NO: 581806 - RNA, 18 nt, Human
agagaacagacagaagau

SEQ ID NO: 581807 - RNA, 20 nt, Human
agagaaggguauacagucug

SEQ ID NO: 581808 - RNA, 22 nt, Human
auacaauagaccacauauccag

SEQ ID NO: 581809 - RNA, 20 nt, Human
caaaacugauaaaaaggaga

SEQ ID NO: 581810 - RNA, 22 nt, Human
caauaucugcugauugaucuaa

SEQ ID NO: 581811 - RNA, 23 nt, Human
cacaccaaaacugauaaaaagga

SEQ ID NO: 581812 - RNA, 19 nt, Human
caccuaaagaacacucacu

SEQ ID NO: 581813 - RNA, 24 nt, Human
ccaaaauaauaccugguauaccgg

SEQ ID NO: 581814 - RNA, 23 nt, Human
ccacaccaaaacugauaaaaagg

SEQ ID NO: 581815 - RNA, 27 nt, Human
cccaaaauaauaccugguauaccggac

SEQ ID NO: 581816 - RNA, 19 nt, Human
ccuugaacuuccuccccca

SEQ ID NO: 581817 - RNA, 21 nt, Human
cucuauauaaggcauaaaggu

SEQ ID NO: 581818 - RNA, 21 nt, Human
gacagaagauaagagaagaga

SEQ ID NO: 581819 - RNA, 21 nt, Human
gagggagagaaaagagaacag

SEQ ID NO: 581820 - RNA, 20 nt, Human
gcugcaaacaugaguuguac

SEQ ID NO: 581821 - RNA, 18 nt, Human
ggugagagagagagagag

SEQ ID NO: 581822 - RNA, 21 nt, Human
uaacaaguuuaauauugaaaa

SEQ ID NO: 581823 - RNA, 25 nt, Human
uacauaucauacacuuuuguguaua

SEQ ID NO: 581824 - RNA, 21 nt, Human
uagcuuaccccaaaauaauac

SEQ ID NO: 581825 - RNA, 19 nt, Human
uaucuguaccacucaguug

SEQ ID NO: 581826 - RNA, 28 nt, Human
ucucuauauaaggcauaaaggugagggu

SEQ ID NO: 581827 - RNA, 22 nt, Human
ugaaagccuauuuaaacuggcc

SEQ ID NO: 581828 - RNA, 20 nt, Human
ugagggagggagagaaaaga

SEQ ID NO: 581829 - RNA, 22 nt, Human
ugagggagggagagaaaagaga

SEQ ID NO: 581830 - RNA, 28 nt, Human
ugagggagggagagaaaagagaacaaca

SEQ ID NO: 581831 - RNA, 22 nt, Human
uggugccuuccuugaacuuccu

SEQ ID NO: 581832 - RNA, 24 nt, Human
uguacuuguuagcuuaccccaaaa

SEQ ID NO: 581833 - RNA, 24 nt, Human
ugugauguaugucuuauguuucca

SEQ ID NO: 581834 - RNA, 19 nt, Human
uguguauaaugugauguau

SEQ ID NO: 581835 - RNA, 22 nt, Human
uuaaagcuuucaggucaccuag

SEQ ID NO: 581836 - RNA, 23 nt, Human
uuccaugucauaucuguaccacu

SEQ ID NO: 581837 - RNA, 22 nt, Human
uucugguguggugccuuccuug

SEQ ID NO: 581838 - RNA, 21 nt, Human
uugaaaaucugaaaaaggcag

SEQ ID NO: 581839 - RNA, 23 nt, Human
aaaugcugggauuacaggcguga

SEQ ID NO: 581840 - RNA, 26 nt, Human
aaaugcugggauuacaggcgugagcc

SEQ ID NO: 581841 - RNA, 19 nt, Human
aaucugcucaucugauccg

SEQ ID NO: 581842 - RNA, 21 nt, Human
aauuccuauguuucuucaaau

SEQ ID NO: 581843 - RNA, 24 nt, Human
acacugaccuucacuaaccaaucu

SEQ ID NO: 581844 - RNA, 18 nt, Human
acaguaauggaagcaucc

SEQ ID NO: 581845 - RNA, 24 nt, Human
acucuuguugcccaggcuggagug

SEQ ID NO: 581846 - RNA, 19 nt, Human
agaaacacagcaacugacc

SEQ ID NO: 581847 - RNA, 20 nt, Human
agaaacacagcaacugacca

SEQ ID NO: 581848 - RNA, 24 nt, Human
agagauucuccugccucagccucc

SEQ ID NO: 581849 - RNA, 24 nt, Human
agguaauccacccacaucagccuc

SEQ ID NO: 581850 - RNA, 18 nt, Human
aguagcugggauuacagg

SEQ ID NO: 581851 - RNA, 18 nt, Human
augggguuucaccauauu

SEQ ID NO: 581852 - RNA, 24 nt, Human
augggguuucaccauauuggccag

SEQ ID NO: 581853 - RNA, 21 nt, Human
caaacagagagaugaacaagc

SEQ ID NO: 581854 - RNA, 23 nt, Human
caaauacucuucaauccuccaga

SEQ ID NO: 581855 - RNA, 22 nt, Human
caagagauucuccugccucagc

SEQ ID NO: 581856 - RNA, 23 nt, Human
cacagcaacugaccaaacagaga

SEQ ID NO: 581857 - RNA, 23 nt, Human
cacaucagccucccaaaugcugg

SEQ ID NO: 581858 - RNA, 18 nt, Human
caccauauuggccaggcc

SEQ ID NO: 581859 - RNA, 21 nt, Human
caccauauuggccaggccggu

SEQ ID NO: 581860 - RNA, 24 nt, Human
caccauauuggccaggccggucuc

SEQ ID NO: 581861 - RNA, 25 nt, Human
caccauguccagcuaauuuuuugua

SEQ ID NO: 581862 - RNA, 19 nt, Human
cacccacaucagccuccca

SEQ ID NO: 581863 - RNA, 21 nt, Human
cacccacaucagccucccaaa

SEQ ID NO: 581864 - RNA, 24 nt, Human
cacucuuguugcccaggcuggagu

SEQ ID NO: 581865 - RNA, 18 nt, Human
cacugcaaccucugccuc

SEQ ID NO: 581866 - RNA, 19 nt, Human
cagacuucaaauacucuuc

SEQ ID NO: 581867 - RNA, 24 nt, Human
cagccaaugcucuuuccagaaauu

SEQ ID NO: 581868 - RNA, 24 nt, Human
cauauuggccaggccggucucgaa

SEQ ID NO: 581869 - RNA, 19 nt, Human
ccaaacagagagaugaaca

SEQ ID NO: 581870 - RNA, 19 nt, Human
ccaaaugcugggauuacag

SEQ ID NO: 581871 - RNA, 21 nt, Human
ccaaaugcugggauuacaggc

SEQ ID NO: 581872 - RNA, 23 nt, Human
ccaaaugcugggauuacaggcgu

SEQ ID NO: 581873 - RNA, 24 nt, Human
ccaaaugcugggauuacaggcgug

SEQ ID NO: 581874 - RNA, 23 nt, Human
ccacccacaucagccucccaaau

SEQ ID NO: 581875 - RNA, 24 nt, Human
cccaaaugcugggauuacaggcgu

SEQ ID NO: 581876 - RNA, 19 nt, Human
cccaggcuggagugcaaug

SEQ ID NO: 581877 - RNA, 23 nt, Human
cccaggcuggagugcaauggagc

SEQ ID NO: 581878 - RNA, 23 nt, Human
cccuaguagcugggauuacaggu

SEQ ID NO: 581879 - RNA, 23 nt, Human
ccuaguagcugggauuacaggua

SEQ ID NO: 581880 - RNA, 18 nt, Human
ccucccaaaugcugggau

SEQ ID NO: 581881 - RNA, 24 nt, Human
ccucucagguucaagagauucucc

SEQ ID NO: 581882 - RNA, 24 nt, Human
ccugacgucagguaauccacccac

SEQ ID NO: 581883 - RNA, 20 nt, Human
cgagacaguaauggaagcau

SEQ ID NO: 581884 - RNA, 20 nt, Human
cuaguagcugggauuacagg

SEQ ID NO: 581885 - RNA, 24 nt, Human
cucacucuuguugcccaggcugga

SEQ ID NO: 581886 - RNA, 24 nt, Human
cucacugcaaccucugccucucag

SEQ ID NO: 581887 - RNA, 24 nt, Human
cucagccucccuaguagcugggau

SEQ ID NO: 581888 - RNA, 21 nt, Human
cucagguucaagagauucucc

SEQ ID NO: 581889 - RNA, 20 nt, Human
cuccaaaauuccacuuauga

SEQ ID NO: 581890 - RNA, 24 nt, Human
cuccagaagcuucucaagcucaga

SEQ ID NO: 581891 - RNA, 18 nt, Human
cucuuguugcccaggcug

SEQ ID NO: 581892 - RNA, 24 nt, Human
cugcaaccucugccucucagguuc

SEQ ID NO: 581893 - RNA, 23 nt, Human
cugccucagccucccuaguagcu

SEQ ID NO: 581894 - RNA, 23 nt, Human
gaaauuuucacaagccuuucacu

SEQ ID NO: 581895 - RNA, 22 nt, Human
gaacaagccagccaaugcucuu

SEQ ID NO: 581896 - RNA, 22 nt, Human
gaagcuucucaagcucagaaac

SEQ ID NO: 581897 - RNA, 19 nt, Human
gaccucggcucacugcaac

SEQ ID NO: 581898 - RNA, 23 nt, Human
gagaugggguuucaccauauugg

SEQ ID NO: 581899 - RNA, 24 nt, Human
gagaugggguuucaccauauuggc

SEQ ID NO: 581900 - RNA, 24 nt, Human
gagauucuccugccucagccuccc

SEQ ID NO: 581901 - RNA, 18 nt, Human
gauuacaggcgugagcca

SEQ ID NO: 581902 - RNA, 21 nt, Human
gauuacaggcgugagccacua

SEQ ID NO: 581903 - RNA, 22 nt, Human
gauuacaggcgugagccacuac

SEQ ID NO: 581904 - RNA, 22 nt, Human
gauuacagguacccaccaccau

SEQ ID NO: 581905 - RNA, 19 nt, Human
gcccaggcuggagugcaau

SEQ ID NO: 581906 - RNA, 22 nt, Human
ggcagaaacacagcaacugacc

SEQ ID NO: 581907 - RNA, 19 nt, Human
ggcuggagugcaauggagc

SEQ ID NO: 581908 - RNA, 18 nt, Human
gggguuucaccauauugg

SEQ ID NO: 581909 - RNA, 22 nt, Human
gggguuucaccauauuggccag

SEQ ID NO: 581910 - RNA, 24 nt, Human
guaauccacccacaucagccuccc

SEQ ID NO: 581911 - RNA, 24 nt, Human
uaauccacccacaucagccuccca

SEQ ID NO: 581912 - RNA, 24 nt, Human
uaauuuuuuguauuuuuaguagag

SEQ ID NO: 581913 - RNA, 25 nt, Human
uaauuuuuuguauuuuuaguagaga

SEQ ID NO: 581914 - RNA, 23 nt, Human
uacaggcgugagccacuacaccc

SEQ ID NO: 581915 - RNA, 24 nt, Human
uacagguacccaccaccaugucca

SEQ ID NO: 581916 - RNA, 19 nt, Human
uaguagagaugggguuuca

SEQ ID NO: 581917 - RNA, 23 nt, Human
uaguagagaugggguuucaccau

SEQ ID NO: 581918 - RNA, 26 nt, Human
uaguagagaugggguuucaccauauu

SEQ ID NO: 581919 - RNA, 25 nt, Human
uaguagcugggauuacagguaccca

SEQ ID NO: 581920 - RNA, 21 nt, Human
ucaauccuccagaagcuucuc

SEQ ID NO: 581921 - RNA, 19 nt, Human
ucacugcaaccucugccuc

SEQ ID NO: 581922 - RNA, 24 nt, Human
ucacugcaaccucugccucucagg

SEQ ID NO: 581923 - RNA, 24 nt, Human
ucagaaacaaucuucuucucacac

SEQ ID NO: 581924 - RNA, 22 nt, Human
ucagugcaaagccauucuuuuu

SEQ ID NO: 581925 - RNA, 21 nt, Human
uccacccacaucagccuccca

SEQ ID NO: 581926 - RNA, 24 nt, Human
uccagaaauuuucacaagccuuuc

SEQ ID NO: 581927 - RNA, 22 nt, Human
ucccaaaugcugggauuacagg

SEQ ID NO: 581928 - RNA, 23 nt, Human
ucccaaaugcugggauuacaggc

SEQ ID NO: 581929 - RNA, 24 nt, Human
ucccaaaugcugggauuacaggcg

SEQ ID NO: 581930 - RNA, 23 nt, Human
ucccuaguagcugggauuacagg

SEQ ID NO: 581931 - RNA, 24 nt, Human
ucccuaguagcugggauuacaggu

SEQ ID NO: 581932 - RNA, 24 nt, Human
ucucacucuuguugcccaggcugg

SEQ ID NO: 581933 - RNA, 25 nt, Human
ucucacucuuguugcccaggcugga

SEQ ID NO: 581934 - RNA, 21 nt, Human
ucucagguucaagagauucuc

SEQ ID NO: 581935 - RNA, 24 nt, Human
ucucagguucaagagauucuccug

SEQ ID NO: 581936 - RNA, 21 nt, Human
ucuccaaaauuccacuuauga

SEQ ID NO: 581937 - RNA, 25 nt, Human
ucuccugccucagccucccuaguag

SEQ ID NO: 581938 - RNA, 22 nt, Human
ucuuguugcccaggcuggagug

SEQ ID NO: 581939 - RNA, 22 nt, Human
ugaacaagccagccaaugcugu

SEQ ID NO: 581940 - RNA, 21 nt, Human
ugacacagacuucaaauacuc

SEQ ID NO: 581941 - RNA, 20 nt, Human
ugcaauggagcgaccucggc

SEQ ID NO: 581942 - RNA, 18 nt, Human
ugcccaggcuggagugca

SEQ ID NO: 581943 - RNA, 21 nt, Human
ugcccaggcuggagugcaaug

SEQ ID NO: 581944 - RNA, 25 nt, Human
ugcccaggcuggagugcaauggagc

SEQ ID NO: 581945 - RNA, 24 nt, Human
ugccucagccucccuaguagcugg

SEQ ID NO: 581946 - RNA, 19 nt, Human
ugcucagugcaaagccauu

SEQ ID NO: 581947 - RNA, 24 nt, Human
ugcugggauuacaggcgugagcca

SEQ ID NO: 581948 - RNA, 24 nt, Human
uggccaggccggucucgaauuccu

SEQ ID NO: 581949 - RNA, 18 nt, Human
ugggauuacaggcgugag

SEQ ID NO: 581950 - RNA, 19 nt, Human
ugggauuacaggcgugagc

SEQ ID NO: 581951 - RNA, 21 nt, Human
ugggauuacaggcgugagcca

SEQ ID NO: 581952 - RNA, 22 nt, Human
ugggauuacaggcgugagccac

SEQ ID NO: 581953 - RNA, 22 nt, Human
ugggauuacaggcgugagccac

SEQ ID NO: 581954 - RNA, 23 nt, Human
ugggauuacaggcgugagccacu

SEQ ID NO: 581955 - RNA, 24 nt, Human
ugggauuacaggcgugagccacua

SEQ ID NO: 581956 - RNA, 26 nt, Human
ugggauuacaggcgugagccacuaca

SEQ ID NO: 581957 - RNA, 19 nt, Human
ugggauuacagguacccac

SEQ ID NO: 581958 - RNA, 21 nt, Human
ugggauuacagguacccacca

SEQ ID NO: 581959 - RNA, 24 nt, Human
ugggauuacagguacccaccacca

SEQ ID NO: 581960 - RNA, 25 nt, Human
ugggauuacagguacccaccaccau

SEQ ID NO: 581961 - RNA, 24 nt, Human
ugggguuucaccauauuggccagg

SEQ ID NO: 581962 - RNA, 21 nt, Human
uguauuuuuaguagagauggg

SEQ ID NO: 581963 - RNA, 20 nt, Human
uguugcccaggcuggagugc

SEQ ID NO: 581964 - RNA, 22 nt, Human
uguugcccaggcuggagugcaa

SEQ ID NO: 581965 - RNA, 21 nt, Human
uuaauuccccuucacuaaccc

SEQ ID NO: 581966 - RNA, 18 nt, Human
uuaguagagaugggguuu

SEQ ID NO: 581967 - RNA, 22 nt, Human
uuaguagagaugggguuucacc

SEQ ID NO: 581968 - RNA, 24 nt, Human
uuaguagagaugggguuucaccau

SEQ ID NO: 581969 - RNA, 23 nt, Human
uucaagagauucuccugccucag

SEQ ID NO: 581970 - RNA, 18 nt, Human
uugcccaggcuggagugc

SEQ ID NO: 581971 - RNA, 24 nt, Human
uuucaccauauuggccaggccggu

SEQ ID NO: 581972 - RNA, 24 nt, Human
uuuuuaguagagaugggguuucac

SEQ ID NO: 581973 - RNA, 21 nt, Human
uuuuuguauuuuuaguagaga

SEQ ID NO: 581974 - RNA, 24 nt, Human
uuuuuuguauuuuuaguagagaug

SEQ ID NO: 581975 - RNA, 30 nt, Human
caaggucagauuugucuucugccagcgccc

SEQ ID NO: 581976 - RNA, 20 nt, Human
cacgacacgggcagcgcgua

SEQ ID NO: 581977 - RNA, 26 nt, Human
cacgcacgacacgggcagcgcguagc

SEQ ID NO: 581978 - RNA, 21 nt, Human
cacuguuuucaaggucagauu

SEQ ID NO: 581979 - RNA, 27 nt, Human
caggcucaggccguucugcuucucuag

SEQ ID NO: 581980 - RNA, 22 nt, Human
cccauaaucuuuaaccucucca

SEQ ID NO: 581981 - RNA, 18 nt, Human
cccucaggucucugugua

SEQ ID NO: 581982 - RNA, 18 nt, Human
ccgccccucaggucucug

SEQ ID NO: 581983 - RNA, 26 nt, Human
cgcacgcacgacacgggcagcgcgua

SEQ ID NO: 581984 - RNA, 19 nt, Human
cgcucggcuuccgccccuc

SEQ ID NO: 581985 - RNA, 22 nt, Human
cggcuuccgccccucaggucuc

SEQ ID NO: 581986 - RNA, 19 nt, Human
cgguacacggcguacaccu

SEQ ID NO: 581987 - RNA, 22 nt, Human
cgguacacggcguacaccuucu

SEQ ID NO: 581988 - RNA, 24 nt, Human
cguucugcuucucuagccgagcca

SEQ ID NO: 581989 - RNA, 22 nt, Human
cucugugccuggcgaggccucc

SEQ ID NO: 581990 - RNA, 20 nt, Human
gcagacguuguccuccagga

SEQ ID NO: 581991 - RNA, 23 nt, Human
gggcagcgcguagcagacguugu

SEQ ID NO: 581992 - RNA, 20 nt, Human
ggggggcucucgggcccggc

SEQ ID NO: 581993 - RNA, 27 nt, Human
ggucagauuugucuucugccagcgccc

SEQ ID NO: 581994 - RNA, 20 nt, Human
guggagcaacagcgcgcccc

SEQ ID NO: 581995 - RNA, 19 nt, Human
uagccgagccaccacugcc

SEQ ID NO: 581996 - RNA, 19 nt, Human
ucaggccguucugcuucuc

SEQ ID NO: 581997 - RNA, 18 nt, Human
ucgcgcacgcacgacacg

SEQ ID NO: 581998 - RNA, 19 nt, Human
ucgcucggcuuccgccccu

SEQ ID NO: 581999 - RNA, 23 nt, Human
ucgcucggcuuccgccccucagg

SEQ ID NO: 582000 - RNA, 22 nt, Human
ucucgggcccggcgcccaauuc

SEQ ID NO: 582001 - RNA, 23 nt, Human
ucucuguguaggacaacgagaau

SEQ ID NO: 582002 - RNA, 22 nt, Human
ugccucgaugcucuugugcgcc

SEQ ID NO: 582003 - RNA, 20 nt, Human
uucaaggucagauuugucuu

SEQ ID NO: 582004 - RNA, 22 nt, Human
aaaaaaacaaacccaagauuua

SEQ ID NO: 582005 - RNA, 20 nt, Human
aaaaacacaaaacacuauua

SEQ ID NO: 582006 - RNA, 24 nt, Human
aaaaggacaugacuagaugaaaua

SEQ ID NO: 582007 - RNA, 22 nt, Human
acaaaacacuauuaugccaaac

SEQ ID NO: 582008 - RNA, 21 nt, Human
accacugcuaauuuagaggac

SEQ ID NO: 582009 - RNA, 25 nt, Human
agauaggaaggaaauacuuaacuag

SEQ ID NO: 582010 - RNA, 23 nt, Human
aggaaggaaauacuuaacuagua

SEQ ID NO: 582011 - RNA, 24 nt, Human
caaugagaaaaaaaacacaaaaca

SEQ ID NO: 582012 - RNA, 22 nt, Human
cacaaaacacuauuaugccaaa

SEQ ID NO: 582013 - RNA, 23 nt, Human
cacugcuaauuuagaggaccaaa

SEQ ID NO: 582014 - RNA, 20 nt, Human
caggugaaaaacaagggcug

SEQ ID NO: 582015 - RNA, 24 nt, Human
cauauucuacaggugaaaaacaag

SEQ ID NO: 582016 - RNA, 24 nt, Human
cauguauauuugugugugugugua

SEQ ID NO: 582017 - RNA, 25 nt, Human
cauguauauuuguguguguguguau

SEQ ID NO: 582018 - RNA, 20 nt, Human
cauucuguguauguaugugc

SEQ ID NO: 582019 - RNA, 20 nt, Human
cauucuguguauguaugugg

SEQ ID NO: 582020 - RNA, 26 nt, Human
cccccucgcccuagcaggcucgggaa

SEQ ID NO: 582021 - RNA, 24 nt, Human
cuugaucgccaugucaguuucuug

SEQ ID NO: 582022 - RNA, 20 nt, Human
gagaaaaaaaacacaaaacc

SEQ ID NO: 582023 - RNA, 20 nt, Human
gggcugcauuauuuuuaaac

SEQ ID NO: 582024 - RNA, 20 nt, Human
guauauuugugugugugugu

SEQ ID NO: 582025 - RNA, 19 nt, Human
uacugcauucuguguaugu

SEQ ID NO: 582026 - RNA, 18 nt, Human
uauguaugugcauguaua

SEQ ID NO: 582027 - RNA, 22 nt, Human
uaugugcauguauauuugugug

SEQ ID NO: 582028 - RNA, 24 nt, Human
uaugugcauguauauuugugugug

SEQ ID NO: 582029 - RNA, 20 nt, Human
uauuucaaugagaaaaaaaa

SEQ ID NO: 582030 - RNA, 23 nt, Human
ucaucaaccauucaccccccucg

SEQ ID NO: 582031 - RNA, 19 nt, Human
ucuguguauguaugugcau

SEQ ID NO: 582032 - RNA, 18 nt, Human
ugaaauacaugccgaaaa

SEQ ID NO: 582033 - RNA, 18 nt, Human
ugagaaaaaaaacacaaa

SEQ ID NO: 582034 - RNA, 22 nt, Human
ugagaaaaaaaacacaaaacac

SEQ ID NO: 582035 - RNA, 19 nt, Human
ugcauguauauuugugugu

SEQ ID NO: 582036 - RNA, 18 nt, Human
ugcugaagggcguucucg

SEQ ID NO: 582037 - RNA, 20 nt, Human
uguauguaugugcauguaua

SEQ ID NO: 582038 - RNA, 21 nt, Human
ugugcauguauauuugugugu

SEQ ID NO: 582039 - RNA, 29 nt, Human
ugugcauguauauuuguguguguguguau

SEQ ID NO: 582040 - RNA, 22 nt, Human
uguguauguaugugcauguaua

SEQ ID NO: 582041 - RNA, 19 nt, Human
uguguguguaugcaagcuc

SEQ ID NO: 582042 - RNA, 21 nt, Human
uguguguguguguaugcaagc

SEQ ID NO: 582043 - RNA, 24 nt, Human
uucaaugagaaaaaaaacacaaaa

SEQ ID NO: 582044 - RNA, 23 nt, Human
aaaaagacccaaauauccgagua

SEQ ID NO: 582045 - RNA, 22 nt, Human
aaaacaguccccaaacaagccu

SEQ ID NO: 582046 - RNA, 22 nt, Human
aaaagacccaaauauccgagua

SEQ ID NO: 582047 - RNA, 19 nt, Human
aaaagccauaucuaccuuu

SEQ ID NO: 582048 - RNA, 18 nt, Human
aagaaagugcagggcaca

SEQ ID NO: 582049 - RNA, 19 nt, Human
aagagaaagagcgaagcug

SEQ ID NO: 582050 - RNA, 23 nt, Human
aagagcaccuguuauuuuucacc

SEQ ID NO: 582051 - RNA, 18 nt, Human
aagcagaacagggguaaa

SEQ ID NO: 582052 - RNA, 18 nt, Human
aagcuuccucuguccacu

SEQ ID NO: 582053 - RNA, 18 nt, Human
acacagauucucuccccu

SEQ ID NO: 582054 - RNA, 18 nt, Human
agagaaagagcgaagcug

SEQ ID NO: 582055 - RNA, 21 nt, Human
agcagaacagggguaaaggaa

SEQ ID NO: 582056 - RNA, 19 nt, Human
aggaaaggcaggaagagaa

SEQ ID NO: 582057 - RNA, 22 nt, Human
aggagagagaggucaccuuggg

SEQ ID NO: 582058 - RNA, 23 nt, Human
aggcaggaagagaaagaggggac

SEQ ID NO: 582059 - RNA, 19 nt, Human
agguacuucugggcuuggc

SEQ ID NO: 582060 - RNA, 23 nt, Human
auggaacacauggucucuacccc

SEQ ID NO: 582061 - RNA, 19 nt, Human
augguucugagaagaaauu

SEQ ID NO: 582062 - RNA, 24 nt, Human
auuagccccacaaacaaaauguuc

SEQ ID NO: 582063 - RNA, 20 nt, Human
caaaauccucccagucuuaa

SEQ ID NO: 582064 - RNA, 18 nt, Human
cacacagauucucucccc

SEQ ID NO: 582065 - RNA, 19 nt, Human
caccaggaaggauacauga

SEQ ID NO: 582066 - RNA, 21 nt, Human
caccaggaaggauacaugaua

SEQ ID NO: 582067 - RNA, 19 nt, Human
caccuguuauuuuucaccu

SEQ ID NO: 582068 - RNA, 18 nt, Human
caccuuauucaugccaag

SEQ ID NO: 582069 - RNA, 22 nt, Human
cacuuuguauacaagaucaguc

SEQ ID NO: 582070 - RNA, 18 nt, Human
caggaccaucccugggca

SEQ ID NO: 582071 - RNA, 25 nt, Human
cagggcagggucuaaagucucuauc

SEQ ID NO: 582072 - RNA, 25 nt, Human
caucaauguuccuaggaagacccuc

SEQ ID NO: 582073 - RNA, 19 nt, Human
ccaaauauccgaguaugga

SEQ ID NO: 582074 - RNA, 19 nt, Human
ccaggaaggauacaugaua

SEQ ID NO: 582075 - RNA, 21 nt, Human
ccuaccaggaagagucagacc

SEQ ID NO: 582076 - RNA, 22 nt, Human
cucaaaaagacccaaauauccg

SEQ ID NO: 582077 - RNA, 21 nt, Human
cuccaacuucccucuugaguu

SEQ ID NO: 582078 - RNA, 20 nt, Human
cucucucaaaaagacccaaa

SEQ ID NO: 582079 - RNA, 24 nt, Human
cugaaaucuucauucuugcaaccu

SEQ ID NO: 582080 - RNA, 20 nt, Human
cugcagcuucaauggccuca

SEQ ID NO: 582081 - RNA, 19 nt, Human
cuggcaccuuauucaugcc

SEQ ID NO: 582082 - RNA, 18 nt, Human
gcagcuucaauggccuca

SEQ ID NO: 582083 - RNA, 22 nt, Human
gcuucagcuuagacagcagagu

SEQ ID NO: 582084 - RNA, 21 nt, Human
ggaagacccucgcugcgagga

SEQ ID NO: 582085 - RNA, 24 nt, Human
ggcaggaccaucccugggcagggc

SEQ ID NO: 582086 - RNA, 18 nt, Human
ggcagggcuuccugcagc

SEQ ID NO: 582087 - RNA, 21 nt, Human
ggcagggcuuccugcagcuuc

SEQ ID NO: 582088 - RNA, 18 nt, Human
ggcuuccuggccuucuga

SEQ ID NO: 582089 - RNA, 21 nt, Human
gggcagggcuuccugcagcuu

SEQ ID NO: 582090 - RNA, 21 nt, Human
guaaaacaguccccaaacaag

SEQ ID NO: 582091 - RNA, 19 nt, Human
uaaaacaguccccaaacaa

SEQ ID NO: 582092 - RNA, 21 nt, Human
uaaaacaguccccaaacaagc

SEQ ID NO: 582093 - RNA, 19 nt, Human
uaaacaguaaagagcaccu

SEQ ID NO: 582094 - RNA, 21 nt, Human
uaaacaguaaagagcaccugu

SEQ ID NO: 582095 - RNA, 24 nt, Human
uaaacugaauucacacauaccuca

SEQ ID NO: 582096 - RNA, 22 nt, Human
uaaagucucuaucuaaagcuuc

SEQ ID NO: 582097 - RNA, 22 nt, Human
uaaggacuguccauaagcacac

SEQ ID NO: 582098 - RNA, 20 nt, Human
uaaggagaaaaggccuuuag

SEQ ID NO: 582099 - RNA, 21 nt, Human
uacaugauauccaugauagug

SEQ ID NO: 582100 - RNA, 19 nt, Human
uagcuaugacacuugaaca

SEQ ID NO: 582101 - RNA, 19 nt, Human
uauccgaguauggaacaca

SEQ ID NO: 582102 - RNA, 20 nt, Human
ucaaaaagacccaaauaucc

SEQ ID NO: 582103 - RNA, 22 nt, Human
ucaaaaagacccaaauauccga

SEQ ID NO: 582104 - RNA, 26 nt, Human
ucaguccucauuuguuucaauuuaug

SEQ ID NO: 582105 - RNA, 19 nt, Human
ucaugccaagcauaaugua

SEQ ID NO: 582106 - RNA, 25 nt, Human
uccccaaacaagccucugggcucau

SEQ ID NO: 582107 - RNA, 18 nt, Human
uccucuguccacugaaaa

SEQ ID NO: 582108 - RNA, 23 nt, Human
ucucucaaaaagacccaaauauc

SEQ ID NO: 582109 - RNA, 20 nt, Human
ucucugcaacagacauacuc

SEQ ID NO: 582110 - RNA, 23 nt, Human
ucuguaauuacaauagaccaaac

SEQ ID NO: 582111 - RNA, 22 nt, Human
ugaagaaagugcagggcacaga

SEQ ID NO: 582112 - RNA, 20 nt, Human
ugaggagagagaggucaccu

SEQ ID NO: 582113 - RNA, 21 nt, Human
ugcaacauucagaaacagcuu

SEQ ID NO: 582114 - RNA, 19 nt, Human
ugccuaguaguagcugaca

SEQ ID NO: 582115 - RNA, 18 nt, Human
ugcgaggaagaggcuuca

SEQ ID NO: 582116 - RNA, 19 nt, Human
uggcaggaccaucccuggg

SEQ ID NO: 582117 - RNA, 25 nt, Human
uggcaggagcagaauucacaaucuu

SEQ ID NO: 582118 - RNA, 19 nt, Human
ugggcagggcuuccugcag

SEQ ID NO: 582119 - RNA, 22 nt, Human
uuaauuuuccagucuucuacau

SEQ ID NO: 582120 - RNA, 18 nt, Human
uuccuggccuucugagcu

SEQ ID NO: 582121 - RNA, 18 nt, Human
uugaacacagugaagaaa

SEQ ID NO: 582122 - RNA, 23 nt, Human
uugcuggcuuccuggccuucuga

SEQ ID NO: 582123 - RNA, 21 nt, Human
uugggaaugugcccucuucga

SEQ ID NO: 582124 - RNA, 21 nt, Human
uuuaaacugcauucuucacaa

SEQ ID NO: 582125 - RNA, 24 nt, Human
uuuccuggcaccuuauucaugcca

SEQ ID NO: 582126 - RNA, 21 nt, Human
aaauauguacauggaaccccc

SEQ ID NO: 582127 - RNA, 18 nt, Human
aaggggacugagccauua

SEQ ID NO: 582128 - RNA, 21 nt, Human
acuuggaaauggggugaaggg

SEQ ID NO: 582129 - RNA, 24 nt, Human
agccccaccagggaaaaaagucaa

SEQ ID NO: 582130 - RNA, 21 nt, Human
agcccgcucggcaccggcccc

SEQ ID NO: 582131 - RNA, 21 nt, Human
agccuuugggggugggggcaa

SEQ ID NO: 582132 - RNA, 19 nt, Human
aggcuaggaacacagcacc

SEQ ID NO: 582133 - RNA, 22 nt, Human
aggcugagccuuuggggguggg

SEQ ID NO: 582134 - RNA, 23 nt, Human
aggcugggguugcugccgugagg

SEQ ID NO: 582135 - RNA, 21 nt, Human
aggggcaaagguguaccucag

SEQ ID NO: 582136 - RNA, 20 nt, Human
agguggccggaaauggucgg

SEQ ID NO: 582137 - RNA, 24 nt, Human
cacccuuagccuggggcaggguuu

SEQ ID NO: 582138 - RNA, 19 nt, Human
cagcccagguccccagguc

SEQ ID NO: 582139 - RNA, 21 nt, Human
cauggcccccgagaugagcca

SEQ ID NO: 582140 - RNA, 21 nt, Human
cauguugggggaaccggggcu

SEQ ID NO: 582141 - RNA, 20 nt, Human
ccaccccugggccgaccccc

SEQ ID NO: 582142 - RNA, 21 nt, Human
ccagaggcuaggaacacagca

SEQ ID NO: 582143 - RNA, 24 nt, Human
ccagcccuggcuuaaaaccucagc

SEQ ID NO: 582144 - RNA, 21 nt, Human
ccaugcacacgccccucuccc

SEQ ID NO: 582145 - RNA, 19 nt, Human
cccaccccugggccgaccc

SEQ ID NO: 582146 - RNA, 19 nt, Human
cccaggaguccugggggca

SEQ ID NO: 582147 - RNA, 18 nt, Human
ccccaccuucccagggag

SEQ ID NO: 582148 - RNA, 23 nt, Human
cccccugcagggagccaaaggag

SEQ ID NO: 582149 - RNA, 20 nt, Human
cccccuguuggucaucuccu

SEQ ID NO: 582150 - RNA, 19 nt, Human
ccccgacccccccccguuc

SEQ ID NO: 582151 - RNA, 22 nt, Human
ccccgacccccccccguucccu

SEQ ID NO: 582152 - RNA, 18 nt, Human
ccccgagaugagccacac

SEQ ID NO: 582153 - RNA, 20 nt, Human
ccccugcagggagccaaagg

SEQ ID NO: 582154 - RNA, 21 nt, Human
ccccuguaaaaauguacaaaa

SEQ ID NO: 582155 - RNA, 22 nt, Human
ccccuuccuugagccccuccuc

SEQ ID NO: 582156 - RNA, 20 nt, Human
cccuccagcccaggucccca

SEQ ID NO: 582157 - RNA, 20 nt, Human
ccucaaagguggccggaaau

SEQ ID NO: 582158 - RNA, 22 nt, Human
ccucagcccuaggaccugguua

SEQ ID NO: 582159 - RNA, 30 nt, Human
ccuccagcccuggcuuaaaaccucagcccc

SEQ ID NO: 582160 - RNA, 25 nt, Human
ccuccucccccagcccucggagggc

SEQ ID NO: 582161 - RNA, 23 nt, Human
ccucugcucucccagugacccua

SEQ ID NO: 582162 - RNA, 18 nt, Human
ccugcaguccccuuuccc

SEQ ID NO: 582163 - RNA, 22 nt, Human
ccuucuagguugggccccagcc

SEQ ID NO: 582164 - RNA, 21 nt, Human
ccuugagccccuccuccccca

SEQ ID NO: 582165 - RNA, 27 nt, Human
cucggcaccggccccagucgugguggc

SEQ ID NO: 582166 - RNA, 20 nt, Human
cugcccuucccuccagccca

SEQ ID NO: 582167 - RNA, 18 nt, Human
gagaggccagaggcuagg

SEQ ID NO: 582168 - RNA, 23 nt, Human
gagaggccagaggcuaggaacac

SEQ ID NO: 582169 - RNA, 20 nt, Human
gaggcugagccuuugggggu

SEQ ID NO: 582170 - RNA, 24 nt, Human
gccccagccuggaggcgccugcug

SEQ ID NO: 582171 - RNA, 20 nt, Human
gccccuccucccccagcccu

SEQ ID NO: 582172 - RNA, 19 nt, Human
gcccucggagggcaugagg

SEQ ID NO: 582173 - RNA, 19 nt, Human
gcccuggcuuaaaaccuca

SEQ ID NO: 582174 - RNA, 19 nt, Human
gcccuuacaggggcaaagg

SEQ ID NO: 582175 - RNA, 20 nt, Human
gcgccugcugcuuugggaag

SEQ ID NO: 582176 - RNA, 21 nt, Human
gcuggaaggcccccugcaggg

SEQ ID NO: 582177 - RNA, 20 nt, Human
ggaagcagggcccaggaguc

SEQ ID NO: 582178 - RNA, 21 nt, Human
ggaaggcccccugcagggagc

SEQ ID NO: 582179 - RNA, 18 nt, Human
ggagcuuugccccgaccc

SEQ ID NO: 582180 - RNA, 22 nt, Human
ggaggcaggcccagggccuaga

SEQ ID NO: 582181 - RNA, 18 nt, Human
ggaggccccauggccccc

SEQ ID NO: 582182 - RNA, 21 nt, Human
ggcacuuggaaauggggugaa

SEQ ID NO: 582183 - RNA, 19 nt, Human
ggcccaggaguccuggggg

SEQ ID NO: 582184 - RNA, 19 nt, Human
ggcuggaaggcccccugca

SEQ ID NO: 582185 - RNA, 20 nt, Human
gggcaggguuuuggagaaca

SEQ ID NO: 582186 - RNA, 23 nt, Human
gggcaggguuuuggagaacaggg

SEQ ID NO: 582187 - RNA, 20 nt, Human
gggggcacuuuggccucugg

SEQ ID NO: 582188 - RNA, 20 nt, Human
ggguuuuggagaacaggguu

SEQ ID NO: 582189 - RNA, 23 nt, Human
gguggccggaaauggucggggau

SEQ ID NO: 582190 - RNA, 21 nt, Human
ggugggggcagagugaacggg

SEQ ID NO: 582191 - RNA, 21 nt, Human
ggugguaggugaacgggaggg

SEQ ID NO: 582192 - RNA, 23 nt, Human
gucccuucccggcucuucccccu

SEQ ID NO: 582193 - RNA, 18 nt, Human
uaauuaaccaggaaggga

SEQ ID NO: 582194 - RNA, 19 nt, Human
uagaggcccuuacaggggc

SEQ ID NO: 582195 - RNA, 25 nt, Human
uaugugaaaggggugauaaauaugu

SEQ ID NO: 582196 - RNA, 19 nt, Human
ucagggaagcagggcccag

SEQ ID NO: 582197 - RNA, 19 nt, Human
ucccagguuccaugaccuc

SEQ ID NO: 582198 - RNA, 19 nt, Human
ucccaugcacacgccccuc

SEQ ID NO: 582199 - RNA, 21 nt, Human
uccccagguccugcccccugu

SEQ ID NO: 582200 - RNA, 22 nt, Human
ucccugguuuccucaaaggugg

SEQ ID NO: 582201 - RNA, 22 nt, Human
ucggcaccggccccagucgugg

SEQ ID NO: 582202 - RNA, 19 nt, Human
ucucuagaggcugugaccu

SEQ ID NO: 582203 - RNA, 19 nt, Human
ucucuggccacccuuagcc

SEQ ID NO: 582204 - RNA, 18 nt, Human
ucuugggcuggaaggccc

SEQ ID NO: 582205 - RNA, 23 nt, Human
ugagccuuugggggugggggcag

SEQ ID NO: 582206 - RNA, 21 nt, Human
ugaggacuugggugguaggug

SEQ ID NO: 582207 - RNA, 27 nt, Human
ugcccuucccuccagcccaggucccca

SEQ ID NO: 582208 - RNA, 20 nt, Human
ugccuucuagguugggcccc

SEQ ID NO: 582209 - RNA, 19 nt, Human
ugcuuugggaaggcugggg

SEQ ID NO: 582210 - RNA, 19 nt, Human
ugcuuugggaaggcugggg

SEQ ID NO: 582211 - RNA, 19 nt, Human
uggaaauggggugaagggg

SEQ ID NO: 582212 - RNA, 27 nt, Human
uggcccccgagaugagccacacucccu

SEQ ID NO: 582213 - RNA, 23 nt, Human
uggccucuggcuuagugagcccu

SEQ ID NO: 582214 - RNA, 21 nt, Human
uggcuggugagguuaugaccu

SEQ ID NO: 582215 - RNA, 19 nt, Human
ugggagagcccgcucggca

SEQ ID NO: 582216 - RNA, 21 nt, Human
uggggaggcaggcccagggcc

SEQ ID NO: 582217 - RNA, 18 nt, Human
ugggggaaccggggcugu

SEQ ID NO: 582218 - RNA, 24 nt, Human
ugguggagucugagauuuagaggc

SEQ ID NO: 582219 - RNA, 21 nt, Human
ugugaugcuuggucuuguggg

SEQ ID NO: 582220 - RNA, 21 nt, Human
uguuagauugaccccugccuu

SEQ ID NO: 582221 - RNA, 22 nt, Human
uuccaugaccucagagguggcu

SEQ ID NO: 582222 - RNA, 21 nt, Human
uucccggcucuucccccugca

SEQ ID NO: 582223 - RNA, 22 nt, Human
uucccggcucuucccccugcag

SEQ ID NO: 582224 - RNA, 19 nt, Human
uuccuugagccccuccucc

SEQ ID NO: 582225 - RNA, 20 nt, Human
uuccuugagccccuccuccc

SEQ ID NO: 582226 - RNA, 25 nt, Human
uuccuugagccccuccucccccagc

SEQ ID NO: 582227 - RNA, 20 nt, Human
uucuagguugggccccagcc

SEQ ID NO: 582228 - RNA, 24 nt, Human
uucuuuggugugugguacauggug

SEQ ID NO: 582229 - RNA, 18 nt, Human
uuggagaacaggguucag

SEQ ID NO: 582230 - RNA, 19 nt, Human
uuguuagauugaccccugc

SEQ ID NO: 582231 - RNA, 19 nt, Human
uuugggggugggggcagag

SEQ ID NO: 582232 - RNA, 24 nt, Human
aaagugcugggauuacaggcguga

SEQ ID NO: 582233 - RNA, 19 nt, Human
aagugcugggauuacaggc

SEQ ID NO: 582234 - RNA, 19 nt, Human
aagugcugggauuacaggc

SEQ ID NO: 582235 - RNA, 26 nt, Human
aagugcugggauuacaggcgugagcc

SEQ ID NO: 582236 - RNA, 21 nt, Human
acgggguuucaccauagccag

SEQ ID NO: 582237 - RNA, 24 nt, Human
acgggguuucaccauagccaggau

SEQ ID NO: 582238 - RNA, 19 nt, Human
agccggugcaggugagcac

SEQ ID NO: 582239 - RNA, 18 nt, Human
aguagagacgggguuuca

SEQ ID NO: 582240 - RNA, 22 nt, Human
aguagagacgggguuucaccau

SEQ ID NO: 582241 - RNA, 23 nt, Human
aguagagacgggguuucaccaua

SEQ ID NO: 582242 - RNA, 18 nt, Human
agugcugggauuacaggc

SEQ ID NO: 582243 - RNA, 24 nt, Human
caaagugcugggauuacaggcgug

SEQ ID NO: 582244 - RNA, 21 nt, Human
caccauagccaggauggucuu

SEQ ID NO: 582245 - RNA, 19 nt, Human
caccgcgcccggcccuccu

SEQ ID NO: 582246 - RNA, 22 nt, Human
ccaaagugcugggauuacaggc

SEQ ID NO: 582247 - RNA, 22 nt, Human
ccaaagugcugggauuacaggc

SEQ ID NO: 582248 - RNA, 24 nt, Human
ccaaagugcugggauuacaggcgu

SEQ ID NO: 582249 - RNA, 19 nt, Human
ccaccgcgcccggcccucc

SEQ ID NO: 582250 - RNA, 18 nt, Human
cccggcccuccugcugug

SEQ ID NO: 582251 - RNA, 21 nt, Human
ccugaccucgugauccgccug

SEQ ID NO: 582252 - RNA, 24 nt, Human
ccugccucggccucccaaagugcu

SEQ ID NO: 582253 - RNA, 24 nt, Human
cuccugaccucgugauccgccugc

SEQ ID NO: 582254 - RNA, 18 nt, Human
cuuugaggagcucccugc

SEQ ID NO: 582255 - RNA, 22 nt, Human
gaccucgugauccgccugccuc

SEQ ID NO: 582256 - RNA, 22 nt, Human
gaccucgugauccgccugccuc

SEQ ID NO: 582257 - RNA, 24 nt, Human
gaccucgugauccgccugccucgg

SEQ ID NO: 582258 - RNA, 19 nt, Human
gagacgggguuucaccaua

SEQ ID NO: 582259 - RNA, 18 nt, Human
gauuacaggcgugagcca

SEQ ID NO: 582260 - RNA, 22 nt, Human
gauuacaggcgugagccaccgc

SEQ ID NO: 582261 - RNA, 22 nt, Human
gauuacaggcgugagccaccgc

SEQ ID NO: 582262 - RNA, 21 nt, Human
gcagccggugcaggugagcac

SEQ ID NO: 582263 - RNA, 24 nt, Human
ggauggucuugaucuccugaccuc

SEQ ID NO: 582264 - RNA, 21 nt, Human
gguuucaccauagccaggaug

SEQ ID NO: 582265 - RNA, 21 nt, Human
gugaauuaauuugcacagguu

SEQ ID NO: 582266 - RNA, 21 nt, Human
guuccugagcucuuugaggag

SEQ ID NO: 582267 - RNA, 21 nt, Human
uaauuugcacagguuuucccc

SEQ ID NO: 582268 - RNA, 23 nt, Human
uacaggcgugagccaccgcgccc

SEQ ID NO: 582269 - RNA, 24 nt, Human
ucccaaagugcugggauuacaggc

SEQ ID NO: 582270 - RNA, 18 nt, Human
ucggccucccaaagugcu

SEQ ID NO: 582271 - RNA, 19 nt, Human
ugaauuuucugaaccaugu

SEQ ID NO: 582272 - RNA, 23 nt, Human
ugagcacgacggggacaccugug

SEQ ID NO: 582273 - RNA, 21 nt, Human
ugccucggccucccaaagugc

SEQ ID NO: 582274 - RNA, 24 nt, Human
ugccucggccucccaaagugcugg

SEQ ID NO: 582275 - RNA, 24 nt, Human
ugcugggauuacaggcgugagcca

SEQ ID NO: 582276 - RNA, 18 nt, Human
ugggauuacaggcgugag

SEQ ID NO: 582277 - RNA, 19 nt, Human
ugggauuacaggcgugagc

SEQ ID NO: 582278 - RNA, 21 nt, Human
ugggauuacaggcgugagcca

SEQ ID NO: 582279 - RNA, 22 nt, Human
ugggauuacaggcgugagccac

SEQ ID NO: 582280 - RNA, 23 nt, Human
ugggauuacaggcgugagccacc

SEQ ID NO: 582281 - RNA, 24 nt, Human
ugggauuacaggcgugagccaccg

SEQ ID NO: 582282 - RNA, 19 nt, Human
uuccugagcucuuugagga

SEQ ID NO: 582283 - RNA, 24 nt, Human
uuccugagcucuuugaggagcucc

SEQ ID NO: 582284 - RNA, 23 nt, Human
uuucaccauagccaggauggucu

SEQ ID NO: 582285 - RNA, 24 nt, Human
uuucaccauagccaggauggucuu

SEQ ID NO: 582286 - RNA, 24 nt, Human
aaagugcugggauuacagguguga

SEQ ID NO: 582287 - RNA, 18 nt, Human
aagugcugggauuacagg

SEQ ID NO: 582288 - RNA, 19 nt, Human
aagugcugggauuacaggu

SEQ ID NO: 582289 - RNA, 26 nt, Human
aagugcugggauuacaggugugagcc

SEQ ID NO: 582290 - RNA, 25 nt, Human
aaucuuguucuguugcccaggcugg

SEQ ID NO: 582291 - RNA, 21 nt, Human
acagguacccaccaccaugcc

SEQ ID NO: 582292 - RNA, 21 nt, Human
acagguacccaccaccaugcc

SEQ ID NO: 582293 - RNA, 22 nt, Human
accauguuggccaggcuggucu

SEQ ID NO: 582294 - RNA, 24 nt, Human
accccgcccugucuggccuuuuua

SEQ ID NO: 582295 - RNA, 20 nt, Human
acccuguucccaaaggcuga

SEQ ID NO: 582296 - RNA, 18 nt, Human
acuggccuugccccgccg

SEQ ID NO: 582297 - RNA, 20 nt, Human
agccaccacaccccgcccug

SEQ ID NO: 582298 - RNA, 21 nt, Human
aggacaaacuccaagucuagc

SEQ ID NO: 582299 - RNA, 25 nt, Human
aggcuggagugcaguagugugaucu

SEQ ID NO: 582300 - RNA, 18 nt, Human
aguagcugggauuacagg

SEQ ID NO: 582301 - RNA, 24 nt, Human
agugaucugcccuccucggccucc

SEQ ID NO: 582302 - RNA, 23 nt, Human
agugcaguagugugaucuuggcu

SEQ ID NO: 582303 - RNA, 24 nt, Human
agugcaguagugugaucuuggcuc

SEQ ID NO: 582304 - RNA, 24 nt, Human
aucuuguucuguugcccaggcugg

SEQ ID NO: 582305 - RNA, 24 nt, Human
caaagugcugggauuacaggugug

SEQ ID NO: 582306 - RNA, 20 nt, Human
caaccuccacuucccggguu

SEQ ID NO: 582307 - RNA, 22 nt, Human
caagcaauucuccugccucagc

SEQ ID NO: 582308 - RNA, 22 nt, Human
cacacacaugggcagagcuugg

SEQ ID NO: 582309 - RNA, 19 nt, Human
cacacccuucaggggcucc

SEQ ID NO: 582310 - RNA, 19 nt, Human
caccaucugacuggccaca

SEQ ID NO: 582311 - RNA, 24 nt, Human
caccaugccuggcuaauuuuugua

SEQ ID NO: 582312 - RNA, 21 nt, Human
caccauguuggccaggcuggu

SEQ ID NO: 582313 - RNA, 24 nt, Human
caccauguuggccaggcuggucuu

SEQ ID NO: 582314 - RNA, 27 nt, Human
caccauguuggccaggcuggucuugaa

SEQ ID NO: 582315 - RNA, 23 nt, Human
cacugcaaccuccacuucccggg

SEQ ID NO: 582316 - RNA, 26 nt, Human
cacugccuggaaaccucucugcccca

SEQ ID NO: 582317 - RNA, 24 nt, Human
cagaaucuuguucuguugcccagg

SEQ ID NO: 582318 - RNA, 22 nt, Human
cagcagagguccagcuugugcu

SEQ ID NO: 582319 - RNA, 21 nt, Human
cagccuccugagccguccccc

SEQ ID NO: 582320 - RNA, 20 nt, Human
cagccuccugaguagcuggg

SEQ ID NO: 582321 - RNA, 18 nt, Human
cagcuccgggacggggaa

SEQ ID NO: 582322 - RNA, 25 nt, Human
cagcugccaccucucacugccugga

SEQ ID NO: 582323 - RNA, 23 nt, Human
caggacaaacuccaagucuagca

SEQ ID NO: 582324 - RNA, 24 nt, Human
cauguuggccaggcuggucuugaa

SEQ ID NO: 582325 - RNA, 23 nt, Human
cauuccugcuguuuccagcagag

SEQ ID NO: 582326 - RNA, 21 nt, Human
ccaaagugcugggauuacagg

SEQ ID NO: 582327 - RNA, 21 nt, Human
ccaaagugcugggauuacagg

SEQ ID NO: 582328 - RNA, 24 nt, Human
ccaaagugcugggauuacaggugu

SEQ ID NO: 582329 - RNA, 19 nt, Human
ccauggugugucugcaucc

SEQ ID NO: 582330 - RNA, 24 nt, Human
cccauggugugucugcauccugcc

SEQ ID NO: 582331 - RNA, 22 nt, Human
ccccgccgcagccuccugagcc

SEQ ID NO: 582332 - RNA, 21 nt, Human
ccccucuccucugcccuccac

SEQ ID NO: 582333 - RNA, 24 nt, Human
cccggguuucaagcaauucuccug

SEQ ID NO: 582334 - RNA, 21 nt, Human
cccuccacacacacccuucag

SEQ ID NO: 582335 - RNA, 24 nt, Human
ccgccgcagccuccugagccgucc

SEQ ID NO: 582336 - RNA, 19 nt, Human
ccucuugacaucuuggugc

SEQ ID NO: 582337 - RNA, 22 nt, Human
ccugaguagcugggauuacagg

SEQ ID NO: 582338 - RNA, 23 nt, Human
ccugaguagcugggauuacaggu

SEQ ID NO: 582339 - RNA, 24 nt, Human
ccugaguagcugggauuacaggua

SEQ ID NO: 582340 - RNA, 24 nt, Human
ccugaucucaagugaucugcccuc

SEQ ID NO: 582341 - RNA, 24 nt, Human
ccugccagccagcugccccaaggc

SEQ ID NO: 582342 - RNA, 23 nt, Human
ccugccucagccuccugaguagc

SEQ ID NO: 582343 - RNA, 24 nt, Human
ccugccucagccuccugaguagcu

SEQ ID NO: 582344 - RNA, 19 nt, Human
ccuggaaaccucucugccc

SEQ ID NO: 582345 - RNA, 23 nt, Human
cgcagccuccugagccguccccc

SEQ ID NO: 582346 - RNA, 19 nt, Human
cuagcaccucuugacaucu

SEQ ID NO: 582347 - RNA, 21 nt, Human
cucaagugaucugcccuccuc

SEQ ID NO: 582348 - RNA, 24 nt, Human
cucacugcaaccuccacuucccgg

SEQ ID NO: 582349 - RNA, 24 nt, Human
cucagccuccugaguagcugggau

SEQ ID NO: 582350 - RNA, 23 nt, Human
cucauggccaggucaccaaaccc

SEQ ID NO: 582351 - RNA, 24 nt, Human
cucauggccaggucaccaaacccc

SEQ ID NO: 582352 - RNA, 24 nt, Human
cuccacacacacccuucaggggcu

SEQ ID NO: 582353 - RNA, 18 nt, Human
cucugcugaaggccaccg

SEQ ID NO: 582354 - RNA, 21 nt, Human
cugaguagcugggauuacagg

SEQ ID NO: 582355 - RNA, 24 nt, Human
cugcaaccuccacuucccggguuu

SEQ ID NO: 582356 - RNA, 25 nt, Human
cugcaaccuccacuucccggguuuc

SEQ ID NO: 582357 - RNA, 20 nt, Human
cuggaaaccucucugcccca

SEQ ID NO: 582358 - RNA, 22 nt, Human
cuucaggggcuccaucaccucu

SEQ ID NO: 582359 - RNA, 25 nt, Human
cuugguggcucagcucagcugccac

SEQ ID NO: 582360 - RNA, 24 nt, Human
cuuguccccucuccucugcccucc

SEQ ID NO: 582361 - RNA, 22 nt, Human
gaguagcugggauuacagguac

SEQ ID NO: 582362 - RNA, 24 nt, Human
gauuacagguacccaccaccaugc

SEQ ID NO: 582363 - RNA, 18 nt, Human
gauuacaggugugagcca

SEQ ID NO: 582364 - RNA, 21 nt, Human
gauuacaggugugagccacca

SEQ ID NO: 582365 - RNA, 22 nt, Human
gauuacaggugugagccaccac

SEQ ID NO: 582366 - RNA, 20 nt, Human
gccacacacaugggcagagc

SEQ ID NO: 582367 - RNA, 21 nt, Human
gccaggccgccgcugccgccg

SEQ ID NO: 582368 - RNA, 20 nt, Human
gcccaggcuggagugcagua

SEQ ID NO: 582369 - RNA, 24 nt, Human
gcugaagggcccuucucuccaucu

SEQ ID NO: 582370 - RNA, 19 nt, Human
ggcaggcucuggugacacu

SEQ ID NO: 582371 - RNA, 24 nt, Human
ggccaggccgccgcugccgccgcg

SEQ ID NO: 582372 - RNA, 24 nt, Human
ggcuggucuugaacuccugaucuc

SEQ ID NO: 582373 - RNA, 21 nt, Human
gggcgcccgcaugucccuggc

SEQ ID NO: 582374 - RNA, 18 nt, Human
gggggguuucaccauguu

SEQ ID NO: 582375 - RNA, 20 nt, Human
gggggguuucaccauguugg

SEQ ID NO: 582376 - RNA, 24 nt, Human
gggggguuucaccauguuggccag

SEQ ID NO: 582377 - RNA, 24 nt, Human
ggggguuucaccauguuggccagg

SEQ ID NO: 582378 - RNA, 22 nt, Human
gggguuucaccauguuggccag

SEQ ID NO: 582379 - RNA, 23 nt, Human
gggguuucaccauguuggccagg

SEQ ID NO: 582380 - RNA, 22 nt, Human
guagagagggggguuucaccau

SEQ ID NO: 582381 - RNA, 23 nt, Human
guagagagggggguuucaccaug

SEQ ID NO: 582382 - RNA, 18 nt, Human
guagcuccagcccuuccc

SEQ ID NO: 582383 - RNA, 18 nt, Human
guagcugggauuacaggu

SEQ ID NO: 582384 - RNA, 19 nt, Human
gugugagccaccacacccc

SEQ ID NO: 582385 - RNA, 24 nt, Human
uaauuuuuguauuguuuguagaga

SEQ ID NO: 582386 - RNA, 22 nt, Human
uacagguacccaccaccaugcc

SEQ ID NO: 582387 - RNA, 23 nt, Human
uacaggugugagccaccacaccc

SEQ ID NO: 582388 - RNA, 22 nt, Human
uagagagggggguuucaccaug

SEQ ID NO: 582389 - RNA, 22 nt, Human
uaucaccugccaggacaaacuc

SEQ ID NO: 582390 - RNA, 19 nt, Human
ucaagcaauucuccugccu

SEQ ID NO: 582391 - RNA, 20 nt, Human
ucaccucugggcuaaauccu

SEQ ID NO: 582392 - RNA, 24 nt, Human
ucacugcaaccuccacuucccggg

SEQ ID NO: 582393 - RNA, 25 nt, Human
ucacugcaaccuccacuucccgggu

SEQ ID NO: 582394 - RNA, 20 nt, Human
ucagccuccugaguagcugg

SEQ ID NO: 582395 - RNA, 20 nt, Human
ucccaaaggcugaagggccc

SEQ ID NO: 582396 - RNA, 21 nt, Human
ucccaaaggcugaagggccuc

SEQ ID NO: 582397 - RNA, 23 nt, Human
ucccaaagugcugggauuacagg

SEQ ID NO: 582398 - RNA, 20 nt, Human
uccccucuccucugcccucc

SEQ ID NO: 582399 - RNA, 21 nt, Human
ucccggguuucaagcaauucu

SEQ ID NO: 582400 - RNA, 22 nt, Human
ucccggguuucaagcaauucuc

SEQ ID NO: 582401 - RNA, 25 nt, Human
ucccggguuucaagcaauucuccug

SEQ ID NO: 582402 - RNA, 20 nt, Human
ucccuggcucuggcccucug

SEQ ID NO: 582403 - RNA, 21 nt, Human
uccucggccucccaaagugcu

SEQ ID NO: 582404 - RNA, 24 nt, Human
uccugaguagcugggauuacaggu

SEQ ID NO: 582405 - RNA, 23 nt, Human
ucucaagugaucugcccuccucg

SEQ ID NO: 582406 - RNA, 24 nt, Human
ucuccugccucagccuccugagua

SEQ ID NO: 582407 - RNA, 22 nt, Human
ucucuguagcuccagcccuucc

SEQ ID NO: 582408 - RNA, 21 nt, Human
ucugcccuccucggccuccca

SEQ ID NO: 582409 - RNA, 19 nt, Human
ucuggccuuuuuauguggu

SEQ ID NO: 582410 - RNA, 18 nt, Human
ucuguugcccaggcugga

SEQ ID NO: 582411 - RNA, 19 nt, Human
ucuguugcccaggcuggag

SEQ ID NO: 582412 - RNA, 24 nt, Human
ucuguugcccaggcuggagugcag

SEQ ID NO: 582413 - RNA, 21 nt, Human
ucuugaacuccugaucucaag

SEQ ID NO: 582414 - RNA, 22 nt, Human
ucuuguucuguugcccaggcug

SEQ ID NO: 582415 - RNA, 23 nt, Human
ucuuguucuguugcccaggcugg

SEQ ID NO: 582416 - RNA, 24 nt, Human
ucuuguucuguugcccaggcugga

SEQ ID NO: 582417 - RNA, 22 nt, Human
ugacccuguucccaaaggcuga

SEQ ID NO: 582418 - RNA, 18 nt, Human
ugagacagaaucuuguuc

SEQ ID NO: 582419 - RNA, 22 nt, Human
ugagacagaaucuuguucuguu

SEQ ID NO: 582420 - RNA, 21 nt, Human
ugaucucaagugaucugcccu

SEQ ID NO: 582421 - RNA, 22 nt, Human
ugaucucaagugaucugcccuc

SEQ ID NO: 582422 - RNA, 24 nt, Human
ugaucugcccuccucggccuccca

SEQ ID NO: 582423 - RNA, 22 nt, Human
ugcaguagugugaucuuggcuc

SEQ ID NO: 582424 - RNA, 18 nt, Human
ugcccaggcuggagugca

SEQ ID NO: 582425 - RNA, 24 nt, Human
ugcccaggcuggagugcaguagug

SEQ ID NO: 582426 - RNA, 18 nt, Human
ugcccgaagcagauuugg

SEQ ID NO: 582427 - RNA, 24 nt, Human
ugccucagccuccugaguagcugg

SEQ ID NO: 582428 - RNA, 20 nt, Human
ugccugggucugaagcccag

SEQ ID NO: 582429 - RNA, 24 nt, Human
ugcugggauuacaggugugagcca

SEQ ID NO: 582430 - RNA, 18 nt, Human
uggaaaccucucugcccc

SEQ ID NO: 582431 - RNA, 21 nt, Human
uggaaagggcugggcugccug

SEQ ID NO: 582432 - RNA, 21 nt, Human
uggaaagggcugggcugccug

SEQ ID NO: 582433 - RNA, 19 nt, Human
uggagugcaguagugugau

SEQ ID NO: 582434 - RNA, 23 nt, Human
uggagugcaguagugugaucuug

SEQ ID NO: 582435 - RNA, 24 nt, Human
uggagugcaguagugugaucuugg

SEQ ID NO: 582436 - RNA, 24 nt, Human
uggccaggcuggucuugaacuccu

SEQ ID NO: 582437 - RNA, 19 nt, Human
ugggauuacagguacccac

SEQ ID NO: 582438 - RNA, 21 nt, Human
ugggauuacagguacccacca

SEQ ID NO: 582439 - RNA, 24 nt, Human
ugggauuacagguacccaccacca

SEQ ID NO: 582440 - RNA, 25 nt, Human
ugggauuacagguacccaccaccau

SEQ ID NO: 582441 - RNA, 18 nt, Human
ugggauuacaggugugag

SEQ ID NO: 582442 - RNA, 19 nt, Human
ugggauuacaggugugagc

SEQ ID NO: 582443 - RNA, 22 nt, Human
ugggauuacaggugugagccac

SEQ ID NO: 582444 - RNA, 23 nt, Human
ugggauuacaggugugagccacc

SEQ ID NO: 582445 - RNA, 24 nt, Human
ugggauuacaggugugagccacca

SEQ ID NO: 582446 - RNA, 22 nt, Human
ugggcuaaauccucaggcugac

SEQ ID NO: 582447 - RNA, 24 nt, Human
uguagagagggggguuucaccaug

SEQ ID NO: 582448 - RNA, 20 nt, Human
uguagcuccagcccuuccca

SEQ ID NO: 582449 - RNA, 28 nt, Human
ugucuuguccccucuccucugcccucca

SEQ ID NO: 582450 - RNA, 19 nt, Human
ugugcuccaccuccuuugc

SEQ ID NO: 582451 - RNA, 21 nt, Human
uucaagcaauucuccugccuc

SEQ ID NO: 582452 - RNA, 24 nt, Human
uucaagcaauucuccugccucagc

SEQ ID NO: 582453 - RNA, 24 nt, Human
uuguagagagggggguuucaccau

SEQ ID NO: 582454 - RNA, 24 nt, Human
uuguucuguugcccaggcuggagu

SEQ ID NO: 582455 - RNA, 24 nt, Human
uuucaccauguuggccaggcuggu

SEQ ID NO: 582456 - RNA, 20 nt, Human
uuuuuguauuguuuguagag

SEQ ID NO: 582457 - RNA, 25 nt, Human
aaaaaacaaaauacagucuggaaga

SEQ ID NO: 582458 - RNA, 24 nt, Human
aaaaacaaaauacagucuggaaga

SEQ ID NO: 582459 - RNA, 21 nt, Human
aaaggcaauuccuucuaccuc

SEQ ID NO: 582460 - RNA, 21 nt, Human
aauuccuucuaccuccaucuc

SEQ ID NO: 582461 - RNA, 20 nt, Human
accccacacgagguaccgug

SEQ ID NO: 582462 - RNA, 19 nt, Human
agaguucucaguccccacc

SEQ ID NO: 582463 - RNA, 21 nt, Human
agaguugguccuagaauaauu

SEQ ID NO: 582464 - RNA, 23 nt, Human
aggaaaaaacaaaauacagucug

SEQ ID NO: 582465 - RNA, 21 nt, Human
aggcugcaggugcacgugucu

SEQ ID NO: 582466 - RNA, 22 nt, Human
auggauuccagaugcaauccau

SEQ ID NO: 582467 - RNA, 21 nt, Human
cacagaacacucggcagucac

SEQ ID NO: 582468 - RNA, 23 nt, Human
cagaacacucggcagucacagcc

SEQ ID NO: 582469 - RNA, 22 nt, Human
cagccuuaguuaacaaucuugc

SEQ ID NO: 582470 - RNA, 20 nt, Human
cagucaugaucauaaaaaug

SEQ ID NO: 582471 - RNA, 18 nt, Human
caugaggcuguucauuuu

SEQ ID NO: 582472 - RNA, 22 nt, Human
ccaaaauagcaaaaauaggccu

SEQ ID NO: 582473 - RNA, 24 nt, Human
ccaaaauagcaaaaauaggccuau

SEQ ID NO: 582474 - RNA, 20 nt, Human
ccccaccccacacgagguac

SEQ ID NO: 582475 - RNA, 18 nt, Human
ccucucgugagaggcgga

SEQ ID NO: 582476 - RNA, 24 nt, Human
ccuucuaccuccaucucuggaguc

SEQ ID NO: 582477 - RNA, 25 nt, Human
cucaaagaguucucaguccccaccc

SEQ ID NO: 582478 - RNA, 19 nt, Human
cuggcacuuaaugccagcc

SEQ ID NO: 582479 - RNA, 23 nt, Human
gcagguuucacacaguuugacag

SEQ ID NO: 582480 - RNA, 24 nt, Human
gucugaaaucuuuuaaaaucccua

SEQ ID NO: 582481 - RNA, 18 nt, Human
uaaaauacacauggaaca

SEQ ID NO: 582482 - RNA, 19 nt, Human
uaccuccaucucuggaguc

SEQ ID NO: 582483 - RNA, 24 nt, Human
uaccuccaucucuggagucagcug

SEQ ID NO: 582484 - RNA, 23 nt, Human
uagcaaaaauaggccuauuucag

SEQ ID NO: 582485 - RNA, 19 nt, Human
ucauguggcuagaaaggaa

SEQ ID NO: 582486 - RNA, 23 nt, Human
uccccagaggauuguccuaacuc

SEQ ID NO: 582487 - RNA, 26 nt, Human
ucggcagucacagccacaguccucuc

SEQ ID NO: 582488 - RNA, 25 nt, Human
ucucaaagaguucucaguccccacc

SEQ ID NO: 582489 - RNA, 19 nt, Human
ucuucagcuugaaugaaca

SEQ ID NO: 582490 - RNA, 23 nt, Human
ugaacuagacucuccccagagga

SEQ ID NO: 582491 - RNA, 21 nt, Human
ugcaaugccacagucaugugg

SEQ ID NO: 582492 - RNA, 20 nt, Human
uggagcucugaucuacacag

SEQ ID NO: 582493 - RNA, 19 nt, Human
uguccaaaauagcaaaaau

SEQ ID NO: 582494 - RNA, 22 nt, Human
uguccaagcuaagaaucaagau

SEQ ID NO: 582495 - RNA, 21 nt, Human
uucagcuugaaugaacaugag

SEQ ID NO: 582496 - RNA, 22 nt, Human
uucagcuugaaugaacaugagg

SEQ ID NO: 582497 - RNA, 22 nt, Human
uuugugcaaugccacagucaug

SEQ ID NO: 582498 - RNA, 23 nt, Human
aaaaaagaaaaaaagaaagaaaa

SEQ ID NO: 582499 - RNA, 19 nt, Human
aaccugcacauccugcaca

SEQ ID NO: 582500 - RNA, 21 nt, Human
aagauccugucucacaaaaaa

SEQ ID NO: 582501 - RNA, 25 nt, Human
acagagcaagauccugucucacaaa

SEQ ID NO: 582502 - RNA, 21 nt, Human
accgacucuccacacaaguac

SEQ ID NO: 582503 - RNA, 23 nt, Human
acuccagccugggagacagagca

SEQ ID NO: 582504 - RNA, 18 nt, Human
acugcacuccagccuggg

SEQ ID NO: 582505 - RNA, 24 nt, Human
acugcacuccagccugggagacag

SEQ ID NO: 582506 - RNA, 25 nt, Human
acuguguugcccaggcuggucucca

SEQ ID NO: 582507 - RNA, 21 nt, Human
acuucaaccuccugaguagcu

SEQ ID NO: 582508 - RNA, 22 nt, Human
agagacagggucuugcucuguu

SEQ ID NO: 582509 - RNA, 22 nt, Human
agaguguaggcgugagccacug

SEQ ID NO: 582510 - RNA, 24 nt, Human
agaguguaggcgugagccacugca

SEQ ID NO: 582511 - RNA, 18 nt, Human
agccucaaccucccuggc

SEQ ID NO: 582512 - RNA, 20 nt, Human
agccucaaccucccuggccc

SEQ ID NO: 582513 - RNA, 21 nt, Human
agccugggcaacaaagugaga

SEQ ID NO: 582514 - RNA, 26 nt, Human
aggaucacuugagcucacgggaguuc

SEQ ID NO: 582515 - RNA, 18 nt, Human
aggcaagaggaucacuug

SEQ ID NO: 582516 - RNA, 24 nt, Human
aggcacuguggcucacgccuguag

SEQ ID NO: 582517 - RNA, 21 nt, Human
aggcgugagccacugcaucca

SEQ ID NO: 582518 - RNA, 21 nt, Human
aggcuggucuccaacuccugg

SEQ ID NO: 582519 - RNA, 24 nt, Human
aggguucucacuguguugcccagg

SEQ ID NO: 582520 - RNA, 21 nt, Human
aguacaguggugugaucauag

SEQ ID NO: 582521 - RNA, 23 nt, Human
aguacaguggugugaucauagcu

SEQ ID NO: 582522 - RNA, 24 nt, Human
aguacaguggugugaucauagcuc

SEQ ID NO: 582523 - RNA, 19 nt, Human
aguagcugggacuacaggc

SEQ ID NO: 582524 - RNA, 21 nt, Human
aguagcugggacuacaggcau

SEQ ID NO: 582525 - RNA, 18 nt, Human
auacagccaacagacacc

SEQ ID NO: 582526 - RNA, 22 nt, Human
auacgcaaggcaugagaaacag

SEQ ID NO: 582527 - RNA, 24 nt, Human
auagcucacugcagccucaaccuc

SEQ ID NO: 582528 - RNA, 25 nt, Human
aucacuugagcucacgggaguucaa

SEQ ID NO: 582529 - RNA, 24 nt, Human
aucaguccucccaccucuaccucc

SEQ ID NO: 582530 - RNA, 19 nt, Human
aucaugaaucaggccaggc

SEQ ID NO: 582531 - RNA, 21 nt, Human
auccaagcugucuaacugcuc

SEQ ID NO: 582532 - RNA, 24 nt, Human
auugugccacugcacuccagccug

SEQ ID NO: 582533 - RNA, 18 nt, Human
caaaucagaaugucaauc

SEQ ID NO: 582534 - RNA, 21 nt, Human
caacagacaccgacucuccac

SEQ ID NO: 582535 - RNA, 24 nt, Human
caacuccuggccucaaucaguccu

SEQ ID NO: 582536 - RNA, 22 nt, Human
caaggcaagaggaucacuugag

SEQ ID NO: 582537 - RNA, 23 nt, Human
caaggcaagaggaucacuugagc

SEQ ID NO: 582538 - RNA, 20 nt, Human
caauacuuugggaggccaag

SEQ ID NO: 582539 - RNA, 23 nt, Human
caauacuuugggaggccaaggca

SEQ ID NO: 582540 - RNA, 21 nt, Human
caaugugcuacaccccccaaa

SEQ ID NO: 582541 - RNA, 24 nt, Human
caccccccaaaauccaagcugucu

SEQ ID NO: 582542 - RNA, 22 nt, Human
caccuagaacaccuguaucagg

SEQ ID NO: 582543 - RNA, 24 nt, Human
caccucacuuggcuaauuuuugua

SEQ ID NO: 582544 - RNA, 23 nt, Human
caccuccacaaaaaauuuaaaaa

SEQ ID NO: 582545 - RNA, 23 nt, Human
cacuccagccugggagacagagc

SEQ ID NO: 582546 - RNA, 18 nt, Human
cacugcacuccagccugg

SEQ ID NO: 582547 - RNA, 19 nt, Human
cacugcacuccagccuggg

SEQ ID NO: 582548 - RNA, 22 nt, Human
cacugcacuccagccugggaga

SEQ ID NO: 582549 - RNA, 24 nt, Human
cacugcacuccagccugggagaca

SEQ ID NO: 582550 - RNA, 24 nt, Human
cacugcacuccagccugggagaca

SEQ ID NO: 582551 - RNA, 19 nt, Human
cacuguguugcccaggcug

SEQ ID NO: 582552 - RNA, 21 nt, Human
cacuguguugcccaggcuggu

SEQ ID NO: 582553 - RNA, 24 nt, Human
cacuguguugcccaggcuggucuc

SEQ ID NO: 582554 - RNA, 24 nt, Human
cacuucaaccuccugaguagcugg

SEQ ID NO: 582555 - RNA, 21 nt, Human
cagccucaaccucccuggccc

SEQ ID NO: 582556 - RNA, 24 nt, Human
cagccucaaccucccuggcccgag

SEQ ID NO: 582557 - RNA, 22 nt, Human
caggagggacagcaucaugaua

SEQ ID NO: 582558 - RNA, 24 nt, Human
cagggucuugcucuguugcccagg

SEQ ID NO: 582559 - RNA, 24 nt, Human
cauacgcaaggcaugagaaacagg

SEQ ID NO: 582560 - RNA, 21 nt, Human
cauagauuccccuuuccaccu

SEQ ID NO: 582561 - RNA, 27 nt, Human
cauccugcacauguauccuggaacuua

SEQ ID NO: 582562 - RNA, 27 nt, Human
cauuacaccccagcccauaaggagcaa

SEQ ID NO: 582563 - RNA, 22 nt, Human
ccaaaauccaagcugucuaacu

SEQ ID NO: 582564 - RNA, 21 nt, Human
ccacaguucccucaacuugga

SEQ ID NO: 582565 - RNA, 18 nt, Human
ccacugcacuccagccug

SEQ ID NO: 582566 - RNA, 19 nt, Human
ccacugcacuccagccugg

SEQ ID NO: 582567 - RNA, 20 nt, Human
ccacugcacuccagccuggg

SEQ ID NO: 582568 - RNA, 22 nt, Human
ccacugcacuccagccugggag

SEQ ID NO: 582569 - RNA, 24 nt, Human
ccacugcacuccagccugggagac

SEQ ID NO: 582570 - RNA, 19 nt, Human
ccacugcauccagccucaa

SEQ ID NO: 582571 - RNA, 21 nt, Human
ccacugcauccagccucaaau

SEQ ID NO: 582572 - RNA, 21 nt, Human
ccagagaguaacaauauaaua

SEQ ID NO: 582573 - RNA, 22 nt, Human
ccaggaauucaaggcugcagug

SEQ ID NO: 582574 - RNA, 21 nt, Human
ccaggcacagugaugugugcc

SEQ ID NO: 582575 - RNA, 20 nt, Human
ccaggcuggucuccaacucc

SEQ ID NO: 582576 - RNA, 19 nt, Human
cccaggcuggaguacagug

SEQ ID NO: 582577 - RNA, 21 nt, Human
ccccuuuccaccuucccuucc

SEQ ID NO: 582578 - RNA, 20 nt, Human
cccucuagcucacauccugg

SEQ ID NO: 582579 - RNA, 24 nt, Human
cccugccagccacagacuccacaa

SEQ ID NO: 582580 - RNA, 22 nt, Human
ccucaaccucccuggcccgaga

SEQ ID NO: 582581 - RNA, 31 nt, Human
ccucccaccucuaccucccagaguguaggcc

SEQ ID NO: 582582 - RNA, 24 nt, Human
ccucccacuucaaccuccugagua

SEQ ID NO: 582583 - RNA, 19 nt, Human
ccucccugcuagccuggga

SEQ ID NO: 582584 - RNA, 26 nt, Human
ccucccugcuagccugggagcagcca

SEQ ID NO: 582585 - RNA, 24 nt, Human
ccucugcacauuacaccccagccc

SEQ ID NO: 582586 - RNA, 19 nt, Human
ccucugugccccuccugug

SEQ ID NO: 582587 - RNA, 23 nt, Human
ccugaguagcugggacuacaggc

SEQ ID NO: 582588 - RNA, 24 nt, Human
ccugaguagcugggacuacaggca

SEQ ID NO: 582589 - RNA, 21 nt, Human
ccugcggucccagcuacuugg

SEQ ID NO: 582590 - RNA, 22 nt, Human
ccugcggucccagcuacuuggg

SEQ ID NO: 582591 - RNA, 18 nt, Human
ccugguucaggacuggag

SEQ ID NO: 582592 - RNA, 20 nt, Human
ccugguucaggacuggagcu

SEQ ID NO: 582593 - RNA, 21 nt, Human
cuacaccccccaaaauccaag

SEQ ID NO: 582594 - RNA, 24 nt, Human
cucaaucaguccucccaccucuac

SEQ ID NO: 582595 - RNA, 24 nt, Human
cucacgccuguagucccaauacuu

SEQ ID NO: 582596 - RNA, 21 nt, Human
cucacugcagccucaaccucc

SEQ ID NO: 582597 - RNA, 21 nt, Human
cuccacaaaaaauuuaaaaaa

SEQ ID NO: 582598 - RNA, 22 nt, Human
cuccacacaaguacuggcgucc

SEQ ID NO: 582599 - RNA, 20 nt, Human
cuccguccucugugccccuc

SEQ ID NO: 582600 - RNA, 21 nt, Human
cuccucugcacauuacacccc

SEQ ID NO: 582601 - RNA, 27 nt, Human
cuccuggccucaaucaguccucccacc

SEQ ID NO: 582602 - RNA, 24 nt, Human
cugcagccucaaccucccuggccc

SEQ ID NO: 582603 - RNA, 22 nt, Human
cugcagugagcuuugauugugc

SEQ ID NO: 582604 - RNA, 23 nt, Human
cugccagccacagacuccacaag

SEQ ID NO: 582605 - RNA, 22 nt, Human
cugcucccacaguucccucaac

SEQ ID NO: 582606 - RNA, 21 nt, Human
gacagagcaagauccugucuc

SEQ ID NO: 582607 - RNA, 22 nt, Human
gagagacagggucuugcucugu

SEQ ID NO: 582608 - RNA, 23 nt, Human
gagaggguucucacuguguugcc

SEQ ID NO: 582609 - RNA, 22 nt, Human
gagauacagccaacagacaccg

SEQ ID NO: 582610 - RNA, 23 nt, Human
gagauccucccacuucaaggcac

SEQ ID NO: 582611 - RNA, 20 nt, Human
gagcaaaucaaucuucccuc

SEQ ID NO: 582612 - RNA, 25 nt, Human
gaguagcugggacuacaggcauaua

SEQ ID NO: 582613 - RNA, 26 nt, Human
gaucacuugagcucacgggaguucaa

SEQ ID NO: 582614 - RNA, 19 nt, Human
gaucauagcucacugcagc

SEQ ID NO: 582615 - RNA, 21 nt, Human
gauugugccacugcacuccag

SEQ ID NO: 582616 - RNA, 24 nt, Human
gcacuccagccugggagacagagc

SEQ ID NO: 582617 - RNA, 22 nt, Human
gcauacgcaaggcaugagaaac

SEQ ID NO: 582618 - RNA, 20 nt, Human
gcccaggcuggaguacagug

SEQ ID NO: 582619 - RNA, 24 nt, Human
gcccaggcuggaguacaguggugu

SEQ ID NO: 582620 - RNA, 22 nt, Human
gccuguagucccaauacuuugg

SEQ ID NO: 582621 - RNA, 25 nt, Human
gcucuguugcccaggcuggaguaca

SEQ ID NO: 582622 - RNA, 23 nt, Human
gcuggucuccaacuccuggccuc

SEQ ID NO: 582623 - RNA, 18 nt, Human
ggacuggagcuccagaca

SEQ ID NO: 582624 - RNA, 21 nt, Human
ggagaaccgcucgagcccagg

SEQ ID NO: 582625 - RNA, 19 nt, Human
ggccugguucaggacugga

SEQ ID NO: 582626 - RNA, 22 nt, Human
ggcuggaguacaguggugugau

SEQ ID NO: 582627 - RNA, 24 nt, Human
ggcuggucuccaacuccuggccuc

SEQ ID NO: 582628 - RNA, 18 nt, Human
gggcagggacugaguugc

SEQ ID NO: 582629 - RNA, 22 nt, Human
gguucucacuguguugcccagg

SEQ ID NO: 582630 - RNA, 22 nt, Human
gucccaauacuuugggaggcca

SEQ ID NO: 582631 - RNA, 22 nt, Human
gucucacaaaaaaaaagaaaaa

SEQ ID NO: 582632 - RNA, 22 nt, Human
guggcucacgccuguaguccca

SEQ ID NO: 582633 - RNA, 23 nt, Human
uaaaaaacuagccaggcacagug

SEQ ID NO: 582634 - RNA, 24 nt, Human
uaauuuuuguauuuuuuguagaga

SEQ ID NO: 582635 - RNA, 18 nt, Human
uacaccccccaaaaucca

SEQ ID NO: 582636 - RNA, 19 nt, Human
uacaguggugugaucauag

SEQ ID NO: 582637 - RNA, 23 nt, Human
uagagaggguucucacuguguug

SEQ ID NO: 582638 - RNA, 22 nt, Human
uagauuccccuuuccaccuucc

SEQ ID NO: 582639 - RNA, 24 nt, Human
uagcucacugcagccucaaccucc

SEQ ID NO: 582640 - RNA, 20 nt, Human
uauaccaccucacuuggcua

SEQ ID NO: 582641 - RNA, 19 nt, Human
ucacugcagccucaaccuc

SEQ ID NO: 582642 - RNA, 25 nt, Human
ucacugcagccucaaccucccuggc

SEQ ID NO: 582643 - RNA, 21 nt, Human
ucacuggcauagauuccccuu

SEQ ID NO: 582644 - RNA, 21 nt, Human
ucacuuggcuaauuuuuguau

SEQ ID NO: 582645 - RNA, 19 nt, Human
ucaggccaggcacuguggc

SEQ ID NO: 582646 - RNA, 24 nt, Human
ucaggccaggcacuguggcucacg

SEQ ID NO: 582647 - RNA, 25 nt, Human
ucaguccucccaccucuaccuccca

SEQ ID NO: 582648 - RNA, 19 nt, Human
uccaagcugucuaacugcu

SEQ ID NO: 582649 - RNA, 21 nt, Human
uccccagcuugggccugguuc

SEQ ID NO: 582650 - RNA, 20 nt, Human
ucccuuccagagaguaacaa

SEQ ID NO: 582651 - RNA, 24 nt, Human
uccugaguagcugggacuacaggc

SEQ ID NO: 582652 - RNA, 21 nt, Human
ucucacaaaaaaaaagaaaaa

SEQ ID NO: 582653 - RNA, 23 nt, Human
ucucacaaaaaaaaagaaaaaaa

SEQ ID NO: 582654 - RNA, 18 nt, Human
ucucacuguguugcccag

SEQ ID NO: 582655 - RNA, 19 nt, Human
ucucacuguguugcccagg

SEQ ID NO: 582656 - RNA, 19 nt, Human
ucucacuguguugcccagg

SEQ ID NO: 582657 - RNA, 23 nt, Human
ucucacuguguugcccaggcugg

SEQ ID NO: 582658 - RNA, 24 nt, Human
ucucacuguguugcccaggcuggu

SEQ ID NO: 582659 - RNA, 26 nt, Human
ucucacuguguugcccaggcuggucu

SEQ ID NO: 582660 - RNA, 27 nt, Human
ucucacuguguugcccaggcuggucuc

SEQ ID NO: 582661 - RNA, 25 nt, Human
ucugugccccuccugugcacggcua

SEQ ID NO: 582662 - RNA, 18 nt, Human
ucuguugcccaggcugga

SEQ ID NO: 582663 - RNA, 23 nt, Human
ucuugcucuguugcccaggcugg

SEQ ID NO: 582664 - RNA, 24 nt, Human
ucuugcucuguugcccaggcugga

SEQ ID NO: 582665 - RNA, 19 nt, Human
ucuuucuuuuucucucuuu

SEQ ID NO: 582666 - RNA, 22 nt, Human
ucuuucuuuuucucucuuuucc

SEQ ID NO: 582667 - RNA, 21 nt, Human
ugaacaugccccugccagcca

SEQ ID NO: 582668 - RNA, 27 nt, Human
ugagaaacaggugcuggugccaacuua

SEQ ID NO: 582669 - RNA, 24 nt, Human
ugaugugugccugcggucccagcu

SEQ ID NO: 582670 - RNA, 21 nt, Human
ugcccaggcuggaguacagug

SEQ ID NO: 582671 - RNA, 24 nt, Human
ugcccaggcuggaguacaguggug

SEQ ID NO: 582672 - RNA, 24 nt, Human
ugcccaggcuggucuccaacuccu

SEQ ID NO: 582673 - RNA, 23 nt, Human
ugccugcggucccagcuacuugg

SEQ ID NO: 582674 - RNA, 24 nt, Human
ugccugcggucccagcuacuuggg

SEQ ID NO: 582675 - RNA, 22 nt, Human
ugcucuguugcccaggcuggag

SEQ ID NO: 582676 - RNA, 19 nt, Human
uggaguacaguggugugau

SEQ ID NO: 582677 - RNA, 19 nt, Human
uggaguacaguggugugau

SEQ ID NO: 582678 - RNA, 28 nt, Human
uggaguacaguggugugauggcucuagc

SEQ ID NO: 582679 - RNA, 21 nt, Human
uggccaaagggcaugaaccug

SEQ ID NO: 582680 - RNA, 21 nt, Human
uggcucacgccuguaguccca

SEQ ID NO: 582681 - RNA, 22 nt, Human
uggcucacgccuguagucccaa

SEQ ID NO: 582682 - RNA, 24 nt, Human
uggcucacgccuguagucccaaua

SEQ ID NO: 582683 - RNA, 21 nt, Human
ugggacuacaggcauauacca

SEQ ID NO: 582684 - RNA, 24 nt, Human
ugggacuacaggcauauaccaccu

SEQ ID NO: 582685 - RNA, 19 nt, Human
ugggaggccaaggcaagag

SEQ ID NO: 582686 - RNA, 24 nt, Human
ugggaggccaaggcaagaggauca

SEQ ID NO: 582687 - RNA, 21 nt, Human
ugggccuaagagcaugccgag

SEQ ID NO: 582688 - RNA, 18 nt, Human
uggugugaucauagcuca

SEQ ID NO: 582689 - RNA, 24 nt, Human
uggugugaucauagcucacugcag

SEQ ID NO: 582690 - RNA, 25 nt, Human
ugguuuagacaccuaccucccugcu

SEQ ID NO: 582691 - RNA, 21 nt, Human
uguaggcgugagccacugcau

SEQ ID NO: 582692 - RNA, 19 nt, Human
uguguugcccaggcugguc

SEQ ID NO: 582693 - RNA, 24 nt, Human
uguguugcccaggcuggucuccaa

SEQ ID NO: 582694 - RNA, 23 nt, Human
uguguugugcucacuggcauaga

SEQ ID NO: 582695 - RNA, 22 nt, Human
uguugcccaggcuggucuccaa

SEQ ID NO: 582696 - RNA, 23 nt, Human
uuaugaucccuuuaacauccaau

SEQ ID NO: 582697 - RNA, 24 nt, Human
uucucacuguguugcccaggcugg

SEQ ID NO: 582698 - RNA, 24 nt, Human
uugcucuguugcccaggcuggagu

SEQ ID NO: 582699 - RNA, 22 nt, Human
uuuucccaccuagaacaccuuc

SEQ ID NO: 582700 - RNA, 19 nt, Human
uuuucuuucuuuuucucuc

SEQ ID NO: 582701 - RNA, 20 nt, Human
uuuuuguauuuuuuguagag

SEQ ID NO: 582702 - RNA, 23 nt, Human
aaacugaaacauguaaaaagcaa

SEQ ID NO: 582703 - RNA, 18 nt, Human
aggaacacaaaaaccaaa

SEQ ID NO: 582704 - RNA, 22 nt, Human
aggaacacaaaaaccaaaugca

SEQ ID NO: 582705 - RNA, 21 nt, Human
agguagucauuaacagucagg

SEQ ID NO: 582706 - RNA, 22 nt, Human
augaaguuagacacuuucccau

SEQ ID NO: 582707 - RNA, 18 nt, Human
cagaugagacuccaaaag

SEQ ID NO: 582708 - RNA, 21 nt, Human
caggcucagcgccgcgggccu

SEQ ID NO: 582709 - RNA, 20 nt, Human
cagggaccgaauuucguuuc

SEQ ID NO: 582710 - RNA, 23 nt, Human
caguuuauugagaaaaucaugau

SEQ ID NO: 582711 - RNA, 19 nt, Human
cccgggaggaggcccaggg

SEQ ID NO: 582712 - RNA, 24 nt, Human
ccgcggccucucccucgcggcucc

SEQ ID NO: 582713 - RNA, 18 nt, Human
cgccgcaggcucagcgcc

SEQ ID NO: 582714 - RNA, 20 nt, Human
cguuucguuuccgagaccag

SEQ ID NO: 582715 - RNA, 21 nt, Human
cucccucgcggcuccgcuagu

SEQ ID NO: 582716 - RNA, 21 nt, Human
gcagcgcccgggaggaggccc

SEQ ID NO: 582717 - RNA, 19 nt, Human
gggaggaggcccagggacc

SEQ ID NO: 582718 - RNA, 21 nt, Human
ucaggaacacaaaaaccaaau

SEQ ID NO: 582719 - RNA, 24 nt, Human
ugaaauuggccucuuccuuccccc

SEQ ID NO: 582720 - RNA, 24 nt, Human
uuccggguggcgcggcgcgcugag

SEQ ID NO: 582721 - RNA, 18 nt, Human
aaaaagcccaccugagag

SEQ ID NO: 582722 - RNA, 24 nt, Human
aaaaugugagaauuacgggcauga

SEQ ID NO: 582723 - RNA, 21 nt, Human
aaaggggaaaggagagagcag

SEQ ID NO: 582724 - RNA, 19 nt, Human
aacaacuggcccagggucc

SEQ ID NO: 582725 - RNA, 18 nt, Human
aaccuagcuggagcuagg

SEQ ID NO: 582726 - RNA, 18 nt, Human
aaccuccucccugccucc

SEQ ID NO: 582727 - RNA, 24 nt, Human
aagacugcucgaggccaggaguuc

SEQ ID NO: 582728 - RNA, 21 nt, Human
aaguagcugggaccacaggca

SEQ ID NO: 582729 - RNA, 24 nt, Human
aaguagcugggaccacaggcacgc

SEQ ID NO: 582730 - RNA, 19 nt, Human
aauuacgggcaugagccac

SEQ ID NO: 582731 - RNA, 21 nt, Human
aauuacgggcaugagccacug

SEQ ID NO: 582732 - RNA, 25 nt, Human
acauuagguagaaagagacggcugu

SEQ ID NO: 582733 - RNA, 21 nt, Human
acccaggcuggagugcagugu

SEQ ID NO: 582734 - RNA, 23 nt, Human
accccuaauccaaacaaccccuc

SEQ ID NO: 582735 - RNA, 18 nt, Human
accuccucccugccucca

SEQ ID NO: 582736 - RNA, 21 nt, Human
accuguaaugccagcauguug

SEQ ID NO: 582737 - RNA, 23 nt, Human
accuguagucccagcuauuuggg

SEQ ID NO: 582738 - RNA, 23 nt, Human
acgcagcacaccaccaugcccag

SEQ ID NO: 582739 - RNA, 24 nt, Human
acucuaucacccaggcuggagugc

SEQ ID NO: 582740 - RNA, 18 nt, Human
acugcccuccagccuggg

SEQ ID NO: 582741 - RNA, 24 nt, Human
acugcccuccagccugggcaacgg

SEQ ID NO: 582742 - RNA, 20 nt, Human
acuguguugcccaaagcugg

SEQ ID NO: 582743 - RNA, 23 nt, Human
agaauuacgggcaugagccacug

SEQ ID NO: 582744 - RNA, 20 nt, Human
agagacuggggauauagagg

SEQ ID NO: 582745 - RNA, 22 nt, Human
agagaugggagugcaauguggg

SEQ ID NO: 582746 - RNA, 18 nt, Human
agaggaaaaggggaaagg

SEQ ID NO: 582747 - RNA, 23 nt, Human
agccgggaguggugguguagacc

SEQ ID NO: 582748 - RNA, 23 nt, Human
aggaaggaaaaccguaucagcac

SEQ ID NO: 582749 - RNA, 23 nt, Human
aggaguucgagaccagccugggc

SEQ ID NO: 582750 - RNA, 21 nt, Human
aggucucacuguguugcccaa

SEQ ID NO: 582751 - RNA, 23 nt, Human
agugcagugucaugaacauggcu

SEQ ID NO: 582752 - RNA, 19 nt, Human
auacaccauuguccaaaga

SEQ ID NO: 582753 - RNA, 23 nt, Human
auaccuguaaugccagcauguug

SEQ ID NO: 582754 - RNA, 24 nt, Human
aucacgucacugcccuccagccug

SEQ ID NO: 582755 - RNA, 23 nt, Human
aucaguaucacacaaagcgaacc

SEQ ID NO: 582756 - RNA, 18 nt, Human
augaacauggcucacugc

SEQ ID NO: 582757 - RNA, 24 nt, Human
auggcucacugcagccuugaccuc

SEQ ID NO: 582758 - RNA, 22 nt, Human
auuuuuuuuuucuuuccuuuga

SEQ ID NO: 582759 - RNA, 24 nt, Human
caaaaccuccucccugccuccagg

SEQ ID NO: 582760 - RNA, 20 nt, Human
caaagccuacauuuuucuca

SEQ ID NO: 582761 - RNA, 20 nt, Human
caaaggccacuagggaugaa

SEQ ID NO: 582762 - RNA, 22 nt, Human
cacaaagcgaaccccagucucc

SEQ ID NO: 582763 - RNA, 18 nt, Human
cacaccaccaugcccagc

SEQ ID NO: 582764 - RNA, 19 nt, Human
cacacuaacacuuacugaa

SEQ ID NO: 582765 - RNA, 24 nt, Human
caccugagagggaagccaacucag

SEQ ID NO: 582766 - RNA, 22 nt, Human
cacucuaucacccaggcuggag

SEQ ID NO: 582767 - RNA, 23 nt, Human
cacucuaucacccaggcuggagu

SEQ ID NO: 582768 - RNA, 19 nt, Human
cacugcccuccagccuggg

SEQ ID NO: 582769 - RNA, 20 nt, Human
cacugcccuccagccugggc

SEQ ID NO: 582770 - RNA, 22 nt, Human
cacugcccuccagccugggcaa

SEQ ID NO: 582771 - RNA, 23 nt, Human
cacugcccuccagccugggcaac

SEQ ID NO: 582772 - RNA, 23 nt, Human
cacugcccuccagccugggcaac

SEQ ID NO: 582773 - RNA, 18 nt, Human
cacuguguugcccaaagc

SEQ ID NO: 582774 - RNA, 22 nt, Human
cagaagauauacccacuuacac

SEQ ID NO: 582775 - RNA, 23 nt, Human
cagcauguugggagcccgaggca

SEQ ID NO: 582776 - RNA, 24 nt, Human
cagcauguugggagcccgaggcag

SEQ ID NO: 582777 - RNA, 23 nt, Human
cagccuugaccuccaggcuaaag

SEQ ID NO: 582778 - RNA, 21 nt, Human
cauacaccauuguccaaagau

SEQ ID NO: 582779 - RNA, 18 nt, Human
cauccugcugccuccacc

SEQ ID NO: 582780 - RNA, 21 nt, Human
cauccugcugccuccaccccu

SEQ ID NO: 582781 - RNA, 27 nt, Human
cauggcucacugcagccuugaccucca

SEQ ID NO: 582782 - RNA, 24 nt, Human
ccaaaaugugagaauuacgggcau

SEQ ID NO: 582783 - RNA, 25 nt, Human
ccaggaguucgagaccagccugggc

SEQ ID NO: 582784 - RNA, 21 nt, Human
ccauacaccauuguccaaaga

SEQ ID NO: 582785 - RNA, 18 nt, Human
cccaccucugccucuugg

SEQ ID NO: 582786 - RNA, 19 nt, Human
ccgggcucaagcaauacuc

SEQ ID NO: 582787 - RNA, 20 nt, Human
ccgggcucaagcaauacucc

SEQ ID NO: 582788 - RNA, 22 nt, Human
ccgggcucaagcaauacuccug

SEQ ID NO: 582789 - RNA, 23 nt, Human
ccuaccuuagccuuccaaguagc

SEQ ID NO: 582790 - RNA, 23 nt, Human
ccucacauggcuuucuaucacuc

SEQ ID NO: 582791 - RNA, 23 nt, Human
ccucagaccaaucuccauuuugc

SEQ ID NO: 582792 - RNA, 26 nt, Human
ccucauaucuguguaugucagagggc

SEQ ID NO: 582793 - RNA, 22 nt, Human
ccuccagccugggcaacggugu

SEQ ID NO: 582794 - RNA, 26 nt, Human
ccuccuaccuuagccuuccaaguagc

SEQ ID NO: 582795 - RNA, 21 nt, Human
ccuguagucccagcuauuugg

SEQ ID NO: 582796 - RNA, 18 nt, Human
ccuuagggucuacccugg

SEQ ID NO: 582797 - RNA, 19 nt, Human
ccuugcugagcacuuuccc

SEQ ID NO: 582798 - RNA, 24 nt, Human
cucaaagaccuuccugacuucugc

SEQ ID NO: 582799 - RNA, 20 nt, Human
cucacucuaucacccaggcc

SEQ ID NO: 582800 - RNA, 21 nt, Human
cucacugcagccuugaccucc

SEQ ID NO: 582801 - RNA, 24 nt, Human
cucaggccuucccugggagucucu

SEQ ID NO: 582802 - RNA, 27 nt, Human
cucaucacugucucucuuauauaaacu

SEQ ID NO: 582803 - RNA, 24 nt, Human
cucauggaacccucagaccaaucu

SEQ ID NO: 582804 - RNA, 19 nt, Human
cuccuugcugagcacuuuc

SEQ ID NO: 582805 - RNA, 18 nt, Human
cucucagaacaagcucaa

SEQ ID NO: 582806 - RNA, 23 nt, Human
cucucguccccucacauggcuuu

SEQ ID NO: 582807 - RNA, 24 nt, Human
cuuagccuuccaaguagcugggac

SEQ ID NO: 582808 - RNA, 19 nt, Human
cuugcugagcacuuuccca

SEQ ID NO: 582809 - RNA, 19 nt, Human
gaacauggcucacugcagc

SEQ ID NO: 582810 - RNA, 19 nt, Human
gaauuacgggcaugagcca

SEQ ID NO: 582811 - RNA, 24 nt, Human
gaccuguagucccagcuauuuggg

SEQ ID NO: 582812 - RNA, 22 nt, Human
gagaauuacgggcaugagccac

SEQ ID NO: 582813 - RNA, 24 nt, Human
gagaauuacgggcaugagccacug

SEQ ID NO: 582814 - RNA, 18 nt, Human
gagauaaccuaaccaugg

SEQ ID NO: 582815 - RNA, 20 nt, Human
gagcuugcaaauggccccaa

SEQ ID NO: 582816 - RNA, 25 nt, Human
gaggcaggaagacugcucgaggcca

SEQ ID NO: 582817 - RNA, 18 nt, Human
gagggaagccaacucaga

SEQ ID NO: 582818 - RNA, 23 nt, Human
gauaagaggaaaaggggaaagga

SEQ ID NO: 582819 - RNA, 20 nt, Human
gcagcacaccaccaugccca

SEQ ID NO: 582820 - RNA, 19 nt, Human
gcagccuugaccuccaggc

SEQ ID NO: 582821 - RNA, 20 nt, Human
gcccccucuucuuguaacuu

SEQ ID NO: 582822 - RNA, 22 nt, Human
gcccgaggcaggaagacugcuc

SEQ ID NO: 582823 - RNA, 23 nt, Human
gccuaucaauucugguuuuugcu

SEQ ID NO: 582824 - RNA, 22 nt, Human
gccucgaccucccaaaauguga

SEQ ID NO: 582825 - RNA, 19 nt, Human
gccugggcaacauauggag

SEQ ID NO: 582826 - RNA, 22 nt, Human
gccuugaccuccaggcuaaagg

SEQ ID NO: 582827 - RNA, 21 nt, Human
gcucacugcagccuugaccuc

SEQ ID NO: 582828 - RNA, 19 nt, Human
gcugggcgcgguggcucau

SEQ ID NO: 582829 - RNA, 22 nt, Human
ggcaugagccacugugccuggc

SEQ ID NO: 582830 - RNA, 20 nt, Human
ggccucaggccuucccuggg

SEQ ID NO: 582831 - RNA, 20 nt, Human
gggaguggugguguagaccu

SEQ ID NO: 582832 - RNA, 24 nt, Human
gggcgcgguggcucauaccuguaa

SEQ ID NO: 582833 - RNA, 24 nt, Human
ggggcccaccucugccucuuggag

SEQ ID NO: 582834 - RNA, 24 nt, Human
gguggcucauaccuguaaugccag

SEQ ID NO: 582835 - RNA, 22 nt, Human
ggugggcuggaagugcugagaa

SEQ ID NO: 582836 - RNA, 22 nt, Human
guaguuccuaggcagcaugggg

SEQ ID NO: 582837 - RNA, 21 nt, Human
gugaugccacuaacacacuaa

SEQ ID NO: 582838 - RNA, 21 nt, Human
guuuuuuuuuuuuuuugugga

SEQ ID NO: 582839 - RNA, 18 nt, Human
uaaaaaauuagccgggag

SEQ ID NO: 582840 - RNA, 23 nt, Human
uaaaggaauccuccuccuaccuu

SEQ ID NO: 582841 - RNA, 24 nt, Human
uaacacacuaacacuuacugaaaa

SEQ ID NO: 582842 - RNA, 21 nt, Human
uaagaggaaaaggggaaagga

SEQ ID NO: 582843 - RNA, 19 nt, Human
uaaguaacacuucagcaaa

SEQ ID NO: 582844 - RNA, 25 nt, Human
uaauggauuuugccaaauugcuauu

SEQ ID NO: 582845 - RNA, 24 nt, Human
uacccacuuacacugccccaaagc

SEQ ID NO: 582846 - RNA, 24 nt, Human
uaccuguaaugccagcauguuggg

SEQ ID NO: 582847 - RNA, 24 nt, Human
uacgggcaugagccacugugccug

SEQ ID NO: 582848 - RNA, 23 nt, Human
uacuccugccucgaccucccaaa

SEQ ID NO: 582849 - RNA, 24 nt, Human
uacuccugccucgaccucccaaaa

SEQ ID NO: 582850 - RNA, 22 nt, Human
uagagguggacaaaaccuccuu

SEQ ID NO: 582851 - RNA, 20 nt, Human
uagggccagcucaugaaccc

SEQ ID NO: 582852 - RNA, 21 nt, Human
uauauggaugggggugggcug

SEQ ID NO: 582853 - RNA, 20 nt, Human
uaucacacaaagcgaacccc

SEQ ID NO: 582854 - RNA, 18 nt, Human
uauggaugggggugggcu

SEQ ID NO: 582855 - RNA, 19 nt, Human
ucacauuguccugguugga

SEQ ID NO: 582856 - RNA, 24 nt, Human
ucacccaggcuggagugcaguguc

SEQ ID NO: 582857 - RNA, 23 nt, Human
ucacgucacugcccuccagccug

SEQ ID NO: 582858 - RNA, 24 nt, Human
ucacucuaucacccaggcuggagu

SEQ ID NO: 582859 - RNA, 19 nt, Human
ucacugcagccuugaccuc

SEQ ID NO: 582860 - RNA, 23 nt, Human
ucacugcagccuugaccuccagg

SEQ ID NO: 582861 - RNA, 24 nt, Human
ucacugcccuccagccugggcaac

SEQ ID NO: 582862 - RNA, 19 nt, Human
ucagaacaagcucaaagac

SEQ ID NO: 582863 - RNA, 22 nt, Human
ucagaccaaucuccauuuugcc

SEQ ID NO: 582864 - RNA, 24 nt, Human
uccaaguagcugggaccacaggca

SEQ ID NO: 582865 - RNA, 24 nt, Human
ucccaaaaugugagaauuacgggc

SEQ ID NO: 582866 - RNA, 21 nt, Human
ucccugcauccagcccggccu

SEQ ID NO: 582867 - RNA, 21 nt, Human
uccgggcucaagcaauacucc

SEQ ID NO: 582868 - RNA, 22 nt, Human
ucgaggccaggaguucgagacc

SEQ ID NO: 582869 - RNA, 24 nt, Human
ucuaucacccaggcuggagugcag

SEQ ID NO: 582870 - RNA, 22 nt, Human
ucucacucuaucacccaggcug

SEQ ID NO: 582871 - RNA, 23 nt, Human
ucucacucuaucacccaggcugg

SEQ ID NO: 582872 - RNA, 24 nt, Human
ucucacucuaucacccaggcugga

SEQ ID NO: 582873 - RNA, 26 nt, Human
ucucacucuaucacccaggcuggagu

SEQ ID NO: 582874 - RNA, 27 nt, Human
ucucacucuaucacccaggcuggagug

SEQ ID NO: 582875 - RNA, 18 nt, Human
ucucacuguguugcccaa

SEQ ID NO: 582876 - RNA, 19 nt, Human
ucucacuguguugcccaaa

SEQ ID NO: 582877 - RNA, 24 nt, Human
ucucacuguguugcccaaagcugg

SEQ ID NO: 582878 - RNA, 21 nt, Human
ucucgaacuuccgggcucaag

SEQ ID NO: 582879 - RNA, 18 nt, Human
ugaaccuagcuggagcua

SEQ ID NO: 582880 - RNA, 18 nt, Human
ugaagaccucccaccccc

SEQ ID NO: 582881 - RNA, 22 nt, Human
ugacuugugcagaaucucaucu

SEQ ID NO: 582882 - RNA, 22 nt, Human
ugagagagaccuagcccgagug

SEQ ID NO: 582883 - RNA, 22 nt, Human
ugagagggaagccaacucagau

SEQ ID NO: 582884 - RNA, 18 nt, Human
ugagucccugcauccagc

SEQ ID NO: 582885 - RNA, 22 nt, Human
ugcauuugggucauuuucaauc

SEQ ID NO: 582886 - RNA, 22 nt, Human
ugcucgagcccugggguguuga

SEQ ID NO: 582887 - RNA, 22 nt, Human
uggaacccucagaccaaucucc

SEQ ID NO: 582888 - RNA, 24 nt, Human
uggagugcagugucaugaacaugg

SEQ ID NO: 582889 - RNA, 24 nt, Human
uggcucacugcagccuugaccucc

SEQ ID NO: 582890 - RNA, 24 nt, Human
uggcucauaccuguaaugccagca

SEQ ID NO: 582891 - RNA, 23 nt, Human
ugggaaggguaguaccaaggagg

SEQ ID NO: 582892 - RNA, 26 nt, Human
ugggaccacaggcacgcagcacacca

SEQ ID NO: 582893 - RNA, 28 nt, Human
ugggaccacaggcacgcagcacaccacc

SEQ ID NO: 582894 - RNA, 29 nt, Human
ugggaccacaggcacgcagcacaccacca

SEQ ID NO: 582895 - RNA, 26 nt, Human
ugggagcccgaggcaggaagacugac

SEQ ID NO: 582896 - RNA, 20 nt, Human
ugggaggcugaagugggaca

SEQ ID NO: 582897 - RNA, 24 nt, Human
ugggaggcugaagugggacaacug

SEQ ID NO: 582898 - RNA, 24 nt, Human
ugggcaacauauggagacccuguc

SEQ ID NO: 582899 - RNA, 24 nt, Human
uggugguguagaccuguaguccca

SEQ ID NO: 582900 - RNA, 23 nt, Human
uguaaugccagcauguugggagc

SEQ ID NO: 582901 - RNA, 20 nt, Human
uguccugguuggauacuuuc

SEQ ID NO: 582902 - RNA, 19 nt, Human
ugugcaguuuccuuucugc

SEQ ID NO: 582903 - RNA, 18 nt, Human
ugugcuggaauguauaug

SEQ ID NO: 582904 - RNA, 25 nt, Human
uguguugcccaaagcuggucucgaa

SEQ ID NO: 582905 - RNA, 19 nt, Human
uuaaagacuuguccaacca

SEQ ID NO: 582906 - RNA, 19 nt, Human
uucacagaagauauaccca

SEQ ID NO: 582907 - RNA, 23 nt, Human
uuccaaguagcugggaccacagg

SEQ ID NO: 582908 - RNA, 24 nt, Human
uuccaaguagcugggaccacaggc

SEQ ID NO: 582909 - RNA, 24 nt, Human
uucccaccauacaccauuguccaa

SEQ ID NO: 582910 - RNA, 22 nt, Human
uuccucucagaacaagcucaaa

SEQ ID NO: 582911 - RNA, 23 nt, Human
uucugcucauccugcugccucca

SEQ ID NO: 582912 - RNA, 26 nt, Human
uugaagaccucccacccccaaaggcc

SEQ ID NO: 582913 - RNA, 22 nt, Human
uuggauacuuucugucuccugu

SEQ ID NO: 582914 - RNA, 20 nt, Human
uuggcggccucaggccuucc

SEQ ID NO: 582915 - RNA, 19 nt, Human
uugugcagaaucucaucuc

SEQ ID NO: 582916 - RNA, 24 nt, Human
uuugagacaaguucucacucuauc

SEQ ID NO: 582917 - RNA, 18 nt, Human
uuuguggagaccuccaau

SEQ ID NO: 582918 - RNA, 21 nt, Human
uuuucagaagugagaugggcu

SEQ ID NO: 582919 - RNA, 21 nt, Human
uuuuccucucagaacaagcuc

SEQ ID NO: 582920 - RNA, 21 nt, Human
aaacaaacaaaacacauuuuu

SEQ ID NO: 582921 - RNA, 24 nt, Human
aaaguccugggauuacaggcauga

SEQ ID NO: 582922 - RNA, 23 nt, Human
aacaguuaaaaacaaacaaaaca

SEQ ID NO: 582923 - RNA, 20 nt, Human
aaccagaaagacagggauuc

SEQ ID NO: 582924 - RNA, 24 nt, Human
aacgugcugagauuguaggcguga

SEQ ID NO: 582925 - RNA, 22 nt, Human
aaggagcacugaccagacagag

SEQ ID NO: 582926 - RNA, 22 nt, Human
acaaaaaugaaaaucuaguguc

SEQ ID NO: 582927 - RNA, 27 nt, Human
acagcagcuggugguacaaaauugggc

SEQ ID NO: 582928 - RNA, 19 nt, Human
acagcccccugugccagaa

SEQ ID NO: 582929 - RNA, 20 nt, Human
accagacagagagaaagcca

SEQ ID NO: 582930 - RNA, 24 nt, Human
accauguuggccaggauggucucg

SEQ ID NO: 582931 - RNA, 25 nt, Human
acccaccucggccucccaaaguccu

SEQ ID NO: 582932 - RNA, 18 nt, Human
acccccuccccacacccg

SEQ ID NO: 582933 - RNA, 18 nt, Human
accugaccuuagguuggu

SEQ ID NO: 582934 - RNA, 24 nt, Human
acucaucacaccagcagccaugcc

SEQ ID NO: 582935 - RNA, 24 nt, Human
acuguguuggccaggauggucuug

SEQ ID NO: 582936 - RNA, 20 nt, Human
agaaaccacccccauaacuc

SEQ ID NO: 582937 - RNA, 21 nt, Human
agaaaguaaagucaagucaag

SEQ ID NO: 582938 - RNA, 24 nt, Human
agaacagacaggcuacucccacug

SEQ ID NO: 582939 - RNA, 23 nt, Human
agaagguugggggucaaagcuaa

SEQ ID NO: 582940 - RNA, 23 nt, Human
agagcucuucuauguccccagcu

SEQ ID NO: 582941 - RNA, 20 nt, Human
agagggcuggagcccaaggc

SEQ ID NO: 582942 - RNA, 23 nt, Human
agcacagcuccucaguacuaccu

SEQ ID NO: 582943 - RNA, 23 nt, Human
agcacugaccagacagagagaaa

SEQ ID NO: 582944 - RNA, 21 nt, Human
agcggaacagaagccccacaa

SEQ ID NO: 582945 - RNA, 23 nt, Human
agcggaacagaagccccacaaga

SEQ ID NO: 582946 - RNA, 21 nt, Human
agcucauggggucagaagucc

SEQ ID NO: 582947 - RNA, 19 nt, Human
aggcagagggcuggagccc

SEQ ID NO: 582948 - RNA, 24 nt, Human
aggcaggaaaaacaccagcuccag

SEQ ID NO: 582949 - RNA, 20 nt, Human
aggcgcccaccaccacgccc

SEQ ID NO: 582950 - RNA, 25 nt, Human
aggcuggagugcaguggcacaaucu

SEQ ID NO: 582951 - RNA, 24 nt, Human
agggauucucccgccucagccucc

SEQ ID NO: 582952 - RNA, 19 nt, Human
aggugaugugucugucuag

SEQ ID NO: 582953 - RNA, 18 nt, Human
aguacaggccugcccagu

SEQ ID NO: 582954 - RNA, 18 nt, Human
aguagcugggauuacagg

SEQ ID NO: 582955 - RNA, 19 nt, Human
aguagcugggauuacaggc

SEQ ID NO: 582956 - RNA, 23 nt, Human
aguagcugggauuacaggcgccc

SEQ ID NO: 582957 - RNA, 20 nt, Human
agugcaguggcacaaucucg

SEQ ID NO: 582958 - RNA, 24 nt, Human
agugcaguggcacaaucucggcuc

SEQ ID NO: 582959 - RNA, 20 nt, Human
aguguaguggcacaaucucg

SEQ ID NO: 582960 - RNA, 24 nt, Human
aguguaguggcacaaucucgguuc

SEQ ID NO: 582961 - RNA, 24 nt, Human
auaaagucuuacuucagccagaag

SEQ ID NO: 582962 - RNA, 20 nt, Human
auauccuaaguuccagcuca

SEQ ID NO: 582963 - RNA, 20 nt, Human
aucugccaucgucacagagc

SEQ ID NO: 582964 - RNA, 24 nt, Human
augauccacccaccucggccuccc

SEQ ID NO: 582965 - RNA, 22 nt, Human
augcugcccucuggcagggggu

SEQ ID NO: 582966 - RNA, 18 nt, Human
augggguuucaccauguu

SEQ ID NO: 582967 - RNA, 22 nt, Human
augggguuucaccauguuggcc

SEQ ID NO: 582968 - RNA, 24 nt, Human
augggguuucaccauguuggccag

SEQ ID NO: 582969 - RNA, 24 nt, Human
augggguuucacuguguuggccag

SEQ ID NO: 582970 - RNA, 18 nt, Human
auucuccugccucagccu

SEQ ID NO: 582971 - RNA, 19 nt, Human
auugggaagaggacuucua

SEQ ID NO: 582972 - RNA, 24 nt, Human
caaaagcaucuaacccccuaaacc

SEQ ID NO: 582973 - RNA, 24 nt, Human
caaaguccugggauuacaggcaug

SEQ ID NO: 582974 - RNA, 20 nt, Human
caaccuccgccucccagguu

SEQ ID NO: 582975 - RNA, 24 nt, Human
caacgugcugagauuguaggcgug

SEQ ID NO: 582976 - RNA, 18 nt, Human
caagaugcacaucuugcu

SEQ ID NO: 582977 - RNA, 22 nt, Human
cacaaccaggguacacccaaau

SEQ ID NO: 582978 - RNA, 24 nt, Human
caccaagcccaguuaauuuuugua

SEQ ID NO: 582979 - RNA, 21 nt, Human
caccagcagccaugccuuugc

SEQ ID NO: 582980 - RNA, 18 nt, Human
caccauguuggccaggau

SEQ ID NO: 582981 - RNA, 22 nt, Human
caccauguuggccaggaugguc

SEQ ID NO: 582982 - RNA, 24 nt, Human
caccauguuggccaggauggucuc

SEQ ID NO: 582983 - RNA, 22 nt, Human
cacccaccucggccucccaaag

SEQ ID NO: 582984 - RNA, 23 nt, Human
cacccaccucggccucccaaagu

SEQ ID NO: 582985 - RNA, 19 nt, Human
caccccaugaauucacacc

SEQ ID NO: 582986 - RNA, 24 nt, Human
caccucggccucccaaaguccugg

SEQ ID NO: 582987 - RNA, 21 nt, Human
cacuacaaccuccgccuccca

SEQ ID NO: 582988 - RNA, 19 nt, Human
cacucaucacaccagcagc

SEQ ID NO: 582989 - RNA, 21 nt, Human
cacuggcagccaggcaagagg

SEQ ID NO: 582990 - RNA, 20 nt, Human
cacugggcucuguacacccu

SEQ ID NO: 582991 - RNA, 18 nt, Human
cacuguguuggccaggau

SEQ ID NO: 582992 - RNA, 21 nt, Human
cacuguguuggccaggauggu

SEQ ID NO: 582993 - RNA, 24 nt, Human
cacuguguuggccaggauggucuu

SEQ ID NO: 582994 - RNA, 21 nt, Human
cagaaaccacccccauaacuc

SEQ ID NO: 582995 - RNA, 18 nt, Human
cagagcucuucuaugucc

SEQ ID NO: 582996 - RNA, 20 nt, Human
cagccuccugaguagcuggg

SEQ ID NO: 582997 - RNA, 20 nt, Human
cagccuccugaguagcuggg

SEQ ID NO: 582998 - RNA, 19 nt, Human
cagcuccucaguacuaccu

SEQ ID NO: 582999 - RNA, 22 nt, Human
cagcuggugguacaaaauuggg

SEQ ID NO: 583000 - RNA, 22 nt, Human
caggaaaaacaccagcuccagg

SEQ ID NO: 583001 - RNA, 21 nt, Human
caggcgcccaccaccacgccc

SEQ ID NO: 583002 - RNA, 19 nt, Human
caucacaccagcagccaug

SEQ ID NO: 583003 - RNA, 21 nt, Human
caucugccaucgucacagagc

SEQ ID NO: 583004 - RNA, 18 nt, Human
cauucaaaagcaucuaac

SEQ ID NO: 583005 - RNA, 24 nt, Human
ccaaaguccugggauuacaggcau

SEQ ID NO: 583006 - RNA, 22 nt, Human
ccaacgugcugagauuguaggc

SEQ ID NO: 583007 - RNA, 22 nt, Human
ccaacgugcugagauuguaggc

SEQ ID NO: 583008 - RNA, 24 nt, Human
ccaacgugcugagauuguaggcgu

SEQ ID NO: 583009 - RNA, 19 nt, Human
ccagaaaguacaaaugggg

SEQ ID NO: 583010 - RNA, 23 nt, Human
ccagaacagacaggcuacuccca

SEQ ID NO: 583011 - RNA, 21 nt, Human
ccagacagagagaaagccaca

SEQ ID NO: 583012 - RNA, 21 nt, Human
ccagauggaauccagaaagua

SEQ ID NO: 583013 - RNA, 20 nt, Human
ccaggcagucagccguugcc

SEQ ID NO: 583014 - RNA, 24 nt, Human
cccaaaguccugggauuacaggca

SEQ ID NO: 583015 - RNA, 22 nt, Human
cccaauuaauuuuuguauuuuu

SEQ ID NO: 583016 - RNA, 24 nt, Human
cccaggaaaaggaauguagcagau

SEQ ID NO: 583017 - RNA, 21 nt, Human
cccagguucaagggauucucc

SEQ ID NO: 583018 - RNA, 23 nt, Human
cccaguuaauuuuuguauuuuua

SEQ ID NO: 583019 - RNA, 21 nt, Human
ccccuccacaguauuguguau

SEQ ID NO: 583020 - RNA, 19 nt, Human
ccccuccccacacccagcc

SEQ ID NO: 583021 - RNA, 24 nt, Human
cccgccucagccuccugaguagcu

SEQ ID NO: 583022 - RNA, 18 nt, Human
cccugggggcccugugag

SEQ ID NO: 583023 - RNA, 23 nt, Human
ccuaaaauaaacccugggggccc

SEQ ID NO: 583024 - RNA, 24 nt, Human
ccucccagguucaagggauucucc

SEQ ID NO: 583025 - RNA, 24 nt, Human
ccucuggguaagccacauaacccu

SEQ ID NO: 583026 - RNA, 22 nt, Human
ccugacuucaugauccacccac

SEQ ID NO: 583027 - RNA, 23 nt, Human
ccugaguagcugggauuacaggc

SEQ ID NO: 583028 - RNA, 23 nt, Human
ccugaguagcugggauuacaggc

SEQ ID NO: 583029 - RNA, 23 nt, Human
ccugaguagcugggauuacaggc

SEQ ID NO: 583030 - RNA, 24 nt, Human
ccugaguagcugggauuacaggcg

SEQ ID NO: 583031 - RNA, 19 nt, Human
ccugccucaccaucucugg

SEQ ID NO: 583032 - RNA, 23 nt, Human
ccugccucagccuccugaguagc

SEQ ID NO: 583033 - RNA, 19 nt, Human
ccuggcacauuggcaugaa

SEQ ID NO: 583034 - RNA, 19 nt, Human
ccuggccucgugauccacc

SEQ ID NO: 583035 - RNA, 21 nt, Human
ccuggccucgugauccaccug

SEQ ID NO: 583036 - RNA, 21 nt, Human
ccugugccagaacagacaggc

SEQ ID NO: 583037 - RNA, 23 nt, Human
ccuugcucuguugccaggcugga

SEQ ID NO: 583038 - RNA, 24 nt, Human
cgccucagccuccugaguagcugg

SEQ ID NO: 583039 - RNA, 21 nt, Human
cgccuggguggcugugaaggc

SEQ ID NO: 583040 - RNA, 20 nt, Human
cgucacagagcucuucuaug

SEQ ID NO: 583041 - RNA, 20 nt, Human
cuaaaauaaacccugggggc

SEQ ID NO: 583042 - RNA, 24 nt, Human
cuacaaccuccgccucccagguuc

SEQ ID NO: 583043 - RNA, 22 nt, Human
cuacccccuccccacacccagc

SEQ ID NO: 583044 - RNA, 22 nt, Human
cuagugucuucccuuguuuucu

SEQ ID NO: 583045 - RNA, 19 nt, Human
cucaaaugccaccuccuca

SEQ ID NO: 583046 - RNA, 24 nt, Human
cucacuacaaccuccgccucccag

SEQ ID NO: 583047 - RNA, 22 nt, Human
cucagagaggccuuccuggacc

SEQ ID NO: 583048 - RNA, 24 nt, Human
cucagccuccugaguagcugggau

SEQ ID NO: 583049 - RNA, 24 nt, Human
cucagccuccugaguagcugggau

SEQ ID NO: 583050 - RNA, 18 nt, Human
cuccugacuucaugaucc

SEQ ID NO: 583051 - RNA, 22 nt, Human
cuccugccucagccuccugagu

SEQ ID NO: 583052 - RNA, 21 nt, Human
cuccuggccucgugauccacc

SEQ ID NO: 583053 - RNA, 24 nt, Human
cuccuggccucgugauccaccugc

SEQ ID NO: 583054 - RNA, 21 nt, Human
cugaccagacagagagaaagc

SEQ ID NO: 583055 - RNA, 22 nt, Human
cugaguagcugggauuacaggc

SEQ ID NO: 583056 - RNA, 22 nt, Human
cugaguagcugggauuacaggc

SEQ ID NO: 583057 - RNA, 24 nt, Human
cugaguagcugggauuacaggcgu

SEQ ID NO: 583058 - RNA, 23 nt, Human
cugccucagccuccugaguagcu

SEQ ID NO: 583059 - RNA, 21 nt, Human
gaaacaccaauggaaauucca

SEQ ID NO: 583060 - RNA, 23 nt, Human
gaaaccacccccauaacucuggu

SEQ ID NO: 583061 - RNA, 21 nt, Human
gaacagacaggcuacucccac

SEQ ID NO: 583062 - RNA, 22 nt, Human
gacuucaugauccacccaccuc

SEQ ID NO: 583063 - RNA, 21 nt, Human
gagacggagccuugcucuguu

SEQ ID NO: 583064 - RNA, 20 nt, Human
gagaugggguuucaccaugu

SEQ ID NO: 583065 - RNA, 24 nt, Human
gagaugggguuucaccauguuggc

SEQ ID NO: 583066 - RNA, 18 nt, Human
gagcagagcaguggccgg

SEQ ID NO: 583067 - RNA, 19 nt, Human
gagcagagcaguggccggc

SEQ ID NO: 583068 - RNA, 21 nt, Human
gagggcuggagcccaaggcug

SEQ ID NO: 583069 - RNA, 20 nt, Human
gaguagcugggauuacaggc

SEQ ID NO: 583070 - RNA, 24 nt, Human
gaguagcugggauuacaggcgugc

SEQ ID NO: 583071 - RNA, 18 nt, Human
gauuacaggcaugagcca

SEQ ID NO: 583072 - RNA, 19 nt, Human
gauuacaggcaugagccac

SEQ ID NO: 583073 - RNA, 22 nt, Human
gauuacaggcaugagccacugc

SEQ ID NO: 583074 - RNA, 20 nt, Human
gcccaauuaauuuuuguauu

SEQ ID NO: 583075 - RNA, 22 nt, Human
gcccaguuaauuuuuguauuuu

SEQ ID NO: 583076 - RNA, 20 nt, Human
gccucagccuccugaguagc

SEQ ID NO: 583077 - RNA, 24 nt, Human
gccuugcucuguugccaggcugga

SEQ ID NO: 583078 - RNA, 18 nt, Human
gcucagucugguccuugg

SEQ ID NO: 583079 - RNA, 19 nt, Human
gcuggagugcaguggcaca

SEQ ID NO: 583080 - RNA, 18 nt, Human
ggagagguggggucugcu

SEQ ID NO: 583081 - RNA, 22 nt, Human
ggauuacaggcaugagccacug

SEQ ID NO: 583082 - RNA, 18 nt, Human
ggccucgugauccaccug

SEQ ID NO: 583083 - RNA, 22 nt, Human
ggccucgugauccaccugccuc

SEQ ID NO: 583084 - RNA, 24 nt, Human
gggauucucccgccucagccuccu

SEQ ID NO: 583085 - RNA, 19 nt, Human
gggcggugucuccgccuag

SEQ ID NO: 583086 - RNA, 22 nt, Human
gggguuucaccauguuggccag

SEQ ID NO: 583087 - RNA, 22 nt, Human
gggguuucacuguguuggccag

SEQ ID NO: 583088 - RNA, 23 nt, Human
gggguuucacuguguuggccagg

SEQ ID NO: 583089 - RNA, 18 nt, Human
ggguuucaccauguuggc

SEQ ID NO: 583090 - RNA, 18 nt, Human
ggguuucacuguguuggc

SEQ ID NO: 583091 - RNA, 20 nt, Human
ggucuugaucuccugacuuc

SEQ ID NO: 583092 - RNA, 24 nt, Human
gguuucaccauguuggccaggaug

SEQ ID NO: 583093 - RNA, 19 nt, Human
guagagaugggguuucacc

SEQ ID NO: 583094 - RNA, 21 nt, Human
guagagaugggguuucaccau

SEQ ID NO: 583095 - RNA, 22 nt, Human
guagagaugggguuucaccaug

SEQ ID NO: 583096 - RNA, 18 nt, Human
guagcugggauuacaggc

SEQ ID NO: 583097 - RNA, 18 nt, Human
guagcugggauuacaggc

SEQ ID NO: 583098 - RNA, 18 nt, Human
guagcugggauuacaggc

SEQ ID NO: 583099 - RNA, 20 nt, Human
guccuugggagagguggggu

SEQ ID NO: 583100 - RNA, 24 nt, Human
gucucgcucuguggccaggcugga

SEQ ID NO: 583101 - RNA, 24 nt, Human
gugauccaccugccucgaccuccc

SEQ ID NO: 583102 - RNA, 21 nt, Human
gugcugagauuguaggcguga

SEQ ID NO: 583103 - RNA, 18 nt, Human
guggaaugaaugaaugaa

SEQ ID NO: 583104 - RNA, 19 nt, Human
uaaaauaaacccugggggc

SEQ ID NO: 583105 - RNA, 20 nt, Human
uaaccccuccacaguauugu

SEQ ID NO: 583106 - RNA, 22 nt, Human
uaagugagugcuauuggacuug

SEQ ID NO: 583107 - RNA, 22 nt, Human
uaaguuccagcucaugggguca

SEQ ID NO: 583108 - RNA, 19 nt, Human
uaaucuauuucgcuuuccc

SEQ ID NO: 583109 - RNA, 22 nt, Human
uaauuuuuguauuuuuaguaga

SEQ ID NO: 583110 - RNA, 23 nt, Human
uaauuuuuguauuuuuguagaga

SEQ ID NO: 583111 - RNA, 22 nt, Human
uacacccucaaugcugcccucu

SEQ ID NO: 583112 - RNA, 23 nt, Human
uacaggcaugagccacugcgccc

SEQ ID NO: 583113 - RNA, 22 nt, Human
uacccccuccccacacccagcc

SEQ ID NO: 583114 - RNA, 21 nt, Human
uacuucuagaucagauauccu

SEQ ID NO: 583115 - RNA, 22 nt, Human
uagagaugggguuucaccaugu

SEQ ID NO: 583116 - RNA, 22 nt, Human
uagaugaaauuauuggccaauu

SEQ ID NO: 583117 - RNA, 20 nt, Human
uaguagacaugggguuucac

SEQ ID NO: 583118 - RNA, 23 nt, Human
uaguagacaugggguuucacugu

SEQ ID NO: 583119 - RNA, 24 nt, Human
uaguagacaugggguuucacugug

SEQ ID NO: 583120 - RNA, 18 nt, Human
ucacaaaguacaggccug

SEQ ID NO: 583121 - RNA, 24 nt, Human
ucaccauguuggccaggauggucu

SEQ ID NO: 583122 - RNA, 20 nt, Human
ucaccccaugaauucacacc

SEQ ID NO: 583123 - RNA, 19 nt, Human
ucacuacaaccuccgccuc

SEQ ID NO: 583124 - RNA, 24 nt, Human
ucacuacaaccuccgccucccagg

SEQ ID NO: 583125 - RNA, 25 nt, Human
ucacuacaaccuccgccucccaggu

SEQ ID NO: 583126 - RNA, 27 nt, Human
ucacuacaaccuccgccucccagguuc

SEQ ID NO: 583127 - RNA, 19 nt, Human
ucacugcaaccucugauuc

SEQ ID NO: 583128 - RNA, 28 nt, Human
ucacugcaaccucugauucggguccucc

SEQ ID NO: 583129 - RNA, 22 nt, Human
ucacugcaaccucugauucucc

SEQ ID NO: 583130 - RNA, 24 nt, Human
ucacugcaaccucugauucuccug

SEQ ID NO: 583131 - RNA, 23 nt, Human
ucagaccaagaugcacaucuugc

SEQ ID NO: 583132 - RNA, 20 nt, Human
ucagccuccugaguagcugg

SEQ ID NO: 583133 - RNA, 20 nt, Human
ucagccuccugaguagcugg

SEQ ID NO: 583134 - RNA, 18 nt, Human
ucagggacauuuguggca

SEQ ID NO: 583135 - RNA, 18 nt, Human
ucauggggucagaagucc

SEQ ID NO: 583136 - RNA, 24 nt, Human
uccaccugccucgaccucccaacg

SEQ ID NO: 583137 - RNA, 18 nt, Human
uccagaaaguacaaaugg

SEQ ID NO: 583138 - RNA, 20 nt, Human
uccaguguaaggcacuugag

SEQ ID NO: 583139 - RNA, 24 nt, Human
ucccaaaguccugggauuacaggc

SEQ ID NO: 583140 - RNA, 24 nt, Human
ucccaacgugcugagauuguaggc

SEQ ID NO: 583141 - RNA, 21 nt, Human
ucccagguucaagggauucuc

SEQ ID NO: 583142 - RNA, 24 nt, Human
ucccagguucaagggauucucccg

SEQ ID NO: 583143 - RNA, 23 nt, Human
ucccuaaaauaaacccugggggc

SEQ ID NO: 583144 - RNA, 24 nt, Human
uccugaguagcugggauuacaggc

SEQ ID NO: 583145 - RNA, 24 nt, Human
uccugaguagcugggauuacaggc

SEQ ID NO: 583146 - RNA, 24 nt, Human
ucucccgccucagccuccugagua

SEQ ID NO: 583147 - RNA, 21 nt, Human
ucucgcucuguggccaggcug

SEQ ID NO: 583148 - RNA, 22 nt, Human
ucucgcucuguggccaggcugg

SEQ ID NO: 583149 - RNA, 23 nt, Human
ucucgcucuguggccaggcugga

SEQ ID NO: 583150 - RNA, 23 nt, Human
ucucucucccuaaaauaaacccu

SEQ ID NO: 583151 - RNA, 24 nt, Human
ucugauucuccugccucagccucc

SEQ ID NO: 583152 - RNA, 21 nt, Human
ucugguuucugguacaguggg

SEQ ID NO: 583153 - RNA, 23 nt, Human
ucuguggccaggcuggaguguag

SEQ ID NO: 583154 - RNA, 18 nt, Human
ucuguugccaggcuggag

SEQ ID NO: 583155 - RNA, 23 nt, Human
ucuguugccaggcuggagugcag

SEQ ID NO: 583156 - RNA, 23 nt, Human
ugaaaaggcagagggcuggagcc

SEQ ID NO: 583157 - RNA, 18 nt, Human
ugaaucaccccaugaauu

SEQ ID NO: 583158 - RNA, 21 nt, Human
ugaaugaaugaaugauuagcc

SEQ ID NO: 583159 - RNA, 22 nt, Human
ugaaugaaugaaugauuagcca

SEQ ID NO: 583160 - RNA, 23 nt, Human
ugacagcagcuggugguacaaaa

SEQ ID NO: 583161 - RNA, 23 nt, Human
ugacccuccauauggaacagccc

SEQ ID NO: 583162 - RNA, 20 nt, Human
ugacuucaugauccacccac

SEQ ID NO: 583163 - RNA, 18 nt, Human
ugagauuguaggcgugag

SEQ ID NO: 583164 - RNA, 19 nt, Human
ugagauuguaggcgugagc

SEQ ID NO: 583165 - RNA, 20 nt, Human
ugagauuguaggcgugagcc

SEQ ID NO: 583166 - RNA, 21 nt, Human
ugagauuguaggcgugagccg

SEQ ID NO: 583167 - RNA, 25 nt, Human
ugagauuguaggcgugagccgcugc

SEQ ID NO: 583168 - RNA, 19 nt, Human
ugagucucgcucuguggcc

SEQ ID NO: 583169 - RNA, 24 nt, Human
ugauccacccaccucggccuccca

SEQ ID NO: 583170 - RNA, 18 nt, Human
ugauucuccugccucagc

SEQ ID NO: 583171 - RNA, 22 nt, Human
ugauucuccugccucagccucc

SEQ ID NO: 583172 - RNA, 21 nt, Human
ugccaggcuggagugcagugg

SEQ ID NO: 583173 - RNA, 23 nt, Human
ugccaggcuggagugcaguggca

SEQ ID NO: 583174 - RNA, 24 nt, Human
ugccucagccuccugaguagcugg

SEQ ID NO: 583175 - RNA, 24 nt, Human
ugccucgaccucccaacgugcuga

SEQ ID NO: 583176 - RNA, 18 nt, Human
uggaaggaacgccugggu

SEQ ID NO: 583177 - RNA, 19 nt, Human
uggaaggaacgccugggug

SEQ ID NO: 583178 - RNA, 21 nt, Human
uggaaggaacgccuggguggc

SEQ ID NO: 583179 - RNA, 18 nt, Human
uggaaugaaugaaugaau

SEQ ID NO: 583180 - RNA, 23 nt, Human
uggagugcaguggcacaaucucg

SEQ ID NO: 583181 - RNA, 24 nt, Human
uggagugcaguggcacaaucucgg

SEQ ID NO: 583182 - RNA, 23 nt, Human
uggaguguaguggcacaaucucg

SEQ ID NO: 583183 - RNA, 24 nt, Human
uggaguguaguggcacaaucucgg

SEQ ID NO: 583184 - RNA, 24 nt, Human
uggcacaaucucggcucacuacaa

SEQ ID NO: 583185 - RNA, 24 nt, Human
uggcacaaucucgguucacugcaa

SEQ ID NO: 583186 - RNA, 23 nt, Human
uggcaugaacaaacaguuaaaaa

SEQ ID NO: 583187 - RNA, 24 nt, Human
uggccaggauggucucgaucuccu

SEQ ID NO: 583188 - RNA, 24 nt, Human
uggccaggauggucuugaucuccu

SEQ ID NO: 583189 - RNA, 24 nt, Human
uggccaggcuggaguguaguggca

SEQ ID NO: 583190 - RNA, 21 nt, Human
ugggaagaggacuucuagagg

SEQ ID NO: 583191 - RNA, 21 nt, Human
ugggaagaggacuucuagagg

SEQ ID NO: 583192 - RNA, 18 nt, Human
ugggauuacaggcaugag

SEQ ID NO: 583193 - RNA, 19 nt, Human
ugggauuacaggcaugagc

SEQ ID NO: 583194 - RNA, 21 nt, Human
ugggauuacaggcaugagcca

SEQ ID NO: 583195 - RNA, 22 nt, Human
ugggauuacaggcaugagccac

SEQ ID NO: 583196 - RNA, 22 nt, Human
ugggauuacaggcaugagccac

SEQ ID NO: 583197 - RNA, 23 nt, Human
ugggauuacaggcaugagccacu

SEQ ID NO: 583198 - RNA, 24 nt, Human
ugggauuacaggcaugagccacug

SEQ ID NO: 583199 - RNA, 26 nt, Human
ugggauuacaggcaugagccacugcg

SEQ ID NO: 583200 - RNA, 21 nt, Human
ugggauuacaggcgcccacca

SEQ ID NO: 583201 - RNA, 24 nt, Human
ugggauuacaggcgcccaccacca

SEQ ID NO: 583202 - RNA, 21 nt, Human
ugggauuacaggcgugcacca

SEQ ID NO: 583203 - RNA, 22 nt, Human
ugggauuacaggcgugcaccac

SEQ ID NO: 583204 - RNA, 24 nt, Human
ugggauuacaggcgugcaccacca

SEQ ID NO: 583205 - RNA, 21 nt, Human
ugggggcccugugaguccugc

SEQ ID NO: 583206 - RNA, 24 nt, Human
ugggguuucaccauguuggccagg

SEQ ID NO: 583207 - RNA, 24 nt, Human
ugggguuucacuguguuggccagg

SEQ ID NO: 583208 - RNA, 24 nt, Human
uggguaagccacauaaccccucca

SEQ ID NO: 583209 - RNA, 21 nt, Human
uggguggcugugaaggccagu

SEQ ID NO: 583210 - RNA, 23 nt, Human
uggguggcugugaaggccaguuu

SEQ ID NO: 583211 - RNA, 24 nt, Human
uguagagaugggguuucaccaugu

SEQ ID NO: 583212 - RNA, 21 nt, Human
uguauuuuuaguagacauggg

SEQ ID NO: 583213 - RNA, 23 nt, Human
ugucuaguuccuagaacagaacc

SEQ ID NO: 583214 - RNA, 19 nt, Human
ugugagcagagcaguggcc

SEQ ID NO: 583215 - RNA, 18 nt, Human
uuaguagacaugggguuu

SEQ ID NO: 583216 - RNA, 21 nt, Human
uuaguagacaugggguuucac

SEQ ID NO: 583217 - RNA, 21 nt, Human
uuaguagacaugggguuucac

SEQ ID NO: 583218 - RNA, 24 nt, Human
uuaguagacaugggguuucacugu

SEQ ID NO: 583219 - RNA, 23 nt, Human
uucaagggauucucccgccucag

SEQ ID NO: 583220 - RNA, 18 nt, Human
uucauggggaaaggaaga

SEQ ID NO: 583221 - RNA, 21 nt, Human
uucccaugaaucaccccauga

SEQ ID NO: 583222 - RNA, 21 nt, Human
uugccaggcuggagugcagug

SEQ ID NO: 583223 - RNA, 21 nt, Human
uugcuaucugggcaccucugg

SEQ ID NO: 583224 - RNA, 24 nt, Human
uuguagagaugggguuucaccaug

SEQ ID NO: 583225 - RNA, 23 nt, Human
uuguauuuuuaguagacaugggg

SEQ ID NO: 583226 - RNA, 19 nt, Human
uuucaccauguuggccagg

SEQ ID NO: 583227 - RNA, 20 nt, Human
uuucaccauguuggccagga

SEQ ID NO: 583228 - RNA, 19 nt, Human
uuucacuguguuggccagg

SEQ ID NO: 583229 - RNA, 19 nt, Human
uuucuacccccuccccaca

SEQ ID NO: 583230 - RNA, 24 nt, Human
uuuguagagaugggguuucaccau

SEQ ID NO: 583231 - RNA, 19 nt, Human
uuuuguauuuuuguagaga

SEQ ID NO: 583232 - RNA, 24 nt, Human
uuuuuaguagacaugggguuucac

SEQ ID NO: 583233 - RNA, 23 nt, Human
uuuuuguagagaugggguuucac

SEQ ID NO: 583234 - RNA, 18 nt, Human
uuuuuguauuuuuaguag

SEQ ID NO: 583235 - RNA, 21 nt, Human
uuuuuguauuuuuaguagaca

SEQ ID NO: 583236 - RNA, 18 nt, Human
aaaaaccuaaauagauaa

SEQ ID NO: 583237 - RNA, 22 nt, Human
aaagucccaggcaaacugagac

SEQ ID NO: 583238 - RNA, 24 nt, Human
aaagugcugggauuacagguguga

SEQ ID NO: 583239 - RNA, 22 nt, Human
aaaucuaacaucccuguuuuug

SEQ ID NO: 583240 - RNA, 23 nt, Human
aagaaagucaccccuucaggcac

SEQ ID NO: 583241 - RNA, 21 nt, Human
aagugcccaugugccacuacc

SEQ ID NO: 583242 - RNA, 18 nt, Human
aagugcugggauuacagg

SEQ ID NO: 583243 - RNA, 19 nt, Human
aagugcugggauuacaggu

SEQ ID NO: 583244 - RNA, 23 nt, Human
aaugaguacauacuuaaaauuca

SEQ ID NO: 583245 - RNA, 21 nt, Human
acacuacuggcuaaccagccc

SEQ ID NO: 583246 - RNA, 20 nt, Human
acauaacauuugcccauucu

SEQ ID NO: 583247 - RNA, 22 nt, Human
accacaaaguuugagcuugcca

SEQ ID NO: 583248 - RNA, 24 nt, Human
accauguuggccaggcuggucucg

SEQ ID NO: 583249 - RNA, 22 nt, Human
acccauuaucucaguuugccca

SEQ ID NO: 583250 - RNA, 23 nt, Human
acgagccaugccagugggaacaa

SEQ ID NO: 583251 - RNA, 18 nt, Human
acgggguuucaccauguu

SEQ ID NO: 583252 - RNA, 23 nt, Human
acgggguuucaccauguuggcca

SEQ ID NO: 583253 - RNA, 24 nt, Human
acgggguuucaccauguuggccag

SEQ ID NO: 583254 - RNA, 23 nt, Human
agagugaauguucaauuucuuug

SEQ ID NO: 583255 - RNA, 23 nt, Human
agagugaauguucaauuucuuug

SEQ ID NO: 583256 - RNA, 19 nt, Human
agccaugccagugggaaca

SEQ ID NO: 583257 - RNA, 20 nt, Human
aggaaggagaagcugugguc

SEQ ID NO: 583258 - RNA, 20 nt, Human
aggaagguggcgauggcaau

SEQ ID NO: 583259 - RNA, 22 nt, Human
aggccacuguccaugagccucc

SEQ ID NO: 583260 - RNA, 19 nt, Human
agggaaaagucauuuggaa

SEQ ID NO: 583261 - RNA, 18 nt, Human
agguggcgauggcaauga

SEQ ID NO: 583262 - RNA, 23 nt, Human
aggugugagccacugugcccggc

SEQ ID NO: 583263 - RNA, 18 nt, Human
aguagcugggauuacagg

SEQ ID NO: 583264 - RNA, 24 nt, Human
agugcaauggcauggucucggcuc

SEQ ID NO: 583265 - RNA, 24 nt, Human
agugccauccauauaugcagcagc

SEQ ID NO: 583266 - RNA, 18 nt, Human
auagaaccucugaaaacu

SEQ ID NO: 583267 - RNA, 20 nt, Human
aucaaguacuguaauggaac

SEQ ID NO: 583268 - RNA, 23 nt, Human
augaaaccaugaaacaugacacu

SEQ ID NO: 583269 - RNA, 24 nt, Human
caaaaaaagcuuaauaaauagaaa

SEQ ID NO: 583270 - RNA, 24 nt, Human
caaaaaaagcuuaauaaauagaaa

SEQ ID NO: 583271 - RNA, 24 nt, Human
caaaaagagcuuaauaaauagaaa

SEQ ID NO: 583272 - RNA, 21 nt, Human
caaacaauucuccugccucag

SEQ ID NO: 583273 - RNA, 24 nt, Human
caaagugcugggauuacaggugug

SEQ ID NO: 583274 - RNA, 23 nt, Human
cacaguacauagaaccucugaag

SEQ ID NO: 583275 - RNA, 21 nt, Human
caccagggccugccacaauga

SEQ ID NO: 583276 - RNA, 24 nt, Human
caccaugcccagcuaauuuuugua

SEQ ID NO: 583277 - RNA, 21 nt, Human
caccauguuggccaggcuggu

SEQ ID NO: 583278 - RNA, 24 nt, Human
caccauguuggccaggcuggucuc

SEQ ID NO: 583279 - RNA, 27 nt, Human
caccauguuggccaggcuggucucgaa

SEQ ID NO: 583280 - RNA, 23 nt, Human
caccugccucggccucccaaagu

SEQ ID NO: 583281 - RNA, 23 nt, Human
cagcauuccugacaugcugacca

SEQ ID NO: 583282 - RNA, 19 nt, Human
cagcuucuagcucaguccu

SEQ ID NO: 583283 - RNA, 20 nt, Human
caggcacccgccaccaugcc

SEQ ID NO: 583284 - RNA, 23 nt, Human
cauaccuccuacgagccaugcca

SEQ ID NO: 583285 - RNA, 24 nt, Human
cauguuggccaggcuggucucgaa

SEQ ID NO: 583286 - RNA, 19 nt, Human
cauuuaaaugcaagccacu

SEQ ID NO: 583287 - RNA, 21 nt, Human
ccaaagugcugggauuacagg

SEQ ID NO: 583288 - RNA, 21 nt, Human
ccaaagugcugggauuacagg

SEQ ID NO: 583289 - RNA, 24 nt, Human
ccaaagugcugggauuacaggugu

SEQ ID NO: 583290 - RNA, 20 nt, Human
ccaggguucaaacaauucuc

SEQ ID NO: 583291 - RNA, 23 nt, Human
cccgaguagcugggauuacaggc

SEQ ID NO: 583292 - RNA, 24 nt, Human
cccgaguagcugggauuacaggca

SEQ ID NO: 583293 - RNA, 21 nt, Human
cccuaggccugcuacccacac

SEQ ID NO: 583294 - RNA, 26 nt, Human
cccugcucuucagcugcgugcuguug

SEQ ID NO: 583295 - RNA, 23 nt, Human
ccgaguagcugggauuacaggca

SEQ ID NO: 583296 - RNA, 24 nt, Human
ccuccaggguucaaacaauucucc

SEQ ID NO: 583297 - RNA, 19 nt, Human
ccucuaggcauucuggaag

SEQ ID NO: 583298 - RNA, 19 nt, Human
ccugacaucgugauccacc

SEQ ID NO: 583299 - RNA, 28 nt, Human
ccugggucacucccuacccucuaaggag

SEQ ID NO: 583300 - RNA, 23 nt, Human
cgccgagcgcucucgcuggcucc

SEQ ID NO: 583301 - RNA, 19 nt, Human
cggcuaaaccuaacaaagu

SEQ ID NO: 583302 - RNA, 21 nt, Human
cgguagaaauaaugguucaug

SEQ ID NO: 583303 - RNA, 22 nt, Human
cuaaaaggugggaccagaaaag

SEQ ID NO: 583304 - RNA, 26 nt, Human
cuaccacccauugaucacagugcuuu

SEQ ID NO: 583305 - RNA, 20 nt, Human
cuaggccugcuacccacacu

SEQ ID NO: 583306 - RNA, 23 nt, Human
cucagucucccgaguagcuggga

SEQ ID NO: 583307 - RNA, 21 nt, Human
cuccauccgacuuugggggcu

SEQ ID NO: 583308 - RNA, 23 nt, Human
cucccucggccgggaaacagccc

SEQ ID NO: 583309 - RNA, 24 nt, Human
cuccugacaucgugauccaccugc

SEQ ID NO: 583310 - RNA, 19 nt, Human
cucguucuuaacuugaugg

SEQ ID NO: 583311 - RNA, 22 nt, Human
cucuagacuccugacgggcccc

SEQ ID NO: 583312 - RNA, 25 nt, Human
cucugucgcccaggcuggagugcaa

SEQ ID NO: 583313 - RNA, 24 nt, Human
cugcaacuuccgccuccaggguuc

SEQ ID NO: 583314 - RNA, 19 nt, Human
cugcaugguguacuuaaag

SEQ ID NO: 583315 - RNA, 25 nt, Human
cugccaccagggccugccacaauga

SEQ ID NO: 583316 - RNA, 23 nt, Human
cugccucagucucccgaguagcu

SEQ ID NO: 583317 - RNA, 23 nt, Human
cugccucggccucccaaagugcu

SEQ ID NO: 583318 - RNA, 23 nt, Human
cugcgugcuguuggccucugcuc

SEQ ID NO: 583319 - RNA, 24 nt, Human
cugcucugucgcccaggcuggagu

SEQ ID NO: 583320 - RNA, 19 nt, Human
cuggagugcaauggcaugg

SEQ ID NO: 583321 - RNA, 22 nt, Human
cuguuuugaugaugcuaccuuu

SEQ ID NO: 583322 - RNA, 20 nt, Human
cuuuuguucuuuggaacugu

SEQ ID NO: 583323 - RNA, 22 nt, Human
gacaucgugauccaccugccuc

SEQ ID NO: 583324 - RNA, 24 nt, Human
gacaucgugauccaccugccucgg

SEQ ID NO: 583325 - RNA, 24 nt, Human
gagacgggguuucaccauguuggc

SEQ ID NO: 583326 - RNA, 25 nt, Human
gaguagcugggauuacaggcacccg

SEQ ID NO: 583327 - RNA, 21 nt, Human
gagucacucucuuguagggcg

SEQ ID NO: 583328 - RNA, 20 nt, Human
gagugcaauggcauggucuc

SEQ ID NO: 583329 - RNA, 22 nt, Human
gauuacaggcacccgccaccau

SEQ ID NO: 583330 - RNA, 18 nt, Human
gauuacaggugugagcca

SEQ ID NO: 583331 - RNA, 21 nt, Human
gauuacaggugugagccacug

SEQ ID NO: 583332 - RNA, 24 nt, Human
gauuacaggugugagccacugugc

SEQ ID NO: 583333 - RNA, 23 nt, Human
gauugcauuaaagguuuguauuc

SEQ ID NO: 583334 - RNA, 21 nt, Human
gccacaaugacaugcuuugcc

SEQ ID NO: 583335 - RNA, 22 nt, Human
gcccagcuaauuuuuguauuuu

SEQ ID NO: 583336 - RNA, 23 nt, Human
gcccaggcuggagugcaauggca

SEQ ID NO: 583337 - RNA, 24 nt, Human
gcccaggcuggagugcaauggcau

SEQ ID NO: 583338 - RNA, 24 nt, Human
gccucagucucccgaguagcuggg

SEQ ID NO: 583339 - RNA, 26 nt, Human
gcuccauccgacuuugggggcugagu

SEQ ID NO: 583340 - RNA, 19 nt, Human
gcucucguucuuaacuuga

SEQ ID NO: 583341 - RNA, 19 nt, Human
gcugcagcuuauaaaaacc

SEQ ID NO: 583342 - RNA, 21 nt, Human
gcugcagcuuauaaaaaccua

SEQ ID NO: 583343 - RNA, 19 nt, Human
gcuggagugcaauggcaug

SEQ ID NO: 583344 - RNA, 20 nt, Human
ggcgauggcaaugaagaccc

SEQ ID NO: 583345 - RNA, 22 nt, Human
gggaaacagcccagcgccgagc

SEQ ID NO: 583346 - RNA, 25 nt, Human
gggccccugcuugucaagacccguc

SEQ ID NO: 583347 - RNA, 23 nt, Human
gggguuucaccauguuggccagg

SEQ ID NO: 583348 - RNA, 22 nt, Human
ggguuucaccauguuggccagg

SEQ ID NO: 583349 - RNA, 23 nt, Human
guagagacgggguuucaccaugu

SEQ ID NO: 583350 - RNA, 18 nt, Human
guagcugggauuacaggc

SEQ ID NO: 583351 - RNA, 20 nt, Human
gucuuugucagugcuguucu

SEQ ID NO: 583352 - RNA, 24 nt, Human
gugauccaccugccucggccuccc

SEQ ID NO: 583353 - RNA, 26 nt, Human
uaaaaaccuaaauagauaacacugaa

SEQ ID NO: 583354 - RNA, 27 nt, Human
uaaaacaaauguuuacacaauaaauac

SEQ ID NO: 583355 - RNA, 18 nt, Human
uaaaccuaacaaaguccc

SEQ ID NO: 583356 - RNA, 28 nt, Human
uaaauagauaacacugauuacauaacau

SEQ ID NO: 583357 - RNA, 24 nt, Human
uaauuuuuguauuuuuaguagaga

SEQ ID NO: 583358 - RNA, 24 nt, Human
uacaggcacccgccaccaugccca

SEQ ID NO: 583359 - RNA, 23 nt, Human
uacaggugugagccacugugccc

SEQ ID NO: 583360 - RNA, 23 nt, Human
uacaggugugagccacugugccc

SEQ ID NO: 583361 - RNA, 22 nt, Human
uagagacgggguuucaccaugu

SEQ ID NO: 583362 - RNA, 24 nt, Human
uaguagagacgggguuucaccaug

SEQ ID NO: 583363 - RNA, 21 nt, Human
uaucggguggugacuccucca

SEQ ID NO: 583364 - RNA, 24 nt, Human
uaucucaguuugcccagacugagg

SEQ ID NO: 583365 - RNA, 19 nt, Human
uaugaagccacaaauacag

SEQ ID NO: 583366 - RNA, 26 nt, Human
uauucacuggaagaggagccuguggg

SEQ ID NO: 583367 - RNA, 22 nt, Human
ucaauuagaaaaaggaacccua

SEQ ID NO: 583368 - RNA, 24 nt, Human
ucaauuagaucaaaguuucccuga

SEQ ID NO: 583369 - RNA, 23 nt, Human
ucacugcaacuuccgccuccagg

SEQ ID NO: 583370 - RNA, 24 nt, Human
ucacugcaacuuccgccuccaggg

SEQ ID NO: 583371 - RNA, 25 nt, Human
ucacugcaacuuccgccuccagggu

SEQ ID NO: 583372 - RNA, 27 nt, Human
ucacugcaacuuccgccuccaggguuc

SEQ ID NO: 583373 - RNA, 23 nt, Human
ucagucucccgaguagcugggau

SEQ ID NO: 583374 - RNA, 21 nt, Human
ucaugcacaaauuccuuaccu

SEQ ID NO: 583375 - RNA, 24 nt, Human
ucauucuaagcucuggcccgguag

SEQ ID NO: 583376 - RNA, 24 nt, Human
uccaggguucaaacaauucuccug

SEQ ID NO: 583377 - RNA, 23 nt, Human
ucccaaagugcugggauuacagg

SEQ ID NO: 583378 - RNA, 24 nt, Human
ucccgaguagcugggauuacaggc

SEQ ID NO: 583379 - RNA, 19 nt, Human
uccgugccucuccccuccc

SEQ ID NO: 583380 - RNA, 23 nt, Human
uccugcucugucgcccaggcugg

SEQ ID NO: 583381 - RNA, 24 nt, Human
uccugcucugucgcccaggcugga

SEQ ID NO: 583382 - RNA, 22 nt, Human
uccugugacuucagaauuucuc

SEQ ID NO: 583383 - RNA, 18 nt, Human
ucgcccaggcuggagugc

SEQ ID NO: 583384 - RNA, 23 nt, Human
ucuaaauugcugacugaggauug

SEQ ID NO: 583385 - RNA, 22 nt, Human
ucuacucuuuuuguuuccagaa

SEQ ID NO: 583386 - RNA, 20 nt, Human
ucuagagaagggaaaaguca

SEQ ID NO: 583387 - RNA, 22 nt, Human
ucuagagaagggaaaagucauu

SEQ ID NO: 583388 - RNA, 22 nt, Human
ucucccauuucugaagaaaguc

SEQ ID NO: 583389 - RNA, 24 nt, Human
ucucuugggcuuuuauaacucucc

SEQ ID NO: 583390 - RNA, 21 nt, Human
ucugcauacacauaccccaga

SEQ ID NO: 583391 - RNA, 24 nt, Human
ucugucgcccaggcuggagugcaa

SEQ ID NO: 583392 - RNA, 24 nt, Human
ugaaaugccuuugcacagcuagau

SEQ ID NO: 583393 - RNA, 21 nt, Human
ugaaucacaguacauagaacc

SEQ ID NO: 583394 - RNA, 19 nt, Human
ugacccugaauuuauuccu

SEQ ID NO: 583395 - RNA, 18 nt, Human
ugacuaaaaccuaggcuc

SEQ ID NO: 583396 - RNA, 26 nt, Human
ugaguacauacuuaaaauucagacaa

SEQ ID NO: 583397 - RNA, 21 nt, Human
ugccaaaguuugacuaaaacc

SEQ ID NO: 583398 - RNA, 19 nt, Human
ugccaugcauccucaccug

SEQ ID NO: 583399 - RNA, 23 nt, Human
ugccucagucucccgaguagcug

SEQ ID NO: 583400 - RNA, 24 nt, Human
ugccucagucucccgaguagcugg

SEQ ID NO: 583401 - RNA, 21 nt, Human
ugccucggccucccaaagugc

SEQ ID NO: 583402 - RNA, 24 nt, Human
ugccucggccucccaaagugcugg

SEQ ID NO: 583403 - RNA, 24 nt, Human
ugcuccauccgacuuugggggcug

SEQ ID NO: 583404 - RNA, 24 nt, Human
ugcucugucgcccaggcuggagug

SEQ ID NO: 583405 - RNA, 24 nt, Human
ugcugggauuacaggugugagcca

SEQ ID NO: 583406 - RNA, 20 nt, Human
uggaacuguagacuuuggaa

SEQ ID NO: 583407 - RNA, 18 nt, Human
uggaggaagguggcgaug

SEQ ID NO: 583408 - RNA, 21 nt, Human
uggaguaccaugcagaugaug

SEQ ID NO: 583409 - RNA, 20 nt, Human
uggagugcaauggcaugguc

SEQ ID NO: 583410 - RNA, 24 nt, Human
uggagugcaauggcauggucucgg

SEQ ID NO: 583411 - RNA, 19 nt, Human
uggcauggucucggcucac

SEQ ID NO: 583412 - RNA, 24 nt, Human
uggccaggcuggucucgaacuccu

SEQ ID NO: 583413 - RNA, 21 nt, Human
ugggauuacaggcacccgcca

SEQ ID NO: 583414 - RNA, 22 nt, Human
ugggauuacaggcacccgccac

SEQ ID NO: 583415 - RNA, 24 nt, Human
ugggauuacaggcacccgccacca

SEQ ID NO: 583416 - RNA, 25 nt, Human
ugggauuacaggcacccgccaccau

SEQ ID NO: 583417 - RNA, 21 nt, Human
ugggauuacaggugugagcca

SEQ ID NO: 583418 - RNA, 22 nt, Human
ugggauuacaggugugagccac

SEQ ID NO: 583419 - RNA, 22 nt, Human
ugggauuacaggugugagccac

SEQ ID NO: 583420 - RNA, 22 nt, Human
ugggauuacaggugugagccac

SEQ ID NO: 583421 - RNA, 24 nt, Human
ugggauuacaggugugagccacug

SEQ ID NO: 583422 - RNA, 19 nt, Human
uguacagaaagucaugcug

SEQ ID NO: 583423 - RNA, 23 nt, Human
uguaggaaggagaagcugugguc

SEQ ID NO: 583424 - RNA, 21 nt, Human
uguauuuuuaguagagacggg

SEQ ID NO: 583425 - RNA, 20 nt, Human
ugucagugcuguucuagagg

SEQ ID NO: 583426 - RNA, 20 nt, Human
ugucgcccaggcuggagugc

SEQ ID NO: 583427 - RNA, 20 nt, Human
uuaauauauucacuggaaga

SEQ ID NO: 583428 - RNA, 18 nt, Human
uuaguagagacgggguuu

SEQ ID NO: 583429 - RNA, 22 nt, Human
uuaguagagacgggguuucacc

SEQ ID NO: 583430 - RNA, 24 nt, Human
uuaguagagacgggguuucaccau

SEQ ID NO: 583431 - RNA, 19 nt, Human
uuauuuuuaaaaggaagaa

SEQ ID NO: 583432 - RNA, 25 nt, Human
uucaaacaauucuccugccucaguc

SEQ ID NO: 583433 - RNA, 19 nt, Human
uucaaagagccugggucac

SEQ ID NO: 583434 - RNA, 20 nt, Human
uucaaagagccugggucacu

SEQ ID NO: 583435 - RNA, 21 nt, Human
uucacuggaagaggagccugu

SEQ ID NO: 583436 - RNA, 26 nt, Human
uucagcugcgugcuguuggccucugc

SEQ ID NO: 583437 - RNA, 19 nt, Human
uuccaaagacaguuuggga

SEQ ID NO: 583438 - RNA, 25 nt, Human
uuccugugacuucagaauuucucuu

SEQ ID NO: 583439 - RNA, 21 nt, Human
uugagauggaguccugcucug

SEQ ID NO: 583440 - RNA, 22 nt, Human
uugggacaggugcagagaaaaa

SEQ ID NO: 583441 - RNA, 20 nt, Human
uuggucacccuaccacuauu

SEQ ID NO: 583442 - RNA, 23 nt, Human
uuguauuuuuaguagagacgggg

SEQ ID NO: 583443 - RNA, 22 nt, Human
uuuauuccuuguuuccuugcuc

SEQ ID NO: 583444 - RNA, 24 nt, Human
uuucaccauguuggccaggcuggu

SEQ ID NO: 583445 - RNA, 23 nt, Human
uuucuuugaaaugccuuugcaca

SEQ ID NO: 583446 - RNA, 23 nt, Human
uuucuuugaaaugccuuugcaca

SEQ ID NO: 583447 - RNA, 18 nt, Human
uuugaaaugccuuugcac

SEQ ID NO: 583448 - RNA, 18 nt, Human
uuugaaaugccuuugcac

SEQ ID NO: 583449 - RNA, 21 nt, Human
uuugucagugcuguucuagag

SEQ ID NO: 583450 - RNA, 21 nt, Human
uuuuguauuuuuaguagagac

SEQ ID NO: 583451 - RNA, 24 nt, Human
uuuuuaguagagacgggguuucac

SEQ ID NO: 583452 - RNA, 20 nt, Human
uuuuuguauuuuuaguagag

SEQ ID NO: 583453 - RNA, 18 nt, Human
aaaaagaacugauuuaaa

SEQ ID NO: 583454 - RNA, 25 nt, Human
aaaacauaaaacaauauaagaaaau

SEQ ID NO: 583455 - RNA, 25 nt, Human
aaacaagaaaacauaaaacaauaua

SEQ ID NO: 583456 - RNA, 22 nt, Human
aaacaauauaagaaaaugccag

SEQ ID NO: 583457 - RNA, 21 nt, Human
aaacacucuuuaccuccccuu

SEQ ID NO: 583458 - RNA, 19 nt, Human
aagcagggcucuacagccu

SEQ ID NO: 583459 - RNA, 23 nt, Human
aaggcauuacaaaaaaaccccaa

SEQ ID NO: 583460 - RNA, 19 nt, Human
acaaaaaaaccccaaagaa

SEQ ID NO: 583461 - RNA, 26 nt, Human
acaagagaaaaacaagaaaacauaaa

SEQ ID NO: 583462 - RNA, 19 nt, Human
acaugaaucuacuaccaac

SEQ ID NO: 583463 - RNA, 24 nt, Human
accccaaagaaaauaagauaaaaa

SEQ ID NO: 583464 - RNA, 20 nt, Human
acgcacaguuagcaacuugc

SEQ ID NO: 583465 - RNA, 25 nt, Human
acugggucugggagagcagaggugg

SEQ ID NO: 583466 - RNA, 21 nt, Human
agaaaaacaagaaaacauaaa

SEQ ID NO: 583467 - RNA, 23 nt, Human
agaagggaagcagggcucuacag

SEQ ID NO: 583468 - RNA, 25 nt, Human
aggucagagaagggaagcagggcuc

SEQ ID NO: 583469 - RNA, 19 nt, Human
aucuuccugcaguucuguu

SEQ ID NO: 583470 - RNA, 21 nt, Human
augccagauauuuacagccuc

SEQ ID NO: 583471 - RNA, 21 nt, Human
caacugcaugaaagagaugau

SEQ ID NO: 583472 - RNA, 22 nt, Human
cagaugaagcuggugccagcca

SEQ ID NO: 583473 - RNA, 27 nt, Human
ccuccccuugcaaaaaacagaggcugg

SEQ ID NO: 583474 - RNA, 20 nt, Human
cgggcggcggcggcgccccc

SEQ ID NO: 583475 - RNA, 21 nt, Human
cuaaacacucuuuaccucccc

SEQ ID NO: 583476 - RNA, 18 nt, Human
gaacaaacuacucaaagu

SEQ ID NO: 583477 - RNA, 23 nt, Human
gagaaaaacaagaaaacauaaaa

SEQ ID NO: 583478 - RNA, 19 nt, Human
gauaaaaacaacaagagaa

SEQ ID NO: 583479 - RNA, 24 nt, Human
gggagacauucauucuaagaaggg

SEQ ID NO: 583480 - RNA, 20 nt, Human
gggcugaggcgggcggcggc

SEQ ID NO: 583481 - RNA, 21 nt, Human
gguaucacagaugaagcuggu

SEQ ID NO: 583482 - RNA, 21 nt, Human
ggugaauaccagcaaagagag

SEQ ID NO: 583483 - RNA, 24 nt, Human
uaaaacaaaaccagagaacauuuc

SEQ ID NO: 583484 - RNA, 19 nt, Human
uaaaguaagacccaauguc

SEQ ID NO: 583485 - RNA, 21 nt, Human
uaagaaaaugccagauauuua

SEQ ID NO: 583486 - RNA, 21 nt, Human
uaagaagggagaaacgcacag

SEQ ID NO: 583487 - RNA, 18 nt, Human
uaagauagguaauuacua

SEQ ID NO: 583488 - RNA, 20 nt, Human
uacaaaaaaaccccaaagaa

SEQ ID NO: 583489 - RNA, 20 nt, Human
uaccuccccuugcaaaaaac

SEQ ID NO: 583490 - RNA, 24 nt, Human
uagcaacuugcugggauuacaaca

SEQ ID NO: 583491 - RNA, 19 nt, Human
uagguaauuacuaaacacu

SEQ ID NO: 583492 - RNA, 19 nt, Human
uauacaaaagaauaaaaag

SEQ ID NO: 583493 - RNA, 19 nt, Human
ucaccacauuuagaacaaa

SEQ ID NO: 583494 - RNA, 23 nt, Human
ucagcauaaaacaaaaccagaga

SEQ ID NO: 583495 - RNA, 21 nt, Human
ugaagcuggugccagccaguu

SEQ ID NO: 583496 - RNA, 23 nt, Human
ugaauaaauaagugaaaaaacaa

SEQ ID NO: 583497 - RNA, 22 nt, Human
ugaauauuggcaacugcaugaa

SEQ ID NO: 583498 - RNA, 23 nt, Human
ugaggcgggcggcggcggcgccc

SEQ ID NO: 583499 - RNA, 20 nt, Human
ugaggucagagaagggaagc

SEQ ID NO: 583500 - RNA, 22 nt, Human
ugaggucagagaagggaagcag

SEQ ID NO: 583501 - RNA, 21 nt, Human
ugccagauauuuacagccucc

SEQ ID NO: 583502 - RNA, 25 nt, Human
ugcugggauuacaacauugucuuca

SEQ ID NO: 583503 - RNA, 18 nt, Human
uggccacgaacucaggug

SEQ ID NO: 583504 - RNA, 26 nt, Human
uguacaaaggcauuacaaaaaaaccc

SEQ ID NO: 583505 - RNA, 22 nt, Human
uguuacuaaaaaugacauaaag

SEQ ID NO: 583506 - RNA, 21 nt, Human
uuagaacaaacuacucaaagu

SEQ ID NO: 583507 - RNA, 22 nt, Human
uucagcauaaaacaaaaccaga

SEQ ID NO: 583508 - RNA, 24 nt, Human
uucagcauaaaacaaaaccagaga

SEQ ID NO: 583509 - RNA, 22 nt, Human
uucaucuuccugcaguucuguu

SEQ ID NO: 583510 - RNA, 18 nt, Human
uuuuuuuuuuuuuuuuug

SEQ ID NO: 583511 - RNA, 25 nt, Human
uuuuuuuuuuuuuuuuuuguuuuuu

SEQ ID NO: 583512 - RNA, 22 nt, Human
aaaacgccgaugggccccgcgg

SEQ ID NO: 583513 - RNA, 20 nt, Human
aaaauagcucccagcgccga

SEQ ID NO: 583514 - RNA, 21 nt, Human
aagcgaugccccgccggccca

SEQ ID NO: 583515 - RNA, 18 nt, Human
agacagcggggugggggg

SEQ ID NO: 583516 - RNA, 20 nt, Human
agccagcguccgccugcugg

SEQ ID NO: 583517 - RNA, 20 nt, Human
agcccccccauccccccccc

SEQ ID NO: 583518 - RNA, 21 nt, Human
caagcgaugccccgccggccc

SEQ ID NO: 583519 - RNA, 21 nt, Human
ccaaaacgccgaugggccccg

SEQ ID NO: 583520 - RNA, 22 nt, Human
ccagcguccgccugcuggcgcc

SEQ ID NO: 583521 - RNA, 22 nt, Human
ccccaaaacgccgaugggcccc

SEQ ID NO: 583522 - RNA, 24 nt, Human
cccccaucccccccccuugggcaa

SEQ ID NO: 583523 - RNA, 26 nt, Human
ccccccaucccccccccuugggcaaa

SEQ ID NO: 583524 - RNA, 24 nt, Human
cccccccuugggcaaaaauagcuc

SEQ ID NO: 583525 - RNA, 26 nt, Human
ccccccuugggcaaaaauagcuccca

SEQ ID NO: 583526 - RNA, 19 nt, Human
ccccuggcggucagcgcag

SEQ ID NO: 583527 - RNA, 23 nt, Human
cccuugggcaaaaauagcuccca

SEQ ID NO: 583528 - RNA, 19 nt, Human
ccuccugcugcggcugugc

SEQ ID NO: 583529 - RNA, 24 nt, Human
cgcaggcucgggccuccuccugcu

SEQ ID NO: 583530 - RNA, 19 nt, Human
cgccccgcccaggcagccu

SEQ ID NO: 583531 - RNA, 24 nt, Human
cggcccgcccagguggucugcgcu

SEQ ID NO: 583532 - RNA, 19 nt, Human
cgggauggggccucgaggg

SEQ ID NO: 583533 - RNA, 24 nt, Human
cuggcgcaggcucgggccuccucc

SEQ ID NO: 583534 - RNA, 21 nt, Human
gaccuggccccgcccaccgga

SEQ ID NO: 583535 - RNA, 19 nt, Human
gaggaaugggggguaggaa

SEQ ID NO: 583536 - RNA, 21 nt, Human
gccagcccccccauccccccc

SEQ ID NO: 583537 - RNA, 24 nt, Human
gccagcccccccaucccccccccu

SEQ ID NO: 583538 - RNA, 18 nt, Human
gcccccccaucccccccc

SEQ ID NO: 583539 - RNA, 20 nt, Human
gcccccccaucccccccccu

SEQ ID NO: 583540 - RNA, 21 nt, Human
gcccgggucggggcggagggg

SEQ ID NO: 583541 - RNA, 28 nt, Human
gccugccuuggccguggcguugggggga

SEQ ID NO: 583542 - RNA, 20 nt, Human
gcggggcccgggucggggcg

SEQ ID NO: 583543 - RNA, 22 nt, Human
gcucaccaagcgaugccccgcc

SEQ ID NO: 583544 - RNA, 22 nt, Human
gcugcagaccuggcgcaggcuc

SEQ ID NO: 583545 - RNA, 18 nt, Human
ggccugccuuggccgugg

SEQ ID NO: 583546 - RNA, 20 nt, Human
ggggcggaggggucccaggc

SEQ ID NO: 583547 - RNA, 23 nt, Human
uacaaggucaucuuccgugaggg

SEQ ID NO: 583548 - RNA, 20 nt, Human
ucaggccgggugcgucuacg

SEQ ID NO: 583549 - RNA, 18 nt, Human
ucccagcgccgaggaaug

SEQ ID NO: 583550 - RNA, 24 nt, Human
ucccccccccuugggcaaaaauug

SEQ ID NO: 583551 - RNA, 21 nt, Human
ucccggcugcggccccaaaac

SEQ ID NO: 583552 - RNA, 18 nt, Human
uccuccugcugcggcugu

SEQ ID NO: 583553 - RNA, 24 nt, Human
ucgguggcgccagcccccccaucc

SEQ ID NO: 583554 - RNA, 21 nt, Human
ugaccuggccccgcccaccgg

SEQ ID NO: 583555 - RNA, 18 nt, Human
ugagaugugcagguucgg

SEQ ID NO: 583556 - RNA, 22 nt, Human
ugccacgccccgcccaggcagc

SEQ ID NO: 583557 - RNA, 21 nt, Human
uggcgccagcccccccauccc

SEQ ID NO: 583558 - RNA, 22 nt, Human
uuggccguggcguuggggggaa

SEQ ID NO: 583559 - RNA, 23 nt, Human
aaacaauucugcgauggcugccc

SEQ ID NO: 583560 - RNA, 21 nt, Human
aaaguucuucagauucugccu

SEQ ID NO: 583561 - RNA, 19 nt, Human
aagaaagaauucaggcacc

SEQ ID NO: 583562 - RNA, 20 nt, Human
aagcagcccuuugcccacaa

SEQ ID NO: 583563 - RNA, 18 nt, Human
agcagccaggcucagcuu

SEQ ID NO: 583564 - RNA, 19 nt, Human
agggauuggagaucugaag

SEQ ID NO: 583565 - RNA, 21 nt, Human
agggauuggagaucugaagcc

SEQ ID NO: 583566 - RNA, 24 nt, Human
aucauaacgucucuaggaaucugu

SEQ ID NO: 583567 - RNA, 24 nt, Human
auuaauaccuucacuuaaaacccc

SEQ ID NO: 583568 - RNA, 25 nt, Human
caaacaauucugcgauggcugccca

SEQ ID NO: 583569 - RNA, 22 nt, Human
caaagcauucugauccuccuuu

SEQ ID NO: 583570 - RNA, 19 nt, Human
caagaaggcuccgaugaua

SEQ ID NO: 583571 - RNA, 23 nt, Human
caaguuugugacuuagccccauc

SEQ ID NO: 583572 - RNA, 23 nt, Human
cagcccuuugcccacaaacaauu

SEQ ID NO: 583573 - RNA, 18 nt, Human
caggcucagcuuccucug

SEQ ID NO: 583574 - RNA, 25 nt, Human
caguuugacuauugaaaucauaagc

SEQ ID NO: 583575 - RNA, 20 nt, Human
caguuuggcugccaucgugu

SEQ ID NO: 583576 - RNA, 24 nt, Human
caugugaugccgaggacaugugua

SEQ ID NO: 583577 - RNA, 21 nt, Human
ccuacaugugaugccgaggac

SEQ ID NO: 583578 - RNA, 18 nt, Human
cucugugucagcuaugac

SEQ ID NO: 583579 - RNA, 23 nt, Human
cugcccaauuaaucccaaagcau

SEQ ID NO: 583580 - RNA, 20 nt, Human
cuuaaaacccccugugcccu

SEQ ID NO: 583581 - RNA, 20 nt, Human
gaguuggggugguggcaggg

SEQ ID NO: 583582 - RNA, 23 nt, Human
gcuaaagcagcccuuugcccaca

SEQ ID NO: 583583 - RNA, 23 nt, Human
gcugcaguuuggcugccaucgug

SEQ ID NO: 583584 - RNA, 24 nt, Human
gcuguuuaucuugcaacuuuaaga

SEQ ID NO: 583585 - RNA, 22 nt, Human
ggcuucacuguguuugucaugu

SEQ ID NO: 583586 - RNA, 20 nt, Human
gugucggcgaaaagaaagaa

SEQ ID NO: 583587 - RNA, 30 nt, Human
gugucggcgaaaagaaagaauucaggcacc

SEQ ID NO: 583588 - RNA, 22 nt, Human
uaaaacccccugugccugagag

SEQ ID NO: 583589 - RNA, 21 nt, Human
uaaccuggcaaccuagguaga

SEQ ID NO: 583590 - RNA, 21 nt, Human
uaacgucucuaggaaucugua

SEQ ID NO: 583591 - RNA, 23 nt, Human
uaccugccagaccucuuauuaau

SEQ ID NO: 583592 - RNA, 18 nt, Human
uaccuucacuuaaaaccc

SEQ ID NO: 583593 - RNA, 18 nt, Human
ucuuuacaucaacaaaca

SEQ ID NO: 583594 - RNA, 18 nt, Human
ugaacagucuccuacaug

SEQ ID NO: 583595 - RNA, 22 nt, Human
ugccagaccucuuauuaauacc

SEQ ID NO: 583596 - RNA, 23 nt, Human
ugccaucgugucggcgaaaagaa

SEQ ID NO: 583597 - RNA, 21 nt, Human
ugggaaaaaaauuaaaacaag

SEQ ID NO: 583598 - RNA, 22 nt, Human
ugggcacacucuggaaaguucu

SEQ ID NO: 583599 - RNA, 19 nt, Human
uuaagaauuuauuuuacca

SEQ ID NO: 583600 - RNA, 20 nt, Human
aaaaucucugaccuaaaaca

SEQ ID NO: 583601 - RNA, 18 nt, Human
aagauggcuuuuguuguc

SEQ ID NO: 583602 - RNA, 19 nt, Human
acaaauuuuugagccacug

SEQ ID NO: 583603 - RNA, 21 nt, Human
accacauguuugauuuaaagc

SEQ ID NO: 583604 - RNA, 23 nt, Human
accacuuaaaaucucugaccuaa

SEQ ID NO: 583605 - RNA, 20 nt, Human
accuggugauaacacucucc

SEQ ID NO: 583606 - RNA, 20 nt, Human
auauguuaauauuuugaacu

SEQ ID NO: 583607 - RNA, 23 nt, Human
caacauaacuauauguuaauauu

SEQ ID NO: 583608 - RNA, 19 nt, Human
cauuucaaauguagacuga

SEQ ID NO: 583609 - RNA, 25 nt, Human
cuuaaaaucucugaccuaaaacaaa

SEQ ID NO: 583610 - RNA, 20 nt, Human
uaacacucuccgcuucuuuc

SEQ ID NO: 583611 - RNA, 25 nt, Human
uaacauuucaaauguagacugacca

SEQ ID NO: 583612 - RNA, 24 nt, Human
uauaccacuuaaaaucucugaccu

SEQ ID NO: 583613 - RNA, 24 nt, Human
uauguuaauauuuugaacuaacau

SEQ ID NO: 583614 - RNA, 24 nt, Human
ucaauguucccuuuugugaagaug

SEQ ID NO: 583615 - RNA, 22 nt, Human
uucccuuuugugaagauggcuu

SEQ ID NO: 583616 - RNA, 22 nt, Human
aagaaggcagaaagcagcucac

SEQ ID NO: 583617 - RNA, 20 nt, Human
aagcagcucacccaagccua

SEQ ID NO: 583618 - RNA, 19 nt, Human
accucaucuucacccugaa

SEQ ID NO: 583619 - RNA, 23 nt, Human
acuggaugcagggagaagccagu

SEQ ID NO: 583620 - RNA, 20 nt, Human
agaagccaggucugucuuca

SEQ ID NO: 583621 - RNA, 21 nt, Human
agauagucuaugugauaaaac

SEQ ID NO: 583622 - RNA, 21 nt, Human
aggcagaaagcagcucaccca

SEQ ID NO: 583623 - RNA, 27 nt, Human
aggcagaaagcagcucacccaagccua

SEQ ID NO: 583624 - RNA, 19 nt, Human
auacuggggaacuggaugc

SEQ ID NO: 583625 - RNA, 23 nt, Human
augaacccaaagguuuuaugcca

SEQ ID NO: 583626 - RNA, 23 nt, Human
caaagccucaaacaauaaugcaa

SEQ ID NO: 583627 - RNA, 18 nt, Human
caagccuaaccuggcccu

SEQ ID NO: 583628 - RNA, 24 nt, Human
cacacaauauucuauuuuacuuaa

SEQ ID NO: 583629 - RNA, 19 nt, Human
cacccaagccuaaccuggc

SEQ ID NO: 583630 - RNA, 23 nt, Human
cagaaagcagcucacccaagccu

SEQ ID NO: 583631 - RNA, 21 nt, Human
caggacagaggggggccuugg

SEQ ID NO: 583632 - RNA, 21 nt, Human
caggcaguggcaagggggcaa

SEQ ID NO: 583633 - RNA, 22 nt, Human
caucaucuaauaagggacuucu

SEQ ID NO: 583634 - RNA, 21 nt, Human
cauuagccaugaaaccuaaga

SEQ ID NO: 583635 - RNA, 22 nt, Human
ccaaagccucaaacaauaaugc

SEQ ID NO: 583636 - RNA, 22 nt, Human
ccaacuagccucucaguauuua

SEQ ID NO: 583637 - RNA, 24 nt, Human
ccagaaaggcguuucaaugcucaa

SEQ ID NO: 583638 - RNA, 19 nt, Human
cccaagccuaaccuggccc

SEQ ID NO: 583639 - RNA, 23 nt, Human
cccacagcacauacuggggaacu

SEQ ID NO: 583640 - RNA, 23 nt, Human
ccucucaguauuuagaugaggau

SEQ ID NO: 583641 - RNA, 25 nt, Human
cgggccgcggcgggggucucugggc

SEQ ID NO: 583642 - RNA, 23 nt, Human
cuaccgagacccucgcgggaccc

SEQ ID NO: 583643 - RNA, 21 nt, Human
cucgcgggacccccgcgagcc

SEQ ID NO: 583644 - RNA, 19 nt, Human
cucuccacugcuuacugug

SEQ ID NO: 583645 - RNA, 20 nt, Human
cugucuucaggaggucacag

SEQ ID NO: 583646 - RNA, 23 nt, Human
gagaagccaggucugucuucagg

SEQ ID NO: 583647 - RNA, 19 nt, Human
gaggaacacugggugccag

SEQ ID NO: 583648 - RNA, 19 nt, Human
gcagaaagcagcucaccca

SEQ ID NO: 583649 - RNA, 23 nt, Human
gcagaaagcagcucacccaagcc

SEQ ID NO: 583650 - RNA, 18 nt, Human
gcagaauauuuguauuaa

SEQ ID NO: 583651 - RNA, 18 nt, Human
gcagggacuaucuggaag

SEQ ID NO: 583652 - RNA, 22 nt, Human
gccaucuucauuauuuguuuca

SEQ ID NO: 583653 - RNA, 22 nt, Human
gcgcggcuaccgagacccucgc

SEQ ID NO: 583654 - RNA, 19 nt, Human
gcggcgggggucucugggc

SEQ ID NO: 583655 - RNA, 24 nt, Human
ggagaagccaggucugucuucagg

SEQ ID NO: 583656 - RNA, 19 nt, Human
ggcagacaaagauguggug

SEQ ID NO: 583657 - RNA, 18 nt, Human
gggcagggacuaucugga

SEQ ID NO: 583658 - RNA, 21 nt, Human
gguacacaaggggaacuccag

SEQ ID NO: 583659 - RNA, 22 nt, Human
gugccaaugcauuagccaugaa

SEQ ID NO: 583660 - RNA, 22 nt, Human
uacacaaggggaacuccaggca

SEQ ID NO: 583661 - RNA, 18 nt, Human
uaccaagaaggcagaaag

SEQ ID NO: 583662 - RNA, 24 nt, Human
uaccaagaaggcagaaagcagcuc

SEQ ID NO: 583663 - RNA, 20 nt, Human
uagaaaaaauaagcaauaug

SEQ ID NO: 583664 - RNA, 22 nt, Human
uagaacagauacgguguaacac

SEQ ID NO: 583665 - RNA, 20 nt, Human
uaucuggaaggacugcaggg

SEQ ID NO: 583666 - RNA, 23 nt, Human
uaucuugugguacuuuuugauuu

SEQ ID NO: 583667 - RNA, 19 nt, Human
ucaaugccuaccagaaagg

SEQ ID NO: 583668 - RNA, 24 nt, Human
ucaaugcucaauagaauacucuua

SEQ ID NO: 583669 - RNA, 22 nt, Human
ucacccaagccuaaccuggccc

SEQ ID NO: 583670 - RNA, 21 nt, Human
ucuuauucuuuugaugccauc

SEQ ID NO: 583671 - RNA, 23 nt, Human
ugcagggagaagccaggucuguc

SEQ ID NO: 583672 - RNA, 20 nt, Human
uggaugcagggagaagccag

SEQ ID NO: 583673 - RNA, 26 nt, Human
uggcaagggggcaauacguggagaaa

SEQ ID NO: 583674 - RNA, 20 nt, Human
uggcagacaaagauguggug

SEQ ID NO: 583675 - RNA, 24 nt, Human
uggggggauggggacacuauggug

SEQ ID NO: 583676 - RNA, 21 nt, Human
ugggugccaggacagaggggg

SEQ ID NO: 583677 - RNA, 22 nt, Human
uguaccaagaaggcagaaagca

SEQ ID NO: 583678 - RNA, 18 nt, Human
uuaaugaacccaaagguu

SEQ ID NO: 583679 - RNA, 19 nt, Human
uuuccauguaucuuucauc

SEQ ID NO: 583680 - RNA, 23 nt, Human
uuuuucacacaauauucuauuuu

SEQ ID NO: 583681 - RNA, 21 nt, Human
uuuuuuuuuuuucuuuuauuu

SEQ ID NO: 583682 - RNA, 24 nt, Human
uuuuuuuuuuuuuuuuuuucuuuu

SEQ ID NO: 583683 - RNA, 22 nt, Human
aaaacagcucccaccuccccca

SEQ ID NO: 583684 - RNA, 19 nt, Human
aaacagcucccaccucccc

SEQ ID NO: 583685 - RNA, 20 nt, Human
aaacagcucccaccuccccc

SEQ ID NO: 583686 - RNA, 21 nt, Human
aagaagccagcgggggcugcc

SEQ ID NO: 583687 - RNA, 20 nt, Human
aagcucggcucaugcccuuc

SEQ ID NO: 583688 - RNA, 21 nt, Human
aagugcaauucccaaaagcca

SEQ ID NO: 583689 - RNA, 20 nt, Human
acaguagaggcaggacugaa

SEQ ID NO: 583690 - RNA, 20 nt, Human
accacaguccacgaccagcc

SEQ ID NO: 583691 - RNA, 24 nt, Human
agacaguagaggcaggacugaacc

SEQ ID NO: 583692 - RNA, 19 nt, Human
agagacaguagaggcagga

SEQ ID NO: 583693 - RNA, 22 nt, Human
agagcagguuccagagcccaaa

SEQ ID NO: 583694 - RNA, 19 nt, Human
agagcccaaaggcccaaaa

SEQ ID NO: 583695 - RNA, 19 nt, Human
agcccaaaggcccaaaagu

SEQ ID NO: 583696 - RNA, 22 nt, Human
agcgcccgcguuccacugcccc

SEQ ID NO: 583697 - RNA, 19 nt, Human
agcgggggcugccccuucc

SEQ ID NO: 583698 - RNA, 20 nt, Human
agcucccaccucccccaacc

SEQ ID NO: 583699 - RNA, 23 nt, Human
agugcaauucccaaaagccaagg

SEQ ID NO: 583700 - RNA, 18 nt, Human
caaaaccaagaagccagc

SEQ ID NO: 583701 - RNA, 18 nt, Human
caagaagccagcgggggc

SEQ ID NO: 583702 - RNA, 24 nt, Human
caaggagcucccagagauccagcg

SEQ ID NO: 583703 - RNA, 25 nt, Human
cacaaaaccaagaagccagcggggg

SEQ ID NO: 583704 - RNA, 19 nt, Human
caccucccccaaccacagu

SEQ ID NO: 583705 - RNA, 19 nt, Human
caccucccccaaccacagu

SEQ ID NO: 583706 - RNA, 18 nt, Human
cagaccaccugggucgga

SEQ ID NO: 583707 - RNA, 20 nt, Human
cagagcccaaaggcccaaaa

SEQ ID NO: 583708 - RNA, 18 nt, Human
cagcaaagauuaaaagga

SEQ ID NO: 583709 - RNA, 22 nt, Human
caguagaggcaggacugaaccg

SEQ ID NO: 583710 - RNA, 20 nt, Human
ccacaagagaccagcuccac

SEQ ID NO: 583711 - RNA, 21 nt, Human
ccaccugggucggaggcugag

SEQ ID NO: 583712 - RNA, 21 nt, Human
ccagagcccaaaggcccaaaa

SEQ ID NO: 583713 - RNA, 21 nt, Human
ccagcuccacaguccacguaa

SEQ ID NO: 583714 - RNA, 21 nt, Human
cccaaccacaguccacgacca

SEQ ID NO: 583715 - RNA, 25 nt, Human
cccacaccaagguguggaacuagga

SEQ ID NO: 583716 - RNA, 18 nt, Human
cccuggugcgaccuccgc

SEQ ID NO: 583717 - RNA, 19 nt, Human
cccuuccuccuccuccuca

SEQ ID NO: 583718 - RNA, 23 nt, Human
ccggcacaggagagggggcacaa

SEQ ID NO: 583719 - RNA, 18 nt, Human
ccugcacccaguaaccca

SEQ ID NO: 583720 - RNA, 26 nt, Human
cgcccaggcuggcuggacucggaagc

SEQ ID NO: 583721 - RNA, 18 nt, Human
cucccaccucccccaacc

SEQ ID NO: 583722 - RNA, 22 nt, Human
cucccaccucccccaaccacag

SEQ ID NO: 583723 - RNA, 18 nt, Human
cucccccaaccacagucc

SEQ ID NO: 583724 - RNA, 24 nt, Human
cucccccaaccacaguccacgacc

SEQ ID NO: 583725 - RNA, 23 nt, Human
cuccgcacggcgcugagccacaa

SEQ ID NO: 583726 - RNA, 23 nt, Human
cuuccaagucucaccaaugaccc

SEQ ID NO: 583727 - RNA, 21 nt, Human
gagaaagaagggggaccccac

SEQ ID NO: 583728 - RNA, 24 nt, Human
gaggcuggcaaccacaaaaccaag

SEQ ID NO: 583729 - RNA, 22 nt, Human
gcacggcgcugagccacaagag

SEQ ID NO: 583730 - RNA, 19 nt, Human
gcagguuccagagcccaaa

SEQ ID NO: 583731 - RNA, 18 nt, Human
ggaacggacuccucgggu

SEQ ID NO: 583732 - RNA, 18 nt, Human
ggagagggggcacacggu

SEQ ID NO: 583733 - RNA, 20 nt, Human
ggaugcccacgccggcacag

SEQ ID NO: 583734 - RNA, 27 nt, Human
ggcccaaaagugcaauucccaaaagcu

SEQ ID NO: 583735 - RNA, 20 nt, Human
gggcacacgguuaaaacagc

SEQ ID NO: 583736 - RNA, 21 nt, Human
ggucugggagccaucaaggag

SEQ ID NO: 583737 - RNA, 19 nt, Human
guccacgaccagccucuca

SEQ ID NO: 583738 - RNA, 20 nt, Human
uacaguggagaaagaagggg

SEQ ID NO: 583739 - RNA, 21 nt, Human
uacccaagggccacccuugag

SEQ ID NO: 583740 - RNA, 20 nt, Human
uacgcuucaaccuccgcacg

SEQ ID NO: 583741 - RNA, 19 nt, Human
ucagcaaagauuaaaagga

SEQ ID NO: 583742 - RNA, 20 nt, Human
uccgcacggcgcugagccac

SEQ ID NO: 583743 - RNA, 18 nt, Human
uccuccucacgcccuggu

SEQ ID NO: 583744 - RNA, 23 nt, Human
ugaggcuggcaaccacaaaacca

SEQ ID NO: 583745 - RNA, 21 nt, Human
ugccaccacucucccggcagg

SEQ ID NO: 583746 - RNA, 19 nt, Human
ugcccacgccggcacagga

SEQ ID NO: 583747 - RNA, 19 nt, Human
ugccccgggggaugcccac

SEQ ID NO: 583748 - RNA, 22 nt, Human
aaaaaaauaauaaucuacagca

SEQ ID NO: 583749 - RNA, 20 nt, Human
aaaaaagcaaaaucaacuca

SEQ ID NO: 583750 - RNA, 18 nt, Human
aaaaagcaaaaucaacuc

SEQ ID NO: 583751 - RNA, 20 nt, Human
aaaaugccagcuccuugaaa

SEQ ID NO: 583752 - RNA, 18 nt, Human
aaacaaaugcgcaacgcc

SEQ ID NO: 583753 - RNA, 19 nt, Human
aaacaaaugcgcaacgcca

SEQ ID NO: 583754 - RNA, 22 nt, Human
aaacaacccugcugacugcagc

SEQ ID NO: 583755 - RNA, 20 nt, Human
aaaggaggggccaggguccu

SEQ ID NO: 583756 - RNA, 19 nt, Human
aaauagucucaaacaaccc

SEQ ID NO: 583757 - RNA, 25 nt, Human
aaauagucucaaacaacccugcuga

SEQ ID NO: 583758 - RNA, 18 nt, Human
aacuccccccuucugcau

SEQ ID NO: 583759 - RNA, 26 nt, Human
aagcaaggugcuggaagggacacggg

SEQ ID NO: 583760 - RNA, 20 nt, Human
accccccuucgcuucagccc

SEQ ID NO: 583761 - RNA, 22 nt, Human
acugcagcugccuucugaaggc

SEQ ID NO: 583762 - RNA, 18 nt, Human
agcaacccccuacccccc

SEQ ID NO: 583763 - RNA, 18 nt, Human
agcagaaagaggcaggga

SEQ ID NO: 583764 - RNA, 18 nt, Human
agcagaaagaggcaggga

SEQ ID NO: 583765 - RNA, 20 nt, Human
aggagggagggagggaggaa

SEQ ID NO: 583766 - RNA, 19 nt, Human
aggagguggagauagagca

SEQ ID NO: 583767 - RNA, 23 nt, Human
auagagcagaaagaggcagggaa

SEQ ID NO: 583768 - RNA, 18 nt, Human
aucuaaaggggugcgggg

SEQ ID NO: 583769 - RNA, 25 nt, Human
aucuccucccuccccuucuucccag

SEQ ID NO: 583770 - RNA, 23 nt, Human
augccauccuccccccucuacaa

SEQ ID NO: 583771 - RNA, 19 nt, Human
caaccaauaaauagucuca

SEQ ID NO: 583772 - RNA, 21 nt, Human
caacggcagagcacgcaggaa

SEQ ID NO: 583773 - RNA, 18 nt, Human
caacuaaaaaaugccagc

SEQ ID NO: 583774 - RNA, 22 nt, Human
caaggugcuggaagggacacgg

SEQ ID NO: 583775 - RNA, 19 nt, Human
cacaauaggggacaagggg

SEQ ID NO: 583776 - RNA, 19 nt, Human
cagaaagaggcagggaaag

SEQ ID NO: 583777 - RNA, 18 nt, Human
cagagagggaggcgggga

SEQ ID NO: 583778 - RNA, 19 nt, Human
cagagcacgcaggaaacgg

SEQ ID NO: 583779 - RNA, 18 nt, Human
cagagcagcaacccccua

SEQ ID NO: 583780 - RNA, 22 nt, Human
cagagcagcaacccccuacccc

SEQ ID NO: 583781 - RNA, 21 nt, Human
cagcaacccccuaccccccuu

SEQ ID NO: 583782 - RNA, 19 nt, Human
cagccccuagcagcugcuc

SEQ ID NO: 583783 - RNA, 19 nt, Human
cagcugccuucugaaggcu

SEQ ID NO: 583784 - RNA, 22 nt, Human
caggaagacuaacaacuaaaaa

SEQ ID NO: 583785 - RNA, 22 nt, Human
ccaucacccgagagacgcccga

SEQ ID NO: 583786 - RNA, 19 nt, Human
ccaugcaaguaaccugaac

SEQ ID NO: 583787 - RNA, 21 nt, Human
cccccaugccauccucccccc

SEQ ID NO: 583788 - RNA, 24 nt, Human
cccccaugccauccuccccccucu

SEQ ID NO: 583789 - RNA, 23 nt, Human
ccccccucuacaauucgaacucc

SEQ ID NO: 583790 - RNA, 18 nt, Human
ccccuucgcuucagcccc

SEQ ID NO: 583791 - RNA, 23 nt, Human
ccccuucuucccaggaucuuucc

SEQ ID NO: 583792 - RNA, 22 nt, Human
cccgagagacgcccgagaggaa

SEQ ID NO: 583793 - RNA, 20 nt, Human
cccucuacaauucgaacucc

SEQ ID NO: 583794 - RNA, 20 nt, Human
ccucccuccccuucuuccca

SEQ ID NO: 583795 - RNA, 22 nt, Human
ccuucuucccaggaucuuuccg

SEQ ID NO: 583796 - RNA, 28 nt, Human
ccuugggaucuccucccuccccuucuuc

SEQ ID NO: 583797 - RNA, 21 nt, Human
ccuuucuguuucaaucaagag

SEQ ID NO: 583798 - RNA, 21 nt, Human
cgcccgagaggaaaacugccc

SEQ ID NO: 583799 - RNA, 21 nt, Human
cuaccccccuucgcuucagcc

SEQ ID NO: 583800 - RNA, 22 nt, Human
cucaaacaacccugcugacugc

SEQ ID NO: 583801 - RNA, 18 nt, Human
cuccugaucaggcugccu

SEQ ID NO: 583802 - RNA, 22 nt, Human
cucuuccuccuccuagcauccc

SEQ ID NO: 583803 - RNA, 20 nt, Human
cugaaggcugggaaaaggag

SEQ ID NO: 583804 - RNA, 20 nt, Human
cuuccuccuccuagcauccc

SEQ ID NO: 583805 - RNA, 27 nt, Human
cuuuccguaaaucuaaaggagaguacu

SEQ ID NO: 583806 - RNA, 20 nt, Human
gaaagggaggagggguucag

SEQ ID NO: 583807 - RNA, 19 nt, Human
gaacuccccccuucugcau

SEQ ID NO: 583808 - RNA, 22 nt, Human
gagcagaaagaggcagggaaag

SEQ ID NO: 583809 - RNA, 20 nt, Human
gaguaacacaucugcccaga

SEQ ID NO: 583810 - RNA, 19 nt, Human
ggagggagggagggaggaa

SEQ ID NO: 583811 - RNA, 18 nt, Human
ggagggguucagucccgg

SEQ ID NO: 583812 - RNA, 24 nt, Human
gucucuaggagggagggagggagg

SEQ ID NO: 583813 - RNA, 22 nt, Human
gugaaagggaggagggguucag

SEQ ID NO: 583814 - RNA, 28 nt, Human
guggagauagagcagaaagaggcaggga

SEQ ID NO: 583815 - RNA, 22 nt, Human
guuguuaucuuucccuuucugu

SEQ ID NO: 583816 - RNA, 18 nt, Human
uaccccccuucgcuucag

SEQ ID NO: 583817 - RNA, 23 nt, Human
uagaaacgauuaaaaaaaaagga

SEQ ID NO: 583818 - RNA, 21 nt, Human
uagcaucccccaugccauccu

SEQ ID NO: 583819 - RNA, 18 nt, Human
ucccuccccuucuuccca

SEQ ID NO: 583820 - RNA, 19 nt, Human
uccucccuccccuucuucc

SEQ ID NO: 583821 - RNA, 20 nt, Human
uccuugaaaggaggggccag

SEQ ID NO: 583822 - RNA, 27 nt, Human
uccuugggaucuccucccuccccuucu

SEQ ID NO: 583823 - RNA, 23 nt, Human
uccuugggcaacuuuccuuuuug

SEQ ID NO: 583824 - RNA, 22 nt, Human
ucugaaggcugggaaaaggagg

SEQ ID NO: 583825 - RNA, 20 nt, Human
ugaaggcugggaaaaggagg

SEQ ID NO: 583826 - RNA, 19 nt, Human
ugaagggggccgaauaaug

SEQ ID NO: 583827 - RNA, 24 nt, Human
ugacugcagcugccuucugaaggc

SEQ ID NO: 583828 - RNA, 19 nt, Human
ugcccagagagggaggcgg

SEQ ID NO: 583829 - RNA, 21 nt, Human
ugcccagagagggaggcgggg

SEQ ID NO: 583830 - RNA, 20 nt, Human
ugcucggaugagguaaucug

SEQ ID NO: 583831 - RNA, 21 nt, Human
ugugugcaccaacggcagagc

SEQ ID NO: 583832 - RNA, 23 nt, Human
uucgaacuccccccuucugcauc

SEQ ID NO: 583833 - RNA, 22 nt, Human
uugucagucuccugaucaggcu

SEQ ID NO: 583834 - RNA, 24 nt, Human
uuugcugaagggggccgaauaaug

SEQ ID NO: 583835 - RNA, 19 nt, Human
aaaccuuuuucugaaagac

SEQ ID NO: 583836 - RNA, 20 nt, Human
aggaacaagaggaugaagga

SEQ ID NO: 583837 - RNA, 24 nt, Human
ccuucgcuguugauuauccacaac

SEQ ID NO: 583838 - RNA, 23 nt, Human
cuuagaaacaaaaaccaaagaaa

SEQ ID NO: 583839 - RNA, 22 nt, Human
cuucaacagacauacucagcau

SEQ ID NO: 583840 - RNA, 18 nt, Human
uaacaccauaaauccaag

SEQ ID NO: 583841 - RNA, 24 nt, Human
uauggucagcauuuuaauaacacc

SEQ ID NO: 583842 - RNA, 24 nt, Human
ucuuucuuagaaacaaaaaccaaa

SEQ ID NO: 583843 - RNA, 21 nt, Human
uggucagcauuuuaauaacac

SEQ ID NO: 583844 - RNA, 20 nt, Human
uguuucguuuucuguuuuug

SEQ ID NO: 583845 - RNA, 25 nt, Human
uuuaauaucucugcucgucuucaac

SEQ ID NO: 583846 - RNA, 20 nt, Human
aaaaaaacaaccaaagaaca

SEQ ID NO: 583847 - RNA, 25 nt, Human
aaaaaaacagugcacaugccacaaa

SEQ ID NO: 583848 - RNA, 19 nt, Human
aaaaaacaaccaaagaaca

SEQ ID NO: 583849 - RNA, 23 nt, Human
aaacaaccaaagaacaauaacaa

SEQ ID NO: 583850 - RNA, 21 nt, Human
aacagcuccugcucaaaguca

SEQ ID NO: 583851 - RNA, 18 nt, Human
aaccaaagaacaauaaca

SEQ ID NO: 583852 - RNA, 19 nt, Human
aaccaaagaacaauaacaa

SEQ ID NO: 583853 - RNA, 22 nt, Human
aaccaaagaacaauaacaaaaa

SEQ ID NO: 583854 - RNA, 23 nt, Human
aagucacagaaauucacagacuu

SEQ ID NO: 583855 - RNA, 22 nt, Human
aaugcagcuuacuaaauugguc

SEQ ID NO: 583856 - RNA, 21 nt, Human
augccacaaagcaaaccaaac

SEQ ID NO: 583857 - RNA, 21 nt, Human
caaaaaaacaaccaaagaaca

SEQ ID NO: 583858 - RNA, 19 nt, Human
caaagaacaauaacaaaaa

SEQ ID NO: 583859 - RNA, 23 nt, Human
caaagcguacuuuuuuucccaaa

SEQ ID NO: 583860 - RNA, 20 nt, Human
caacagcuccugcucaaagu

SEQ ID NO: 583861 - RNA, 19 nt, Human
caaccaaagaacaauaaca

SEQ ID NO: 583862 - RNA, 20 nt, Human
caaguuagaaugacaauaaa

SEQ ID NO: 583863 - RNA, 21 nt, Human
cacaugccacaaagcaaaccc

SEQ ID NO: 583864 - RNA, 22 nt, Human
cagacuuaauaugcacacccaa

SEQ ID NO: 583865 - RNA, 21 nt, Human
cagugcacaugccacaaagca

SEQ ID NO: 583866 - RNA, 21 nt, Human
cauguguaggggccucuccuc

SEQ ID NO: 583867 - RNA, 24 nt, Human
ccaaaacauaaaaucauucagcaa

SEQ ID NO: 583868 - RNA, 24 nt, Human
ccaaagaacaauaacaaaaaaaca

SEQ ID NO: 583869 - RNA, 18 nt, Human
cucaguuuuccuacugau

SEQ ID NO: 583870 - RNA, 23 nt, Human
cugauggcuuauagaaugcagcu

SEQ ID NO: 583871 - RNA, 19 nt, Human
gcaaaccaaacauagcuca

SEQ ID NO: 583872 - RNA, 22 nt, Human
gguugagguagggaaaaucuug

SEQ ID NO: 583873 - RNA, 22 nt, Human
gucuuuuaauuuuggcaugugg

SEQ ID NO: 583874 - RNA, 22 nt, Human
gugcacaugccacaaagcaaac

SEQ ID NO: 583875 - RNA, 18 nt, Human
guggaagucacagaaauu

SEQ ID NO: 583876 - RNA, 25 nt, Human
uaaaaucauucagcaaaaaaacaac

SEQ ID NO: 583877 - RNA, 21 nt, Human
uaacaaaaaaacagugcacau

SEQ ID NO: 583878 - RNA, 18 nt, Human
uauagaaugcagcuuacu

SEQ ID NO: 583879 - RNA, 19 nt, Human
ucacagaaauucacagacu

SEQ ID NO: 583880 - RNA, 18 nt, Human
ucagcaaaaaaacaacca

SEQ ID NO: 583881 - RNA, 21 nt, Human
uccugcucaaagucagguuga

SEQ ID NO: 583882 - RNA, 22 nt, Human
ugaaaauacauauucaucuaca

SEQ ID NO: 583883 - RNA, 21 nt, Human
ugccacaaagcaaaccaaaca

SEQ ID NO: 583884 - RNA, 22 nt, Human
uggcauguggaagucacagaaa

SEQ ID NO: 583885 - RNA, 19 nt, Human
uguuuuguuuuuugcuuuu

SEQ ID NO: 583886 - RNA, 18 nt, Human
uuaaaugagcccgaagga

SEQ ID NO: 583887 - RNA, 21 nt, Human
uucagcaaaaaaacaaccaaa

SEQ ID NO: 583888 - RNA, 21 nt, Human
uuuuuuuuuuguuuuguuuuu

SEQ ID NO: 583889 - RNA, 21 nt, Human
aaauagagacaggguucucug

SEQ ID NO: 583890 - RNA, 21 nt, Human
aaaugucggaggucgaauucu

SEQ ID NO: 583891 - RNA, 25 nt, Human
aacaauacaggcauaauacaacaau

SEQ ID NO: 583892 - RNA, 21 nt, Human
aacauggcgagaccucauuuc

SEQ ID NO: 583893 - RNA, 24 nt, Human
aaccuuuuuguuuguuuguuuuuu

SEQ ID NO: 583894 - RNA, 25 nt, Human
aagcaauccucccaccucagccucc

SEQ ID NO: 583895 - RNA, 18 nt, Human
aagugggaggaucgcuug

SEQ ID NO: 583896 - RNA, 19 nt, Human
acaauacaggcauaauaca

SEQ ID NO: 583897 - RNA, 18 nt, Human
acagcucacugcagccuc

SEQ ID NO: 583898 - RNA, 24 nt, Human
accacguugcccaggcuggucucg

SEQ ID NO: 583899 - RNA, 25 nt, Human
accacguugcccaggcuggucucga

SEQ ID NO: 583900 - RNA, 23 nt, Human
acccaggccuauaagaaccuagu

SEQ ID NO: 583901 - RNA, 20 nt, Human
accucagccuccccagcagc

SEQ ID NO: 583902 - RNA, 23 nt, Human
accucagccuccccagcagcugg

SEQ ID NO: 583903 - RNA, 18 nt, Human
accucauuucuacuaaaa

SEQ ID NO: 583904 - RNA, 19 nt, Human
acucuaguguguucugggc

SEQ ID NO: 583905 - RNA, 18 nt, Human
acugcacuccggccuggg

SEQ ID NO: 583906 - RNA, 24 nt, Human
acugcacuccggccugggugacag

SEQ ID NO: 583907 - RNA, 21 nt, Human
acuggggcacaccagaaugug

SEQ ID NO: 583908 - RNA, 18 nt, Human
agaagagagcaacaaaaa

SEQ ID NO: 583909 - RNA, 19 nt, Human
agaagagagcaacaaaaag

SEQ ID NO: 583910 - RNA, 20 nt, Human
agagaagccagaaacccaga

SEQ ID NO: 583911 - RNA, 20 nt, Human
agagagcaacaaaaagaggc

SEQ ID NO: 583912 - RNA, 18 nt, Human
agagaggucuucggccuc

SEQ ID NO: 583913 - RNA, 21 nt, Human
aggcacaaacccaggccuaua

SEQ ID NO: 583914 - RNA, 24 nt, Human
aggcugaagugggaggaucgcuug

SEQ ID NO: 583915 - RNA, 24 nt, Human
aggguucucuguugcccaggcugg

SEQ ID NO: 583916 - RNA, 19 nt, Human
aggucuucggccucccagc

SEQ ID NO: 583917 - RNA, 24 nt, Human
agguugaggcugcagugagccuug

SEQ ID NO: 583918 - RNA, 20 nt, Human
aguucccaaccuggcaauuc

SEQ ID NO: 583919 - RNA, 21 nt, Human
auggcgagaccucauuucuac

SEQ ID NO: 583920 - RNA, 18 nt, Human
augggguuucaccacguu

SEQ ID NO: 583921 - RNA, 19 nt, Human
augggguuucaccacguug

SEQ ID NO: 583922 - RNA, 24 nt, Human
augggguuucaccacguugcccag

SEQ ID NO: 583923 - RNA, 24 nt, Human
auugugccacugcacuccggccug

SEQ ID NO: 583924 - RNA, 27 nt, Human
caagcaauccucccaccucagccuccc

SEQ ID NO: 583925 - RNA, 19 nt, Human
caaguucauuaucaggagg

SEQ ID NO: 583926 - RNA, 21 nt, Human
caauaggggagugagcaccua

SEQ ID NO: 583927 - RNA, 21 nt, Human
cacacccagcuaauuuuugua

SEQ ID NO: 583928 - RNA, 24 nt, Human
caccacguugcccaggcuggucuc

SEQ ID NO: 583929 - RNA, 27 nt, Human
caccacguugcccaggcuggucucgaa

SEQ ID NO: 583930 - RNA, 23 nt, Human
caccucagcuuccgaaagugcag

SEQ ID NO: 583931 - RNA, 24 nt, Human
cacguugcccaggcuggucucgaa

SEQ ID NO: 583932 - RNA, 22 nt, Human
cacuccggccugggugacagug

SEQ ID NO: 583933 - RNA, 19 nt, Human
cacugcacuccggccuggg

SEQ ID NO: 583934 - RNA, 21 nt, Human
cacugcacuccggccugggug

SEQ ID NO: 583935 - RNA, 22 nt, Human
cacugcacuccggccuggguga

SEQ ID NO: 583936 - RNA, 23 nt, Human
cacugcacuccggccugggugac

SEQ ID NO: 583937 - RNA, 24 nt, Human
cacugcacuccggccugggugaca

SEQ ID NO: 583938 - RNA, 25 nt, Human
cacugcacuccggccugggugacag

SEQ ID NO: 583939 - RNA, 22 nt, Human
cacugcagccucgaccucccag

SEQ ID NO: 583940 - RNA, 24 nt, Human
cagcagcugggaccacagaugugc

SEQ ID NO: 583941 - RNA, 19 nt, Human
cagcaguucccaaccuggc

SEQ ID NO: 583942 - RNA, 21 nt, Human
cagccucgaccucccaggccc

SEQ ID NO: 583943 - RNA, 24 nt, Human
cagccucgaccucccaggcccaag

SEQ ID NO: 583944 - RNA, 25 nt, Human
cagccucgaccucccaggcccaagc

SEQ ID NO: 583945 - RNA, 22 nt, Human
cagugacuuccuacuucuaaac

SEQ ID NO: 583946 - RNA, 20 nt, Human
cagugggaagcaagagagua

SEQ ID NO: 583947 - RNA, 28 nt, Human
caucuaaagucuccaugugacuguugcc

SEQ ID NO: 583948 - RNA, 20 nt, Human
ccacugcacuccggccuggg

SEQ ID NO: 583949 - RNA, 20 nt, Human
ccacugcacuccggccuggg

SEQ ID NO: 583950 - RNA, 20 nt, Human
ccacugcacuccggccuggg

SEQ ID NO: 583951 - RNA, 21 nt, Human
ccacugcacuccggccugggu

SEQ ID NO: 583952 - RNA, 21 nt, Human
ccacugcacuccggccugggu

SEQ ID NO: 583953 - RNA, 24 nt, Human
ccacugcacuccggccugggugac

SEQ ID NO: 583954 - RNA, 22 nt, Human
ccagaagguugaggcugcagug

SEQ ID NO: 583955 - RNA, 23 nt, Human
ccagagucccgcccauauuacac

SEQ ID NO: 583956 - RNA, 23 nt, Human
ccaggcccaagcaauccucccac

SEQ ID NO: 583957 - RNA, 21 nt, Human
cccaagcaauccucccaccuc

SEQ ID NO: 583958 - RNA, 24 nt, Human
cccaagcaauccucccaccucagc

SEQ ID NO: 583959 - RNA, 21 nt, Human
ccccagcagcugggaccacag

SEQ ID NO: 583960 - RNA, 22 nt, Human
cccgucucaaaaagccucggaa

SEQ ID NO: 583961 - RNA, 25 nt, Human
ccucccaccucagccuccccagcag

SEQ ID NO: 583962 - RNA, 20 nt, Human
ccucgaccucccaggcccaa

SEQ ID NO: 583963 - RNA, 25 nt, Human
cgaccucccaggcccaagcaauccu

SEQ ID NO: 583964 - RNA, 21 nt, Human
cggcaucgucggaaucagcca

SEQ ID NO: 583965 - RNA, 21 nt, Human
cguacagagcucucugcuagg

SEQ ID NO: 583966 - RNA, 21 nt, Human
cucccaccucagccuccccag

SEQ ID NO: 583967 - RNA, 19 nt, Human
cucuguugcccaggcugga

SEQ ID NO: 583968 - RNA, 23 nt, Human
cucuguugcccaggcuggaaugc

SEQ ID NO: 583969 - RNA, 22 nt, Human
cugcagccucgaccucccaggc

SEQ ID NO: 583970 - RNA, 23 nt, Human
cugcagccucgaccucccaggcc

SEQ ID NO: 583971 - RNA, 22 nt, Human
cugcagugagccuugauugugc

SEQ ID NO: 583972 - RNA, 20 nt, Human
gaagagaagccagaaaccca

SEQ ID NO: 583973 - RNA, 23 nt, Human
gaccucccaggcccaagcaaucc

SEQ ID NO: 583974 - RNA, 21 nt, Human
gagaauggggagcgaugggga

SEQ ID NO: 583975 - RNA, 27 nt, Human
gagagcaacaaaaagaggccgguaccc

SEQ ID NO: 583976 - RNA, 20 nt, Human
gagaguagauaagugugcaa

SEQ ID NO: 583977 - RNA, 18 nt, Human
gagaugggguuucaccac

SEQ ID NO: 583978 - RNA, 20 nt, Human
gagaugggguuucaccacgu

SEQ ID NO: 583979 - RNA, 25 nt, Human
gagcugccauggcuggccaaggcug

SEQ ID NO: 583980 - RNA, 19 nt, Human
gauugugccacugcacucc

SEQ ID NO: 583981 - RNA, 24 nt, Human
gcaccuaccacguacagagcucuc

SEQ ID NO: 583982 - RNA, 18 nt, Human
gcauggagucucuccacc

SEQ ID NO: 583983 - RNA, 23 nt, Human
gccaaggcugucuuuuaaaaagc

SEQ ID NO: 583984 - RNA, 19 nt, Human
gccacugcacuccggccug

SEQ ID NO: 583985 - RNA, 24 nt, Human
gccacugcacuccggccuggguga

SEQ ID NO: 583986 - RNA, 20 nt, Human
gcccaaagaagguaucugca

SEQ ID NO: 583987 - RNA, 18 nt, Human
gcugugguggcccaugcc

SEQ ID NO: 583988 - RNA, 19 nt, Human
ggaggcugaauauagaauu

SEQ ID NO: 583989 - RNA, 24 nt, Human
ggcccaugccuguagucaucccag

SEQ ID NO: 583990 - RNA, 23 nt, Human
ggcucaagcuaucugcccaccuc

SEQ ID NO: 583991 - RNA, 24 nt, Human
ggcugugguggcccaugccuguag

SEQ ID NO: 583992 - RNA, 24 nt, Human
gggcacgugcccaucuaaagucuc

SEQ ID NO: 583993 - RNA, 22 nt, Human
gggguuucaccacguugcccag

SEQ ID NO: 583994 - RNA, 23 nt, Human
gggguuucaccacguugcccagg

SEQ ID NO: 583995 - RNA, 24 nt, Human
ggguucucuguugcccaggcugga

SEQ ID NO: 583996 - RNA, 20 nt, Human
gguaaucacagcucacugca

SEQ ID NO: 583997 - RNA, 19 nt, Human
guagagaugggguuucacc

SEQ ID NO: 583998 - RNA, 22 nt, Human
guagagaugggguuucaccacg

SEQ ID NO: 583999 - RNA, 19 nt, Human
guauuuuuuguagagaugg

SEQ ID NO: 584000 - RNA, 20 nt, Human
guucucuguugcccaggcug

SEQ ID NO: 584001 - RNA, 22 nt, Human
guucucuguugcccaggcugga

SEQ ID NO: 584002 - RNA, 22 nt, Human
uaaguaggcacagagcuugcca

SEQ ID NO: 584003 - RNA, 27 nt, Human
uaaguaggcacagagcuugccaccuau

SEQ ID NO: 584004 - RNA, 23 nt, Human
uaagugugcaacaggcacaaacc

SEQ ID NO: 584005 - RNA, 21 nt, Human
uaaucugccgacagcuuccuu

SEQ ID NO: 584006 - RNA, 22 nt, Human
uaauuuuuguauuuuuuguaga

SEQ ID NO: 584007 - RNA, 24 nt, Human
uaauuuuuguauuuuuuguagaga

SEQ ID NO: 584008 - RNA, 22 nt, Human
uagagaugggguuucaccacgu

SEQ ID NO: 584009 - RNA, 24 nt, Human
uagggagaugagcaagcauuuugu

SEQ ID NO: 584010 - RNA, 24 nt, Human
uagguucucugggggcagcaguuc

SEQ ID NO: 584011 - RNA, 21 nt, Human
uaguauugaaaucacaaaguc

SEQ ID NO: 584012 - RNA, 24 nt, Human
uaguauugaaaucacaaagucaga

SEQ ID NO: 584013 - RNA, 21 nt, Human
ucaccacguugcccaggcugg

SEQ ID NO: 584014 - RNA, 19 nt, Human
ucacugcagccucgaccuc

SEQ ID NO: 584015 - RNA, 23 nt, Human
ucacugcagccucgaccucccag

SEQ ID NO: 584016 - RNA, 24 nt, Human
ucacugcagccucgaccucccagg

SEQ ID NO: 584017 - RNA, 18 nt, Human
ucagccuccccagcagcu

SEQ ID NO: 584018 - RNA, 20 nt, Human
ucagccuccccagcagcugg

SEQ ID NO: 584019 - RNA, 23 nt, Human
ucagcuggcugugguggcccaug

SEQ ID NO: 584020 - RNA, 21 nt, Human
ucccaccucagccuccccagc

SEQ ID NO: 584021 - RNA, 21 nt, Human
ucccaggcccaagcaauccuc

SEQ ID NO: 584022 - RNA, 22 nt, Human
ucuacuaaaaagaaaaaaaaaa

SEQ ID NO: 584023 - RNA, 18 nt, Human
ucuccaugugacuguugc

SEQ ID NO: 584024 - RNA, 19 nt, Human
ucuccaugugacuguugcc

SEQ ID NO: 584025 - RNA, 22 nt, Human
ucucgaacuccucggcucaagc

SEQ ID NO: 584026 - RNA, 18 nt, Human
ucucuggcugaagguggc

SEQ ID NO: 584027 - RNA, 19 nt, Human
ucucuggcugaagguggcg

SEQ ID NO: 584028 - RNA, 18 nt, Human
ucucugggggcagcaguu

SEQ ID NO: 584029 - RNA, 18 nt, Human
ucucuguugcccaggcug

SEQ ID NO: 584030 - RNA, 23 nt, Human
ucucuguugcccaggcuggaaug

SEQ ID NO: 584031 - RNA, 21 nt, Human
ucugcaagccagguacaaacc

SEQ ID NO: 584032 - RNA, 25 nt, Human
ucugcaagccagguacaaaccagca

SEQ ID NO: 584033 - RNA, 19 nt, Human
ucugcauggagucucucca

SEQ ID NO: 584034 - RNA, 19 nt, Human
ucugcccaccucagcuucc

SEQ ID NO: 584035 - RNA, 19 nt, Human
ucugcuagguucucugggg

SEQ ID NO: 584036 - RNA, 18 nt, Human
ucuguugcccaggcugga

SEQ ID NO: 584037 - RNA, 24 nt, Human
ucuguugcccaggcuggaaugcag

SEQ ID NO: 584038 - RNA, 24 nt, Human
ucuucggccucccagccucucugg

SEQ ID NO: 584039 - RNA, 23 nt, Human
ugaaaggcugaagugggaggauc

SEQ ID NO: 584040 - RNA, 19 nt, Human
ugaacauugugcugcccaa

SEQ ID NO: 584041 - RNA, 20 nt, Human
ugaacauugugcugcccaaa

SEQ ID NO: 584042 - RNA, 18 nt, Human
ugacuguugcccugcagg

SEQ ID NO: 584043 - RNA, 22 nt, Human
ugacuuccuacuucuaaacacc

SEQ ID NO: 584044 - RNA, 26 nt, Human
ugagcaccuaccacguacagagcucu

SEQ ID NO: 584045 - RNA, 18 nt, Human
ugaggcugcagugagccu

SEQ ID NO: 584046 - RNA, 23 nt, Human
ugcaacaggcacaaacccaggcc

SEQ ID NO: 584047 - RNA, 22 nt, Human
ugcccaaagaagguaucugcaa

SEQ ID NO: 584048 - RNA, 24 nt, Human
ugcccaggcuggucucgaacuccu

SEQ ID NO: 584049 - RNA, 20 nt, Human
uggcuggccaaggcugucuu

SEQ ID NO: 584050 - RNA, 21 nt, Human
ugggaccacagaugugcacca

SEQ ID NO: 584051 - RNA, 22 nt, Human
ugggcacgugcccaucuaaagu

SEQ ID NO: 584052 - RNA, 24 nt, Human
ugggguuucaccacguugcccagg

SEQ ID NO: 584053 - RNA, 21 nt, Human
ugguggcccaugccuguaguc

SEQ ID NO: 584054 - RNA, 26 nt, Human
ugucggaggucgaauucuaguucugc

SEQ ID NO: 584055 - RNA, 22 nt, Human
uguguugguucaagaccagucu

SEQ ID NO: 584056 - RNA, 20 nt, Human
uguugguucaagaccagucu

SEQ ID NO: 584057 - RNA, 23 nt, Human
uuaguauugaaaucacaaaguca

SEQ ID NO: 584058 - RNA, 24 nt, Human
uucuacuaaaaagaaaaaaaaaau

SEQ ID NO: 584059 - RNA, 19 nt, Human
uucucugggggcagcaguu

SEQ ID NO: 584060 - RNA, 24 nt, Human
uucucuguugcccaggcuggaaug

SEQ ID NO: 584061 - RNA, 24 nt, Human
uugaaaggcugaagugggaggauc

SEQ ID NO: 584062 - RNA, 21 nt, Human
uugaaaucacaaagucagaaa

SEQ ID NO: 584063 - RNA, 20 nt, Human
uugauacaaaguauccaguu

SEQ ID NO: 584064 - RNA, 21 nt, Human
uugccaccuauuagguacuca

SEQ ID NO: 584065 - RNA, 23 nt, Human
uugcccaggcuggaaugcaguga

SEQ ID NO: 584066 - RNA, 24 nt, Human
uuggaggcugaauauagaauuuua

SEQ ID NO: 584067 - RNA, 24 nt, Human
uuguagagaugggguuucaccacg

SEQ ID NO: 584068 - RNA, 23 nt, Human
uugugccacugcacuccggccug

SEQ ID NO: 584069 - RNA, 25 nt, Human
uuuguagagaugggguuucaccacg

SEQ ID NO: 584070 - RNA, 23 nt, Human
uuuuguuuguuuguuuuuuuccc

SEQ ID NO: 584071 - RNA, 20 nt, Human
uuuuuguauuuuuuguagag

SEQ ID NO: 584072 - RNA, 23 nt, Human
uuuuuguauuuuuuguagagaug

SEQ ID NO: 584073 - RNA, 20 nt, Human
uuuuuguuuguuuguuuuuu

SEQ ID NO: 584074 - RNA, 21 nt, Human
uuuuuguuuguuuguuuuuuu

SEQ ID NO: 584075 - RNA, 22 nt, Human
uuuuuuguagagaugggguuuc

SEQ ID NO: 584076 - RNA, 24 nt, Human
uuuuuuguagagaugggguuucac

SEQ ID NO: 584077 - RNA, 23 nt, Human
aaaacuucauauuaugaaagcaa

SEQ ID NO: 584078 - RNA, 18 nt, Human
aacugcaugaucuucugc

SEQ ID NO: 584079 - RNA, 19 nt, Human
acugcagcuucaugccucc

SEQ ID NO: 584080 - RNA, 21 nt, Human
acuucagacuagaggguucag

SEQ ID NO: 584081 - RNA, 20 nt, Human
acuuuucuuguuggccacca

SEQ ID NO: 584082 - RNA, 22 nt, Human
auauuccaaguuucaaagauuu

SEQ ID NO: 584083 - RNA, 20 nt, Human
caugaaaacuuccaaacugc

SEQ ID NO: 584084 - RNA, 19 nt, Human
cccuagaaacagggacaga

SEQ ID NO: 584085 - RNA, 18 nt, Human
ccucucaucuccccgacu

SEQ ID NO: 584086 - RNA, 18 nt, Human
cgggaacucagcacugcg

SEQ ID NO: 584087 - RNA, 24 nt, Human
cucaaagguuucacuguugacauu

SEQ ID NO: 584088 - RNA, 20 nt, Human
cuccugcgaacuuguagaac

SEQ ID NO: 584089 - RNA, 18 nt, Human
cucucaucuccccgacug

SEQ ID NO: 584090 - RNA, 23 nt, Human
cugcagcuucaugccuccucuca

SEQ ID NO: 584091 - RNA, 20 nt, Human
cugcaugaucuucugccagg

SEQ ID NO: 584092 - RNA, 21 nt, Human
cuucaucaacauaagcuccua

SEQ ID NO: 584093 - RNA, 23 nt, Human
gagggugcuggcucccucaaagg

SEQ ID NO: 584094 - RNA, 19 nt, Human
gaucuugcggcugaucucg

SEQ ID NO: 584095 - RNA, 18 nt, Human
gcagcuucaugccuccuc

SEQ ID NO: 584096 - RNA, 25 nt, Human
gcgcuaggaauggcaagugguggca

SEQ ID NO: 584097 - RNA, 19 nt, Human
gcuuaauaucaaucacauc

SEQ ID NO: 584098 - RNA, 18 nt, Human
ggcugccgcggacuccua

SEQ ID NO: 584099 - RNA, 22 nt, Human
ggcuuacccggaggcugccgcg

SEQ ID NO: 584100 - RNA, 21 nt, Human
guagaaacucuggaaucucuu

SEQ ID NO: 584101 - RNA, 18 nt, Human
gucggguugcagcuccau

SEQ ID NO: 584102 - RNA, 21 nt, Human
uaagcuccuaauucuuguaau

SEQ ID NO: 584103 - RNA, 20 nt, Human
ucaaagguuucacuguugac

SEQ ID NO: 584104 - RNA, 22 nt, Human
uccucugucauuugguccugac

SEQ ID NO: 584105 - RNA, 21 nt, Human
ugaaagcaauauauuccaagu

SEQ ID NO: 584106 - RNA, 22 nt, Human
ugacauuugugguuuuugacuc

SEQ ID NO: 584107 - RNA, 21 nt, Human
uuccaaguuucaaagauuuga

SEQ ID NO: 584108 - RNA, 21 nt, Human
aagguugcaaggcccgugugu

SEQ ID NO: 584109 - RNA, 21 nt, Human
acagcacuggaaggcagcagc

SEQ ID NO: 584110 - RNA, 18 nt, Human
acagggaccugcugugga

SEQ ID NO: 584111 - RNA, 21 nt, Human
accaggcugcagaccucccac

SEQ ID NO: 584112 - RNA, 28 nt, Human
acuggaaggcagcagcagggugggggcc

SEQ ID NO: 584113 - RNA, 23 nt, Human
agaaaaccagagugagcaguggg

SEQ ID NO: 584114 - RNA, 21 nt, Human
agagccaggggaugggggcag

SEQ ID NO: 584115 - RNA, 21 nt, Human
agaugacagaucugggcucca

SEQ ID NO: 584116 - RNA, 20 nt, Human
agcccagccguccaccaccc

SEQ ID NO: 584117 - RNA, 19 nt, Human
aggcagcagcagggugggg

SEQ ID NO: 584118 - RNA, 18 nt, Human
aggcagggucccuucacg

SEQ ID NO: 584119 - RNA, 20 nt, Human
aggcagggugagggcccugu

SEQ ID NO: 584120 - RNA, 21 nt, Human
aggccaugaccaggcugcaga

SEQ ID NO: 584121 - RNA, 24 nt, Human
aggcggcgggguggucggcugcuc

SEQ ID NO: 584122 - RNA, 19 nt, Human
augaccaggcugcagaccu

SEQ ID NO: 584123 - RNA, 21 nt, Human
augcagauaugucuguccaca

SEQ ID NO: 584124 - RNA, 25 nt, Human
cacgacagcccagccguccaccacc

SEQ ID NO: 584125 - RNA, 20 nt, Human
cagaaaaccagagugagcac

SEQ ID NO: 584126 - RNA, 20 nt, Human
cagaggagggagacagcagc

SEQ ID NO: 584127 - RNA, 19 nt, Human
cagcagcagggugggggcc

SEQ ID NO: 584128 - RNA, 22 nt, Human
cagcagcagggugggggccuag

SEQ ID NO: 584129 - RNA, 19 nt, Human
cagccguccaccacccgcc

SEQ ID NO: 584130 - RNA, 21 nt, Human
caggggccuccugguuggccc

SEQ ID NO: 584131 - RNA, 24 nt, Human
ccaccacccgccucaucucugccc

SEQ ID NO: 584132 - RNA, 23 nt, Human
ccacugccuggguuacagccagg

SEQ ID NO: 584133 - RNA, 22 nt, Human
cccaccagccacaccgagggga

SEQ ID NO: 584134 - RNA, 19 nt, Human
ccccaugcaccggaggcgg

SEQ ID NO: 584135 - RNA, 22 nt, Human
cccccgggggcgcgcucagccc

SEQ ID NO: 584136 - RNA, 26 nt, Human
ccccgggggcgcgcucagccccagcg

SEQ ID NO: 584137 - RNA, 18 nt, Human
cccugugcagacccugcc

SEQ ID NO: 584138 - RNA, 19 nt, Human
ccucaggcuucccaagccc

SEQ ID NO: 584139 - RNA, 18 nt, Human
ccugaaaggcaggguccc

SEQ ID NO: 584140 - RNA, 24 nt, Human
cgcgcucagccccagcgauggcuc

SEQ ID NO: 584141 - RNA, 19 nt, Human
cggcgggguggucggcugc

SEQ ID NO: 584142 - RNA, 20 nt, Human
cggcgggguggucggcugcu

SEQ ID NO: 584143 - RNA, 26 nt, Human
cuccagacccugagcagaaaaccaga

SEQ ID NO: 584144 - RNA, 22 nt, Human
cuccaggggccuccugguuggc

SEQ ID NO: 584145 - RNA, 23 nt, Human
cuccggccgcccggcaucgggcg

SEQ ID NO: 584146 - RNA, 20 nt, Human
cuccugguuggcccuugugg

SEQ ID NO: 584147 - RNA, 22 nt, Human
cugcagaccucccacugccugg

SEQ ID NO: 584148 - RNA, 22 nt, Human
cuucccagggguccgugggccc

SEQ ID NO: 584149 - RNA, 23 nt, Human
gccucaggcuucccaagcccugg

SEQ ID NO: 584150 - RNA, 20 nt, Human
ggcagaggagggagacagca

SEQ ID NO: 584151 - RNA, 20 nt, Human
gggcagaggagggagacagc

SEQ ID NO: 584152 - RNA, 21 nt, Human
gggucccuucacggcucaccc

SEQ ID NO: 584153 - RNA, 21 nt, Human
ggugguucccucccuuccaag

SEQ ID NO: 584154 - RNA, 19 nt, Human
guggaggccaugaccaggc

SEQ ID NO: 584155 - RNA, 25 nt, Human
uaccgggaacugguggcgcguagug

SEQ ID NO: 584156 - RNA, 23 nt, Human
uccacagggaccugcuguggagg

SEQ ID NO: 584157 - RNA, 19 nt, Human
uccaccacccgccucaucu

SEQ ID NO: 584158 - RNA, 20 nt, Human
uccagacccugagcagaaaa

SEQ ID NO: 584159 - RNA, 27 nt, Human
uccccccgggggcgcgcucagcccccc

SEQ ID NO: 584160 - RNA, 20 nt, Human
uccccgaucuccccccgggg

SEQ ID NO: 584161 - RNA, 22 nt, Human
ucccuucacggcucacccacca

SEQ ID NO: 584162 - RNA, 23 nt, Human
ugagcagaaaaccagagugagca

SEQ ID NO: 584163 - RNA, 19 nt, Human
ugcccaggggagagccagg

SEQ ID NO: 584164 - RNA, 18 nt, Human
ugccuggguuacagccag

SEQ ID NO: 584165 - RNA, 19 nt, Human
uggcuccucagccaguccc

SEQ ID NO: 584166 - RNA, 18 nt, Human
ugggggcagaggagggag

SEQ ID NO: 584167 - RNA, 20 nt, Human
ugggggcagaggagggagac

SEQ ID NO: 584168 - RNA, 20 nt, Human
ugggggcagggagaggcaga

SEQ ID NO: 584169 - RNA, 20 nt, Human
ugguucccucccuuccaagg

SEQ ID NO: 584170 - RNA, 25 nt, Human
aaaaauuaucuugguucaaaacaau

SEQ ID NO: 584171 - RNA, 18 nt, Human
aacccuuguguugcccuu

SEQ ID NO: 584172 - RNA, 22 nt, Human
aagagacaaaaucuugcuaugu

SEQ ID NO: 584173 - RNA, 21 nt, Human
aaggacauuugggugguuucu

SEQ ID NO: 584174 - RNA, 22 nt, Human
acagugcacuacagcccagaac

SEQ ID NO: 584175 - RNA, 22 nt, Human
acccacuucucuccucucuccc

SEQ ID NO: 584176 - RNA, 19 nt, Human
accuaguuacccccaaugg

SEQ ID NO: 584177 - RNA, 18 nt, Human
agacaaaaucuugcuaug

SEQ ID NO: 584178 - RNA, 18 nt, Human
agcacagugcacuacagc

SEQ ID NO: 584179 - RNA, 22 nt, Human
auaccacaaugucacaaccagg

SEQ ID NO: 584180 - RNA, 18 nt, Human
auacugaugcagaacuua

SEQ ID NO: 584181 - RNA, 24 nt, Human
caaaaucuugcuauguugcccagg

SEQ ID NO: 584182 - RNA, 19 nt, Human
caagaaacugccaaacugc

SEQ ID NO: 584183 - RNA, 19 nt, Human
cacaguuuaauuauucgcc

SEQ ID NO: 584184 - RNA, 22 nt, Human
cacaguuuaauuauucgccccu

SEQ ID NO: 584185 - RNA, 24 nt, Human
cacccacuucucuccucucuccca

SEQ ID NO: 584186 - RNA, 22 nt, Human
cacuacagcccagaacuccugg

SEQ ID NO: 584187 - RNA, 22 nt, Human
ccacagucaaggcacagaaugc

SEQ ID NO: 584188 - RNA, 23 nt, Human
ccacuucucuccucucucccaaa

SEQ ID NO: 584189 - RNA, 21 nt, Human
cccacuucucuccucucuccc

SEQ ID NO: 584190 - RNA, 22 nt, Human
cccacuucucuccucucuccca

SEQ ID NO: 584191 - RNA, 23 nt, Human
ccccuuaccuaguuacccccaau

SEQ ID NO: 584192 - RNA, 22 nt, Human
ccugggcucaagugauccuccu

SEQ ID NO: 584193 - RNA, 23 nt, Human
ccugggcucaagugauccuccug

SEQ ID NO: 584194 - RNA, 23 nt, Human
cuacagcccagaacuccugggcu

SEQ ID NO: 584195 - RNA, 18 nt, Human
cucaagugauccuccugc

SEQ ID NO: 584196 - RNA, 20 nt, Human
cuccagaaaaaucuuuuaag

SEQ ID NO: 584197 - RNA, 24 nt, Human
cuccucucucccaaacuccaucuc

SEQ ID NO: 584198 - RNA, 25 nt, Human
cugcugggucauauggcaauugcau

SEQ ID NO: 584199 - RNA, 20 nt, Human
cugguggucccccacuccca

SEQ ID NO: 584200 - RNA, 21 nt, Human
cuuugauugugugguaguucu

SEQ ID NO: 584201 - RNA, 24 nt, Human
gaacuccugggcucaagugauccu

SEQ ID NO: 584202 - RNA, 19 nt, Human
gcucaagugauccuccugc

SEQ ID NO: 584203 - RNA, 22 nt, Human
gcugaagugcaguggcuauuca

SEQ ID NO: 584204 - RNA, 19 nt, Human
gggcucaagugauccuccu

SEQ ID NO: 584205 - RNA, 18 nt, Human
ggugguuucuaguuucug

SEQ ID NO: 584206 - RNA, 22 nt, Human
gucacaaccaggauauucagau

SEQ ID NO: 584207 - RNA, 18 nt, Human
uaccacaaugucacaacc

SEQ ID NO: 584208 - RNA, 20 nt, Human
uacccccaaugguaacaucu

SEQ ID NO: 584209 - RNA, 25 nt, Human
uaguaauaucuuauuguggguuuua

SEQ ID NO: 584210 - RNA, 18 nt, Human
uauguugcccaggcugaa

SEQ ID NO: 584211 - RNA, 23 nt, Human
uauguugcccaggcugaagugca

SEQ ID NO: 584212 - RNA, 20 nt, Human
ucacaagugcuaucccacua

SEQ ID NO: 584213 - RNA, 19 nt, Human
ucccaaacuccaucucuaa

SEQ ID NO: 584214 - RNA, 21 nt, Human
uccugggcucaagugauccuc

SEQ ID NO: 584215 - RNA, 22 nt, Human
uccugggcucaagugauccucc

SEQ ID NO: 584216 - RNA, 22 nt, Human
uccugggcucaagugauccucc

SEQ ID NO: 584217 - RNA, 24 nt, Human
uccugggcucaagugauccuccug

SEQ ID NO: 584218 - RNA, 18 nt, Human
uccuuaggcaaccuggug

SEQ ID NO: 584219 - RNA, 22 nt, Human
uccuuaggcaaccugguggucc

SEQ ID NO: 584220 - RNA, 19 nt, Human
ucuugcuauguugcccagg

SEQ ID NO: 584221 - RNA, 23 nt, Human
ucuugcuauguugcccaggcuga

SEQ ID NO: 584222 - RNA, 24 nt, Human
ucuugcuauguugcccaggcugaa

SEQ ID NO: 584223 - RNA, 23 nt, Human
ugaaaaaaaauuaucuugguuca

SEQ ID NO: 584224 - RNA, 23 nt, Human
ugcacgaaugauuuguuucuuuu

SEQ ID NO: 584225 - RNA, 23 nt, Human
ugcccaggcugaagugcaguggc

SEQ ID NO: 584226 - RNA, 24 nt, Human
ugcuauguugcccaggcugaagug

SEQ ID NO: 584227 - RNA, 25 nt, Human
ugcuauguugcccaggcugaagugc

SEQ ID NO: 584228 - RNA, 19 nt, Human
uggcagguguguaguaaua

SEQ ID NO: 584229 - RNA, 19 nt, Human
ugggauaaaugccugugag

SEQ ID NO: 584230 - RNA, 20 nt, Human
ugggcucaagugauccuccu

SEQ ID NO: 584231 - RNA, 18 nt, Human
ugguggucccccacuccc

SEQ ID NO: 584232 - RNA, 20 nt, Human
ugucggauaugugguuugca

SEQ ID NO: 584233 - RNA, 19 nt, Human
uguguacagguuucugugu

SEQ ID NO: 584234 - RNA, 24 nt, Human
uguuucuaaccaggaccuguucac

SEQ ID NO: 584235 - RNA, 19 nt, Human
uguuucuuuuauugcuggg

SEQ ID NO: 584236 - RNA, 23 nt, Human
uuccaaaauuugaugguguugcc

SEQ ID NO: 584237 - RNA, 22 nt, Human
uucuuuagauauucuaaacacu

SEQ ID NO: 584238 - RNA, 23 nt, Human
uugaugguguugccauuuuuuau

SEQ ID NO: 584239 - RNA, 24 nt, Human
uugcccaggcugaagugcaguggc

SEQ ID NO: 584240 - RNA, 25 nt, Human
uugguucaaaacaauuguuggagua

SEQ ID NO: 584241 - RNA, 18 nt, Human
aaaccauauuugccuaca

SEQ ID NO: 584242 - RNA, 25 nt, Human
aagagcccugaacaauuuuuaaucc

SEQ ID NO: 584243 - RNA, 24 nt, Human
accaucucuaagagcccugaacaa

SEQ ID NO: 584244 - RNA, 21 nt, Human
accauucaugcauccauaauc

SEQ ID NO: 584245 - RNA, 25 nt, Human
auccauuuccuaaacaagauauguu

SEQ ID NO: 584246 - RNA, 21 nt, Human
auuugccuacacaccacugcc

SEQ ID NO: 584247 - RNA, 25 nt, Human
cacuugauuuuuuuauacauccauu

SEQ ID NO: 584248 - RNA, 24 nt, Human
cauuaaaagacgaaugccaaacca

SEQ ID NO: 584249 - RNA, 23 nt, Human
ccacugccuuuucccuuucuuuc

SEQ ID NO: 584250 - RNA, 18 nt, Human
uauaguauaaagauggcu

SEQ ID NO: 584251 - RNA, 22 nt, Human
ucaaaaugacaucauaucaggu

SEQ ID NO: 584252 - RNA, 18 nt, Human
ucuaagagcccugaacaa

SEQ ID NO: 584253 - RNA, 22 nt, Human
ucuccaaagcaugaccauucau

SEQ ID NO: 584254 - RNA, 23 nt, Human
ucucuaagagcccugaacaauuu

SEQ ID NO: 584255 - RNA, 25 nt, Human
uguuuauucaucuuuuuaauccuca

SEQ ID NO: 584256 - RNA, 19 nt, Human
uugcacuugauuuuuuuau

SEQ ID NO: 584257 - RNA, 27 nt, Human
aaggagaaguuggaacaaaugcagugg

SEQ ID NO: 584258 - RNA, 20 nt, Human
aaugcagugggcacaaugac

SEQ ID NO: 584259 - RNA, 20 nt, Human
cgaccccgccuccaccagcc

SEQ ID NO: 584260 - RNA, 21 nt, Human
cucgaccccgccuccaccagc

SEQ ID NO: 584261 - RNA, 23 nt, Human
cuggggugaguuuauacaaggag

SEQ ID NO: 584262 - RNA, 21 nt, Human
gaacaaacuaaaagcaucuau

SEQ ID NO: 584263 - RNA, 24 nt, Human
gaacaggcuuuaguacugaggucc

SEQ ID NO: 584264 - RNA, 22 nt, Human
gaccccgccuccaccagcccac

SEQ ID NO: 584265 - RNA, 19 nt, Human
gcccuguguugcuggggug

SEQ ID NO: 584266 - RNA, 21 nt, Human
uacaaggagaaguuggaacaa

SEQ ID NO: 584267 - RNA, 22 nt, Human
uacagcugacuuucugugauuu

SEQ ID NO: 584268 - RNA, 22 nt, Human
ucaguucaaaguaggucuuggg

SEQ ID NO: 584269 - RNA, 21 nt, Human
ucgaccccgccuccaccagcc

SEQ ID NO: 584270 - RNA, 24 nt, Human
ucgaccccgccuccaccagcccac

SEQ ID NO: 584271 - RNA, 19 nt, Human
ugcucauuguugaucaggg

SEQ ID NO: 584272 - RNA, 19 nt, Human
uggaacaaaugcagugggc

SEQ ID NO: 584273 - RNA, 18 nt, Human
uuauuuccuccagagaac

SEQ ID NO: 584274 - RNA, 23 nt, Human
uucuuuauuuccuccagagaaca

SEQ ID NO: 584275 - RNA, 26 nt, Human
aaaaaaaaaacaaaacacauagacaa

SEQ ID NO: 584276 - RNA, 25 nt, Human
aaaaaaaaacaaaacacauagacaa

SEQ ID NO: 584277 - RNA, 18 nt, Human
aaaacaaaacacauagac

SEQ ID NO: 584278 - RNA, 18 nt, Human
aaacaccacagcccagug

SEQ ID NO: 584279 - RNA, 24 nt, Human
aaacaccacagcccagugaugaac

SEQ ID NO: 584280 - RNA, 22 nt, Human
aaacagguaauucucaaccugg

SEQ ID NO: 584281 - RNA, 19 nt, Human
aaccaggaagcaaaggcca

SEQ ID NO: 584282 - RNA, 22 nt, Human
aaccaggaagcaaaggccagga

SEQ ID NO: 584283 - RNA, 20 nt, Human
aagaggguuuucucucccuu

SEQ ID NO: 584284 - RNA, 18 nt, Human
aagcaagggcucgagaca

SEQ ID NO: 584285 - RNA, 21 nt, Human
aagcagcugucagaagaacuu

SEQ ID NO: 584286 - RNA, 20 nt, Human
aaguagcuaagauuauauac

SEQ ID NO: 584287 - RNA, 18 nt, Human
aagucuagauuucuccag

SEQ ID NO: 584288 - RNA, 21 nt, Human
acaaaguaagagcaagacuug

SEQ ID NO: 584289 - RNA, 24 nt, Human
acaacugugguugaacaaaugcuc

SEQ ID NO: 584290 - RNA, 19 nt, Human
acacugggggacugugggg

SEQ ID NO: 584291 - RNA, 24 nt, Human
accacagcccagugaugaacgccu

SEQ ID NO: 584292 - RNA, 18 nt, Human
accaucacacuacaugcu

SEQ ID NO: 584293 - RNA, 19 nt, Human
accccuccccaccccagcc

SEQ ID NO: 584294 - RNA, 22 nt, Human
acucuggaaagcucuucagcac

SEQ ID NO: 584295 - RNA, 18 nt, Human
acuggaaccugaacucca

SEQ ID NO: 584296 - RNA, 21 nt, Human
agacacaccugagccugaggg

SEQ ID NO: 584297 - RNA, 18 nt, Human
agcccagugaugaacgcc

SEQ ID NO: 584298 - RNA, 18 nt, Human
agcuaaccuugcaaagca

SEQ ID NO: 584299 - RNA, 18 nt, Human
aggaaagcaagggcucga

SEQ ID NO: 584300 - RNA, 24 nt, Human
aggaagaggguuuucucucccuuc

SEQ ID NO: 584301 - RNA, 26 nt, Human
aggcaaaccaggaagcaaaggccagg

SEQ ID NO: 584302 - RNA, 22 nt, Human
aggcacucggaugaagaguuuu

SEQ ID NO: 584303 - RNA, 20 nt, Human
aggccaggacugaacuagga

SEQ ID NO: 584304 - RNA, 21 nt, Human
agggaaacagcagaaagagca

SEQ ID NO: 584305 - RNA, 21 nt, Human
agggggauugcaucggcuggu

SEQ ID NO: 584306 - RNA, 22 nt, Human
auaaucaguuaaaagucaaagu

SEQ ID NO: 584307 - RNA, 25 nt, Human
auacugaagcccucaaaaaccggag

SEQ ID NO: 584308 - RNA, 21 nt, Human
auagacaaguaaugcaaacaa

SEQ ID NO: 584309 - RNA, 23 nt, Human
augaacaaugagcaaagcauguc

SEQ ID NO: 584310 - RNA, 18 nt, Human
augccuaggaaauguuag

SEQ ID NO: 584311 - RNA, 22 nt, Human
caaaccaggaagcaaaggccag

SEQ ID NO: 584312 - RNA, 21 nt, Human
caaagcuaaaaugggaacugg

SEQ ID NO: 584313 - RNA, 20 nt, Human
caaaguaagagcaagacuug

SEQ ID NO: 584314 - RNA, 19 nt, Human
caaagucaaucaauagcca

SEQ ID NO: 584315 - RNA, 21 nt, Human
caagaaacaccacagcccagu

SEQ ID NO: 584316 - RNA, 22 nt, Human
caagaaacaccacagcccagug

SEQ ID NO: 584317 - RNA, 20 nt, Human
caagacccaaggcuagaagc

SEQ ID NO: 584318 - RNA, 23 nt, Human
caagacccaaggcuagaagcuaa

SEQ ID NO: 584319 - RNA, 20 nt, Human
caagacccaaggcuagaagg

SEQ ID NO: 584320 - RNA, 23 nt, Human
cacaccaggaugaccccucccca

SEQ ID NO: 584321 - RNA, 18 nt, Human
cagaucaaugaggugcca

SEQ ID NO: 584322 - RNA, 20 nt, Human
cagcagaccucaggaaauga

SEQ ID NO: 584323 - RNA, 23 nt, Human
cagcagaccucaggaaaugacug

SEQ ID NO: 584324 - RNA, 25 nt, Human
cagcgacagacaaaguggggucuac

SEQ ID NO: 584325 - RNA, 18 nt, Human
caggagagguggagaagg

SEQ ID NO: 584326 - RNA, 18 nt, Human
caucacacuacaugcuuu

SEQ ID NO: 584327 - RNA, 23 nt, Human
ccaacaucugacuuaggcaaacc

SEQ ID NO: 584328 - RNA, 22 nt, Human
ccacucaucagcacccuacccc

SEQ ID NO: 584329 - RNA, 25 nt, Human
ccacugaauugaaucuaaaauucca

SEQ ID NO: 584330 - RNA, 19 nt, Human
ccagcuaaccuugcaaagc

SEQ ID NO: 584331 - RNA, 27 nt, Human
cccaccccagcccuaugacucuggaaa

SEQ ID NO: 584332 - RNA, 26 nt, Human
cccagugaugaacgccaggaugccuc

SEQ ID NO: 584333 - RNA, 23 nt, Human
cccagugaugaacgccaggguac

SEQ ID NO: 584334 - RNA, 27 nt, Human
ccccaccccagcccuaugaccgguucc

SEQ ID NO: 584335 - RNA, 22 nt, Human
cccccgaaacucacagccccuu

SEQ ID NO: 584336 - RNA, 19 nt, Human
ccccuccccaccccagccc

SEQ ID NO: 584337 - RNA, 21 nt, Human
cccucaggaaagcaagggcuc

SEQ ID NO: 584338 - RNA, 19 nt, Human
ccucaaaauccucuuugga

SEQ ID NO: 584339 - RNA, 19 nt, Human
ccucaggaaagcaagggcu

SEQ ID NO: 584340 - RNA, 23 nt, Human
ccuccccaccccagcccuaugac

SEQ ID NO: 584341 - RNA, 22 nt, Human
ccucuuuggagaaaguaggggc

SEQ ID NO: 584342 - RNA, 23 nt, Human
ccugucccugcaucuucagucgu

SEQ ID NO: 584343 - RNA, 23 nt, Human
ccuucuuuggugucugggccaaa

SEQ ID NO: 584344 - RNA, 18 nt, Human
cggcaagacccaaggcua

SEQ ID NO: 584345 - RNA, 24 nt, Human
cggcaagacccaaggcuagaagcu

SEQ ID NO: 584346 - RNA, 23 nt, Human
cuaaccuugcaaagcacacacac

SEQ ID NO: 584347 - RNA, 18 nt, Human
cucaugucuucagcguca

SEQ ID NO: 584348 - RNA, 25 nt, Human
cuccugccuacuuuuccccuuuaaa

SEQ ID NO: 584349 - RNA, 22 nt, Human
cuucagucgucucuacugccac

SEQ ID NO: 584350 - RNA, 20 nt, Human
cuugcccaccaucacacuac

SEQ ID NO: 584351 - RNA, 19 nt, Human
cuuuccuccuuucuccucc

SEQ ID NO: 584352 - RNA, 20 nt, Human
gaaaauggccccuucaccaa

SEQ ID NO: 584353 - RNA, 20 nt, Human
gaaacaccacagcccaguga

SEQ ID NO: 584354 - RNA, 23 nt, Human
gaaacagcagaaagagcagagaa

SEQ ID NO: 584355 - RNA, 23 nt, Human
gacccugucccugcaucuucagu

SEQ ID NO: 584356 - RNA, 18 nt, Human
gcaaagcaugucuugccc

SEQ ID NO: 584357 - RNA, 19 nt, Human
gccaaaaccaccaaccccg

SEQ ID NO: 584358 - RNA, 23 nt, Human
gccccuucaccaacuaccacuca

SEQ ID NO: 584359 - RNA, 19 nt, Human
gcuuuggauuggguguugu

SEQ ID NO: 584360 - RNA, 19 nt, Human
ggagguguggaggugccag

SEQ ID NO: 584361 - RNA, 21 nt, Human
ggcaggacgaguugcugcaga

SEQ ID NO: 584362 - RNA, 23 nt, Human
gggaaacagcagaaagagcagag

SEQ ID NO: 584363 - RNA, 22 nt, Human
ggggcaucucaguaagcagcug

SEQ ID NO: 584364 - RNA, 22 nt, Human
guacauugauugagacuuggcu

SEQ ID NO: 584365 - RNA, 26 nt, Human
gucaucuuucaugccuaggaaauguu

SEQ ID NO: 584366 - RNA, 20 nt, Human
guggaacaagaaacaccaca

SEQ ID NO: 584367 - RNA, 23 nt, Human
uaaaacaguaucuuucuaauccc

SEQ ID NO: 584368 - RNA, 20 nt, Human
uacagagggagcucaguccg

SEQ ID NO: 584369 - RNA, 24 nt, Human
uagcacagaugagagcaaagcuaa

SEQ ID NO: 584370 - RNA, 18 nt, Human
uagugugucuucaaccuc

SEQ ID NO: 584371 - RNA, 18 nt, Human
uauacugaagccauuucu

SEQ ID NO: 584372 - RNA, 24 nt, Human
uaucccagaacuacuuaugauuua

SEQ ID NO: 584373 - RNA, 18 nt, Human
uauuuguucucugggcuu

SEQ ID NO: 584374 - RNA, 23 nt, Human
ucaguuaaaagucaaagucaauc

SEQ ID NO: 584375 - RNA, 22 nt, Human
uccccaccccagcccuaugacu

SEQ ID NO: 584376 - RNA, 20 nt, Human
ucccugcaucuucagucguc

SEQ ID NO: 584377 - RNA, 22 nt, Human
ucuacagccuucacccuucugc

SEQ ID NO: 584378 - RNA, 23 nt, Human
ucuccaguuacuuguaagaagcc

SEQ ID NO: 584379 - RNA, 24 nt, Human
ucucugggcuuugggguagcagag

SEQ ID NO: 584380 - RNA, 19 nt, Human
ucugucucccuuggggacu

SEQ ID NO: 584381 - RNA, 27 nt, Human
ugaccccuccccaccccagcccuauga

SEQ ID NO: 584382 - RNA, 24 nt, Human
ugacucuggaaagcucuucagcac

SEQ ID NO: 584383 - RNA, 20 nt, Human
ugaggacaaucaggaggugu

SEQ ID NO: 584384 - RNA, 24 nt, Human
ugccacaugcccuguccacaccag

SEQ ID NO: 584385 - RNA, 21 nt, Human
ugcccaccaucacacuacaug

SEQ ID NO: 584386 - RNA, 19 nt, Human
ugcggcaagacccaaggcu

SEQ ID NO: 584387 - RNA, 25 nt, Human
uggaaaacagguaauucucaaccug

SEQ ID NO: 584388 - RNA, 18 nt, Human
uggaggccuugcuuaggu

SEQ ID NO: 584389 - RNA, 19 nt, Human
ugguugaacaaaugcucag

SEQ ID NO: 584390 - RNA, 21 nt, Human
ugucagaagaacuuugaggau

SEQ ID NO: 584391 - RNA, 20 nt, Human
ugucaggaagugggggagau

SEQ ID NO: 584392 - RNA, 26 nt, Human
ugucuucaaccucggcaaaauaaccu

SEQ ID NO: 584393 - RNA, 24 nt, Human
ugucuugcccaccaucacacuaca

SEQ ID NO: 584394 - RNA, 27 nt, Human
uguggggcaucucaguaagcagcuggu

SEQ ID NO: 584395 - RNA, 23 nt, Human
ugugguugaacaaaugcucagug

SEQ ID NO: 584396 - RNA, 18 nt, Human
uguugggcaggcguugcg

SEQ ID NO: 584397 - RNA, 20 nt, Human
uguuguggggaauaaauaga

SEQ ID NO: 584398 - RNA, 25 nt, Human
uuacauagugaccuuguguuugucu

SEQ ID NO: 584399 - RNA, 24 nt, Human
uuaggagucuuaacuuuauucccc

SEQ ID NO: 584400 - RNA, 21 nt, Human
uuccuccuuucuccuccugcc

SEQ ID NO: 584401 - RNA, 25 nt, Human
uugaggauggaggccuugcuuaggu

SEQ ID NO: 584402 - RNA, 18 nt, Human
uuggagaaaguaggggcc

SEQ ID NO: 584403 - RNA, 18 nt, Human
uuggucugucucccuugg

SEQ ID NO: 584404 - RNA, 18 nt, Human
uuuauuccccuccucuua

SEQ ID NO: 584405 - RNA, 22 nt, Human
uuugaggacaaucaggaggugu

SEQ ID NO: 584406 - RNA, 22 nt, Human
uuuugaggacaaucaggaggug

SEQ ID NO: 584407 - RNA, 21 nt, Human
acucaggcaugguggcagcau

SEQ ID NO: 584408 - RNA, 22 nt, Human
agccaggaucuccuauggagug

SEQ ID NO: 584409 - RNA, 19 nt, Human
auggaguguguaggugucc

SEQ ID NO: 584410 - RNA, 18 nt, Human
cacgaguguaccggugug

SEQ ID NO: 584411 - RNA, 21 nt, Human
cagcauugagggaaagacagg

SEQ ID NO: 584412 - RNA, 24 nt, Human
cagcauugagggaaagacaggugu

SEQ ID NO: 584413 - RNA, 21 nt, Human
cagccaguucuuuucccaccu

SEQ ID NO: 584414 - RNA, 21 nt, Human
caggucagggcaaaggucaca

SEQ ID NO: 584415 - RNA, 18 nt, Human
ccacauguaggucccagg

SEQ ID NO: 584416 - RNA, 21 nt, Human
cccacuggucccuggcuccaa

SEQ ID NO: 584417 - RNA, 20 nt, Human
cccgccacgccgggacaccg

SEQ ID NO: 584418 - RNA, 19 nt, Human
cccgcgcccagugcgcucc

SEQ ID NO: 584419 - RNA, 25 nt, Human
ccgccacgccgggacaccgccgucc

SEQ ID NO: 584420 - RNA, 21 nt, Human
ccuugcccacccuggaaagcc

SEQ ID NO: 584421 - RNA, 21 nt, Human
ccuugcccuugcccacccugg

SEQ ID NO: 584422 - RNA, 18 nt, Human
cucuccugggaagugaag

SEQ ID NO: 584423 - RNA, 18 nt, Human
gacucgggagccguccgg

SEQ ID NO: 584424 - RNA, 19 nt, Human
gcuucccgccacgccggga

SEQ ID NO: 584425 - RNA, 21 nt, Human
ggacaccgccguccggcccag

SEQ ID NO: 584426 - RNA, 23 nt, Human
ggcugggcccuuccaggucaggg

SEQ ID NO: 584427 - RNA, 22 nt, Human
gggagcgggguccccaccugcc

SEQ ID NO: 584428 - RNA, 19 nt, Human
gggcaaaggucacagccag

SEQ ID NO: 584429 - RNA, 24 nt, Human
guaggucccaggcucaggggcuua

SEQ ID NO: 584430 - RNA, 22 nt, Human
ucacagccaguucuuuucccac

SEQ ID NO: 584431 - RNA, 22 nt, Human
ucaggcaugguggcagcauuga

SEQ ID NO: 584432 - RNA, 23 nt, Human
uccacgaguguaccggugugcgg

SEQ ID NO: 584433 - RNA, 19 nt, Human
uccaggucagggcaaaggu

SEQ ID NO: 584434 - RNA, 22 nt, Human
ucccugcgccucccggucccgc

SEQ ID NO: 584435 - RNA, 19 nt, Human
uggcuccaagccugcuccu

SEQ ID NO: 584436 - RNA, 20 nt, Human
uggcuccaagccugcuccuu

SEQ ID NO: 584437 - RNA, 20 nt, Human
ugggaagugaagacuucuuc

SEQ ID NO: 584438 - RNA, 18 nt, Human
uguuggggagcggggucc

SEQ ID NO: 584439 - RNA, 19 nt, Human
aaaaucucuccaacuggau

SEQ ID NO: 584440 - RNA, 22 nt, Human
aaacaaaguuugcgaugcucau

SEQ ID NO: 584441 - RNA, 21 nt, Human
aaauguuccucuugccuacug

SEQ ID NO: 584442 - RNA, 21 nt, Human
aacacauuuuuucaaggcacu

SEQ ID NO: 584443 - RNA, 23 nt, Human
aacuuuuugagucagucgcaaca

SEQ ID NO: 584444 - RNA, 24 nt, Human
acuggaucaaauuuuuuauauacu

SEQ ID NO: 584445 - RNA, 21 nt, Human
augauaauguuaaaacauauc

SEQ ID NO: 584446 - RNA, 24 nt, Human
caguauuagucugguuuccuacag

SEQ ID NO: 584447 - RNA, 20 nt, Human
ccucaaacuucaagggugaa

SEQ ID NO: 584448 - RNA, 24 nt, Human
cuucaagggugaaaagcauaccau

SEQ ID NO: 584449 - RNA, 21 nt, Human
gagucagucgcaacagacugg

SEQ ID NO: 584450 - RNA, 18 nt, Human
uacaauuuuuagaaaagg

SEQ ID NO: 584451 - RNA, 24 nt, Human
uacaggaaaaauguuccucuugcc

SEQ ID NO: 584452 - RNA, 18 nt, Human
uagaacccacaacagcug

SEQ ID NO: 584453 - RNA, 21 nt, Human
ugaggaagaauuuggacuagc

SEQ ID NO: 584454 - RNA, 24 nt, Human
ugaggaagaauuuggacuagcugg

SEQ ID NO: 584455 - RNA, 19 nt, Human
uguaaaaauauuuuucuuc

SEQ ID NO: 584456 - RNA, 21 nt, Human
uucaagggugaaaagcauacc

SEQ ID NO: 584457 - RNA, 27 nt, Human
uucagcaguggcaacauuuaacuuuuu

SEQ ID NO: 584458 - RNA, 28 nt, Human
uuccuacagaagccuguccugaggaaga

SEQ ID NO: 584459 - RNA, 27 nt, Human
uuuaaaaucucuccaacuggaucaaau

SEQ ID NO: 584460 - RNA, 24 nt, Human
aaaagaaaccaaaauccagagaaa

SEQ ID NO: 584461 - RNA, 21 nt, Human
aaaccaaaauccagagaaaaa

SEQ ID NO: 584462 - RNA, 18 nt, Human
aaagccaaaagaaaccaa

SEQ ID NO: 584463 - RNA, 19 nt, Human
aaaugcacucgacccaaaa

SEQ ID NO: 584464 - RNA, 23 nt, Human
aagcaggaacucaaagggacagc

SEQ ID NO: 584465 - RNA, 23 nt, Human
aagcaucuuugggugugaagagg

SEQ ID NO: 584466 - RNA, 24 nt, Human
aagccaaaagaaaccaaaauccag

SEQ ID NO: 584467 - RNA, 19 nt, Human
aagccagccccagcucccc

SEQ ID NO: 584468 - RNA, 21 nt, Human
aagccagccccagcuccccgg

SEQ ID NO: 584469 - RNA, 25 nt, Human
acagcgcagccaucuugacaaagca

SEQ ID NO: 584470 - RNA, 21 nt, Human
acagcucugaggccuggaagc

SEQ ID NO: 584471 - RNA, 21 nt, Human
acaggccucugguccuggggc

SEQ ID NO: 584472 - RNA, 20 nt, Human
accaccccuccacacaacag

SEQ ID NO: 584473 - RNA, 21 nt, Human
acccaaccccaccucuucccc

SEQ ID NO: 584474 - RNA, 20 nt, Human
acucuccuggcccuccuccu

SEQ ID NO: 584475 - RNA, 24 nt, Human
agacagccagaaagacauggggaa

SEQ ID NO: 584476 - RNA, 21 nt, Human
agagaaaggggaaggcaaggg

SEQ ID NO: 584477 - RNA, 24 nt, Human
agaggaaaccaagacccuucucug

SEQ ID NO: 584478 - RNA, 23 nt, Human
agaggaacauagagacagccaga

SEQ ID NO: 584479 - RNA, 22 nt, Human
agaguuggaacccaaccccacc

SEQ ID NO: 584480 - RNA, 22 nt, Human
agcaaacgaguucaggagccua

SEQ ID NO: 584481 - RNA, 19 nt, Human
agcaggaaaggaggggaca

SEQ ID NO: 584482 - RNA, 18 nt, Human
aggaaauggguucuuugu

SEQ ID NO: 584483 - RNA, 18 nt, Human
aggaacauagagacagcc

SEQ ID NO: 584484 - RNA, 23 nt, Human
aggaaggcugggcagggaggaag

SEQ ID NO: 584485 - RNA, 21 nt, Human
aggaagggaguaggagaggaa

SEQ ID NO: 584486 - RNA, 26 nt, Human
aggagcaaacgaguucaggagccuaa

SEQ ID NO: 584487 - RNA, 21 nt, Human
aggcaccaggucugguuaggu

SEQ ID NO: 584488 - RNA, 21 nt, Human
aggccucugguccuggggcag

SEQ ID NO: 584489 - RNA, 19 nt, Human
agggaagggggagacaggg

SEQ ID NO: 584490 - RNA, 19 nt, Human
agggaggggcuggggcgug

SEQ ID NO: 584491 - RNA, 22 nt, Human
aggggacagaaacgggugccag

SEQ ID NO: 584492 - RNA, 22 nt, Human
aguguuggagacagagaaaggg

SEQ ID NO: 584493 - RNA, 26 nt, Human
aguuggaacccaaccccaccucuucc

SEQ ID NO: 584494 - RNA, 19 nt, Human
auagagacagccagaaaga

SEQ ID NO: 584495 - RNA, 31 nt, Human
auuuuuuucuuuucuuuuuuuuuuuuuuuuu

SEQ ID NO: 584496 - RNA, 22 nt, Human
caaaagaaaccaaaauccagag

SEQ ID NO: 584497 - RNA, 21 nt, Human
caaagcaucuuugggugugaa

SEQ ID NO: 584498 - RNA, 18 nt, Human
caaagggacagcgcagcc

SEQ ID NO: 584499 - RNA, 18 nt, Human
caaggagggaggggcugg

SEQ ID NO: 584500 - RNA, 19 nt, Human
cacacagcucugaggccug

SEQ ID NO: 584501 - RNA, 27 nt, Human
cacacagcucugaggccuggaagccac

SEQ ID NO: 584502 - RNA, 22 nt, Human
cacagaccucugaccaccccuc

SEQ ID NO: 584503 - RNA, 18 nt, Human
cacgggacaaaccaccau

SEQ ID NO: 584504 - RNA, 25 nt, Human
cacuggacugcagugauguccagcc

SEQ ID NO: 584505 - RNA, 20 nt, Human
cagaccucugaccaccccuc

SEQ ID NO: 584506 - RNA, 24 nt, Human
cagagucgucuggcaagacugucc

SEQ ID NO: 584507 - RNA, 21 nt, Human
ccacaccuguucccuuacacg

SEQ ID NO: 584508 - RNA, 24 nt, Human
ccaccucuuccccacaccuguucc

SEQ ID NO: 584509 - RNA, 18 nt, Human
ccagccccagcagggggc

SEQ ID NO: 584510 - RNA, 22 nt, Human
ccccaccucuuccccacaccug

SEQ ID NO: 584511 - RNA, 19 nt, Human
cccccuggaacucuccugg

SEQ ID NO: 584512 - RNA, 21 nt, Human
ccccuggaacucuccuggccc

SEQ ID NO: 584513 - RNA, 21 nt, Human
cccgauacacccucucucccu

SEQ ID NO: 584514 - RNA, 21 nt, Human
cccuccacacaacagagcucc

SEQ ID NO: 584515 - RNA, 23 nt, Human
cccuccacacaacagagcuccca

SEQ ID NO: 584516 - RNA, 20 nt, Human
ccgguggggagggaaggggg

SEQ ID NO: 584517 - RNA, 22 nt, Human
ccgucccagcuggggugggggc

SEQ ID NO: 584518 - RNA, 23 nt, Human
ccuccuccuggugucgggggcag

SEQ ID NO: 584519 - RNA, 25 nt, Human
ccuggcccuccuccugguccccugg

SEQ ID NO: 584520 - RNA, 26 nt, Human
ccuggccucacuucuccuccccaucu

SEQ ID NO: 584521 - RNA, 19 nt, Human
cgcccgccccggcggggac

SEQ ID NO: 584522 - RNA, 19 nt, Human
cggcgagaguccccagagc

SEQ ID NO: 584523 - RNA, 19 nt, Human
cgggagaagggaggggcuu

SEQ ID NO: 584524 - RNA, 23 nt, Human
cuagugcaguccgggaagggcca

SEQ ID NO: 584525 - RNA, 23 nt, Human
cucaugccuccugcccgcucuuc

SEQ ID NO: 584526 - RNA, 18 nt, Human
cuccggagaaagcccggg

SEQ ID NO: 584527 - RNA, 20 nt, Human
cuccggagaaagcccgggcu

SEQ ID NO: 584528 - RNA, 19 nt, Human
cuccucagagucgucuggc

SEQ ID NO: 584529 - RNA, 19 nt, Human
cuccucgccugcucaugcc

SEQ ID NO: 584530 - RNA, 19 nt, Human
cuccuggcccuccuccugg

SEQ ID NO: 584531 - RNA, 21 nt, Human
cucuccuggcccuccuccugg

SEQ ID NO: 584532 - RNA, 20 nt, Human
cucugcuccggagaaagccc

SEQ ID NO: 584533 - RNA, 23 nt, Human
cucugcuccggagaaagcccggg

SEQ ID NO: 584534 - RNA, 24 nt, Human
cugcagugauguccagccccagcc

SEQ ID NO: 584535 - RNA, 21 nt, Human
cugcuccggagaaagcccggg

SEQ ID NO: 584536 - RNA, 23 nt, Human
cuggaacucuccuggcccuccuc

SEQ ID NO: 584537 - RNA, 20 nt, Human
cuggcaagacugucccuggc

SEQ ID NO: 584538 - RNA, 21 nt, Human
gaaagccaaaagaaaccaaaa

SEQ ID NO: 584539 - RNA, 24 nt, Human
gaacccaaccccaccucuucccca

SEQ ID NO: 584540 - RNA, 23 nt, Human
gagcucccagccuagugcagucc

SEQ ID NO: 584541 - RNA, 18 nt, Human
gaggccuggaagccaccc

SEQ ID NO: 584542 - RNA, 25 nt, Human
gaggggacagaaacgggugccagga

SEQ ID NO: 584543 - RNA, 20 nt, Human
gauacaaggaaggcugggca

SEQ ID NO: 584544 - RNA, 18 nt, Human
gcagccaucuugacaaag

SEQ ID NO: 584545 - RNA, 22 nt, Human
gcgcagccaucuugacaaagca

SEQ ID NO: 584546 - RNA, 19 nt, Human
ggacaagccagccccagcu

SEQ ID NO: 584547 - RNA, 22 nt, Human
ggacaagccagccccagcuccc

SEQ ID NO: 584548 - RNA, 26 nt, Human
ggacaagccagccccagcuccccggg

SEQ ID NO: 584549 - RNA, 21 nt, Human
ggacagaaacgggugccagga

SEQ ID NO: 584550 - RNA, 23 nt, Human
ggaggaggcccgaauggacagaa

SEQ ID NO: 584551 - RNA, 19 nt, Human
ggagggaagggggagacag

SEQ ID NO: 584552 - RNA, 20 nt, Human
ggaggggcuggggcguggga

SEQ ID NO: 584553 - RNA, 22 nt, Human
ggcaagggaaagccaaaagaaa

SEQ ID NO: 584554 - RNA, 21 nt, Human
ggcuggggcgugggagguggg

SEQ ID NO: 584555 - RNA, 19 nt, Human
gggaaagccaaaagaaacc

SEQ ID NO: 584556 - RNA, 18 nt, Human
gggaggggcuggggcgug

SEQ ID NO: 584557 - RNA, 19 nt, Human
gggcuggggcgugggaggu

SEQ ID NO: 584558 - RNA, 21 nt, Human
gggcuggggcgugggaggugg

SEQ ID NO: 584559 - RNA, 27 nt, Human
ggggacagaaacgggugccaggaagga

SEQ ID NO: 584560 - RNA, 20 nt, Human
ggggcgugggagguggggag

SEQ ID NO: 584561 - RNA, 18 nt, Human
ggggcuggggcgugggag

SEQ ID NO: 584562 - RNA, 19 nt, Human
ggggcuggggcgugggagg

SEQ ID NO: 584563 - RNA, 19 nt, Human
ggugucgggggcagccaca

SEQ ID NO: 584564 - RNA, 21 nt, Human
ggugucgggggcagccacagg

SEQ ID NO: 584565 - RNA, 23 nt, Human
gucugaccccuucuccccuaauu

SEQ ID NO: 584566 - RNA, 18 nt, Human
gucuggagagauacaagg

SEQ ID NO: 584567 - RNA, 18 nt, Human
gugagagguacacgcccc

SEQ ID NO: 584568 - RNA, 19 nt, Human
guugcaucuagauuuuguu

SEQ ID NO: 584569 - RNA, 24 nt, Human
uaagagaagaggaacauagagaca

SEQ ID NO: 584570 - RNA, 21 nt, Human
uacacgggacaaaccaccauc

SEQ ID NO: 584571 - RNA, 22 nt, Human
uccagagaaaaagaauuaacaa

SEQ ID NO: 584572 - RNA, 18 nt, Human
ucccagcugggguggggg

SEQ ID NO: 584573 - RNA, 18 nt, Human
uccccggcgagagucccc

SEQ ID NO: 584574 - RNA, 19 nt, Human
uccccgggagaagggaggg

SEQ ID NO: 584575 - RNA, 24 nt, Human
uccccgggagaagggaggggcuuu

SEQ ID NO: 584576 - RNA, 22 nt, Human
uccccuaauugauggggacaag

SEQ ID NO: 584577 - RNA, 23 nt, Human
ucgucuggcaagacugucccugg

SEQ ID NO: 584578 - RNA, 18 nt, Human
ucuaccagaaaaagccag

SEQ ID NO: 584579 - RNA, 20 nt, Human
ucuccccuaauugaugggga

SEQ ID NO: 584580 - RNA, 22 nt, Human
ucuccuggcccuccuccuggug

SEQ ID NO: 584581 - RNA, 21 nt, Human
ucucucccuuugauuguccga

SEQ ID NO: 584582 - RNA, 22 nt, Human
ucucuggauuguaaacagcugc

SEQ ID NO: 584583 - RNA, 19 nt, Human
ucucugugugccucagccc

SEQ ID NO: 584584 - RNA, 21 nt, Human
ucuggcggcccgcccgccccg

SEQ ID NO: 584585 - RNA, 21 nt, Human
ucugugugccucagcccccug

SEQ ID NO: 584586 - RNA, 21 nt, Human
ucuuuuuuuuucuuuuccauu

SEQ ID NO: 584587 - RNA, 25 nt, Human
ucuuuuuuuuuuuuuuugucuuuuu

SEQ ID NO: 584588 - RNA, 22 nt, Human
ugacuuuuugacucaacaauuu

SEQ ID NO: 584589 - RNA, 22 nt, Human
ugccacacagcucugaggccug

SEQ ID NO: 584590 - RNA, 21 nt, Human
ugccaggaaggaaauggguuc

SEQ ID NO: 584591 - RNA, 21 nt, Human
ugccaggccagcagcgcugcu

SEQ ID NO: 584592 - RNA, 27 nt, Human
ugccucagcccccuggaacucuccugg

SEQ ID NO: 584593 - RNA, 19 nt, Human
ugcucaugccuccugcccg

SEQ ID NO: 584594 - RNA, 18 nt, Human
ugcuccggagaaagcccg

SEQ ID NO: 584595 - RNA, 23 nt, Human
uggaacaggacccgauacacccu

SEQ ID NO: 584596 - RNA, 20 nt, Human
uggaacccaaccccaccucu

SEQ ID NO: 584597 - RNA, 24 nt, Human
uggaagccacccggcgaugccggc

SEQ ID NO: 584598 - RNA, 22 nt, Human
uggacugcagugauguccagcc

SEQ ID NO: 584599 - RNA, 19 nt, Human
uggagagauacaaggaagg

SEQ ID NO: 584600 - RNA, 22 nt, Human
ugggagguggggaggaggcccg

SEQ ID NO: 584601 - RNA, 20 nt, Human
ugggcugcuucccgggacag

SEQ ID NO: 584602 - RNA, 22 nt, Human
uggggagggaagggggagacag

SEQ ID NO: 584603 - RNA, 21 nt, Human
uggggcgugggagguggggag

SEQ ID NO: 584604 - RNA, 26 nt, Human
ugggggcgucaaggcaccaggucugg

SEQ ID NO: 584605 - RNA, 22 nt, Human
uguccagccccagcagggggcc

SEQ ID NO: 584606 - RNA, 27 nt, Human
ugucgggggcagccacaggcugggcug

SEQ ID NO: 584607 - RNA, 24 nt, Human
uuacacgggacaaaccaccaucuu

SEQ ID NO: 584608 - RNA, 22 nt, Human
uucuuuguuucgcuguugcauu

SEQ ID NO: 584609 - RNA, 21 nt, Human
uugcaucuagauuuuguuuuc

SEQ ID NO: 584610 - RNA, 25 nt, Human
uuggaacccaaccccaccucuuccc

SEQ ID NO: 584611 - RNA, 27 nt, Human
uuucuuuuuuuuuuuuuuugucuuuuu

SEQ ID NO: 584612 - RNA, 20 nt, Human
uuuggucugaccccuucucc

SEQ ID NO: 584613 - RNA, 23 nt, Human
uuuucuuuuuuuuuuuuuuuggg

SEQ ID NO: 584614 - RNA, 20 nt, Human
uuuuugucuuuuuuuuucuu

SEQ ID NO: 584615 - RNA, 19 nt, Human
aaagugcuggaauuacagg

SEQ ID NO: 584616 - RNA, 24 nt, Human
aaagugcuggaauuacagguguga

SEQ ID NO: 584617 - RNA, 24 nt, Human
aaagugcugggacuacaggcauga

SEQ ID NO: 584618 - RNA, 21 nt, Human
aaauguuggaaccagagagaa

SEQ ID NO: 584619 - RNA, 23 nt, Human
aacacagcacuucaggaccaccu

SEQ ID NO: 584620 - RNA, 18 nt, Human
aaccuccgccuccgccuc

SEQ ID NO: 584621 - RNA, 19 nt, Human
aaccucugccucccggguc

SEQ ID NO: 584622 - RNA, 19 nt, Human
aagaaagggaaaaaaugga

SEQ ID NO: 584623 - RNA, 24 nt, Human
aagugauccacucgccucagccuc

SEQ ID NO: 584624 - RNA, 26 nt, Human
aagugcuggaauuacaggugugagcc

SEQ ID NO: 584625 - RNA, 19 nt, Human
aagugcugggacuacaggc

SEQ ID NO: 584626 - RNA, 26 nt, Human
aagugcugggacuacaggcaugagcc

SEQ ID NO: 584627 - RNA, 20 nt, Human
aauguuggaaccagagagaa

SEQ ID NO: 584628 - RNA, 18 nt, Human
aauuacaggugugagcca

SEQ ID NO: 584629 - RNA, 19 nt, Human
aauuacaggugugagccac

SEQ ID NO: 584630 - RNA, 21 nt, Human
aauuacaggugugagccacua

SEQ ID NO: 584631 - RNA, 24 nt, Human
acaaagugcuggaauuacaggugu

SEQ ID NO: 584632 - RNA, 20 nt, Human
acaaggguauaaaugagugu

SEQ ID NO: 584633 - RNA, 21 nt, Human
acacaggaagaaggauccuag

SEQ ID NO: 584634 - RNA, 19 nt, Human
accaaauuaaaucaacagc

SEQ ID NO: 584635 - RNA, 24 nt, Human
accauguuggccaggcuggucucg

SEQ ID NO: 584636 - RNA, 18 nt, Human
accauguuggucaggcug

SEQ ID NO: 584637 - RNA, 19 nt, Human
acccauuuucuuccaucag

SEQ ID NO: 584638 - RNA, 24 nt, Human
accuugugauccgccugccucagu

SEQ ID NO: 584639 - RNA, 18 nt, Human
acgagguuucaccauguu

SEQ ID NO: 584640 - RNA, 20 nt, Human
acgagguuucaccauguugg

SEQ ID NO: 584641 - RNA, 24 nt, Human
acgagguuucaccauguuggccag

SEQ ID NO: 584642 - RNA, 25 nt, Human
acucuguugcccagguuggagugca

SEQ ID NO: 584643 - RNA, 19 nt, Human
acuguguaaaacaccugaa

SEQ ID NO: 584644 - RNA, 22 nt, Human
agaaaaccuaacuagagaaaua

SEQ ID NO: 584645 - RNA, 28 nt, Human
aggaauuagcaagaaauagagcuacccc

SEQ ID NO: 584646 - RNA, 23 nt, Human
aggcaugcaccaccaaaccuggc

SEQ ID NO: 584647 - RNA, 29 nt, Human
agggaaaaaauggagacaaaagggacccc

SEQ ID NO: 584648 - RNA, 18 nt, Human
agguucaagugacucuca

SEQ ID NO: 584649 - RNA, 19 nt, Human
agguucuugcuucuuccug

SEQ ID NO: 584650 - RNA, 25 nt, Human
agguuggagugcaguugcacgaucu

SEQ ID NO: 584651 - RNA, 21 nt, Human
aguagcugggauuacaggcau

SEQ ID NO: 584652 - RNA, 23 nt, Human
aguagcugggauuacaggcaugc

SEQ ID NO: 584653 - RNA, 25 nt, Human
aguaggugggauuacaggugcaugu

SEQ ID NO: 584654 - RNA, 21 nt, Human
aguauaaagugucauaccuau

SEQ ID NO: 584655 - RNA, 23 nt, Human
agugacucucaugccucggucuc

SEQ ID NO: 584656 - RNA, 20 nt, Human
agugcagugaugcaaucuug

SEQ ID NO: 584657 - RNA, 24 nt, Human
agugcagugaugcaaucuuggcuc

SEQ ID NO: 584658 - RNA, 24 nt, Human
agugcaguugcacgaucucggcuc

SEQ ID NO: 584659 - RNA, 20 nt, Human
augagccaccacgccuggcc

SEQ ID NO: 584660 - RNA, 22 nt, Human
augccucggucucccgaguagc

SEQ ID NO: 584661 - RNA, 24 nt, Human
augccucggucucccgaguagcug

SEQ ID NO: 584662 - RNA, 19 nt, Human
auuacaggugcaugucacc

SEQ ID NO: 584663 - RNA, 19 nt, Human
auuucaccauguuggucag

SEQ ID NO: 584664 - RNA, 20 nt, Human
auuucaccauguuggucagg

SEQ ID NO: 584665 - RNA, 20 nt, Human
caaagugcuggaauuacagg

SEQ ID NO: 584666 - RNA, 23 nt, Human
caaagugcuggaauuacaggugu

SEQ ID NO: 584667 - RNA, 24 nt, Human
caaagugcuggaauuacaggugug

SEQ ID NO: 584668 - RNA, 24 nt, Human
caaagugcugggacuacaggcaug

SEQ ID NO: 584669 - RNA, 22 nt, Human
caaauuuucagacagaacacaa

SEQ ID NO: 584670 - RNA, 23 nt, Human
caaccuccgccuccgccuccgcc

SEQ ID NO: 584671 - RNA, 19 nt, Human
caacuaacuuuaguauuca

SEQ ID NO: 584672 - RNA, 22 nt, Human
caacuaacuuuaguauucacuc

SEQ ID NO: 584673 - RNA, 22 nt, Human
caagcaauucucuugccucagc

SEQ ID NO: 584674 - RNA, 21 nt, Human
caccauguuggccaggcuggu

SEQ ID NO: 584675 - RNA, 24 nt, Human
caccauguuggccaggcuggucuc

SEQ ID NO: 584676 - RNA, 27 nt, Human
caccauguuggccaggcuggucucgaa

SEQ ID NO: 584677 - RNA, 21 nt, Human
caccauguuggucaggcuggu

SEQ ID NO: 584678 - RNA, 22 nt, Human
caccauguuggucaggcugguc

SEQ ID NO: 584679 - RNA, 24 nt, Human
cacccaagcuggagugcagugaug

SEQ ID NO: 584680 - RNA, 21 nt, Human
cacugcaaccucugccucccg

SEQ ID NO: 584681 - RNA, 23 nt, Human
cacugcaaccucugccucccggg

SEQ ID NO: 584682 - RNA, 24 nt, Human
cacuucaggaccaccuuagguuca

SEQ ID NO: 584683 - RNA, 22 nt, Human
cagaagcaaaaacuugaucacc

SEQ ID NO: 584684 - RNA, 23 nt, Human
cagaagcaaaaacuugaucaccc

SEQ ID NO: 584685 - RNA, 22 nt, Human
cagagagaaaccaaaaucuauu

SEQ ID NO: 584686 - RNA, 20 nt, Human
caggagcuuuuccaacuaac

SEQ ID NO: 584687 - RNA, 24 nt, Human
caguagagacgagguuucaccaug

SEQ ID NO: 584688 - RNA, 26 nt, Human
caguagagacgagguuucaccauguu

SEQ ID NO: 584689 - RNA, 22 nt, Human
cauccccucaagccuucacuuc

SEQ ID NO: 584690 - RNA, 23 nt, Human
caugcaccaccaaaccuggcuaa

SEQ ID NO: 584691 - RNA, 24 nt, Human
caugucaccgcacccaacuaauuu

SEQ ID NO: 584692 - RNA, 24 nt, Human
cauguuggccaggcuggucucgaa

SEQ ID NO: 584693 - RNA, 24 nt, Human
cauguuggucaggcuggucccaaa

SEQ ID NO: 584694 - RNA, 19 nt, Human
ccaaagugcugggacuaca

SEQ ID NO: 584695 - RNA, 24 nt, Human
ccaaagugcugggacuacaggcau

SEQ ID NO: 584696 - RNA, 24 nt, Human
cccaaagugcugggacuacaggca

SEQ ID NO: 584697 - RNA, 18 nt, Human
cccagguuggagugcagu

SEQ ID NO: 584698 - RNA, 23 nt, Human
cccgaguagcugggauuacaggc

SEQ ID NO: 584699 - RNA, 24 nt, Human
cccgaguagcugggauuacaggca

SEQ ID NO: 584700 - RNA, 20 nt, Human
cccggguccaagcaauucuc

SEQ ID NO: 584701 - RNA, 23 nt, Human
ccgaguagcugggauuacaggca

SEQ ID NO: 584702 - RNA, 24 nt, Human
ccgaguagcugggauuacaggcau

SEQ ID NO: 584703 - RNA, 23 nt, Human
ccucccggguccaagcaauucuc

SEQ ID NO: 584704 - RNA, 23 nt, Human
ccuccgccuccgccuccgccaug

SEQ ID NO: 584705 - RNA, 20 nt, Human
ccugaccucaagugauccac

SEQ ID NO: 584706 - RNA, 20 nt, Human
ccugaccucaagugauccac

SEQ ID NO: 584707 - RNA, 22 nt, Human
ccugaguaggugggauuacagg

SEQ ID NO: 584708 - RNA, 23 nt, Human
ccugaguaggugggauuacaggu

SEQ ID NO: 584709 - RNA, 24 nt, Human
ccugccucagucucccaaagugcu

SEQ ID NO: 584710 - RNA, 24 nt, Human
cgagguuucaccauguuggccagg

SEQ ID NO: 584711 - RNA, 20 nt, Human
cuaauuuuuguauuuuuagg

SEQ ID NO: 584712 - RNA, 24 nt, Human
cucacugcaaccucugccucccgg

SEQ ID NO: 584713 - RNA, 24 nt, Human
cuccugaccuugugauccgccugc

SEQ ID NO: 584714 - RNA, 24 nt, Human
cucggucucccgaguagcugggau

SEQ ID NO: 584715 - RNA, 20 nt, Human
cucugucacccaagcuggag

SEQ ID NO: 584716 - RNA, 23 nt, Human
cugaguaggugggauuacaggug

SEQ ID NO: 584717 - RNA, 19 nt, Human
cugcaaccucugccucccg

SEQ ID NO: 584718 - RNA, 23 nt, Human
cugcaaccucugccucccggguc

SEQ ID NO: 584719 - RNA, 24 nt, Human
cugccucagucucccaaagugcug

SEQ ID NO: 584720 - RNA, 18 nt, Human
cugucacccaagcuggag

SEQ ID NO: 584721 - RNA, 20 nt, Human
gaccaccuuagguucauucc

SEQ ID NO: 584722 - RNA, 24 nt, Human
gaccucaagugauccacucgccuc

SEQ ID NO: 584723 - RNA, 24 nt, Human
gaccuugugauccgccugccucag

SEQ ID NO: 584724 - RNA, 21 nt, Human
gacuacaggcaugagccacca

SEQ ID NO: 584725 - RNA, 19 nt, Human
gaggcauccccucaagccu

SEQ ID NO: 584726 - RNA, 23 nt, Human
gagguuucaccauguuggccagg

SEQ ID NO: 584727 - RNA, 21 nt, Human
gccaugagagguucaagugac

SEQ ID NO: 584728 - RNA, 19 nt, Human
gcccagguuggagugcagu

SEQ ID NO: 584729 - RNA, 23 nt, Human
gccucagccucacaaagugcugg

SEQ ID NO: 584730 - RNA, 24 nt, Human
gccucagucucccaaagugcuggg

SEQ ID NO: 584731 - RNA, 25 nt, Human
gcucugucacccaagcuggagugca

SEQ ID NO: 584732 - RNA, 23 nt, Human
gcuggucucgaacuccugaccuc

SEQ ID NO: 584733 - RNA, 19 nt, Human
ggacuacaggcaugagcca

SEQ ID NO: 584734 - RNA, 18 nt, Human
ggagcuuuuccaacuaac

SEQ ID NO: 584735 - RNA, 23 nt, Human
ggcuggucccaaacuccugaccu

SEQ ID NO: 584736 - RNA, 24 nt, Human
ggcuggucucgaacuccugaccuc

SEQ ID NO: 584737 - RNA, 20 nt, Human
ggucccaaacuccugaccuu

SEQ ID NO: 584738 - RNA, 19 nt, Human
ggucucgaacuccugaccu

SEQ ID NO: 584739 - RNA, 18 nt, Human
guagcugggauuacaggc

SEQ ID NO: 584740 - RNA, 20 nt, Human
guagcugggauuacaggcau

SEQ ID NO: 584741 - RNA, 24 nt, Human
guauauuucaccauguuggucagg

SEQ ID NO: 584742 - RNA, 22 nt, Human
gugauccacucgccucagccuc

SEQ ID NO: 584743 - RNA, 18 nt, Human
gugauccgccugccucag

SEQ ID NO: 584744 - RNA, 18 nt, Human
uaaaaacuaucauacuaa

SEQ ID NO: 584745 - RNA, 24 nt, Human
uaacuuuaguauucacuccaagau

SEQ ID NO: 584746 - RNA, 26 nt, Human
uaagaaagggaaaaaauggagacaaa

SEQ ID NO: 584747 - RNA, 22 nt, Human
uacaaguauaaagugucauacc

SEQ ID NO: 584748 - RNA, 22 nt, Human
uacaggcaugagccaccacgcc

SEQ ID NO: 584749 - RNA, 22 nt, Human
uacaggugugagccacuacucc

SEQ ID NO: 584750 - RNA, 23 nt, Human
uacaggugugagccacuacuccu

SEQ ID NO: 584751 - RNA, 21 nt, Human
uacuguauuauguaaauguug

SEQ ID NO: 584752 - RNA, 22 nt, Human
uacuuuuacauuucauuuagca

SEQ ID NO: 584753 - RNA, 21 nt, Human
uagaaaaccuaacuagagaaa

SEQ ID NO: 584754 - RNA, 22 nt, Human
uagagacgagguuucaccaugu

SEQ ID NO: 584755 - RNA, 24 nt, Human
uagcauguggagcaauuuuguuuc

SEQ ID NO: 584756 - RNA, 21 nt, Human
uauccauaaaaggcaauuauc

SEQ ID NO: 584757 - RNA, 22 nt, Human
uauucagaagcaaaaacuugau

SEQ ID NO: 584758 - RNA, 24 nt, Human
ucaaaguaagcaagguugucaauc

SEQ ID NO: 584759 - RNA, 24 nt, Human
ucacaaagugcuggaauuacaggu

SEQ ID NO: 584760 - RNA, 20 nt, Human
ucacugcaaccuccgccucc

SEQ ID NO: 584761 - RNA, 21 nt, Human
ucacugcaaccuccgccuccg

SEQ ID NO: 584762 - RNA, 22 nt, Human
ucacugcaaccuccgccuccgc

SEQ ID NO: 584763 - RNA, 25 nt, Human
ucacugcaaccuccgccuccgccuc

SEQ ID NO: 584764 - RNA, 24 nt, Human
ucacugcaaccucugccucccggg

SEQ ID NO: 584765 - RNA, 25 nt, Human
ucacugcaaccucugccucccgggu

SEQ ID NO: 584766 - RNA, 23 nt, Human
ucagggacucaaguccccaagug

SEQ ID NO: 584767 - RNA, 24 nt, Human
ucaguagagacgagguuucaccau

SEQ ID NO: 584768 - RNA, 25 nt, Human
ucauuaguaauaauacacuuucaaa

SEQ ID NO: 584769 - RNA, 24 nt, Human
ucauuucaguguuuacacaggaag

SEQ ID NO: 584770 - RNA, 24 nt, Human
ucccaaagugcugggacuacaggc

SEQ ID NO: 584771 - RNA, 24 nt, Human
ucccgaguagcugggauuacaggc

SEQ ID NO: 584772 - RNA, 21 nt, Human
ucccggguccaagcaauucuc

SEQ ID NO: 584773 - RNA, 21 nt, Human
ucccggguccaagcaauucuc

SEQ ID NO: 584774 - RNA, 24 nt, Human
uccugaguaggugggauuacaggu

SEQ ID NO: 584775 - RNA, 21 nt, Human
ucucgaacuccugaccucaag

SEQ ID NO: 584776 - RNA, 24 nt, Human
ucucuuguccuuucauuucuguga

SEQ ID NO: 584777 - RNA, 24 nt, Human
ucugccucccggguccaagcaauu

SEQ ID NO: 584778 - RNA, 24 nt, Human
ucugucacccaagcuggagugcag

SEQ ID NO: 584779 - RNA, 23 nt, Human
ucuuacucuguugcccagguugg

SEQ ID NO: 584780 - RNA, 24 nt, Human
ucuuacucuguugcccagguugga

SEQ ID NO: 584781 - RNA, 24 nt, Human
ucuugcucugucacccaagcugga

SEQ ID NO: 584782 - RNA, 20 nt, Human
ucuugucaacucucuugucc

SEQ ID NO: 584783 - RNA, 22 nt, Human
ugaaauagaaaaccuaacuaga

SEQ ID NO: 584784 - RNA, 23 nt, Human
ugaauauuggucagccauguaga

SEQ ID NO: 584785 - RNA, 19 nt, Human
ugaauguaccagaaagaau

SEQ ID NO: 584786 - RNA, 19 nt, Human
ugaauguagaaaaaaaauc

SEQ ID NO: 584787 - RNA, 20 nt, Human
ugaccucaagugauccacuc

SEQ ID NO: 584788 - RNA, 24 nt, Human
ugaccucaagugauccacucgccu

SEQ ID NO: 584789 - RNA, 20 nt, Human
ugauaaaugaucaauucuac

SEQ ID NO: 584790 - RNA, 22 nt, Human
ugcagugaugcaaucuuggcuc

SEQ ID NO: 584791 - RNA, 18 nt, Human
ugcccagguuggagugca

SEQ ID NO: 584792 - RNA, 20 nt, Human
ugcccagguuggagugcagu

SEQ ID NO: 584793 - RNA, 23 nt, Human
ugcccagguuggagugcaguugc

SEQ ID NO: 584794 - RNA, 20 nt, Human
ugccucagccuccugaguag

SEQ ID NO: 584795 - RNA, 24 nt, Human
ugccucagccuccugaguaggugg

SEQ ID NO: 584796 - RNA, 24 nt, Human
ugccucagucucccaaagugcugg

SEQ ID NO: 584797 - RNA, 22 nt, Human
ugccucggucucccgaguagcu

SEQ ID NO: 584798 - RNA, 24 nt, Human
ugcuggaauuacaggugugagcca

SEQ ID NO: 584799 - RNA, 25 nt, Human
ugcuuugcccuacaccaaucugaaa

SEQ ID NO: 584800 - RNA, 18 nt, Human
uggaaccagagagaaacc

SEQ ID NO: 584801 - RNA, 18 nt, Human
uggaauuacaggugugag

SEQ ID NO: 584802 - RNA, 19 nt, Human
uggaauuacaggugugagc

SEQ ID NO: 584803 - RNA, 21 nt, Human
uggaauuacaggugugagcca

SEQ ID NO: 584804 - RNA, 22 nt, Human
uggaauuacaggugugagccac

SEQ ID NO: 584805 - RNA, 22 nt, Human
uggaauuacaggugugagccac

SEQ ID NO: 584806 - RNA, 24 nt, Human
uggaauuacaggugugagccacua

SEQ ID NO: 584807 - RNA, 23 nt, Human
uggagugcagugaugcaaucuug

SEQ ID NO: 584808 - RNA, 24 nt, Human
uggagugcagugaugcaaucuugg

SEQ ID NO: 584809 - RNA, 20 nt, Human
uggagugcaguugcacgauc

SEQ ID NO: 584810 - RNA, 23 nt, Human
uggagugcaguugcacgaucucg

SEQ ID NO: 584811 - RNA, 24 nt, Human
uggagugcaguugcacgaucucgg

SEQ ID NO: 584812 - RNA, 24 nt, Human
uggccaggcuggucucgaacuccu

SEQ ID NO: 584813 - RNA, 18 nt, Human
ugggacuacaggcaugag

SEQ ID NO: 584814 - RNA, 22 nt, Human
ugggacuacaggcaugagccac

SEQ ID NO: 584815 - RNA, 24 nt, Human
ugggacuacaggcaugagccacca

SEQ ID NO: 584816 - RNA, 24 nt, Human
ugggacuacaggcaugagccacca

SEQ ID NO: 584817 - RNA, 21 nt, Human
ugggauuacaggcaugcacca

SEQ ID NO: 584818 - RNA, 24 nt, Human
ugggauuacaggcaugcaccacca

SEQ ID NO: 584819 - RNA, 21 nt, Human
ugggauuacaggugcauguca

SEQ ID NO: 584820 - RNA, 22 nt, Human
ugggauuacaggugcaugucac

SEQ ID NO: 584821 - RNA, 23 nt, Human
ugggauuacaggugcaugucacc

SEQ ID NO: 584822 - RNA, 24 nt, Human
ugggauuacaggugcaugucaccg

SEQ ID NO: 584823 - RNA, 24 nt, Human
uggucaggcuggucccaaacuccu

SEQ ID NO: 584824 - RNA, 18 nt, Human
uguaaaacaccugaaaua

SEQ ID NO: 584825 - RNA, 24 nt, Human
uguauauuucaccauguuggucag

SEQ ID NO: 584826 - RNA, 18 nt, Human
ugucacagaucccuugga

SEQ ID NO: 584827 - RNA, 21 nt, Human
ugucacccaagcuggagugca

SEQ ID NO: 584828 - RNA, 24 nt, Human
ugugauccgccugccucagucucc

SEQ ID NO: 584829 - RNA, 21 nt, Human
uguguaaaacaccugaaauaa

SEQ ID NO: 584830 - RNA, 21 nt, Human
ugugucaaucaacuguuucug

SEQ ID NO: 584831 - RNA, 19 nt, Human
uguguguguucacauaugu

SEQ ID NO: 584832 - RNA, 21 nt, Human
uguugcccagguuggagugca

SEQ ID NO: 584833 - RNA, 23 nt, Human
uucaagugacucucaugccucgg

SEQ ID NO: 584834 - RNA, 22 nt, Human
uucaguguuuacacaggaagaa

SEQ ID NO: 584835 - RNA, 20 nt, Human
uugcuucuuccuguguaucc

SEQ ID NO: 584836 - RNA, 25 nt, Human
uuggaaagguucugcucuaaauuaa

SEQ ID NO: 584837 - RNA, 21 nt, Human
uuguuggauuugaagcuaugu

SEQ ID NO: 584838 - RNA, 24 nt, Human
uuucaccauguuggccaggcuggu

SEQ ID NO: 584839 - RNA, 24 nt, Human
uuucaccauguuggucaggcuggu

SEQ ID NO: 584840 - RNA, 24 nt, Human
uuuguauuuuuguauauuucacca

SEQ ID NO: 584841 - RNA, 24 nt, Human
uuuucaguagagacgagguuucac

SEQ ID NO: 584842 - RNA, 21 nt, Human
uuuuccuaccuguaggcaccu

SEQ ID NO: 584843 - RNA, 18 nt, Human
uuuuuuuuuuuuuuuuug

SEQ ID NO: 584844 - RNA, 22 nt, Human
uuuuuuuuuuuuuuuuugacag

SEQ ID NO: 584845 - RNA, 24 nt, Human
aaaguguugggauuauaggcauga

SEQ ID NO: 584846 - RNA, 18 nt, Human
aagcaggcuggacucacg

SEQ ID NO: 584847 - RNA, 21 nt, Human
aaguguugggauuauaggcau

SEQ ID NO: 584848 - RNA, 21 nt, Human
aauagcugggauuacaggcau

SEQ ID NO: 584849 - RNA, 21 nt, Human
aauggcaccaucucagcucac

SEQ ID NO: 584850 - RNA, 24 nt, Human
aauuuuguauuuuuaguagagaug

SEQ ID NO: 584851 - RNA, 21 nt, Human
acccaaccucccugcccccaa

SEQ ID NO: 584852 - RNA, 18 nt, Human
agccucccgaauagcugg

SEQ ID NO: 584853 - RNA, 18 nt, Human
aggauaucucuucuccgg

SEQ ID NO: 584854 - RNA, 19 nt, Human
aggcaggaggaggcugagu

SEQ ID NO: 584855 - RNA, 20 nt, Human
aggcaugagccaccaugccc

SEQ ID NO: 584856 - RNA, 21 nt, Human
aggcaugagccaccaugcccg

SEQ ID NO: 584857 - RNA, 22 nt, Human
aggcaugcaagcuugccccauu

SEQ ID NO: 584858 - RNA, 24 nt, Human
aggugauccgccugccucggccuu

SEQ ID NO: 584859 - RNA, 21 nt, Human
aguagagaugggguucuccau

SEQ ID NO: 584860 - RNA, 18 nt, Human
auagcugggauuacaggc

SEQ ID NO: 584861 - RNA, 19 nt, Human
aucagcccacccaaccucc

SEQ ID NO: 584862 - RNA, 24 nt, Human
auuacaccauguggauuccugacu

SEQ ID NO: 584863 - RNA, 24 nt, Human
caaaguguugggauuauaggcaug

SEQ ID NO: 584864 - RNA, 23 nt, Human
caaccuccaucuccuggguucaa

SEQ ID NO: 584865 - RNA, 22 nt, Human
caagcaauucuccugccucagc

SEQ ID NO: 584866 - RNA, 18 nt, Human
cacccaaccucccugccc

SEQ ID NO: 584867 - RNA, 19 nt, Human
cacccaaccucccugcccc

SEQ ID NO: 584868 - RNA, 21 nt, Human
cacccaaccucccugccccca

SEQ ID NO: 584869 - RNA, 22 nt, Human
cacccaaccucccugcccccaa

SEQ ID NO: 584870 - RNA, 22 nt, Human
caccuccagcaaccccucugcu

SEQ ID NO: 584871 - RNA, 21 nt, Human
cacuuucuucccugugucccc

SEQ ID NO: 584872 - RNA, 19 nt, Human
cagcagguaguagaugcag

SEQ ID NO: 584873 - RNA, 20 nt, Human
caggcaggaggaggcugagu

SEQ ID NO: 584874 - RNA, 22 nt, Human
caggcuggacucacgcauugag

SEQ ID NO: 584875 - RNA, 22 nt, Human
caggugauccgccugccucggc

SEQ ID NO: 584876 - RNA, 21 nt, Human
cagugaagcccugugagguuc

SEQ ID NO: 584877 - RNA, 21 nt, Human
cauguggauuccugacugcuu

SEQ ID NO: 584878 - RNA, 22 nt, Human
ccaaaguguugggauuauaggc

SEQ ID NO: 584879 - RNA, 24 nt, Human
ccaaaguguugggauuauaggcau

SEQ ID NO: 584880 - RNA, 21 nt, Human
ccaaccucccugcccccaaaa

SEQ ID NO: 584881 - RNA, 24 nt, Human
ccaccaugcccggcuaaagcccag

SEQ ID NO: 584882 - RNA, 18 nt, Human
ccacccaaccucccugcc

SEQ ID NO: 584883 - RNA, 24 nt, Human
ccacccaaccucccugcccccaaa

SEQ ID NO: 584884 - RNA, 19 nt, Human
ccauguggauuccugacug

SEQ ID NO: 584885 - RNA, 22 nt, Human
cccaacacucaagaccuuaccu

SEQ ID NO: 584886 - RNA, 19 nt, Human
cccacccaaccucccugcc

SEQ ID NO: 584887 - RNA, 20 nt, Human
ccccaggaaugcucacaccc

SEQ ID NO: 584888 - RNA, 23 nt, Human
cccgaauagcugggauuacaggc

SEQ ID NO: 584889 - RNA, 24 nt, Human
cccgaauagcugggauuacaggca

SEQ ID NO: 584890 - RNA, 19 nt, Human
cccgugccugugcccgaag

SEQ ID NO: 584891 - RNA, 24 nt, Human
ccgaauagcugggauuacaggcau

SEQ ID NO: 584892 - RNA, 18 nt, Human
ccgcaaccuccaucuccu

SEQ ID NO: 584893 - RNA, 23 nt, Human
ccgcaaccuccaucuccuggguu

SEQ ID NO: 584894 - RNA, 24 nt, Human
ccgcaaccuccaucuccuggguuc

SEQ ID NO: 584895 - RNA, 23 nt, Human
ccucccuccugaagcaggcugga

SEQ ID NO: 584896 - RNA, 20 nt, Human
ccuccugaagcaggcuggac

SEQ ID NO: 584897 - RNA, 24 nt, Human
ccuccugaagcaggcuggacucac

SEQ ID NO: 584898 - RNA, 18 nt, Human
ccugaccucaggugaucc

SEQ ID NO: 584899 - RNA, 21 nt, Human
ccugaccucaggugauccgcc

SEQ ID NO: 584900 - RNA, 23 nt, Human
ccugaccucaggugauccgccug

SEQ ID NO: 584901 - RNA, 23 nt, Human
ccuggguucaagcaauucuccug

SEQ ID NO: 584902 - RNA, 28 nt, Human
ccugugcccgaagccucccuccugaagc

SEQ ID NO: 584903 - RNA, 21 nt, Human
ccuguggaugacgaggugcag

SEQ ID NO: 584904 - RNA, 23 nt, Human
cgguggggauuucccugaggcuc

SEQ ID NO: 584905 - RNA, 25 nt, Human
cuaaagcccagucucuuuauuacac

SEQ ID NO: 584906 - RNA, 28 nt, Human
cuaaagcccagucucuuuauuacaccau

SEQ ID NO: 584907 - RNA, 24 nt, Human
cuaauuuuguauuuuuaguagaga

SEQ ID NO: 584908 - RNA, 20 nt, Human
cuccagcaaccccucugcuu

SEQ ID NO: 584909 - RNA, 24 nt, Human
cucccgaauagcugggauuacagg

SEQ ID NO: 584910 - RNA, 26 nt, Human
cuccugaccucaggugauccgccugc

SEQ ID NO: 584911 - RNA, 21 nt, Human
cuccuggguucaagcaauucu

SEQ ID NO: 584912 - RNA, 20 nt, Human
cucgcucuuguugcccgggc

SEQ ID NO: 584913 - RNA, 23 nt, Human
cugccucagccucccgaauagcu

SEQ ID NO: 584914 - RNA, 19 nt, Human
cugugagguucagagcagg

SEQ ID NO: 584915 - RNA, 20 nt, Human
cugugcccgugccugugccc

SEQ ID NO: 584916 - RNA, 21 nt, Human
cuuuaugugggacccaauccu

SEQ ID NO: 584917 - RNA, 22 nt, Human
gaaacuuguacuccucuaccag

SEQ ID NO: 584918 - RNA, 24 nt, Human
gaauagcugggauuacaggcaugc

SEQ ID NO: 584919 - RNA, 24 nt, Human
gaccucaggugauccgccugccuc

SEQ ID NO: 584920 - RNA, 23 nt, Human
gagaugggguucuccauguuggu

SEQ ID NO: 584921 - RNA, 23 nt, Human
gagugggacugaggucccagggu

SEQ ID NO: 584922 - RNA, 18 nt, Human
gauuacaggcaugcgcca

SEQ ID NO: 584923 - RNA, 24 nt, Human
gauuacaggcaugcgccaccaugc

SEQ ID NO: 584924 - RNA, 21 nt, Human
gauuauaggcaugagccacca

SEQ ID NO: 584925 - RNA, 24 nt, Human
gauuauaggcaugagccaccaugc

SEQ ID NO: 584926 - RNA, 21 nt, Human
gcccccaaaaugguccuucca

SEQ ID NO: 584927 - RNA, 18 nt, Human
gcccgaagccucccuccu

SEQ ID NO: 584928 - RNA, 20 nt, Human
gcugaagugcaauggcacca

SEQ ID NO: 584929 - RNA, 23 nt, Human
gcugguguugaacuccugaccuc

SEQ ID NO: 584930 - RNA, 21 nt, Human
ggaaacuuguacuccucuacc

SEQ ID NO: 584931 - RNA, 23 nt, Human
ggaaacuuguacuccucuaccag

SEQ ID NO: 584932 - RNA, 22 nt, Human
ggaggcugagugggacugaggu

SEQ ID NO: 584933 - RNA, 24 nt, Human
ggaggcugagugggacugaggucc

SEQ ID NO: 584934 - RNA, 24 nt, Human
ggauuacaggcaugcgccaccaug

SEQ ID NO: 584935 - RNA, 24 nt, Human
ggauuauaggcaugagccaccaug

SEQ ID NO: 584936 - RNA, 26 nt, Human
ggcgaaguggauggcagugaagggac

SEQ ID NO: 584937 - RNA, 20 nt, Human
gguguugaacuccugaccuc

SEQ ID NO: 584938 - RNA, 25 nt, Human
gucccaggguccacaauuuauauaa

SEQ ID NO: 584939 - RNA, 24 nt, Human
uagaugcaggggagggccacggug

SEQ ID NO: 584940 - RNA, 23 nt, Human
uaguagagaugggguucuccaug

SEQ ID NO: 584941 - RNA, 19 nt, Human
ucaagcaauucuccugccu

SEQ ID NO: 584942 - RNA, 24 nt, Human
ucaccgcaaccuccaucuccuggg

SEQ ID NO: 584943 - RNA, 27 nt, Human
ucaccgcaaccuccaucuccuggguuc

SEQ ID NO: 584944 - RNA, 21 nt, Human
ucacgcauugaggucugcgcc

SEQ ID NO: 584945 - RNA, 23 nt, Human
ucagcccacccaaccucccugcc

SEQ ID NO: 584946 - RNA, 20 nt, Human
ucagccucccgaauagcugg

SEQ ID NO: 584947 - RNA, 21 nt, Human
ucaggugauccgccugccucg

SEQ ID NO: 584948 - RNA, 23 nt, Human
uccaaaguguugggauuauaggc

SEQ ID NO: 584949 - RNA, 24 nt, Human
ucccgaauagcugggauuacaggc

SEQ ID NO: 584950 - RNA, 23 nt, Human
ucccuguguccccaggaaugcuc

SEQ ID NO: 584951 - RNA, 21 nt, Human
uccuggguucaagcaauucuc

SEQ ID NO: 584952 - RNA, 24 nt, Human
uccuggguucaagcaauucuccug

SEQ ID NO: 584953 - RNA, 20 nt, Human
uccuugucaccuccagcaac

SEQ ID NO: 584954 - RNA, 18 nt, Human
ucuccgggugaccacucc

SEQ ID NO: 584955 - RNA, 20 nt, Human
ucuccgggugaccacuccga

SEQ ID NO: 584956 - RNA, 26 nt, Human
ucuccugccucagccucccgaauagc

SEQ ID NO: 584957 - RNA, 24 nt, Human
ucuccuggguucaagcaauucucc

SEQ ID NO: 584958 - RNA, 19 nt, Human
ucucgcucuuguugcccgg

SEQ ID NO: 584959 - RNA, 20 nt, Human
ucucgcucuuguugcccggg

SEQ ID NO: 584960 - RNA, 24 nt, Human
ucucgcucuuguugcccgggcuga

SEQ ID NO: 584961 - RNA, 25 nt, Human
ucucgcucuuguugcccgggcugaa

SEQ ID NO: 584962 - RNA, 21 nt, Human
ugaagcccugugagguucaga

SEQ ID NO: 584963 - RNA, 19 nt, Human
ugaccacuccgagcagcgu

SEQ ID NO: 584964 - RNA, 18 nt, Human
ugaccucaggugauccgc

SEQ ID NO: 584965 - RNA, 24 nt, Human
ugaccucaggugauccgccugccu

SEQ ID NO: 584966 - RNA, 18 nt, Human
ugagugggacugaggucc

SEQ ID NO: 584967 - RNA, 23 nt, Human
ugcccgaagccucccuccugaag

SEQ ID NO: 584968 - RNA, 23 nt, Human
ugcccgggcugaagugcaauggc

SEQ ID NO: 584969 - RNA, 24 nt, Human
ugcccgggcugaagugcaauggca

SEQ ID NO: 584970 - RNA, 27 nt, Human
ugccucagccucccgaauagcugggau

SEQ ID NO: 584971 - RNA, 24 nt, Human
uggcaccaucucagcucaccgcaa

SEQ ID NO: 584972 - RNA, 18 nt, Human
ugggauuacaggcaugcg

SEQ ID NO: 584973 - RNA, 21 nt, Human
ugggauuacaggcaugcgcca

SEQ ID NO: 584974 - RNA, 22 nt, Human
ugggauuacaggcaugcgccac

SEQ ID NO: 584975 - RNA, 24 nt, Human
ugggauuacaggcaugcgccacca

SEQ ID NO: 584976 - RNA, 18 nt, Human
ugggauuauaggcaugag

SEQ ID NO: 584977 - RNA, 22 nt, Human
ugggauuauaggcaugagccac

SEQ ID NO: 584978 - RNA, 23 nt, Human
ugggauuauaggcaugagccacc

SEQ ID NO: 584979 - RNA, 24 nt, Human
ugggauuauaggcaugagccacca

SEQ ID NO: 584980 - RNA, 25 nt, Human
ugggauuauaggcaugagccaccau

SEQ ID NO: 584981 - RNA, 21 nt, Human
uggguucaagcaauucuccug

SEQ ID NO: 584982 - RNA, 23 nt, Human
uggguucaagcaauucuccugcc

SEQ ID NO: 584983 - RNA, 24 nt, Human
uggucaugcugguguugaacuccu

SEQ ID NO: 584984 - RNA, 22 nt, Human
uguacuccucuaccaggaccug

SEQ ID NO: 584985 - RNA, 21 nt, Human
uguauuuuuaguagagauggg

SEQ ID NO: 584986 - RNA, 22 nt, Human
ugugcccgaagccucccuccug

SEQ ID NO: 584987 - RNA, 18 nt, Human
uuaguagagaugggguuc

SEQ ID NO: 584988 - RNA, 23 nt, Human
uuaguagagaugggguucuccau

SEQ ID NO: 584989 - RNA, 21 nt, Human
uucaagcaauucuccugccuc

SEQ ID NO: 584990 - RNA, 24 nt, Human
uucaagcaauucuccugccucagc

SEQ ID NO: 584991 - RNA, 21 nt, Human
uuccacagccagaagaugagu

SEQ ID NO: 584992 - RNA, 18 nt, Human
uugcccgggcugaagugc

SEQ ID NO: 584993 - RNA, 23 nt, Human
uugccugccuggaaguagggcug

SEQ ID NO: 584994 - RNA, 21 nt, Human
uugggauuauaggcaugagcc

SEQ ID NO: 584995 - RNA, 23 nt, Human
uuguauuuuuaguagagaugggg

SEQ ID NO: 584996 - RNA, 23 nt, Human
uuguugcccgggcugaagugcaa

SEQ ID NO: 584997 - RNA, 24 nt, Human
uuucuccagcagguaguagaugca

SEQ ID NO: 584998 - RNA, 19 nt, Human
uuuuguauuuuuaguagag

SEQ ID NO: 584999 - RNA, 20 nt, Human
uuuuguauuuuuaguagaga

SEQ ID NO: 585000 - RNA, 19 nt, Human
uuuuuaguagagauggggu

SEQ ID NO: 585001 - RNA, 20 nt, Human
aacccaguuuuagccaaugg

SEQ ID NO: 585002 - RNA, 18 nt, Human
aagauacggcaucaggug

SEQ ID NO: 585003 - RNA, 23 nt, Human
accugccucugcagcuggagagc

SEQ ID NO: 585004 - RNA, 22 nt, Human
acucuggggaagagauuugggg

SEQ ID NO: 585005 - RNA, 23 nt, Human
acucuggggaagagauuuggggu

SEQ ID NO: 585006 - RNA, 24 nt, Human
acuuuauuuuaccuccauuuagca

SEQ ID NO: 585007 - RNA, 24 nt, Human
agaccagguaucccaaagguuggg

SEQ ID NO: 585008 - RNA, 20 nt, Human
agcaggcaugccagugggag

SEQ ID NO: 585009 - RNA, 23 nt, Human
aggaaggagacagugcugggagg

SEQ ID NO: 585010 - RNA, 25 nt, Human
aggaaggagacagugcugggagggg

SEQ ID NO: 585011 - RNA, 19 nt, Human
aggagcaggggcuccaagc

SEQ ID NO: 585012 - RNA, 23 nt, Human
aggugcugcaaugggaggcucug

SEQ ID NO: 585013 - RNA, 19 nt, Human
auguggacucugguggcag

SEQ ID NO: 585014 - RNA, 30 nt, Human
caauggaucuuucucucuaaugacagucuu

SEQ ID NO: 585015 - RNA, 24 nt, Human
cacaccugccucugcagcuggaga

SEQ ID NO: 585016 - RNA, 19 nt, Human
cagaccagcugucaguggu

SEQ ID NO: 585017 - RNA, 21 nt, Human
cagaccagcugucagugguug

SEQ ID NO: 585018 - RNA, 21 nt, Human
cagcuagggcacaggcaugga

SEQ ID NO: 585019 - RNA, 19 nt, Human
cagcugucagugguugggc

SEQ ID NO: 585020 - RNA, 26 nt, Human
caggaggaagugcuagauacucagau

SEQ ID NO: 585021 - RNA, 18 nt, Human
caggcugagcagggugcc

SEQ ID NO: 585022 - RNA, 22 nt, Human
cagucagaaagugggcaucucu

SEQ ID NO: 585023 - RNA, 21 nt, Human
caucucugcccugagggcagg

SEQ ID NO: 585024 - RNA, 23 nt, Human
caucucugcccugagggcagggg

SEQ ID NO: 585025 - RNA, 20 nt, Human
ccagggcucugcuuccagag

SEQ ID NO: 585026 - RNA, 20 nt, Human
cccagcaucuucagguucau

SEQ ID NO: 585027 - RNA, 23 nt, Human
ccccaugacgcaguucaggagga

SEQ ID NO: 585028 - RNA, 18 nt, Human
cccuucccuccuuucuuu

SEQ ID NO: 585029 - RNA, 24 nt, Human
ccgaggaagggguggcugccaggu

SEQ ID NO: 585030 - RNA, 24 nt, Human
ccgggccagcagugucuuggccuc

SEQ ID NO: 585031 - RNA, 18 nt, Human
ccuacagaccagguaucc

SEQ ID NO: 585032 - RNA, 25 nt, Human
ccuccacggagcggaacagcugcuc

SEQ ID NO: 585033 - RNA, 21 nt, Human
ccuccuccaccuccuccucgu

SEQ ID NO: 585034 - RNA, 25 nt, Human
ccucggcugccggcgucuucuucuc

SEQ ID NO: 585035 - RNA, 23 nt, Human
ccucuccuccuccaccuccuccu

SEQ ID NO: 585036 - RNA, 19 nt, Human
ccugcaaccccaugacgca

SEQ ID NO: 585037 - RNA, 24 nt, Human
ccugccaccucuccuccuccaccu

SEQ ID NO: 585038 - RNA, 18 nt, Human
ccuggggccccccucugg

SEQ ID NO: 585039 - RNA, 18 nt, Human
cuagucaucaacauuucc

SEQ ID NO: 585040 - RNA, 25 nt, Human
cucaaggcaaaaucuucugcaacgg

SEQ ID NO: 585041 - RNA, 25 nt, Human
cuccgccgucuggucaucacaccug

SEQ ID NO: 585042 - RNA, 21 nt, Human
cuccuccuccaccuccuccuc

SEQ ID NO: 585043 - RNA, 26 nt, Human
cucgggcuuaaccuuggaaggagcca

SEQ ID NO: 585044 - RNA, 21 nt, Human
cucugggcucgggcuuaaccu

SEQ ID NO: 585045 - RNA, 23 nt, Human
cugacugccaggcucccucugga

SEQ ID NO: 585046 - RNA, 20 nt, Human
cuggucccagcaucuucagg

SEQ ID NO: 585047 - RNA, 19 nt, Human
cuucccuccuuucuuuacc

SEQ ID NO: 585048 - RNA, 18 nt, Human
cuuggccucggcugccgg

SEQ ID NO: 585049 - RNA, 19 nt, Human
gaacccaguuuuagccaau

SEQ ID NO: 585050 - RNA, 23 nt, Human
gaaggagccagcagagacucaag

SEQ ID NO: 585051 - RNA, 18 nt, Human
gaauucccucagccuuuc

SEQ ID NO: 585052 - RNA, 19 nt, Human
gacagugcugggaggggag

SEQ ID NO: 585053 - RNA, 20 nt, Human
gaggagcccgaggaaggggu

SEQ ID NO: 585054 - RNA, 20 nt, Human
gcaggaaugcaggggcugcg

SEQ ID NO: 585055 - RNA, 20 nt, Human
gcuagggcacaggcauggaa

SEQ ID NO: 585056 - RNA, 23 nt, Human
ggaaggagacagugcugggaggg

SEQ ID NO: 585057 - RNA, 20 nt, Human
ggaauucccucagccuuucc

SEQ ID NO: 585058 - RNA, 22 nt, Human
ggagauccugaaacucugggga

SEQ ID NO: 585059 - RNA, 18 nt, Human
ggagcggaacagcugcuc

SEQ ID NO: 585060 - RNA, 22 nt, Human
gggaauccucugaccugcagcc

SEQ ID NO: 585061 - RNA, 18 nt, Human
gggguugggagcugggaa

SEQ ID NO: 585062 - RNA, 19 nt, Human
gucagacucagucagaaag

SEQ ID NO: 585063 - RNA, 19 nt, Human
gucuucuucuccuccugcc

SEQ ID NO: 585064 - RNA, 22 nt, Human
uaaauccuaccuguccucuaga

SEQ ID NO: 585065 - RNA, 21 nt, Human
uacaggacucuuccauucccc

SEQ ID NO: 585066 - RNA, 20 nt, Human
uaccuguccucuagagcugg

SEQ ID NO: 585067 - RNA, 23 nt, Human
uaccuuagauucuaugcccuucc

SEQ ID NO: 585068 - RNA, 22 nt, Human
uaucuuggccuacuccuuccug

SEQ ID NO: 585069 - RNA, 22 nt, Human
uaugaacacccauugucacccu

SEQ ID NO: 585070 - RNA, 19 nt, Human
ucagccuuuccuagucauc

SEQ ID NO: 585071 - RNA, 19 nt, Human
ucagcuucccacaguccag

SEQ ID NO: 585072 - RNA, 21 nt, Human
ucccaaagguugggcccaguc

SEQ ID NO: 585073 - RNA, 21 nt, Human
ucccagcaucuucagguucau

SEQ ID NO: 585074 - RNA, 19 nt, Human
ucccuccuuucuuuaccug

SEQ ID NO: 585075 - RNA, 19 nt, Human
uccuccuccaccuccuccu

SEQ ID NO: 585076 - RNA, 24 nt, Human
uccuccuccaccuccuccucguca

SEQ ID NO: 585077 - RNA, 22 nt, Human
uccuccugccaccucuccuccu

SEQ ID NO: 585078 - RNA, 22 nt, Human
uccugccaccucuccuccucca

SEQ ID NO: 585079 - RNA, 19 nt, Human
uccuuggaauucccucagc

SEQ ID NO: 585080 - RNA, 19 nt, Human
ucuaugaacacccauuguc

SEQ ID NO: 585081 - RNA, 24 nt, Human
ucuaugcccuucccuccuuucuuu

SEQ ID NO: 585082 - RNA, 26 nt, Human
ucucuggucccagcaucuucagguuc

SEQ ID NO: 585083 - RNA, 18 nt, Human
ucuuccauuccccacugu

SEQ ID NO: 585084 - RNA, 23 nt, Human
ugacugccaggcucccucuggag

SEQ ID NO: 585085 - RNA, 19 nt, Human
ugagacuggguaucuuggc

SEQ ID NO: 585086 - RNA, 23 nt, Human
ugagcagggugcccacagggugg

SEQ ID NO: 585087 - RNA, 20 nt, Human
ugaggaggagaguacaggac

SEQ ID NO: 585088 - RNA, 25 nt, Human
ugcagcuagggcacaggcauggaac

SEQ ID NO: 585089 - RNA, 22 nt, Human
uggaauucccucagccuuuccu

SEQ ID NO: 585090 - RNA, 19 nt, Human
uggaggagcccgaggaagg

SEQ ID NO: 585091 - RNA, 21 nt, Human
uggaggagcccgaggaagggg

SEQ ID NO: 585092 - RNA, 25 nt, Human
uggaucuuucucucuaaugacaguc

SEQ ID NO: 585093 - RNA, 18 nt, Human
uggcaauggaucuuucuc

SEQ ID NO: 585094 - RNA, 22 nt, Human
uggcagagucagcuucccacag

SEQ ID NO: 585095 - RNA, 21 nt, Human
uggcaggaaugcaggggcugc

SEQ ID NO: 585096 - RNA, 26 nt, Human
uggcucuggguuggcuagcugcgggg

SEQ ID NO: 585097 - RNA, 20 nt, Human
ugggagagacacaggcauug

SEQ ID NO: 585098 - RNA, 21 nt, Human
ugggagcugggaauccucuga

SEQ ID NO: 585099 - RNA, 22 nt, Human
uucacccccauggcacuguuug

SEQ ID NO: 585100 - RNA, 22 nt, Human
uucaggaggaggggcucgcagu

SEQ ID NO: 585101 - RNA, 24 nt, Human
uuccugcaaccccaugacgcaguu

SEQ ID NO: 585102 - RNA, 20 nt, Human
uuccugggguguggagugcu

SEQ ID NO: 585103 - RNA, 25 nt, Human
uugcagcuagggcacaggcauggaa

SEQ ID NO: 585104 - RNA, 18 nt, Human
aaacaggauggaaacaug

SEQ ID NO: 585105 - RNA, 25 nt, Human
aaacaggauggaaacaugcagcccu

SEQ ID NO: 585106 - RNA, 21 nt, Human
aaacuuugugcuucucuuugc

SEQ ID NO: 585107 - RNA, 24 nt, Human
aaagcuguguuucaaccaguuugg

SEQ ID NO: 585108 - RNA, 22 nt, Human
aacaggggugagaaccaggccu

SEQ ID NO: 585109 - RNA, 25 nt, Human
aagaaaacccacagggugguacaga

SEQ ID NO: 585110 - RNA, 23 nt, Human
aagaugucuuuggcuaaaacuuu

SEQ ID NO: 585111 - RNA, 22 nt, Human
aaggagacaaagcagcggcuga

SEQ ID NO: 585112 - RNA, 20 nt, Human
aagggacugagcagcccagc

SEQ ID NO: 585113 - RNA, 20 nt, Human
aagggucauguggcaaugug

SEQ ID NO: 585114 - RNA, 18 nt, Human
aaggguugaccucuccuc

SEQ ID NO: 585115 - RNA, 20 nt, Human
aauaaaagaggcaaacagga

SEQ ID NO: 585116 - RNA, 25 nt, Human
acagugcagaacagaaugcugaaac

SEQ ID NO: 585117 - RNA, 21 nt, Human
acaucacaacagcccuucagc

SEQ ID NO: 585118 - RNA, 21 nt, Human
accucuccugccuccuuguua

SEQ ID NO: 585119 - RNA, 18 nt, Human
acuccaacaggggugaga

SEQ ID NO: 585120 - RNA, 20 nt, Human
agaacagaaugcugaaacac

SEQ ID NO: 585121 - RNA, 19 nt, Human
agacccaugaagggacuga

SEQ ID NO: 585122 - RNA, 21 nt, Human
agcaccggcccaacaccaccc

SEQ ID NO: 585123 - RNA, 21 nt, Human
agccaugaaauggcccagccc

SEQ ID NO: 585124 - RNA, 19 nt, Human
aggaacagggaagggcagg

SEQ ID NO: 585125 - RNA, 24 nt, Human
aggaacagggaagggcaggugggc

SEQ ID NO: 585126 - RNA, 20 nt, Human
aggcagggagcgcgugcaag

SEQ ID NO: 585127 - RNA, 26 nt, Human
aggccaaagauggacagaagggaccc

SEQ ID NO: 585128 - RNA, 25 nt, Human
aggggcucuggccaggccacagucc

SEQ ID NO: 585129 - RNA, 20 nt, Human
agguccccugcacauucauc

SEQ ID NO: 585130 - RNA, 21 nt, Human
aucacaacagcccuucagcac

SEQ ID NO: 585131 - RNA, 20 nt, Human
caaagcagcggcugacaggc

SEQ ID NO: 585132 - RNA, 21 nt, Human
caacaaaaguaggaagauguc

SEQ ID NO: 585133 - RNA, 22 nt, Human
caagaaaacccacaggguggua

SEQ ID NO: 585134 - RNA, 20 nt, Human
caaggcucaaacuuugugcu

SEQ ID NO: 585135 - RNA, 23 nt, Human
cacagccccgcuuuccaccuccu

SEQ ID NO: 585136 - RNA, 18 nt, Human
cacagugcagaacagaau

SEQ ID NO: 585137 - RNA, 19 nt, Human
caccggcccaacaccaccc

SEQ ID NO: 585138 - RNA, 20 nt, Human
cacucagcccauggcagagc

SEQ ID NO: 585139 - RNA, 19 nt, Human
cagaacaucacaacagccc

SEQ ID NO: 585140 - RNA, 20 nt, Human
cagaaugcugaaacacaaca

SEQ ID NO: 585141 - RNA, 26 nt, Human
cagagagccagcccacagugcagaac

SEQ ID NO: 585142 - RNA, 24 nt, Human
cagagcacccagccugagcccaac

SEQ ID NO: 585143 - RNA, 22 nt, Human
caggccaaagauggacagaaga

SEQ ID NO: 585144 - RNA, 18 nt, Human
caggccgcccccgccggc

SEQ ID NO: 585145 - RNA, 20 nt, Human
caggugggccacccuggcca

SEQ ID NO: 585146 - RNA, 21 nt, Human
cagucacagaaagagccccaa

SEQ ID NO: 585147 - RNA, 22 nt, Human
caugaagggacugagcagccca

SEQ ID NO: 585148 - RNA, 22 nt, Human
cauuccaggaggaugggaacag

SEQ ID NO: 585149 - RNA, 19 nt, Human
cauugcugagggcacaggu

SEQ ID NO: 585150 - RNA, 21 nt, Human
ccaaagauggacagaagaaua

SEQ ID NO: 585151 - RNA, 21 nt, Human
ccacagggugguacagaggcc

SEQ ID NO: 585152 - RNA, 19 nt, Human
ccaggggccagugcccagg

SEQ ID NO: 585153 - RNA, 19 nt, Human
cccaacaccacccucgugc

SEQ ID NO: 585154 - RNA, 20 nt, Human
cccacagugcagaacagaau

SEQ ID NO: 585155 - RNA, 28 nt, Human
cccacagugcagaacagaaugcugaaac

SEQ ID NO: 585156 - RNA, 19 nt, Human
cccauggcagagcacccag

SEQ ID NO: 585157 - RNA, 22 nt, Human
ccccgcuuuccaccuccucccc

SEQ ID NO: 585158 - RNA, 21 nt, Human
cccgagcuaaggagacaaagc

SEQ ID NO: 585159 - RNA, 24 nt, Human
cccgccacagccccgcuuuccacc

SEQ ID NO: 585160 - RNA, 23 nt, Human
cccgccggcccgccacagccccc

SEQ ID NO: 585161 - RNA, 24 nt, Human
ccggcccgccacagccccgcuuuc

SEQ ID NO: 585162 - RNA, 23 nt, Human
ccuggcuauaaggcccaggaacc

SEQ ID NO: 585163 - RNA, 25 nt, Human
ccuucagcacuggccagguguccaa

SEQ ID NO: 585164 - RNA, 23 nt, Human
cggcggcagcggcagcagcaccg

SEQ ID NO: 585165 - RNA, 27 nt, Human
cucuccugccuccuuguuaguugagag

SEQ ID NO: 585166 - RNA, 20 nt, Human
cucuggccaggccacagucc

SEQ ID NO: 585167 - RNA, 19 nt, Human
gaaacaugcagcccugcca

SEQ ID NO: 585168 - RNA, 22 nt, Human
gaacaucacaacagcccuucag

SEQ ID NO: 585169 - RNA, 21 nt, Human
gacaggccgcccccgccggcc

SEQ ID NO: 585170 - RNA, 23 nt, Human
gacccgagcuaaggagacaaagc

SEQ ID NO: 585171 - RNA, 18 nt, Human
gagaggggaugugggcag

SEQ ID NO: 585172 - RNA, 18 nt, Human
gauguagugcaaaugucg

SEQ ID NO: 585173 - RNA, 20 nt, Human
gcagagcacccagccugagc

SEQ ID NO: 585174 - RNA, 20 nt, Human
gcagagcaggggcacaggca

SEQ ID NO: 585175 - RNA, 24 nt, Human
gcaugggacaaggguugaccucuc

SEQ ID NO: 585176 - RNA, 21 nt, Human
gcccaacaccacccucgugcc

SEQ ID NO: 585177 - RNA, 21 nt, Human
gcccaacaccacccucguggu

SEQ ID NO: 585178 - RNA, 19 nt, Human
gcccaggaaccauauagga

SEQ ID NO: 585179 - RNA, 20 nt, Human
gcccauggcagagcacccag

SEQ ID NO: 585180 - RNA, 19 nt, Human
ggaaacaugcagcccugcc

SEQ ID NO: 585181 - RNA, 20 nt, Human
ggacaaggguugaccucucc

SEQ ID NO: 585182 - RNA, 19 nt, Human
ggcagagcaggggcacagg

SEQ ID NO: 585183 - RNA, 18 nt, Human
ggggcaugggugguggug

SEQ ID NO: 585184 - RNA, 18 nt, Human
ggggccagugcccagggu

SEQ ID NO: 585185 - RNA, 21 nt, Human
ggugagaaccaggccugggca

SEQ ID NO: 585186 - RNA, 22 nt, Human
gugggcaggggauaaggaaggu

SEQ ID NO: 585187 - RNA, 20 nt, Human
uaaaagaggcaaacaggaug

SEQ ID NO: 585188 - RNA, 21 nt, Human
ucaaggcucaaacuuugugcu

SEQ ID NO: 585189 - RNA, 20 nt, Human
ucacaaaagucgggagcgcc

SEQ ID NO: 585190 - RNA, 20 nt, Human
ucagcccauggcagagcacc

SEQ ID NO: 585191 - RNA, 20 nt, Human
uccauuagcaagacccauga

SEQ ID NO: 585192 - RNA, 18 nt, Human
ucccagcaacagcacaug

SEQ ID NO: 585193 - RNA, 25 nt, Human
ucccccauuccaggaggaugggaac

SEQ ID NO: 585194 - RNA, 18 nt, Human
ucccugcggcagcgcaga

SEQ ID NO: 585195 - RNA, 22 nt, Human
uccucagucacagaaagagccc

SEQ ID NO: 585196 - RNA, 24 nt, Human
uccuggguccaggaaucaaggcuc

SEQ ID NO: 585197 - RNA, 18 nt, Human
ucgcaaccaaguacuaug

SEQ ID NO: 585198 - RNA, 22 nt, Human
ucugggccacucagcccauggc

SEQ ID NO: 585199 - RNA, 21 nt, Human
ugaaacacaacaaaaguagga

SEQ ID NO: 585200 - RNA, 21 nt, Human
ugaaauggcccagccaggggc

SEQ ID NO: 585201 - RNA, 21 nt, Human
ugagccaugaaauggcccagc

SEQ ID NO: 585202 - RNA, 25 nt, Human
ugcagucuguguccccugcuggcac

SEQ ID NO: 585203 - RNA, 19 nt, Human
ugcggcagcgcagaaggga

SEQ ID NO: 585204 - RNA, 24 nt, Human
ugcuuuauuggagaggggaugugg

SEQ ID NO: 585205 - RNA, 21 nt, Human
uggaaacaugcagcccugcca

SEQ ID NO: 585206 - RNA, 20 nt, Human
uggagaggggaugugggcag

SEQ ID NO: 585207 - RNA, 19 nt, Human
uggcaauguggagccaaag

SEQ ID NO: 585208 - RNA, 18 nt, Human
uggcccgggcggccuccc

SEQ ID NO: 585209 - RNA, 24 nt, Human
uguccaagaaaacccacagggugg

SEQ ID NO: 585210 - RNA, 22 nt, Human
uuaagggucauguggcaaugug

SEQ ID NO: 585211 - RNA, 20 nt, Human
uuccuugagcccccagaggc

SEQ ID NO: 585212 - RNA, 18 nt, Human
uucuucucaguucuuuuc

SEQ ID NO: 585213 - RNA, 18 nt, Human
uugagccaugaaauggcc

SEQ ID NO: 585214 - RNA, 24 nt, Human
uuggagaggggaugugggcagggg

SEQ ID NO: 585215 - RNA, 23 nt, Human
uuuuaaagcacauauaugcuacu

SEQ ID NO: 585216 - RNA, 24 nt, Human
aaaaccauuauaaauuaaaugggu

SEQ ID NO: 585217 - RNA, 30 nt, Human
aaaccaucuucuccugaacccaaacaugcu

SEQ ID NO: 585218 - RNA, 22 nt, Human
aaagaggcauacucuuuugauc

SEQ ID NO: 585219 - RNA, 19 nt, Human
aaagugcuaggauuacagg

SEQ ID NO: 585220 - RNA, 24 nt, Human
aaagugcuaggauuacaggcguga

SEQ ID NO: 585221 - RNA, 21 nt, Human
aagaaaaguuuuaacaaagga

SEQ ID NO: 585222 - RNA, 20 nt, Human
aaggcuuuuuaaauauggca

SEQ ID NO: 585223 - RNA, 21 nt, Human
aaguaauagagaacuuggaac

SEQ ID NO: 585224 - RNA, 26 nt, Human
aagugcuaggauuacaggcgugagcc

SEQ ID NO: 585225 - RNA, 24 nt, Human
aauaucuuagguuaacaagcaacu

SEQ ID NO: 585226 - RNA, 25 nt, Human
aauuccaucaaagaaaaccuugcua

SEQ ID NO: 585227 - RNA, 19 nt, Human
acaaaacaaaaugauggau

SEQ ID NO: 585228 - RNA, 22 nt, Human
acagugcuguucaauaacuauu

SEQ ID NO: 585229 - RNA, 20 nt, Human
acauacaguuuuuggcugca

SEQ ID NO: 585230 - RNA, 19 nt, Human
acuaucuacacauuucuug

SEQ ID NO: 585231 - RNA, 22 nt, Human
agaaguaauagagaacuuggaa

SEQ ID NO: 585232 - RNA, 19 nt, Human
agcccugaaaacauagaug

SEQ ID NO: 585233 - RNA, 24 nt, Human
agcgcaguggcacgaucucggcuc

SEQ ID NO: 585234 - RNA, 20 nt, Human
aggaauaauuuuauuucuaa

SEQ ID NO: 585235 - RNA, 18 nt, Human
aggcacgggaagagagag

SEQ ID NO: 585236 - RNA, 23 nt, Human
aggcgugagccaccgugccuggc

SEQ ID NO: 585237 - RNA, 18 nt, Human
aguagcugggacuauagg

SEQ ID NO: 585238 - RNA, 20 nt, Human
auacaugcuggcaaaaggga

SEQ ID NO: 585239 - RNA, 24 nt, Human
augagguguuagccaggauggucu

SEQ ID NO: 585240 - RNA, 21 nt, Human
augcacaugcaugucuuugua

SEQ ID NO: 585241 - RNA, 22 nt, Human
auuaggccauacaaaacaaaau

SEQ ID NO: 585242 - RNA, 18 nt, Human
auugcuauuuugcccagg

SEQ ID NO: 585243 - RNA, 24 nt, Human
caaagugcuaggauuacaggcgug

SEQ ID NO: 585244 - RNA, 25 nt, Human
caacuaagcaaaaaucacuauaucu

SEQ ID NO: 585245 - RNA, 22 nt, Human
caagcaauucuccugccucggc

SEQ ID NO: 585246 - RNA, 21 nt, Human
caauagcagcaaaaauaaguu

SEQ ID NO: 585247 - RNA, 20 nt, Human
cacaauagcagcaaaaauaa

SEQ ID NO: 585248 - RNA, 24 nt, Human
caccucagccucccgaguagcugg

SEQ ID NO: 585249 - RNA, 18 nt, Human
cacugcaaccucugccuc

SEQ ID NO: 585250 - RNA, 21 nt, Human
cacugcaaccucugccuccca

SEQ ID NO: 585251 - RNA, 21 nt, Human
cagcaaaaauaaguuccccug

SEQ ID NO: 585252 - RNA, 20 nt, Human
cagccucccgaguagcuggg

SEQ ID NO: 585253 - RNA, 24 nt, Human
caguaugaaucaaauaauuccauc

SEQ ID NO: 585254 - RNA, 22 nt, Human
cauuucaggcaucacuuccucc

SEQ ID NO: 585255 - RNA, 20 nt, Human
ccaaagugcuaggauuacag

SEQ ID NO: 585256 - RNA, 22 nt, Human
ccaaagugcuaggauuacaggc

SEQ ID NO: 585257 - RNA, 24 nt, Human
ccaaagugcuaggauuacaggcgu

SEQ ID NO: 585258 - RNA, 23 nt, Human
ccaccucagccucccgaguagcu

SEQ ID NO: 585259 - RNA, 22 nt, Human
ccacugcaccugucugaguggc

SEQ ID NO: 585260 - RNA, 24 nt, Human
ccagucaaaauccagccacauuua

SEQ ID NO: 585261 - RNA, 25 nt, Human
ccauacaaaacaaaaugauggauag

SEQ ID NO: 585262 - RNA, 22 nt, Human
cccaaacaugcauacuauuucu

SEQ ID NO: 585263 - RNA, 23 nt, Human
cccagguucaagcaauucuccug

SEQ ID NO: 585264 - RNA, 23 nt, Human
cccauauucccagucaaaaucca

SEQ ID NO: 585265 - RNA, 24 nt, Human
ccucccagguucaagcaauucucc

SEQ ID NO: 585266 - RNA, 19 nt, Human
ccugaacuacaguggagag

SEQ ID NO: 585267 - RNA, 19 nt, Human
ccugaguagcugggacuau

SEQ ID NO: 585268 - RNA, 23 nt, Human
ccugaguagcugggacuauaggc

SEQ ID NO: 585269 - RNA, 24 nt, Human
ccugccucggccuccugaguagcu

SEQ ID NO: 585270 - RNA, 25 nt, Human
ccuggcccacuucuauuuucuuagu

SEQ ID NO: 585271 - RNA, 18 nt, Human
ccuggcuucaagugaucc

SEQ ID NO: 585272 - RNA, 20 nt, Human
ccuggcuucaagugauccuc

SEQ ID NO: 585273 - RNA, 21 nt, Human
ccugucugaguggcuuuuuuu

SEQ ID NO: 585274 - RNA, 24 nt, Human
cucacugcaaccucugccucccag

SEQ ID NO: 585275 - RNA, 24 nt, Human
cucacugcaaccucugccucccag

SEQ ID NO: 585276 - RNA, 24 nt, Human
cucagccucccgaguagcuggggc

SEQ ID NO: 585277 - RNA, 18 nt, Human
cucaugauccgccugccu

SEQ ID NO: 585278 - RNA, 24 nt, Human
cucggccuccugaguagcugggac

SEQ ID NO: 585279 - RNA, 24 nt, Human
cucucucugccacccaggcuggag

SEQ ID NO: 585280 - RNA, 24 nt, Human
cucucugccacccaggcuggagcg

SEQ ID NO: 585281 - RNA, 18 nt, Human
cucugccacccaggcugg

SEQ ID NO: 585282 - RNA, 23 nt, Human
cugcaaccucugccucccagguu

SEQ ID NO: 585283 - RNA, 24 nt, Human
cugcaaccucugccucccagguuc

SEQ ID NO: 585284 - RNA, 23 nt, Human
cugccucggccucccaaagugcu

SEQ ID NO: 585285 - RNA, 19 nt, Human
cuuaaaauuauccauugaa

SEQ ID NO: 585286 - RNA, 24 nt, Human
cuuccgaccucaugauccgccugc

SEQ ID NO: 585287 - RNA, 22 nt, Human
gaccucaugauccgccugccuc

SEQ ID NO: 585288 - RNA, 22 nt, Human
gaccucaugauccgccugccuc

SEQ ID NO: 585289 - RNA, 24 nt, Human
gaccucaugauccgccugccucgg

SEQ ID NO: 585290 - RNA, 24 nt, Human
gacuauaggcgccugccaccaugc

SEQ ID NO: 585291 - RNA, 19 nt, Human
gaguaggugggauuacaug

SEQ ID NO: 585292 - RNA, 18 nt, Human
gauuacaggcgugagcca

SEQ ID NO: 585293 - RNA, 21 nt, Human
gauuacaggcgugagccaccg

SEQ ID NO: 585294 - RNA, 24 nt, Human
gauuacaggcgugagccaccgugc

SEQ ID NO: 585295 - RNA, 18 nt, Human
gauuacaugugugagcca

SEQ ID NO: 585296 - RNA, 19 nt, Human
gauuacaugugugagccac

SEQ ID NO: 585297 - RNA, 23 nt, Human
gauuacaugugugagccacugca

SEQ ID NO: 585298 - RNA, 22 nt, Human
gcaaccucugccucccagguuc

SEQ ID NO: 585299 - RNA, 21 nt, Human
gcaguggcacgaucucggcuc

SEQ ID NO: 585300 - RNA, 23 nt, Human
gcccggcuaauuuuuuguauuuu

SEQ ID NO: 585301 - RNA, 19 nt, Human
gccucagucuucugaguag

SEQ ID NO: 585302 - RNA, 18 nt, Human
gccuccugaguagcuggg

SEQ ID NO: 585303 - RNA, 20 nt, Human
gccucggccuccugaguagc

SEQ ID NO: 585304 - RNA, 21 nt, Human
gccucggccuccugaguagcu

SEQ ID NO: 585305 - RNA, 22 nt, Human
ggauuacaggcgugagccaccg

SEQ ID NO: 585306 - RNA, 18 nt, Human
gggaagagagagagucaa

SEQ ID NO: 585307 - RNA, 19 nt, Human
gggauuacaugugugagcc

SEQ ID NO: 585308 - RNA, 22 nt, Human
ggguagggucauguguucuuug

SEQ ID NO: 585309 - RNA, 21 nt, Human
guguguguguguguuugugua

SEQ ID NO: 585310 - RNA, 23 nt, Human
guguguuuguguauguguguguu

SEQ ID NO: 585311 - RNA, 18 nt, Human
uaacagaaucuugaaaaa

SEQ ID NO: 585312 - RNA, 26 nt, Human
uaagcaaaaaucacuauaaucaacgg

SEQ ID NO: 585313 - RNA, 21 nt, Human
uaauagagaacuuggaacuaa

SEQ ID NO: 585314 - RNA, 24 nt, Human
uaauuuuuuguauuuuuaguagag

SEQ ID NO: 585315 - RNA, 25 nt, Human
uaauuuuuuguauuuuuaguagaga

SEQ ID NO: 585316 - RNA, 22 nt, Human
uacaggcgugagccaccgugcc

SEQ ID NO: 585317 - RNA, 22 nt, Human
uacaggcgugagccaccgugcc

SEQ ID NO: 585318 - RNA, 21 nt, Human
uacaguggagagaagauucac

SEQ ID NO: 585319 - RNA, 24 nt, Human
uacaugugugagccacugcaccug

SEQ ID NO: 585320 - RNA, 20 nt, Human
uaccuggacaaucugugcaa

SEQ ID NO: 585321 - RNA, 18 nt, Human
uaggauuacaggcgugag

SEQ ID NO: 585322 - RNA, 21 nt, Human
uaggauuacaggcgugagcca

SEQ ID NO: 585323 - RNA, 22 nt, Human
uaggauuacaggcgugagccac

SEQ ID NO: 585324 - RNA, 23 nt, Human
uaggauuacaggcgugagccacc

SEQ ID NO: 585325 - RNA, 23 nt, Human
uaggauuacaggcgugagccacc

SEQ ID NO: 585326 - RNA, 24 nt, Human
uaggauuacaggcgugagccaccg

SEQ ID NO: 585327 - RNA, 19 nt, Human
uaggcgccugccaccaugc

SEQ ID NO: 585328 - RNA, 23 nt, Human
uaggcgccugccaccaugcccgg

SEQ ID NO: 585329 - RNA, 23 nt, Human
uaguagagaugagguguuagcca

SEQ ID NO: 585330 - RNA, 24 nt, Human
uauuacuaaucuuucaaaaauguu

SEQ ID NO: 585331 - RNA, 26 nt, Human
uauucaaacuauugacauaauuuaau

SEQ ID NO: 585332 - RNA, 24 nt, Human
uauuuugcccaggcuguucuugag

SEQ ID NO: 585333 - RNA, 26 nt, Human
ucaaagaaaaccuugcuaaacagacu

SEQ ID NO: 585334 - RNA, 19 nt, Human
ucaagugauccuccggccu

SEQ ID NO: 585335 - RNA, 20 nt, Human
ucaagugauccuccggccuc

SEQ ID NO: 585336 - RNA, 23 nt, Human
ucacaucccacgugccuagcaca

SEQ ID NO: 585337 - RNA, 19 nt, Human
ucacugcaaccucugccuc

SEQ ID NO: 585338 - RNA, 24 nt, Human
ucacugcaaccucugccucccagg

SEQ ID NO: 585339 - RNA, 25 nt, Human
ucacugcaaccucugccucccaggu

SEQ ID NO: 585340 - RNA, 23 nt, Human
ucagccucccgaguagcuggggc

SEQ ID NO: 585341 - RNA, 19 nt, Human
uccacgaaacuugcccugg

SEQ ID NO: 585342 - RNA, 18 nt, Human
uccagguacgauguggaa

SEQ ID NO: 585343 - RNA, 24 nt, Human
ucccaaagugcuaggauuacaggc

SEQ ID NO: 585344 - RNA, 21 nt, Human
ucccagguucaagcaauucuc

SEQ ID NO: 585345 - RNA, 24 nt, Human
ucccagguucaagcaauucuccug

SEQ ID NO: 585346 - RNA, 21 nt, Human
ucccgaguagcuggggcuacc

SEQ ID NO: 585347 - RNA, 24 nt, Human
ucccgaguagcuggggcuaccggc

SEQ ID NO: 585348 - RNA, 24 nt, Human
uccugaguagcugggacuauaggc

SEQ ID NO: 585349 - RNA, 23 nt, Human
ucggccuccugaguagcugggac

SEQ ID NO: 585350 - RNA, 23 nt, Human
ucucucucugccacccaggcugg

SEQ ID NO: 585351 - RNA, 24 nt, Human
ucucucucugccacccaggcugga

SEQ ID NO: 585352 - RNA, 19 nt, Human
ucucugccacccaggcugg

SEQ ID NO: 585353 - RNA, 25 nt, Human
ucucugccacccaggcuggagcgca

SEQ ID NO: 585354 - RNA, 24 nt, Human
ucugccacccaggcuggagcgcag

SEQ ID NO: 585355 - RNA, 21 nt, Human
ucuuuugaucauguauauucu

SEQ ID NO: 585356 - RNA, 22 nt, Human
ugagacagagucucucucugcc

SEQ ID NO: 585357 - RNA, 24 nt, Human
ugagacagagucucucucugccac

SEQ ID NO: 585358 - RNA, 21 nt, Human
ugagguguuagccaggauggu

SEQ ID NO: 585359 - RNA, 24 nt, Human
ugagguguuagccaggauggucuc

SEQ ID NO: 585360 - RNA, 24 nt, Human
ugauacauacaguuuuuggcugca

SEQ ID NO: 585361 - RNA, 19 nt, Human
ugauccuccggccucaguc

SEQ ID NO: 585362 - RNA, 24 nt, Human
ugcccaggcuguucuugagcuccu

SEQ ID NO: 585363 - RNA, 25 nt, Human
ugcccggcuaauuuuuuguauuuuu

SEQ ID NO: 585364 - RNA, 22 nt, Human
ugcccuggauuuuccacuucac

SEQ ID NO: 585365 - RNA, 21 nt, Human
ugccucggccucccaaagugc

SEQ ID NO: 585366 - RNA, 24 nt, Human
ugccucggccucccaaagugcuag

SEQ ID NO: 585367 - RNA, 24 nt, Human
ugccucggccuccugaguagcugg

SEQ ID NO: 585368 - RNA, 26 nt, Human
ugccuggcccacuucuauuuucuuag

SEQ ID NO: 585369 - RNA, 24 nt, Human
ugcuaggauuacaggcgugagcca

SEQ ID NO: 585370 - RNA, 24 nt, Human
ugcuuuguucuucccauauuccca

SEQ ID NO: 585371 - RNA, 24 nt, Human
uggagcgcaguggcacgaucucgg

SEQ ID NO: 585372 - RNA, 24 nt, Human
uggcuucaagugauccuccggccu

SEQ ID NO: 585373 - RNA, 21 nt, Human
ugggacuauaggcgccugcca

SEQ ID NO: 585374 - RNA, 22 nt, Human
ugggacuauaggcgccugccac

SEQ ID NO: 585375 - RNA, 24 nt, Human
ugggacuauaggcgccugccacca

SEQ ID NO: 585376 - RNA, 25 nt, Human
ugggacuauaggcgccugccaccau

SEQ ID NO: 585377 - RNA, 19 nt, Human
ugggauuacaugugugagc

SEQ ID NO: 585378 - RNA, 22 nt, Human
ugggauuacaugugugagccac

SEQ ID NO: 585379 - RNA, 22 nt, Human
ugggauuacaugugugagccac

SEQ ID NO: 585380 - RNA, 24 nt, Human
ugggauuacaugugugagccacug

SEQ ID NO: 585381 - RNA, 21 nt, Human
uguaaacagaaaaaugaacca

SEQ ID NO: 585382 - RNA, 24 nt, Human
ugugauuacuagugugugugugug

SEQ ID NO: 585383 - RNA, 19 nt, Human
uguguguguguguuugugu

SEQ ID NO: 585384 - RNA, 21 nt, Human
uguguguguguuuguguaugu

SEQ ID NO: 585385 - RNA, 21 nt, Human
uguguguguguuuguguaugu

SEQ ID NO: 585386 - RNA, 21 nt, Human
uguguguguguuuguguaugu

SEQ ID NO: 585387 - RNA, 24 nt, Human
uguguguucccaugcacaugcaug

SEQ ID NO: 585388 - RNA, 23 nt, Human
uguguuuguguaugugugugugu

SEQ ID NO: 585389 - RNA, 24 nt, Human
uguuuguguauguguguguguguu

SEQ ID NO: 585390 - RNA, 23 nt, Human
uuacuaaucuuucaaaaauguug

SEQ ID NO: 585391 - RNA, 18 nt, Human
uuaguagagaugaggugu

SEQ ID NO: 585392 - RNA, 21 nt, Human
uucaagcaauucuccugccuc

SEQ ID NO: 585393 - RNA, 24 nt, Human
uucaagcaauucuccugccucggc

SEQ ID NO: 585394 - RNA, 23 nt, Human
uucaagugauccuccggccucag

SEQ ID NO: 585395 - RNA, 26 nt, Human
uuccaguaugaaucaaauaauuccau

SEQ ID NO: 585396 - RNA, 18 nt, Human
uuggagcuugauacauac

SEQ ID NO: 585397 - RNA, 25 nt, Human
uuucuaauguuaaacuuucuaguca

SEQ ID NO: 585398 - RNA, 21 nt, Human
uuuuuaguagagaugaggugu

SEQ ID NO: 585399 - RNA, 21 nt, Human
uuuuuguauuuuuaguagaga

SEQ ID NO: 585400 - RNA, 24 nt, Human
uuuuuuguauuuuuaguagagaug

SEQ ID NO: 585401 - RNA, 26 nt, Human
aaacccaauaagcuuaaacaaaguga

SEQ ID NO: 585402 - RNA, 25 nt, Human
aaauaaaauguacuuggcuauaaaa

SEQ ID NO: 585403 - RNA, 22 nt, Human
aagaaaauaguuuugaaaaaga

SEQ ID NO: 585404 - RNA, 21 nt, Human
aagcaugaucaauaccaagau

SEQ ID NO: 585405 - RNA, 19 nt, Human
aaggaaaggcuauuuggua

SEQ ID NO: 585406 - RNA, 18 nt, Human
agaaugcuauagaaagcc

SEQ ID NO: 585407 - RNA, 19 nt, Human
auuucauuacuggguaaca

SEQ ID NO: 585408 - RNA, 23 nt, Human
cagcaagaaaauaaaauguacuu

SEQ ID NO: 585409 - RNA, 25 nt, Human
cagcaagaaaauaaaauguacuugg

SEQ ID NO: 585410 - RNA, 23 nt, Human
cauaaaccuuaaagcaugaucaa

SEQ ID NO: 585411 - RNA, 21 nt, Human
ccaaaaaagcaagaacaguga

SEQ ID NO: 585412 - RNA, 23 nt, Human
ccaucuagaaauuuuucaaauaa

SEQ ID NO: 585413 - RNA, 23 nt, Human
cccaauaagcuuaaacaaaguga

SEQ ID NO: 585414 - RNA, 19 nt, Human
cucuucccaaaaaagcaaa

SEQ ID NO: 585415 - RNA, 22 nt, Human
gaaaaaaauccuuuuauuuuua

SEQ ID NO: 585416 - RNA, 20 nt, Human
ggaguuaacaacuuacaauu

SEQ ID NO: 585417 - RNA, 25 nt, Human
guugaaauauuuaucuacacauuag

SEQ ID NO: 585418 - RNA, 19 nt, Human
uaaaaauuuaaacaccuga

SEQ ID NO: 585419 - RNA, 22 nt, Human
uaaaauguacuuggcuauaaaa

SEQ ID NO: 585420 - RNA, 19 nt, Human
uaagaacaucaguacacuu

SEQ ID NO: 585421 - RNA, 18 nt, Human
uacuugaaaaaggguugc

SEQ ID NO: 585422 - RNA, 23 nt, Human
uacuuggcuauaaaaauacugag

SEQ ID NO: 585423 - RNA, 21 nt, Human
uagaaugcuauagaaagccuc

SEQ ID NO: 585424 - RNA, 20 nt, Human
uagacugcauugaugaaaau

SEQ ID NO: 585425 - RNA, 18 nt, Human
uaguaaagugagguuaca

SEQ ID NO: 585426 - RNA, 22 nt, Human
uccacuugcaauauuuauccaa

SEQ ID NO: 585427 - RNA, 20 nt, Human
ugaaacccaauaagcuuaaa

SEQ ID NO: 585428 - RNA, 22 nt, Human
ugcauaauuuccaacucaucca

SEQ ID NO: 585429 - RNA, 24 nt, Human
ugucguaaacaauagagaaaaaaa

SEQ ID NO: 585430 - RNA, 26 nt, Human
uuaaaaucaugcaauacugcauggua

SEQ ID NO: 585431 - RNA, 22 nt, Human
uucccaaaaaagcaagaacagu

SEQ ID NO: 585432 - RNA, 21 nt, Human
uugcaacaaagugucucuucc

SEQ ID NO: 585433 - RNA, 19 nt, Human
uuuaaacaccugauuaauc

SEQ ID NO: 585434 - RNA, 20 nt, Human
uuuuuuuuuuuuccacuuca

SEQ ID NO: 585435 - RNA, 22 nt, Human
uuuuuuuuuuuuuuuuccacuu

SEQ ID NO: 585436 - RNA, 22 nt, Human
aaccccuuacagccagccccac

SEQ ID NO: 585437 - RNA, 21 nt, Human
aagaagggcgggugggcagaa

SEQ ID NO: 585438 - RNA, 18 nt, Human
accccagaaauauccaag

SEQ ID NO: 585439 - RNA, 19 nt, Human
agagggaagaagggcgggu

SEQ ID NO: 585440 - RNA, 24 nt, Human
aggaaaguccucaaugccucuucc

SEQ ID NO: 585441 - RNA, 24 nt, Human
aucagccuucccacccaccccggg

SEQ ID NO: 585442 - RNA, 20 nt, Human
aucagucccccagcuccacu

SEQ ID NO: 585443 - RNA, 18 nt, Human
caccccagaaauauccaa

SEQ ID NO: 585444 - RNA, 18 nt, Human
caccgagggccggcggcg

SEQ ID NO: 585445 - RNA, 22 nt, Human
cacgcgccgcccgccccaggca

SEQ ID NO: 585446 - RNA, 22 nt, Human
cagcagcugcuccugggggugc

SEQ ID NO: 585447 - RNA, 19 nt, Human
caggugcacugaaugaggc

SEQ ID NO: 585448 - RNA, 20 nt, Human
cccaggcagccggacucugc

SEQ ID NO: 585449 - RNA, 21 nt, Human
cccggguggggcccucccugu

SEQ ID NO: 585450 - RNA, 23 nt, Human
ccgcccgccccaggcagccggac

SEQ ID NO: 585451 - RNA, 21 nt, Human
ccggguggggcccucccuguc

SEQ ID NO: 585452 - RNA, 19 nt, Human
ccucaaugccucuuccucc

SEQ ID NO: 585453 - RNA, 24 nt, Human
ccuggaggugucucuggccagcca

SEQ ID NO: 585454 - RNA, 24 nt, Human
cgcccgccccaggcagccggacuc

SEQ ID NO: 585455 - RNA, 25 nt, Human
cgggugggcagaaggaaggggcugg

SEQ ID NO: 585456 - RNA, 27 nt, Human
cgggugggcagaaggaaggggcuggag

SEQ ID NO: 585457 - RNA, 21 nt, Human
cggguggggcccucccugucu

SEQ ID NO: 585458 - RNA, 24 nt, Human
cuccagaaagguggcccaggggcg

SEQ ID NO: 585459 - RNA, 19 nt, Human
cuccccccagcccccaggc

SEQ ID NO: 585460 - RNA, 18 nt, Human
cugcuggcucccagaucu

SEQ ID NO: 585461 - RNA, 22 nt, Human
cuggccagccacagcauccagc

SEQ ID NO: 585462 - RNA, 19 nt, Human
cuggcucccagaucugucc

SEQ ID NO: 585463 - RNA, 18 nt, Human
cuggcugggccugcuggg

SEQ ID NO: 585464 - RNA, 22 nt, Human
gaaaguccucaaugccucuucc

SEQ ID NO: 585465 - RNA, 18 nt, Human
gagggaagaagggcgggu

SEQ ID NO: 585466 - RNA, 22 nt, Human
gccuggggcuccccccagcccc

SEQ ID NO: 585467 - RNA, 21 nt, Human
gcgccgcccgccccaggcagc

SEQ ID NO: 585468 - RNA, 22 nt, Human
gcuggggcccaggugcacugaa

SEQ ID NO: 585469 - RNA, 19 nt, Human
ggaaaaacagguaaggaaa

SEQ ID NO: 585470 - RNA, 23 nt, Human
ggaaaguccucaaugccucuucc

SEQ ID NO: 585471 - RNA, 21 nt, Human
ggagacagaucaucagccuuc

SEQ ID NO: 585472 - RNA, 25 nt, Human
ggcacuggcgggggggcaaccccuu

SEQ ID NO: 585473 - RNA, 21 nt, Human
ggcagaaggaaggggcuggag

SEQ ID NO: 585474 - RNA, 22 nt, Human
gggcccaggugcacugaaugaa

SEQ ID NO: 585475 - RNA, 21 nt, Human
gggccugcuggggcccaggug

SEQ ID NO: 585476 - RNA, 18 nt, Human
uauucacagcagcugcuc

SEQ ID NO: 585477 - RNA, 19 nt, Human
ucacagcagcugcuccugg

SEQ ID NO: 585478 - RNA, 20 nt, Human
ucacagcagcugcuccuggg

SEQ ID NO: 585479 - RNA, 19 nt, Human
ucagccuucccacccaccc

SEQ ID NO: 585480 - RNA, 19 nt, Human
uccaaggcacuggcggggg

SEQ ID NO: 585481 - RNA, 22 nt, Human
uccucaaugccucuuccuccac

SEQ ID NO: 585482 - RNA, 18 nt, Human
ucucuggccagccacagc

SEQ ID NO: 585483 - RNA, 19 nt, Human
ucuguccaguugcccagag

SEQ ID NO: 585484 - RNA, 20 nt, Human
ucuguccaguugcccagagg

SEQ ID NO: 585485 - RNA, 19 nt, Human
ugaaugaggcuucuaauca

SEQ ID NO: 585486 - RNA, 18 nt, Human
ugagcuggaaaaacaggu

SEQ ID NO: 585487 - RNA, 21 nt, Human
ugcccagagggaagaagggcg

SEQ ID NO: 585488 - RNA, 22 nt, Human
ugcuggggcccaggugcacuga

SEQ ID NO: 585489 - RNA, 21 nt, Human
uggaaaaacagguaaggaaag

SEQ ID NO: 585490 - RNA, 21 nt, Human
uggaaaaacagguaaggaaag

SEQ ID NO: 585491 - RNA, 21 nt, Human
uggcugggccugcuggggccc

SEQ ID NO: 585492 - RNA, 18 nt, Human
ugggcagaaggaaggggc

SEQ ID NO: 585493 - RNA, 20 nt, Human
ugggcagaaggaaggggcug

SEQ ID NO: 585494 - RNA, 23 nt, Human
ugggggugcaggcggccgggcga

SEQ ID NO: 585495 - RNA, 23 nt, Human
uucuaaucagucccccagcucca

SEQ ID NO: 585496 - RNA, 22 nt, Human
agccccgacaggaagcuuuaac

SEQ ID NO: 585497 - RNA, 23 nt, Human
aggaagcuuuaacauaaagccuu

SEQ ID NO: 585498 - RNA, 18 nt, Human
ugacccugagaagcaugg

SEQ ID NO: 585499 - RNA, 20 nt, Human
ugucgugagcagguucaugg

SEQ ID NO: 585500 - RNA, 22 nt, Human
aagaacaccacugugcuguacc

SEQ ID NO: 585501 - RNA, 18 nt, Human
agacagggucucucuaug

SEQ ID NO: 585502 - RNA, 23 nt, Human
agacagggucucucuauguugcc

SEQ ID NO: 585503 - RNA, 19 nt, Human
agacucgggguaguggcag

SEQ ID NO: 585504 - RNA, 19 nt, Human
agagcuaagagagcacagu

SEQ ID NO: 585505 - RNA, 19 nt, Human
aguccuggggccagccugc

SEQ ID NO: 585506 - RNA, 24 nt, Human
auggacgcccgugaguccuggggc

SEQ ID NO: 585507 - RNA, 20 nt, Human
auguugcccaggcuggucuc

SEQ ID NO: 585508 - RNA, 24 nt, Human
caaagugcugugauuaggccuacg

SEQ ID NO: 585509 - RNA, 23 nt, Human
cacccccaagccuggcuggugac

SEQ ID NO: 585510 - RNA, 22 nt, Human
cagagacagggucucucuaugu

SEQ ID NO: 585511 - RNA, 24 nt, Human
cagccucugcagccccacugcccu

SEQ ID NO: 585512 - RNA, 18 nt, Human
cagcucccuccaucagcc

SEQ ID NO: 585513 - RNA, 24 nt, Human
cagcugcauggacgcccgugaguc

SEQ ID NO: 585514 - RNA, 24 nt, Human
cagggucucucuauguugcccagg

SEQ ID NO: 585515 - RNA, 23 nt, Human
ccaaagugcugugauuaggccua

SEQ ID NO: 585516 - RNA, 21 nt, Human
ccaggcagacacagcacgaac

SEQ ID NO: 585517 - RNA, 20 nt, Human
cccagcucccuccaucagcc

SEQ ID NO: 585518 - RNA, 18 nt, Human
ccccacugcccucucuca

SEQ ID NO: 585519 - RNA, 25 nt, Human
ccccacugcccucucucauuaccug

SEQ ID NO: 585520 - RNA, 18 nt, Human
ccccuagggcagcaguuu

SEQ ID NO: 585521 - RNA, 21 nt, Human
cccgugagucccggagacagg

SEQ ID NO: 585522 - RNA, 19 nt, Human
ccuaacacuuaccucaccu

SEQ ID NO: 585523 - RNA, 22 nt, Human
ccuccaucacccccaagccugg

SEQ ID NO: 585524 - RNA, 26 nt, Human
ccucccaccuuggccucccaaagugc

SEQ ID NO: 585525 - RNA, 19 nt, Human
ccuccuccaucacccccaa

SEQ ID NO: 585526 - RNA, 21 nt, Human
ccuccuccaucacccccaagc

SEQ ID NO: 585527 - RNA, 20 nt, Human
ccucugcagccccacugccc

SEQ ID NO: 585528 - RNA, 18 nt, Human
ccuggggccagccugcuu

SEQ ID NO: 585529 - RNA, 21 nt, Human
cguugugugucacuuucuuaa

SEQ ID NO: 585530 - RNA, 19 nt, Human
cuacaguagucuguggcuc

SEQ ID NO: 585531 - RNA, 19 nt, Human
cucaccccagccucugcag

SEQ ID NO: 585532 - RNA, 19 nt, Human
cucagugauccucccaccu

SEQ ID NO: 585533 - RNA, 19 nt, Human
cucagugauccucccaccu

SEQ ID NO: 585534 - RNA, 23 nt, Human
cucagugauccucccaccuuggc

SEQ ID NO: 585535 - RNA, 21 nt, Human
cuggagagacucgggguagug

SEQ ID NO: 585536 - RNA, 19 nt, Human
gaauugcaacuguccaggc

SEQ ID NO: 585537 - RNA, 24 nt, Human
gaccuuaccuuccuguacugccac

SEQ ID NO: 585538 - RNA, 23 nt, Human
gcuguagggaaauaauuuauagg

SEQ ID NO: 585539 - RNA, 19 nt, Human
ggccagccugcuuucucag

SEQ ID NO: 585540 - RNA, 18 nt, Human
ggcugcagggaucuggaa

SEQ ID NO: 585541 - RNA, 18 nt, Human
gguaguggcaggcugcag

SEQ ID NO: 585542 - RNA, 24 nt, Human
gguccagcuccccuccaucagcug

SEQ ID NO: 585543 - RNA, 21 nt, Human
guaguggcaggcugcagggau

SEQ ID NO: 585544 - RNA, 21 nt, Human
guccgguccagcuccccucca

SEQ ID NO: 585545 - RNA, 20 nt, Human
uaaacagccauacuaagaac

SEQ ID NO: 585546 - RNA, 20 nt, Human
uaagaacaccacugugcugu

SEQ ID NO: 585547 - RNA, 23 nt, Human
uaccgaguccuccuccaucaccc

SEQ ID NO: 585548 - RNA, 23 nt, Human
uaccucaccuguguaagaacucc

SEQ ID NO: 585549 - RNA, 23 nt, Human
uauguugcccaggcuggucucag

SEQ ID NO: 585550 - RNA, 24 nt, Human
uauguugcccaggcuggucucagu

SEQ ID NO: 585551 - RNA, 27 nt, Human
ucagugauccucccaccuuggccuccc

SEQ ID NO: 585552 - RNA, 22 nt, Human
ucccaaagugcugugauuaggc

SEQ ID NO: 585553 - RNA, 23 nt, Human
uccgguccagcuccccuccauca

SEQ ID NO: 585554 - RNA, 22 nt, Human
uccuaucucauggaguggaagc

SEQ ID NO: 585555 - RNA, 18 nt, Human
ucuauguugcccaggcug

SEQ ID NO: 585556 - RNA, 18 nt, Human
ucuauguugcccaggcug

SEQ ID NO: 585557 - RNA, 20 nt, Human
ucucuauguugcccaggcug

SEQ ID NO: 585558 - RNA, 23 nt, Human
ucucucuauguugcccaggcugg

SEQ ID NO: 585559 - RNA, 24 nt, Human
ucucucuauguugcccaggcuggu

SEQ ID NO: 585560 - RNA, 19 nt, Human
ucugcagccccacugcccu

SEQ ID NO: 585561 - RNA, 20 nt, Human
ucugcagccccacugcccuc

SEQ ID NO: 585562 - RNA, 30 nt, Human
ucugcgacuguaaacagccauacuaagaac

SEQ ID NO: 585563 - RNA, 21 nt, Human
ucuguggcucaccccagccuc

SEQ ID NO: 585564 - RNA, 21 nt, Human
ugaagcacgagaagcacaguc

SEQ ID NO: 585565 - RNA, 22 nt, Human
ugauucugaaaguuacugggaa

SEQ ID NO: 585566 - RNA, 19 nt, Human
ugcagccccacugcccucu

SEQ ID NO: 585567 - RNA, 19 nt, Human
ugcauggacgcccgugagu

SEQ ID NO: 585568 - RNA, 25 nt, Human
ugcccaggcuggucucagugauccu

SEQ ID NO: 585569 - RNA, 20 nt, Human
ugccuggccacagcaggugc

SEQ ID NO: 585570 - RNA, 21 nt, Human
uggcuggugaccuggagagac

SEQ ID NO: 585571 - RNA, 19 nt, Human
uggggccagccugcuuucu

SEQ ID NO: 585572 - RNA, 20 nt, Human
uggggccagccugcuuucuc

SEQ ID NO: 585573 - RNA, 23 nt, Human
uggucucagugauccucccaccu

SEQ ID NO: 585574 - RNA, 20 nt, Human
uguccaaaaccuucauaaau

SEQ ID NO: 585575 - RNA, 24 nt, Human
ugucccuuaccgaguccuccucca

SEQ ID NO: 585576 - RNA, 22 nt, Human
uuccaaaugacuguccaaaacc

SEQ ID NO: 585577 - RNA, 19 nt, Human
uugcuuaaccaauccccua

SEQ ID NO: 585578 - RNA, 18 nt, Human
uuggccucccaaagugcu

SEQ ID NO: 585579 - RNA, 21 nt, Human
aaaagcaucaacaaaacccag

SEQ ID NO: 585580 - RNA, 24 nt, Human
aaacacacccaaaccugagaccac

SEQ ID NO: 585581 - RNA, 24 nt, Human
aaagugcugggauuacaggcguga

SEQ ID NO: 585582 - RNA, 24 nt, Human
aagcgauccucuagccuuggccuc

SEQ ID NO: 585583 - RNA, 19 nt, Human
aagugcugggauuacaggc

SEQ ID NO: 585584 - RNA, 19 nt, Human
aagugcugggauuacaggc

SEQ ID NO: 585585 - RNA, 26 nt, Human
aagugcugggauuacaggcgugaacu

SEQ ID NO: 585586 - RNA, 19 nt, Human
accaaacacacccaaaccu

SEQ ID NO: 585587 - RNA, 22 nt, Human
accagaccaaacacacccaaac

SEQ ID NO: 585588 - RNA, 24 nt, Human
agaaaagcaucaacaaaacccagg

SEQ ID NO: 585589 - RNA, 23 nt, Human
agaccaaacacacccaaaccuga

SEQ ID NO: 585590 - RNA, 23 nt, Human
agcuugucacgccuugcaccacg

SEQ ID NO: 585591 - RNA, 19 nt, Human
aggcgugaacugcuguacc

SEQ ID NO: 585592 - RNA, 20 nt, Human
agggaccugagcuggcaggg

SEQ ID NO: 585593 - RNA, 21 nt, Human
agggaccugagcuggcagggg

SEQ ID NO: 585594 - RNA, 21 nt, Human
aggggccaagccuucugcccc

SEQ ID NO: 585595 - RNA, 18 nt, Human
agugcugggauuacaggc

SEQ ID NO: 585596 - RNA, 27 nt, Human
aguggcagggaccugagcuggcagggg

SEQ ID NO: 585597 - RNA, 23 nt, Human
auccacugaguggcagggaccug

SEQ ID NO: 585598 - RNA, 25 nt, Human
caaacuccugggcucaagcgauccu

SEQ ID NO: 585599 - RNA, 19 nt, Human
caaaggauggcgcagcacc

SEQ ID NO: 585600 - RNA, 20 nt, Human
caaagucccauccacugagu

SEQ ID NO: 585601 - RNA, 24 nt, Human
caaagugcugggauuacaggcgug

SEQ ID NO: 585602 - RNA, 21 nt, Human
cacaaaggauggcgcagcacc

SEQ ID NO: 585603 - RNA, 25 nt, Human
cacccaaaccugagaccacagaggc

SEQ ID NO: 585604 - RNA, 20 nt, Human
cagaggccgcccagccgggu

SEQ ID NO: 585605 - RNA, 26 nt, Human
cagcagccccugagccccccgaaucg

SEQ ID NO: 585606 - RNA, 19 nt, Human
cagccccugagcccugacc

SEQ ID NO: 585607 - RNA, 18 nt, Human
caggagcccccgacccgg

SEQ ID NO: 585608 - RNA, 19 nt, Human
caggcugaucucaaacucc

SEQ ID NO: 585609 - RNA, 22 nt, Human
cagggaccuugccccaaagcuc

SEQ ID NO: 585610 - RNA, 23 nt, Human
cagggaccuugccccaaagcucc

SEQ ID NO: 585611 - RNA, 20 nt, Human
ccaaagcuccaauugucagg

SEQ ID NO: 585612 - RNA, 22 nt, Human
ccaaagugcugggauuacaggc

SEQ ID NO: 585613 - RNA, 22 nt, Human
ccaaagugcugggauuacaggc

SEQ ID NO: 585614 - RNA, 24 nt, Human
ccaaagugcugggauuacaggcgu

SEQ ID NO: 585615 - RNA, 21 nt, Human
ccacagaggccgcccagccgg

SEQ ID NO: 585616 - RNA, 18 nt, Human
ccagaccaaacacaccca

SEQ ID NO: 585617 - RNA, 20 nt, Human
ccagaccaaacacacccaaa

SEQ ID NO: 585618 - RNA, 25 nt, Human
ccagaccaaacacacccaaaccuga

SEQ ID NO: 585619 - RNA, 24 nt, Human
ccaucuuggccgcgaagcggggac

SEQ ID NO: 585620 - RNA, 22 nt, Human
cccaaaccugagaccacagagg

SEQ ID NO: 585621 - RNA, 23 nt, Human
cccaaaccugagaccacagaggc

SEQ ID NO: 585622 - RNA, 20 nt, Human
cccaaggccuccgauucgau

SEQ ID NO: 585623 - RNA, 21 nt, Human
cccacacuccgccaaaguccc

SEQ ID NO: 585624 - RNA, 18 nt, Human
cccagggcugcagggacc

SEQ ID NO: 585625 - RNA, 21 nt, Human
ccccacagcuguggggaccua

SEQ ID NO: 585626 - RNA, 23 nt, Human
ccccagggcugcagggaccuggg

SEQ ID NO: 585627 - RNA, 23 nt, Human
ccccugagcccugaccagaccaa

SEQ ID NO: 585628 - RNA, 20 nt, Human
ccccuggcaacacacgccug

SEQ ID NO: 585629 - RNA, 21 nt, Human
ccccugugcuagccccagggc

SEQ ID NO: 585630 - RNA, 20 nt, Human
cccggaacgcccuucccggg

SEQ ID NO: 585631 - RNA, 20 nt, Human
cccugugcuagccccagggc

SEQ ID NO: 585632 - RNA, 21 nt, Human
ccgcccagccggguccacagg

SEQ ID NO: 585633 - RNA, 19 nt, Human
ccggcucccggaacgcccu

SEQ ID NO: 585634 - RNA, 22 nt, Human
ccggcugcuccucccaaggccu

SEQ ID NO: 585635 - RNA, 22 nt, Human
ccuccgauucgaugucccugau

SEQ ID NO: 585636 - RNA, 22 nt, Human
ccugagcuggcaggggccaugc

SEQ ID NO: 585637 - RNA, 26 nt, Human
ccugcaggggccccacacuccgccaa

SEQ ID NO: 585638 - RNA, 21 nt, Human
ccuugcaccacggguggcccc

SEQ ID NO: 585639 - RNA, 19 nt, Human
cgucccccgagccagcccc

SEQ ID NO: 585640 - RNA, 21 nt, Human
cgugaccccuucuccagggac

SEQ ID NO: 585641 - RNA, 18 nt, Human
cucccugcaggggcccca

SEQ ID NO: 585642 - RNA, 23 nt, Human
cuccugggcucaagcgauccucu

SEQ ID NO: 585643 - RNA, 24 nt, Human
cuccugggcucaagcgauccucua

SEQ ID NO: 585644 - RNA, 22 nt, Human
cugagcccugaccagaccaaac

SEQ ID NO: 585645 - RNA, 21 nt, Human
cugcugcaggcagcuuaacug

SEQ ID NO: 585646 - RNA, 20 nt, Human
cuuccuggguuugcugggca

SEQ ID NO: 585647 - RNA, 22 nt, Human
gaaaacgaguacuccauucuua

SEQ ID NO: 585648 - RNA, 21 nt, Human
gaccagcagccccugagcccu

SEQ ID NO: 585649 - RNA, 19 nt, Human
gaccuaggccgagguccgc

SEQ ID NO: 585650 - RNA, 19 nt, Human
gacgccacaccuuccuggg

SEQ ID NO: 585651 - RNA, 20 nt, Human
gagaccacagaggccgccca

SEQ ID NO: 585652 - RNA, 24 nt, Human
gagccccggccagggaggcuucag

SEQ ID NO: 585653 - RNA, 21 nt, Human
gauuacaggcgugaacugcug

SEQ ID NO: 585654 - RNA, 22 nt, Human
gauucacuaaaauucacaaaga

SEQ ID NO: 585655 - RNA, 18 nt, Human
gccagccccacagcugug

SEQ ID NO: 585656 - RNA, 22 nt, Human
gccuuggccucccaaagugcug

SEQ ID NO: 585657 - RNA, 18 nt, Human
ggccaagccuucugcccc

SEQ ID NO: 585658 - RNA, 23 nt, Human
ggguggccccauuguggggacag

SEQ ID NO: 585659 - RNA, 18 nt, Human
gucacgccuugcaccacg

SEQ ID NO: 585660 - RNA, 18 nt, Human
gucccauccacugagugg

SEQ ID NO: 585661 - RNA, 25 nt, Human
guggaccagcagccccugagcccug

SEQ ID NO: 585662 - RNA, 24 nt, Human
guggggacagcaguggccaggcgu

SEQ ID NO: 585663 - RNA, 24 nt, Human
uagacccucccugcaggggcccca

SEQ ID NO: 585664 - RNA, 21 nt, Human
uaggacaaaucucuugaaaac

SEQ ID NO: 585665 - RNA, 27 nt, Human
uaugaaaaaccucgaacaaaggagcca

SEQ ID NO: 585666 - RNA, 23 nt, Human
uauguugcccaggcugaucucaa

SEQ ID NO: 585667 - RNA, 24 nt, Human
uauguugcccaggcugaucucaaa

SEQ ID NO: 585668 - RNA, 20 nt, Human
uccacaggcuuggccagggg

SEQ ID NO: 585669 - RNA, 19 nt, Human
uccaccagccagacguggg

SEQ ID NO: 585670 - RNA, 19 nt, Human
uccagggaccuugccccaa

SEQ ID NO: 585671 - RNA, 24 nt, Human
ucccaaagugcugggauuacaggc

SEQ ID NO: 585672 - RNA, 23 nt, Human
uccccacgugaccccuucuccag

SEQ ID NO: 585673 - RNA, 19 nt, Human
uccgccaaagucccaucca

SEQ ID NO: 585674 - RNA, 19 nt, Human
uccucuagccuuggccucc

SEQ ID NO: 585675 - RNA, 21 nt, Human
uccugggcucaagcgauccuc

SEQ ID NO: 585676 - RNA, 23 nt, Human
ucucaaacuccugggcucaagcg

SEQ ID NO: 585677 - RNA, 19 nt, Human
ucuugguauguugcccagg

SEQ ID NO: 585678 - RNA, 23 nt, Human
ucuugguauguugcccaggcuga

SEQ ID NO: 585679 - RNA, 27 nt, Human
ugaauuauucaucaauacuuggcauaa

SEQ ID NO: 585680 - RNA, 22 nt, Human
ugaccagaccaaacacacccaa

SEQ ID NO: 585681 - RNA, 24 nt, Human
ugaggucuugguauguugcccagg

SEQ ID NO: 585682 - RNA, 19 nt, Human
ugccccuggcaacacacgc

SEQ ID NO: 585683 - RNA, 21 nt, Human
ugccguugauaguuaaggucu

SEQ ID NO: 585684 - RNA, 20 nt, Human
ugcugggauuacaggcguga

SEQ ID NO: 585685 - RNA, 22 nt, Human
ugcugggcagaccuggccucug

SEQ ID NO: 585686 - RNA, 22 nt, Human
uggcagggaccugagcuggcag

SEQ ID NO: 585687 - RNA, 21 nt, Human
uggcaggggccaugcuuagca

SEQ ID NO: 585688 - RNA, 22 nt, Human
uggccucugcagggcagccagc

SEQ ID NO: 585689 - RNA, 19 nt, Human
ugggauuacaggcgugaac

SEQ ID NO: 585690 - RNA, 19 nt, Human
ugggauuacaggcgugaac

SEQ ID NO: 585691 - RNA, 19 nt, Human
ugggauuacaggcgugaac

SEQ ID NO: 585692 - RNA, 19 nt, Human
ugggauuacaggcgugaac

SEQ ID NO: 585693 - RNA, 20 nt, Human
ugggauuacaggcgugaacu

SEQ ID NO: 585694 - RNA, 22 nt, Human
ugggauuacaggcgugaacugc

SEQ ID NO: 585695 - RNA, 24 nt, Human
ugggauuacaggcgugaacugcug

SEQ ID NO: 585696 - RNA, 25 nt, Human
ugggauuacaggcgugaacugcugu

SEQ ID NO: 585697 - RNA, 18 nt, Human
ugggcucaagcgauccuc

SEQ ID NO: 585698 - RNA, 23 nt, Human
ugugcuagccccagggcugcagg

SEQ ID NO: 585699 - RNA, 19 nt, Human
uguggaccagcagccccug

SEQ ID NO: 585700 - RNA, 20 nt, Human
uuagaaaagcaucaacaaaa

SEQ ID NO: 585701 - RNA, 19 nt, Human
uuccuggguuugcugggca

SEQ ID NO: 585702 - RNA, 20 nt, Human
uucgaugucccugauuaagg

SEQ ID NO: 585703 - RNA, 18 nt, Human
uuggccucccaaagugcu

SEQ ID NO: 585704 - RNA, 19 nt, Human
aaaaacccccaacucaggu

SEQ ID NO: 585705 - RNA, 20 nt, Human
aaaaccugacauuccccagg

SEQ ID NO: 585706 - RNA, 18 nt, Human
aaagacaagaagggaaag

SEQ ID NO: 585707 - RNA, 19 nt, Human
aaagugcugggauuacggg

SEQ ID NO: 585708 - RNA, 23 nt, Human
aaagugcugggauuacggguaca

SEQ ID NO: 585709 - RNA, 21 nt, Human
aacaacacagaaaccccccua

SEQ ID NO: 585710 - RNA, 21 nt, Human
aaccgaacagaaaaaccccca

SEQ ID NO: 585711 - RNA, 20 nt, Human
aaccugacauuccccaggga

SEQ ID NO: 585712 - RNA, 21 nt, Human
aagccucacuguguuggccag

SEQ ID NO: 585713 - RNA, 24 nt, Human
aaguagcuggaacuacaggcaugc

SEQ ID NO: 585714 - RNA, 18 nt, Human
aagugcugggauuacggg

SEQ ID NO: 585715 - RNA, 26 nt, Human
aagugcugggauuacggguacaagcc

SEQ ID NO: 585716 - RNA, 19 nt, Human
aaucauagcucacuacagc

SEQ ID NO: 585717 - RNA, 20 nt, Human
acagaaauacaaggggcugg

SEQ ID NO: 585718 - RNA, 21 nt, Human
acccccaacucagguuugcug

SEQ ID NO: 585719 - RNA, 21 nt, Human
accccgguaccccggccuuua

SEQ ID NO: 585720 - RNA, 24 nt, Human
agaaaaacccccaacucagguuug

SEQ ID NO: 585721 - RNA, 21 nt, Human
agaaauacaaggggcuggggc

SEQ ID NO: 585722 - RNA, 18 nt, Human
agacaaagccucacugug

SEQ ID NO: 585723 - RNA, 23 nt, Human
agacaagaagggaaagagaacag

SEQ ID NO: 585724 - RNA, 19 nt, Human
agacagaauaaaaagcaca

SEQ ID NO: 585725 - RNA, 23 nt, Human
agacagccaggacacagugaagc

SEQ ID NO: 585726 - RNA, 20 nt, Human
agacuccaggaggacuccga

SEQ ID NO: 585727 - RNA, 21 nt, Human
agacucccagaccagcccucc

SEQ ID NO: 585728 - RNA, 19 nt, Human
agaguguccuccccagccc

SEQ ID NO: 585729 - RNA, 21 nt, Human
agaguguccuccccagccccg

SEQ ID NO: 585730 - RNA, 19 nt, Human
agccaccacacugggccua

SEQ ID NO: 585731 - RNA, 18 nt, Human
agccucgaccucccaggc

SEQ ID NO: 585732 - RNA, 28 nt, Human
agcucacuacagccucgaccucccaggg

SEQ ID NO: 585733 - RNA, 18 nt, Human
aggcuagaaacgaccaaa

SEQ ID NO: 585734 - RNA, 22 nt, Human
aggggcuggggccugaggcuag

SEQ ID NO: 585735 - RNA, 24 nt, Human
auagcucacuacagccucgaccuc

SEQ ID NO: 585736 - RNA, 21 nt, Human
aucuagaacagaaauacaagg

SEQ ID NO: 585737 - RNA, 23 nt, Human
caaagugcugggauuacggguac

SEQ ID NO: 585738 - RNA, 20 nt, Human
caagcgacucuuacagcccu

SEQ ID NO: 585739 - RNA, 22 nt, Human
caagcgaugcuccugccucggc

SEQ ID NO: 585740 - RNA, 18 nt, Human
caaggggcucagaguguc

SEQ ID NO: 585741 - RNA, 18 nt, Human
caauauuuuuaaagacaa

SEQ ID NO: 585742 - RNA, 18 nt, Human
caaucauagcucacuaca

SEQ ID NO: 585743 - RNA, 25 nt, Human
caccacacugggccuacuucuuuau

SEQ ID NO: 585744 - RNA, 24 nt, Human
caccucagccucacaaguagcugg

SEQ ID NO: 585745 - RNA, 22 nt, Human
cacuacagccucgaccucccag

SEQ ID NO: 585746 - RNA, 21 nt, Human
cacuguguuggccaguugaac

SEQ ID NO: 585747 - RNA, 20 nt, Human
cagaccagcccuccgccccu

SEQ ID NO: 585748 - RNA, 22 nt, Human
cagccaggacacagugaagcag

SEQ ID NO: 585749 - RNA, 22 nt, Human
cagccccuaggauuccugcccu

SEQ ID NO: 585750 - RNA, 22 nt, Human
cagcccuguagccuugccgugu

SEQ ID NO: 585751 - RNA, 21 nt, Human
cagccucgaccucccaggcuc

SEQ ID NO: 585752 - RNA, 24 nt, Human
cagccucgaccucccaggcucaag

SEQ ID NO: 585753 - RNA, 21 nt, Human
cagccucgggggcgccagcag

SEQ ID NO: 585754 - RNA, 21 nt, Human
caggagccggagcgccgcgag

SEQ ID NO: 585755 - RNA, 21 nt, Human
caucuagaacagaaauacaag

SEQ ID NO: 585756 - RNA, 18 nt, Human
ccaaagugcugggauuac

SEQ ID NO: 585757 - RNA, 21 nt, Human
ccaaagugcugggauuacggg

SEQ ID NO: 585758 - RNA, 22 nt, Human
ccaaagugcugggauuacgggu

SEQ ID NO: 585759 - RNA, 19 nt, Human
ccacagaagcuggaccagg

SEQ ID NO: 585760 - RNA, 20 nt, Human
ccacgcgccgcgccccaccc

SEQ ID NO: 585761 - RNA, 21 nt, Human
ccacgcgccgcgccccacccc

SEQ ID NO: 585762 - RNA, 20 nt, Human
ccacuaccccaaggggcugu

SEQ ID NO: 585763 - RNA, 24 nt, Human
ccagaccagcccuccgccccugcc

SEQ ID NO: 585764 - RNA, 23 nt, Human
ccagccuguuuccccaugggcag

SEQ ID NO: 585765 - RNA, 19 nt, Human
ccauuaaaaaaauacugua

SEQ ID NO: 585766 - RNA, 19 nt, Human
cccacacccagccagccau

SEQ ID NO: 585767 - RNA, 20 nt, Human
cccaggcucaagcgauccuc

SEQ ID NO: 585768 - RNA, 21 nt, Human
ccccaccccgguaccccggcc

SEQ ID NO: 585769 - RNA, 20 nt, Human
cccccaacucagguuugcug

SEQ ID NO: 585770 - RNA, 21 nt, Human
ccccgccccuauaucccgggc

SEQ ID NO: 585771 - RNA, 22 nt, Human
ccccgccccuauaucccgggcc

SEQ ID NO: 585772 - RNA, 23 nt, Human
ccccgcccgcguccggccgcucc

SEQ ID NO: 585773 - RNA, 19 nt, Human
ccccuauaucccgggcccu

SEQ ID NO: 585774 - RNA, 22 nt, Human
cccgcccaucugggccccgggc

SEQ ID NO: 585775 - RNA, 19 nt, Human
cccgcuggcccaggacagc

SEQ ID NO: 585776 - RNA, 18 nt, Human
cccgggcccugaaccccg

SEQ ID NO: 585777 - RNA, 18 nt, Human
cccgggcccugagccccg

SEQ ID NO: 585778 - RNA, 24 nt, Human
cccuauaucccgggcccugagccc

SEQ ID NO: 585779 - RNA, 20 nt, Human
ccgccccugcccucaaucuu

SEQ ID NO: 585780 - RNA, 21 nt, Human
ccucccaccucagccucacaa

SEQ ID NO: 585781 - RNA, 26 nt, Human
ccucccaccucagccucacaaguagc

SEQ ID NO: 585782 - RNA, 20 nt, Human
ccucgaccucccaggcucaa

SEQ ID NO: 585783 - RNA, 21 nt, Human
ccugaaccccguccacgcccu

SEQ ID NO: 585784 - RNA, 19 nt, Human
ccugcccucaguucagcac

SEQ ID NO: 585785 - RNA, 23 nt, Human
ccugggcucaagcgaugcuccuc

SEQ ID NO: 585786 - RNA, 23 nt, Human
ccugggcucaagcgaugcuccug

SEQ ID NO: 585787 - RNA, 19 nt, Human
ccuucuuuuccacagaagc

SEQ ID NO: 585788 - RNA, 25 nt, Human
cgaccaaagacagaauaaaaagcac

SEQ ID NO: 585789 - RNA, 25 nt, Human
cgaccucccaggcucaagcgauccu

SEQ ID NO: 585790 - RNA, 23 nt, Human
cgcguccaggcgcccgccccgcc

SEQ ID NO: 585791 - RNA, 23 nt, Human
cggagugcaccaagcucacugug

SEQ ID NO: 585792 - RNA, 19 nt, Human
cggccacgccgccgccguc

SEQ ID NO: 585793 - RNA, 19 nt, Human
cggccuuuaagccccgccu

SEQ ID NO: 585794 - RNA, 23 nt, Human
cgggagggagcgaaucucgggca

SEQ ID NO: 585795 - RNA, 19 nt, Human
cgggcccugagccccgccc

SEQ ID NO: 585796 - RNA, 24 nt, Human
cguccacgcccugcgccccgcccc

SEQ ID NO: 585797 - RNA, 22 nt, Human
cguccaggcgcccgccccgccc

SEQ ID NO: 585798 - RNA, 23 nt, Human
cuacagccucgaccucccaggcu

SEQ ID NO: 585799 - RNA, 27 nt, Human
cucaagcgauccucccaccucagccuc

SEQ ID NO: 585800 - RNA, 18 nt, Human
cucaagcgaugcuccugc

SEQ ID NO: 585801 - RNA, 21 nt, Human
cucagaguguccuccccagcc

SEQ ID NO: 585802 - RNA, 19 nt, Human
cucccagccuguuucccca

SEQ ID NO: 585803 - RNA, 25 nt, Human
cucccaggcucaagcgauccuccca

SEQ ID NO: 585804 - RNA, 22 nt, Human
cucccccgcccaucugggcccc

SEQ ID NO: 585805 - RNA, 22 nt, Human
cucccgcuggcccaggacagcc

SEQ ID NO: 585806 - RNA, 19 nt, Human
cugagaagcaggucacuua

SEQ ID NO: 585807 - RNA, 18 nt, Human
cugaggcuagaaacgacc

SEQ ID NO: 585808 - RNA, 21 nt, Human
cugcagcaucugagccucggu

SEQ ID NO: 585809 - RNA, 23 nt, Human
cugccucggccucccaaagugcu

SEQ ID NO: 585810 - RNA, 24 nt, Human
cugcgccccgccccuauaucccgg

SEQ ID NO: 585811 - RNA, 22 nt, Human
cuuacagcccuguagccuugcc

SEQ ID NO: 585812 - RNA, 27 nt, Human
gaaccccguccacgcccugcgccccgc

SEQ ID NO: 585813 - RNA, 21 nt, Human
gaacucuguccccacuacccc

SEQ ID NO: 585814 - RNA, 22 nt, Human
gaagcccuuccugaacaacacu

SEQ ID NO: 585815 - RNA, 18 nt, Human
gaccugucucugccaaag

SEQ ID NO: 585816 - RNA, 20 nt, Human
gacuccuuccaaguacacac

SEQ ID NO: 585817 - RNA, 18 nt, Human
gauuacggguacaagcca

SEQ ID NO: 585818 - RNA, 19 nt, Human
gcaaagagagguacagccu

SEQ ID NO: 585819 - RNA, 23 nt, Human
gcaaggcagggcccuauuccauc

SEQ ID NO: 585820 - RNA, 20 nt, Human
gcagcagagacagccaggac

SEQ ID NO: 585821 - RNA, 20 nt, Human
gccaguugaacuccugggcu

SEQ ID NO: 585822 - RNA, 18 nt, Human
gcccacgcgccgcgcccc

SEQ ID NO: 585823 - RNA, 21 nt, Human
gcccacgcgccgcgccccacc

SEQ ID NO: 585824 - RNA, 18 nt, Human
gccccgccccuauauccc

SEQ ID NO: 585825 - RNA, 20 nt, Human
gccccgcccgcguccggccg

SEQ ID NO: 585826 - RNA, 21 nt, Human
gcccugaaccccguccacgcc

SEQ ID NO: 585827 - RNA, 23 nt, Human
gcccuggggcaggcacagcgggg

SEQ ID NO: 585828 - RNA, 18 nt, Human
gcccuguagccuugccgu

SEQ ID NO: 585829 - RNA, 22 nt, Human
gcucaagcgauccucccaccuc

SEQ ID NO: 585830 - RNA, 18 nt, Human
gcucacuguggcuugggg

SEQ ID NO: 585831 - RNA, 20 nt, Human
gcucagaguguccuccccag

SEQ ID NO: 585832 - RNA, 18 nt, Human
gcuggcccaggacagccu

SEQ ID NO: 585833 - RNA, 24 nt, Human
ggaaaacagccccuaggauuccug

SEQ ID NO: 585834 - RNA, 22 nt, Human
ggaaggcaaggcaaggcagggc

SEQ ID NO: 585835 - RNA, 20 nt, Human
ggagugcaccaagcucacug

SEQ ID NO: 585836 - RNA, 19 nt, Human
ggauuacggguacaagcca

SEQ ID NO: 585837 - RNA, 27 nt, Human
ggcagcagagacagccaggacacagug

SEQ ID NO: 585838 - RNA, 21 nt, Human
ggcaguaucugaugcucugau

SEQ ID NO: 585839 - RNA, 23 nt, Human
ggcuggggccugaggcuagaaac

SEQ ID NO: 585840 - RNA, 18 nt, Human
ggcuggggccugaggcuc

SEQ ID NO: 585841 - RNA, 18 nt, Human
gggagaaggagaaaagga

SEQ ID NO: 585842 - RNA, 19 nt, Human
gggaugcugccgggaaggc

SEQ ID NO: 585843 - RNA, 21 nt, Human
gggcagcagagacagccagga

SEQ ID NO: 585844 - RNA, 22 nt, Human
gggcucaagcgaugcuccugcc

SEQ ID NO: 585845 - RNA, 20 nt, Human
ggguggggugguggcguggg

SEQ ID NO: 585846 - RNA, 18 nt, Human
gguucuugcaaagagagg

SEQ ID NO: 585847 - RNA, 23 nt, Human
guaaugagaaccgaacagaaaaa

SEQ ID NO: 585848 - RNA, 21 nt, Human
guacacacgaucucccgugua

SEQ ID NO: 585849 - RNA, 24 nt, Human
guguuggccaguugaacuccuggg

SEQ ID NO: 585850 - RNA, 19 nt, Human
uaagccccgccuacauucc

SEQ ID NO: 585851 - RNA, 23 nt, Human
uaauuuuuaaauuuuuaguagag

SEQ ID NO: 585852 - RNA, 24 nt, Human
uaauuuuuaaauuuuuaguagaga

SEQ ID NO: 585853 - RNA, 26 nt, Human
uaauuuuuaaauuuuuaguagagaca

SEQ ID NO: 585854 - RNA, 24 nt, Human
uacaggcaugcgccaccaugccca

SEQ ID NO: 585855 - RNA, 19 nt, Human
uaccccggccuuuaagccc

SEQ ID NO: 585856 - RNA, 22 nt, Human
uacucggggcccacacccagcc

SEQ ID NO: 585857 - RNA, 24 nt, Human
uaguagagacaaagccucacugug

SEQ ID NO: 585858 - RNA, 24 nt, Human
uaucaaagaagcccuuccggacgg

SEQ ID NO: 585859 - RNA, 22 nt, Human
ucaaaaccugacauuccccagg

SEQ ID NO: 585860 - RNA, 19 nt, Human
ucacaaggggcucagagug

SEQ ID NO: 585861 - RNA, 24 nt, Human
ucacaaguagcuggaacuacaggc

SEQ ID NO: 585862 - RNA, 23 nt, Human
ucacuacagccucgaccucccag

SEQ ID NO: 585863 - RNA, 24 nt, Human
ucacuacagccucgaccucccagg

SEQ ID NO: 585864 - RNA, 19 nt, Human
ucagugcacaacugaaggu

SEQ ID NO: 585865 - RNA, 21 nt, Human
ucagugcacaacugaagguca

SEQ ID NO: 585866 - RNA, 18 nt, Human
uccacagaagcuggacca

SEQ ID NO: 585867 - RNA, 18 nt, Human
uccacagaagcuggacca

SEQ ID NO: 585868 - RNA, 18 nt, Human
uccaucugcagcaucuga

SEQ ID NO: 585869 - RNA, 19 nt, Human
uccaucugcagcaucugag

SEQ ID NO: 585870 - RNA, 23 nt, Human
ucccaaagugcugggauuacggg

SEQ ID NO: 585871 - RNA, 21 nt, Human
ucccaggcucaagcgauccuc

SEQ ID NO: 585872 - RNA, 22 nt, Human
ucccgggcccugagccccgccc

SEQ ID NO: 585873 - RNA, 22 nt, Human
uccucccaccucagccucacaa

SEQ ID NO: 585874 - RNA, 21 nt, Human
uccugggcucaagcgaugcuc

SEQ ID NO: 585875 - RNA, 22 nt, Human
uccugggcucaagcgaugcucc

SEQ ID NO: 585876 - RNA, 24 nt, Human
uccugggcucaagcgaugcuccug

SEQ ID NO: 585877 - RNA, 18 nt, Human
ucggccucccaaagugcu

SEQ ID NO: 585878 - RNA, 18 nt, Human
ucugcagcaucugagccu

SEQ ID NO: 585879 - RNA, 21 nt, Human
ucugcagcaucugagccucgg

SEQ ID NO: 585880 - RNA, 23 nt, Human
ucugggccccgggcccugaaccc

SEQ ID NO: 585881 - RNA, 23 nt, Human
ucuuacagcccuguagccuugcc

SEQ ID NO: 585882 - RNA, 18 nt, Human
ugagaagcaggucacuua

SEQ ID NO: 585883 - RNA, 22 nt, Human
ugagauuuucaaaaccugacau

SEQ ID NO: 585884 - RNA, 21 nt, Human
ugcccucaaucucagaauugc

SEQ ID NO: 585885 - RNA, 26 nt, Human
ugcccuggggcaggcacagcggggcu

SEQ ID NO: 585886 - RNA, 21 nt, Human
ugccucggccucccaaagugc

SEQ ID NO: 585887 - RNA, 24 nt, Human
ugccucggccucccaaagugcugg

SEQ ID NO: 585888 - RNA, 21 nt, Human
uggaacuacaggcaugcgcca

SEQ ID NO: 585889 - RNA, 24 nt, Human
uggaacuacaggcaugcgccacca

SEQ ID NO: 585890 - RNA, 19 nt, Human
uggcccaggacagccucgg

SEQ ID NO: 585891 - RNA, 23 nt, Human
uggcccaggacagccucgggggc

SEQ ID NO: 585892 - RNA, 22 nt, Human
ugggauuacggguacaagccac

SEQ ID NO: 585893 - RNA, 24 nt, Human
ugggauuacggguacaagccacca

SEQ ID NO: 585894 - RNA, 22 nt, Human
ugggccccgggcccugaacccc

SEQ ID NO: 585895 - RNA, 21 nt, Human
uggggcaggcacagcggggcu

SEQ ID NO: 585896 - RNA, 18 nt, Human
ugggguggggugguggcg

SEQ ID NO: 585897 - RNA, 21 nt, Human
uguaaacuguacagcagagac

SEQ ID NO: 585898 - RNA, 22 nt, Human
uguacucggggcccacacccag

SEQ ID NO: 585899 - RNA, 21 nt, Human
uguuggccaguugaacuccug

SEQ ID NO: 585900 - RNA, 23 nt, Human
uguuggccaguugaacuccuggg

SEQ ID NO: 585901 - RNA, 23 nt, Human
uuaaauuuuuaguagagacaaag

SEQ ID NO: 585902 - RNA, 25 nt, Human
uuccugaacaacacagaaacccccc

SEQ ID NO: 585903 - RNA, 19 nt, Human
uugcugaacucuggaaagu

SEQ ID NO: 585904 - RNA, 23 nt, Human
uuuccacagaagcuggaccaggu

SEQ ID NO: 585905 - RNA, 26 nt, Human
uuuuuucuuuuuuuuuugagagaggg

SEQ ID NO: 585906 - RNA, 30 nt, Human
uuuuuucuuuuuuuuuugagagaggguguu

SEQ ID NO: 585907 - RNA, 20 nt, Human
uuuuuuucuuuuuuuuuugg

SEQ ID NO: 585908 - RNA, 24 nt, Human
aacugcaaccugacgcagggcccg

SEQ ID NO: 585909 - RNA, 19 nt, Human
cagcuggugggcaaacacu

SEQ ID NO: 585910 - RNA, 23 nt, Human
ccaccuuuauuguguuuccccaa

SEQ ID NO: 585911 - RNA, 19 nt, Human
ccagagcuaaaagugaaac

SEQ ID NO: 585912 - RNA, 23 nt, Human
cgagcaggagcuggaggugccca

SEQ ID NO: 585913 - RNA, 19 nt, Human
cuggcgcgucugcucuccc

SEQ ID NO: 585914 - RNA, 23 nt, Human
gagcuaaaagugaaacugcaacc

SEQ ID NO: 585915 - RNA, 20 nt, Human
gggcuagcagcuggugggca

SEQ ID NO: 585916 - RNA, 26 nt, Human
ggugggcaaacacucugcccugcugg

SEQ ID NO: 585917 - RNA, 22 nt, Human
gugggcaaacacucugcccugc

SEQ ID NO: 585918 - RNA, 19 nt, Human
uagggcuagcagcuggugg

SEQ ID NO: 585919 - RNA, 20 nt, Human
uccccaacuccugggcccca

SEQ ID NO: 585920 - RNA, 18 nt, Human
ucccugggagccguccgg

SEQ ID NO: 585921 - RNA, 19 nt, Human
ugaaacugcaaccugacgc

SEQ ID NO: 585922 - RNA, 22 nt, Human
ugcccagagcuaaaagugaaac

SEQ ID NO: 585923 - RNA, 23 nt, Human
uggcuacugggcuccuggccuuc

SEQ ID NO: 585924 - RNA, 20 nt, Human
uuccccaacuccugggcccc

SEQ ID NO: 585925 - RNA, 25 nt, Human
uuuuuuuuuuccuucguaugccacc

SEQ ID NO: 585926 - RNA, 18 nt, Human
uuuuuuuuuuuuccuucg

SEQ ID NO: 585927 - RNA, 18 nt, Human
uuuuuuuuuuuuuuuuug

SEQ ID NO: 585928 - RNA, 26 nt, Human
uuuuuuuuuuuuuuuuuuugguuuuu

SEQ ID NO: 585929 - RNA, 23 nt, Human
aaacaagccaugaagaagcacac

SEQ ID NO: 585930 - RNA, 19 nt, Human
aagaguaaacaagccauga

SEQ ID NO: 585931 - RNA, 23 nt, Human
aagaguaaacaagccaugaagaa

SEQ ID NO: 585932 - RNA, 24 nt, Human
acaagccaugaagaagcacacagu

SEQ ID NO: 585933 - RNA, 26 nt, Human
acacaguccauggcggccucuccucg

SEQ ID NO: 585934 - RNA, 21 nt, Human
agagagcauuccuucugcccc

SEQ ID NO: 585935 - RNA, 21 nt, Human
agguaggaagcaucaacuucu

SEQ ID NO: 585936 - RNA, 24 nt, Human
aggugccuucuauuugcagauccu

SEQ ID NO: 585937 - RNA, 22 nt, Human
auggcggccucuccucggccug

SEQ ID NO: 585938 - RNA, 25 nt, Human
auggggcauggcggaagccagaguu

SEQ ID NO: 585939 - RNA, 23 nt, Human
cacaguccauggcggccucuccu

SEQ ID NO: 585940 - RNA, 19 nt, Human
caggccccaagcuguaggg

SEQ ID NO: 585941 - RNA, 18 nt, Human
caucacaaaucaaggccu

SEQ ID NO: 585942 - RNA, 19 nt, Human
ccccccagcauggaacccc

SEQ ID NO: 585943 - RNA, 21 nt, Human
ccccccagcauggaacccccg

SEQ ID NO: 585944 - RNA, 19 nt, Human
ccuaaggaacagggaaggg

SEQ ID NO: 585945 - RNA, 18 nt, Human
ccucauuuucucauccca

SEQ ID NO: 585946 - RNA, 22 nt, Human
ccucauuuucucaucccaggcu

SEQ ID NO: 585947 - RNA, 24 nt, Human
cucaaugaggauggucagaggagc

SEQ ID NO: 585948 - RNA, 18 nt, Human
cugagacauggggcaugg

SEQ ID NO: 585949 - RNA, 22 nt, Human
cugcugggccgcuccaacaggu

SEQ ID NO: 585950 - RNA, 22 nt, Human
gaacccccgacuagugcaaccu

SEQ ID NO: 585951 - RNA, 21 nt, Human
gauccugugcucuccuagcac

SEQ ID NO: 585952 - RNA, 22 nt, Human
ggaacagggaagggauucagaa

SEQ ID NO: 585953 - RNA, 20 nt, Human
gguaggaagcaucaacuucu

SEQ ID NO: 585954 - RNA, 21 nt, Human
guagggucugugaaagaagag

SEQ ID NO: 585955 - RNA, 22 nt, Human
gucagaggagcccaggccccaa

SEQ ID NO: 585956 - RNA, 22 nt, Human
guuaagaaaagaggcaaauuug

SEQ ID NO: 585957 - RNA, 21 nt, Human
uaagaaaagaggcaaauuugc

SEQ ID NO: 585958 - RNA, 24 nt, Human
uagcacaucacaaaucaaggccuu

SEQ ID NO: 585959 - RNA, 20 nt, Human
uccgagauacuguuuaugcu

SEQ ID NO: 585960 - RNA, 23 nt, Human
ugaaagaagaguaaacaagccau

SEQ ID NO: 585961 - RNA, 26 nt, Human
ugaaagaagaguaaacaagccaugaa

SEQ ID NO: 585962 - RNA, 21 nt, Human
uggcggccucuccucggccug

SEQ ID NO: 585963 - RNA, 21 nt, Human
uguguuaagaaaagaggcaaa

SEQ ID NO: 585964 - RNA, 20 nt, Human
uguucugcuuccccaguaga

SEQ ID NO: 585965 - RNA, 24 nt, Human
uucacaguggagggaguuucuccc

SEQ ID NO: 585966 - RNA, 21 nt, Human
uucugcuuccccaguagagac

SEQ ID NO: 585967 - RNA, 20 nt, Human
aagccagcuuaucagcaggg

SEQ ID NO: 585968 - RNA, 22 nt, Human
aagccagcuuaucagcagggcg

SEQ ID NO: 585969 - RNA, 24 nt, Human
acugccccgccuccuccuuuuccu

SEQ ID NO: 585970 - RNA, 20 nt, Human
agaaaacaguuccccuccgg

SEQ ID NO: 585971 - RNA, 18 nt, Human
cagugguagcggcccgac

SEQ ID NO: 585972 - RNA, 19 nt, Human
ccccacugccccgccuccu

SEQ ID NO: 585973 - RNA, 23 nt, Human
ccccacugccccgccuccuccuu

SEQ ID NO: 585974 - RNA, 20 nt, Human
ccccgccuccuccuuuuccu

SEQ ID NO: 585975 - RNA, 21 nt, Human
ccccgccuccuccuuuuccua

SEQ ID NO: 585976 - RNA, 21 nt, Human
ccgacccguucuagagacgga

SEQ ID NO: 585977 - RNA, 21 nt, Human
ccggagaaaacaguuccccuc

SEQ ID NO: 585978 - RNA, 18 nt, Human
cgaaggccccacugcccc

SEQ ID NO: 585979 - RNA, 26 nt, Human
cggacagugguagcggcccgacccgu

SEQ ID NO: 585980 - RNA, 21 nt, Human
cugcccccucgcaggugugcc

SEQ ID NO: 585981 - RNA, 18 nt, Human
gcggagcacaccugcccc

SEQ ID NO: 585982 - RNA, 18 nt, Human
gucaguuuaaugaagccg

SEQ ID NO: 585983 - RNA, 19 nt, Human
uccggagaaaacaguuccc

SEQ ID NO: 585984 - RNA, 18 nt, Human
ucgccgccgaaggcccca

SEQ ID NO: 585985 - RNA, 20 nt, Human
uuuuuuuuuuuuuuuuuugg

SEQ ID NO: 585986 - RNA, 19 nt, Human
aaacaagaauuugcccaga

SEQ ID NO: 585987 - RNA, 21 nt, Human
aacucagcaagcuguagaaaa

SEQ ID NO: 585988 - RNA, 26 nt, Human
aagcaaugaagacuccuggauguacc

SEQ ID NO: 585989 - RNA, 21 nt, Human
agacauuccugcacaggagag

SEQ ID NO: 585990 - RNA, 18 nt, Human
agacuccuggauguaccc

SEQ ID NO: 585991 - RNA, 21 nt, Human
agagcagggaggaggcagcgg

SEQ ID NO: 585992 - RNA, 24 nt, Human
agaggagacgggguaauaacagaa

SEQ ID NO: 585993 - RNA, 21 nt, Human
agcaagcuguagaaaauggca

SEQ ID NO: 585994 - RNA, 21 nt, Human
agcucagagacauuccugcac

SEQ ID NO: 585995 - RNA, 22 nt, Human
auacccucccccgcacccacag

SEQ ID NO: 585996 - RNA, 20 nt, Human
caacagugaaggaaggaaaa

SEQ ID NO: 585997 - RNA, 21 nt, Human
caacagugaaggaaggaaaaa

SEQ ID NO: 585998 - RNA, 23 nt, Human
cacacuccauacaucccucugcu

SEQ ID NO: 585999 - RNA, 21 nt, Human
cacccuacggccagcagcuug

SEQ ID NO: 586000 - RNA, 23 nt, Human
cacccuacggccagcagcuuggu

SEQ ID NO: 586001 - RNA, 20 nt, Human
caccucccugugcaccggau

SEQ ID NO: 586002 - RNA, 19 nt, Human
cacuuacaguuuccccacc

SEQ ID NO: 586003 - RNA, 22 nt, Human
cagaaucaguuuacagacuugc

SEQ ID NO: 586004 - RNA, 21 nt, Human
cagcagcagugaggcucagag

SEQ ID NO: 586005 - RNA, 23 nt, Human
caucccucugcucauacccugcc

SEQ ID NO: 586006 - RNA, 21 nt, Human
ccagaagaggacuguggagaa

SEQ ID NO: 586007 - RNA, 18 nt, Human
ccaggaucaugcaggaag

SEQ ID NO: 586008 - RNA, 22 nt, Human
cccacaaaguggacaacgcugg

SEQ ID NO: 586009 - RNA, 23 nt, Human
ccggauacccucccccgcaccca

SEQ ID NO: 586010 - RNA, 29 nt, Human
ccuacaaagccccacaaaguggacaaccg

SEQ ID NO: 586011 - RNA, 21 nt, Human
ccucugaggccuccuuccaga

SEQ ID NO: 586012 - RNA, 20 nt, Human
cgggagggcccaggaucaug

SEQ ID NO: 586013 - RNA, 20 nt, Human
cuaccuacaaagccccacaa

SEQ ID NO: 586014 - RNA, 22 nt, Human
cuaccuacaaagccccacaaag

SEQ ID NO: 586015 - RNA, 20 nt, Human
cucagagucacccacacucc

SEQ ID NO: 586016 - RNA, 21 nt, Human
cuccauacaucccucugcuca

SEQ ID NO: 586017 - RNA, 23 nt, Human
gaagaaacaagaauuugcccaga

SEQ ID NO: 586018 - RNA, 22 nt, Human
gaaucaguuuacagacuugcuc

SEQ ID NO: 586019 - RNA, 20 nt, Human
gagagcagggaggaggcagc

SEQ ID NO: 586020 - RNA, 18 nt, Human
gagcagcagugcccgggg

SEQ ID NO: 586021 - RNA, 19 nt, Human
gaggcagcggaaagguacc

SEQ ID NO: 586022 - RNA, 23 nt, Human
gauacccucccccgcacccacag

SEQ ID NO: 586023 - RNA, 24 nt, Human
gcuccgucuaccuacaaagcccca

SEQ ID NO: 586024 - RNA, 19 nt, Human
ggagacgggguaauaacag

SEQ ID NO: 586025 - RNA, 18 nt, Human
ggagagcagggaggaggc

SEQ ID NO: 586026 - RNA, 21 nt, Human
gucuaccuacaaagccccaca

SEQ ID NO: 586027 - RNA, 21 nt, Human
guggagaaaccucugaggccu

SEQ ID NO: 586028 - RNA, 21 nt, Human
uaauaacagaagcaaugaaga

SEQ ID NO: 586029 - RNA, 22 nt, Human
ucacccacacuccauacauccc

SEQ ID NO: 586030 - RNA, 20 nt, Human
ucccccgcacccacaggggu

SEQ ID NO: 586031 - RNA, 23 nt, Human
ucuacacccaagucuugccaacc

SEQ ID NO: 586032 - RNA, 22 nt, Human
ucuuuacuacaacagugaagga

SEQ ID NO: 586033 - RNA, 24 nt, Human
ugaagaaacaagaauuugcccaga

SEQ ID NO: 586034 - RNA, 22 nt, Human
ugaagacuccuggauguaccca

SEQ ID NO: 586035 - RNA, 19 nt, Human
ugcacaggagagcagggag

SEQ ID NO: 586036 - RNA, 20 nt, Human
ugcccagaagaggacugugg

SEQ ID NO: 586037 - RNA, 22 nt, Human
ugcccagaagaggacuguggag

SEQ ID NO: 586038 - RNA, 23 nt, Human
uuccugcacaggagagcagggag

SEQ ID NO: 586039 - RNA, 24 nt, Human
uuggaaauaagcuacugcauuggu

SEQ ID NO: 586040 - RNA, 20 nt, Human
uuggucuuaagcuaguccgg

SEQ ID NO: 586041 - RNA, 19 nt, Human
uuuuuuuuuuuuuuuuugu

SEQ ID NO: 586042 - RNA, 20 nt, Human
uuuuuuuuuuuuuuuuuugg

SEQ ID NO: 586043 - RNA, 22 nt, Human
aaaacccacauugaaacaaauc

SEQ ID NO: 586044 - RNA, 23 nt, Human
aaacaaaaaacccacauugaaac

SEQ ID NO: 586045 - RNA, 22 nt, Human
aaacaaaacaaaaaacccacau

SEQ ID NO: 586046 - RNA, 19 nt, Human
aaacaaaacaaaacaaaaa

SEQ ID NO: 586047 - RNA, 23 nt, Human
aaacaaaacaaaacaaaaaaccc

SEQ ID NO: 586048 - RNA, 24 nt, Human
aaacaaaacaaaacaaaaaaccca

SEQ ID NO: 586049 - RNA, 19 nt, Human
aaagugcugggauuacaga

SEQ ID NO: 586050 - RNA, 24 nt, Human
aaagugcugggauuacagacguga

SEQ ID NO: 586051 - RNA, 19 nt, Human
aagaauaaaagucccacaa

SEQ ID NO: 586052 - RNA, 19 nt, Human
aagugcugggauuacagac

SEQ ID NO: 586053 - RNA, 26 nt, Human
aagugcugggauuacagacgugagcc

SEQ ID NO: 586054 - RNA, 19 nt, Human
acaaaacaaaacaaaaaac

SEQ ID NO: 586055 - RNA, 22 nt, Human
acaaaacaaaacaaaaaaccca

SEQ ID NO: 586056 - RNA, 19 nt, Human
acaagagccaguugagccc

SEQ ID NO: 586057 - RNA, 18 nt, Human
acagacgugagccaccgc

SEQ ID NO: 586058 - RNA, 21 nt, Human
acgugagccaccgcgcccggc

SEQ ID NO: 586059 - RNA, 24 nt, Human
aguagagacguggguuucaccgug

SEQ ID NO: 586060 - RNA, 24 nt, Human
agugcugggauuacagacgugagc

SEQ ID NO: 586061 - RNA, 22 nt, Human
auaacaaugaaauagauccaaa

SEQ ID NO: 586062 - RNA, 20 nt, Human
auaauccuaaacaaucuuua

SEQ ID NO: 586063 - RNA, 24 nt, Human
caaagugcugggauuacagacgug

SEQ ID NO: 586064 - RNA, 22 nt, Human
caaaucagaaaaaauuaaagca

SEQ ID NO: 586065 - RNA, 26 nt, Human
caauaaacaaaacaaaacaaaaaacc

SEQ ID NO: 586066 - RNA, 24 nt, Human
caccguguaagccacgauggucuu

SEQ ID NO: 586067 - RNA, 25 nt, Human
cagguuaggaaaauauaacacauaa

SEQ ID NO: 586068 - RNA, 22 nt, Human
ccaaagugcugggauuacagac

SEQ ID NO: 586069 - RNA, 24 nt, Human
ccaaagugcugggauuacagacgu

SEQ ID NO: 586070 - RNA, 18 nt, Human
ccaguugauauucccuga

SEQ ID NO: 586071 - RNA, 18 nt, Human
ccgcgcccggccugauua

SEQ ID NO: 586072 - RNA, 18 nt, Human
cucaugauccgccugccu

SEQ ID NO: 586073 - RNA, 24 nt, Human
cuccugaccucaugauccgccugc

SEQ ID NO: 586074 - RNA, 24 nt, Human
cugccucaggcucccaaagugcug

SEQ ID NO: 586075 - RNA, 22 nt, Human
gaccucaugauccgccugccuc

SEQ ID NO: 586076 - RNA, 24 nt, Human
gaccucaugauccgccugccucag

SEQ ID NO: 586077 - RNA, 18 nt, Human
gauuacagacgugagcca

SEQ ID NO: 586078 - RNA, 22 nt, Human
gauuacagacgugagccaccgc

SEQ ID NO: 586079 - RNA, 22 nt, Human
guaaacaaauauuuauuugcaa

SEQ ID NO: 586080 - RNA, 23 nt, Human
gucccuggauugaucuauuuucu

SEQ ID NO: 586081 - RNA, 24 nt, Human
guggguuucaccguguaagccacg

SEQ ID NO: 586082 - RNA, 21 nt, Human
uaaauauauaucuauuuaaag

SEQ ID NO: 586083 - RNA, 22 nt, Human
uaacacauaauccuaaacaauc

SEQ ID NO: 586084 - RNA, 19 nt, Human
uaacacuaucuuauuguga

SEQ ID NO: 586085 - RNA, 23 nt, Human
uacagacgugagccaccgcgccc

SEQ ID NO: 586086 - RNA, 25 nt, Human
uacauuacagugcugcacaaaucuu

SEQ ID NO: 586087 - RNA, 26 nt, Human
uaccaauaaacaaaacaaaacaaaaa

SEQ ID NO: 586088 - RNA, 19 nt, Human
uagagacguggguuucacc

SEQ ID NO: 586089 - RNA, 23 nt, Human
uauuuaaaguuucauccacaagg

SEQ ID NO: 586090 - RNA, 24 nt, Human
ucagaaaaaauuaaagcaugaaca

SEQ ID NO: 586091 - RNA, 19 nt, Human
ucaggcucccaaagugcug

SEQ ID NO: 586092 - RNA, 20 nt, Human
uccaaauauuagaaggagga

SEQ ID NO: 586093 - RNA, 18 nt, Human
ucccaaagugcugggauu

SEQ ID NO: 586094 - RNA, 24 nt, Human
ucccaaagugcugggauuacagac

SEQ ID NO: 586095 - RNA, 25 nt, Human
ucccuggauugaucuauuuucuucc

SEQ ID NO: 586096 - RNA, 21 nt, Human
ucuuccaaauauuagaaggag

SEQ ID NO: 586097 - RNA, 19 nt, Human
ugaaauagauccaaaguuc

SEQ ID NO: 586098 - RNA, 19 nt, Human
ugcauuauucuaaucuagc

SEQ ID NO: 586099 - RNA, 21 nt, Human
ugccucaggcucccaaagugc

SEQ ID NO: 586100 - RNA, 24 nt, Human
ugccucaggcucccaaagugcugg

SEQ ID NO: 586101 - RNA, 24 nt, Human
ugcugggauuacagacgugagcca

SEQ ID NO: 586102 - RNA, 19 nt, Human
uggaaaaacaaagaaugaa

SEQ ID NO: 586103 - RNA, 18 nt, Human
ugggauuacagacgugag

SEQ ID NO: 586104 - RNA, 19 nt, Human
ugggauuacagacgugagc

SEQ ID NO: 586105 - RNA, 21 nt, Human
ugggauuacagacgugagcca

SEQ ID NO: 586106 - RNA, 22 nt, Human
ugggauuacagacgugagccac

SEQ ID NO: 586107 - RNA, 23 nt, Human
ugggauuacagacgugagccacc

SEQ ID NO: 586108 - RNA, 24 nt, Human
ugggauuacagacgugagccaccg

SEQ ID NO: 586109 - RNA, 22 nt, Human
uggguuucaccguguaagccac

SEQ ID NO: 586110 - RNA, 23 nt, Human
uguaccaauugaacaagagccag

SEQ ID NO: 586111 - RNA, 21 nt, Human
uuuauuugcaagcuuuucuua

SEQ ID NO: 586112 - RNA, 21 nt, Human
uuugcaagcuuuucuuaauug

SEQ ID NO: 586113 - RNA, 26 nt, Human
uuuuuaaacccauuccuggguaaaca

SEQ ID NO: 586114 - RNA, 20 nt, Human
aaacaggaaccagccuugcg

SEQ ID NO: 586115 - RNA, 24 nt, Human
aaaguguuaggauuacaugcguga

SEQ ID NO: 586116 - RNA, 20 nt, Human
aacacaaucagcccucaguc

SEQ ID NO: 586117 - RNA, 21 nt, Human
aacauccccacaacacaauca

SEQ ID NO: 586118 - RNA, 19 nt, Human
aagccaguguaaggcgccc

SEQ ID NO: 586119 - RNA, 26 nt, Human
aaguguuaggauuacaugcgugagcc

SEQ ID NO: 586120 - RNA, 23 nt, Human
acagcccaccccucugugguccc

SEQ ID NO: 586121 - RNA, 22 nt, Human
accccccgcugcaugacaaccc

SEQ ID NO: 586122 - RNA, 22 nt, Human
acccgccuuggccucccaaagu

SEQ ID NO: 586123 - RNA, 19 nt, Human
acccuaagcccuucuuccu

SEQ ID NO: 586124 - RNA, 20 nt, Human
acuucuaaccucugccccuu

SEQ ID NO: 586125 - RNA, 19 nt, Human
agaaaacaggaaccagccu

SEQ ID NO: 586126 - RNA, 18 nt, Human
agagaggcagagagacag

SEQ ID NO: 586127 - RNA, 22 nt, Human
agauucuccugccucagccucc

SEQ ID NO: 586128 - RNA, 21 nt, Human
agcccuucuuccuccaggaag

SEQ ID NO: 586129 - RNA, 18 nt, Human
agccuccagaguagcugg

SEQ ID NO: 586130 - RNA, 21 nt, Human
agcuccugcccagcacccucc

SEQ ID NO: 586131 - RNA, 21 nt, Human
agcugggauuacaagcgugca

SEQ ID NO: 586132 - RNA, 22 nt, Human
aggagggagggagccgcugggg

SEQ ID NO: 586133 - RNA, 20 nt, Human
aggcagcuccaaguggcuag

SEQ ID NO: 586134 - RNA, 25 nt, Human
aggcuggagugcaguagcacagucu

SEQ ID NO: 586135 - RNA, 18 nt, Human
agggagggagccgcuggg

SEQ ID NO: 586136 - RNA, 21 nt, Human
agggauucacccgccuuggcc

SEQ ID NO: 586137 - RNA, 23 nt, Human
agggauucacccgccuuggccuc

SEQ ID NO: 586138 - RNA, 19 nt, Human
aguagcugggauuacaagc

SEQ ID NO: 586139 - RNA, 20 nt, Human
agugagcugucagccggcac

SEQ ID NO: 586140 - RNA, 24 nt, Human
agugcaguagcacagucucggcuc

SEQ ID NO: 586141 - RNA, 18 nt, Human
augggguuucgccauguu

SEQ ID NO: 586142 - RNA, 24 nt, Human
augggguuucgccauguugaccag

SEQ ID NO: 586143 - RNA, 19 nt, Human
caaacuccacaccagcacc

SEQ ID NO: 586144 - RNA, 23 nt, Human
caaagcccagaaaacaggaacca

SEQ ID NO: 586145 - RNA, 24 nt, Human
caaagcccagaaaacaggaaccag

SEQ ID NO: 586146 - RNA, 23 nt, Human
caacccccagggucugcuguccu

SEQ ID NO: 586147 - RNA, 22 nt, Human
caagagauucuccugccucagc

SEQ ID NO: 586148 - RNA, 19 nt, Human
caaggacuuucaaggccuc

SEQ ID NO: 586149 - RNA, 20 nt, Human
caaggccuccacugcccccu

SEQ ID NO: 586150 - RNA, 25 nt, Human
caaucagcccucagucccuccccaa

SEQ ID NO: 586151 - RNA, 23 nt, Human
cacagcccaccccucuguggucc

SEQ ID NO: 586152 - RNA, 26 nt, Human
cacagcccaccccucuguggucccga

SEQ ID NO: 586153 - RNA, 20 nt, Human
cacaggcugggaggcugggc

SEQ ID NO: 586154 - RNA, 24 nt, Human
caccauaccuggcuaauuuuugua

SEQ ID NO: 586155 - RNA, 19 nt, Human
caccccccgcugcaugaca

SEQ ID NO: 586156 - RNA, 23 nt, Human
cacccgccuuggccucccaaagu

SEQ ID NO: 586157 - RNA, 24 nt, Human
cacccgccuuggccucccaaagug

SEQ ID NO: 586158 - RNA, 21 nt, Human
cacugcaaccucugccucccg

SEQ ID NO: 586159 - RNA, 23 nt, Human
cacugcaaccucugccucccggg

SEQ ID NO: 586160 - RNA, 18 nt, Human
cacugugcuugcaugggg

SEQ ID NO: 586161 - RNA, 18 nt, Human
cagaaccacugucucccu

SEQ ID NO: 586162 - RNA, 25 nt, Human
cagagcuggguccagaaaccaagau

SEQ ID NO: 586163 - RNA, 22 nt, Human
cagcacccgcaaggcaaggaga

SEQ ID NO: 586164 - RNA, 18 nt, Human
cagcccaccccucugugg

SEQ ID NO: 586165 - RNA, 19 nt, Human
cagccccaggccagcuccu

SEQ ID NO: 586166 - RNA, 22 nt, Human
cagcuccugcccagcacccucc

SEQ ID NO: 586167 - RNA, 20 nt, Human
caggagaaagagaggcagag

SEQ ID NO: 586168 - RNA, 20 nt, Human
caggcccagccagcagggcc

SEQ ID NO: 586169 - RNA, 24 nt, Human
caguagagaugggguuucgccaug

SEQ ID NO: 586170 - RNA, 18 nt, Human
caguagcacagucucggc

SEQ ID NO: 586171 - RNA, 18 nt, Human
cagucccuccccaaaugc

SEQ ID NO: 586172 - RNA, 19 nt, Human
ccaaaguguuaggauuaca

SEQ ID NO: 586173 - RNA, 24 nt, Human
ccaaaguguuaggauuacaugcgu

SEQ ID NO: 586174 - RNA, 21 nt, Human
ccacugcccccuacugacagg

SEQ ID NO: 586175 - RNA, 23 nt, Human
ccagaaccacugucucccuccuc

SEQ ID NO: 586176 - RNA, 19 nt, Human
ccagaguagcugggauuac

SEQ ID NO: 586177 - RNA, 23 nt, Human
ccagaguagcugggauuacaagc

SEQ ID NO: 586178 - RNA, 21 nt, Human
ccagcuccugucuccagaacc

SEQ ID NO: 586179 - RNA, 20 nt, Human
ccaggcccagccagcagggc

SEQ ID NO: 586180 - RNA, 19 nt, Human
cccaaauuuguccccaauu

SEQ ID NO: 586181 - RNA, 20 nt, Human
cccaccccucuguggucccg

SEQ ID NO: 586182 - RNA, 20 nt, Human
cccagcacccuccagcucaa

SEQ ID NO: 586183 - RNA, 25 nt, Human
cccauggaacccagaagcaucuaaa

SEQ ID NO: 586184 - RNA, 20 nt, Human
cccauggguggcucuaaccu

SEQ ID NO: 586185 - RNA, 23 nt, Human
cccauggugaauaccaucagagc

SEQ ID NO: 586186 - RNA, 21 nt, Human
ccccaccgaacuguuggccuu

SEQ ID NO: 586187 - RNA, 18 nt, Human
ccccagggucugcugucc

SEQ ID NO: 586188 - RNA, 21 nt, Human
cccccgcugcaugacaacccc

SEQ ID NO: 586189 - RNA, 23 nt, Human
ccccuggguccccgcagcucagg

SEQ ID NO: 586190 - RNA, 23 nt, Human
cccggguucaagagauucuccug

SEQ ID NO: 586191 - RNA, 22 nt, Human
cccugagcacagcccaccccuc

SEQ ID NO: 586192 - RNA, 19 nt, Human
cccuggguccccgcagcuc

SEQ ID NO: 586193 - RNA, 24 nt, Human
ccucccggguucaagagauucucc

SEQ ID NO: 586194 - RNA, 26 nt, Human
ccuggccaagcagaugaaaaguucca

SEQ ID NO: 586195 - RNA, 20 nt, Human
ccuggguccccgcagcucag

SEQ ID NO: 586196 - RNA, 21 nt, Human
ccuggguccccgcagcucagg

SEQ ID NO: 586197 - RNA, 19 nt, Human
ccuugcgccuccucucccc

SEQ ID NO: 586198 - RNA, 20 nt, Human
ccuugcgccuccucucccca

SEQ ID NO: 586199 - RNA, 22 nt, Human
ccuugcgccuccucuccccacc

SEQ ID NO: 586200 - RNA, 24 nt, Human
cgccauguugaccagccuggucuu

SEQ ID NO: 586201 - RNA, 21 nt, Human
cggaguauugcucuguugccc

SEQ ID NO: 586202 - RNA, 23 nt, Human
cgugcaccaccauaccuggcuaa

SEQ ID NO: 586203 - RNA, 23 nt, Human
cuaauuuuuguauuuucaguaga

SEQ ID NO: 586204 - RNA, 24 nt, Human
cucacugcaaccucugccucccgg

SEQ ID NO: 586205 - RNA, 24 nt, Human
cucagccuccagaguagcugggau

SEQ ID NO: 586206 - RNA, 22 nt, Human
cuccacaccagcacccuaagcc

SEQ ID NO: 586207 - RNA, 26 nt, Human
cuccacaccagcacccuaagcccuuc

SEQ ID NO: 586208 - RNA, 21 nt, Human
cuccagaaccacugucucccu

SEQ ID NO: 586209 - RNA, 21 nt, Human
cuccaggaaggagacuguccc

SEQ ID NO: 586210 - RNA, 19 nt, Human
cuccugcccagcacccucc

SEQ ID NO: 586211 - RNA, 23 nt, Human
cucuaaccucccuccuuccagcu

SEQ ID NO: 586212 - RNA, 19 nt, Human
cugcaaccucugccucccg

SEQ ID NO: 586213 - RNA, 23 nt, Human
cugcaaccucugccucccggguu

SEQ ID NO: 586214 - RNA, 24 nt, Human
cugcaaccucugccucccggguuc

SEQ ID NO: 586215 - RNA, 23 nt, Human
cugccucagccuccagaguagcu

SEQ ID NO: 586216 - RNA, 24 nt, Human
cuggccagacacaggccuacucca

SEQ ID NO: 586217 - RNA, 23 nt, Human
cuggcggggggaggguggccagc

SEQ ID NO: 586218 - RNA, 19 nt, Human
cuggguccccgcagcucag

SEQ ID NO: 586219 - RNA, 19 nt, Human
cuguugcccaggcuggagu

SEQ ID NO: 586220 - RNA, 25 nt, Human
gacaaccccaggaaaaagggaacgc

SEQ ID NO: 586221 - RNA, 21 nt, Human
gacagccaugagcugggagga

SEQ ID NO: 586222 - RNA, 18 nt, Human
gagaaagagaggcagaga

SEQ ID NO: 586223 - RNA, 22 nt, Human
gagacuuuccagggacagauuu

SEQ ID NO: 586224 - RNA, 20 nt, Human
gagaugggguuucgccaugu

SEQ ID NO: 586225 - RNA, 24 nt, Human
gaguagcugggauuacaagcgugc

SEQ ID NO: 586226 - RNA, 24 nt, Human
gauuacaagcgugcaccaccauac

SEQ ID NO: 586227 - RNA, 18 nt, Human
gauuacaugcgugagcca

SEQ ID NO: 586228 - RNA, 22 nt, Human
gauucacccgccuuggccuccc

SEQ ID NO: 586229 - RNA, 23 nt, Human
gcacccuaagcccuucuuccucc

SEQ ID NO: 586230 - RNA, 21 nt, Human
gcaugacaaccccaggaaaaa

SEQ ID NO: 586231 - RNA, 19 nt, Human
gccccuuggcaucaccugg

SEQ ID NO: 586232 - RNA, 20 nt, Human
gccuccucuccccaccgaac

SEQ ID NO: 586233 - RNA, 22 nt, Human
gcucacuugaaaaccaggccca

SEQ ID NO: 586234 - RNA, 19 nt, Human
gcucuguugcccaggcugg

SEQ ID NO: 586235 - RNA, 20 nt, Human
gcucuguugcccaggcugga

SEQ ID NO: 586236 - RNA, 25 nt, Human
gcucuguugcccaggcuggagugca

SEQ ID NO: 586237 - RNA, 19 nt, Human
gcuggagugcaguagcaca

SEQ ID NO: 586238 - RNA, 24 nt, Human
gcugggagggcagccccaggccag

SEQ ID NO: 586239 - RNA, 22 nt, Human
ggagaaagagaggcagagagac

SEQ ID NO: 586240 - RNA, 20 nt, Human
ggagaacaggggcugggagg

SEQ ID NO: 586241 - RNA, 20 nt, Human
ggagggagccgcugggggug

SEQ ID NO: 586242 - RNA, 21 nt, Human
ggagggagggagccgcugggg

SEQ ID NO: 586243 - RNA, 24 nt, Human
ggagggagggagccgcugggggug

SEQ ID NO: 586244 - RNA, 18 nt, Human
ggagggcagccccaggcc

SEQ ID NO: 586245 - RNA, 22 nt, Human
ggauuacaugcgugagccacca

SEQ ID NO: 586246 - RNA, 21 nt, Human
ggcugcucugcgggcccuugc

SEQ ID NO: 586247 - RNA, 22 nt, Human
ggcugggagggcagccccaggc

SEQ ID NO: 586248 - RNA, 24 nt, Human
ggcugggagggcagccccaggcca

SEQ ID NO: 586249 - RNA, 18 nt, Human
gggcagccccaggccagc

SEQ ID NO: 586250 - RNA, 23 nt, Human
gggcugggagggcagccccaggc

SEQ ID NO: 586251 - RNA, 22 nt, Human
gggguuucgccauguugaccag

SEQ ID NO: 586252 - RNA, 19 nt, Human
ggguuccuccaccccccgc

SEQ ID NO: 586253 - RNA, 19 nt, Human
ggucuugaacuccugaccu

SEQ ID NO: 586254 - RNA, 19 nt, Human
ggucuugaacuccugaccu

SEQ ID NO: 586255 - RNA, 23 nt, Human
guagagaugggguuucgccaugu

SEQ ID NO: 586256 - RNA, 25 nt, Human
guagcccaggcggacggugaugucc

SEQ ID NO: 586257 - RNA, 18 nt, Human
guagcugggauuacaagc

SEQ ID NO: 586258 - RNA, 19 nt, Human
gucccgagucucagcucug

SEQ ID NO: 586259 - RNA, 23 nt, Human
guggguucagccaggguuugugu

SEQ ID NO: 586260 - RNA, 23 nt, Human
guuucgccauguugaccagccug

SEQ ID NO: 586261 - RNA, 19 nt, Human
uaaccucugccccuuggca

SEQ ID NO: 586262 - RNA, 21 nt, Human
uaaccucugccccuuggcauc

SEQ ID NO: 586263 - RNA, 18 nt, Human
uaaggcgcccauggaacc

SEQ ID NO: 586264 - RNA, 24 nt, Human
uaauuuuuguauuuucaguagaga

SEQ ID NO: 586265 - RNA, 20 nt, Human
uacauuauaucauuaaaucc

SEQ ID NO: 586266 - RNA, 28 nt, Human
uacuccacaggcugggaggcuggggcca

SEQ ID NO: 586267 - RNA, 22 nt, Human
uagagaugggguuucgccaugu

SEQ ID NO: 586268 - RNA, 21 nt, Human
uagcaggagaaagagaggcag

SEQ ID NO: 586269 - RNA, 22 nt, Human
uagcaggagaaagagaggcaga

SEQ ID NO: 586270 - RNA, 22 nt, Human
uaggauuacaugcgugagccac

SEQ ID NO: 586271 - RNA, 24 nt, Human
uaggauuacaugcgugagccacca

SEQ ID NO: 586272 - RNA, 19 nt, Human
uauugcucuguugcccagg

SEQ ID NO: 586273 - RNA, 23 nt, Human
uauugcucuguugcccaggcugg

SEQ ID NO: 586274 - RNA, 24 nt, Human
uauugcucuguugcccaggcugga

SEQ ID NO: 586275 - RNA, 18 nt, Human
ucaaaguccucuccaagg

SEQ ID NO: 586276 - RNA, 24 nt, Human
ucacugcaaccucugccucccggg

SEQ ID NO: 586277 - RNA, 25 nt, Human
ucacugcaaccucugccucccgggu

SEQ ID NO: 586278 - RNA, 18 nt, Human
ucaguagagaugggguuu

SEQ ID NO: 586279 - RNA, 24 nt, Human
ucaguagagaugggguuucgccau

SEQ ID NO: 586280 - RNA, 21 nt, Human
ucagucccuccccaaaugcaa

SEQ ID NO: 586281 - RNA, 24 nt, Human
uccaaggacuuucaaggccuccac

SEQ ID NO: 586282 - RNA, 22 nt, Human
uccaaguggcuaggaucuggcu

SEQ ID NO: 586283 - RNA, 18 nt, Human
ucccaaaguguuaggauu

SEQ ID NO: 586284 - RNA, 19 nt, Human
uccccaaauuuguccccaa

SEQ ID NO: 586285 - RNA, 23 nt, Human
uccccuguucccuuucgaucaaa

SEQ ID NO: 586286 - RNA, 21 nt, Human
ucccggguucaagagauucuc

SEQ ID NO: 586287 - RNA, 24 nt, Human
ucccggguucaagagauucuccug

SEQ ID NO: 586288 - RNA, 25 nt, Human
uccucuggccacaaagcgaggcugg

SEQ ID NO: 586289 - RNA, 22 nt, Human
ucgccauguugaccagccuggu

SEQ ID NO: 586290 - RNA, 19 nt, Human
ucuaagacccccugggucc

SEQ ID NO: 586291 - RNA, 19 nt, Human
ucucccuccucuggccacc

SEQ ID NO: 586292 - RNA, 24 nt, Human
ucuccugccucagccuccagagua

SEQ ID NO: 586293 - RNA, 22 nt, Human
ucucugauucucugccaacauc

SEQ ID NO: 586294 - RNA, 18 nt, Human
ucuguugcccaggcugga

SEQ ID NO: 586295 - RNA, 24 nt, Human
ucuguugcccaggcuggagugcag

SEQ ID NO: 586296 - RNA, 21 nt, Human
ucuugaacuccugaccuuaag

SEQ ID NO: 586297 - RNA, 22 nt, Human
ugaaagcacugugcuugcaugg

SEQ ID NO: 586298 - RNA, 24 nt, Human
ugaccagccuggucuugaacuccu

SEQ ID NO: 586299 - RNA, 18 nt, Human
ugagcacagcccaccccu

SEQ ID NO: 586300 - RNA, 19 nt, Human
ugagcugggagaacagggg

SEQ ID NO: 586301 - RNA, 20 nt, Human
ugagcugggagaacaggggc

SEQ ID NO: 586302 - RNA, 23 nt, Human
ugagcugggagaacaggggcugg

SEQ ID NO: 586303 - RNA, 20 nt, Human
ugagcugggaggauccaguu

SEQ ID NO: 586304 - RNA, 22 nt, Human
ugcaguagcacagucucggcuc

SEQ ID NO: 586305 - RNA, 18 nt, Human
ugcccaggcuggagugca

SEQ ID NO: 586306 - RNA, 19 nt, Human
ugcccaggcuggagugcag

SEQ ID NO: 586307 - RNA, 18 nt, Human
ugccccauccgcuguguu

SEQ ID NO: 586308 - RNA, 24 nt, Human
ugccucagccuccagaguagcugg

SEQ ID NO: 586309 - RNA, 18 nt, Human
ugcucugcgggcccuugc

SEQ ID NO: 586310 - RNA, 24 nt, Human
ugcucuguugcccaggcuggagug

SEQ ID NO: 586311 - RNA, 22 nt, Human
ugcuucaaaguccucuccaagg

SEQ ID NO: 586312 - RNA, 21 nt, Human
uggagcuggcggggggagggu

SEQ ID NO: 586313 - RNA, 24 nt, Human
uggagugcaguagcacagucucgg

SEQ ID NO: 586314 - RNA, 19 nt, Human
ugggagaacaggggcuggg

SEQ ID NO: 586315 - RNA, 23 nt, Human
ugggaggauccaguucuguagca

SEQ ID NO: 586316 - RNA, 21 nt, Human
ugggauuacaagcgugcacca

SEQ ID NO: 586317 - RNA, 24 nt, Human
ugggauuacaagcgugcaccacca

SEQ ID NO: 586318 - RNA, 25 nt, Human
ugggauuacaagcgugcaccaccau

SEQ ID NO: 586319 - RNA, 26 nt, Human
uggggauggagcuggcggggggaggg

SEQ ID NO: 586320 - RNA, 18 nt, Human
ugggguuucgccauguug

SEQ ID NO: 586321 - RNA, 21 nt, Human
uggguggcucuaaccucccuc

SEQ ID NO: 586322 - RNA, 18 nt, Human
uggguuccuccacccccc

SEQ ID NO: 586323 - RNA, 19 nt, Human
uggguuccuccaccccccg

SEQ ID NO: 586324 - RNA, 18 nt, Human
ugucaacauggcucugcu

SEQ ID NO: 586325 - RNA, 18 nt, Human
uucaagagauucuccugc

SEQ ID NO: 586326 - RNA, 23 nt, Human
uucaagagauucuccugccucag

SEQ ID NO: 586327 - RNA, 19 nt, Human
uucaaggccuccacugccc

SEQ ID NO: 586328 - RNA, 20 nt, Human
uucaaggccuccacugcccc

SEQ ID NO: 586329 - RNA, 24 nt, Human
uugcccaggcuggagugcaguagc

SEQ ID NO: 586330 - RNA, 20 nt, Human
uugcucuguugcccaggcug

SEQ ID NO: 586331 - RNA, 20 nt, Human
uugcucuguugcccaggcug

SEQ ID NO: 586332 - RNA, 22 nt, Human
uugcucuguugcccaggcugga

SEQ ID NO: 586333 - RNA, 21 nt, Human
uuggccucccaaaguguuagg

SEQ ID NO: 586334 - RNA, 23 nt, Human
uuucaaggccuccacugcccccu

SEQ ID NO: 586335 - RNA, 23 nt, Human
uuuccagagcuggguccagaaac

SEQ ID NO: 586336 - RNA, 21 nt, Human
uuucgccauguugaccagccu

SEQ ID NO: 586337 - RNA, 22 nt, Human
uuuucaguagagaugggguuuc

SEQ ID NO: 586338 - RNA, 23 nt, Human
uuuucaguagagaugggguuucg

SEQ ID NO: 586339 - RNA, 20 nt, Human
uuuuuguauuuucaguagag

SEQ ID NO: 586340 - RNA, 23 nt, Human
uuuuuguauuuucaguagagaug

SEQ ID NO: 586341 - RNA, 25 nt, Human
aaaaagccagaaaaacaccaagaua

SEQ ID NO: 586342 - RNA, 26 nt, Human
aaaaagccagaaaaacaccaagauac

SEQ ID NO: 586343 - RNA, 20 nt, Human
aaacaccaagauacaggucu

SEQ ID NO: 586344 - RNA, 20 nt, Human
aagacaggaggcgaaagggu

SEQ ID NO: 586345 - RNA, 21 nt, Human
aagcagaaagacaggaggcga

SEQ ID NO: 586346 - RNA, 21 nt, Human
aagccagaaaaacaccaagau

SEQ ID NO: 586347 - RNA, 23 nt, Human
aauaaauagaaaaaaaguuacaa

SEQ ID NO: 586348 - RNA, 22 nt, Human
accagcagcccaagcacacacc

SEQ ID NO: 586349 - RNA, 20 nt, Human
acccacccccgacccgcgcc

SEQ ID NO: 586350 - RNA, 19 nt, Human
agaaagacaggaggcgaaa

SEQ ID NO: 586351 - RNA, 18 nt, Human
agacaggaggcgaaaggg

SEQ ID NO: 586352 - RNA, 18 nt, Human
agagcaagggugggggac

SEQ ID NO: 586353 - RNA, 23 nt, Human
agaugugggggugacuugggggg

SEQ ID NO: 586354 - RNA, 19 nt, Human
agccgggcuccuucccuga

SEQ ID NO: 586355 - RNA, 23 nt, Human
aggugagaagagagggcagcgag

SEQ ID NO: 586356 - RNA, 23 nt, Human
agugggggugagccaaugguccu

SEQ ID NO: 586357 - RNA, 24 nt, Human
augcaccccagucucaaaauaaaa

SEQ ID NO: 586358 - RNA, 23 nt, Human
augugggggugacuugggggggu

SEQ ID NO: 586359 - RNA, 18 nt, Human
caaggugggggaaaggaa

SEQ ID NO: 586360 - RNA, 19 nt, Human
cacaccccuuccaggcuuc

SEQ ID NO: 586361 - RNA, 23 nt, Human
cagccgggcuccuucccugacuu

SEQ ID NO: 586362 - RNA, 23 nt, Human
cagccucccuccuggagcccaag

SEQ ID NO: 586363 - RNA, 23 nt, Human
caggaugcugcucccccugcccc

SEQ ID NO: 586364 - RNA, 22 nt, Human
caguauggcuucugcuucugga

SEQ ID NO: 586365 - RNA, 24 nt, Human
ccaacccugagcccacccugggac

SEQ ID NO: 586366 - RNA, 23 nt, Human
ccacuuuggagguggcauaaugg

SEQ ID NO: 586367 - RNA, 22 nt, Human
ccagaaaaacaccaagauacag

SEQ ID NO: 586368 - RNA, 24 nt, Human
cccaacccugagcccacccuggga

SEQ ID NO: 586369 - RNA, 20 nt, Human
cccacgcaccccacuguccc

SEQ ID NO: 586370 - RNA, 20 nt, Human
ccccaacccugagcccaccc

SEQ ID NO: 586371 - RNA, 19 nt, Human
cccccaucuccagccgggc

SEQ ID NO: 586372 - RNA, 20 nt, Human
cccccugcccccaucuccag

SEQ ID NO: 586373 - RNA, 18 nt, Human
cccccugcccuccuuccc

SEQ ID NO: 586374 - RNA, 19 nt, Human
cccccugcccuccuucccg

SEQ ID NO: 586375 - RNA, 23 nt, Human
cccccugcccuccuucccguccg

SEQ ID NO: 586376 - RNA, 19 nt, Human
cccgcgcccccugcccucc

SEQ ID NO: 586377 - RNA, 24 nt, Human
cccgcuccgcuucgccggcucccg

SEQ ID NO: 586378 - RNA, 19 nt, Human
cccuccuucccguccgucc

SEQ ID NO: 586379 - RNA, 25 nt, Human
cccugagcaguagggggugggggag

SEQ ID NO: 586380 - RNA, 22 nt, Human
cccugagcccacccugggaccc

SEQ ID NO: 586381 - RNA, 23 nt, Human
cccugagcccacccugggacccu

SEQ ID NO: 586382 - RNA, 19 nt, Human
cccugcccccaucuccagc

SEQ ID NO: 586383 - RNA, 22 nt, Human
cccugggacccuagugcccaag

SEQ ID NO: 586384 - RNA, 20 nt, Human
ccgcgccgggccggcagggu

SEQ ID NO: 586385 - RNA, 21 nt, Human
ccgggaccccuaccgcaccca

SEQ ID NO: 586386 - RNA, 21 nt, Human
ccuaccgcacccacccccgac

SEQ ID NO: 586387 - RNA, 21 nt, Human
ccucccagccucccuccugga

SEQ ID NO: 586388 - RNA, 26 nt, Human
ccucccagccucccuccuggagccca

SEQ ID NO: 586389 - RNA, 20 nt, Human
ccucuuuggggggcucgguc

SEQ ID NO: 586390 - RNA, 21 nt, Human
ccugccucccagccucccucc

SEQ ID NO: 586391 - RNA, 19 nt, Human
ccuggagcccaagccaguc

SEQ ID NO: 586392 - RNA, 19 nt, Human
ccugggacccuagugccca

SEQ ID NO: 586393 - RNA, 19 nt, Human
ccuuggccacccagggugg

SEQ ID NO: 586394 - RNA, 21 nt, Human
cggcucccgcgcccccugccc

SEQ ID NO: 586395 - RNA, 25 nt, Human
cggcucccgcgcccccugcccuccu

SEQ ID NO: 586396 - RNA, 18 nt, Human
cuccgcuucgccggcucc

SEQ ID NO: 586397 - RNA, 18 nt, Human
cuccucccugggucaagg

SEQ ID NO: 586398 - RNA, 19 nt, Human
cucugcgcucggccgcccc

SEQ ID NO: 586399 - RNA, 18 nt, Human
cuuccaggcuucugggug

SEQ ID NO: 586400 - RNA, 23 nt, Human
cuuccccaacccugagcccaccc

SEQ ID NO: 586401 - RNA, 20 nt, Human
cuucuggguggcaguauggc

SEQ ID NO: 586402 - RNA, 22 nt, Human
cuuuccuuuccagaucgggggu

SEQ ID NO: 586403 - RNA, 20 nt, Human
cuuuuggggugcccaaagug

SEQ ID NO: 586404 - RNA, 21 nt, Human
gaaaaaaaaaaaggaaaagga

SEQ ID NO: 586405 - RNA, 27 nt, Human
gaaaaagccagaaaaacaccaagauac

SEQ ID NO: 586406 - RNA, 21 nt, Human
gaggcugaggccugaggccuc

SEQ ID NO: 586407 - RNA, 22 nt, Human
gauccccacucccacgcacccc

SEQ ID NO: 586408 - RNA, 23 nt, Human
gaugaaggggcgaagcagaaaga

SEQ ID NO: 586409 - RNA, 19 nt, Human
gaugcugcucccccugccc

SEQ ID NO: 586410 - RNA, 21 nt, Human
gcccaagccagucuggguaag

SEQ ID NO: 586411 - RNA, 21 nt, Human
gcccaagccagucuggguaag

SEQ ID NO: 586412 - RNA, 22 nt, Human
gccccgggaccccuaccgcacc

SEQ ID NO: 586413 - RNA, 22 nt, Human
gcccugagcaguaggggguggg

SEQ ID NO: 586414 - RNA, 18 nt, Human
gccggcucccgcgccccc

SEQ ID NO: 586415 - RNA, 24 nt, Human
gcgaagcagaaagacaggaggagg

SEQ ID NO: 586416 - RNA, 20 nt, Human
gcgaggacuuccccaacccu

SEQ ID NO: 586417 - RNA, 18 nt, Human
gcgcccccugcccuccuu

SEQ ID NO: 586418 - RNA, 24 nt, Human
gcucuggagaugcaccccagucuc

SEQ ID NO: 586419 - RNA, 18 nt, Human
ggaaaaggacauguaaua

SEQ ID NO: 586420 - RNA, 22 nt, Human
ggaccccuaccgcacccacccc

SEQ ID NO: 586421 - RNA, 23 nt, Human
ggaccccuaccgcacccaccccc

SEQ ID NO: 586422 - RNA, 18 nt, Human
ggacccuuggccacccag

SEQ ID NO: 586423 - RNA, 27 nt, Human
ggcccggccggggccaggggagguccu

SEQ ID NO: 586424 - RNA, 20 nt, Human
ggccugaggccucuucaauu

SEQ ID NO: 586425 - RNA, 21 nt, Human
ggcgaagcagaaagacaggag

SEQ ID NO: 586426 - RNA, 20 nt, Human
gggaaaaugugcuacauuga

SEQ ID NO: 586427 - RNA, 18 nt, Human
gggccggcagggugaugc

SEQ ID NO: 586428 - RNA, 23 nt, Human
gggcggggccucuuuggggggcu

SEQ ID NO: 586429 - RNA, 19 nt, Human
gggggugagguaugaggcu

SEQ ID NO: 586430 - RNA, 19 nt, Human
ggugaaaaagccagaaaaa

SEQ ID NO: 586431 - RNA, 19 nt, Human
guccuggcugggcagccac

SEQ ID NO: 586432 - RNA, 23 nt, Human
gugaaaaagccagaaaaacacca

SEQ ID NO: 586433 - RNA, 20 nt, Human
guggcucuggagaugcaccc

SEQ ID NO: 586434 - RNA, 19 nt, Human
uaagaugaaggggcgaagc

SEQ ID NO: 586435 - RNA, 19 nt, Human
uacaccguucaauaaauag

SEQ ID NO: 586436 - RNA, 19 nt, Human
uaccgcacccacccccgac

SEQ ID NO: 586437 - RNA, 26 nt, Human
uaccgcacccacccccgacccgcgcc

SEQ ID NO: 586438 - RNA, 21 nt, Human
uauggcuucugcuucuggagu

SEQ ID NO: 586439 - RNA, 22 nt, Human
ucaaggugggggaaaggaagga

SEQ ID NO: 586440 - RNA, 19 nt, Human
ucccagccucccuccugga

SEQ ID NO: 586441 - RNA, 24 nt, Human
uccccaacccugagcccacccugg

SEQ ID NO: 586442 - RNA, 19 nt, Human
uccccacucccacgcaccc

SEQ ID NO: 586443 - RNA, 19 nt, Human
ucccccugcccccaucucc

SEQ ID NO: 586444 - RNA, 18 nt, Human
ucgccggcucccgcgccc

SEQ ID NO: 586445 - RNA, 23 nt, Human
ucgcgucugugucccccaacccc

SEQ ID NO: 586446 - RNA, 18 nt, Human
ucgcucaguuccugaguu

SEQ ID NO: 586447 - RNA, 20 nt, Human
ucgcucaguuccugaguugu

SEQ ID NO: 586448 - RNA, 22 nt, Human
ucucccuucuccucccuggguc

SEQ ID NO: 586449 - RNA, 22 nt, Human
ucuccucccugggucaaggugg

SEQ ID NO: 586450 - RNA, 23 nt, Human
ucugcgcucggccgccccgggac

SEQ ID NO: 586451 - RNA, 20 nt, Human
ucuggguggcaguauggcuu

SEQ ID NO: 586452 - RNA, 23 nt, Human
ucuucaauuccuucagugggggu

SEQ ID NO: 586453 - RNA, 20 nt, Human
ugaaaaaaaaaaaggaaaag

SEQ ID NO: 586454 - RNA, 21 nt, Human
ugaaaaagccagaaaaacacc

SEQ ID NO: 586455 - RNA, 23 nt, Human
ugaaaaagccagaaaaacaccaa

SEQ ID NO: 586456 - RNA, 21 nt, Human
ugaaaugccacgugggccuaa

SEQ ID NO: 586457 - RNA, 21 nt, Human
ugagggugugaguggcucugg

SEQ ID NO: 586458 - RNA, 23 nt, Human
ugcccccaucuccagccgggcuc

SEQ ID NO: 586459 - RNA, 18 nt, Human
uggcaguauggcuucugc

SEQ ID NO: 586460 - RNA, 21 nt, Human
ugugggggugacuuggggggg

SEQ ID NO: 586461 - RNA, 20 nt, Human
uucccguccguccucugcgc

SEQ ID NO: 586462 - RNA, 22 nt, Human
uucccguccguccucugcgcuc

SEQ ID NO: 586463 - RNA, 20 nt, Human
uucgccggcucccgcgcccc

SEQ ID NO: 586464 - RNA, 18 nt, Human
uucuggagucuugcacac

SEQ ID NO: 586465 - RNA, 22 nt, Human
aagcccacagccagucccccaa

SEQ ID NO: 586466 - RNA, 24 nt, Human
aagcggcugaugcgggaggcaggc

SEQ ID NO: 586467 - RNA, 19 nt, Human
aaguaggccccccaccuuc

SEQ ID NO: 586468 - RNA, 23 nt, Human
accccgcaccccuaccucuccaa

SEQ ID NO: 586469 - RNA, 24 nt, Human
acccgggagaaggcagcuguugga

SEQ ID NO: 586470 - RNA, 19 nt, Human
acucagcuggggccggggu

SEQ ID NO: 586471 - RNA, 19 nt, Human
agauucagcucccccccac

SEQ ID NO: 586472 - RNA, 22 nt, Human
agcaggguacggccugcucugg

SEQ ID NO: 586473 - RNA, 21 nt, Human
agccagucccccaaaguuggc

SEQ ID NO: 586474 - RNA, 21 nt, Human
agcggucacucagcuggggcc

SEQ ID NO: 586475 - RNA, 23 nt, Human
agcucccccccaccccgcacccc

SEQ ID NO: 586476 - RNA, 21 nt, Human
agcuggggccggggugucuuc

SEQ ID NO: 586477 - RNA, 19 nt, Human
aggagcgagggaggcagag

SEQ ID NO: 586478 - RNA, 19 nt, Human
aggcaagacugggaagccc

SEQ ID NO: 586479 - RNA, 20 nt, Human
aguugggaguuccccagccc

SEQ ID NO: 586480 - RNA, 24 nt, Human
augcgggaggcaggcaccuugcgu

SEQ ID NO: 586481 - RNA, 26 nt, Human
auugaagauucagcucccccccaccc

SEQ ID NO: 586482 - RNA, 23 nt, Human
caagaaccuccacauggucccca

SEQ ID NO: 586483 - RNA, 18 nt, Human
caagacugggaagcccaa

SEQ ID NO: 586484 - RNA, 28 nt, Human
cacaaggccaaccaacagucuggcccag

SEQ ID NO: 586485 - RNA, 22 nt, Human
cacccaggccucucccaggccc

SEQ ID NO: 586486 - RNA, 19 nt, Human
caccccgcaccccuaccuc

SEQ ID NO: 586487 - RNA, 24 nt, Human
caccccgcaccccuaccucuccaa

SEQ ID NO: 586488 - RNA, 21 nt, Human
caccccuaccucuccaacaca

SEQ ID NO: 586489 - RNA, 23 nt, Human
cacccucugacugcagacgaccu

SEQ ID NO: 586490 - RNA, 20 nt, Human
ccaagcccacagccaguccc

SEQ ID NO: 586491 - RNA, 25 nt, Human
ccaagcccacagccagucccccaaa

SEQ ID NO: 586492 - RNA, 24 nt, Human
ccacccucugacugcagacgaccu

SEQ ID NO: 586493 - RNA, 21 nt, Human
ccagccccagggauccugagc

SEQ ID NO: 586494 - RNA, 22 nt, Human
ccagcgguggggcccaggcccc

SEQ ID NO: 586495 - RNA, 22 nt, Human
cccagccccagggauccugagc

SEQ ID NO: 586496 - RNA, 22 nt, Human
ccccagggauccugagcuucug

SEQ ID NO: 586497 - RNA, 28 nt, Human
ccccagggauccugagcuucugggccaa

SEQ ID NO: 586498 - RNA, 18 nt, Human
ccccagggccccacaagg

SEQ ID NO: 586499 - RNA, 22 nt, Human
ccccagggccccacaaggccaa

SEQ ID NO: 586500 - RNA, 27 nt, Human
ccccagggccccacaaggccaaccaac

SEQ ID NO: 586501 - RNA, 19 nt, Human
cccccaaaguuggccaagc

SEQ ID NO: 586502 - RNA, 18 nt, Human
cccccccaccccgcaccc

SEQ ID NO: 586503 - RNA, 23 nt, Human
cccccccaccccgcaccccuacc

SEQ ID NO: 586504 - RNA, 18 nt, Human
cccccgaaguaggccccc

SEQ ID NO: 586505 - RNA, 20 nt, Human
ccccgcaccccuaccucucc

SEQ ID NO: 586506 - RNA, 21 nt, Human
ccuagccccaagcccacagcc

SEQ ID NO: 586507 - RNA, 20 nt, Human
ccucaaauguuggcaaagau

SEQ ID NO: 586508 - RNA, 19 nt, Human
ccucacccaggccucuccc

SEQ ID NO: 586509 - RNA, 24 nt, Human
ccucccgugcccugcgaauguccu

SEQ ID NO: 586510 - RNA, 18 nt, Human
ccugcgaauguccuccuc

SEQ ID NO: 586511 - RNA, 25 nt, Human
cgaauguccuccucacccaggccuc

SEQ ID NO: 586512 - RNA, 20 nt, Human
cucccccccaccccgcaccc

SEQ ID NO: 586513 - RNA, 19 nt, Human
cuccuagccccaagcccac

SEQ ID NO: 586514 - RNA, 19 nt, Human
cucggcauuggccuccgac

SEQ ID NO: 586515 - RNA, 18 nt, Human
cugacccagggcagacgg

SEQ ID NO: 586516 - RNA, 20 nt, Human
cuugaggcagaggugagggc

SEQ ID NO: 586517 - RNA, 22 nt, Human
gacaggaaggggcuggagucca

SEQ ID NO: 586518 - RNA, 21 nt, Human
gagcugggaacuggcagagga

SEQ ID NO: 586519 - RNA, 20 nt, Human
gaggagagccaggcaagacu

SEQ ID NO: 586520 - RNA, 22 nt, Human
gcagcggcccaaggcucccuca

SEQ ID NO: 586521 - RNA, 18 nt, Human
gccaucucggccaguacu

SEQ ID NO: 586522 - RNA, 24 nt, Human
gcccaagaaccuccacaugguccc

SEQ ID NO: 586523 - RNA, 23 nt, Human
gcccagaaccacccucugacugc

SEQ ID NO: 586524 - RNA, 23 nt, Human
gccccaagcccacagccaguccc

SEQ ID NO: 586525 - RNA, 23 nt, Human
gcgguggggcccaggccccaggg

SEQ ID NO: 586526 - RNA, 18 nt, Human
gcuucugggccaaggagg

SEQ ID NO: 586527 - RNA, 19 nt, Human
ggaagcccaagggggcucc

SEQ ID NO: 586528 - RNA, 19 nt, Human
ggacugaaucccccaugga

SEQ ID NO: 586529 - RNA, 20 nt, Human
ggagcgagggaggcagaggu

SEQ ID NO: 586530 - RNA, 19 nt, Human
ggcccaggccccagggccc

SEQ ID NO: 586531 - RNA, 18 nt, Human
gggaacuccaagucuuug

SEQ ID NO: 586532 - RNA, 21 nt, Human
gggauccugagcuucugggcc

SEQ ID NO: 586533 - RNA, 21 nt, Human
ggggcccaggccccagggccc

SEQ ID NO: 586534 - RNA, 21 nt, Human
gguggggcccaggccccaggg

SEQ ID NO: 586535 - RNA, 23 nt, Human
uaagaggcacuacagcaggguac

SEQ ID NO: 586536 - RNA, 19 nt, Human
uagccccaagcccacagcc

SEQ ID NO: 586537 - RNA, 23 nt, Human
uaggccccccaccuucagccaca

SEQ ID NO: 586538 - RNA, 18 nt, Human
ucacucagcuggggccgg

SEQ ID NO: 586539 - RNA, 24 nt, Human
ucagccacauugcggaaaauccaa

SEQ ID NO: 586540 - RNA, 19 nt, Human
uccaauggagcguaaguca

SEQ ID NO: 586541 - RNA, 21 nt, Human
uccagcccagaaccacccucu

SEQ ID NO: 586542 - RNA, 18 nt, Human
uccccagccccagggauc

SEQ ID NO: 586543 - RNA, 19 nt, Human
uccccagccccagggaucc

SEQ ID NO: 586544 - RNA, 25 nt, Human
uccccagccccagggauccugagcu

SEQ ID NO: 586545 - RNA, 21 nt, Human
ucccccgaaguaggcccccca

SEQ ID NO: 586546 - RNA, 19 nt, Human
uccugggacgggccucccg

SEQ ID NO: 586547 - RNA, 19 nt, Human
ucucgaacccacacccgug

SEQ ID NO: 586548 - RNA, 19 nt, Human
ucugaucugcauaacgaca

SEQ ID NO: 586549 - RNA, 19 nt, Human
ucugggccaaggaggagag

SEQ ID NO: 586550 - RNA, 18 nt, Human
ucuuccugggacgggccu

SEQ ID NO: 586551 - RNA, 19 nt, Human
ugacccagggcagacgggg

SEQ ID NO: 586552 - RNA, 22 nt, Human
ugacugcagacgaccuccuggc

SEQ ID NO: 586553 - RNA, 18 nt, Human
ugaggacugccuccagga

SEQ ID NO: 586554 - RNA, 21 nt, Human
ugaggcagaggugagggcucc

SEQ ID NO: 586555 - RNA, 21 nt, Human
ugcccugcgaauguccuccuc

SEQ ID NO: 586556 - RNA, 26 nt, Human
uguccuccucacccaggccucuccca

SEQ ID NO: 586557 - RNA, 25 nt, Human
uugaggcagaggugagggcuccccc

SEQ ID NO: 586558 - RNA, 21 nt, Human
uugggaguuccccagccccag

SEQ ID NO: 586559 - RNA, 18 nt, Human
uuuuuuuuuuuggaaggg

SEQ ID NO: 586560 - RNA, 26 nt, Human
uuuuuuuuuuuuggaaggggagggcu

SEQ ID NO: 586561 - RNA, 22 nt, Human
uuuuuuuuuuuuuuuggaaggg

SEQ ID NO: 586562 - RNA, 22 nt, Human
aaagagaaggccaagccaacua

SEQ ID NO: 586563 - RNA, 21 nt, Human
aagccaacuaccccuacucug

SEQ ID NO: 586564 - RNA, 21 nt, Human
acacagccagacauugccacc

SEQ ID NO: 586565 - RNA, 25 nt, Human
acauugccacacaucugccaugagc

SEQ ID NO: 586566 - RNA, 21 nt, Human
acccccuggacuaaggcucaa

SEQ ID NO: 586567 - RNA, 27 nt, Human
accgccccugcccagccccuucugcug

SEQ ID NO: 586568 - RNA, 18 nt, Human
accgggccaggaaggagc

SEQ ID NO: 586569 - RNA, 19 nt, Human
agaggaggccggggagagg

SEQ ID NO: 586570 - RNA, 19 nt, Human
agagguccuggggcccacc

SEQ ID NO: 586571 - RNA, 21 nt, Human
agcaaugcaaauggcuggggg

SEQ ID NO: 586572 - RNA, 20 nt, Human
agcacauccaccaugcagca

SEQ ID NO: 586573 - RNA, 21 nt, Human
aggaggccggggagagggugc

SEQ ID NO: 586574 - RNA, 24 nt, Human
aggaggccggggagagggugcuuc

SEQ ID NO: 586575 - RNA, 18 nt, Human
augguacaaaaauaaagg

SEQ ID NO: 586576 - RNA, 19 nt, Human
caacuaccccuacucugcc

SEQ ID NO: 586577 - RNA, 18 nt, Human
caaggaggcaaugugacc

SEQ ID NO: 586578 - RNA, 22 nt, Human
cacaacaacccugugagguagg

SEQ ID NO: 586579 - RNA, 28 nt, Human
cacagccagacauugccacacaucugcc

SEQ ID NO: 586580 - RNA, 24 nt, Human
cacagccccacgggugcagacaga

SEQ ID NO: 586581 - RNA, 19 nt, Human
caccgccccugcccagccc

SEQ ID NO: 586582 - RNA, 18 nt, Human
cagcugaaggugggcggc

SEQ ID NO: 586583 - RNA, 24 nt, Human
cauccuccucccgggcgcuggggg

SEQ ID NO: 586584 - RNA, 19 nt, Human
ccaggaaggagcacaucca

SEQ ID NO: 586585 - RNA, 22 nt, Human
ccaggccagcuccccacaaccu

SEQ ID NO: 586586 - RNA, 20 nt, Human
cccacaaccugcauccccaa

SEQ ID NO: 586587 - RNA, 19 nt, Human
cccagccccuucugcugcc

SEQ ID NO: 586588 - RNA, 24 nt, Human
cccagccccuucugcugccucucc

SEQ ID NO: 586589 - RNA, 19 nt, Human
ccccaauaccugaaucucc

SEQ ID NO: 586590 - RNA, 18 nt, Human
ccccacaaccugcauccc

SEQ ID NO: 586591 - RNA, 22 nt, Human
ccccacaaccugcauccccaau

SEQ ID NO: 586592 - RNA, 19 nt, Human
ccccgccccccaggccagg

SEQ ID NO: 586593 - RNA, 18 nt, Human
ccccgcuucgcccuuccc

SEQ ID NO: 586594 - RNA, 25 nt, Human
ccccuggacuaaggcucaaggaggc

SEQ ID NO: 586595 - RNA, 19 nt, Human
cccgccccuggaggcagga

SEQ ID NO: 586596 - RNA, 24 nt, Human
ccgccccgcgcugcucccgccccc

SEQ ID NO: 586597 - RNA, 18 nt, Human
ccgccccuggaggcagga

SEQ ID NO: 586598 - RNA, 22 nt, Human
ccgcggcgucugcauccuccuc

SEQ ID NO: 586599 - RNA, 20 nt, Human
ccgggccaggaaggagcaca

SEQ ID NO: 586600 - RNA, 19 nt, Human
ccggucccgccccgcuucg

SEQ ID NO: 586601 - RNA, 23 nt, Human
ccuccaccgccccugcccagccc

SEQ ID NO: 586602 - RNA, 22 nt, Human
ccucccgggcgcugggggcggg

SEQ ID NO: 586603 - RNA, 22 nt, Human
ccuccucccgggcgcugggggc

SEQ ID NO: 586604 - RNA, 24 nt, Human
ccuccucccgggcgcugggggcgg

SEQ ID NO: 586605 - RNA, 23 nt, Human
ccuggacuaaggcucaaggaggc

SEQ ID NO: 586606 - RNA, 18 nt, Human
ccuucugcugccucuccc

SEQ ID NO: 586607 - RNA, 22 nt, Human
ccuucugcugccucuccccgcc

SEQ ID NO: 586608 - RNA, 21 nt, Human
cgccccgccccuggaggcagg

SEQ ID NO: 586609 - RNA, 27 nt, Human
cgccccgccccuggaggcaggaguugg

SEQ ID NO: 586610 - RNA, 20 nt, Human
cgcugggggcgggcggggac

SEQ ID NO: 586611 - RNA, 19 nt, Human
cgcuucgcccuuccccgca

SEQ ID NO: 586612 - RNA, 19 nt, Human
cgggagcuguaguccgcgc

SEQ ID NO: 586613 - RNA, 19 nt, Human
cuaccccuacucugccagg

SEQ ID NO: 586614 - RNA, 21 nt, Human
cuccucugugcacccucacaa

SEQ ID NO: 586615 - RNA, 18 nt, Human
cucuccccgccccccagg

SEQ ID NO: 586616 - RNA, 19 nt, Human
cugcauccuccucccgggc

SEQ ID NO: 586617 - RNA, 21 nt, Human
cugugagguaggugggguggg

SEQ ID NO: 586618 - RNA, 25 nt, Human
gacuuugcuccucugugcacccuca

SEQ ID NO: 586619 - RNA, 24 nt, Human
gagcccgggagaggggacgcaggu

SEQ ID NO: 586620 - RNA, 18 nt, Human
gcccaggggucgggcugg

SEQ ID NO: 586621 - RNA, 18 nt, Human
gccccgcgcugcucccgc

SEQ ID NO: 586622 - RNA, 18 nt, Human
gcggccccuauauacugc

SEQ ID NO: 586623 - RNA, 22 nt, Human
ggaggagugacccccuggacua

SEQ ID NO: 586624 - RNA, 25 nt, Human
ggcaaugugaccgggccaggaagga

SEQ ID NO: 586625 - RNA, 24 nt, Human
gggcaggccgggagcuguaguccg

SEQ ID NO: 586626 - RNA, 18 nt, Human
gggggcgggcggggaccg

SEQ ID NO: 586627 - RNA, 18 nt, Human
gggggcgggcggggaccg

SEQ ID NO: 586628 - RNA, 19 nt, Human
gggugcagacagaggaggc

SEQ ID NO: 586629 - RNA, 26 nt, Human
guccacucugcccagagguccugggg

SEQ ID NO: 586630 - RNA, 25 nt, Human
uaccugaaucuccauuugcaaacac

SEQ ID NO: 586631 - RNA, 24 nt, Human
ucaccaaagagaaggccaagccaa

SEQ ID NO: 586632 - RNA, 21 nt, Human
uccccaauaccugaaucucca

SEQ ID NO: 586633 - RNA, 19 nt, Human
uccccacaaccugcauccc

SEQ ID NO: 586634 - RNA, 22 nt, Human
uccuccaccgccccugcccagc

SEQ ID NO: 586635 - RNA, 23 nt, Human
ucggacacagcugagaagcaagg

SEQ ID NO: 586636 - RNA, 22 nt, Human
ucucaggcccggggcccacccc

SEQ ID NO: 586637 - RNA, 24 nt, Human
ucuccauuugcaaacacaguguua

SEQ ID NO: 586638 - RNA, 23 nt, Human
ucugcauccuccucccgggcgcu

SEQ ID NO: 586639 - RNA, 20 nt, Human
ucugccaggccagcucccca

SEQ ID NO: 586640 - RNA, 23 nt, Human
ugagguagguggggugggaggag

SEQ ID NO: 586641 - RNA, 23 nt, Human
ugaguccuccaccgccccugccc

SEQ ID NO: 586642 - RNA, 26 nt, Human
ugccaggccagcuccccacaaccugc

SEQ ID NO: 586643 - RNA, 21 nt, Human
ugcccagccccuucugcugcc

SEQ ID NO: 586644 - RNA, 19 nt, Human
ugcucccgcccccgguccc

SEQ ID NO: 586645 - RNA, 21 nt, Human
ugcugccucuccccgcccccc

SEQ ID NO: 586646 - RNA, 22 nt, Human
ugggggugggaucaccaaagag

SEQ ID NO: 586647 - RNA, 21 nt, Human
uggguccuucccaucccaggg

SEQ ID NO: 586648 - RNA, 18 nt, Human
uuugcaaacacaguguua

SEQ ID NO: 586649 - RNA, 19 nt, Human
uuugcaaacacaguguuau

SEQ ID NO: 586650 - RNA, 25 nt, Human
aaacagaagagaaggcagaggccca

SEQ ID NO: 586651 - RNA, 19 nt, Human
aagagaacgcugcucggug

SEQ ID NO: 586652 - RNA, 20 nt, Human
aauuccuacccacuguccuc

SEQ ID NO: 586653 - RNA, 21 nt, Human
acucuggucucugcacugggg

SEQ ID NO: 586654 - RNA, 23 nt, Human
agacaacacacaaagcgcagcuc

SEQ ID NO: 586655 - RNA, 21 nt, Human
agacaauacccaacuucugua

SEQ ID NO: 586656 - RNA, 25 nt, Human
aggcuaacaccuuacaggguaacac

SEQ ID NO: 586657 - RNA, 21 nt, Human
auugcugaaagguguguaucu

SEQ ID NO: 586658 - RNA, 20 nt, Human
cacagugacauccacaccag

SEQ ID NO: 586659 - RNA, 21 nt, Human
cagaacuucacagaauugucu

SEQ ID NO: 586660 - RNA, 19 nt, Human
caguaaauguaccagcuuc

SEQ ID NO: 586661 - RNA, 19 nt, Human
ccaaacagaagagaaggca

SEQ ID NO: 586662 - RNA, 21 nt, Human
cccacuguccucgggcaucug

SEQ ID NO: 586663 - RNA, 22 nt, Human
ccuuaucuucacacagugacau

SEQ ID NO: 586664 - RNA, 22 nt, Human
cgacauagacaacacacaaagc

SEQ ID NO: 586665 - RNA, 22 nt, Human
cuagauauuccacugcuguacu

SEQ ID NO: 586666 - RNA, 23 nt, Human
cuucacacagugacauccacacc

SEQ ID NO: 586667 - RNA, 21 nt, Human
gaagagaaggcagaggcccac

SEQ ID NO: 586668 - RNA, 22 nt, Human
gccucuccccugacagacagcu

SEQ ID NO: 586669 - RNA, 19 nt, Human
ggaggagaaauaacaaaaa

SEQ ID NO: 586670 - RNA, 23 nt, Human
ggauuuuggagaggugggcggcu

SEQ ID NO: 586671 - RNA, 18 nt, Human
ggcuagauauuccacugc

SEQ ID NO: 586672 - RNA, 22 nt, Human
uaacaccuuacaggguaacacc

SEQ ID NO: 586673 - RNA, 19 nt, Human
ucagccgacauagacaaca

SEQ ID NO: 586674 - RNA, 25 nt, Human
uccacaccagguggccaaacagaag

SEQ ID NO: 586675 - RNA, 18 nt, Human
uccaugaaaacuuccacc

SEQ ID NO: 586676 - RNA, 23 nt, Human
ucccauauccgcacaucgccgcc

SEQ ID NO: 586677 - RNA, 22 nt, Human
uccgcacaucgccgcccacgcg

SEQ ID NO: 586678 - RNA, 21 nt, Human
ucuccaugaaaacuuccaccu

SEQ ID NO: 586679 - RNA, 20 nt, Human
ugacuggagguagcaagaau

SEQ ID NO: 586680 - RNA, 21 nt, Human
ugaugcugcgcaguccuuggg

SEQ ID NO: 586681 - RNA, 20 nt, Human
ugcugaaagguguguaucug

SEQ ID NO: 586682 - RNA, 18 nt, Human
uggguuuccucuuauccc

SEQ ID NO: 586683 - RNA, 23 nt, Human
uucacacagugacauccacacca

SEQ ID NO: 586684 - RNA, 21 nt, Human
aagaagaagggggguucccag

SEQ ID NO: 586685 - RNA, 22 nt, Human
aagcaagaagaaagguggucag

SEQ ID NO: 586686 - RNA, 21 nt, Human
acccuugaaccagccacagug

SEQ ID NO: 586687 - RNA, 21 nt, Human
agaagaagggggguucccagg

SEQ ID NO: 586688 - RNA, 22 nt, Human
agagagcucaugugcuugguag

SEQ ID NO: 586689 - RNA, 19 nt, Human
agaguggaguuuccaggag

SEQ ID NO: 586690 - RNA, 29 nt, Human
aggaaaagggagggggagaggugaagggg

SEQ ID NO: 586691 - RNA, 20 nt, Human
agggagggggagaggugaag

SEQ ID NO: 586692 - RNA, 19 nt, Human
agggggagaggugaagggg

SEQ ID NO: 586693 - RNA, 22 nt, Human
agggggagaggugaagggguca

SEQ ID NO: 586694 - RNA, 20 nt, Human
aggguccugggacaggcagg

SEQ ID NO: 586695 - RNA, 21 nt, Human
aguggaguuuccaggaguggc

SEQ ID NO: 586696 - RNA, 22 nt, Human
aucaguguaggagcaggucugg

SEQ ID NO: 586697 - RNA, 19 nt, Human
caaaacaaaggaaaaggga

SEQ ID NO: 586698 - RNA, 21 nt, Human
caagaagaaagguggucagac

SEQ ID NO: 586699 - RNA, 19 nt, Human
cagccagcauggccaggug

SEQ ID NO: 586700 - RNA, 24 nt, Human
caggaaagacuuccugggagucag

SEQ ID NO: 586701 - RNA, 18 nt, Human
caggccccagaggcaggg

SEQ ID NO: 586702 - RNA, 24 nt, Human
caggccccagaggcaggggacaga

SEQ ID NO: 586703 - RNA, 26 nt, Human
caggccccagaggcaggggacagaag

SEQ ID NO: 586704 - RNA, 26 nt, Human
cauggccaggugccugcaccgcagcc

SEQ ID NO: 586705 - RNA, 20 nt, Human
ccaaaacaaaggaaaaggga

SEQ ID NO: 586706 - RNA, 18 nt, Human
ccagggcagaagggauca

SEQ ID NO: 586707 - RNA, 18 nt, Human
cccaacugaagcaagaag

SEQ ID NO: 586708 - RNA, 19 nt, Human
ccccaacugaagcaagaag

SEQ ID NO: 586709 - RNA, 23 nt, Human
cccccacccuguuagagagcuca

SEQ ID NO: 586710 - RNA, 21 nt, Human
ccgcagccccggccugugccu

SEQ ID NO: 586711 - RNA, 18 nt, Human
gaagaagggggguuccca

SEQ ID NO: 586712 - RNA, 18 nt, Human
gaggcagacugcugugca

SEQ ID NO: 586713 - RNA, 20 nt, Human
gagggggagaggugaagggg

SEQ ID NO: 586714 - RNA, 20 nt, Human
gagggggagaggugaagggg

SEQ ID NO: 586715 - RNA, 24 nt, Human
gaugcagaguagcagaagcuccuc

SEQ ID NO: 586716 - RNA, 24 nt, Human
ggacaggcagguuuuuuagggucu

SEQ ID NO: 586717 - RNA, 24 nt, Human
ggagcucucacauacccuugaacc

SEQ ID NO: 586718 - RNA, 19 nt, Human
ggagggggagaggugaagg

SEQ ID NO: 586719 - RNA, 21 nt, Human
ggagggucccuggaauggcca

SEQ ID NO: 586720 - RNA, 21 nt, Human
ggcagaagggaucagagucug

SEQ ID NO: 586721 - RNA, 23 nt, Human
ggccaggugccugcaccgcagcc

SEQ ID NO: 586722 - RNA, 18 nt, Human
gggggagaggugaagggg

SEQ ID NO: 586723 - RNA, 20 nt, Human
ggggugccauucaggagaaa

SEQ ID NO: 586724 - RNA, 21 nt, Human
ggugcacgacugguaagggaa

SEQ ID NO: 586725 - RNA, 23 nt, Human
gucucugacaagcaguuuucuga

SEQ ID NO: 586726 - RNA, 23 nt, Human
uagucagggcugugcuugggccg

SEQ ID NO: 586727 - RNA, 20 nt, Human
ucagagucugccccaacuga

SEQ ID NO: 586728 - RNA, 21 nt, Human
ucagaguggaguuuccaggag

SEQ ID NO: 586729 - RNA, 18 nt, Human
ucagccuggcuggaacgg

SEQ ID NO: 586730 - RNA, 22 nt, Human
ucaggagaaagaagaagggggg

SEQ ID NO: 586731 - RNA, 24 nt, Human
ucaggggagaaagguggucuuuug

SEQ ID NO: 586732 - RNA, 21 nt, Human
ucccaaaacaaaggaaaaggg

SEQ ID NO: 586733 - RNA, 18 nt, Human
ucccuggaauggccagaa

SEQ ID NO: 586734 - RNA, 21 nt, Human
ucucacauacccuugaaccag

SEQ ID NO: 586735 - RNA, 24 nt, Human
ucuccagguucuucaauaucagug

SEQ ID NO: 586736 - RNA, 20 nt, Human
ucugacaagcaguuuucuga

SEQ ID NO: 586737 - RNA, 19 nt, Human
ucuuuugugcugcugucau

SEQ ID NO: 586738 - RNA, 24 nt, Human
ucuuuugugcugcugucauccuag

SEQ ID NO: 586739 - RNA, 28 nt, Human
ugaaacacuguguuucugggacaaaggu

SEQ ID NO: 586740 - RNA, 23 nt, Human
ugaagcaagaagaaaggugguca

SEQ ID NO: 586741 - RNA, 19 nt, Human
ugaaggggucagcuagggu

SEQ ID NO: 586742 - RNA, 22 nt, Human
ugaaucccaaaacaaaggaaaa

SEQ ID NO: 586743 - RNA, 19 nt, Human
ugacaagcaguuuucugaa

SEQ ID NO: 586744 - RNA, 24 nt, Human
ugcaccgcagccccggccugugcc

SEQ ID NO: 586745 - RNA, 19 nt, Human
ugccugcaccgcagccccg

SEQ ID NO: 586746 - RNA, 19 nt, Human
ugcugagugucaucaguga

SEQ ID NO: 586747 - RNA, 24 nt, Human
ugcuugguagaagggagucccaua

SEQ ID NO: 586748 - RNA, 18 nt, Human
uggccaggugccugcacc

SEQ ID NO: 586749 - RNA, 19 nt, Human
ugggagaagggaguguugg

SEQ ID NO: 586750 - RNA, 19 nt, Human
uguccaaagcggcagcuuc

SEQ ID NO: 586751 - RNA, 23 nt, Human
uguuagagagcucaugugcuugg

SEQ ID NO: 586752 - RNA, 23 nt, Human
uguuagagagcucaugugcuugg

SEQ ID NO: 586753 - RNA, 18 nt, Human
uuagauguuugguguuca

SEQ ID NO: 586754 - RNA, 19 nt, Human
uucaggaaagacuuccugg

SEQ ID NO: 586755 - RNA, 19 nt, Human
uucccaggccccagaggca

SEQ ID NO: 586756 - RNA, 21 nt, Human
uuugguguucauuaccauagg

SEQ ID NO: 586757 - RNA, 23 nt, Human
uuuugugcugcugucauccuagu

SEQ ID NO: 586758 - RNA, 24 nt, Human
uuuuuagggucucuugaaacacug

SEQ ID NO: 586759 - RNA, 23 nt, Human
uuuuuuuuuuuuuuuuaagccuu

SEQ ID NO: 586760 - RNA, 19 nt, Human
uuuuuuuuuuuuuuuuuaa

SEQ ID NO: 586761 - RNA, 24 nt, Human
aaagugcugggauuacaggcguga

SEQ ID NO: 586762 - RNA, 21 nt, Human
aaagugcuggguuuacaggug

SEQ ID NO: 586763 - RNA, 24 nt, Human
aaagugcuggguuuacagguguga

SEQ ID NO: 586764 - RNA, 18 nt, Human
aacuuccugcaggcagac

SEQ ID NO: 586765 - RNA, 19 nt, Human
aacuucugccccccacccg

SEQ ID NO: 586766 - RNA, 24 nt, Human
aagaaauauuucuuacagcaacug

SEQ ID NO: 586767 - RNA, 21 nt, Human
aagcgaucuuccugccucagc

SEQ ID NO: 586768 - RNA, 20 nt, Human
aaguagcugggauuauaggc

SEQ ID NO: 586769 - RNA, 22 nt, Human
aaguagcugggauuauaggcgu

SEQ ID NO: 586770 - RNA, 24 nt, Human
aaguagcugggauuauaggcgugu

SEQ ID NO: 586771 - RNA, 18 nt, Human
aagugcacccgcagucac

SEQ ID NO: 586772 - RNA, 19 nt, Human
aagugcugggauuacaggc

SEQ ID NO: 586773 - RNA, 19 nt, Human
aagugcugggauuacaggc

SEQ ID NO: 586774 - RNA, 26 nt, Human
aagugcugggauuacaggcgugagcc

SEQ ID NO: 586775 - RNA, 20 nt, Human
acagcgcucgaguggauuag

SEQ ID NO: 586776 - RNA, 18 nt, Human
acaggguuuugcuauguu

SEQ ID NO: 586777 - RNA, 19 nt, Human
acaggguuuugcuauguug

SEQ ID NO: 586778 - RNA, 24 nt, Human
acaggguuuugcuauguugcucag

SEQ ID NO: 586779 - RNA, 18 nt, Human
acaguaacggcaguaagu

SEQ ID NO: 586780 - RNA, 24 nt, Human
accauguuggccaggcuggucucg

SEQ ID NO: 586781 - RNA, 19 nt, Human
acccaggcuggagugcagu

SEQ ID NO: 586782 - RNA, 21 nt, Human
acucauuuucccuuccauacu

SEQ ID NO: 586783 - RNA, 23 nt, Human
acucugagcccuauucauccucc

SEQ ID NO: 586784 - RNA, 25 nt, Human
acucuggagccccauugucagcccc

SEQ ID NO: 586785 - RNA, 21 nt, Human
agaaauaagcagugaagaaaa

SEQ ID NO: 586786 - RNA, 18 nt, Human
agacaggguuuugcuaug

SEQ ID NO: 586787 - RNA, 23 nt, Human
agacaggguuuugcuauguugcu

SEQ ID NO: 586788 - RNA, 25 nt, Human
agcaucucuccugaggucccugcca

SEQ ID NO: 586789 - RNA, 24 nt, Human
agcccuauucauccuccuccccag

SEQ ID NO: 586790 - RNA, 18 nt, Human
agcuggacccaagcccag

SEQ ID NO: 586791 - RNA, 19 nt, Human
agcuggacccaagcccagc

SEQ ID NO: 586792 - RNA, 18 nt, Human
aggagacaguaacggcag

SEQ ID NO: 586793 - RNA, 19 nt, Human
aggcauagagggggcacgg

SEQ ID NO: 586794 - RNA, 21 nt, Human
aggcguguaccaccacaccca

SEQ ID NO: 586795 - RNA, 25 nt, Human
aggcuggagugcaguggcacaaucu

SEQ ID NO: 586796 - RNA, 18 nt, Human
agggggcacgggaggugg

SEQ ID NO: 586797 - RNA, 21 nt, Human
aguacugggacuacaggcacc

SEQ ID NO: 586798 - RNA, 24 nt, Human
aguagacauucaccguugguuugc

SEQ ID NO: 586799 - RNA, 23 nt, Human
aguagagauggggguuucaccau

SEQ ID NO: 586800 - RNA, 19 nt, Human
aguaggugugugaggcuuu

SEQ ID NO: 586801 - RNA, 20 nt, Human
agugcaguggcacaaucucg

SEQ ID NO: 586802 - RNA, 24 nt, Human
agugcaguggcacaaucucggcuc

SEQ ID NO: 586803 - RNA, 18 nt, Human
agugcugggauuacaggc

SEQ ID NO: 586804 - RNA, 18 nt, Human
aucacaauuauuucuuug

SEQ ID NO: 586805 - RNA, 23 nt, Human
auggggguuucaccauguuggcc

SEQ ID NO: 586806 - RNA, 20 nt, Human
auguugcucaggcuggucuc

SEQ ID NO: 586807 - RNA, 24 nt, Human
auuuuuguauuuuuaguagagaug

SEQ ID NO: 586808 - RNA, 24 nt, Human
caaagugcugggauuacaggcgug

SEQ ID NO: 586809 - RNA, 24 nt, Human
caaagugcuggguuuacaggugug

SEQ ID NO: 586810 - RNA, 22 nt, Human
caagcgauucuccugccucagc

SEQ ID NO: 586811 - RNA, 18 nt, Human
caaggccccagagggagg

SEQ ID NO: 586812 - RNA, 22 nt, Human
caaggccccagagggagggggg

SEQ ID NO: 586813 - RNA, 19 nt, Human
cacagugcguagcagugac

SEQ ID NO: 586814 - RNA, 24 nt, Human
caccacacccagcuaauuuuugua

SEQ ID NO: 586815 - RNA, 21 nt, Human
caccauguuggccaggcuggu

SEQ ID NO: 586816 - RNA, 24 nt, Human
caccauguuggccaggcuggucuc

SEQ ID NO: 586817 - RNA, 27 nt, Human
caccauguuggccaggcuggucucgaa

SEQ ID NO: 586818 - RNA, 21 nt, Human
caccuggggcucccaaagugc

SEQ ID NO: 586819 - RNA, 24 nt, Human
cacuacacccagcuaauuuuugua

SEQ ID NO: 586820 - RNA, 20 nt, Human
cacugcaacuucugcccccc

SEQ ID NO: 586821 - RNA, 21 nt, Human
cacugcaacuucugcccccca

SEQ ID NO: 586822 - RNA, 20 nt, Human
cagauggccauuuuccaggg

SEQ ID NO: 586823 - RNA, 19 nt, Human
cagccccaggcccagcccc

SEQ ID NO: 586824 - RNA, 19 nt, Human
cagccccaggggugcuccc

SEQ ID NO: 586825 - RNA, 23 nt, Human
cagccuccgucuccuaggcuuaa

SEQ ID NO: 586826 - RNA, 19 nt, Human
cagccuccugaguacuggg

SEQ ID NO: 586827 - RNA, 24 nt, Human
caggguuuugcuauguugcucagg

SEQ ID NO: 586828 - RNA, 22 nt, Human
caguaacggcaguaagucagcu

SEQ ID NO: 586829 - RNA, 19 nt, Human
cauccuccuccccagccag

SEQ ID NO: 586830 - RNA, 24 nt, Human
cauguuggccaggcuggucucgaa

SEQ ID NO: 586831 - RNA, 18 nt, Human
cauuuguucuccugagca

SEQ ID NO: 586832 - RNA, 22 nt, Human
ccaaagugcugggauuacaggc

SEQ ID NO: 586833 - RNA, 22 nt, Human
ccaaagugcugggauuacaggc

SEQ ID NO: 586834 - RNA, 24 nt, Human
ccaaagugcugggauuacaggcgu

SEQ ID NO: 586835 - RNA, 21 nt, Human
ccaaagugcuggguuuacagg

SEQ ID NO: 586836 - RNA, 24 nt, Human
ccaaagugcuggguuuacaggugu

SEQ ID NO: 586837 - RNA, 21 nt, Human
cccaccuggggcucccaaagu

SEQ ID NO: 586838 - RNA, 23 nt, Human
ccccaggggugcucccggugcug

SEQ ID NO: 586839 - RNA, 22 nt, Human
cccgcagucacucgcagauggc

SEQ ID NO: 586840 - RNA, 21 nt, Human
ccgcaccugcccuugcacuca

SEQ ID NO: 586841 - RNA, 22 nt, Human
ccgcauguauaauuucuuaacc

SEQ ID NO: 586842 - RNA, 19 nt, Human
ccggauucaagcgauucuc

SEQ ID NO: 586843 - RNA, 18 nt, Human
ccuaaccccaccuuuccc

SEQ ID NO: 586844 - RNA, 23 nt, Human
ccuaaguagcugggauuauaggc

SEQ ID NO: 586845 - RNA, 23 nt, Human
ccuaaguagcugggauuauaggc

SEQ ID NO: 586846 - RNA, 19 nt, Human
ccuccccagccagcucacc

SEQ ID NO: 586847 - RNA, 25 nt, Human
ccugaccucgugaucugcccaccug

SEQ ID NO: 586848 - RNA, 24 nt, Human
ccugagcucaagugauuugcccuc

SEQ ID NO: 586849 - RNA, 22 nt, Human
ccugaguacugggacuacaggc

SEQ ID NO: 586850 - RNA, 23 nt, Human
ccugccucagccuccugaguacu

SEQ ID NO: 586851 - RNA, 20 nt, Human
cguguaccaccacacccagc

SEQ ID NO: 586852 - RNA, 22 nt, Human
cguuccacacucuggagcccca

SEQ ID NO: 586853 - RNA, 19 nt, Human
cuaaccccaccuuucccau

SEQ ID NO: 586854 - RNA, 24 nt, Human
cuaaguagcugggauuauaggcgu

SEQ ID NO: 586855 - RNA, 23 nt, Human
cuaauuuuuguauuuuuaguaga

SEQ ID NO: 586856 - RNA, 23 nt, Human
cuaauuuuuguauuuuuuguaga

SEQ ID NO: 586857 - RNA, 23 nt, Human
cuacagccuccgucuccuaggcu

SEQ ID NO: 586858 - RNA, 23 nt, Human
cucaagugauuugcccuccucag

SEQ ID NO: 586859 - RNA, 19 nt, Human
cucacugcaacuucugccc

SEQ ID NO: 586860 - RNA, 25 nt, Human
cucacugcaacuucugccccccacc

SEQ ID NO: 586861 - RNA, 24 nt, Human
cucagccuccuaaguagcugggau

SEQ ID NO: 586862 - RNA, 18 nt, Human
cuccagggcaggugcugu

SEQ ID NO: 586863 - RNA, 23 nt, Human
cuccucagucucccaaagugcug

SEQ ID NO: 586864 - RNA, 22 nt, Human
cuccugaccucgugaucugccc

SEQ ID NO: 586865 - RNA, 18 nt, Human
cuccugagcucaagugau

SEQ ID NO: 586866 - RNA, 24 nt, Human
cucucucugucacccaggcuggag

SEQ ID NO: 586867 - RNA, 24 nt, Human
cucucugucacccaggcuggagug

SEQ ID NO: 586868 - RNA, 22 nt, Human
cucuggagccccauugucagcc

SEQ ID NO: 586869 - RNA, 23 nt, Human
cucugucacccaggcuggagugc

SEQ ID NO: 586870 - RNA, 23 nt, Human
cugccucagccuccuaaguagcu

SEQ ID NO: 586871 - RNA, 20 nt, Human
cuuaagcgaucuuccugccu

SEQ ID NO: 586872 - RNA, 24 nt, Human
cuuccugccucagccuccugagua

SEQ ID NO: 586873 - RNA, 21 nt, Human
cuugagugaacaaaaccagca

SEQ ID NO: 586874 - RNA, 21 nt, Human
gaccucgugaucugcccaccu

SEQ ID NO: 586875 - RNA, 23 nt, Human
gaccucgugaucugcccaccugg

SEQ ID NO: 586876 - RNA, 21 nt, Human
gagacggagucucucucuguc

SEQ ID NO: 586877 - RNA, 18 nt, Human
gauuacaggcgugagcca

SEQ ID NO: 586878 - RNA, 20 nt, Human
gauuacaggcgugagccacc

SEQ ID NO: 586879 - RNA, 22 nt, Human
gauuacaggcgugagccaccgc

SEQ ID NO: 586880 - RNA, 21 nt, Human
gauucuccugccucagccucc

SEQ ID NO: 586881 - RNA, 19 nt, Human
gcaacuucugccccccacc

SEQ ID NO: 586882 - RNA, 20 nt, Human
gcaccggcugccucaugguu

SEQ ID NO: 586883 - RNA, 24 nt, Human
gcagaccuucucagucccucacag

SEQ ID NO: 586884 - RNA, 24 nt, Human
gcccuauucauccuccuccccagc

SEQ ID NO: 586885 - RNA, 23 nt, Human
gccggauucaagcgauucuccug

SEQ ID NO: 586886 - RNA, 20 nt, Human
gccucagccuccuaaguagc

SEQ ID NO: 586887 - RNA, 24 nt, Human
gcgaucuuccugccucagccuccu

SEQ ID NO: 586888 - RNA, 24 nt, Human
gcgauucuccugccucagccuccu

SEQ ID NO: 586889 - RNA, 19 nt, Human
gcuauguugcucaggcugg

SEQ ID NO: 586890 - RNA, 20 nt, Human
gcuauguugcucaggcuggu

SEQ ID NO: 586891 - RNA, 23 nt, Human
gcucaggcuggucucaaacuccu

SEQ ID NO: 586892 - RNA, 19 nt, Human
gcuggagugcaguggcaca

SEQ ID NO: 586893 - RNA, 23 nt, Human
gcuggucucgaacuccugaccuc

SEQ ID NO: 586894 - RNA, 24 nt, Human
ggcuggucucgaacuccugaccuc

SEQ ID NO: 586895 - RNA, 24 nt, Human
ggggguuucaccauguuggccagg

SEQ ID NO: 586896 - RNA, 18 nt, Human
gggguuucaccauguugg

SEQ ID NO: 586897 - RNA, 22 nt, Human
gggguuucaccauguuggccag

SEQ ID NO: 586898 - RNA, 23 nt, Human
gggguuucaccauguuggccagg

SEQ ID NO: 586899 - RNA, 19 nt, Human
ggucucgaacuccugaccu

SEQ ID NO: 586900 - RNA, 19 nt, Human
guacucaucuggagugcag

SEQ ID NO: 586901 - RNA, 18 nt, Human
guagagacaggguuuugc

SEQ ID NO: 586902 - RNA, 20 nt, Human
guagcagugacguguggcac

SEQ ID NO: 586903 - RNA, 18 nt, Human
guagcugggauuauaggc

SEQ ID NO: 586904 - RNA, 18 nt, Human
gugccagugcugguggag

SEQ ID NO: 586905 - RNA, 19 nt, Human
guguaccaccacacccagc

SEQ ID NO: 586906 - RNA, 22 nt, Human
guugguuugcucauuuguucuc

SEQ ID NO: 586907 - RNA, 24 nt, Human
guuuugcuauguugcucaggcugg

SEQ ID NO: 586908 - RNA, 27 nt, Human
uaagcgaucuuccugccucagccuccu

SEQ ID NO: 586909 - RNA, 24 nt, Human
uaauuuuuguauuuuuaguagaga

SEQ ID NO: 586910 - RNA, 22 nt, Human
uaauuuuuguauuuuuuguaga

SEQ ID NO: 586911 - RNA, 24 nt, Human
uaauuuuuguauuuuuuguagaga

SEQ ID NO: 586912 - RNA, 24 nt, Human
uacaggcacccgccacuacaccca

SEQ ID NO: 586913 - RNA, 23 nt, Human
uacaggcgugagccaccgcgccc

SEQ ID NO: 586914 - RNA, 22 nt, Human
uaccaccacacccagcuaauuu

SEQ ID NO: 586915 - RNA, 20 nt, Human
uacuccagggcaggugcugg

SEQ ID NO: 586916 - RNA, 22 nt, Human
uagagacaggguuuugcuaugu

SEQ ID NO: 586917 - RNA, 21 nt, Human
uagcacauuugcucuucuucu

SEQ ID NO: 586918 - RNA, 24 nt, Human
uaggcuuaagcgaucuuccugccu

SEQ ID NO: 586919 - RNA, 25 nt, Human
uaguagagauggggguuucaccaug

SEQ ID NO: 586920 - RNA, 23 nt, Human
uauguugcucaggcuggucucaa

SEQ ID NO: 586921 - RNA, 24 nt, Human
uauguugcucaggcuggucucaaa

SEQ ID NO: 586922 - RNA, 24 nt, Human
ucacccaggcuggagugcaguggc

SEQ ID NO: 586923 - RNA, 19 nt, Human
ucacuacagccuccgucuc

SEQ ID NO: 586924 - RNA, 24 nt, Human
ucacuacagccuccgucuccuagg

SEQ ID NO: 586925 - RNA, 25 nt, Human
ucacuacagccuccgucuccuaggc

SEQ ID NO: 586926 - RNA, 18 nt, Human
ucacugcaacuucugccc

SEQ ID NO: 586927 - RNA, 21 nt, Human
ucacugcaacuucugcccccc

SEQ ID NO: 586928 - RNA, 23 nt, Human
ucacugcaacuucugccccccac

SEQ ID NO: 586929 - RNA, 20 nt, Human
ucauccuccuccccagccag

SEQ ID NO: 586930 - RNA, 20 nt, Human
uccagggcaggugcugugag

SEQ ID NO: 586931 - RNA, 24 nt, Human
ucccaaagugcugggauuacaggc

SEQ ID NO: 586932 - RNA, 23 nt, Human
ucccaaagugcuggguuuacagg

SEQ ID NO: 586933 - RNA, 23 nt, Human
uccccagccagcucaccuggagc

SEQ ID NO: 586934 - RNA, 21 nt, Human
ucccucacagugcguagcagu

SEQ ID NO: 586935 - RNA, 24 nt, Human
uccuaaguagcugggauuauaggc

SEQ ID NO: 586936 - RNA, 20 nt, Human
uccuaggcuuaagcgaucuu

SEQ ID NO: 586937 - RNA, 23 nt, Human
uccugaguacugggacuacaggc

SEQ ID NO: 586938 - RNA, 24 nt, Human
uccugaguacugggacuacaggca

SEQ ID NO: 586939 - RNA, 22 nt, Human
uccuuggaggagacaguaacgg

SEQ ID NO: 586940 - RNA, 21 nt, Human
ucuaucacaauuauuucuuug

SEQ ID NO: 586941 - RNA, 23 nt, Human
ucucaaacuccugagcucaagug

SEQ ID NO: 586942 - RNA, 26 nt, Human
ucucacggagcuuccacuccuuggag

SEQ ID NO: 586943 - RNA, 24 nt, Human
ucuccugccucagccuccuaagua

SEQ ID NO: 586944 - RNA, 19 nt, Human
ucucgaacuccugaccucg

SEQ ID NO: 586945 - RNA, 23 nt, Human
ucucucucugucacccaggcugg

SEQ ID NO: 586946 - RNA, 24 nt, Human
ucucucucugucacccaggcugga

SEQ ID NO: 586947 - RNA, 24 nt, Human
ucucucugucacccaggcuggagu

SEQ ID NO: 586948 - RNA, 22 nt, Human
ucuggagccccauugucagccc

SEQ ID NO: 586949 - RNA, 24 nt, Human
ucugucacccaggcuggagugcag

SEQ ID NO: 586950 - RNA, 25 nt, Human
ugaaacacugggguauuuuuggaaa

SEQ ID NO: 586951 - RNA, 21 nt, Human
ugaauguuuugcccuaacccc

SEQ ID NO: 586952 - RNA, 21 nt, Human
ugagcccuauucauccuccuc

SEQ ID NO: 586953 - RNA, 21 nt, Human
ugagcucaagugauuugcccu

SEQ ID NO: 586954 - RNA, 22 nt, Human
ugagcucaagugauuugcccuc

SEQ ID NO: 586955 - RNA, 19 nt, Human
ugaguccucugguuuugug

SEQ ID NO: 586956 - RNA, 24 nt, Human
ugaucugcccaccuggggcuccca

SEQ ID NO: 586957 - RNA, 22 nt, Human
ugauuugcccuccucagucucc

SEQ ID NO: 586958 - RNA, 22 nt, Human
ugcaguggcaccaucucagcuc

SEQ ID NO: 586959 - RNA, 22 nt, Human
ugcccaccuggggcucccaaag

SEQ ID NO: 586960 - RNA, 24 nt, Human
ugccucagccuccuaaguagcugg

SEQ ID NO: 586961 - RNA, 23 nt, Human
ugccucagccuccugaguacugg

SEQ ID NO: 586962 - RNA, 24 nt, Human
ugcuauguugcucaggcuggucuc

SEQ ID NO: 586963 - RNA, 24 nt, Human
ugcugggauuacaggcgugagcca

SEQ ID NO: 586964 - RNA, 23 nt, Human
uggagugcaguggcacaaucucg

SEQ ID NO: 586965 - RNA, 24 nt, Human
uggagugcaguggcacaaucucgg

SEQ ID NO: 586966 - RNA, 19 nt, Human
uggagugcaguggcaccau

SEQ ID NO: 586967 - RNA, 23 nt, Human
uggagugcaguggcaccaucuca

SEQ ID NO: 586968 - RNA, 24 nt, Human
uggcacaaucucggcucacugcaa

SEQ ID NO: 586969 - RNA, 19 nt, Human
uggcaccaucucagcucac

SEQ ID NO: 586970 - RNA, 23 nt, Human
uggcaccaucucagcucacuaca

SEQ ID NO: 586971 - RNA, 24 nt, Human
uggccaggcuggucucgaacuccu

SEQ ID NO: 586972 - RNA, 21 nt, Human
ugggacuacaggcacccgcca

SEQ ID NO: 586973 - RNA, 22 nt, Human
ugggacuacaggcacccgccac

SEQ ID NO: 586974 - RNA, 22 nt, Human
ugggacuacaggcacccgccac

SEQ ID NO: 586975 - RNA, 24 nt, Human
ugggacuacaggcacccgccacua

SEQ ID NO: 586976 - RNA, 18 nt, Human
ugggauuacaggcgugag

SEQ ID NO: 586977 - RNA, 19 nt, Human
ugggauuacaggcgugagc

SEQ ID NO: 586978 - RNA, 21 nt, Human
ugggauuacaggcgugagcca

SEQ ID NO: 586979 - RNA, 22 nt, Human
ugggauuacaggcgugagccac

SEQ ID NO: 586980 - RNA, 23 nt, Human
ugggauuacaggcgugagccacc

SEQ ID NO: 586981 - RNA, 24 nt, Human
ugggauuacaggcgugagccaccg

SEQ ID NO: 586982 - RNA, 21 nt, Human
ugggauuauaggcguguacca

SEQ ID NO: 586983 - RNA, 22 nt, Human
ugggauuauaggcguguaccac

SEQ ID NO: 586984 - RNA, 24 nt, Human
ugggauuauaggcguguaccacca

SEQ ID NO: 586985 - RNA, 22 nt, Human
ugggcagugggcacaggggccu

SEQ ID NO: 586986 - RNA, 19 nt, Human
ugggccugggcagugggca

SEQ ID NO: 586987 - RNA, 24 nt, Human
uggggguuucaccauguuggccag

SEQ ID NO: 586988 - RNA, 21 nt, Human
ugggucucagugccagugcug

SEQ ID NO: 586989 - RNA, 22 nt, Human
uggguuuacaggugugagcugc

SEQ ID NO: 586990 - RNA, 18 nt, Human
ugguggaguggguggggg

SEQ ID NO: 586991 - RNA, 24 nt, Human
uguagagacaggguuuugcuaugu

SEQ ID NO: 586992 - RNA, 21 nt, Human
uguauuuuuaguagagauggg

SEQ ID NO: 586993 - RNA, 18 nt, Human
ugucaagugauaguaaca

SEQ ID NO: 586994 - RNA, 20 nt, Human
ugucacugaugaaguuugaa

SEQ ID NO: 586995 - RNA, 18 nt, Human
ugugggucauaggggucc

SEQ ID NO: 586996 - RNA, 20 nt, Human
uguugcucaggcuggucuca

SEQ ID NO: 586997 - RNA, 23 nt, Human
uguuugauaaaaguaggugugug

SEQ ID NO: 586998 - RNA, 24 nt, Human
uguuuuguacucagcacaguucua

SEQ ID NO: 586999 - RNA, 25 nt, Human
uuaguagagauggggguuucaccau

SEQ ID NO: 587000 - RNA, 23 nt, Human
uuauguaugucuuucuccuaacu

SEQ ID NO: 587001 - RNA, 18 nt, Human
uucaagaaauaacagucc

SEQ ID NO: 587002 - RNA, 22 nt, Human
uucaagaaauaacaguccagca

SEQ ID NO: 587003 - RNA, 21 nt, Human
uucaagcgauucuccugccuc

SEQ ID NO: 587004 - RNA, 23 nt, Human
uucaagcgauucuccugccucag

SEQ ID NO: 587005 - RNA, 24 nt, Human
uucaagcgauucuccugccucagc

SEQ ID NO: 587006 - RNA, 27 nt, Human
uuccuagaaauaagcagugaagaaaaa

SEQ ID NO: 587007 - RNA, 22 nt, Human
uugaaagacagacagcgcucga

SEQ ID NO: 587008 - RNA, 20 nt, Human
uugcucauuuguucuccuga

SEQ ID NO: 587009 - RNA, 24 nt, Human
uuguagagacaggguuuugcuaug

SEQ ID NO: 587010 - RNA, 24 nt, Human
uuguauuuuuaguagagauggggg

SEQ ID NO: 587011 - RNA, 24 nt, Human
uuucaccauguuggccaggcuggu

SEQ ID NO: 587012 - RNA, 21 nt, Human
uuucuucuuuucuuuucagcc

SEQ ID NO: 587013 - RNA, 24 nt, Human
uuuguagagacaggguuuugcuau

SEQ ID NO: 587014 - RNA, 19 nt, Human
uuuugcuauguugcucagg

SEQ ID NO: 587015 - RNA, 23 nt, Human
uuuugcuauguugcucaggcugg

SEQ ID NO: 587016 - RNA, 25 nt, Human
uuuuuaguagagauggggguuucac

SEQ ID NO: 587017 - RNA, 20 nt, Human
uuuuuguauuuuuaguagag

SEQ ID NO: 587018 - RNA, 20 nt, Human
uuuuuguauuuuuuguagag

SEQ ID NO: 587019 - RNA, 23 nt, Human
uuuuuguauuuuuuguagagaca

SEQ ID NO: 587020 - RNA, 21 nt, Human
uuuuuuguagagacaggguuu

SEQ ID NO: 587021 - RNA, 24 nt, Human
uuuuuuguagagacaggguuuugc

SEQ ID NO: 587022 - RNA, 18 nt, Human
aaacaaccgaaaacaucc

SEQ ID NO: 587023 - RNA, 23 nt, Human
aaccgaaaacaucccgugccgga

SEQ ID NO: 587024 - RNA, 19 nt, Human
aagagcaaacccaaggaac

SEQ ID NO: 587025 - RNA, 20 nt, Human
acaaccgaaaacaucccgug

SEQ ID NO: 587026 - RNA, 24 nt, Human
acaccgggccccaccacaccaggc

SEQ ID NO: 587027 - RNA, 24 nt, Human
acagaauuucaccauguuggccag

SEQ ID NO: 587028 - RNA, 18 nt, Human
accauguuggccaggcug

SEQ ID NO: 587029 - RNA, 19 nt, Human
acccuccggucccaaacac

SEQ ID NO: 587030 - RNA, 23 nt, Human
agaauuucaccauguuggccagg

SEQ ID NO: 587031 - RNA, 18 nt, Human
agccucccgaauagcugg

SEQ ID NO: 587032 - RNA, 20 nt, Human
aggcaugcaccaccaugccc

SEQ ID NO: 587033 - RNA, 25 nt, Human
aggcuggagugcaguggcaugaucu

SEQ ID NO: 587034 - RNA, 19 nt, Human
agugcaguggcaugaucuc

SEQ ID NO: 587035 - RNA, 21 nt, Human
agugcaguggcaugaucucag

SEQ ID NO: 587036 - RNA, 23 nt, Human
agugcaguggcaugaucucagcu

SEQ ID NO: 587037 - RNA, 24 nt, Human
aguggcaugaucucagcucacugc

SEQ ID NO: 587038 - RNA, 19 nt, Human
aucugccugccuuggccuc

SEQ ID NO: 587039 - RNA, 22 nt, Human
auuuuuguauuuuuaguagaga

SEQ ID NO: 587040 - RNA, 24 nt, Human
auuuuuguauuuuuaguagagaca

SEQ ID NO: 587041 - RNA, 21 nt, Human
caaacaccgggccccaccaca

SEQ ID NO: 587042 - RNA, 21 nt, Human
caaccgaaaacaucccgugcc

SEQ ID NO: 587043 - RNA, 26 nt, Human
caaggaacucaucagccgucaacacc

SEQ ID NO: 587044 - RNA, 22 nt, Human
caagugauucuccuaccucagc

SEQ ID NO: 587045 - RNA, 20 nt, Human
caccacaccaggccccucuc

SEQ ID NO: 587046 - RNA, 22 nt, Human
caccaccaugcccggcucauuu

SEQ ID NO: 587047 - RNA, 23 nt, Human
caccaggccccucuccacacucu

SEQ ID NO: 587048 - RNA, 19 nt, Human
caccaugcccggcucauuu

SEQ ID NO: 587049 - RNA, 21 nt, Human
caccauguuggccaggcuggu

SEQ ID NO: 587050 - RNA, 24 nt, Human
caccauguuggccaggcugguuuc

SEQ ID NO: 587051 - RNA, 31 nt, Human; identical to SEQ ID NO: 466129

SEQ ID NO: 587052 - RNA, 23 nt, Human
cacccuccggucccaaacaccuc

SEQ ID NO: 587053 - RNA, 21 nt, Human
cacugcaacuuccgccuccug

SEQ ID NO: 587054 - RNA, 23 nt, Human
cacugcaacuuccgccuccuggg

SEQ ID NO: 587055 - RNA, 24 nt, Human
cagaauuucaccauguuggccagg

SEQ ID NO: 587056 - RNA, 23 nt, Human
cauguuggccaggcugguuucaa

SEQ ID NO: 587057 - RNA, 19 nt, Human
ccacaccaggccccucucc

SEQ ID NO: 587058 - RNA, 27 nt, Human
ccaggccccucuccacacucuccuuuc

SEQ ID NO: 587059 - RNA, 23 nt, Human
ccccaccacaccaggccccucuc

SEQ ID NO: 587060 - RNA, 23 nt, Human
ccccucuccacacucuccuuucc

SEQ ID NO: 587061 - RNA, 24 nt, Human
ccgccuccuggguucaagugauuc

SEQ ID NO: 587062 - RNA, 21 nt, Human
ccggcaugugcugcccuuccu

SEQ ID NO: 587063 - RNA, 20 nt, Human
ccgggccccaccacaccagg

SEQ ID NO: 587064 - RNA, 22 nt, Human
ccuccggucccaaacaccgggc

SEQ ID NO: 587065 - RNA, 24 nt, Human
ccuccuggguucaagugauucucc

SEQ ID NO: 587066 - RNA, 24 nt, Human
ccucuccacacucuccuuuccuca

SEQ ID NO: 587067 - RNA, 21 nt, Human
ccugaucucaaaugaucugcc

SEQ ID NO: 587068 - RNA, 23 nt, Human
ccugaucucaaaugaucugccug

SEQ ID NO: 587069 - RNA, 22 nt, Human
ccugccuuggccucccaaagug

SEQ ID NO: 587070 - RNA, 23 nt, Human
ccuggguucaagugauucuccuc

SEQ ID NO: 587071 - RNA, 24 nt, Human
cgcucuguugcccaggcuggagug

SEQ ID NO: 587072 - RNA, 18 nt, Human
cucaaaugaucugccugc

SEQ ID NO: 587073 - RNA, 20 nt, Human
cucaaaugaucugccugccu

SEQ ID NO: 587074 - RNA, 24 nt, Human
cucacugcaacuuccgccuccugg

SEQ ID NO: 587075 - RNA, 21 nt, Human
cuccggcaugugcugcccuuc

SEQ ID NO: 587076 - RNA, 20 nt, Human
cuccuggguucaagugauuc

SEQ ID NO: 587077 - RNA, 21 nt, Human
cuccuggguucaagugauucu

SEQ ID NO: 587078 - RNA, 24 nt, Human
cucgcucuguugcccaggcuggag

SEQ ID NO: 587079 - RNA, 23 nt, Human
cugcaacuuccgccuccuggguu

SEQ ID NO: 587080 - RNA, 23 nt, Human
cugccuuggccucccaaagugcu

SEQ ID NO: 587081 - RNA, 24 nt, Human
cuggagugcaguggcaugaucuca

SEQ ID NO: 587082 - RNA, 22 nt, Human
cuuccgccuccuggguucaagu

SEQ ID NO: 587083 - RNA, 21 nt, Human
cuuucuccggcaugugcugcc

SEQ ID NO: 587084 - RNA, 24 nt, Human
gaauagcugggcuuacaggcaugc

SEQ ID NO: 587085 - RNA, 21 nt, Human
gagacagaauuucaccauguu

SEQ ID NO: 587086 - RNA, 21 nt, Human
gauucuccuaccucagccucc

SEQ ID NO: 587087 - RNA, 20 nt, Human
gcccaggcuggagugcagug

SEQ ID NO: 587088 - RNA, 24 nt, Human
gcccaggcuggagugcaguggcau

SEQ ID NO: 587089 - RNA, 22 nt, Human
gccuuggccucccaaagugcug

SEQ ID NO: 587090 - RNA, 25 nt, Human
gcucuguugcccaggcuggagugca

SEQ ID NO: 587091 - RNA, 24 nt, Human
gcuuacaggcaugcaccaccaugc

SEQ ID NO: 587092 - RNA, 23 nt, Human
ggagucucgcucuguugcccagg

SEQ ID NO: 587093 - RNA, 24 nt, Human
ggcugguuucaaacuccugaucuc

SEQ ID NO: 587094 - RNA, 24 nt, Human
gugauucuccuaccucagccuccc

SEQ ID NO: 587095 - RNA, 23 nt, Human
uacaggcaugcaccaccaugccc

SEQ ID NO: 587096 - RNA, 27 nt, Human
uaccucagccucccgaauagcugggcu

SEQ ID NO: 587097 - RNA, 22 nt, Human
uagagacagaauuucaccaugu

SEQ ID NO: 587098 - RNA, 24 nt, Human
uaguagagacagaauuucaccaug

SEQ ID NO: 587099 - RNA, 26 nt, Human
uaguagagacagaauuucaccauguu

SEQ ID NO: 587100 - RNA, 24 nt, Human
ucacugcaacuuccgccuccuggg

SEQ ID NO: 587101 - RNA, 25 nt, Human
ucacugcaacuuccgccuccugggu

SEQ ID NO: 587102 - RNA, 27 nt, Human
ucacugcaacuuccgccuccuggguuc

SEQ ID NO: 587103 - RNA, 19 nt, Human
ucagccgucaacacccucc

SEQ ID NO: 587104 - RNA, 20 nt, Human
ucagccucccgaauagcugg

SEQ ID NO: 587105 - RNA, 20 nt, Human
uccacacucuccuuuccuca

SEQ ID NO: 587106 - RNA, 21 nt, Human
uccuggguucaagugauucuc

SEQ ID NO: 587107 - RNA, 23 nt, Human
uccuggguucaagugauucuccu

SEQ ID NO: 587108 - RNA, 24 nt, Human
ucgcucuguugcccaggcuggagu

SEQ ID NO: 587109 - RNA, 26 nt, Human
ucuccuaccucagccucccgaauagc

SEQ ID NO: 587110 - RNA, 19 nt, Human
ucucgcucuguugcccagg

SEQ ID NO: 587111 - RNA, 23 nt, Human
ucucgcucuguugcccaggcugg

SEQ ID NO: 587112 - RNA, 24 nt, Human
ucucgcucuguugcccaggcugga

SEQ ID NO: 587113 - RNA, 26 nt, Human
ucucgcucuguugcccaggcuggagu

SEQ ID NO: 587114 - RNA, 27 nt, Human
ucucgcucuguugcccaggcuggagug

SEQ ID NO: 587115 - RNA, 18 nt, Human
ucuguugcccaggcugga

SEQ ID NO: 587116 - RNA, 24 nt, Human
ucuguugcccaggcuggagugcag

SEQ ID NO: 587117 - RNA, 22 nt, Human
ugagauggagucucgcucuguu

SEQ ID NO: 587118 - RNA, 18 nt, Human
ugaucucaaaugaucugc

SEQ ID NO: 587119 - RNA, 20 nt, Human
ugauucuccuaccucagccu

SEQ ID NO: 587120 - RNA, 22 nt, Human
ugcaguggcaugaucucagcuc

SEQ ID NO: 587121 - RNA, 18 nt, Human
ugcccaggcuggagugca

SEQ ID NO: 587122 - RNA, 21 nt, Human
ugcccaggcuggagugcagug

SEQ ID NO: 587123 - RNA, 22 nt, Human
ugcccaggcuggagugcagugg

SEQ ID NO: 587124 - RNA, 24 nt, Human
ugcccaggcuggagugcaguggca

SEQ ID NO: 587125 - RNA, 18 nt, Human
ugccugccuuggccuccc

SEQ ID NO: 587126 - RNA, 24 nt, Human
uggagucucgcucuguugcccagg

SEQ ID NO: 587127 - RNA, 19 nt, Human
uggagugcaguggcaugau

SEQ ID NO: 587128 - RNA, 24 nt, Human
uggagugcaguggcaugaucucag

SEQ ID NO: 587129 - RNA, 24 nt, Human
uggcaugaucucagcucacugcaa

SEQ ID NO: 587130 - RNA, 24 nt, Human
uggccaggcugguuucaaacuccu

SEQ ID NO: 587131 - RNA, 24 nt, Human
ugggcuuacaggcaugcaccacca

SEQ ID NO: 587132 - RNA, 23 nt, Human
uggguucaagugauucuccuacc

SEQ ID NO: 587133 - RNA, 21 nt, Human
ugugcugcccuuccuggaguc

SEQ ID NO: 587134 - RNA, 24 nt, Human
uuaguagagacagaauuucaccau

SEQ ID NO: 587135 - RNA, 23 nt, Human
uucaagugauucuccuaccucag

SEQ ID NO: 587136 - RNA, 24 nt, Human
uucaagugauucuccuaccucagc

SEQ ID NO: 587137 - RNA, 18 nt, Human
uuggccucccaaagugcu

SEQ ID NO: 587138 - RNA, 24 nt, Human
uuucaccauguuggccaggcuggu

SEQ ID NO: 587139 - RNA, 24 nt, Human
uuuuuaguagagacagaauuucac

SEQ ID NO: 587140 - RNA, 20 nt, Human
uuuuuguauuuuuaguagag

SEQ ID NO: 587141 - RNA, 19 nt, Human
aaggcagaaaaaaacucac

SEQ ID NO: 587142 - RNA, 27 nt, Human
agaaauuaaaugagaauuuaaucaaau

SEQ ID NO: 587143 - RNA, 22 nt, Human
caaaaggaguaaacauacaucu

SEQ ID NO: 587144 - RNA, 24 nt, Human
cagaaaaaaacucacauuuacuca

SEQ ID NO: 587145 - RNA, 25 nt, Human
uacuacuagaaauuaaaugagaagg

SEQ ID NO: 587146 - RNA, 24 nt, Human
uaucauccaucaaaaggaguaaac

SEQ ID NO: 587147 - RNA, 18 nt, Human
uuacaaggcagaaaaaaa

SEQ ID NO: 587148 - RNA, 18 nt, Human
aaaaaaaaaaaagaaaaa

SEQ ID NO: 587149 - RNA, 19 nt, Human
aaaaaaaaaaagaaaaaaa

SEQ ID NO: 587150 - RNA, 22 nt, Human
aaaaaaaaaagaaaaaaaaaag

SEQ ID NO: 587151 - RNA, 22 nt, Human
aaaaaaaagaaaaaaaaaagaa

SEQ ID NO: 587152 - RNA, 24 nt, Human
aaaaaaaagaauguuaucuacagg

SEQ ID NO: 587153 - RNA, 23 nt, Human
aaaacagcuggcacacaccaagc

SEQ ID NO: 587154 - RNA, 18 nt, Human
aaaacaucacucccaaaa

SEQ ID NO: 587155 - RNA, 21 nt, Human
aaaaggagacuggacuuguca

SEQ ID NO: 587156 - RNA, 22 nt, Human
aaacagcuggcacacaccaagc

SEQ ID NO: 587157 - RNA, 18 nt, Human
aaacaucacucccaaaac

SEQ ID NO: 587158 - RNA, 19 nt, Human
aaacaucacucccaaaaca

SEQ ID NO: 587159 - RNA, 21 nt, Human
aaacaucacucccaaaacagc

SEQ ID NO: 587160 - RNA, 22 nt, Human
aaacugauguggccaucauagu

SEQ ID NO: 587161 - RNA, 20 nt, Human
aaagugcugggauuauaggc

SEQ ID NO: 587162 - RNA, 23 nt, Human
aaagugcugggauuauaggcgug

SEQ ID NO: 587163 - RNA, 24 nt, Human
aaagugcugggauuauaggcguga

SEQ ID NO: 587164 - RNA, 22 nt, Human
aacaaggaaaaauugaaaaaaa

SEQ ID NO: 587165 - RNA, 21 nt, Human
aacagcaaagacaaugugacc

SEQ ID NO: 587166 - RNA, 19 nt, Human
aaccaagaaaccuuaacag

SEQ ID NO: 587167 - RNA, 19 nt, Human
aaccuuaacagcaaagaca

SEQ ID NO: 587168 - RNA, 22 nt, Human
aagcauaaccagaacuauauaa

SEQ ID NO: 587169 - RNA, 20 nt, Human
aaggaaaaacaucacuccca

SEQ ID NO: 587170 - RNA, 23 nt, Human
aagugauucuugucucagccucc

SEQ ID NO: 587171 - RNA, 19 nt, Human
aagugcugggauuauaggc

SEQ ID NO: 587172 - RNA, 19 nt, Human
aagugcugggauuauaggc

SEQ ID NO: 587173 - RNA, 26 nt, Human
aagugcugggauuauaggcgugagcc

SEQ ID NO: 587174 - RNA, 19 nt, Human
aaucauauuuacuucucau

SEQ ID NO: 587175 - RNA, 21 nt, Human
accgcaaccuuugccucccgg

SEQ ID NO: 587176 - RNA, 22 nt, Human
accgcaaccuuugccucccggg

SEQ ID NO: 587177 - RNA, 20 nt, Human
acugggcccagccagaaauu

SEQ ID NO: 587178 - RNA, 21 nt, Human
agaaauaaggaaaaacaucac

SEQ ID NO: 587179 - RNA, 23 nt, Human
agagaaauaaggaaaaacaucac

SEQ ID NO: 587180 - RNA, 19 nt, Human
agaugccgaagagcuauag

SEQ ID NO: 587181 - RNA, 21 nt, Human
agaugccgaagagcuauagcc

SEQ ID NO: 587182 - RNA, 20 nt, Human
aggcagagucuugcucugua

SEQ ID NO: 587183 - RNA, 21 nt, Human
aggcgugagccacugggccca

SEQ ID NO: 587184 - RNA, 21 nt, Human
agggacaauggaaagcuuggc

SEQ ID NO: 587185 - RNA, 22 nt, Human
aggguuuugccauguuggccag

SEQ ID NO: 587186 - RNA, 23 nt, Human
aggguuuugccauguuggccagg

SEQ ID NO: 587187 - RNA, 23 nt, Human
aguacaguggcaugcucgcagcu

SEQ ID NO: 587188 - RNA, 23 nt, Human
auaggguuuugccauguuggcca

SEQ ID NO: 587189 - RNA, 24 nt, Human
auaggguuuugccauguuggccag

SEQ ID NO: 587190 - RNA, 28 nt, Human
aucacucccaaaacagcuggcacacacc

SEQ ID NO: 587191 - RNA, 24 nt, Human
auuuuuguauuuuuaguagagaua

SEQ ID NO: 587192 - RNA, 25 nt, Human
caaaacagcuggcacacaccaagcc

SEQ ID NO: 587193 - RNA, 22 nt, Human
caacagagaggaaaagccugaa

SEQ ID NO: 587194 - RNA, 25 nt, Human
caaggaagcaugacuuuaauuuucc

SEQ ID NO: 587195 - RNA, 20 nt, Human
caagugauucuugucucagc

SEQ ID NO: 587196 - RNA, 22 nt, Human
cacagccuuugacaagaacaag

SEQ ID NO: 587197 - RNA, 24 nt, Human
caccacaccugguuaauuuuugua

SEQ ID NO: 587198 - RNA, 26 nt, Human
caccugguuaauuuuuguauuuuuag

SEQ ID NO: 587199 - RNA, 25 nt, Human
cacucccaaaacagcuggcacacug

SEQ ID NO: 587200 - RNA, 21 nt, Human
cacugugguucacuuaaauca

SEQ ID NO: 587201 - RNA, 22 nt, Human
cacuucuaaaagccauccagag

SEQ ID NO: 587202 - RNA, 27 nt, Human
cagaugccgaagagcuauagccagaga

SEQ ID NO: 587203 - RNA, 22 nt, Human
cagccuccugaguagcuacaug

SEQ ID NO: 587204 - RNA, 23 nt, Human
cagcuuaccgcaaccuuugccuc

SEQ ID NO: 587205 - RNA, 20 nt, Human
caggccucaucucagggguc

SEQ ID NO: 587206 - RNA, 18 nt, Human
caguaguaaccuccuugg

SEQ ID NO: 587207 - RNA, 20 nt, Human
caugugccugucaccacacc

SEQ ID NO: 587208 - RNA, 24 nt, Human
cauguuggccaggcuggucucaaa

SEQ ID NO: 587209 - RNA, 22 nt, Human
ccaaaucuggaucacccaauag

SEQ ID NO: 587210 - RNA, 18 nt, Human
ccagggugauggucccuu

SEQ ID NO: 587211 - RNA, 27 nt, Human
ccauccagagagaaagaugcugauugc

SEQ ID NO: 587212 - RNA, 24 nt, Human
ccaucuguaaaccaagaaaccuua

SEQ ID NO: 587213 - RNA, 19 nt, Human
ccauguuggccaggcuggu

SEQ ID NO: 587214 - RNA, 22 nt, Human
ccauguuggccaggcuggucuc

SEQ ID NO: 587215 - RNA, 26 nt, Human
cccaaaacagcuggcacacaccaagc

SEQ ID NO: 587216 - RNA, 19 nt, Human
ccgcaaccuuugccucccg

SEQ ID NO: 587217 - RNA, 23 nt, Human
ccgcaaccuuugccucccggguu

SEQ ID NO: 587218 - RNA, 24 nt, Human
ccgcaaccuuugccucccggguuc

SEQ ID NO: 587219 - RNA, 23 nt, Human
ccuaaagugcugggauuauaggc

SEQ ID NO: 587220 - RNA, 21 nt, Human
ccucccggguucaagugauuc

SEQ ID NO: 587221 - RNA, 20 nt, Human
ccugaccucaaaugauugcc

SEQ ID NO: 587222 - RNA, 23 nt, Human
ccugaccucaaaugauugcccac

SEQ ID NO: 587223 - RNA, 22 nt, Human
cggguucaagugauucuugucu

SEQ ID NO: 587224 - RNA, 24 nt, Human
cuaaagugcugggauuauaggcgu

SEQ ID NO: 587225 - RNA, 21 nt, Human
cuaacuugucugcaacuucac

SEQ ID NO: 587226 - RNA, 21 nt, Human
cuacagguuaauucuugacau

SEQ ID NO: 587227 - RNA, 21 nt, Human
cuauagccagagaggaagggc

SEQ ID NO: 587228 - RNA, 24 nt, Human
cuugucucagccuccugaguagcu

SEQ ID NO: 587229 - RNA, 18 nt, Human
cuuuggaaaauuccaagu

SEQ ID NO: 587230 - RNA, 20 nt, Human
gaaaaaaaaaaaaaagaaaa

SEQ ID NO: 587231 - RNA, 22 nt, Human
gaaaaaaaaaaaaaagaaaaaa

SEQ ID NO: 587232 - RNA, 22 nt, Human
gaauucccaguacagugacugu

SEQ ID NO: 587233 - RNA, 23 nt, Human
gaccucaaaugauugcccaccuu

SEQ ID NO: 587234 - RNA, 24 nt, Human
gagcacuuaacacuuaaacugaug

SEQ ID NO: 587235 - RNA, 19 nt, Human
gauaggguuuugccauguu

SEQ ID NO: 587236 - RNA, 18 nt, Human
gauuauaggcgugagcca

SEQ ID NO: 587237 - RNA, 21 nt, Human
gauuauaggcgugagccacug

SEQ ID NO: 587238 - RNA, 24 nt, Human
gauuauaggcgugagccacugggc

SEQ ID NO: 587239 - RNA, 21 nt, Human
gcaagauuaccaaaaacugac

SEQ ID NO: 587240 - RNA, 20 nt, Human
gccauguuggccaggcuggu

SEQ ID NO: 587241 - RNA, 23 nt, Human
gcucaggcuggaguacaguggca

SEQ ID NO: 587242 - RNA, 24 nt, Human
gcucaggcuggaguacaguggcau

SEQ ID NO: 587243 - RNA, 19 nt, Human
gcuggaguacaguggcaug

SEQ ID NO: 587244 - RNA, 23 nt, Human
gcuggucucaaacuccugaccuc

SEQ ID NO: 587245 - RNA, 23 nt, Human
ggaagggcacugaugcccgcaga

SEQ ID NO: 587246 - RNA, 24 nt, Human
ggcuggucucaaacuccugaccuc

SEQ ID NO: 587247 - RNA, 21 nt, Human
ggguuuugccauguuggccag

SEQ ID NO: 587248 - RNA, 22 nt, Human
ggguuuugccauguuggccagg

SEQ ID NO: 587249 - RNA, 23 nt, Human
guagagauaggguuuugccaugu

SEQ ID NO: 587250 - RNA, 24 nt, Human
gucuugcucuguagcucaggcugg

SEQ ID NO: 587251 - RNA, 21 nt, Human
gugauucuugucucagccucc

SEQ ID NO: 587252 - RNA, 23 nt, Human
guuaauucuugacaucaacagag

SEQ ID NO: 587253 - RNA, 18 nt, Human
uaaaaggagacuggacuu

SEQ ID NO: 587254 - RNA, 21 nt, Human
uaaaaggagacuggacuuguc

SEQ ID NO: 587255 - RNA, 23 nt, Human
uaaagauaauacaaauggcaaga

SEQ ID NO: 587256 - RNA, 24 nt, Human
uaacacuuaaacugauguggccau

SEQ ID NO: 587257 - RNA, 21 nt, Human
uaacaguaacaaaugccuuga

SEQ ID NO: 587258 - RNA, 18 nt, Human
uaauacaaauggcaagau

SEQ ID NO: 587259 - RNA, 24 nt, Human
uaauuuuuguauuuuuaguagaga

SEQ ID NO: 587260 - RNA, 23 nt, Human
uacaaauggcaagauuaccaaaa

SEQ ID NO: 587261 - RNA, 21 nt, Human
uaccgcaaccuuugccucccg

SEQ ID NO: 587262 - RNA, 23 nt, Human
uaccgcaaccuuugccucccggg

SEQ ID NO: 587263 - RNA, 22 nt, Human
uacuuuagcuuccuugggguuc

SEQ ID NO: 587264 - RNA, 19 nt, Human
uagaagggacuacgguggc

SEQ ID NO: 587265 - RNA, 22 nt, Human
uagagauaggguuuugccaugu

SEQ ID NO: 587266 - RNA, 24 nt, Human
uaggguuuugccauguuggccagg

SEQ ID NO: 587267 - RNA, 24 nt, Human
uaguagagauaggguuuugccaug

SEQ ID NO: 587268 - RNA, 19 nt, Human
uaucaaggaagcaugacuu

SEQ ID NO: 587269 - RNA, 28 nt, Human
uaucucaggccucaucucaggggucuaa

SEQ ID NO: 587270 - RNA, 22 nt, Human
ucaaaugauugcccaccuuggc

SEQ ID NO: 587271 - RNA, 18 nt, Human
ucccaguacagugacugu

SEQ ID NO: 587272 - RNA, 20 nt, Human
ucccggguucaagugauucu

SEQ ID NO: 587273 - RNA, 20 nt, Human
ucccggguucaagugauucu

SEQ ID NO: 587274 - RNA, 24 nt, Human
uccuaaagugcugggauuauaggc

SEQ ID NO: 587275 - RNA, 18 nt, Human
uccugaccucaaaugauu

SEQ ID NO: 587276 - RNA, 20 nt, Human
uccugaguagcuacaugugc

SEQ ID NO: 587277 - RNA, 22 nt, Human
ucucaggccucaucucaggggu

SEQ ID NO: 587278 - RNA, 22 nt, Human
ucucauagagagugauaaagau

SEQ ID NO: 587279 - RNA, 19 nt, Human
ucuugcucuguagcucagg

SEQ ID NO: 587280 - RNA, 19 nt, Human
ucuugcucuguagcucagg

SEQ ID NO: 587281 - RNA, 23 nt, Human
ucuugcucuguagcucaggcugg

SEQ ID NO: 587282 - RNA, 24 nt, Human
ucuugcucuguagcucaggcugga

SEQ ID NO: 587283 - RNA, 21 nt, Human
ugaaaaaaaaaaaaaagaaaa

SEQ ID NO: 587284 - RNA, 19 nt, Human
ugacaagaacaaggaaaaa

SEQ ID NO: 587285 - RNA, 22 nt, Human
ugaggacaggccucucacugug

SEQ ID NO: 587286 - RNA, 25 nt, Human
ugaggacaggccucucacugugguu

SEQ ID NO: 587287 - RNA, 19 nt, Human
ugaguaaaccacacuaugg

SEQ ID NO: 587288 - RNA, 20 nt, Human
ugaguaaaccacacuaugga

SEQ ID NO: 587289 - RNA, 23 nt, Human
ugccaugaaagaaaccauggcag

SEQ ID NO: 587290 - RNA, 24 nt, Human
ugccauguuggccaggcuggucuc

SEQ ID NO: 587291 - RNA, 26 nt, Human
ugccauguuggccaggcuggucucaa

SEQ ID NO: 587292 - RNA, 23 nt, Human
ugcucuguagcucaggcuggagu

SEQ ID NO: 587293 - RNA, 22 nt, Human
uggaaagcuuucucuucacugg

SEQ ID NO: 587294 - RNA, 20 nt, Human
uggcaagauuaccaaaaacu

SEQ ID NO: 587295 - RNA, 22 nt, Human
uggcaagauuaccaaaaacuga

SEQ ID NO: 587296 - RNA, 24 nt, Human
uggccaggcuggucucaaacuccu

SEQ ID NO: 587297 - RNA, 18 nt, Human
ugggauuauaggcgugag

SEQ ID NO: 587298 - RNA, 19 nt, Human
ugggauuauaggcgugagc

SEQ ID NO: 587299 - RNA, 21 nt, Human
ugggauuauaggcgugagcca

SEQ ID NO: 587300 - RNA, 22 nt, Human
ugggauuauaggcgugagccac

SEQ ID NO: 587301 - RNA, 22 nt, Human
ugggauuauaggcgugagccac

SEQ ID NO: 587302 - RNA, 24 nt, Human
ugggauuauaggcgugagccacug

SEQ ID NO: 587303 - RNA, 18 nt, Human
ugggcccagccagaaauu

SEQ ID NO: 587304 - RNA, 22 nt, Human
ugggcccagccagaaauucauc

SEQ ID NO: 587305 - RNA, 20 nt, Human
ugucucagccuccugaguag

SEQ ID NO: 587306 - RNA, 23 nt, Human
ugucucagccuccugaguagcua

SEQ ID NO: 587307 - RNA, 22 nt, Human
ugucugcaacuucaccaucugu

SEQ ID NO: 587308 - RNA, 19 nt, Human
ugugaccaaucauucucag

SEQ ID NO: 587309 - RNA, 23 nt, Human
uuaauuuuuguauuuuuaguaga

SEQ ID NO: 587310 - RNA, 24 nt, Human
uuaccgcaaccuuugccucccggg

SEQ ID NO: 587311 - RNA, 25 nt, Human
uuaccgcaaccuuugccucccgggu

SEQ ID NO: 587312 - RNA, 18 nt, Human
uuaguagagauaggguuu

SEQ ID NO: 587313 - RNA, 18 nt, Human
uuaguagagauaggguuu

SEQ ID NO: 587314 - RNA, 24 nt, Human
uuaguagagauaggguuuugccau

SEQ ID NO: 587315 - RNA, 21 nt, Human
uucaagugauucuugucucag

SEQ ID NO: 587316 - RNA, 24 nt, Human
uugccauguuggccaggcuggucu

SEQ ID NO: 587317 - RNA, 23 nt, Human
uugccucccggguucaagugauu

SEQ ID NO: 587318 - RNA, 18 nt, Human
uugcucuguagcucaggc

SEQ ID NO: 587319 - RNA, 27 nt, Human
uuggauggcaguaguaaccuccuugga

SEQ ID NO: 587320 - RNA, 18 nt, Human
uuggccuccuaaagugcu

SEQ ID NO: 587321 - RNA, 18 nt, Human
uuugacaagaacaaggaa

SEQ ID NO: 587322 - RNA, 24 nt, Human
uuuuccaacugcaucuucauccau

SEQ ID NO: 587323 - RNA, 23 nt, Human
uuuugccauguuggccaggcugg

SEQ ID NO: 587324 - RNA, 21 nt, Human
uuuuuaguagagauaggguuu

SEQ ID NO: 587325 - RNA, 21 nt, Human
uuuuuaguagagauaggguuu

SEQ ID NO: 587326 - RNA, 20 nt, Human
uuuuuguauuuuuaguagag

SEQ ID NO: 587327 - RNA, 22 nt, Human
aaaaaggccagacaucgccuuc

SEQ ID NO: 587328 - RNA, 20 nt, Human
aaacggccccccaccggccc

SEQ ID NO: 587329 - RNA, 21 nt, Human
aacaccuccgcagacaaaucu

SEQ ID NO: 587330 - RNA, 24 nt, Human
aacuuauccgucucucccacuguc

SEQ ID NO: 587331 - RNA, 19 nt, Human
aagcagcucuccggcucac

SEQ ID NO: 587332 - RNA, 21 nt, Human
aagcucggggcucuccagcgg

SEQ ID NO: 587333 - RNA, 22 nt, Human
acccuugauucccauuugugcc

SEQ ID NO: 587334 - RNA, 18 nt, Human
accgcagaaaaaaacgca

SEQ ID NO: 587335 - RNA, 23 nt, Human
acuccuucugucuccuccuuccu

SEQ ID NO: 587336 - RNA, 18 nt, Human
agaucagagcuaggagac

SEQ ID NO: 587337 - RNA, 21 nt, Human
agcaagcagcucuccggcuca

SEQ ID NO: 587338 - RNA, 20 nt, Human
agccuggagaucagagcuag

SEQ ID NO: 587339 - RNA, 19 nt, Human
agcugugcaaaaaaggcca

SEQ ID NO: 587340 - RNA, 18 nt, Human
agcugugcccccuccggg

SEQ ID NO: 587341 - RNA, 20 nt, Human
caaacggccccccaccggcc

SEQ ID NO: 587342 - RNA, 21 nt, Human
caacacaggaauuuggggcag

SEQ ID NO: 587343 - RNA, 23 nt, Human
caagcagcucuccggcucacauc

SEQ ID NO: 587344 - RNA, 20 nt, Human
cacaacuccacaggccggga

SEQ ID NO: 587345 - RNA, 22 nt, Human
cacaguucaguccauaacaccu

SEQ ID NO: 587346 - RNA, 29 nt, Human
caccggccccagccccgcugccgguuccg

SEQ ID NO: 587347 - RNA, 19 nt, Human
cagccccgcugcucugcgc

SEQ ID NO: 587348 - RNA, 22 nt, Human
caggcaacagcagcugugcaaa

SEQ ID NO: 587349 - RNA, 23 nt, Human
caggcaacagcagcugugcaaaa

SEQ ID NO: 587350 - RNA, 19 nt, Human
caggugaaugcuauaugaa

SEQ ID NO: 587351 - RNA, 19 nt, Human
ccacacauucaucagcccc

SEQ ID NO: 587352 - RNA, 20 nt, Human
ccagccccgcugcucugcgc

SEQ ID NO: 587353 - RNA, 27 nt, Human
ccagcgguguuuuuagcugugcccccu

SEQ ID NO: 587354 - RNA, 21 nt, Human
ccagggccuggccgccucggu

SEQ ID NO: 587355 - RNA, 18 nt, Human
cccaaacggccccccacc

SEQ ID NO: 587356 - RNA, 23 nt, Human
cccaaacggccccccaccggccc

SEQ ID NO: 587357 - RNA, 22 nt, Human
cccacacauucaucagcccccu

SEQ ID NO: 587358 - RNA, 21 nt, Human
cccacuccuugccauugucgc

SEQ ID NO: 587359 - RNA, 19 nt, Human
ccccaccggccccagcccc

SEQ ID NO: 587360 - RNA, 24 nt, Human
cccccacacauucaucagcccccu

SEQ ID NO: 587361 - RNA, 23 nt, Human
cccccuauuggacaaagucuuau

SEQ ID NO: 587362 - RNA, 21 nt, Human
cccccuccggggcuccugggc

SEQ ID NO: 587363 - RNA, 22 nt, Human
cccggccccgguaaagaaugcg

SEQ ID NO: 587364 - RNA, 23 nt, Human
cccgggccgggagucccacuccu

SEQ ID NO: 587365 - RNA, 21 nt, Human
ccgcugcucugcgcugcaggg

SEQ ID NO: 587366 - RNA, 20 nt, Human
ccgucucucccacuguccca

SEQ ID NO: 587367 - RNA, 18 nt, Human
ccuaaaagccuuaucucc

SEQ ID NO: 587368 - RNA, 24 nt, Human
ccuaaggccacugucggugaaggg

SEQ ID NO: 587369 - RNA, 23 nt, Human
ccucccacaacuccacaggccgg

SEQ ID NO: 587370 - RNA, 19 nt, Human
ccuccgcagacaaaucuga

SEQ ID NO: 587371 - RNA, 26 nt, Human
ccucugcgcggaaucacagggguugg

SEQ ID NO: 587372 - RNA, 23 nt, Human
ccuucaacacaggaauuuggggc

SEQ ID NO: 587373 - RNA, 21 nt, Human
cgaucuccgggcaggcaacag

SEQ ID NO: 587374 - RNA, 19 nt, Human
cgcacucaaggggccccag

SEQ ID NO: 587375 - RNA, 18 nt, Human
cgcugcucugcgcugcag

SEQ ID NO: 587376 - RNA, 19 nt, Human
cucaugcaucccugggcuc

SEQ ID NO: 587377 - RNA, 18 nt, Human
cuccggggcuccugggcg

SEQ ID NO: 587378 - RNA, 24 nt, Human
cuccuucugucuccuccuuccucc

SEQ ID NO: 587379 - RNA, 20 nt, Human
cucugcgcugcagccucccc

SEQ ID NO: 587380 - RNA, 19 nt, Human
cuguggccccugggguugg

SEQ ID NO: 587381 - RNA, 20 nt, Human
gaagggggucuucccucacc

SEQ ID NO: 587382 - RNA, 18 nt, Human
gagcucuggaccgaaaac

SEQ ID NO: 587383 - RNA, 18 nt, Human
gccacccucucaugcauc

SEQ ID NO: 587384 - RNA, 18 nt, Human
gccuuaucuccaaauaca

SEQ ID NO: 587385 - RNA, 18 nt, Human
ggaaucacagggguagcc

SEQ ID NO: 587386 - RNA, 22 nt, Human
ggcccgggugggugaauucugg

SEQ ID NO: 587387 - RNA, 19 nt, Human
ggccgggagucccacuccu

SEQ ID NO: 587388 - RNA, 19 nt, Human
ggguccgggacaggccugg

SEQ ID NO: 587389 - RNA, 19 nt, Human
guucagggcaggacuucuc

SEQ ID NO: 587390 - RNA, 19 nt, Human
uacagucacauggggguua

SEQ ID NO: 587391 - RNA, 21 nt, Human
uagccgccaccccggccccgg

SEQ ID NO: 587392 - RNA, 18 nt, Human
uagccgggacgcaggcgg

SEQ ID NO: 587393 - RNA, 18 nt, Human
uaggagacgcagagccac

SEQ ID NO: 587394 - RNA, 18 nt, Human
uaggccuucaacacagga

SEQ ID NO: 587395 - RNA, 22 nt, Human
uaggccuucaacacaggaauuu

SEQ ID NO: 587396 - RNA, 18 nt, Human
ucaguccauaacaccucc

SEQ ID NO: 587397 - RNA, 18 nt, Human
ucccaaacggccccccac

SEQ ID NO: 587398 - RNA, 20 nt, Human
ucccacuccuugccauuguc

SEQ ID NO: 587399 - RNA, 19 nt, Human
ucccagaggcaggagccac

SEQ ID NO: 587400 - RNA, 21 nt, Human
ucccagaggcaggagccaccc

SEQ ID NO: 587401 - RNA, 23 nt, Human
ucccaguucccagaggcaggagc

SEQ ID NO: 587402 - RNA, 19 nt, Human
ucccccgccgcggugagag

SEQ ID NO: 587403 - RNA, 23 nt, Human
uccgcagacaaaucugaucucug

SEQ ID NO: 587404 - RNA, 18 nt, Human
uccucccacaacuccaca

SEQ ID NO: 587405 - RNA, 20 nt, Human
uccuucugucuccuccuucc

SEQ ID NO: 587406 - RNA, 22 nt, Human
uccuucugucuccuccuuccuc

SEQ ID NO: 587407 - RNA, 24 nt, Human
uccuucugucuccuccuuccuccc

SEQ ID NO: 587408 - RNA, 19 nt, Human
ucggggcucuccagcggug

SEQ ID NO: 587409 - RNA, 21 nt, Human
ucuagccgggacgcaggcggc

SEQ ID NO: 587410 - RNA, 23 nt, Human
ucuccagcgguguuuuuagcugu

SEQ ID NO: 587411 - RNA, 18 nt, Human
ucugucuccuccuuccuc

SEQ ID NO: 587412 - RNA, 19 nt, Human
ugaaugcuauaugaauggg

SEQ ID NO: 587413 - RNA, 19 nt, Human
ugauuuccguccaggucuc

SEQ ID NO: 587414 - RNA, 23 nt, Human
ugcagccuccccgggacgcgggu

SEQ ID NO: 587415 - RNA, 22 nt, Human
ugcgagggacgcacguggcugg

SEQ ID NO: 587416 - RNA, 25 nt, Human
uggagaucagagcuaggagacgcag

SEQ ID NO: 587417 - RNA, 24 nt, Human
uggccccugggguuggcgaacccc

SEQ ID NO: 587418 - RNA, 24 nt, Human
uguaggaggaccuguggccccugg

SEQ ID NO: 587419 - RNA, 18 nt, Human
ugugccucgugugcauuu

SEQ ID NO: 587420 - RNA, 18 nt, Human
aaacccagcaaucuggga

SEQ ID NO: 587421 - RNA, 22 nt, Human
aaagagaaaacagugaacuuaa

SEQ ID NO: 587422 - RNA, 19 nt, Human
aaagugcaagggaaggcug

SEQ ID NO: 587423 - RNA, 24 nt, Human
aaagugcugggauuacagguguga

SEQ ID NO: 587424 - RNA, 18 nt, Human
aacauggugaaaccccau

SEQ ID NO: 587425 - RNA, 19 nt, Human
aacauggugaaaccccauc

SEQ ID NO: 587426 - RNA, 22 nt, Human
aacauggugaaaccccaucccc

SEQ ID NO: 587427 - RNA, 27 nt, Human
aagcgauucuccugccucagcauccca

SEQ ID NO: 587428 - RNA, 20 nt, Human
aagggguuucaccauguugg

SEQ ID NO: 587429 - RNA, 21 nt, Human
aagggguuucaccauguuggu

SEQ ID NO: 587430 - RNA, 18 nt, Human
aagugcugggauuacagg

SEQ ID NO: 587431 - RNA, 19 nt, Human
aagugcugggauuacaggu

SEQ ID NO: 587432 - RNA, 26 nt, Human
aagugcugggauuacaggugugagcc

SEQ ID NO: 587433 - RNA, 24 nt, Human
accauguuggucaggcuggucuag

SEQ ID NO: 587434 - RNA, 23 nt, Human
acccugugaacccugugaaauga

SEQ ID NO: 587435 - RNA, 24 nt, Human
accugaggucaggaguuugagacc

SEQ ID NO: 587436 - RNA, 20 nt, Human
acggcacuccagccuggggg

SEQ ID NO: 587437 - RNA, 24 nt, Human
acggcacuccagccugggggacgg

SEQ ID NO: 587438 - RNA, 22 nt, Human
acuccagccugggggacgguga

SEQ ID NO: 587439 - RNA, 23 nt, Human
agaaaacagugaacuuaaccccc

SEQ ID NO: 587440 - RNA, 21 nt, Human
agauaaacacagaagucacca

SEQ ID NO: 587441 - RNA, 22 nt, Human
agaucaccugaggucaggaguu

SEQ ID NO: 587442 - RNA, 22 nt, Human
agccuggccaacauggugaaac

SEQ ID NO: 587443 - RNA, 24 nt, Human
agccuggccaacauggugaaaccc

SEQ ID NO: 587444 - RNA, 22 nt, Human
agccugggggacggugagacuc

SEQ ID NO: 587445 - RNA, 23 nt, Human
agcuggguguggugacaggugcc

SEQ ID NO: 587446 - RNA, 23 nt, Human
agcuuccugugcuaguggcaagu

SEQ ID NO: 587447 - RNA, 20 nt, Human
aggaguuugagaccagccug

SEQ ID NO: 587448 - RNA, 26 nt, Human
aggcagaucaccugaggucaggaguu

SEQ ID NO: 587449 - RNA, 18 nt, Human
aggcagcaggugcaggca

SEQ ID NO: 587450 - RNA, 18 nt, Human
aggcaggagaauagccug

SEQ ID NO: 587451 - RNA, 24 nt, Human
aggcaggagaauagccugaacccg

SEQ ID NO: 587452 - RNA, 26 nt, Human
aggcaggcagaucaccugaggucagg

SEQ ID NO: 587453 - RNA, 20 nt, Human
aggcugaggcaggagaauag

SEQ ID NO: 587454 - RNA, 20 nt, Human
agguggagguugcagugagc

SEQ ID NO: 587455 - RNA, 24 nt, Human
agguggagguugcagugagcugag

SEQ ID NO: 587456 - RNA, 24 nt, Human
agugcaauggcaucaucuuggcuc

SEQ ID NO: 587457 - RNA, 20 nt, Human
agugcugggauuacaggugu

SEQ ID NO: 587458 - RNA, 24 nt, Human
aguuacaggcaugcaccaccaugc

SEQ ID NO: 587459 - RNA, 24 nt, Human
aucacgccacggcacuccagccug

SEQ ID NO: 587460 - RNA, 24 nt, Human
caaagugcugggauuacaggugug

SEQ ID NO: 587461 - RNA, 24 nt, Human
caacaacugaagaaugaaugauac

SEQ ID NO: 587462 - RNA, 18 nt, Human
caacauggugaaacccca

SEQ ID NO: 587463 - RNA, 22 nt, Human
caagcgauucuccugccucagc

SEQ ID NO: 587464 - RNA, 26 nt, Human
caaggcacacauucugacauuaacuu

SEQ ID NO: 587465 - RNA, 24 nt, Human
caaggcaggcagaucaccugaggu

SEQ ID NO: 587466 - RNA, 26 nt, Human
caaggcaggcagaucaccugagguca

SEQ ID NO: 587467 - RNA, 21 nt, Human
cacacuccugcagauaaacac

SEQ ID NO: 587468 - RNA, 22 nt, Human
caccaccaugccuggcuaauuu

SEQ ID NO: 587469 - RNA, 21 nt, Human
caccauguuggucaggcuggu

SEQ ID NO: 587470 - RNA, 22 nt, Human
caccauguuggucaggcugguc

SEQ ID NO: 587471 - RNA, 23 nt, Human
cacccacccuggugucccaaagu

SEQ ID NO: 587472 - RNA, 23 nt, Human
caccugaggucaggaguuugaga

SEQ ID NO: 587473 - RNA, 22 nt, Human
cacggcacuccagccuggggga

SEQ ID NO: 587474 - RNA, 23 nt, Human
cacggcacuccagccugggggac

SEQ ID NO: 587475 - RNA, 21 nt, Human
cacuccagccugggggacggu

SEQ ID NO: 587476 - RNA, 23 nt, Human
cagauaaacacagaagucaccau

SEQ ID NO: 587477 - RNA, 24 nt, Human
cagaucaccugaggucaggaguuu

SEQ ID NO: 587478 - RNA, 27 nt, Human
cagaucaccugaggucaggaguuugag

SEQ ID NO: 587479 - RNA, 24 nt, Human
cagcuacucgggaggcugaggcag

SEQ ID NO: 587480 - RNA, 24 nt, Human
caggcagaucaccugaggucagga

SEQ ID NO: 587481 - RNA, 25 nt, Human
caggugauccacccacccccugaag

SEQ ID NO: 587482 - RNA, 23 nt, Human
cauagaaagagaaaacagugaac

SEQ ID NO: 587483 - RNA, 21 nt, Human
ccaaagugcugggauuacagg

SEQ ID NO: 587484 - RNA, 21 nt, Human
ccaaagugcugggauuacagg

SEQ ID NO: 587485 - RNA, 24 nt, Human
ccaaagugcugggauuacaggugu

SEQ ID NO: 587486 - RNA, 24 nt, Human
ccaaguaucuggaguuacaggcau

SEQ ID NO: 587487 - RNA, 20 nt, Human
ccacggcacuccagccuggg

SEQ ID NO: 587488 - RNA, 24 nt, Human
ccacggcacuccagccugggggac

SEQ ID NO: 587489 - RNA, 22 nt, Human
ccauaccacaacuauucuccua

SEQ ID NO: 587490 - RNA, 21 nt, Human
cccauccccacuaaaaauaca

SEQ ID NO: 587491 - RNA, 21 nt, Human
cccgggagguggagguugcag

SEQ ID NO: 587492 - RNA, 18 nt, Human
cccuggugucccaaagug

SEQ ID NO: 587493 - RNA, 20 nt, Human
cccuuccccucuuucaguuc

SEQ ID NO: 587494 - RNA, 18 nt, Human
ccgcgccgccgccgcugc

SEQ ID NO: 587495 - RNA, 25 nt, Human
ccgcgccgccgccgcugccgcuucu

SEQ ID NO: 587496 - RNA, 21 nt, Human
ccucaggugauccacccaccc

SEQ ID NO: 587497 - RNA, 24 nt, Human
ccugaccucaggugauccacccac

SEQ ID NO: 587498 - RNA, 22 nt, Human
ccugaggucaggaguuugagac

SEQ ID NO: 587499 - RNA, 23 nt, Human
ccuggccaacauggugaaacccc

SEQ ID NO: 587500 - RNA, 24 nt, Human
ccuggccaacauggugaaacccca

SEQ ID NO: 587501 - RNA, 21 nt, Human
ccuguaaucccagcuacucgg

SEQ ID NO: 587502 - RNA, 22 nt, Human
ccuguaaucccagcuacucggg

SEQ ID NO: 587503 - RNA, 23 nt, Human
cgccacggcacuccagccugggg

SEQ ID NO: 587504 - RNA, 18 nt, Human
cgccgccgccgcugccgc

SEQ ID NO: 587505 - RNA, 21 nt, Human
cgccgccgccgcugccgcuuc

SEQ ID NO: 587506 - RNA, 21 nt, Human
cgccgcgccgccgccgcugcc

SEQ ID NO: 587507 - RNA, 22 nt, Human
cgccgcgccgccgccgcugccg

SEQ ID NO: 587508 - RNA, 29 nt, Human
cgggagguggagguugcagugacaacggu

SEQ ID NO: 587509 - RNA, 24 nt, Human
cgggagguggagguugcagugagc

SEQ ID NO: 587510 - RNA, 23 nt, Human
cguagagaagggguuucaccaug

SEQ ID NO: 587511 - RNA, 23 nt, Human
cucaugccuguaaacccagcaau

SEQ ID NO: 587512 - RNA, 21 nt, Human
cuccccgggccggugccugcg

SEQ ID NO: 587513 - RNA, 23 nt, Human
cucccuuccccucuuucaguucu

SEQ ID NO: 587514 - RNA, 23 nt, Human
cucucuuguugcccaggcuggag

SEQ ID NO: 587515 - RNA, 18 nt, Human
cucuuguugcccaggcug

SEQ ID NO: 587516 - RNA, 24 nt, Human
cugaacccgggagguggagguugc

SEQ ID NO: 587517 - RNA, 19 nt, Human
cugcagauaaacacagaag

SEQ ID NO: 587518 - RNA, 23 nt, Human
cuggccaacauggugaaacccca

SEQ ID NO: 587519 - RNA, 22 nt, Human
cugugcuaguggcaagucagau

SEQ ID NO: 587520 - RNA, 24 nt, Human
cuucucucuuguugcccaggcugg

SEQ ID NO: 587521 - RNA, 24 nt, Human
cuuguugcccaggcuggagugcaa

SEQ ID NO: 587522 - RNA, 19 nt, Human
gaagggguuucaccauguu

SEQ ID NO: 587523 - RNA, 22 nt, Human
gaagggguuucaccauguuggu

SEQ ID NO: 587524 - RNA, 22 nt, Human
gaccucaggugauccacccacc

SEQ ID NO: 587525 - RNA, 24 nt, Human
gagaagggguuucaccauguuggu

SEQ ID NO: 587526 - RNA, 22 nt, Human
gagguugcagugagcugagauc

SEQ ID NO: 587527 - RNA, 24 nt, Human
gaucaccugaggucaggaguuuga

SEQ ID NO: 587528 - RNA, 19 nt, Human
gaugcaaggaaaauccaga

SEQ ID NO: 587529 - RNA, 18 nt, Human
gauuacaggugugagcca

SEQ ID NO: 587530 - RNA, 22 nt, Human
gauuacaggugugagccacugc

SEQ ID NO: 587531 - RNA, 22 nt, Human
gauuacaggugugagccacugc

SEQ ID NO: 587532 - RNA, 28 nt, Human
gcaagggaaggcugggcgugguggcuca

SEQ ID NO: 587533 - RNA, 20 nt, Human
gcaccaccaugccuggcuaa

SEQ ID NO: 587534 - RNA, 22 nt, Human
gccaacauggugaaaccccauc

SEQ ID NO: 587535 - RNA, 24 nt, Human
gcccaggcuggagugcaauggcau

SEQ ID NO: 587536 - RNA, 20 nt, Human
gccugaacccgggaggugga

SEQ ID NO: 587537 - RNA, 22 nt, Human
gccugaacccgggagguggagg

SEQ ID NO: 587538 - RNA, 20 nt, Human
gcuggagugcaauggcauca

SEQ ID NO: 587539 - RNA, 19 nt, Human
gcugggcgugguggcucau

SEQ ID NO: 587540 - RNA, 23 nt, Human
gcuggucuagaacuccugaccuc

SEQ ID NO: 587541 - RNA, 23 nt, Human
ggaaggcugggcgugguggcuca

SEQ ID NO: 587542 - RNA, 22 nt, Human
ggagguugcagugagcugagau

SEQ ID NO: 587543 - RNA, 23 nt, Human
ggagguugcagugagcugagauc

SEQ ID NO: 587544 - RNA, 24 nt, Human
ggagguugcagugagcugagauca

SEQ ID NO: 587545 - RNA, 23 nt, Human
ggcugggcgugguggcucaugcc

SEQ ID NO: 587546 - RNA, 24 nt, Human
ggcuggucuagaacuccugaccuc

SEQ ID NO: 587547 - RNA, 24 nt, Human
gggcgugguggcucaugccuguaa

SEQ ID NO: 587548 - RNA, 22 nt, Human
gggguuucaccauguuggucag

SEQ ID NO: 587549 - RNA, 23 nt, Human
gggguuucaccauguuggucagg

SEQ ID NO: 587550 - RNA, 24 nt, Human
ggguguggugacaggugccuguaa

SEQ ID NO: 587551 - RNA, 22 nt, Human
ggguuucaccauguuggucagg

SEQ ID NO: 587552 - RNA, 19 nt, Human
ggucaggaguuugagacca

SEQ ID NO: 587553 - RNA, 22 nt, Human
ggugaaaccccauccccacuaa

SEQ ID NO: 587554 - RNA, 24 nt, Human
ggugacaggugccuguaaucccag

SEQ ID NO: 587555 - RNA, 19 nt, Human
gguggagguugcagugagc

SEQ ID NO: 587556 - RNA, 24 nt, Human
gguggcucaugccuguaaacccag

SEQ ID NO: 587557 - RNA, 20 nt, Human
guggagguugcagugagcug

SEQ ID NO: 587558 - RNA, 19 nt, Human
guugcagugagcugagauc

SEQ ID NO: 587559 - RNA, 25 nt, Human
uaaacccagcaaucugggaggccaa

SEQ ID NO: 587560 - RNA, 22 nt, Human
uacaggcaugcaccaccaugcc

SEQ ID NO: 587561 - RNA, 22 nt, Human
uacaggugugagccacugcgcc

SEQ ID NO: 587562 - RNA, 22 nt, Human
uacaggugugagccacugcgcc

SEQ ID NO: 587563 - RNA, 23 nt, Human
uacaggugugagccacugcgccu

SEQ ID NO: 587564 - RNA, 20 nt, Human
uaccacaacuauucuccuag

SEQ ID NO: 587565 - RNA, 19 nt, Human
uaccauagaaagagaaaac

SEQ ID NO: 587566 - RNA, 21 nt, Human
uagagaagggguuucaccaug

SEQ ID NO: 587567 - RNA, 22 nt, Human
uagagaagggguuucaccaugu

SEQ ID NO: 587568 - RNA, 24 nt, Human
uagccugaacccgggagguggagg

SEQ ID NO: 587569 - RNA, 24 nt, Human
uauaaagcaagaauuucaaggcac

SEQ ID NO: 587570 - RNA, 22 nt, Human
uauaaagcuugcagaccuauuu

SEQ ID NO: 587571 - RNA, 19 nt, Human
ucaccugaggucaggaguu

SEQ ID NO: 587572 - RNA, 23 nt, Human
ucacgccacggcacuccagccug

SEQ ID NO: 587573 - RNA, 24 nt, Human
uccaaauaacacuccuaaaucaac

SEQ ID NO: 587574 - RNA, 27 nt, Human
uccacuguuaaggcagcaggugcaggc

SEQ ID NO: 587575 - RNA, 21 nt, Human
uccagaguaaaaauaaaaaac

SEQ ID NO: 587576 - RNA, 23 nt, Human
ucccaaagugcugggauuacagg

SEQ ID NO: 587577 - RNA, 18 nt, Human
ucguccugagcuuccugu

SEQ ID NO: 587578 - RNA, 21 nt, Human
ucucauauucaagcgauucuc

SEQ ID NO: 587579 - RNA, 22 nt, Human
ucucauauucaagcgauucucc

SEQ ID NO: 587580 - RNA, 24 nt, Human
ucucauauucaagcgauucuccug

SEQ ID NO: 587581 - RNA, 22 nt, Human
ucucucuuguugcccaggcugg

SEQ ID NO: 587582 - RNA, 23 nt, Human
ucucucuuguugcccaggcugga

SEQ ID NO: 587583 - RNA, 23 nt, Human
ucucuuguugcccaggcuggagu

SEQ ID NO: 587584 - RNA, 24 nt, Human
ucucuuguugcccaggcuggagug

SEQ ID NO: 587585 - RNA, 22 nt, Human
ucuuguugcccaggcuggagug

SEQ ID NO: 587586 - RNA, 19 nt, Human
ugaaaccccauccccacua

SEQ ID NO: 587587 - RNA, 22 nt, Human
ugaaaccccauccccacuaaaa

SEQ ID NO: 587588 - RNA, 22 nt, Human
ugaaaugaaaaugacagaugua

SEQ ID NO: 587589 - RNA, 22 nt, Human
ugacaggugccuguaaucccag

SEQ ID NO: 587590 - RNA, 21 nt, Human
ugaccucaggugauccaccca

SEQ ID NO: 587591 - RNA, 24 nt, Human
ugaccucaggugauccacccaccc

SEQ ID NO: 587592 - RNA, 25 nt, Human
ugaccucaggugauccacccacccu

SEQ ID NO: 587593 - RNA, 23 nt, Human
ugagaccagccuggccaacaugg

SEQ ID NO: 587594 - RNA, 24 nt, Human
ugagaccagccuggccaacauggu

SEQ ID NO: 587595 - RNA, 24 nt, Human
ugagaucacgccacggcacuccag

SEQ ID NO: 587596 - RNA, 22 nt, Human
ugagcugagaucacgccacggc

SEQ ID NO: 587597 - RNA, 20 nt, Human
ugaggcaggagaauagccug

SEQ ID NO: 587598 - RNA, 24 nt, Human
ugaggcaggagaauagccugaacc

SEQ ID NO: 587599 - RNA, 25 nt, Human
ugaggcaggagaauagccugaaccc

SEQ ID NO: 587600 - RNA, 18 nt, Human
ugaggucaggaguuugag

SEQ ID NO: 587601 - RNA, 18 nt, Human
ugcaaggaaaauccagag

SEQ ID NO: 587602 - RNA, 24 nt, Human
ugcaagggaaggcugggcguggug

SEQ ID NO: 587603 - RNA, 18 nt, Human
ugcccaggcuggagugca

SEQ ID NO: 587604 - RNA, 21 nt, Human
ugcccaggcuggagugcaaug

SEQ ID NO: 587605 - RNA, 24 nt, Human
ugcccaggcuggagugcaauggca

SEQ ID NO: 587606 - RNA, 24 nt, Human
ugccucagcaucccaaguaucugg

SEQ ID NO: 587607 - RNA, 23 nt, Human
ugccuguaaucccagcuacucgg

SEQ ID NO: 587608 - RNA, 24 nt, Human
ugccuguaaucccagcuacucggg

SEQ ID NO: 587609 - RNA, 26 nt, Human
ugcgccgcgccgccgccgcugccgcu

SEQ ID NO: 587610 - RNA, 24 nt, Human
ugcugggauuacaggugugagcca

SEQ ID NO: 587611 - RNA, 23 nt, Human
uggagugcaauggcaucaucuug

SEQ ID NO: 587612 - RNA, 24 nt, Human
uggagugcaauggcaucaucuugg

SEQ ID NO: 587613 - RNA, 24 nt, Human
uggaguuacaggcaugcaccacca

SEQ ID NO: 587614 - RNA, 24 nt, Human
uggccaacauggugaaaccccauc

SEQ ID NO: 587615 - RNA, 21 nt, Human
uggcucaugccuguaaaccca

SEQ ID NO: 587616 - RNA, 24 nt, Human
uggcucaugccuguaaacccagca

SEQ ID NO: 587617 - RNA, 24 nt, Human
ugggaggccaaggcaggcagauca

SEQ ID NO: 587618 - RNA, 18 nt, Human
ugggauuacaggugugag

SEQ ID NO: 587619 - RNA, 19 nt, Human
ugggauuacaggugugagc

SEQ ID NO: 587620 - RNA, 21 nt, Human
ugggauuacaggugugagcca

SEQ ID NO: 587621 - RNA, 22 nt, Human
ugggauuacaggugugagccac

SEQ ID NO: 587622 - RNA, 22 nt, Human
ugggauuacaggugugagccac

SEQ ID NO: 587623 - RNA, 24 nt, Human
ugggauuacaggugugagccacug

SEQ ID NO: 587624 - RNA, 24 nt, Human
uggucaggcuggucuagaacuccu

SEQ ID NO: 587625 - RNA, 23 nt, Human
uggucuagaacuccugaccucag

SEQ ID NO: 587626 - RNA, 24 nt, Human
uggugacaggugccuguaauccca

SEQ ID NO: 587627 - RNA, 24 nt, Human
ugguggcucaugccuguaaaccca

SEQ ID NO: 587628 - RNA, 20 nt, Human
uguugcccaggcuggagugc

SEQ ID NO: 587629 - RNA, 24 nt, Human
uuagcuggguguggugacaggugc

SEQ ID NO: 587630 - RNA, 21 nt, Human
uucaagcgauucuccugccuc

SEQ ID NO: 587631 - RNA, 23 nt, Human
uucaagcgauucuccugccucag

SEQ ID NO: 587632 - RNA, 24 nt, Human
uucaagcgauucuccugccucagc

SEQ ID NO: 587633 - RNA, 24 nt, Human
uucucucuuguugcccaggcugga

SEQ ID NO: 587634 - RNA, 18 nt, Human
uugcagugagcugagauc

SEQ ID NO: 587635 - RNA, 20 nt, Human
uugcagugagcugagaucac

SEQ ID NO: 587636 - RNA, 21 nt, Human
uugcagugagcugagaucacg

SEQ ID NO: 587637 - RNA, 19 nt, Human
uuggcuccgccucucauau

SEQ ID NO: 587638 - RNA, 24 nt, Human
uuucaccauguuggucaggcuggu

SEQ ID NO: 587639 - RNA, 25 nt, Human
uuuuguauuuuuuuauacguagaga

SEQ ID NO: 587640 - RNA, 18 nt, Human
aagagaaaaaaaaaaacc

SEQ ID NO: 587641 - RNA, 22 nt, Human
aagcccggacugagcgugcuag

SEQ ID NO: 587642 - RNA, 21 nt, Human
aauguuacauguaaaacacaa

SEQ ID NO: 587643 - RNA, 24 nt, Human
caacugccaaaucuguaugaaaau

SEQ ID NO: 587644 - RNA, 18 nt, Human
cacagaucauggaccaua

SEQ ID NO: 587645 - RNA, 19 nt, Human
caccaccgccgccgccgcc

SEQ ID NO: 587646 - RNA, 20 nt, Human
caccgccgccgccgccgccg

SEQ ID NO: 587647 - RNA, 24 nt, Human
cauaaagugaauaauuacuuuuga

SEQ ID NO: 587648 - RNA, 19 nt, Human
ccaagcccggacugagcgu

SEQ ID NO: 587649 - RNA, 19 nt, Human
ccaccgccgccgccgccgc

SEQ ID NO: 587650 - RNA, 24 nt, Human
ccaccgccgccgccgccgccgccc

SEQ ID NO: 587651 - RNA, 20 nt, Human
cccccucuaccuccuucucc

SEQ ID NO: 587652 - RNA, 18 nt, Human
ccccucuaccuccuucuc

SEQ ID NO: 587653 - RNA, 20 nt, Human
ccgccaccaccgccgccgcc

SEQ ID NO: 587654 - RNA, 24 nt, Human
ccgccaccaccgccgccgccgccg

SEQ ID NO: 587655 - RNA, 23 nt, Human
ccgccgccgccgcccccucuacc

SEQ ID NO: 587656 - RNA, 18 nt, Human
ccgccgccgccgccgccg

SEQ ID NO: 587657 - RNA, 25 nt, Human
ccucuaccuccuucuccgccgcggg

SEQ ID NO: 587658 - RNA, 20 nt, Human
gagaaaaaaaaaaaccucau

SEQ ID NO: 587659 - RNA, 21 nt, Human
gccccaagcccggacugagcg

SEQ ID NO: 587660 - RNA, 20 nt, Human
uaaaacacaauuaaaaucag

SEQ ID NO: 587661 - RNA, 24 nt, Human
uaaaacuuaccccaacagaaacuu

SEQ ID NO: 587662 - RNA, 22 nt, Human
uaaaacuuaccccaacagagga

SEQ ID NO: 587663 - RNA, 24 nt, Human
uaccuccuucuccgccgcggggcc

SEQ ID NO: 587664 - RNA, 24 nt, Human
uccuucuccgccgcggggccccaa

SEQ ID NO: 587665 - RNA, 21 nt, Human
ugccuaagagaaaaaaaaaaa

SEQ ID NO: 587666 - RNA, 22 nt, Human
ugccuaagagaaaaaaaaaaac

SEQ ID NO: 587667 - RNA, 19 nt, Human
uggaaaaaaagaucuacau

SEQ ID NO: 587668 - RNA, 19 nt, Human
ugguuuggcuucuuuaucc

SEQ ID NO: 587669 - RNA, 23 nt, Human
uguaaugauggaaaaaaagaucu

SEQ ID NO: 587670 - RNA, 22 nt, Human
uguaaugauuugcguuugaauc

SEQ ID NO: 587671 - RNA, 25 nt, Human
uugaaguagacauugauauacuuau

SEQ ID NO: 587672 - RNA, 23 nt, Human
uuguaaugauggaaaaaaagauc

SEQ ID NO: 587673 - RNA, 19 nt, Human
aagcagcaggcccaugcgc

SEQ ID NO: 587674 - RNA, 20 nt, Human
acaggcgggacaagcagcag

SEQ ID NO: 587675 - RNA, 26 nt, Human
acccgcaacagggggagccccuccug

SEQ ID NO: 587676 - RNA, 24 nt, Human
agaagcugcaggcguggggggagg

SEQ ID NO: 587677 - RNA, 20 nt, Human
agauaccaccgcacggaaug

SEQ ID NO: 587678 - RNA, 23 nt, Human
aggcgggcgccgggccucccaag

SEQ ID NO: 587679 - RNA, 21 nt, Human
agggacgaggggaggcccggg

SEQ ID NO: 587680 - RNA, 24 nt, Human
agggauggagcuggagugggcagg

SEQ ID NO: 587681 - RNA, 20 nt, Human
agggcuggggugaggggggu

SEQ ID NO: 587682 - RNA, 23 nt, Human
agggcuggggugaggggggugug

SEQ ID NO: 587683 - RNA, 21 nt, Human
aggggcugugggagagacagg

SEQ ID NO: 587684 - RNA, 24 nt, Human
augcgcagggcuggggugaggggg

SEQ ID NO: 587685 - RNA, 22 nt, Human
caggcccagccuccagggcuca

SEQ ID NO: 587686 - RNA, 24 nt, Human
caucugaaaauagagagcagccgc

SEQ ID NO: 587687 - RNA, 20 nt, Human
ccaggccacugagucuaugg

SEQ ID NO: 587688 - RNA, 21 nt, Human
cccccuugggaggcgccgcuc

SEQ ID NO: 587689 - RNA, 22 nt, Human
ccccucgcgagaagcugcaggc

SEQ ID NO: 587690 - RNA, 22 nt, Human
cccgcaacagggggagccccuc

SEQ ID NO: 587691 - RNA, 23 nt, Human
cccgcgagccggucccgccgccu

SEQ ID NO: 587692 - RNA, 22 nt, Human
ccggggcggggucggccgugcc

SEQ ID NO: 587693 - RNA, 18 nt, Human
ccucccgcuucacccgga

SEQ ID NO: 587694 - RNA, 22 nt, Human
cgagggugcgggcaggcgggcg

SEQ ID NO: 587695 - RNA, 22 nt, Human
cgcagggcuggggugagggggg

SEQ ID NO: 587696 - RNA, 18 nt, Human
cgcgagaagcugcaggcg

SEQ ID NO: 587697 - RNA, 18 nt, Human
cggggcagggcccggcgg

SEQ ID NO: 587698 - RNA, 23 nt, Human
cggugggaggacggacuaagggg

SEQ ID NO: 587699 - RNA, 22 nt, Human
cggugggcggugcccggggcgg

SEQ ID NO: 587700 - RNA, 21 nt, Human
cuccgacucuggcugccuccc

SEQ ID NO: 587701 - RNA, 18 nt, Human
cuccugcuggcccgaacc

SEQ ID NO: 587702 - RNA, 21 nt, Human
cugcuggaaggaauaaauaag

SEQ ID NO: 587703 - RNA, 20 nt, Human
cuucacccggacccgcaccc

SEQ ID NO: 587704 - RNA, 20 nt, Human
gacaggggcugugggagaga

SEQ ID NO: 587705 - RNA, 19 nt, Human
gagaauguagagccuggga

SEQ ID NO: 587706 - RNA, 21 nt, Human
gagucgggagggagggcgagg

SEQ ID NO: 587707 - RNA, 18 nt, Human
gcaggcccagccuccagg

SEQ ID NO: 587708 - RNA, 24 nt, Human
gcccgaaccuagggaagagggccc

SEQ ID NO: 587709 - RNA, 22 nt, Human
gcgcagggcuggggugaggggg

SEQ ID NO: 587710 - RNA, 19 nt, Human
gcgccgggccugcgccugg

SEQ ID NO: 587711 - RNA, 19 nt, Human
gcgccuggugcucgggccc

SEQ ID NO: 587712 - RNA, 23 nt, Human
gcgccuggugcucgggcccggcu

SEQ ID NO: 587713 - RNA, 20 nt, Human
gcggggucggccgugccugg

SEQ ID NO: 587714 - RNA, 18 nt, Human
ggaaugggggugauuaag

SEQ ID NO: 587715 - RNA, 22 nt, Human
ggaaugggggugauuaaggccu

SEQ ID NO: 587716 - RNA, 22 nt, Human
ggagacuccagccggcaccucc

SEQ ID NO: 587717 - RNA, 18 nt, Human
ggagccccuccugccacc

SEQ ID NO: 587718 - RNA, 19 nt, Human
ggcggugcccggggcgggg

SEQ ID NO: 587719 - RNA, 20 nt, Human
ggcucuggggucuggggagg

SEQ ID NO: 587720 - RNA, 18 nt, Human
ggcuggggugaggggggu

SEQ ID NO: 587721 - RNA, 19 nt, Human
gggcaggcgggcgccgggc

SEQ ID NO: 587722 - RNA, 22 nt, Human
gggcaggcgggcgccgggccug

SEQ ID NO: 587723 - RNA, 18 nt, Human
gggcggggccggguggga

SEQ ID NO: 587724 - RNA, 19 nt, Human
gggugauuaaggccugggc

SEQ ID NO: 587725 - RNA, 22 nt, Human
gucgggagggagggcgagggug

SEQ ID NO: 587726 - RNA, 22 nt, Human
uacagcaacaucugaaaauaga

SEQ ID NO: 587727 - RNA, 24 nt, Human
uagaagagggacgaggggaggccc

SEQ ID NO: 587728 - RNA, 18 nt, Human
uauacagaagcaacggcc

SEQ ID NO: 587729 - RNA, 18 nt, Human
ucccucagaggccaggag

SEQ ID NO: 587730 - RNA, 19 nt, Human
uccugccaccaggggaccg

SEQ ID NO: 587731 - RNA, 25 nt, Human
ucucuauauacagaagcaacggccg

SEQ ID NO: 587732 - RNA, 19 nt, Human
ucuuggcucuggggucugg

SEQ ID NO: 587733 - RNA, 22 nt, Human
ugaaaauagagagcagccgccu

SEQ ID NO: 587734 - RNA, 23 nt, Human
ugacaagggagaagguuacccug

SEQ ID NO: 587735 - RNA, 21 nt, Human
ugagaugacaagggagaaggu

SEQ ID NO: 587736 - RNA, 18 nt, Human
ugaggggggugugccagg

SEQ ID NO: 587737 - RNA, 22 nt, Human
ugcauaaggccgggaugcgggg

SEQ ID NO: 587738 - RNA, 25 nt, Human
ugccucccgcuucacccggacccuu

SEQ ID NO: 587739 - RNA, 19 nt, Human
ugccugggcggggccgggu

SEQ ID NO: 587740 - RNA, 19 nt, Human
ugccugggcggggccgggu

SEQ ID NO: 587741 - RNA, 20 nt, Human
ugcuggaaggaauaaauaag

SEQ ID NO: 587742 - RNA, 22 nt, Human
uggaaggaauaaauaagggaug

SEQ ID NO: 587743 - RNA, 24 nt, Human
uggaaggaauaaauaagggaugga

SEQ ID NO: 587744 - RNA, 23 nt, Human
uggcucuggggucuggggaggcc

SEQ ID NO: 587745 - RNA, 19 nt, Human
ugggagagacaggcgggac

SEQ ID NO: 587746 - RNA, 21 nt, Human
ugggaggggcagugcauaagg

SEQ ID NO: 587747 - RNA, 22 nt, Human
ugggaggggcagugcauaagga

SEQ ID NO: 587748 - RNA, 23 nt, Human
ugggcggugcccggggcgggguc

SEQ ID NO: 587749 - RNA, 27 nt, Human
uggggggaggcgaggcaggauggcucg

SEQ ID NO: 587750 - RNA, 21 nt, Human
ugugggagagacaggcgggac

SEQ ID NO: 587751 - RNA, 22 nt, Human
uuuuuuuuuuuuuuuuuuucag

SEQ ID NO: 587752 - RNA, 23 nt, Human
aaagacacacacucucaccacaa

SEQ ID NO: 587753 - RNA, 21 nt, Human
aacaaaacagagaaacgaucc

SEQ ID NO: 587754 - RNA, 23 nt, Human
acaaaacagagaaacgaucccuc

SEQ ID NO: 587755 - RNA, 19 nt, Human
acaccugcggcccagacac

SEQ ID NO: 587756 - RNA, 20 nt, Human
acagagaaacgaucccuccc

SEQ ID NO: 587757 - RNA, 22 nt, Human
acagagaaacgaucccucccca

SEQ ID NO: 587758 - RNA, 19 nt, Human
acagugccacaccugcggc

SEQ ID NO: 587759 - RNA, 20 nt, Human
acccugagggaaaacaggag

SEQ ID NO: 587760 - RNA, 21 nt, Human
acgcugaacugaauuguacau

SEQ ID NO: 587761 - RNA, 21 nt, Human
acucauuccuuggagggaagc

SEQ ID NO: 587762 - RNA, 28 nt, Human
agaaacgaucccuccccaagccuacaga

SEQ ID NO: 587763 - RNA, 20 nt, Human
agacacacacucucaccaca

SEQ ID NO: 587764 - RNA, 21 nt, Human
agggcucacccaugagggaca

SEQ ID NO: 587765 - RNA, 19 nt, Human
auccaaaaggaaaaugauu

SEQ ID NO: 587766 - RNA, 25 nt, Human
augacacagacacacgugaacaccg

SEQ ID NO: 587767 - RNA, 21 nt, Human
augggacaacgggacggggag

SEQ ID NO: 587768 - RNA, 21 nt, Human
cacacucucaccacagugcca

SEQ ID NO: 587769 - RNA, 20 nt, Human
cacagacacacgugaacacc

SEQ ID NO: 587770 - RNA, 26 nt, Human
caccacagugccacaccugcggccca

SEQ ID NO: 587771 - RNA, 22 nt, Human
cacccacugcuucacaugccua

SEQ ID NO: 587772 - RNA, 18 nt, Human
cagagaaacgaucccucc

SEQ ID NO: 587773 - RNA, 20 nt, Human
caggagugugucugucuuca

SEQ ID NO: 587774 - RNA, 21 nt, Human
cagguacccaccagauuuaac

SEQ ID NO: 587775 - RNA, 26 nt, Human
caugacacagacacacgugaacaccc

SEQ ID NO: 587776 - RNA, 20 nt, Human
caugacacagacacacgugg

SEQ ID NO: 587777 - RNA, 27 nt, Human
caugugcacacauguauacauuuauug

SEQ ID NO: 587778 - RNA, 21 nt, Human
ccagcccgccgguccuagcag

SEQ ID NO: 587779 - RNA, 24 nt, Human
cccacugcuucacaugccuaauuc

SEQ ID NO: 587780 - RNA, 18 nt, Human
cccugagggaaaacagga

SEQ ID NO: 587781 - RNA, 18 nt, Human
cggguggacacccacugc

SEQ ID NO: 587782 - RNA, 20 nt, Human
cuccccaagccuacagaaca

SEQ ID NO: 587783 - RNA, 19 nt, Human
cugaaggccagaaucccac

SEQ ID NO: 587784 - RNA, 21 nt, Human
cuuccagcacugacagccacu

SEQ ID NO: 587785 - RNA, 21 nt, Human
cuuggcucaggagugugucug

SEQ ID NO: 587786 - RNA, 22 nt, Human
gaacacccagcccgccgguccu

SEQ ID NO: 587787 - RNA, 20 nt, Human
gacaagaacccccuagcaac

SEQ ID NO: 587788 - RNA, 18 nt, Human
gaccacacugccugggcu

SEQ ID NO: 587789 - RNA, 20 nt, Human
gccugggcucacagcuggag

SEQ ID NO: 587790 - RNA, 22 nt, Human
gcuaaagcucaaaggcauacug

SEQ ID NO: 587791 - RNA, 26 nt, Human
gcugaacugaauuguacauaccaacu

SEQ ID NO: 587792 - RNA, 20 nt, Human
ggaaaacaggagagccugag

SEQ ID NO: 587793 - RNA, 19 nt, Human
ggcagcacagggaugcggu

SEQ ID NO: 587794 - RNA, 19 nt, Human
ggcugagugacacgccagc

SEQ ID NO: 587795 - RNA, 23 nt, Human
uaaaauucaucauagcacuuucc

SEQ ID NO: 587796 - RNA, 19 nt, Human
uaacaaaacagagaaacga

SEQ ID NO: 587797 - RNA, 31 nt, Human
uaacaaaacagagaaacgaucccuccccaag

SEQ ID NO: 587798 - RNA, 24 nt, Human
uaacagcuaaagcucaaaggcaua

SEQ ID NO: 587799 - RNA, 25 nt, Human
uaacagcuaaagcucaaaggcauac

SEQ ID NO: 587800 - RNA, 20 nt, Human
uacagugcacacgggugcgg

SEQ ID NO: 587801 - RNA, 22 nt, Human
uacagugcacacgggugcggcu

SEQ ID NO: 587802 - RNA, 19 nt, Human
uccaaaaggaaaaugauuc

SEQ ID NO: 587803 - RNA, 24 nt, Human
uccaaaaggaaaaugauucaagaa

SEQ ID NO: 587804 - RNA, 25 nt, Human
uccaaaaggaaaaugauucaagaaa

SEQ ID NO: 587805 - RNA, 19 nt, Human
ucccgcugcacugugugug

SEQ ID NO: 587806 - RNA, 20 nt, Human
ucccuccuggucucugaagg

SEQ ID NO: 587807 - RNA, 18 nt, Human
ucguguggaagauccagg

SEQ ID NO: 587808 - RNA, 19 nt, Human
ucguguggaagauccaggu

SEQ ID NO: 587809 - RNA, 22 nt, Human
ucugaaggccagaaucccacuc

SEQ ID NO: 587810 - RNA, 18 nt, Human
ugaaauccacucauuccu

SEQ ID NO: 587811 - RNA, 21 nt, Human
ugaacugaauuguacauacca

SEQ ID NO: 587812 - RNA, 18 nt, Human
ugaagacaagaccuuggc

SEQ ID NO: 587813 - RNA, 21 nt, Human
ugaagacaagaccuuggcuca

SEQ ID NO: 587814 - RNA, 18 nt, Human
ugacgcacaguccuccag

SEQ ID NO: 587815 - RNA, 22 nt, Human
ugagggaaaacaggagagccug

SEQ ID NO: 587816 - RNA, 25 nt, Human
ugcaaagacacacacucucaccaca

SEQ ID NO: 587817 - RNA, 18 nt, Human
ugccugggcucacagcug

SEQ ID NO: 587818 - RNA, 21 nt, Human
uggagggcucacccaugaggg

SEQ ID NO: 587819 - RNA, 18 nt, Human
ugggaagggaagaaaggg

SEQ ID NO: 587820 - RNA, 19 nt, Human
ugggaagggaagaaaggga

SEQ ID NO: 587821 - RNA, 24 nt, Human
ugugcaaagacacacacucucacc

SEQ ID NO: 587822 - RNA, 25 nt, Human
uucacagagcaaaaugggacaacgg

SEQ ID NO: 587823 - RNA, 20 nt, Human
uucagucugugcaauaaaga

SEQ ID NO: 587824 - RNA, 19 nt, Human
uuccuggugaggagggucc

SEQ ID NO: 587825 - RNA, 22 nt, Human
uuccuuggagggaagcuggccc

SEQ ID NO: 587826 - RNA, 26 nt, Human
uuuacaacagcuguagguuucuguau

SEQ ID NO: 587827 - RNA, 19 nt, Human
aacacgauuaaccacaucu

SEQ ID NO: 587828 - RNA, 20 nt, Human
aaccacaucuugcuuccucc

SEQ ID NO: 587829 - RNA, 21 nt, Human
gucauuuuuaagcauggaucc

SEQ ID NO: 587830 - RNA, 21 nt, Human
uacugguuuaaaugucgaucu

SEQ ID NO: 587831 - RNA, 24 nt, Human
ugcugucuccuuuucuccucucug

SEQ ID NO: 587832 - RNA, 24 nt, Human
uggcgucuugcugucuccuuuucu

SEQ ID NO: 587833 - RNA, 22 nt, Human
uuuucuccucucugcgcucucu

SEQ ID NO: 587834 - RNA, 19 nt, Human
aaaagcaacgcacaaagac

SEQ ID NO: 587835 - RNA, 20 nt, Human
aaaaugaauaaucaaacuug

SEQ ID NO: 587836 - RNA, 19 nt, Human
aaaggccugacccuaaagc

SEQ ID NO: 587837 - RNA, 21 nt, Human
aacaagagcaaacuccgucuc

SEQ ID NO: 587838 - RNA, 20 nt, Human
aacuugccucccaauuccca

SEQ ID NO: 587839 - RNA, 19 nt, Human
aagcaacgcacaaagacuu

SEQ ID NO: 587840 - RNA, 24 nt, Human
aagcaauccgcccaccuuggccuc

SEQ ID NO: 587841 - RNA, 19 nt, Human
aaguagcugggacuacagg

SEQ ID NO: 587842 - RNA, 20 nt, Human
aaguagcugggacuacaggu

SEQ ID NO: 587843 - RNA, 26 nt, Human
aaguagcugggacuacaggugucugc

SEQ ID NO: 587844 - RNA, 20 nt, Human
aaguugguccccacacaggu

SEQ ID NO: 587845 - RNA, 19 nt, Human
aaucauuaccauugccuaa

SEQ ID NO: 587846 - RNA, 22 nt, Human
acagagcacgaaguuggucccc

SEQ ID NO: 587847 - RNA, 25 nt, Human
acagugcugggguuacaggugacag

SEQ ID NO: 587848 - RNA, 24 nt, Human
acagugcugggguuacagguguga

SEQ ID NO: 587849 - RNA, 20 nt, Human
acccagccuaucaguucauu

SEQ ID NO: 587850 - RNA, 21 nt, Human
acccaucauauccucuuuccu

SEQ ID NO: 587851 - RNA, 22 nt, Human
acccuaaagcccucaaagacuu

SEQ ID NO: 587852 - RNA, 26 nt, Human
acgccgagccugaggagcugcccaau

SEQ ID NO: 587853 - RNA, 18 nt, Human
acgggguuuagccauguu

SEQ ID NO: 587854 - RNA, 19 nt, Human
acgggguuuagccauguug

SEQ ID NO: 587855 - RNA, 24 nt, Human
acgggguuuagccauguugcccag

SEQ ID NO: 587856 - RNA, 21 nt, Human
acuacaggugucugccaccau

SEQ ID NO: 587857 - RNA, 21 nt, Human
acuagauuuaaagcagaagug

SEQ ID NO: 587858 - RNA, 24 nt, Human
acugauaccaaaggccugacccua

SEQ ID NO: 587859 - RNA, 27 nt, Human
acugcacuccagccucaucaacaagag

SEQ ID NO: 587860 - RNA, 21 nt, Human
agcaauccgcccaccuuggcc

SEQ ID NO: 587861 - RNA, 27 nt, Human
agccauguugcccaggcuggucucaaa

SEQ ID NO: 587862 - RNA, 21 nt, Human
agcuguaaggccucaaagagu

SEQ ID NO: 587863 - RNA, 24 nt, Human
aggcggagguugcagugagucaag

SEQ ID NO: 587864 - RNA, 25 nt, Human
agguuccccccucauacuaaaccuc

SEQ ID NO: 587865 - RNA, 22 nt, Human
agugcugggguuacagguguga

SEQ ID NO: 587866 - RNA, 22 nt, Human
auccucccaccucugcccucca

SEQ ID NO: 587867 - RNA, 23 nt, Human
aucgcgccacugcacuccagccu

SEQ ID NO: 587868 - RNA, 21 nt, Human
caaaaugaauaaucaaacuug

SEQ ID NO: 587869 - RNA, 23 nt, Human
caaaggccugacccuaaagcccu

SEQ ID NO: 587870 - RNA, 23 nt, Human
caagagcaaacuccgucucaaaa

SEQ ID NO: 587871 - RNA, 24 nt, Human
caagaucgcgccacugcacuccag

SEQ ID NO: 587872 - RNA, 23 nt, Human
cacacaggucacaauuauguagc

SEQ ID NO: 587873 - RNA, 18 nt, Human
caccaugcuuggcuaauu

SEQ ID NO: 587874 - RNA, 18 nt, Human
caccccucaucuuucaga

SEQ ID NO: 587875 - RNA, 21 nt, Human
caccucugcccuccaaguagc

SEQ ID NO: 587876 - RNA, 24 nt, Human
cacgcagggggaaugacacgcgcg

SEQ ID NO: 587877 - RNA, 22 nt, Human
cacugcacuccagccucaucaa

SEQ ID NO: 587878 - RNA, 24 nt, Human
cacugcacuccagccucaucaaca

SEQ ID NO: 587879 - RNA, 26 nt, Human
cacugcacuccagccucaucaacaag

SEQ ID NO: 587880 - RNA, 21 nt, Human
caggugucugccaccaugcuu

SEQ ID NO: 587881 - RNA, 19 nt, Human
cauggauuuuaaaaacugc

SEQ ID NO: 587882 - RNA, 23 nt, Human
cauguugcccaggcuggucucaa

SEQ ID NO: 587883 - RNA, 24 nt, Human
cauguugcccaggcuggucucaaa

SEQ ID NO: 587884 - RNA, 21 nt, Human
ccaaaggccugacccuaaagc

SEQ ID NO: 587885 - RNA, 21 nt, Human
ccacagugcugggguuacagg

SEQ ID NO: 587886 - RNA, 24 nt, Human
ccacagugcugggguuacaggugu

SEQ ID NO: 587887 - RNA, 20 nt, Human
ccacugcacuccagccucau

SEQ ID NO: 587888 - RNA, 24 nt, Human
ccacugcacuccagccucaucaac

SEQ ID NO: 587889 - RNA, 27 nt, Human
ccacugcacuccagccucaucaacaag

SEQ ID NO: 587890 - RNA, 23 nt, Human
ccagcaaugacagucacauccag

SEQ ID NO: 587891 - RNA, 22 nt, Human
ccauguugcccaggcuggucuc

SEQ ID NO: 587892 - RNA, 20 nt, Human
cccccacaccaugucccuuc

SEQ ID NO: 587893 - RNA, 23 nt, Human
ccccccacaccaugucccuucag

SEQ ID NO: 587894 - RNA, 21 nt, Human
ccccucauacuaaaccucagc

SEQ ID NO: 587895 - RNA, 24 nt, Human
ccuaucaguucauuuauggagucc

SEQ ID NO: 587896 - RNA, 23 nt, Human
ccucaguuccauuucccuacccc

SEQ ID NO: 587897 - RNA, 20 nt, Human
ccucauacuaaaccucagcc

SEQ ID NO: 587898 - RNA, 19 nt, Human
ccucccaccucugcccucc

SEQ ID NO: 587899 - RNA, 23 nt, Human
ccucccaccucugcccuccaagu

SEQ ID NO: 587900 - RNA, 26 nt, Human
ccucccaccucugcccuccaaguagc

SEQ ID NO: 587901 - RNA, 22 nt, Human
ccuucaauuuacuuuaaaaauc

SEQ ID NO: 587902 - RNA, 26 nt, Human
cgccacugcacuccagccucaucaac

SEQ ID NO: 587903 - RNA, 22 nt, Human
cgccaucaaagcuagaaugcag

SEQ ID NO: 587904 - RNA, 20 nt, Human
cggauagucucaacauggga

SEQ ID NO: 587905 - RNA, 24 nt, Human
cgggguuuagccauguugcccagg

SEQ ID NO: 587906 - RNA, 21 nt, Human
cucaaauucuuuuucuuauua

SEQ ID NO: 587907 - RNA, 24 nt, Human
cucaagcaauccgcccaccuuggc

SEQ ID NO: 587908 - RNA, 24 nt, Human
cucaagccauccucccaccucugc

SEQ ID NO: 587909 - RNA, 24 nt, Human
cuccaaguagcugggacuacaggu

SEQ ID NO: 587910 - RNA, 19 nt, Human
cugauaaguauguggaaau

SEQ ID NO: 587911 - RNA, 24 nt, Human
cugcaaacaggcuccagcaaugac

SEQ ID NO: 587912 - RNA, 18 nt, Human
cugccaccaugcuuggcu

SEQ ID NO: 587913 - RNA, 21 nt, Human
cuugccucccaauucccaaaa

SEQ ID NO: 587914 - RNA, 21 nt, Human
cuuggaaaagcaacgcacaaa

SEQ ID NO: 587915 - RNA, 27 nt, Human
cuuugcgcucauugucacaccccuccu

SEQ ID NO: 587916 - RNA, 24 nt, Human
gacuacaggugucugccaccaugc

SEQ ID NO: 587917 - RNA, 24 nt, Human
gagcagcagcuuggaggccuccaa

SEQ ID NO: 587918 - RNA, 24 nt, Human
gagcucagccacggccggggacgc

SEQ ID NO: 587919 - RNA, 22 nt, Human
gaggagcugcccaaugccgccg

SEQ ID NO: 587920 - RNA, 20 nt, Human
gaggcggagguugcagugag

SEQ ID NO: 587921 - RNA, 23 nt, Human
gagguugcagugagucaagaucg

SEQ ID NO: 587922 - RNA, 19 nt, Human
gccauguugcccaggcugg

SEQ ID NO: 587923 - RNA, 19 nt, Human
gcuagaaugcaguggcaug

SEQ ID NO: 587924 - RNA, 21 nt, Human
gcugacaggagaaugaaggaa

SEQ ID NO: 587925 - RNA, 20 nt, Human
ggagguugcagugagucaag

SEQ ID NO: 587926 - RNA, 24 nt, Human
ggagguugcagugagucaagaucg

SEQ ID NO: 587927 - RNA, 19 nt, Human
gggcucuggagaacccagc

SEQ ID NO: 587928 - RNA, 20 nt, Human
ggggacgccgagccugagga

SEQ ID NO: 587929 - RNA, 23 nt, Human
gggguuuagccauguugcccagg

SEQ ID NO: 587930 - RNA, 23 nt, Human
ggugagcagcagcuuggaggccu

SEQ ID NO: 587931 - RNA, 18 nt, Human
gguuacaggugugagcca

SEQ ID NO: 587932 - RNA, 24 nt, Human
gguuacaggugugagccaccgugc

SEQ ID NO: 587933 - RNA, 22 nt, Human
guagagacgggguuuagccaug

SEQ ID NO: 587934 - RNA, 20 nt, Human
gugaggcggagguugcagug

SEQ ID NO: 587935 - RNA, 24 nt, Human
guuuagccauguugcccaggcugg

SEQ ID NO: 587936 - RNA, 26 nt, Human
uaaaacccaccacuucagaagcauua

SEQ ID NO: 587937 - RNA, 19 nt, Human
uaaagcccucaaagacuua

SEQ ID NO: 587938 - RNA, 24 nt, Human
uacaggugugagccaccgugccca

SEQ ID NO: 587939 - RNA, 20 nt, Human
uaccaaacacuuaaugcacc

SEQ ID NO: 587940 - RNA, 21 nt, Human
uaccaaacacuuaaugcaccg

SEQ ID NO: 587941 - RNA, 24 nt, Human
uagaaugcaguggcaugauuaugg

SEQ ID NO: 587942 - RNA, 20 nt, Human
uauagacugauaccaaaggc

SEQ ID NO: 587943 - RNA, 25 nt, Human
ucaagccauccucccaccucugccc

SEQ ID NO: 587944 - RNA, 30 nt, Human
ucaaucaacaaaagugggcagaaaaaaaaa

SEQ ID NO: 587945 - RNA, 22 nt, Human
ucacaccccucaucuuucagaa

SEQ ID NO: 587946 - RNA, 24 nt, Human
ucagcauuauuccaguguguccac

SEQ ID NO: 587947 - RNA, 25 nt, Human
ucaguuccauuucccuaccccccca

SEQ ID NO: 587948 - RNA, 18 nt, Human
uccaaggcgauuaccucc

SEQ ID NO: 587949 - RNA, 22 nt, Human
uccaaguagcugggacuacagg

SEQ ID NO: 587950 - RNA, 23 nt, Human
uccaaguagcugggacuacaggu

SEQ ID NO: 587951 - RNA, 23 nt, Human
ucccacagugcugggguuacagg

SEQ ID NO: 587952 - RNA, 18 nt, Human
ucccaccucugcccucca

SEQ ID NO: 587953 - RNA, 23 nt, Human
uccccccucauacuaaaccucag

SEQ ID NO: 587954 - RNA, 24 nt, Human
ucccuacccccccacaccaugucc

SEQ ID NO: 587955 - RNA, 21 nt, Human
uccgcccaccuuggccuccca

SEQ ID NO: 587956 - RNA, 21 nt, Human
uccuaagcucaagcaauccgc

SEQ ID NO: 587957 - RNA, 24 nt, Human
ucucacuucgccaucaaagcuaga

SEQ ID NO: 587958 - RNA, 19 nt, Human
ugaagcugugaggcggagg

SEQ ID NO: 587959 - RNA, 18 nt, Human
ugacaggagaaugaagga

SEQ ID NO: 587960 - RNA, 20 nt, Human
ugacauggauuuuaaaaacu

SEQ ID NO: 587961 - RNA, 23 nt, Human
ugaccugauaaaugagguaacac

SEQ ID NO: 587962 - RNA, 19 nt, Human
ugaguaaacugaccguggu

SEQ ID NO: 587963 - RNA, 22 nt, Human
ugagucaagaucgcgccacugc

SEQ ID NO: 587964 - RNA, 23 nt, Human
ugagucaagaucgcgccacugca

SEQ ID NO: 587965 - RNA, 24 nt, Human
ugauaccaaaggccugacccuaaa

SEQ ID NO: 587966 - RNA, 22 nt, Human
ugauuaugggcucaagccaucc

SEQ ID NO: 587967 - RNA, 24 nt, Human
ugcccaggcuggucucaaacuccu

SEQ ID NO: 587968 - RNA, 23 nt, Human
uggcagagcucagccacggccgg

SEQ ID NO: 587969 - RNA, 20 nt, Human
uggcaugauuaugggcucaa

SEQ ID NO: 587970 - RNA, 19 nt, Human
ugggacuacaggugucugc

SEQ ID NO: 587971 - RNA, 21 nt, Human
ugggacuacaggugucugcca

SEQ ID NO: 587972 - RNA, 24 nt, Human
ugggacuacaggugucugccacca

SEQ ID NO: 587973 - RNA, 25 nt, Human
ugggacuacaggugucugccaccau

SEQ ID NO: 587974 - RNA, 18 nt, Human
ugggguuacaggugugag

SEQ ID NO: 587975 - RNA, 22 nt, Human
ugggguuacaggugugagccac

SEQ ID NO: 587976 - RNA, 23 nt, Human
ugggguuacaggugugagccacc

SEQ ID NO: 587977 - RNA, 24 nt, Human
ugggguuacaggugugagccaccg

SEQ ID NO: 587978 - RNA, 24 nt, Human
uguagagacgggguuuagccaugu

SEQ ID NO: 587979 - RNA, 23 nt, Human
ugucauuauuugcaugcaaaggu

SEQ ID NO: 587980 - RNA, 19 nt, Human
uuacaggugugagccaccg

SEQ ID NO: 587981 - RNA, 27 nt, Human
uucaaaaugaauaaucaaacuugccuc

SEQ ID NO: 587982 - RNA, 19 nt, Human
uucaugacaauauaccaaa

SEQ ID NO: 587983 - RNA, 20 nt, Human
uuccucaaauucuuuuucuu

SEQ ID NO: 587984 - RNA, 24 nt, Human
uugaagcugugaggcggagguugc

SEQ ID NO: 587985 - RNA, 22 nt, Human
uugcagugagucaagaucgcgc

SEQ ID NO: 587986 - RNA, 24 nt, Human
uuguagagacgggguuuagccaug

SEQ ID NO: 587987 - RNA, 20 nt, Human
uuuaaauagccugguggcuu

SEQ ID NO: 587988 - RNA, 23 nt, Human
uuuagccauguugcccaggcugg

SEQ ID NO: 587989 - RNA, 22 nt, Human
uuugcgcucauugucacacccc

SEQ ID NO: 587990 - RNA, 24 nt, Human
uuuguagagacgggguuuagccau

SEQ ID NO: 587991 - RNA, 24 nt, Human
uuuucugacuagugggguuuuaaa

SEQ ID NO: 587992 - RNA, 22 nt, Human
uuuuuuuguagagacgggguuu

SEQ ID NO: 587993 - RNA, 24 nt, Human
aaaaaagaaaaacgacaaagcaca

SEQ ID NO: 587994 - RNA, 22 nt, Human
aaaaacgacaaagcacaaaacc

SEQ ID NO: 587995 - RNA, 19 nt, Human
aaaaagaaauaauuagaga

SEQ ID NO: 587996 - RNA, 18 nt, Human
aaaaccugccuacaauuc

SEQ ID NO: 587997 - RNA, 24 nt, Human
aaaagaaaaauaaaagccaaagag

SEQ ID NO: 587998 - RNA, 27 nt, Human
aaaagcucuuccauucucaaggcacuc

SEQ ID NO: 587999 - RNA, 18 nt, Human
aaacccaacaaguaaacc

SEQ ID NO: 588000 - RNA, 22 nt, Human
aagcacaaaaccucaauccgac

SEQ ID NO: 588001 - RNA, 19 nt, Human
aagcacaaggcugauaaaa

SEQ ID NO: 588002 - RNA, 20 nt, Human
acuucauugcccagaggcaa

SEQ ID NO: 588003 - RNA, 21 nt, Human
acuuuuucuuguccauggccu

SEQ ID NO: 588004 - RNA, 21 nt, Human
agaaaaacgacaaagcacaaa

SEQ ID NO: 588005 - RNA, 22 nt, Human
agaaaagaggcacacccggagc

SEQ ID NO: 588006 - RNA, 22 nt, Human
agaaaaggaauugcauagaaga

SEQ ID NO: 588007 - RNA, 22 nt, Human
agaccuuuggaacuuaaaaaug

SEQ ID NO: 588008 - RNA, 26 nt, Human
agagaaacauuacuucauugcccaga

SEQ ID NO: 588009 - RNA, 21 nt, Human
agagcccaucaauccuuaggc

SEQ ID NO: 588010 - RNA, 22 nt, Human
agcaaaagcuaagacucauuca

SEQ ID NO: 588011 - RNA, 20 nt, Human
agcaagagggaacuccacaa

SEQ ID NO: 588012 - RNA, 21 nt, Human
agccagggagagaaaagaggc

SEQ ID NO: 588013 - RNA, 18 nt, Human
agcuguagauuucuugcu

SEQ ID NO: 588014 - RNA, 19 nt, Human
aggaaccaugacuuaugaa

SEQ ID NO: 588015 - RNA, 24 nt, Human
aggaucagaggccaaaagagagcc

SEQ ID NO: 588016 - RNA, 24 nt, Human
aggcacucgagagguaaaaaaaug

SEQ ID NO: 588017 - RNA, 22 nt, Human
aggccaaaagagagcccaucaa

SEQ ID NO: 588018 - RNA, 24 nt, Human
agugauguucccugcaacugggcu

SEQ ID NO: 588019 - RNA, 18 nt, Human
aucuaggaaagcgugaag

SEQ ID NO: 588020 - RNA, 22 nt, Human
caaagcacaaaaccucaauccg

SEQ ID NO: 588021 - RNA, 22 nt, Human
caaagccaucuccccacuuuuc

SEQ ID NO: 588022 - RNA, 21 nt, Human
caaagugaucauuacagccag

SEQ ID NO: 588023 - RNA, 27 nt, Human
caacacauauaacaccaugacaucaca

SEQ ID NO: 588024 - RNA, 21 nt, Human
caaugauguacugcuucacaa

SEQ ID NO: 588025 - RNA, 22 nt, Human
caguagguggaugacacugccu

SEQ ID NO: 588026 - RNA, 23 nt, Human
caguagguggaugacacugccuc

SEQ ID NO: 588027 - RNA, 24 nt, Human
cagucaauacuagcucagcaaggu

SEQ ID NO: 588028 - RNA, 21 nt, Human
caguucuacacaaagccaucu

SEQ ID NO: 588029 - RNA, 19 nt, Human
ccagggagagaaaagaggc

SEQ ID NO: 588030 - RNA, 24 nt, Human
ccuacaauucaucuucuacacacc

SEQ ID NO: 588031 - RNA, 27 nt, Human
ccugcugaugccccccaaccaugcuaa

SEQ ID NO: 588032 - RNA, 21 nt, Human
ccuuauuagaucuauaaaauc

SEQ ID NO: 588033 - RNA, 21 nt, Human
cuaauaauuggugggcuugcu

SEQ ID NO: 588034 - RNA, 20 nt, Human
cuagaauucuggaaaugacu

SEQ ID NO: 588035 - RNA, 22 nt, Human
cuccaccacucagcaaggcgcc

SEQ ID NO: 588036 - RNA, 21 nt, Human
cucgaugcauuaugucuggag

SEQ ID NO: 588037 - RNA, 20 nt, Human
cucuucaacacgacugcugg

SEQ ID NO: 588038 - RNA, 18 nt, Human
cugauaguacuuagucca

SEQ ID NO: 588039 - RNA, 23 nt, Human
cugcugaugccccccaaccaugc

SEQ ID NO: 588040 - RNA, 19 nt, Human
gaacucaguccccacgacu

SEQ ID NO: 588041 - RNA, 23 nt, Human
gaauucuggaaaugacuucauuu

SEQ ID NO: 588042 - RNA, 24 nt, Human
gacaaagcacaaaaccucaauccg

SEQ ID NO: 588043 - RNA, 18 nt, Human
gacaguagguggaugaca

SEQ ID NO: 588044 - RNA, 21 nt, Human
gaccuuuggaacuuaaaaaug

SEQ ID NO: 588045 - RNA, 19 nt, Human
gauuggcagccagggagag

SEQ ID NO: 588046 - RNA, 20 nt, Human
gcuugcugugccaguacacu

SEQ ID NO: 588047 - RNA, 18 nt, Human
ggaaaaucaggauuggca

SEQ ID NO: 588048 - RNA, 21 nt, Human
gggacugcagggaaaaucagg

SEQ ID NO: 588049 - RNA, 19 nt, Human
gucugcagagaaaacccac

SEQ ID NO: 588050 - RNA, 19 nt, Human
guuaaaaggcuggcauuca

SEQ ID NO: 588051 - RNA, 22 nt, Human
guuuuucacacuagaauucugg

SEQ ID NO: 588052 - RNA, 24 nt, Human
uaacauugagaaccuauguagcuc

SEQ ID NO: 588053 - RNA, 21 nt, Human
uacacaaagccaucuccccac

SEQ ID NO: 588054 - RNA, 27 nt, Human
uaccacagaugaauacaaugaggugac

SEQ ID NO: 588055 - RNA, 25 nt, Human
uagcuuccuuguuucuacucagaaa

SEQ ID NO: 588056 - RNA, 22 nt, Human
uauaacaccaugacaucacaca

SEQ ID NO: 588057 - RNA, 22 nt, Human
uauaugucacuccgaacagagu

SEQ ID NO: 588058 - RNA, 19 nt, Human
ucacuuguuccacuguucu

SEQ ID NO: 588059 - RNA, 24 nt, Human
ucccucaccuccaccacucagcaa

SEQ ID NO: 588060 - RNA, 20 nt, Human
ucucaggguagcuuccuugu

SEQ ID NO: 588061 - RNA, 22 nt, Human
ucucuugcaaguccuuauauag

SEQ ID NO: 588062 - RNA, 18 nt, Human
ucugaguagacagcaggc

SEQ ID NO: 588063 - RNA, 18 nt, Human
ucugcagagaaaacccac

SEQ ID NO: 588064 - RNA, 19 nt, Human
ucuggaaaugacuucauuu

SEQ ID NO: 588065 - RNA, 21 nt, Human
ugaaggacaaaucugaaaugg

SEQ ID NO: 588066 - RNA, 23 nt, Human
ugacaggaaaaccuaggaaccau

SEQ ID NO: 588067 - RNA, 24 nt, Human
ugacaggaaaaccuaggaaccaug

SEQ ID NO: 588068 - RNA, 24 nt, Human
ugacuauaucucaggguagcuucc

SEQ ID NO: 588069 - RNA, 24 nt, Human
ugagauaauaaaauauuuuccuua

SEQ ID NO: 588070 - RNA, 19 nt, Human
ugaggugacaggaaaaccu

SEQ ID NO: 588071 - RNA, 21 nt, Human
ugcaaaggaaaucuuccaaag

SEQ ID NO: 588072 - RNA, 19 nt, Human
ugcugaucagcaaaaccug

SEQ ID NO: 588073 - RNA, 26 nt, Human
ugcuguacuuuuucuuguccauggga

SEQ ID NO: 588074 - RNA, 19 nt, Human
uggagggcgagggcugcgc

SEQ ID NO: 588075 - RNA, 24 nt, Human
uggaugacacugccucuucaacac

SEQ ID NO: 588076 - RNA, 23 nt, Human
uggcagaucuaggaaagcgugaa

SEQ ID NO: 588077 - RNA, 19 nt, Human
ugggguaagcacaaggcug

SEQ ID NO: 588078 - RNA, 24 nt, Human
uguacugcuucacaaaagcucuuc

SEQ ID NO: 588079 - RNA, 18 nt, Human
ugucacgacauucugcag

SEQ ID NO: 588080 - RNA, 19 nt, Human
uguccugcugaugcccccc

SEQ ID NO: 588081 - RNA, 23 nt, Human
uguugguuuguccugcugaugcc

SEQ ID NO: 588082 - RNA, 22 nt, Human
uuacaaaccaaggggacugcag

SEQ ID NO: 588083 - RNA, 23 nt, Human
uuccaaaggggacaguaggugga

SEQ ID NO: 588084 - RNA, 22 nt, Human
uugcucuuauaugucacuccga

SEQ ID NO: 588085 - RNA, 18 nt, Human
uugcugugccaguacacu

SEQ ID NO: 588086 - RNA, 23 nt, Human
uuguccugcugaugccccccaac

SEQ ID NO: 588087 - RNA, 22 nt, Human
uuuaccccuacauguacagaug

SEQ ID NO: 588088 - RNA, 22 nt, Human
uuucuuguccauggccuggagg

SEQ ID NO: 588089 - RNA, 18 nt, Human
uuuggcuuuccuggccug

SEQ ID NO: 588090 - RNA, 21 nt, Human
aaaaacaaugaaugagagccg

SEQ ID NO: 588091 - RNA, 20 nt, Human
aaacaaugaaugagagcuac

SEQ ID NO: 588092 - RNA, 23 nt, Human
aaagauaugauacccgguucuuc

SEQ ID NO: 588093 - RNA, 21 nt, Human
aaauagcugcaugcuaauuuu

SEQ ID NO: 588094 - RNA, 21 nt, Human
aagguuuuuuuuuuuuuccua

SEQ ID NO: 588095 - RNA, 21 nt, Human
aggcaguucuaucauguagga

SEQ ID NO: 588096 - RNA, 23 nt, Human
caagguuuuuuuuuuuuuccuaa

SEQ ID NO: 588097 - RNA, 23 nt, Human
cacaagguuuuuuuuuuuuuccu

SEQ ID NO: 588098 - RNA, 18 nt, Human
cagucugcccucacagac

SEQ ID NO: 588099 - RNA, 22 nt, Human
ccaaauguuuucuacacugaca

SEQ ID NO: 588100 - RNA, 21 nt, Human
cggggcagcuccgcugcucug

SEQ ID NO: 588101 - RNA, 24 nt, Human
gacacuaaaggcaggaauuaagaa

SEQ ID NO: 588102 - RNA, 20 nt, Human
gauacccgguucuuccacau

SEQ ID NO: 588103 - RNA, 25 nt, Human
gccacaauugaaaccuguauuaacu

SEQ ID NO: 588104 - RNA, 18 nt, Human
ggcaaucuugucuuugca

SEQ ID NO: 588105 - RNA, 21 nt, Human
uaaaaaacaaugaaugagagc

SEQ ID NO: 588106 - RNA, 21 nt, Human
uacccccaaccauagcaucac

SEQ ID NO: 588107 - RNA, 20 nt, Human
ucagaaagaaaauaggggca

SEQ ID NO: 588108 - RNA, 18 nt, Human
ucccgcgccaucuuuguu

SEQ ID NO: 588109 - RNA, 21 nt, Human
ucucccuaacuacccccaacc

SEQ ID NO: 588110 - RNA, 19 nt, Human
ugccacaauugaaaccugu

SEQ ID NO: 588111 - RNA, 24 nt, Human
ugcuagugaacaggucuuauuccu

SEQ ID NO: 588112 - RNA, 18 nt, Human
ugucuuugcauugcuuug

SEQ ID NO: 588113 - RNA, 23 nt, Human
uuagaacccccuugaaaaugcua

SEQ ID NO: 588114 - RNA, 24 nt, Human
uuagaacccccuugaaaaugcuag

SEQ ID NO: 588115 - RNA, 25 nt, Human
uugaaaaugcuagugaacaggucuu

SEQ ID NO: 588116 - RNA, 20 nt, Human
uuuauggcuuuuaagcacuu

SEQ ID NO: 588117 - RNA, 22 nt, Human
uuugugucauucuggcuucccu

SEQ ID NO: 588118 - RNA, 21 nt, Human
uuuuagggccgugcggcuacc

SEQ ID NO: 588119 - RNA, 20 nt, Human
uuuucuacacugacauuuuu

SEQ ID NO: 588120 - RNA, 23 nt, Human
uuuuuuuuuuuuuuuugccagaa

SEQ ID NO: 588121 - RNA, 18 nt, Human
uuuuuuuuuuuuuuuuug

SEQ ID NO: 588122 - RNA, 20 nt, Human
aucauccugagaucuggcgu

SEQ ID NO: 588123 - RNA, 23 nt, Human
cacacccacgaugugcugcaugg

SEQ ID NO: 588124 - RNA, 19 nt, Human
ccccaucauccugagaucu

SEQ ID NO: 588125 - RNA, 21 nt, Human
ccucuggaggaggggccaggg

SEQ ID NO: 588126 - RNA, 19 nt, Human
cgccccaucauccugagau

SEQ ID NO: 588127 - RNA, 20 nt, Human
guaaaugaaccuugucuaca

SEQ ID NO: 588128 - RNA, 22 nt, Human
uccacauucacagcuauugccu

SEQ ID NO: 588129 - RNA, 18 nt, Human
uccugagaucuggcgugg

SEQ ID NO: 588130 - RNA, 20 nt, Human
aaugcuguucucccccagga

SEQ ID NO: 588131 - RNA, 22 nt, Human
agaaucccucacccuccacccc

SEQ ID NO: 588132 - RNA, 22 nt, Human
caccugcccaaccuaggacagc

SEQ ID NO: 588133 - RNA, 22 nt, Human
cagaaucccucacccuccaccc

SEQ ID NO: 588134 - RNA, 23 nt, Human
cagaaucccucacccuccacccc

SEQ ID NO: 588135 - RNA, 21 nt, Human
cagccgcagccgccuaagccg

SEQ ID NO: 588136 - RNA, 19 nt, Human
ccccaggguccucccucuc

SEQ ID NO: 588137 - RNA, 18 nt, Human
cccucacccuccacccca

SEQ ID NO: 588138 - RNA, 22 nt, Human
cccugggccgcaggauguccuc

SEQ ID NO: 588139 - RNA, 24 nt, Human
ccgccguagcagccgcagccgccu

SEQ ID NO: 588140 - RNA, 22 nt, Human
ccgccuaagccguuccaggggc

SEQ ID NO: 588141 - RNA, 18 nt, Human
ccucagggcuggguucca

SEQ ID NO: 588142 - RNA, 18 nt, Human
ggacagcugggccugagc

SEQ ID NO: 588143 - RNA, 22 nt, Human
ggccgcaggauguccucagggc

SEQ ID NO: 588144 - RNA, 21 nt, Human
ggggagaggcuggaggcggcg

SEQ ID NO: 588145 - RNA, 20 nt, Human
uagcagccgcagccgccuaa

SEQ ID NO: 588146 - RNA, 19 nt, Human
uccacagaaucccucaccc

SEQ ID NO: 588147 - RNA, 23 nt, Human
uccacagaaucccucacccucca

SEQ ID NO: 588148 - RNA, 19 nt, Human
ucccucacccuccacccca

SEQ ID NO: 588149 - RNA, 19 nt, Human
ucucucagcaggugucacu

SEQ ID NO: 588150 - RNA, 20 nt, Human
ucucucagcaggugucacuu

SEQ ID NO: 588151 - RNA, 21 nt, Human
ugcccaaccuaggacagcugg

SEQ ID NO: 588152 - RNA, 18 nt, Human
ugggcgggcaggggauuc

SEQ ID NO: 588153 - RNA, 21 nt, Human
uggguccacccaccugcccaa

SEQ ID NO: 588154 - RNA, 19 nt, Human
aaacauuguaggcuauacu

SEQ ID NO: 588155 - RNA, 20 nt, Human
aaacuaagacccccauaaac

SEQ ID NO: 588156 - RNA, 22 nt, Human
aaacuccuagcugaagcugccu

SEQ ID NO: 588157 - RNA, 20 nt, Human
aacgaagcccacaccaauga

SEQ ID NO: 588158 - RNA, 19 nt, Human
aaggcaaaacgaagcccac

SEQ ID NO: 588159 - RNA, 18 nt, Human
acccugaagcauaacagc

SEQ ID NO: 588160 - RNA, 21 nt, Human
acccugaagcauaacagccuu

SEQ ID NO: 588161 - RNA, 22 nt, Human
agcugccagccucaagcaguuu

SEQ ID NO: 588162 - RNA, 25 nt, Human
auuccuuuaggccccggggcugcua

SEQ ID NO: 588163 - RNA, 20 nt, Human
caaacuuccugcuauccucc

SEQ ID NO: 588164 - RNA, 21 nt, Human
caaucuccagggcucucuagu

SEQ ID NO: 588165 - RNA, 22 nt, Human
caccaaugauuauguaagucag

SEQ ID NO: 588166 - RNA, 19 nt, Human
cagaaacaggagcugccag

SEQ ID NO: 588167 - RNA, 20 nt, Human
cauuguacagaacacccaga

SEQ ID NO: 588168 - RNA, 22 nt, Human
cccaaguuuuuuugcuccagca

SEQ ID NO: 588169 - RNA, 19 nt, Human
cccuucccuaccaccaauc

SEQ ID NO: 588170 - RNA, 21 nt, Human
cucuaguuugcuccuauuuuu

SEQ ID NO: 588171 - RNA, 18 nt, Human
cucugugaauuuacugaa

SEQ ID NO: 588172 - RNA, 18 nt, Human
cuucagcaacccugaagc

SEQ ID NO: 588173 - RNA, 21 nt, Human
gaaacaggagcugccagccuc

SEQ ID NO: 588174 - RNA, 23 nt, Human
gacaaaugugucacaaaguccuu

SEQ ID NO: 588175 - RNA, 22 nt, Human
ggcaaaacgaagcccacaccaa

SEQ ID NO: 588176 - RNA, 24 nt, Human
uaagaccucaauuacguaaaccaa

SEQ ID NO: 588177 - RNA, 22 nt, Human
uccagcagguugaccuucaagg

SEQ ID NO: 588178 - RNA, 23 nt, Human
ugaugacagcugauuccuuuagg

SEQ ID NO: 588179 - RNA, 21 nt, Human
ugcaucagucuucagaaacag

SEQ ID NO: 588180 - RNA, 23 nt, Human
uguaaauggagcuacaaauucaa

SEQ ID NO: 588181 - RNA, 21 nt, Human
uugcacgucccucuugaucuc

SEQ ID NO: 588182 - RNA, 24 nt, Human
aaacgggagcgagcaucaagccug

SEQ ID NO: 588183 - RNA, 21 nt, Human
agcaucaagccuguguuuuuu

SEQ ID NO: 588184 - RNA, 22 nt, Human
aggggagccagcugggcgcgcg

SEQ ID NO: 588185 - RNA, 21 nt, Human
cacuaaaccuugauugaagac

SEQ ID NO: 588186 - RNA, 24 nt, Human
cacuaaaccuugauugaagaccua

SEQ ID NO: 588187 - RNA, 19 nt, Human
ccaggcgaggggaugcccu

SEQ ID NO: 588188 - RNA, 22 nt, Human
cccgcacgcauaccaggcugug

SEQ ID NO: 588189 - RNA, 20 nt, Human
ccuccuccaggcgaggggau

SEQ ID NO: 588190 - RNA, 20 nt, Human
ccuccuguagaaacgggagc

SEQ ID NO: 588191 - RNA, 20 nt, Human
ccuguagaaacgggagcgag

SEQ ID NO: 588192 - RNA, 22 nt, Human
cgacccaguagccgugggcccu

SEQ ID NO: 588193 - RNA, 23 nt, Human
cgggagcgagcaucaagccugug

SEQ ID NO: 588194 - RNA, 18 nt, Human
cguuguuuucugaggugg

SEQ ID NO: 588195 - RNA, 19 nt, Human
cuccaggcgaggggaugcc

SEQ ID NO: 588196 - RNA, 24 nt, Human
cugucccagacaauaaaggugccc

SEQ ID NO: 588197 - RNA, 24 nt, Human
gaggggcugagggccugucccaga

SEQ ID NO: 588198 - RNA, 19 nt, Human
ggaggaggccgacccagua

SEQ ID NO: 588199 - RNA, 19 nt, Human
gggagccagcugggcgcgc

SEQ ID NO: 588200 - RNA, 20 nt, Human
gggcaggaggggcugagggc

SEQ ID NO: 588201 - RNA, 23 nt, Human
gggcaggaggggcugagggccug

SEQ ID NO: 588202 - RNA, 20 nt, Human
ggggcaggaggggcugaggg

SEQ ID NO: 588203 - RNA, 22 nt, Human
ggggcaggaggggcugagggcc

SEQ ID NO: 588204 - RNA, 21 nt, Human
gucaaaaccuccuguagaaac

SEQ ID NO: 588205 - RNA, 19 nt, Human
gugagcaagugggugugcu

SEQ ID NO: 588206 - RNA, 19 nt, Human
gugcugggaaccuggccac

SEQ ID NO: 588207 - RNA, 18 nt, Human
gugggugugcugggaacc

SEQ ID NO: 588208 - RNA, 20 nt, Human
uaggaugggcucgagugugg

SEQ ID NO: 588209 - RNA, 25 nt, Human
uaggaugggcucgaguguggcggug

SEQ ID NO: 588210 - RNA, 23 nt, Human
ucuggguggauggggcaggaggg

SEQ ID NO: 588211 - RNA, 23 nt, Human
ugagguggccucgcugucuuuca

SEQ ID NO: 588212 - RNA, 22 nt, Human
uggauggggcaggaggggcuga

SEQ ID NO: 588213 - RNA, 24 nt, Human
uguguacauucgaaacuccacuaa

SEQ ID NO: 588214 - RNA, 22 nt, Human
uucgaaacuccacuaaaccuug

SEQ ID NO: 588215 - RNA, 23 nt, Human
aaaaaacccuucaucugcagacc

SEQ ID NO: 588216 - RNA, 24 nt, Human
aaaauaccccauccagggccugga

SEQ ID NO: 588217 - RNA, 21 nt, Human
aaacacugaaaaaucagguga

SEQ ID NO: 588218 - RNA, 21 nt, Human
aaaccagggcugacaggaaga

SEQ ID NO: 588219 - RNA, 24 nt, Human
aaaggaacaagauacaaacagccc

SEQ ID NO: 588220 - RNA, 18 nt, Human
aacacacuucacaaagga

SEQ ID NO: 588221 - RNA, 19 nt, Human
aacagaaacaucaaacugc

SEQ ID NO: 588222 - RNA, 23 nt, Human
aagcaaaagacugcggcuccucu

SEQ ID NO: 588223 - RNA, 24 nt, Human
aagcaaacucaagucugugaugau

SEQ ID NO: 588224 - RNA, 22 nt, Human
acaccaaaauaccccauccagg

SEQ ID NO: 588225 - RNA, 24 nt, Human
acaccccagcagguccccgcaggc

SEQ ID NO: 588226 - RNA, 20 nt, Human
acacugaaaaaucaggugac

SEQ ID NO: 588227 - RNA, 22 nt, Human
accauggaaaccagggcugacc

SEQ ID NO: 588228 - RNA, 23 nt, Human
acgggucuggcccccaggccacc

SEQ ID NO: 588229 - RNA, 19 nt, Human
agaaaagagaaucaggagg

SEQ ID NO: 588230 - RNA, 20 nt, Human
agaggucacucgcaaagagg

SEQ ID NO: 588231 - RNA, 28 nt, Human
agccaagagcccugaaauugacuucggu

SEQ ID NO: 588232 - RNA, 22 nt, Human
agccgcuuccagcagggaccug

SEQ ID NO: 588233 - RNA, 26 nt, Human
agcuaccaaaggcugcacuaggauuu

SEQ ID NO: 588234 - RNA, 21 nt, Human
aggaaguuaguaaacauuuuu

SEQ ID NO: 588235 - RNA, 23 nt, Human
aggagcggagcccagaggucacu

SEQ ID NO: 588236 - RNA, 23 nt, Human
aggcagacagguuucgugccaga

SEQ ID NO: 588237 - RNA, 24 nt, Human
aggggcccgcugcguccugucuca

SEQ ID NO: 588238 - RNA, 23 nt, Human
agugaggagcggagcccagaggu

SEQ ID NO: 588239 - RNA, 22 nt, Human
auaaauauccuuugacucuaaa

SEQ ID NO: 588240 - RNA, 20 nt, Human
auuugcaggcucuucuccuu

SEQ ID NO: 588241 - RNA, 18 nt, Human
caaaauaccccauccagg

SEQ ID NO: 588242 - RNA, 22 nt, Human
caaaauaccccauccagggccu

SEQ ID NO: 588243 - RNA, 24 nt, Human
caaagcccaaacagccucagauuc

SEQ ID NO: 588244 - RNA, 24 nt, Human
caacccucccucugcccucacacc

SEQ ID NO: 588245 - RNA, 19 nt, Human
cacacagguagaaacacug

SEQ ID NO: 588246 - RNA, 23 nt, Human
cacacagguagaaacacugaaaa

SEQ ID NO: 588247 - RNA, 19 nt, Human
cacacuucacaaaggaaca

SEQ ID NO: 588248 - RNA, 20 nt, Human
cacagcccagcgucuccuuc

SEQ ID NO: 588249 - RNA, 21 nt, Human
cacaggaaggaacucgauuuc

SEQ ID NO: 588250 - RNA, 18 nt, Human
caccauggaaaccagggc

SEQ ID NO: 588251 - RNA, 19 nt, Human
cacccuccgcaccgcacag

SEQ ID NO: 588252 - RNA, 18 nt, Human
caccgcacagcccagcgu

SEQ ID NO: 588253 - RNA, 18 nt, Human
caccuccccaggggaccc

SEQ ID NO: 588254 - RNA, 23 nt, Human
cacgcaagcgcacgcuguguggc

SEQ ID NO: 588255 - RNA, 19 nt, Human
cacgcuguguggcaggcgu

SEQ ID NO: 588256 - RNA, 20 nt, Human
cagaaacaucaaacugccaa

SEQ ID NO: 588257 - RNA, 23 nt, Human
cagccgcuuccagcagggaccug

SEQ ID NO: 588258 - RNA, 27 nt, Human
caggccagggcccaugccccaccugcc

SEQ ID NO: 588259 - RNA, 18 nt, Human
cagggaccuggccugagg

SEQ ID NO: 588260 - RNA, 22 nt, Human
cagggaugaaugcaccagguuu

SEQ ID NO: 588261 - RNA, 22 nt, Human
caggugacggcucggcucugcc

SEQ ID NO: 588262 - RNA, 18 nt, Human
cagugcugcagagaggag

SEQ ID NO: 588263 - RNA, 18 nt, Human
caguggcauuucauucaa

SEQ ID NO: 588264 - RNA, 24 nt, Human
caucacccuccgcaccgcacagcc

SEQ ID NO: 588265 - RNA, 22 nt, Human
cauccucaucacccuccgcacc

SEQ ID NO: 588266 - RNA, 18 nt, Human
caugcuaaaaaacaaguc

SEQ ID NO: 588267 - RNA, 21 nt, Human
cauuggccauuugcaggcucu

SEQ ID NO: 588268 - RNA, 19 nt, Human
ccacaagcaaaagacugcg

SEQ ID NO: 588269 - RNA, 19 nt, Human
ccauccagggccuggaagc

SEQ ID NO: 588270 - RNA, 23 nt, Human
ccauuugcaggcucuucuccuug

SEQ ID NO: 588271 - RNA, 20 nt, Human
ccccaggccaccaggggccc

SEQ ID NO: 588272 - RNA, 22 nt, Human
ccccaggccaccaggggcccgc

SEQ ID NO: 588273 - RNA, 23 nt, Human
cccccaggccaccaggggcccgc

SEQ ID NO: 588274 - RNA, 22 nt, Human
cccccaggccaccaggggcccu

SEQ ID NO: 588275 - RNA, 22 nt, Human
ccccccgcccggcagggaaccu

SEQ ID NO: 588276 - RNA, 23 nt, Human
ccccccgcccggcagggaaccug

SEQ ID NO: 588277 - RNA, 22 nt, Human
ccccgugggagaacacggggcg

SEQ ID NO: 588278 - RNA, 23 nt, Human
ccccgugggagaacacggggcgg

SEQ ID NO: 588279 - RNA, 18 nt, Human
ccccuggaacucgggcug

SEQ ID NO: 588280 - RNA, 21 nt, Human
cccggcagggaaccugacccc

SEQ ID NO: 588281 - RNA, 23 nt, Human
ccgcgugcgcgcccuccgauucu

SEQ ID NO: 588282 - RNA, 19 nt, Human
ccggugcacgcugccgccg

SEQ ID NO: 588283 - RNA, 23 nt, Human
cgaaacagaaacaucaaacugcc

SEQ ID NO: 588284 - RNA, 19 nt, Human
cggcacggcggcggcugcc

SEQ ID NO: 588285 - RNA, 21 nt, Human
cggcagggaaccugaccccac

SEQ ID NO: 588286 - RNA, 20 nt, Human
cggggcggcaccggugcccc

SEQ ID NO: 588287 - RNA, 22 nt, Human
cggugcacgcugccgccggaag

SEQ ID NO: 588288 - RNA, 22 nt, Human
cguuggacugcgcccgucucuu

SEQ ID NO: 588289 - RNA, 19 nt, Human
cuccagggaugaaugcacc

SEQ ID NO: 588290 - RNA, 20 nt, Human
cuggcccccaggccaccagg

SEQ ID NO: 588291 - RNA, 18 nt, Human
cugggucccuucccucgg

SEQ ID NO: 588292 - RNA, 25 nt, Human
gagcuccagcacacagguagaaaca

SEQ ID NO: 588293 - RNA, 20 nt, Human
gaggccccuggaacucgggc

SEQ ID NO: 588294 - RNA, 18 nt, Human
gaggugauugauugaaac

SEQ ID NO: 588295 - RNA, 21 nt, Human
gaggugauugauugaaacgga

SEQ ID NO: 588296 - RNA, 21 nt, Human
gcccgcccggugcacgcugcc

SEQ ID NO: 588297 - RNA, 28 nt, Human
gccgaaacagaaacaucaaacugccaag

SEQ ID NO: 588298 - RNA, 24 nt, Human
ggagcugaagguuguuuuuaaaug

SEQ ID NO: 588299 - RNA, 18 nt, Human
ggccaccaggggcccgcu

SEQ ID NO: 588300 - RNA, 22 nt, Human
ggcggcugccuugcgcuuccag

SEQ ID NO: 588301 - RNA, 19 nt, Human
gggguuccucuucuccucc

SEQ ID NO: 588302 - RNA, 22 nt, Human
gggguuccucuucuccuccuca

SEQ ID NO: 588303 - RNA, 18 nt, Human
ggguuccucuucuccucc

SEQ ID NO: 588304 - RNA, 21 nt, Human
gguuucgugccagagugacac

SEQ ID NO: 588305 - RNA, 23 nt, Human
guacuuacuggccuuggugguca

SEQ ID NO: 588306 - RNA, 23 nt, Human
guccugcuggcaguguccaugcu

SEQ ID NO: 588307 - RNA, 21 nt, Human
guuuuccugcgagaauccugg

SEQ ID NO: 588308 - RNA, 22 nt, Human
uaaaaaaagaggggacuggaaa

SEQ ID NO: 588309 - RNA, 23 nt, Human
uaaaaaacaagucgaggugauug

SEQ ID NO: 588310 - RNA, 18 nt, Human
uaaaaccacaggcuggac

SEQ ID NO: 588311 - RNA, 20 nt, Human
uaagaaaagcagaaaaagug

SEQ ID NO: 588312 - RNA, 26 nt, Human
uaagaaaagcagaaaaaguguuuucu

SEQ ID NO: 588313 - RNA, 19 nt, Human
uaccaaaggcugcacuagg

SEQ ID NO: 588314 - RNA, 18 nt, Human
uacucggguggcugcgug

SEQ ID NO: 588315 - RNA, 19 nt, Human
uacuguuuuccugcgagaa

SEQ ID NO: 588316 - RNA, 24 nt, Human
uaggauuucuucuguguccaacag

SEQ ID NO: 588317 - RNA, 24 nt, Human
uaucguaaaaccacaggcuggacg

SEQ ID NO: 588318 - RNA, 19 nt, Human
uccacaagcaaaagacugc

SEQ ID NO: 588319 - RNA, 21 nt, Human
uccacaagcaaaagacugcgg

SEQ ID NO: 588320 - RNA, 22 nt, Human
uccacaagcaaaagacugcggc

SEQ ID NO: 588321 - RNA, 19 nt, Human
uccagggccuggaagcccc

SEQ ID NO: 588322 - RNA, 22 nt, Human
uccccagaucgggaugucucug

SEQ ID NO: 588323 - RNA, 20 nt, Human
uccccaggggacccagcgga

SEQ ID NO: 588324 - RNA, 20 nt, Human
uccuccucagaagggcugua

SEQ ID NO: 588325 - RNA, 27 nt, Human
ucuccaauuauaaaaucagugacuguu

SEQ ID NO: 588326 - RNA, 22 nt, Human
ucugcccucacaccccagcagg

SEQ ID NO: 588327 - RNA, 26 nt, Human
ucugccuuugacucuaagauggggca

SEQ ID NO: 588328 - RNA, 18 nt, Human
ugaaaaugcacaguggca

SEQ ID NO: 588329 - RNA, 18 nt, Human
ugaaaaugcacaguggca

SEQ ID NO: 588330 - RNA, 18 nt, Human
ugacaccaaaauacccca

SEQ ID NO: 588331 - RNA, 26 nt, Human
ugaggaaguuaguaaacauuuuuucc

SEQ ID NO: 588332 - RNA, 21 nt, Human
ugaggagcggagcccagaggu

SEQ ID NO: 588333 - RNA, 20 nt, Human
ugagggcaagggaggagcgg

SEQ ID NO: 588334 - RNA, 21 nt, Human
ugccccaccugcccacggguc

SEQ ID NO: 588335 - RNA, 21 nt, Human
ugccccaccugcccacggguc

SEQ ID NO: 588336 - RNA, 23 nt, Human
ugccgaaacagaaacaucaaacu

SEQ ID NO: 588337 - RNA, 20 nt, Human
ugcggcuccucucucugcag

SEQ ID NO: 588338 - RNA, 25 nt, Human
ugcuuuaggaagcaaacucaagucu

SEQ ID NO: 588339 - RNA, 24 nt, Human
uggcccccaggccaccaggggccc

SEQ ID NO: 588340 - RNA, 22 nt, Human
ugggaugugcccgcgacccugg

SEQ ID NO: 588341 - RNA, 23 nt, Human
ugggaugugcccgcgacccuggc

SEQ ID NO: 588342 - RNA, 19 nt, Human
uguacagcaggagugagga

SEQ ID NO: 588343 - RNA, 23 nt, Human
ugucaccagacauccucaucacc

SEQ ID NO: 588344 - RNA, 21 nt, Human
uguccgcacggcugucaccag

SEQ ID NO: 588345 - RNA, 18 nt, Human
ugucucacacacaagggg

SEQ ID NO: 588346 - RNA, 24 nt, Human
uuaaaaaaugcugcauguuuccug

SEQ ID NO: 588347 - RNA, 21 nt, Human
uucaaaaaacccuucaucugc

SEQ ID NO: 588348 - RNA, 22 nt, Human
uucagaaaucaaaaaaauuuuc

SEQ ID NO: 588349 - RNA, 21 nt, Human
uuccugaaguaccuaaaugga

SEQ ID NO: 588350 - RNA, 19 nt, Human
uuuacuuauuccauugaaa

SEQ ID NO: 588351 - RNA, 18 nt, Human
uuugacucuaagaugggg

SEQ ID NO: 588352 - RNA, 24 nt, Human
uuuuuuuuuuuuuuuuuucccaag

SEQ ID NO: 588353 - RNA, 24 nt, Human
aaaaugcuuggauuacaggcauga

SEQ ID NO: 588354 - RNA, 21 nt, Human
aaccacagcgcccccgccagc

SEQ ID NO: 588355 - RNA, 25 nt, Human
aagcgauucucccaccucagccucc

SEQ ID NO: 588356 - RNA, 20 nt, Human
acagccacuuuuuuggccca

SEQ ID NO: 588357 - RNA, 21 nt, Human
accacagcgcccccgccagcc

SEQ ID NO: 588358 - RNA, 19 nt, Human
acucuaaguuuuguuuugg

SEQ ID NO: 588359 - RNA, 19 nt, Human
agaaagccaggggugaaaa

SEQ ID NO: 588360 - RNA, 22 nt, Human
agaaugccuuugucccaugaaa

SEQ ID NO: 588361 - RNA, 18 nt, Human
agagggagguggggcuug

SEQ ID NO: 588362 - RNA, 23 nt, Human
aguagcugggauuacgggcgugu

SEQ ID NO: 588363 - RNA, 20 nt, Human
agugcaguggcgcaaucucg

SEQ ID NO: 588364 - RNA, 24 nt, Human
agugcaguggcgcaaucucggcuc

SEQ ID NO: 588365 - RNA, 18 nt, Human
augaaauguucuggaacc

SEQ ID NO: 588366 - RNA, 19 nt, Human
augacacuuccugaagucu

SEQ ID NO: 588367 - RNA, 25 nt, Human
augacacuuccugaagucuugggug

SEQ ID NO: 588368 - RNA, 18 nt, Human
auggggucucgccauguu

SEQ ID NO: 588369 - RNA, 20 nt, Human
auggggucucgccauguugg

SEQ ID NO: 588370 - RNA, 24 nt, Human
auggggucucgccauguuggccag

SEQ ID NO: 588371 - RNA, 24 nt, Human
auuuuuguauuuuuaguagagaug

SEQ ID NO: 588372 - RNA, 24 nt, Human
caaaaugcuuggauuacaggcaug

SEQ ID NO: 588373 - RNA, 24 nt, Human
caacaugcucagcuaauuuuugua

SEQ ID NO: 588374 - RNA, 20 nt, Human
caagcgauucucccaccuca

SEQ ID NO: 588375 - RNA, 20 nt, Human
cacagcgcccccgccagccc

SEQ ID NO: 588376 - RNA, 21 nt, Human
cacagcgcccccgccagcccu

SEQ ID NO: 588377 - RNA, 20 nt, Human
cacccggccacaagcuucua

SEQ ID NO: 588378 - RNA, 24 nt, Human
caccucagccuccugaguagcugg

SEQ ID NO: 588379 - RNA, 21 nt, Human
cacugcaaccugcaccuccug

SEQ ID NO: 588380 - RNA, 23 nt, Human
cacugcaaccugcaccuccuggg

SEQ ID NO: 588381 - RNA, 20 nt, Human
cagccuccugaguagcuggg

SEQ ID NO: 588382 - RNA, 21 nt, Human
cagcgcccccgccagcccucc

SEQ ID NO: 588383 - RNA, 19 nt, Human
caugaaauguucuggaacc

SEQ ID NO: 588384 - RNA, 24 nt, Human
cauguuggccaggcuggucucaaa

SEQ ID NO: 588385 - RNA, 20 nt, Human
ccacagcgcccccgccagcc

SEQ ID NO: 588386 - RNA, 23 nt, Human
ccaccucagccuccugaguagcu

SEQ ID NO: 588387 - RNA, 19 nt, Human
ccacugcacccggccacaa

SEQ ID NO: 588388 - RNA, 19 nt, Human
ccauguuggccaggcuggu

SEQ ID NO: 588389 - RNA, 23 nt, Human
cccaccucagccuccugaguagc

SEQ ID NO: 588390 - RNA, 21 nt, Human
ccccagggugggggggacacc

SEQ ID NO: 588391 - RNA, 19 nt, Human
ccccugcccaccucagaca

SEQ ID NO: 588392 - RNA, 19 nt, Human
cccugcccaccucagacag

SEQ ID NO: 588393 - RNA, 24 nt, Human
ccuccuggguucaagcgauucucc

SEQ ID NO: 588394 - RNA, 23 nt, Human
ccugaguagcugggauuacgggc

SEQ ID NO: 588395 - RNA, 23 nt, Human
ccugaguagcugggauuacgggc

SEQ ID NO: 588396 - RNA, 24 nt, Human
ccuggccucaauugauccaccucc

SEQ ID NO: 588397 - RNA, 19 nt, Human
ccuucaucaccaucagggu

SEQ ID NO: 588398 - RNA, 20 nt, Human
ccuuggagcuggcugagccc

SEQ ID NO: 588399 - RNA, 21 nt, Human
ccuuggagcuggcugagcccu

SEQ ID NO: 588400 - RNA, 22 nt, Human
cgccagcccuccgugggagcac

SEQ ID NO: 588401 - RNA, 24 nt, Human
cgccauguuggccaggcuggucuc

SEQ ID NO: 588402 - RNA, 24 nt, Human
cucacugcaaccugcaccuccugg

SEQ ID NO: 588403 - RNA, 24 nt, Human
cucagccuccugaguagcugggau

SEQ ID NO: 588404 - RNA, 23 nt, Human
cuccuggccucaauugauccacc

SEQ ID NO: 588405 - RNA, 21 nt, Human
cuccuggguucaagcgauucu

SEQ ID NO: 588406 - RNA, 24 nt, Human
cugaguagcugggauuacgggcgu

SEQ ID NO: 588407 - RNA, 21 nt, Human
cugcaaccugcaccuccuggg

SEQ ID NO: 588408 - RNA, 23 nt, Human
cugcaaccugcaccuccuggguu

SEQ ID NO: 588409 - RNA, 19 nt, Human
cuggaaccacagcgccccc

SEQ ID NO: 588410 - RNA, 21 nt, Human
cuugcagaaugccuuuguccc

SEQ ID NO: 588411 - RNA, 20 nt, Human
cuuggauuacaggcaugagc

SEQ ID NO: 588412 - RNA, 19 nt, Human
gaacuuggagagggaggug

SEQ ID NO: 588413 - RNA, 22 nt, Human
gaaggucucccuuccccugccc

SEQ ID NO: 588414 - RNA, 19 nt, Human
gagacaccaucaugugugg

SEQ ID NO: 588415 - RNA, 21 nt, Human
gagauagggucuugcuccauu

SEQ ID NO: 588416 - RNA, 20 nt, Human
gagcacagaggggcaggccu

SEQ ID NO: 588417 - RNA, 20 nt, Human
gaguagcugggauuacgggc

SEQ ID NO: 588418 - RNA, 20 nt, Human
gaguagcugggauuacgggc

SEQ ID NO: 588419 - RNA, 18 nt, Human
gauuacaggcaugagcca

SEQ ID NO: 588420 - RNA, 22 nt, Human
gauuacaggcaugagccacugc

SEQ ID NO: 588421 - RNA, 23 nt, Human
gauuacaggcaugagccacugca

SEQ ID NO: 588422 - RNA, 21 nt, Human
gauucucccaccucagccucc

SEQ ID NO: 588423 - RNA, 22 nt, Human
gccacaagcuucuacuucuugc

SEQ ID NO: 588424 - RNA, 22 nt, Human
gccacugcacccggccacaagc

SEQ ID NO: 588425 - RNA, 25 nt, Human
gccauguuggccaggcuggucucaa

SEQ ID NO: 588426 - RNA, 19 nt, Human
gcuagagugcaguggcgca

SEQ ID NO: 588427 - RNA, 23 nt, Human
gcuggucucaaacuccuggccuc

SEQ ID NO: 588428 - RNA, 18 nt, Human
ggagagggagguggggcu

SEQ ID NO: 588429 - RNA, 22 nt, Human
ggagagggagguggggcuugga

SEQ ID NO: 588430 - RNA, 18 nt, Human
ggagcuggcugagcccug

SEQ ID NO: 588431 - RNA, 19 nt, Human
ggagcuggcugagcccugu

SEQ ID NO: 588432 - RNA, 20 nt, Human
ggauuacaggcaugagccac

SEQ ID NO: 588433 - RNA, 22 nt, Human
ggauuacaggcaugagccacug

SEQ ID NO: 588434 - RNA, 24 nt, Human
ggauuacaggcaugagccacugca

SEQ ID NO: 588435 - RNA, 24 nt, Human
ggcuggucucaaacuccuggccuc

SEQ ID NO: 588436 - RNA, 18 nt, Human
ggggacaccuuguccuug

SEQ ID NO: 588437 - RNA, 21 nt, Human
ggggguguagagaggaggagg

SEQ ID NO: 588438 - RNA, 22 nt, Human
ggggucucgccauguuggccag

SEQ ID NO: 588439 - RNA, 19 nt, Human
gguggggcuuggaaaugcc

SEQ ID NO: 588440 - RNA, 23 nt, Human
guagagauggggucucgccaugu

SEQ ID NO: 588441 - RNA, 18 nt, Human
guagcugggauuacgggc

SEQ ID NO: 588442 - RNA, 24 nt, Human
uaaggaggugguggggaaggucuc

SEQ ID NO: 588443 - RNA, 24 nt, Human
uaauuuuuguauuuuuaguagaga

SEQ ID NO: 588444 - RNA, 23 nt, Human
uacaggcaugagccacugcaccc

SEQ ID NO: 588445 - RNA, 19 nt, Human
uagaaagccaggggugaaa

SEQ ID NO: 588446 - RNA, 22 nt, Human
uagagauggggucucgccaugu

SEQ ID NO: 588447 - RNA, 23 nt, Human
uagagugcaguggcgcaaucucg

SEQ ID NO: 588448 - RNA, 24 nt, Human
uagagugcaguggcgcaaucucgg

SEQ ID NO: 588449 - RNA, 24 nt, Human
uaguagagauggggucucgccaug

SEQ ID NO: 588450 - RNA, 24 nt, Human
ucaaaaugcuuggauuacaggcau

SEQ ID NO: 588451 - RNA, 24 nt, Human
ucacugcaaccugcaccuccuggg

SEQ ID NO: 588452 - RNA, 27 nt, Human
ucacugcaaccugcaccuccuggguuc

SEQ ID NO: 588453 - RNA, 20 nt, Human
ucagccuccugaguagcugg

SEQ ID NO: 588454 - RNA, 23 nt, Human
uccaccuccuuggccucucaaaa

SEQ ID NO: 588455 - RNA, 22 nt, Human
uccacgagugcuaugacacuuc

SEQ ID NO: 588456 - RNA, 24 nt, Human
uccauugcuuaggcuagagugcag

SEQ ID NO: 588457 - RNA, 22 nt, Human
ucccuucucucauuuucuaaaa

SEQ ID NO: 588458 - RNA, 22 nt, Human
uccucugacaauugaguuucca

SEQ ID NO: 588459 - RNA, 24 nt, Human
uccugaguagcugggauuacgggc

SEQ ID NO: 588460 - RNA, 21 nt, Human
uccuggguucaagcgauucuc

SEQ ID NO: 588461 - RNA, 23 nt, Human
uccuggguucaagcgauucuccc

SEQ ID NO: 588462 - RNA, 20 nt, Human
uccuuggagcuggcugagcc

SEQ ID NO: 588463 - RNA, 23 nt, Human
uccuuggagcuggcugagcccug

SEQ ID NO: 588464 - RNA, 25 nt, Human
uccuuggagcuggcugagcccugug

SEQ ID NO: 588465 - RNA, 24 nt, Human
ucgccauguuggccaggcuggucu

SEQ ID NO: 588466 - RNA, 22 nt, Human
ucggcucacugcaaccugcacc

SEQ ID NO: 588467 - RNA, 24 nt, Human
ucucaaaaugcuuggauuacaggc

SEQ ID NO: 588468 - RNA, 23 nt, Human
ucucacaccaggcuaaggaggug

SEQ ID NO: 588469 - RNA, 24 nt, Human
ucucccaccucagccuccugagua

SEQ ID NO: 588470 - RNA, 24 nt, Human
ucucgccauguuggccaggcuggu

SEQ ID NO: 588471 - RNA, 24 nt, Human
ucuugcuccauugcuuaggcuaga

SEQ ID NO: 588472 - RNA, 19 nt, Human
ugaaauguucuggaaccac

SEQ ID NO: 588473 - RNA, 30 nt, Human
ugaaauguucuggaaccacagcgccccccu

SEQ ID NO: 588474 - RNA, 20 nt, Human
ugauccaccuccuuggccuc

SEQ ID NO: 588475 - RNA, 22 nt, Human
ugcaguggcgcaaucucggcuc

SEQ ID NO: 588476 - RNA, 23 nt, Human
ugcaguggcgcaaucucggcuca

SEQ ID NO: 588477 - RNA, 20 nt, Human
ugccagcccaguccuugaac

SEQ ID NO: 588478 - RNA, 19 nt, Human
ugccuuguccccagggugg

SEQ ID NO: 588479 - RNA, 24 nt, Human
ugcuccauugcuuaggcuagagug

SEQ ID NO: 588480 - RNA, 22 nt, Human
ugcuuaggcuagagugcagugg

SEQ ID NO: 588481 - RNA, 24 nt, Human
ugcuuaggcuagagugcaguggcg

SEQ ID NO: 588482 - RNA, 23 nt, Human
uggaaaugccuuguccccagggu

SEQ ID NO: 588483 - RNA, 22 nt, Human
uggaaccacagcgcccccgcca

SEQ ID NO: 588484 - RNA, 20 nt, Human
uggauuacaggcaugagcca

SEQ ID NO: 588485 - RNA, 23 nt, Human
uggauuacaggcaugagccacug

SEQ ID NO: 588486 - RNA, 24 nt, Human
uggccaggcuggucucaaacuccu

SEQ ID NO: 588487 - RNA, 21 nt, Human
uggccucaauugauccaccuc

SEQ ID NO: 588488 - RNA, 20 nt, Human
uggccucuuggggaucccuc

SEQ ID NO: 588489 - RNA, 18 nt, Human
ugggauuacgggcgugug

SEQ ID NO: 588490 - RNA, 21 nt, Human
ugggauuacgggcguguguca

SEQ ID NO: 588491 - RNA, 24 nt, Human
uggggucucgccauguuggccagg

SEQ ID NO: 588492 - RNA, 23 nt, Human
uggguccucugacaauugaguuu

SEQ ID NO: 588493 - RNA, 18 nt, Human
ugguauauucacaaaugc

SEQ ID NO: 588494 - RNA, 21 nt, Human
uguauuuuuaguagagauggg

SEQ ID NO: 588495 - RNA, 18 nt, Human
uuaguagagauggggucu

SEQ ID NO: 588496 - RNA, 24 nt, Human
uuaguagagauggggucucgccau

SEQ ID NO: 588497 - RNA, 23 nt, Human
uucaagcgauucucccaccucag

SEQ ID NO: 588498 - RNA, 24 nt, Human
uucaagcgauucucccaccucagc

SEQ ID NO: 588499 - RNA, 23 nt, Human
uuggaaaugccuuguccccaggg

SEQ ID NO: 588500 - RNA, 23 nt, Human
uuggagagggagguggggcuugg

SEQ ID NO: 588501 - RNA, 22 nt, Human
uuggauuacaggcaugagccac

SEQ ID NO: 588502 - RNA, 24 nt, Human
uuggauuacaggcaugagccacug

SEQ ID NO: 588503 - RNA, 23 nt, Human
uuguauuuuuaguagagaugggg

SEQ ID NO: 588504 - RNA, 19 nt, Human
uuucucagacgauucugug

SEQ ID NO: 588505 - RNA, 21 nt, Human
uuucucagacgauucugugaa

SEQ ID NO: 588506 - RNA, 24 nt, Human
uuuuuaguagagauggggucucgc

SEQ ID NO: 588507 - RNA, 20 nt, Human
uuuuuguauuuuuaguagag

SEQ ID NO: 588508 - RNA, 22 nt, Human
accucccgcggacucuccgcug

SEQ ID NO: 588509 - RNA, 21 nt, Human
aggcaaagggcaagcccagag

SEQ ID NO: 588510 - RNA, 23 nt, Human
caaaacacccugaaccagccacg

SEQ ID NO: 588511 - RNA, 22 nt, Human
caaggccggcucuuccaagcac

SEQ ID NO: 588512 - RNA, 23 nt, Human
cacccaagccaccucccgcggac

SEQ ID NO: 588513 - RNA, 23 nt, Human
cacccugaaccagccacgaagac

SEQ ID NO: 588514 - RNA, 19 nt, Human
ccaagccaccucccgcgga

SEQ ID NO: 588515 - RNA, 27 nt, Human
ccacaaauccucuccucgcccaggucc

SEQ ID NO: 588516 - RNA, 23 nt, Human
ccacgaagacugcugcucccaga

SEQ ID NO: 588517 - RNA, 21 nt, Human
cccaagccaccucccgcggac

SEQ ID NO: 588518 - RNA, 21 nt, Human
cccugagguauagaaccggca

SEQ ID NO: 588519 - RNA, 19 nt, Human
ccucccgcggacucuccgc

SEQ ID NO: 588520 - RNA, 21 nt, Human
ccucgcccaggucccuuuccc

SEQ ID NO: 588521 - RNA, 21 nt, Human
cgcacacccaagccaccuccc

SEQ ID NO: 588522 - RNA, 21 nt, Human
cggaacaaaacacccugaacc

SEQ ID NO: 588523 - RNA, 18 nt, Human
cggcaggcaggcaggcuc

SEQ ID NO: 588524 - RNA, 18 nt, Human
cucuccgcuggcaguccc

SEQ ID NO: 588525 - RNA, 19 nt, Human
gacugcugcucccagacuc

SEQ ID NO: 588526 - RNA, 22 nt, Human
gcugauagccucacucaaccca

SEQ ID NO: 588527 - RNA, 18 nt, Human
ggaacaaaacacccugaa

SEQ ID NO: 588528 - RNA, 20 nt, Human
ggacucuccgcuggcagucc

SEQ ID NO: 588529 - RNA, 18 nt, Human
ggagggcccacccaaggc

SEQ ID NO: 588530 - RNA, 18 nt, Human
ggcagaggguuuucauca

SEQ ID NO: 588531 - RNA, 22 nt, Human
gggcagaggguuuucaucaugu

SEQ ID NO: 588532 - RNA, 20 nt, Human
ggggaggggacgggaggggg

SEQ ID NO: 588533 - RNA, 18 nt, Human
gucccuuucccccuuucu

SEQ ID NO: 588534 - RNA, 20 nt, Human
gucccuuucccccuuucugg

SEQ ID NO: 588535 - RNA, 21 nt, Human
gugaggguagaggcgguggag

SEQ ID NO: 588536 - RNA, 20 nt, Human
uccaaggggaggggacggga

SEQ ID NO: 588537 - RNA, 18 nt, Human
ucugcaggaggcaaaggg

SEQ ID NO: 588538 - RNA, 22 nt, Human
ucugcaggaggcaaagggcaag

SEQ ID NO: 588539 - RNA, 21 nt, Human
ugaggguagaggcgguggagg

SEQ ID NO: 588540 - RNA, 24 nt, Human
ugaggguagaggcgguggagggcc

SEQ ID NO: 588541 - RNA, 18 nt, Human
ugccccugagguauagaa

SEQ ID NO: 588542 - RNA, 22 nt, Human
uggagggcccacccaaggccgg

SEQ ID NO: 588543 - RNA, 21 nt, Human
ugguagaugaggccagggcag

SEQ ID NO: 588544 - RNA, 21 nt, Human
uuuucaaaguucugcaggagg

SEQ ID NO: 588545 - RNA, 22 nt, Human
aaaaacacgaugaaugauaguc

SEQ ID NO: 588546 - RNA, 24 nt, Human
aaaacauaaaaaauaaaagcuaca

SEQ ID NO: 588547 - RNA, 21 nt, Human
aaaauccucuuaaccccacuu

SEQ ID NO: 588548 - RNA, 18 nt, Human
aaaugaaaacacaaauaa

SEQ ID NO: 588549 - RNA, 22 nt, Human
aaaugcagaagaucgauggacu

SEQ ID NO: 588550 - RNA, 18 nt, Human
agacuuuuaacuuucuuc

SEQ ID NO: 588551 - RNA, 23 nt, Human
auagcagacaauaguggcuuggu

SEQ ID NO: 588552 - RNA, 23 nt, Human
auccaaauuguuauguacuguau

SEQ ID NO: 588553 - RNA, 18 nt, Human
auccuauuccuuucccca

SEQ ID NO: 588554 - RNA, 21 nt, Human
auggauccgacagggucgugg

SEQ ID NO: 588555 - RNA, 20 nt, Human
auggaucuggauuaagaugg

SEQ ID NO: 588556 - RNA, 19 nt, Human
auugaaauuccacagguaa

SEQ ID NO: 588557 - RNA, 21 nt, Human
caaagcaaaccaauuuccccu

SEQ ID NO: 588558 - RNA, 22 nt, Human
caaagcaaaccaauuuccccug

SEQ ID NO: 588559 - RNA, 18 nt, Human
caacacucucaaaugaaa

SEQ ID NO: 588560 - RNA, 26 nt, Human
caacacucucaaaugaaaacacaaau

SEQ ID NO: 588561 - RNA, 22 nt, Human
caaugguggucuuaaaauuggu

SEQ ID NO: 588562 - RNA, 27 nt, Human
cacuucaguccuuuugauugcuguuuc

SEQ ID NO: 588563 - RNA, 21 nt, Human
cagacugggauccaaauuguu

SEQ ID NO: 588564 - RNA, 20 nt, Human
cagaggagcugcucugggug

SEQ ID NO: 588565 - RNA, 19 nt, Human
cagcacuacuacaaucuua

SEQ ID NO: 588566 - RNA, 23 nt, Human
ccuguggcugaaucacaguuaac

SEQ ID NO: 588567 - RNA, 21 nt, Human
cugaguuugagaagaagaagg

SEQ ID NO: 588568 - RNA, 24 nt, Human
cuuaaaauccucuuaaccccacuu

SEQ ID NO: 588569 - RNA, 25 nt, Human
cuuaaaauccucuuaaccccacuuc

SEQ ID NO: 588570 - RNA, 19 nt, Human
cuuuggacuguugcuccuc

SEQ ID NO: 588571 - RNA, 18 nt, Human
gaacuaaacuugaaaaaa

SEQ ID NO: 588572 - RNA, 18 nt, Human
guccucuugaccuucugc

SEQ ID NO: 588573 - RNA, 22 nt, Human
gugguucccgagguauagugaa

SEQ ID NO: 588574 - RNA, 19 nt, Human
guuuucaguguucugugcc

SEQ ID NO: 588575 - RNA, 18 nt, Human
uaaaagcuacauaauccu

SEQ ID NO: 588576 - RNA, 21 nt, Human
uaaaggucauucuuuaaaaca

SEQ ID NO: 588577 - RNA, 24 nt, Human
uaagagcagauacugccaccuagg

SEQ ID NO: 588578 - RNA, 28 nt, Human
uacaaucuuaacagucugccuuuuuaaa

SEQ ID NO: 588579 - RNA, 23 nt, Human
uauaaaacauaaaaaauaaaagc

SEQ ID NO: 588580 - RNA, 25 nt, Human
uauaacaaaaacacgaugaaugaua

SEQ ID NO: 588581 - RNA, 21 nt, Human
uauuccagacugggauccaaa

SEQ ID NO: 588582 - RNA, 19 nt, Human
ucaaaacuaugcagaggag

SEQ ID NO: 588583 - RNA, 23 nt, Human
ucaaaccuauaaaugcagaagau

SEQ ID NO: 588584 - RNA, 23 nt, Human
uccgcggaggcgcgguuuuuuuu

SEQ ID NO: 588585 - RNA, 21 nt, Human
uccucaggugagaauuuuguu

SEQ ID NO: 588586 - RNA, 21 nt, Human
ucuccuuuaacugauaaaggu

SEQ ID NO: 588587 - RNA, 24 nt, Human
ucucuccuuuuuccucaggugaga

SEQ ID NO: 588588 - RNA, 23 nt, Human
ucugaguuugagaagaagaaggg

SEQ ID NO: 588589 - RNA, 24 nt, Human
ucugugccauggcuaggucaggga

SEQ ID NO: 588590 - RNA, 19 nt, Human
ugaaaacacaaauaaguuu

SEQ ID NO: 588591 - RNA, 20 nt, Human
ugaaaguggcuacaguugga

SEQ ID NO: 588592 - RNA, 22 nt, Human
ugaacuaaacuugaaaaaaucc

SEQ ID NO: 588593 - RNA, 18 nt, Human
ugccauggcuaggucagg

SEQ ID NO: 588594 - RNA, 23 nt, Human
ugcccuuuuuauuccagacuggg

SEQ ID NO: 588595 - RNA, 27 nt, Human
ugcuggagauggagguggucguacguc

SEQ ID NO: 588596 - RNA, 19 nt, Human
uggauccgacagggucgug

SEQ ID NO: 588597 - RNA, 18 nt, Human
uggcaacaauagcagaca

SEQ ID NO: 588598 - RNA, 22 nt, Human
uggcaacaauagcagacaauag

SEQ ID NO: 588599 - RNA, 24 nt, Human
uuaaauggagaacuagagaauaca

SEQ ID NO: 588600 - RNA, 24 nt, Human
uucaaaccuauaaaugcagaagau

SEQ ID NO: 588601 - RNA, 22 nt, Human
uucaauaucagcaauggugguc

SEQ ID NO: 588602 - RNA, 19 nt, Human
uucaguguucugugccaug

SEQ ID NO: 588603 - RNA, 19 nt, Human
uucaguguucugugccaug

SEQ ID NO: 588604 - RNA, 20 nt, Human
uuccucaggugagaauuuug

SEQ ID NO: 588605 - RNA, 20 nt, Human
uuggguuuagagagguuuuu

SEQ ID NO: 588606 - RNA, 22 nt, Human
uuguucaacacucucaaaugaa

SEQ ID NO: 588607 - RNA, 23 nt, Human
uuuuuucugaguuugagaagaag

SEQ ID NO: 588608 - RNA, 22 nt, Human
aaaaaaagggggauaaacagaa

SEQ ID NO: 588609 - RNA, 20 nt, Human
aaaagauucaguuagccccu

SEQ ID NO: 588610 - RNA, 20 nt, Human
aaacaaugggcuuaaaaaaa

SEQ ID NO: 588611 - RNA, 24 nt, Human
aaacccaacagccacagugauugu

SEQ ID NO: 588612 - RNA, 23 nt, Human
aaccugugccugguggccacaga

SEQ ID NO: 588613 - RNA, 23 nt, Human
aacuccucuggcccuggggcugg

SEQ ID NO: 588614 - RNA, 22 nt, Human
aagcaaagauggggcuccaagg

SEQ ID NO: 588615 - RNA, 25 nt, Human
aagcaaagauggggcuccaaggucu

SEQ ID NO: 588616 - RNA, 22 nt, Human
aaggaaucuagaacaaaguucu

SEQ ID NO: 588617 - RNA, 21 nt, Human
aaggagccaacuccccacgag

SEQ ID NO: 588618 - RNA, 26 nt, Human
aaugggcuuaaaaaaaaaaaaagggg

SEQ ID NO: 588619 - RNA, 18 nt, Human
acacccccacccaccauc

SEQ ID NO: 588620 - RNA, 20 nt, Human
acccccacccaccaucccca

SEQ ID NO: 588621 - RNA, 18 nt, Human
acccugcccaggaaggag

SEQ ID NO: 588622 - RNA, 21 nt, Human
accugugccugguggccacag

SEQ ID NO: 588623 - RNA, 23 nt, Human
acuccacugcccuagacgagugg

SEQ ID NO: 588624 - RNA, 19 nt, Human
acugcuuggggcaagggaa

SEQ ID NO: 588625 - RNA, 20 nt, Human
acugcuuggggcaagggaag

SEQ ID NO: 588626 - RNA, 24 nt, Human
agaaauaggagaaaacccaacagc

SEQ ID NO: 588627 - RNA, 19 nt, Human
agagagggcuaugcugugu

SEQ ID NO: 588628 - RNA, 24 nt, Human
agccaacuccccacgagaagccug

SEQ ID NO: 588629 - RNA, 20 nt, Human
agcugagggggcaucagacc

SEQ ID NO: 588630 - RNA, 25 nt, Human
aggaaaaaacaggcucaagagugaa

SEQ ID NO: 588631 - RNA, 21 nt, Human
aggaagagguaggcaacaaaa

SEQ ID NO: 588632 - RNA, 23 nt, Human
aggaagagguaggcaacaaaagg

SEQ ID NO: 588633 - RNA, 24 nt, Human
aggagucaggagaaagaaccaaca

SEQ ID NO: 588634 - RNA, 18 nt, Human
agguaggcaacaaaagga

SEQ ID NO: 588635 - RNA, 23 nt, Human
agguaggcaacaaaaggaagaga

SEQ ID NO: 588636 - RNA, 18 nt, Human
aggucagggaggugggga

SEQ ID NO: 588637 - RNA, 19 nt, Human
agguguuauccugaagaag

SEQ ID NO: 588638 - RNA, 21 nt, Human
caaaaccacaggagucaggag

SEQ ID NO: 588639 - RNA, 20 nt, Human
caaaauaaauaugccaguuc

SEQ ID NO: 588640 - RNA, 19 nt, Human
caaagcuuaccugccuucc

SEQ ID NO: 588641 - RNA, 24 nt, Human
caauggggcagcagccugaagccc

SEQ ID NO: 588642 - RNA, 21 nt, Human
cacaguagcuguggcucacca

SEQ ID NO: 588643 - RNA, 21 nt, Human
caccucccugaccccugcgcu

SEQ ID NO: 588644 - RNA, 22 nt, Human
cacgcagacuccacugcccuag

SEQ ID NO: 588645 - RNA, 23 nt, Human
cacgcagacuccacugcccuaga

SEQ ID NO: 588646 - RNA, 21 nt, Human
cacggcaaccugggcagucug

SEQ ID NO: 588647 - RNA, 21 nt, Human
cagaccaagggaucaaagcua

SEQ ID NO: 588648 - RNA, 23 nt, Human
cagcagugucuccaccucccuga

SEQ ID NO: 588649 - RNA, 22 nt, Human
cagccagggagccccgcccccu

SEQ ID NO: 588650 - RNA, 21 nt, Human
caggagacacgcagacuccac

SEQ ID NO: 588651 - RNA, 24 nt, Human
ccaacagccacagugauugucaaa

SEQ ID NO: 588652 - RNA, 18 nt, Human
ccaagccggagcaguucu

SEQ ID NO: 588653 - RNA, 22 nt, Human
ccaaugcccugccccagcccca

SEQ ID NO: 588654 - RNA, 23 nt, Human
ccaauggggcagcagccugaagc

SEQ ID NO: 588655 - RNA, 20 nt, Human
ccagagaggaugauaugauc

SEQ ID NO: 588656 - RNA, 30 nt, Human
ccagcgccccaccugcuggaacagccaagg

SEQ ID NO: 588657 - RNA, 24 nt, Human
ccaggccagaagugguaaaagauu

SEQ ID NO: 588658 - RNA, 19 nt, Human
ccagggagccccgcccccu

SEQ ID NO: 588659 - RNA, 21 nt, Human
cccacccaccauccccagaga

SEQ ID NO: 588660 - RNA, 20 nt, Human
cccagaccaagggaucaaag

SEQ ID NO: 588661 - RNA, 21 nt, Human
cccagaccaagggaucaaagc

SEQ ID NO: 588662 - RNA, 27 nt, Human
cccaggagacacgcagacuccacugcc

SEQ ID NO: 588663 - RNA, 19 nt, Human
ccccaagucauugaguugg

SEQ ID NO: 588664 - RNA, 20 nt, Human
ccccacccaccauccccaga

SEQ ID NO: 588665 - RNA, 28 nt, Human
ccccaccugcuggaacagccaagccgga

SEQ ID NO: 588666 - RNA, 19 nt, Human
ccccagaauucaaaccacu

SEQ ID NO: 588667 - RNA, 18 nt, Human
cccccacccaccaucccc

SEQ ID NO: 588668 - RNA, 20 nt, Human
cccugcgcugcuuugcucug

SEQ ID NO: 588669 - RNA, 20 nt, Human
cccuggggcuggcucacugc

SEQ ID NO: 588670 - RNA, 19 nt, Human
ccuacacaaaggccccaga

SEQ ID NO: 588671 - RNA, 24 nt, Human
ccuacuccugcugggcccuagaag

SEQ ID NO: 588672 - RNA, 23 nt, Human
ccucccugaccccugcgcugcuu

SEQ ID NO: 588673 - RNA, 18 nt, Human
ccugagcugugccugggg

SEQ ID NO: 588674 - RNA, 22 nt, Human
ccugccccacccugcccaggaa

SEQ ID NO: 588675 - RNA, 18 nt, Human
ccugccuucccuccuccc

SEQ ID NO: 588676 - RNA, 18 nt, Human
ccuggcccccacuuccua

SEQ ID NO: 588677 - RNA, 24 nt, Human
cgccccaccugcuggaacagccaa

SEQ ID NO: 588678 - RNA, 21 nt, Human
cgggacacugaccggaagcca

SEQ ID NO: 588679 - RNA, 21 nt, Human
cucacugcauccugccccacc

SEQ ID NO: 588680 - RNA, 20 nt, Human
cuccaccucccugaccccug

SEQ ID NO: 588681 - RNA, 23 nt, Human
cuccaggauauugacacccccac

SEQ ID NO: 588682 - RNA, 21 nt, Human
cucccugaccccugcgcugcu

SEQ ID NO: 588683 - RNA, 24 nt, Human
cuccucuggcccuggggcuggcuc

SEQ ID NO: 588684 - RNA, 28 nt, Human
cucguccaaagcuuaccuggccuaaugg

SEQ ID NO: 588685 - RNA, 20 nt, Human
cugaccccugcgcugcuuug

SEQ ID NO: 588686 - RNA, 25 nt, Human
cugccccacccugcccaggaaggag

SEQ ID NO: 588687 - RNA, 18 nt, Human
cugcucuccuggccccca

SEQ ID NO: 588688 - RNA, 20 nt, Human
cuggggcuuucuguugccaa

SEQ ID NO: 588689 - RNA, 23 nt, Human
cuuaaaaaaaaaaaaagggggau

SEQ ID NO: 588690 - RNA, 24 nt, Human
gaaaaaacaggcucaagagugaag

SEQ ID NO: 588691 - RNA, 19 nt, Human
gagagagagagggcuaugc

SEQ ID NO: 588692 - RNA, 19 nt, Human
gcaaagauggggcuccaag

SEQ ID NO: 588693 - RNA, 20 nt, Human
gcagcagccugaagccccgc

SEQ ID NO: 588694 - RNA, 19 nt, Human
gcccaguacuggguggacu

SEQ ID NO: 588695 - RNA, 20 nt, Human
gccccaccugcuggaacagc

SEQ ID NO: 588696 - RNA, 18 nt, Human
gcccuggagagagagagg

SEQ ID NO: 588697 - RNA, 19 nt, Human
gcuggaacagccaagccgg

SEQ ID NO: 588698 - RNA, 23 nt, Human
ggaagccuggggaguaaucuucc

SEQ ID NO: 588699 - RNA, 18 nt, Human
ggcuuaaaaaaaaaaaaa

SEQ ID NO: 588700 - RNA, 22 nt, Human
gggagggagccagugacuggac

SEQ ID NO: 588701 - RNA, 23 nt, Human
ggggaagaaaugccuccuuuagg

SEQ ID NO: 588702 - RNA, 21 nt, Human
ggggcaagggaagccugggga

SEQ ID NO: 588703 - RNA, 21 nt, Human
gggggguggggaaggccacgg

SEQ ID NO: 588704 - RNA, 19 nt, Human
gggguggggaaggccacgg

SEQ ID NO: 588705 - RNA, 25 nt, Human
guggggaagaaaugccuccuuuagg

SEQ ID NO: 588706 - RNA, 25 nt, Human
guugucaccucccgcacaguguccu

SEQ ID NO: 588707 - RNA, 22 nt, Human
uaaacaaugggcuuaaaaaaaa

SEQ ID NO: 588708 - RNA, 19 nt, Human
uaaagugccauuagcaaaa

SEQ ID NO: 588709 - RNA, 21 nt, Human
uaacagaugaccccaacuccu

SEQ ID NO: 588710 - RNA, 24 nt, Human
uaacugccaaugcccugccccagc

SEQ ID NO: 588711 - RNA, 27 nt, Human
uaauaaauaaauaaaggucaggcacaa

SEQ ID NO: 588712 - RNA, 18 nt, Human
uacaacccuaugagguag

SEQ ID NO: 588713 - RNA, 24 nt, Human
uacacaaaggccccagaauucaaa

SEQ ID NO: 588714 - RNA, 20 nt, Human
uaccggccacaccggaagcc

SEQ ID NO: 588715 - RNA, 25 nt, Human
uagcaaaaccacaggagucaggaga

SEQ ID NO: 588716 - RNA, 18 nt, Human
ucacaguagcuguggcuc

SEQ ID NO: 588717 - RNA, 24 nt, Human
ucauugaguugggguaagggagcu

SEQ ID NO: 588718 - RNA, 18 nt, Human
ucccuccucccugagcug

SEQ ID NO: 588719 - RNA, 20 nt, Human
uccgugaaccuugcugcugu

SEQ ID NO: 588720 - RNA, 19 nt, Human
uccucuggcccuggggcug

SEQ ID NO: 588721 - RNA, 23 nt, Human
uccugccccacccugcccaggaa

SEQ ID NO: 588722 - RNA, 23 nt, Human
ucucaaagaauaaacaaugggcu

SEQ ID NO: 588723 - RNA, 23 nt, Human
ucuccaccucccugaccccugcg

SEQ ID NO: 588724 - RNA, 20 nt, Human
ucugaacccaaaugagugga

SEQ ID NO: 588725 - RNA, 23 nt, Human
ugagguaggccguaccacuaucc

SEQ ID NO: 588726 - RNA, 21 nt, Human
ugaguugggguaagggagcuc

SEQ ID NO: 588727 - RNA, 24 nt, Human
ugcaagcaaagauggggcuccaag

SEQ ID NO: 588728 - RNA, 23 nt, Human
ugccaaugcccugccccagcccc

SEQ ID NO: 588729 - RNA, 20 nt, Human
ugccuggggcuuucuguugc

SEQ ID NO: 588730 - RNA, 19 nt, Human
ugcguaacugccaaugccc

SEQ ID NO: 588731 - RNA, 20 nt, Human
ugcuggaacagccaagccgg

SEQ ID NO: 588732 - RNA, 21 nt, Human
uggaacagccaagccggagca

SEQ ID NO: 588733 - RNA, 20 nt, Human
uggagccaggccagaagugg

SEQ ID NO: 588734 - RNA, 20 nt, Human
ugggcuuaaaaaaaaaaaaa

SEQ ID NO: 588735 - RNA, 18 nt, Human
uggggcuccaaggucugu

SEQ ID NO: 588736 - RNA, 20 nt, Human
ugggggguggggaaggccac

SEQ ID NO: 588737 - RNA, 24 nt, Human
ugguccaccugacaucuccaugga

SEQ ID NO: 588738 - RNA, 24 nt, Human
ugucaaagagcugagggggcauca

SEQ ID NO: 588739 - RNA, 25 nt, Human
ugucaaagagcugagggggcaucag

SEQ ID NO: 588740 - RNA, 19 nt, Human
ugugcagagggugucaagg

SEQ ID NO: 588741 - RNA, 22 nt, Human
ugugccaagcacuucacauuua

SEQ ID NO: 588742 - RNA, 22 nt, Human
uguugccaagaaauguuaagga

SEQ ID NO: 588743 - RNA, 23 nt, Human
uuagaaauaggagaaaacccaac

SEQ ID NO: 588744 - RNA, 21 nt, Human
uucauuagcacagcaugauga

SEQ ID NO: 588745 - RNA, 23 nt, Human
uuccacuguagccuagcagggag

SEQ ID NO: 588746 - RNA, 23 nt, Human
uucucguccaaagcuuaccugcc

SEQ ID NO: 588747 - RNA, 22 nt, Human
uuucauuagcacagcaugauga

SEQ ID NO: 588748 - RNA, 23 nt, Human
uuuuuuuuuuuuuuuuuuucacg

SEQ ID NO: 588749 - RNA, 20 nt, Human
acacuuguaugguuucucuu

SEQ ID NO: 588750 - RNA, 19 nt, Human
acugugccugggaggaguu

SEQ ID NO: 588751 - RNA, 21 nt, Human
aggcagaacugaccuuaagcu

SEQ ID NO: 588752 - RNA, 20 nt, Human
aggucuccgaaauggcagga

SEQ ID NO: 588753 - RNA, 24 nt, Human
aucaggauguggaugaguguggcu

SEQ ID NO: 588754 - RNA, 20 nt, Human
caguaugaauucucuuaugu

SEQ ID NO: 588755 - RNA, 22 nt, Human
caugucuacuaaggguugagga

SEQ ID NO: 588756 - RNA, 20 nt, Human
cuaauucuucugccacacac

SEQ ID NO: 588757 - RNA, 24 nt, Human
cuacauggcuguaaaugggccacu

SEQ ID NO: 588758 - RNA, 20 nt, Human
cugggucugcacuauagucc

SEQ ID NO: 588759 - RNA, 27 nt, Human
gcauauggugggccuuggcgguuagcc

SEQ ID NO: 588760 - RNA, 20 nt, Human
ggcagaacugaccuuaagcu

SEQ ID NO: 588761 - RNA, 18 nt, Human
ggccugccuacauggcug

SEQ ID NO: 588762 - RNA, 23 nt, Human
gggccacuuccuccaggucuccg

SEQ ID NO: 588763 - RNA, 22 nt, Human
uaaacugauguuagaagguaaa

SEQ ID NO: 588764 - RNA, 18 nt, Human
uaaguucagaacucucag

SEQ ID NO: 588765 - RNA, 23 nt, Human
uagaaccagacaaugggcauaau

SEQ ID NO: 588766 - RNA, 18 nt, Human
uagcuggcuuguuagagg

SEQ ID NO: 588767 - RNA, 21 nt, Human
uccaggucuccgaaauggcag

SEQ ID NO: 588768 - RNA, 23 nt, Human
uccuccaggucuccgaaauggca

SEQ ID NO: 588769 - RNA, 21 nt, Human
ucucuuauguguaguaaggau

SEQ ID NO: 588770 - RNA, 19 nt, Human
ucugcaggccugccuacau

SEQ ID NO: 588771 - RNA, 19 nt, Human
ugaaugaacucaugucuac

SEQ ID NO: 588772 - RNA, 21 nt, Human
ugaauuuguagugaugagggg

SEQ ID NO: 588773 - RNA, 21 nt, Human
ugaauuuguagugaugagggg

SEQ ID NO: 588774 - RNA, 23 nt, Human
ugacuaauucuucugccacacac

SEQ ID NO: 588775 - RNA, 21 nt, Human
ugaugagggguuuuagcuugg

SEQ ID NO: 588776 - RNA, 22 nt, Human
ugccacauucuucacaaacgua

SEQ ID NO: 588777 - RNA, 21 nt, Human
uggcuuguuagaggggguugg

SEQ ID NO: 588778 - RNA, 18 nt, Human
ugggaggaguuugggaug

SEQ ID NO: 588779 - RNA, 19 nt, Human
uguauaguaaggugugagg

SEQ ID NO: 588780 - RNA, 24 nt, Human
uguguaguaaggauacgggaguac

SEQ ID NO: 588781 - RNA, 19 nt, Human
uuaaaauagaaccagacaa

SEQ ID NO: 588782 - RNA, 24 nt, Human
uuccuccaggucuccgaaauggca

SEQ ID NO: 588783 - RNA, 20 nt, Human
uuggcagucaggucugcaua

SEQ ID NO: 588784 - RNA, 19 nt, Human
aaaaaaacccacccauuuu

SEQ ID NO: 588785 - RNA, 18 nt, Human
aaaacgccauuaaguuug

SEQ ID NO: 588786 - RNA, 21 nt, Human
aaaaugguucuuguauugcca

SEQ ID NO: 588787 - RNA, 20 nt, Human
aaagcaaaugaaauugaagc

SEQ ID NO: 588788 - RNA, 18 nt, Human
aaaugugaacagaaaggu

SEQ ID NO: 588789 - RNA, 21 nt, Human
aagaaggaaguaacuccaaga

SEQ ID NO: 588790 - RNA, 23 nt, Human
aaugguucuuguauugccagaag

SEQ ID NO: 588791 - RNA, 18 nt, Human
accaggaaaaaacuccaa

SEQ ID NO: 588792 - RNA, 23 nt, Human
acuauaagguguaacacuggacc

SEQ ID NO: 588793 - RNA, 24 nt, Human
agagccucuccgggcggcgggaga

SEQ ID NO: 588794 - RNA, 18 nt, Human
aggccagacauucauucu

SEQ ID NO: 588795 - RNA, 22 nt, Human
agguuacacuguaacuaccccc

SEQ ID NO: 588796 - RNA, 20 nt, Human
aguacgugaccucuugugcu

SEQ ID NO: 588797 - RNA, 19 nt, Human
agugaguccucccuuaguu

SEQ ID NO: 588798 - RNA, 21 nt, Human
auaacugcuuaaaaaaaaccc

SEQ ID NO: 588799 - RNA, 23 nt, Human
auaagguguaacacuggaccgaa

SEQ ID NO: 588800 - RNA, 21 nt, Human
auuuuuguuucauuuugaaaa

SEQ ID NO: 588801 - RNA, 21 nt, Human
caaagcaaguaaaagaaagua

SEQ ID NO: 588802 - RNA, 26 nt, Human
caaagccugccucaguuuaaaaauca

SEQ ID NO: 588803 - RNA, 19 nt, Human
caagagauuauuucaugaa

SEQ ID NO: 588804 - RNA, 18 nt, Human
caccauacaagacuaggc

SEQ ID NO: 588805 - RNA, 26 nt, Human
caccuucagucaaagaaagccagagg

SEQ ID NO: 588806 - RNA, 19 nt, Human
cagaaacccucuugcuggc

SEQ ID NO: 588807 - RNA, 18 nt, Human
caggggcugcugcugcug

SEQ ID NO: 588808 - RNA, 21 nt, Human
caguaccgcuaaauuuguaua

SEQ ID NO: 588809 - RNA, 22 nt, Human
cauccuucagaagaaucaaagc

SEQ ID NO: 588810 - RNA, 25 nt, Human
cauuuugaaaaaacaaaaacaucag

SEQ ID NO: 588811 - RNA, 21 nt, Human
ccaagauccugaaaaugguuc

SEQ ID NO: 588812 - RNA, 21 nt, Human
cccacucagauucuauuucca

SEQ ID NO: 588813 - RNA, 21 nt, Human
ccccaguggggcuuauuacuu

SEQ ID NO: 588814 - RNA, 21 nt, Human
ccccgccgucuuuguccuccu

SEQ ID NO: 588815 - RNA, 20 nt, Human
ccgccgucuuuguccuccuc

SEQ ID NO: 588816 - RNA, 19 nt, Human
ccuauaaacaccuucaguc

SEQ ID NO: 588817 - RNA, 20 nt, Human
ccuccucugagcccccgcug

SEQ ID NO: 588818 - RNA, 28 nt, Human
ccucuccgggcggcgggagagcaggggc

SEQ ID NO: 588819 - RNA, 24 nt, Human
ccucugagcccccgcugguggcga

SEQ ID NO: 588820 - RNA, 23 nt, Human
ccuggggcuggggcuggggcugc

SEQ ID NO: 588821 - RNA, 18 nt, Human
cgccaagggggagcggcg

SEQ ID NO: 588822 - RNA, 23 nt, Human
cgggaccgggugccuuuggcgcc

SEQ ID NO: 588823 - RNA, 22 nt, Human
cugcugcugcugcugggccugg

SEQ ID NO: 588824 - RNA, 18 nt, Human
cugcugcugcugggccug

SEQ ID NO: 588825 - RNA, 20 nt, Human
cugggccuggggcuggggcu

SEQ ID NO: 588826 - RNA, 19 nt, Human
cuggggcugcuggggcuug

SEQ ID NO: 588827 - RNA, 22 nt, Human
cuggggcuggggcugcuggggc

SEQ ID NO: 588828 - RNA, 23 nt, Human
cuguguggucugcagccagaggu

SEQ ID NO: 588829 - RNA, 28 nt, Human
cuuccuauaaacaccuucagucaaagaa

SEQ ID NO: 588830 - RNA, 19 nt, Human
cuuuguccuccuccucuga

SEQ ID NO: 588831 - RNA, 18 nt, Human
gaagccgcucuuguugac

SEQ ID NO: 588832 - RNA, 19 nt, Human
gacuaccagacuucacuga

SEQ ID NO: 588833 - RNA, 24 nt, Human
gaugcacugagacugaaauaacau

SEQ ID NO: 588834 - RNA, 21 nt, Human
gaugcuggguaaagugcagag

SEQ ID NO: 588835 - RNA, 20 nt, Human
gcagagagaagcaccacaga

SEQ ID NO: 588836 - RNA, 23 nt, Human
gcaggggcugcugcugcugcugc

SEQ ID NO: 588837 - RNA, 21 nt, Human
gccagacauucauucugugcu

SEQ ID NO: 588838 - RNA, 22 nt, Human
gccuuuggcgccaagggggagc

SEQ ID NO: 588839 - RNA, 20 nt, Human
gcugcugcugcugcugcugg

SEQ ID NO: 588840 - RNA, 20 nt, Human
gcugcuggggcuugcugggg

SEQ ID NO: 588841 - RNA, 20 nt, Human
gcuuucuguuauugcugaaa

SEQ ID NO: 588842 - RNA, 23 nt, Human
ggaaaaaacuccaaacuugugga

SEQ ID NO: 588843 - RNA, 26 nt, Human
ggacugaauuacacuauaagguguaa

SEQ ID NO: 588844 - RNA, 20 nt, Human
ggaggcucccugcuuaccgg

SEQ ID NO: 588845 - RNA, 23 nt, Human
ggccuggggcuggggcuggggcu

SEQ ID NO: 588846 - RNA, 23 nt, Human
gggagagcaggggcugcugcugc

SEQ ID NO: 588847 - RNA, 25 nt, Human
gggcugcuggggcuugcuggggccg

SEQ ID NO: 588848 - RNA, 25 nt, Human
ggggagcggcggcgggagcuccgcg

SEQ ID NO: 588849 - RNA, 19 nt, Human
ggggcuggggcugcugggg

SEQ ID NO: 588850 - RNA, 20 nt, Human
ggggcuggggcugcuggggc

SEQ ID NO: 588851 - RNA, 26 nt, Human
gugaauccuuaaaaauaaaauucaca

SEQ ID NO: 588852 - RNA, 22 nt, Human
gugcagagagaagcaccacaga

SEQ ID NO: 588853 - RNA, 22 nt, Human
guucaagagauuauuucaugaa

SEQ ID NO: 588854 - RNA, 18 nt, Human
uaaaaaucagaugaaaug

SEQ ID NO: 588855 - RNA, 28 nt, Human
uaaaaugucaugaaaugguaccuaaaaa

SEQ ID NO: 588856 - RNA, 22 nt, Human
uaaagugcagagagaagcacca

SEQ ID NO: 588857 - RNA, 27 nt, Human
uaagaaggaaguaacuccaagauccug

SEQ ID NO: 588858 - RNA, 18 nt, Human
uaccuuaaaucuccucac

SEQ ID NO: 588859 - RNA, 24 nt, Human
uacuucagccuuuucauggugccu

SEQ ID NO: 588860 - RNA, 21 nt, Human
uaggguuguccuguguggucu

SEQ ID NO: 588861 - RNA, 25 nt, Human
uagugacagaacauagacuagcuuc

SEQ ID NO: 588862 - RNA, 21 nt, Human
uauugccagaagaauuucagu

SEQ ID NO: 588863 - RNA, 19 nt, Human
ucaaagcaaguaaaagaaa

SEQ ID NO: 588864 - RNA, 19 nt, Human
ucagaacacaucuuuaaca

SEQ ID NO: 588865 - RNA, 22 nt, Human
ucagucaaagaaagccagagga

SEQ ID NO: 588866 - RNA, 23 nt, Human
ucagucaaagaaagccagaggag

SEQ ID NO: 588867 - RNA, 19 nt, Human
uccgcggaggcucccugcu

SEQ ID NO: 588868 - RNA, 19 nt, Human
uccgcggaggcucccugcu

SEQ ID NO: 588869 - RNA, 19 nt, Human
ugaaaaaacaaaaacauca

SEQ ID NO: 588870 - RNA, 20 nt, Human
ugaaaaaacaaaaacaucag

SEQ ID NO: 588871 - RNA, 26 nt, Human
ugaaauaacaucuguugacuaccaga

SEQ ID NO: 588872 - RNA, 22 nt, Human
ugaaaucggccgucugcucucc

SEQ ID NO: 588873 - RNA, 23 nt, Human
ugaaaugugaacagaaagguuuu

SEQ ID NO: 588874 - RNA, 22 nt, Human
ugaggcauaauguucaaagcaa

SEQ ID NO: 588875 - RNA, 21 nt, Human
ugagguaauaacugcuuaaaa

SEQ ID NO: 588876 - RNA, 18 nt, Human
ugaucacuccuggucucu

SEQ ID NO: 588877 - RNA, 21 nt, Human
ugcugcugcugcugggccugg

SEQ ID NO: 588878 - RNA, 18 nt, Human
ugcugcugcugggccugg

SEQ ID NO: 588879 - RNA, 20 nt, Human
ugcuggggcuugcuggggcc

SEQ ID NO: 588880 - RNA, 19 nt, Human
uggggcugcuggggcuugc

SEQ ID NO: 588881 - RNA, 20 nt, Human
uggggcugcuggggcuugcu

SEQ ID NO: 588882 - RNA, 24 nt, Human
ugguucugaagaccugcugaucac

SEQ ID NO: 588883 - RNA, 20 nt, Human
uguccuccuccucugagccc

SEQ ID NO: 588884 - RNA, 25 nt, Human
uguggucugcagccagagguuacac

SEQ ID NO: 588885 - RNA, 20 nt, Human
uuaaaucuccucacgugugu

SEQ ID NO: 588886 - RNA, 26 nt, Human
uuaagaaagauuaagaaggaaguaac

SEQ ID NO: 588887 - RNA, 22 nt, Human
uuacaccauacaagacuaggcu

SEQ ID NO: 588888 - RNA, 20 nt, Human
uugacuaccagacuucacug

SEQ ID NO: 588889 - RNA, 19 nt, Human
uugcuggggccgucgccuc

SEQ ID NO: 588890 - RNA, 25 nt, Human
uuggucuuaauauaagacaucagaa

SEQ ID NO: 588891 - RNA, 18 nt, Human
uuuguuagagucugcaaa

SEQ ID NO: 588892 - RNA, 18 nt, Human
uuuuugguucugaagacc

SEQ ID NO: 588893 - RNA, 24 nt, Human
uuuuugguucugaagaccugcuga

SEQ ID NO: 588894 - RNA, 21 nt, Human
aaaggcagggagguggcaaag

SEQ ID NO: 588895 - RNA, 18 nt, Human
aaccccucccugaaccca

SEQ ID NO: 588896 - RNA, 19 nt, Human
aaccccucccugaacccac

SEQ ID NO: 588897 - RNA, 21 nt, Human
acagagcagacagaaaccccg

SEQ ID NO: 588898 - RNA, 21 nt, Human
accagagaaggcacaccagac

SEQ ID NO: 588899 - RNA, 18 nt, Human
accaggggccaacugaaa

SEQ ID NO: 588900 - RNA, 23 nt, Human
acccaccacuccugagaacagca

SEQ ID NO: 588901 - RNA, 22 nt, Human
accccaucuguggccucuccag

SEQ ID NO: 588902 - RNA, 20 nt, Human
agacaagugccagcggcccc

SEQ ID NO: 588903 - RNA, 18 nt, Human
agccaaccaggggccaac

SEQ ID NO: 588904 - RNA, 21 nt, Human
agccaccagagaaggcacacc

SEQ ID NO: 588905 - RNA, 23 nt, Human
agccauggcacgugccgucccug

SEQ ID NO: 588906 - RNA, 23 nt, Human
agcugugagugcacagcaggcac

SEQ ID NO: 588907 - RNA, 20 nt, Human
aggcagggagguggcaaagg

SEQ ID NO: 588908 - RNA, 26 nt, Human
aggcagggagguggcaaaggggaccc

SEQ ID NO: 588909 - RNA, 23 nt, Human
agguggcaaaggccagcccaacc

SEQ ID NO: 588910 - RNA, 18 nt, Human
agucuccacaaacugugg

SEQ ID NO: 588911 - RNA, 19 nt, Human
caaaggccagcccaaccca

SEQ ID NO: 588912 - RNA, 20 nt, Human
caaaggccagcccaacccag

SEQ ID NO: 588913 - RNA, 21 nt, Human
cacaggcccugcaaaggcagg

SEQ ID NO: 588914 - RNA, 18 nt, Human
cacagucccucaggccca

SEQ ID NO: 588915 - RNA, 21 nt, Human
cagacacagacuccugucagc

SEQ ID NO: 588916 - RNA, 21 nt, Human
cagacagaaaccccggcccuu

SEQ ID NO: 588917 - RNA, 25 nt, Human
cagcacugcuccaaccccucccuga

SEQ ID NO: 588918 - RNA, 19 nt, Human
cagcccaacccagcccucc

SEQ ID NO: 588919 - RNA, 22 nt, Human
cagcccaucaccuggaggugau

SEQ ID NO: 588920 - RNA, 19 nt, Human
cagguccuggcaccaucuc

SEQ ID NO: 588921 - RNA, 22 nt, Human
cagugugaagaggggcugggga

SEQ ID NO: 588922 - RNA, 24 nt, Human
caucccccaccacaggccuccgcu

SEQ ID NO: 588923 - RNA, 24 nt, Human
caucuguggccucuccagccgucc

SEQ ID NO: 588924 - RNA, 22 nt, Human
ccaaaagagccagguccuggca

SEQ ID NO: 588925 - RNA, 24 nt, Human
ccaaccccagcccugccuggaggc

SEQ ID NO: 588926 - RNA, 23 nt, Human
ccagcacugcuccaaccccuccc

SEQ ID NO: 588927 - RNA, 19 nt, Human
ccaggcaguggccaugaac

SEQ ID NO: 588928 - RNA, 23 nt, Human
ccaucuguggccucuccagccgu

SEQ ID NO: 588929 - RNA, 19 nt, Human
ccauggcacgugccguccc

SEQ ID NO: 588930 - RNA, 23 nt, Human
cccagcaggccugcugcagguca

SEQ ID NO: 588931 - RNA, 20 nt, Human
cccaggucacagggagggcg

SEQ ID NO: 588932 - RNA, 22 nt, Human
ccccaggucacagggagggcgg

SEQ ID NO: 588933 - RNA, 25 nt, Human
cccccaccacaggccuccgcugcuc

SEQ ID NO: 588934 - RNA, 23 nt, Human
cccugccuggaggcccuggugag

SEQ ID NO: 588935 - RNA, 21 nt, Human
ccgagcucccagcaggccugc

SEQ ID NO: 588936 - RNA, 21 nt, Human
ccggcccuucuugggggcuuc

SEQ ID NO: 588937 - RNA, 21 nt, Human
ccguccacaggcccugcaaag

SEQ ID NO: 588938 - RNA, 23 nt, Human
ccuccacucuggguacccagagg

SEQ ID NO: 588939 - RNA, 20 nt, Human
ccuggaggcccuggugagcu

SEQ ID NO: 588940 - RNA, 20 nt, Human
cgacaggggugggccccagg

SEQ ID NO: 588941 - RNA, 18 nt, Human
cgcugcucacugcugugc

SEQ ID NO: 588942 - RNA, 22 nt, Human
cgggcaggcaauguacauagcc

SEQ ID NO: 588943 - RNA, 23 nt, Human
cgggcaggcaauguacauagcca

SEQ ID NO: 588944 - RNA, 23 nt, Human
cuccaaccccucccugaacccac

SEQ ID NO: 588945 - RNA, 19 nt, Human
cucccagcaggccugcugc

SEQ ID NO: 588946 - RNA, 25 nt, Human
cucccugaacccacagggcagagcc

SEQ ID NO: 588947 - RNA, 26 nt, Human
gagcccgcccacaccuccaucauacc

SEQ ID NO: 588948 - RNA, 24 nt, Human
gcaggucagaagggccacauccca

SEQ ID NO: 588949 - RNA, 19 nt, Human
gccuggggcauccucugca

SEQ ID NO: 588950 - RNA, 21 nt, Human
gccuugaucggccuggacgag

SEQ ID NO: 588951 - RNA, 21 nt, Human
gcuccaaccccucccugaacc

SEQ ID NO: 588952 - RNA, 21 nt, Human
ggaugccuccuccccugcugg

SEQ ID NO: 588953 - RNA, 21 nt, Human
ggcaaaggccagcccaaccca

SEQ ID NO: 588954 - RNA, 20 nt, Human
ggcacgugccgucccugugg

SEQ ID NO: 588955 - RNA, 18 nt, Human
gggcauccucugcaagag

SEQ ID NO: 588956 - RNA, 20 nt, Human
gggcugggagagugccaguc

SEQ ID NO: 588957 - RNA, 20 nt, Human
gggcuggggacccaccacuc

SEQ ID NO: 588958 - RNA, 18 nt, Human
uaagaggagccaccagag

SEQ ID NO: 588959 - RNA, 18 nt, Human
uacccagaggaaggcgca

SEQ ID NO: 588960 - RNA, 18 nt, Human
uagaggguucaggccugg

SEQ ID NO: 588961 - RNA, 24 nt, Human
uagccauggcacgugccgucccug

SEQ ID NO: 588962 - RNA, 23 nt, Human
uccacagcccaucaccuggaggu

SEQ ID NO: 588963 - RNA, 24 nt, Human
ucccacgagaguccaucccccacc

SEQ ID NO: 588964 - RNA, 20 nt, Human
ucccccaccacaggccuccg

SEQ ID NO: 588965 - RNA, 22 nt, Human
ucccucaggcccaggugaggau

SEQ ID NO: 588966 - RNA, 18 nt, Human
uccgcugcucacugcugu

SEQ ID NO: 588967 - RNA, 21 nt, Human
uccucugcaagaggaucccac

SEQ ID NO: 588968 - RNA, 22 nt, Human
uccuggcaccaucuccgagcuc

SEQ ID NO: 588969 - RNA, 22 nt, Human
ucuccacaaacuguggauccac

SEQ ID NO: 588970 - RNA, 22 nt, Human
ucuccagccguccacaggcccu

SEQ ID NO: 588971 - RNA, 18 nt, Human
ucuugggucccugaccuc

SEQ ID NO: 588972 - RNA, 21 nt, Human
ugaaaaaaugcuggacucucg

SEQ ID NO: 588973 - RNA, 22 nt, Human
ugaacccacagggcagagccag

SEQ ID NO: 588974 - RNA, 20 nt, Human
ugcaaaggcagggagguggc

SEQ ID NO: 588975 - RNA, 18 nt, Human
ugcaagcacuucacauga

SEQ ID NO: 588976 - RNA, 22 nt, Human
ugcuggacucucggucaaggac

SEQ ID NO: 588977 - RNA, 21 nt, Human
uggaggcccuggugagcuugc

SEQ ID NO: 588978 - RNA, 22 nt, Human
ugggaagacccagcugugagug

SEQ ID NO: 588979 - RNA, 23 nt, Human
ugggccccaggucacaggacccu

SEQ ID NO: 588980 - RNA, 23 nt, Human
uggggacccaccacuccugagaa

SEQ ID NO: 588981 - RNA, 19 nt, Human
uggguacccagaggaaggc

SEQ ID NO: 588982 - RNA, 24 nt, Human
ugggucccugaccucauugggccu

SEQ ID NO: 588983 - RNA, 23 nt, Human
ugucagcucaggcguccuggccu

SEQ ID NO: 588984 - RNA, 26 nt, Human
aaucaaaaacacaaaguccaaggauc

SEQ ID NO: 588985 - RNA, 22 nt, Human
acacaaaguccaaggauccucc

SEQ ID NO: 588986 - RNA, 21 nt, Human
agaauaucaacauacaaucaa

SEQ ID NO: 588987 - RNA, 18 nt, Human
caacauacaaucaaaaac

SEQ ID NO: 588988 - RNA, 21 nt, Human
ucaaaaacacaaaguccaagg

SEQ ID NO: 588989 - RNA, 18 nt, Human
aaaaacaaaagacauuca

SEQ ID NO: 588990 - RNA, 21 nt, Human
aaaaacaaaagacauucaaaa

SEQ ID NO: 588991 - RNA, 24 nt, Human
aaacaaaaacaaaagacauucaaa

SEQ ID NO: 588992 - RNA, 26 nt, Human
aaacaaaacaaaaacaaaagacauuc

SEQ ID NO: 588993 - RNA, 26 nt, Human
acaaaacaaaaacaaaagacauucaa

SEQ ID NO: 588994 - RNA, 27 nt, Human
acaaaacaaaaacaaaagacauucaaa

SEQ ID NO: 588995 - RNA, 30 nt, Human
caaaaacaaaagacauucaaaauuccccuu

SEQ ID NO: 588996 - RNA, 23 nt, Human
caaaacaaaaacaaaagacauuc

SEQ ID NO: 588997 - RNA, 23 nt, Human
caaaacaaaacaaaaacaaaaga

SEQ ID NO: 588998 - RNA, 22 nt, Human
caaaagacauucaaaauucccc

SEQ ID NO: 588999 - RNA, 19 nt, Human
cucugugccgcgccgcucc

SEQ ID NO: 589000 - RNA, 18 nt, Human
gaacacuugcaccaggga

SEQ ID NO: 589001 - RNA, 23 nt, Human
gggggugggcuguugcccuggca

SEQ ID NO: 589002 - RNA, 25 nt, Human
ucaaaacaaaacaaaaacaaaagac

SEQ ID NO: 589003 - RNA, 28 nt, Human
ucaaaauuccccugugguggacaacuga

SEQ ID NO: 589004 - RNA, 22 nt, Human
ucccagguugucucagggagca

SEQ ID NO: 589005 - RNA, 23 nt, Human
ugaguugauguggcugauccagg

SEQ ID NO: 589006 - RNA, 23 nt, Human
uggaugaacacuugcaccaggga

SEQ ID NO: 589007 - RNA, 20 nt, Human
uguugcccuggcacggcugg

SEQ ID NO: 589008 - RNA, 25 nt, Human
uucaaaacaaaacaaaaacaaaaga

SEQ ID NO: 589009 - RNA, 18 nt, Human
uucaaaauuccccugugg

SEQ ID NO: 589010 - RNA, 26 nt, Human
aaaaaaaaaaaaaaaggccccuggga

SEQ ID NO: 589011 - RNA, 18 nt, Human
aaaaaaaaaaaaaaggcc

SEQ ID NO: 589012 - RNA, 19 nt, Human
aaaaaaaggccccugggaa

SEQ ID NO: 589013 - RNA, 20 nt, Human
aaaaaggccccugggaauca

SEQ ID NO: 589014 - RNA, 24 nt, Human
aaacaaacaaagucccgcggagca

SEQ ID NO: 589015 - RNA, 21 nt, Human
aaagagggcuuucuccauguu

SEQ ID NO: 589016 - RNA, 22 nt, Human
aacaaagagggacgaggaggaa

SEQ ID NO: 589017 - RNA, 24 nt, Human
aagaaggcuucaggaggcaggaag

SEQ ID NO: 589018 - RNA, 21 nt, Human
acaaacaaagucccgcggagc

SEQ ID NO: 589019 - RNA, 18 nt, Human
acacccccauccccacac

SEQ ID NO: 589020 - RNA, 20 nt, Human
acccccauccccacaccccc

SEQ ID NO: 589021 - RNA, 25 nt, Human
acccccauccccacaccccuuuuga

SEQ ID NO: 589022 - RNA, 26 nt, Human
acggagcgcacgcgccaagggccccc

SEQ ID NO: 589023 - RNA, 18 nt, Human
agaagcccaguccuagac

SEQ ID NO: 589024 - RNA, 24 nt, Human
agacauccaugaggcaagaggucu

SEQ ID NO: 589025 - RNA, 22 nt, Human
agcauggaguagcagggaagaa

SEQ ID NO: 589026 - RNA, 19 nt, Human
agcccaguccuagaccacc

SEQ ID NO: 589027 - RNA, 26 nt, Human
agcggcgugaggggccgcaggcgggg

SEQ ID NO: 589028 - RNA, 21 nt, Human
aggaagagacugaauggauag

SEQ ID NO: 589029 - RNA, 22 nt, Human
aggaagcuccgagauuaacuga

SEQ ID NO: 589030 - RNA, 18 nt, Human
aggcaggaagugggggca

SEQ ID NO: 589031 - RNA, 18 nt, Human
agggaagguuguagagag

SEQ ID NO: 589032 - RNA, 21 nt, Human
agggcggggugggagcacuag

SEQ ID NO: 589033 - RNA, 18 nt, Human
auagaacuagcccuccuc

SEQ ID NO: 589034 - RNA, 21 nt, Human
aucaaaaaaaaaaaaaaaaaa

SEQ ID NO: 589035 - RNA, 22 nt, Human
aucaaaaaaaaaaaaaaaaaaa

SEQ ID NO: 589036 - RNA, 18 nt, Human
caaggcagcucauccucc

SEQ ID NO: 589037 - RNA, 20 nt, Human
cacccccauccccacacccc

SEQ ID NO: 589038 - RNA, 23 nt, Human
cagaaaauccccacccccuucca

SEQ ID NO: 589039 - RNA, 19 nt, Human
cagagccucccucgccucc

SEQ ID NO: 589040 - RNA, 22 nt, Human
cagccuuuguuuccauaggucc

SEQ ID NO: 589041 - RNA, 22 nt, Human
caguccuagaccacccuucuca

SEQ ID NO: 589042 - RNA, 24 nt, Human
cauacagagccucccucgccuccc

SEQ ID NO: 589043 - RNA, 20 nt, Human
ccacaaaccucaacauggaa

SEQ ID NO: 589044 - RNA, 21 nt, Human
ccacaccccuuuugaucaaaa

SEQ ID NO: 589045 - RNA, 23 nt, Human
cccaacaaagagggacgaggagg

SEQ ID NO: 589046 - RNA, 18 nt, Human
ccccacccccuuccauuc

SEQ ID NO: 589047 - RNA, 20 nt, Human
ccguagacacccccaucccc

SEQ ID NO: 589048 - RNA, 25 nt, Human
ccucacccacuccagggaggaacag

SEQ ID NO: 589049 - RNA, 18 nt, Human
ccuggcaggggaagggcc

SEQ ID NO: 589050 - RNA, 19 nt, Human
ccuuccuucccuucuaacc

SEQ ID NO: 589051 - RNA, 19 nt, Human
cgcaggcggggucggggca

SEQ ID NO: 589052 - RNA, 24 nt, Human
cgcccugcuggagaagccgaacuc

SEQ ID NO: 589053 - RNA, 21 nt, Human
cgcggagcacagccgcacgga

SEQ ID NO: 589054 - RNA, 22 nt, Human
cgggcugggggaauguggggcc

SEQ ID NO: 589055 - RNA, 21 nt, Human
cgucucaucccuucuggguca

SEQ ID NO: 589056 - RNA, 21 nt, Human
cucccucgccucccguggagg

SEQ ID NO: 589057 - RNA, 20 nt, Human
cugaggaagagacugaaugg

SEQ ID NO: 589058 - RNA, 22 nt, Human
cugcagccgcccugcuggagaa

SEQ ID NO: 589059 - RNA, 26 nt, Human
cuggagauuucguaucuaaagccuga

SEQ ID NO: 589060 - RNA, 22 nt, Human
cuucccuucuaaccuuacuccg

SEQ ID NO: 589061 - RNA, 18 nt, Human
cuuccuucccuucuaacc

SEQ ID NO: 589062 - RNA, 18 nt, Human
cuuuaugucccugcucuu

SEQ ID NO: 589063 - RNA, 19 nt, Human
cuuuaugucccugcucuuc

SEQ ID NO: 589064 - RNA, 24 nt, Human
gaaucaauuuaaguauagaacuag

SEQ ID NO: 589065 - RNA, 24 nt, Human
gagauuucguaucuaaagccugag

SEQ ID NO: 589066 - RNA, 23 nt, Human
gagcacagccgcacggagcgcac

SEQ ID NO: 589067 - RNA, 26 nt, Human
gcagcucauccuccuaaugggagccu

SEQ ID NO: 589068 - RNA, 21 nt, Human
gcggagcacagccgcacggag

SEQ ID NO: 589069 - RNA, 18 nt, Human
ggcacaucuggcacuggu

SEQ ID NO: 589070 - RNA, 26 nt, Human
ggcggcagaagcccucggccggggga

SEQ ID NO: 589071 - RNA, 18 nt, Human
ggcuuugacgaggcuggu

SEQ ID NO: 589072 - RNA, 21 nt, Human
gggaaaaaccuuugccggagg

SEQ ID NO: 589073 - RNA, 21 nt, Human
ggggcuuugacgaggcuggug

SEQ ID NO: 589074 - RNA, 19 nt, Human
gggguggacaccuuccccc

SEQ ID NO: 589075 - RNA, 22 nt, Human
guagacacccccauccccacac

SEQ ID NO: 589076 - RNA, 21 nt, Human
guccuggcaggggaagggccc

SEQ ID NO: 589077 - RNA, 19 nt, Human
uaaaaauacuauuuacaaa

SEQ ID NO: 589078 - RNA, 18 nt, Human
uaacugaggaagagacug

SEQ ID NO: 589079 - RNA, 19 nt, Human
uaggucccauguaaacacu

SEQ ID NO: 589080 - RNA, 23 nt, Human
ucaaaaaaaaaaaaaaaaaaaaa

SEQ ID NO: 589081 - RNA, 19 nt, Human
uccagggaggaacagaaaa

SEQ ID NO: 589082 - RNA, 20 nt, Human
uccaggucucgguguagcgg

SEQ ID NO: 589083 - RNA, 18 nt, Human
uccauguucuugaucggg

SEQ ID NO: 589084 - RNA, 19 nt, Human
ucccacccucacccacucc

SEQ ID NO: 589085 - RNA, 19 nt, Human
ucccccagaacagggacaa

SEQ ID NO: 589086 - RNA, 24 nt, Human
ucccccagaacagggacaaggcag

SEQ ID NO: 589087 - RNA, 19 nt, Human
ucccgcggagcacagccgc

SEQ ID NO: 589088 - RNA, 19 nt, Human
ucccuucuaaccuuacucc

SEQ ID NO: 589089 - RNA, 22 nt, Human
ugacauuuuccuuuaugucccu

SEQ ID NO: 589090 - RNA, 24 nt, Human
ugaggggccgcaggcggggucggg

SEQ ID NO: 589091 - RNA, 23 nt, Human
ugaucgucaucacccuacagucc

SEQ ID NO: 589092 - RNA, 21 nt, Human
ugcagagggaccagacaucca

SEQ ID NO: 589093 - RNA, 21 nt, Human
ugccaggagggcgggguggga

SEQ ID NO: 589094 - RNA, 21 nt, Human
uggaguagcagggaagaaggc

SEQ ID NO: 589095 - RNA, 24 nt, Human
ugggagcacuagcggcgugagggg

SEQ ID NO: 589096 - RNA, 19 nt, Human
ugggggaauguggggcgcc

SEQ ID NO: 589097 - RNA, 21 nt, Human
ugucccugcucuucuguuuca

SEQ ID NO: 589098 - RNA, 20 nt, Human
uguggggcgccgcggggcgg

SEQ ID NO: 589099 - RNA, 23 nt, Human
uuaaccguagacacccccauccc

SEQ ID NO: 589100 - RNA, 21 nt, Human
uucuccauguucuugaucggg

SEQ ID NO: 589101 - RNA, 28 nt, Human
uugaucuuuccuuccuucccuucuaacc

SEQ ID NO: 589102 - RNA, 19 nt, Human
uugcuuaaccguagacacc

SEQ ID NO: 589103 - RNA, 19 nt, Human
uugguuggagcugugcaga

SEQ ID NO: 589104 - RNA, 23 nt, Human
uugguuggagcugugcagaggga

SEQ ID NO: 589105 - RNA, 19 nt, Human
aggagagcagacaugugcc

SEQ ID NO: 589106 - RNA, 22 nt, Human
cacaguucugaaguucuggggg

SEQ ID NO: 589107 - RNA, 20 nt, Human
ccacacaguucugaaguucu

SEQ ID NO: 589108 - RNA, 25 nt, Human
cuccacacaguucugaaguucuggg

SEQ ID NO: 589109 - RNA, 19 nt, Human
ggguuggggucucccaugu

SEQ ID NO: 589110 - RNA, 18 nt, Human
ggucucccaugugaggga

SEQ ID NO: 589111 - RNA, 21 nt, Human
guucugaaguucugggggcuc

SEQ ID NO: 589112 - RNA, 21 nt, Human
uccacauugucagcuggguug

SEQ ID NO: 589113 - RNA, 18 nt, Human
uccucacauccaaacagc

SEQ ID NO: 589114 - RNA, 24 nt, Human
uugucagcuggguuggggucuccc

SEQ ID NO: 589115 - RNA, 23 nt, Human
uuuguaguuucauucuccucaaa

SEQ ID NO: 589116 - RNA, 23 nt, Human
uuuucaggagagcagacaugugc

SEQ ID NO: 589117 - RNA, 18 nt, Human
uuuuuuuuuuuuuuuuug

SEQ ID NO: 589118 - RNA, 25 nt, Human
uuuuuuuuuuuuuuuuuuguaguuu

SEQ ID NO: 589119 - RNA, 21 nt, Human
aaaaaagaaaagccuauggaa

SEQ ID NO: 589120 - RNA, 21 nt, Human
aaaaagcuccaaccuguagcc

SEQ ID NO: 589121 - RNA, 24 nt, Human
aaaagccccagggaaagggaacaa

SEQ ID NO: 589122 - RNA, 18 nt, Human
aaaccugaaaaaagaaaa

SEQ ID NO: 589123 - RNA, 20 nt, Human
aaagccuauggaaguaggcc

SEQ ID NO: 589124 - RNA, 18 nt, Human
aaagggaacaacuaagag

SEQ ID NO: 589125 - RNA, 18 nt, Human
aaccuaucagaaagacaa

SEQ ID NO: 589126 - RNA, 27 nt, Human
aacuugcuucuuuccucauuccuccug

SEQ ID NO: 589127 - RNA, 25 nt, Human
aagaagugguauguuagcaaggggu

SEQ ID NO: 589128 - RNA, 20 nt, Human
aagacaaacaaaucaccgac

SEQ ID NO: 589129 - RNA, 18 nt, Human
aagacaccaaauuuguga

SEQ ID NO: 589130 - RNA, 28 nt, Human
aaggaaaaaaauacaaugcaguauaaaa

SEQ ID NO: 589131 - RNA, 23 nt, Human
aagggguuuggacccucuuggcc

SEQ ID NO: 589132 - RNA, 23 nt, Human
aaguagccuucugggggaagggc

SEQ ID NO: 589133 - RNA, 19 nt, Human
aauggaaaagccccaggga

SEQ ID NO: 589134 - RNA, 18 nt, Human
acccugggcauauuuugg

SEQ ID NO: 589135 - RNA, 21 nt, Human
acgauugaaguagggcagcac

SEQ ID NO: 589136 - RNA, 21 nt, Human
agaaagacaaacaaaucaccg

SEQ ID NO: 589137 - RNA, 23 nt, Human
agacaaacaaaucaccgacaaca

SEQ ID NO: 589138 - RNA, 25 nt, Human
agacaaacaaaucaccgacaacagg

SEQ ID NO: 589139 - RNA, 22 nt, Human
agagggugguaauuggcucugc

SEQ ID NO: 589140 - RNA, 25 nt, Human
agcccaugcuuacaucaaaccugaa

SEQ ID NO: 589141 - RNA, 25 nt, Human
aggaaguagccuucugggggaaggg

SEQ ID NO: 589142 - RNA, 21 nt, Human
aggaaguaucuccaggcagag

SEQ ID NO: 589143 - RNA, 23 nt, Human
aggaggggcaaguccacugagaa

SEQ ID NO: 589144 - RNA, 21 nt, Human
aggaggugugggauugggagg

SEQ ID NO: 589145 - RNA, 22 nt, Human
aggcagagugagaggagcuauu

SEQ ID NO: 589146 - RNA, 20 nt, Human
agguggggaugggguugggg

SEQ ID NO: 589147 - RNA, 23 nt, Human
agucaaaaggugaaaagagggac

SEQ ID NO: 589148 - RNA, 18 nt, Human
augugccucuccaauccu

SEQ ID NO: 589149 - RNA, 21 nt, Human
caaauggggagaaaaaaauuc

SEQ ID NO: 589150 - RNA, 23 nt, Human
caaccuaucagaaagacaaacaa

SEQ ID NO: 589151 - RNA, 22 nt, Human
caagagguacccaagcacuaag

SEQ ID NO: 589152 - RNA, 22 nt, Human
caaggugaggagaugcaagucc

SEQ ID NO: 589153 - RNA, 20 nt, Human
caaugcaguauaaaagauuu

SEQ ID NO: 589154 - RNA, 19 nt, Human
cacccagucacucuccuag

SEQ ID NO: 589155 - RNA, 18 nt, Human
cacuaagcagcagagggu

SEQ ID NO: 589156 - RNA, 23 nt, Human
cagcaagcaaccucauaggccuu

SEQ ID NO: 589157 - RNA, 22 nt, Human
caggggaaaaaaagcuccaacc

SEQ ID NO: 589158 - RNA, 28 nt, Human
caggggccuggacauguuuucuuccugu

SEQ ID NO: 589159 - RNA, 20 nt, Human
cagucacucuccuagauccu

SEQ ID NO: 589160 - RNA, 19 nt, Human
caugcagaaguagcaucac

SEQ ID NO: 589161 - RNA, 23 nt, Human
ccaggggccuggacauguuuucu

SEQ ID NO: 589162 - RNA, 18 nt, Human
cccaacuugcuucuuucc

SEQ ID NO: 589163 - RNA, 18 nt, Human
cccagcagcaagcaaccu

SEQ ID NO: 589164 - RNA, 24 nt, Human
ccucaccauugaacggcucccgga

SEQ ID NO: 589165 - RNA, 23 nt, Human
ccucgcugcugccuccuccuuca

SEQ ID NO: 589166 - RNA, 21 nt, Human
cgagcagaugaggguacaagg

SEQ ID NO: 589167 - RNA, 20 nt, Human
cugcauggaggaucuauuuu

SEQ ID NO: 589168 - RNA, 23 nt, Human
cugcugccuccuccuucagcagc

SEQ ID NO: 589169 - RNA, 19 nt, Human
cuggacauguuuucuuccu

SEQ ID NO: 589170 - RNA, 21 nt, Human
gaaaaaagaaaagccuaugga

SEQ ID NO: 589171 - RNA, 23 nt, Human
gaaagacaaacaaaucaccgaca

SEQ ID NO: 589172 - RNA, 20 nt, Human
gaaagggaaggggguggggc

SEQ ID NO: 589173 - RNA, 18 nt, Human
gaaggcugggcagcgcag

SEQ ID NO: 589174 - RNA, 21 nt, Human
gagaccaggggccuggacaug

SEQ ID NO: 589175 - RNA, 20 nt, Human
gcagcgcagaguugaaagag

SEQ ID NO: 589176 - RNA, 20 nt, Human
ggagguggggaugggguugg

SEQ ID NO: 589177 - RNA, 22 nt, Human
ggauguuauggaaaagcaauuc

SEQ ID NO: 589178 - RNA, 21 nt, Human
ggccuuuuugagggaugggug

SEQ ID NO: 589179 - RNA, 18 nt, Human
gggaaagggaacaacuaa

SEQ ID NO: 589180 - RNA, 19 nt, Human
gggaaggaagucuucccau

SEQ ID NO: 589181 - RNA, 20 nt, Human
gggaagggccgaaggaggac

SEQ ID NO: 589182 - RNA, 18 nt, Human
ggggaagggccgaaggag

SEQ ID NO: 589183 - RNA, 18 nt, Human
ggggaugggguuggggga

SEQ ID NO: 589184 - RNA, 22 nt, Human
ggggaugggguugggggacagg

SEQ ID NO: 589185 - RNA, 19 nt, Human
gggguuuggaggaaaggga

SEQ ID NO: 589186 - RNA, 20 nt, Human
gucaauacgugagagggaaa

SEQ ID NO: 589187 - RNA, 20 nt, Human
uaaaacaaggaaguagccuu

SEQ ID NO: 589188 - RNA, 22 nt, Human
uaaaacuaaaaauggugucauu

SEQ ID NO: 589189 - RNA, 25 nt, Human
uacaaaaggaaaaaaauacaaugca

SEQ ID NO: 589190 - RNA, 20 nt, Human
uacaagguucucagagggug

SEQ ID NO: 589191 - RNA, 22 nt, Human
uagaacucugagcugaguucau

SEQ ID NO: 589192 - RNA, 22 nt, Human
uagcaucaccccauggguaccg

SEQ ID NO: 589193 - RNA, 19 nt, Human
uaggccauauccugcccaa

SEQ ID NO: 589194 - RNA, 24 nt, Human
uauaugagaaacgugcugggaaca

SEQ ID NO: 589195 - RNA, 21 nt, Human
uaucagaaagacaaacaaauc

SEQ ID NO: 589196 - RNA, 19 nt, Human
uauggagaccaggggccug

SEQ ID NO: 589197 - RNA, 27 nt, Human
uauuacacaauuuucaaccuaucagaa

SEQ ID NO: 589198 - RNA, 24 nt, Human
ucauugaguaaaaacaaaacaaau

SEQ ID NO: 589199 - RNA, 28 nt, Human
ucauugcugaggucccaauguccccauc

SEQ ID NO: 589200 - RNA, 23 nt, Human
ucccaaugggcaguaccuuccuc

SEQ ID NO: 589201 - RNA, 24 nt, Human
ucccagcagcaagcaaccucauag

SEQ ID NO: 589202 - RNA, 21 nt, Human
ucccucagugacugagggcua

SEQ ID NO: 589203 - RNA, 18 nt, Human
ucgcugcugccuccuccu

SEQ ID NO: 589204 - RNA, 18 nt, Human
ucucacaugccacgucuc

SEQ ID NO: 589205 - RNA, 18 nt, Human
ucucauguuaggugucag

SEQ ID NO: 589206 - RNA, 18 nt, Human
ucugaaguggaggugggg

SEQ ID NO: 589207 - RNA, 23 nt, Human
ugaaaagacaccaaauuugugac

SEQ ID NO: 589208 - RNA, 24 nt, Human
ugaaaagacaccaaauuugugacu

SEQ ID NO: 589209 - RNA, 21 nt, Human
ugccaagcagucuucaauccu

SEQ ID NO: 589210 - RNA, 25 nt, Human
ugccaagcagucuucaauccugugg

SEQ ID NO: 589211 - RNA, 21 nt, Human
ugccaccccucccaaucacac

SEQ ID NO: 589212 - RNA, 19 nt, Human
ugccuccuccuucagcagc

SEQ ID NO: 589213 - RNA, 21 nt, Human
ugccuguagagaaaauggccc

SEQ ID NO: 589214 - RNA, 25 nt, Human
ugcuaucaggaaauaaaacuaaaaa

SEQ ID NO: 589215 - RNA, 19 nt, Human
ugcuucuuuccucauuccu

SEQ ID NO: 589216 - RNA, 26 nt, Human
uggcaaacaggagguguucgagggcg

SEQ ID NO: 589217 - RNA, 23 nt, Human
uggcucugccaggcuucccagca

SEQ ID NO: 589218 - RNA, 18 nt, Human
uggggaugggguuggggg

SEQ ID NO: 589219 - RNA, 20 nt, Human
ugggguugggggacagggga

SEQ ID NO: 589220 - RNA, 20 nt, Human
uguagagaaaauggccccca

SEQ ID NO: 589221 - RNA, 23 nt, Human
ugucagaugcccuguagaugcau

SEQ ID NO: 589222 - RNA, 27 nt, Human
ugucauugaguaaaaacaaaacaaaug

SEQ ID NO: 589223 - RNA, 22 nt, Human
ugucucacaugccaagucucau

SEQ ID NO: 589224 - RNA, 19 nt, Human
ugucuggagggaguuaggg

SEQ ID NO: 589225 - RNA, 26 nt, Human
ugugacuuuaccugccuacuagugcc

SEQ ID NO: 589226 - RNA, 18 nt, Human
uguuucuucuggcuccuc

SEQ ID NO: 589227 - RNA, 21 nt, Human
uuagggguuuggaggaaaggg

SEQ ID NO: 589228 - RNA, 21 nt, Human
uucccugggugucuggaggga

SEQ ID NO: 589229 - RNA, 19 nt, Human
uucuauauauauuuuuccu

SEQ ID NO: 589230 - RNA, 18 nt, Human
uuuggaggaaagggaagg

SEQ ID NO: 589231 - RNA, 21 nt, Human
uuuggaggaaagggaaggggg

SEQ ID NO: 589232 - RNA, 23 nt, Human
uuugggaaggaagucuucccguu

SEQ ID NO: 589233 - RNA, 20 nt, Human
agaaccccugcuggcucucc

SEQ ID NO: 589234 - RNA, 20 nt, Human
agaccuccacccaaccacag

SEQ ID NO: 589235 - RNA, 21 nt, Human
agcagagcccuccugaggcuc

SEQ ID NO: 589236 - RNA, 21 nt, Human
cagagcccuccugaggcuccc

SEQ ID NO: 589237 - RNA, 21 nt, Human
cagcacagaugggcagguggg

SEQ ID NO: 589238 - RNA, 21 nt, Human
cagcugggcucccuugagccc

SEQ ID NO: 589239 - RNA, 20 nt, Human
ccagcuccgcacugccugcc

SEQ ID NO: 589240 - RNA, 23 nt, Human
cccacggccagcuccgcacugcc

SEQ ID NO: 589241 - RNA, 22 nt, Human
cccauagccaaguggguggagc

SEQ ID NO: 589242 - RNA, 18 nt, Human
ccccagccucagccugcc

SEQ ID NO: 589243 - RNA, 19 nt, Human
cccuggcucaacuggcucc

SEQ ID NO: 589244 - RNA, 24 nt, Human
cccuugagccccucccccagccuc

SEQ ID NO: 589245 - RNA, 19 nt, Human
ccucagccugccccuuucu

SEQ ID NO: 589246 - RNA, 20 nt, Human
ccuugagccccucccccagc

SEQ ID NO: 589247 - RNA, 23 nt, Human
ccuugagccccucccccagccuc

SEQ ID NO: 589248 - RNA, 23 nt, Human
cgugaaggccaaggcugaggugg

SEQ ID NO: 589249 - RNA, 20 nt, Human
cucaggaacaaguuuauugc

SEQ ID NO: 589250 - RNA, 25 nt, Human
cuccuggaccaaggcccuaacccac

SEQ ID NO: 589251 - RNA, 22 nt, Human
cucuggcccuucuccagaaggg

SEQ ID NO: 589252 - RNA, 22 nt, Human
cugggaggagagccggggaggg

SEQ ID NO: 589253 - RNA, 18 nt, Human
cugggcccucccagcugg

SEQ ID NO: 589254 - RNA, 19 nt, Human
cuggucugagucaugacuu

SEQ ID NO: 589255 - RNA, 18 nt, Human
gaccaaggcccuaaccca

SEQ ID NO: 589256 - RNA, 19 nt, Human
gaccuccacccaaccacag

SEQ ID NO: 589257 - RNA, 21 nt, Human
gagacgccuggauguggcugc

SEQ ID NO: 589258 - RNA, 24 nt, Human
gagccggggagggaggaggauggu

SEQ ID NO: 589259 - RNA, 18 nt, Human
gaggaccugcuggcugca

SEQ ID NO: 589260 - RNA, 18 nt, Human
gaggaugguaggcaggaa

SEQ ID NO: 589261 - RNA, 26 nt, Human
gcacugccugccugggcccucccagc

SEQ ID NO: 589262 - RNA, 24 nt, Human
gcagagcccuccugaggcucccag

SEQ ID NO: 589263 - RNA, 26 nt, Human
gcauaaaaacuacaaaaauaucuggc

SEQ ID NO: 589264 - RNA, 24 nt, Human
gcccacggccagcuccgcacugcc

SEQ ID NO: 589265 - RNA, 22 nt, Human
gccugggcccucccagcugggc

SEQ ID NO: 589266 - RNA, 18 nt, Human
gcugcccuggcucaacug

SEQ ID NO: 589267 - RNA, 20 nt, Human
ggcagguggguugaccuucc

SEQ ID NO: 589268 - RNA, 18 nt, Human
ggcccuucaaggcugaug

SEQ ID NO: 589269 - RNA, 22 nt, Human
ggcucucgagugugggcagcuc

SEQ ID NO: 589270 - RNA, 21 nt, Human
gggagggaggaggaugguagg

SEQ ID NO: 589271 - RNA, 18 nt, Human
ggggagggaggaggaugg

SEQ ID NO: 589272 - RNA, 20 nt, Human
gguggagcugggcuggagug

SEQ ID NO: 589273 - RNA, 19 nt, Human
gugcagacagaccuccacc

SEQ ID NO: 589274 - RNA, 18 nt, Human
guggcgcugaggggguga

SEQ ID NO: 589275 - RNA, 24 nt, Human
uagccaaaggcauaaaaacuacaa

SEQ ID NO: 589276 - RNA, 18 nt, Human
ucaugacuugggcugccc

SEQ ID NO: 589277 - RNA, 19 nt, Human
ucccagugcagacagaccu

SEQ ID NO: 589278 - RNA, 22 nt, Human
ucccagugcagacagaccucca

SEQ ID NO: 589279 - RNA, 26 nt, Human
ucccccagccucagccugccccuuuc

SEQ ID NO: 589280 - RNA, 18 nt, Human
ucccuugagccccucccc

SEQ ID NO: 589281 - RNA, 19 nt, Human
ucuccagaagggaggccca

SEQ ID NO: 589282 - RNA, 25 nt, Human
ucucccauagccaaguggguggagc

SEQ ID NO: 589283 - RNA, 19 nt, Human
ugaaaggguaggcagccca

SEQ ID NO: 589284 - RNA, 22 nt, Human
ugagggggugaggaagugccuu

SEQ ID NO: 589285 - RNA, 19 nt, Human
ugaugcugggaggagagcc

SEQ ID NO: 589286 - RNA, 18 nt, Human
ugccugggcccucccagc

SEQ ID NO: 589287 - RNA, 20 nt, Human
ugccuuggcugcuuccacag

SEQ ID NO: 589288 - RNA, 25 nt, Human
ugcuggcugcauggcuggugugaug

SEQ ID NO: 589289 - RNA, 22 nt, Human
uggaccaaggcccuaacccacc

SEQ ID NO: 589290 - RNA, 21 nt, Human
uggcuccuggaccaaggcccu

SEQ ID NO: 589291 - RNA, 21 nt, Human
uggcugcccuggcucaacugg

SEQ ID NO: 589292 - RNA, 19 nt, Human
uggugugaugcugggagga

SEQ ID NO: 589293 - RNA, 23 nt, Human
uggugugaugcugggaggagagc

SEQ ID NO: 589294 - RNA, 18 nt, Human
uuccggccacuccccaga

SEQ ID NO: 589295 - RNA, 22 nt, Human
uuuuuuuuuuuuuuuucucagg

SEQ ID NO: 589296 - RNA, 20 nt, Human
aauguacaauguguaaaauu

SEQ ID NO: 589297 - RNA, 21 nt, Human
acugcgcggccccggccgggc

SEQ ID NO: 589298 - RNA, 25 nt, Human
acuggagcacaaagcgccgcagccg

SEQ ID NO: 589299 - RNA, 22 nt, Human
auuaaacacagguauaaaucuu

SEQ ID NO: 589300 - RNA, 25 nt, Human
caagccagauugugauuuuaaaaua

SEQ ID NO: 589301 - RNA, 21 nt, Human
ccccgccucagaugcccuaac

SEQ ID NO: 589302 - RNA, 19 nt, Human
cccgccgcuucuccccgcc

SEQ ID NO: 589303 - RNA, 18 nt, Human
cccgggggacgcaacgcc

SEQ ID NO: 589304 - RNA, 27 nt, Human
ccggccgggccagggagcguuaggagc

SEQ ID NO: 589305 - RNA, 21 nt, Human
cgaauaaaccacaaaaguggu

SEQ ID NO: 589306 - RNA, 23 nt, Human
cgccucagaugcccuaacugcgc

SEQ ID NO: 589307 - RNA, 19 nt, Human
cucaaauaucccaaggacc

SEQ ID NO: 589308 - RNA, 23 nt, Human
cugcgcggccccggccgggccag

SEQ ID NO: 589309 - RNA, 22 nt, Human
cuucaagguccaaccauaaauu

SEQ ID NO: 589310 - RNA, 21 nt, Human
gaaguaugccauucaagccag

SEQ ID NO: 589311 - RNA, 21 nt, Human
uaaaauacccaauucauuuuu

SEQ ID NO: 589312 - RNA, 20 nt, Human
uaacuguaaacaaaguagca

SEQ ID NO: 589313 - RNA, 25 nt, Human
uaauuuauacuaaauuccagggaga

SEQ ID NO: 589314 - RNA, 21 nt, Human
ucaaacccuuagacaaacauc

SEQ ID NO: 589315 - RNA, 22 nt, Human
ucuccccgccgcuucuccccgc

SEQ ID NO: 589316 - RNA, 22 nt, Human
ugcaagaucacaauuuaucagu

SEQ ID NO: 589317 - RNA, 22 nt, Human
uggagcacaaagcgccgcagcc

SEQ ID NO: 589318 - RNA, 21 nt, Human
uguaaagaaaacugaaugcau

SEQ ID NO: 589319 - RNA, 20 nt, Human
uguguaaaauuccaauuaaa

SEQ ID NO: 589320 - RNA, 18 nt, Human
uucauuuuuacaacaaau

SEQ ID NO: 589321 - RNA, 18 nt, Human
uuuuuuuuuuuuuuuucg

SEQ ID NO: 589322 - RNA, 21 nt, Human
aaaccaucuucaaaucggcag

SEQ ID NO: 589323 - RNA, 19 nt, Human
aagcagcaccagaccaaca

SEQ ID NO: 589324 - RNA, 21 nt, Human
aagcagcaccagaccaacaga

SEQ ID NO: 589325 - RNA, 19 nt, Human
acaaaugugcacccacaca

SEQ ID NO: 589326 - RNA, 27 nt, Human
acaagugugcacacauacauacgugca

SEQ ID NO: 589327 - RNA, 23 nt, Human
acacacacacacaaaugugcacc

SEQ ID NO: 589328 - RNA, 25 nt, Human
acacacacacacaggcacacacaca

SEQ ID NO: 589329 - RNA, 28 nt, Human
acacacacaggcacacacacacacacaa

SEQ ID NO: 589330 - RNA, 23 nt, Human
acacauacauacgugcacacaca

SEQ ID NO: 589331 - RNA, 25 nt, Human
acacauacauacgugcacacacaca

SEQ ID NO: 589332 - RNA, 24 nt, Human
acagugcugggauuacaggcguga

SEQ ID NO: 589333 - RNA, 19 nt, Human
accccccagcccgggacuu

SEQ ID NO: 589334 - RNA, 23 nt, Human
acgcagccccaggcugcucagag

SEQ ID NO: 589335 - RNA, 27 nt, Human
acgugcacacacacacacaggcacaca

SEQ ID NO: 589336 - RNA, 21 nt, Human
acuggugugagggccguggcu

SEQ ID NO: 589337 - RNA, 18 nt, Human
agagagcgcgcccugccc

SEQ ID NO: 589338 - RNA, 21 nt, Human
agagagcgcgcccugcccaca

SEQ ID NO: 589339 - RNA, 21 nt, Human
agcaugagcacaggggagaga

SEQ ID NO: 589340 - RNA, 23 nt, Human
agccacagagccucggccucagc

SEQ ID NO: 589341 - RNA, 18 nt, Human
agccgagcugcaaaaagu

SEQ ID NO: 589342 - RNA, 23 nt, Human
agcuggagggcaucggaaguggg

SEQ ID NO: 589343 - RNA, 18 nt, Human
aguagagaugggguuuca

SEQ ID NO: 589344 - RNA, 22 nt, Human
aguagagaugggguuucaccau

SEQ ID NO: 589345 - RNA, 23 nt, Human
aguagagaugggguuucaccaug

SEQ ID NO: 589346 - RNA, 19 nt, Human
agucaacuuuuugaugugu

SEQ ID NO: 589347 - RNA, 18 nt, Human
agugcugggauuacaggc

SEQ ID NO: 589348 - RNA, 21 nt, Human
agugcugggauuacaggcgug

SEQ ID NO: 589349 - RNA, 22 nt, Human
agugcugggauuacaggcguga

SEQ ID NO: 589350 - RNA, 29 nt, Human
auacgugcacacacacacacaggcacaca

SEQ ID NO: 589351 - RNA, 19 nt, Human
augaaccagugagcagccc

SEQ ID NO: 589352 - RNA, 19 nt, Human
augggguuucaccaugucg

SEQ ID NO: 589353 - RNA, 20 nt, Human
augggguuucaccaugucgg

SEQ ID NO: 589354 - RNA, 22 nt, Human
augggguuucaccaugucggcc

SEQ ID NO: 589355 - RNA, 18 nt, Human
caagccucugccucggga

SEQ ID NO: 589356 - RNA, 29 nt, Human
caagugugcacacauacauacgugcacac

SEQ ID NO: 589357 - RNA, 21 nt, Human
cacacacaaaugugcacccac

SEQ ID NO: 589358 - RNA, 19 nt, Human
cacagacccagacccagag

SEQ ID NO: 589359 - RNA, 28 nt, Human
cacagacccagacccagagcccgcucac

SEQ ID NO: 589360 - RNA, 21 nt, Human
cacaggaccugguauccggcc

SEQ ID NO: 589361 - RNA, 28 nt, Human
cacaggcacacacacacacacaaaugug

SEQ ID NO: 589362 - RNA, 22 nt, Human
caccaugucggccaggacgguc

SEQ ID NO: 589363 - RNA, 24 nt, Human
caccaugucggccaggacggucuc

SEQ ID NO: 589364 - RNA, 21 nt, Human
caccucacagacccagaccca

SEQ ID NO: 589365 - RNA, 19 nt, Human
cacugcuaccccccagccc

SEQ ID NO: 589366 - RNA, 20 nt, Human
cagagcccgcucaccucugg

SEQ ID NO: 589367 - RNA, 26 nt, Human
cagcaccucacagacccagacccaga

SEQ ID NO: 589368 - RNA, 24 nt, Human
cagcaugagcacaggggagagaag

SEQ ID NO: 589369 - RNA, 21 nt, Human
cagcccagccuuuugccuccc

SEQ ID NO: 589370 - RNA, 19 nt, Human
cagccuuuuucgugccaag

SEQ ID NO: 589371 - RNA, 28 nt, Human
caggcacacacacacacacaaaugugca

SEQ ID NO: 589372 - RNA, 28 nt, Human
caggcacacacacacaggcacacaugca

SEQ ID NO: 589373 - RNA, 24 nt, Human
cagugcugggauuacaggcgugag

SEQ ID NO: 589374 - RNA, 20 nt, Human
caugaaccagugagcagccc

SEQ ID NO: 589375 - RNA, 23 nt, Human
ccacacacacaggcacacacaca

SEQ ID NO: 589376 - RNA, 22 nt, Human
ccacagugcugggauuacaggc

SEQ ID NO: 589377 - RNA, 24 nt, Human
ccacagugcugggauuacaggcgu

SEQ ID NO: 589378 - RNA, 24 nt, Human
ccacccggacggcuccagcgagcc

SEQ ID NO: 589379 - RNA, 27 nt, Human
ccacccgggggacaugggcagggaccu

SEQ ID NO: 589380 - RNA, 23 nt, Human
ccacugcuaccccccagcccggg

SEQ ID NO: 589381 - RNA, 19 nt, Human
ccagaccaacagacacagc

SEQ ID NO: 589382 - RNA, 24 nt, Human
ccagacccagagcccgcucaccuc

SEQ ID NO: 589383 - RNA, 18 nt, Human
ccagagcccgcucaccuc

SEQ ID NO: 589384 - RNA, 24 nt, Human
ccagugagcagccccugccccaga

SEQ ID NO: 589385 - RNA, 24 nt, Human
cccacacacacaggcacacacaca

SEQ ID NO: 589386 - RNA, 21 nt, Human
cccagagcacuguccccucac

SEQ ID NO: 589387 - RNA, 23 nt, Human
cccagccuccacugcuacccccc

SEQ ID NO: 589388 - RNA, 19 nt, Human
ccccccagcccgggacuug

SEQ ID NO: 589389 - RNA, 19 nt, Human
cccccucacgcugugcuuc

SEQ ID NO: 589390 - RNA, 22 nt, Human
ccccucacgcugugcuuccagc

SEQ ID NO: 589391 - RNA, 21 nt, Human
ccucacagacccagacccaga

SEQ ID NO: 589392 - RNA, 21 nt, Human
ccucaugauccucccgccucc

SEQ ID NO: 589393 - RNA, 21 nt, Human
ccucccgccuccgccucccac

SEQ ID NO: 589394 - RNA, 23 nt, Human
ccugcccacaccaccacaggacc

SEQ ID NO: 589395 - RNA, 21 nt, Human
ccuggaaacacugcaugcuga

SEQ ID NO: 589396 - RNA, 21 nt, Human
ccugguauccggccacagcca

SEQ ID NO: 589397 - RNA, 24 nt, Human
cgccuccgccucccacagugcugg

SEQ ID NO: 589398 - RNA, 22 nt, Human
cgcgcccggcccuaaaauguuu

SEQ ID NO: 589399 - RNA, 18 nt, Human
cgggggacaugggcaggg

SEQ ID NO: 589400 - RNA, 23 nt, Human
cucacagacccagacccagagcc

SEQ ID NO: 589401 - RNA, 22 nt, Human
cucagcccagccuuuugccucc

SEQ ID NO: 589402 - RNA, 27 nt, Human
cucaugauccucccgccuccgccuccc

SEQ ID NO: 589403 - RNA, 24 nt, Human
cuccugaccucaugauccucccgc

SEQ ID NO: 589404 - RNA, 22 nt, Human
cucggccucagcccagccuuuu

SEQ ID NO: 589405 - RNA, 23 nt, Human
cugaccucaugauccucccgccu

SEQ ID NO: 589406 - RNA, 19 nt, Human
cuguaaccgucugccucag

SEQ ID NO: 589407 - RNA, 19 nt, Human
cuguuucuguucacacacg

SEQ ID NO: 589408 - RNA, 18 nt, Human
gacacagcguucccaccc

SEQ ID NO: 589409 - RNA, 22 nt, Human
gaccucaugauccucccgccuc

SEQ ID NO: 589410 - RNA, 22 nt, Human
gaccugguauccggccacagcc

SEQ ID NO: 589411 - RNA, 23 nt, Human
gacggucucgaucuccugaccuc

SEQ ID NO: 589412 - RNA, 24 nt, Human
gacuugaaagggcaugagaacugg

SEQ ID NO: 589413 - RNA, 18 nt, Human
gagaugggguuucaccau

SEQ ID NO: 589414 - RNA, 24 nt, Human
gagaugggguuucaccaugucggc

SEQ ID NO: 589415 - RNA, 20 nt, Human
gagcccgcucaccucuggcc

SEQ ID NO: 589416 - RNA, 21 nt, Human
gagccgcugccagcccaucug

SEQ ID NO: 589417 - RNA, 23 nt, Human
gagcgcgcccugcccacaccacc

SEQ ID NO: 589418 - RNA, 18 nt, Human
gauuacaggcgugagcca

SEQ ID NO: 589419 - RNA, 22 nt, Human
gauuacaggcgugagccaccgc

SEQ ID NO: 589420 - RNA, 22 nt, Human
gauuacaggcgugagccaccgc

SEQ ID NO: 589421 - RNA, 27 nt, Human
gcacacacacacacaggcacacacaca

SEQ ID NO: 589422 - RNA, 23 nt, Human
gcacacacacacaggcacacaug

SEQ ID NO: 589423 - RNA, 19 nt, Human
gccacagagccucggccuc

SEQ ID NO: 589424 - RNA, 23 nt, Human
gcccugcccacaccaccacagga

SEQ ID NO: 589425 - RNA, 23 nt, Human
gccuccacugcuaccccccagcc

SEQ ID NO: 589426 - RNA, 25 nt, Human
ggagagaagggucccaaggugugag

SEQ ID NO: 589427 - RNA, 18 nt, Human
ggaugacagaccugaacc

SEQ ID NO: 589428 - RNA, 19 nt, Human
ggccaugaaccagugagca

SEQ ID NO: 589429 - RNA, 21 nt, Human
ggcuguaaccgucugccucag

SEQ ID NO: 589430 - RNA, 24 nt, Human
gggaagaugaggcacagccgagcu

SEQ ID NO: 589431 - RNA, 18 nt, Human
gggacaugggcagggacc

SEQ ID NO: 589432 - RNA, 26 nt, Human
gggcagggaccucucuucagcuuugg

SEQ ID NO: 589433 - RNA, 19 nt, Human
gggcaugagaacugggcag

SEQ ID NO: 589434 - RNA, 22 nt, Human
gggguuucaccaugucggccag

SEQ ID NO: 589435 - RNA, 21 nt, Human
guagagaugggguuucaccau

SEQ ID NO: 589436 - RNA, 23 nt, Human
guagagaugggguuucaccaugu

SEQ ID NO: 589437 - RNA, 22 nt, Human
gucccaaggugugagaaggcca

SEQ ID NO: 589438 - RNA, 19 nt, Human
gugacccugccacaggacu

SEQ ID NO: 589439 - RNA, 25 nt, Human
gugcacccacacacacaggcacaca

SEQ ID NO: 589440 - RNA, 21 nt, Human
gugcuuccagcaugagcacag

SEQ ID NO: 589441 - RNA, 19 nt, Human
uacaacauacaugaaaaug

SEQ ID NO: 589442 - RNA, 23 nt, Human
uacaggcgugagccaccgcgccc

SEQ ID NO: 589443 - RNA, 23 nt, Human
uaccccccagcccgggacuugaa

SEQ ID NO: 589444 - RNA, 22 nt, Human
uagagaugggguuucaccaugu

SEQ ID NO: 589445 - RNA, 21 nt, Human
uagaugacauccuacagcuaa

SEQ ID NO: 589446 - RNA, 18 nt, Human
ucaaggacguucguguuu

SEQ ID NO: 589447 - RNA, 24 nt, Human
ucaccaugucggccaggacggucu

SEQ ID NO: 589448 - RNA, 18 nt, Human
ucagaccgugguguccac

SEQ ID NO: 589449 - RNA, 19 nt, Human
ucagcuuugggagacuugg

SEQ ID NO: 589450 - RNA, 21 nt, Human
uccacaaugaggccuuugaga

SEQ ID NO: 589451 - RNA, 22 nt, Human
uccacaaugaggccuuugagac

SEQ ID NO: 589452 - RNA, 21 nt, Human
uccacagcaccucacagaccc

SEQ ID NO: 589453 - RNA, 21 nt, Human
uccacggcgugaacagaccac

SEQ ID NO: 589454 - RNA, 23 nt, Human
uccacggcgugaacagaccacgu

SEQ ID NO: 589455 - RNA, 21 nt, Human
uccacugcuaccccccagccc

SEQ ID NO: 589456 - RNA, 24 nt, Human
ucccacagugcugggauuacaggc

SEQ ID NO: 589457 - RNA, 18 nt, Human
ucccaguucacucucucu

SEQ ID NO: 589458 - RNA, 21 nt, Human
ucccaugaccuuugcccccuc

SEQ ID NO: 589459 - RNA, 23 nt, Human
ugaaagggcaugagaacugggca

SEQ ID NO: 589460 - RNA, 21 nt, Human
ugaaccagugagcagccccug

SEQ ID NO: 589461 - RNA, 22 nt, Human
ugaccucaugauccucccgccu

SEQ ID NO: 589462 - RNA, 19 nt, Human
ugagcagccccugccccag

SEQ ID NO: 589463 - RNA, 23 nt, Human
ugagcagccccugccccagagca

SEQ ID NO: 589464 - RNA, 21 nt, Human
ugagguacaacauacaugaaa

SEQ ID NO: 589465 - RNA, 22 nt, Human
ugagguacaacauacaugaaaa

SEQ ID NO: 589466 - RNA, 27 nt, Human
ugcacacacacacacaggcacacacac

SEQ ID NO: 589467 - RNA, 28 nt, Human
ugcacacacacacacaggcacacacaca

SEQ ID NO: 589468 - RNA, 26 nt, Human
ugcacacauacauacgugcacacaca

SEQ ID NO: 589469 - RNA, 22 nt, Human
ugccacaggacucccacugugg

SEQ ID NO: 589470 - RNA, 18 nt, Human
ugcccccucacgcugugc

SEQ ID NO: 589471 - RNA, 18 nt, Human
ugcccccucacgcugugc

SEQ ID NO: 589472 - RNA, 23 nt, Human
ugccucgggaaggaagacggcuc

SEQ ID NO: 589473 - RNA, 24 nt, Human
ugcugggauuacaggcgugagcca

SEQ ID NO: 589474 - RNA, 21 nt, Human
uggccggaagacacguggggc

SEQ ID NO: 589475 - RNA, 25 nt, Human
uggccggaagacacguggggcugac

SEQ ID NO: 589476 - RNA, 21 nt, Human
uggcuguaaccgucugccuca

SEQ ID NO: 589477 - RNA, 22 nt, Human
ugggaagaugaggcacagccga

SEQ ID NO: 589478 - RNA, 18 nt, Human
ugggauuacaggcgugag

SEQ ID NO: 589479 - RNA, 19 nt, Human
ugggauuacaggcgugagc

SEQ ID NO: 589480 - RNA, 21 nt, Human
ugggauuacaggcgugagcca

SEQ ID NO: 589481 - RNA, 22 nt, Human
ugggauuacaggcgugagccac

SEQ ID NO: 589482 - RNA, 23 nt, Human
ugggauuacaggcgugagccacc

SEQ ID NO: 589483 - RNA, 24 nt, Human
ugggauuacaggcgugagccaccg

SEQ ID NO: 589484 - RNA, 24 nt, Human
ugggguuucaccaugucggccagg

SEQ ID NO: 589485 - RNA, 18 nt, Human
uguaaccgucugccucag

SEQ ID NO: 589486 - RNA, 23 nt, Human
ugucccugccccaggagcacccc

SEQ ID NO: 589487 - RNA, 20 nt, Human
ugugcacacauacauacgug

SEQ ID NO: 589488 - RNA, 24 nt, Human
ugugcacccacacacacaggcaca

SEQ ID NO: 589489 - RNA, 20 nt, Human
uucacucucucuggcugaga

SEQ ID NO: 589490 - RNA, 19 nt, Human
uuccagcaugagcacaggg

SEQ ID NO: 589491 - RNA, 21 nt, Human
uugcccccucacgcugugcuu

SEQ ID NO: 589492 - RNA, 22 nt, Human
uuucaccaugucggccaggacg

SEQ ID NO: 589493 - RNA, 20 nt, Human
aagauaccacauugaagcag

SEQ ID NO: 589494 - RNA, 18 nt, Human
ccauacaaagauaccaca

SEQ ID NO: 589495 - RNA, 20 nt, Human
ccgcucagagcccucgugcc

SEQ ID NO: 589496 - RNA, 26 nt, Human
cgccgaaccccaggcuccuagaaguc

SEQ ID NO: 589497 - RNA, 21 nt, Human
uuuuuuuuuuuuuuuuuuaca

SEQ ID NO: 589498 - RNA, 29 nt, Human
aaaaacacaaaaggagagagucuaacaca

SEQ ID NO: 589499 - RNA, 19 nt, Human
aaaaaccagcucaacagca

SEQ ID NO: 589500 - RNA, 23 nt, Human
aaacacaaaaggagagagucuaa

SEQ ID NO: 589501 - RNA, 21 nt, Human
aaacagcgccauuuuguucau

SEQ ID NO: 589502 - RNA, 18 nt, Human
aaaugacccuuuuaaagg

SEQ ID NO: 589503 - RNA, 22 nt, Human
aacagacggacuauguuaaaaa

SEQ ID NO: 589504 - RNA, 23 nt, Human
aacucuaugucagacugaaauaa

SEQ ID NO: 589505 - RNA, 19 nt, Human
aagacccuggaagccauag

SEQ ID NO: 589506 - RNA, 22 nt, Human
aagccauagaaguuuagcaaac

SEQ ID NO: 589507 - RNA, 18 nt, Human
aauaucuacccaauucuu

SEQ ID NO: 589508 - RNA, 21 nt, Human
acaccagccgccacggacagc

SEQ ID NO: 589509 - RNA, 18 nt, Human
acagccagacauaaugaa

SEQ ID NO: 589510 - RNA, 20 nt, Human
acauauauaacaaaagugaa

SEQ ID NO: 589511 - RNA, 23 nt, Human
accagcucaacagcaaaacacca

SEQ ID NO: 589512 - RNA, 24 nt, Human
acuacaaucugauugcaguuaacu

SEQ ID NO: 589513 - RNA, 21 nt, Human
agacauaaugaauggcauagc

SEQ ID NO: 589514 - RNA, 22 nt, Human
agcaaacaccuaaaacagaccg

SEQ ID NO: 589515 - RNA, 20 nt, Human
auaaauacaacucacagggc

SEQ ID NO: 589516 - RNA, 25 nt, Human
auuuuguucauuccucccccugccc

SEQ ID NO: 589517 - RNA, 26 nt, Human
caaaacaccaaaugacccuuuuaaag

SEQ ID NO: 589518 - RNA, 18 nt, Human
caacagcaaaacaccaaa

SEQ ID NO: 589519 - RNA, 21 nt, Human
cacccuguuucaugucaagga

SEQ ID NO: 589520 - RNA, 22 nt, Human
cagagaagcugaaaauggguag

SEQ ID NO: 589521 - RNA, 20 nt, Human
cagcaaaacaccaaaugacc

SEQ ID NO: 589522 - RNA, 19 nt, Human
cagcucaacagcaaaacac

SEQ ID NO: 589523 - RNA, 22 nt, Human
cagcucaacagcaaaacaccaa

SEQ ID NO: 589524 - RNA, 20 nt, Human
cauuccucccccugcccacg

SEQ ID NO: 589525 - RNA, 18 nt, Human
ccaacaccagccgccacg

SEQ ID NO: 589526 - RNA, 21 nt, Human
ccaaugccagccaacaccagc

SEQ ID NO: 589527 - RNA, 19 nt, Human
ccacaaaaacuuccuccuc

SEQ ID NO: 589528 - RNA, 20 nt, Human
ccagcccugcagccauugac

SEQ ID NO: 589529 - RNA, 22 nt, Human
ccgccacggacagcuucucuuc

SEQ ID NO: 589530 - RNA, 18 nt, Human
ccucccccugcccacgga

SEQ ID NO: 589531 - RNA, 18 nt, Human
ccucuugacuuugucugc

SEQ ID NO: 589532 - RNA, 21 nt, Human
ccugcagccauugacugccac

SEQ ID NO: 589533 - RNA, 20 nt, Human
cucccccugcccacggacac

SEQ ID NO: 589534 - RNA, 19 nt, Human
cucuauacccagcuaacuc

SEQ ID NO: 589535 - RNA, 21 nt, Human
cuuuucaacauuuucacuugc

SEQ ID NO: 589536 - RNA, 19 nt, Human
gaacaaugccgugcugacu

SEQ ID NO: 589537 - RNA, 24 nt, Human
gagguuugccagcccugaccacag

SEQ ID NO: 589538 - RNA, 18 nt, Human
gagguuugccagcccugc

SEQ ID NO: 589539 - RNA, 25 nt, Human
gcagugccggauacaggauaaauac

SEQ ID NO: 589540 - RNA, 21 nt, Human
ggaaagccugcggagaagccg

SEQ ID NO: 589541 - RNA, 20 nt, Human
ggaagaggaaagccugcgga

SEQ ID NO: 589542 - RNA, 18 nt, Human
ggccacuggggaagagga

SEQ ID NO: 589543 - RNA, 22 nt, Human
guaaacagacggacuauguuaa

SEQ ID NO: 589544 - RNA, 24 nt, Human
guuaaaggaaugcauuguaagaag

SEQ ID NO: 589545 - RNA, 19 nt, Human
uaaaaccaagaguagugcu

SEQ ID NO: 589546 - RNA, 22 nt, Human
uaaagcuauacuugcaccccua

SEQ ID NO: 589547 - RNA, 24 nt, Human
uaaagcuauacuugcaccccuaaa

SEQ ID NO: 589548 - RNA, 25 nt, Human
uaaauacauauauaacaaaagugaa

SEQ ID NO: 589549 - RNA, 22 nt, Human
uagacauucauaggaaauguca

SEQ ID NO: 589550 - RNA, 21 nt, Human
uagcaaacaccuaaaacagac

SEQ ID NO: 589551 - RNA, 21 nt, Human
uagugagaugagguucuucca

SEQ ID NO: 589552 - RNA, 24 nt, Human
ucagcccugggacucgccagugcc

SEQ ID NO: 589553 - RNA, 22 nt, Human
uccuuguaucagaagagaggca

SEQ ID NO: 589554 - RNA, 18 nt, Human
ucuguaucagcccuggga

SEQ ID NO: 589555 - RNA, 20 nt, Human
ugaaaaaaguaacuauagug

SEQ ID NO: 589556 - RNA, 22 nt, Human
ugaaauaaaaccaagaguagug

SEQ ID NO: 589557 - RNA, 24 nt, Human
ugaaauaaaaccaagaguagugcu

SEQ ID NO: 589558 - RNA, 27 nt, Human
ugacucaaaaaccagcucaacagcaag

SEQ ID NO: 589559 - RNA, 18 nt, Human
ugacugccacaucagcag

SEQ ID NO: 589560 - RNA, 21 nt, Human
ugcccacggacacuuccuuug

SEQ ID NO: 589561 - RNA, 19 nt, Human
ugcccugagccuucuuagc

SEQ ID NO: 589562 - RNA, 21 nt, Human
ugcccugagccuucuuagccc

SEQ ID NO: 589563 - RNA, 18 nt, Human
ugccucaguaaacagacg

SEQ ID NO: 589564 - RNA, 19 nt, Human
uguaucagaagagaggcag

SEQ ID NO: 589565 - RNA, 22 nt, Human
ugucaagcauucuaggagucug

SEQ ID NO: 589566 - RNA, 26 nt, Human
ugucacugaaaauaaacaacauagag

SEQ ID NO: 589567 - RNA, 18 nt, Human
uucauuguccacaaaaac

SEQ ID NO: 589568 - RNA, 23 nt, Human
uuuguucauuccucccccugccc

SEQ ID NO: 589569 - RNA, 24 nt, Human
uugauggaauaauaauuuaaugcu

SEQ ID NO: 589570 - RNA, 20 nt, Human
uuuuuuuuuuuuuugaugga

SEQ ID NO: 589571 - RNA, 21 nt, Human
uuuuuuuuuuuuuuuugaugg

SEQ ID NO: 589572 - RNA, 22 nt, Human
aaacaaaaaaagaaggaagaga

SEQ ID NO: 589573 - RNA, 19 nt, Human
aaacaccaagaaccagaca

SEQ ID NO: 589574 - RNA, 21 nt, Human
aaagaaggaaacaaaaaaaaa

SEQ ID NO: 589575 - RNA, 21 nt, Human
aaauagccagugcauaaaaac

SEQ ID NO: 589576 - RNA, 24 nt, Human
aaauagccagugcauaaaaaccuu

SEQ ID NO: 589577 - RNA, 20 nt, Human
aaauagccagugcauaaaac

SEQ ID NO: 589578 - RNA, 21 nt, Human
aacaaaaaaagaaggaagaga

SEQ ID NO: 589579 - RNA, 20 nt, Human
aagaaaguaggaaagaagga

SEQ ID NO: 589580 - RNA, 20 nt, Human
aagaaggaaacaaaaaaaaa

SEQ ID NO: 589581 - RNA, 22 nt, Human
aagaaggaaacaaaaaaaaaaa

SEQ ID NO: 589582 - RNA, 27 nt, Human
aagaaggaaacaaaaaaaaagggaccc

SEQ ID NO: 589583 - RNA, 18 nt, Human
aaggaaacaaaaaaaaaa

SEQ ID NO: 589584 - RNA, 27 nt, Human
aaguaggaaagaaggaaacaaaaaaaa

SEQ ID NO: 589585 - RNA, 18 nt, Human
acaaaaaaaaaaaagaaa

SEQ ID NO: 589586 - RNA, 20 nt, Human
acaaaaaaaaaaaagaaaga

SEQ ID NO: 589587 - RNA, 21 nt, Human
acaaaaaaaaaaaagaaagaa

SEQ ID NO: 589588 - RNA, 20 nt, Human
acaaacaaaaaaagaaggaa

SEQ ID NO: 589589 - RNA, 22 nt, Human
acagaaagggaggauacccaga

SEQ ID NO: 589590 - RNA, 20 nt, Human
acaguaggccucugacauuc

SEQ ID NO: 589591 - RNA, 23 nt, Human
acucaaaccucucuccuuuuauu

SEQ ID NO: 589592 - RNA, 18 nt, Human
agaaaggaaggaaaggaa

SEQ ID NO: 589593 - RNA, 25 nt, Human
agaagaaaaugaauucuuugaagaa

SEQ ID NO: 589594 - RNA, 20 nt, Human
agaaggaagagaaaggaagg

SEQ ID NO: 589595 - RNA, 22 nt, Human
agagaaaggaaggaaaggaagg

SEQ ID NO: 589596 - RNA, 18 nt, Human
agcuuguuggaauccaaa

SEQ ID NO: 589597 - RNA, 23 nt, Human
aggaaagaaggaaacaaaaaaaa

SEQ ID NO: 589598 - RNA, 21 nt, Human
aggaaggagugaaagaaagua

SEQ ID NO: 589599 - RNA, 21 nt, Human
agggaggauacccagaacuca

SEQ ID NO: 589600 - RNA, 21 nt, Human
agugaaagaaaguaggaaaga

SEQ ID NO: 589601 - RNA, 22 nt, Human
auccacaaaauugugaccugau

SEQ ID NO: 589602 - RNA, 24 nt, Human
caaaacccaaaagcaaaaggguca

SEQ ID NO: 589603 - RNA, 25 nt, Human
caaacagucccuguuaugacugcca

SEQ ID NO: 589604 - RNA, 22 nt, Human
caaauagccagugcauaaaaac

SEQ ID NO: 589605 - RNA, 21 nt, Human
caacaaaaucaacccuuggga

SEQ ID NO: 589606 - RNA, 24 nt, Human
caagaaaagaacaauuuacaucca

SEQ ID NO: 589607 - RNA, 19 nt, Human
cacacugagcaaaacccaa

SEQ ID NO: 589608 - RNA, 18 nt, Human
caucuaaaaucagauacu

SEQ ID NO: 589609 - RNA, 20 nt, Human
cauuaccaagaaaagaacaa

SEQ ID NO: 589610 - RNA, 26 nt, Human
cauuuaaaaaaaaaaaaagcagucaa

SEQ ID NO: 589611 - RNA, 21 nt, Human
ccagcauuacuuauugacaag

SEQ ID NO: 589612 - RNA, 24 nt, Human
cgauuguaacccaaauccaaaaaa

SEQ ID NO: 589613 - RNA, 21 nt, Human
cucucuccuuuuauuuauaaa

SEQ ID NO: 589614 - RNA, 19 nt, Human
cugauaaauccaaguugug

SEQ ID NO: 589615 - RNA, 20 nt, Human
cuguauacaaauuguuaaaa

SEQ ID NO: 589616 - RNA, 23 nt, Human
gaucaucuaaaaucagauacuaa

SEQ ID NO: 589617 - RNA, 21 nt, Human
gcaauacugacaaacaguccc

SEQ ID NO: 589618 - RNA, 20 nt, Human
gcuuugucagaaaacauuuu

SEQ ID NO: 589619 - RNA, 24 nt, Human
ggaaagaaggaaacaaaaaaaaaa

SEQ ID NO: 589620 - RNA, 22 nt, Human
gggacaaagccaaagcauggaa

SEQ ID NO: 589621 - RNA, 23 nt, Human
guaaacucacuuuauuuuuaaau

SEQ ID NO: 589622 - RNA, 27 nt, Human
guaggccucugacauucucuaugcugg

SEQ ID NO: 589623 - RNA, 24 nt, Human
uaaaaaacaaacaaacaaacaaaa

SEQ ID NO: 589624 - RNA, 24 nt, Human
uaaauuggggaggcauuuaaaugu

SEQ ID NO: 589625 - RNA, 20 nt, Human
uaacaugauccuguaaguga

SEQ ID NO: 589626 - RNA, 21 nt, Human
uaacauggaagguacaccuuu

SEQ ID NO: 589627 - RNA, 21 nt, Human
uaacuaaauggcaaguaacau

SEQ ID NO: 589628 - RNA, 23 nt, Human
uaaggaacuccaaguccauguca

SEQ ID NO: 589629 - RNA, 19 nt, Human
uaaguaaauugagcggagg

SEQ ID NO: 589630 - RNA, 24 nt, Human
uaauuaaaaaacaaacaaacaaac

SEQ ID NO: 589631 - RNA, 19 nt, Human
uacaauuacacaguaggcc

SEQ ID NO: 589632 - RNA, 19 nt, Human
uacacaaaaaagaagaaaa

SEQ ID NO: 589633 - RNA, 19 nt, Human
uacacaguaggccucugac

SEQ ID NO: 589634 - RNA, 25 nt, Human
uaccaagaaaagaacaauuuacauc

SEQ ID NO: 589635 - RNA, 25 nt, Human
uagagacaccucuagggcuucaaac

SEQ ID NO: 589636 - RNA, 24 nt, Human
uaggaaagaaggaaacaaaaaaaa

SEQ ID NO: 589637 - RNA, 20 nt, Human
uaggagagguccagauugcg

SEQ ID NO: 589638 - RNA, 22 nt, Human
uaguuaccagggacaaagccaa

SEQ ID NO: 589639 - RNA, 25 nt, Human
ucaacauuaccaagaaaagaacaau

SEQ ID NO: 589640 - RNA, 21 nt, Human
ucaacccuugggaaaauugcu

SEQ ID NO: 589641 - RNA, 24 nt, Human
ucccaguaauuaaaaaacaaacaa

SEQ ID NO: 589642 - RNA, 21 nt, Human
ucuuugguuuaaaucuucauu

SEQ ID NO: 589643 - RNA, 25 nt, Human
ugaaagaaaguaggaaagaaggaaa

SEQ ID NO: 589644 - RNA, 21 nt, Human
ugacagcaauacugacaaaca

SEQ ID NO: 589645 - RNA, 25 nt, Human
ugacaguuuccugugagauauuggu

SEQ ID NO: 589646 - RNA, 18 nt, Human
ugagcaaaacccaaaagc

SEQ ID NO: 589647 - RNA, 24 nt, Human
ugauaaauccaaguuguguaagga

SEQ ID NO: 589648 - RNA, 18 nt, Human
ugauacacaaaaaagaag

SEQ ID NO: 589649 - RNA, 25 nt, Human
ugaucaacauuaccaagaaaagaac

SEQ ID NO: 589650 - RNA, 19 nt, Human
ugaugaguuuccgaaggcc

SEQ ID NO: 589651 - RNA, 21 nt, Human
ugcaaaaugaugaguuuccga

SEQ ID NO: 589652 - RNA, 18 nt, Human
ugccagaauuuaaccucu

SEQ ID NO: 589653 - RNA, 18 nt, Human
uggaauugaaguuucauu

SEQ ID NO: 589654 - RNA, 23 nt, Human
uggaauuuugguaaacucacuuu

SEQ ID NO: 589655 - RNA, 21 nt, Human
uggagcgaauccuguuccauu

SEQ ID NO: 589656 - RNA, 19 nt, Human
ugggaaaauugcucuuugg

SEQ ID NO: 589657 - RNA, 23 nt, Human
uguaacccaaauccaaaaaauca

SEQ ID NO: 589658 - RNA, 21 nt, Human
ugucugaagcuuauuguagga

SEQ ID NO: 589659 - RNA, 22 nt, Human
ugugagaucccuguugcaugcu

SEQ ID NO: 589660 - RNA, 22 nt, Human
ugugcagauaaguaauuuuguu

SEQ ID NO: 589661 - RNA, 21 nt, Human
uuaccaagaaaagaacaauua

SEQ ID NO: 589662 - RNA, 24 nt, Human
uucaaacauuuaccucuccuuccc

SEQ ID NO: 589663 - RNA, 24 nt, Human
uucagugcuuugucagaaaacauu

SEQ ID NO: 589664 - RNA, 28 nt, Human
uuccagcaacaaggccuuaggguacccc

SEQ ID NO: 589665 - RNA, 23 nt, Human
uucuuccagcaacaaggccuuag

SEQ ID NO: 589666 - RNA, 18 nt, Human
uugaucuuggaaaacugg

SEQ ID NO: 589667 - RNA, 23 nt, Human
uugaucuuggaaaacugguugug

SEQ ID NO: 589668 - RNA, 23 nt, Human
uuggcuaauggagcgaauccugu

SEQ ID NO: 589669 - RNA, 29 nt, Human
uuguauguguguuuuuaaguccaaccccu

SEQ ID NO: 589670 - RNA, 20 nt, Human
uugucugcucacuaacauga

SEQ ID NO: 589671 - RNA, 28 nt, Human
uugugcuccagguggagcuccggguccg

SEQ ID NO: 589672 - RNA, 21 nt, Human
uuuaaaaaaaaaaaaagcagu

SEQ ID NO: 589673 - RNA, 22 nt, Human
uuuauuauugcuagaucaucca

SEQ ID NO: 589674 - RNA, 20 nt, Human
uuuccugugagauauuggug

SEQ ID NO: 589675 - RNA, 24 nt, Human
aaacuggagugaaaaugauuucca

SEQ ID NO: 589676 - RNA, 18 nt, Human
accuugaggcuuaaagag

SEQ ID NO: 589677 - RNA, 20 nt, Human
agagcaaggaaggaaaaugu

SEQ ID NO: 589678 - RNA, 21 nt, Human
agcauuuuuggaagaaaggca

SEQ ID NO: 589679 - RNA, 19 nt, Human
aggcaccagauaaguccaa

SEQ ID NO: 589680 - RNA, 20 nt, Human
auaaaaugcuaacaaaaaaa

SEQ ID NO: 589681 - RNA, 25 nt, Human
caaugccauaaaaugcuaacaaaaa

SEQ ID NO: 589682 - RNA, 19 nt, Human
ccacacaacgaaggccgcg

SEQ ID NO: 589683 - RNA, 20 nt, Human
ccuuaaagucaguaaauugc

SEQ ID NO: 589684 - RNA, 22 nt, Human
cuguucagccaggagacuaagu

SEQ ID NO: 589685 - RNA, 21 nt, Human
cuugaacaucaaagauguuug

SEQ ID NO: 589686 - RNA, 21 nt, Human
uaaaacagagcccuguaucac

SEQ ID NO: 589687 - RNA, 24 nt, Human
uaaaacagagcccuguaucacaga

SEQ ID NO: 589688 - RNA, 23 nt, Human
uaaauugcauaaaaguacucuga

SEQ ID NO: 589689 - RNA, 21 nt, Human
uaagucucagcaagucagucu

SEQ ID NO: 589690 - RNA, 18 nt, Human
uacuguuuuccuuaaagu

SEQ ID NO: 589691 - RNA, 22 nt, Human
ucaguaaauugcauaaaaguac

SEQ ID NO: 589692 - RNA, 20 nt, Human
uccuuaaagucaguaaauug

SEQ ID NO: 589693 - RNA, 19 nt, Human
ugcagccaggagacaaugc

SEQ ID NO: 589694 - RNA, 18 nt, Human
ugccauaaaaugcuaaca

SEQ ID NO: 589695 - RNA, 20 nt, Human
ugccauaaaaugcuaacaaa

SEQ ID NO: 589696 - RNA, 18 nt, Human
ugucaaaguagaagcugg

SEQ ID NO: 589697 - RNA, 19 nt, Human
aagaccccacccccaauac

SEQ ID NO: 589698 - RNA, 18 nt, Human
aagcacuaaucccauuca

SEQ ID NO: 589699 - RNA, 20 nt, Human
aagcagcagggagucugcgg

SEQ ID NO: 589700 - RNA, 23 nt, Human
aagggcauccacugucaaaaugu

SEQ ID NO: 589701 - RNA, 26 nt, Human
aaucaccucuccaagaccccaccccc

SEQ ID NO: 589702 - RNA, 23 nt, Human
aaucccauucaucagggcuccac

SEQ ID NO: 589703 - RNA, 18 nt, Human
aaucgcuugaaccuggga

SEQ ID NO: 589704 - RNA, 24 nt, Human
aaucgcuugaaccugggaggcaga

SEQ ID NO: 589705 - RNA, 19 nt, Human
acacacggugaguagugac

SEQ ID NO: 589706 - RNA, 18 nt, Human
acaccacuauacuccagc

SEQ ID NO: 589707 - RNA, 22 nt, Human
acaccacuauacuccagccugg

SEQ ID NO: 589708 - RNA, 24 nt, Human
accacuauacuccagccuggguga

SEQ ID NO: 589709 - RNA, 22 nt, Human
accccacccccaauaccauccc

SEQ ID NO: 589710 - RNA, 22 nt, Human
acccucauaaccuaaucaccuc

SEQ ID NO: 589711 - RNA, 20 nt, Human
accuguaauuccagcuacuc

SEQ ID NO: 589712 - RNA, 18 nt, Human
acuauacuccagccuggg

SEQ ID NO: 589713 - RNA, 24 nt, Human
acuauacuccagccugggugacag

SEQ ID NO: 589714 - RNA, 21 nt, Human
acuguugaauuccauuuucua

SEQ ID NO: 589715 - RNA, 19 nt, Human
agaaagccguagccugaaa

SEQ ID NO: 589716 - RNA, 22 nt, Human
agaaucgcuugaaccugggagg

SEQ ID NO: 589717 - RNA, 20 nt, Human
agagguugcagugagccaag

SEQ ID NO: 589718 - RNA, 23 nt, Human
agagguugcagugagccaagauc

SEQ ID NO: 589719 - RNA, 24 nt, Human
agagguugcagugagccaagauca

SEQ ID NO: 589720 - RNA, 26 nt, Human
agccugcagccucauggccacagucu

SEQ ID NO: 589721 - RNA, 24 nt, Human
agccugggugacagagcgagacuc

SEQ ID NO: 589722 - RNA, 18 nt, Human
agcuguguguacaagcag

SEQ ID NO: 589723 - RNA, 22 nt, Human
aggcacucaaagcuuccuguuc

SEQ ID NO: 589724 - RNA, 24 nt, Human
aggcagagguugcagugagccaag

SEQ ID NO: 589725 - RNA, 22 nt, Human
aggcaggagaaucgcuugaacc

SEQ ID NO: 589726 - RNA, 24 nt, Human
aggcaggagaaucgcuugaaccug

SEQ ID NO: 589727 - RNA, 20 nt, Human
aggcugaggcaggagaaucg

SEQ ID NO: 589728 - RNA, 24 nt, Human
aggcugaggcaggagaaucgcuug

SEQ ID NO: 589729 - RNA, 23 nt, Human
agggaugcgaagcagcagggagu

SEQ ID NO: 589730 - RNA, 24 nt, Human
aggggagggaggggaagggacauc

SEQ ID NO: 589731 - RNA, 24 nt, Human
auacuccagccugggugacagagc

SEQ ID NO: 589732 - RNA, 24 nt, Human
aucacaccacuauacuccagccug

SEQ ID NO: 589733 - RNA, 18 nt, Human
caaagcuuccuguucgac

SEQ ID NO: 589734 - RNA, 24 nt, Human
cacaggagggaugcgaagcagcag

SEQ ID NO: 589735 - RNA, 25 nt, Human
caccagccugcagccucauggccac

SEQ ID NO: 589736 - RNA, 21 nt, Human
caccccuaccccuggguguuc

SEQ ID NO: 589737 - RNA, 21 nt, Human
caccucuccaagaccccaccc

SEQ ID NO: 589738 - RNA, 22 nt, Human
caccugccuccugggccccagg

SEQ ID NO: 589739 - RNA, 24 nt, Human
cacuauacuccagccugggugaca

SEQ ID NO: 589740 - RNA, 25 nt, Human
cacuguccagaucuaacuccacacc

SEQ ID NO: 589741 - RNA, 19 nt, Human
cagaccuguaauuccagcu

SEQ ID NO: 589742 - RNA, 28 nt, Human
cagcacccuaaaugacagugcccagggg

SEQ ID NO: 589743 - RNA, 18 nt, Human
cagcccaggucccacaaa

SEQ ID NO: 589744 - RNA, 24 nt, Human
cagcccaggucccacaaaccaucc

SEQ ID NO: 589745 - RNA, 24 nt, Human
cagcuacucgagaggcugaggcag

SEQ ID NO: 589746 - RNA, 19 nt, Human
caggcugcacuuugaaaac

SEQ ID NO: 589747 - RNA, 23 nt, Human
cagggugggggccucagucugcu

SEQ ID NO: 589748 - RNA, 22 nt, Human
cauaaccuaaucaccucuccaa

SEQ ID NO: 589749 - RNA, 24 nt, Human
ccacccucauaaccuaaucaccuc

SEQ ID NO: 589750 - RNA, 20 nt, Human
ccacuauacuccagccuggg

SEQ ID NO: 589751 - RNA, 21 nt, Human
ccacuauacuccagccugggu

SEQ ID NO: 589752 - RNA, 24 nt, Human
ccacuauacuccagccugggugac

SEQ ID NO: 589753 - RNA, 21 nt, Human
ccccaggccaagucaggugug

SEQ ID NO: 589754 - RNA, 24 nt, Human
ccccuccuacugggcucuuucuca

SEQ ID NO: 589755 - RNA, 20 nt, Human
cccgcagccuccggcuagcc

SEQ ID NO: 589756 - RNA, 23 nt, Human
cccuauuagccuccuauaagaaa

SEQ ID NO: 589757 - RNA, 20 nt, Human
cccuuuggggauuagggcuu

SEQ ID NO: 589758 - RNA, 19 nt, Human
ccuacugggcucuuucuca

SEQ ID NO: 589759 - RNA, 25 nt, Human
ccuaggcuuuuucagggugggggag

SEQ ID NO: 589760 - RNA, 19 nt, Human
ccuccuacugggcucuuuc

SEQ ID NO: 589761 - RNA, 23 nt, Human
ccucuccaagaccccacccccaa

SEQ ID NO: 589762 - RNA, 25 nt, Human
ccugggaggcagagguugcagugag

SEQ ID NO: 589763 - RNA, 23 nt, Human
ccugggccccaggccaagucagg

SEQ ID NO: 589764 - RNA, 22 nt, Human
ccugggugacagagcgagacuc

SEQ ID NO: 589765 - RNA, 22 nt, Human
ccuguaauuccagcuacucgag

SEQ ID NO: 589766 - RNA, 25 nt, Human
ccugugcugcaaucugcugucauag

SEQ ID NO: 589767 - RNA, 21 nt, Human
cgacaggccugggucugggac

SEQ ID NO: 589768 - RNA, 22 nt, Human
cggcauggacucucaguucagg

SEQ ID NO: 589769 - RNA, 22 nt, Human
cggucuuccccccgcagccucc

SEQ ID NO: 589770 - RNA, 19 nt, Human
cucaaagcuuccuguucga

SEQ ID NO: 589771 - RNA, 21 nt, Human
cucacuguugcauguuggggc

SEQ ID NO: 589772 - RNA, 20 nt, Human
cuccaagaccccacccccaa

SEQ ID NO: 589773 - RNA, 23 nt, Human
cuccaagaccccacccccaauac

SEQ ID NO: 589774 - RNA, 18 nt, Human
cugaagacugcuguguac

SEQ ID NO: 589775 - RNA, 19 nt, Human
cugaagacugcuguguacc

SEQ ID NO: 589776 - RNA, 19 nt, Human
cugcaccccuaccccuggg

SEQ ID NO: 589777 - RNA, 20 nt, Human
cuggagacacuguagaacac

SEQ ID NO: 589778 - RNA, 24 nt, Human
cuuauggucucacuguugcauguu

SEQ ID NO: 589779 - RNA, 23 nt, Human
cuuggcagcgugauuugcccucu

SEQ ID NO: 589780 - RNA, 18 nt, Human
cuuucuaggucucugaau

SEQ ID NO: 589781 - RNA, 25 nt, Human
cuuuucaggcuccgaagaacucuga

SEQ ID NO: 589782 - RNA, 22 nt, Human
gaaaacacaugcugacagcagc

SEQ ID NO: 589783 - RNA, 22 nt, Human
gaccuguaauuccagcuacucg

SEQ ID NO: 589784 - RNA, 19 nt, Human
gcagcuccagguggcaucc

SEQ ID NO: 589785 - RNA, 22 nt, Human
gcucuuucucaaaccccuuuuc

SEQ ID NO: 589786 - RNA, 20 nt, Human
gcuuuugaugccugccuugg

SEQ ID NO: 589787 - RNA, 22 nt, Human
ggaggugauuuguacagcaccc

SEQ ID NO: 589788 - RNA, 23 nt, Human
ggauuagggcuucaacgugaauu

SEQ ID NO: 589789 - RNA, 18 nt, Human
ggccugcuggguggccag

SEQ ID NO: 589790 - RNA, 23 nt, Human
gggaugcgaagcagcagggaguc

SEQ ID NO: 589791 - RNA, 20 nt, Human
ggggcuggaggggagggccc

SEQ ID NO: 589792 - RNA, 20 nt, Human
gugcagaaggccacuuuggc

SEQ ID NO: 589793 - RNA, 25 nt, Human
uaaaugacagugcccaggaaugucc

SEQ ID NO: 589794 - RNA, 19 nt, Human
uaaccuaaucaccucucca

SEQ ID NO: 589795 - RNA, 19 nt, Human
uacagcacccuaaaugacu

SEQ ID NO: 589796 - RNA, 22 nt, Human
uacuccagccugggugacagag

SEQ ID NO: 589797 - RNA, 24 nt, Human
uacuccagccugggugacagagcg

SEQ ID NO: 589798 - RNA, 19 nt, Human
uauaaagcacuaaucccau

SEQ ID NO: 589799 - RNA, 21 nt, Human
uauagcauauaucacccugaa

SEQ ID NO: 589800 - RNA, 24 nt, Human
ucacugcccacaccugcaccccua

SEQ ID NO: 589801 - RNA, 23 nt, Human
ucagggcuccacccucauaaccu

SEQ ID NO: 589802 - RNA, 20 nt, Human
uccaagaccccacccccaau

SEQ ID NO: 589803 - RNA, 20 nt, Human
uccacugucaaaauguggcc

SEQ ID NO: 589804 - RNA, 23 nt, Human
uccagccugggugacagagcgag

SEQ ID NO: 589805 - RNA, 24 nt, Human
uccagccugggugacagagcgaga

SEQ ID NO: 589806 - RNA, 20 nt, Human
uccagguggcauccagguuu

SEQ ID NO: 589807 - RNA, 19 nt, Human
uccgaagaacucugaggca

SEQ ID NO: 589808 - RNA, 25 nt, Human
uccugccccuccuacugggcucuuu

SEQ ID NO: 589809 - RNA, 21 nt, Human
uccugccugcaguggaggcca

SEQ ID NO: 589810 - RNA, 18 nt, Human
uccuggugagggcucucu

SEQ ID NO: 589811 - RNA, 18 nt, Human
ucgcuugaaccugggagg

SEQ ID NO: 589812 - RNA, 22 nt, Human
ucuacugaguuuauuuucccca

SEQ ID NO: 589813 - RNA, 22 nt, Human
ucucacuguugcauguuggggc

SEQ ID NO: 589814 - RNA, 21 nt, Human
ucuccaagaccccacccccaa

SEQ ID NO: 589815 - RNA, 18 nt, Human
ucugcggucuuccccccg

SEQ ID NO: 589816 - RNA, 23 nt, Human
ucuguggggucagcugucacgcu

SEQ ID NO: 589817 - RNA, 22 nt, Human
ucuuacaguucuggaagcuggg

SEQ ID NO: 589818 - RNA, 20 nt, Human
ucuuacaguucuggaagcuu

SEQ ID NO: 589819 - RNA, 24 nt, Human
ugaaaacacaugcugacagcagcg

SEQ ID NO: 589820 - RNA, 24 nt, Human
ugaaccugggaggcagagguugca

SEQ ID NO: 589821 - RNA, 25 nt, Human
ugaauugggagcauaugaacauuca

SEQ ID NO: 589822 - RNA, 19 nt, Human
ugacaucguggaggaaggc

SEQ ID NO: 589823 - RNA, 25 nt, Human
ugaccacaucuuacacguuuuuagc

SEQ ID NO: 589824 - RNA, 21 nt, Human
ugacuccugcacagggcgcac

SEQ ID NO: 589825 - RNA, 18 nt, Human
ugaggaagacaauggucc

SEQ ID NO: 589826 - RNA, 20 nt, Human
ugaggcaggagaaucgcuug

SEQ ID NO: 589827 - RNA, 24 nt, Human
ugaggcaggagaaucgcuugaacc

SEQ ID NO: 589828 - RNA, 25 nt, Human
ugaggcaggagaaucgcuugaaccu

SEQ ID NO: 589829 - RNA, 21 nt, Human
ugaugucccacugggggcugg

SEQ ID NO: 589830 - RNA, 21 nt, Human
ugauuugcccucugguuccug

SEQ ID NO: 589831 - RNA, 20 nt, Human
ugauuuguacagcacccuaa

SEQ ID NO: 589832 - RNA, 18 nt, Human
ugccgggcugacuccugc

SEQ ID NO: 589833 - RNA, 20 nt, Human
ugccuccugggccccaggcc

SEQ ID NO: 589834 - RNA, 23 nt, Human
uggaagcugggaagucucaaggu

SEQ ID NO: 589835 - RNA, 23 nt, Human
uggaggaaggcacucaaagcuuc

SEQ ID NO: 589836 - RNA, 24 nt, Human
ugggaggcagagguugcagugagc

SEQ ID NO: 589837 - RNA, 20 nt, Human
ugggccccaggccaagucag

SEQ ID NO: 589838 - RNA, 20 nt, Human
ugggcucuuucucaaacccc

SEQ ID NO: 589839 - RNA, 24 nt, Human
ugggcucuuucucaaaccccuuuu

SEQ ID NO: 589840 - RNA, 25 nt, Human
ugggcucuuucucaaaccccuuuuc

SEQ ID NO: 589841 - RNA, 23 nt, Human
ugggggcuggaggggagggcccu

SEQ ID NO: 589842 - RNA, 20 nt, Human
uggggucagcugucacgcuc

SEQ ID NO: 589843 - RNA, 18 nt, Human
uguguacacgauagugug

SEQ ID NO: 589844 - RNA, 20 nt, Human
uguuggcaagaaaaaccacu

SEQ ID NO: 589845 - RNA, 20 nt, Human
uuagggcuucaacgugaauu

SEQ ID NO: 589846 - RNA, 21 nt, Human
uuauuucuuacaguucuggaa

SEQ ID NO: 589847 - RNA, 20 nt, Human
uucacuguccagaucuaacu

SEQ ID NO: 589848 - RNA, 23 nt, Human
uucaggcugcuguaacagaaagc

SEQ ID NO: 589849 - RNA, 24 nt, Human
uugaaccugggaggcagagguugc

SEQ ID NO: 589850 - RNA, 20 nt, Human
uugcagugagccaagaucac

SEQ ID NO: 589851 - RNA, 22 nt, Human
uuggcagcgugauuugcccucu

SEQ ID NO: 589852 - RNA, 24 nt, Human
aaagacauuggcagcaacaaagga

SEQ ID NO: 589853 - RNA, 21 nt, Human
aaauaggcaccuccaaagucu

SEQ ID NO: 589854 - RNA, 18 nt, Human
aagacauuggcagcaaca

SEQ ID NO: 589855 - RNA, 18 nt, Human
aagcauucacccaugacc

SEQ ID NO: 589856 - RNA, 21 nt, Human
aaggacacacaaugacugaaa

SEQ ID NO: 589857 - RNA, 20 nt, Human
acaucugcaaguuaaaauug

SEQ ID NO: 589858 - RNA, 23 nt, Human
accccguggguccccuauucccc

SEQ ID NO: 589859 - RNA, 20 nt, Human
acuccaucuacccagaacaa

SEQ ID NO: 589860 - RNA, 22 nt, Human
agacauuggcagcaacaaagga

SEQ ID NO: 589861 - RNA, 21 nt, Human
auccauccucuuccugcucag

SEQ ID NO: 589862 - RNA, 18 nt, Human
cacacuguacaaacugga

SEQ ID NO: 589863 - RNA, 21 nt, Human
cacagacuugacuaaaaugaa

SEQ ID NO: 589864 - RNA, 23 nt, Human
cacccuggccccauucccaguuc

SEQ ID NO: 589865 - RNA, 21 nt, Human
cacuuacagcagaaagcauuc

SEQ ID NO: 589866 - RNA, 21 nt, Human
cagaaaaaauaggcaccucca

SEQ ID NO: 589867 - RNA, 23 nt, Human
cagaaaaaauaggcaccuccaaa

SEQ ID NO: 589868 - RNA, 24 nt, Human
caucccacuaugcugauuccuacu

SEQ ID NO: 589869 - RNA, 19 nt, Human
caugaaucauuucuccuuc

SEQ ID NO: 589870 - RNA, 21 nt, Human
ccacugaggccaugcugagga

SEQ ID NO: 589871 - RNA, 20 nt, Human
ccagagccacauguucacag

SEQ ID NO: 589872 - RNA, 23 nt, Human
cccgcugagacucccuggaccca

SEQ ID NO: 589873 - RNA, 18 nt, Human
ccgcugagacucccugga

SEQ ID NO: 589874 - RNA, 22 nt, Human
ccucuggaagcuaauauggagc

SEQ ID NO: 589875 - RNA, 19 nt, Human
cuaccuacagaugggcaaa

SEQ ID NO: 589876 - RNA, 26 nt, Human
cuauccagagccacauguucacaguu

SEQ ID NO: 589877 - RNA, 19 nt, Human
cucuaaaagacacuuacag

SEQ ID NO: 589878 - RNA, 21 nt, Human
cucucagugcccugagcgauc

SEQ ID NO: 589879 - RNA, 24 nt, Human
cugauuccuacucuaaaagacacu

SEQ ID NO: 589880 - RNA, 22 nt, Human
cugcugggcaucccacuaugcu

SEQ ID NO: 589881 - RNA, 21 nt, Human
cuuccugcucaguugcucccc

SEQ ID NO: 589882 - RNA, 26 nt, Human
cuugcagugauuuagacacuucuucu

SEQ ID NO: 589883 - RNA, 18 nt, Human
cuuuuccaaaauggccaa

SEQ ID NO: 589884 - RNA, 21 nt, Human
gacagggagagaggggagacu

SEQ ID NO: 589885 - RNA, 22 nt, Human
ggacacacaaugacugaaaaca

SEQ ID NO: 589886 - RNA, 21 nt, Human
gggagacugagcugagaggga

SEQ ID NO: 589887 - RNA, 26 nt, Human
uaaaagacacuuacagcagaaagcau

SEQ ID NO: 589888 - RNA, 22 nt, Human
uagaaguuccccgcugagacuc

SEQ ID NO: 589889 - RNA, 18 nt, Human
ucaacaucugauacaaug

SEQ ID NO: 589890 - RNA, 21 nt, Human
ucacaguucucuagcaagcag

SEQ ID NO: 589891 - RNA, 19 nt, Human
ucccuggacccaugguuug

SEQ ID NO: 589892 - RNA, 18 nt, Human
ucugcaaguuaaaauugc

SEQ ID NO: 589893 - RNA, 24 nt, Human
ugacuaaaaugaauauauuauucu

SEQ ID NO: 589894 - RNA, 22 nt, Human
ugaggccaugcugaggagcugg

SEQ ID NO: 589895 - RNA, 26 nt, Human
ugauccauccucuuccugcucaguug

SEQ ID NO: 589896 - RNA, 23 nt, Human
ugauuccuacucuaaaagacacu

SEQ ID NO: 589897 - RNA, 21 nt, Human
uggagcagcagucacucuauc

SEQ ID NO: 589898 - RNA, 21 nt, Human
ugggagguguggaugcacuga

SEQ ID NO: 589899 - RNA, 18 nt, Human
ugggauggaaugcaggac

SEQ ID NO: 589900 - RNA, 26 nt, Human
ugucuugcuuuuccaaaauggccaau

SEQ ID NO: 589901 - RNA, 22 nt, Human
uuagacacuucuucugaagccu

SEQ ID NO: 589902 - RNA, 22 nt, Human
uuaugaaggaaauauucugucc

SEQ ID NO: 589903 - RNA, 20 nt, Human
uuucugcuggauuuuugugu

SEQ ID NO: 589904 - RNA, 19 nt, Human
aaaaacgguaagaaaucaa

SEQ ID NO: 589905 - RNA, 19 nt, Human
aacacagugaaacccuguc

SEQ ID NO: 589906 - RNA, 20 nt, Human
aacacagugaaacccugucu

SEQ ID NO: 589907 - RNA, 21 nt, Human
aacacagugaaacccugucuc

SEQ ID NO: 589908 - RNA, 20 nt, Human
aaccagaacacgugguuucc

SEQ ID NO: 589909 - RNA, 21 nt, Human
aaccagaacacgugguuucca

SEQ ID NO: 589910 - RNA, 22 nt, Human
aaccagaacacgugguuuccaa

SEQ ID NO: 589911 - RNA, 20 nt, Human
acagagcaagacuccgucuc

SEQ ID NO: 589912 - RNA, 23 nt, Human
acagagcaagacuccgucucaaa

SEQ ID NO: 589913 - RNA, 24 nt, Human
acagagcaagacuccgucucaaaa

SEQ ID NO: 589914 - RNA, 24 nt, Human
acccugucucuacuaaaaauacaa

SEQ ID NO: 589915 - RNA, 24 nt, Human
accgcgccacugcacuccagccug

SEQ ID NO: 589916 - RNA, 19 nt, Human
acgaauacaucuucaucac

SEQ ID NO: 589917 - RNA, 24 nt, Human
acugcacuccagccugggcgacag

SEQ ID NO: 589918 - RNA, 26 nt, Human
acugcacuccagccugggcgacagag

SEQ ID NO: 589919 - RNA, 23 nt, Human
agaaauaggaccuccagaaggaa

SEQ ID NO: 589920 - RNA, 22 nt, Human
agaccgcgccacugcacuccag

SEQ ID NO: 589921 - RNA, 19 nt, Human
agacuuuucuggaagaugg

SEQ ID NO: 589922 - RNA, 22 nt, Human
agaggaggaaaaaauuuaagag

SEQ ID NO: 589923 - RNA, 24 nt, Human
agccugggcgacagagcaagacuc

SEQ ID NO: 589924 - RNA, 20 nt, Human
aggaggggagaggaaggauu

SEQ ID NO: 589925 - RNA, 21 nt, Human
aggcaggagaauggcgugaac

SEQ ID NO: 589926 - RNA, 24 nt, Human
aggcaggagaauggcgugaacccg

SEQ ID NO: 589927 - RNA, 22 nt, Human
aggcagggcgcgguggcucacg

SEQ ID NO: 589928 - RNA, 21 nt, Human
aggccgaggcgggcggaucac

SEQ ID NO: 589929 - RNA, 23 nt, Human
aggccgaggcgggcggaucacaa

SEQ ID NO: 589930 - RNA, 24 nt, Human
aggcggagcuugcagugagccaag

SEQ ID NO: 589931 - RNA, 24 nt, Human
aggcgggcggaucacaaggucagg

SEQ ID NO: 589932 - RNA, 19 nt, Human
aggcugaggcaggagaaug

SEQ ID NO: 589933 - RNA, 21 nt, Human
aguauagaggaagaggaggaa

SEQ ID NO: 589934 - RNA, 24 nt, Human
auaagcaaagccucccaaucccaa

SEQ ID NO: 589935 - RNA, 20 nt, Human
auaauaacaugaggcaaccc

SEQ ID NO: 589936 - RNA, 19 nt, Human
augggaggaggggagagga

SEQ ID NO: 589937 - RNA, 18 nt, Human
caaaacagagccaaaaac

SEQ ID NO: 589938 - RNA, 21 nt, Human
caagacuccgucucaaaaaaa

SEQ ID NO: 589939 - RNA, 18 nt, Human
caaucccaaacaauacga

SEQ ID NO: 589940 - RNA, 20 nt, Human
cacgccuguaaucccagcug

SEQ ID NO: 589941 - RNA, 19 nt, Human
cacugcacuccagccuggg

SEQ ID NO: 589942 - RNA, 20 nt, Human
cacugcacuccagccugggc

SEQ ID NO: 589943 - RNA, 22 nt, Human
cacugcacuccagccugggcga

SEQ ID NO: 589944 - RNA, 23 nt, Human
cacugcacuccagccugggcgac

SEQ ID NO: 589945 - RNA, 24 nt, Human
cacugcacuccagccugggcgaca

SEQ ID NO: 589946 - RNA, 27 nt, Human
cacugcacuccagccugggcgacagag

SEQ ID NO: 589947 - RNA, 22 nt, Human
cagcaaauacaagaccucuuuc

SEQ ID NO: 589948 - RNA, 24 nt, Human
cagcugcucgggaggcugaggcag

SEQ ID NO: 589949 - RNA, 24 nt, Human
cagcuguuagggaggccgaggcgg

SEQ ID NO: 589950 - RNA, 22 nt, Human
cauggaaaccagaacacguggu

SEQ ID NO: 589951 - RNA, 22 nt, Human
ccaaccauacuccacccuccau

SEQ ID NO: 589952 - RNA, 18 nt, Human
ccaagaccgcgccacugc

SEQ ID NO: 589953 - RNA, 24 nt, Human
ccaauaggaaaaaaaaaaaaagaa

SEQ ID NO: 589954 - RNA, 20 nt, Human
ccaaucccaaacaauacgaa

SEQ ID NO: 589955 - RNA, 20 nt, Human
ccacugcacuccagccuggg

SEQ ID NO: 589956 - RNA, 21 nt, Human
ccacugcacuccagccugggc

SEQ ID NO: 589957 - RNA, 21 nt, Human
ccacugcacuccagccugggc

SEQ ID NO: 589958 - RNA, 23 nt, Human
ccacugcacuccagccugggcga

SEQ ID NO: 589959 - RNA, 24 nt, Human
ccacugcacuccagccugggcgac

SEQ ID NO: 589960 - RNA, 22 nt, Human
ccuggcuaacacagugaaaccc

SEQ ID NO: 589961 - RNA, 24 nt, Human
ccuggcuaacacagugaaacccug

SEQ ID NO: 589962 - RNA, 22 nt, Human
ccugggcgacagagcaagacuc

SEQ ID NO: 589963 - RNA, 22 nt, Human
ccuguaaucccagcuguuaggg

SEQ ID NO: 589964 - RNA, 21 nt, Human
ccuguagucccagcugcucgg

SEQ ID NO: 589965 - RNA, 24 nt, Human
cgagaccauccuggcuaacacagu

SEQ ID NO: 589966 - RNA, 23 nt, Human
cgccuguaaucccagcuguuagg

SEQ ID NO: 589967 - RNA, 23 nt, Human
cgccuguagucccagcugcucgg

SEQ ID NO: 589968 - RNA, 24 nt, Human
cgccuguagucccagcugcucggg

SEQ ID NO: 589969 - RNA, 22 nt, Human
cgguaagaaaucaauuaaguau

SEQ ID NO: 589970 - RNA, 18 nt, Human
cucaaaaaaaaaaaaaaa

SEQ ID NO: 589971 - RNA, 20 nt, Human
cucacgccuguaaucccagc

SEQ ID NO: 589972 - RNA, 20 nt, Human
cucacgccuguaaucccagc

SEQ ID NO: 589973 - RNA, 20 nt, Human
cucaucgaaacacucgguga

SEQ ID NO: 589974 - RNA, 22 nt, Human
cuccaaccauacuccacccucc

SEQ ID NO: 589975 - RNA, 19 nt, Human
cuccgucucaaaaaaaaaa

SEQ ID NO: 589976 - RNA, 18 nt, Human
cugaaauugaguaauauc

SEQ ID NO: 589977 - RNA, 18 nt, Human
cuggcuaacacagugaaa

SEQ ID NO: 589978 - RNA, 24 nt, Human
cuggcuaacacagugaaacccugu

SEQ ID NO: 589979 - RNA, 24 nt, Human
gaacacgugguuuccaaacaagaa

SEQ ID NO: 589980 - RNA, 18 nt, Human
gagccaaaaacgguaaga

SEQ ID NO: 589981 - RNA, 18 nt, Human
gagcuugcagugagccaa

SEQ ID NO: 589982 - RNA, 23 nt, Human
gagcuugcagugagccaagaccg

SEQ ID NO: 589983 - RNA, 19 nt, Human
gaggaggggagaggaagga

SEQ ID NO: 589984 - RNA, 24 nt, Human
gaggcgggcggaucacaaggucag

SEQ ID NO: 589985 - RNA, 23 nt, Human
gauaggcaucauggaaaccagaa

SEQ ID NO: 589986 - RNA, 24 nt, Human
gauauagcaaaacagagccaaaaa

SEQ ID NO: 589987 - RNA, 20 nt, Human
gcaaaacagagccaaaaacg

SEQ ID NO: 589988 - RNA, 24 nt, Human
gcacuccagccugggcgacagagc

SEQ ID NO: 589989 - RNA, 20 nt, Human
gccaagaccgcgccacugca

SEQ ID NO: 589990 - RNA, 22 nt, Human
gccacugcacuccagccugggc

SEQ ID NO: 589991 - RNA, 24 nt, Human
gccacugcacuccagccugggcga

SEQ ID NO: 589992 - RNA, 24 nt, Human
gcuaacacagugaaacccugucuc

SEQ ID NO: 589993 - RNA, 22 nt, Human
gcugaggcaggagaauggcgug

SEQ ID NO: 589994 - RNA, 20 nt, Human
ggaaaaaaaaaaaaagaaac

SEQ ID NO: 589995 - RNA, 18 nt, Human
ggagcuugcagugagcca

SEQ ID NO: 589996 - RNA, 20 nt, Human
ggagcuugcagugagccaag

SEQ ID NO: 589997 - RNA, 24 nt, Human
ggaugggaggaggggagaggaagg

SEQ ID NO: 589998 - RNA, 18 nt, Human
ggcagggcgcgguggcuc

SEQ ID NO: 589999 - RNA, 23 nt, Human
ggcgcgguggcucacgccuguaa

SEQ ID NO: 590000 - RNA, 21 nt, Human
ggcggaucacaaggucaggag

SEQ ID NO: 590001 - RNA, 25 nt, Human
ggcuccaaccauacuccacccucca

SEQ ID NO: 590002 - RNA, 23 nt, Human
gggaggccgaggcgggcggauca

SEQ ID NO: 590003 - RNA, 20 nt, Human
gggaugggaggaggggagag

SEQ ID NO: 590004 - RNA, 24 nt, Human
gggaugggaggaggggagaggaag

SEQ ID NO: 590005 - RNA, 24 nt, Human
gggcgagguggcgggcgccuguag

SEQ ID NO: 590006 - RNA, 23 nt, Human
gguggcgggcgccuguaguccca

SEQ ID NO: 590007 - RNA, 23 nt, Human
gguggcucacgccuguaauccca

SEQ ID NO: 590008 - RNA, 24 nt, Human
gguggcucacgccuguaaucccag

SEQ ID NO: 590009 - RNA, 21 nt, Human
gugaaacccugucucuacuaa

SEQ ID NO: 590010 - RNA, 23 nt, Human
guggcgggcgccuguagucccag

SEQ ID NO: 590011 - RNA, 22 nt, Human
uaaaaaaauaagcaaagccucc

SEQ ID NO: 590012 - RNA, 21 nt, Human
uaacacagugaaacccugucu

SEQ ID NO: 590013 - RNA, 22 nt, Human
uaacacagugaaacccugucuc

SEQ ID NO: 590014 - RNA, 24 nt, Human
uaacacagugaaacccugucucua

SEQ ID NO: 590015 - RNA, 23 nt, Human
uacaagaccucuuucuacaaaga

SEQ ID NO: 590016 - RNA, 21 nt, Human
uacagcuuaacccuuuaccuc

SEQ ID NO: 590017 - RNA, 25 nt, Human
uacaucuucaucaccaauucguacu

SEQ ID NO: 590018 - RNA, 22 nt, Human
uacgaauacaucuucaucacca

SEQ ID NO: 590019 - RNA, 19 nt, Human
uagagaaauaggaccucca

SEQ ID NO: 590020 - RNA, 21 nt, Human
uagagaaauaggaccuccaga

SEQ ID NO: 590021 - RNA, 20 nt, Human
uagcaaaacagagccaaaaa

SEQ ID NO: 590022 - RNA, 18 nt, Human
uagcacaaccaacaaauu

SEQ ID NO: 590023 - RNA, 21 nt, Human
uaggaaaaaaaaaaaaagaaa

SEQ ID NO: 590024 - RNA, 22 nt, Human
uaucuauagccagagacggcuu

SEQ ID NO: 590025 - RNA, 18 nt, Human
ucacaaggucaggagauc

SEQ ID NO: 590026 - RNA, 24 nt, Human
ucacaaggucaggagaucgagacc

SEQ ID NO: 590027 - RNA, 22 nt, Human
ucaguccagcagaacguuaaaa

SEQ ID NO: 590028 - RNA, 23 nt, Human
uccagaaggaaaaguaucaagaa

SEQ ID NO: 590029 - RNA, 24 nt, Human
uccagaaggaaaaguaucaagaaa

SEQ ID NO: 590030 - RNA, 24 nt, Human
uccagccugggcgacagagcaaga

SEQ ID NO: 590031 - RNA, 23 nt, Human
uccgucucaaaaaaaaaaaaaaa

SEQ ID NO: 590032 - RNA, 24 nt, Human
uccgucucaaaaaaaaaaaaaaaa

SEQ ID NO: 590033 - RNA, 24 nt, Human
ucgcugauuaggcuccaaccauac

SEQ ID NO: 590034 - RNA, 18 nt, Human
ucucaaaaaaaaaaaaaa

SEQ ID NO: 590035 - RNA, 24 nt, Human
ucucuacuaaaaauacaaaauauu

SEQ ID NO: 590036 - RNA, 24 nt, Human
ugaggcaggagaauggcgugaacc

SEQ ID NO: 590037 - RNA, 25 nt, Human
ugaggcaggagaauggcgugaaccc

SEQ ID NO: 590038 - RNA, 20 nt, Human
ugagggaugggaggagggga

SEQ ID NO: 590039 - RNA, 24 nt, Human
ugagggaugggaggaggggagagg

SEQ ID NO: 590040 - RNA, 21 nt, Human
uggaaaaaagguuaaggcagc

SEQ ID NO: 590041 - RNA, 26 nt, Human
uggaagauguuagagaaauaggaccu

SEQ ID NO: 590042 - RNA, 22 nt, Human
uggauaggcaucauggaaacca

SEQ ID NO: 590043 - RNA, 21 nt, Human
uggcucacgccuguaauccca

SEQ ID NO: 590044 - RNA, 22 nt, Human
uggcucacgccuguaaucccag

SEQ ID NO: 590045 - RNA, 23 nt, Human
uguaaucccagcuguuagggagg

SEQ ID NO: 590046 - RNA, 22 nt, Human
uguuagagaaauaggaccucca

SEQ ID NO: 590047 - RNA, 22 nt, Human
uugcagugagccaagaccgcgc

SEQ ID NO: 590048 - RNA, 24 nt, Human
uuuaagagguggacuggaaaaaag

SEQ ID NO: 590049 - RNA, 23 nt, Human
uuucuggaagauguuagagaaau

SEQ ID NO: 590050 - RNA, 19 nt, Human
aaaaggaagggcauagaaa

SEQ ID NO: 590051 - RNA, 21 nt, Human
aggcugccccuuuggucucca

SEQ ID NO: 590052 - RNA, 23 nt, Human
auuuuaaaaauacauacaucuua

SEQ ID NO: 590053 - RNA, 20 nt, Human
cacuguaaucaaaacaaagc

SEQ ID NO: 590054 - RNA, 20 nt, Human
caucuuacacuguaaucaaa

SEQ ID NO: 590055 - RNA, 19 nt, Human
cuggcucaaggcugccccu

SEQ ID NO: 590056 - RNA, 26 nt, Human
cuguaaucaaaacaaagccggggucc

SEQ ID NO: 590057 - RNA, 23 nt, Human
gaagggcauagaaaggaagaaac

SEQ ID NO: 590058 - RNA, 24 nt, Human
ggaagggcauagaaaggaagaaac

SEQ ID NO: 590059 - RNA, 19 nt, Human
gggaacaaaaggaagggcc

SEQ ID NO: 590060 - RNA, 25 nt, Human
uaaaaauacauacaucuuacacugu

SEQ ID NO: 590061 - RNA, 19 nt, Human
uagaaaggaagaaacucug

SEQ ID NO: 590062 - RNA, 19 nt, Human
ucuguggucuggcucaagg

SEQ ID NO: 590063 - RNA, 20 nt, Human
uuuaaaaauacauacaucuu

SEQ ID NO: 590064 - RNA, 22 nt, Human
aaaaaguugauucaguguuugc

SEQ ID NO: 590065 - RNA, 18 nt, Human
aaagacuuuucugcccuc

SEQ ID NO: 590066 - RNA, 24 nt, Human
aacugcuugaaccugggaggcaga

SEQ ID NO: 590067 - RNA, 24 nt, Human
aagcaacaaaccacaucuguuaga

SEQ ID NO: 590068 - RNA, 18 nt, Human
aagcauccuaaaugaaca

SEQ ID NO: 590069 - RNA, 19 nt, Human
aaguagcugggauuacagg

SEQ ID NO: 590070 - RNA, 24 nt, Human
aaguagcugggauuacaggcacac

SEQ ID NO: 590071 - RNA, 21 nt, Human
acacgccuccuaaacacagga

SEQ ID NO: 590072 - RNA, 21 nt, Human
acagguucucucugugguguc

SEQ ID NO: 590073 - RNA, 19 nt, Human
acccaggcuggagugcagu

SEQ ID NO: 590074 - RNA, 23 nt, Human
acccaggcuggagugcaguggug

SEQ ID NO: 590075 - RNA, 23 nt, Human
acuaaagcaacaaaccacaucug

SEQ ID NO: 590076 - RNA, 19 nt, Human
aggcagagguugcugugag

SEQ ID NO: 590077 - RNA, 22 nt, Human
aggcaggagaacugcuugaacc

SEQ ID NO: 590078 - RNA, 24 nt, Human
aggcaggagaacugcuugaaccug

SEQ ID NO: 590079 - RNA, 24 nt, Human
aggcugaggcaggagaacugcuug

SEQ ID NO: 590080 - RNA, 25 nt, Human
aggcuggagugcaguggugcgaucu

SEQ ID NO: 590081 - RNA, 25 nt, Human
agguggaaacucccuacuacagggc

SEQ ID NO: 590082 - RNA, 21 nt, Human
agugcaguggugcgaucuuag

SEQ ID NO: 590083 - RNA, 23 nt, Human
agugcaguggugcgaucuuagcu

SEQ ID NO: 590084 - RNA, 24 nt, Human
agugcaguggugcgaucuuagcuc

SEQ ID NO: 590085 - RNA, 20 nt, Human
augggguuucaccaugcugg

SEQ ID NO: 590086 - RNA, 22 nt, Human
auucuuuucuacugaccagaga

SEQ ID NO: 590087 - RNA, 21 nt, Human
caacauacauccauaugugca

SEQ ID NO: 590088 - RNA, 23 nt, Human
caaccuccaccucccagguucaa

SEQ ID NO: 590089 - RNA, 22 nt, Human
caacuaaagcaacaaaccacau

SEQ ID NO: 590090 - RNA, 22 nt, Human
caagcaauucuccugccucagc

SEQ ID NO: 590091 - RNA, 28 nt, Human
caagcaauucuccugccucagcuuccca

SEQ ID NO: 590092 - RNA, 20 nt, Human
caaugagcagacuuaacagu

SEQ ID NO: 590093 - RNA, 18 nt, Human
cacagugagacucugucc

SEQ ID NO: 590094 - RNA, 18 nt, Human
caccaugcuggccaggcu

SEQ ID NO: 590095 - RNA, 23 nt, Human
caccaugcuggccaggcugaggc

SEQ ID NO: 590096 - RNA, 21 nt, Human
cacccaggcuggagugcagug

SEQ ID NO: 590097 - RNA, 21 nt, Human
cacgccuccuaaacacaggag

SEQ ID NO: 590098 - RNA, 21 nt, Human
cacugcaaccuccaccuccca

SEQ ID NO: 590099 - RNA, 21 nt, Human
cauggagguagugguggggug

SEQ ID NO: 590100 - RNA, 27 nt, Human
ccaaagacuuuucugcccucauccuaa

SEQ ID NO: 590101 - RNA, 23 nt, Human
ccaaguagcugggauuacaggca

SEQ ID NO: 590102 - RNA, 26 nt, Human
ccaccucccagguucaagcaauucuu

SEQ ID NO: 590103 - RNA, 27 nt, Human
cccaaagacuuuucugcccucauccuu

SEQ ID NO: 590104 - RNA, 23 nt, Human
cccaaguagcugggauuacaggc

SEQ ID NO: 590105 - RNA, 24 nt, Human
cccaaguagcugggauuacaggca

SEQ ID NO: 590106 - RNA, 23 nt, Human
cccagguucaagcaauucuccug

SEQ ID NO: 590107 - RNA, 18 nt, Human
ccccaaagacuuuucugc

SEQ ID NO: 590108 - RNA, 23 nt, Human
ccccaaagacuuuucugcccucu

SEQ ID NO: 590109 - RNA, 19 nt, Human
ccuaaacacaggagugaga

SEQ ID NO: 590110 - RNA, 24 nt, Human
ccucccagguucaagcaauucucc

SEQ ID NO: 590111 - RNA, 21 nt, Human
ccuccuaaacacaggagugag

SEQ ID NO: 590112 - RNA, 24 nt, Human
ccugccucagcuucccaaguagcu

SEQ ID NO: 590113 - RNA, 25 nt, Human
ccugggaggcagagguugcugugag

SEQ ID NO: 590114 - RNA, 24 nt, Human
cgcucugucacccaggcuggagug

SEQ ID NO: 590115 - RNA, 22 nt, Human
cuacagggcucuucauuccaau

SEQ ID NO: 590116 - RNA, 24 nt, Human
cucacugcaaccuccaccucccag

SEQ ID NO: 590117 - RNA, 23 nt, Human
cucagcuucccaaguagcuggga

SEQ ID NO: 590118 - RNA, 24 nt, Human
cucgcucugucacccaggcuggag

SEQ ID NO: 590119 - RNA, 23 nt, Human
cucugucacccaggcuggagugc

SEQ ID NO: 590120 - RNA, 23 nt, Human
cugcaaccuccaccucccagguu

SEQ ID NO: 590121 - RNA, 24 nt, Human
cugcaaccuccaccucccagguuc

SEQ ID NO: 590122 - RNA, 24 nt, Human
cugcuugaaccugggaggcagagg

SEQ ID NO: 590123 - RNA, 23 nt, Human
cuggaagacucauguggccccca

SEQ ID NO: 590124 - RNA, 24 nt, Human
cuuuauaaugguucacaguggcug

SEQ ID NO: 590125 - RNA, 19 nt, Human
cuuuuuuuuugaaauggag

SEQ ID NO: 590126 - RNA, 18 nt, Human
gagaugggguuucaccau

SEQ ID NO: 590127 - RNA, 24 nt, Human
gagaugggguuucaccaugcuggc

SEQ ID NO: 590128 - RNA, 18 nt, Human
gcacaagcuuguuucagu

SEQ ID NO: 590129 - RNA, 24 nt, Human
gccucagcuucccaaguagcuggg

SEQ ID NO: 590130 - RNA, 25 nt, Human
gccuccuaaacacaggagugagagu

SEQ ID NO: 590131 - RNA, 23 nt, Human
ggaaacucccuacuacagggcuc

SEQ ID NO: 590132 - RNA, 21 nt, Human
ggagaucaugccacugcacag

SEQ ID NO: 590133 - RNA, 22 nt, Human
gggguuucaccaugcuggccag

SEQ ID NO: 590134 - RNA, 19 nt, Human
guagagaugggguuucacc

SEQ ID NO: 590135 - RNA, 21 nt, Human
guagagaugggguuucaccau

SEQ ID NO: 590136 - RNA, 22 nt, Human
guagagaugggguuucaccaug

SEQ ID NO: 590137 - RNA, 18 nt, Human
guagcugggauuacaggc

SEQ ID NO: 590138 - RNA, 23 nt, Human
uaaagcaacaaaccacaucuguu

SEQ ID NO: 590139 - RNA, 22 nt, Human
uaaaugaacaaccauggaggua

SEQ ID NO: 590140 - RNA, 24 nt, Human
uaauuuccuguauuuuugguagag

SEQ ID NO: 590141 - RNA, 24 nt, Human
uaguaaaucuucuauuugaugccc

SEQ ID NO: 590142 - RNA, 29 nt, Human
uauuauaaacauuuucaacauggcaauaa

SEQ ID NO: 590143 - RNA, 22 nt, Human
ucacccaggcuggagugcagug

SEQ ID NO: 590144 - RNA, 23 nt, Human
ucacugcaaccuccaccucccag

SEQ ID NO: 590145 - RNA, 24 nt, Human
ucacugcaaccuccaccucccagg

SEQ ID NO: 590146 - RNA, 27 nt, Human
ucacugcaaccuccaccucccagguuc

SEQ ID NO: 590147 - RNA, 21 nt, Human
uccacuuucaacauacaucca

SEQ ID NO: 590148 - RNA, 18 nt, Human
uccaucauccacuuucaa

SEQ ID NO: 590149 - RNA, 24 nt, Human
ucccaaguagcugggauuacaggc

SEQ ID NO: 590150 - RNA, 21 nt, Human
ucccagguucaagcaauucuc

SEQ ID NO: 590151 - RNA, 24 nt, Human
ucccagguucaagcaauucuccug

SEQ ID NO: 590152 - RNA, 21 nt, Human
uccccaaugagcagacuuaac

SEQ ID NO: 590153 - RNA, 24 nt, Human
ucgcucugucacccaggcuggagu

SEQ ID NO: 590154 - RNA, 19 nt, Human
ucucgcucugucacccagg

SEQ ID NO: 590155 - RNA, 22 nt, Human
ucucgcucugucacccaggcug

SEQ ID NO: 590156 - RNA, 23 nt, Human
ucucgcucugucacccaggcugg

SEQ ID NO: 590157 - RNA, 24 nt, Human
ucucgcucugucacccaggcugga

SEQ ID NO: 590158 - RNA, 26 nt, Human
ucucgcucugucacccaggcuggagu

SEQ ID NO: 590159 - RNA, 27 nt, Human
ucucgcucugucacccaggcuggagug

SEQ ID NO: 590160 - RNA, 24 nt, Human
ucugucacccaggcuggagugcag

SEQ ID NO: 590161 - RNA, 22 nt, Human
ucuguccgaaaaaaaaaaaaaa

SEQ ID NO: 590162 - RNA, 23 nt, Human
ucuguccgaaaaaaaaaaaaaag

SEQ ID NO: 590163 - RNA, 20 nt, Human
ucuguggugucacccccaug

SEQ ID NO: 590164 - RNA, 23 nt, Human
ucuguggugucacccccauguuu

SEQ ID NO: 590165 - RNA, 22 nt, Human
ugaaauggagucucgcucuguc

SEQ ID NO: 590166 - RNA, 24 nt, Human
ugaauuagaagcauccuaaaugaa

SEQ ID NO: 590167 - RNA, 24 nt, Human
ugaggcaggagaacugcuugaacc

SEQ ID NO: 590168 - RNA, 24 nt, Human
ugaggcaggagaacugcuugaacc

SEQ ID NO: 590169 - RNA, 23 nt, Human
ugcacagugagacucuguccgaa

SEQ ID NO: 590170 - RNA, 24 nt, Human
ugccucagcuucccaaguagcugg

SEQ ID NO: 590171 - RNA, 23 nt, Human
uggagugcaguggugcgaucuua

SEQ ID NO: 590172 - RNA, 24 nt, Human
uggagugcaguggugcgaucuuag

SEQ ID NO: 590173 - RNA, 19 nt, Human
uggauagcuuaaaggauuc

SEQ ID NO: 590174 - RNA, 22 nt, Human
uggccaggcugaggcaggagaa

SEQ ID NO: 590175 - RNA, 19 nt, Human
ugggauuacaggcacacac

SEQ ID NO: 590176 - RNA, 19 nt, Human
ugggauuacaggcacacac

SEQ ID NO: 590177 - RNA, 21 nt, Human
ugggauuacaggcacacacua

SEQ ID NO: 590178 - RNA, 22 nt, Human
ugggauuacaggcacacacuac

SEQ ID NO: 590179 - RNA, 24 nt, Human
ugggguuucaccaugcuggccagg

SEQ ID NO: 590180 - RNA, 23 nt, Human
ugguagagaugggguuucaccau

SEQ ID NO: 590181 - RNA, 24 nt, Human
ugguagagaugggguuucaccaug

SEQ ID NO: 590182 - RNA, 24 nt, Human
uggugcgaucuuagcucacugcaa

SEQ ID NO: 590183 - RNA, 20 nt, Human
ugugcacauauuuuuacaug

SEQ ID NO: 590184 - RNA, 22 nt, Human
uuagaagcagcccuuuccaucu

SEQ ID NO: 590185 - RNA, 25 nt, Human
uuagcucacugcaaccuccaccucc

SEQ ID NO: 590186 - RNA, 23 nt, Human
uucaacaacuaaagcaacaaacc

SEQ ID NO: 590187 - RNA, 21 nt, Human
uucaagcaauucuccugccuc

SEQ ID NO: 590188 - RNA, 24 nt, Human
uucaagcaauucuccugccucagc

SEQ ID NO: 590189 - RNA, 20 nt, Human
uucacagguucucucugugg

SEQ ID NO: 590190 - RNA, 24 nt, Human
uucacaguggcugaauuagaagca

SEQ ID NO: 590191 - RNA, 21 nt, Human
uuccuguauuuuugguagaga

SEQ ID NO: 590192 - RNA, 24 nt, Human
uugaaccugggaggcagagguugc

SEQ ID NO: 590193 - RNA, 24 nt, Human
uugguagagaugggguuucaccau

SEQ ID NO: 590194 - RNA, 21 nt, Human
uuucaccaugcuggccaggcu

SEQ ID NO: 590195 - RNA, 23 nt, Human
uuuccuguauuuuugguagagau

SEQ ID NO: 590196 - RNA, 24 nt, Human
uuuccuguauuuuugguagagaug

SEQ ID NO: 590197 - RNA, 20 nt, Human
uuuucugcccucauccuaag

SEQ ID NO: 590198 - RNA, 22 nt, Human
uuuuugguagagaugggguuuc

SEQ ID NO: 590199 - RNA, 24 nt, Human
uuuuugguagagaugggguuucac

SEQ ID NO: 590200 - RNA, 19 nt, Human
aaaacugauaaaagcaaca

SEQ ID NO: 590201 - RNA, 21 nt, Human
aaacgcaagaggauggugagg

SEQ ID NO: 590202 - RNA, 21 nt, Human
aaccccacggguccaggcacc

SEQ ID NO: 590203 - RNA, 20 nt, Human
aaccuaguuucccaggccca

SEQ ID NO: 590204 - RNA, 22 nt, Human
aacugauaaaagcaacacaacu

SEQ ID NO: 590205 - RNA, 18 nt, Human
aagcaaggccacgcugug

SEQ ID NO: 590206 - RNA, 25 nt, Human
aagcaccauggcacguccuuugugc

SEQ ID NO: 590207 - RNA, 24 nt, Human
aagccccaaguuuggacacccugc

SEQ ID NO: 590208 - RNA, 21 nt, Human
aagcugaagaggcccccaggg

SEQ ID NO: 590209 - RNA, 23 nt, Human
aaggagccccaugcagccagugc

SEQ ID NO: 590210 - RNA, 18 nt, Human
aaguuuggacacccugcc

SEQ ID NO: 590211 - RNA, 19 nt, Human
acaagcaaggccacgcugu

SEQ ID NO: 590212 - RNA, 23 nt, Human
acacugcaggugccugggaagcc

SEQ ID NO: 590213 - RNA, 21 nt, Human
accaacaccccucccucucaa

SEQ ID NO: 590214 - RNA, 18 nt, Human
acccuggggucccucugc

SEQ ID NO: 590215 - RNA, 19 nt, Human
agagcuggcagggccccuu

SEQ ID NO: 590216 - RNA, 20 nt, Human
agaggauggugagggucccg

SEQ ID NO: 590217 - RNA, 23 nt, Human
agccccagcagggcaggccagga

SEQ ID NO: 590218 - RNA, 19 nt, Human
aggaggggaggggaggggu

SEQ ID NO: 590219 - RNA, 19 nt, Human
agggaaaggauguguggca

SEQ ID NO: 590220 - RNA, 19 nt, Human
aggugccugggaagcccca

SEQ ID NO: 590221 - RNA, 22 nt, Human
aggugcuggugagggaccccag

SEQ ID NO: 590222 - RNA, 21 nt, Human
aggugucagggaggugcuggu

SEQ ID NO: 590223 - RNA, 20 nt, Human
auccccgccgccgccgccgc

SEQ ID NO: 590224 - RNA, 22 nt, Human
augccccucugggagguauguc

SEQ ID NO: 590225 - RNA, 24 nt, Human
caaagcccacccggggcgccuccc

SEQ ID NO: 590226 - RNA, 21 nt, Human
caacaggcuccgccgcggcuc

SEQ ID NO: 590227 - RNA, 24 nt, Human
caaccccacggguccaggcacccu

SEQ ID NO: 590228 - RNA, 23 nt, Human
caaggagccccaugcagccagug

SEQ ID NO: 590229 - RNA, 20 nt, Human
cacagcacugagcaaggccc

SEQ ID NO: 590230 - RNA, 19 nt, Human
caccaacaccccucccucu

SEQ ID NO: 590231 - RNA, 22 nt, Human
caccaacaccccucccucucaa

SEQ ID NO: 590232 - RNA, 23 nt, Human
caccaacaccccucccucucaaa

SEQ ID NO: 590233 - RNA, 19 nt, Human
cacccccaagaggccucca

SEQ ID NO: 590234 - RNA, 27 nt, Human
caccccucccucucaaaugguggcuug

SEQ ID NO: 590235 - RNA, 22 nt, Human
cacccggggcgccucccugccc

SEQ ID NO: 590236 - RNA, 19 nt, Human
cacccuggggucccucugc

SEQ ID NO: 590237 - RNA, 23 nt, Human
cagcagggcaggccaggagggaa

SEQ ID NO: 590238 - RNA, 18 nt, Human
cagcccccuccgcggccc

SEQ ID NO: 590239 - RNA, 27 nt, Human
cagcuccacugaguggccacgagcaac

SEQ ID NO: 590240 - RNA, 20 nt, Human
cagcugcuccuggucuugga

SEQ ID NO: 590241 - RNA, 22 nt, Human
caggcacccucccugcaguccc

SEQ ID NO: 590242 - RNA, 21 nt, Human
cagggaggugcuggugaggga

SEQ ID NO: 590243 - RNA, 20 nt, Human
cagggccccuuccaccucuc

SEQ ID NO: 590244 - RNA, 23 nt, Human
caggggacacccuggggucccuc

SEQ ID NO: 590245 - RNA, 22 nt, Human
cagggugggcucugaggagggg

SEQ ID NO: 590246 - RNA, 20 nt, Human
caguagagccccagcagggc

SEQ ID NO: 590247 - RNA, 23 nt, Human
cauucuuaucuuggagcucaggg

SEQ ID NO: 590248 - RNA, 20 nt, Human
cccaaaggucccacccccaa

SEQ ID NO: 590249 - RNA, 24 nt, Human
cccacccccaagaggccuccagga

SEQ ID NO: 590250 - RNA, 19 nt, Human
cccaggcccaggacaccau

SEQ ID NO: 590251 - RNA, 22 nt, Human
cccaugcagccagugccccaug

SEQ ID NO: 590252 - RNA, 18 nt, Human
ccccaaagcccacccggg

SEQ ID NO: 590253 - RNA, 28 nt, Human
ccccaaagcccacccggggcgccucccu

SEQ ID NO: 590254 - RNA, 21 nt, Human
ccccaagaggccuccaggacc

SEQ ID NO: 590255 - RNA, 19 nt, Human
ccccgccgccgccgccgcc

SEQ ID NO: 590256 - RNA, 25 nt, Human
ccccgccgccgccgccgccucagaa

SEQ ID NO: 590257 - RNA, 27 nt, Human
ccccgccgccgccgccgccucagagac

SEQ ID NO: 590258 - RNA, 19 nt, Human
cccgcaccaaggcaugggg

SEQ ID NO: 590259 - RNA, 18 nt, Human
cccgucggccggcucucc

SEQ ID NO: 590260 - RNA, 21 nt, Human
ccgccgccgccgccgccucag

SEQ ID NO: 590261 - RNA, 19 nt, Human
ccgccgccgccucagagac

SEQ ID NO: 590262 - RNA, 22 nt, Human
ccgccgccucagagaccacucc

SEQ ID NO: 590263 - RNA, 21 nt, Human
ccgccgcggcucccgucggcc

SEQ ID NO: 590264 - RNA, 27 nt, Human
ccgccgcggcucccgucggccggcucu

SEQ ID NO: 590265 - RNA, 21 nt, Human
ccggcagcccgcgcgagcuca

SEQ ID NO: 590266 - RNA, 26 nt, Human
ccucagagaccacucccggcagcccu

SEQ ID NO: 590267 - RNA, 23 nt, Human
ccucccugcaguccccgcggcca

SEQ ID NO: 590268 - RNA, 19 nt, Human
ccuuugcuaauaaggccuc

SEQ ID NO: 590269 - RNA, 19 nt, Human
cgagaggcauuaggauggu

SEQ ID NO: 590270 - RNA, 19 nt, Human
cgccagugccggagacgau

SEQ ID NO: 590271 - RNA, 23 nt, Human
cgccagugccggagacgaucccc

SEQ ID NO: 590272 - RNA, 20 nt, Human
cgcggccaggcuccugcugg

SEQ ID NO: 590273 - RNA, 23 nt, Human
cgcggccaggcuccugcuggguc

SEQ ID NO: 590274 - RNA, 20 nt, Human
cggcuuagcucccgcugugg

SEQ ID NO: 590275 - RNA, 24 nt, Human
cuaaagcucagaacagcccaaggc

SEQ ID NO: 590276 - RNA, 20 nt, Human
cucaaugaagcaaccccacg

SEQ ID NO: 590277 - RNA, 23 nt, Human
cuccccagagcuggcagggcccc

SEQ ID NO: 590278 - RNA, 20 nt, Human
cugaagaggcccccaggggc

SEQ ID NO: 590279 - RNA, 21 nt, Human
cugaaggccgcggucuggcug

SEQ ID NO: 590280 - RNA, 20 nt, Human
cugcaggcccagcuccacug

SEQ ID NO: 590281 - RNA, 21 nt, Human
cugcccaaaggucccaccccc

SEQ ID NO: 590282 - RNA, 18 nt, Human
cugcuccccagagcuggc

SEQ ID NO: 590283 - RNA, 21 nt, Human
cugcugggucuacagggucca

SEQ ID NO: 590284 - RNA, 21 nt, Human
cugcugucuccagcucacagc

SEQ ID NO: 590285 - RNA, 19 nt, Human
cugucuccagcucacagcu

SEQ ID NO: 590286 - RNA, 25 nt, Human
cuuccaccucucggagugcuggccc

SEQ ID NO: 590287 - RNA, 19 nt, Human
cuucccacaaaccacugca

SEQ ID NO: 590288 - RNA, 20 nt, Human
cuucccacaaaccacugcaa

SEQ ID NO: 590289 - RNA, 20 nt, Human
gaaagcaccauggcacgucc

SEQ ID NO: 590290 - RNA, 22 nt, Human
gaacaaauguucagcaguucuc

SEQ ID NO: 590291 - RNA, 18 nt, Human
gacaagcaaggccacgcu

SEQ ID NO: 590292 - RNA, 18 nt, Human
gagcaaggcccugaguag

SEQ ID NO: 590293 - RNA, 18 nt, Human
gaggaggggaggggaggg

SEQ ID NO: 590294 - RNA, 24 nt, Human
gauccccgccgccgccgccgccuc

SEQ ID NO: 590295 - RNA, 19 nt, Human
gcccagggccggcuuagcu

SEQ ID NO: 590296 - RNA, 22 nt, Human
gcccaggugucagggaggugcu

SEQ ID NO: 590297 - RNA, 22 nt, Human
gccccaaagcccacccggggcg

SEQ ID NO: 590298 - RNA, 26 nt, Human
gccccaaagcccacccggggcgccuc

SEQ ID NO: 590299 - RNA, 23 nt, Human
gcccccagugcuguuggcaggug

SEQ ID NO: 590300 - RNA, 22 nt, Human
gcccccuccgcggcccuaaucu

SEQ ID NO: 590301 - RNA, 22 nt, Human
gcgccucccugccccugccugc

SEQ ID NO: 590302 - RNA, 22 nt, Human
gcggccaggcuccugcuggguc

SEQ ID NO: 590303 - RNA, 23 nt, Human
ggaaagcaccauggcacguccuu

SEQ ID NO: 590304 - RNA, 24 nt, Human
ggcucugaggaggggaggggaggg

SEQ ID NO: 590305 - RNA, 21 nt, Human
gggcgccucccugccccugcc

SEQ ID NO: 590306 - RNA, 18 nt, Human
ggggccaaaacgcaagag

SEQ ID NO: 590307 - RNA, 20 nt, Human
gucagugggcaaacccugcc

SEQ ID NO: 590308 - RNA, 22 nt, Human
gugccaugggggucacugcugc

SEQ ID NO: 590309 - RNA, 20 nt, Human
guggcagacaagcaaggcca

SEQ ID NO: 590310 - RNA, 19 nt, Human
guggcagugccgcagcccc

SEQ ID NO: 590311 - RNA, 21 nt, Human
gugucagggaggugcugguga

SEQ ID NO: 590312 - RNA, 18 nt, Human
uaaagcucagaacagccc

SEQ ID NO: 590313 - RNA, 18 nt, Human
uagaaaacugauaaaagc

SEQ ID NO: 590314 - RNA, 25 nt, Human
uaggauggucacugacaggcgccaa

SEQ ID NO: 590315 - RNA, 21 nt, Human
ucagcaguucucucggggcca

SEQ ID NO: 590316 - RNA, 22 nt, Human
ucagggcaccaacaccccuccc

SEQ ID NO: 590317 - RNA, 20 nt, Human
ucaguccugguggcagucca

SEQ ID NO: 590318 - RNA, 19 nt, Human
uccaggcacccucccugca

SEQ ID NO: 590319 - RNA, 23 nt, Human
ucccacccccaagaggccuccag

SEQ ID NO: 590320 - RNA, 18 nt, Human
ucccaggcccaggacacc

SEQ ID NO: 590321 - RNA, 20 nt, Human
uccccgccgccgccgccgcc

SEQ ID NO: 590322 - RNA, 20 nt, Human
uccccgcggccaggcuccug

SEQ ID NO: 590323 - RNA, 21 nt, Human
ucccugcaguccccgcggcca

SEQ ID NO: 590324 - RNA, 27 nt, Human
ucucaaggcucugcaaguguccuucuc

SEQ ID NO: 590325 - RNA, 22 nt, Human
ucucaaugaagcaaccccacgg

SEQ ID NO: 590326 - RNA, 21 nt, Human
ucuccuggggagaagccccca

SEQ ID NO: 590327 - RNA, 23 nt, Human
ucugcaggggacacccugggguc

SEQ ID NO: 590328 - RNA, 24 nt, Human
ucugcaggggacacccuggggucc

SEQ ID NO: 590329 - RNA, 24 nt, Human
ugaagcaaccccacggguccaggc

SEQ ID NO: 590330 - RNA, 21 nt, Human
ugacucaggaggugacagcaa

SEQ ID NO: 590331 - RNA, 23 nt, Human
ugagcaaggcccugaguaggugg

SEQ ID NO: 590332 - RNA, 19 nt, Human
ugagggaccccagugacuc

SEQ ID NO: 590333 - RNA, 19 nt, Human
ugccccugccugcccggcc

SEQ ID NO: 590334 - RNA, 23 nt, Human
ugcgccagugccggagacgaucc

SEQ ID NO: 590335 - RNA, 23 nt, Human
uggcaguccaugccccucuggga

SEQ ID NO: 590336 - RNA, 23 nt, Human
ugggacuuacagcuuuguggaag

SEQ ID NO: 590337 - RNA, 25 nt, Human
ugggaucugcaggggacacccuggg

SEQ ID NO: 590338 - RNA, 18 nt, Human
ugggcaaacccugcccaa

SEQ ID NO: 590339 - RNA, 22 nt, Human
uggggagaagcccccagugcug

SEQ ID NO: 590340 - RNA, 22 nt, Human
ugggucuacaggguccaaggag

SEQ ID NO: 590341 - RNA, 18 nt, Human
uggugagggucccgucac

SEQ ID NO: 590342 - RNA, 20 nt, Human
uggugagggucccgucacug

SEQ ID NO: 590343 - RNA, 20 nt, Human
uggugggaucugcaggggac

SEQ ID NO: 590344 - RNA, 22 nt, Human
ugucacugaggccccccugcag

SEQ ID NO: 590345 - RNA, 25 nt, Human
ugucuuggucaccuuucuggucuca

SEQ ID NO: 590346 - RNA, 22 nt, Human
ugugccaugggggucacugcug

SEQ ID NO: 590347 - RNA, 23 nt, Human
uguggaaggggcccacaaaccuu

SEQ ID NO: 590348 - RNA, 21 nt, Human
uuacagcuuuguggaaggggc

SEQ ID NO: 590349 - RNA, 22 nt, Human
uuggacacccugcccagucccu

SEQ ID NO: 590350 - RNA, 20 nt, Human
aaacccucagugggucaggg

SEQ ID NO: 590351 - RNA, 22 nt, Human
aagaaagaaauuccaguuagga

SEQ ID NO: 590352 - RNA, 21 nt, Human
aagaaccuugauuuaucauug

SEQ ID NO: 590353 - RNA, 25 nt, Human
aagcaauccuccugccucagccucc

SEQ ID NO: 590354 - RNA, 21 nt, Human
acacaacacaccagggaucag

SEQ ID NO: 590355 - RNA, 18 nt, Human
acagcuuacuguaaccuc

SEQ ID NO: 590356 - RNA, 19 nt, Human
acccugugcucaaacugcu

SEQ ID NO: 590357 - RNA, 24 nt, Human
acccugugcucaaacugcuacaaa

SEQ ID NO: 590358 - RNA, 22 nt, Human
acguggcuucagcaauucucaa

SEQ ID NO: 590359 - RNA, 19 nt, Human
acucggucacccaggcugg

SEQ ID NO: 590360 - RNA, 20 nt, Human
acucggucacccaggcugga

SEQ ID NO: 590361 - RNA, 22 nt, Human
acucggucacccaggcuggagg

SEQ ID NO: 590362 - RNA, 20 nt, Human
acugcuacaaaaauaugaga

SEQ ID NO: 590363 - RNA, 24 nt, Human
agcuaggacuacaagcaugugcca

SEQ ID NO: 590364 - RNA, 22 nt, Human
agggaaaaaugagcuaagucug

SEQ ID NO: 590365 - RNA, 21 nt, Human
aggugcuucuacguggcuuca

SEQ ID NO: 590366 - RNA, 22 nt, Human
aggugcuucuacguggcuucag

SEQ ID NO: 590367 - RNA, 23 nt, Human
aguagcuaggacuacaagcaugu

SEQ ID NO: 590368 - RNA, 22 nt, Human
agugggucagggucuucuaaga

SEQ ID NO: 590369 - RNA, 21 nt, Human
auccuccugccucagccuccc

SEQ ID NO: 590370 - RNA, 25 nt, Human
caaacuccuagacucaagcaauccu

SEQ ID NO: 590371 - RNA, 22 nt, Human
caagcaauccuccugccucagc

SEQ ID NO: 590372 - RNA, 27 nt, Human
caagcaauccuccugccucagccuccc

SEQ ID NO: 590373 - RNA, 27 nt, Human
caagcaauccuccugccucagccuccc

SEQ ID NO: 590374 - RNA, 24 nt, Human
cacacaacacaccagggaucagag

SEQ ID NO: 590375 - RNA, 27 nt, Human
cagcaauucucacaacaaacccucagu

SEQ ID NO: 590376 - RNA, 24 nt, Human
cagcuacagcauuucuuacugaac

SEQ ID NO: 590377 - RNA, 24 nt, Human
caguacugaaaguucguuuggaga

SEQ ID NO: 590378 - RNA, 19 nt, Human
ccaaugguugacagcuccc

SEQ ID NO: 590379 - RNA, 20 nt, Human
ccacacuuguuucauuuuua

SEQ ID NO: 590380 - RNA, 19 nt, Human
cccacacaacacaccaggg

SEQ ID NO: 590381 - RNA, 24 nt, Human
cccaccuccaccccaccucaagaa

SEQ ID NO: 590382 - RNA, 27 nt, Human
cccaccuccaccccaccucaagaagaa

SEQ ID NO: 590383 - RNA, 23 nt, Human
ccugccucagccucccaaguagc

SEQ ID NO: 590384 - RNA, 22 nt, Human
cgcuauguugcccaggcugguc

SEQ ID NO: 590385 - RNA, 27 nt, Human
cgcuauguugcccaggcugguccugaa

SEQ ID NO: 590386 - RNA, 20 nt, Human
cguggcuucagcaauucuca

SEQ ID NO: 590387 - RNA, 24 nt, Human
cucaagcaauccuccugccucagc

SEQ ID NO: 590388 - RNA, 23 nt, Human
cugccucagccucccaaguagcu

SEQ ID NO: 590389 - RNA, 21 nt, Human
cuuacuguaaccucaaacucc

SEQ ID NO: 590390 - RNA, 23 nt, Human
cuugcuccccaccuccaccccac

SEQ ID NO: 590391 - RNA, 20 nt, Human
gaacuuccugaccuuuccga

SEQ ID NO: 590392 - RNA, 19 nt, Human
gcugguccugaacuccugg

SEQ ID NO: 590393 - RNA, 23 nt, Human
gcugguccugaacuccuggccuc

SEQ ID NO: 590394 - RNA, 22 nt, Human
ggacuacaagcaugugccacca

SEQ ID NO: 590395 - RNA, 19 nt, Human
ggaucagagccaggucaaa

SEQ ID NO: 590396 - RNA, 18 nt, Human
ggcaagaaagaaauuccg

SEQ ID NO: 590397 - RNA, 24 nt, Human
ggcugguccugaacuccuggccuc

SEQ ID NO: 590398 - RNA, 24 nt, Human
gggggucucgcuauguugcccagg

SEQ ID NO: 590399 - RNA, 20 nt, Human
gugcuucuacguggcuucag

SEQ ID NO: 590400 - RNA, 21 nt, Human
uaaaaagcuauccucagauga

SEQ ID NO: 590401 - RNA, 23 nt, Human
uaaagaggcccacacaacacacc

SEQ ID NO: 590402 - RNA, 21 nt, Human
uaauaaaacccacugaucaaa

SEQ ID NO: 590403 - RNA, 21 nt, Human
uacaagcaugugccaccacac

SEQ ID NO: 590404 - RNA, 21 nt, Human
uacuguaaccucaaacuccua

SEQ ID NO: 590405 - RNA, 21 nt, Human
uaggacuacaagcaugugcca

SEQ ID NO: 590406 - RNA, 24 nt, Human
uaggacuacaagcaugugccacca

SEQ ID NO: 590407 - RNA, 23 nt, Human
uauguugcccaggcugguccuga

SEQ ID NO: 590408 - RNA, 24 nt, Human
uauguugcccaggcugguccugaa

SEQ ID NO: 590409 - RNA, 23 nt, Human
ucacccaggcuggaggccauguc

SEQ ID NO: 590410 - RNA, 20 nt, Human
ucagccucccaaguagcuag

SEQ ID NO: 590411 - RNA, 18 nt, Human
ucaguucuuccauugaug

SEQ ID NO: 590412 - RNA, 21 nt, Human
ucaguucuuccauugauggua

SEQ ID NO: 590413 - RNA, 18 nt, Human
uccaccccaccucaagaa

SEQ ID NO: 590414 - RNA, 20 nt, Human
uccccaccuccaccccaccu

SEQ ID NO: 590415 - RNA, 21 nt, Human
uccccaccuccaccccaccuc

SEQ ID NO: 590416 - RNA, 27 nt, Human
uccuccugccucagccucccaaguagc

SEQ ID NO: 590417 - RNA, 24 nt, Human
ucucacucggucacccaggcugga

SEQ ID NO: 590418 - RNA, 19 nt, Human
ucucgcuauguugcccagg

SEQ ID NO: 590419 - RNA, 23 nt, Human
ucucgcuauguugcccaggcugg

SEQ ID NO: 590420 - RNA, 24 nt, Human
ucucgcuauguugcccaggcuggu

SEQ ID NO: 590421 - RNA, 26 nt, Human
ucucgcuauguugcccaggcuggucc

SEQ ID NO: 590422 - RNA, 27 nt, Human
ucucgcuauguugcccaggcugguccu

SEQ ID NO: 590423 - RNA, 19 nt, Human
ucuugcuccccaccuccac

SEQ ID NO: 590424 - RNA, 19 nt, Human
ugaaagggcaagaaagaaa

SEQ ID NO: 590425 - RNA, 25 nt, Human
ugaaauaauaaaacccacugaucaa

SEQ ID NO: 590426 - RNA, 23 nt, Human
ugaaugacaacagcuacagcauu

SEQ ID NO: 590427 - RNA, 24 nt, Human
ugcccaggcugguccugaacuccu

SEQ ID NO: 590428 - RNA, 23 nt, Human
ugccucagccucccaaguagcua

SEQ ID NO: 590429 - RNA, 24 nt, Human
ugccucagccucccaaguagcuag

SEQ ID NO: 590430 - RNA, 19 nt, Human
ugcuccccaccuccacccc

SEQ ID NO: 590431 - RNA, 20 nt, Human
ugguccugaacuccuggccu

SEQ ID NO: 590432 - RNA, 21 nt, Human
uguccuuggccaaaaguagaa

SEQ ID NO: 590433 - RNA, 19 nt, Human
ugugguuuuacagauuuca

SEQ ID NO: 590434 - RNA, 22 nt, Human
uuaacccugugcucaaacugcu

SEQ ID NO: 590435 - RNA, 23 nt, Human
uuggagaguuguaguccaguuuc

SEQ ID NO: 590436 - RNA, 23 nt, Human
uuuauuuuuuguuuuuauuuuua

SEQ ID NO: 590437 - RNA, 19 nt, Human
uuucugccagagguugcac

SEQ ID NO: 590438 - RNA, 19 nt, Human
uuuuuuuuuuuuaaggacc

SEQ ID NO: 590439 - RNA, 25 nt, Human
uuuuuuuuuuuuuuuuuuuuuaagg

SEQ ID NO: 590440 - RNA, 21 nt, Human
aaacugaggagcagagggcac

SEQ ID NO: 590441 - RNA, 22 nt, Human
aagcauuccauggugucuucau

SEQ ID NO: 590442 - RNA, 26 nt, Human
accccaucugaugacgauucggauug

SEQ ID NO: 590443 - RNA, 19 nt, Human
acuguuuuuuuuuagggug

SEQ ID NO: 590444 - RNA, 23 nt, Human
agagagaagguaauaguuggaaa

SEQ ID NO: 590445 - RNA, 23 nt, Human
agaguauucuaccaccucacgga

SEQ ID NO: 590446 - RNA, 21 nt, Human
agcacugcaagauggucucca

SEQ ID NO: 590447 - RNA, 23 nt, Human
agcagcagcagcagccuaauggg

SEQ ID NO: 590448 - RNA, 18 nt, Human
aggacaguuuuggcugcc

SEQ ID NO: 590449 - RNA, 24 nt, Human
auaguggccucgucauccagcuga

SEQ ID NO: 590450 - RNA, 23 nt, Human
caauaaccagugagaucuccaau

SEQ ID NO: 590451 - RNA, 22 nt, Human
caccccaucugaugacgauucg

SEQ ID NO: 590452 - RNA, 22 nt, Human
cacuggggucauggggucugcc

SEQ ID NO: 590453 - RNA, 27 nt, Human
cagaaucacaucagaguauucuaccaa

SEQ ID NO: 590454 - RNA, 22 nt, Human
cagcacugagaugggcaggcag

SEQ ID NO: 590455 - RNA, 26 nt, Human
cagcagcagcagccuaaugggucucu

SEQ ID NO: 590456 - RNA, 26 nt, Human
cagcagcagccuaaugggucucuggc

SEQ ID NO: 590457 - RNA, 22 nt, Human
cagcagccuaaugggucucugg

SEQ ID NO: 590458 - RNA, 19 nt, Human
cagugagaucuccaaucuu

SEQ ID NO: 590459 - RNA, 20 nt, Human
cauccaggacuuccagaauc

SEQ ID NO: 590460 - RNA, 23 nt, Human
cauugaguuuagcccaccccauc

SEQ ID NO: 590461 - RNA, 21 nt, Human
ccaaucuuauauacaguagcu

SEQ ID NO: 590462 - RNA, 18 nt, Human
ccugcaaaacuucuuccu

SEQ ID NO: 590463 - RNA, 24 nt, Human
ccugcaaaacuucuuccuuacacu

SEQ ID NO: 590464 - RNA, 19 nt, Human
ccuuacacugaaacuccuc

SEQ ID NO: 590465 - RNA, 22 nt, Human
ccuuacacugaaacuccuccug

SEQ ID NO: 590466 - RNA, 20 nt, Human
cggagaauggagcaacuuga

SEQ ID NO: 590467 - RNA, 21 nt, Human
cucacggacuccuuguaauaa

SEQ ID NO: 590468 - RNA, 21 nt, Human
cugcaguacugggcagcaguc

SEQ ID NO: 590469 - RNA, 24 nt, Human
cugcuucucccucaucuccucaac

SEQ ID NO: 590470 - RNA, 22 nt, Human
cugggcagcaguccacugggcc

SEQ ID NO: 590471 - RNA, 26 nt, Human
cugguaaucucccgucccacuggaac

SEQ ID NO: 590472 - RNA, 23 nt, Human
cuugcugcuucucccucaucucc

SEQ ID NO: 590473 - RNA, 20 nt, Human
cuuggaaacuuuaccuggcu

SEQ ID NO: 590474 - RNA, 25 nt, Human
cuuguaauaagccuucauaguggcc

SEQ ID NO: 590475 - RNA, 24 nt, Human
gacuguguaagucucucuucuucc

SEQ ID NO: 590476 - RNA, 26 nt, Human
gagcagagggcacuuuggagguugcu

SEQ ID NO: 590477 - RNA, 23 nt, Human
gaguggguggugguggucuauag

SEQ ID NO: 590478 - RNA, 21 nt, Human
gauacuucuuuuauuucuguu

SEQ ID NO: 590479 - RNA, 19 nt, Human
gcauccaggacuuccagaa

SEQ ID NO: 590480 - RNA, 23 nt, Human
gcuccugggcagcuugcugcuuc

SEQ ID NO: 590481 - RNA, 19 nt, Human
gggcagcuugcugcuucuu

SEQ ID NO: 590482 - RNA, 23 nt, Human
ggguggugguggucuauagaagc

SEQ ID NO: 590483 - RNA, 22 nt, Human
gguugcuuucuucccauuuugu

SEQ ID NO: 590484 - RNA, 20 nt, Human
uaguggccucgucauccagc

SEQ ID NO: 590485 - RNA, 18 nt, Human
uaguuaccaacacugcca

SEQ ID NO: 590486 - RNA, 19 nt, Human
uauuucagccucucgauug

SEQ ID NO: 590487 - RNA, 19 nt, Human
ucccucaucuccucaaccc

SEQ ID NO: 590488 - RNA, 19 nt, Human
ucccucaucuccucaaccc

SEQ ID NO: 590489 - RNA, 21 nt, Human
ucccuggggauuuuaucugca

SEQ ID NO: 590490 - RNA, 24 nt, Human
ucuguuguaaaacagaguaggggu

SEQ ID NO: 590491 - RNA, 23 nt, Human
ugagaucagucaauuaguuacca

SEQ ID NO: 590492 - RNA, 22 nt, Human
ugaggagcagagggcacuuugg

SEQ ID NO: 590493 - RNA, 18 nt, Human
ugaguggguggugguggu

SEQ ID NO: 590494 - RNA, 18 nt, Human
ugcagcacugcaagaugg

SEQ ID NO: 590495 - RNA, 21 nt, Human
uggagugaacaaacugaggag

SEQ ID NO: 590496 - RNA, 18 nt, Human
uggcaucugcuauuucca

SEQ ID NO: 590497 - RNA, 23 nt, Human
uggccaagcauuccauggugucu

SEQ ID NO: 590498 - RNA, 19 nt, Human
ugggaggcaaagacacaua

SEQ ID NO: 590499 - RNA, 20 nt, Human
ugggaggcaaagacacauag

SEQ ID NO: 590500 - RNA, 22 nt, Human
ugggaggcaaagacacauaguu

SEQ ID NO: 590501 - RNA, 23 nt, Human
ugggucucuggcauccaggacuu

SEQ ID NO: 590502 - RNA, 20 nt, Human
ugguaaucucccgucccacu

SEQ ID NO: 590503 - RNA, 19 nt, Human
uguaagucucucuucuucc

SEQ ID NO: 590504 - RNA, 27 nt, Human
ugucaaagaacuuggucauuuccuuaa

SEQ ID NO: 590505 - RNA, 19 nt, Human
ugugagugggugguggugg

SEQ ID NO: 590506 - RNA, 23 nt, Human
uucacugguaaucucccguccca

SEQ ID NO: 590507 - RNA, 18 nt, Human
uugaucuccauuuugagu

SEQ ID NO: 590508 - RNA, 18 nt, Human
uugcuccugggcagcuug

SEQ ID NO: 590509 - RNA, 21 nt, Human
uuggcugccugcuccugacug

SEQ ID NO: 590510 - RNA, 24 nt, Human
uuuaucugcacauuucuguaaauu

SEQ ID NO: 590511 - RNA, 23 nt, Human
aaaauacguuucuuuagugccag

SEQ ID NO: 590512 - RNA, 22 nt, Human
aaacaccagacacauacagaaa

SEQ ID NO: 590513 - RNA, 24 nt, Human
aaacaccagacacauacagaaaca

SEQ ID NO: 590514 - RNA, 18 nt, Human
aaacaccugaagcuguga

SEQ ID NO: 590515 - RNA, 21 nt, Human
aacucccccuucaagaugagc

SEQ ID NO: 590516 - RNA, 21 nt, Human
aacucguaacacaaccucaca

SEQ ID NO: 590517 - RNA, 21 nt, Human
aaucagaguuauccacacuug

SEQ ID NO: 590518 - RNA, 20 nt, Human
acacaaccucacaaaaagcg

SEQ ID NO: 590519 - RNA, 25 nt, Human
acacaaccucacaaaaaggggaacc

SEQ ID NO: 590520 - RNA, 23 nt, Human
acagagccggagccucccacccc

SEQ ID NO: 590521 - RNA, 23 nt, Human
agaaagauuacaugcaacagcca

SEQ ID NO: 590522 - RNA, 19 nt, Human
agcggcagcugacagagcc

SEQ ID NO: 590523 - RNA, 21 nt, Human
auacagaaacaauuaggauuc

SEQ ID NO: 590524 - RNA, 24 nt, Human
aucugcagcgccugcaggagaacu

SEQ ID NO: 590525 - RNA, 21 nt, Human
caaaacaccagacacauacag

SEQ ID NO: 590526 - RNA, 22 nt, Human
caaacaccugaagcugugacuc

SEQ ID NO: 590527 - RNA, 19 nt, Human
caaaugaggaaacugagga

SEQ ID NO: 590528 - RNA, 21 nt, Human
caaccucacaaaaagcggucc

SEQ ID NO: 590529 - RNA, 23 nt, Human
caacucguaacacaaccucacaa

SEQ ID NO: 590530 - RNA, 18 nt, Human
cacuuguagugaaauuca

SEQ ID NO: 590531 - RNA, 24 nt, Human
cagagccggagccucccaccccag

SEQ ID NO: 590532 - RNA, 24 nt, Human
cagcggcagcugacagagccggag

SEQ ID NO: 590533 - RNA, 23 nt, Human
caggagaagaccaagugucagca

SEQ ID NO: 590534 - RNA, 23 nt, Human
cauggucccgagacucacacaaa

SEQ ID NO: 590535 - RNA, 21 nt, Human
cauuucauccucacaccaagc

SEQ ID NO: 590536 - RNA, 18 nt, Human
cccucagauccauaggug

SEQ ID NO: 590537 - RNA, 23 nt, Human
ccuccugaauucagcaaggauug

SEQ ID NO: 590538 - RNA, 21 nt, Human
ccuuaaccuccugaauucagc

SEQ ID NO: 590539 - RNA, 19 nt, Human
cgagggccgaaaugcagca

SEQ ID NO: 590540 - RNA, 23 nt, Human
cgagggccgaaaugcagcagcca

SEQ ID NO: 590541 - RNA, 24 nt, Human
cggagccucccaccccaggauaca

SEQ ID NO: 590542 - RNA, 23 nt, Human
cuccugaauucagcaaggaugua

SEQ ID NO: 590543 - RNA, 21 nt, Human
cugaaaagagauaauguggua

SEQ ID NO: 590544 - RNA, 22 nt, Human
cugcagcgccugcaggagaacu

SEQ ID NO: 590545 - RNA, 24 nt, Human
cuuaagagcugcuccuuuuucccc

SEQ ID NO: 590546 - RNA, 23 nt, Human
cuucacaguggugcaacauaacu

SEQ ID NO: 590547 - RNA, 20 nt, Human
gaaaugcagcagccauacug

SEQ ID NO: 590548 - RNA, 19 nt, Human
gacagagccggagccuccc

SEQ ID NO: 590549 - RNA, 22 nt, Human
gaccagguuccuucaaggaucc

SEQ ID NO: 590550 - RNA, 20 nt, Human
gauccauagguggacugaaa

SEQ ID NO: 590551 - RNA, 24 nt, Human
gcaaaacaccagacacauacagaa

SEQ ID NO: 590552 - RNA, 21 nt, Human
gcaaacaccugaagcugugac

SEQ ID NO: 590553 - RNA, 23 nt, Human
gccgaaaugcagcagccauacug

SEQ ID NO: 590554 - RNA, 18 nt, Human
ggagccaagcuugcaucu

SEQ ID NO: 590555 - RNA, 19 nt, Human
gggaagcgccuuucugagg

SEQ ID NO: 590556 - RNA, 18 nt, Human
ggugucggaagcugaacc

SEQ ID NO: 590557 - RNA, 18 nt, Human
guuucuuuuucaaguuuc

SEQ ID NO: 590558 - RNA, 23 nt, Human
uaacacaaccucacaaaaagcgg

SEQ ID NO: 590559 - RNA, 22 nt, Human
uagaagcaggccccucagaucc

SEQ ID NO: 590560 - RNA, 24 nt, Human
uauacucccccaaagugaaauuuu

SEQ ID NO: 590561 - RNA, 22 nt, Human
uaucucauuucauccucacacc

SEQ ID NO: 590562 - RNA, 20 nt, Human
ucacacaaauguaguaaggu

SEQ ID NO: 590563 - RNA, 23 nt, Human
ucagcacacugucugcugaagug

SEQ ID NO: 590564 - RNA, 24 nt, Human
ucauuucauccucacaccaagccu

SEQ ID NO: 590565 - RNA, 19 nt, Human
uccacacuuguagugaaau

SEQ ID NO: 590566 - RNA, 22 nt, Human
uccacacuuguagugaaauuca

SEQ ID NO: 590567 - RNA, 23 nt, Human
uccccauuuaccaaaugaggaaa

SEQ ID NO: 590568 - RNA, 25 nt, Human
uccuuuuuccccucugaaaagagau

SEQ ID NO: 590569 - RNA, 24 nt, Human
ucgagggccgaaaugcagcagcca

SEQ ID NO: 590570 - RNA, 22 nt, Human
ucucagagaucggcaugguacc

SEQ ID NO: 590571 - RNA, 23 nt, Human
ucuuuuguugaaauucuuuuaau

SEQ ID NO: 590572 - RNA, 23 nt, Human
ugcaaguaacuacuccuuugaaa

SEQ ID NO: 590573 - RNA, 25 nt, Human
ugcauggaucguuuccuuaaccucc

SEQ ID NO: 590574 - RNA, 22 nt, Human
uugagcagaaggaagaacucau

SEQ ID NO: 590575 - RNA, 19 nt, Human
uuuuuuuuuuuuuuuugca

SEQ ID NO: 590576 - RNA, 21 nt, Human
uuuuuuuuuuuuuuuuugcau

SEQ ID NO: 590577 - RNA, 20 nt, Human
uuuuuuuuuuuuuuuuuugg

SEQ ID NO: 590578 - RNA, 22 nt, Human
aaaguuucugugggucaggagu

SEQ ID NO: 590579 - RNA, 22 nt, Human
aagacaaaaacauguagaagga

SEQ ID NO: 590580 - RNA, 22 nt, Human
aaguucuuuuaucagugacuuu

SEQ ID NO: 590581 - RNA, 21 nt, Human
agaggucaguaagacaaaaac

SEQ ID NO: 590582 - RNA, 22 nt, Human
aggcaucuuuucauguuguuuu

SEQ ID NO: 590583 - RNA, 19 nt, Human
aggcguuggcuggggcugg

SEQ ID NO: 590584 - RNA, 24 nt, Human
agugacuuuucccuuccuggcccc

SEQ ID NO: 590585 - RNA, 19 nt, Human
caaaaacauguagaaggag

SEQ ID NO: 590586 - RNA, 22 nt, Human
caaagucagcugauuagaaacc

SEQ ID NO: 590587 - RNA, 20 nt, Human
cacucucuuuuaaaggacua

SEQ ID NO: 590588 - RNA, 24 nt, Human
cauguuguuuucucacaguuuuaa

SEQ ID NO: 590589 - RNA, 23 nt, Human
cccacccacacucaaugggggag

SEQ ID NO: 590590 - RNA, 19 nt, Human
cccaucacuuuugccauau

SEQ ID NO: 590591 - RNA, 20 nt, Human
cugaaaguuucuguggguca

SEQ ID NO: 590592 - RNA, 25 nt, Human
cuggucauagaaaauagaaggcaaa

SEQ ID NO: 590593 - RNA, 18 nt, Human
uaaaaaacaacauggcuu

SEQ ID NO: 590594 - RNA, 20 nt, Human
uaaagguuuuuuuuuuuaaa

SEQ ID NO: 590595 - RNA, 18 nt, Human
uaacauaacauaauaugg

SEQ ID NO: 590596 - RNA, 19 nt, Human
uaacuggcuugauuuggga

SEQ ID NO: 590597 - RNA, 22 nt, Human
uacaaagaaaaaauuauagaac

SEQ ID NO: 590598 - RNA, 23 nt, Human
uaccuuugacagacugugauuuu

SEQ ID NO: 590599 - RNA, 20 nt, Human
uagaaaauagaaggcaaaau

SEQ ID NO: 590600 - RNA, 19 nt, Human
uagaaggagguauacuucu

SEQ ID NO: 590601 - RNA, 20 nt, Human
uagaaggagguauacuucuu

SEQ ID NO: 590602 - RNA, 21 nt, Human
uagcucuuuuucuugacauug

SEQ ID NO: 590603 - RNA, 18 nt, Human
uaggucaggcccacccag

SEQ ID NO: 590604 - RNA, 22 nt, Human
uauaugaacuuaaauggaauaa

SEQ ID NO: 590605 - RNA, 22 nt, Human
uauccuuuuccuauauuacacu

SEQ ID NO: 590606 - RNA, 19 nt, Human
uccucugcucagaguuuca

SEQ ID NO: 590607 - RNA, 25 nt, Human
ucucuuugcacaggaaucucugguc

SEQ ID NO: 590608 - RNA, 19 nt, Human
ugaaaaaaauagauguuug

SEQ ID NO: 590609 - RNA, 19 nt, Human
ugaaaggucauuuuucucc

SEQ ID NO: 590610 - RNA, 19 nt, Human
ugcaagcaaggcguuggcu

SEQ ID NO: 590611 - RNA, 18 nt, Human
uggcuugauuugggaacc

SEQ ID NO: 590612 - RNA, 18 nt, Human
ugggagagaugaucccau

SEQ ID NO: 590613 - RNA, 28 nt, Human
ugggucaggaguccaaacgucggauccg

SEQ ID NO: 590614 - RNA, 19 nt, Human
uuaaaggacaacaauucca

SEQ ID NO: 590615 - RNA, 21 nt, Human
uuaaaggacaacaauuccauu

SEQ ID NO: 590616 - RNA, 21 nt, Human
uuaaaggacuagucugauuag

SEQ ID NO: 590617 - RNA, 24 nt, Human
uuacaugucccacccacacucaau

SEQ ID NO: 590618 - RNA, 22 nt, Human
uucuacagacccagagucaugu

SEQ ID NO: 590619 - RNA, 24 nt, Human
uugaggucuucauugacacucucu

SEQ ID NO: 590620 - RNA, 23 nt, Human
uuuaaaguuuucuuuuaauaccu

SEQ ID NO: 590621 - RNA, 19 nt, Human
uuuacuaagaauccugcca

SEQ ID NO: 590622 - RNA, 21 nt, Human
uuuuuuuuuuuaaaguuuucu

SEQ ID NO: 590623 - RNA, 20 nt, Human
aaagugcugggauuacaggc

SEQ ID NO: 590624 - RNA, 23 nt, Human
aaagugcugggauuacaggcgua

SEQ ID NO: 590625 - RNA, 19 nt, Human
aagugcugggauuacaggc

SEQ ID NO: 590626 - RNA, 19 nt, Human
aagugcugggauuacaggc

SEQ ID NO: 590627 - RNA, 26 nt, Human
aagugcugggauuacaggcguaagcc

SEQ ID NO: 590628 - RNA, 18 nt, Human
acaggcguaagccaccgu

SEQ ID NO: 590629 - RNA, 18 nt, Human
acaggguuucaccauguu

SEQ ID NO: 590630 - RNA, 19 nt, Human
acaggguuucaccauguug

SEQ ID NO: 590631 - RNA, 24 nt, Human
acaggguuucaccauguugcccag

SEQ ID NO: 590632 - RNA, 25 nt, Human
acccgccucggccucccaaagugcu

SEQ ID NO: 590633 - RNA, 24 nt, Human
accguguuggccaggauggucucg

SEQ ID NO: 590634 - RNA, 18 nt, Human
acgggguuucaccguguu

SEQ ID NO: 590635 - RNA, 23 nt, Human
acgggguuucaccguguuggcca

SEQ ID NO: 590636 - RNA, 24 nt, Human
acgggguuucaccguguuggccag

SEQ ID NO: 590637 - RNA, 18 nt, Human
acucugucacccaggcug

SEQ ID NO: 590638 - RNA, 25 nt, Human
acucugucacccaggcugaagugca

SEQ ID NO: 590639 - RNA, 23 nt, Human
agacaggguuucaccauguugcc

SEQ ID NO: 590640 - RNA, 19 nt, Human
agagacgggguuucaccgu

SEQ ID NO: 590641 - RNA, 21 nt, Human
agaggcugcugcagagccacc

SEQ ID NO: 590642 - RNA, 23 nt, Human
aggcguaagccaccgugcccggc

SEQ ID NO: 590643 - RNA, 24 nt, Human
aggcugaagugcaguggugcgauc

SEQ ID NO: 590644 - RNA, 20 nt, Human
agugcaguggugcgaucucg

SEQ ID NO: 590645 - RNA, 23 nt, Human
agugcaguggugcgaucucggcu

SEQ ID NO: 590646 - RNA, 24 nt, Human
agugcaguggugcgaucucggcuc

SEQ ID NO: 590647 - RNA, 18 nt, Human
agugcugggauuacaggc

SEQ ID NO: 590648 - RNA, 24 nt, Human
caaagugcugggauuacaggcgua

SEQ ID NO: 590649 - RNA, 24 nt, Human
cacaggcgcccgccaccacgccca

SEQ ID NO: 590650 - RNA, 23 nt, Human
caccauguugcccagguuguuuc

SEQ ID NO: 590651 - RNA, 23 nt, Human
cacccgccucggccucccaaagu

SEQ ID NO: 590652 - RNA, 19 nt, Human
caccgcaaguuccgccucc

SEQ ID NO: 590653 - RNA, 18 nt, Human
caccguguuggccaggau

SEQ ID NO: 590654 - RNA, 21 nt, Human
caccguguuggccaggauggu

SEQ ID NO: 590655 - RNA, 24 nt, Human
caccguguuggccaggauggucuc

SEQ ID NO: 590656 - RNA, 23 nt, Human
cacucugucacccaggcugaagu

SEQ ID NO: 590657 - RNA, 24 nt, Human
cacucugucacccaggcugaagug

SEQ ID NO: 590658 - RNA, 19 nt, Human
cagccccccgaguaacugg

SEQ ID NO: 590659 - RNA, 21 nt, Human
caggcgcccgccaccacgccc

SEQ ID NO: 590660 - RNA, 24 nt, Human
caggguuucaccauguugcccagg

SEQ ID NO: 590661 - RNA, 22 nt, Human
caugccauucuccugccucagc

SEQ ID NO: 590662 - RNA, 21 nt, Human
cauguugcccagguuguuuca

SEQ ID NO: 590663 - RNA, 22 nt, Human
ccaaagugcugggauuacaggc

SEQ ID NO: 590664 - RNA, 22 nt, Human
ccaaagugcugggauuacaggc

SEQ ID NO: 590665 - RNA, 24 nt, Human
ccaaagugcugggauuacaggcgu

SEQ ID NO: 590666 - RNA, 21 nt, Human
cccgccaccacgcccagcuaa

SEQ ID NO: 590667 - RNA, 20 nt, Human
ccugaccucgugauccaccc

SEQ ID NO: 590668 - RNA, 23 nt, Human
ccugggccucccagagccaagaa

SEQ ID NO: 590669 - RNA, 19 nt, Human
cgccucccggguucaugcc

SEQ ID NO: 590670 - RNA, 24 nt, Human
cgccucggccucccaaagugcugg

SEQ ID NO: 590671 - RNA, 24 nt, Human
cgggguuucaccguguuggccagg

SEQ ID NO: 590672 - RNA, 21 nt, Human
cucccagagccaagaacuagc

SEQ ID NO: 590673 - RNA, 21 nt, Human
cucccggguucaugccauucu

SEQ ID NO: 590674 - RNA, 24 nt, Human
cuccugaccucgugauccacccgc

SEQ ID NO: 590675 - RNA, 22 nt, Human
cuccugccucagccccccgagu

SEQ ID NO: 590676 - RNA, 24 nt, Human
cuccugccucagccccccgaguaa

SEQ ID NO: 590677 - RNA, 22 nt, Human
gaccucgugauccacccgccuc

SEQ ID NO: 590678 - RNA, 22 nt, Human
gaccucgugauccacccgccuc

SEQ ID NO: 590679 - RNA, 24 nt, Human
gaccucgugauccacccgccucgg

SEQ ID NO: 590680 - RNA, 24 nt, Human
gagacgggguuucaccguguuggc

SEQ ID NO: 590681 - RNA, 25 nt, Human
gaguaacugggaccacaggcgcccg

SEQ ID NO: 590682 - RNA, 18 nt, Human
gauuacaggcguaagcca

SEQ ID NO: 590683 - RNA, 21 nt, Human
gauuacaggcguaagccaccg

SEQ ID NO: 590684 - RNA, 24 nt, Human
gauuacaggcguaagccaccgugc

SEQ ID NO: 590685 - RNA, 23 nt, Human
gcccagcuaauuuuuuguauuuu

SEQ ID NO: 590686 - RNA, 25 nt, Human
gccucccggguucaugccauucucc

SEQ ID NO: 590687 - RNA, 24 nt, Human
ggauuacaggcguaagccaccgug

SEQ ID NO: 590688 - RNA, 23 nt, Human
gggguuucaccguguuggccagg

SEQ ID NO: 590689 - RNA, 20 nt, Human
ggucucgaucuccugaccuc

SEQ ID NO: 590690 - RNA, 20 nt, Human
gguggcagaggcugcugcag

SEQ ID NO: 590691 - RNA, 23 nt, Human
guagagacgggguuucaccgugu

SEQ ID NO: 590692 - RNA, 24 nt, Human
gugauccacccgccucggccuccc

SEQ ID NO: 590693 - RNA, 18 nt, Human
guuuuaauccaggcuggu

SEQ ID NO: 590694 - RNA, 22 nt, Human
uaaagacaggguuucaccaugu

SEQ ID NO: 590695 - RNA, 19 nt, Human
uaacugggaccacaggcgc

SEQ ID NO: 590696 - RNA, 24 nt, Human
uaauuuuuuguauuuuuaguagag

SEQ ID NO: 590697 - RNA, 25 nt, Human
uaauuuuuuguauuuuuaguagaga

SEQ ID NO: 590698 - RNA, 23 nt, Human
uacaggcguaagccaccgugccc

SEQ ID NO: 590699 - RNA, 21 nt, Human
uaguagagacgggguuucacc

SEQ ID NO: 590700 - RNA, 24 nt, Human
uaguagagacgggguuucaccgug

SEQ ID NO: 590701 - RNA, 26 nt, Human
uaguagagacgggguuucaccguguu

SEQ ID NO: 590702 - RNA, 26 nt, Human
uaguagagacgggguuucaccguugg

SEQ ID NO: 590703 - RNA, 28 nt, Human
uauuuuauuuuuuguaaagacaggguuu

SEQ ID NO: 590704 - RNA, 24 nt, Human
ucaccgcaaguuccgccucccggg

SEQ ID NO: 590705 - RNA, 24 nt, Human
ucaccguguuggccaggauggucu

SEQ ID NO: 590706 - RNA, 18 nt, Human
ucaugccauucuccugcc

SEQ ID NO: 590707 - RNA, 24 nt, Human
ucccaaagugcugggauuacaggc

SEQ ID NO: 590708 - RNA, 21 nt, Human
ucccagagccaagaacuagca

SEQ ID NO: 590709 - RNA, 21 nt, Human
ucccggguucaugccauucuc

SEQ ID NO: 590710 - RNA, 24 nt, Human
ucccggguucaugccauucuccug

SEQ ID NO: 590711 - RNA, 18 nt, Human
ucggccucccaaagugcu

SEQ ID NO: 590712 - RNA, 19 nt, Human
ucucacucugucacccagg

SEQ ID NO: 590713 - RNA, 24 nt, Human
ucucacucugucacccaggcugaa

SEQ ID NO: 590714 - RNA, 26 nt, Human
ucucacucugucacccaggcugaagu

SEQ ID NO: 590715 - RNA, 27 nt, Human
ucucacucugucacccaggcugaagug

SEQ ID NO: 590716 - RNA, 24 nt, Human
ucugucacccaggcugaagugcag

SEQ ID NO: 590717 - RNA, 24 nt, Human
ugaagugcaguggugcgaucucgg

SEQ ID NO: 590718 - RNA, 18 nt, Human
ugagacagagucucacuc

SEQ ID NO: 590719 - RNA, 22 nt, Human
ugagacagagucucacucuguc

SEQ ID NO: 590720 - RNA, 21 nt, Human
ugccucagccccccgaguaac

SEQ ID NO: 590721 - RNA, 24 nt, Human
ugccucagccccccgaguaacugg

SEQ ID NO: 590722 - RNA, 24 nt, Human
ugcugggauuacaggcguaagcca

SEQ ID NO: 590723 - RNA, 24 nt, Human
uggccaggauggucucgaucuccu

SEQ ID NO: 590724 - RNA, 21 nt, Human
ugggaccacaggcgcccgcca

SEQ ID NO: 590725 - RNA, 24 nt, Human
ugggaccacaggcgcccgccacca

SEQ ID NO: 590726 - RNA, 18 nt, Human
ugggauuacaggcguaag

SEQ ID NO: 590727 - RNA, 21 nt, Human
ugggauuacaggcguaagcca

SEQ ID NO: 590728 - RNA, 22 nt, Human
ugggauuacaggcguaagccac

SEQ ID NO: 590729 - RNA, 23 nt, Human
ugggauuacaggcguaagccacc

SEQ ID NO: 590730 - RNA, 23 nt, Human
ugggauuacaggcguaagccacc

SEQ ID NO: 590731 - RNA, 24 nt, Human
ugggauuacaggcguaagccaccg

SEQ ID NO: 590732 - RNA, 21 nt, Human
ugggccucccagagccaagaa

SEQ ID NO: 590733 - RNA, 21 nt, Human
uguauuuuuaguagagacggg

SEQ ID NO: 590734 - RNA, 18 nt, Human
uuaauccaggcugguuau

SEQ ID NO: 590735 - RNA, 18 nt, Human
uuaguagagacgggguuu

SEQ ID NO: 590736 - RNA, 22 nt, Human
uuaguagagacgggguuucacc

SEQ ID NO: 590737 - RNA, 24 nt, Human
uuaguagagacgggguuucaccgu

SEQ ID NO: 590738 - RNA, 24 nt, Human
uucacauuguuuuaauccaggcug

SEQ ID NO: 590739 - RNA, 19 nt, Human
uucaugccauucuccugcc

SEQ ID NO: 590740 - RNA, 24 nt, Human
uuguaaagacaggguuucaccaug

SEQ ID NO: 590741 - RNA, 23 nt, Human
uuguauuuuuaguagagacgggg

SEQ ID NO: 590742 - RNA, 19 nt, Human
uuucaccauguugcccagg

SEQ ID NO: 590743 - RNA, 19 nt, Human
uuucaccguguuggccagg

SEQ ID NO: 590744 - RNA, 24 nt, Human
uuuuuaguagagacgggguuucac

SEQ ID NO: 590745 - RNA, 21 nt, Human
uuuuuguauuuuuaguagaga

SEQ ID NO: 590746 - RNA, 24 nt, Human
uuuuuuguauuuuuaguagagacg

SEQ ID NO: 590747 - RNA, 23 nt, Human
aaacaaagagaaaaaugcaucca

SEQ ID NO: 590748 - RNA, 24 nt, Human
aaacaaagagaaaaaugcauccaa

SEQ ID NO: 590749 - RNA, 25 nt, Human
aaccuacagaaccuccaccaaaaga

SEQ ID NO: 590750 - RNA, 24 nt, Human
aagagagaagugggucucugagga

SEQ ID NO: 590751 - RNA, 21 nt, Human
aaggaggcauuuaaccaucga

SEQ ID NO: 590752 - RNA, 19 nt, Human
acuuuggaaacaaagagaa

SEQ ID NO: 590753 - RNA, 21 nt, Human
agacaaggcuuccugagugug

SEQ ID NO: 590754 - RNA, 27 nt, Human
agaucacuagaguccaggaguucaaga

SEQ ID NO: 590755 - RNA, 24 nt, Human
agcacuuugggagguugagguggg

SEQ ID NO: 590756 - RNA, 23 nt, Human
agccugggcaacauggcaaagcc

SEQ ID NO: 590757 - RNA, 24 nt, Human
agccugggcaacauggcaaagccu

SEQ ID NO: 590758 - RNA, 23 nt, Human
agcuaggugugguggugugugcc

SEQ ID NO: 590759 - RNA, 21 nt, Human
agcucaugccuguaaucccag

SEQ ID NO: 590760 - RNA, 23 nt, Human
aggaguucaagaccagccugggc

SEQ ID NO: 590761 - RNA, 20 nt, Human
aggaugaggcgggaggauug

SEQ ID NO: 590762 - RNA, 26 nt, Human
aggcauuuaaccaucgaaaguaaaua

SEQ ID NO: 590763 - RNA, 24 nt, Human
aggcgugguagcucaugccuguaa

SEQ ID NO: 590764 - RNA, 21 nt, Human
agguugaggugggcagaucac

SEQ ID NO: 590765 - RNA, 27 nt, Human
aguccaggaguucaagaccagccuggg

SEQ ID NO: 590766 - RNA, 25 nt, Human
augcagaaggaugaggcgggaggau

SEQ ID NO: 590767 - RNA, 19 nt, Human
augccuguaaucccagcac

SEQ ID NO: 590768 - RNA, 22 nt, Human
caacauggcaaagccuugucuc

SEQ ID NO: 590769 - RNA, 22 nt, Human
cacacacaaaaaaauacaaaaa

SEQ ID NO: 590770 - RNA, 24 nt, Human
cagaucacuagaguccaggaguuc

SEQ ID NO: 590771 - RNA, 21 nt, Human
cagcacuuugggagguugagg

SEQ ID NO: 590772 - RNA, 24 nt, Human
cagcacuuugggagguugaggugg

SEQ ID NO: 590773 - RNA, 19 nt, Human
cagcagcugaggccacaac

SEQ ID NO: 590774 - RNA, 26 nt, Human
cagcauaaguaaucccaaaagcaaug

SEQ ID NO: 590775 - RNA, 18 nt, Human
caguauauauacaggaua

SEQ ID NO: 590776 - RNA, 20 nt, Human
caugccuguaaucccagcac

SEQ ID NO: 590777 - RNA, 24 nt, Human
caugccuguaaucccagcacuuug

SEQ ID NO: 590778 - RNA, 28 nt, Human
cauguaagcuucuuucaaggugaagcuu

SEQ ID NO: 590779 - RNA, 22 nt, Human
ccaaaguuuccaaauggagacu

SEQ ID NO: 590780 - RNA, 22 nt, Human
ccagugaaggaagugaauuggg

SEQ ID NO: 590781 - RNA, 19 nt, Human
ccuacagaaccuccaccaa

SEQ ID NO: 590782 - RNA, 23 nt, Human
ccuauacuuuggaaacaaagaga

SEQ ID NO: 590783 - RNA, 21 nt, Human
ccugggcaacauggcaaagcc

SEQ ID NO: 590784 - RNA, 21 nt, Human
ccuuuagucccaguuaugcag

SEQ ID NO: 590785 - RNA, 21 nt, Human
cgcacgcacgcuuuccugccc

SEQ ID NO: 590786 - RNA, 20 nt, Human
cgcccacucucuuagccgca

SEQ ID NO: 590787 - RNA, 19 nt, Human
cgggaggauugauaaacua

SEQ ID NO: 590788 - RNA, 24 nt, Human
cucaugccuguaaucccagcacuu

SEQ ID NO: 590789 - RNA, 21 nt, Human
cuccacacacaaaaaaauaca

SEQ ID NO: 590790 - RNA, 23 nt, Human
cucuggcaacugcagaaaaguuu

SEQ ID NO: 590791 - RNA, 24 nt, Human
gaaccuacagaaccuccaccaaaa

SEQ ID NO: 590792 - RNA, 25 nt, Human
gagacuugacaucaggacagaaacg

SEQ ID NO: 590793 - RNA, 18 nt, Human
gccuugucuccacacaca

SEQ ID NO: 590794 - RNA, 19 nt, Human
gcgcccacucucuuagccg

SEQ ID NO: 590795 - RNA, 20 nt, Human
gcugacuugcccuauauacc

SEQ ID NO: 590796 - RNA, 28 nt, Human
ggaaacaaagagaaaaaugccgguaccc

SEQ ID NO: 590797 - RNA, 18 nt, Human
ggagguugaggugggcag

SEQ ID NO: 590798 - RNA, 22 nt, Human
ggagguugaggugggcagauca

SEQ ID NO: 590799 - RNA, 21 nt, Human
ggauaggcgugguagcucaug

SEQ ID NO: 590800 - RNA, 23 nt, Human
ggccgcgagagcgcccacucucu

SEQ ID NO: 590801 - RNA, 26 nt, Human
gggcagaucacuagaguccaggaguu

SEQ ID NO: 590802 - RNA, 24 nt, Human
gguagcucaugccuguaaucccag

SEQ ID NO: 590803 - RNA, 20 nt, Human
uagacaaggcuuccugagug

SEQ ID NO: 590804 - RNA, 22 nt, Human
uagcucaugccuguaaucccag

SEQ ID NO: 590805 - RNA, 24 nt, Human
uagcucaugccuguaaucccagca

SEQ ID NO: 590806 - RNA, 26 nt, Human
uaugcagaaggaugaggcgggaggau

SEQ ID NO: 590807 - RNA, 27 nt, Human
uaugcagaaggaugaggcgggaggauu

SEQ ID NO: 590808 - RNA, 23 nt, Human
ucacuagaguccaggaguucaag

SEQ ID NO: 590809 - RNA, 26 nt, Human
ucacuagaguccaggaguucaagacc

SEQ ID NO: 590810 - RNA, 27 nt, Human
ucauccagagacaacaaugggguggga

SEQ ID NO: 590811 - RNA, 22 nt, Human
ucaugccuguaaucccagcacu

SEQ ID NO: 590812 - RNA, 20 nt, Human
uccaaauggagacuuagcuc

SEQ ID NO: 590813 - RNA, 19 nt, Human
uccaugguagaaaccugaa

SEQ ID NO: 590814 - RNA, 18 nt, Human
ucccugugggccugucaa

SEQ ID NO: 590815 - RNA, 21 nt, Human
ucucugaggaguaucuggggc

SEQ ID NO: 590816 - RNA, 21 nt, Human
ucucuuagccgcacgcacgcu

SEQ ID NO: 590817 - RNA, 25 nt, Human
ugaagcuuggaagcuguucuccaag

SEQ ID NO: 590818 - RNA, 19 nt, Human
ugagaccaaaguuuccaaa

SEQ ID NO: 590819 - RNA, 18 nt, Human
ugaggugggcagaucacu

SEQ ID NO: 590820 - RNA, 25 nt, Human
ugaggugggcagaucacuagagucc

SEQ ID NO: 590821 - RNA, 26 nt, Human
ugaggugggcagaucacuagagucca

SEQ ID NO: 590822 - RNA, 24 nt, Human
ugaguuccacagcauaaguaaucc

SEQ ID NO: 590823 - RNA, 23 nt, Human
ugccuguaaucccagcacuuugg

SEQ ID NO: 590824 - RNA, 24 nt, Human
ugccuguaaucccagcacuuuggg

SEQ ID NO: 590825 - RNA, 21 nt, Human
uggaaacaaagagaaaaaugc

SEQ ID NO: 590826 - RNA, 24 nt, Human
uggcaaaggaaagcagcaaucauc

SEQ ID NO: 590827 - RNA, 22 nt, Human
uggcuagacuucauccagagac

SEQ ID NO: 590828 - RNA, 20 nt, Human
ugggagguugaggugggcag

SEQ ID NO: 590829 - RNA, 24 nt, Human
ugggagguugaggugggcagauca

SEQ ID NO: 590830 - RNA, 25 nt, Human
uggggugggacccagugaaggaagu

SEQ ID NO: 590831 - RNA, 24 nt, Human
ugguagcucaugccuguaauccca

SEQ ID NO: 590832 - RNA, 24 nt, Human
ugguggugugugccuuuaguccca

SEQ ID NO: 590833 - RNA, 24 nt, Human
uggugugugccuuuagucccaguu

SEQ ID NO: 590834 - RNA, 24 nt, Human
uuagcuaggugugguggugugugc

SEQ ID NO: 590835 - RNA, 20 nt, Human
uuagucccaguuaugcagaa

SEQ ID NO: 590836 - RNA, 23 nt, Human
uuccugaguguguggugcuuucu

SEQ ID NO: 590837 - RNA, 21 nt, Human
uugagaccaaaguuuccaaau

SEQ ID NO: 590838 - RNA, 18 nt, Human
aaacaggguuuugccaug

SEQ ID NO: 590839 - RNA, 19 nt, Human
aacaggguuuugccauguu

SEQ ID NO: 590840 - RNA, 19 nt, Human
acaaucuaccugccuuggc

SEQ ID NO: 590841 - RNA, 22 nt, Human
acaaucuaccugccuuggcuuc

SEQ ID NO: 590842 - RNA, 24 nt, Human
acaaugcagugguuaucuuugacc

SEQ ID NO: 590843 - RNA, 24 nt, Human
acagagucaugaacauaagcucac

SEQ ID NO: 590844 - RNA, 18 nt, Human
acaggguuuugccauguu

SEQ ID NO: 590845 - RNA, 19 nt, Human
acaggguuuugccauguug

SEQ ID NO: 590846 - RNA, 24 nt, Human
acaggguuuugccauguugcccag

SEQ ID NO: 590847 - RNA, 23 nt, Human
acccaggcuggagugcaguggug

SEQ ID NO: 590848 - RNA, 21 nt, Human
accucagccuacugaggagcu

SEQ ID NO: 590849 - RNA, 23 nt, Human
accugccuuggcuucccaaagug

SEQ ID NO: 590850 - RNA, 23 nt, Human
agaaaauuauuauuucuauguua

SEQ ID NO: 590851 - RNA, 22 nt, Human
agaagccacuugacccuccacg

SEQ ID NO: 590852 - RNA, 24 nt, Human
agacccagcuaacuuuguguagaa

SEQ ID NO: 590853 - RNA, 19 nt, Human
agauuacaggcaugcgcca

SEQ ID NO: 590854 - RNA, 22 nt, Human
agcucacugcagccuagaccuc

SEQ ID NO: 590855 - RNA, 25 nt, Human
aggcuggagugcaguggugcaaucu

SEQ ID NO: 590856 - RNA, 21 nt, Human
aguagcugagauuacaggcau

SEQ ID NO: 590857 - RNA, 23 nt, Human
aguagcugagauuacaggcaugc

SEQ ID NO: 590858 - RNA, 21 nt, Human
agugcaguggugcaaucucag

SEQ ID NO: 590859 - RNA, 19 nt, Human
auacagagucaugaacaua

SEQ ID NO: 590860 - RNA, 19 nt, Human
augaacauaagcucacugc

SEQ ID NO: 590861 - RNA, 20 nt, Human
augaacauaagcucacugca

SEQ ID NO: 590862 - RNA, 22 nt, Human
auuauuauuauuauuauuuucu

SEQ ID NO: 590863 - RNA, 24 nt, Human
auugauucuccugccucagccucc

SEQ ID NO: 590864 - RNA, 21 nt, Human
caaacuccugggcuacaaucu

SEQ ID NO: 590865 - RNA, 20 nt, Human
caagugauccucucaccuca

SEQ ID NO: 590866 - RNA, 22 nt, Human
caauugauucuccugccucagc

SEQ ID NO: 590867 - RNA, 24 nt, Human
caccaugccuggcuaauuuuugua

SEQ ID NO: 590868 - RNA, 24 nt, Human
cacccaggcuggagugcaguggug

SEQ ID NO: 590869 - RNA, 24 nt, Human
caccucagccuacugaggagcugg

SEQ ID NO: 590870 - RNA, 19 nt, Human
cacggccgaggacccgcgc

SEQ ID NO: 590871 - RNA, 20 nt, Human
cagccuacugaggagcugga

SEQ ID NO: 590872 - RNA, 24 nt, Human
cagccuagaccuccugggcucaag

SEQ ID NO: 590873 - RNA, 20 nt, Human
cagccuccugaguagcugag

SEQ ID NO: 590874 - RNA, 24 nt, Human
caggguuuugccauguugcccagg

SEQ ID NO: 590875 - RNA, 21 nt, Human
cauccagccuggaauacagag

SEQ ID NO: 590876 - RNA, 23 nt, Human
cauguugcccaggcuguucucaa

SEQ ID NO: 590877 - RNA, 24 nt, Human
cauguugcccaggcuguucucaaa

SEQ ID NO: 590878 - RNA, 18 nt, Human
ccacagaggcaccagacc

SEQ ID NO: 590879 - RNA, 22 nt, Human
cccuccacggccgaggacccgc

SEQ ID NO: 590880 - RNA, 22 nt, Human
ccuagaccuccugggcucaagu

SEQ ID NO: 590881 - RNA, 24 nt, Human
ccuccugggcucaagugauccucu

SEQ ID NO: 590882 - RNA, 24 nt, Human
ccucucaccucagccuacugagga

SEQ ID NO: 590883 - RNA, 19 nt, Human
ccugaguagcugagauuac

SEQ ID NO: 590884 - RNA, 23 nt, Human
ccugaguagcugagauuacaggc

SEQ ID NO: 590885 - RNA, 24 nt, Human
ccugaguagcugagauuacaggca

SEQ ID NO: 590886 - RNA, 23 nt, Human
ccugccucagccuccugaguagc

SEQ ID NO: 590887 - RNA, 22 nt, Human
ccugggcucaagugauccucuc

SEQ ID NO: 590888 - RNA, 22 nt, Human
cgcuccccucccucagcgcuca

SEQ ID NO: 590889 - RNA, 26 nt, Human
cucaagugauccucucaccucagccu

SEQ ID NO: 590890 - RNA, 24 nt, Human
cucacugcagccuagaccuccugg

SEQ ID NO: 590891 - RNA, 18 nt, Human
cuccugggcuacaaucua

SEQ ID NO: 590892 - RNA, 23 nt, Human
cugaguagcugagauuacaggca

SEQ ID NO: 590893 - RNA, 24 nt, Human
cugaguagcugagauuacaggcau

SEQ ID NO: 590894 - RNA, 23 nt, Human
cugcagccuagaccuccugggcu

SEQ ID NO: 590895 - RNA, 23 nt, Human
cugccucagccuccugaguagcu

SEQ ID NO: 590896 - RNA, 24 nt, Human
cuugcucugucacccaggcuggag

SEQ ID NO: 590897 - RNA, 24 nt, Human
cuuuguguagaaacaggguuuugc

SEQ ID NO: 590898 - RNA, 19 nt, Human
gaagaagccacuugacccu

SEQ ID NO: 590899 - RNA, 20 nt, Human
gaagaagccacuugacccuc

SEQ ID NO: 590900 - RNA, 21 nt, Human
gagacaagaucuugcucuauc

SEQ ID NO: 590901 - RNA, 22 nt, Human
gaguagcugagauuacaggcau

SEQ ID NO: 590902 - RNA, 18 nt, Human
gauuacaggcaugcgcca

SEQ ID NO: 590903 - RNA, 24 nt, Human
gauuacaggcaugcgccaccaugc

SEQ ID NO: 590904 - RNA, 22 nt, Human
gccuuggcuucccaaagugcug

SEQ ID NO: 590905 - RNA, 22 nt, Human
gcuacaaucuaccugccuuggc

SEQ ID NO: 590906 - RNA, 18 nt, Human
gcucaagugauccucuca

SEQ ID NO: 590907 - RNA, 25 nt, Human
gcucugucacccaggcuggagugca

SEQ ID NO: 590908 - RNA, 27 nt, Human
gcuggaaccacagaggcaccagaccca

SEQ ID NO: 590909 - RNA, 22 nt, Human
gggcucaagugauccucucacc

SEQ ID NO: 590910 - RNA, 20 nt, Human
guagcugagauuacaggcau

SEQ ID NO: 590911 - RNA, 20 nt, Human
gugcaaucucagcucucagc

SEQ ID NO: 590912 - RNA, 23 nt, Human
uacagagucaugaacauaagcuc

SEQ ID NO: 590913 - RNA, 22 nt, Human
uacaggcaugcgccaccaugcc

SEQ ID NO: 590914 - RNA, 23 nt, Human
uaccugccuuggcuucccaaagu

SEQ ID NO: 590915 - RNA, 21 nt, Human
uagaaaauuauuauuucuaug

SEQ ID NO: 590916 - RNA, 22 nt, Human
uagaaacaggguuuugccaugu

SEQ ID NO: 590917 - RNA, 25 nt, Human
ucaauugauucuccugccucagccu

SEQ ID NO: 590918 - RNA, 24 nt, Human
ucacccaggcuggagugcaguggu

SEQ ID NO: 590919 - RNA, 24 nt, Human
ucacugcagccuagaccuccuggg

SEQ ID NO: 590920 - RNA, 24 nt, Human
uccugaguagcugagauuacaggc

SEQ ID NO: 590921 - RNA, 21 nt, Human
uccugggcucaagugauccuc

SEQ ID NO: 590922 - RNA, 24 nt, Human
uccugggcucaagugauccucuca

SEQ ID NO: 590923 - RNA, 19 nt, Human
ucucagcucaccuccgucu

SEQ ID NO: 590924 - RNA, 24 nt, Human
ucuccugccucagccuccugagua

SEQ ID NO: 590925 - RNA, 24 nt, Human
ucugucacccaggcuggagugcag

SEQ ID NO: 590926 - RNA, 24 nt, Human
ucuugcucuaucauccagccugga

SEQ ID NO: 590927 - RNA, 22 nt, Human
ucuugcucugucacccaggcug

SEQ ID NO: 590928 - RNA, 23 nt, Human
ucuugcucugucacccaggcugg

SEQ ID NO: 590929 - RNA, 24 nt, Human
ucuugcucugucacccaggcugga

SEQ ID NO: 590930 - RNA, 19 nt, Human
ugaacauaagcucacugca

SEQ ID NO: 590931 - RNA, 21 nt, Human
ugagauuacaggcaugcgcca

SEQ ID NO: 590932 - RNA, 22 nt, Human
ugagauuacaggcaugcgccac

SEQ ID NO: 590933 - RNA, 24 nt, Human
ugagauuacaggcaugcgccacca

SEQ ID NO: 590934 - RNA, 20 nt, Human
ugauucuccugccucagccu

SEQ ID NO: 590935 - RNA, 22 nt, Human
ugcaguggugcaaucucagcuc

SEQ ID NO: 590936 - RNA, 24 nt, Human
ugccauguugcccaggcuguucuc

SEQ ID NO: 590937 - RNA, 27 nt, Human
ugccauguugcccaggcuguucucaaa

SEQ ID NO: 590938 - RNA, 24 nt, Human
ugccucagccuccugaguagcuga

SEQ ID NO: 590939 - RNA, 19 nt, Human
ugccuuggcuucccaaagu

SEQ ID NO: 590940 - RNA, 24 nt, Human
ugcucugucacccaggcuggagug

SEQ ID NO: 590941 - RNA, 19 nt, Human
uggaaccacagaggcacca

SEQ ID NO: 590942 - RNA, 18 nt, Human
uggagugcaguggugcaa

SEQ ID NO: 590943 - RNA, 23 nt, Human
uggagugcaguggugcaaucuca

SEQ ID NO: 590944 - RNA, 24 nt, Human
uggagugcaguggugcaaucucag

SEQ ID NO: 590945 - RNA, 19 nt, Human
ugggcucaagugauccucu

SEQ ID NO: 590946 - RNA, 21 nt, Human
uggugcaaucucagcucucag

SEQ ID NO: 590947 - RNA, 22 nt, Human
uguagaaacaggguuuugccau

SEQ ID NO: 590948 - RNA, 23 nt, Human
uguagaaacaggguuuugccaug

SEQ ID NO: 590949 - RNA, 24 nt, Human
uguagaaacaggguuuugccaugu

SEQ ID NO: 590950 - RNA, 23 nt, Human
uuaacaaugcagugguuaucuuu

SEQ ID NO: 590951 - RNA, 23 nt, Human
uucaauugauucuccugccucag

SEQ ID NO: 590952 - RNA, 24 nt, Human
uucuugcucugucacccaggcugg

SEQ ID NO: 590953 - RNA, 24 nt, Human
uugauucuccugccucagccuccu

SEQ ID NO: 590954 - RNA, 24 nt, Human
uugcucugucacccaggcuggagu

SEQ ID NO: 590955 - RNA, 19 nt, Human
uuuugccauguugcccagg

SEQ ID NO: 590956 - RNA, 26 nt, Human
aaaaaaaaaauacaugaguaccagga

SEQ ID NO: 590957 - RNA, 24 nt, Human
aaaaacaaaacaaaacaaaacaaa

SEQ ID NO: 590958 - RNA, 19 nt, Human
aaaaaccagcauuucugca

SEQ ID NO: 590959 - RNA, 20 nt, Human
aaaaacugcaccuucuguca

SEQ ID NO: 590960 - RNA, 18 nt, Human
aaaaauccaggaugaaca

SEQ ID NO: 590961 - RNA, 24 nt, Human
aaaacaaaacaaaaccaaaagaaa

SEQ ID NO: 590962 - RNA, 22 nt, Human
aaaacacccuuguaaaguuuuu

SEQ ID NO: 590963 - RNA, 21 nt, Human
aaaagggauuaaggaacaggg

SEQ ID NO: 590964 - RNA, 20 nt, Human
aaaaugccuacaaugagaug

SEQ ID NO: 590965 - RNA, 22 nt, Human
aaacaaaacaaaacaaaacaaa

SEQ ID NO: 590966 - RNA, 22 nt, Human
aaacaaaacaaaacaaaacaaa

SEQ ID NO: 590967 - RNA, 22 nt, Human
aaacaaaacaaaacaaaaccaa

SEQ ID NO: 590968 - RNA, 23 nt, Human
aaacaaaacaaaacaaaaccaaa

SEQ ID NO: 590969 - RNA, 24 nt, Human
aaacaaaacaaaacaaaaccaaaa

SEQ ID NO: 590970 - RNA, 23 nt, Human
aaacaaacauggcccaguaaaau

SEQ ID NO: 590971 - RNA, 18 nt, Human
aaacaagaaaaaaaacug

SEQ ID NO: 590972 - RNA, 21 nt, Human
aaaugggaagaccauaaaaau

SEQ ID NO: 590973 - RNA, 23 nt, Human
aacaaaacaaaaccaaaagaaaa

SEQ ID NO: 590974 - RNA, 20 nt, Human
aacaaaaccaaaagaaaagu

SEQ ID NO: 590975 - RNA, 19 nt, Human
aagaaaggaaagaaagagg

SEQ ID NO: 590976 - RNA, 21 nt, Human
aagaggcaaaaaccagcacaa

SEQ ID NO: 590977 - RNA, 24 nt, Human
aagaggcaaaaaccagcacaaaug

SEQ ID NO: 590978 - RNA, 26 nt, Human
aagcauuucaguguacaauaguccuu

SEQ ID NO: 590979 - RNA, 21 nt, Human
aauaaaggcuuugcggagaaa

SEQ ID NO: 590980 - RNA, 21 nt, Human
acaaaacaaaacaaaacaaaa

SEQ ID NO: 590981 - RNA, 21 nt, Human
acaaaacaaaacaaaacaaaa

SEQ ID NO: 590982 - RNA, 23 nt, Human
acaaaacaaaacaaaacaaaacc

SEQ ID NO: 590983 - RNA, 22 nt, Human
acaaaacaaaacaaaaccaaaa

SEQ ID NO: 590984 - RNA, 24 nt, Human
acaaaacaaaacaaaaccaaaaga

SEQ ID NO: 590985 - RNA, 18 nt, Human
acaaaaccaaaagaaaag

SEQ ID NO: 590986 - RNA, 24 nt, Human
acaacugugauuauagcaaaguua

SEQ ID NO: 590987 - RNA, 23 nt, Human
acaguagucuuuccuuauguuca

SEQ ID NO: 590988 - RNA, 20 nt, Human
agaaaacaagaaaaaaaacu

SEQ ID NO: 590989 - RNA, 18 nt, Human
agaaaggaaagaaagagg

SEQ ID NO: 590990 - RNA, 19 nt, Human
agaccaaucccuaaaaucc

SEQ ID NO: 590991 - RNA, 24 nt, Human
agcacaaaugggaagaccauaaaa

SEQ ID NO: 590992 - RNA, 24 nt, Human
agugguaagaaaacaagaaaaaaa

SEQ ID NO: 590993 - RNA, 24 nt, Human
auauuacagggucaagaaacaaaa

SEQ ID NO: 590994 - RNA, 21 nt, Human
auuaaggaacagggaggggga

SEQ ID NO: 590995 - RNA, 18 nt, Human
auuauagcaaaguuauug

SEQ ID NO: 590996 - RNA, 18 nt, Human
auuguuuuuaaaaauguu

SEQ ID NO: 590997 - RNA, 24 nt, Human
caaaaacaaaacaaaacaaaacaa

SEQ ID NO: 590998 - RNA, 24 nt, Human
caaaacaaaacaaaacaaaacaaa

SEQ ID NO: 590999 - RNA, 27 nt, Human
caaaacaaaacaaaacaaaacaaaacc

SEQ ID NO: 591000 - RNA, 22 nt, Human
caaaacaaaacaaaacaaaacc

SEQ ID NO: 591001 - RNA, 23 nt, Human
caaaacaaaacaaaacaaaacca

SEQ ID NO: 591002 - RNA, 25 nt, Human
caaaacaaaacaaaacaaaaccaaa

SEQ ID NO: 591003 - RNA, 21 nt, Human
caaaaccaaaagaaaaguccu

SEQ ID NO: 591004 - RNA, 21 nt, Human
caaaagcugcuguccagucau

SEQ ID NO: 591005 - RNA, 22 nt, Human
caacagaagcuaaauacaauug

SEQ ID NO: 591006 - RNA, 24 nt, Human
caagaaaaaaaacugcugcugcau

SEQ ID NO: 591007 - RNA, 21 nt, Human
caauaagacacagcugacacc

SEQ ID NO: 591008 - RNA, 24 nt, Human
caauauuagcagacugucauauua

SEQ ID NO: 591009 - RNA, 24 nt, Human
cacacgcagcagaauacucuuaca

SEQ ID NO: 591010 - RNA, 21 nt, Human
cacuuuuucuuaagacucaag

SEQ ID NO: 591011 - RNA, 22 nt, Human
cagcacaaaugggaagaccaua

SEQ ID NO: 591012 - RNA, 22 nt, Human
cagcacaaaugggaagaccaua

SEQ ID NO: 591013 - RNA, 23 nt, Human
caguaaaauaugaggcaaaaaug

SEQ ID NO: 591014 - RNA, 20 nt, Human
ccaaaaaaaaaaaaaaaaaa

SEQ ID NO: 591015 - RNA, 22 nt, Human
ccaaaaaaaaaaaaaaaaaaaa

SEQ ID NO: 591016 - RNA, 23 nt, Human
ccaaaaaaaaaaaaaaaaaaaaa

SEQ ID NO: 591017 - RNA, 19 nt, Human
ccagcacaaaugggaagac

SEQ ID NO: 591018 - RNA, 21 nt, Human
ccucuaaauacugaugacaga

SEQ ID NO: 591019 - RNA, 21 nt, Human
cucaaguacaacagaaacaag

SEQ ID NO: 591020 - RNA, 21 nt, Human
cugacagugcucuggaacaac

SEQ ID NO: 591021 - RNA, 21 nt, Human
gaacaaguuucaaaaugcaac

SEQ ID NO: 591022 - RNA, 23 nt, Human
gcaaagcuuuucuucauuuaaaa

SEQ ID NO: 591023 - RNA, 22 nt, Human
ggaaaaaaaaaaaauacaugag

SEQ ID NO: 591024 - RNA, 21 nt, Human
ggaaagagaucuggaaaaaaa

SEQ ID NO: 591025 - RNA, 22 nt, Human
gggaaagagaucuggaaaaaaa

SEQ ID NO: 591026 - RNA, 18 nt, Human
ggggaaagagaucuggaa

SEQ ID NO: 591027 - RNA, 21 nt, Human
gguaagaaaacaagaaaaaaa

SEQ ID NO: 591028 - RNA, 22 nt, Human
guaaaaccaaaaacaaaacaaa

SEQ ID NO: 591029 - RNA, 24 nt, Human
guaaaaccaaaaacaaaacaaaac

SEQ ID NO: 591030 - RNA, 27 nt, Human
guaaaguuuuucuuuaggaugguguaa

SEQ ID NO: 591031 - RNA, 23 nt, Human
guacuaaagccuuuggaaauugu

SEQ ID NO: 591032 - RNA, 21 nt, Human
guauaacugcauccacacgca

SEQ ID NO: 591033 - RNA, 22 nt, Human
uaaaaaccagcauuucugcaca

SEQ ID NO: 591034 - RNA, 18 nt, Human
uaaaggcuuugcggagaa

SEQ ID NO: 591035 - RNA, 22 nt, Human
uaagauuccaacuuuauaaccu

SEQ ID NO: 591036 - RNA, 23 nt, Human
uacauucacuucucacccucuaa

SEQ ID NO: 591037 - RNA, 24 nt, Human
uacauucacuucucacccucuaaa

SEQ ID NO: 591038 - RNA, 20 nt, Human
uacuccaaaggaguaggauc

SEQ ID NO: 591039 - RNA, 20 nt, Human
uagcaacuuggggaaagaga

SEQ ID NO: 591040 - RNA, 23 nt, Human
uagcgaaaaucacgacuauaacc

SEQ ID NO: 591041 - RNA, 20 nt, Human
uaggaugguguaaaaaccag

SEQ ID NO: 591042 - RNA, 21 nt, Human
uaguaagauacugaugcagug

SEQ ID NO: 591043 - RNA, 27 nt, Human
uaugcaaagcaucuucuuucacacagu

SEQ ID NO: 591044 - RNA, 23 nt, Human
uauuacagggucaagaaacaaaa

SEQ ID NO: 591045 - RNA, 21 nt, Human
ucauuuaaaaggagaaaaaaa

SEQ ID NO: 591046 - RNA, 25 nt, Human
ucauuuaaaaggagaaaaaaaaaaa

SEQ ID NO: 591047 - RNA, 18 nt, Human
uccaggaugaacaaguuu

SEQ ID NO: 591048 - RNA, 21 nt, Human
ucccuaaaauccauccggagg

SEQ ID NO: 591049 - RNA, 18 nt, Human
ucugaaagaauaaagugg

SEQ ID NO: 591050 - RNA, 23 nt, Human
ucugaaagaauaaagugguaaga

SEQ ID NO: 591051 - RNA, 18 nt, Human
ucugagauaaaaaugauu

SEQ ID NO: 591052 - RNA, 18 nt, Human
ucuguaaaaccaaaaaca

SEQ ID NO: 591053 - RNA, 20 nt, Human
ucugugcaugaguccauuuu

SEQ ID NO: 591054 - RNA, 20 nt, Human
ucuuacaauagcaacuuggg

SEQ ID NO: 591055 - RNA, 19 nt, Human
ucuuuuuuuaaaccaguuc

SEQ ID NO: 591056 - RNA, 21 nt, Human
ucuuuuuuuaaaccaguucug

SEQ ID NO: 591057 - RNA, 19 nt, Human
ugaaaagccuauaaucagg

SEQ ID NO: 591058 - RNA, 18 nt, Human
ugaaagaauaaaguggua

SEQ ID NO: 591059 - RNA, 23 nt, Human
ugcaauaagacacagcugacacc

SEQ ID NO: 591060 - RNA, 28 nt, Human
ugcaauaagacacagcugacaccagacc

SEQ ID NO: 591061 - RNA, 20 nt, Human
ugcagcaaauaugcaaagca

SEQ ID NO: 591062 - RNA, 18 nt, Human
ugcauccacacgcagcag

SEQ ID NO: 591063 - RNA, 21 nt, Human
ugcauccacacgcagcagaau

SEQ ID NO: 591064 - RNA, 18 nt, Human
ugcucuggaacaacugug

SEQ ID NO: 591065 - RNA, 19 nt, Human
uggaaaacacauuuggcuu

SEQ ID NO: 591066 - RNA, 19 nt, Human
ugggaagaccauaaaaaug

SEQ ID NO: 591067 - RNA, 23 nt, Human
uggggucagacgggaaaaaggga

SEQ ID NO: 591068 - RNA, 19 nt, Human
uguaaaaccaaaaacaaaa

SEQ ID NO: 591069 - RNA, 22 nt, Human
ugugcaugaguccauuuucuuu

SEQ ID NO: 591070 - RNA, 28 nt, Human
uucacuggaauuuuuuucuuuguaauaa

SEQ ID NO: 591071 - RNA, 23 nt, Human
uucugcagcuaugcauguauuuc

SEQ ID NO: 591072 - RNA, 24 nt, Human
uucugcagcuaugcauguauuucu

SEQ ID NO: 591073 - RNA, 27 nt, Human
uuguauuuucuuuuuuuaaaccaguuc

SEQ ID NO: 591074 - RNA, 24 nt, Human
uuuaaaaggagaaaaaaaaaaacc

SEQ ID NO: 591075 - RNA, 21 nt, Human
uuuaagauuucuuucccaugg

SEQ ID NO: 591076 - RNA, 23 nt, Human
uuuauaccuguuacauucacuuc

SEQ ID NO: 591077 - RNA, 25 nt, Human
uuucugcagcuaugcauguauuucu

SEQ ID NO: 591078 - RNA, 24 nt, Human
uuuuauagcugcuuuauagcuacu

SEQ ID NO: 591079 - RNA, 20 nt, Human
aaaagauuuagucauaugaa

SEQ ID NO: 591080 - RNA, 20 nt, Human
aacguauuuuuucaaagacc

SEQ ID NO: 591081 - RNA, 20 nt, Human
acgccgcccgcgcccaccca

SEQ ID NO: 591082 - RNA, 19 nt, Human
acgcugagucgcaacccgg

SEQ ID NO: 591083 - RNA, 21 nt, Human
agacgccgcccgcgcccaccc

SEQ ID NO: 591084 - RNA, 21 nt, Human
caagaacgcugagucgcaacc

SEQ ID NO: 591085 - RNA, 22 nt, Human
caaggccagagccccaagcuag

SEQ ID NO: 591086 - RNA, 21 nt, Human
ccaagaacgcugagucgcaac

SEQ ID NO: 591087 - RNA, 26 nt, Human
ccaggcgauagcggcagccccgcacc

SEQ ID NO: 591088 - RNA, 22 nt, Human
ccccaagcuaggccggccccuc

SEQ ID NO: 591089 - RNA, 21 nt, Human
ccccucaacgccccacucccg

SEQ ID NO: 591090 - RNA, 18 nt, Human
cccgcaccgggcucagga

SEQ ID NO: 591091 - RNA, 21 nt, Human
cccucaacgccccacucccgc

SEQ ID NO: 591092 - RNA, 21 nt, Human
ccgcgcugccucccgcccugc

SEQ ID NO: 591093 - RNA, 18 nt, Human
ccucaacgccccacuccc

SEQ ID NO: 591094 - RNA, 22 nt, Human
ccucccgcccugcggcccaagc

SEQ ID NO: 591095 - RNA, 18 nt, Human
ccucgggggaugcccgcc

SEQ ID NO: 591096 - RNA, 20 nt, Human
ccugcggcccaagcaguugg

SEQ ID NO: 591097 - RNA, 22 nt, Human
cggagacgccgcccgcgcccac

SEQ ID NO: 591098 - RNA, 20 nt, Human
cggccaggcgauagcggcag

SEQ ID NO: 591099 - RNA, 23 nt, Human
cggccccucaacgccccacuccc

SEQ ID NO: 591100 - RNA, 20 nt, Human
gcccgcgcccacccaagaac

SEQ ID NO: 591101 - RNA, 20 nt, Human
gcuccggcacccacggccag

SEQ ID NO: 591102 - RNA, 24 nt, Human
gucgcaacccggccgcuccggcac

SEQ ID NO: 591103 - RNA, 18 nt, Human
ucaaaaucacauccaaga

SEQ ID NO: 591104 - RNA, 20 nt, Human
ucccgcccugcggcccaagc

SEQ ID NO: 591105 - RNA, 21 nt, Human
ucccgcccugcggcccaagca

SEQ ID NO: 591106 - RNA, 18 nt, Human
ucggaagacgcaaggcca

SEQ ID NO: 591107 - RNA, 20 nt, Human
ugccucccgcccugcggccc

SEQ ID NO: 591108 - RNA, 23 nt, Human
uucaaaagauuuagucauaugaa

SEQ ID NO: 591109 - RNA, 24 nt, Human
uuuaauugguucauuaaccaaaga

SEQ ID NO: 591110 - RNA, 23 nt, Human
aaaaagauuugugaacuugaaca

SEQ ID NO: 591111 - RNA, 21 nt, Human
aaacugccccccuccccagcc

SEQ ID NO: 591112 - RNA, 22 nt, Human
aaacugccccccuccccagcca

SEQ ID NO: 591113 - RNA, 24 nt, Human
aaagaagaaaaggagaacaaagaa

SEQ ID NO: 591114 - RNA, 22 nt, Human
aaagauuugugaacuugaacaa

SEQ ID NO: 591115 - RNA, 22 nt, Human
aaaggagacaauauguaauaua

SEQ ID NO: 591116 - RNA, 19 nt, Human
aacaaggcaagagauacaa

SEQ ID NO: 591117 - RNA, 24 nt, Human
aacaaggcaagagauacaaucuaa

SEQ ID NO: 591118 - RNA, 18 nt, Human
aacacacucagcuacucu

SEQ ID NO: 591119 - RNA, 19 nt, Human
aaccuccuccuuccuucac

SEQ ID NO: 591120 - RNA, 19 nt, Human
aacuguauguugcccacua

SEQ ID NO: 591121 - RNA, 22 nt, Human
aagaagaaaaggagaacaaaga

SEQ ID NO: 591122 - RNA, 21 nt, Human
aagacauagaauaaacaacaa

SEQ ID NO: 591123 - RNA, 25 nt, Human
aagcagaaaaagaagaaaagggacc

SEQ ID NO: 591124 - RNA, 20 nt, Human
aauuaccuuccaaaggucac

SEQ ID NO: 591125 - RNA, 23 nt, Human
acagagauuguuaacuggauaaa

SEQ ID NO: 591126 - RNA, 21 nt, Human
acagggaaaaacccaugucaa

SEQ ID NO: 591127 - RNA, 22 nt, Human
accuccuccuuccuucacuuga

SEQ ID NO: 591128 - RNA, 19 nt, Human
agaaaaagaagaaaaggag

SEQ ID NO: 591129 - RNA, 22 nt, Human
agaaaacauacuuuggauggga

SEQ ID NO: 591130 - RNA, 19 nt, Human
agaaaucugagucuccauu

SEQ ID NO: 591131 - RNA, 20 nt, Human
agacacauaaucucaucaug

SEQ ID NO: 591132 - RNA, 19 nt, Human
agagauuguuaacuggaua

SEQ ID NO: 591133 - RNA, 23 nt, Human
agagguuaaaaauuacaauuucu

SEQ ID NO: 591134 - RNA, 20 nt, Human
agauuagugaacugaaagac

SEQ ID NO: 591135 - RNA, 21 nt, Human
agccaggaccugauuuucuuc

SEQ ID NO: 591136 - RNA, 21 nt, Human
aggcaagagauacaaucuaaa

SEQ ID NO: 591137 - RNA, 18 nt, Human
aggucuaguguccaguga

SEQ ID NO: 591138 - RNA, 21 nt, Human
aguggaagccucuaaaacugc

SEQ ID NO: 591139 - RNA, 19 nt, Human
auaccccaguaaaaagaca

SEQ ID NO: 591140 - RNA, 21 nt, Human
aucucaucaugaggguuccac

SEQ ID NO: 591141 - RNA, 21 nt, Human
caaaggagacaauauguaaua

SEQ ID NO: 591142 - RNA, 20 nt, Human
caagguguuggcaggucuag

SEQ ID NO: 591143 - RNA, 21 nt, Human
cacuaaacacccacuuuaaau

SEQ ID NO: 591144 - RNA, 18 nt, Human
cagaaaaagaagaaaagg

SEQ ID NO: 591145 - RNA, 30 nt, Human
cagaaaaagaagaaaaggagaacaaagaag

SEQ ID NO: 591146 - RNA, 30 nt, Human
cagcuacucuaagggaaagcagaaaaagag

SEQ ID NO: 591147 - RNA, 18 nt, Human
caggaaauacccaagaac

SEQ ID NO: 591148 - RNA, 21 nt, Human
caggaaccuccuccuuccuuc

SEQ ID NO: 591149 - RNA, 20 nt, Human
cauaagacacauaaucucau

SEQ ID NO: 591150 - RNA, 22 nt, Human
caucauuuucauguacauaugu

SEQ ID NO: 591151 - RNA, 20 nt, Human
cauggcaaagagcagagaaa

SEQ ID NO: 591152 - RNA, 24 nt, Human
ccacuaaacacccacuuuaaauau

SEQ ID NO: 591153 - RNA, 23 nt, Human
ccccaguaaaaagacagagauug

SEQ ID NO: 591154 - RNA, 19 nt, Human
cccggcacuggccuauggc

SEQ ID NO: 591155 - RNA, 22 nt, Human
cccuaaauuuuggcuaagaaau

SEQ ID NO: 591156 - RNA, 22 nt, Human
ccugauuuucuucuggcuacac

SEQ ID NO: 591157 - RNA, 20 nt, Human
ccuggcccuuaaaccccggc

SEQ ID NO: 591158 - RNA, 19 nt, Human
cugaaagacauagcuauga

SEQ ID NO: 591159 - RNA, 18 nt, Human
cugacugccuuaacaaac

SEQ ID NO: 591160 - RNA, 19 nt, Human
cugacugccuuaacaaaca

SEQ ID NO: 591161 - RNA, 21 nt, Human
cugccccccuccccagccaaa

SEQ ID NO: 591162 - RNA, 26 nt, Human
gaaaaagaagaaaaggagaacaaagg

SEQ ID NO: 591163 - RNA, 22 nt, Human
gaacuugaacaaggcaagagau

SEQ ID NO: 591164 - RNA, 21 nt, Human
gaaguuagaaugauaaguuca

SEQ ID NO: 591165 - RNA, 20 nt, Human
gccccccuccccagccaaac

SEQ ID NO: 591166 - RNA, 22 nt, Human
ggaugcuucgucuuugguuucu

SEQ ID NO: 591167 - RNA, 19 nt, Human
gggagggguagugagguuu

SEQ ID NO: 591168 - RNA, 20 nt, Human
gguuucuucuggauccuccc

SEQ ID NO: 591169 - RNA, 23 nt, Human
guaauauaaacacacucagcuac

SEQ ID NO: 591170 - RNA, 18 nt, Human
guuucuucuggauccucc

SEQ ID NO: 591171 - RNA, 25 nt, Human
uaaaaagacagagauuguuaacugg

SEQ ID NO: 591172 - RNA, 24 nt, Human
uaaaaguaaaaccaugauaaauaa

SEQ ID NO: 591173 - RNA, 24 nt, Human
uaaacacccacuuuaaauaugaaa

SEQ ID NO: 591174 - RNA, 26 nt, Human
uaaacuacaaagagaacaaaagcuaa

SEQ ID NO: 591175 - RNA, 20 nt, Human
uaagaaaucugagucuccau

SEQ ID NO: 591176 - RNA, 21 nt, Human
uaagccaacaaaggagacaau

SEQ ID NO: 591177 - RNA, 22 nt, Human
uaagccaacaaaggagacaaua

SEQ ID NO: 591178 - RNA, 18 nt, Human
uaccuuccaaaggucaca

SEQ ID NO: 591179 - RNA, 22 nt, Human
uaggacuucaacauguaaauuu

SEQ ID NO: 591180 - RNA, 22 nt, Human
uagguuaaaaguaaaaccauga

SEQ ID NO: 591181 - RNA, 20 nt, Human
uaguaaaugaaaaacaauau

SEQ ID NO: 591182 - RNA, 23 nt, Human
uauugugggagggguagugaggu

SEQ ID NO: 591183 - RNA, 18 nt, Human
ucaagguguuggcagguc

SEQ ID NO: 591184 - RNA, 18 nt, Human
ucacuugaacucucuugc

SEQ ID NO: 591185 - RNA, 22 nt, Human
ucccugaaugcuuccuuuccug

SEQ ID NO: 591186 - RNA, 18 nt, Human
ucuaaaacugccccccuc

SEQ ID NO: 591187 - RNA, 20 nt, Human
ucuaagggaaagcagaaaaa

SEQ ID NO: 591188 - RNA, 22 nt, Human
ucuagaacuggacucuaaaaca

SEQ ID NO: 591189 - RNA, 26 nt, Human
ucuguuucaggaaauacccaagaacu

SEQ ID NO: 591190 - RNA, 18 nt, Human
ugaaagacauagcuauga

SEQ ID NO: 591191 - RNA, 21 nt, Human
ugaaagacauagcuaugagaa

SEQ ID NO: 591192 - RNA, 21 nt, Human
ugacauccacauccaggaacc

SEQ ID NO: 591193 - RNA, 19 nt, Human
ugagaguccauuuccuggu

SEQ ID NO: 591194 - RNA, 26 nt, Human
uggaaaaaagauuagugaacugaaag

SEQ ID NO: 591195 - RNA, 22 nt, Human
uggcaaagagcagagaaagaga

SEQ ID NO: 591196 - RNA, 18 nt, Human
ugggaugcuucgucuuug

SEQ ID NO: 591197 - RNA, 19 nt, Human
uguacauauguguauacac

SEQ ID NO: 591198 - RNA, 22 nt, Human
uguauacacaaaaagauuugug

SEQ ID NO: 591199 - RNA, 20 nt, Human
ugucaaauuauuagagguua

SEQ ID NO: 591200 - RNA, 20 nt, Human
uucaggaaauacccaagaac

SEQ ID NO: 591201 - RNA, 21 nt, Human
uucuucuggauccucccuaaa

SEQ ID NO: 591202 - RNA, 21 nt, Human
uuuacaguuaauaagccaaca

SEQ ID NO: 591203 - RNA, 22 nt, Human
uuuccuggcccuuaaaccccgg

SEQ ID NO: 591204 - RNA, 23 nt, Human
aaaaaaaaaagaaaaagaaaaag

SEQ ID NO: 591205 - RNA, 21 nt, Human
aaaaagaaaaagaaaaagcau

SEQ ID NO: 591206 - RNA, 23 nt, Human
aaaagaaaaagaaaaagaaaaag

SEQ ID NO: 591207 - RNA, 19 nt, Human
aaaagaaaaagaaaaagca

SEQ ID NO: 591208 - RNA, 19 nt, Human
aacaugguaaaacccuauc

SEQ ID NO: 591209 - RNA, 20 nt, Human
aacaugguaaaacccuaucu

SEQ ID NO: 591210 - RNA, 21 nt, Human
aacaugguaaaacccuaucuc

SEQ ID NO: 591211 - RNA, 20 nt, Human
aacucacuggcagccagugg

SEQ ID NO: 591212 - RNA, 21 nt, Human
aagacuggcagccaaaaggaa

SEQ ID NO: 591213 - RNA, 24 nt, Human
aauugcuugagaugaggaggcgga

SEQ ID NO: 591214 - RNA, 19 nt, Human
acaacagccauauacuccu

SEQ ID NO: 591215 - RNA, 24 nt, Human
acagggcaagacuccgucucaaaa

SEQ ID NO: 591216 - RNA, 23 nt, Human
acccuaucucuacuaaaauacaa

SEQ ID NO: 591217 - RNA, 23 nt, Human
acucugaguggcaaagaaccagg

SEQ ID NO: 591218 - RNA, 18 nt, Human
acugcacugcagccuggg

SEQ ID NO: 591219 - RNA, 19 nt, Human
acugcacugcagccugggc

SEQ ID NO: 591220 - RNA, 20 nt, Human
acugcacugcagccugggcg

SEQ ID NO: 591221 - RNA, 24 nt, Human
acugcacugcagccugggcgacag

SEQ ID NO: 591222 - RNA, 23 nt, Human
acugcagccugggcgacagggca

SEQ ID NO: 591223 - RNA, 21 nt, Human
agaaaaagcauuacuuuaaga

SEQ ID NO: 591224 - RNA, 20 nt, Human
agacacaagagaauaagaug

SEQ ID NO: 591225 - RNA, 19 nt, Human
agacaggagaauugcuuga

SEQ ID NO: 591226 - RNA, 23 nt, Human
agacaggagaauugcuugagaug

SEQ ID NO: 591227 - RNA, 18 nt, Human
agacauuugugcagaaaa

SEQ ID NO: 591228 - RNA, 26 nt, Human
agacggguggaucucuugaggccagg

SEQ ID NO: 591229 - RNA, 23 nt, Human
agccaggugugguggcacaugcc

SEQ ID NO: 591230 - RNA, 24 nt, Human
agccugggcgacagggcaagacuc

SEQ ID NO: 591231 - RNA, 24 nt, Human
agccuggugaacaugguaaaaccc

SEQ ID NO: 591232 - RNA, 18 nt, Human
aggacugaugggcccagg

SEQ ID NO: 591233 - RNA, 18 nt, Human
aggauuucgagacuagcc

SEQ ID NO: 591234 - RNA, 24 nt, Human
aggcggagguugcagugagccgag

SEQ ID NO: 591235 - RNA, 24 nt, Human
aggugugguggcacaugccuguaa

SEQ ID NO: 591236 - RNA, 23 nt, Human
aguggcucacaccuguaauccca

SEQ ID NO: 591237 - RNA, 21 nt, Human
auaaacaccaauaugcccuuc

SEQ ID NO: 591238 - RNA, 23 nt, Human
aucacaguaaaauacaauuugcu

SEQ ID NO: 591239 - RNA, 22 nt, Human
aucccaacacuuugggaggcca

SEQ ID NO: 591240 - RNA, 18 nt, Human
auuagaaacaaucugaca

SEQ ID NO: 591241 - RNA, 22 nt, Human
auugucucuguuuuauacauga

SEQ ID NO: 591242 - RNA, 24 nt, Human
auugugccacugcacugcagccug

SEQ ID NO: 591243 - RNA, 24 nt, Human
caaaaggaaacacugacaagagca

SEQ ID NO: 591244 - RNA, 24 nt, Human
caaaaggaaacacugacaagagca

SEQ ID NO: 591245 - RNA, 19 nt, Human
caaagaaaacaaaaaccac

SEQ ID NO: 591246 - RNA, 24 nt, Human
caacacugaaaacucauuaggaga

SEQ ID NO: 591247 - RNA, 20 nt, Human
caacacuuugggaggccaag

SEQ ID NO: 591248 - RNA, 24 nt, Human
caacacuuugggaggccaagacgg

SEQ ID NO: 591249 - RNA, 26 nt, Human
caagacggguggaucucuugaggcca

SEQ ID NO: 591250 - RNA, 21 nt, Human
caagacuccgucucaaaaaaa

SEQ ID NO: 591251 - RNA, 24 nt, Human
caagagcaugaaaggugcugacug

SEQ ID NO: 591252 - RNA, 19 nt, Human
caagucagaagcagaaaaa

SEQ ID NO: 591253 - RNA, 24 nt, Human
cacaccuguaaucccaacacuuug

SEQ ID NO: 591254 - RNA, 23 nt, Human
caccuguaaucccaacacuuugg

SEQ ID NO: 591255 - RNA, 24 nt, Human
caccuguaaucccaacacuuuggg

SEQ ID NO: 591256 - RNA, 21 nt, Human
cacucuuuacuuagaacucuu

SEQ ID NO: 591257 - RNA, 20 nt, Human
cacugcacugcagccugggc

SEQ ID NO: 591258 - RNA, 23 nt, Human
cacugcacugcagccugggcgac

SEQ ID NO: 591259 - RNA, 24 nt, Human
cacugcacugcagccugggcgaca

SEQ ID NO: 591260 - RNA, 23 nt, Human
cacugcagccugggcgacagggc

SEQ ID NO: 591261 - RNA, 19 nt, Human
cagaaaaagcauuacuugg

SEQ ID NO: 591262 - RNA, 21 nt, Human
ccacaguuacaguuucaggaa

SEQ ID NO: 591263 - RNA, 20 nt, Human
ccacugcacugcagccuggg

SEQ ID NO: 591264 - RNA, 21 nt, Human
ccacugcacugcagccugggc

SEQ ID NO: 591265 - RNA, 24 nt, Human
ccacugcacugcagccugggcgac

SEQ ID NO: 591266 - RNA, 22 nt, Human
ccugggcgacagggcaagacuc

SEQ ID NO: 591267 - RNA, 22 nt, Human
ccuggugaacaugguaaaaccc

SEQ ID NO: 591268 - RNA, 18 nt, Human
ccuguaaucccagcuacu

SEQ ID NO: 591269 - RNA, 21 nt, Human
ccuguaaucccagcuacuggg

SEQ ID NO: 591270 - RNA, 22 nt, Human
ccuguaaucccagcuacugggg

SEQ ID NO: 591271 - RNA, 22 nt, Human
ccuucucuauucuauaucaaaa

SEQ ID NO: 591272 - RNA, 24 nt, Human
cggguggaucucuugaggccagga

SEQ ID NO: 591273 - RNA, 18 nt, Human
cucaaaaaaaaaaaaaag

SEQ ID NO: 591274 - RNA, 25 nt, Human
cucaaaaaaaaaaaaaagaaaaaga

SEQ ID NO: 591275 - RNA, 22 nt, Human
cucacaccuguaaucccaacac

SEQ ID NO: 591276 - RNA, 24 nt, Human
cucacaccuguaaucccaacacuu

SEQ ID NO: 591277 - RNA, 19 nt, Human
cuccgucucaaaaaaaaaa

SEQ ID NO: 591278 - RNA, 18 nt, Human
cugcuucagacuauuuac

SEQ ID NO: 591279 - RNA, 18 nt, Human
gaagcagaaaaauuugag

SEQ ID NO: 591280 - RNA, 27 nt, Human
gacaacacaagaaugagagacaauuaa

SEQ ID NO: 591281 - RNA, 21 nt, Human
gacagggcaagacuccgucuc

SEQ ID NO: 591282 - RNA, 24 nt, Human
gacagggcaagacuccgucucaaa

SEQ ID NO: 591283 - RNA, 23 nt, Human
gagaauugcuugagaugaggagg

SEQ ID NO: 591284 - RNA, 22 nt, Human
gagacugagacaggagaauugc

SEQ ID NO: 591285 - RNA, 23 nt, Human
gagauugugccacugcacugcag

SEQ ID NO: 591286 - RNA, 21 nt, Human
gaggcggagguugcagugagc

SEQ ID NO: 591287 - RNA, 21 nt, Human
gagguugcagugagccgagau

SEQ ID NO: 591288 - RNA, 23 nt, Human
gagguugcagugagccgagauug

SEQ ID NO: 591289 - RNA, 24 nt, Human
gaucucuugaggccaggauuucga

SEQ ID NO: 591290 - RNA, 24 nt, Human
gcacucacuccagcaaacacauug

SEQ ID NO: 591291 - RNA, 24 nt, Human
gccacugcacugcagccugggcga

SEQ ID NO: 591292 - RNA, 20 nt, Human
gcccuucaaaaggaaacacu

SEQ ID NO: 591293 - RNA, 21 nt, Human
gcuagagaaaggcaagcaaau

SEQ ID NO: 591294 - RNA, 22 nt, Human
ggagguugcagugagccgagau

SEQ ID NO: 591295 - RNA, 24 nt, Human
ggagguugcagugagccgagauug

SEQ ID NO: 591296 - RNA, 19 nt, Human
ggcugggugcaguggcuca

SEQ ID NO: 591297 - RNA, 21 nt, Human
ggcugggugcaguggcucaca

SEQ ID NO: 591298 - RNA, 23 nt, Human
ggugcaguggcucacaccuguaa

SEQ ID NO: 591299 - RNA, 22 nt, Human
gguggaucucuugaggccagga

SEQ ID NO: 591300 - RNA, 24 nt, Human
gguggcacaugccuguaaucccag

SEQ ID NO: 591301 - RNA, 20 nt, Human
gucucaaaaaaaaaaaaaag

SEQ ID NO: 591302 - RNA, 18 nt, Human
gugcaguggcucacaccu

SEQ ID NO: 591303 - RNA, 23 nt, Human
gugggacaacacaagaaugagag

SEQ ID NO: 591304 - RNA, 26 nt, Human
gugugcauacauacguguauguacau

SEQ ID NO: 591305 - RNA, 21 nt, Human
uaauccaagacuggcagccaa

SEQ ID NO: 591306 - RNA, 21 nt, Human
uauauagcacacauuuauaug

SEQ ID NO: 591307 - RNA, 20 nt, Human
uauguacacaauaaaaauaa

SEQ ID NO: 591308 - RNA, 26 nt, Human
uauguacacaauaaaaauaauauaug

SEQ ID NO: 591309 - RNA, 21 nt, Human
uauuagaaacaaucugacagc

SEQ ID NO: 591310 - RNA, 25 nt, Human
ucaaaaaaaaaaaaaagaaaaagaa

SEQ ID NO: 591311 - RNA, 22 nt, Human
ucaacugugaguuuuuagcugu

SEQ ID NO: 591312 - RNA, 19 nt, Human
uccaaagaaaacaaaaacc

SEQ ID NO: 591313 - RNA, 22 nt, Human
uccgucucaaaaaaaaaaaaaa

SEQ ID NO: 591314 - RNA, 23 nt, Human
uccgucucaaaaaaaaaaaaaag

SEQ ID NO: 591315 - RNA, 27 nt, Human
uccgucucaaaaaaaaaaaaaagaaaa

SEQ ID NO: 591316 - RNA, 21 nt, Human
uccuugaugcacucacuccag

SEQ ID NO: 591317 - RNA, 21 nt, Human
ucucuacuaaaauacaaaaaa

SEQ ID NO: 591318 - RNA, 23 nt, Human
ucugugugcauuucugugugccc

SEQ ID NO: 591319 - RNA, 24 nt, Human
ugaaagagcuaguauauaaaaaua

SEQ ID NO: 591320 - RNA, 18 nt, Human
ugaaaggugcugacuguu

SEQ ID NO: 591321 - RNA, 20 nt, Human
ugacagcucuugugagcgau

SEQ ID NO: 591322 - RNA, 22 nt, Human
ugagccgagauugugccacugc

SEQ ID NO: 591323 - RNA, 22 nt, Human
ugccuguaaucccagcuacugg

SEQ ID NO: 591324 - RNA, 23 nt, Human
ugccuguaaucccagcuacuggg

SEQ ID NO: 591325 - RNA, 18 nt, Human
ugcuugagaugaggaggc

SEQ ID NO: 591326 - RNA, 23 nt, Human
uggaucucuugaggccaggauuu

SEQ ID NO: 591327 - RNA, 21 nt, Human
uggcacaugccuguaauccca

SEQ ID NO: 591328 - RNA, 18 nt, Human
uggcagccaaaaggaaca

SEQ ID NO: 591329 - RNA, 19 nt, Human
uggcuagagaaaggcaagc

SEQ ID NO: 591330 - RNA, 21 nt, Human
uggcucacaccuguaauccca

SEQ ID NO: 591331 - RNA, 23 nt, Human
ugggaggccaagacggguggauc

SEQ ID NO: 591332 - RNA, 24 nt, Human
ugguggcacaugccuguaauccca

SEQ ID NO: 591333 - RNA, 21 nt, Human
uggugggacaacacaagaaug

SEQ ID NO: 591334 - RNA, 23 nt, Human
uguaacaguguuucaacacaaga

SEQ ID NO: 591335 - RNA, 22 nt, Human
ugugcagaaaaauaacaggaac

SEQ ID NO: 591336 - RNA, 22 nt, Human
ugugcauacauacguguaugua

SEQ ID NO: 591337 - RNA, 22 nt, Human
ugugccacugcacugcagccug

SEQ ID NO: 591338 - RNA, 21 nt, Human
ugugugcauacauacguguau

SEQ ID NO: 591339 - RNA, 25 nt, Human
ugugugcauacauacguguauguac

SEQ ID NO: 591340 - RNA, 25 nt, Human
ugugugcauacauacguguauguag

SEQ ID NO: 591341 - RNA, 22 nt, Human
uguuucaacacaagacauuugu

SEQ ID NO: 591342 - RNA, 22 nt, Human
uuaaaaauauacauauaucaca

SEQ ID NO: 591343 - RNA, 20 nt, Human
uuagugccuguguacucacu

SEQ ID NO: 591344 - RNA, 27 nt, Human
uucaacacugaaaacucauuaggagaa

SEQ ID NO: 591345 - RNA, 21 nt, Human
uucaagucagaagcagaaaaa

SEQ ID NO: 591346 - RNA, 24 nt, Human
uugagaugaggaggcggagguugc

SEQ ID NO: 591347 - RNA, 22 nt, Human
uugcagugagccgagauugugc

SEQ ID NO: 591348 - RNA, 23 nt, Human
uugcagugagccgagauugugcc

SEQ ID NO: 591349 - RNA, 24 nt, Human
uugcuugagaugaggaggcggagg

SEQ ID NO: 591350 - RNA, 19 nt, Human
uuuuuauauuagaaacaau

SEQ ID NO: 591351 - RNA, 26 nt, Human
aaaaacaaacaaacaaaaaacaaaaa

SEQ ID NO: 591352 - RNA, 20 nt, Human
aaacaaaaaacaaaaaaccc

SEQ ID NO: 591353 - RNA, 24 nt, Human
aaacaaaaaacaaaaaacccgugg

SEQ ID NO: 591354 - RNA, 20 nt, Human
aaacaaacaaaaaacaaaaa

SEQ ID NO: 591355 - RNA, 25 nt, Human
aaacaaacaaaaaacaaaaaacccc

SEQ ID NO: 591356 - RNA, 25 nt, Human
aaacaaacaaaaaacaaaaaacccg

SEQ ID NO: 591357 - RNA, 21 nt, Human
aaaccacaagccuuccaacug

SEQ ID NO: 591358 - RNA, 20 nt, Human
aacccguggugccccucccc

SEQ ID NO: 591359 - RNA, 18 nt, Human
aagcuguacccaccagcu

SEQ ID NO: 591360 - RNA, 23 nt, Human
aaggcccacuuccaccaaaaauc

SEQ ID NO: 591361 - RNA, 19 nt, Human
aaggggguggagugacuga

SEQ ID NO: 591362 - RNA, 25 nt, Human
acaaacaaaaaacaaaaaacccgug

SEQ ID NO: 591363 - RNA, 22 nt, Human
acaggcucaggugugcaaaccc

SEQ ID NO: 591364 - RNA, 24 nt, Human
accagccucagggaccuggaaggg

SEQ ID NO: 591365 - RNA, 23 nt, Human
accaggagagcacuccccuccuu

SEQ ID NO: 591366 - RNA, 21 nt, Human
acugcagaaaguacacugugu

SEQ ID NO: 591367 - RNA, 19 nt, Human
agaaccagccucagggacc

SEQ ID NO: 591368 - RNA, 19 nt, Human
agagagcagacacuggguu

SEQ ID NO: 591369 - RNA, 19 nt, Human
agaguuggggugagagagg

SEQ ID NO: 591370 - RNA, 27 nt, Human
agcuguguggccucaagcaaaucacau

SEQ ID NO: 591371 - RNA, 20 nt, Human
agggaaugauagauuggagg

SEQ ID NO: 591372 - RNA, 24 nt, Human
aggggcuugggggagaguuggggu

SEQ ID NO: 591373 - RNA, 22 nt, Human
aggguggacagaggcugagugu

SEQ ID NO: 591374 - RNA, 25 nt, Human
aggugagggcuggaggcagggcugg

SEQ ID NO: 591375 - RNA, 21 nt, Human
agucagaaacugcagaaagua

SEQ ID NO: 591376 - RNA, 20 nt, Human
agugaaagggagaggcugga

SEQ ID NO: 591377 - RNA, 24 nt, Human
agugaaagggagaggcuggagaag

SEQ ID NO: 591378 - RNA, 22 nt, Human
aucugcaccaucugggugcccc

SEQ ID NO: 591379 - RNA, 20 nt, Human
auugaguuaaaugagaaguc

SEQ ID NO: 591380 - RNA, 18 nt, Human
auuggauugguuguaaau

SEQ ID NO: 591381 - RNA, 23 nt, Human
caaaaaacccguggugccccucc

SEQ ID NO: 591382 - RNA, 24 nt, Human
caaaaaccaucuuauaaaaacaaa

SEQ ID NO: 591383 - RNA, 20 nt, Human
caaaaggcuucaaagcacca

SEQ ID NO: 591384 - RNA, 27 nt, Human
caaacaaacaaaaaacaaaaaacccgu

SEQ ID NO: 591385 - RNA, 25 nt, Human
caaauccaaguccaaguccaagucc

SEQ ID NO: 591386 - RNA, 25 nt, Human
caagcucaaauccaaguccaagucc

SEQ ID NO: 591387 - RNA, 25 nt, Human
caaguccaaguccaaguccacgucc

SEQ ID NO: 591388 - RNA, 20 nt, Human
cacacccccaucugccccuu

SEQ ID NO: 591389 - RNA, 23 nt, Human
caccacagacaggcucaggugug

SEQ ID NO: 591390 - RNA, 19 nt, Human
caccaggcagugcguggga

SEQ ID NO: 591391 - RNA, 18 nt, Human
cacuggagucugggcagc

SEQ ID NO: 591392 - RNA, 22 nt, Human
cacuguguucaaggcccacuuc

SEQ ID NO: 591393 - RNA, 20 nt, Human
cagagagcagacacuggguu

SEQ ID NO: 591394 - RNA, 21 nt, Human
cagaugaaaugcugagaccug

SEQ ID NO: 591395 - RNA, 20 nt, Human
cagcccagggcgaggcgccg

SEQ ID NO: 591396 - RNA, 21 nt, Human
cagcccagggcgaggcgccgg

SEQ ID NO: 591397 - RNA, 25 nt, Human
cagcccagggcgaggcgccggggug

SEQ ID NO: 591398 - RNA, 18 nt, Human
caggggugaguggaguug

SEQ ID NO: 591399 - RNA, 23 nt, Human
caguuccuccaugucuccugccc

SEQ ID NO: 591400 - RNA, 21 nt, Human
caucugggugccccccaguuc

SEQ ID NO: 591401 - RNA, 21 nt, Human
ccaccaaaaaucuagcugugu

SEQ ID NO: 591402 - RNA, 22 nt, Human
ccaggcagugcgugggaugcag

SEQ ID NO: 591403 - RNA, 18 nt, Human
ccaguuccuccaugucuc

SEQ ID NO: 591404 - RNA, 21 nt, Human
cccacuuccaccaaaaaucua

SEQ ID NO: 591405 - RNA, 18 nt, Human
cccaucugccccuucaga

SEQ ID NO: 591406 - RNA, 25 nt, Human
cccccaguuccuccaugucuccugc

SEQ ID NO: 591407 - RNA, 19 nt, Human
cccccgccccgccccacuc

SEQ ID NO: 591408 - RNA, 21 nt, Human
ccccgccccgccccacuccuc

SEQ ID NO: 591409 - RNA, 25 nt, Human
ccccgccccgccccacuccuccgaa

SEQ ID NO: 591410 - RNA, 18 nt, Human
cccguggugccccucccc

SEQ ID NO: 591411 - RNA, 18 nt, Human
ccgccccgccccacuccu

SEQ ID NO: 591412 - RNA, 21 nt, Human
ccugagggagcugccccccuc

SEQ ID NO: 591413 - RNA, 19 nt, Human
ccugcccuccuuucuaacc

SEQ ID NO: 591414 - RNA, 21 nt, Human
ccugcgauuagaacccaggaa

SEQ ID NO: 591415 - RNA, 19 nt, Human
ccuggaggagagagcuuga

SEQ ID NO: 591416 - RNA, 23 nt, Human
cgacuacucacacccccaucugc

SEQ ID NO: 591417 - RNA, 25 nt, Human
cgacuccccgacuacucacaccccc

SEQ ID NO: 591418 - RNA, 22 nt, Human
cgccaaggcugagauuaaaaac

SEQ ID NO: 591419 - RNA, 30 nt, Human
cgccaaggcugagauuaaaaacaaacaaag

SEQ ID NO: 591420 - RNA, 23 nt, Human
cuaguucacaguagcuuucccca

SEQ ID NO: 591421 - RNA, 20 nt, Human
cucaaauccaaguccaaguc

SEQ ID NO: 591422 - RNA, 19 nt, Human
cucaccucuacuugccccc

SEQ ID NO: 591423 - RNA, 20 nt, Human
cuccaugucuccugcccucc

SEQ ID NO: 591424 - RNA, 18 nt, Human
cucccccgccccgcccca

SEQ ID NO: 591425 - RNA, 22 nt, Human
cucccccgccccgccccacucc

SEQ ID NO: 591426 - RNA, 18 nt, Human
cuccuccgaaguccgggc

SEQ ID NO: 591427 - RNA, 21 nt, Human
cuccugggccuggcugcuugc

SEQ ID NO: 591428 - RNA, 22 nt, Human
cucucaagcuguacccaccagc

SEQ ID NO: 591429 - RNA, 22 nt, Human
cugcccuccuuucuaacccagg

SEQ ID NO: 591430 - RNA, 22 nt, Human
cugggcuuguuagaggaggcuu

SEQ ID NO: 591431 - RNA, 25 nt, Human
cuguggguggggcugaauuuggggc

SEQ ID NO: 591432 - RNA, 24 nt, Human
gaaaggggcuugggggagaguugg

SEQ ID NO: 591433 - RNA, 18 nt, Human
gaccuggaagggggugga

SEQ ID NO: 591434 - RNA, 21 nt, Human
gacgcgggguugggcacaggc

SEQ ID NO: 591435 - RNA, 21 nt, Human
gacuccccgacuacucacacc

SEQ ID NO: 591436 - RNA, 23 nt, Human
gacuccccgacuacucacacccc

SEQ ID NO: 591437 - RNA, 25 nt, Human
gagccaagcucaaauccaaguccaa

SEQ ID NO: 591438 - RNA, 21 nt, Human
gagcugccccccucucaagcu

SEQ ID NO: 591439 - RNA, 23 nt, Human
gaggcagggcuggccccccaagg

SEQ ID NO: 591440 - RNA, 20 nt, Human
gaugcugggcgaagagugaa

SEQ ID NO: 591441 - RNA, 27 nt, Human
gccaaggcugagauuaaaaacaaacaa

SEQ ID NO: 591442 - RNA, 20 nt, Human
gcccuccuuucuaacccagg

SEQ ID NO: 591443 - RNA, 18 nt, Human
gccggggugggcgcgggg

SEQ ID NO: 591444 - RNA, 21 nt, Human
gcgaggcgccggggugggcgc

SEQ ID NO: 591445 - RNA, 18 nt, Human
gcgccggggugggcgcgg

SEQ ID NO: 591446 - RNA, 20 nt, Human
gcuucauccauccaguuccc

SEQ ID NO: 591447 - RNA, 20 nt, Human
ggacaggggggcaggaugcu

SEQ ID NO: 591448 - RNA, 18 nt, Human
ggagggagguggggaaag

SEQ ID NO: 591449 - RNA, 19 nt, Human
ggccccacuuuccuggagg

SEQ ID NO: 591450 - RNA, 20 nt, Human
ggcuugggggagaguugggg

SEQ ID NO: 591451 - RNA, 25 nt, Human
ggcuugggggagaguuggggugaag

SEQ ID NO: 591452 - RNA, 21 nt, Human
ggguggggcugaauuuggggc

SEQ ID NO: 591453 - RNA, 22 nt, Human
ggguugggcacaggcugcagug

SEQ ID NO: 591454 - RNA, 23 nt, Human
guagggaaugauagauuggaggg

SEQ ID NO: 591455 - RNA, 23 nt, Human
gugacugaguuggggccccacuu

SEQ ID NO: 591456 - RNA, 24 nt, Human
uaagagaggcauuggcaaguggug

SEQ ID NO: 591457 - RNA, 18 nt, Human
uagaaccagccucaggga

SEQ ID NO: 591458 - RNA, 19 nt, Human
uagaacccaggaauccugc

SEQ ID NO: 591459 - RNA, 24 nt, Human
uauaaaaacaaaaggcuucaaagc

SEQ ID NO: 591460 - RNA, 20 nt, Human
uauuuuggccuuagagagua

SEQ ID NO: 591461 - RNA, 18 nt, Human
uccaugucuccugcccuc

SEQ ID NO: 591462 - RNA, 19 nt, Human
ucccaauaagagaacgagg

SEQ ID NO: 591463 - RNA, 21 nt, Human
ucucuguggguggggcugaau

SEQ ID NO: 591464 - RNA, 19 nt, Human
ucugggugccccccaguuc

SEQ ID NO: 591465 - RNA, 23 nt, Human
ugaaaccacaagccuuccaacug

SEQ ID NO: 591466 - RNA, 23 nt, Human
ugaaaugcugagaccugauccuc

SEQ ID NO: 591467 - RNA, 18 nt, Human
ugaagggcaguagcuuag

SEQ ID NO: 591468 - RNA, 26 nt, Human
ugagauuaaaaacaaacaaacaaaaa

SEQ ID NO: 591469 - RNA, 20 nt, Human
ugagggcuggaggcagggcu

SEQ ID NO: 591470 - RNA, 22 nt, Human
ugagggcuggaggcagggcugg

SEQ ID NO: 591471 - RNA, 19 nt, Human
ugagguggauggagccguc

SEQ ID NO: 591472 - RNA, 18 nt, Human
ugaguagaaaggggcuug

SEQ ID NO: 591473 - RNA, 24 nt, Human
ugcagacgcgggguugggcacagg

SEQ ID NO: 591474 - RNA, 23 nt, Human
ugcuugcauuugggauggugggg

SEQ ID NO: 591475 - RNA, 23 nt, Human
ugcuuuaagagaggcauuggcaa

SEQ ID NO: 591476 - RNA, 23 nt, Human
uggaaggggguggagugacugag

SEQ ID NO: 591477 - RNA, 24 nt, Human
uggaaggggguggagugacugagu

SEQ ID NO: 591478 - RNA, 23 nt, Human
uggagaagagaggaaggccccag

SEQ ID NO: 591479 - RNA, 22 nt, Human
uggagggagguggggaaagugu

SEQ ID NO: 591480 - RNA, 20 nt, Human
uggaggugauggggauacag

SEQ ID NO: 591481 - RNA, 20 nt, Human
uggcaagugguggugguggu

SEQ ID NO: 591482 - RNA, 18 nt, Human
uggcccagugaagggcag

SEQ ID NO: 591483 - RNA, 19 nt, Human
uggcccgagcucgcggcag

SEQ ID NO: 591484 - RNA, 22 nt, Human
ugggagcuccaugccugugggg

SEQ ID NO: 591485 - RNA, 23 nt, Human
ugggaugggccugauguccugcu

SEQ ID NO: 591486 - RNA, 18 nt, Human
ugggaugguggggugggg

SEQ ID NO: 591487 - RNA, 21 nt, Human
uggggccccacuuuccuggag

SEQ ID NO: 591488 - RNA, 20 nt, Human
ugggggagaguuggggugag

SEQ ID NO: 591489 - RNA, 23 nt, Human
ugggggccagaggaacuccuggg

SEQ ID NO: 591490 - RNA, 19 nt, Human
uggggugagagaggugagg

SEQ ID NO: 591491 - RNA, 20 nt, Human
uggggugggguugccagccu

SEQ ID NO: 591492 - RNA, 25 nt, Human
ugggguugccagccuugaccacagg

SEQ ID NO: 591493 - RNA, 28 nt, Human
ugggugccccccaguuccuccaugucuc

SEQ ID NO: 591494 - RNA, 18 nt, Human
uggguggggcugaauuug

SEQ ID NO: 591495 - RNA, 18 nt, Human
ugguggagaccacauagg

SEQ ID NO: 591496 - RNA, 18 nt, Human
ugguggugguggugugug

SEQ ID NO: 591497 - RNA, 19 nt, Human
ugguggugugugaauaugg

SEQ ID NO: 591498 - RNA, 19 nt, Human
ugugaauaugguggagacc

SEQ ID NO: 591499 - RNA, 20 nt, Human
uguggaggugauggggauac

SEQ ID NO: 591500 - RNA, 25 nt, Human
ugugggggccagaggaacuccuggg

SEQ ID NO: 591501 - RNA, 22 nt, Human
uuacagucagaaacugcagaaa

SEQ ID NO: 591502 - RNA, 19 nt, Human
uucucuguggguggggcug

SEQ ID NO: 591503 - RNA, 26 nt, Human
uucucuguggguggggcugaauuugg

SEQ ID NO: 591504 - RNA, 24 nt, Human
uuucacagaugaaaugcugagacc

SEQ ID NO: 591505 - RNA, 21 nt, Human
uuuuacagucagaaacugcag

SEQ ID NO: 591506 - RNA, 24 nt, Human
aaagugcugggauuacaggcguga

SEQ ID NO: 591507 - RNA, 21 nt, Human
aaaugauucuccugccucagc

SEQ ID NO: 591508 - RNA, 24 nt, Human
aaauggacuuguaacaucauaaac

SEQ ID NO: 591509 - RNA, 21 nt, Human
aagcagagguucauauuaaga

SEQ ID NO: 591510 - RNA, 19 nt, Human
aagugcugggauuacaggc

SEQ ID NO: 591511 - RNA, 19 nt, Human
aagugcugggauuacaggc

SEQ ID NO: 591512 - RNA, 26 nt, Human
aagugcugggauuacaggcgugagcc

SEQ ID NO: 591513 - RNA, 22 nt, Human
aaucuccacucacugcaaccuc

SEQ ID NO: 591514 - RNA, 21 nt, Human
acaguccaaauugccuggugg

SEQ ID NO: 591515 - RNA, 22 nt, Human
acauguccaagacaguaccaaa

SEQ ID NO: 591516 - RNA, 26 nt, Human
accacauugcugauuuccaaaggucc

SEQ ID NO: 591517 - RNA, 24 nt, Human
accauguuggucaggcuggucuug

SEQ ID NO: 591518 - RNA, 23 nt, Human
accucaaccucccaaagugcugg

SEQ ID NO: 591519 - RNA, 21 nt, Human
acgggguuucaccauguuggu

SEQ ID NO: 591520 - RNA, 23 nt, Human
acgggguuucaccauguugguca

SEQ ID NO: 591521 - RNA, 24 nt, Human
acgggguuucaccauguuggucag

SEQ ID NO: 591522 - RNA, 25 nt, Human
acuccauugaccaggcuggagugca

SEQ ID NO: 591523 - RNA, 24 nt, Human
agaacauguccaagacaguaccaa

SEQ ID NO: 591524 - RNA, 22 nt, Human
agacugaaauucauuaagucug

SEQ ID NO: 591525 - RNA, 25 nt, Human
aggcuggagugcagugguacaaucu

SEQ ID NO: 591526 - RNA, 19 nt, Human
aguagcugggauuacaggc

SEQ ID NO: 591527 - RNA, 19 nt, Human
agugcagugguacaaucuc

SEQ ID NO: 591528 - RNA, 18 nt, Human
agugcugggauuacaggc

SEQ ID NO: 591529 - RNA, 27 nt, Human
aucaucaucaacaucaucauggucuua

SEQ ID NO: 591530 - RNA, 18 nt, Human
augaagacauucuuuccu

SEQ ID NO: 591531 - RNA, 24 nt, Human
augauucuccugccucagccuccc

SEQ ID NO: 591532 - RNA, 18 nt, Human
auucuccugccucagccu

SEQ ID NO: 591533 - RNA, 24 nt, Human
auuuuuguauuuuuaguagagacg

SEQ ID NO: 591534 - RNA, 24 nt, Human
caaagugcugggauuacaggcgug

SEQ ID NO: 591535 - RNA, 24 nt, Human
caaccucagccucccggguugaaa

SEQ ID NO: 591536 - RNA, 23 nt, Human
caagacaguaccaaagacaggau

SEQ ID NO: 591537 - RNA, 26 nt, Human
caaguucaaauccaagcuccaucacc

SEQ ID NO: 591538 - RNA, 24 nt, Human
caccacacccagcuaauuuuugua

SEQ ID NO: 591539 - RNA, 21 nt, Human
caccauguuggucaggcuggu

SEQ ID NO: 591540 - RNA, 23 nt, Human
caccauguuggucaggcuggucu

SEQ ID NO: 591541 - RNA, 24 nt, Human
caccauguuggucaggcuggucuu

SEQ ID NO: 591542 - RNA, 21 nt, Human
cacccaccucaaccucccaaa

SEQ ID NO: 591543 - RNA, 22 nt, Human
cacccaccucaaccucccaaag

SEQ ID NO: 591544 - RNA, 23 nt, Human
cacccaccucaaccucccaaagu

SEQ ID NO: 591545 - RNA, 20 nt, Human
cacugcaaccucagccuccc

SEQ ID NO: 591546 - RNA, 21 nt, Human
cacugcaaccucagccucccg

SEQ ID NO: 591547 - RNA, 23 nt, Human
cacugcaaccucagccucccggg

SEQ ID NO: 591548 - RNA, 22 nt, Human
cagccucccggguugaaaugau

SEQ ID NO: 591549 - RNA, 24 nt, Human
cauguuggucaggcuggucuugaa

SEQ ID NO: 591550 - RNA, 21 nt, Human
cauugaccaggcuggagugca

SEQ ID NO: 591551 - RNA, 25 nt, Human
ccaaagguccucuuaaugucaguac

SEQ ID NO: 591552 - RNA, 22 nt, Human
ccaaagugcugggauuacaggc

SEQ ID NO: 591553 - RNA, 22 nt, Human
ccaaagugcugggauuacaggc

SEQ ID NO: 591554 - RNA, 24 nt, Human
ccaaagugcugggauuacaggcgu

SEQ ID NO: 591555 - RNA, 19 nt, Human
ccaagacaguaccaaagac

SEQ ID NO: 591556 - RNA, 18 nt, Human
ccaagcggggcaguggcc

SEQ ID NO: 591557 - RNA, 20 nt, Human
ccaccacacccagcuaauuu

SEQ ID NO: 591558 - RNA, 26 nt, Human
ccacccaccucaaccucccaaagugc

SEQ ID NO: 591559 - RNA, 18 nt, Human
ccagaugaagaagcagag

SEQ ID NO: 591560 - RNA, 24 nt, Human
cccacucacacaaauggaagaaca

SEQ ID NO: 591561 - RNA, 25 nt, Human
cccacucacacaaauggaagaacaa

SEQ ID NO: 591562 - RNA, 23 nt, Human
cccgaguagcugggauuacaggc

SEQ ID NO: 591563 - RNA, 24 nt, Human
cccgaguagcugggauuacaggcg

SEQ ID NO: 591564 - RNA, 18 nt, Human
cccgccaccagcccggag

SEQ ID NO: 591565 - RNA, 22 nt, Human
ccgaguagcugggauuacaggc

SEQ ID NO: 591566 - RNA, 24 nt, Human
ccgaguagcugggauuacaggcgu

SEQ ID NO: 591567 - RNA, 24 nt, Human
ccucccggguugaaaugauucucc

SEQ ID NO: 591568 - RNA, 22 nt, Human
ccugaccucaugauccacccac

SEQ ID NO: 591569 - RNA, 23 nt, Human
ccugccucagccucccgaguagc

SEQ ID NO: 591570 - RNA, 24 nt, Human
cgggguuucaccauguuggucagg

SEQ ID NO: 591571 - RNA, 20 nt, Human
cguaugccaccacacccagc

SEQ ID NO: 591572 - RNA, 23 nt, Human
cuaauuuuuguauuuuuaguaga

SEQ ID NO: 591573 - RNA, 24 nt, Human
cucacugcaaccucagccucccgg

SEQ ID NO: 591574 - RNA, 24 nt, Human
cucagccucccgaguagcugggau

SEQ ID NO: 591575 - RNA, 18 nt, Human
cuccugaccucaugaucc

SEQ ID NO: 591576 - RNA, 22 nt, Human
cuccugccucagccucccgagu

SEQ ID NO: 591577 - RNA, 23 nt, Human
cugccucagccucccgaguagcu

SEQ ID NO: 591578 - RNA, 18 nt, Human
gacaguaccaaagacagg

SEQ ID NO: 591579 - RNA, 22 nt, Human
gaccucaugauccacccaccuc

SEQ ID NO: 591580 - RNA, 24 nt, Human
gaccucaugauccacccaccucaa

SEQ ID NO: 591581 - RNA, 23 nt, Human
gagacgggguuucaccauguugg

SEQ ID NO: 591582 - RNA, 24 nt, Human
gagacgggguuucaccauguuggu

SEQ ID NO: 591583 - RNA, 26 nt, Human
gaguagcugggauuacaggcguaugc

SEQ ID NO: 591584 - RNA, 19 nt, Human
gauacaguaacccucagca

SEQ ID NO: 591585 - RNA, 18 nt, Human
gauuacaggcguaugcca

SEQ ID NO: 591586 - RNA, 18 nt, Human
gauuacaggcgugagcca

SEQ ID NO: 591587 - RNA, 21 nt, Human
gauuacaggcgugagccacca

SEQ ID NO: 591588 - RNA, 22 nt, Human
gauuacaggcgugagccaccac

SEQ ID NO: 591589 - RNA, 21 nt, Human
gauucuccugccucagccucc

SEQ ID NO: 591590 - RNA, 23 nt, Human
gcuggucuugaacuccugaccuc

SEQ ID NO: 591591 - RNA, 22 nt, Human
ggagucgcacuccauugaccag

SEQ ID NO: 591592 - RNA, 19 nt, Human
ggauuacaggcguaugcca

SEQ ID NO: 591593 - RNA, 19 nt, Human
ggauuacaggcgugagcca

SEQ ID NO: 591594 - RNA, 24 nt, Human
ggcuggucuugaacuccugaccuc

SEQ ID NO: 591595 - RNA, 23 nt, Human
gggguuucaccauguuggucagg

SEQ ID NO: 591596 - RNA, 23 nt, Human
ggguugaaaugauucuccugccu

SEQ ID NO: 591597 - RNA, 19 nt, Human
ggucuugaacuccugaccu

SEQ ID NO: 591598 - RNA, 23 nt, Human
guagagacgggguuucaccaugu

SEQ ID NO: 591599 - RNA, 18 nt, Human
guagcugggauuacaggc

SEQ ID NO: 591600 - RNA, 19 nt, Human
guaugccaccacacccagc

SEQ ID NO: 591601 - RNA, 18 nt, Human
uaacccucagcaagacac

SEQ ID NO: 591602 - RNA, 24 nt, Human
uaauuuuuguauuuuuaguagaga

SEQ ID NO: 591603 - RNA, 24 nt, Human
uacaggcguaugccaccacaccca

SEQ ID NO: 591604 - RNA, 22 nt, Human
uacaggcgugagccaccacgcc

SEQ ID NO: 591605 - RNA, 22 nt, Human
uacaggcgugagccaccacgcc

SEQ ID NO: 591606 - RNA, 23 nt, Human
uacaggcgugagccaccacgccu

SEQ ID NO: 591607 - RNA, 19 nt, Human
uacaguaacccucagcaag

SEQ ID NO: 591608 - RNA, 22 nt, Human
uacaguucucucccaaaaugga

SEQ ID NO: 591609 - RNA, 24 nt, Human
uaccaaagacaggauucaaagaca

SEQ ID NO: 591610 - RNA, 21 nt, Human
uaccagaaucaucaucaacau

SEQ ID NO: 591611 - RNA, 22 nt, Human
uagagacgggguuucaccaugu

SEQ ID NO: 591612 - RNA, 19 nt, Human
uagcaguuaacauugauac

SEQ ID NO: 591613 - RNA, 24 nt, Human
uaguagagacgggguuucaccaug

SEQ ID NO: 591614 - RNA, 26 nt, Human
uaguagagacgggguuucaccauguu

SEQ ID NO: 591615 - RNA, 20 nt, Human
uaucucaaauuacuuaucug

SEQ ID NO: 591616 - RNA, 18 nt, Human
uaugcccauacacaaauu

SEQ ID NO: 591617 - RNA, 21 nt, Human
ucaaauccaagcuccaucacc

SEQ ID NO: 591618 - RNA, 18 nt, Human
ucacugcaaccucagccu

SEQ ID NO: 591619 - RNA, 23 nt, Human
ucacugcaaccucagccucccgg

SEQ ID NO: 591620 - RNA, 24 nt, Human
ucacugcaaccucagccucccggg

SEQ ID NO: 591621 - RNA, 20 nt, Human
ucagccucccgaguagcugg

SEQ ID NO: 591622 - RNA, 18 nt, Human
uccagaugaagaagcaga

SEQ ID NO: 591623 - RNA, 19 nt, Human
uccauugaccaggcuggag

SEQ ID NO: 591624 - RNA, 24 nt, Human
ucccaaagugcugggauuacaggc

SEQ ID NO: 591625 - RNA, 24 nt, Human
ucccgaguagcugggauuacaggc

SEQ ID NO: 591626 - RNA, 24 nt, Human
ucccggguugaaaugauucuccug

SEQ ID NO: 591627 - RNA, 24 nt, Human
ucgcacuccauugaccaggcugga

SEQ ID NO: 591628 - RNA, 21 nt, Human
ucuugaacuccugaccucaug

SEQ ID NO: 591629 - RNA, 18 nt, Human
ugaagaagcagagguuca

SEQ ID NO: 591630 - RNA, 24 nt, Human
ugaccaggcuggagugcaguggua

SEQ ID NO: 591631 - RNA, 24 nt, Human
ugauccacccaccucaaccuccca

SEQ ID NO: 591632 - RNA, 24 nt, Human
ugccucagccucccgaguagcugg

SEQ ID NO: 591633 - RNA, 24 nt, Human
ugcugggauuacaggcgugagcca

SEQ ID NO: 591634 - RNA, 18 nt, Human
uggagugcagugguacaa

SEQ ID NO: 591635 - RNA, 19 nt, Human
uggagugcagugguacaau

SEQ ID NO: 591636 - RNA, 21 nt, Human
ugggauuacaggcguaugcca

SEQ ID NO: 591637 - RNA, 22 nt, Human
ugggauuacaggcguaugccac

SEQ ID NO: 591638 - RNA, 24 nt, Human
ugggauuacaggcguaugccacca

SEQ ID NO: 591639 - RNA, 18 nt, Human
ugggauuacaggcgugag

SEQ ID NO: 591640 - RNA, 19 nt, Human
ugggauuacaggcgugagc

SEQ ID NO: 591641 - RNA, 22 nt, Human
ugggauuacaggcgugagccac

SEQ ID NO: 591642 - RNA, 23 nt, Human
ugggauuacaggcgugagccacc

SEQ ID NO: 591643 - RNA, 24 nt, Human
ugggauuacaggcgugagccacca

SEQ ID NO: 591644 - RNA, 24 nt, Human
ugguacaaucuccacucacugcaa

SEQ ID NO: 591645 - RNA, 24 nt, Human
uggucaggcuggucuugaacuccu

SEQ ID NO: 591646 - RNA, 22 nt, Human
uguaaaauggagauaauaguac

SEQ ID NO: 591647 - RNA, 21 nt, Human
uguauuuuuaguagagacggg

SEQ ID NO: 591648 - RNA, 22 nt, Human
uguucaggcuccacuccuggag

SEQ ID NO: 591649 - RNA, 18 nt, Human
uuaguagagacgggguuu

SEQ ID NO: 591650 - RNA, 22 nt, Human
uuaguagagacgggguuucacc

SEQ ID NO: 591651 - RNA, 24 nt, Human
uuaguagagacgggguuucaccau

SEQ ID NO: 591652 - RNA, 21 nt, Human
uuauguucaggcuccacuccu

SEQ ID NO: 591653 - RNA, 24 nt, Human
uuucaccauguuggucaggcuggu

SEQ ID NO: 591654 - RNA, 24 nt, Human
uuuuuaguagagacgggguuucac

SEQ ID NO: 591655 - RNA, 20 nt, Human
uuuuuguauuuuuaguagag

SEQ ID NO: 591656 - RNA, 21 nt, Human
aaccaugaggagaaaagaguu

SEQ ID NO: 591657 - RNA, 18 nt, Human
accaugaggagaaaagag

SEQ ID NO: 591658 - RNA, 19 nt, Human
acccucauucucauuuucc

SEQ ID NO: 591659 - RNA, 18 nt, Human
agaaccaugaggagaaaa

SEQ ID NO: 591660 - RNA, 21 nt, Human
agguguugaaggauuagaacc

SEQ ID NO: 591661 - RNA, 20 nt, Human
augcaguaggaacaggaguu

SEQ ID NO: 591662 - RNA, 22 nt, Human
cacaauuucuccaggauuaccc

SEQ ID NO: 591663 - RNA, 26 nt, Human
caguaggaacaggaguugcagcaggu

SEQ ID NO: 591664 - RNA, 21 nt, Human
gaaaggucuucauucucuguu

SEQ ID NO: 591665 - RNA, 19 nt, Human
gaugcaguaggaacaggag

SEQ ID NO: 591666 - RNA, 22 nt, Human
gcauguggucggcauggaggua

SEQ ID NO: 591667 - RNA, 20 nt, Human
ggagaaaagaguugacuugc

SEQ ID NO: 591668 - RNA, 22 nt, Human
ggauuacccucauucucauuuu

SEQ ID NO: 591669 - RNA, 21 nt, Human
ggguggaaaauguuugauucu

SEQ ID NO: 591670 - RNA, 18 nt, Human
ugaaggaggugguuugga

SEQ ID NO: 591671 - RNA, 27 nt, Human
ugcaguaggaacaggaguugcagcagg

SEQ ID NO: 591672 - RNA, 20 nt, Human
uggccagcuucacauuuguc

SEQ ID NO: 591673 - RNA, 20 nt, Human
uggcccaagaauucgugcag

SEQ ID NO: 591674 - RNA, 21 nt, Human
uuagaaccaugaggagaaaag

SEQ ID NO: 591675 - RNA, 22 nt, Human
uuaggaguauauggagguggag

SEQ ID NO: 591676 - RNA, 18 nt, Human
uuccuacaggauuaggag

SEQ ID NO: 591677 - RNA, 20 nt, Human
uucucuguuccuacaggauu

SEQ ID NO: 591678 - RNA, 24 nt, Human
uugaaggaggugguuuggauggcc

SEQ ID NO: 591679 - RNA, 19 nt, Human
uugaaggauuagaaccaug

SEQ ID NO: 591680 - RNA, 20 nt, Human
uugcagcagguguugaagga

SEQ ID NO: 591681 - RNA, 18 nt, Human
uugccuucguuaguacau

SEQ ID NO: 591682 - RNA, 19 nt, Human
uuugucagauuguucauug

SEQ ID NO: 591683 - RNA, 22 nt, Human
aaagaaagauaugcuuguggca

SEQ ID NO: 591684 - RNA, 24 nt, Human
aaagugcugggauuacaggcguga

SEQ ID NO: 591685 - RNA, 19 nt, Human
aagcagcugggauuacaga

SEQ ID NO: 591686 - RNA, 26 nt, Human
aagcagcugggauuacagacgccugc

SEQ ID NO: 591687 - RNA, 22 nt, Human
aagccaacccugaugcuccugg

SEQ ID NO: 591688 - RNA, 22 nt, Human
aaguagcagugcugccggggcc

SEQ ID NO: 591689 - RNA, 19 nt, Human
aagugcugggauuacaggc

SEQ ID NO: 591690 - RNA, 19 nt, Human
aagugcugggauuacaggc

SEQ ID NO: 591691 - RNA, 26 nt, Human
aagugcugggauuacaggcgugagcc

SEQ ID NO: 591692 - RNA, 21 nt, Human
acacauacacacauauacaca

SEQ ID NO: 591693 - RNA, 21 nt, Human
acauacacacauauacacaca

SEQ ID NO: 591694 - RNA, 24 nt, Human
acaugcccaggcagaguccaugug

SEQ ID NO: 591695 - RNA, 24 nt, Human
acugccucagccucccaagcagcu

SEQ ID NO: 591696 - RNA, 21 nt, Human
acugugcuuggggaaacucca

SEQ ID NO: 591697 - RNA, 31 nt, Human
acuuaaaauacacauacacacauauacacag

SEQ ID NO: 591698 - RNA, 23 nt, Human
agccggcuccaauggcgccucca

SEQ ID NO: 591699 - RNA, 25 nt, Human
aggcuggagugcaguggcaugaucu

SEQ ID NO: 591700 - RNA, 26 nt, Human
aggguagaccuuuucccuuuagaggu

SEQ ID NO: 591701 - RNA, 22 nt, Human
aguagagaugggguuucaccau

SEQ ID NO: 591702 - RNA, 18 nt, Human
agugcaguggcaugaucu

SEQ ID NO: 591703 - RNA, 18 nt, Human
agugcaguggcaugaucu

SEQ ID NO: 591704 - RNA, 24 nt, Human
agugcaguggcaugaucugugcuc

SEQ ID NO: 591705 - RNA, 23 nt, Human
agugcugccggggccuggcccag

SEQ ID NO: 591706 - RNA, 18 nt, Human
agugcugggauuacaggc

SEQ ID NO: 591707 - RNA, 24 nt, Human
auauacacacacucucacacgcag

SEQ ID NO: 591708 - RNA, 24 nt, Human
augggguuucaccauauuggccag

SEQ ID NO: 591709 - RNA, 18 nt, Human
auuggccaggguggucuc

SEQ ID NO: 591710 - RNA, 24 nt, Human
caaagugcugggauuacaggcgug

SEQ ID NO: 591711 - RNA, 28 nt, Human
caagugauccgcaugccucggacuccca

SEQ ID NO: 591712 - RNA, 22 nt, Human
caagugauucuacugccucagc

SEQ ID NO: 591713 - RNA, 22 nt, Human
cacagccagaauccccaagauc

SEQ ID NO: 591714 - RNA, 18 nt, Human
caccauauuggccagggu

SEQ ID NO: 591715 - RNA, 22 nt, Human
caccauauuggccagggugguc

SEQ ID NO: 591716 - RNA, 24 nt, Human
caccauauuggccaggguggucuc

SEQ ID NO: 591717 - RNA, 19 nt, Human
cagaauccccaagaucaaa

SEQ ID NO: 591718 - RNA, 23 nt, Human
cagacgccugccaccacgcccgg

SEQ ID NO: 591719 - RNA, 21 nt, Human
cagcacccggcagcggcgcug

SEQ ID NO: 591720 - RNA, 23 nt, Human
cagccgggcucgccagccaagcc

SEQ ID NO: 591721 - RNA, 23 nt, Human
cagccucccaagcagcugggauu

SEQ ID NO: 591722 - RNA, 19 nt, Human
caggguagaccuuuucccu

SEQ ID NO: 591723 - RNA, 23 nt, Human
caguuuguucuaauuucucacca

SEQ ID NO: 591724 - RNA, 26 nt, Human
cauccuaacuuacgauucauauucug

SEQ ID NO: 591725 - RNA, 22 nt, Human
caugcucccaagccaacccuga

SEQ ID NO: 591726 - RNA, 22 nt, Human
ccaaagugcugggauuacaggc

SEQ ID NO: 591727 - RNA, 22 nt, Human
ccaaagugcugggauuacaggc

SEQ ID NO: 591728 - RNA, 24 nt, Human
ccaaagugcugggauuacaggcgu

SEQ ID NO: 591729 - RNA, 19 nt, Human
ccacugcgcccagcccaaa

SEQ ID NO: 591730 - RNA, 20 nt, Human
ccacugcgcccagcccaaau

SEQ ID NO: 591731 - RNA, 18 nt, Human
ccaggguucaagugauuc

SEQ ID NO: 591732 - RNA, 23 nt, Human
ccaggguucaagugauucuacug

SEQ ID NO: 591733 - RNA, 25 nt, Human
cccaagaucaaaaaaaaaauuuuug

SEQ ID NO: 591734 - RNA, 19 nt, Human
cccaagcagcugggauuac

SEQ ID NO: 591735 - RNA, 20 nt, Human
ccgcaugccucggacuccca

SEQ ID NO: 591736 - RNA, 26 nt, Human
ccggcagcggcgcuggccccgccuuc

SEQ ID NO: 591737 - RNA, 23 nt, Human
ccgucuccaguuuguucuaauuu

SEQ ID NO: 591738 - RNA, 18 nt, Human
ccugaccucaagugaucc

SEQ ID NO: 591739 - RNA, 19 nt, Human
ccugaccucaagugauccg

SEQ ID NO: 591740 - RNA, 21 nt, Human
ccugauacccagauaugugac

SEQ ID NO: 591741 - RNA, 24 nt, Human
cggcuccaauggcgccuccagcac

SEQ ID NO: 591742 - RNA, 24 nt, Human
cguuuuguugcccaggcuggagug

SEQ ID NO: 591743 - RNA, 21 nt, Human
cucaagugauccgcaugccuc

SEQ ID NO: 591744 - RNA, 19 nt, Human
cuccaggguucaagugauu

SEQ ID NO: 591745 - RNA, 24 nt, Human
cucccaagccaacccugaugcucc

SEQ ID NO: 591746 - RNA, 24 nt, Human
cucguuuuguugcccaggcuggag

SEQ ID NO: 591747 - RNA, 20 nt, Human
cugcaaccgccaccuccagg

SEQ ID NO: 591748 - RNA, 23 nt, Human
cuuuguuguauuuuuaguagaga

SEQ ID NO: 591749 - RNA, 24 nt, Human
gaccucaagugauccgcaugccuc

SEQ ID NO: 591750 - RNA, 23 nt, Human
gagacgaagucucguuuuguugc

SEQ ID NO: 591751 - RNA, 24 nt, Human
gagacgaagucucguuuuguugcc

SEQ ID NO: 591752 - RNA, 23 nt, Human
gagaugggguuucaccauauugg

SEQ ID NO: 591753 - RNA, 24 nt, Human
gagaugggguuucaccauauuggc

SEQ ID NO: 591754 - RNA, 22 nt, Human
gagcucuaugauaauuguguga

SEQ ID NO: 591755 - RNA, 18 nt, Human
gauuacagacgccugcca

SEQ ID NO: 591756 - RNA, 18 nt, Human
gauuacaggcgugagcca

SEQ ID NO: 591757 - RNA, 22 nt, Human
gauuacaggcgugagccacugc

SEQ ID NO: 591758 - RNA, 22 nt, Human
gauuacaggcgugagccacugc

SEQ ID NO: 591759 - RNA, 21 nt, Human
gauucuacugccucagccucc

SEQ ID NO: 591760 - RNA, 22 nt, Human
gcaaccgccaccuccaggguuc

SEQ ID NO: 591761 - RNA, 21 nt, Human
gcagaaacguuuaaguguucu

SEQ ID NO: 591762 - RNA, 24 nt, Human
gccaccuccaggguucaagugauu

SEQ ID NO: 591763 - RNA, 24 nt, Human
gcccaggcuggagugcaguggcau

SEQ ID NO: 591764 - RNA, 18 nt, Human
gcgcccagcccaaauuau

SEQ ID NO: 591765 - RNA, 18 nt, Human
gcucaccucucaugcucc

SEQ ID NO: 591766 - RNA, 24 nt, Human
gcuggagugcaguggcaugaucug

SEQ ID NO: 591767 - RNA, 18 nt, Human
gggguuucaccauauugg

SEQ ID NO: 591768 - RNA, 22 nt, Human
gggguuucaccauauuggccag

SEQ ID NO: 591769 - RNA, 23 nt, Human
gguggucucgaacuccugaccuc

SEQ ID NO: 591770 - RNA, 18 nt, Human
guccaugugucaauggcc

SEQ ID NO: 591771 - RNA, 24 nt, Human
gucucguuuuguugcccaggcugg

SEQ ID NO: 591772 - RNA, 22 nt, Human
gugagccacugcgcccagccca

SEQ ID NO: 591773 - RNA, 24 nt, Human
gugauucuacugccucagccuccc

SEQ ID NO: 591774 - RNA, 24 nt, Human
uaacaauaccuacacauaaaaaca

SEQ ID NO: 591775 - RNA, 20 nt, Human
uaacaugcccaggcagaguc

SEQ ID NO: 591776 - RNA, 24 nt, Human
uaaccuaacaugcccaggcagagu

SEQ ID NO: 591777 - RNA, 23 nt, Human
uacagacgccugccaccacgccc

SEQ ID NO: 591778 - RNA, 19 nt, Human
uacaggcgugagccacugc

SEQ ID NO: 591779 - RNA, 24 nt, Human
uacaggcgugagccacugcgccca

SEQ ID NO: 591780 - RNA, 22 nt, Human
uaccauaauugucgugcaccaa

SEQ ID NO: 591781 - RNA, 30 nt, Human
uagaccaagcaaauguuuuuuuaccauaaa

SEQ ID NO: 591782 - RNA, 19 nt, Human
uaguagagaugggguuuca

SEQ ID NO: 591783 - RNA, 23 nt, Human
uaguagagaugggguuucaccau

SEQ ID NO: 591784 - RNA, 26 nt, Human
uaguagagaugggguuucaccauauu

SEQ ID NO: 591785 - RNA, 24 nt, Human
ucaccauauuggccaggguggucu

SEQ ID NO: 591786 - RNA, 23 nt, Human
ucacugcaaccgccaccuccagg

SEQ ID NO: 591787 - RNA, 24 nt, Human
ucacugcaaccgccaccuccaggg

SEQ ID NO: 591788 - RNA, 27 nt, Human
ucacugcaaccgccaccuccaggguuc

SEQ ID NO: 591789 - RNA, 18 nt, Human
ucagccucccaagcagcu

SEQ ID NO: 591790 - RNA, 20 nt, Human
ucagccucccaagcagcugg

SEQ ID NO: 591791 - RNA, 25 nt, Human
uccaugugaguauuuuaaggcuugg

SEQ ID NO: 591792 - RNA, 24 nt, Human
ucccaaagugcugggauuacaggc

SEQ ID NO: 591793 - RNA, 22 nt, Human
ucgccagccaagccggcuccaa

SEQ ID NO: 591794 - RNA, 19 nt, Human
ucggacucccaaagugcug

SEQ ID NO: 591795 - RNA, 24 nt, Human
ucguuuuguugcccaggcuggagu

SEQ ID NO: 591796 - RNA, 23 nt, Human
ucuaugauaauugugugaaugag

SEQ ID NO: 591797 - RNA, 21 nt, Human
ucuccaguuuguucuaauuuc

SEQ ID NO: 591798 - RNA, 21 nt, Human
ucucgaacuccugaccucaag

SEQ ID NO: 591799 - RNA, 23 nt, Human
ucucguuuuguugcccaggcugg

SEQ ID NO: 591800 - RNA, 24 nt, Human
ucucguuuuguugcccaggcugga

SEQ ID NO: 591801 - RNA, 18 nt, Human
ugaccucaagugauccgc

SEQ ID NO: 591802 - RNA, 24 nt, Human
ugaccucaagugauccgcaugccu

SEQ ID NO: 591803 - RNA, 18 nt, Human
ugaggucaaaccugauac

SEQ ID NO: 591804 - RNA, 22 nt, Human
ugccacugaaggcauauuuugc

SEQ ID NO: 591805 - RNA, 18 nt, Human
ugcccaggcuggagugca

SEQ ID NO: 591806 - RNA, 21 nt, Human
ugcccaggcuggagugcagug

SEQ ID NO: 591807 - RNA, 22 nt, Human
ugcccaggcuggagugcagugg

SEQ ID NO: 591808 - RNA, 24 nt, Human
ugcccaggcuggagugcaguggca

SEQ ID NO: 591809 - RNA, 19 nt, Human
ugccggggccuggcccagg

SEQ ID NO: 591810 - RNA, 24 nt, Human
ugccucagccucccaagcagcugg

SEQ ID NO: 591811 - RNA, 21 nt, Human
ugccucggacucccaaagugc

SEQ ID NO: 591812 - RNA, 24 nt, Human
ugcuccuggcuccaggguagaccu

SEQ ID NO: 591813 - RNA, 24 nt, Human
ugcugggauuacaggcgugagcca

SEQ ID NO: 591814 - RNA, 19 nt, Human
uggagugcaguggcaugau

SEQ ID NO: 591815 - RNA, 21 nt, Human
uggagugcaguggcaugaucu

SEQ ID NO: 591816 - RNA, 22 nt, Human
uggagugcaguggcaugaucug

SEQ ID NO: 591817 - RNA, 24 nt, Human
uggccaggguggucucgaacuccu

SEQ ID NO: 591818 - RNA, 21 nt, Human
ugggauuacagacgccugcca

SEQ ID NO: 591819 - RNA, 22 nt, Human
ugggauuacagacgccugccac

SEQ ID NO: 591820 - RNA, 24 nt, Human
ugggauuacagacgccugccacca

SEQ ID NO: 591821 - RNA, 18 nt, Human
ugggauuacaggcgugag

SEQ ID NO: 591822 - RNA, 19 nt, Human
ugggauuacaggcgugagc

SEQ ID NO: 591823 - RNA, 21 nt, Human
ugggauuacaggcgugagcca

SEQ ID NO: 591824 - RNA, 22 nt, Human
ugggauuacaggcgugagccac

SEQ ID NO: 591825 - RNA, 22 nt, Human
ugggauuacaggcgugagccac

SEQ ID NO: 591826 - RNA, 24 nt, Human
ugggauuacaggcgugagccacug

SEQ ID NO: 591827 - RNA, 26 nt, Human
ugggauuacaggcgugagccacugcg

SEQ ID NO: 591828 - RNA, 24 nt, Human
ugggguuucaccauauuggccagg

SEQ ID NO: 591829 - RNA, 21 nt, Human
uguauuuuuaguagagauggg

SEQ ID NO: 591830 - RNA, 18 nt, Human
uguuacaacuuguauggu

SEQ ID NO: 591831 - RNA, 23 nt, Human
uguuuggaaaaucuaucacagua

SEQ ID NO: 591832 - RNA, 18 nt, Human
uuaguagagaugggguuu

SEQ ID NO: 591833 - RNA, 22 nt, Human
uuaguagagaugggguuucacc

SEQ ID NO: 591834 - RNA, 24 nt, Human
uuaguagagaugggguuucaccau

SEQ ID NO: 591835 - RNA, 23 nt, Human
uucaagugauucuacugccucag

SEQ ID NO: 591836 - RNA, 22 nt, Human
uucacagccagaauccccaaga

SEQ ID NO: 591837 - RNA, 22 nt, Human
uucgcuuuaucaucauaaucac

SEQ ID NO: 591838 - RNA, 24 nt, Human
uugcccaggcuggagugcaguggc

SEQ ID NO: 591839 - RNA, 24 nt, Human
uugcuaaacugcugcuccagguau

SEQ ID NO: 591840 - RNA, 18 nt, Human
uuguauuuuuaguagaga

SEQ ID NO: 591841 - RNA, 23 nt, Human
uuguauuuuuaguagagaugggg

SEQ ID NO: 591842 - RNA, 20 nt, Human
uuuaauaacuaauacaaagg

SEQ ID NO: 591843 - RNA, 19 nt, Human
uuucaccauauuggccagg

SEQ ID NO: 591844 - RNA, 20 nt, Human
uuugcuaaacugcugcucca

SEQ ID NO: 591845 - RNA, 18 nt, Human
uuuguugcccaggcugga

SEQ ID NO: 591846 - RNA, 24 nt, Human
uuuguugcccaggcuggagugcag

SEQ ID NO: 591847 - RNA, 21 nt, Human
uuuguuguauuuuuaguagag

SEQ ID NO: 591848 - RNA, 24 nt, Human
uuuguuguauuuuuaguagagaug

SEQ ID NO: 591849 - RNA, 24 nt, Human
uuuuuaguagagaugggguuucac

SEQ ID NO: 591850 - RNA, 25 nt, Human
aaaaaaaaaucuuuuaauuuuuaua

SEQ ID NO: 591851 - RNA, 20 nt, Human
aaaaaagaggagagcacaaa

SEQ ID NO: 591852 - RNA, 19 nt, Human
aaacaaaaaagaggagagc

SEQ ID NO: 591853 - RNA, 27 nt, Human
aaacaaacaaaaaagaggagagcagcu

SEQ ID NO: 591854 - RNA, 19 nt, Human
aaauaguauuacaguaaca

SEQ ID NO: 591855 - RNA, 23 nt, Human
aacaaaaaagaggagagcacaaa

SEQ ID NO: 591856 - RNA, 26 nt, Human
aacaaacaaauaugaaaaaaaaagua

SEQ ID NO: 591857 - RNA, 19 nt, Human
aacaaggugaaaccucauc

SEQ ID NO: 591858 - RNA, 20 nt, Human
aacaaggugaaaccucaucu

SEQ ID NO: 591859 - RNA, 21 nt, Human
aacaaggugaaaccucaucuc

SEQ ID NO: 591860 - RNA, 18 nt, Human
aagccgaggcggguggau

SEQ ID NO: 591861 - RNA, 24 nt, Human
aauugcuugagccagggagaugga

SEQ ID NO: 591862 - RNA, 24 nt, Human
acagagcaauauuccaucucaaaa

SEQ ID NO: 591863 - RNA, 22 nt, Human
accacuguacuccagccugggc

SEQ ID NO: 591864 - RNA, 23 nt, Human
accacuguacuccagccugggca

SEQ ID NO: 591865 - RNA, 24 nt, Human
accacuguacuccagccugggcaa

SEQ ID NO: 591866 - RNA, 20 nt, Human
accagccugaccaacaaggu

SEQ ID NO: 591867 - RNA, 22 nt, Human
accucaucucuacuaaaaauaa

SEQ ID NO: 591868 - RNA, 21 nt, Human
acgccuauaaucccagcacuu

SEQ ID NO: 591869 - RNA, 21 nt, Human
acuauagucccagcuacuugg

SEQ ID NO: 591870 - RNA, 24 nt, Human
acuguacuccagccugggcaacag

SEQ ID NO: 591871 - RNA, 25 nt, Human
acuguacuccagccugggcaacaga

SEQ ID NO: 591872 - RNA, 19 nt, Human
agauggagguugcagugac

SEQ ID NO: 591873 - RNA, 24 nt, Human
agccugggcaacagagcaauauuc

SEQ ID NO: 591874 - RNA, 21 nt, Human
aggaaaaccauuccguuuuga

SEQ ID NO: 591875 - RNA, 21 nt, Human
aggaaaucagcaaacuaaagc

SEQ ID NO: 591876 - RNA, 20 nt, Human
aggaguuugagaccagccug

SEQ ID NO: 591877 - RNA, 24 nt, Human
aggcaugguggcuuacgccuauaa

SEQ ID NO: 591878 - RNA, 22 nt, Human
aggcggguggauccccugaggu

SEQ ID NO: 591879 - RNA, 26 nt, Human
aggcggguggauccccugaggucagg

SEQ ID NO: 591880 - RNA, 22 nt, Human
agugcaaaacaaacaaaaaaga

SEQ ID NO: 591881 - RNA, 23 nt, Human
auaguauuacaguaacauugcaa

SEQ ID NO: 591882 - RNA, 20 nt, Human
cacagcagguuacuaaaagc

SEQ ID NO: 591883 - RNA, 22 nt, Human
cacagcuccacuuccaucucuu

SEQ ID NO: 591884 - RNA, 19 nt, Human
caccauguaccagaaaaga

SEQ ID NO: 591885 - RNA, 19 nt, Human
cacuguacuccagccuggg

SEQ ID NO: 591886 - RNA, 20 nt, Human
cacuguacuccagccugggc

SEQ ID NO: 591887 - RNA, 21 nt, Human
cacuguacuccagccugggca

SEQ ID NO: 591888 - RNA, 22 nt, Human
cacuguacuccagccugggcaa

SEQ ID NO: 591889 - RNA, 23 nt, Human
cacuguacuccagccugggcaac

SEQ ID NO: 591890 - RNA, 24 nt, Human
cacuguacuccagccugggcaaca

SEQ ID NO: 591891 - RNA, 18 nt, Human
cagaaaagaaugccccuc

SEQ ID NO: 591892 - RNA, 23 nt, Human
cagcaaacuaaagccucaaauca

SEQ ID NO: 591893 - RNA, 24 nt, Human
cagcacuucgggaagccgaggcgg

SEQ ID NO: 591894 - RNA, 21 nt, Human
cagcuccacuuccaucucuuu

SEQ ID NO: 591895 - RNA, 24 nt, Human
cagugaccacuguacuccagccug

SEQ ID NO: 591896 - RNA, 20 nt, Human
ccacuguacuccagccuggg

SEQ ID NO: 591897 - RNA, 21 nt, Human
ccacuguacuccagccugggc

SEQ ID NO: 591898 - RNA, 22 nt, Human
ccacuguacuccagccugggca

SEQ ID NO: 591899 - RNA, 23 nt, Human
ccacuguacuccagccugggcaa

SEQ ID NO: 591900 - RNA, 24 nt, Human
ccacuguacuccagccugggcaac

SEQ ID NO: 591901 - RNA, 23 nt, Human
ccacuuccaucucuucucaggaa

SEQ ID NO: 591902 - RNA, 26 nt, Human
ccauguaccagaaaagaaugccccuc

SEQ ID NO: 591903 - RNA, 24 nt, Human
cccugaggucaggaguuugagacc

SEQ ID NO: 591904 - RNA, 18 nt, Human
ccucagcaacaugggcca

SEQ ID NO: 591905 - RNA, 24 nt, Human
ccugaccaacaaggugaaaccuca

SEQ ID NO: 591906 - RNA, 22 nt, Human
ccugaggucaggaguuugagac

SEQ ID NO: 591907 - RNA, 24 nt, Human
cgaggcggguggauccccugaggu

SEQ ID NO: 591908 - RNA, 23 nt, Human
cgccuauaaucccagcacuucgg

SEQ ID NO: 591909 - RNA, 24 nt, Human
cggguggauccccugaggucagga

SEQ ID NO: 591910 - RNA, 23 nt, Human
cuaaagccucaaaucaaaggugg

SEQ ID NO: 591911 - RNA, 25 nt, Human
cuuacgccuauaaucccagcacuuc

SEQ ID NO: 591912 - RNA, 22 nt, Human
cuuuucauaaaaucuuaguaga

SEQ ID NO: 591913 - RNA, 22 nt, Human
gagaauugcuugagccagggag

SEQ ID NO: 591914 - RNA, 20 nt, Human
gagagcacaaaugaauagcc

SEQ ID NO: 591915 - RNA, 25 nt, Human
gaggcggguggauccccugagguca

SEQ ID NO: 591916 - RNA, 21 nt, Human
gauccccugaggucaggaguu

SEQ ID NO: 591917 - RNA, 24 nt, Human
gauccccugaggucaggaguuuga

SEQ ID NO: 591918 - RNA, 21 nt, Human
gauugacaaagugcaaaacaa

SEQ ID NO: 591919 - RNA, 20 nt, Human
gcaugguggcuuacgccuau

SEQ ID NO: 591920 - RNA, 18 nt, Human
ggaaggacauauuuaaua

SEQ ID NO: 591921 - RNA, 18 nt, Human
ggagguugcagugaccac

SEQ ID NO: 591922 - RNA, 19 nt, Human
ggucaggaguuugagacca

SEQ ID NO: 591923 - RNA, 24 nt, Human
gguggcuuacgccuauaaucccag

SEQ ID NO: 591924 - RNA, 18 nt, Human
guaccagaaaagaaugcc

SEQ ID NO: 591925 - RNA, 24 nt, Human
guacuccagccugggcaacagagc

SEQ ID NO: 591926 - RNA, 18 nt, Human
gucaucuuuucauaaaau

SEQ ID NO: 591927 - RNA, 18 nt, Human
uaacauugcaaacaaaca

SEQ ID NO: 591928 - RNA, 23 nt, Human
uacaaaaugccaaggaaaaccau

SEQ ID NO: 591929 - RNA, 19 nt, Human
uacacagcacacaaauuuu

SEQ ID NO: 591930 - RNA, 18 nt, Human
uacagaugugagagcauu

SEQ ID NO: 591931 - RNA, 18 nt, Human
uaccagaaaagaaugccc

SEQ ID NO: 591932 - RNA, 24 nt, Human
uacgccuauaaucccagcacuucg

SEQ ID NO: 591933 - RNA, 19 nt, Human
uagaaagaaugggaagcca

SEQ ID NO: 591934 - RNA, 22 nt, Human
uagaaagggcucacaaucugag

SEQ ID NO: 591935 - RNA, 27 nt, Human
uaggucuucugauagaagcagcaguuc

SEQ ID NO: 591936 - RNA, 19 nt, Human
uaguagaggugcacuccag

SEQ ID NO: 591937 - RNA, 20 nt, Human
uaguagaggugcacuccagg

SEQ ID NO: 591938 - RNA, 24 nt, Human
uaguagaggugcacuccagggaug

SEQ ID NO: 591939 - RNA, 21 nt, Human
uauugugaugguggccaggaa

SEQ ID NO: 591940 - RNA, 23 nt, Human
uccccugaggucaggaguuugag

SEQ ID NO: 591941 - RNA, 19 nt, Human
ucucuacuaaaaauaaauu

SEQ ID NO: 591942 - RNA, 19 nt, Human
ugaaaccucaucucuacua

SEQ ID NO: 591943 - RNA, 23 nt, Human
ugaauagcccacuuagaagcuga

SEQ ID NO: 591944 - RNA, 22 nt, Human
ugacaaagugcaaaacaaacaa

SEQ ID NO: 591945 - RNA, 23 nt, Human
ugacaaagugcaaaacaaacaaa

SEQ ID NO: 591946 - RNA, 18 nt, Human
ugacauaggagaauugcu

SEQ ID NO: 591947 - RNA, 24 nt, Human
ugacuauagucccagcuacuuggg

SEQ ID NO: 591948 - RNA, 21 nt, Human
ugagaccagccugaccaacaa

SEQ ID NO: 591949 - RNA, 23 nt, Human
ugagaccagccugaccaacaagg

SEQ ID NO: 591950 - RNA, 18 nt, Human
ugaggucaggaguuugag

SEQ ID NO: 591951 - RNA, 20 nt, Human
ugagucucuggagccugaac

SEQ ID NO: 591952 - RNA, 23 nt, Human
ugcaaaacaaacaaaaaagagga

SEQ ID NO: 591953 - RNA, 18 nt, Human
ugcuuauuucugcacucu

SEQ ID NO: 591954 - RNA, 23 nt, Human
uggauccccugaggucaggaguu

SEQ ID NO: 591955 - RNA, 24 nt, Human
uggauccccugaggucaggaguuu

SEQ ID NO: 591956 - RNA, 24 nt, Human
uggcaaauaguauuacaguaacau

SEQ ID NO: 591957 - RNA, 21 nt, Human
uggcuuacgccuauaauccca

SEQ ID NO: 591958 - RNA, 24 nt, Human
uggcuuacgccuauaaucccagca

SEQ ID NO: 591959 - RNA, 25 nt, Human
ugggaagccauuucguuucauaaaa

SEQ ID NO: 591960 - RNA, 24 nt, Human
ugguggcuuacgccuauaauccca

SEQ ID NO: 591961 - RNA, 23 nt, Human
ugucaucuuuucauaaaaucuua

SEQ ID NO: 591962 - RNA, 22 nt, Human
uuaacuuuuaucaugcagccca

SEQ ID NO: 591963 - RNA, 18 nt, Human
uuagccgggcaugguggc

SEQ ID NO: 591964 - RNA, 24 nt, Human
uugcagugaccacuguacuccagc

SEQ ID NO: 591965 - RNA, 24 nt, Human
uugcuugagccagggagauggagg

SEQ ID NO: 591966 - RNA, 23 nt, Human
uugggaggcugacauaggagaau

SEQ ID NO: 591967 - RNA, 23 nt, Human
uuuacaauggcaaauaguauuac

SEQ ID NO: 591968 - RNA, 18 nt, Human
uuuugagucucuggagcc

SEQ ID NO: 591969 - RNA, 19 nt, Human
aaguguugggacuacaggc

SEQ ID NO: 591970 - RNA, 19 nt, Human
aaguguugggacuacaggc

SEQ ID NO: 591971 - RNA, 23 nt, Human
aaguguugggacuacaggcguga

SEQ ID NO: 591972 - RNA, 26 nt, Human
aaguguugggacuacaggcgugagcc

SEQ ID NO: 591973 - RNA, 20 nt, Human
aaucuccgccuccugggcuc

SEQ ID NO: 591974 - RNA, 25 nt, Human
aauuacucaagaccaaaaggcauaa

SEQ ID NO: 591975 - RNA, 24 nt, Human
accagacacaggacacaacaccug

SEQ ID NO: 591976 - RNA, 19 nt, Human
acccaggcuggagugcagu

SEQ ID NO: 591977 - RNA, 23 nt, Human
accccacacauuuuuuguauuuu

SEQ ID NO: 591978 - RNA, 25 nt, Human
acccugggacaccugugguuagcac

SEQ ID NO: 591979 - RNA, 24 nt, Human
acgggaauucgccauguuggccag

SEQ ID NO: 591980 - RNA, 22 nt, Human
acucuugucacccaggcuggag

SEQ ID NO: 591981 - RNA, 24 nt, Human
agacagaggggaaaugaaaacaua

SEQ ID NO: 591982 - RNA, 18 nt, Human
agccuccugaguagcuag

SEQ ID NO: 591983 - RNA, 24 nt, Human
agcgauucuccugccucagccucc

SEQ ID NO: 591984 - RNA, 18 nt, Human
aggaugcuguuaauuacu

SEQ ID NO: 591985 - RNA, 28 nt, Human
aggcauaaaaggagacauauguccaccc

SEQ ID NO: 591986 - RNA, 25 nt, Human
aggcuggagugcagugacacgaucu

SEQ ID NO: 591987 - RNA, 23 nt, Human
aggucuguaguacacccugggga

SEQ ID NO: 591988 - RNA, 24 nt, Human
aggugauccgcccgccucggccuc

SEQ ID NO: 591989 - RNA, 19 nt, Human
aguagcuaggauuacaggc

SEQ ID NO: 591990 - RNA, 18 nt, Human
aguaguugggaagagugg

SEQ ID NO: 591991 - RNA, 20 nt, Human
agugauaaggcaguuuggga

SEQ ID NO: 591992 - RNA, 24 nt, Human
agugcagugacacgaucucggcuc

SEQ ID NO: 591993 - RNA, 22 nt, Human
auuuuuuguauuuuuaguagag

SEQ ID NO: 591994 - RNA, 20 nt, Human
caagcgauucuccugccuca

SEQ ID NO: 591995 - RNA, 22 nt, Human
caagcgauucuccugccucagc

SEQ ID NO: 591996 - RNA, 25 nt, Human
cacaacaccugaggugaaauuucaa

SEQ ID NO: 591997 - RNA, 22 nt, Human
caccaugccuggccccaaccag

SEQ ID NO: 591998 - RNA, 24 nt, Human
cacucuugucacccaggcuggagu

SEQ ID NO: 591999 - RNA, 23 nt, Human
cacugcaaucuccgccuccuggg

SEQ ID NO: 592000 - RNA, 21 nt, Human
cagacacaggacacaacaccu

SEQ ID NO: 592001 - RNA, 19 nt, Human
cagccuccugaguagcuag

SEQ ID NO: 592002 - RNA, 24 nt, Human
cauguuggccaggcuggucuugaa

SEQ ID NO: 592003 - RNA, 19 nt, Human
ccagaacacuucugagcgu

SEQ ID NO: 592004 - RNA, 19 nt, Human
ccauguuggccaggcuggu

SEQ ID NO: 592005 - RNA, 21 nt, Human
ccauguuggccaggcuggucu

SEQ ID NO: 592006 - RNA, 20 nt, Human
cccaguaugcccugccccuu

SEQ ID NO: 592007 - RNA, 24 nt, Human
cccuaaguguugggacuacaggcg

SEQ ID NO: 592008 - RNA, 24 nt, Human
ccgccuccugggcucaagcgauuc

SEQ ID NO: 592009 - RNA, 24 nt, Human
ccuaaguguugggacuacaggcgu

SEQ ID NO: 592010 - RNA, 24 nt, Human
ccuccugggcucaagcgauucucc

SEQ ID NO: 592011 - RNA, 23 nt, Human
ccugaguagcuaggauuacaggc

SEQ ID NO: 592012 - RNA, 24 nt, Human
ccugaguagcuaggauuacaggcu

SEQ ID NO: 592013 - RNA, 22 nt, Human
ccugaucucaggugauccgccc

SEQ ID NO: 592014 - RNA, 23 nt, Human
ccugccucagccuccugaguagc

SEQ ID NO: 592015 - RNA, 24 nt, Human
ccugccucagccuccugaguagcu

SEQ ID NO: 592016 - RNA, 20 nt, Human
ccugggcucaagcgauucuc

SEQ ID NO: 592017 - RNA, 23 nt, Human
ccugggcucaagcgauucuccug

SEQ ID NO: 592018 - RNA, 23 nt, Human
cggaagaguaguugggaagagug

SEQ ID NO: 592019 - RNA, 24 nt, Human
cgggaauucgccauguuggccagg

SEQ ID NO: 592020 - RNA, 24 nt, Human
cucaagcgauucuccugccucagc

SEQ ID NO: 592021 - RNA, 24 nt, Human
cucacugcaaucuccgccuccugg

SEQ ID NO: 592022 - RNA, 24 nt, Human
cuccugaguagcuaggauuacagg

SEQ ID NO: 592023 - RNA, 21 nt, Human
cuccugggcucaagcgauucu

SEQ ID NO: 592024 - RNA, 25 nt, Human
cuccugggcucaagcgauucuccug

SEQ ID NO: 592025 - RNA, 18 nt, Human
cuccugggugcugccucu

SEQ ID NO: 592026 - RNA, 25 nt, Human
cuccugggugcugccucugccuccu

SEQ ID NO: 592027 - RNA, 24 nt, Human
cucuccccaaaucuagcuuccaaa

SEQ ID NO: 592028 - RNA, 20 nt, Human
cugccucugccuccucauau

SEQ ID NO: 592029 - RNA, 18 nt, Human
cugggugcugccucugcc

SEQ ID NO: 592030 - RNA, 24 nt, Human
cuugucacccaggcuggagugcag

SEQ ID NO: 592031 - RNA, 18 nt, Human
gacuacaggcgugagcca

SEQ ID NO: 592032 - RNA, 21 nt, Human
gacuacaggcgugagccacca

SEQ ID NO: 592033 - RNA, 24 nt, Human
gacuacaggcgugagccaccaugc

SEQ ID NO: 592034 - RNA, 22 nt, Human
gagccaccaugccuggccccaa

SEQ ID NO: 592035 - RNA, 26 nt, Human
gaguagcuaggauuacaggcuccugc

SEQ ID NO: 592036 - RNA, 24 nt, Human
gaucucaggugauccgcccgccuc

SEQ ID NO: 592037 - RNA, 24 nt, Human
gccauguuggccaggcuggucuug

SEQ ID NO: 592038 - RNA, 25 nt, Human
gccauguuggccaggcuggucuuga

SEQ ID NO: 592039 - RNA, 24 nt, Human
gcgauucuccugccucagccuccu

SEQ ID NO: 592040 - RNA, 22 nt, Human
ggaauucgccauguuggccagg

SEQ ID NO: 592041 - RNA, 24 nt, Human
ggacuacaggcgugagccaccaug

SEQ ID NO: 592042 - RNA, 22 nt, Human
ggauuacaggcuccugccacca

SEQ ID NO: 592043 - RNA, 21 nt, Human
ggcacagagcacccugggaca

SEQ ID NO: 592044 - RNA, 24 nt, Human
ggcuggucuugaacuccugaucuc

SEQ ID NO: 592045 - RNA, 23 nt, Human
gggaauucgccauguuggccagg

SEQ ID NO: 592046 - RNA, 22 nt, Human
gggcucaagcgauucuccugcc

SEQ ID NO: 592047 - RNA, 19 nt, Human
gguuagcaccauuuaagaa

SEQ ID NO: 592048 - RNA, 24 nt, Human
gugauccgcccgccucggccuccc

SEQ ID NO: 592049 - RNA, 18 nt, Human
guggagcugguggagcug

SEQ ID NO: 592050 - RNA, 22 nt, Human
guggagcugguggagcugucca

SEQ ID NO: 592051 - RNA, 21 nt, Human
uaaaaggagacauauguccac

SEQ ID NO: 592052 - RNA, 23 nt, Human
uacacccuggggaagaaagugau

SEQ ID NO: 592053 - RNA, 22 nt, Human
uacaggcgugagccaccaugcc

SEQ ID NO: 592054 - RNA, 22 nt, Human
uacaggcgugagccaccaugcc

SEQ ID NO: 592055 - RNA, 22 nt, Human
uaggauuacaggcuccugccac

SEQ ID NO: 592056 - RNA, 24 nt, Human
uaggauuacaggcuccugccacca

SEQ ID NO: 592057 - RNA, 25 nt, Human
uaguagagaacgggaauucgccaug

SEQ ID NO: 592058 - RNA, 24 nt, Human
ucacccaggcuggagugcagugac

SEQ ID NO: 592059 - RNA, 23 nt, Human
ucacugcaaucuccgccuccugg

SEQ ID NO: 592060 - RNA, 24 nt, Human
ucacugcaaucuccgccuccuggg

SEQ ID NO: 592061 - RNA, 25 nt, Human
ucacugcaaucuccgccuccugggc

SEQ ID NO: 592062 - RNA, 27 nt, Human
ucacugcaaucuccgccuccugggcuc

SEQ ID NO: 592063 - RNA, 24 nt, Human
ucccuaaguguugggacuacaggc

SEQ ID NO: 592064 - RNA, 19 nt, Human
uccugaguagcuaggauua

SEQ ID NO: 592065 - RNA, 24 nt, Human
uccugaguagcuaggauuacaggc

SEQ ID NO: 592066 - RNA, 21 nt, Human
uccugggcucaagcgauucuc

SEQ ID NO: 592067 - RNA, 24 nt, Human
uccugggcucaagcgauucuccug

SEQ ID NO: 592068 - RNA, 19 nt, Human
uccugggugcugccucugc

SEQ ID NO: 592069 - RNA, 20 nt, Human
uccugguaauugagcuccua

SEQ ID NO: 592070 - RNA, 24 nt, Human
ucgccauguuggccaggcuggucu

SEQ ID NO: 592071 - RNA, 24 nt, Human
ucucacucuugucacccaggcugg

SEQ ID NO: 592072 - RNA, 25 nt, Human
ucucacucuugucacccaggcugga

SEQ ID NO: 592073 - RNA, 19 nt, Human
ucuccgccuccugggcuca

SEQ ID NO: 592074 - RNA, 24 nt, Human
ucuccugccucagccuccugagua

SEQ ID NO: 592075 - RNA, 21 nt, Human
ucugcugaauccuacugucca

SEQ ID NO: 592076 - RNA, 23 nt, Human
ucuugaacuccugaucucaggug

SEQ ID NO: 592077 - RNA, 19 nt, Human
ugacgugaaggcuuucccc

SEQ ID NO: 592078 - RNA, 18 nt, Human
ugaucucaggugauccgc

SEQ ID NO: 592079 - RNA, 24 nt, Human
ugaucucaggugauccgcccgccu

SEQ ID NO: 592080 - RNA, 20 nt, Human
ugcccugccccuugaaaguu

SEQ ID NO: 592081 - RNA, 23 nt, Human
ugccucagccuccugaguagcua

SEQ ID NO: 592082 - RNA, 24 nt, Human
ugccucagccuccugaguagcuag

SEQ ID NO: 592083 - RNA, 21 nt, Human
uggaaggaaagacaucagagc

SEQ ID NO: 592084 - RNA, 21 nt, Human
uggagcugguggagcugucca

SEQ ID NO: 592085 - RNA, 23 nt, Human
uggagugcagugacacgaucucg

SEQ ID NO: 592086 - RNA, 24 nt, Human
uggagugcagugacacgaucucgg

SEQ ID NO: 592087 - RNA, 24 nt, Human
uggccaggcuggucuugaacuccu

SEQ ID NO: 592088 - RNA, 18 nt, Human
ugggacuacaggcgugag

SEQ ID NO: 592089 - RNA, 22 nt, Human
ugggacuacaggcgugagccac

SEQ ID NO: 592090 - RNA, 24 nt, Human
ugggacuacaggcgugagccacca

SEQ ID NO: 592091 - RNA, 25 nt, Human
ugggacuacaggcgugagccaccau

SEQ ID NO: 592092 - RNA, 22 nt, Human
ugggagaaaaaugagguaagcu

SEQ ID NO: 592093 - RNA, 24 nt, Human
ugggcucaagcgauucuccugccu

SEQ ID NO: 592094 - RNA, 25 nt, Human
uuaguagagaacgggaauucgccau

SEQ ID NO: 592095 - RNA, 20 nt, Human
uucgccauguuggccaggcu

SEQ ID NO: 592096 - RNA, 21 nt, Human
uuuuuguauuuuuaguagaga

SEQ ID NO: 592097 - RNA, 18 nt, Human
uuuuuuguauuuuuagua

SEQ ID NO: 592098 - RNA, 24 nt, Human
acugcagacucaaaguggcuacaa

SEQ ID NO: 592099 - RNA, 22 nt, Human
aguggcuacaaaaggaaaagua

SEQ ID NO: 592100 - RNA, 21 nt, Human
caauacccguuuacuaaagac

SEQ ID NO: 592101 - RNA, 21 nt, Human
cuccuaaaccaguucaacuug

SEQ ID NO: 592102 - RNA, 22 nt, Human
gacauuuucagauauuuacaga

SEQ ID NO: 592103 - RNA, 22 nt, Human
uaacucuaggcacuaaucuccu

SEQ ID NO: 592104 - RNA, 26 nt, Human
uaacuugacuuugaaguuuauuauaa

SEQ ID NO: 592105 - RNA, 24 nt, Human
uggcuacaaaaggaaaaguauugu

SEQ ID NO: 592106 - RNA, 23 nt, Human
uuacuaaagacauuuucagauau

SEQ ID NO: 592107 - RNA, 22 nt, Human
aacuccugugggcggcacagcc

SEQ ID NO: 592108 - RNA, 23 nt, Human
aagaauaggaauaagaaaaaugu

SEQ ID NO: 592109 - RNA, 18 nt, Human
agcgaggucacagccugg

SEQ ID NO: 592110 - RNA, 22 nt, Human
aggcagcgaggucacagccugg

SEQ ID NO: 592111 - RNA, 23 nt, Human
aggcagcgaggucacagccuggu

SEQ ID NO: 592112 - RNA, 21 nt, Human
caaggguuggccuggaugugg

SEQ ID NO: 592113 - RNA, 18 nt, Human
cacaccauugaagaggga

SEQ ID NO: 592114 - RNA, 24 nt, Human
caccgcucuccucuccacgucucu

SEQ ID NO: 592115 - RNA, 23 nt, Human
cagaaaauggcccauccaacccc

SEQ ID NO: 592116 - RNA, 19 nt, Human
cauagcuauggcucaagaa

SEQ ID NO: 592117 - RNA, 20 nt, Human
ccaaccccacauccuggccg

SEQ ID NO: 592118 - RNA, 22 nt, Human
ccaaccccacauccuggccggg

SEQ ID NO: 592119 - RNA, 26 nt, Human
ccaaccccacauccuggccgggcgug

SEQ ID NO: 592120 - RNA, 23 nt, Human
ccacaguaugugacaacagaccc

SEQ ID NO: 592121 - RNA, 20 nt, Human
ccacccuggacccccgugcu

SEQ ID NO: 592122 - RNA, 18 nt, Human
ccaggcccugggacgcua

SEQ ID NO: 592123 - RNA, 19 nt, Human
ccaggucccuguggggcga

SEQ ID NO: 592124 - RNA, 19 nt, Human
cccaagagcuaccuggcug

SEQ ID NO: 592125 - RNA, 19 nt, Human
cccaccgcucuccucucca

SEQ ID NO: 592126 - RNA, 23 nt, Human
cccauccaaccccacauccuggc

SEQ ID NO: 592127 - RNA, 25 nt, Human
ccccaagagcuaccuggcugggucu

SEQ ID NO: 592128 - RNA, 26 nt, Human
ccccacauccuggccgggcgugucca

SEQ ID NO: 592129 - RNA, 23 nt, Human
ccccuggcgccugggacaagggu

SEQ ID NO: 592130 - RNA, 27 nt, Human
cccugggacgcuagagaccccaagagc

SEQ ID NO: 592131 - RNA, 20 nt, Human
ccgccgaggggcugggucuu

SEQ ID NO: 592132 - RNA, 19 nt, Human
ccucugggaggaggguggg

SEQ ID NO: 592133 - RNA, 23 nt, Human
ccugggacgcuagagaccccaag

SEQ ID NO: 592134 - RNA, 19 nt, Human
ccugugggcggcacagccc

SEQ ID NO: 592135 - RNA, 27 nt, Human
cggcacagccccaggcugggccucugg

SEQ ID NO: 592136 - RNA, 22 nt, Human
cuggcugggucuauggucaggg

SEQ ID NO: 592137 - RNA, 18 nt, Human
cugugugugccugcaugu

SEQ ID NO: 592138 - RNA, 21 nt, Human
gaacagaaaccaggcccuggg

SEQ ID NO: 592139 - RNA, 22 nt, Human
gaacagaaaccaggcccuggga

SEQ ID NO: 592140 - RNA, 24 nt, Human
gagaucagagccccuggcgccugg

SEQ ID NO: 592141 - RNA, 20 nt, Human
gaggagggugggauggaugg

SEQ ID NO: 592142 - RNA, 21 nt, Human
gagggugggauggaugggaga

SEQ ID NO: 592143 - RNA, 23 nt, Human
gaggguuuggcugccccagacgu

SEQ ID NO: 592144 - RNA, 18 nt, Human
gccccaggcugggccucu

SEQ ID NO: 592145 - RNA, 18 nt, Human
gcugggucuucgccuuua

SEQ ID NO: 592146 - RNA, 20 nt, Human
gcuguguccaucugcaccuc

SEQ ID NO: 592147 - RNA, 19 nt, Human
ggacaaggguuggccugga

SEQ ID NO: 592148 - RNA, 21 nt, Human
ggacaaggguuggccuggaug

SEQ ID NO: 592149 - RNA, 23 nt, Human
ggacgcuagagaccccaagagcu

SEQ ID NO: 592150 - RNA, 23 nt, Human
ggccuugucaaggccucagaggc

SEQ ID NO: 592151 - RNA, 18 nt, Human
ggcggcacagccccaggc

SEQ ID NO: 592152 - RNA, 18 nt, Human
ggcugggucuauggucag

SEQ ID NO: 592153 - RNA, 18 nt, Human
gggaugcguguaggcugu

SEQ ID NO: 592154 - RNA, 19 nt, Human
gggcagggccugggagccg

SEQ ID NO: 592155 - RNA, 20 nt, Human
uaccuggcugggucuauggu

SEQ ID NO: 592156 - RNA, 28 nt, Human
uaggaauaguagaagaauaugccauagc

SEQ ID NO: 592157 - RNA, 22 nt, Human
uauaauaggaauaguagaagaa

SEQ ID NO: 592158 - RNA, 19 nt, Human
ucacagccugguggagggu

SEQ ID NO: 592159 - RNA, 18 nt, Human
ucccaccgcucuccucuc

SEQ ID NO: 592160 - RNA, 22 nt, Human
ucccaccgcucuccucuccacg

SEQ ID NO: 592161 - RNA, 18 nt, Human
ucucuuggcgaugcccag

SEQ ID NO: 592162 - RNA, 21 nt, Human
ucucuuggcgaugcccagcuu

SEQ ID NO: 592163 - RNA, 24 nt, Human
ucucuuggcgaugcccagcuuggg

SEQ ID NO: 592164 - RNA, 20 nt, Human
ugcccagcuugggcugggcg

SEQ ID NO: 592165 - RNA, 19 nt, Human
uggccgggcguguccaggu

SEQ ID NO: 592166 - RNA, 21 nt, Human
uggcgaugcccagcuugggcu

SEQ ID NO: 592167 - RNA, 21 nt, Human
uggcggggguggagaugaggg

SEQ ID NO: 592168 - RNA, 20 nt, Human
ugggaacacaccauugaaga

SEQ ID NO: 592169 - RNA, 18 nt, Human
ugggaggagggugggaug

SEQ ID NO: 592170 - RNA, 19 nt, Human
ugggaggagggugggaugg

SEQ ID NO: 592171 - RNA, 18 nt, Human
ugggauggaugggagauc

SEQ ID NO: 592172 - RNA, 18 nt, Human
ugugcacaggcugugugu

SEQ ID NO: 592173 - RNA, 22 nt, Human
ugugggcggcacagccccaggc

SEQ ID NO: 592174 - RNA, 19 nt, Human
uguggggcgaggguuuggc

SEQ ID NO: 592175 - RNA, 21 nt, Human
ugugugcacaggcugugugug

SEQ ID NO: 592176 - RNA, 29 nt, Human
ugugugccugcaugugugggaugcgugua

SEQ ID NO: 592177 - RNA, 19 nt, Human
ugugugggaugcguguagg

SEQ ID NO: 592178 - RNA, 18 nt, Human
aacccauagccuuggccu

SEQ ID NO: 592179 - RNA, 23 nt, Human
aagaacacuacaaagaguagcuc

SEQ ID NO: 592180 - RNA, 21 nt, Human
aagcaaacuccagacaaugga

SEQ ID NO: 592181 - RNA, 22 nt, Human
aaggcuuuuugucugcagcugc

SEQ ID NO: 592182 - RNA, 19 nt, Human
aagugcccuuauaagagga

SEQ ID NO: 592183 - RNA, 20 nt, Human
acaaagaguagcucucugaa

SEQ ID NO: 592184 - RNA, 22 nt, Human
acaaagaguagcucucugaaca

SEQ ID NO: 592185 - RNA, 23 nt, Human
agaggaggguuuuggcagcugaa

SEQ ID NO: 592186 - RNA, 23 nt, Human
agcugaauucucgguaagaccug

SEQ ID NO: 592187 - RNA, 20 nt, Human
aggcuuuuugucugcagcug

SEQ ID NO: 592188 - RNA, 19 nt, Human
agggguaaggguuuacaga

SEQ ID NO: 592189 - RNA, 21 nt, Human
agguaacccauagccuuggcc

SEQ ID NO: 592190 - RNA, 23 nt, Human
agguaacccauagccuuggccuu

SEQ ID NO: 592191 - RNA, 22 nt, Human
caagcaaacuccagacaaugga

SEQ ID NO: 592192 - RNA, 22 nt, Human
ccaguugucauauaaugaucuc

SEQ ID NO: 592193 - RNA, 20 nt, Human
ccauagccuuggccuuccag

SEQ ID NO: 592194 - RNA, 19 nt, Human
cgguaagaccugcuuuacu

SEQ ID NO: 592195 - RNA, 23 nt, Human
cuuuacucaucaaaguuuagcua

SEQ ID NO: 592196 - RNA, 21 nt, Human
gcuagauuaaaacaagcaaac

SEQ ID NO: 592197 - RNA, 19 nt, Human
ggcuuuuugucugcagcug

SEQ ID NO: 592198 - RNA, 20 nt, Human
gguaaggguuuacagaucag

SEQ ID NO: 592199 - RNA, 23 nt, Human
gugcuaagugcccuuauaagagg

SEQ ID NO: 592200 - RNA, 20 nt, Human
gugugugucuuaaggcuuca

SEQ ID NO: 592201 - RNA, 24 nt, Human
uaacccauagccuuggccuuccag

SEQ ID NO: 592202 - RNA, 25 nt, Human
uagaaaaaacauuuauuauauaugc

SEQ ID NO: 592203 - RNA, 18 nt, Human
uagcucucugaacagcaa

SEQ ID NO: 592204 - RNA, 19 nt, Human
uccagguugaggagggaag

SEQ ID NO: 592205 - RNA, 18 nt, Human
ucuagcuuccuguggcuu

SEQ ID NO: 592206 - RNA, 19 nt, Human
ucucaaucuagcuuccugu

SEQ ID NO: 592207 - RNA, 22 nt, Human
ucucugaacagcaagggguaag

SEQ ID NO: 592208 - RNA, 19 nt, Human
ucugcagcugcuguuuguu

SEQ ID NO: 592209 - RNA, 18 nt, Human
ugaaacuacaaaaaguuc

SEQ ID NO: 592210 - RNA, 19 nt, Human
ugagauacugaguaaagcu

SEQ ID NO: 592211 - RNA, 22 nt, Human
ugcaagaacacuacaaagagua

SEQ ID NO: 592212 - RNA, 22 nt, Human
ugccaaaauuccucaauuugag

SEQ ID NO: 592213 - RNA, 23 nt, Human
ugccaaaauuccucaauuugagg

SEQ ID NO: 592214 - RNA, 20 nt, Human
ugugucuuaaggcuucagaa

SEQ ID NO: 592215 - RNA, 18 nt, Human
uucaaugaaaggggaggg

SEQ ID NO: 592216 - RNA, 28 nt, Human
uucagaaugaaacuacaaaaaguucuga

SEQ ID NO: 592217 - RNA, 22 nt, Human
uugagguaacccauagccuugg

SEQ ID NO: 592218 - RNA, 19 nt, Human
aaaaggucauuuguccaca

SEQ ID NO: 592219 - RNA, 21 nt, Human
aaaccaagaaaacccaaaaga

SEQ ID NO: 592220 - RNA, 19 nt, Human
aaaggccagcggauggccu

SEQ ID NO: 592221 - RNA, 28 nt, Human
aaauccaccuuccuucguaaccaauaaa

SEQ ID NO: 592222 - RNA, 25 nt, Human
aaaucugccucagaccagaggccua

SEQ ID NO: 592223 - RNA, 20 nt, Human
aacauggugaaacccugucu

SEQ ID NO: 592224 - RNA, 21 nt, Human
aacauggugaaacccugucuc

SEQ ID NO: 592225 - RNA, 20 nt, Human
aaccaaggcugacagcaaca

SEQ ID NO: 592226 - RNA, 21 nt, Human
aacccugucucuaccaaaaau

SEQ ID NO: 592227 - RNA, 19 nt, Human
aacggaggagacaagacua

SEQ ID NO: 592228 - RNA, 22 nt, Human
aagcagaaacggaggagacaag

SEQ ID NO: 592229 - RNA, 20 nt, Human
aaggcgccucuacucccgcc

SEQ ID NO: 592230 - RNA, 24 nt, Human
aaucacuugaacccgggaggcgga

SEQ ID NO: 592231 - RNA, 21 nt, Human
acaguccagauccaggagugg

SEQ ID NO: 592232 - RNA, 19 nt, Human
acccaggcuggagugcagu

SEQ ID NO: 592233 - RNA, 18 nt, Human
accccucccuacuuugcu

SEQ ID NO: 592234 - RNA, 24 nt, Human
acccugcuuuuaaaaaaccucgac

SEQ ID NO: 592235 - RNA, 24 nt, Human
acccugucucuaccaaaaauacaa

SEQ ID NO: 592236 - RNA, 18 nt, Human
acgacacuccagccuggg

SEQ ID NO: 592237 - RNA, 24 nt, Human
acgacacuccagccugggcaagag

SEQ ID NO: 592238 - RNA, 21 nt, Human
acgccacgacacuccagccug

SEQ ID NO: 592239 - RNA, 22 nt, Human
acuccagccugggcaagaguga

SEQ ID NO: 592240 - RNA, 18 nt, Human
acucugucacccaggcug

SEQ ID NO: 592241 - RNA, 25 nt, Human
acucugucacccaggcuggagugca

SEQ ID NO: 592242 - RNA, 24 nt, Human
acuugaggucaggaguuugagacc

SEQ ID NO: 592243 - RNA, 22 nt, Human
agaaucacuugaacccgggagg

SEQ ID NO: 592244 - RNA, 18 nt, Human
agcagcugggauuacagg

SEQ ID NO: 592245 - RNA, 24 nt, Human
agccugcagucuucuaggaggcug

SEQ ID NO: 592246 - RNA, 22 nt, Human
agccuggccaacauggugaaac

SEQ ID NO: 592247 - RNA, 24 nt, Human
agccuggccaacauggugaaaccc

SEQ ID NO: 592248 - RNA, 18 nt, Human
agcgucggcgaggcagca

SEQ ID NO: 592249 - RNA, 21 nt, Human
agcuacuggggaagcugaggc

SEQ ID NO: 592250 - RNA, 22 nt, Human
aggaagaaacaguccagaucca

SEQ ID NO: 592251 - RNA, 20 nt, Human
aggaguuugagaccagccug

SEQ ID NO: 592252 - RNA, 18 nt, Human
aggcacgagaaucacuug

SEQ ID NO: 592253 - RNA, 24 nt, Human
aggcacgagaaucacuugaacccg

SEQ ID NO: 592254 - RNA, 21 nt, Human
aggccgaggcggguggaucac

SEQ ID NO: 592255 - RNA, 21 nt, Human
aggcggagguugcagugagcc

SEQ ID NO: 592256 - RNA, 24 nt, Human
aggcggagguugcagugagccgag

SEQ ID NO: 592257 - RNA, 22 nt, Human
aggcggcaaacuaaaaggccaa

SEQ ID NO: 592258 - RNA, 21 nt, Human
aggcggguggaucacuugagg

SEQ ID NO: 592259 - RNA, 23 nt, Human
aggcggguggaucacuugagguc

SEQ ID NO: 592260 - RNA, 26 nt, Human
aggcggguggaucacuugaggucagg

SEQ ID NO: 592261 - RNA, 19 nt, Human
aggcuggagugcaguggca

SEQ ID NO: 592262 - RNA, 21 nt, Human
agugcaguggcacaauuucag

SEQ ID NO: 592263 - RNA, 24 nt, Human
aucacgccacgacacuccagccug

SEQ ID NO: 592264 - RNA, 20 nt, Human
aucacuugaggucaggaguu

SEQ ID NO: 592265 - RNA, 24 nt, Human
aucacuugaggucaggaguuugag

SEQ ID NO: 592266 - RNA, 19 nt, Human
aucccaaaaaaaaaaucug

SEQ ID NO: 592267 - RNA, 21 nt, Human
auuauccugccucagccuccc

SEQ ID NO: 592268 - RNA, 20 nt, Human
caaacuaaaaggccagcgga

SEQ ID NO: 592269 - RNA, 18 nt, Human
caacaggaagaaacaguc

SEQ ID NO: 592270 - RNA, 24 nt, Human
caacauggugaaacccugucucua

SEQ ID NO: 592271 - RNA, 23 nt, Human
caaccuccaccucccaggcccaa

SEQ ID NO: 592272 - RNA, 24 nt, Human
caaccuccaccucccaggcccaag

SEQ ID NO: 592273 - RNA, 24 nt, Human
cacaauuucagcccacugcaaccu

SEQ ID NO: 592274 - RNA, 25 nt, Human
caccuucaauccuagcuacugggga

SEQ ID NO: 592275 - RNA, 23 nt, Human
cacgacacuccagccugggcaag

SEQ ID NO: 592276 - RNA, 24 nt, Human
cacgacacuccagccugggcaaga

SEQ ID NO: 592277 - RNA, 24 nt, Human
cacgccuauaaucccagcacuuug

SEQ ID NO: 592278 - RNA, 21 nt, Human
cacgcgcagccaacccuuggc

SEQ ID NO: 592279 - RNA, 20 nt, Human
cacuccagccugggcaagag

SEQ ID NO: 592280 - RNA, 20 nt, Human
cacuccagccugggcaagag

SEQ ID NO: 592281 - RNA, 22 nt, Human
cacuccagccugggcaagagug

SEQ ID NO: 592282 - RNA, 23 nt, Human
cacucugucacccaggcuggagu

SEQ ID NO: 592283 - RNA, 24 nt, Human
cacucugucacccaggcuggagug

SEQ ID NO: 592284 - RNA, 21 nt, Human
cacugcaaccuccaccuccca

SEQ ID NO: 592285 - RNA, 23 nt, Human
cacuugaggucaggaguuugaga

SEQ ID NO: 592286 - RNA, 22 nt, Human
cagcacuuugagaggccgaggc

SEQ ID NO: 592287 - RNA, 24 nt, Human
cagcacuuugagaggccgaggcgg

SEQ ID NO: 592288 - RNA, 23 nt, Human
cagcccacugcaaccuccaccuc

SEQ ID NO: 592289 - RNA, 23 nt, Human
cagccucccgagcagcugggauu

SEQ ID NO: 592290 - RNA, 18 nt, Human
cagccuuaacaaauagcc

SEQ ID NO: 592291 - RNA, 19 nt, Human
cagggucugcaauguagca

SEQ ID NO: 592292 - RNA, 24 nt, Human
caggugcccaccaccagggaaaac

SEQ ID NO: 592293 - RNA, 19 nt, Human
ccaaaagaauuaaucucau

SEQ ID NO: 592294 - RNA, 19 nt, Human
ccaccucccaggcccaagc

SEQ ID NO: 592295 - RNA, 22 nt, Human
ccacgacacuccagccugggca

SEQ ID NO: 592296 - RNA, 24 nt, Human
ccacgacacuccagccugggcaag

SEQ ID NO: 592297 - RNA, 24 nt, Human
ccacugcaaccuccaccucccagg

SEQ ID NO: 592298 - RNA, 26 nt, Human
ccacugcaaccuccaccucccaggcc

SEQ ID NO: 592299 - RNA, 19 nt, Human
ccagauccaggagugggga

SEQ ID NO: 592300 - RNA, 25 nt, Human
cccaaaaaaaaaaucugccucagac

SEQ ID NO: 592301 - RNA, 24 nt, Human
cccacugcaaccuccaccucccag

SEQ ID NO: 592302 - RNA, 26 nt, Human
ccccaucccaaaaaaaaaaucugccu

SEQ ID NO: 592303 - RNA, 19 nt, Human
cccgagcagcugggauuac

SEQ ID NO: 592304 - RNA, 24 nt, Human
cccgagcagcugggauuacaggug

SEQ ID NO: 592305 - RNA, 21 nt, Human
ccgagcagcugggauuacagg

SEQ ID NO: 592306 - RNA, 23 nt, Human
ccgagcagcugggauuacaggug

SEQ ID NO: 592307 - RNA, 23 nt, Human
ccgccgcacgcgcagccaacccu

SEQ ID NO: 592308 - RNA, 24 nt, Human
ccugccucagccucccgagcagcu

SEQ ID NO: 592309 - RNA, 22 nt, Human
ccuggccaacauggugaaaccc

SEQ ID NO: 592310 - RNA, 24 nt, Human
ccuggccaacauggugaaacccug

SEQ ID NO: 592311 - RNA, 20 nt, Human
ccuuaaaaccaagaaaaccc

SEQ ID NO: 592312 - RNA, 24 nt, Human
cgagaucacgccacgacacuccag

SEQ ID NO: 592313 - RNA, 24 nt, Human
cgagcagcugggauuacaggugcc

SEQ ID NO: 592314 - RNA, 24 nt, Human
cgaggcggguggaucacuugaggu

SEQ ID NO: 592315 - RNA, 24 nt, Human
cgggaggcggagguugcagugagc

SEQ ID NO: 592316 - RNA, 24 nt, Human
cggguggaucacuugaggucagga

SEQ ID NO: 592317 - RNA, 19 nt, Human
cuaauagauucuuccuauu

SEQ ID NO: 592318 - RNA, 20 nt, Human
cuagaaccaaggcugacagc

SEQ ID NO: 592319 - RNA, 22 nt, Human
cucacgccuauaaucccagcac

SEQ ID NO: 592320 - RNA, 24 nt, Human
cucacgccuauaaucccagcacuu

SEQ ID NO: 592321 - RNA, 24 nt, Human
cucacucugucacccaggcuggag

SEQ ID NO: 592322 - RNA, 18 nt, Human
cugcaaccuccaccuccc

SEQ ID NO: 592323 - RNA, 23 nt, Human
cugcaaccuccaccucccaggcc

SEQ ID NO: 592324 - RNA, 19 nt, Human
cugcuuaaaaaaggucauu

SEQ ID NO: 592325 - RNA, 19 nt, Human
cugcuuuuaaaaaaccucg

SEQ ID NO: 592326 - RNA, 24 nt, Human
cuggccaacauggugaaacccugu

SEQ ID NO: 592327 - RNA, 21 nt, Human
cuuaaaaccaagaaaacccaa

SEQ ID NO: 592328 - RNA, 22 nt, Human
gaagaaacaguccagauccagg

SEQ ID NO: 592329 - RNA, 22 nt, Human
gagaugccuuaaaaccaagaaa

SEQ ID NO: 592330 - RNA, 25 nt, Human
gaggcggguggaucacuugagguca

SEQ ID NO: 592331 - RNA, 22 nt, Human
gagguugcagugagccgagauc

SEQ ID NO: 592332 - RNA, 21 nt, Human
gaucacuugaggucaggaguu

SEQ ID NO: 592333 - RNA, 24 nt, Human
gaucacuugaggucaggaguuuga

SEQ ID NO: 592334 - RNA, 20 nt, Human
gcaaccuccaccucccaggc

SEQ ID NO: 592335 - RNA, 18 nt, Human
gcagcugggauuacaggu

SEQ ID NO: 592336 - RNA, 24 nt, Human
gccaacauggugaaacccugucuc

SEQ ID NO: 592337 - RNA, 22 nt, Human
gccacgacacuccagccugggc

SEQ ID NO: 592338 - RNA, 19 nt, Human
gcccaagcaauuauccugc

SEQ ID NO: 592339 - RNA, 24 nt, Human
gccugguuugcugcggcggggaaa

SEQ ID NO: 592340 - RNA, 19 nt, Human
gccuuaacaaauagccugc

SEQ ID NO: 592341 - RNA, 19 nt, Human
gcuggagugcaguggcaca

SEQ ID NO: 592342 - RNA, 18 nt, Human
ggagacaagacuauaaac

SEQ ID NO: 592343 - RNA, 18 nt, Human
ggagguugcagugagccg

SEQ ID NO: 592344 - RNA, 20 nt, Human
ggagguugcagugagccgag

SEQ ID NO: 592345 - RNA, 22 nt, Human
ggagguugcagugagccgagau

SEQ ID NO: 592346 - RNA, 23 nt, Human
ggagguugcagugagccgagauc

SEQ ID NO: 592347 - RNA, 24 nt, Human
ggagguugcagugagccgagauca

SEQ ID NO: 592348 - RNA, 22 nt, Human
ggcggggaaacagucacuuccu

SEQ ID NO: 592349 - RNA, 19 nt, Human
ggcggggugugguggcuca

SEQ ID NO: 592350 - RNA, 22 nt, Human
ggcggggugugguggcucacgg

SEQ ID NO: 592351 - RNA, 24 nt, Human
ggggaagcugaggcacgagaauca

SEQ ID NO: 592352 - RNA, 19 nt, Human
ggucaggaguuugagacca

SEQ ID NO: 592353 - RNA, 24 nt, Human
gguggcucacgccuauaaucccag

SEQ ID NO: 592354 - RNA, 23 nt, Human
ggugugguggcucacgccuauaa

SEQ ID NO: 592355 - RNA, 23 nt, Human
guggcucacgccuauaaucccag

SEQ ID NO: 592356 - RNA, 19 nt, Human
guugcagugagccgagauc

SEQ ID NO: 592357 - RNA, 19 nt, Human
uaaaaaaccucgacuguuu

SEQ ID NO: 592358 - RNA, 19 nt, Human
uaaacuagaaccaaggcug

SEQ ID NO: 592359 - RNA, 19 nt, Human
uaagcagaaacggaggaga

SEQ ID NO: 592360 - RNA, 21 nt, Human
uaccaaaaauacaaaaauuag

SEQ ID NO: 592361 - RNA, 22 nt, Human
uauaaacuagaaccaaggcuga

SEQ ID NO: 592362 - RNA, 23 nt, Human
uauaaacuagaaccaaggcugac

SEQ ID NO: 592363 - RNA, 22 nt, Human
ucacccaggcuggagugcagug

SEQ ID NO: 592364 - RNA, 24 nt, Human
ucacucugucacccaggcuggagu

SEQ ID NO: 592365 - RNA, 24 nt, Human
ucacuugaacccgggaggcggagg

SEQ ID NO: 592366 - RNA, 25 nt, Human
ucagcccacugcaaccuccaccucc

SEQ ID NO: 592367 - RNA, 24 nt, Human
ucagccuuaacaaauagccugcag

SEQ ID NO: 592368 - RNA, 23 nt, Human
ucaucugaugaucacucagucac

SEQ ID NO: 592369 - RNA, 20 nt, Human
uccaccuuccuucguaacca

SEQ ID NO: 592370 - RNA, 21 nt, Human
uccagccugggcaagagugag

SEQ ID NO: 592371 - RNA, 22 nt, Human
uccagccugggcaagagugaga

SEQ ID NO: 592372 - RNA, 22 nt, Human
ucccaaaaaaaaaaucugccuc

SEQ ID NO: 592373 - RNA, 23 nt, Human
ucccgagcagcugggauuacagg

SEQ ID NO: 592374 - RNA, 24 nt, Human
ucccgagcagcugggauuacaggu

SEQ ID NO: 592375 - RNA, 27 nt, Human
ucccuacuuugcugggggaaccuucua

SEQ ID NO: 592376 - RNA, 21 nt, Human
uccuuaacuaccucaagaauc

SEQ ID NO: 592377 - RNA, 20 nt, Human
ucggcgaggcagcaggcucc

SEQ ID NO: 592378 - RNA, 23 nt, Human
ucucacucugucacccaggcugg

SEQ ID NO: 592379 - RNA, 24 nt, Human
ucucacucugucacccaggcugga

SEQ ID NO: 592380 - RNA, 26 nt, Human
ucucacucugucacccaggcuggagu

SEQ ID NO: 592381 - RNA, 24 nt, Human
ucugucacccaggcuggagugcag

SEQ ID NO: 592382 - RNA, 28 nt, Human
ugacagcaacaggaagaaacaguccaga

SEQ ID NO: 592383 - RNA, 23 nt, Human
ugagaccagccuggccaacaugg

SEQ ID NO: 592384 - RNA, 24 nt, Human
ugagaccagccuggccaacauggu

SEQ ID NO: 592385 - RNA, 18 nt, Human
ugagaccccaucccaaaa

SEQ ID NO: 592386 - RNA, 19 nt, Human
ugagaggccgaggcgggug

SEQ ID NO: 592387 - RNA, 24 nt, Human
ugagaggccgaggcggguggauca

SEQ ID NO: 592388 - RNA, 19 nt, Human
ugagccgagaucacgccac

SEQ ID NO: 592389 - RNA, 20 nt, Human
ugaggcacgagaaucacuug

SEQ ID NO: 592390 - RNA, 24 nt, Human
ugaggcacgagaaucacuugaacc

SEQ ID NO: 592391 - RNA, 23 nt, Human
ugaggcggcaaacuaaaaggcca

SEQ ID NO: 592392 - RNA, 18 nt, Human
ugaggucaggaguuugag

SEQ ID NO: 592393 - RNA, 24 nt, Human
ugccucagccucccgagcagcugg

SEQ ID NO: 592394 - RNA, 25 nt, Human
ugccuuaaaaccaagaaaacccaaa

SEQ ID NO: 592395 - RNA, 23 nt, Human
ugcugcggcggggaaacagucac

SEQ ID NO: 592396 - RNA, 18 nt, Human
uggagugcaguggcacaa

SEQ ID NO: 592397 - RNA, 23 nt, Human
uggagugcaguggcacaauuuca

SEQ ID NO: 592398 - RNA, 24 nt, Human
uggagugcaguggcacaauuucag

SEQ ID NO: 592399 - RNA, 23 nt, Human
uggaucacuugaggucaggaguu

SEQ ID NO: 592400 - RNA, 24 nt, Human
uggaucacuugaggucaggaguuu

SEQ ID NO: 592401 - RNA, 26 nt, Human
uggaucacuugaggucaggaguuuga

SEQ ID NO: 592402 - RNA, 20 nt, Human
uggcacaauuucagcccacu

SEQ ID NO: 592403 - RNA, 24 nt, Human
uggcacaauuucagcccacugcaa

SEQ ID NO: 592404 - RNA, 24 nt, Human
uggccaacauggugaaacccuguc

SEQ ID NO: 592405 - RNA, 21 nt, Human
uggcucacgccuauaauccca

SEQ ID NO: 592406 - RNA, 22 nt, Human
uggcucacgccuauaaucccag

SEQ ID NO: 592407 - RNA, 24 nt, Human
uggcucacgccuauaaucccagca

SEQ ID NO: 592408 - RNA, 21 nt, Human
ugggauuacaggugcccacca

SEQ ID NO: 592409 - RNA, 24 nt, Human
ugggauuacaggugcccaccacca

SEQ ID NO: 592410 - RNA, 19 nt, Human
ugggcaagagugagacccc

SEQ ID NO: 592411 - RNA, 24 nt, Human
ugguggcucacgccuauaauccca

SEQ ID NO: 592412 - RNA, 18 nt, Human
uuaaaaccaagaaaaccc

SEQ ID NO: 592413 - RNA, 23 nt, Human
uuaaaaccaagaaaacccaaaag

SEQ ID NO: 592414 - RNA, 19 nt, Human
uuagaaauaucuaaaaauu

SEQ ID NO: 592415 - RNA, 18 nt, Human
uuagccgggcaugguggc

SEQ ID NO: 592416 - RNA, 24 nt, Human
uuccuauucacaaaccaaagauug

SEQ ID NO: 592417 - RNA, 22 nt, Human
uuccuggugcgcaaggcgccuc

SEQ ID NO: 592418 - RNA, 24 nt, Human
uucgagaugccuuaaaaccaagaa

SEQ ID NO: 592419 - RNA, 24 nt, Human
uugaacccgggaggcggagguugc

SEQ ID NO: 592420 - RNA, 18 nt, Human
uugcagugagccgagauc

SEQ ID NO: 592421 - RNA, 20 nt, Human
uugcagugagccgagaucac

SEQ ID NO: 592422 - RNA, 21 nt, Human
uugcagugagccgagaucacg

SEQ ID NO: 592423 - RNA, 19 nt, Human
uuucugguuuuaauccuua

SEQ ID NO: 592424 - RNA, 23 nt, Human
uuuuuuuuuuuugagauggcguc

SEQ ID NO: 592425 - RNA, 26 nt, Human
uuuuuuuuuuuugagauggcgucuca

SEQ ID NO: 592426 - RNA, 18 nt, Human
uuuuuuuuuuuuuuuuug

SEQ ID NO: 592427 - RNA, 19 nt, Human
aaaugccucuugagcagcc

SEQ ID NO: 592428 - RNA, 22 nt, Human
aaccgcuucuccucaaguucca

SEQ ID NO: 592429 - RNA, 26 nt, Human
aacuccacaguuuuccaucucgacac

SEQ ID NO: 592430 - RNA, 22 nt, Human
aagcauuuuuauuguacaucca

SEQ ID NO: 592431 - RNA, 22 nt, Human
aagcugaggacugaucaagcau

SEQ ID NO: 592432 - RNA, 19 nt, Human
aaggcaggauguaaacucu

SEQ ID NO: 592433 - RNA, 20 nt, Human
aagugaccugcaccauaaaa

SEQ ID NO: 592434 - RNA, 23 nt, Human
acaacagagagggcuaauaugaa

SEQ ID NO: 592435 - RNA, 19 nt, Human
acccaagugaccugcacca

SEQ ID NO: 592436 - RNA, 24 nt, Human
acccaagugaccugcaccauaaaa

SEQ ID NO: 592437 - RNA, 21 nt, Human
agacccaagugaccugcacca

SEQ ID NO: 592438 - RNA, 20 nt, Human
agaggacagaaggcaggaug

SEQ ID NO: 592439 - RNA, 22 nt, Human
agaggaccagauuuagcccugu

SEQ ID NO: 592440 - RNA, 21 nt, Human
agauuugaaagccacaaugcc

SEQ ID NO: 592441 - RNA, 26 nt, Human
agccaaggguggccaguucugccgcc

SEQ ID NO: 592442 - RNA, 27 nt, Human
agccaaggguggccaguucugcuccgc

SEQ ID NO: 592443 - RNA, 20 nt, Human
agcccuguucuuuccaucca

SEQ ID NO: 592444 - RNA, 21 nt, Human
agccugaaagaauauagagcu

SEQ ID NO: 592445 - RNA, 22 nt, Human
aggaagaucugacucagaacca

SEQ ID NO: 592446 - RNA, 21 nt, Human
aucucuuuuagcugcaaucaa

SEQ ID NO: 592447 - RNA, 20 nt, Human
auuuccuuccccuccccacc

SEQ ID NO: 592448 - RNA, 19 nt, Human
caacucucugcaaacagca

SEQ ID NO: 592449 - RNA, 24 nt, Human
caaucaaaaugcagcggccaaaac

SEQ ID NO: 592450 - RNA, 18 nt, Human
caccaaggaagaucugac

SEQ ID NO: 592451 - RNA, 22 nt, Human
caccagcaugcauucuuuccag

SEQ ID NO: 592452 - RNA, 21 nt, Human
cagagagggcuaauaugaagc

SEQ ID NO: 592453 - RNA, 21 nt, Human
cagcacucaagaggcagcagg

SEQ ID NO: 592454 - RNA, 19 nt, Human
cagccugaaagaauauaga

SEQ ID NO: 592455 - RNA, 23 nt, Human
cauccuucuuucaaugcuagagg

SEQ ID NO: 592456 - RNA, 18 nt, Human
caucucgacaccagagga

SEQ ID NO: 592457 - RNA, 20 nt, Human
ccacaaugcccauuuucuag

SEQ ID NO: 592458 - RNA, 18 nt, Human
ccagccugcauucagugu

SEQ ID NO: 592459 - RNA, 19 nt, Human
ccaucagucauguuaaaau

SEQ ID NO: 592460 - RNA, 18 nt, Human
ccugaagacccaagugac

SEQ ID NO: 592461 - RNA, 18 nt, Human
ccugccuccuccacgucc

SEQ ID NO: 592462 - RNA, 23 nt, Human
ccuguggaucuagucaccccaga

SEQ ID NO: 592463 - RNA, 22 nt, Human
ccuugauuuggagaauagaaau

SEQ ID NO: 592464 - RNA, 22 nt, Human
cucaagaggcagcagggccacc

SEQ ID NO: 592465 - RNA, 23 nt, Human
cucagccugaaagaauauagagc

SEQ ID NO: 592466 - RNA, 24 nt, Human
cugcaaagcugaggacugaucaag

SEQ ID NO: 592467 - RNA, 24 nt, Human
cuuucaccagguagacauccuucu

SEQ ID NO: 592468 - RNA, 19 nt, Human
gaagaaucucagccugaaa

SEQ ID NO: 592469 - RNA, 20 nt, Human
gaccacagugcuauaucugg

SEQ ID NO: 592470 - RNA, 18 nt, Human
gaggauaaauacagggcu

SEQ ID NO: 592471 - RNA, 19 nt, Human
gauaacuauuuccuucccc

SEQ ID NO: 592472 - RNA, 21 nt, Human
gcaacucucugcaaacagcag

SEQ ID NO: 592473 - RNA, 19 nt, Human
gcauucagugugaacccau

SEQ ID NO: 592474 - RNA, 18 nt, Human
gcccugccugccuccucc

SEQ ID NO: 592475 - RNA, 18 nt, Human
gccugaaagaauauagag

SEQ ID NO: 592476 - RNA, 20 nt, Human
gcucugggugccuggcccug

SEQ ID NO: 592477 - RNA, 20 nt, Human
ggacccugaagacccaagug

SEQ ID NO: 592478 - RNA, 18 nt, Human
ggcacggcucugggugcc

SEQ ID NO: 592479 - RNA, 18 nt, Human
ggccaaaacauauaaaga

SEQ ID NO: 592480 - RNA, 21 nt, Human
ggccagagagaaauauccugu

SEQ ID NO: 592481 - RNA, 21 nt, Human
gugaaaaauguagauuaauga

SEQ ID NO: 592482 - RNA, 24 nt, Human
uaaagaaauaaaguggagaccaca

SEQ ID NO: 592483 - RNA, 25 nt, Human
uagaaauuaauccagcuacacuagc

SEQ ID NO: 592484 - RNA, 22 nt, Human
uagacauccuucuuucaaugcu

SEQ ID NO: 592485 - RNA, 23 nt, Human
uagaggacagugaaaaauguaga

SEQ ID NO: 592486 - RNA, 23 nt, Human
ucaccagguagacauccuucuuu

SEQ ID NO: 592487 - RNA, 30 nt, Human
ucagagccucuucaacuccacaguuuuccu

SEQ ID NO: 592488 - RNA, 19 nt, Human
ucagucauguuaaaauaua

SEQ ID NO: 592489 - RNA, 21 nt, Human
uccagcuacacuagcugaaug

SEQ ID NO: 592490 - RNA, 22 nt, Human
uccccaccuccaacugcaucuc

SEQ ID NO: 592491 - RNA, 23 nt, Human
ucucugcaaacagcagcaggagu

SEQ ID NO: 592492 - RNA, 24 nt, Human
ucucuggaagagucaaccagcuuu

SEQ ID NO: 592493 - RNA, 19 nt, Human
ucugaaaugccucuugagc

SEQ ID NO: 592494 - RNA, 22 nt, Human
ucugaaaugccucuugagcagc

SEQ ID NO: 592495 - RNA, 22 nt, Human
ucuguuaucucuuuuagcugca

SEQ ID NO: 592496 - RNA, 20 nt, Human
ugaaaaauguagauuaauga

SEQ ID NO: 592497 - RNA, 22 nt, Human
ugaaagccacaaugcccauuuu

SEQ ID NO: 592498 - RNA, 18 nt, Human
ugaaaugccucuugagca

SEQ ID NO: 592499 - RNA, 19 nt, Human
ugaauggaaauauuccuua

SEQ ID NO: 592500 - RNA, 19 nt, Human
ugagcagccaaggguggcc

SEQ ID NO: 592501 - RNA, 21 nt, Human
ugagcagccaaggguggccag

SEQ ID NO: 592502 - RNA, 24 nt, Human
ugauaacuauuuccuuccccuccc

SEQ ID NO: 592503 - RNA, 19 nt, Human
ugcugaacacaugcccucg

SEQ ID NO: 592504 - RNA, 20 nt, Human
ugggugccuggcccugccug

SEQ ID NO: 592505 - RNA, 22 nt, Human
uuaacuagcaaauagccauguu

SEQ ID NO: 592506 - RNA, 19 nt, Human
uuagcugcaaucaaaaugc

SEQ ID NO: 592507 - RNA, 22 nt, Human
uucaacuccacaguuuuccauc

SEQ ID NO: 592508 - RNA, 18 nt, Human
uuccuguggaucuaguca

SEQ ID NO: 592509 - RNA, 20 nt, Human
uugauuguccuuucugggca

SEQ ID NO: 592510 - RNA, 20 nt, Human
uuggccucaucaagguguug

SEQ ID NO: 592511 - RNA, 25 nt, Human
uuuuccaucucgacaccagaggacc

SEQ ID NO: 592512 - RNA, 19 nt, Human
uuuugguuccuguggaucu

SEQ ID NO: 592513 - RNA, 19 nt, Human
aaccuccauucuucaucuc

SEQ ID NO: 592514 - RNA, 22 nt, Human
aagaaggcuuuucuuucuggcc

SEQ ID NO: 592515 - RNA, 21 nt, Human
aggaaaaggaacaauaaacac

SEQ ID NO: 592516 - RNA, 19 nt, Human
aguccuggccuagugaaaa

SEQ ID NO: 592517 - RNA, 23 nt, Human
caaccuccauucuucaucucuca

SEQ ID NO: 592518 - RNA, 18 nt, Human
caacuucuaaguuucucu

SEQ ID NO: 592519 - RNA, 19 nt, Human
caauguaguccuggccuag

SEQ ID NO: 592520 - RNA, 22 nt, Human
caauguaguccuggccuaguga

SEQ ID NO: 592521 - RNA, 22 nt, Human
ccagagacugcuuccuuuguag

SEQ ID NO: 592522 - RNA, 23 nt, Human
ccagauaccaaucagggaaugac

SEQ ID NO: 592523 - RNA, 18 nt, Human
ccccauggcccuugcugc

SEQ ID NO: 592524 - RNA, 20 nt, Human
ccccauggcccuugcugcuu

SEQ ID NO: 592525 - RNA, 18 nt, Human
ccucccaguccaggaugu

SEQ ID NO: 592526 - RNA, 24 nt, Human
cuagugaaaaagaaggcuuuucuu

SEQ ID NO: 592527 - RNA, 18 nt, Human
cuggccuccagagacugc

SEQ ID NO: 592528 - RNA, 21 nt, Human
cuugagaacaugugggauuug

SEQ ID NO: 592529 - RNA, 18 nt, Human
gaacaugugggauuuguc

SEQ ID NO: 592530 - RNA, 25 nt, Human
gacuggccaggacuggaacuuaacg

SEQ ID NO: 592531 - RNA, 18 nt, Human
gauuugucuuugagcccc

SEQ ID NO: 592532 - RNA, 20 nt, Human
gccuccagagacugcuuccu

SEQ ID NO: 592533 - RNA, 18 nt, Human
gugguugcaggcugcuug

SEQ ID NO: 592534 - RNA, 21 nt, Human
ucccugagacaguugcuccug

SEQ ID NO: 592535 - RNA, 22 nt, Human
ucucucaauguaguccuggccu

SEQ ID NO: 592536 - RNA, 21 nt, Human
ucugccuccaccucccagucc

SEQ ID NO: 592537 - RNA, 20 nt, Human
ucuuugagccccauuggcuu

SEQ ID NO: 592538 - RNA, 21 nt, Human
ugagaacaugugggauuuguc

SEQ ID NO: 592539 - RNA, 20 nt, Human
ugccuccaccucccaguccg

SEQ ID NO: 592540 - RNA, 22 nt, Human
ugcuuccuuuguaggaaaagga

SEQ ID NO: 592541 - RNA, 21 nt, Human
uggccaggacuggaacuuaac

SEQ ID NO: 592542 - RNA, 20 nt, Human
uggcuugugauguuuuccuc

SEQ ID NO: 592543 - RNA, 25 nt, Human
uguaggaaaaggaacaauaaacacu

SEQ ID NO: 592544 - RNA, 20 nt, Human
ugucugaggugguugcaggc

SEQ ID NO: 592545 - RNA, 22 nt, Human
aacccuuccggggcuuccgcca

SEQ ID NO: 592546 - RNA, 21 nt, Human
accggcaccugucccagcgcg

SEQ ID NO: 592547 - RNA, 24 nt, Human
agccggacucaacccuuccggggc

SEQ ID NO: 592548 - RNA, 18 nt, Human
agcguccccuuccgggug

SEQ ID NO: 592549 - RNA, 19 nt, Human
agcguccccuuccggguga

SEQ ID NO: 592550 - RNA, 19 nt, Human
aucccccucggccgccgcc

SEQ ID NO: 592551 - RNA, 22 nt, Human
caccccgcuccggugucgggag

SEQ ID NO: 592552 - RNA, 18 nt, Human
cagcacaggagcuggcgg

SEQ ID NO: 592553 - RNA, 21 nt, Human
ccccucggccgccgccgccgc

SEQ ID NO: 592554 - RNA, 20 nt, Human
cccgcucgugcucgcggccg

SEQ ID NO: 592555 - RNA, 21 nt, Human
cccggccccagccacgcucgc

SEQ ID NO: 592556 - RNA, 19 nt, Human
ccgccgccgccgccgcaca

SEQ ID NO: 592557 - RNA, 18 nt, Human
ccgccgccgccgccgccg

SEQ ID NO: 592558 - RNA, 23 nt, Human
ccgcuggacgagcgcucucuccg

SEQ ID NO: 592559 - RNA, 19 nt, Human
ccggugucgggaguggugg

SEQ ID NO: 592560 - RNA, 21 nt, Human
cgccguggccgggguggugcu

SEQ ID NO: 592561 - RNA, 24 nt, Human
cgcgaucauccccuuugcguccug

SEQ ID NO: 592562 - RNA, 18 nt, Human
cggagccggacucaaccc

SEQ ID NO: 592563 - RNA, 18 nt, Human
cgggagugguggugacug

SEQ ID NO: 592564 - RNA, 24 nt, Human
cgguggcccucagucuugcuccug

SEQ ID NO: 592565 - RNA, 21 nt, Human
cucccgggccggcucgcagcc

SEQ ID NO: 592566 - RNA, 19 nt, Human
cuccggggcguggcggucc

SEQ ID NO: 592567 - RNA, 21 nt, Human
cucgccggggcuaggcucagc

SEQ ID NO: 592568 - RNA, 20 nt, Human
cugcgcgggggcugcugggg

SEQ ID NO: 592569 - RNA, 19 nt, Human
cugcucucucuggcgggcu

SEQ ID NO: 592570 - RNA, 26 nt, Human
cugucacuguucuccacacugucgug

SEQ ID NO: 592571 - RNA, 22 nt, Human
gccccuacggccccgguugugg

SEQ ID NO: 592572 - RNA, 23 nt, Human
gccguggaagggcuuccaguccc

SEQ ID NO: 592573 - RNA, 23 nt, Human
gcguggggcgcgccugcgcgggg

SEQ ID NO: 592574 - RNA, 24 nt, Human
gcugagccugucgccguggccggg

SEQ ID NO: 592575 - RNA, 21 nt, Human
ggccgggguggugcuccgggg

SEQ ID NO: 592576 - RNA, 23 nt, Human
gggcaggugcggcgccgccggug

SEQ ID NO: 592577 - RNA, 23 nt, Human
ggggugcggggcgagggcguggg

SEQ ID NO: 592578 - RNA, 21 nt, Human
gggugaacaaggaguggcugc

SEQ ID NO: 592579 - RNA, 21 nt, Human
guccuggcggucgcgcucccg

SEQ ID NO: 592580 - RNA, 21 nt, Human
gugcaguucugucgugggaga

SEQ ID NO: 592581 - RNA, 21 nt, Human
gugcggggcgagggcgugggg

SEQ ID NO: 592582 - RNA, 19 nt, Human
gugcucgcggccgccgugg

SEQ ID NO: 592583 - RNA, 24 nt, Human
uccaccccgcuccggugucgggag

SEQ ID NO: 592584 - RNA, 18 nt, Human
uccaucccccucggccgc

SEQ ID NO: 592585 - RNA, 28 nt, Human
ucccccucggccgccgccgccgccgccg

SEQ ID NO: 592586 - RNA, 20 nt, Human
ucccggccccagccacgcuc

SEQ ID NO: 592587 - RNA, 22 nt, Human
ucccgggccggcucgcagcccc

SEQ ID NO: 592588 - RNA, 19 nt, Human
uccuugugcggccgcucgu

SEQ ID NO: 592589 - RNA, 21 nt, Human
ucgcagccccuacggccccgg

SEQ ID NO: 592590 - RNA, 20 nt, Human
ucgcccucgguguaguggug

SEQ ID NO: 592591 - RNA, 22 nt, Human
ucgcuccaucccccucggccgc

SEQ ID NO: 592592 - RNA, 19 nt, Human
ucgggagugguggugacug

SEQ ID NO: 592593 - RNA, 22 nt, Human
ugacccggcucggcgcucgcuc

SEQ ID NO: 592594 - RNA, 18 nt, Human
ugcaccugcccagagagc

SEQ ID NO: 592595 - RNA, 21 nt, Human
uggcgguccuggcggucgcgc

SEQ ID NO: 592596 - RNA, 20 nt, Human
ugggagaagcggucggggug

SEQ ID NO: 592597 - RNA, 22 nt, Human
uggggugaacaaggaguggcug

SEQ ID NO: 592598 - RNA, 18 nt, Human
ugguaguaccggcaccug

SEQ ID NO: 592599 - RNA, 24 nt, Human
ugucgugggagaagcggucggggu

SEQ ID NO: 592600 - RNA, 22 nt, Human
uugcuuuaggcucuucuagagg

SEQ ID NO: 592601 - RNA, 25 nt, Human
aaaccagccagcaauccucccagac

SEQ ID NO: 592602 - RNA, 23 nt, Human
aacaaacagagcaggaagccaga

SEQ ID NO: 592603 - RNA, 26 nt, Human
aacagagcaggaagccagagaucuau

SEQ ID NO: 592604 - RNA, 19 nt, Human
aaccugcccagggcagaug

SEQ ID NO: 592605 - RNA, 19 nt, Human
aacuccucuuccuugcccc

SEQ ID NO: 592606 - RNA, 21 nt, Human
aacuccucuuccuugccccuc

SEQ ID NO: 592607 - RNA, 24 nt, Human
aagacauggaauccaggagaaagg

SEQ ID NO: 592608 - RNA, 19 nt, Human
aagggacaacagaagccug

SEQ ID NO: 592609 - RNA, 20 nt, Human
aaguggcuguuauaggcagg

SEQ ID NO: 592610 - RNA, 19 nt, Human
acagagcaggaagccagag

SEQ ID NO: 592611 - RNA, 22 nt, Human
acaucuggaaagugagaagcca

SEQ ID NO: 592612 - RNA, 20 nt, Human
accagauccccacaucugga

SEQ ID NO: 592613 - RNA, 21 nt, Human
acccugucuguagcaccugga

SEQ ID NO: 592614 - RNA, 26 nt, Human
acugaaauuuaccagauccccacauc

SEQ ID NO: 592615 - RNA, 20 nt, Human
agaaaacaacuggaggacau

SEQ ID NO: 592616 - RNA, 27 nt, Human
agacaagagauggaaagaagggacccc

SEQ ID NO: 592617 - RNA, 19 nt, Human
agacagcauagagcuuugc

SEQ ID NO: 592618 - RNA, 18 nt, Human
agacugaaagaggcagug

SEQ ID NO: 592619 - RNA, 23 nt, Human
agagaggauagacagcauagagc

SEQ ID NO: 592620 - RNA, 19 nt, Human
agaugagcagcaagaccua

SEQ ID NO: 592621 - RNA, 24 nt, Human
agaugagcagcaagaccuagaugg

SEQ ID NO: 592622 - RNA, 21 nt, Human
agcaaagcaacuuuauuccuu

SEQ ID NO: 592623 - RNA, 22 nt, Human
agcuguaggccuguggacugcc

SEQ ID NO: 592624 - RNA, 18 nt, Human
aggccccagugaacuucu

SEQ ID NO: 592625 - RNA, 22 nt, Human
agggacuguguagcauagggcc

SEQ ID NO: 592626 - RNA, 20 nt, Human
agggcccgccucccggugcu

SEQ ID NO: 592627 - RNA, 20 nt, Human
agugaggggugcaacugaag

SEQ ID NO: 592628 - RNA, 28 nt, Human
auacuggaaucuuccugcaaccggaggg

SEQ ID NO: 592629 - RNA, 25 nt, Human
auccaugugccucccaccccccuuc

SEQ ID NO: 592630 - RNA, 19 nt, Human
augggaacagaguccaggu

SEQ ID NO: 592631 - RNA, 19 nt, Human
auucaauucccuucugcaa

SEQ ID NO: 592632 - RNA, 21 nt, Human
caaccagaacaaacagagcag

SEQ ID NO: 592633 - RNA, 23 nt, Human
caacuccucuuccuugccccucc

SEQ ID NO: 592634 - RNA, 22 nt, Human
caacuuggaucauugggcuaaa

SEQ ID NO: 592635 - RNA, 23 nt, Human
caacuuggaucauugggcuaaag

SEQ ID NO: 592636 - RNA, 22 nt, Human
caccccccuucaguuuucuacu

SEQ ID NO: 592637 - RNA, 22 nt, Human
cacccugagcugcucuggcagg

SEQ ID NO: 592638 - RNA, 23 nt, Human
cacccugagcugcucuggcaggg

SEQ ID NO: 592639 - RNA, 18 nt, Human
caccuggauaaagccuuc

SEQ ID NO: 592640 - RNA, 18 nt, Human
cacgcagggcccgccucc

SEQ ID NO: 592641 - RNA, 23 nt, Human
cagcaauccucccagacgguauc

SEQ ID NO: 592642 - RNA, 21 nt, Human
cagcauagagcuuugccagga

SEQ ID NO: 592643 - RNA, 27 nt, Human
caggaaaccagccagcaauccucccag

SEQ ID NO: 592644 - RNA, 20 nt, Human
caguuguugcuugcgggcuu

SEQ ID NO: 592645 - RNA, 18 nt, Human
cauggcugcagcugcucc

SEQ ID NO: 592646 - RNA, 28 nt, Human
caugugccucccaccccccuucaguuuu

SEQ ID NO: 592647 - RNA, 19 nt, Human
ccaaggcucaggaaccugc

SEQ ID NO: 592648 - RNA, 21 nt, Human
ccagaccagguaugaccacug

SEQ ID NO: 592649 - RNA, 19 nt, Human
ccagccagcaauccuccca

SEQ ID NO: 592650 - RNA, 22 nt, Human
ccaggagaaagggacuugcaca

SEQ ID NO: 592651 - RNA, 24 nt, Human
ccagggcaaccagaacaaacagag

SEQ ID NO: 592652 - RNA, 20 nt, Human
ccaugugccucccacccccc

SEQ ID NO: 592653 - RNA, 18 nt, Human
ccccaaggcucaggaacc

SEQ ID NO: 592654 - RNA, 18 nt, Human
ccccacgcagggcccgcc

SEQ ID NO: 592655 - RNA, 20 nt, Human
cccccucugcugucggcucc

SEQ ID NO: 592656 - RNA, 19 nt, Human
ccccucugcugucggcucc

SEQ ID NO: 592657 - RNA, 18 nt, Human
cccucugcugucggcucc

SEQ ID NO: 592658 - RNA, 21 nt, Human
ccgccgcugcucccugacugc

SEQ ID NO: 592659 - RNA, 23 nt, Human
ccgccgcugcucccugacugccc

SEQ ID NO: 592660 - RNA, 18 nt, Human
ccugcugggcucacucca

SEQ ID NO: 592661 - RNA, 22 nt, Human
ccugguguuuccgcaacagccu

SEQ ID NO: 592662 - RNA, 23 nt, Human
ccuugcaacuuucacuuucccug

SEQ ID NO: 592663 - RNA, 23 nt, Human
cgccaggaaguggcuguuauagg

SEQ ID NO: 592664 - RNA, 23 nt, Human
cucacccaucaugauucuccagg

SEQ ID NO: 592665 - RNA, 24 nt, Human
cucagagccuugaaaugggccccu

SEQ ID NO: 592666 - RNA, 18 nt, Human
cucaggaaccugcccagg

SEQ ID NO: 592667 - RNA, 19 nt, Human
cucucagucuugaaaccca

SEQ ID NO: 592668 - RNA, 22 nt, Human
cucuucccuuucuuggugucug

SEQ ID NO: 592669 - RNA, 20 nt, Human
cugcagcugagggacccuga

SEQ ID NO: 592670 - RNA, 23 nt, Human
cugcugggcucacuccauucggu

SEQ ID NO: 592671 - RNA, 19 nt, Human
cuggagcaggucccauggc

SEQ ID NO: 592672 - RNA, 21 nt, Human
cuggagcaggucccauggcug

SEQ ID NO: 592673 - RNA, 19 nt, Human
cuggucccccaaggcucag

SEQ ID NO: 592674 - RNA, 25 nt, Human
cuuguccugcugggucauuuaaaaa

SEQ ID NO: 592675 - RNA, 20 nt, Human
gaaguggcuguuauaggcag

SEQ ID NO: 592676 - RNA, 24 nt, Human
gaaucugauugguuauuaacccug

SEQ ID NO: 592677 - RNA, 19 nt, Human
gaccgccaggaaguggcug

SEQ ID NO: 592678 - RNA, 18 nt, Human
gacuguguagcauagggc

SEQ ID NO: 592679 - RNA, 18 nt, Human
gagagaagagaggauaga

SEQ ID NO: 592680 - RNA, 18 nt, Human
gagaugagcagcaagacc

SEQ ID NO: 592681 - RNA, 24 nt, Human
gcagcugcuccacccugagcugcu

SEQ ID NO: 592682 - RNA, 20 nt, Human
gcauauuagcauucccagaa

SEQ ID NO: 592683 - RNA, 20 nt, Human
gcuuuccaagugguuuucca

SEQ ID NO: 592684 - RNA, 24 nt, Human
ggaacgcucaucucggccaucccc

SEQ ID NO: 592685 - RNA, 24 nt, Human
ggagacaucuauucaauucccuuc

SEQ ID NO: 592686 - RNA, 23 nt, Human
ggaggaagucccggggcaugggc

SEQ ID NO: 592687 - RNA, 22 nt, Human
ggaggugaacaaggugaaaugc

SEQ ID NO: 592688 - RNA, 24 nt, Human
ggaguuaaaagcaacaacagcuuu

SEQ ID NO: 592689 - RNA, 18 nt, Human
ggcagauggagucucacc

SEQ ID NO: 592690 - RNA, 24 nt, Human
ggcaggcucuccuggaugcuugcu

SEQ ID NO: 592691 - RNA, 22 nt, Human
ggcagggucuauacagagugaa

SEQ ID NO: 592692 - RNA, 19 nt, Human
ggccaacuccucuuccuug

SEQ ID NO: 592693 - RNA, 22 nt, Human
gggaaaagugacugucuggaaa

SEQ ID NO: 592694 - RNA, 24 nt, Human
gggacucgggggaccucucuugcc

SEQ ID NO: 592695 - RNA, 20 nt, Human
gggcaaccagaacaaacaga

SEQ ID NO: 592696 - RNA, 21 nt, Human
guggacugccagguaggagga

SEQ ID NO: 592697 - RNA, 18 nt, Human
guguggguucgcugccuc

SEQ ID NO: 592698 - RNA, 21 nt, Human
uaaaagcaacaacagcuuuau

SEQ ID NO: 592699 - RNA, 19 nt, Human
uaaacaccagaugugcgug

SEQ ID NO: 592700 - RNA, 23 nt, Human
uaagaaacauucaagacauggaa

SEQ ID NO: 592701 - RNA, 18 nt, Human
uaaguggcacaaugaccg

SEQ ID NO: 592702 - RNA, 24 nt, Human
uacaaccaagaaaagagggaagca

SEQ ID NO: 592703 - RNA, 18 nt, Human
uaggcagggguuugcaag

SEQ ID NO: 592704 - RNA, 23 nt, Human
uagggccuugccuggagcagguc

SEQ ID NO: 592705 - RNA, 21 nt, Human
uauacuggaaucuuccugcaa

SEQ ID NO: 592706 - RNA, 22 nt, Human
uaucucaggacaacacucccag

SEQ ID NO: 592707 - RNA, 24 nt, Human
ucaguugaugaugauggauuugag

SEQ ID NO: 592708 - RNA, 22 nt, Human
ucccaccccccuucaguuuucu

SEQ ID NO: 592709 - RNA, 20 nt, Human
ucccaguacauucucuaguu

SEQ ID NO: 592710 - RNA, 18 nt, Human
ucccauggacucaccaag

SEQ ID NO: 592711 - RNA, 19 nt, Human
uccccuggaagggcgggua

SEQ ID NO: 592712 - RNA, 22 nt, Human
ucccggugcucuccgcaggcgg

SEQ ID NO: 592713 - RNA, 18 nt, Human
ucccugugggaacgcuca

SEQ ID NO: 592714 - RNA, 19 nt, Human
ucccuguuuucccacaugu

SEQ ID NO: 592715 - RNA, 25 nt, Human
uccgcaggcggcgcccgcccggccc

SEQ ID NO: 592716 - RNA, 23 nt, Human
uccuaaguggcacaaugaccgcc

SEQ ID NO: 592717 - RNA, 18 nt, Human
uccucacccccagggacu

SEQ ID NO: 592718 - RNA, 22 nt, Human
uccucuggaauccucaccccca

SEQ ID NO: 592719 - RNA, 23 nt, Human
uccuggaugcuugcuggggcgug

SEQ ID NO: 592720 - RNA, 24 nt, Human
ucuccaggugaccaccugcugccu

SEQ ID NO: 592721 - RNA, 24 nt, Human
ucuuguaggccccagugaacuucu

SEQ ID NO: 592722 - RNA, 18 nt, Human
ugaaaugcuguaacacug

SEQ ID NO: 592723 - RNA, 23 nt, Human
ugaaauuuaccagauccccacau

SEQ ID NO: 592724 - RNA, 18 nt, Human
ugacaauacuugucucag

SEQ ID NO: 592725 - RNA, 20 nt, Human
ugagaugagcagcaagaccc

SEQ ID NO: 592726 - RNA, 21 nt, Human
ugaggggugcaacugaagguc

SEQ ID NO: 592727 - RNA, 18 nt, Human
ugaggguggaggaagucc

SEQ ID NO: 592728 - RNA, 23 nt, Human
ugccaagcaguuugccccgcucu

SEQ ID NO: 592729 - RNA, 24 nt, Human
ugcccugcugggcucacuccauuc

SEQ ID NO: 592730 - RNA, 18 nt, Human
ugccucccaccccccuuc

SEQ ID NO: 592731 - RNA, 20 nt, Human
ugcgcgcggccccacgcagg

SEQ ID NO: 592732 - RNA, 22 nt, Human
ugcugauggggcugcacaagug

SEQ ID NO: 592733 - RNA, 19 nt, Human
uggaaucuuccugcaagga

SEQ ID NO: 592734 - RNA, 18 nt, Human
uggaggacauccucugcc

SEQ ID NO: 592735 - RNA, 19 nt, Human
uggaguuaaaagcaacaac

SEQ ID NO: 592736 - RNA, 21 nt, Human
uggcagcagugggaaaaccuc

SEQ ID NO: 592737 - RNA, 25 nt, Human
uggcagcagugggaaaaccucagag

SEQ ID NO: 592738 - RNA, 25 nt, Human
uggcagcaucccgcggaugaucagu

SEQ ID NO: 592739 - RNA, 22 nt, Human
uggccaaggccauccggagacu

SEQ ID NO: 592740 - RNA, 20 nt, Human
uggcugcagcugcuccaccc

SEQ ID NO: 592741 - RNA, 20 nt, Human
ugggaaaagugacugucugg

SEQ ID NO: 592742 - RNA, 22 nt, Human
ugggaaaagugacugucuggaa

SEQ ID NO: 592743 - RNA, 19 nt, Human
ugggcugagcagcaggcuu

SEQ ID NO: 592744 - RNA, 26 nt, Human
ugucucugccgccgcugcucccugac

SEQ ID NO: 592745 - RNA, 20 nt, Human
ugucuggaaagcugggguug

SEQ ID NO: 592746 - RNA, 22 nt, Human
ugucuggaaagcugggguugcu

SEQ ID NO: 592747 - RNA, 24 nt, Human
uguuauaggcagggguuugcaagc

SEQ ID NO: 592748 - RNA, 22 nt, Human
uucacuugcauauuagcauucc

SEQ ID NO: 592749 - RNA, 18 nt, Human
uucccugccccuucugug

SEQ ID NO: 592750 - RNA, 21 nt, Human
uuccuuguggcagcaucccgc

SEQ ID NO: 592751 - RNA, 21 nt, Human
uuucagcuucccccucugcug

SEQ ID NO: 592752 - RNA, 21 nt, Human
uuuccagggcaaccagaacaa

SEQ ID NO: 592753 - RNA, 18 nt, Human
uuucucaggaaaccagcc

SEQ ID NO: 592754 - RNA, 20 nt, Human
uuugugcgucuuuucagcuu

SEQ ID NO: 592755 - RNA, 22 nt, Human
aaacaggaacaaagcaaaagua

SEQ ID NO: 592756 - RNA, 19 nt, Human
aacaaagcaaaaguagaca

SEQ ID NO: 592757 - RNA, 25 nt, Human
aagaaacccaugaacaucuguggac

SEQ ID NO: 592758 - RNA, 22 nt, Human
aagaacagacgaaagaauaggc

SEQ ID NO: 592759 - RNA, 20 nt, Human
aagcccagagggaaagaagc

SEQ ID NO: 592760 - RNA, 25 nt, Human
aagcuccuuucuucaccacucuccu

SEQ ID NO: 592761 - RNA, 23 nt, Human
aagcuggaggccaccucuuaggg

SEQ ID NO: 592762 - RNA, 21 nt, Human
aagguccucacagaagggaaa

SEQ ID NO: 592763 - RNA, 22 nt, Human
aaguccagcguucuggaacuag

SEQ ID NO: 592764 - RNA, 27 nt, Human
aaguggucgugaggacuuguuuagagc

SEQ ID NO: 592765 - RNA, 22 nt, Human
aauaacuuuucaggaaaaaaaa

SEQ ID NO: 592766 - RNA, 20 nt, Human
aaugagagaacacaaagaaa

SEQ ID NO: 592767 - RNA, 24 nt, Human
acacuagaagagaugagaaacagg

SEQ ID NO: 592768 - RNA, 21 nt, Human
acccugaaguacagucucaau

SEQ ID NO: 592769 - RNA, 20 nt, Human
acugauggauaaaaguuuca

SEQ ID NO: 592770 - RNA, 24 nt, Human
agaaacagguggucaucagccuuc

SEQ ID NO: 592771 - RNA, 23 nt, Human
agaaacccaugaacaucugugga

SEQ ID NO: 592772 - RNA, 18 nt, Human
agaagcuggaggccaccu

SEQ ID NO: 592773 - RNA, 21 nt, Human
agcaucaacccugaaguacag

SEQ ID NO: 592774 - RNA, 21 nt, Human
aggaaaaagggaagagcagaa

SEQ ID NO: 592775 - RNA, 22 nt, Human
aggaacaaagcaaaaguagaca

SEQ ID NO: 592776 - RNA, 28 nt, Human
aggaauaauggcaacgugaccgguaccc

SEQ ID NO: 592777 - RNA, 23 nt, Human
aggcaggaaaaagggaagagcag

SEQ ID NO: 592778 - RNA, 30 nt, Human
agugcccacuccucacgccaccaaauggcc

SEQ ID NO: 592779 - RNA, 21 nt, Human
aucgaauuggggauucugacu

SEQ ID NO: 592780 - RNA, 22 nt, Human
augcaaguggaggcggcaacuc

SEQ ID NO: 592781 - RNA, 18 nt, Human
auggaaaaugaugcagug

SEQ ID NO: 592782 - RNA, 22 nt, Human
caaagcaaaaguagacaggaac

SEQ ID NO: 592783 - RNA, 22 nt, Human
caagcuccuuucuucaccacuc

SEQ ID NO: 592784 - RNA, 23 nt, Human
caagcuccuuucuucaccacucc

SEQ ID NO: 592785 - RNA, 23 nt, Human
caaugagcaccccauccuugaag

SEQ ID NO: 592786 - RNA, 18 nt, Human
cacaaagaaacccaugaa

SEQ ID NO: 592787 - RNA, 19 nt, Human
cagaagggaaacaggaaca

SEQ ID NO: 592788 - RNA, 20 nt, Human
cagagggaaagaagcguucc

SEQ ID NO: 592789 - RNA, 22 nt, Human
cagcaucaacccugaaguacag

SEQ ID NO: 592790 - RNA, 23 nt, Human
cagcugugagcccagggccaccu

SEQ ID NO: 592791 - RNA, 25 nt, Human
cagcuuugaaaaaaugagagaacac

SEQ ID NO: 592792 - RNA, 26 nt, Human
cauauauauacauacacacacauugg

SEQ ID NO: 592793 - RNA, 28 nt, Human
cauuuuugucuucuguaucagucaggaa

SEQ ID NO: 592794 - RNA, 21 nt, Human
ccacaaugagcaccccauccc

SEQ ID NO: 592795 - RNA, 24 nt, Human
ccaccaaauggccagcaucaaccc

SEQ ID NO: 592796 - RNA, 18 nt, Human
ccagagguguaaggggag

SEQ ID NO: 592797 - RNA, 20 nt, Human
ccaggcaggaaaaagggaag

SEQ ID NO: 592798 - RNA, 21 nt, Human
ccaggcaggaaaaagggaaga

SEQ ID NO: 592799 - RNA, 22 nt, Human
ccaggcaggaaaaagggaagag

SEQ ID NO: 592800 - RNA, 23 nt, Human
cccacuccucacgccaccaaaug

SEQ ID NO: 592801 - RNA, 24 nt, Human
cccagcuuugaaaaaaugagagaa

SEQ ID NO: 592802 - RNA, 21 nt, Human
cccucuuuccccuuccaaugc

SEQ ID NO: 592803 - RNA, 21 nt, Human
ccucugaguuuuaaagaacuc

SEQ ID NO: 592804 - RNA, 24 nt, Human
cguggcauaggaggaagacggcug

SEQ ID NO: 592805 - RNA, 20 nt, Human
cguuccaggcaggaaaaagg

SEQ ID NO: 592806 - RNA, 24 nt, Human
cugcaaggggugggggauggaaaa

SEQ ID NO: 592807 - RNA, 18 nt, Human
cuucagagagcugaaguc

SEQ ID NO: 592808 - RNA, 18 nt, Human
gaaaaaaugagagaacac

SEQ ID NO: 592809 - RNA, 22 nt, Human
gaagguaaaaguggugcuccuc

SEQ ID NO: 592810 - RNA, 23 nt, Human
gagaacacaaagaaacccaugaa

SEQ ID NO: 592811 - RNA, 22 nt, Human
gagcagaagguaaaaguggugc

SEQ ID NO: 592812 - RNA, 18 nt, Human
gaggaaaugaccaagccc

SEQ ID NO: 592813 - RNA, 19 nt, Human
gaggacgaagguggcaggg

SEQ ID NO: 592814 - RNA, 19 nt, Human
gcagcucuacaacauccuu

SEQ ID NO: 592815 - RNA, 18 nt, Human
gcccacuccucacgccac

SEQ ID NO: 592816 - RNA, 18 nt, Human
gcugcaguucuggugaga

SEQ ID NO: 592817 - RNA, 28 nt, Human
ggggagccuaggaccuacucugaaauac

SEQ ID NO: 592818 - RNA, 26 nt, Human
gucaucagccuucagagagcugaagu

SEQ ID NO: 592819 - RNA, 22 nt, Human
guucacguaacaguagugcacc

SEQ ID NO: 592820 - RNA, 18 nt, Human
guucccucuuuccccuuc

SEQ ID NO: 592821 - RNA, 21 nt, Human
uaaugcaaaagcauauauaua

SEQ ID NO: 592822 - RNA, 19 nt, Human
uacaacauccuugcagaac

SEQ ID NO: 592823 - RNA, 18 nt, Human
uacagcuucagaaacagg

SEQ ID NO: 592824 - RNA, 21 nt, Human
uaccauaggaauaauggcaac

SEQ ID NO: 592825 - RNA, 19 nt, Human
uaccguacagcuucagaaa

SEQ ID NO: 592826 - RNA, 23 nt, Human
uacuucauaaagaugagaaaacu

SEQ ID NO: 592827 - RNA, 19 nt, Human
uagaaaagccacaaugagc

SEQ ID NO: 592828 - RNA, 21 nt, Human
uagaaaagccacaaugagcac

SEQ ID NO: 592829 - RNA, 22 nt, Human
uagaaaagccacaaugagcacc

SEQ ID NO: 592830 - RNA, 23 nt, Human
uagaaaagccacaaugagcaccc

SEQ ID NO: 592831 - RNA, 24 nt, Human
uaguuagugcuucugucucauggg

SEQ ID NO: 592832 - RNA, 22 nt, Human
uauauacauacacacacauugu

SEQ ID NO: 592833 - RNA, 25 nt, Human
uauauauacauacacacacauuggc

SEQ ID NO: 592834 - RNA, 20 nt, Human
uaugagaagacacuuguguu

SEQ ID NO: 592835 - RNA, 21 nt, Human
ucagaacugcuagcagagaca

SEQ ID NO: 592836 - RNA, 24 nt, Human
ucagccuucagagagcugaagucu

SEQ ID NO: 592837 - RNA, 19 nt, Human
ucaggagucugugaugcca

SEQ ID NO: 592838 - RNA, 25 nt, Human
ucaugggccacauuuuacugcaagg

SEQ ID NO: 592839 - RNA, 23 nt, Human
uccucacagaagggaaacaggaa

SEQ ID NO: 592840 - RNA, 23 nt, Human
ucucaauguuggugcuugccaag

SEQ ID NO: 592841 - RNA, 20 nt, Human
ucucuucccuucucacacag

SEQ ID NO: 592842 - RNA, 21 nt, Human
ucugggaggaaacauaagaca

SEQ ID NO: 592843 - RNA, 22 nt, Human
ugaaaaaaugagagaacacaaa

SEQ ID NO: 592844 - RNA, 26 nt, Human
ugaaaaaaugagagaacacaaagaaa

SEQ ID NO: 592845 - RNA, 25 nt, Human
ugacauacacuagaagagaugagaa

SEQ ID NO: 592846 - RNA, 19 nt, Human
ugagagaggcugcagaggu

SEQ ID NO: 592847 - RNA, 21 nt, Human
ugagagaggcugcagagguca

SEQ ID NO: 592848 - RNA, 19 nt, Human
ugaggacgaagguggcagg

SEQ ID NO: 592849 - RNA, 20 nt, Human
ugaggaggggaagguccuca

SEQ ID NO: 592850 - RNA, 22 nt, Human
ugauguuggucccaacacccag

SEQ ID NO: 592851 - RNA, 20 nt, Human
ugcccacuccucacgccacc

SEQ ID NO: 592852 - RNA, 24 nt, Human
ugcggaaucaaaauuggcagauga

SEQ ID NO: 592853 - RNA, 20 nt, Human
ugcuugggaggaaaugacca

SEQ ID NO: 592854 - RNA, 18 nt, Human
uggcagaugagagaggcu

SEQ ID NO: 592855 - RNA, 19 nt, Human
uggcuuaaacaaauuaggu

SEQ ID NO: 592856 - RNA, 24 nt, Human
ugggccacauuuuacugcaagggg

SEQ ID NO: 592857 - RNA, 18 nt, Human
uggugagagcacguggca

SEQ ID NO: 592858 - RNA, 20 nt, Human
uuaucuguguauuuacuccc

SEQ ID NO: 592859 - RNA, 18 nt, Human
uucacaguguuucuaaca

SEQ ID NO: 592860 - RNA, 21 nt, Human
uucacaguguuucuaacaauc

SEQ ID NO: 592861 - RNA, 23 nt, Human
uucacaguguuucuaacaaucag

SEQ ID NO: 592862 - RNA, 19 nt, Human
uucccucguucuauggauc

SEQ ID NO: 592863 - RNA, 25 nt, Human
uucccucuuuccccuuccaaugcuu

SEQ ID NO: 592864 - RNA, 18 nt, Human
uugcugcaguucugguga

SEQ ID NO: 592865 - RNA, 22 nt, Human
uuggccuggagaagcaaguuuc

SEQ ID NO: 592866 - RNA, 19 nt, Human
aaaaacccaguucagucac

SEQ ID NO: 592867 - RNA, 24 nt, Human
aaaacccaguucagucacagaaaa

SEQ ID NO: 592868 - RNA, 21 nt, Human
aaaaggaggcaaauauuggua

SEQ ID NO: 592869 - RNA, 20 nt, Human
aagcuaggaugacucuacgg

SEQ ID NO: 592870 - RNA, 18 nt, Human
aagugugaaaauaaaacc

SEQ ID NO: 592871 - RNA, 25 nt, Human
acagagcaagaauccaagugugaaa

SEQ ID NO: 592872 - RNA, 18 nt, Human
agcucucccaaagaagag

SEQ ID NO: 592873 - RNA, 18 nt, Human
aggaagagauaaagggga

SEQ ID NO: 592874 - RNA, 18 nt, Human
aggaagccauggaucuac

SEQ ID NO: 592875 - RNA, 18 nt, Human
aggaggucuugggaaaca

SEQ ID NO: 592876 - RNA, 23 nt, Human
aggcaggagaggaggaaaugagg

SEQ ID NO: 592877 - RNA, 21 nt, Human
aggggcccaaucuagaaauca

SEQ ID NO: 592878 - RNA, 19 nt, Human
aggggucugugcagucugg

SEQ ID NO: 592879 - RNA, 21 nt, Human
auuaggagucuaggcauguca

SEQ ID NO: 592880 - RNA, 26 nt, Human
cacugcugcaucugagccgggugucc

SEQ ID NO: 592881 - RNA, 20 nt, Human
cagccuccgccgccgcugga

SEQ ID NO: 592882 - RNA, 19 nt, Human
cagcucucccaaagaagag

SEQ ID NO: 592883 - RNA, 22 nt, Human
caggacagcgccagccuccgcc

SEQ ID NO: 592884 - RNA, 25 nt, Human
cagguggagagaaucauucucauga

SEQ ID NO: 592885 - RNA, 21 nt, Human
cagucacuuuucucagaccaa

SEQ ID NO: 592886 - RNA, 20 nt, Human
ccagucccaagcguacucca

SEQ ID NO: 592887 - RNA, 22 nt, Human
ccauaccucuuccuuucuggag

SEQ ID NO: 592888 - RNA, 24 nt, Human
cccauaccucuuccuuucuggagc

SEQ ID NO: 592889 - RNA, 20 nt, Human
ccccagucccaagcguacuc

SEQ ID NO: 592890 - RNA, 20 nt, Human
ccgcacagagcccucccucu

SEQ ID NO: 592891 - RNA, 21 nt, Human
ccuggaucauaauuagcugag

SEQ ID NO: 592892 - RNA, 20 nt, Human
ccuuggacagaagaucaguc

SEQ ID NO: 592893 - RNA, 24 nt, Human
cgcacagagcccucccucucagga

SEQ ID NO: 592894 - RNA, 22 nt, Human
cucacucgcagccccaguccca

SEQ ID NO: 592895 - RNA, 23 nt, Human
cucgcagccccagucccaagcgu

SEQ ID NO: 592896 - RNA, 23 nt, Human
cucuccagcacugcugcaucuga

SEQ ID NO: 592897 - RNA, 18 nt, Human
gaaaaggaggcaaauauu

SEQ ID NO: 592898 - RNA, 19 nt, Human
gaauccaagugugaaaaua

SEQ ID NO: 592899 - RNA, 22 nt, Human
gccccagucccaagcguacucc

SEQ ID NO: 592900 - RNA, 19 nt, Human
gccuccgccgccgcuggac

SEQ ID NO: 592901 - RNA, 21 nt, Human
ggaggucuugggaaacacugg

SEQ ID NO: 592902 - RNA, 20 nt, Human
ggccguguguggcauaaugu

SEQ ID NO: 592903 - RNA, 20 nt, Human
uaggcaugucagaaaaaccc

SEQ ID NO: 592904 - RNA, 20 nt, Human
ucagaccaagugagaucuua

SEQ ID NO: 592905 - RNA, 20 nt, Human
uccaagugugaaaauaaaac

SEQ ID NO: 592906 - RNA, 22 nt, Human
ucccaaagaagagcucucucug

SEQ ID NO: 592907 - RNA, 19 nt, Human
ucccuggcagaguuaaaug

SEQ ID NO: 592908 - RNA, 24 nt, Human
ucuccagcacugcugcaucugagc

SEQ ID NO: 592909 - RNA, 23 nt, Human
ugaaaauaaaaccuccaucuaaa

SEQ ID NO: 592910 - RNA, 24 nt, Human
ugaaaauaaaaccuccaucuaaau

SEQ ID NO: 592911 - RNA, 25 nt, Human
ugaaccaaauguccgcuuccgaacc

SEQ ID NO: 592912 - RNA, 21 nt, Human
ugaaggcaccaaggaagaaau

SEQ ID NO: 592913 - RNA, 20 nt, Human
ugacucccauaccucuuccu

SEQ ID NO: 592914 - RNA, 21 nt, Human
ugacucccauaccucuuccuu

SEQ ID NO: 592915 - RNA, 24 nt, Human
ugacucuuccgcacagagcccucc

SEQ ID NO: 592916 - RNA, 23 nt, Human
ugcagucuggugugagugcaucu

SEQ ID NO: 592917 - RNA, 19 nt, Human
uggugugagugcaucucca

SEQ ID NO: 592918 - RNA, 21 nt, Human
ugucagaaaaacccaguucag

SEQ ID NO: 592919 - RNA, 25 nt, Human
uguccagcgccaaguccuggaucau

SEQ ID NO: 592920 - RNA, 23 nt, Human
ugucucaucacccaagcaagguc

SEQ ID NO: 592921 - RNA, 18 nt, Human
ugugaaaauaaaaccucc

SEQ ID NO: 592922 - RNA, 19 nt, Human
ugugaaaauaaaaccucca

SEQ ID NO: 592923 - RNA, 19 nt, Human
uguguggcauaauguggag

SEQ ID NO: 592924 - RNA, 20 nt, Human
uuaaaugcucguucugaacc

SEQ ID NO: 592925 - RNA, 24 nt, Human
uuccgcacagagcccucccucuca

SEQ ID NO: 592926 - RNA, 21 nt, Human
uuuuuuuuuuuuuuuugaagg

SEQ ID NO: 592927 - RNA, 18 nt, Human
uuuuuuuuuuuuuuuuug

SEQ ID NO: 592928 - RNA, 21 nt, Human
aaaagacagcuccgcacuucc

SEQ ID NO: 592929 - RNA, 22 nt, Human
aacaucucuguaacaacagcca

SEQ ID NO: 592930 - RNA, 25 nt, Human
acuuucaacaauaacaauggucuga

SEQ ID NO: 592931 - RNA, 22 nt, Human
agagaacauguuuauuuacauc

SEQ ID NO: 592932 - RNA, 20 nt, Human
agcuccgcacuuccaaucuu

SEQ ID NO: 592933 - RNA, 18 nt, Human
auucuuucaugucguacu

SEQ ID NO: 592934 - RNA, 22 nt, Human
caagcugaaccuauuugacacu

SEQ ID NO: 592935 - RNA, 20 nt, Human
cacaauauaaccagaaggcc

SEQ ID NO: 592936 - RNA, 22 nt, Human
caucacuauuuccuuuuuacaa

SEQ ID NO: 592937 - RNA, 23 nt, Human
caucaugcucaaaagacagcucc

SEQ ID NO: 592938 - RNA, 23 nt, Human
caugcaaaucacuuacuuuucau

SEQ ID NO: 592939 - RNA, 18 nt, Human
ccggucuggccagcucug

SEQ ID NO: 592940 - RNA, 22 nt, Human
ccuaugauuuuuauuuacauga

SEQ ID NO: 592941 - RNA, 19 nt, Human
cguacugagauuucagaua

SEQ ID NO: 592942 - RNA, 20 nt, Human
cucccuauguuguuguguau

SEQ ID NO: 592943 - RNA, 20 nt, Human
cucuguaacaacagccaagg

SEQ ID NO: 592944 - RNA, 22 nt, Human
cugacauucuuucaugucguac

SEQ ID NO: 592945 - RNA, 19 nt, Human
cuggaaguuuuccguauca

SEQ ID NO: 592946 - RNA, 25 nt, Human
cuggaaguuuuccguaucagucaua

SEQ ID NO: 592947 - RNA, 22 nt, Human
cuggugcaucugcucucuuugu

SEQ ID NO: 592948 - RNA, 19 nt, Human
gacccugcaucuuuuccaa

SEQ ID NO: 592949 - RNA, 19 nt, Human
gacuuucaacaauaacaau

SEQ ID NO: 592950 - RNA, 21 nt, Human
gagaaacuauaagacagauuu

SEQ ID NO: 592951 - RNA, 20 nt, Human
uaaaaaauagaaaagguuaa

SEQ ID NO: 592952 - RNA, 21 nt, Human
uaagacagauuuuccuaauau

SEQ ID NO: 592953 - RNA, 23 nt, Human
uacaucacuauuuccuuuuuaca

SEQ ID NO: 592954 - RNA, 21 nt, Human
uagagaaacuauaagacagau

SEQ ID NO: 592955 - RNA, 19 nt, Human
uauaaucaaauccuugcac

SEQ ID NO: 592956 - RNA, 18 nt, Human
uauguuguuguguaugug

SEQ ID NO: 592957 - RNA, 18 nt, Human
ucaaaagacagcuccgca

SEQ ID NO: 592958 - RNA, 28 nt, Human
ucaaaagacagcuccgcaccaccuaggu

SEQ ID NO: 592959 - RNA, 19 nt, Human
ucccuauguuguuguguau

SEQ ID NO: 592960 - RNA, 22 nt, Human
uccuuuuuacaaugccuccacc

SEQ ID NO: 592961 - RNA, 24 nt, Human
ucucuguaacaacagccaagggcc

SEQ ID NO: 592962 - RNA, 18 nt, Human
ucugaaagagacacaugg

SEQ ID NO: 592963 - RNA, 24 nt, Human
ugaauaauaaaauuuuccaggaaa

SEQ ID NO: 592964 - RNA, 22 nt, Human
ugaguuccucugaauaguuggu

SEQ ID NO: 592965 - RNA, 19 nt, Human
ugcucaaaagacagcuccg

SEQ ID NO: 592966 - RNA, 24 nt, Human
uggaucuuuuccgaugaggauuuu

SEQ ID NO: 592967 - RNA, 21 nt, Human
uggcagcaagcugaaccuauu

SEQ ID NO: 592968 - RNA, 18 nt, Human
uuaccauucaucaaauga

SEQ ID NO: 592969 - RNA, 24 nt, Human
uuggaucuuuuccgaugaggauuu

SEQ ID NO: 592970 - RNA, 23 nt, Human
uuuuggcagcaagcugaaccuau

SEQ ID NO: 592971 - RNA, 21 nt, Human
uuuuuuuugaaagagaacaug

SEQ ID NO: 592972 - RNA, 19 nt, Human
uuuuuuuuuuugaaagaga

SEQ ID NO: 592973 - RNA, 27 nt, Human
uuuuuuuuuuuugaaagagaacauguu

SEQ ID NO: 592974 - RNA, 18 nt, Human
uuuuuuuuuuuuuuuuug

SEQ ID NO: 592975 - RNA, 18 nt, Human
aaaaaggcaguucuguuu

SEQ ID NO: 592976 - RNA, 22 nt, Human
aaaacaaaaaaaccccccagaa

SEQ ID NO: 592977 - RNA, 24 nt, Human
aaacaaaaaaaccccccagaaaca

SEQ ID NO: 592978 - RNA, 25 nt, Human
aaacaaaaaaaccccccagaaacaa

SEQ ID NO: 592979 - RNA, 19 nt, Human
aaaccccccagaaacaaca

SEQ ID NO: 592980 - RNA, 22 nt, Human
aaaggacuccaaagccaggaca

SEQ ID NO: 592981 - RNA, 21 nt, Human
aaauagcuuuaaauagauucu

SEQ ID NO: 592982 - RNA, 23 nt, Human
aacaaaaaaaccccccagaaaca

SEQ ID NO: 592983 - RNA, 22 nt, Human
aacaaaaaaauaucagugagaa

SEQ ID NO: 592984 - RNA, 21 nt, Human
aacaaaacaaaaaaacccccc

SEQ ID NO: 592985 - RNA, 26 nt, Human
aacaaaacaaaaaaaccccccagaaa

SEQ ID NO: 592986 - RNA, 30 nt, Human
aacaaaacaaaaaaaccccccagaaacaag

SEQ ID NO: 592987 - RNA, 23 nt, Human
aacaaggaauacauuggacaaaa

SEQ ID NO: 592988 - RNA, 19 nt, Human
aaccuccucuucccugccc

SEQ ID NO: 592989 - RNA, 22 nt, Human
aagccaggacaaccaaagggga

SEQ ID NO: 592990 - RNA, 24 nt, Human
aagugaccagaagaguuagugaac

SEQ ID NO: 592991 - RNA, 24 nt, Human
aaucacuuggacccgggaggcaga

SEQ ID NO: 592992 - RNA, 24 nt, Human
acaaaacaaaaaaaccccccagaa

SEQ ID NO: 592993 - RNA, 25 nt, Human
acaaaacaaaaaaaccccccagaaa

SEQ ID NO: 592994 - RNA, 18 nt, Human
acaaaaccauagaagacu

SEQ ID NO: 592995 - RNA, 22 nt, Human
acaacaaaaaaauaucagugag

SEQ ID NO: 592996 - RNA, 18 nt, Human
acacaccacucagagucc

SEQ ID NO: 592997 - RNA, 19 nt, Human
acaccacucagaguccacc

SEQ ID NO: 592998 - RNA, 24 nt, Human
accaacauggagauacccugucuc

SEQ ID NO: 592999 - RNA, 23 nt, Human
accauagaagacuacaacuuguu

SEQ ID NO: 593000 - RNA, 18 nt, Human
acccacagggggccaggu

SEQ ID NO: 593001 - RNA, 19 nt, Human
acccuggagcucucauagc

SEQ ID NO: 593002 - RNA, 24 nt, Human
acccugucucuaccaaaaauacaa

SEQ ID NO: 593003 - RNA, 22 nt, Human
accuuguugguaaacacccaaa

SEQ ID NO: 593004 - RNA, 26 nt, Human
agaaaaaggcaguucuguuuaaagaa

SEQ ID NO: 593005 - RNA, 18 nt, Human
agacagggaaggagcuga

SEQ ID NO: 593006 - RNA, 18 nt, Human
agaccaacacaauagaaa

SEQ ID NO: 593007 - RNA, 24 nt, Human
agagguugcagugaggugagaucg

SEQ ID NO: 593008 - RNA, 24 nt, Human
agcacuuugggaggccgagguggg

SEQ ID NO: 593009 - RNA, 22 nt, Human
agcagcugcuacuccuggcccc

SEQ ID NO: 593010 - RNA, 23 nt, Human
agcugggugugguggcgcaugcc

SEQ ID NO: 593011 - RNA, 22 nt, Human
aggaagaaaauaugcacucaaa

SEQ ID NO: 593012 - RNA, 19 nt, Human
aggagcugagaguuaaagc

SEQ ID NO: 593013 - RNA, 19 nt, Human
aggcagagguugcagugag

SEQ ID NO: 593014 - RNA, 24 nt, Human
aggcagagguugcagugaggugag

SEQ ID NO: 593015 - RNA, 18 nt, Human
aggcaggagaaucacuug

SEQ ID NO: 593016 - RNA, 24 nt, Human
aggcaggagaaucacuuggacccg

SEQ ID NO: 593017 - RNA, 24 nt, Human
aggcaugguggcucacgccuguaa

SEQ ID NO: 593018 - RNA, 21 nt, Human
aggccgaggugggcggaucac

SEQ ID NO: 593019 - RNA, 24 nt, Human
aggcugaggcaggagaaucacuug

SEQ ID NO: 593020 - RNA, 18 nt, Human
agggauugggggcagggg

SEQ ID NO: 593021 - RNA, 23 nt, Human
agggggccaggucucaaguuucc

SEQ ID NO: 593022 - RNA, 22 nt, Human
aggugggcggaucaccugaggu

SEQ ID NO: 593023 - RNA, 19 nt, Human
aggugguuuuccagccagg

SEQ ID NO: 593024 - RNA, 24 nt, Human
aucaccugccuaagggcgugggcu

SEQ ID NO: 593025 - RNA, 24 nt, Human
aucgcgccauugcacuccagccug

SEQ ID NO: 593026 - RNA, 21 nt, Human
auguuuugaucauuugauguu

SEQ ID NO: 593027 - RNA, 21 nt, Human
auuagcaaauaaauauucuga

SEQ ID NO: 593028 - RNA, 21 nt, Human
auugcacuccagccuggguga

SEQ ID NO: 593029 - RNA, 25 nt, Human
auugcacuccagccugggugacaag

SEQ ID NO: 593030 - RNA, 19 nt, Human
caaaaauacaaaauuagcu

SEQ ID NO: 593031 - RNA, 22 nt, Human
caaaacaaaaaaaccccccaga

SEQ ID NO: 593032 - RNA, 25 nt, Human
caaaacaaaaaaaccccccagaaac

SEQ ID NO: 593033 - RNA, 23 nt, Human
caaaaccauagaagacuacaacu

SEQ ID NO: 593034 - RNA, 19 nt, Human
caaaggacuccaaagccag

SEQ ID NO: 593035 - RNA, 21 nt, Human
caaaggacuccaaagccagga

SEQ ID NO: 593036 - RNA, 24 nt, Human
caaaggacuccaaagccaggacaa

SEQ ID NO: 593037 - RNA, 24 nt, Human
caaaggcauuaaaaacaaaacaaa

SEQ ID NO: 593038 - RNA, 21 nt, Human
caaauauguaaaaucugugug

SEQ ID NO: 593039 - RNA, 23 nt, Human
caacacaauagaaagaguuuaca

SEQ ID NO: 593040 - RNA, 24 nt, Human
caacauggagauacccugucucua

SEQ ID NO: 593041 - RNA, 19 nt, Human
caacugccacaccccaacu

SEQ ID NO: 593042 - RNA, 23 nt, Human
caagugaaaacuagacacacuua

SEQ ID NO: 593043 - RNA, 23 nt, Human
caauuuguuacaaaaccauagaa

SEQ ID NO: 593044 - RNA, 21 nt, Human
caccagugaagccucaguggc

SEQ ID NO: 593045 - RNA, 24 nt, Human
cacgccuguaaucccagcacuuug

SEQ ID NO: 593046 - RNA, 20 nt, Human
cacuacacaccacucagagu

SEQ ID NO: 593047 - RNA, 20 nt, Human
cacuccagccugggugacaa

SEQ ID NO: 593048 - RNA, 24 nt, Human
cacuccagccugggugacaagagc

SEQ ID NO: 593049 - RNA, 21 nt, Human
cagcacuuugggaggccgagg

SEQ ID NO: 593050 - RNA, 24 nt, Human
cagcacuuugggaggccgaggugg

SEQ ID NO: 593051 - RNA, 24 nt, Human
cagcuacuugggaggcugaggcag

SEQ ID NO: 593052 - RNA, 19 nt, Human
cagugggacagaaggggcu

SEQ ID NO: 593053 - RNA, 24 nt, Human
caugccuguaaucccagcuacuug

SEQ ID NO: 593054 - RNA, 19 nt, Human
caugucaccagcuuaggcg

SEQ ID NO: 593055 - RNA, 19 nt, Human
cauugcacuccagccuggg

SEQ ID NO: 593056 - RNA, 21 nt, Human
cauugcacuccagccugggug

SEQ ID NO: 593057 - RNA, 22 nt, Human
cauugcacuccagccuggguga

SEQ ID NO: 593058 - RNA, 24 nt, Human
cauugcacuccagccugggugaca

SEQ ID NO: 593059 - RNA, 25 nt, Human
cauugcacuccagccugggugacaa

SEQ ID NO: 593060 - RNA, 24 nt, Human
ccaguucuuucagauggcaacaaa

SEQ ID NO: 593061 - RNA, 20 nt, Human
ccauugcacuccagccuggg

SEQ ID NO: 593062 - RNA, 21 nt, Human
ccauugcacuccagccugggu

SEQ ID NO: 593063 - RNA, 21 nt, Human
ccauugcacuccagccugggu

SEQ ID NO: 593064 - RNA, 22 nt, Human
ccauugcacuccagccugggug

SEQ ID NO: 593065 - RNA, 24 nt, Human
ccauugcacuccagccugggugac

SEQ ID NO: 593066 - RNA, 21 nt, Human
cccacacaccccgucgagcca

SEQ ID NO: 593067 - RNA, 25 nt, Human
cccacacaccccgucgagccauuuc

SEQ ID NO: 593068 - RNA, 24 nt, Human
cccagaaacaacaacaaaaaaaua

SEQ ID NO: 593069 - RNA, 20 nt, Human
ccccaagaacaugcccuuac

SEQ ID NO: 593070 - RNA, 20 nt, Human
ccccacacaccccgucgagc

SEQ ID NO: 593071 - RNA, 25 nt, Human
ccccccagaaacaacaacaaaaaaa

SEQ ID NO: 593072 - RNA, 22 nt, Human
cccugcccaacugccacacccc

SEQ ID NO: 593073 - RNA, 26 nt, Human
ccuaaaaccacgcaaugcaagcugcu

SEQ ID NO: 593074 - RNA, 22 nt, Human
ccugaccaacauggagauaccc

SEQ ID NO: 593075 - RNA, 22 nt, Human
ccugaggucgggaauccaagac

SEQ ID NO: 593076 - RNA, 22 nt, Human
ccuguaaucccagcacuuuggg

SEQ ID NO: 593077 - RNA, 18 nt, Human
ccuguaaucccagcuacu

SEQ ID NO: 593078 - RNA, 21 nt, Human
ccuguaaucccagcuacuugg

SEQ ID NO: 593079 - RNA, 19 nt, Human
cgacuaguaauuauuuuuu

SEQ ID NO: 593080 - RNA, 21 nt, Human
cgaggugggcggaucaccuga

SEQ ID NO: 593081 - RNA, 24 nt, Human
cgaggugggcggaucaccugaggu

SEQ ID NO: 593082 - RNA, 26 nt, Human
cgccauugcacuccagccugggugac

SEQ ID NO: 593083 - RNA, 23 nt, Human
cgccuguaaucccagcacuuugg

SEQ ID NO: 593084 - RNA, 23 nt, Human
cggaucaccugaggucgggaauc

SEQ ID NO: 593085 - RNA, 24 nt, Human
cggaucaccugaggucgggaaucc

SEQ ID NO: 593086 - RNA, 26 nt, Human
cuagcuagagauaaguaaauuuccuc

SEQ ID NO: 593087 - RNA, 23 nt, Human
cucaagcgagcuuucagacccac

SEQ ID NO: 593088 - RNA, 22 nt, Human
cucacgccuguaaucccagcac

SEQ ID NO: 593089 - RNA, 24 nt, Human
cucacgccuguaaucccagcacuu

SEQ ID NO: 593090 - RNA, 23 nt, Human
cuuaagauaaauauauuagcaaa

SEQ ID NO: 593091 - RNA, 18 nt, Human
cuuggauuaggaggagac

SEQ ID NO: 593092 - RNA, 23 nt, Human
gaauuuaaaagacaaugguuggu

SEQ ID NO: 593093 - RNA, 22 nt, Human
gacccugcuucccuaaaaccac

SEQ ID NO: 593094 - RNA, 23 nt, Human
gagaaucacuuggacccgggagg

SEQ ID NO: 593095 - RNA, 23 nt, Human
gagaucgcgccauugcacuccag

SEQ ID NO: 593096 - RNA, 23 nt, Human
gaggugggcggaucaccugaggu

SEQ ID NO: 593097 - RNA, 18 nt, Human
gaucaccugaggucggga

SEQ ID NO: 593098 - RNA, 24 nt, Human
gaucaccugaggucgggaauccaa

SEQ ID NO: 593099 - RNA, 27 nt, Human
gcauuaaaaacaaaacaaaaaaacccc

SEQ ID NO: 593100 - RNA, 19 nt, Human
gccauugcacuccagccug

SEQ ID NO: 593101 - RNA, 24 nt, Human
gccauugcacuccagccuggguga

SEQ ID NO: 593102 - RNA, 20 nt, Human
gccuguaaucccagcuacuu

SEQ ID NO: 593103 - RNA, 20 nt, Human
gcuaaagaaagccacuuugg

SEQ ID NO: 593104 - RNA, 24 nt, Human
gcugggcaggcaugguggcucacg

SEQ ID NO: 593105 - RNA, 23 nt, Human
gcuuucagacccacugggccagu

SEQ ID NO: 593106 - RNA, 22 nt, Human
ggaucaccugaggucgggaauc

SEQ ID NO: 593107 - RNA, 18 nt, Human
ggauuaggaggagacagg

SEQ ID NO: 593108 - RNA, 23 nt, Human
ggauuaggaggagacagggaagg

SEQ ID NO: 593109 - RNA, 19 nt, Human
ggcaaauguuuugaucauu

SEQ ID NO: 593110 - RNA, 22 nt, Human
ggcauggcgucugagaccugaa

SEQ ID NO: 593111 - RNA, 21 nt, Human
ggcgcaugccuguaaucccag

SEQ ID NO: 593112 - RNA, 18 nt, Human
ggcgucugagaccugaaa

SEQ ID NO: 593113 - RNA, 21 nt, Human
ggcucacgccuguaaucccag

SEQ ID NO: 593114 - RNA, 20 nt, Human
gggaggccgaggugggcgga

SEQ ID NO: 593115 - RNA, 22 nt, Human
gggcugggucacuugacccugc

SEQ ID NO: 593116 - RNA, 20 nt, Human
gggcuguggaucauguacac

SEQ ID NO: 593117 - RNA, 24 nt, Human
gguggcgcaugccuguaaucccag

SEQ ID NO: 593118 - RNA, 24 nt, Human
gguggcucacgccuguaaucccag

SEQ ID NO: 593119 - RNA, 23 nt, Human
ggugugguggcgcaugccuguaa

SEQ ID NO: 593120 - RNA, 19 nt, Human
guccuuguucuccuaccca

SEQ ID NO: 593121 - RNA, 18 nt, Human
gucgagccauuucugcag

SEQ ID NO: 593122 - RNA, 20 nt, Human
gucgggaauccaagaccagc

SEQ ID NO: 593123 - RNA, 21 nt, Human
guggcaaauguuuugaucauu

SEQ ID NO: 593124 - RNA, 18 nt, Human
gugugguggcgcaugccu

SEQ ID NO: 593125 - RNA, 24 nt, Human
uaaaauagugccuuguuagaccaa

SEQ ID NO: 593126 - RNA, 19 nt, Human
uaaagaguagaaaaaggca

SEQ ID NO: 593127 - RNA, 20 nt, Human
uaaagccagcuuacuggggc

SEQ ID NO: 593128 - RNA, 19 nt, Human
uaagaaaaacauucugaua

SEQ ID NO: 593129 - RNA, 23 nt, Human
uaagagugagauucucguucaag

SEQ ID NO: 593130 - RNA, 20 nt, Human
uaagguuuuaaaauugcauu

SEQ ID NO: 593131 - RNA, 20 nt, Human
uaccaaaaauacaaaauuag

SEQ ID NO: 593132 - RNA, 23 nt, Human
uagaccucauuuuaaaagcauua

SEQ ID NO: 593133 - RNA, 23 nt, Human
uagcaaauaaauauucugagaac

SEQ ID NO: 593134 - RNA, 20 nt, Human
uaggaggagacagggaagga

SEQ ID NO: 593135 - RNA, 24 nt, Human
uauuuuuuagaccucauuuuaaaa

SEQ ID NO: 593136 - RNA, 19 nt, Human
ucaguggaaagugagauac

SEQ ID NO: 593137 - RNA, 27 nt, Human
uccaaagccaggacaaccaaaggggac

SEQ ID NO: 593138 - RNA, 21 nt, Human
uccaagaccagccugaccaac

SEQ ID NO: 593139 - RNA, 19 nt, Human
uccagccugggugacaaga

SEQ ID NO: 593140 - RNA, 22 nt, Human
uccauaaaugaaaugugcugcu

SEQ ID NO: 593141 - RNA, 21 nt, Human
uccgaggagcagcccccaagg

SEQ ID NO: 593142 - RNA, 23 nt, Human
ucgcgccauugcacuccagccug

SEQ ID NO: 593143 - RNA, 20 nt, Human
ucuagaacucuucacuguau

SEQ ID NO: 593144 - RNA, 22 nt, Human
ucucaaaaaaaaaaaggcaaug

SEQ ID NO: 593145 - RNA, 19 nt, Human
ucucaguggaaagugagau

SEQ ID NO: 593146 - RNA, 18 nt, Human
ucucauagcagcggcuuu

SEQ ID NO: 593147 - RNA, 24 nt, Human
ucugcagccaguggcagggggccc

SEQ ID NO: 593148 - RNA, 23 nt, Human
ucuucuagcuuuuaaaacauuuu

SEQ ID NO: 593149 - RNA, 18 nt, Human
ucuuucgccaucugcagc

SEQ ID NO: 593150 - RNA, 24 nt, Human
ugaaugaauaaauaaauacaagug

SEQ ID NO: 593151 - RNA, 21 nt, Human
ugacaagagcaaaauuccauc

SEQ ID NO: 593152 - RNA, 24 nt, Human
ugaccaacauggagauacccuguc

SEQ ID NO: 593153 - RNA, 19 nt, Human
ugaccagaagaguuaguga

SEQ ID NO: 593154 - RNA, 25 nt, Human
ugacccugcccaacugccacacccc

SEQ ID NO: 593155 - RNA, 19 nt, Human
ugagaguuaaagccagcuu

SEQ ID NO: 593156 - RNA, 20 nt, Human
ugaggcaggagaaucacuug

SEQ ID NO: 593157 - RNA, 21 nt, Human
ugaggcaggagaaucacuugg

SEQ ID NO: 593158 - RNA, 24 nt, Human
ugaggcaggagaaucacuuggacc

SEQ ID NO: 593159 - RNA, 25 nt, Human
ugaggcaggagaaucacuuggaccc

SEQ ID NO: 593160 - RNA, 22 nt, Human
ugaggugagaucgcgccauugc

SEQ ID NO: 593161 - RNA, 20 nt, Human
ugcaaaggacuccaaagcca

SEQ ID NO: 593162 - RNA, 19 nt, Human
ugcaaauauguaaaaucug

SEQ ID NO: 593163 - RNA, 23 nt, Human
ugcacuccagccugggugacaag

SEQ ID NO: 593164 - RNA, 21 nt, Human
ugccacaccccaacuuagagg

SEQ ID NO: 593165 - RNA, 23 nt, Human
ugcccggagggucagaguucagg

SEQ ID NO: 593166 - RNA, 24 nt, Human
ugccuguaaucccagcuacuuggg

SEQ ID NO: 593167 - RNA, 23 nt, Human
uggaaaaagagcccuuagaccau

SEQ ID NO: 593168 - RNA, 20 nt, Human
uggaccucagccaagaccag

SEQ ID NO: 593169 - RNA, 19 nt, Human
uggcaaauguuuugaucau

SEQ ID NO: 593170 - RNA, 21 nt, Human
uggcgcaugccuguaauccca

SEQ ID NO: 593171 - RNA, 22 nt, Human
uggcgcaugccuguaaucccag

SEQ ID NO: 593172 - RNA, 22 nt, Human
uggcucacgccuguaaucccag

SEQ ID NO: 593173 - RNA, 24 nt, Human
uggcucacgccuguaaucccagca

SEQ ID NO: 593174 - RNA, 19 nt, Human
ugggaggccgaggugggcg

SEQ ID NO: 593175 - RNA, 24 nt, Human
ugggaggccgaggugggcggauca

SEQ ID NO: 593176 - RNA, 19 nt, Human
ugggaggcugaggcaggag

SEQ ID NO: 593177 - RNA, 24 nt, Human
ugggaggcugaggcaggagaauca

SEQ ID NO: 593178 - RNA, 19 nt, Human
ugggcaggcaugguggcuc

SEQ ID NO: 593179 - RNA, 24 nt, Human
ugggcggaucaccugaggucggga

SEQ ID NO: 593180 - RNA, 18 nt, Human
ugggugugguggcgcaug

SEQ ID NO: 593181 - RNA, 24 nt, Human
ugguggcgcaugccuguaauccca

SEQ ID NO: 593182 - RNA, 24 nt, Human
ugguggcucacgccuguaauccca

SEQ ID NO: 593183 - RNA, 25 nt, Human
ugugagcagugggacagaaggggcu

SEQ ID NO: 593184 - RNA, 23 nt, Human
uguuacaaaaccauagaagacua

SEQ ID NO: 593185 - RNA, 21 nt, Human
uguuuaaagaauaauagucuc

SEQ ID NO: 593186 - RNA, 24 nt, Human
uuaaaauugcauuuuuguuucuac

SEQ ID NO: 593187 - RNA, 24 nt, Human
uuaaagccagcuuacuggggcugc

SEQ ID NO: 593188 - RNA, 21 nt, Human
uuagcagcugcuacuccuggc

SEQ ID NO: 593189 - RNA, 18 nt, Human
uuagcugggugugguggc

SEQ ID NO: 593190 - RNA, 20 nt, Human
uuagcugggugugguggcgc

SEQ ID NO: 593191 - RNA, 24 nt, Human
uuagcugggugugguggcgcaugc

SEQ ID NO: 593192 - RNA, 20 nt, Human
uucaagacuggagaacccag

SEQ ID NO: 593193 - RNA, 21 nt, Human
uucauauuaaaagccagaccc

SEQ ID NO: 593194 - RNA, 20 nt, Human
uuccuagcugcugccaucac

SEQ ID NO: 593195 - RNA, 25 nt, Human
uucuccuacccacagggggccagga

SEQ ID NO: 593196 - RNA, 21 nt, Human
uugaagccacauucucuacuc

SEQ ID NO: 593197 - RNA, 23 nt, Human
uugaagccacauucucuacucau

SEQ ID NO: 593198 - RNA, 24 nt, Human
uugacccugcccaacugccacacu

SEQ ID NO: 593199 - RNA, 22 nt, Human
uugcagugaggugagaucgcgc

SEQ ID NO: 593200 - RNA, 25 nt, Human
uugggaggccgaggugggcggauca

SEQ ID NO: 593201 - RNA, 25 nt, Human
uugggaggcugaggcaggagaauca

SEQ ID NO: 593202 - RNA, 24 nt, Human
uuguucaagugaaaacuagacaca

SEQ ID NO: 593203 - RNA, 23 nt, Human
uuucuaccaccuguaagcuacaa

SEQ ID NO: 593204 - RNA, 21 nt, Human
uuugcaaaggacuccaaagcc

SEQ ID NO: 593205 - RNA, 26 nt, Human
uuugcaguucauauuaaaagccagac

SEQ ID NO: 593206 - RNA, 19 nt, Human
aaacaggaaaaucacacac

SEQ ID NO: 593207 - RNA, 20 nt, Human
aaacaggaaaaucacacacg

SEQ ID NO: 593208 - RNA, 21 nt, Human
aaacaguuacaguagaguuca

SEQ ID NO: 593209 - RNA, 19 nt, Human
aaaccccuaacguugccca

SEQ ID NO: 593210 - RNA, 23 nt, Human
aaaccccuaacguugcccacccu

SEQ ID NO: 593211 - RNA, 20 nt, Human
aaaggcaguggccuggcccg

SEQ ID NO: 593212 - RNA, 20 nt, Human
acagggcaaugaacuuggac

SEQ ID NO: 593213 - RNA, 21 nt, Human
acagggcaaugaacuuggaca

SEQ ID NO: 593214 - RNA, 21 nt, Human
acaggggaggggcgggccaga

SEQ ID NO: 593215 - RNA, 27 nt, Human
accccgcuucaguucugccuucuguca

SEQ ID NO: 593216 - RNA, 18 nt, Human
acccugaggcccagccac

SEQ ID NO: 593217 - RNA, 18 nt, Human
accguggcaggcuguggc

SEQ ID NO: 593218 - RNA, 18 nt, Human
accuccagccuccuuccc

SEQ ID NO: 593219 - RNA, 19 nt, Human
agagcggaccuccagccuc

SEQ ID NO: 593220 - RNA, 23 nt, Human
agauacuuagaaaucacacggau

SEQ ID NO: 593221 - RNA, 18 nt, Human
agcaggugcagacgguug

SEQ ID NO: 593222 - RNA, 23 nt, Human
agccacagcaccggacacggccc

SEQ ID NO: 593223 - RNA, 21 nt, Human
agccugggucaaggcggccgg

SEQ ID NO: 593224 - RNA, 23 nt, Human
agcgccgcccucaagggccgccc

SEQ ID NO: 593225 - RNA, 24 nt, Human
agcggaccuccagccuccuucccg

SEQ ID NO: 593226 - RNA, 18 nt, Human
aggaaaaucacacacgua

SEQ ID NO: 593227 - RNA, 22 nt, Human
aggacaaaaggcaguggccugg

SEQ ID NO: 593228 - RNA, 18 nt, Human
aggcaggcgggagaggag

SEQ ID NO: 593229 - RNA, 24 nt, Human
aggggugggggaagagcaggugca

SEQ ID NO: 593230 - RNA, 28 nt, Human
aggugguggcccagccacggcgcucuuc

SEQ ID NO: 593231 - RNA, 21 nt, Human
auaaguaucaugaaccaugcu

SEQ ID NO: 593232 - RNA, 21 nt, Human
augccaagcucacgucuggcu

SEQ ID NO: 593233 - RNA, 21 nt, Human
auggucuugggagugucaaaa

SEQ ID NO: 593234 - RNA, 24 nt, Human
caaagucccacucgugcgcucccc

SEQ ID NO: 593235 - RNA, 26 nt, Human
caacagaaggaccacgauucuaaaug

SEQ ID NO: 593236 - RNA, 21 nt, Human
caacaggugccacugcccccu

SEQ ID NO: 593237 - RNA, 20 nt, Human
caacgcuaagauacuuagaa

SEQ ID NO: 593238 - RNA, 24 nt, Human
caaggcggccggacgucuugacca

SEQ ID NO: 593239 - RNA, 26 nt, Human
cacaacacgccagguggaagaagucu

SEQ ID NO: 593240 - RNA, 21 nt, Human
cacacaacugccuugaugccc

SEQ ID NO: 593241 - RNA, 20 nt, Human
cacacauggcacgugaagau

SEQ ID NO: 593242 - RNA, 19 nt, Human
cacagagcggaccuccagc

SEQ ID NO: 593243 - RNA, 25 nt, Human
caccacugaccuacaguucuaaaau

SEQ ID NO: 593244 - RNA, 25 nt, Human
cacccgcccucaccagggcugcagu

SEQ ID NO: 593245 - RNA, 18 nt, Human
cacgucuggcugcgaccg

SEQ ID NO: 593246 - RNA, 20 nt, Human
cacgucuggcugcgaccgug

SEQ ID NO: 593247 - RNA, 27 nt, Human
cacugaccuacaguucuaaaaucagac

SEQ ID NO: 593248 - RNA, 22 nt, Human
cagaagguccacugguaagcac

SEQ ID NO: 593249 - RNA, 18 nt, Human
cagcaccggacacggccc

SEQ ID NO: 593250 - RNA, 19 nt, Human
cagcaccggacacggcccu

SEQ ID NO: 593251 - RNA, 23 nt, Human
cagccacagcaccggacacggcc

SEQ ID NO: 593252 - RNA, 22 nt, Human
caggaaaaucacacacguagua

SEQ ID NO: 593253 - RNA, 19 nt, Human
caggggccgcuuugcaacu

SEQ ID NO: 593254 - RNA, 24 nt, Human
caggugguggcccagccacggcgc

SEQ ID NO: 593255 - RNA, 20 nt, Human
caguggccguucuccggccc

SEQ ID NO: 593256 - RNA, 22 nt, Human
cagugggcccagugcaaacuuu

SEQ ID NO: 593257 - RNA, 20 nt, Human
cauagaaaccuucagggccg

SEQ ID NO: 593258 - RNA, 21 nt, Human
ccacccugaggcccagccacc

SEQ ID NO: 593259 - RNA, 23 nt, Human
ccaguggccguucuccggccucu

SEQ ID NO: 593260 - RNA, 18 nt, Human
cccacccugaggcccagc

SEQ ID NO: 593261 - RNA, 23 nt, Human
cccagccaccagccacccagggg

SEQ ID NO: 593262 - RNA, 21 nt, Human
ccccagagcccuuggcacaga

SEQ ID NO: 593263 - RNA, 19 nt, Human
cccccugcugggcccuggg

SEQ ID NO: 593264 - RNA, 24 nt, Human
cccccugcugggcccugggccuuc

SEQ ID NO: 593265 - RNA, 18 nt, Human
cccugaggcccagccacc

SEQ ID NO: 593266 - RNA, 22 nt, Human
cccugaggcccagccaccagcc

SEQ ID NO: 593267 - RNA, 21 nt, Human
ccgggaaggaccgcgccggcg

SEQ ID NO: 593268 - RNA, 26 nt, Human
ccuacaguucuaaaaucagacagaca

SEQ ID NO: 593269 - RNA, 19 nt, Human
ccuucagggccggcuccag

SEQ ID NO: 593270 - RNA, 21 nt, Human
cgagauucacagaacauggca

SEQ ID NO: 593271 - RNA, 19 nt, Human
cggauaaugcaaaccgaug

SEQ ID NO: 593272 - RNA, 20 nt, Human
cggcccuggacagcgacggc

SEQ ID NO: 593273 - RNA, 19 nt, Human
cgggagaggaggagcuggg

SEQ ID NO: 593274 - RNA, 19 nt, Human
cgggccagaagguccacug

SEQ ID NO: 593275 - RNA, 25 nt, Human
cggggcccuggaugcccgacaagug

SEQ ID NO: 593276 - RNA, 18 nt, Human
cguccuguacagcuucau

SEQ ID NO: 593277 - RNA, 23 nt, Human
cgucgccaccgccgcugcggcca

SEQ ID NO: 593278 - RNA, 22 nt, Human
cguugcccacccugaggcccag

SEQ ID NO: 593279 - RNA, 22 nt, Human
cucacgucuggcugcgaccgug

SEQ ID NO: 593280 - RNA, 22 nt, Human
cuccccucccacaccaguggcc

SEQ ID NO: 593281 - RNA, 20 nt, Human
cuccggccucuggacucggc

SEQ ID NO: 593282 - RNA, 18 nt, Human
cugcccccugcugggccc

SEQ ID NO: 593283 - RNA, 18 nt, Human
cugcccccugcugggccc

SEQ ID NO: 593284 - RNA, 19 nt, Human
cugccuugaugcccaaagc

SEQ ID NO: 593285 - RNA, 24 nt, Human
cugccuugaugcccaaagccuggg

SEQ ID NO: 593286 - RNA, 20 nt, Human
cuggaugcccgacaagugac

SEQ ID NO: 593287 - RNA, 19 nt, Human
cugggcccugggccuucag

SEQ ID NO: 593288 - RNA, 21 nt, Human
gaacuuggacaagcccuucag

SEQ ID NO: 593289 - RNA, 18 nt, Human
gaagcuaaggcacagcac

SEQ ID NO: 593290 - RNA, 23 nt, Human
gaccucuccccaacagauucagu

SEQ ID NO: 593291 - RNA, 21 nt, Human
gagaggaggagcuggggacac

SEQ ID NO: 593292 - RNA, 25 nt, Human
gcaacagaaggaccacgauucuaaa

SEQ ID NO: 593293 - RNA, 30 nt, Human
gcaacagaaggaccacgauucuaaaugggg

SEQ ID NO: 593294 - RNA, 22 nt, Human
gccaaaccccuaacguugccca

SEQ ID NO: 593295 - RNA, 19 nt, Human
gccccagagcccuuggcac

SEQ ID NO: 593296 - RNA, 23 nt, Human
gcccgacaagugacaggggaggg

SEQ ID NO: 593297 - RNA, 21 nt, Human
gcccuuggcacagagcggacc

SEQ ID NO: 593298 - RNA, 22 nt, Human
gccgguggcggagguauggggg

SEQ ID NO: 593299 - RNA, 20 nt, Human
gccgucgucgccaccgccgc

SEQ ID NO: 593300 - RNA, 24 nt, Human
gcggcuaggcacaggucggggccc

SEQ ID NO: 593301 - RNA, 20 nt, Human
ggagaggaggagcuggggac

SEQ ID NO: 593302 - RNA, 20 nt, Human
ggcagaggauauuggcuaag

SEQ ID NO: 593303 - RNA, 23 nt, Human
ggccggugggugagacacauagg

SEQ ID NO: 593304 - RNA, 23 nt, Human
ggcggccggacgucuugaccacc

SEQ ID NO: 593305 - RNA, 23 nt, Human
ggugggggaagagcaggugcagg

SEQ ID NO: 593306 - RNA, 25 nt, Human
gucccacucgugcgcuccccuccca

SEQ ID NO: 593307 - RNA, 22 nt, Human
gugaccucuccccaacagauuc

SEQ ID NO: 593308 - RNA, 21 nt, Human
uaaaacaggaaaaucacacac

SEQ ID NO: 593309 - RNA, 21 nt, Human
uaacagggcaaugaacuugga

SEQ ID NO: 593310 - RNA, 25 nt, Human
uauaaaauuucccugaauggucuug

SEQ ID NO: 593311 - RNA, 21 nt, Human
ucaacaggugccacugccccc

SEQ ID NO: 593312 - RNA, 20 nt, Human
ucaacgcuaagauacuuaga

SEQ ID NO: 593313 - RNA, 22 nt, Human
ucacagaacauggcaagcccgc

SEQ ID NO: 593314 - RNA, 23 nt, Human
ucccucaaucccauggggcgggc

SEQ ID NO: 593315 - RNA, 18 nt, Human
ucccugaauggucuuggg

SEQ ID NO: 593316 - RNA, 19 nt, Human
uccuacagcuuuacagcca

SEQ ID NO: 593317 - RNA, 20 nt, Human
uccuacagcuuuacagccac

SEQ ID NO: 593318 - RNA, 21 nt, Human
ucgucgccaccgccgcugcgg

SEQ ID NO: 593319 - RNA, 21 nt, Human
ucucccgggaaggaccgcgcc

SEQ ID NO: 593320 - RNA, 21 nt, Human
ugacuauggugaccucucccc

SEQ ID NO: 593321 - RNA, 19 nt, Human
ugagcaacaacgcagccac

SEQ ID NO: 593322 - RNA, 20 nt, Human
ugaggucccacagggguggg

SEQ ID NO: 593323 - RNA, 19 nt, Human
ugagucccggcaccugggg

SEQ ID NO: 593324 - RNA, 21 nt, Human
ugcccaaagccugggcuccua

SEQ ID NO: 593325 - RNA, 19 nt, Human
ugcccgacaagugacaggg

SEQ ID NO: 593326 - RNA, 18 nt, Human
ugccuugaugcccaaagc

SEQ ID NO: 593327 - RNA, 19 nt, Human
ugccuugaugcccaaagcc

SEQ ID NO: 593328 - RNA, 20 nt, Human
ugccuugaugcccaaagccu

SEQ ID NO: 593329 - RNA, 18 nt, Human
uggaagaagucucccggg

SEQ ID NO: 593330 - RNA, 21 nt, Human
uggcaggcuguggcauccccg

SEQ ID NO: 593331 - RNA, 21 nt, Human
uggcucugaagcaagagcagc

SEQ ID NO: 593332 - RNA, 21 nt, Human
uggggaagcuaaggcacagca

SEQ ID NO: 593333 - RNA, 23 nt, Human
uggggcgggcuuucgccaaaccc

SEQ ID NO: 593334 - RNA, 24 nt, Human
ugguaagcaccucggccuuuuccg

SEQ ID NO: 593335 - RNA, 20 nt, Human
uggucuugggagugucaaaa

SEQ ID NO: 593336 - RNA, 19 nt, Human
uuacagccacagcaccgga

SEQ ID NO: 593337 - RNA, 22 nt, Human
uuacagccacagcaccggacac

SEQ ID NO: 593338 - RNA, 19 nt, Human
uucaagaaaacaguuacag

SEQ ID NO: 593339 - RNA, 21 nt, Human
uucauagaaaccuucagggcc

SEQ ID NO: 593340 - RNA, 22 nt, Human
uuccaggccggccggcgcccac

SEQ ID NO: 593341 - RNA, 19 nt, Human
uucccaaacaugaguucau

SEQ ID NO: 593342 - RNA, 18 nt, Human
uugcccagccccuagcag

SEQ ID NO: 593343 - RNA, 23 nt, Human
aaaaaaccaaaacccucccccca

SEQ ID NO: 593344 - RNA, 18 nt, Human
aaaaaccucuuugagucc

SEQ ID NO: 593345 - RNA, 18 nt, Human
aaaaggccaacaugggca

SEQ ID NO: 593346 - RNA, 19 nt, Human
aaauacagucuauaaaccg

SEQ ID NO: 593347 - RNA, 19 nt, Human
aaccaaaacccucccccca

SEQ ID NO: 593348 - RNA, 22 nt, Human
aaccaagaauguacuucagaac

SEQ ID NO: 593349 - RNA, 19 nt, Human
aacccuccccccaccccca

SEQ ID NO: 593350 - RNA, 25 nt, Human
acacacgcaagacagacgauauaac

SEQ ID NO: 593351 - RNA, 23 nt, Human
acacugaugcauccggagucacu

SEQ ID NO: 593352 - RNA, 21 nt, Human
acauacaauuaacagcaucac

SEQ ID NO: 593353 - RNA, 22 nt, Human
accaaaacccuccccccacccc

SEQ ID NO: 593354 - RNA, 25 nt, Human
accaagaauguacuucagaacaagg

SEQ ID NO: 593355 - RNA, 22 nt, Human
accagccagccauccuugucau

SEQ ID NO: 593356 - RNA, 18 nt, Human
acccuccccccaccccca

SEQ ID NO: 593357 - RNA, 22 nt, Human
accggaaggcugaaaaacacca

SEQ ID NO: 593358 - RNA, 19 nt, Human
agaacaaggaucugagagc

SEQ ID NO: 593359 - RNA, 22 nt, Human
agaaguacagauaaccaagaau

SEQ ID NO: 593360 - RNA, 21 nt, Human
agagcaacuuaugguguugcc

SEQ ID NO: 593361 - RNA, 19 nt, Human
caaaacccuccccccaccc

SEQ ID NO: 593362 - RNA, 23 nt, Human
caccagccagccauccuugucau

SEQ ID NO: 593363 - RNA, 18 nt, Human
cacccgaacgcaagaagg

SEQ ID NO: 593364 - RNA, 21 nt, Human
cacugaugcauccggagucac

SEQ ID NO: 593365 - RNA, 18 nt, Human
cacuuuggaaaaaaccaa

SEQ ID NO: 593366 - RNA, 24 nt, Human
cacuuuggaaaaaaccaaaacccu

SEQ ID NO: 593367 - RNA, 22 nt, Human
cagaagaaccgaaugggguggg

SEQ ID NO: 593368 - RNA, 26 nt, Human
caguauggggccugcaggaauccacu

SEQ ID NO: 593369 - RNA, 23 nt, Human
cauacaauuaacagcaucacacc

SEQ ID NO: 593370 - RNA, 24 nt, Human
caucacaccagcuacagaaguaca

SEQ ID NO: 593371 - RNA, 24 nt, Human
ccaaaacccuccccccacccccac

SEQ ID NO: 593372 - RNA, 21 nt, Human
ccaagaauguacuucagaaca

SEQ ID NO: 593373 - RNA, 19 nt, Human
ccaaucuccugauuguucu

SEQ ID NO: 593374 - RNA, 20 nt, Human
ccacaaaaacccaguucuga

SEQ ID NO: 593375 - RNA, 18 nt, Human
ccacccccaccaucauuc

SEQ ID NO: 593376 - RNA, 22 nt, Human
ccacccggccgccgcugugcuc

SEQ ID NO: 593377 - RNA, 20 nt, Human
ccagccccgcuggccccacu

SEQ ID NO: 593378 - RNA, 22 nt, Human
ccccacucacccccgccacccg

SEQ ID NO: 593379 - RNA, 19 nt, Human
ccccgcuggccccacucac

SEQ ID NO: 593380 - RNA, 24 nt, Human
ccccgcuggccccacucacccccg

SEQ ID NO: 593381 - RNA, 21 nt, Human
cccgaacgcaagaaggcagcu

SEQ ID NO: 593382 - RNA, 19 nt, Human
cccgccacccggccgccgc

SEQ ID NO: 593383 - RNA, 24 nt, Human
ccgcugcuguccagccccgcuggc

SEQ ID NO: 593384 - RNA, 22 nt, Human
cgcccggggcccgcugcugucc

SEQ ID NO: 593385 - RNA, 24 nt, Human
cggaaggcugaaaaacaccagcca

SEQ ID NO: 593386 - RNA, 22 nt, Human
cggcggcgcccggggcccgcug

SEQ ID NO: 593387 - RNA, 23 nt, Human
cucacccccgccacccggccgcc

SEQ ID NO: 593388 - RNA, 25 nt, Human
cuccccccacccccaccaucauucu

SEQ ID NO: 593389 - RNA, 22 nt, Human
cugcucugaaccuccacaaaaa

SEQ ID NO: 593390 - RNA, 24 nt, Human
cuugggaaugguuuuuuuuaaaaa

SEQ ID NO: 593391 - RNA, 25 nt, Human
gaaaaaaccaaaacccuccccccac

SEQ ID NO: 593392 - RNA, 22 nt, Human
gaaaaacaccagccagccaucc

SEQ ID NO: 593393 - RNA, 18 nt, Human
gaauccacuagauaaaua

SEQ ID NO: 593394 - RNA, 20 nt, Human
gagugugagauguggcagcu

SEQ ID NO: 593395 - RNA, 24 nt, Human
gccauccuugucauugcuuccaac

SEQ ID NO: 593396 - RNA, 22 nt, Human
gcggcgcccggggcccgcugcu

SEQ ID NO: 593397 - RNA, 19 nt, Human
ggguggguggaagagguuu

SEQ ID NO: 593398 - RNA, 21 nt, Human
gguuuuuuuuaaaaaaugaca

SEQ ID NO: 593399 - RNA, 21 nt, Human
guagagagauaacagaugguc

SEQ ID NO: 593400 - RNA, 19 nt, Human
guccaggcucaguaugggg

SEQ ID NO: 593401 - RNA, 22 nt, Human
guugccugcucugaaccuccac

SEQ ID NO: 593402 - RNA, 20 nt, Human
uaaaaaaugacaagaacuaa

SEQ ID NO: 593403 - RNA, 22 nt, Human
ucacuauguccagucagcucug

SEQ ID NO: 593404 - RNA, 21 nt, Human
ucaggcagaagaaccgaaugg

SEQ ID NO: 593405 - RNA, 25 nt, Human
ucauugcuuccaacugguggacacu

SEQ ID NO: 593406 - RNA, 18 nt, Human
uccacaaaaacccaguuc

SEQ ID NO: 593407 - RNA, 20 nt, Human
ucggcggcggcgaugugcuc

SEQ ID NO: 593408 - RNA, 23 nt, Human
ucggcggcggcgaugugcucggc

SEQ ID NO: 593409 - RNA, 21 nt, Human
ucugaaccuccacaaaaaccc

SEQ ID NO: 593410 - RNA, 21 nt, Human
ucugacacacgcaagacagac

SEQ ID NO: 593411 - RNA, 18 nt, Human
ucugauccuuucacgccc

SEQ ID NO: 593412 - RNA, 19 nt, Human
ugaaaaacaccagccagcc

SEQ ID NO: 593413 - RNA, 21 nt, Human
ugaaccuccacaaaaacccag

SEQ ID NO: 593414 - RNA, 22 nt, Human
ugagauguggcagcucgcuugg

SEQ ID NO: 593415 - RNA, 18 nt, Human
ugcucggcgggcgcgggg

SEQ ID NO: 593416 - RNA, 24 nt, Human
uggaaaaaaccaaaacccuccccc

SEQ ID NO: 593417 - RNA, 26 nt, Human
uggaaaaaaccaaaacccucccccca

SEQ ID NO: 593418 - RNA, 23 nt, Human
uggcacugcuguaaaaggccaac

SEQ ID NO: 593419 - RNA, 19 nt, Human
uggcagcucgcuuggugcc

SEQ ID NO: 593420 - RNA, 18 nt, Human
ugggguggguggaagagg

SEQ ID NO: 593421 - RNA, 18 nt, Human
ugggguggguggaagagg

SEQ ID NO: 593422 - RNA, 21 nt, Human
ugggguggguggaagagguuu

SEQ ID NO: 593423 - RNA, 20 nt, Human
uguaaaaggccaacaugggc

SEQ ID NO: 593424 - RNA, 27 nt, Human
uguccagccccgcuggccccacucacc

SEQ ID NO: 593425 - RNA, 18 nt, Human
uuccacuuuggaaaaaac

SEQ ID NO: 593426 - RNA, 21 nt, Human
uucuucauaaauuugcuucca

SEQ ID NO: 593427 - RNA, 24 nt, Human
uuggaaaaaaccaaaacccucccc

SEQ ID NO: 593428 - RNA, 20 nt, Human
augaugcuguguuccuugau

SEQ ID NO: 593429 - RNA, 20 nt, Human
auggagcuggggggagugcu

SEQ ID NO: 593430 - RNA, 20 nt, Human
auggagcuggggggagugcu

SEQ ID NO: 593431 - RNA, 22 nt, Human
auggagcuggggggagugcuuc

SEQ ID NO: 593432 - RNA, 18 nt, Human
cacuggcggcaaggaggc

SEQ ID NO: 593433 - RNA, 18 nt, Human
cagagaauauacuuggac

SEQ ID NO: 593434 - RNA, 22 nt, Human
ccaagcaacuugagguaaaggc

SEQ ID NO: 593435 - RNA, 23 nt, Human
cccccacacaguguugguuucug

SEQ ID NO: 593436 - RNA, 20 nt, Human
cuguauggcuggaggugucc

SEQ ID NO: 593437 - RNA, 19 nt, Human
gagcuggggggagugcuuc

SEQ ID NO: 593438 - RNA, 22 nt, Human
gcggcaaggaggcggcccgggg

SEQ ID NO: 593439 - RNA, 21 nt, Human
gcggcgcgacgcgacgggcac

SEQ ID NO: 593440 - RNA, 20 nt, Human
ggcggcaaggaggcggcccg

SEQ ID NO: 593441 - RNA, 25 nt, Human
uaaaggcauuaaaaggguuagacua

SEQ ID NO: 593442 - RNA, 24 nt, Human
uacaagaaaugaaaacaagacaau

SEQ ID NO: 593443 - RNA, 19 nt, Human
ucacuggaaacauacguug

SEQ ID NO: 593444 - RNA, 24 nt, Human
uccucucagagaauauacuuggac

SEQ ID NO: 593445 - RNA, 23 nt, Human
ucuguauggcuggagguguccuu

SEQ ID NO: 593446 - RNA, 18 nt, Human
ugaaguaaacaaucuucc

SEQ ID NO: 593447 - RNA, 23 nt, Human
uuccuuguguuaacauaaggauc

SEQ ID NO: 593448 - RNA, 23 nt, Human
uugacuucacuggaaacauacgu

SEQ ID NO: 593449 - RNA, 24 nt, Human
uugaugaaguaaacaaucuuccuu

SEQ ID NO: 593450 - RNA, 22 nt, Human
uuucauauugcauaaugaugcu

SEQ ID NO: 593451 - RNA, 22 nt, Human
aaacaucacaguggcuggaagc

SEQ ID NO: 593452 - RNA, 21 nt, Human
aacacugagacagcaggcauc

SEQ ID NO: 593453 - RNA, 23 nt, Human
aaguacaacacaacucccacuuc

SEQ ID NO: 593454 - RNA, 20 nt, Human
acaacacaacucccacuucc

SEQ ID NO: 593455 - RNA, 18 nt, Human
agacagcaggcaucagag

SEQ ID NO: 593456 - RNA, 23 nt, Human
aggaggacgggguccugucccag

SEQ ID NO: 593457 - RNA, 24 nt, Human
aggaggccccggaggcggcgggac

SEQ ID NO: 593458 - RNA, 26 nt, Human
aggcagaugggucuuaggaagccaga

SEQ ID NO: 593459 - RNA, 21 nt, Human
aggcggcgggaccgcagggcg

SEQ ID NO: 593460 - RNA, 19 nt, Human
cacacagcgaggaggugac

SEQ ID NO: 593461 - RNA, 18 nt, Human
cagaccaaggggccagaa

SEQ ID NO: 593462 - RNA, 18 nt, Human
cagcccagcuacccaagu

SEQ ID NO: 593463 - RNA, 20 nt, Human
ccaaguagaagguggggcgg

SEQ ID NO: 593464 - RNA, 19 nt, Human
ccagcccagcuacccaagu

SEQ ID NO: 593465 - RNA, 23 nt, Human
cccagcgucccagcccagcuacc

SEQ ID NO: 593466 - RNA, 22 nt, Human
ccuggucuuuggggaccuugac

SEQ ID NO: 593467 - RNA, 21 nt, Human
cgccuucagcgcuggcggcgu

SEQ ID NO: 593468 - RNA, 21 nt, Human
cggcagacaccucaaaguucc

SEQ ID NO: 593469 - RNA, 19 nt, Human
cggccuccgggcugcgccu

SEQ ID NO: 593470 - RNA, 21 nt, Human
cugagacagcaggcaucagag

SEQ ID NO: 593471 - RNA, 27 nt, Human
cugggccaccuguucucuauacuucgu

SEQ ID NO: 593472 - RNA, 18 nt, Human
gagaggcagcagugggag

SEQ ID NO: 593473 - RNA, 19 nt, Human
gaggugacagaccaagggg

SEQ ID NO: 593474 - RNA, 25 nt, Human
gaucugggccaccuguucucuauac

SEQ ID NO: 593475 - RNA, 21 nt, Human
ggagaggucauugaggaaugu

SEQ ID NO: 593476 - RNA, 21 nt, Human
ggagcuuucucaagaucacac

SEQ ID NO: 593477 - RNA, 24 nt, Human
ggaggcggcgggaccgcagggcgg

SEQ ID NO: 593478 - RNA, 18 nt, Human
ggaggggaggccguggga

SEQ ID NO: 593479 - RNA, 20 nt, Human
ggaggugacagaccaagggg

SEQ ID NO: 593480 - RNA, 19 nt, Human
ggccagaaguugggucccc

SEQ ID NO: 593481 - RNA, 20 nt, Human
gggccagaaguugggucccc

SEQ ID NO: 593482 - RNA, 19 nt, Human
ggugggugaguggaaggag

SEQ ID NO: 593483 - RNA, 21 nt, Human
guuugcauaauaaccaaacac

SEQ ID NO: 593484 - RNA, 18 nt, Human
uaaccaaacacugagaca

SEQ ID NO: 593485 - RNA, 19 nt, Human
uaaccaaacacugagacag

SEQ ID NO: 593486 - RNA, 22 nt, Human
uacccaaguagaagguggggcg

SEQ ID NO: 593487 - RNA, 23 nt, Human
uauuucaaacaucacaguggcug

SEQ ID NO: 593488 - RNA, 21 nt, Human
ucaaaguuccucugaucccaa

SEQ ID NO: 593489 - RNA, 22 nt, Human
ucacaguggcuggaagcaacag

SEQ ID NO: 593490 - RNA, 21 nt, Human
ucagagugccaugaaguacaa

SEQ ID NO: 593491 - RNA, 19 nt, Human
ucagggagaagagugccag

SEQ ID NO: 593492 - RNA, 19 nt, Human
ucccaggaggccccggagg

SEQ ID NO: 593493 - RNA, 19 nt, Human
ucuauggcugagucuuggg

SEQ ID NO: 593494 - RNA, 22 nt, Human
ucuauggcugagucuugggcag

SEQ ID NO: 593495 - RNA, 22 nt, Human
ucuuaggaagccagaggguugu

SEQ ID NO: 593496 - RNA, 21 nt, Human
ugacagaccaaggggccagaa

SEQ ID NO: 593497 - RNA, 24 nt, Human
ugacagaccaaggggccagaaguu

SEQ ID NO: 593498 - RNA, 27 nt, Human
ugacagcaaggguaaggcaucauucuu

SEQ ID NO: 593499 - RNA, 20 nt, Human
ugagagcugugccuguugag

SEQ ID NO: 593500 - RNA, 27 nt, Human
ugaggcaggggacguguacuguggacu

SEQ ID NO: 593501 - RNA, 21 nt, Human
ugccaugaaguacaacacaac

SEQ ID NO: 593502 - RNA, 19 nt, Human
ugcccaggagaggcagcag

SEQ ID NO: 593503 - RNA, 19 nt, Human
uggcuggaagcaacagggc

SEQ ID NO: 593504 - RNA, 24 nt, Human
ugggagaggucauugaggaauguc

SEQ ID NO: 593505 - RNA, 18 nt, Human
ugggugaguggaaggagc

SEQ ID NO: 593506 - RNA, 23 nt, Human
uugggcagugggugcucugucau

SEQ ID NO: 593507 - RNA, 24 nt, Human
uuggucucagggagaagagugcca

SEQ ID NO: 593508 - RNA, 21 nt, Human
aaaggaagaaggaagccugag

SEQ ID NO: 593509 - RNA, 19 nt, Human
aaccccacuacuuccucca

SEQ ID NO: 593510 - RNA, 19 nt, Human
aagccaguuccagguucaa

SEQ ID NO: 593511 - RNA, 18 nt, Human
aagccugagggcaagggg

SEQ ID NO: 593512 - RNA, 21 nt, Human
aauccuucucccuuaguccac

SEQ ID NO: 593513 - RNA, 22 nt, Human
accaaacaucuagcccuucagc

SEQ ID NO: 593514 - RNA, 26 nt, Human
accaaacaucuagcccuucagcccua

SEQ ID NO: 593515 - RNA, 22 nt, Human
accaaagggaaaggaagaagga

SEQ ID NO: 593516 - RNA, 19 nt, Human
accucugccucaucaacug

SEQ ID NO: 593517 - RNA, 18 nt, Human
acgggccccaccccccau

SEQ ID NO: 593518 - RNA, 20 nt, Human
acuggggcugguagcagagg

SEQ ID NO: 593519 - RNA, 20 nt, Human
agaaaaaacugagcauggug

SEQ ID NO: 593520 - RNA, 20 nt, Human
agaggggggauccucaaacc

SEQ ID NO: 593521 - RNA, 25 nt, Human
agaugggaaggaggaaaccucaggg

SEQ ID NO: 593522 - RNA, 18 nt, Human
agcagaggggggauccuc

SEQ ID NO: 593523 - RNA, 18 nt, Human
aggaagaaggaagccuga

SEQ ID NO: 593524 - RNA, 24 nt, Human
aggaagaaggaagccugagggcaa

SEQ ID NO: 593525 - RNA, 22 nt, Human
aggaagaguagggaaggagagc

SEQ ID NO: 593526 - RNA, 24 nt, Human
agggaaggagagcacucauggaga

SEQ ID NO: 593527 - RNA, 22 nt, Human
agggagcccagugguugcaaug

SEQ ID NO: 593528 - RNA, 18 nt, Human
aguccagaggacugggaa

SEQ ID NO: 593529 - RNA, 20 nt, Human
aguucugaggagggcauggu

SEQ ID NO: 593530 - RNA, 20 nt, Human
caaaguaguagcucagaggc

SEQ ID NO: 593531 - RNA, 19 nt, Human
caacgggccccacccccca

SEQ ID NO: 593532 - RNA, 21 nt, Human
cacaguuucauggucaaagcc

SEQ ID NO: 593533 - RNA, 21 nt, Human
caccacucugcuccugggucc

SEQ ID NO: 593534 - RNA, 22 nt, Human
cacuggagugggaaaaugcugg

SEQ ID NO: 593535 - RNA, 18 nt, Human
cagcucaccuggaacacc

SEQ ID NO: 593536 - RNA, 20 nt, Human
cagcugcugugggggcuggc

SEQ ID NO: 593537 - RNA, 24 nt, Human
caggagaucugcagcugaggccau

SEQ ID NO: 593538 - RNA, 24 nt, Human
cauggggaaggugauacuggggcu

SEQ ID NO: 593539 - RNA, 18 nt, Human
ccaaacaucuagcccuuu

SEQ ID NO: 593540 - RNA, 24 nt, Human
ccacagccacaagagcauggggaa

SEQ ID NO: 593541 - RNA, 19 nt, Human
ccauaccccuuaauccuuc

SEQ ID NO: 593542 - RNA, 26 nt, Human
cccaccccccauuauccggcucccca

SEQ ID NO: 593543 - RNA, 20 nt, Human
ccccaacgggccccaccccc

SEQ ID NO: 593544 - RNA, 21 nt, Human
ccccaacgggccccacccccc

SEQ ID NO: 593545 - RNA, 23 nt, Human
ccccaccccccauuauccggcuc

SEQ ID NO: 593546 - RNA, 21 nt, Human
ccccacuacuuccuccaaagg

SEQ ID NO: 593547 - RNA, 23 nt, Human
ccccccaacgggccccacccccc

SEQ ID NO: 593548 - RNA, 20 nt, Human
ccccuggaggaccuuuggaa

SEQ ID NO: 593549 - RNA, 26 nt, Human
ccccuggaggaccuuuggaaccucug

SEQ ID NO: 593550 - RNA, 20 nt, Human
ccccuguggcagcuccaguu

SEQ ID NO: 593551 - RNA, 21 nt, Human
ccccuguggcagcuccaguuc

SEQ ID NO: 593552 - RNA, 21 nt, Human
cccucagauuccacaugguug

SEQ ID NO: 593553 - RNA, 25 nt, Human
cccuucagcccuacuuucccagccu

SEQ ID NO: 593554 - RNA, 25 nt, Human
ccuccuguuuuccuggcaaccccaa

SEQ ID NO: 593555 - RNA, 21 nt, Human
ccuuaauccuucucccuuagu

SEQ ID NO: 593556 - RNA, 28 nt, Human
cgggccccaccccccauuauccggcucu

SEQ ID NO: 593557 - RNA, 20 nt, Human
cuaaucccaugcaggauuaa

SEQ ID NO: 593558 - RNA, 23 nt, Human
cucaaaccucugccucaucaacu

SEQ ID NO: 593559 - RNA, 21 nt, Human
cucugagguaugcaccgcuuc

SEQ ID NO: 593560 - RNA, 18 nt, Human
cugagaccaaacaucuag

SEQ ID NO: 593561 - RNA, 18 nt, Human
cugaggccaugcucacuu

SEQ ID NO: 593562 - RNA, 22 nt, Human
cugcagcugaggccaugcucac

SEQ ID NO: 593563 - RNA, 19 nt, Human
cugccucaucaacugcccc

SEQ ID NO: 593564 - RNA, 19 nt, Human
cuggaggaccuuuggaacc

SEQ ID NO: 593565 - RNA, 23 nt, Human
cugggaagagccgagguuagccu

SEQ ID NO: 593566 - RNA, 19 nt, Human
cuuccccagcucaccugga

SEQ ID NO: 593567 - RNA, 25 nt, Human
cuuccccagcucaccuggaacaccc

SEQ ID NO: 593568 - RNA, 22 nt, Human
gaaaaaacugagcauggugaga

SEQ ID NO: 593569 - RNA, 19 nt, Human
gaacaggaagaguagggaa

SEQ ID NO: 593570 - RNA, 19 nt, Human
gaaccugcucuagaaggcc

SEQ ID NO: 593571 - RNA, 21 nt, Human
gaaccugcucuagaaggccag

SEQ ID NO: 593572 - RNA, 20 nt, Human
gaaugggugggccccacuuc

SEQ ID NO: 593573 - RNA, 19 nt, Human
gagagaagacagugucaga

SEQ ID NO: 593574 - RNA, 25 nt, Human
gaggaccuuuggaaccucugauagu

SEQ ID NO: 593575 - RNA, 18 nt, Human
gaugcaaaguaguagcuc

SEQ ID NO: 593576 - RNA, 26 nt, Human
gcaaugaaagacuaaaaggucuacac

SEQ ID NO: 593577 - RNA, 19 nt, Human
gccugcuggcugagcuccg

SEQ ID NO: 593578 - RNA, 23 nt, Human
gcucugaagaggggccuagucuu

SEQ ID NO: 593579 - RNA, 23 nt, Human
ggaacaggaagaguagggaagga

SEQ ID NO: 593580 - RNA, 19 nt, Human
ggaaugggugggccccacu

SEQ ID NO: 593581 - RNA, 18 nt, Human
ggaauucagccauacccc

SEQ ID NO: 593582 - RNA, 20 nt, Human
ggccauucacaguuucaugg

SEQ ID NO: 593583 - RNA, 18 nt, Human
gggaaggagagcacucau

SEQ ID NO: 593584 - RNA, 21 nt, Human
gggaaggaggaaaccucaggg

SEQ ID NO: 593585 - RNA, 21 nt, Human
gggauccucaaaccucugccu

SEQ ID NO: 593586 - RNA, 20 nt, Human
ggugauacuggggcugguag

SEQ ID NO: 593587 - RNA, 22 nt, Human
guaccaaauccagcacauccag

SEQ ID NO: 593588 - RNA, 21 nt, Human
guucagaaaaaacugagcaug

SEQ ID NO: 593589 - RNA, 18 nt, Human
guucugaggagggcaugg

SEQ ID NO: 593590 - RNA, 22 nt, Human
uaccauagaacacauccaccuu

SEQ ID NO: 593591 - RNA, 18 nt, Human
uaccucacuaguccaacu

SEQ ID NO: 593592 - RNA, 26 nt, Human
uagaacacauccaccuucuagaaccu

SEQ ID NO: 593593 - RNA, 18 nt, Human
uagcagaggggggauccu

SEQ ID NO: 593594 - RNA, 24 nt, Human
uagcauuccugagauugaugacau

SEQ ID NO: 593595 - RNA, 22 nt, Human
uagggccauucacaguuucaug

SEQ ID NO: 593596 - RNA, 18 nt, Human
uaguuuggccagaaaggg

SEQ ID NO: 593597 - RNA, 20 nt, Human
uauucaguacagaugcaaag

SEQ ID NO: 593598 - RNA, 19 nt, Human
ucagaaaaaacugagcaug

SEQ ID NO: 593599 - RNA, 23 nt, Human
ucccagccuugggaggcucuggg

SEQ ID NO: 593600 - RNA, 22 nt, Human
uccccagccucagaaacuucca

SEQ ID NO: 593601 - RNA, 22 nt, Human
uccuggguccuagagaucaccc

SEQ ID NO: 593602 - RNA, 19 nt, Human
ucucagagcucuggguuca

SEQ ID NO: 593603 - RNA, 23 nt, Human
ucucuaauguucagaccuggcuu

SEQ ID NO: 593604 - RNA, 27 nt, Human
ucugcagcugaggccaugccggggucc

SEQ ID NO: 593605 - RNA, 21 nt, Human
ucugccaugaugccgcugcuc

SEQ ID NO: 593606 - RNA, 22 nt, Human
ugaaagacuaaagcaauaacug

SEQ ID NO: 593607 - RNA, 21 nt, Human
ugaaguuagggccauucacag

SEQ ID NO: 593608 - RNA, 21 nt, Human
ugagggcaaggggugccgggg

SEQ ID NO: 593609 - RNA, 24 nt, Human
ugccaugaugccgcugcuccagga

SEQ ID NO: 593610 - RNA, 18 nt, Human
ugccccuguggcagcucc

SEQ ID NO: 593611 - RNA, 24 nt, Human
ugccuuauuucccuccuguuuucc

SEQ ID NO: 593612 - RNA, 20 nt, Human
ugcuccaggagaucugcagc

SEQ ID NO: 593613 - RNA, 21 nt, Human
ugcuccaggagaucugcagcu

SEQ ID NO: 593614 - RNA, 21 nt, Human
ugcucguuccuccaagagcua

SEQ ID NO: 593615 - RNA, 18 nt, Human
ugcucuagaaggccaggc

SEQ ID NO: 593616 - RNA, 23 nt, Human
uggaaccucugauagucugucau

SEQ ID NO: 593617 - RNA, 22 nt, Human
uggaguucuggccaagucugga

SEQ ID NO: 593618 - RNA, 23 nt, Human
uggaguucuggccaagucuggag

SEQ ID NO: 593619 - RNA, 22 nt, Human
uggcuucacugaggaauaguuc

SEQ ID NO: 593620 - RNA, 19 nt, Human
ugguagcagaggggggauc

SEQ ID NO: 593621 - RNA, 18 nt, Human
uguuuugcucguuccucc

SEQ ID NO: 593622 - RNA, 23 nt, Human
uucccuugaaguuagggccauuc

SEQ ID NO: 593623 - RNA, 22 nt, Human
uugcaaugaaagacuaaagcaa

SEQ ID NO: 593624 - RNA, 18 nt, Human
uugcuaggccugcuggcu

SEQ ID NO: 593625 - RNA, 22 nt, Human
aaaaaaacaaaaaacagggcag

SEQ ID NO: 593626 - RNA, 19 nt, Human
aaacccucaaugaccaaac

SEQ ID NO: 593627 - RNA, 19 nt, Human
aaagaggcccugcagccuu

SEQ ID NO: 593628 - RNA, 18 nt, Human
aacagcacugagcugacc

SEQ ID NO: 593629 - RNA, 20 nt, Human
aacaugggaggauguaaagc

SEQ ID NO: 593630 - RNA, 24 nt, Human
aagaagagagggaggggacccaag

SEQ ID NO: 593631 - RNA, 18 nt, Human
aagagccacaaccugaaa

SEQ ID NO: 593632 - RNA, 21 nt, Human
aagccucccugcccuggcccu

SEQ ID NO: 593633 - RNA, 18 nt, Human
acaaaaaacagggcaggg

SEQ ID NO: 593634 - RNA, 24 nt, Human
acaaacaaacccucaaugaccaaa

SEQ ID NO: 593635 - RNA, 18 nt, Human
acaaaugagagaagcaga

SEQ ID NO: 593636 - RNA, 18 nt, Human
acaaaugagagaagcaga

SEQ ID NO: 593637 - RNA, 21 nt, Human
acacauacuucauccaccuga

SEQ ID NO: 593638 - RNA, 19 nt, Human
accaagaccucccaguccu

SEQ ID NO: 593639 - RNA, 22 nt, Human
accaccaagaccucccaguccu

SEQ ID NO: 593640 - RNA, 26 nt, Human
accagagcacuggaaccauggcacug

SEQ ID NO: 593641 - RNA, 23 nt, Human
accccauaccucccccuuccuaa

SEQ ID NO: 593642 - RNA, 18 nt, Human
acccucuccaaguguuga

SEQ ID NO: 593643 - RNA, 19 nt, Human
acugguucugccuuccucu

SEQ ID NO: 593644 - RNA, 20 nt, Human
acugucucaguccugagcag

SEQ ID NO: 593645 - RNA, 21 nt, Human
agaaaacccucucuucugcca

SEQ ID NO: 593646 - RNA, 24 nt, Human
agacauugaugaaaacacaaacaa

SEQ ID NO: 593647 - RNA, 21 nt, Human
agagagcaggacuggaggguu

SEQ ID NO: 593648 - RNA, 27 nt, Human
agagagggaggggacccaaggcucagg

SEQ ID NO: 593649 - RNA, 22 nt, Human
agagaucuggggagagaugagu

SEQ ID NO: 593650 - RNA, 20 nt, Human
agagggaggggacccaaggc

SEQ ID NO: 593651 - RNA, 23 nt, Human
agagggaggggacccaaggcuca

SEQ ID NO: 593652 - RNA, 20 nt, Human
agaggugacuaaggagccgc

SEQ ID NO: 593653 - RNA, 24 nt, Human
agccagucauggccaaauaaccuc

SEQ ID NO: 593654 - RNA, 22 nt, Human
agccugaacuuggcuuggagac

SEQ ID NO: 593655 - RNA, 21 nt, Human
aggagggaagaagagagggag

SEQ ID NO: 593656 - RNA, 20 nt, Human
aggauuccccgacccagagc

SEQ ID NO: 593657 - RNA, 20 nt, Human
aggcagcuucagaggccugg

SEQ ID NO: 593658 - RNA, 19 nt, Human
aggcagugaggagggguga

SEQ ID NO: 593659 - RNA, 21 nt, Human
aggcuggggaguccaggcggg

SEQ ID NO: 593660 - RNA, 22 nt, Human
aggcuggggaguccaggcgggg

SEQ ID NO: 593661 - RNA, 27 nt, Human
agggaagaagagagggaggggacccaa

SEQ ID NO: 593662 - RNA, 22 nt, Human
agggagcggggaaggagggaag

SEQ ID NO: 593663 - RNA, 19 nt, Human
agggcaggguggggguaga

SEQ ID NO: 593664 - RNA, 18 nt, Human
aggggaacacaggcugga

SEQ ID NO: 593665 - RNA, 22 nt, Human
aggguuccuucugguaccuucu

SEQ ID NO: 593666 - RNA, 21 nt, Human
agugcugguuccuccaaguga

SEQ ID NO: 593667 - RNA, 21 nt, Human
aguggcuguguccugggugac

SEQ ID NO: 593668 - RNA, 24 nt, Human
auguaggcccccaggacugcaggg

SEQ ID NO: 593669 - RNA, 22 nt, Human
auuaggguucuaaaauccugcg

SEQ ID NO: 593670 - RNA, 23 nt, Human
caaacaaacccucagcucccgga

SEQ ID NO: 593671 - RNA, 19 nt, Human
caaaugagagagagagaga

SEQ ID NO: 593672 - RNA, 21 nt, Human
caaccaccaagaccucccagu

SEQ ID NO: 593673 - RNA, 22 nt, Human
caagaucagccagucauggcca

SEQ ID NO: 593674 - RNA, 24 nt, Human
caagcuccuuuccuucccaccuuc

SEQ ID NO: 593675 - RNA, 23 nt, Human
caaggaaggcuuuaucuuccuca

SEQ ID NO: 593676 - RNA, 23 nt, Human
cacaaacaaacccucaaugacca

SEQ ID NO: 593677 - RNA, 24 nt, Human
cacaaacaaacccucaaugaccaa

SEQ ID NO: 593678 - RNA, 27 nt, Human
cacaaacaaacccucaaugaccaaaca

SEQ ID NO: 593679 - RNA, 22 nt, Human
cacaaccugaaauagaugcaga

SEQ ID NO: 593680 - RNA, 21 nt, Human
cacccagucuugggcccaugu

SEQ ID NO: 593681 - RNA, 22 nt, Human
caccucccucuggagauaagcc

SEQ ID NO: 593682 - RNA, 18 nt, Human
cacgcugccucucagcug

SEQ ID NO: 593683 - RNA, 18 nt, Human
cacugagcugaccuuucc

SEQ ID NO: 593684 - RNA, 19 nt, Human
cagacugcccccgcccucc

SEQ ID NO: 593685 - RNA, 21 nt, Human
cagagcacuggaaccauggca

SEQ ID NO: 593686 - RNA, 23 nt, Human
cagccaagauggggcugacuuug

SEQ ID NO: 593687 - RNA, 20 nt, Human
caggcgccugguccgggcuc

SEQ ID NO: 593688 - RNA, 18 nt, Human
cagugugucaagaagggc

SEQ ID NO: 593689 - RNA, 24 nt, Human
cauaacuaacuaaggcagcccaca

SEQ ID NO: 593690 - RNA, 22 nt, Human
cauaagaaaggacacaggugac

SEQ ID NO: 593691 - RNA, 20 nt, Human
ccaaauaaccucauuccuga

SEQ ID NO: 593692 - RNA, 20 nt, Human
ccaccaagaccucccagucc

SEQ ID NO: 593693 - RNA, 23 nt, Human
ccagagaaguaagaguccuagaa

SEQ ID NO: 593694 - RNA, 23 nt, Human
ccagagagcaggacuggaggguu

SEQ ID NO: 593695 - RNA, 20 nt, Human
ccaggacacacgagccccca

SEQ ID NO: 593696 - RNA, 19 nt, Human
ccauguaggcccccaggac

SEQ ID NO: 593697 - RNA, 18 nt, Human
cccaagcucaagguucug

SEQ ID NO: 593698 - RNA, 18 nt, Human
cccauaccucccccuucc

SEQ ID NO: 593699 - RNA, 23 nt, Human
cccauaccucccccuuccuaaca

SEQ ID NO: 593700 - RNA, 18 nt, Human
cccaugcacacgcacaca

SEQ ID NO: 593701 - RNA, 20 nt, Human
cccaugcacacgcacacaca

SEQ ID NO: 593702 - RNA, 19 nt, Human
ccccaaaccccaggccuca

SEQ ID NO: 593703 - RNA, 21 nt, Human
ccccaguucaauucccaagcu

SEQ ID NO: 593704 - RNA, 20 nt, Human
ccccauaccucccccuuccu

SEQ ID NO: 593705 - RNA, 22 nt, Human
ccccauaccucccccuuccuaa

SEQ ID NO: 593706 - RNA, 19 nt, Human
cccccaaaccccaggccuc

SEQ ID NO: 593707 - RNA, 22 nt, Human
ccccgaguggcuguguccuggg

SEQ ID NO: 593708 - RNA, 20 nt, Human
cccuacuccaaggucuucuc

SEQ ID NO: 593709 - RNA, 18 nt, Human
cccucaaugaccaaacaa

SEQ ID NO: 593710 - RNA, 18 nt, Human
cccugaacaucugggccc

SEQ ID NO: 593711 - RNA, 18 nt, Human
ccucccugcccuggcccu

SEQ ID NO: 593712 - RNA, 22 nt, Human
ccuccgaagcccucugcugccc

SEQ ID NO: 593713 - RNA, 23 nt, Human
ccucucugagugaggaacaggga

SEQ ID NO: 593714 - RNA, 24 nt, Human
ccucucuucugccauuuccagaag

SEQ ID NO: 593715 - RNA, 22 nt, Human
ccucuggagauaagccugaccu

SEQ ID NO: 593716 - RNA, 24 nt, Human
ccugcuugcucuccucccuuaagg

SEQ ID NO: 593717 - RNA, 22 nt, Human
ccuggaccagggucuucagagc

SEQ ID NO: 593718 - RNA, 18 nt, Human
cgaguggcuguguccugg

SEQ ID NO: 593719 - RNA, 24 nt, Human
cgcagggaacccacguuggcucca

SEQ ID NO: 593720 - RNA, 20 nt, Human
cuagaaccaagagccacaac

SEQ ID NO: 593721 - RNA, 23 nt, Human
cucacccagucuugggcccaugu

SEQ ID NO: 593722 - RNA, 24 nt, Human
cucaggauuccccgacccagagcc

SEQ ID NO: 593723 - RNA, 22 nt, Human
cucauaacuaacuaaggcagcc

SEQ ID NO: 593724 - RNA, 20 nt, Human
cuccaaguguugaccuugga

SEQ ID NO: 593725 - RNA, 24 nt, Human
cugcacgcugccucucagcugccu

SEQ ID NO: 593726 - RNA, 19 nt, Human
cugcccccucuaguuuuug

SEQ ID NO: 593727 - RNA, 21 nt, Human
cuucccaccuucacaucacug

SEQ ID NO: 593728 - RNA, 22 nt, Human
cuugagacccucuccucccagg

SEQ ID NO: 593729 - RNA, 20 nt, Human
cuuugcccuaagccugaugc

SEQ ID NO: 593730 - RNA, 26 nt, Human
gaaaggacacaggugaccccaguuca

SEQ ID NO: 593731 - RNA, 19 nt, Human
gaacagcacugagcugacc

SEQ ID NO: 593732 - RNA, 21 nt, Human
gaagggcagcaagaucgggag

SEQ ID NO: 593733 - RNA, 20 nt, Human
gaagucaccccauaccuccc

SEQ ID NO: 593734 - RNA, 19 nt, Human
gacaagcaaccuuguauuu

SEQ ID NO: 593735 - RNA, 19 nt, Human
gaccuuggaggcugucucu

SEQ ID NO: 593736 - RNA, 18 nt, Human
gacuaaggagccgcaggg

SEQ ID NO: 593737 - RNA, 19 nt, Human
gacugcccccgcccuccuu

SEQ ID NO: 593738 - RNA, 18 nt, Human
gagacccucuccucccag

SEQ ID NO: 593739 - RNA, 20 nt, Human
gagcccccacccccauucaa

SEQ ID NO: 593740 - RNA, 23 nt, Human
gaucagccagucauggccaaaua

SEQ ID NO: 593741 - RNA, 22 nt, Human
gcacagguguggccagagagca

SEQ ID NO: 593742 - RNA, 20 nt, Human
gcagacugcccccgcccucc

SEQ ID NO: 593743 - RNA, 22 nt, Human
gcccccucuaguuuuugguuug

SEQ ID NO: 593744 - RNA, 19 nt, Human
gcccuuagccagagaagua

SEQ ID NO: 593745 - RNA, 20 nt, Human
gccgugagcauuuuacuccu

SEQ ID NO: 593746 - RNA, 23 nt, Human
gcugucucuucccagcccuuccc

SEQ ID NO: 593747 - RNA, 21 nt, Human
gcuuuacaaagacauugauga

SEQ ID NO: 593748 - RNA, 19 nt, Human
ggaaggagggaagaagaga

SEQ ID NO: 593749 - RNA, 18 nt, Human
ggacacaggugaccccag

SEQ ID NO: 593750 - RNA, 22 nt, Human
ggagggaagaagagagggaggg

SEQ ID NO: 593751 - RNA, 20 nt, Human
ggaucagcuggggcagcggg

SEQ ID NO: 593752 - RNA, 19 nt, Human
ggcaggguggggguagaag

SEQ ID NO: 593753 - RNA, 22 nt, Human
ggccauuuccucaugccuuacc

SEQ ID NO: 593754 - RNA, 19 nt, Human
ggcugcacgcugccucuca

SEQ ID NO: 593755 - RNA, 18 nt, Human
gggaagaagagagggagg

SEQ ID NO: 593756 - RNA, 22 nt, Human
gggaagaagagagggaggggac

SEQ ID NO: 593757 - RNA, 21 nt, Human
gggaaggagggaagaagagag

SEQ ID NO: 593758 - RNA, 21 nt, Human
gggaaggagggaagaagagag

SEQ ID NO: 593759 - RNA, 20 nt, Human
gggagggagguauggggugg

SEQ ID NO: 593760 - RNA, 23 nt, Human
guccccucaguauccucccuaaa

SEQ ID NO: 593761 - RNA, 21 nt, Human
gucucuucccagcccuucccu

SEQ ID NO: 593762 - RNA, 19 nt, Human
gucuuucagaaagaagaug

SEQ ID NO: 593763 - RNA, 18 nt, Human
gugcugguuccuccaagu

SEQ ID NO: 593764 - RNA, 24 nt, Human
guggggaucagcuggggcagcggg

SEQ ID NO: 593765 - RNA, 22 nt, Human
uaccagugcugcugacuuugcc

SEQ ID NO: 593766 - RNA, 22 nt, Human
uaggcccccaggacugcaggga

SEQ ID NO: 593767 - RNA, 18 nt, Human
uaugauggguagucaagg

SEQ ID NO: 593768 - RNA, 19 nt, Human
ucacccagucuugggccca

SEQ ID NO: 593769 - RNA, 18 nt, Human
ucacugaggaugagaaga

SEQ ID NO: 593770 - RNA, 19 nt, Human
uccaaggucuucucagagu

SEQ ID NO: 593771 - RNA, 21 nt, Human
uccaagugaggggaacacagg

SEQ ID NO: 593772 - RNA, 19 nt, Human
uccacgcacacucccaugc

SEQ ID NO: 593773 - RNA, 22 nt, Human
uccacgcacacucccaugcaca

SEQ ID NO: 593774 - RNA, 18 nt, Human
ucccaaugccaagcuccu

SEQ ID NO: 593775 - RNA, 19 nt, Human
ucccaaugccaagcuccuu

SEQ ID NO: 593776 - RNA, 19 nt, Human
ucccaggacacacgagccc

SEQ ID NO: 593777 - RNA, 23 nt, Human
ucccaggacacacgagcccccac

SEQ ID NO: 593778 - RNA, 18 nt, Human
uccccgacccagagcccc

SEQ ID NO: 593779 - RNA, 24 nt, Human
ucccgccggcuccaggcuucgcgg

SEQ ID NO: 593780 - RNA, 19 nt, Human
ucccucuggagauaagccu

SEQ ID NO: 593781 - RNA, 19 nt, Human
ucccucuggagauaagccu

SEQ ID NO: 593782 - RNA, 21 nt, Human
ucccugaacaucugggcccca

SEQ ID NO: 593783 - RNA, 21 nt, Human
ucucagaguggccuggggucc

SEQ ID NO: 593784 - RNA, 20 nt, Human
ucugccaagacucucaccca

SEQ ID NO: 593785 - RNA, 21 nt, Human
ucuugggcccauguaggcccc

SEQ ID NO: 593786 - RNA, 19 nt, Human
ugaaaacacaaacaaaccc

SEQ ID NO: 593787 - RNA, 22 nt, Human
ugaaaacacaaacaaacccuca

SEQ ID NO: 593788 - RNA, 23 nt, Human
ugaaaacacaaacaaacccucaa

SEQ ID NO: 593789 - RNA, 19 nt, Human
ugaaaugagaagucuggcc

SEQ ID NO: 593790 - RNA, 21 nt, Human
ugaccuuuccccccaaacccc

SEQ ID NO: 593791 - RNA, 20 nt, Human
ugacugguucugccuuccuc

SEQ ID NO: 593792 - RNA, 22 nt, Human
ugagaaaacccucucuucugcc

SEQ ID NO: 593793 - RNA, 23 nt, Human
ugagaaaacccucucuucugcca

SEQ ID NO: 593794 - RNA, 19 nt, Human
ugagagagagagagaucac

SEQ ID NO: 593795 - RNA, 23 nt, Human
ugagagagagagagaucacagug

SEQ ID NO: 593796 - RNA, 23 nt, Human
ugaggaggggugaggacaucuaa

SEQ ID NO: 593797 - RNA, 27 nt, Human
ugaggaggggugaggacaucuaaugaa

SEQ ID NO: 593798 - RNA, 18 nt, Human
ugagugaauuaugugagu

SEQ ID NO: 593799 - RNA, 22 nt, Human
ugaugaaaacacaaacaaaccc

SEQ ID NO: 593800 - RNA, 21 nt, Human
ugcaaaggcucugccaagacu

SEQ ID NO: 593801 - RNA, 24 nt, Human
ugccuuaccuguuuuccucccuca

SEQ ID NO: 593802 - RNA, 22 nt, Human
ugcugcugacuuugccccgucc

SEQ ID NO: 593803 - RNA, 22 nt, Human
uggacucuaaguuccaugaauc

SEQ ID NO: 593804 - RNA, 19 nt, Human
uggccaaauaaccucauuc

SEQ ID NO: 593805 - RNA, 20 nt, Human
ugggagagggcgaauccugg

SEQ ID NO: 593806 - RNA, 21 nt, Human
ugggagagggcgaauccugga

SEQ ID NO: 593807 - RNA, 23 nt, Human
ugggagagggcgaauccuggacc

SEQ ID NO: 593808 - RNA, 22 nt, Human
ugguugaagucccaagaagcug

SEQ ID NO: 593809 - RNA, 24 nt, Human
ugguuugauaucagcccuucugca

SEQ ID NO: 593810 - RNA, 23 nt, Human
uguagagaugauaucccagucca

SEQ ID NO: 593811 - RNA, 26 nt, Human
uucacaucacugaggaugagaagagg

SEQ ID NO: 593812 - RNA, 22 nt, Human
uuccagaagcuggggccacacc

SEQ ID NO: 593813 - RNA, 23 nt, Human
uucccaggacacacgagccccca

SEQ ID NO: 593814 - RNA, 22 nt, Human
uuccugaacugguugaaaccag

SEQ ID NO: 593815 - RNA, 24 nt, Human
uuccugcagucuuguagaacugug

SEQ ID NO: 593816 - RNA, 20 nt, Human
uugaaaccaguggguuaacc

SEQ ID NO: 593817 - RNA, 21 nt, Human
uugaaaccaguggguuaaccc

SEQ ID NO: 593818 - RNA, 20 nt, Human
uugggcccauguaggccccc

SEQ ID NO: 593819 - RNA, 21 nt, Human
uuggggaaaaaaaaaacaaaa

SEQ ID NO: 593820 - RNA, 23 nt, Human
uuucagaaagaagaugguugaag

SEQ ID NO: 593821 - RNA, 21 nt, Human
uuuugcugggguuuaaacuuc

SEQ ID NO: 593822 - RNA, 20 nt, Human
uuuuuuuuaaguuugucugg

SEQ ID NO: 593823 - RNA, 21 nt, Human
aagaaagacuaaaauguggua

SEQ ID NO: 593824 - RNA, 25 nt, Human
accacagaagcccccaagugaaccc

SEQ ID NO: 593825 - RNA, 22 nt, Human
agcccccaagugaaccgaauuc

SEQ ID NO: 593826 - RNA, 19 nt, Human
cacagaagcccccaaguga

SEQ ID NO: 593827 - RNA, 23 nt, Human
cacagaagcccccaagugaaccg

SEQ ID NO: 593828 - RNA, 19 nt, Human
cagggcagucucucuggag

SEQ ID NO: 593829 - RNA, 25 nt, Human
cccaggagaaauccauuuugcugcc

SEQ ID NO: 593830 - RNA, 21 nt, Human
ggcgugcagggcagucucucu

SEQ ID NO: 593831 - RNA, 21 nt, Human
uaacuuuguucuccccaggag

SEQ ID NO: 593832 - RNA, 25 nt, Human
uagcacaaucacaguccugucacac

SEQ ID NO: 593833 - RNA, 25 nt, Human
ucagugucccuuaacuuuguucucc

SEQ ID NO: 593834 - RNA, 19 nt, Human
ucuugugcauuuuguacau

SEQ ID NO: 593835 - RNA, 20 nt, Human
ucuugugcauuuuguacauu

SEQ ID NO: 593836 - RNA, 21 nt, Human
ugcugccaaaugugaccagca

SEQ ID NO: 593837 - RNA, 22 nt, Human
uggcccaaggcauggcgugcag

SEQ ID NO: 593838 - RNA, 22 nt, Human
uggcgugcagggcagucucucu

SEQ ID NO: 593839 - RNA, 21 nt, Human
uguccuccacucugucuucau

SEQ ID NO: 593840 - RNA, 23 nt, Human
ugucuucauuuacugcuccagga

SEQ ID NO: 593841 - RNA, 22 nt, Human
uuuguguccuccacucugucuu

SEQ ID NO: 593842 - RNA, 21 nt, Human
aaaaaaaaacccugaauuuac

SEQ ID NO: 593843 - RNA, 22 nt, Human
aaaaaaacaaaaaaaaacccug

SEQ ID NO: 593844 - RNA, 23 nt, Human
aaaaaacaaaaaaaaacccugaa

SEQ ID NO: 593845 - RNA, 26 nt, Human
aaaaaacccugaauuuacagaacuaa

SEQ ID NO: 593846 - RNA, 26 nt, Human
aaaacaaaaaaacaaaaaaaaacccc

SEQ ID NO: 593847 - RNA, 21 nt, Human
aagcauuuuuucggcuuaaaa

SEQ ID NO: 593848 - RNA, 24 nt, Human
aagcuaagcaagggcccagaaauc

SEQ ID NO: 593849 - RNA, 24 nt, Human
acaggcuggacacaguggcucaca

SEQ ID NO: 593850 - RNA, 24 nt, Human
accccgucucuacuaaaacuacaa

SEQ ID NO: 593851 - RNA, 21 nt, Human
accuguaauccaagcacuucg

SEQ ID NO: 593852 - RNA, 21 nt, Human
acucugugacuaagacaauug

SEQ ID NO: 593853 - RNA, 21 nt, Human
acugcuucugcaaacaguuuu

SEQ ID NO: 593854 - RNA, 18 nt, Human
acuguacuccagccuggg

SEQ ID NO: 593855 - RNA, 23 nt, Human
acuguacuccagccugggcgaua

SEQ ID NO: 593856 - RNA, 24 nt, Human
acuguacuccagccugggcgauaa

SEQ ID NO: 593857 - RNA, 24 nt, Human
agacaggaagcaagcuaagcaagg

SEQ ID NO: 593858 - RNA, 20 nt, Human
agaggcagguagaucacuug

SEQ ID NO: 593859 - RNA, 22 nt, Human
agagguugcaguggacugagau

SEQ ID NO: 593860 - RNA, 24 nt, Human
agagguugcaguggacugagauug

SEQ ID NO: 593861 - RNA, 22 nt, Human
agaucacuugaggucaggaguu

SEQ ID NO: 593862 - RNA, 21 nt, Human
agcaagcuaagcaagggccca

SEQ ID NO: 593863 - RNA, 19 nt, Human
agcccgguaaggugaaacc

SEQ ID NO: 593864 - RNA, 24 nt, Human
aggcaggagaacugcuuaaacccg

SEQ ID NO: 593865 - RNA, 26 nt, Human
aggcagguagaucacuugaggucagg

SEQ ID NO: 593866 - RNA, 24 nt, Human
aggcgugguggggcacaccuguaa

SEQ ID NO: 593867 - RNA, 18 nt, Human
aggcugaggcaggagaac

SEQ ID NO: 593868 - RNA, 23 nt, Human
aggcugcaugaagaaaaaaaaaa

SEQ ID NO: 593869 - RNA, 22 nt, Human
agguagaucacuugaggucagg

SEQ ID NO: 593870 - RNA, 24 nt, Human
aguggcucacaccuguaauccaag

SEQ ID NO: 593871 - RNA, 18 nt, Human
auaaaccuacucugugac

SEQ ID NO: 593872 - RNA, 24 nt, Human
aucacuguacuccagccugggcga

SEQ ID NO: 593873 - RNA, 20 nt, Human
aucacuugaggucaggaguu

SEQ ID NO: 593874 - RNA, 24 nt, Human
auugcaucacuguacuccagccug

SEQ ID NO: 593875 - RNA, 24 nt, Human
caaaggcacugauuaaagucaaga

SEQ ID NO: 593876 - RNA, 24 nt, Human
caagggcccagaaaucccaaaggc

SEQ ID NO: 593877 - RNA, 19 nt, Human
cacaccuguaauccaagca

SEQ ID NO: 593878 - RNA, 18 nt, Human
cacaccuguaaucccagc

SEQ ID NO: 593879 - RNA, 22 nt, Human
caccuguaauccaagcacuucg

SEQ ID NO: 593880 - RNA, 21 nt, Human
caccuguaaucccagcuacuc

SEQ ID NO: 593881 - RNA, 24 nt, Human
caccuguaaucccagcuacucagg

SEQ ID NO: 593882 - RNA, 19 nt, Human
cacuguacuccagccuggg

SEQ ID NO: 593883 - RNA, 20 nt, Human
cacuguacuccagccugggc

SEQ ID NO: 593884 - RNA, 20 nt, Human
cacuguacuccagccugggc

SEQ ID NO: 593885 - RNA, 20 nt, Human
cacuguacuccagccugggc

SEQ ID NO: 593886 - RNA, 21 nt, Human
cacuguacuccagccugggcg

SEQ ID NO: 593887 - RNA, 22 nt, Human
cacuguacuccagccugggcga

SEQ ID NO: 593888 - RNA, 22 nt, Human
cacuguacuccagccugggcga

SEQ ID NO: 593889 - RNA, 24 nt, Human
cacuguacuccagccugggcgaua

SEQ ID NO: 593890 - RNA, 21 nt, Human
cacuugaggucaggaguuuua

SEQ ID NO: 593891 - RNA, 27 nt, Human
cagaggcagguagaucacuugagguca

SEQ ID NO: 593892 - RNA, 23 nt, Human
cagagguaauacaaggcuuugcu

SEQ ID NO: 593893 - RNA, 24 nt, Human
cagcuacucaggaggcugaggcag

SEQ ID NO: 593894 - RNA, 24 nt, Human
cagguagaucacuugaggucagga

SEQ ID NO: 593895 - RNA, 20 nt, Human
caucacuguacuccagccug

SEQ ID NO: 593896 - RNA, 24 nt, Human
cauuacaaaaucuuccucuauggg

SEQ ID NO: 593897 - RNA, 23 nt, Human
ccaaauguugauacagaacacuc

SEQ ID NO: 593898 - RNA, 21 nt, Human
ccacacuuggaaccgaugcag

SEQ ID NO: 593899 - RNA, 22 nt, Human
ccagaaaucccaaaggcacuga

SEQ ID NO: 593900 - RNA, 21 nt, Human
ccagcccgguaaggugaaacc

SEQ ID NO: 593901 - RNA, 24 nt, Human
cccaaaacccagcuucugaucuug

SEQ ID NO: 593902 - RNA, 22 nt, Human
cccagauaaaccuacucuguga

SEQ ID NO: 593903 - RNA, 22 nt, Human
ccccaaaacccagcuucugauc

SEQ ID NO: 593904 - RNA, 19 nt, Human
cccgguaaggugaaacccc

SEQ ID NO: 593905 - RNA, 24 nt, Human
ccuguaauccaagcacuucgggag

SEQ ID NO: 593906 - RNA, 21 nt, Human
ccuguaaucccagcuacucag

SEQ ID NO: 593907 - RNA, 21 nt, Human
ccuguacuagaauauauuaag

SEQ ID NO: 593908 - RNA, 24 nt, Human
ccugucuuuaaaaaaaaaaaaaaa

SEQ ID NO: 593909 - RNA, 24 nt, Human
cgggaggcagaggcagguagauca

SEQ ID NO: 593910 - RNA, 22 nt, Human
cgggagggcagagguugcagug

SEQ ID NO: 593911 - RNA, 24 nt, Human
cgguaaggugaaaccccgucucua

SEQ ID NO: 593912 - RNA, 23 nt, Human
cuaaaacuacaaaaauuagcccu

SEQ ID NO: 593913 - RNA, 20 nt, Human
cuaagacaaguguagauauc

SEQ ID NO: 593914 - RNA, 21 nt, Human
cucaaccccaaaacccagcuu

SEQ ID NO: 593915 - RNA, 24 nt, Human
cucacaccuguaauccaagcacuu

SEQ ID NO: 593916 - RNA, 21 nt, Human
cuguaaucccagcuacucagg

SEQ ID NO: 593917 - RNA, 22 nt, Human
cuuaaaacggguacuuguuuuc

SEQ ID NO: 593918 - RNA, 22 nt, Human
cuugacuaaguucauaauuacu

SEQ ID NO: 593919 - RNA, 26 nt, Human
cuuuaaaaaaaaaaaaaaaacuucua

SEQ ID NO: 593920 - RNA, 23 nt, Human
gacacaguggcucacaccuguaa

SEQ ID NO: 593921 - RNA, 21 nt, Human
gagaaaagcaggagagguagc

SEQ ID NO: 593922 - RNA, 20 nt, Human
gauaaagcgagacccugucu

SEQ ID NO: 593923 - RNA, 24 nt, Human
gaucacuugaggucaggaguuuua

SEQ ID NO: 593924 - RNA, 25 nt, Human
gaucacuugaggucaggaguuuuag

SEQ ID NO: 593925 - RNA, 22 nt, Human
gcgauaaagcgagacccugucu

SEQ ID NO: 593926 - RNA, 20 nt, Human
gcuggacacaguggcucaca

SEQ ID NO: 593927 - RNA, 19 nt, Human
ggcagagguugcaguggac

SEQ ID NO: 593928 - RNA, 23 nt, Human
ggcagagguugcaguggacugag

SEQ ID NO: 593929 - RNA, 21 nt, Human
gggcacaccuguaaucccagc

SEQ ID NO: 593930 - RNA, 24 nt, Human
gggcagagguugcaguggacugag

SEQ ID NO: 593931 - RNA, 21 nt, Human
gguaaggugaaaccccgucuc

SEQ ID NO: 593932 - RNA, 24 nt, Human
gguggggcacaccuguaaucccag

SEQ ID NO: 593933 - RNA, 19 nt, Human
gucaguucuucagagccga

SEQ ID NO: 593934 - RNA, 21 nt, Human
guugcaguggacugagauugc

SEQ ID NO: 593935 - RNA, 21 nt, Human
guuuuccggccauaauuauuc

SEQ ID NO: 593936 - RNA, 24 nt, Human
uaaaaaaaacaaaaaaacaaaaaa

SEQ ID NO: 593937 - RNA, 21 nt, Human
uaaaacuacaaaaauuagcca

SEQ ID NO: 593938 - RNA, 24 nt, Human
uaagcaagggcccagaaaucccaa

SEQ ID NO: 593939 - RNA, 20 nt, Human
uacaauaugauugugaauaa

SEQ ID NO: 593940 - RNA, 24 nt, Human
uacuaaaacuacaaaaauuagcca

SEQ ID NO: 593941 - RNA, 22 nt, Human
uacuccagccugggcgauaaag

SEQ ID NO: 593942 - RNA, 24 nt, Human
uacuccagccugggcgauaaagcg

SEQ ID NO: 593943 - RNA, 25 nt, Human
uagaaaggcugcaugaagaaaaaaa

SEQ ID NO: 593944 - RNA, 23 nt, Human
uagaucacuugaggucaggaguu

SEQ ID NO: 593945 - RNA, 24 nt, Human
uagaucacuugaggucaggaguuu

SEQ ID NO: 593946 - RNA, 27 nt, Human
uagaucacuugaggucaggaguuuuag

SEQ ID NO: 593947 - RNA, 22 nt, Human
uaguccaauaaggucuaucugu

SEQ ID NO: 593948 - RNA, 23 nt, Human
uagugucaguucuucagagccga

SEQ ID NO: 593949 - RNA, 21 nt, Human
uauauucacuuaacauauuaa

SEQ ID NO: 593950 - RNA, 26 nt, Human
uauuaaaauuaauauccaucccagau

SEQ ID NO: 593951 - RNA, 27 nt, Human
uauuaaaauuaauauccaucccagaua

SEQ ID NO: 593952 - RNA, 21 nt, Human
uauuugaauucccaucugaau

SEQ ID NO: 593953 - RNA, 23 nt, Human
ucaauucaugaaaaggaaacgcc

SEQ ID NO: 593954 - RNA, 20 nt, Human
ucacuguacuccagccuggg

SEQ ID NO: 593955 - RNA, 21 nt, Human
ucacuguacuccagccugggc

SEQ ID NO: 593956 - RNA, 23 nt, Human
ucacuguacuccagccugggcga

SEQ ID NO: 593957 - RNA, 24 nt, Human
ucacuguacuccagccugggcgau

SEQ ID NO: 593958 - RNA, 19 nt, Human
ucaugaaaaggaaacgccc

SEQ ID NO: 593959 - RNA, 24 nt, Human
uccacagaacugcuucugcaaaca

SEQ ID NO: 593960 - RNA, 19 nt, Human
uccagagaggauucauauu

SEQ ID NO: 593961 - RNA, 24 nt, Human
uccagccugggcgauaaagcgaga

SEQ ID NO: 593962 - RNA, 20 nt, Human
uccuuuagcaggauucccag

SEQ ID NO: 593963 - RNA, 24 nt, Human
ucuaucauuccucugaccugaaac

SEQ ID NO: 593964 - RNA, 21 nt, Human
ucucuacuaaaacuacaaaaa

SEQ ID NO: 593965 - RNA, 20 nt, Human
ucuuuaaaaaaaaaaaaaaa

SEQ ID NO: 593966 - RNA, 24 nt, Human
ugaggcaggagaacugcuuaaacc

SEQ ID NO: 593967 - RNA, 23 nt, Human
ugauugugaauaauggggggagg

SEQ ID NO: 593968 - RNA, 21 nt, Human
ugcaucacuguacuccagccu

SEQ ID NO: 593969 - RNA, 22 nt, Human
ugcaucacuguacuccagccug

SEQ ID NO: 593970 - RNA, 25 nt, Human
uggaaccgaugcagucccauuacca

SEQ ID NO: 593971 - RNA, 18 nt, Human
uggacccucuccagagag

SEQ ID NO: 593972 - RNA, 19 nt, Human
uggcucacaccuguaaucc

SEQ ID NO: 593973 - RNA, 20 nt, Human
uggcucacaccuguaaucca

SEQ ID NO: 593974 - RNA, 19 nt, Human
ugguagaaaggcugcauga

SEQ ID NO: 593975 - RNA, 24 nt, Human
ugguggggcacaccuguaauccca

SEQ ID NO: 593976 - RNA, 23 nt, Human
uguagagcuugcucucacacucu

SEQ ID NO: 593977 - RNA, 20 nt, Human
ugucaguucuucagagccga

SEQ ID NO: 593978 - RNA, 21 nt, Human
uguuguaagaaaaaugacaaa

SEQ ID NO: 593979 - RNA, 22 nt, Human
uuaaaaaaaacaaaaaaacaaa

SEQ ID NO: 593980 - RNA, 21 nt, Human
uuaaacccgggagggcagagg

SEQ ID NO: 593981 - RNA, 20 nt, Human
uucucaaccccaaaacccag

SEQ ID NO: 593982 - RNA, 21 nt, Human
uugcaguggacugagauugca

SEQ ID NO: 593983 - RNA, 24 nt, Human
uuguuguugccaauuguuuuuguu

SEQ ID NO: 593984 - RNA, 23 nt, Human
uuuuccggccauaauuauuccag

SEQ ID NO: 593985 - RNA, 21 nt, Human
aagaggaagagaaaggcccag

SEQ ID NO: 593986 - RNA, 18 nt, Human
acagggcagcaauaauca

SEQ ID NO: 593987 - RNA, 22 nt, Human
acuacagaggaaccagcuaggg

SEQ ID NO: 593988 - RNA, 22 nt, Human
agaaaaacagggcacgagcugg

SEQ ID NO: 593989 - RNA, 18 nt, Human
agacagaugcuggagccc

SEQ ID NO: 593990 - RNA, 19 nt, Human
agaggauggggccuucuac

SEQ ID NO: 593991 - RNA, 18 nt, Human
agcaagacccacagggca

SEQ ID NO: 593992 - RNA, 19 nt, Human
aggaagagaaaggcccaga

SEQ ID NO: 593993 - RNA, 21 nt, Human
aggaugucccagcccuuugaa

SEQ ID NO: 593994 - RNA, 26 nt, Human
aggaugucccagcccuuugaaggguc

SEQ ID NO: 593995 - RNA, 20 nt, Human
agggcaucauuaacuaugga

SEQ ID NO: 593996 - RNA, 18 nt, Human
aggggcugguuggggugg

SEQ ID NO: 593997 - RNA, 22 nt, Human
auuuuuaaaaauuugggaaagu

SEQ ID NO: 593998 - RNA, 20 nt, Human
caaagcagugcuucgagggc

SEQ ID NO: 593999 - RNA, 22 nt, Human
caagagguaugacugccagggc

SEQ ID NO: 594000 - RNA, 23 nt, Human
cacaauaucccuuaugagguagg

SEQ ID NO: 594001 - RNA, 23 nt, Human
caccacacuaugucccccaccaa

SEQ ID NO: 594002 - RNA, 21 nt, Human
cacccacuauguaccaggcac

SEQ ID NO: 594003 - RNA, 18 nt, Human
cacugugaccccguuccu

SEQ ID NO: 594004 - RNA, 22 nt, Human
cagcaauaaucauuuauccuga

SEQ ID NO: 594005 - RNA, 23 nt, Human
caucagaagcuuccccauggcaa

SEQ ID NO: 594006 - RNA, 22 nt, Human
ccaagaggaagagaaaggccca

SEQ ID NO: 594007 - RNA, 19 nt, Human
ccaaggugacccagcuggu

SEQ ID NO: 594008 - RNA, 21 nt, Human
ccagcccuuugaaggguccug

SEQ ID NO: 594009 - RNA, 22 nt, Human
cccaagucccaggaugucccag

SEQ ID NO: 594010 - RNA, 18 nt, Human
cccuugaaaaaacugaag

SEQ ID NO: 594011 - RNA, 20 nt, Human
ccuucuugagccuugguggg

SEQ ID NO: 594012 - RNA, 18 nt, Human
ccuugcugccuccagaag

SEQ ID NO: 594013 - RNA, 21 nt, Human
cuaaagccuucugcagaccca

SEQ ID NO: 594014 - RNA, 21 nt, Human
cuauggcuagaaaaacagggc

SEQ ID NO: 594015 - RNA, 24 nt, Human
cuauguaccaggcacuugggaggu

SEQ ID NO: 594016 - RNA, 18 nt, Human
cugaggccccauucagcg

SEQ ID NO: 594017 - RNA, 18 nt, Human
cugccuccagaagaagcu

SEQ ID NO: 594018 - RNA, 18 nt, Human
cuggacaggaaauggcau

SEQ ID NO: 594019 - RNA, 21 nt, Human
cuucuacucugagucugggag

SEQ ID NO: 594020 - RNA, 24 nt, Human
gagcaccagaccacuggacaagag

SEQ ID NO: 594021 - RNA, 24 nt, Human
gaggagcugugaguaaucuggggg

SEQ ID NO: 594022 - RNA, 21 nt, Human
gaguaaucugggggcuauggc

SEQ ID NO: 594023 - RNA, 19 nt, Human
gagucauacauagcaaucu

SEQ ID NO: 594024 - RNA, 21 nt, Human
gagucugggagaggggcuggu

SEQ ID NO: 594025 - RNA, 18 nt, Human
gauguuucaauaccuucu

SEQ ID NO: 594026 - RNA, 24 nt, Human
gcccuuugaaggguccuggggcuu

SEQ ID NO: 594027 - RNA, 19 nt, Human
ggagaaacagaguggccaa

SEQ ID NO: 594028 - RNA, 18 nt, Human
ggagaggggcugguuggg

SEQ ID NO: 594029 - RNA, 21 nt, Human
ggagaggggcugguuggggug

SEQ ID NO: 594030 - RNA, 22 nt, Human
ggagaucaugcuucuuacccag

SEQ ID NO: 594031 - RNA, 19 nt, Human
ggcaccugcugaggcccca

SEQ ID NO: 594032 - RNA, 18 nt, Human
gggagguauuuucucaca

SEQ ID NO: 594033 - RNA, 21 nt, Human
ggggaaaggcuaauuaccaug

SEQ ID NO: 594034 - RNA, 26 nt, Human
ggggccuucuacucugagucugggag

SEQ ID NO: 594035 - RNA, 18 nt, Human
ggguuuuauuuuuccuug

SEQ ID NO: 594036 - RNA, 19 nt, Human
uaagggacuucccaaaugc

SEQ ID NO: 594037 - RNA, 19 nt, Human
uaaggggccuaaaccauaa

SEQ ID NO: 594038 - RNA, 18 nt, Human
uaccaggcacuugggagg

SEQ ID NO: 594039 - RNA, 19 nt, Human
uaugucccccaccaaggga

SEQ ID NO: 594040 - RNA, 18 nt, Human
ucaauaccuucucucuca

SEQ ID NO: 594041 - RNA, 19 nt, Human
ucccagcaggacuacagag

SEQ ID NO: 594042 - RNA, 25 nt, Human
ucccagcccuuugaaggguccuggg

SEQ ID NO: 594043 - RNA, 19 nt, Human
ucccaggaugucccagccc

SEQ ID NO: 594044 - RNA, 22 nt, Human
uccucugugaaagguaaggggg

SEQ ID NO: 594045 - RNA, 23 nt, Human
uccucugugaaagguaagggggu

SEQ ID NO: 594046 - RNA, 18 nt, Human
uccuugcugccuccagaa

SEQ ID NO: 594047 - RNA, 18 nt, Human
ucucugcuauagccuaaa

SEQ ID NO: 594048 - RNA, 26 nt, Human
ucugcagacccacauuuaaaugagcu

SEQ ID NO: 594049 - RNA, 25 nt, Human
ucugcuauagccuaaaaaccugaac

SEQ ID NO: 594050 - RNA, 21 nt, Human
ucuggacaggaaauggcauga

SEQ ID NO: 594051 - RNA, 21 nt, Human
ugaaagguuccucugugaaag

SEQ ID NO: 594052 - RNA, 23 nt, Human
ugaacugucaccacacuaugucc

SEQ ID NO: 594053 - RNA, 18 nt, Human
ugaauaaauuaacauggg

SEQ ID NO: 594054 - RNA, 18 nt, Human
ugacccagcugguaaugg

SEQ ID NO: 594055 - RNA, 24 nt, Human
ugagacagaugcuggagcccaagu

SEQ ID NO: 594056 - RNA, 21 nt, Human
ugaggagcugugaguaaucug

SEQ ID NO: 594057 - RNA, 22 nt, Human
ugaggagcugugaguaaucugg

SEQ ID NO: 594058 - RNA, 19 nt, Human
ugagucugggagaggggcu

SEQ ID NO: 594059 - RNA, 21 nt, Human
ugagucugggagaggggcugg

SEQ ID NO: 594060 - RNA, 23 nt, Human
uggagcccaagucccaggauguc

SEQ ID NO: 594061 - RNA, 19 nt, Human
uggcaugaggagcugugag

SEQ ID NO: 594062 - RNA, 25 nt, Human
uggccaagguuguagcagcuugggc

SEQ ID NO: 594063 - RNA, 22 nt, Human
uggccugagacagaugcuggag

SEQ ID NO: 594064 - RNA, 18 nt, Human
ugggagaggggcugguug

SEQ ID NO: 594065 - RNA, 24 nt, Human
ugggagaggggcugguuggggugg

SEQ ID NO: 594066 - RNA, 21 nt, Human
uggggccuucuacucugaguc

SEQ ID NO: 594067 - RNA, 24 nt, Human
uggggcuugagaggauggggccuu

SEQ ID NO: 594068 - RNA, 18 nt, Human
ugggguggagaaacagag

SEQ ID NO: 594069 - RNA, 20 nt, Human
ugggguggagaaacagagug

SEQ ID NO: 594070 - RNA, 23 nt, Human
ugggguggagaaacagaguggcc

SEQ ID NO: 594071 - RNA, 22 nt, Human
ugguugggguggcuucggugac

SEQ ID NO: 594072 - RNA, 23 nt, Human
ugucccagcccuuugaagggucc

SEQ ID NO: 594073 - RNA, 19 nt, Human
ugucccccaccaagggaua

SEQ ID NO: 594074 - RNA, 21 nt, Human
uucaguugacccuugaaaaaa

SEQ ID NO: 594075 - RNA, 21 nt, Human
uuccuguacaccaagcucuag

SEQ ID NO: 594076 - RNA, 26 nt, Human
uugacccuugaaaaaacugaauaaau

SEQ ID NO: 594077 - RNA, 27 nt, Human
uugacccuugaaaaaacugaauaaauu

SEQ ID NO: 594078 - RNA, 23 nt, Human
uuguagcagcuugggcaccugcu

SEQ ID NO: 594079 - RNA, 21 nt, Human
uuucucacugucucugcuaua

SEQ ID NO: 594080 - RNA, 27 nt, Human
aaauauauacacauuauguuaaccuuc

SEQ ID NO: 594081 - RNA, 18 nt, Human
aaucacaguuacuuuuuu

SEQ ID NO: 594082 - RNA, 23 nt, Human
acggagcuuagcuguucucaggc

SEQ ID NO: 594083 - RNA, 18 nt, Human
aggaugaaaaaauaaaaa

SEQ ID NO: 594084 - RNA, 21 nt, Human
aggcaucugaaugggggugug

SEQ ID NO: 594085 - RNA, 21 nt, Human
caaagccuacuaaaguccaga

SEQ ID NO: 594086 - RNA, 20 nt, Human
uacaagaaucacaguuacuu

SEQ ID NO: 594087 - RNA, 21 nt, Human
uauggcaauucaccuauaaca

SEQ ID NO: 594088 - RNA, 22 nt, Human
uauggcaauucaccuauaacac

SEQ ID NO: 594089 - RNA, 22 nt, Human
uggcaauucaccuauaacacau

SEQ ID NO: 594090 - RNA, 19 nt, Human
uggggguguggagaagucc

SEQ ID NO: 594091 - RNA, 20 nt, Human
ugucaaaauaaaucagcaca

SEQ ID NO: 594092 - RNA, 19 nt, Human
uucuacaaaaguuuucuca

SEQ ID NO: 594093 - RNA, 19 nt, Human
aaaacaccccucccgccca

SEQ ID NO: 594094 - RNA, 22 nt, Human
aaaccagagcagccucaaaggg

SEQ ID NO: 594095 - RNA, 24 nt, Human
aaagugcugggauuacaggcguga

SEQ ID NO: 594096 - RNA, 25 nt, Human
aaccccaggcacugccauucagccu

SEQ ID NO: 594097 - RNA, 18 nt, Human
aaccccuuugggccugga

SEQ ID NO: 594098 - RNA, 19 nt, Human
aagcaggaagggugacaau

SEQ ID NO: 594099 - RNA, 22 nt, Human
aagcaugccacaagaugcagaa

SEQ ID NO: 594100 - RNA, 18 nt, Human
aagcuggccugccagcag

SEQ ID NO: 594101 - RNA, 24 nt, Human
aaggaggcugguggucaccagggc

SEQ ID NO: 594102 - RNA, 18 nt, Human
aaggggcccaggagcugc

SEQ ID NO: 594103 - RNA, 24 nt, Human
aaguagcugggacuuuaggugugu

SEQ ID NO: 594104 - RNA, 19 nt, Human
aagugcugggauuacaggc

SEQ ID NO: 594105 - RNA, 19 nt, Human
aagugcugggauuacaggc

SEQ ID NO: 594106 - RNA, 26 nt, Human
aagugcugggauuacaggcgugagcc

SEQ ID NO: 594107 - RNA, 18 nt, Human
acaccagaaaagcccagg

SEQ ID NO: 594108 - RNA, 19 nt, Human
acaccccucccgcccaccc

SEQ ID NO: 594109 - RNA, 22 nt, Human
accauggagggugggcagggag

SEQ ID NO: 594110 - RNA, 18 nt, Human
accauguuggccaggcug

SEQ ID NO: 594111 - RNA, 19 nt, Human
acccacaccagaaaagccc

SEQ ID NO: 594112 - RNA, 22 nt, Human
accccucccgcccacccacccc

SEQ ID NO: 594113 - RNA, 20 nt, Human
acccuucccugaacuuuucc

SEQ ID NO: 594114 - RNA, 26 nt, Human
accucacccaaccaaggagaaaauua

SEQ ID NO: 594115 - RNA, 19 nt, Human
acgcgccucugcgccgccu

SEQ ID NO: 594116 - RNA, 22 nt, Human
acucaaccaccaguaccuugcc

SEQ ID NO: 594117 - RNA, 24 nt, Human
acucaaccaccaguaccuugccac

SEQ ID NO: 594118 - RNA, 24 nt, Human
acuccugaccucaacugacccacc

SEQ ID NO: 594119 - RNA, 25 nt, Human
acucugucgcccagccuggagugca

SEQ ID NO: 594120 - RNA, 22 nt, Human
acugaaaugaugccccuacccc

SEQ ID NO: 594121 - RNA, 23 nt, Human
agaaaacaucugauucucacuga

SEQ ID NO: 594122 - RNA, 24 nt, Human
agaagcacagagcuucuccacagg

SEQ ID NO: 594123 - RNA, 18 nt, Human
agaaggggcaggagggca

SEQ ID NO: 594124 - RNA, 25 nt, Human
agagcagaguggggagaagcaccuc

SEQ ID NO: 594125 - RNA, 20 nt, Human
agcaaggucccagagcuugg

SEQ ID NO: 594126 - RNA, 23 nt, Human
agcagaguggggagaagcaccuc

SEQ ID NO: 594127 - RNA, 23 nt, Human
agccucaaccucccaaguagcug

SEQ ID NO: 594128 - RNA, 25 nt, Human
agcugcaagguuccccauggaaccu

SEQ ID NO: 594129 - RNA, 20 nt, Human
agcugccuccucccacaacc

SEQ ID NO: 594130 - RNA, 18 nt, Human
aggcacugcagaucugcc

SEQ ID NO: 594131 - RNA, 25 nt, Human
aggcuggaccugggaguagagagag

SEQ ID NO: 594132 - RNA, 18 nt, Human
agggcccagcccccucuc

SEQ ID NO: 594133 - RNA, 19 nt, Human
aggugugugccaccacacc

SEQ ID NO: 594134 - RNA, 19 nt, Human
agugauggacuacagaugg

SEQ ID NO: 594135 - RNA, 20 nt, Human
agugcaguggcgagaucuug

SEQ ID NO: 594136 - RNA, 23 nt, Human
agugcaguggcgagaucuuggcu

SEQ ID NO: 594137 - RNA, 24 nt, Human
agugcaguggcgagaucuuggcuc

SEQ ID NO: 594138 - RNA, 24 nt, Human
augagauuucaccauguuggccag

SEQ ID NO: 594139 - RNA, 20 nt, Human
augcagaaggggcaggaggg

SEQ ID NO: 594140 - RNA, 19 nt, Human
caaaccagagcagccucaa

SEQ ID NO: 594141 - RNA, 23 nt, Human
caaacccagaaacagaaaacauc

SEQ ID NO: 594142 - RNA, 24 nt, Human
caaagugcugggauuacaggcgug

SEQ ID NO: 594143 - RNA, 18 nt, Human
caaccaccaguaccuugc

SEQ ID NO: 594144 - RNA, 21 nt, Human
cacaagaugcagaaggggcag

SEQ ID NO: 594145 - RNA, 23 nt, Human
cacacagaagaccauggagggug

SEQ ID NO: 594146 - RNA, 21 nt, Human
caccaagaagcacagagcuuc

SEQ ID NO: 594147 - RNA, 22 nt, Human
caccagaaaagcccaggcuaag

SEQ ID NO: 594148 - RNA, 21 nt, Human
caccauguuggccaggcuggu

SEQ ID NO: 594149 - RNA, 24 nt, Human
caccauguuggccaggcuggucuc

SEQ ID NO: 594150 - RNA, 27 nt, Human
caccauguuggccaggcuggucucaaa

SEQ ID NO: 594151 - RNA, 20 nt, Human
cacccaccccaccguacccc

SEQ ID NO: 594152 - RNA, 20 nt, Human
cacccaggggaagcaugcca

SEQ ID NO: 594153 - RNA, 18 nt, Human
caccccucccgcccaccc

SEQ ID NO: 594154 - RNA, 19 nt, Human
caccccucccgcccaccca

SEQ ID NO: 594155 - RNA, 23 nt, Human
caccucaaccccuuugggccugg

SEQ ID NO: 594156 - RNA, 23 nt, Human
caccugccuuggacucccaaagu

SEQ ID NO: 594157 - RNA, 24 nt, Human
caccugccuuggacucccaaagug

SEQ ID NO: 594158 - RNA, 18 nt, Human
cacucugucgcccagccu

SEQ ID NO: 594159 - RNA, 22 nt, Human
cacucugucgcccagccuggag

SEQ ID NO: 594160 - RNA, 21 nt, Human
cacugcaaacucugcuuccca

SEQ ID NO: 594161 - RNA, 24 nt, Human
cagccucaaccucccaaguagcug

SEQ ID NO: 594162 - RNA, 25 nt, Human
cagccucaaccucccaaguagcugg

SEQ ID NO: 594163 - RNA, 19 nt, Human
cagccugggcagccaguga

SEQ ID NO: 594164 - RNA, 19 nt, Human
caggucccagggcccagcc

SEQ ID NO: 594165 - RNA, 22 nt, Human
caggucccagggcccagccccc

SEQ ID NO: 594166 - RNA, 20 nt, Human
caugaaaacaccccucccgc

SEQ ID NO: 594167 - RNA, 24 nt, Human
cauguuggccaggcuggucucaaa

SEQ ID NO: 594168 - RNA, 20 nt, Human
ccaaagugcugggauuacag

SEQ ID NO: 594169 - RNA, 22 nt, Human
ccaaagugcugggauuacaggc

SEQ ID NO: 594170 - RNA, 22 nt, Human
ccaaagugcugggauuacaggc

SEQ ID NO: 594171 - RNA, 24 nt, Human
ccaaagugcugggauuacaggcgu

SEQ ID NO: 594172 - RNA, 27 nt, Human
ccacccaccccaccguaccccacccac

SEQ ID NO: 594173 - RNA, 20 nt, Human
ccacccagggcagcuggcag

SEQ ID NO: 594174 - RNA, 26 nt, Human
ccaccccaccguaccccacccacucc

SEQ ID NO: 594175 - RNA, 28 nt, Human
ccagcagccacacacacacagaagacca

SEQ ID NO: 594176 - RNA, 23 nt, Human
ccagcccccucucuaaagcagga

SEQ ID NO: 594177 - RNA, 21 nt, Human
cccaaacccagaaacagaaaa

SEQ ID NO: 594178 - RNA, 23 nt, Human
cccaagcugggcugcccuugagg

SEQ ID NO: 594179 - RNA, 24 nt, Human
cccacccacucugguuucugaaag

SEQ ID NO: 594180 - RNA, 24 nt, Human
cccaccccaccguaccccacccac

SEQ ID NO: 594181 - RNA, 22 nt, Human
cccagccuggagugcaguggcg

SEQ ID NO: 594182 - RNA, 19 nt, Human
cccaggagcugccuccucc

SEQ ID NO: 594183 - RNA, 20 nt, Human
cccaggagcugccuccuccc

SEQ ID NO: 594184 - RNA, 22 nt, Human
cccaggagcugccuccucccac

SEQ ID NO: 594185 - RNA, 19 nt, Human
cccaggcuaagccccaaga

SEQ ID NO: 594186 - RNA, 20 nt, Human
cccagguucaagugaucuuc

SEQ ID NO: 594187 - RNA, 18 nt, Human
ccccaagcugggcugccc

SEQ ID NO: 594188 - RNA, 24 nt, Human
ccccaccguaccccacccacucug

SEQ ID NO: 594189 - RNA, 20 nt, Human
ccccagggagggggaaugug

SEQ ID NO: 594190 - RNA, 23 nt, Human
ccccagggccuuugcgagucaga

SEQ ID NO: 594191 - RNA, 19 nt, Human
ccccucccugccaacccca

SEQ ID NO: 594192 - RNA, 20 nt, Human
ccccucccugccaaccccag

SEQ ID NO: 594193 - RNA, 22 nt, Human
cccuugaggagcugaguguggc

SEQ ID NO: 594194 - RNA, 18 nt, Human
ccucaucucuccaaaggg

SEQ ID NO: 594195 - RNA, 19 nt, Human
ccucccgcccacccacccc

SEQ ID NO: 594196 - RNA, 20 nt, Human
ccucccgcccacccacccca

SEQ ID NO: 594197 - RNA, 23 nt, Human
ccucugcgccgccuccgcugcuc

SEQ ID NO: 594198 - RNA, 23 nt, Human
ccugaccucaacugacccaccug

SEQ ID NO: 594199 - RNA, 21 nt, Human
ccuucaggucccagggcccag

SEQ ID NO: 594200 - RNA, 19 nt, Human
ccuugcuugugguuuuucu

SEQ ID NO: 594201 - RNA, 23 nt, Human
cucacugcaaacucugcuuccca

SEQ ID NO: 594202 - RNA, 18 nt, Human
cucugcuucugcauucag

SEQ ID NO: 594203 - RNA, 18 nt, Human
cugcuucccagguucaag

SEQ ID NO: 594204 - RNA, 19 nt, Human
cugggacuuuaggugugug

SEQ ID NO: 594205 - RNA, 25 nt, Human
cuguuuuguauuuuuaguacagaug

SEQ ID NO: 594206 - RNA, 23 nt, Human
cuucccagguucaagugaucuuc

SEQ ID NO: 594207 - RNA, 23 nt, Human
cuuuuccgcaguuucagaggaga

SEQ ID NO: 594208 - RNA, 24 nt, Human
gaacuuuuccgcaguuucagagga

SEQ ID NO: 594209 - RNA, 23 nt, Human
gaccauggagggugggcagggag

SEQ ID NO: 594210 - RNA, 22 nt, Human
gacccuucccugaacuuuuccg

SEQ ID NO: 594211 - RNA, 23 nt, Human
gaccucaacugacccaccugccu

SEQ ID NO: 594212 - RNA, 21 nt, Human
gagacuggaagguggaaaggu

SEQ ID NO: 594213 - RNA, 22 nt, Human
gagauuucaccauguuggccag

SEQ ID NO: 594214 - RNA, 19 nt, Human
gagcagaguggggagaagc

SEQ ID NO: 594215 - RNA, 26 nt, Human
gagcagccucaaagggaagggaacgc

SEQ ID NO: 594216 - RNA, 18 nt, Human
gauuacaggcgugagccc

SEQ ID NO: 594217 - RNA, 22 nt, Human
gcaaacucugcuucccagguuc

SEQ ID NO: 594218 - RNA, 26 nt, Human
gcccacccaccccaccguaccccacc

SEQ ID NO: 594219 - RNA, 20 nt, Human
gccccucccugccaacccca

SEQ ID NO: 594220 - RNA, 21 nt, Human
gccgaggguuccccggacccu

SEQ ID NO: 594221 - RNA, 25 nt, Human
gccuggacccacaccagaaaagccc

SEQ ID NO: 594222 - RNA, 22 nt, Human
gcuggccugccagcagccacac

SEQ ID NO: 594223 - RNA, 23 nt, Human
gcuggucucaaacuccugaccuc

SEQ ID NO: 594224 - RNA, 21 nt, Human
ggaaagguauaaaacgugaua

SEQ ID NO: 594225 - RNA, 19 nt, Human
ggacauagcacacugugcc

SEQ ID NO: 594226 - RNA, 23 nt, Human
ggaccuaaaaacccacuagcugc

SEQ ID NO: 594227 - RNA, 23 nt, Human
ggagcaaggucccagagcuuggg

SEQ ID NO: 594228 - RNA, 23 nt, Human
ggaggacacacccaggggaagca

SEQ ID NO: 594229 - RNA, 22 nt, Human
ggcagcuggcagcuuguggggc

SEQ ID NO: 594230 - RNA, 24 nt, Human
ggcuggucucaaacuccugaccuc

SEQ ID NO: 594231 - RNA, 20 nt, Human
gggcagggagacuggaaggu

SEQ ID NO: 594232 - RNA, 24 nt, Human
gggcccaaacccagaaacagaaaa

SEQ ID NO: 594233 - RNA, 22 nt, Human
gggccgaggguuccccggaccc

SEQ ID NO: 594234 - RNA, 19 nt, Human
gggguccagccccagggcc

SEQ ID NO: 594235 - RNA, 24 nt, Human
ggucacugagggcaagcucugugg

SEQ ID NO: 594236 - RNA, 21 nt, Human
gucccagagcuugggaaacca

SEQ ID NO: 594237 - RNA, 22 nt, Human
guccugaauggggccugucugg

SEQ ID NO: 594238 - RNA, 19 nt, Human
guuggagggcaugaugagg

SEQ ID NO: 594239 - RNA, 20 nt, Human
uaaaaacccacuagcugcaa

SEQ ID NO: 594240 - RNA, 22 nt, Human
uaagccccaagauuuuagccag

SEQ ID NO: 594241 - RNA, 24 nt, Human
uaccacaaaggcuccauuccugga

SEQ ID NO: 594242 - RNA, 19 nt, Human
uaccccacccacucugguu

SEQ ID NO: 594243 - RNA, 22 nt, Human
uaccccagggagggggaaugug

SEQ ID NO: 594244 - RNA, 25 nt, Human
uaggugugugccaccacaccuggcu

SEQ ID NO: 594245 - RNA, 24 nt, Human
uaguacagaugagauuucaccaug

SEQ ID NO: 594246 - RNA, 19 nt, Human
ucacaguggcucugcuucu

SEQ ID NO: 594247 - RNA, 19 nt, Human
ucacugcaaacucugcuuc

SEQ ID NO: 594248 - RNA, 24 nt, Human
ucacugcaaacucugcuucccagg

SEQ ID NO: 594249 - RNA, 28 nt, Human
ucacugcaaacucugcuucgggcccucc

SEQ ID NO: 594250 - RNA, 28 nt, Human
ucacugcaaacucugcuucggguccucc

SEQ ID NO: 594251 - RNA, 18 nt, Human
ucagacaaccacagaagc

SEQ ID NO: 594252 - RNA, 18 nt, Human
uccaccacccagggcagc

SEQ ID NO: 594253 - RNA, 19 nt, Human
uccaccacccagggcagcu

SEQ ID NO: 594254 - RNA, 18 nt, Human
uccagccucaaccuccca

SEQ ID NO: 594255 - RNA, 24 nt, Human
uccagccucaaccucccaaguagc

SEQ ID NO: 594256 - RNA, 24 nt, Human
ucccaaagugcugggauuacaggc

SEQ ID NO: 594257 - RNA, 23 nt, Human
ucccaaguagcugggacuuuagg

SEQ ID NO: 594258 - RNA, 21 nt, Human
ucccagagcuugggaaaccaa

SEQ ID NO: 594259 - RNA, 18 nt, Human
ucccagguucaagugauc

SEQ ID NO: 594260 - RNA, 19 nt, Human
ucccugaacuuuuccgcag

SEQ ID NO: 594261 - RNA, 24 nt, Human
ucgcccagccuggagugcaguggc

SEQ ID NO: 594262 - RNA, 18 nt, Human
ucgccggacacuggggga

SEQ ID NO: 594263 - RNA, 19 nt, Human
ucgggguccagccccaggg

SEQ ID NO: 594264 - RNA, 21 nt, Human
ucgucgggguccagccccagg

SEQ ID NO: 594265 - RNA, 24 nt, Human
ucucacucugucgcccagccugga

SEQ ID NO: 594266 - RNA, 23 nt, Human
ucucagacaaccacagaagccaa

SEQ ID NO: 594267 - RNA, 20 nt, Human
ucucaggucauuccccauau

SEQ ID NO: 594268 - RNA, 26 nt, Human
ucugcauucaggggaugccucucaga

SEQ ID NO: 594269 - RNA, 19 nt, Human
ucugcgccgccuccgcugc

SEQ ID NO: 594270 - RNA, 19 nt, Human
ucugcuucccagguucaag

SEQ ID NO: 594271 - RNA, 23 nt, Human
ucugggagcuuugggccgagggu

SEQ ID NO: 594272 - RNA, 19 nt, Human
ucugguuucugaaaggagg

SEQ ID NO: 594273 - RNA, 24 nt, Human
ucugucgcccagccuggagugcag

SEQ ID NO: 594274 - RNA, 20 nt, Human
ugaaaacaccccucccgccc

SEQ ID NO: 594275 - RNA, 24 nt, Human
ugaaaacaccccucccgcccaccc

SEQ ID NO: 594276 - RNA, 21 nt, Human
ugaaaggaggcugguggucac

SEQ ID NO: 594277 - RNA, 22 nt, Human
ugaccucaacugacccaccugc

SEQ ID NO: 594278 - RNA, 21 nt, Human
ugagauuucaccauguuggcc

SEQ ID NO: 594279 - RNA, 24 nt, Human
ugagauuucaccauguuggccagg

SEQ ID NO: 594280 - RNA, 19 nt, Human
ugcccagagccucgucggg

SEQ ID NO: 594281 - RNA, 20 nt, Human
ugcucuggugcccagagccu

SEQ ID NO: 594282 - RNA, 24 nt, Human
ugcugggauuacaggcgugagccc

SEQ ID NO: 594283 - RNA, 20 nt, Human
uggaaaaccucacccaacca

SEQ ID NO: 594284 - RNA, 22 nt, Human
uggaaagguauaaaacgugaua

SEQ ID NO: 594285 - RNA, 27 nt, Human
uggaacaguagacauacaacuugaaua

SEQ ID NO: 594286 - RNA, 21 nt, Human
uggaaccuacuguccugcaug

SEQ ID NO: 594287 - RNA, 18 nt, Human
uggagggcaugaugaggc

SEQ ID NO: 594288 - RNA, 18 nt, Human
uggagggugggcagggag

SEQ ID NO: 594289 - RNA, 23 nt, Human
uggaguccacggacauagcacac

SEQ ID NO: 594290 - RNA, 22 nt, Human
uggaguccucaagauuguggag

SEQ ID NO: 594291 - RNA, 23 nt, Human
uggagugcaguggcgagaucuug

SEQ ID NO: 594292 - RNA, 24 nt, Human
uggagugcaguggcgagaucuugg

SEQ ID NO: 594293 - RNA, 20 nt, Human
uggcaccggcgccgccgcgg

SEQ ID NO: 594294 - RNA, 24 nt, Human
uggccaggcuggucucaaacuccu

SEQ ID NO: 594295 - RNA, 18 nt, Human
ugggauuacaggcgugag

SEQ ID NO: 594296 - RNA, 19 nt, Human
ugggauuacaggcgugagc

SEQ ID NO: 594297 - RNA, 23 nt, Human
ugggauuacaggcgugagcccca

SEQ ID NO: 594298 - RNA, 21 nt, Human
ugggcagggagacuggaaggu

SEQ ID NO: 594299 - RNA, 18 nt, Human
uggggcccaaacccagaa

SEQ ID NO: 594300 - RNA, 23 nt, Human
ugggggacccaguggcucuguug

SEQ ID NO: 594301 - RNA, 26 nt, Human
ugggggacccaguggcucuguugguu

SEQ ID NO: 594302 - RNA, 19 nt, Human
ugguccugacucaaccacc

SEQ ID NO: 594303 - RNA, 18 nt, Human
uguauuuuaacauaugga

SEQ ID NO: 594304 - RNA, 18 nt, Human
uguccugaauggggccug

SEQ ID NO: 594305 - RNA, 19 nt, Human
ugucuggaucacaaaccag

SEQ ID NO: 594306 - RNA, 19 nt, Human
ugucuguuuggucccuagg

SEQ ID NO: 594307 - RNA, 20 nt, Human
uuaggcacugcagaucugcc

SEQ ID NO: 594308 - RNA, 24 nt, Human
uuaguacagaugagauuucaccau

SEQ ID NO: 594309 - RNA, 23 nt, Human
uucacaguggcucugcuucugca

SEQ ID NO: 594310 - RNA, 24 nt, Human
uuccagccucaaccucccaaguag

SEQ ID NO: 594311 - RNA, 19 nt, Human
uuccuggaccuaaaaaccc

SEQ ID NO: 594312 - RNA, 27 nt, Human
uucugcauucaggggaugccucucaga

SEQ ID NO: 594313 - RNA, 19 nt, Human
uuggacucccaaagugcug

SEQ ID NO: 594314 - RNA, 24 nt, Human
uuucaccauguuggccaggcuggu

SEQ ID NO: 594315 - RNA, 19 nt, Human
uuuugcucuggugcccaga

SEQ ID NO: 594316 - RNA, 20 nt, Human
uuuugcucuggugcccagag

SEQ ID NO: 594317 - RNA, 26 nt, Human
uuuugcucuggugcccagagccucgu

SEQ ID NO: 594318 - RNA, 24 nt, Human
uuuuuaguacagaugagauuucac

SEQ ID NO: 594319 - RNA, 21 nt, Human
aaaaaauagaauaucuuuccu

SEQ ID NO: 594320 - RNA, 24 nt, Human
aaacaaucuggucaucuggaaaca

SEQ ID NO: 594321 - RNA, 18 nt, Human
aacagauguguaaacucu

SEQ ID NO: 594322 - RNA, 22 nt, Human
aagaacagcuaaucgacaugac

SEQ ID NO: 594323 - RNA, 24 nt, Human
aagcaggaaaacuaucagaucagg

SEQ ID NO: 594324 - RNA, 19 nt, Human
aaguuccagguucaucaug

SEQ ID NO: 594325 - RNA, 22 nt, Human
acccacagaaagcccaccgcaa

SEQ ID NO: 594326 - RNA, 22 nt, Human
accccguccccucccgccccua

SEQ ID NO: 594327 - RNA, 24 nt, Human
accccguccccucccgccccuacc

SEQ ID NO: 594328 - RNA, 21 nt, Human
acccgccgaggagccgcccaa

SEQ ID NO: 594329 - RNA, 27 nt, Human
accucauguguacuaugaaaguuuuau

SEQ ID NO: 594330 - RNA, 21 nt, Human
acugcauuccccucaugcauu

SEQ ID NO: 594331 - RNA, 24 nt, Human
agaaaaacaaucuggucaucugga

SEQ ID NO: 594332 - RNA, 24 nt, Human
agaaaaacagcaguuaugccugca

SEQ ID NO: 594333 - RNA, 25 nt, Human
agaaaauagacuauuaauugcacaa

SEQ ID NO: 594334 - RNA, 22 nt, Human
augaaaguuuuauuuaugcccc

SEQ ID NO: 594335 - RNA, 25 nt, Human
augugcuggacucugaauucugugg

SEQ ID NO: 594336 - RNA, 19 nt, Human
caaaagagcauauuggagc

SEQ ID NO: 594337 - RNA, 26 nt, Human
caacccaaagcuugacguuaagucaa

SEQ ID NO: 594338 - RNA, 19 nt, Human
cacagcuacaaccuaggga

SEQ ID NO: 594339 - RNA, 22 nt, Human
caccaccgccacccgccgagga

SEQ ID NO: 594340 - RNA, 18 nt, Human
cagaaaaacaaucugguc

SEQ ID NO: 594341 - RNA, 25 nt, Human
cagaauggaccuaacagacaacuga

SEQ ID NO: 594342 - RNA, 19 nt, Human
cagacagaccuucuuaggc

SEQ ID NO: 594343 - RNA, 20 nt, Human
cauacuccucacuguaagaa

SEQ ID NO: 594344 - RNA, 18 nt, Human
ccacagaaagcccaccgc

SEQ ID NO: 594345 - RNA, 22 nt, Human
ccaccccguccccucccgcccc

SEQ ID NO: 594346 - RNA, 24 nt, Human
cccacagaaagcccaccgcaaaug

SEQ ID NO: 594347 - RNA, 23 nt, Human
cccacaucaacccaaagcuugac

SEQ ID NO: 594348 - RNA, 23 nt, Human
cccaccgcaaauguucuguguau

SEQ ID NO: 594349 - RNA, 19 nt, Human
ccccaccccguccccuccc

SEQ ID NO: 594350 - RNA, 21 nt, Human
ccccaccccguccccucccgc

SEQ ID NO: 594351 - RNA, 25 nt, Human
ccccaccccguccccucccgccccu

SEQ ID NO: 594352 - RNA, 24 nt, Human
ccccuaccccagcaaggccggguu

SEQ ID NO: 594353 - RNA, 23 nt, Human
cccggccuggccccgacauuaac

SEQ ID NO: 594354 - RNA, 23 nt, Human
ccgccacccgccgaggagccgcc

SEQ ID NO: 594355 - RNA, 21 nt, Human
ccgccgaggagccgcccaagc

SEQ ID NO: 594356 - RNA, 24 nt, Human
ccgcuacggccaccaccgccaccc

SEQ ID NO: 594357 - RNA, 22 nt, Human
ccuacccacaucaacccaaagc

SEQ ID NO: 594358 - RNA, 23 nt, Human
ccuauaaacauccagacagaccu

SEQ ID NO: 594359 - RNA, 24 nt, Human
ccuauaaacauccagacagaccuu

SEQ ID NO: 594360 - RNA, 23 nt, Human
ccuaucuaccuauauaaaaaaaa

SEQ ID NO: 594361 - RNA, 25 nt, Human
ccucccgccccuaccccagcaaggc

SEQ ID NO: 594362 - RNA, 26 nt, Human
ccucccgccccuaccccagcaaggcc

SEQ ID NO: 594363 - RNA, 23 nt, Human
ccuggccccgacauuaacagggc

SEQ ID NO: 594364 - RNA, 18 nt, Human
cggccaccaccgccaccc

SEQ ID NO: 594365 - RNA, 20 nt, Human
cggccaccaccgccacccgc

SEQ ID NO: 594366 - RNA, 22 nt, Human
cuaacagacaacugaaaguaaa

SEQ ID NO: 594367 - RNA, 21 nt, Human
cuacggccaccaccgccaccc

SEQ ID NO: 594368 - RNA, 18 nt, Human
cucccccggccuggcccc

SEQ ID NO: 594369 - RNA, 18 nt, Human
cugcaguaucucguuagc

SEQ ID NO: 594370 - RNA, 25 nt, Human
cugcaguaucucguuagcaucugac

SEQ ID NO: 594371 - RNA, 23 nt, Human
cugcauuccccucaugcauugcc

SEQ ID NO: 594372 - RNA, 23 nt, Human
gaagggugaauaugcuacacaga

SEQ ID NO: 594373 - RNA, 23 nt, Human
gaggagccgcccaagcccauuug

SEQ ID NO: 594374 - RNA, 24 nt, Human
gcaaauguucuguguaucaaauau

SEQ ID NO: 594375 - RNA, 19 nt, Human
gcacauccuacccacaaca

SEQ ID NO: 594376 - RNA, 21 nt, Human
gcccaccgcaaauguucugug

SEQ ID NO: 594377 - RNA, 21 nt, Human
gccccuaccccagcaaggccg

SEQ ID NO: 594378 - RNA, 20 nt, Human
guauuguuccaggaagcagg

SEQ ID NO: 594379 - RNA, 23 nt, Human
gucuggguacggcuugcuuccug

SEQ ID NO: 594380 - RNA, 26 nt, Human
uaaaaaaaauagaauaucuuuccaga

SEQ ID NO: 594381 - RNA, 24 nt, Human
uaaaaauaugcucauuuucagaaa

SEQ ID NO: 594382 - RNA, 20 nt, Human
uaagcuaaugaccugcauau

SEQ ID NO: 594383 - RNA, 23 nt, Human
uaagucaaaaguaaauuauagua

SEQ ID NO: 594384 - RNA, 24 nt, Human
uaaucgacaugacuaaaaauaugc

SEQ ID NO: 594385 - RNA, 22 nt, Human
uacugaucuggccaaggcacac

SEQ ID NO: 594386 - RNA, 22 nt, Human
uagaagaacagcuaaucgacau

SEQ ID NO: 594387 - RNA, 21 nt, Human
uagaagacauuguaaacccau

SEQ ID NO: 594388 - RNA, 22 nt, Human
uagaagacauuguaaacccauc

SEQ ID NO: 594389 - RNA, 18 nt, Human
uagggcgccauccucccc

SEQ ID NO: 594390 - RNA, 19 nt, Human
uauaaacauccagacagac

SEQ ID NO: 594391 - RNA, 21 nt, Human
uaugccccauuaagucaaaag

SEQ ID NO: 594392 - RNA, 19 nt, Human
uaugcuacacagagcuaug

SEQ ID NO: 594393 - RNA, 24 nt, Human
ucaucuggaaacaaucacagcuac

SEQ ID NO: 594394 - RNA, 20 nt, Human
uccaauguuaacccuagaau

SEQ ID NO: 594395 - RNA, 19 nt, Human
uccccaccccguccccucc

SEQ ID NO: 594396 - RNA, 25 nt, Human
uccccaccccguccccucccgcccc

SEQ ID NO: 594397 - RNA, 23 nt, Human
ucuaguaaacagaauggaccuaa

SEQ ID NO: 594398 - RNA, 20 nt, Human
ucucuugaagugcaagggcu

SEQ ID NO: 594399 - RNA, 22 nt, Human
ucuuaggcagcagaacuggucc

SEQ ID NO: 594400 - RNA, 19 nt, Human
ugaccugcauauuuucaua

SEQ ID NO: 594401 - RNA, 20 nt, Human
ugagcacauccuacccacaa

SEQ ID NO: 594402 - RNA, 18 nt, Human
ugcuacacagagcuauga

SEQ ID NO: 594403 - RNA, 24 nt, Human
ugcuggacucugaauucuguggua

SEQ ID NO: 594404 - RNA, 18 nt, Human
uguauuaagucugaagau

SEQ ID NO: 594405 - RNA, 19 nt, Human
uguguaucaaauauccacc

SEQ ID NO: 594406 - RNA, 21 nt, Human
uguguaucaaauauccaccuc

SEQ ID NO: 594407 - RNA, 22 nt, Human
uucagaaaaacaaucuggucau

SEQ ID NO: 594408 - RNA, 21 nt, Human
uucagaggugcugccuauaaa

SEQ ID NO: 594409 - RNA, 19 nt, Human
uuccagguucaucauguca

SEQ ID NO: 594410 - RNA, 18 nt, Human
aaacugcagagacugaug

SEQ ID NO: 594411 - RNA, 19 nt, Human
aacagcacccccgcauagu

SEQ ID NO: 594412 - RNA, 23 nt, Human
aaggacagagugggugaguaagc

SEQ ID NO: 594413 - RNA, 23 nt, Human
aaggagcaggcaggagccaccag

SEQ ID NO: 594414 - RNA, 21 nt, Human
aaggagcccagggcagcugga

SEQ ID NO: 594415 - RNA, 22 nt, Human
aagggccuuuccacccucucuu

SEQ ID NO: 594416 - RNA, 20 nt, Human
aagugggggauggaggagga

SEQ ID NO: 594417 - RNA, 24 nt, Human
acaaagcaccaggaguuaauacca

SEQ ID NO: 594418 - RNA, 22 nt, Human
accauggggacagauggcaggg

SEQ ID NO: 594419 - RNA, 21 nt, Human
acccagacauggcccuggggc

SEQ ID NO: 594420 - RNA, 21 nt, Human
agaggaagaaaggccacagag

SEQ ID NO: 594421 - RNA, 23 nt, Human
agaggaagaaaggccacagagag

SEQ ID NO: 594422 - RNA, 18 nt, Human
agcccagggcagcuggac

SEQ ID NO: 594423 - RNA, 28 nt, Human
agccuacugcccagaaccccugaaacgg

SEQ ID NO: 594424 - RNA, 24 nt, Human
agcugacagaugggucaggggugg

SEQ ID NO: 594425 - RNA, 18 nt, Human
agggcagcuggaccagua

SEQ ID NO: 594426 - RNA, 19 nt, Human
agugaaggagcaggcagga

SEQ ID NO: 594427 - RNA, 21 nt, Human
agugucccuagcuuaggcagc

SEQ ID NO: 594428 - RNA, 21 nt, Human
auccucggccagugacuagga

SEQ ID NO: 594429 - RNA, 19 nt, Human
cacagagcuguaucaccau

SEQ ID NO: 594430 - RNA, 22 nt, Human
cacugucguccuguucugggaa

SEQ ID NO: 594431 - RNA, 24 nt, Human
cagccggggaugagacacaggcag

SEQ ID NO: 594432 - RNA, 20 nt, Human
caggacaacagcacccccgc

SEQ ID NO: 594433 - RNA, 21 nt, Human
caggacaacagcacccccgca

SEQ ID NO: 594434 - RNA, 23 nt, Human
caggagccaccagguucugaggc

SEQ ID NO: 594435 - RNA, 22 nt, Human
caggagccaccuuugcucuauu

SEQ ID NO: 594436 - RNA, 22 nt, Human
caggcaggacaacagcaccccc

SEQ ID NO: 594437 - RNA, 18 nt, Human
cagggcccaaggcacagg

SEQ ID NO: 594438 - RNA, 25 nt, Human
cagggcccaaggcacaggggaggcu

SEQ ID NO: 594439 - RNA, 21 nt, Human
ccagaacuugaaucacacaga

SEQ ID NO: 594440 - RNA, 21 nt, Human
cccauggcaauggugccuguc

SEQ ID NO: 594441 - RNA, 18 nt, Human
ccccauggcaauggugcc

SEQ ID NO: 594442 - RNA, 22 nt, Human
cccugggaaaaagcugacagau

SEQ ID NO: 594443 - RNA, 22 nt, Human
ccuacugcccagaaccccugaa

SEQ ID NO: 594444 - RNA, 19 nt, Human
ccuccucugucaaugaggg

SEQ ID NO: 594445 - RNA, 23 nt, Human
ccuggcuggcacauguuaguugg

SEQ ID NO: 594446 - RNA, 18 nt, Human
cgccagcaccagcugacc

SEQ ID NO: 594447 - RNA, 24 nt, Human
cuagccuuacaagcucugccagaa

SEQ ID NO: 594448 - RNA, 18 nt, Human
cuauccccacaaacacua

SEQ ID NO: 594449 - RNA, 18 nt, Human
cucccugggaaaaagcug

SEQ ID NO: 594450 - RNA, 23 nt, Human
cugacagaugggucaggggugga

SEQ ID NO: 594451 - RNA, 23 nt, Human
cugcccagaaccccugaaacggg

SEQ ID NO: 594452 - RNA, 19 nt, Human
cuggaagcccuucuuugcc

SEQ ID NO: 594453 - RNA, 20 nt, Human
cuuuccacccucucuucacc

SEQ ID NO: 594454 - RNA, 21 nt, Human
gaaaaggacucugcaggugaa

SEQ ID NO: 594455 - RNA, 20 nt, Human
gacaacagcacccccgcaua

SEQ ID NO: 594456 - RNA, 20 nt, Human
gaccagccccauggcaaugg

SEQ ID NO: 594457 - RNA, 24 nt, Human
gacccuggauggaacugguauggg

SEQ ID NO: 594458 - RNA, 18 nt, Human
gagcaggcaggagccacc

SEQ ID NO: 594459 - RNA, 20 nt, Human
gagcaggcaggagccaccag

SEQ ID NO: 594460 - RNA, 25 nt, Human
gcaaucccuucacauccuccaccau

SEQ ID NO: 594461 - RNA, 21 nt, Human
gcagccggggaugagacacag

SEQ ID NO: 594462 - RNA, 18 nt, Human
gcauggaaucuaucccca

SEQ ID NO: 594463 - RNA, 19 nt, Human
gccauguccugccuuggcc

SEQ ID NO: 594464 - RNA, 19 nt, Human
gcccuggggcugaagggcc

SEQ ID NO: 594465 - RNA, 20 nt, Human
gccucagcucugggggcagg

SEQ ID NO: 594466 - RNA, 22 nt, Human
gcuggaggcuccccauugggcc

SEQ ID NO: 594467 - RNA, 22 nt, Human
gcuuugaauaagaccuccuagg

SEQ ID NO: 594468 - RNA, 23 nt, Human
ggagcccagggcagcuggaccag

SEQ ID NO: 594469 - RNA, 20 nt, Human
ggaguggauggguggcauug

SEQ ID NO: 594470 - RNA, 20 nt, Human
ggcccuggggcugaagggcc

SEQ ID NO: 594471 - RNA, 20 nt, Human
gggaggaagauggggcaagg

SEQ ID NO: 594472 - RNA, 21 nt, Human
gggcaaggaaggaagcacuug

SEQ ID NO: 594473 - RNA, 22 nt, Human
ggggaggcucagaggccuccag

SEQ ID NO: 594474 - RNA, 19 nt, Human
ggugaagugggggauggag

SEQ ID NO: 594475 - RNA, 22 nt, Human
gguggcacucaaggccucuugu

SEQ ID NO: 594476 - RNA, 20 nt, Human
guaacacuuggcaaggagug

SEQ ID NO: 594477 - RNA, 28 nt, Human
guaugggauggggugaagugggggaugg

SEQ ID NO: 594478 - RNA, 20 nt, Human
gugaguaagcagacagggag

SEQ ID NO: 594479 - RNA, 19 nt, Human
gugugcaacaagcacaggg

SEQ ID NO: 594480 - RNA, 22 nt, Human
guucugggaacagcacaagacu

SEQ ID NO: 594481 - RNA, 20 nt, Human
guucuucccuggggguggca

SEQ ID NO: 594482 - RNA, 21 nt, Human
uaaacaagccuugccaggucc

SEQ ID NO: 594483 - RNA, 20 nt, Human
uacugcccagaaccccugaa

SEQ ID NO: 594484 - RNA, 18 nt, Human
uaggucaugaaaaggacu

SEQ ID NO: 594485 - RNA, 25 nt, Human
ucagggguggauugagcuggaaacc

SEQ ID NO: 594486 - RNA, 23 nt, Human
ucccuggggguggcacucaaggc

SEQ ID NO: 594487 - RNA, 22 nt, Human
uccuaggucaugaaaaggacuc

SEQ ID NO: 594488 - RNA, 20 nt, Human
ugaaaaggacucugcaggug

SEQ ID NO: 594489 - RNA, 21 nt, Human
ugaaggggaugguuuuacaaa

SEQ ID NO: 594490 - RNA, 21 nt, Human
ugacucucuggcuuucuccuc

SEQ ID NO: 594491 - RNA, 18 nt, Human
ugaggaaaggacagagug

SEQ ID NO: 594492 - RNA, 18 nt, Human
ugaggccaggcccagccu

SEQ ID NO: 594493 - RNA, 19 nt, Human
ugcagauggccucagcucu

SEQ ID NO: 594494 - RNA, 25 nt, Human
ugccuggcuggcacauguuaguugg

SEQ ID NO: 594495 - RNA, 20 nt, Human
uggcaaggaguggaugggug

SEQ ID NO: 594496 - RNA, 20 nt, Human
uggcacucaaggccucuugu

SEQ ID NO: 594497 - RNA, 20 nt, Human
uggcacucaaggccucuugu

SEQ ID NO: 594498 - RNA, 21 nt, Human
uggcuggaggcuccccauugg

SEQ ID NO: 594499 - RNA, 20 nt, Human
ugggaaaaagcugacagaug

SEQ ID NO: 594500 - RNA, 20 nt, Human
ugggaaaaagcugacagaug

SEQ ID NO: 594501 - RNA, 23 nt, Human
ugggaaaaagcugacagaugggu

SEQ ID NO: 594502 - RNA, 25 nt, Human
ugggaaaaagcugacagauggguca

SEQ ID NO: 594503 - RNA, 18 nt, Human
ugggaaccacccaguggc

SEQ ID NO: 594504 - RNA, 18 nt, Human
ugggaggaagauggggca

SEQ ID NO: 594505 - RNA, 18 nt, Human
ugggauggggugaagugg

SEQ ID NO: 594506 - RNA, 20 nt, Human
ugggauggggugaagugggg

SEQ ID NO: 594507 - RNA, 18 nt, Human
ugggcauggagaacccag

SEQ ID NO: 594508 - RNA, 20 nt, Human
ugggccaugggcaggggcuu

SEQ ID NO: 594509 - RNA, 23 nt, Human
uggggguggcacucaaggccucu

SEQ ID NO: 594510 - RNA, 23 nt, Human
uggggugaagugggggauggagg

SEQ ID NO: 594511 - RNA, 20 nt, Human
ugguaugggauggggugaag

SEQ ID NO: 594512 - RNA, 23 nt, Human
uguggcuucugccuucagccuuc

SEQ ID NO: 594513 - RNA, 24 nt, Human
uuauguucuucccuggggguggca

SEQ ID NO: 594514 - RNA, 25 nt, Human
uucacauccuccaccaucuggguaa

SEQ ID NO: 594515 - RNA, 19 nt, Human
uucccuggggguggcacuc

SEQ ID NO: 594516 - RNA, 23 nt, Human
uucugaggccaggcccagccuac

SEQ ID NO: 594517 - RNA, 18 nt, Human
aaacagucacggacuucc

SEQ ID NO: 594518 - RNA, 19 nt, Human
aaacagucacggacuucca

SEQ ID NO: 594519 - RNA, 24 nt, Human
aagugagcuuccucuucucagcuc

SEQ ID NO: 594520 - RNA, 25 nt, Human
caaauuuuuuucucaggaaagaagc

SEQ ID NO: 594521 - RNA, 20 nt, Human
ccaggaaacagucacggacu

SEQ ID NO: 594522 - RNA, 24 nt, Human
ccaggaaacagucacggacuucca

SEQ ID NO: 594523 - RNA, 22 nt, Human
cccuacgccggaagugagcuuc

SEQ ID NO: 594524 - RNA, 18 nt, Human
ccggaagugagcuuccuc

SEQ ID NO: 594525 - RNA, 20 nt, Human
cucccuacgccggaagugag

SEQ ID NO: 594526 - RNA, 19 nt, Human
ggugcacaggacugggagu

SEQ ID NO: 594527 - RNA, 26 nt, Human
uccgagagcaaugcgaaccucggauu

SEQ ID NO: 594528 - RNA, 22 nt, Human
ugcgaaccucggauuccggagg

SEQ ID NO: 594529 - RNA, 22 nt, Human
ugggaguacuggggaggcagaa

SEQ ID NO: 594530 - RNA, 20 nt, Human
aaacacuaaacaugucaaaa

SEQ ID NO: 594531 - RNA, 19 nt, Human
aaagccaaacuucaggacc

SEQ ID NO: 594532 - RNA, 25 nt, Human
aacacaauaguaacaacuuaaagau

SEQ ID NO: 594533 - RNA, 20 nt, Human
aagcagaaacacuaaacaug

SEQ ID NO: 594534 - RNA, 22 nt, Human
aagcagaaacacuaaacauguc

SEQ ID NO: 594535 - RNA, 23 nt, Human
acacuaaacaugucaaaacaccu

SEQ ID NO: 594536 - RNA, 22 nt, Human
acugugugcuaagugcuuuagg

SEQ ID NO: 594537 - RNA, 25 nt, Human
acuucccaauucaggauaaaagcug

SEQ ID NO: 594538 - RNA, 24 nt, Human
agaaacacuaaacaugucaaaaca

SEQ ID NO: 594539 - RNA, 26 nt, Human
agcagaaacacuaaacaugucaaaac

SEQ ID NO: 594540 - RNA, 18 nt, Human
aucuuuaagggguuuucu

SEQ ID NO: 594541 - RNA, 21 nt, Human
auuacuuuucgucaaaauaac

SEQ ID NO: 594542 - RNA, 26 nt, Human
auugccaucaaaucagaauuuugauu

SEQ ID NO: 594543 - RNA, 23 nt, Human
auuucagguucacagcaaaauug

SEQ ID NO: 594544 - RNA, 23 nt, Human
auuuucucuauuacuuuucguca

SEQ ID NO: 594545 - RNA, 23 nt, Human
cacuguaaagcagaaacacuaaa

SEQ ID NO: 594546 - RNA, 19 nt, Human
cagcacuguaaagcagaaa

SEQ ID NO: 594547 - RNA, 22 nt, Human
cagcacuguaaagcagaaacac

SEQ ID NO: 594548 - RNA, 20 nt, Human
cauucugauacagugcuaaa

SEQ ID NO: 594549 - RNA, 27 nt, Human
ggaauucagcacuguaaagcagaaaca

SEQ ID NO: 594550 - RNA, 20 nt, Human
uaaaagacaaccuaaugaca

SEQ ID NO: 594551 - RNA, 20 nt, Human
uaacacaauaguaacaacuu

SEQ ID NO: 594552 - RNA, 24 nt, Human
uaaccacaaaucugcaaaugacac

SEQ ID NO: 594553 - RNA, 20 nt, Human
uaacugagaagcaaucagua

SEQ ID NO: 594554 - RNA, 18 nt, Human
uaacuuacagguaugaua

SEQ ID NO: 594555 - RNA, 25 nt, Human
uaagaguauuaauuuaaagccaguc

SEQ ID NO: 594556 - RNA, 22 nt, Human
uaguuucuucauucugauacag

SEQ ID NO: 594557 - RNA, 31 nt, Human
uaucccaaauauacacacaauccuauuuauu

SEQ ID NO: 594558 - RNA, 20 nt, Human
ucccaauucaggauaaaagc

SEQ ID NO: 594559 - RNA, 18 nt, Human
ucuagacauaaaauaauu

SEQ ID NO: 594560 - RNA, 19 nt, Human
ugacagaaggaucccgaga

SEQ ID NO: 594561 - RNA, 21 nt, Human
ugcucuaacacuggaugauuc

SEQ ID NO: 594562 - RNA, 22 nt, Human
uuaaaagacaaccuaaugacag

SEQ ID NO: 594563 - RNA, 18 nt, Human
uucauagcuucuaaaaua

SEQ ID NO: 594564 - RNA, 22 nt, Human
uuuucauuuccaugucucuaga

SEQ ID NO: 594565 - RNA, 25 nt, Human
aaauaaaaauaaaaaggcccgaagc

SEQ ID NO: 594566 - RNA, 21 nt, Human
aacacauggcaaacaugauau

SEQ ID NO: 594567 - RNA, 19 nt, Human
aagcgucucugaaacagac

SEQ ID NO: 594568 - RNA, 18 nt, Human
acaguuuuguuucucauu

SEQ ID NO: 594569 - RNA, 20 nt, Human
accuaugaguucuuaagaac

SEQ ID NO: 594570 - RNA, 20 nt, Human
acucuguugcccaggcugga

SEQ ID NO: 594571 - RNA, 25 nt, Human
acucuguugcccaggcuggacuccg

SEQ ID NO: 594572 - RNA, 18 nt, Human
agucaucagaaagucacc

SEQ ID NO: 594573 - RNA, 24 nt, Human
aguuacucuguugcccaggcugga

SEQ ID NO: 594574 - RNA, 22 nt, Human
auucagucaucagaaagucacc

SEQ ID NO: 594575 - RNA, 21 nt, Human
cacaacacauggcaaacauga

SEQ ID NO: 594576 - RNA, 19 nt, Human
caccacaggccagugaggu

SEQ ID NO: 594577 - RNA, 18 nt, Human
cagaaagucaccuaugag

SEQ ID NO: 594578 - RNA, 19 nt, Human
cagaaagucaccuaugagu

SEQ ID NO: 594579 - RNA, 19 nt, Human
cgagcugugugcagucacc

SEQ ID NO: 594580 - RNA, 18 nt, Human
ggcuggacuccgucucaa

SEQ ID NO: 594581 - RNA, 23 nt, Human
guuacucuguugcccaggcugga

SEQ ID NO: 594582 - RNA, 19 nt, Human
uaagaaccacaacacaugg

SEQ ID NO: 594583 - RNA, 22 nt, Human
uaagaaccacaacacauggcaa

SEQ ID NO: 594584 - RNA, 19 nt, Human
uacucuguugcccaggcug

SEQ ID NO: 594585 - RNA, 24 nt, Human
uacucuguugcccaggcuggacuc

SEQ ID NO: 594586 - RNA, 19 nt, Human
ucucaaaaaauaaaaaaua

SEQ ID NO: 594587 - RNA, 24 nt, Human
ucucugaaacagacauucagucau

SEQ ID NO: 594588 - RNA, 23 nt, Human
ucugaaacagacauucagucauc

SEQ ID NO: 594589 - RNA, 18 nt, Human
ucuguugcccaggcugga

SEQ ID NO: 594590 - RNA, 22 nt, Human
uggcaaacaugauaucagaagu

SEQ ID NO: 594591 - RNA, 22 nt, Human
uguauacgccaguuccuucucu

SEQ ID NO: 594592 - RNA, 22 nt, Human
uuacucuguugcccaggcugga

SEQ ID NO: 594593 - RNA, 19 nt, Human
uuauuuauuuauuuauuug

SEQ ID NO: 594594 - RNA, 21 nt, Human
uucagucaucagaaagucacc

SEQ ID NO: 594595 - RNA, 23 nt, Human
uuugagaaggagaguuacucugu

SEQ ID NO: 594596 - RNA, 19 nt, Human
aaaaaaacagaagacacag

SEQ ID NO: 594597 - RNA, 24 nt, Human
aaaaaaacagaagacacaggaaca

SEQ ID NO: 594598 - RNA, 25 nt, Human
aaaacagaagacacaggaacagaag

SEQ ID NO: 594599 - RNA, 23 nt, Human
aaagaagaaaagcugcggcagag

SEQ ID NO: 594600 - RNA, 22 nt, Human
aaagagcuguguaugugaccuc

SEQ ID NO: 594601 - RNA, 23 nt, Human
aaagggggcaggggugcuuccag

SEQ ID NO: 594602 - RNA, 21 nt, Human
aagagcugcugaucacuggcu

SEQ ID NO: 594603 - RNA, 22 nt, Human
aagagcugcugaucacuggcuu

SEQ ID NO: 594604 - RNA, 18 nt, Human
aagaugucaaagcugcga

SEQ ID NO: 594605 - RNA, 23 nt, Human
aagcgacaugaguacaccaagau

SEQ ID NO: 594606 - RNA, 19 nt, Human
aaguugaccugcccagccu

SEQ ID NO: 594607 - RNA, 21 nt, Human
acacaaguugaccugcccagc

SEQ ID NO: 594608 - RNA, 19 nt, Human
accaacugcccuucacaug

SEQ ID NO: 594609 - RNA, 22 nt, Human
acggcauccucccagggugagg

SEQ ID NO: 594610 - RNA, 23 nt, Human
agaaaaaaacagaagacacagga

SEQ ID NO: 594611 - RNA, 19 nt, Human
agaagacacaggaacagaa

SEQ ID NO: 594612 - RNA, 21 nt, Human
agagcuguguaugugaccucc

SEQ ID NO: 594613 - RNA, 23 nt, Human
agaugucaaagcugcgacgggcu

SEQ ID NO: 594614 - RNA, 22 nt, Human
agcaacgauucaccagaaaaaa

SEQ ID NO: 594615 - RNA, 19 nt, Human
aggcagaaaagggcaauaa

SEQ ID NO: 594616 - RNA, 20 nt, Human
aggcgaggccucugcgccuc

SEQ ID NO: 594617 - RNA, 18 nt, Human
agggagccccaagagggc

SEQ ID NO: 594618 - RNA, 20 nt, Human
agggagccccaagagggcau

SEQ ID NO: 594619 - RNA, 22 nt, Human
agggggcaggggugcuuccagg

SEQ ID NO: 594620 - RNA, 22 nt, Human
caacugcccuucacaugaucuc

SEQ ID NO: 594621 - RNA, 24 nt, Human
caccaaguccacagcaagcaacga

SEQ ID NO: 594622 - RNA, 18 nt, Human
caccagaaaaaaacagaa

SEQ ID NO: 594623 - RNA, 22 nt, Human
caccagaaaaaaacagaagaca

SEQ ID NO: 594624 - RNA, 22 nt, Human
caccagaaaaaaacagaagacu

SEQ ID NO: 594625 - RNA, 19 nt, Human
cagaaaagggcaauaaaaa

SEQ ID NO: 594626 - RNA, 27 nt, Human
cagcaagcaacgauucaccagaaaaaa

SEQ ID NO: 594627 - RNA, 18 nt, Human
caggaggccugccugacc

SEQ ID NO: 594628 - RNA, 20 nt, Human
cagggccaguggcgaaacca

SEQ ID NO: 594629 - RNA, 24 nt, Human
cagggccaguggcgaaaccaggag

SEQ ID NO: 594630 - RNA, 22 nt, Human
caggggugcuuccaggucaagc

SEQ ID NO: 594631 - RNA, 21 nt, Human
caggguccccucucagguggg

SEQ ID NO: 594632 - RNA, 21 nt, Human
caucauacuagugucggcccc

SEQ ID NO: 594633 - RNA, 19 nt, Human
ccacacugcguccuucagg

SEQ ID NO: 594634 - RNA, 22 nt, Human
ccaccccgagcucucccaagug

SEQ ID NO: 594635 - RNA, 20 nt, Human
ccagaaaaaaacagaagaca

SEQ ID NO: 594636 - RNA, 29 nt, Human
ccagaaaaaaacagaagacacaggaacaa

SEQ ID NO: 594637 - RNA, 22 nt, Human
cccaccacugcuccuccaaagg

SEQ ID NO: 594638 - RNA, 21 nt, Human
ccccaucugucuugcacuaaa

SEQ ID NO: 594639 - RNA, 25 nt, Human
ccccccggccuaaccugaccggaaa

SEQ ID NO: 594640 - RNA, 18 nt, Human
cccccggccuaaccugac

SEQ ID NO: 594641 - RNA, 18 nt, Human
ccccgguggccgacugug

SEQ ID NO: 594642 - RNA, 26 nt, Human
ccgcacccccccggccuaaccugacc

SEQ ID NO: 594643 - RNA, 22 nt, Human
ccuccaacuacucagagguggg

SEQ ID NO: 594644 - RNA, 19 nt, Human
ccucuacacacacgugcag

SEQ ID NO: 594645 - RNA, 18 nt, Human
ccugaaaagggggcaggg

SEQ ID NO: 594646 - RNA, 19 nt, Human
ccugaaaagggggcagggg

SEQ ID NO: 594647 - RNA, 21 nt, Human
cgccacggcauccucccaggg

SEQ ID NO: 594648 - RNA, 23 nt, Human
cggaaacucgaaaucagucgccc

SEQ ID NO: 594649 - RNA, 20 nt, Human
cggccccugagggcaccccu

SEQ ID NO: 594650 - RNA, 20 nt, Human
cuaaaaggcucaccaagggc

SEQ ID NO: 594651 - RNA, 22 nt, Human
cuaggccaguggcauccacacu

SEQ ID NO: 594652 - RNA, 18 nt, Human
cucagggugccagccggc

SEQ ID NO: 594653 - RNA, 26 nt, Human
cuccaccuccuuccgaccaggaccgc

SEQ ID NO: 594654 - RNA, 20 nt, Human
cuguguaugugaccuccaac

SEQ ID NO: 594655 - RNA, 20 nt, Human
gaaaaaaacagaagacacag

SEQ ID NO: 594656 - RNA, 22 nt, Human
gacaggguccccucucaggugg

SEQ ID NO: 594657 - RNA, 20 nt, Human
gcacugaucuggcuccuggg

SEQ ID NO: 594658 - RNA, 22 nt, Human
gcuuaagugaugaggcauuuuc

SEQ ID NO: 594659 - RNA, 20 nt, Human
ggaaaacagccccaucuggu

SEQ ID NO: 594660 - RNA, 20 nt, Human
ggcaggugaggggcaaaugg

SEQ ID NO: 594661 - RNA, 19 nt, Human
ggcaugaggaaaaagaaga

SEQ ID NO: 594662 - RNA, 24 nt, Human
gggcaggggugcuuccaggucaag

SEQ ID NO: 594663 - RNA, 22 nt, Human
uaaaaaaagagcuguguaugug

SEQ ID NO: 594664 - RNA, 18 nt, Human
uaaaaggcucaccaaggg

SEQ ID NO: 594665 - RNA, 24 nt, Human
uacccccaccacugcuccuccaaa

SEQ ID NO: 594666 - RNA, 22 nt, Human
uccacacugcguccuucaggag

SEQ ID NO: 594667 - RNA, 19 nt, Human
ucccugaaaagggggcagg

SEQ ID NO: 594668 - RNA, 21 nt, Human
ucggccccugagggcaccccu

SEQ ID NO: 594669 - RNA, 20 nt, Human
ucuacccaauuccucccuca

SEQ ID NO: 594670 - RNA, 20 nt, Human
ucucccaaguggcaggaguu

SEQ ID NO: 594671 - RNA, 22 nt, Human
ucugcgccucauucuccaggag

SEQ ID NO: 594672 - RNA, 24 nt, Human
ucugggcagaagcggaugugcugg

SEQ ID NO: 594673 - RNA, 21 nt, Human
ugacccccgacucuccaccuc

SEQ ID NO: 594674 - RNA, 23 nt, Human
ugacccccgacucuccaccuccu

SEQ ID NO: 594675 - RNA, 21 nt, Human
ugaggggcaaaugguaauacu

SEQ ID NO: 594676 - RNA, 25 nt, Human
ugaguacaccaagaugucaaagcug

SEQ ID NO: 594677 - RNA, 19 nt, Human
uggacaggguccccucuca

SEQ ID NO: 594678 - RNA, 20 nt, Human
ugggaggagacgccacggca

SEQ ID NO: 594679 - RNA, 20 nt, Human
ugggaggggguaacacaagg

SEQ ID NO: 594680 - RNA, 24 nt, Human
ugggggaaaacagccccaucuguc

SEQ ID NO: 594681 - RNA, 25 nt, Human
ugguaauacugggaggggguaacac

SEQ ID NO: 594682 - RNA, 21 nt, Human
uucagaggcagaaaagggcaa

SEQ ID NO: 594683 - RNA, 18 nt, Human
uuccuccccucugagucc

SEQ ID NO: 594684 - RNA, 19 nt, Human
uuggagaguuucuacccaa

SEQ ID NO: 594685 - RNA, 21 nt, Human
aaaaacaaugacuauaaaagc

SEQ ID NO: 594686 - RNA, 18 nt, Human
aaaagcuacaggaaaggu

SEQ ID NO: 594687 - RNA, 21 nt, Human
aaaccugggugagggcuggua

SEQ ID NO: 594688 - RNA, 26 nt, Human
aacaaaaaacaauaaauuaaaaguca

SEQ ID NO: 594689 - RNA, 19 nt, Human
aacagaauguuccuggggu

SEQ ID NO: 594690 - RNA, 22 nt, Human
aaccaaggcaauccacucacaa

SEQ ID NO: 594691 - RNA, 21 nt, Human
aaccuaggcacauccuccugu

SEQ ID NO: 594692 - RNA, 24 nt, Human
aaggagcuuuuacccuccaaaucc

SEQ ID NO: 594693 - RNA, 23 nt, Human
aaggcgggcggaucacgagguca

SEQ ID NO: 594694 - RNA, 22 nt, Human
aaggcucuaaguggcccaaagc

SEQ ID NO: 594695 - RNA, 20 nt, Human
aauacaaugaucuacacuuc

SEQ ID NO: 594696 - RNA, 21 nt, Human
aauccccaaacuagaagcaaa

SEQ ID NO: 594697 - RNA, 20 nt, Human
acagagcgagacuccgucuc

SEQ ID NO: 594698 - RNA, 24 nt, Human
acagagcgagacuccgucucaaaa

SEQ ID NO: 594699 - RNA, 24 nt, Human
accaaaaaaaaaacaaugaacugg

SEQ ID NO: 594700 - RNA, 20 nt, Human
accacagugaaaccccgucu

SEQ ID NO: 594701 - RNA, 24 nt, Human
accccgucucuacuaaaaauacaa

SEQ ID NO: 594702 - RNA, 18 nt, Human
acgccacugcacuccagc

SEQ ID NO: 594703 - RNA, 22 nt, Human
acgccacugcacuccagccugg

SEQ ID NO: 594704 - RNA, 24 nt, Human
acuacgccacugcacuccagccug

SEQ ID NO: 594705 - RNA, 28 nt, Human
acuccgucucaaaaaaaaaaaaaaaaaa

SEQ ID NO: 594706 - RNA, 24 nt, Human
acugcacuccagccugggugacag

SEQ ID NO: 594707 - RNA, 26 nt, Human
acugcacuccagccugggugacagag

SEQ ID NO: 594708 - RNA, 19 nt, Human
acugcugagaucuccuuga

SEQ ID NO: 594709 - RNA, 25 nt, Human
agaaaagagaaacacagacacaagg

SEQ ID NO: 594710 - RNA, 23 nt, Human
agaaacacagacacaaggcacgc

SEQ ID NO: 594711 - RNA, 22 nt, Human
agagcuuuuguauuuucccagu

SEQ ID NO: 594712 - RNA, 24 nt, Human
agccugggugacagagcgagacuc

SEQ ID NO: 594713 - RNA, 23 nt, Human
agcgcaauccccaaacuagaagc

SEQ ID NO: 594714 - RNA, 18 nt, Human
agcuuuuguauuuuccca

SEQ ID NO: 594715 - RNA, 21 nt, Human
aggaaauucagucuggucaca

SEQ ID NO: 594716 - RNA, 19 nt, Human
aggcacuuggcccacgcca

SEQ ID NO: 594717 - RNA, 24 nt, Human
aggcaggagaacggcgugaaccca

SEQ ID NO: 594718 - RNA, 22 nt, Human
aggcauguugcaguggucugug

SEQ ID NO: 594719 - RNA, 21 nt, Human
aggccaaggcgggcggaucac

SEQ ID NO: 594720 - RNA, 23 nt, Human
aggccaaggcgggcggaucacga

SEQ ID NO: 594721 - RNA, 24 nt, Human
aggcggagcuugcagugagccgag

SEQ ID NO: 594722 - RNA, 18 nt, Human
aggcgggcggaucacgag

SEQ ID NO: 594723 - RNA, 24 nt, Human
aggcgggcggaucacgaggucagg

SEQ ID NO: 594724 - RNA, 19 nt, Human
aggcugaggcaggagaacg

SEQ ID NO: 594725 - RNA, 20 nt, Human
aguagcagcuuuauucuaaa

SEQ ID NO: 594726 - RNA, 20 nt, Human
aucacgaggucaggagaucc

SEQ ID NO: 594727 - RNA, 22 nt, Human
aucccagcaccuugggaggcca

SEQ ID NO: 594728 - RNA, 20 nt, Human
augacaagaaaagacaugua

SEQ ID NO: 594729 - RNA, 24 nt, Human
caaacuagaagcaaacugcccuua

SEQ ID NO: 594730 - RNA, 22 nt, Human
caauccccaaacuagaagcaaa

SEQ ID NO: 594731 - RNA, 20 nt, Human
cacagacacaaggcacgcca

SEQ ID NO: 594732 - RNA, 18 nt, Human
cacagugaaaccccgucu

SEQ ID NO: 594733 - RNA, 19 nt, Human
cacagugaaaccccgucuc

SEQ ID NO: 594734 - RNA, 18 nt, Human
caccagcauggcuacacc

SEQ ID NO: 594735 - RNA, 24 nt, Human
cacgcuuguaaucccagcaccuug

SEQ ID NO: 594736 - RNA, 22 nt, Human
cacuccagccugggugacagag

SEQ ID NO: 594737 - RNA, 23 nt, Human
cacuccagccugggugacagagc

SEQ ID NO: 594738 - RNA, 24 nt, Human
cacuccagccugggugacagagcg

SEQ ID NO: 594739 - RNA, 19 nt, Human
cacugcacuccagccuggg

SEQ ID NO: 594740 - RNA, 21 nt, Human
cacugcacuccagccugggug

SEQ ID NO: 594741 - RNA, 22 nt, Human
cacugcacuccagccuggguga

SEQ ID NO: 594742 - RNA, 23 nt, Human
cacugcacuccagccugggugac

SEQ ID NO: 594743 - RNA, 24 nt, Human
cacugcacuccagccugggugaca

SEQ ID NO: 594744 - RNA, 25 nt, Human
cacugcacuccagccugggugacag

SEQ ID NO: 594745 - RNA, 22 nt, Human
cagaguugaaacauaaucuguc

SEQ ID NO: 594746 - RNA, 24 nt, Human
cagcaccuugggaggccaaggcgg

SEQ ID NO: 594747 - RNA, 21 nt, Human
cagcccacucauacagcauug

SEQ ID NO: 594748 - RNA, 18 nt, Human
cauagauguacuuugcuc

SEQ ID NO: 594749 - RNA, 20 nt, Human
cauauaaccuaggcacaucc

SEQ ID NO: 594750 - RNA, 20 nt, Human
ccacugcacuccagccuggg

SEQ ID NO: 594751 - RNA, 20 nt, Human
ccacugcacuccagccuggg

SEQ ID NO: 594752 - RNA, 21 nt, Human
ccacugcacuccagccugggu

SEQ ID NO: 594753 - RNA, 21 nt, Human
ccacugcacuccagccugggu

SEQ ID NO: 594754 - RNA, 23 nt, Human
ccacugcacuccagccuggguga

SEQ ID NO: 594755 - RNA, 24 nt, Human
ccacugcacuccagccugggugac

SEQ ID NO: 594756 - RNA, 22 nt, Human
ccaggaggaacaauuccuugcc

SEQ ID NO: 594757 - RNA, 26 nt, Human
cccaaacuagaagcaaacugcccuua

SEQ ID NO: 594758 - RNA, 21 nt, Human
ccuggggucaguuacagugaa

SEQ ID NO: 594759 - RNA, 22 nt, Human
ccugggugacagagcgagacuc

SEQ ID NO: 594760 - RNA, 21 nt, Human
ccuguagucccagcuucucag

SEQ ID NO: 594761 - RNA, 20 nt, Human
ccuucauugggcuagcgcaa

SEQ ID NO: 594762 - RNA, 24 nt, Human
cgagacuacgccacugcacuccag

SEQ ID NO: 594763 - RNA, 24 nt, Human
cgccuguagucccagcuucucaga

SEQ ID NO: 594764 - RNA, 23 nt, Human
cgcuuguaaucccagcaccuugg

SEQ ID NO: 594765 - RNA, 24 nt, Human
cgcuuguaaucccagcaccuuggg

SEQ ID NO: 594766 - RNA, 18 nt, Human
cucaaaaaaaaaaaaaaa

SEQ ID NO: 594767 - RNA, 23 nt, Human
cucacgcuuguaaucccagcacc

SEQ ID NO: 594768 - RNA, 24 nt, Human
cucacgcuuguaaucccagcaccu

SEQ ID NO: 594769 - RNA, 19 nt, Human
cuccgucucaaaaaaaaaa

SEQ ID NO: 594770 - RNA, 20 nt, Human
cucuaaguggcccaaagcuu

SEQ ID NO: 594771 - RNA, 19 nt, Human
cuugcagugagccgagacu

SEQ ID NO: 594772 - RNA, 21 nt, Human
cuugcagugagccgagacuac

SEQ ID NO: 594773 - RNA, 23 nt, Human
gaaaagagaaacacagacacaag

SEQ ID NO: 594774 - RNA, 24 nt, Human
gacagagcgagacuccgucucaaa

SEQ ID NO: 594775 - RNA, 24 nt, Human
gaccacagugaaaccccgucucua

SEQ ID NO: 594776 - RNA, 24 nt, Human
gcacuccagccugggugacagagc

SEQ ID NO: 594777 - RNA, 18 nt, Human
gcagaaugagcugcagag

SEQ ID NO: 594778 - RNA, 22 nt, Human
gcaggagaacggcgugaaccca

SEQ ID NO: 594779 - RNA, 19 nt, Human
gccacugcacuccagccug

SEQ ID NO: 594780 - RNA, 24 nt, Human
gccacugcacuccagccuggguga

SEQ ID NO: 594781 - RNA, 18 nt, Human
ggaaggcauguugcagug

SEQ ID NO: 594782 - RNA, 18 nt, Human
ggagcuugcagugagccg

SEQ ID NO: 594783 - RNA, 20 nt, Human
ggauacagagggccaacugu

SEQ ID NO: 594784 - RNA, 21 nt, Human
ggcggaucacgaggucaggag

SEQ ID NO: 594785 - RNA, 18 nt, Human
ggcgugguggcgggcgcc

SEQ ID NO: 594786 - RNA, 22 nt, Human
ggcgugguggcgggcgccugua

SEQ ID NO: 594787 - RNA, 24 nt, Human
gggugcgguggcucacgcuuguaa

SEQ ID NO: 594788 - RNA, 24 nt, Human
ggucaggagaucgagaccacagug

SEQ ID NO: 594789 - RNA, 24 nt, Human
gguggcgggcgccuguagucccag

SEQ ID NO: 594790 - RNA, 23 nt, Human
gguggcucacgcuuguaauccca

SEQ ID NO: 594791 - RNA, 24 nt, Human
gguggcucacgcuuguaaucccag

SEQ ID NO: 594792 - RNA, 20 nt, Human
guaaaauucauugugacuga

SEQ ID NO: 594793 - RNA, 23 nt, Human
guggcucacgcuuguaaucccag

SEQ ID NO: 594794 - RNA, 20 nt, Human
guucacugcugagaucuccu

SEQ ID NO: 594795 - RNA, 21 nt, Human
uaaaaccugggugagggcugg

SEQ ID NO: 594796 - RNA, 21 nt, Human
uacugaccauauacugagcac

SEQ ID NO: 594797 - RNA, 23 nt, Human
uagaagcaaacugcccuuaauau

SEQ ID NO: 594798 - RNA, 24 nt, Human
uagcagcuuuauucuaaaaggcua

SEQ ID NO: 594799 - RNA, 23 nt, Human
uauaaccuaggcacauccuccug

SEQ ID NO: 594800 - RNA, 27 nt, Human
uauacuguauugguuuuuaaauuugua

SEQ ID NO: 594801 - RNA, 23 nt, Human
uauauaaugauccagcagggaag

SEQ ID NO: 594802 - RNA, 20 nt, Human
uauuuucaaaugaaguggaa

SEQ ID NO: 594803 - RNA, 22 nt, Human
ucaaaaaaaaaaaaaaaaaaaa

SEQ ID NO: 594804 - RNA, 23 nt, Human
ucaaaaaaaaaaaaaaaaaaaaa

SEQ ID NO: 594805 - RNA, 25 nt, Human
ucaaaaaaaaaaaaaaaaaaaaaau

SEQ ID NO: 594806 - RNA, 18 nt, Human
ucacgaggucaggagauc

SEQ ID NO: 594807 - RNA, 24 nt, Human
ucacgaggucaggagaucgagacc

SEQ ID NO: 594808 - RNA, 20 nt, Human
ucaggcacuuggcccacgcc

SEQ ID NO: 594809 - RNA, 25 nt, Human
ucaggccgggugcgguggcucacgc

SEQ ID NO: 594810 - RNA, 19 nt, Human
uccaaaagcuucaucaccu

SEQ ID NO: 594811 - RNA, 21 nt, Human
uccaaacuugguugaauucac

SEQ ID NO: 594812 - RNA, 24 nt, Human
uccagcagggaaggcauguugcag

SEQ ID NO: 594813 - RNA, 23 nt, Human
uccagccugggugacagagcgag

SEQ ID NO: 594814 - RNA, 24 nt, Human
uccagccugggugacagagcgaga

SEQ ID NO: 594815 - RNA, 19 nt, Human
uccguaacugggagaaccc

SEQ ID NO: 594816 - RNA, 25 nt, Human
uccguaacugggagaacccagguug

SEQ ID NO: 594817 - RNA, 23 nt, Human
uccgucucaaaaaaaaaaaaaaa

SEQ ID NO: 594818 - RNA, 25 nt, Human
ucucuacuaaaaauacaaaaaaauu

SEQ ID NO: 594819 - RNA, 23 nt, Human
ugaaaaacaaugacuauaaaagc

SEQ ID NO: 594820 - RNA, 23 nt, Human
ugaauucacagauauagagcuca

SEQ ID NO: 594821 - RNA, 19 nt, Human
ugacugacuuuuggaaggg

SEQ ID NO: 594822 - RNA, 18 nt, Human
ugagaucuccuugauuug

SEQ ID NO: 594823 - RNA, 24 nt, Human
ugaggcaggagaacggcgugaacc

SEQ ID NO: 594824 - RNA, 25 nt, Human
ugaggcaggagaacggcgugaaccc

SEQ ID NO: 594825 - RNA, 19 nt, Human
ugauuggcucguccaauga

SEQ ID NO: 594826 - RNA, 22 nt, Human
ugcauauaaccuaggcacaucc

SEQ ID NO: 594827 - RNA, 21 nt, Human
uggcccacgccaggugcucug

SEQ ID NO: 594828 - RNA, 24 nt, Human
uggcucacgcuuguaaucccagca

SEQ ID NO: 594829 - RNA, 24 nt, Human
ugggaggccaaggcgggcggauca

SEQ ID NO: 594830 - RNA, 25 nt, Human
ugggagugagaugaaaauucaguau

SEQ ID NO: 594831 - RNA, 24 nt, Human
ugguggcgggcgccuguaguccca

SEQ ID NO: 594832 - RNA, 22 nt, Human
uguacuauuuuucucgcacucu

SEQ ID NO: 594833 - RNA, 23 nt, Human
uguauuuucccaguucacugcug

SEQ ID NO: 594834 - RNA, 23 nt, Human
ugugaaggagcuuuuacccucca

SEQ ID NO: 594835 - RNA, 23 nt, Human
ugugacugacuuuuggaaggggu

SEQ ID NO: 594836 - RNA, 18 nt, Human
uuagccgggcgugguggc

SEQ ID NO: 594837 - RNA, 24 nt, Human
uuagccgggcgugguggcgggcgc

SEQ ID NO: 594838 - RNA, 18 nt, Human
uugcagugagccgagacu

SEQ ID NO: 594839 - RNA, 20 nt, Human
uugcagugagccgagacuac

SEQ ID NO: 594840 - RNA, 21 nt, Human
uugcagugagccgagacuacg

SEQ ID NO: 594841 - RNA, 23 nt, Human
uugcuaaaucaucucuagauugc

SEQ ID NO: 594842 - RNA, 21 nt, Human
uuucaggguaaguuuuuauag

SEQ ID NO: 594843 - RNA, 19 nt, Human
uuucaucguuauguauauu

SEQ ID NO: 594844 - RNA, 20 nt, Human
uuuuuuuuuuuuaaggcucu

SEQ ID NO: 594845 - RNA, 23 nt, Human
uuuuuuuuuuuuuuuuuuuaagg

SEQ ID NO: 594846 - RNA, 23 nt, Human
aaaccaguaaaucaauuuguauc

SEQ ID NO: 594847 - RNA, 19 nt, Human
aaagacauagauaaaugcu

SEQ ID NO: 594848 - RNA, 19 nt, Human
aaaucaguacuuaaaacca

SEQ ID NO: 594849 - RNA, 19 nt, Human
aacaaauuucucaacaaua

SEQ ID NO: 594850 - RNA, 20 nt, Human
aacauagcaaaacucugucc

SEQ ID NO: 594851 - RNA, 25 nt, Human
aagccugauguucugaucuacugga

SEQ ID NO: 594852 - RNA, 23 nt, Human
aaucagcaaaauaaaaaccagua

SEQ ID NO: 594853 - RNA, 24 nt, Human
aaucugggcaacauagcaaaacuc

SEQ ID NO: 594854 - RNA, 25 nt, Human
acagcuaauucagaaagggaacaau

SEQ ID NO: 594855 - RNA, 24 nt, Human
accuccacugcucagaaauggccc

SEQ ID NO: 594856 - RNA, 18 nt, Human
acucugucccuacaaaac

SEQ ID NO: 594857 - RNA, 24 nt, Human
acugcacucuagccugggcaacag

SEQ ID NO: 594858 - RNA, 24 nt, Human
acugcacucuagccugggcaacag

SEQ ID NO: 594859 - RNA, 24 nt, Human
agaaauggcccgcgccgcagcucg

SEQ ID NO: 594860 - RNA, 23 nt, Human
agcugggcauggugguacaugcc

SEQ ID NO: 594861 - RNA, 20 nt, Human
aggaguuugagaccaaucug

SEQ ID NO: 594862 - RNA, 19 nt, Human
aggcaggaggaucgcuuga

SEQ ID NO: 594863 - RNA, 23 nt, Human
aggcaggaggaucgcuugagcuc

SEQ ID NO: 594864 - RNA, 24 nt, Human
aggcuaaggcaggaggaucgcuug

SEQ ID NO: 594865 - RNA, 24 nt, Human
aucaugccacugcacucuagccug

SEQ ID NO: 594866 - RNA, 21 nt, Human
aucuauuaccacgaggaacag

SEQ ID NO: 594867 - RNA, 20 nt, Human
augccuauagucccagcaac

SEQ ID NO: 594868 - RNA, 21 nt, Human
auuaaaaaaaaaaaaaaagau

SEQ ID NO: 594869 - RNA, 23 nt, Human
caaagcacuuuaaauuauuuuaa

SEQ ID NO: 594870 - RNA, 21 nt, Human
caacucaagaggcuaaggcag

SEQ ID NO: 594871 - RNA, 24 nt, Human
caauauaaacaaaucuuuugggua

SEQ ID NO: 594872 - RNA, 24 nt, Human
caauauaaucuaugaaauagcauc

SEQ ID NO: 594873 - RNA, 18 nt, Human
caauaugccauuuaaaau

SEQ ID NO: 594874 - RNA, 22 nt, Human
cacagcccacagaccacagccc

SEQ ID NO: 594875 - RNA, 25 nt, Human
cacagcccacagaccacagcccggg

SEQ ID NO: 594876 - RNA, 18 nt, Human
cacaggauuugaugacag

SEQ ID NO: 594877 - RNA, 19 nt, Human
cacugcacucuagccuggg

SEQ ID NO: 594878 - RNA, 21 nt, Human
cacugcacucuagccugggca

SEQ ID NO: 594879 - RNA, 22 nt, Human
cacugcacucuagccugggcaa

SEQ ID NO: 594880 - RNA, 23 nt, Human
cacugcacucuagccugggcaac

SEQ ID NO: 594881 - RNA, 24 nt, Human
cacugcacucuagccugggcaaca

SEQ ID NO: 594882 - RNA, 21 nt, Human
cagcacaggauuugaugacag

SEQ ID NO: 594883 - RNA, 23 nt, Human
caggagugagaggccaggaguuu

SEQ ID NO: 594884 - RNA, 20 nt, Human
ccacugcacucuagccuggg

SEQ ID NO: 594885 - RNA, 20 nt, Human
ccacugcacucuagccuggg

SEQ ID NO: 594886 - RNA, 21 nt, Human
ccacugcacucuagccugggc

SEQ ID NO: 594887 - RNA, 23 nt, Human
ccacugcacucuagccugggcaa

SEQ ID NO: 594888 - RNA, 24 nt, Human
ccacugcacucuagccugggcaac

SEQ ID NO: 594889 - RNA, 30 nt, Human
cccacagcccacagaccacagcccggggcc

SEQ ID NO: 594890 - RNA, 24 nt, Human
cccgcgccgcagcucgucccacag

SEQ ID NO: 594891 - RNA, 25 nt, Human
ccgcggcgcgaucccaguuccuuuu

SEQ ID NO: 594892 - RNA, 22 nt, Human
ccuauagucccagcaacucaag

SEQ ID NO: 594893 - RNA, 23 nt, Human
ccuccaucuaacaguuacuuuua

SEQ ID NO: 594894 - RNA, 24 nt, Human
ccugacauuaaaaaaaaaaaaaaa

SEQ ID NO: 594895 - RNA, 23 nt, Human
cggcaggagugagaggccaggag

SEQ ID NO: 594896 - RNA, 18 nt, Human
cucaagagguugaugcaa

SEQ ID NO: 594897 - RNA, 23 nt, Human
cucgcgcaacaucggucccuggg

SEQ ID NO: 594898 - RNA, 22 nt, Human
cucgucccacagcccacagacc

SEQ ID NO: 594899 - RNA, 19 nt, Human
cugggcaacauagcaaaac

SEQ ID NO: 594900 - RNA, 19 nt, Human
cuugaaaccuccacugcuc

SEQ ID NO: 594901 - RNA, 22 nt, Human
cuugaaaccuccacugcucaga

SEQ ID NO: 594902 - RNA, 19 nt, Human
cuuuuggguacucaacaua

SEQ ID NO: 594903 - RNA, 22 nt, Human
gaaaacacgggcauaagucugg

SEQ ID NO: 594904 - RNA, 18 nt, Human
gaucaugccacugcacuc

SEQ ID NO: 594905 - RNA, 24 nt, Human
gcacucuagccugggcaacagagc

SEQ ID NO: 594906 - RNA, 24 nt, Human
gccacugcacucuagccugggcaa

SEQ ID NO: 594907 - RNA, 21 nt, Human
gcccacagaccacagcccggg

SEQ ID NO: 594908 - RNA, 19 nt, Human
ggcaggagugagaggccag

SEQ ID NO: 594909 - RNA, 19 nt, Human
ggccaggaguuugagacca

SEQ ID NO: 594910 - RNA, 21 nt, Human
gggcgggguaaggggcuucgg

SEQ ID NO: 594911 - RNA, 21 nt, Human
gguacaugccuauagucccag

SEQ ID NO: 594912 - RNA, 22 nt, Human
guggaaaacaaauuucucaaca

SEQ ID NO: 594913 - RNA, 20 nt, Human
uaaacugaaauaagcuauga

SEQ ID NO: 594914 - RNA, 23 nt, Human
uaagacaaaagauuaauaaaaac

SEQ ID NO: 594915 - RNA, 22 nt, Human
uaaggcaggaggaucgcuugag

SEQ ID NO: 594916 - RNA, 21 nt, Human
uaauaguaauuauaaauuagc

SEQ ID NO: 594917 - RNA, 21 nt, Human
uaccuuaaauauaccaaauau

SEQ ID NO: 594918 - RNA, 19 nt, Human
uauaaucuaugaaauagca

SEQ ID NO: 594919 - RNA, 26 nt, Human
uccacauauaacaaacaugauuaaac

SEQ ID NO: 594920 - RNA, 19 nt, Human
ucccugggcagcgcaacug

SEQ ID NO: 594921 - RNA, 22 nt, Human
ucccugggcagcgcaacuguaa

SEQ ID NO: 594922 - RNA, 19 nt, Human
ugaaaacacgggcauaagu

SEQ ID NO: 594923 - RNA, 28 nt, Human
ugaaaacacgggcauaaguuggagaccc

SEQ ID NO: 594924 - RNA, 24 nt, Human
ugaaaauaaaguuuuaaaucauuc

SEQ ID NO: 594925 - RNA, 22 nt, Human
ugacaaguggaaaacaaauuuc

SEQ ID NO: 594926 - RNA, 24 nt, Human
ugguacaugccuauagucccagca

SEQ ID NO: 594927 - RNA, 24 nt, Human
uggugguacaugccuauaguccca

SEQ ID NO: 594928 - RNA, 23 nt, Human
uuaaauauaccaaauauuauaau

SEQ ID NO: 594929 - RNA, 18 nt, Human
uuagcugggcaugguggu

SEQ ID NO: 594930 - RNA, 24 nt, Human
uuagcugggcauggugguacaugc

SEQ ID NO: 594931 - RNA, 18 nt, Human
uuuuaauuuuuuuucccu

SEQ ID NO: 594932 - RNA, 23 nt, Human
uuuuuccuuuuuacacaaaguau

SEQ ID NO: 594933 - RNA, 19 nt, Human
aaaccugaaagcccuggug

SEQ ID NO: 594934 - RNA, 18 nt, Human
aaaguaagucauaauaua

SEQ ID NO: 594935 - RNA, 18 nt, Human
aacaugugcccaaggugg

SEQ ID NO: 594936 - RNA, 24 nt, Human
aagaaaugguaccuggaaccugga

SEQ ID NO: 594937 - RNA, 19 nt, Human
aagaccacaaugcucacca

SEQ ID NO: 594938 - RNA, 23 nt, Human
aagaccccgucucaaaaaaacaa

SEQ ID NO: 594939 - RNA, 21 nt, Human
aagagacaaaauggcagagua

SEQ ID NO: 594940 - RNA, 24 nt, Human
aagcaaaaacggcaacaaccccgg

SEQ ID NO: 594941 - RNA, 21 nt, Human
aagcaacaaaaccugaaagcc

SEQ ID NO: 594942 - RNA, 18 nt, Human
aagccugcccugccaacc

SEQ ID NO: 594943 - RNA, 21 nt, Human
aagccugcccugccaaccccg

SEQ ID NO: 594944 - RNA, 21 nt, Human
aaggccccagaaguacgccaa

SEQ ID NO: 594945 - RNA, 27 nt, Human
acaaaaccugaaagcccuggugcaggc

SEQ ID NO: 594946 - RNA, 19 nt, Human
acaacaagaccccgucuca

SEQ ID NO: 594947 - RNA, 22 nt, Human
acaacucaaaggucggagcagg

SEQ ID NO: 594948 - RNA, 19 nt, Human
acacaacaagaccccgucu

SEQ ID NO: 594949 - RNA, 20 nt, Human
acacaacaagaccccgucuc

SEQ ID NO: 594950 - RNA, 19 nt, Human
acaggggcuggggaaggga

SEQ ID NO: 594951 - RNA, 20 nt, Human
acagugcagcuggggggcag

SEQ ID NO: 594952 - RNA, 20 nt, Human
acccacugcgaaugcucacg

SEQ ID NO: 594953 - RNA, 23 nt, Human
accccgacagaccccagggcuug

SEQ ID NO: 594954 - RNA, 19 nt, Human
accccgucucaaaaaaaca

SEQ ID NO: 594955 - RNA, 18 nt, Human
acgcacuguaccccuggc

SEQ ID NO: 594956 - RNA, 18 nt, Human
acuacacucuaaccuggg

SEQ ID NO: 594957 - RNA, 22 nt, Human
acucaaaggucggagcagggga

SEQ ID NO: 594958 - RNA, 24 nt, Human
agaguucuuuccaucuaccugcuc

SEQ ID NO: 594959 - RNA, 22 nt, Human
agauguacuguucauugcugca

SEQ ID NO: 594960 - RNA, 21 nt, Human
agauucccccucaugcccacc

SEQ ID NO: 594961 - RNA, 18 nt, Human
agcaaaaacggcaacaag

SEQ ID NO: 594962 - RNA, 24 nt, Human
agcagauggggcaagucgcggcgc

SEQ ID NO: 594963 - RNA, 19 nt, Human
agcauguuuucucuuuuac

SEQ ID NO: 594964 - RNA, 18 nt, Human
agccugggcaacauggug

SEQ ID NO: 594965 - RNA, 18 nt, Human
agccugggcaacauggug

SEQ ID NO: 594966 - RNA, 23 nt, Human
agcuggggggcaguaagaaauga

SEQ ID NO: 594967 - RNA, 21 nt, Human
aggaggcggcggcagggcugg

SEQ ID NO: 594968 - RNA, 23 nt, Human
aggaguucaagaccagccugggc

SEQ ID NO: 594969 - RNA, 21 nt, Human
aggcagcccacccuaaggaaa

SEQ ID NO: 594970 - RNA, 23 nt, Human
aggcaggagaucaauuaagcccg

SEQ ID NO: 594971 - RNA, 22 nt, Human
aggcuacaagugaauuuaaaca

SEQ ID NO: 594972 - RNA, 19 nt, Human
aggcucacuguagugagcc

SEQ ID NO: 594973 - RNA, 22 nt, Human
aggcucacuguagugagccgag

SEQ ID NO: 594974 - RNA, 22 nt, Human
aggcugccaugaucagugcccc

SEQ ID NO: 594975 - RNA, 21 nt, Human
agggagaggcaauuucccaau

SEQ ID NO: 594976 - RNA, 18 nt, Human
agggaugcggcucugcgg

SEQ ID NO: 594977 - RNA, 19 nt, Human
agggcaggacuccccagac

SEQ ID NO: 594978 - RNA, 20 nt, Human
agggcucagcuucuccucug

SEQ ID NO: 594979 - RNA, 20 nt, Human
aggggcuggggaagggaugc

SEQ ID NO: 594980 - RNA, 20 nt, Human
aggugugccccuuccaggag

SEQ ID NO: 594981 - RNA, 22 nt, Human
agguuggaaaguaagucauaau

SEQ ID NO: 594982 - RNA, 27 nt, Human
aguccaggaguucaagaccagccuggg

SEQ ID NO: 594983 - RNA, 18 nt, Human
agugcagcuggggggcag

SEQ ID NO: 594984 - RNA, 19 nt, Human
aguguagacgcacuguacc

SEQ ID NO: 594985 - RNA, 21 nt, Human
auaaaacccaucugaugagaa

SEQ ID NO: 594986 - RNA, 18 nt, Human
auaaacuuccacucccgc

SEQ ID NO: 594987 - RNA, 24 nt, Human
auacauacaacuucacaaacccac

SEQ ID NO: 594988 - RNA, 18 nt, Human
aucaguuuaguccuugag

SEQ ID NO: 594989 - RNA, 23 nt, Human
augcugcacuccaccuccacagu

SEQ ID NO: 594990 - RNA, 23 nt, Human
auuaagcccgggaggcugaggcu

SEQ ID NO: 594991 - RNA, 22 nt, Human
auucaggcucugagaagucacc

SEQ ID NO: 594992 - RNA, 19 nt, Human
caaaaacggcaacaaggaa

SEQ ID NO: 594993 - RNA, 26 nt, Human
caaaacagcuuuguagggucauuuca

SEQ ID NO: 594994 - RNA, 21 nt, Human
caacaggccaucccguccccc

SEQ ID NO: 594995 - RNA, 21 nt, Human
caacaggccaucccguccccc

SEQ ID NO: 594996 - RNA, 20 nt, Human
caacuucacaaacccacugc

SEQ ID NO: 594997 - RNA, 21 nt, Human
caagcgcauuaagagacaaaa

SEQ ID NO: 594998 - RNA, 18 nt, Human
caagggcgccugcaggcc

SEQ ID NO: 594999 - RNA, 19 nt, Human
cacaaacccacugcgaaug

SEQ ID NO: 595000 - RNA, 26 nt, Human
cacaacaagaccccgucucaaaaaaa

SEQ ID NO: 595001 - RNA, 25 nt, Human
caccaguccaaggggcugcggucac

SEQ ID NO: 595002 - RNA, 18 nt, Human
caccaugguaacuccaca

SEQ ID NO: 595003 - RNA, 19 nt, Human
caccaugguaacuccacaa

SEQ ID NO: 595004 - RNA, 27 nt, Human
cacuacacucuaaccugggugacacaa

SEQ ID NO: 595005 - RNA, 21 nt, Human
cacuucccucucgcucugcca

SEQ ID NO: 595006 - RNA, 22 nt, Human
cagaccccuuagauaggaauuu

SEQ ID NO: 595007 - RNA, 23 nt, Human
cagcugauuaugccaggugacac

SEQ ID NO: 595008 - RNA, 22 nt, Human
cauacaacuucacaaacccacu

SEQ ID NO: 595009 - RNA, 23 nt, Human
caugaucagugccccgcuccacc

SEQ ID NO: 595010 - RNA, 19 nt, Human
cauggcauccccucgaucc

SEQ ID NO: 595011 - RNA, 19 nt, Human
cauugcguuacaacugccu

SEQ ID NO: 595012 - RNA, 19 nt, Human
ccaagaccacaaugcucac

SEQ ID NO: 595013 - RNA, 23 nt, Human
ccacaagggcgccugcaggcccc

SEQ ID NO: 595014 - RNA, 25 nt, Human
ccaccccccgccaacccucuaucug

SEQ ID NO: 595015 - RNA, 26 nt, Human
ccaccuucauggcauccccucgaucc

SEQ ID NO: 595016 - RNA, 24 nt, Human
ccacuacacucuaaccugggugac

SEQ ID NO: 595017 - RNA, 22 nt, Human
ccaggggagacauucaggcucu

SEQ ID NO: 595018 - RNA, 21 nt, Human
cccacagccuggguguggggc

SEQ ID NO: 595019 - RNA, 22 nt, Human
cccaccuucauccacagaugua

SEQ ID NO: 595020 - RNA, 23 nt, Human
cccccacacaaaacagcuuugua

SEQ ID NO: 595021 - RNA, 26 nt, Human
ccccgccaacccucuaucugcccacc

SEQ ID NO: 595022 - RNA, 21 nt, Human
ccccgcuccaccccccgccaa

SEQ ID NO: 595023 - RNA, 23 nt, Human
ccccgcuccaccccccgccaacc

SEQ ID NO: 595024 - RNA, 19 nt, Human
cccuaacaggaggaccgcu

SEQ ID NO: 595025 - RNA, 22 nt, Human
cccuuggggcuggccacagcag

SEQ ID NO: 595026 - RNA, 21 nt, Human
ccgacacccagucacaugacc

SEQ ID NO: 595027 - RNA, 23 nt, Human
ccuacacaaggcucuucugcacc

SEQ ID NO: 595028 - RNA, 21 nt, Human
ccucagaggcacucccucucc

SEQ ID NO: 595029 - RNA, 18 nt, Human
ccucagucuccuuuuucc

SEQ ID NO: 595030 - RNA, 24 nt, Human
ccucucgcucugccaucccuugau

SEQ ID NO: 595031 - RNA, 20 nt, Human
ccugcaggccccaagaccac

SEQ ID NO: 595032 - RNA, 19 nt, Human
ccugcaggccccaagaccu

SEQ ID NO: 595033 - RNA, 19 nt, Human
ccuggaaccuggagaucag

SEQ ID NO: 595034 - RNA, 19 nt, Human
ccugggcaacaugguggca

SEQ ID NO: 595035 - RNA, 23 nt, Human
ccugggugacacaacaagacccc

SEQ ID NO: 595036 - RNA, 18 nt, Human
ccuguggucccagcuacu

SEQ ID NO: 595037 - RNA, 21 nt, Human
ccuguggucccagcuacuugg

SEQ ID NO: 595038 - RNA, 26 nt, Human
ccuuguccacaggccccaaucagcug

SEQ ID NO: 595039 - RNA, 21 nt, Human
cgacagaccccagggcuuggc

SEQ ID NO: 595040 - RNA, 24 nt, Human
cggacacccacagccuuguccaca

SEQ ID NO: 595041 - RNA, 22 nt, Human
cgggaggcugaggcucacugua

SEQ ID NO: 595042 - RNA, 30 nt, Human
cgugaccuggugucugaauccccagcaccc

SEQ ID NO: 595043 - RNA, 26 nt, Human
cuacacucuaaccugggugacacaac

SEQ ID NO: 595044 - RNA, 21 nt, Human
cucaaauauucgccaccccua

SEQ ID NO: 595045 - RNA, 19 nt, Human
cuccaccccccgccaaccc

SEQ ID NO: 595046 - RNA, 18 nt, Human
cuccucugggacucucuu

SEQ ID NO: 595047 - RNA, 23 nt, Human
cucggaaacuugccucagucucc

SEQ ID NO: 595048 - RNA, 18 nt, Human
cugcacuccaccuccaca

SEQ ID NO: 595049 - RNA, 19 nt, Human
cugcacuucccucucgcuc

SEQ ID NO: 595050 - RNA, 20 nt, Human
cuggcugucuaaaaaugauc

SEQ ID NO: 595051 - RNA, 20 nt, Human
cuggugcaggcuggcaggaa

SEQ ID NO: 595052 - RNA, 22 nt, Human
cuguagugagccgagacggcgc

SEQ ID NO: 595053 - RNA, 23 nt, Human
cuucuccucugggacucucuucu

SEQ ID NO: 595054 - RNA, 21 nt, Human
cuuugauuuuucuuccuugac

SEQ ID NO: 595055 - RNA, 19 nt, Human
gaacaugugcccaaggugg

SEQ ID NO: 595056 - RNA, 20 nt, Human
gaagucuaauagucgcugcc

SEQ ID NO: 595057 - RNA, 18 nt, Human
gacacuuaccauugcguu

SEQ ID NO: 595058 - RNA, 23 nt, Human
gaccccuuagauaggaauuuggg

SEQ ID NO: 595059 - RNA, 23 nt, Human
gaccuggugucugaauccccagc

SEQ ID NO: 595060 - RNA, 24 nt, Human
gagaacaugugcccaagguggucg

SEQ ID NO: 595061 - RNA, 18 nt, Human
gaggaccgcuucagucca

SEQ ID NO: 595062 - RNA, 20 nt, Human
gagggcaccgugcaugcagg

SEQ ID NO: 595063 - RNA, 21 nt, Human
gauucccccucaugcccaccu

SEQ ID NO: 595064 - RNA, 18 nt, Human
gcaaauuuucccccacac

SEQ ID NO: 595065 - RNA, 22 nt, Human
gcaaauuuucccccacacaaaa

SEQ ID NO: 595066 - RNA, 22 nt, Human
gcagacccaugugaauucacca

SEQ ID NO: 595067 - RNA, 21 nt, Human
gcccacccuaaggaaagcauc

SEQ ID NO: 595068 - RNA, 19 nt, Human
gcccaugacacaguccuca

SEQ ID NO: 595069 - RNA, 21 nt, Human
gccuaacacaggggcugggga

SEQ ID NO: 595070 - RNA, 19 nt, Human
gccucacggccuaacacag

SEQ ID NO: 595071 - RNA, 18 nt, Human
gccucagccccuccucca

SEQ ID NO: 595072 - RNA, 24 nt, Human
gcggcggcagggcuggucuucugg

SEQ ID NO: 595073 - RNA, 22 nt, Human
ggaaaggucaagcagaaaugag

SEQ ID NO: 595074 - RNA, 20 nt, Human
ggaggaccgcuucaguccag

SEQ ID NO: 595075 - RNA, 18 nt, Human
ggaggcugaggcucacug

SEQ ID NO: 595076 - RNA, 22 nt, Human
ggaugaugaaaucaccuaacaa

SEQ ID NO: 595077 - RNA, 21 nt, Human
ggcaagucgcggcgccugggg

SEQ ID NO: 595078 - RNA, 21 nt, Human
ggcauccccucgaucccaccu

SEQ ID NO: 595079 - RNA, 18 nt, Human
ggcgccuggggacagagg

SEQ ID NO: 595080 - RNA, 19 nt, Human
ggcuuccaauaaaaucuca

SEQ ID NO: 595081 - RNA, 21 nt, Human
gggagggucuggaagaaaaag

SEQ ID NO: 595082 - RNA, 24 nt, Human
gggcacagugcagcuggggggcag

SEQ ID NO: 595083 - RNA, 23 nt, Human
gggcguccuaccggaaaagggaa

SEQ ID NO: 595084 - RNA, 18 nt, Human
gggcugaggcaggagauc

SEQ ID NO: 595085 - RNA, 20 nt, Human
ggucccagcuacuugggggg

SEQ ID NO: 595086 - RNA, 20 nt, Human
ggugggccuccucugcagca

SEQ ID NO: 595087 - RNA, 24 nt, Human
guaccuggaaccuggagaucaggu

SEQ ID NO: 595088 - RNA, 26 nt, Human
gucucaaaaaaacaaaauaaaaaaag

SEQ ID NO: 595089 - RNA, 18 nt, Human
guggggcaggcugucuca

SEQ ID NO: 595090 - RNA, 22 nt, Human
uaagcaacaaaaccugaaagcc

SEQ ID NO: 595091 - RNA, 23 nt, Human
uaagcaacaaaaccugaaagccc

SEQ ID NO: 595092 - RNA, 18 nt, Human
uaagucauaauauauagg

SEQ ID NO: 595093 - RNA, 25 nt, Human
uacaacuucacaaacccacugcgaa

SEQ ID NO: 595094 - RNA, 23 nt, Human
uaccggaaaagggaagcagccuc

SEQ ID NO: 595095 - RNA, 23 nt, Human
uacuuggggggcugaggcaggag

SEQ ID NO: 595096 - RNA, 22 nt, Human
uagcucaggaggugugccccuu

SEQ ID NO: 595097 - RNA, 21 nt, Human
uaggguuaaauaaaacccauc

SEQ ID NO: 595098 - RNA, 21 nt, Human
uauauaagaccccaagucaaa

SEQ ID NO: 595099 - RNA, 22 nt, Human
uauauaagaccccaagucaaaa

SEQ ID NO: 595100 - RNA, 22 nt, Human
uaugccaggugacacggagggg

SEQ ID NO: 595101 - RNA, 18 nt, Human
ucaaaggucggagcaggg

SEQ ID NO: 595102 - RNA, 22 nt, Human
ucaaauauucgccaccccuaac

SEQ ID NO: 595103 - RNA, 24 nt, Human
ucaaaugcugcacuccaccuccac

SEQ ID NO: 595104 - RNA, 20 nt, Human
ucacggccuaacacaggggc

SEQ ID NO: 595105 - RNA, 19 nt, Human
ucacuguagugagccgaga

SEQ ID NO: 595106 - RNA, 22 nt, Human
ucagccagugagaccuagugcc

SEQ ID NO: 595107 - RNA, 23 nt, Human
ucagccccuccuccaggaagccu

SEQ ID NO: 595108 - RNA, 23 nt, Human
uccaagcaaaaacggcaacaagg

SEQ ID NO: 595109 - RNA, 22 nt, Human
uccaaggaggcaagaguugagg

SEQ ID NO: 595110 - RNA, 20 nt, Human
uccaaggggcugcggucacc

SEQ ID NO: 595111 - RNA, 25 nt, Human
uccaaguguacuuuuucuuuccugc

SEQ ID NO: 595112 - RNA, 22 nt, Human
uccacaauauaguuuccaagca

SEQ ID NO: 595113 - RNA, 19 nt, Human
uccacaggccccaaucagc

SEQ ID NO: 595114 - RNA, 19 nt, Human
uccagaagcaacaggccau

SEQ ID NO: 595115 - RNA, 23 nt, Human
uccaggcuacaagugaauuuaaa

SEQ ID NO: 595116 - RNA, 21 nt, Human
uccccaagggcuguuucuacc

SEQ ID NO: 595117 - RNA, 19 nt, Human
uccggagugcaaggagggc

SEQ ID NO: 595118 - RNA, 23 nt, Human
uccggagugcaaggagggcaccg

SEQ ID NO: 595119 - RNA, 21 nt, Human
uccucaggagguccugagaac

SEQ ID NO: 595120 - RNA, 20 nt, Human
uccugcugcagggagagcuc

SEQ ID NO: 595121 - RNA, 24 nt, Human
uccugcugcagggagagcuccagc

SEQ ID NO: 595122 - RNA, 21 nt, Human
ucucgcucugccaucccuuga

SEQ ID NO: 595123 - RNA, 20 nt, Human
ucugauuugcagggcaggac

SEQ ID NO: 595124 - RNA, 24 nt, Human
ucugcagcagauggggccgggguc

SEQ ID NO: 595125 - RNA, 23 nt, Human
ugaaaagcaguguagacgcacug

SEQ ID NO: 595126 - RNA, 19 nt, Human
ugaauccccagcaccaguc

SEQ ID NO: 595127 - RNA, 19 nt, Human
ugaggugauggucccacag

SEQ ID NO: 595128 - RNA, 27 nt, Human
ugcaugacccuggaugugcuaagcaac

SEQ ID NO: 595129 - RNA, 21 nt, Human
ugccccgcuccaccccccgcc

SEQ ID NO: 595130 - RNA, 24 nt, Human
ugccccgcuccaccccccgccaac

SEQ ID NO: 595131 - RNA, 24 nt, Human
ugccuguggucccagcuacuuggg

SEQ ID NO: 595132 - RNA, 23 nt, Human
ugcugcacuccaccuccacagug

SEQ ID NO: 595133 - RNA, 19 nt, Human
ugcuugggucucuuccaag

SEQ ID NO: 595134 - RNA, 24 nt, Human
uggcacgugccuguggucccagcu

SEQ ID NO: 595135 - RNA, 18 nt, Human
uggcaggaugagagggag

SEQ ID NO: 595136 - RNA, 19 nt, Human
uggcaggaugagagggaga

SEQ ID NO: 595137 - RNA, 21 nt, Human
uggccuaaguguguuguucau

SEQ ID NO: 595138 - RNA, 18 nt, Human
uggggcaagucgcggcgc

SEQ ID NO: 595139 - RNA, 20 nt, Human
uggggcaggcugucucaucc

SEQ ID NO: 595140 - RNA, 23 nt, Human
uggggggcugaggcaggagauca

SEQ ID NO: 595141 - RNA, 21 nt, Human
uggguaagugggcuagagcaa

SEQ ID NO: 595142 - RNA, 19 nt, Human
ugguaccuggaaccuggag

SEQ ID NO: 595143 - RNA, 24 nt, Human
uggucccagcuacuuggggggcug

SEQ ID NO: 595144 - RNA, 24 nt, Human
ugguggcacgugccugugguccca

SEQ ID NO: 595145 - RNA, 24 nt, Human
uguacuguucauugcugcaaggga

SEQ ID NO: 595146 - RNA, 19 nt, Human
uguagacgcacuguacccc

SEQ ID NO: 595147 - RNA, 22 nt, Human
ugucugaauccccagcaccagu

SEQ ID NO: 595148 - RNA, 20 nt, Human
uguggacaggggcacagugc

SEQ ID NO: 595149 - RNA, 21 nt, Human
uuaaaaaagagucaaaaaugu

SEQ ID NO: 595150 - RNA, 21 nt, Human
uuaaacacauuuugagguaaa

SEQ ID NO: 595151 - RNA, 20 nt, Human
uuacagaugcaaauuuuccc

SEQ ID NO: 595152 - RNA, 22 nt, Human
uucacaaacccacugcgaaugc

SEQ ID NO: 595153 - RNA, 22 nt, Human
uucaccacugacaacucaaaua

SEQ ID NO: 595154 - RNA, 21 nt, Human
uucaggcucugagaagucacc

SEQ ID NO: 595155 - RNA, 22 nt, Human
uucaguccaggaguucaagacc

SEQ ID NO: 595156 - RNA, 22 nt, Human
uuccaagcaaaaacggcaacaa

SEQ ID NO: 595157 - RNA, 19 nt, Human
uuccuauucagaucuuuca

SEQ ID NO: 595158 - RNA, 24 nt, Human
uucuuuacagaugcaaauuuuccc

SEQ ID NO: 595159 - RNA, 24 nt, Human
uuggggggcugaggcaggagauca

SEQ ID NO: 595160 - RNA, 21 nt, Human
uuguucauccagccugcagaa

SEQ ID NO: 595161 - RNA, 20 nt, Human
uuuaauaaacuuccacuccc

SEQ ID NO: 595162 - RNA, 18 nt, Human
uuuuauguauuuuaggga

SEQ ID NO: 595163 - RNA, 24 nt, Human
aaaaaaaaguauauguaaacagaa

SEQ ID NO: 595164 - RNA, 20 nt, Human
aaaaacaaauaaaagugccc

SEQ ID NO: 595165 - RNA, 19 nt, Human
aaaaacccacaaauuuccc

SEQ ID NO: 595166 - RNA, 23 nt, Human
aaaaacccacaaauuuccccaac

SEQ ID NO: 595167 - RNA, 19 nt, Human
aaaaaggcagaauuacaau

SEQ ID NO: 595168 - RNA, 24 nt, Human
aaaauacacauucaauauagccaa

SEQ ID NO: 595169 - RNA, 24 nt, Human
aaacagaaaaaaaaaacccucuag

SEQ ID NO: 595170 - RNA, 18 nt, Human
aacacuggccuguggcac

SEQ ID NO: 595171 - RNA, 23 nt, Human
aagaagccauauguuaacuuagg

SEQ ID NO: 595172 - RNA, 19 nt, Human
aaguccugguauagagaag

SEQ ID NO: 595173 - RNA, 26 nt, Human
agaaaaaauucuuccaaaaaggcaga

SEQ ID NO: 595174 - RNA, 22 nt, Human
agccacagaacuauuucaaccu

SEQ ID NO: 595175 - RNA, 22 nt, Human
auacaucuuaauaaaagaacuc

SEQ ID NO: 595176 - RNA, 19 nt, Human
auacugagcuaagaagucc

SEQ ID NO: 595177 - RNA, 23 nt, Human
aucaaugccaagauuuacaaauu

SEQ ID NO: 595178 - RNA, 19 nt, Human
caacagaaaaacuuacauc

SEQ ID NO: 595179 - RNA, 22 nt, Human
caacagaaaaacuuacauccag

SEQ ID NO: 595180 - RNA, 23 nt, Human
caacagaaaaacuuacauccaga

SEQ ID NO: 595181 - RNA, 21 nt, Human
cacaacauucagcuuccuaag

SEQ ID NO: 595182 - RNA, 23 nt, Human
cagagauucuuuucccauuauuu

SEQ ID NO: 595183 - RNA, 18 nt, Human
ccacaacuuucuucuugu

SEQ ID NO: 595184 - RNA, 20 nt, Human
ccacaacuuucuucuuguag

SEQ ID NO: 595185 - RNA, 23 nt, Human
cuuucuggacuaccaaaggaaua

SEQ ID NO: 595186 - RNA, 18 nt, Human
gagaagcagagagaccaa

SEQ ID NO: 595187 - RNA, 23 nt, Human
gauacaucuuaauaaaagaacuc

SEQ ID NO: 595188 - RNA, 19 nt, Human
gaugauguuucuuucugga

SEQ ID NO: 595189 - RNA, 19 nt, Human
gcccaaguuuuaagaagcc

SEQ ID NO: 595190 - RNA, 22 nt, Human
gugaacuuaagaugacuuguuu

SEQ ID NO: 595191 - RNA, 18 nt, Human
uaaacagaaaaaaaaaac

SEQ ID NO: 595192 - RNA, 24 nt, Human
uaaugauaaagccuguccaaguac

SEQ ID NO: 595193 - RNA, 20 nt, Human
uacacauucaauauagccaa

SEQ ID NO: 595194 - RNA, 24 nt, Human
uagagaagcagagagaccaaccua

SEQ ID NO: 595195 - RNA, 23 nt, Human
uaggagaacacucuuuaaugaua

SEQ ID NO: 595196 - RNA, 25 nt, Human
uagugauaacacaacauucagcuuc

SEQ ID NO: 595197 - RNA, 21 nt, Human
uauagagaagcagagagacca

SEQ ID NO: 595198 - RNA, 22 nt, Human
uauauauuucaccaacaacacu

SEQ ID NO: 595199 - RNA, 26 nt, Human
uaucucaacaauacauuuauuacuug

SEQ ID NO: 595200 - RNA, 21 nt, Human
uauguaaacagaaaaaaaaaa

SEQ ID NO: 595201 - RNA, 22 nt, Human
uauguaaacagaaaaaaaaaac

SEQ ID NO: 595202 - RNA, 25 nt, Human
uauuagugauaacacaacauucagc

SEQ ID NO: 595203 - RNA, 18 nt, Human
uauuucaaccuguacccu

SEQ ID NO: 595204 - RNA, 22 nt, Human
uauuucaaccuguacccuuaau

SEQ ID NO: 595205 - RNA, 21 nt, Human
ucacuaaagaaaaauacacau

SEQ ID NO: 595206 - RNA, 21 nt, Human
uccucagugucaauauaucuc

SEQ ID NO: 595207 - RNA, 25 nt, Human
ucucuuucacuucuagcagaagcug

SEQ ID NO: 595208 - RNA, 21 nt, Human
ucuuaggacagccacagaacu

SEQ ID NO: 595209 - RNA, 18 nt, Human
ugaagggagaugauacug

SEQ ID NO: 595210 - RNA, 19 nt, Human
ugccaagauuuacaaauuc

SEQ ID NO: 595211 - RNA, 22 nt, Human
ugcuaaguacugaaauaaaaca

SEQ ID NO: 595212 - RNA, 22 nt, Human
uguaaacagaaaaaaaaaaccc

SEQ ID NO: 595213 - RNA, 24 nt, Human
uguaaacagaaaaaaaaaacccuc

SEQ ID NO: 595214 - RNA, 23 nt, Human
uuccccaacuauagcuuaucugu

SEQ ID NO: 595215 - RNA, 20 nt, Human
uucuaguuuuaaaaagaagc

SEQ ID NO: 595216 - RNA, 20 nt, Human
uuuauaagcuccucaguguc

SEQ ID NO: 595217 - RNA, 23 nt, Human
aaacaggaggaaucggggcaagg

SEQ ID NO: 595218 - RNA, 21 nt, Human
aaauggcugcaggaaagccga

SEQ ID NO: 595219 - RNA, 23 nt, Human
aagcacuggcagaucacgcacuu

SEQ ID NO: 595220 - RNA, 20 nt, Human
aaugccucgucugggauuca

SEQ ID NO: 595221 - RNA, 20 nt, Human
acaggcagaggacguccaca

SEQ ID NO: 595222 - RNA, 20 nt, Human
accccgggaacacccuggcc

SEQ ID NO: 595223 - RNA, 21 nt, Human
acccuggccccuuucccuaac

SEQ ID NO: 595224 - RNA, 19 nt, Human
accgacccaccugcugcgc

SEQ ID NO: 595225 - RNA, 23 nt, Human
acucuacacugcacaaugucaaa

SEQ ID NO: 595226 - RNA, 21 nt, Human
agaaagcacuggcagaucacg

SEQ ID NO: 595227 - RNA, 20 nt, Human
agaggacguccacaaacacc

SEQ ID NO: 595228 - RNA, 21 nt, Human
aggaaacagcuucugcuuuug

SEQ ID NO: 595229 - RNA, 24 nt, Human
agggaugccagacccucggccucc

SEQ ID NO: 595230 - RNA, 23 nt, Human
caacccuggggagcgcaaacagg

SEQ ID NO: 595231 - RNA, 26 nt, Human
cagaacccacagaccugccugcaggg

SEQ ID NO: 595232 - RNA, 22 nt, Human
cagggacaagguggcuccaaag

SEQ ID NO: 595233 - RNA, 25 nt, Human
ccaaaacggcacuggaaaaugugac

SEQ ID NO: 595234 - RNA, 22 nt, Human
ccagacccucggccuccuggac

SEQ ID NO: 595235 - RNA, 20 nt, Human
ccagaugcccagugggcuca

SEQ ID NO: 595236 - RNA, 25 nt, Human
cccaaccccgggaacacccuggccc

SEQ ID NO: 595237 - RNA, 21 nt, Human
cccaaggaguuuagucuccuu

SEQ ID NO: 595238 - RNA, 20 nt, Human
cccacagaccugccugcagg

SEQ ID NO: 595239 - RNA, 21 nt, Human
cccaggggcguggaaaggccc

SEQ ID NO: 595240 - RNA, 23 nt, Human
ccccaaccccgggaacacccugg

SEQ ID NO: 595241 - RNA, 21 nt, Human
cccgcgcugcauccccgggac

SEQ ID NO: 595242 - RNA, 26 nt, Human
cccggccccugccccgcaccgguucc

SEQ ID NO: 595243 - RNA, 23 nt, Human
cccggccccugccccgcacuccc

SEQ ID NO: 595244 - RNA, 21 nt, Human
ccgcgcugcauccccgggacc

SEQ ID NO: 595245 - RNA, 18 nt, Human
ccggccccugccccgcac

SEQ ID NO: 595246 - RNA, 19 nt, Human
ccuccggggggacccggcc

SEQ ID NO: 595247 - RNA, 23 nt, Human
ccuccuggacgcacagcgggggc

SEQ ID NO: 595248 - RNA, 19 nt, Human
ccugcagggccccucaccg

SEQ ID NO: 595249 - RNA, 20 nt, Human
ccuggacgcacagcgggggc

SEQ ID NO: 595250 - RNA, 19 nt, Human
cgaaaaggcuaaacagcug

SEQ ID NO: 595251 - RNA, 22 nt, Human
cggcaaagcggccccuccggaa

SEQ ID NO: 595252 - RNA, 24 nt, Human
cggcaaagcggccccuccggaacg

SEQ ID NO: 595253 - RNA, 22 nt, Human
cgggggcucgcaccccaacccc

SEQ ID NO: 595254 - RNA, 25 nt, Human
cucacaacuucccagcaagaaaugu

SEQ ID NO: 595255 - RNA, 20 nt, Human
cucagacagacagaucuuua

SEQ ID NO: 595256 - RNA, 23 nt, Human
cucgcaccccaaccccgggaaca

SEQ ID NO: 595257 - RNA, 31 nt, Human
cucgcaccccaaccccgggaacacccuggcc

SEQ ID NO: 595258 - RNA, 23 nt, Human
cugugaucucugcgagcuacucc

SEQ ID NO: 595259 - RNA, 25 nt, Human
gaccacuugcuaauugauuucccau

SEQ ID NO: 595260 - RNA, 20 nt, Human
gagcgcuggcccagggugug

SEQ ID NO: 595261 - RNA, 22 nt, Human
gcaaacaggaggaaucggggca

SEQ ID NO: 595262 - RNA, 25 nt, Human
gccggucccagccgcccccucgugc

SEQ ID NO: 595263 - RNA, 21 nt, Human
gcuccaaaggagaggugccaa

SEQ ID NO: 595264 - RNA, 18 nt, Human
ggagcgcaaacaggagga

SEQ ID NO: 595265 - RNA, 19 nt, Human
ggggacccggccccugccc

SEQ ID NO: 595266 - RNA, 23 nt, Human
gggggcucgcaccccaaccccgg

SEQ ID NO: 595267 - RNA, 18 nt, Human
ggucugaaaacccugccu

SEQ ID NO: 595268 - RNA, 18 nt, Human
guaugggugaaaaguuuc

SEQ ID NO: 595269 - RNA, 21 nt, Human
gugacuugaagaaagcacugg

SEQ ID NO: 595270 - RNA, 20 nt, Human
guggaaaggcccaaugccuc

SEQ ID NO: 595271 - RNA, 22 nt, Human
uacauugcaaccaguucucaca

SEQ ID NO: 595272 - RNA, 20 nt, Human
uaccccaggccggucccagc

SEQ ID NO: 595273 - RNA, 24 nt, Human
uacuaaaugggcugggacccacgg

SEQ ID NO: 595274 - RNA, 24 nt, Human
uagccagggacaagguggcuccaa

SEQ ID NO: 595275 - RNA, 23 nt, Human
ucaggagcggauucagggcacag

SEQ ID NO: 595276 - RNA, 22 nt, Human
ucauugcuguguaaugcuggug

SEQ ID NO: 595277 - RNA, 22 nt, Human
ucucagccaccuccggggggac

SEQ ID NO: 595278 - RNA, 20 nt, Human
ugacccccgcgcugcauccc

SEQ ID NO: 595279 - RNA, 24 nt, Human
ugaggcguccucaccgucuacccu

SEQ ID NO: 595280 - RNA, 21 nt, Human
ugcaaccaguucucacauuua

SEQ ID NO: 595281 - RNA, 24 nt, Human
ugcaagcauuucugugaucucugc

SEQ ID NO: 595282 - RNA, 23 nt, Human
uguguuuacagaggugagggcuu

SEQ ID NO: 595283 - RNA, 25 nt, Human
uuagccucaggagcggauucagggc

SEQ ID NO: 595284 - RNA, 19 nt, Human
uucagggcacaggcagagg

SEQ ID NO: 595285 - RNA, 22 nt, Human
uucccguggacccuucucguug

SEQ ID NO: 595286 - RNA, 21 nt, Human
aaaacaaacaaacaaaagagc

SEQ ID NO: 595287 - RNA, 22 nt, Human
aaaacaaacaaacaaaagagca

SEQ ID NO: 595288 - RNA, 23 nt, Human
aaaacaaacaaacaaaagagcac

SEQ ID NO: 595289 - RNA, 18 nt, Human
aaaagagcacagugaacu

SEQ ID NO: 595290 - RNA, 19 nt, Human
aacaaaagagcacagugaa

SEQ ID NO: 595291 - RNA, 22 nt, Human
aacaaaccccuuuuggacagaa

SEQ ID NO: 595292 - RNA, 19 nt, Human
aacauugccucugcugagu

SEQ ID NO: 595293 - RNA, 20 nt, Human
aacucuagaguuuucagaga

SEQ ID NO: 595294 - RNA, 28 nt, Human
aagaggaacaaaccccuuuuggacagaa

SEQ ID NO: 595295 - RNA, 21 nt, Human
aaguugccuaagacacaacuu

SEQ ID NO: 595296 - RNA, 20 nt, Human
acaaacaaaagagcacagug

SEQ ID NO: 595297 - RNA, 22 nt, Human
acaaacaaugcaguaauaaugc

SEQ ID NO: 595298 - RNA, 19 nt, Human
acauaaaauaaaaaaaucu

SEQ ID NO: 595299 - RNA, 19 nt, Human
acauguauugacuaauucc

SEQ ID NO: 595300 - RNA, 20 nt, Human
accaaaacaaacaaacaaaa

SEQ ID NO: 595301 - RNA, 18 nt, Human
acuccagauucaggcaag

SEQ ID NO: 595302 - RNA, 20 nt, Human
agaagcaaauggaagacuug

SEQ ID NO: 595303 - RNA, 24 nt, Human
aggaacaaaccccuuuuggacaga

SEQ ID NO: 595304 - RNA, 19 nt, Human
aggguaauaauaaggcaug

SEQ ID NO: 595305 - RNA, 18 nt, Human
auaaugccucugguuuua

SEQ ID NO: 595306 - RNA, 20 nt, Human
aucacugucguugaaaacuu

SEQ ID NO: 595307 - RNA, 22 nt, Human
caaacaaacaaaagagcacagu

SEQ ID NO: 595308 - RNA, 28 nt, Human
caaacaaacaaaagagcacagugaacuc

SEQ ID NO: 595309 - RNA, 21 nt, Human
cacauaaaacagacuuguaac

SEQ ID NO: 595310 - RNA, 18 nt, Human
cacuggacaucgaaguuc

SEQ ID NO: 595311 - RNA, 18 nt, Human
cagagggcucaaccccac

SEQ ID NO: 595312 - RNA, 24 nt, Human
caugguggccucuuggggucccuu

SEQ ID NO: 595313 - RNA, 21 nt, Human
cauuuuagaauucucaugaaa

SEQ ID NO: 595314 - RNA, 26 nt, Human
ccaaaacaaacaaacaaaagagcaca

SEQ ID NO: 595315 - RNA, 27 nt, Human
ccaaaacaaacaaacaaaagagcacag

SEQ ID NO: 595316 - RNA, 21 nt, Human
ccuaagacacaacuuccuaca

SEQ ID NO: 595317 - RNA, 18 nt, Human
ccucucuuccccuuuucc

SEQ ID NO: 595318 - RNA, 21 nt, Human
cgagauaagagcaugguggcc

SEQ ID NO: 595319 - RNA, 22 nt, Human
cggcccgaggggcgauggacgg

SEQ ID NO: 595320 - RNA, 18 nt, Human
cucaaccccacuccagau

SEQ ID NO: 595321 - RNA, 19 nt, Human
cugcugaguggaauuugca

SEQ ID NO: 595322 - RNA, 19 nt, Human
cuggcuccucaaacagcaa

SEQ ID NO: 595323 - RNA, 21 nt, Human
cugguuuuaguuccucuugga

SEQ ID NO: 595324 - RNA, 18 nt, Human
gacacaacuuccuacaua

SEQ ID NO: 595325 - RNA, 25 nt, Human
gaccguccucuaacugcaccucuau

SEQ ID NO: 595326 - RNA, 19 nt, Human
gaccuuggugacacucagc

SEQ ID NO: 595327 - RNA, 22 nt, Human
gcaacaucaccaaacgugcauu

SEQ ID NO: 595328 - RNA, 19 nt, Human
ggaacaaaccccuuuugga

SEQ ID NO: 595329 - RNA, 19 nt, Human
ggcaaggggaauaggaaag

SEQ ID NO: 595330 - RNA, 22 nt, Human
gguggccucuuggggucccuug

SEQ ID NO: 595331 - RNA, 21 nt, Human
gugaacucaaaucauauucca

SEQ ID NO: 595332 - RNA, 27 nt, Human
uaagaagcaaauggaagacuugcucca

SEQ ID NO: 595333 - RNA, 26 nt, Human
uaagacacaacuuccuacauagagga

SEQ ID NO: 595334 - RNA, 25 nt, Human
uagacagacucccaguaauuaagcc

SEQ ID NO: 595335 - RNA, 21 nt, Human
uagacugugaauauuuacaga

SEQ ID NO: 595336 - RNA, 18 nt, Human
uaguaaucaaaacacaua

SEQ ID NO: 595337 - RNA, 22 nt, Human
uaugaccaaaacaaacaaacaa

SEQ ID NO: 595338 - RNA, 21 nt, Human
uauuggcauccugccauuuca

SEQ ID NO: 595339 - RNA, 18 nt, Human
uauuguccuuuagagcac

SEQ ID NO: 595340 - RNA, 21 nt, Human
ucaaccccacuccagauucag

SEQ ID NO: 595341 - RNA, 21 nt, Human
ucacugucguugaaaacuuuc

SEQ ID NO: 595342 - RNA, 18 nt, Human
uccacauggcuauggagu

SEQ ID NO: 595343 - RNA, 21 nt, Human
uccagauucaggcaaggggaa

SEQ ID NO: 595344 - RNA, 20 nt, Human
ucccaguaauuaagccucca

SEQ ID NO: 595345 - RNA, 20 nt, Human
ucccaguaauuaagccucca

SEQ ID NO: 595346 - RNA, 20 nt, Human
ucccucugguuguugagccu

SEQ ID NO: 595347 - RNA, 21 nt, Human
ucccuugaugggggcuguugg

SEQ ID NO: 595348 - RNA, 18 nt, Human
ugaaauaucucauauugg

SEQ ID NO: 595349 - RNA, 19 nt, Human
ugaccaaaacaaacaaaca

SEQ ID NO: 595350 - RNA, 21 nt, Human
ugagaaaaagauacuaauggg

SEQ ID NO: 595351 - RNA, 18 nt, Human
ugcacuucuaccaucaac

SEQ ID NO: 595352 - RNA, 21 nt, Human
ugcacuucuaccaucaacucc

SEQ ID NO: 595353 - RNA, 26 nt, Human
uggaagacuugcuccaacucuagagu

SEQ ID NO: 595354 - RNA, 18 nt, Human
uggccucuuggggucccu

SEQ ID NO: 595355 - RNA, 19 nt, Human
uuacuccugccauggauca

SEQ ID NO: 595356 - RNA, 21 nt, Human
uuauacaaacaaacuguauuu

SEQ ID NO: 595357 - RNA, 19 nt, Human
uucccagugacaaacaaug

SEQ ID NO: 595358 - RNA, 20 nt, Human
uugcauucguuacuucaaaa

SEQ ID NO: 595359 - RNA, 25 nt, Human
aaaaaaacaaaaaaaaacuauacca

SEQ ID NO: 595360 - RNA, 18 nt, Human
aaaaaaaucaaggcagcu

SEQ ID NO: 595361 - RNA, 21 nt, Human
aaaaaaucaaggcagcuagua

SEQ ID NO: 595362 - RNA, 19 nt, Human
aaaaaaucccccccaccca

SEQ ID NO: 595363 - RNA, 21 nt, Human
aaaaaggaaaauccuugaaga

SEQ ID NO: 595364 - RNA, 20 nt, Human
aaaacaaauguucaaggaaa

SEQ ID NO: 595365 - RNA, 22 nt, Human
aaaaggugacgaguuuuuuaaa

SEQ ID NO: 595366 - RNA, 23 nt, Human
aaaaucccccccacccacaaaaa

SEQ ID NO: 595367 - RNA, 22 nt, Human
aaaaucggcaaagcacaaaaca

SEQ ID NO: 595368 - RNA, 26 nt, Human
aaacaaaaaaaaacuauaccaaccga

SEQ ID NO: 595369 - RNA, 19 nt, Human
aaacacaacugcuacaagg

SEQ ID NO: 595370 - RNA, 25 nt, Human
aaacacaggcuauagcaacuaugaa

SEQ ID NO: 595371 - RNA, 19 nt, Human
aaacagcaaaagaacauga

SEQ ID NO: 595372 - RNA, 21 nt, Human
aaagaauaccauguuaaccac

SEQ ID NO: 595373 - RNA, 21 nt, Human
aaaggcaaaggagacaaccag

SEQ ID NO: 595374 - RNA, 22 nt, Human
aaauccugucucuacuaaaaaa

SEQ ID NO: 595375 - RNA, 22 nt, Human
aacagcgaaacuccgucucaaa

SEQ ID NO: 595376 - RNA, 18 nt, Human
aacccacugagucagacu

SEQ ID NO: 595377 - RNA, 19 nt, Human
aagacccccauggugggaa

SEQ ID NO: 595378 - RNA, 19 nt, Human
aaggcacaaagcucccccg

SEQ ID NO: 595379 - RNA, 18 nt, Human
aauaaggaaugaaaaaau

SEQ ID NO: 595380 - RNA, 23 nt, Human
aaucacaaaacuaaacacaggcu

SEQ ID NO: 595381 - RNA, 24 nt, Human
aaucccuugaacccaggaggcgga

SEQ ID NO: 595382 - RNA, 19 nt, Human
aauccuugaagaaaggcaa

SEQ ID NO: 595383 - RNA, 18 nt, Human
aauuagccaggcauggug

SEQ ID NO: 595384 - RNA, 24 nt, Human
acaaagcucccccgagauacccag

SEQ ID NO: 595385 - RNA, 20 nt, Human
acaacagcgaaacuccgucu

SEQ ID NO: 595386 - RNA, 21 nt, Human
acaacagcgaaacuccgucuc

SEQ ID NO: 595387 - RNA, 22 nt, Human
acagcaaggaggccauccugaa

SEQ ID NO: 595388 - RNA, 22 nt, Human
acaggagaaucccuugaaccca

SEQ ID NO: 595389 - RNA, 24 nt, Human
accaacauggagaaauccugucuc

SEQ ID NO: 595390 - RNA, 20 nt, Human
acccacugagucagacugua

SEQ ID NO: 595391 - RNA, 24 nt, Human
accugaggucaggaguucaagacc

SEQ ID NO: 595392 - RNA, 24 nt, Human
agaaaaaggaaaauccuugaagaa

SEQ ID NO: 595393 - RNA, 23 nt, Human
agacacacacacacaaaaucagg

SEQ ID NO: 595394 - RNA, 23 nt, Human
agacagacgcacagucugucaac

SEQ ID NO: 595395 - RNA, 24 nt, Human
agacagacgcacagucugucaacu

SEQ ID NO: 595396 - RNA, 23 nt, Human
agacagcaaggaggccauccuga

SEQ ID NO: 595397 - RNA, 18 nt, Human
agagcagaguggucacug

SEQ ID NO: 595398 - RNA, 23 nt, Human
agaucaccugaggucaggaguuc

SEQ ID NO: 595399 - RNA, 20 nt, Human
agaugguaacauccagggcc

SEQ ID NO: 595400 - RNA, 24 nt, Human
agaugguaacauccagggccuaaa

SEQ ID NO: 595401 - RNA, 22 nt, Human
agcacaaaacagcaaaagaaca

SEQ ID NO: 595402 - RNA, 24 nt, Human
agcacuuuaggaggccgagguggg

SEQ ID NO: 595403 - RNA, 19 nt, Human
agcaucacaaacuguugga

SEQ ID NO: 595404 - RNA, 23 nt, Human
agccaggcaugguggcgcaugcc

SEQ ID NO: 595405 - RNA, 21 nt, Human
agcucucuccucccccagucc

SEQ ID NO: 595406 - RNA, 24 nt, Human
aggcaugguggcgcaugccuguaa

SEQ ID NO: 595407 - RNA, 23 nt, Human
aggccaauaccaaauaugagaga

SEQ ID NO: 595408 - RNA, 21 nt, Human
aggccgaggugggcagaucac

SEQ ID NO: 595409 - RNA, 19 nt, Human
aggcggagguuguggugag

SEQ ID NO: 595410 - RNA, 22 nt, Human
agggaaaaaacaugauaaagag

SEQ ID NO: 595411 - RNA, 24 nt, Human
agggaaaaaacaugauaaagagga

SEQ ID NO: 595412 - RNA, 23 nt, Human
agggcacgagucuuagauuuuug

SEQ ID NO: 595413 - RNA, 24 nt, Human
aggugcaguggcucaugccuguaa

SEQ ID NO: 595414 - RNA, 22 nt, Human
aggugggcagaucaccugaggu

SEQ ID NO: 595415 - RNA, 26 nt, Human
aggugggcagaucaccugaggucagg

SEQ ID NO: 595416 - RNA, 24 nt, Human
aggugggucuuuugcuugaaccug

SEQ ID NO: 595417 - RNA, 23 nt, Human
aguggcucaugccuguaauccca

SEQ ID NO: 595418 - RNA, 24 nt, Human
aguggcucaugccuguaaucccag

SEQ ID NO: 595419 - RNA, 22 nt, Human
auacugccacuagaauccuaaa

SEQ ID NO: 595420 - RNA, 24 nt, Human
aucaccugaggucaggaguucaag

SEQ ID NO: 595421 - RNA, 18 nt, Human
auccaaaaucggcaaagc

SEQ ID NO: 595422 - RNA, 24 nt, Human
augaaaaaaucccccccacccaca

SEQ ID NO: 595423 - RNA, 19 nt, Human
augccuguaaucccagcac

SEQ ID NO: 595424 - RNA, 22 nt, Human
augcuagcuauuccaacuacau

SEQ ID NO: 595425 - RNA, 24 nt, Human
auugcacuccagccugggcaacaa

SEQ ID NO: 595426 - RNA, 26 nt, Human
auugcacuccagccugggcaacaaca

SEQ ID NO: 595427 - RNA, 23 nt, Human
caaagcacaaaacagcaaaagaa

SEQ ID NO: 595428 - RNA, 23 nt, Human
caaagcacaaaacagcaaaagaa

SEQ ID NO: 595429 - RNA, 21 nt, Human
caaagcucccccgagauaccc

SEQ ID NO: 595430 - RNA, 23 nt, Human
caaagcucccccgagauacccag

SEQ ID NO: 595431 - RNA, 21 nt, Human
caacaacagcgaaacuccguc

SEQ ID NO: 595432 - RNA, 24 nt, Human
caacauggagaaauccugucucua

SEQ ID NO: 595433 - RNA, 26 nt, Human
caacuccuaagacauccauuaagaca

SEQ ID NO: 595434 - RNA, 21 nt, Human
caacugacaccacaauagcac

SEQ ID NO: 595435 - RNA, 21 nt, Human
caagaauacugccacuagaau

SEQ ID NO: 595436 - RNA, 21 nt, Human
caauagcacuagccugcccua

SEQ ID NO: 595437 - RNA, 21 nt, Human
cacaaaaaaaaaucaaggcag

SEQ ID NO: 595438 - RNA, 19 nt, Human
cacaaaacagcaaaagaac

SEQ ID NO: 595439 - RNA, 25 nt, Human
cacaaaacagcaaaagaacaugaaa

SEQ ID NO: 595440 - RNA, 19 nt, Human
cacaaaacuaaacacaggc

SEQ ID NO: 595441 - RNA, 23 nt, Human
cacaaagcucccccgagauaccc

SEQ ID NO: 595442 - RNA, 22 nt, Human
cacacacacacaaaaucaggaa

SEQ ID NO: 595443 - RNA, 21 nt, Human
caccacaauagcacuagccug

SEQ ID NO: 595444 - RNA, 23 nt, Human
caccugaggucaggaguucaaga

SEQ ID NO: 595445 - RNA, 24 nt, Human
cagaucaccugaggucaggaguuc

SEQ ID NO: 595446 - RNA, 27 nt, Human
cagaucaccugaggucaggaguucaag

SEQ ID NO: 595447 - RNA, 24 nt, Human
cagcacuuuaggaggccgaggugg

SEQ ID NO: 595448 - RNA, 24 nt, Human
cagccugaccaacauggagaaauc

SEQ ID NO: 595449 - RNA, 18 nt, Human
cagccugggcaacaacag

SEQ ID NO: 595450 - RNA, 18 nt, Human
cauguuccugucaaccca

SEQ ID NO: 595451 - RNA, 18 nt, Human
cauugcacuccagccugg

SEQ ID NO: 595452 - RNA, 19 nt, Human
cauugcacuccagccuggg

SEQ ID NO: 595453 - RNA, 21 nt, Human
cauugcacuccagccugggca

SEQ ID NO: 595454 - RNA, 24 nt, Human
cauugcacuccagccugggcaaca

SEQ ID NO: 595455 - RNA, 26 nt, Human
cauugcacuccagccugggcaacaac

SEQ ID NO: 595456 - RNA, 23 nt, Human
ccacaaaaaaaaaucaaggcagc

SEQ ID NO: 595457 - RNA, 19 nt, Human
ccacaauagcacuagccug

SEQ ID NO: 595458 - RNA, 19 nt, Human
ccagaaaguagacuuugcc

SEQ ID NO: 595459 - RNA, 22 nt, Human
ccaggaggcggagguuguggug

SEQ ID NO: 595460 - RNA, 20 nt, Human
ccauugcacuccagccuggg

SEQ ID NO: 595461 - RNA, 21 nt, Human
ccauugcacuccagccugggc

SEQ ID NO: 595462 - RNA, 22 nt, Human
ccauugcacuccagccugggca

SEQ ID NO: 595463 - RNA, 23 nt, Human
ccauugcacuccagccugggcaa

SEQ ID NO: 595464 - RNA, 24 nt, Human
ccauugcacuccagccugggcaac

SEQ ID NO: 595465 - RNA, 22 nt, Human
cccacaaaaaaaaaucaaggcu

SEQ ID NO: 595466 - RNA, 23 nt, Human
cccaguaccaucuuuaaggcgaa

SEQ ID NO: 595467 - RNA, 18 nt, Human
ccccacccacaaaaaaaa

SEQ ID NO: 595468 - RNA, 21 nt, Human
ccccacccacaaaaaaaaauc

SEQ ID NO: 595469 - RNA, 24 nt, Human
ccccagaauuuaaaacagcggacc

SEQ ID NO: 595470 - RNA, 25 nt, Human
ccuaaagacaccucuuguuaacuaa

SEQ ID NO: 595471 - RNA, 21 nt, Human
ccuaaagagcagaguggucac

SEQ ID NO: 595472 - RNA, 22 nt, Human
ccugaccaacauggagaaaucc

SEQ ID NO: 595473 - RNA, 24 nt, Human
ccugaccaacauggagaaauccug

SEQ ID NO: 595474 - RNA, 19 nt, Human
ccuguaaucccagcacuuu

SEQ ID NO: 595475 - RNA, 21 nt, Human
ccugucccuucacuccuuggg

SEQ ID NO: 595476 - RNA, 20 nt, Human
cgaggugggcagaucaccug

SEQ ID NO: 595477 - RNA, 24 nt, Human
cgaggugggcagaucaccugaggu

SEQ ID NO: 595478 - RNA, 26 nt, Human
cgaggugggcagaucaccugagguca

SEQ ID NO: 595479 - RNA, 23 nt, Human
cgaugguggcuucgcauguuccu

SEQ ID NO: 595480 - RNA, 22 nt, Human
cgcacagucugucaacuuuggu

SEQ ID NO: 595481 - RNA, 21 nt, Human
cggcaaagcacaaaacagcaa

SEQ ID NO: 595482 - RNA, 23 nt, Human
cggcaaagcacaaaacagcaaaa

SEQ ID NO: 595483 - RNA, 24 nt, Human
cggccaggugcaguggcucaugcc

SEQ ID NO: 595484 - RNA, 21 nt, Human
cuaaacacaggcuauagcaac

SEQ ID NO: 595485 - RNA, 24 nt, Human
cucaugccuguaaucccagcacuu

SEQ ID NO: 595486 - RNA, 21 nt, Human
cuguagggaacuagacuacag

SEQ ID NO: 595487 - RNA, 20 nt, Human
cuuaaaaccccauguacccu

SEQ ID NO: 595488 - RNA, 25 nt, Human
cuuauaauguccuggauugccaacu

SEQ ID NO: 595489 - RNA, 18 nt, Human
gaacagccuucacagaga

SEQ ID NO: 595490 - RNA, 19 nt, Human
gacucugggugggcagcuc

SEQ ID NO: 595491 - RNA, 18 nt, Human
gagcaucacaaacuguug

SEQ ID NO: 595492 - RNA, 20 nt, Human
gaggcggagguuguggugag

SEQ ID NO: 595493 - RNA, 23 nt, Human
gaggugggcagaucaccugaggu

SEQ ID NO: 595494 - RNA, 23 nt, Human
gaggugggucuuuugcuugaacc

SEQ ID NO: 595495 - RNA, 24 nt, Human
gauacgccauugcacuccagccug

SEQ ID NO: 595496 - RNA, 23 nt, Human
gaucaccugaggucaggaguuca

SEQ ID NO: 595497 - RNA, 24 nt, Human
gaucaccugaggucaggaguucaa

SEQ ID NO: 595498 - RNA, 21 nt, Human
gauccaucaaggcacaaagcu

SEQ ID NO: 595499 - RNA, 21 nt, Human
gcaaaugaaacuaaauaucaa

SEQ ID NO: 595500 - RNA, 22 nt, Human
gccauugcacuccagccugggc

SEQ ID NO: 595501 - RNA, 24 nt, Human
gccauugcacuccagccugggcaa

SEQ ID NO: 595502 - RNA, 23 nt, Human
ggaaaagcaaauccuugacugga

SEQ ID NO: 595503 - RNA, 21 nt, Human
ggagaaucccuugaacccagg

SEQ ID NO: 595504 - RNA, 20 nt, Human
ggagaggagaggauuuacua

SEQ ID NO: 595505 - RNA, 23 nt, Human
ggagauacgccauugcacuccag

SEQ ID NO: 595506 - RNA, 22 nt, Human
ggagguuguggugaguggagau

SEQ ID NO: 595507 - RNA, 25 nt, Human
ggagguuguggugaguggagauacg

SEQ ID NO: 595508 - RNA, 21 nt, Human
ggccaggugcaguggcucaug

SEQ ID NO: 595509 - RNA, 19 nt, Human
gggaaaaaacaugauaaag

SEQ ID NO: 595510 - RNA, 26 nt, Human
gggcagaucaccugaggucaggaguu

SEQ ID NO: 595511 - RNA, 21 nt, Human
gguaaagaaucucuuccuuau

SEQ ID NO: 595512 - RNA, 22 nt, Human
ggucccaaagguggauguuugg

SEQ ID NO: 595513 - RNA, 24 nt, Human
gguggcgcaugccuguaaucacag

SEQ ID NO: 595514 - RNA, 24 nt, Human
ggugggcagcucuucaauaaagac

SEQ ID NO: 595515 - RNA, 25 nt, Human
guauauccacgucuaacagguuaca

SEQ ID NO: 595516 - RNA, 21 nt, Human
gucuuuugcuugaaccugggu

SEQ ID NO: 595517 - RNA, 22 nt, Human
gucuuuugcuugaaccugggug

SEQ ID NO: 595518 - RNA, 22 nt, Human
uaaaauccaaaaucggcaaagc

SEQ ID NO: 595519 - RNA, 22 nt, Human
uaaacacaggcuauagcaacua

SEQ ID NO: 595520 - RNA, 24 nt, Human
uaacagguuacaagaauacugcca

SEQ ID NO: 595521 - RNA, 19 nt, Human
uaagacagacgcacagucu

SEQ ID NO: 595522 - RNA, 23 nt, Human
uaagacagacgcacagucuguca

SEQ ID NO: 595523 - RNA, 24 nt, Human
uaagacaggagaaucccuugaacc

SEQ ID NO: 595524 - RNA, 23 nt, Human
uaaguucaauaaggaaugaaaaa

SEQ ID NO: 595525 - RNA, 18 nt, Human
uaauugaaacugacaacg

SEQ ID NO: 595526 - RNA, 24 nt, Human
uacauccacguuagcauccaugug

SEQ ID NO: 595527 - RNA, 23 nt, Human
uaccagaaaguagacuuugccuc

SEQ ID NO: 595528 - RNA, 18 nt, Human
uaccaggagggcacgagu

SEQ ID NO: 595529 - RNA, 19 nt, Human
uagacuacaguucccuacu

SEQ ID NO: 595530 - RNA, 22 nt, Human
uagagaacagcucucuccuccc

SEQ ID NO: 595531 - RNA, 20 nt, Human
uaggaggccgaggugggcag

SEQ ID NO: 595532 - RNA, 24 nt, Human
uaggaggccgaggugggcagauca

SEQ ID NO: 595533 - RNA, 19 nt, Human
uaggcaaaauccugucccu

SEQ ID NO: 595534 - RNA, 19 nt, Human
uauaagauucuuuucuagu

SEQ ID NO: 595535 - RNA, 19 nt, Human
uauaccaaccgaacgcuug

SEQ ID NO: 595536 - RNA, 24 nt, Human
uaugcuauggucccaaagguggau

SEQ ID NO: 595537 - RNA, 20 nt, Human
uauggagaaaaaagagugcc

SEQ ID NO: 595538 - RNA, 18 nt, Human
ucaaaaaaaaagagagaa

SEQ ID NO: 595539 - RNA, 21 nt, Human
ucaacugacaccacaauagca

SEQ ID NO: 595540 - RNA, 18 nt, Human
ucacugggggguaaaaag

SEQ ID NO: 595541 - RNA, 20 nt, Human
ucaggcuccuuacuuguaag

SEQ ID NO: 595542 - RNA, 22 nt, Human
ucauaauugaaacugacaacgc

SEQ ID NO: 595543 - RNA, 22 nt, Human
ucaugccuguaaucccagcacu

SEQ ID NO: 595544 - RNA, 25 nt, Human
uccaaaaucggcaaagcacaaaaca

SEQ ID NO: 595545 - RNA, 26 nt, Human
uccaagcaagacccuggauagggacc

SEQ ID NO: 595546 - RNA, 20 nt, Human
uccguuucuaaaguggggua

SEQ ID NO: 595547 - RNA, 23 nt, Human
uccguuucuaaagugggguagga

SEQ ID NO: 595548 - RNA, 21 nt, Human
uccuugacuggauaaaaacag

SEQ ID NO: 595549 - RNA, 19 nt, Human
ucucacuccaucaaccuaa

SEQ ID NO: 595550 - RNA, 21 nt, Human
ugaaaaaaucccccccaccca

SEQ ID NO: 595551 - RNA, 25 nt, Human
ugaaaaaaucccccccacccacaaa

SEQ ID NO: 595552 - RNA, 18 nt, Human
ugaaaagagaugaaaacu

SEQ ID NO: 595553 - RNA, 21 nt, Human
ugaaacuaaauaucaacugac

SEQ ID NO: 595554 - RNA, 24 nt, Human
ugaaacugacaacgccaguaaauc

SEQ ID NO: 595555 - RNA, 21 nt, Human
ugaacaauagcacaaaugcca

SEQ ID NO: 595556 - RNA, 24 nt, Human
ugaccaacauggagaaauccuguc

SEQ ID NO: 595557 - RNA, 23 nt, Human
ugagguccgaaggaugcugccau

SEQ ID NO: 595558 - RNA, 23 nt, Human
ugaugaaaucacaaaacuaaaca

SEQ ID NO: 595559 - RNA, 20 nt, Human
ugccuaggcaaaauccuguc

SEQ ID NO: 595560 - RNA, 19 nt, Human
ugccucugcagagaggugg

SEQ ID NO: 595561 - RNA, 24 nt, Human
ugccuguaaucacagcuacucagg

SEQ ID NO: 595562 - RNA, 18 nt, Human
ugccuguaaucccagcac

SEQ ID NO: 595563 - RNA, 22 nt, Human
ugccuguaaucccagcacuuua

SEQ ID NO: 595564 - RNA, 24 nt, Human
ugccuguaaucccagcacuuuagg

SEQ ID NO: 595565 - RNA, 19 nt, Human
uggcgcaugccuguaauca

SEQ ID NO: 595566 - RNA, 25 nt, Human
uggcucacagccugguaaagaaucu

SEQ ID NO: 595567 - RNA, 22 nt, Human
uggcucaugccuguaaucccag

SEQ ID NO: 595568 - RNA, 24 nt, Human
uggcucaugccuguaaucccagca

SEQ ID NO: 595569 - RNA, 24 nt, Human
ugggcagaucaccugaggucagga

SEQ ID NO: 595570 - RNA, 22 nt, Human
ugggggguaaaaagaaaaagga

SEQ ID NO: 595571 - RNA, 21 nt, Human
ugggguucagcaaaugaaacu

SEQ ID NO: 595572 - RNA, 18 nt, Human
uggugagguccgaaggau

SEQ ID NO: 595573 - RNA, 21 nt, Human
ugguggcgcaugccuguaauc

SEQ ID NO: 595574 - RNA, 19 nt, Human
uguagggaacuagacuaca

SEQ ID NO: 595575 - RNA, 25 nt, Human
ugucacaacuauauuacauccacug

SEQ ID NO: 595576 - RNA, 22 nt, Human
ugucacugacaaagaacuuuua

SEQ ID NO: 595577 - RNA, 22 nt, Human
uguuccugucaacccacugagu

SEQ ID NO: 595578 - RNA, 18 nt, Human
uuaaugcuggcuuucagg

SEQ ID NO: 595579 - RNA, 21 nt, Human
uuacuuguaaguaaacaaugu

SEQ ID NO: 595580 - RNA, 18 nt, Human
uucaaauaaaaaaguaag

SEQ ID NO: 595581 - RNA, 22 nt, Human
uucaaggaaaagcaaauccuug

SEQ ID NO: 595582 - RNA, 24 nt, Human
uucaaggaaaagcaaauccuugac

SEQ ID NO: 595583 - RNA, 23 nt, Human
uugaacccaggaggcggagguug

SEQ ID NO: 595584 - RNA, 21 nt, Human
uuuaacuaugcuaugguccca

SEQ ID NO: 595585 - RNA, 19 nt, Human
uuuccacacucucccacag

SEQ ID NO: 595586 - RNA, 24 nt, Human
uuuguaaacacuauugugcaaaau

SEQ ID NO: 595587 - RNA, 22 nt, Human
aaaagaaaaaucauccagugca

SEQ ID NO: 595588 - RNA, 19 nt, Human
aaaaguuagaauuaacuua

SEQ ID NO: 595589 - RNA, 19 nt, Human
acagagccgccaggcgacu

SEQ ID NO: 595590 - RNA, 21 nt, Human
acccagcuauccccaaaacag

SEQ ID NO: 595591 - RNA, 18 nt, Human
agcugagaaugggggugg

SEQ ID NO: 595592 - RNA, 23 nt, Human
augugcccaaaaucaagcaaaau

SEQ ID NO: 595593 - RNA, 19 nt, Human
caaaacaguguaguggggc

SEQ ID NO: 595594 - RNA, 22 nt, Human
caaaauaaaaucccaugcuucc

SEQ ID NO: 595595 - RNA, 21 nt, Human
cacgugcuccuuuucugggga

SEQ ID NO: 595596 - RNA, 24 nt, Human
cacuguguucaauuuugaguuucc

SEQ ID NO: 595597 - RNA, 24 nt, Human
cauccagugcacguagaugggcac

SEQ ID NO: 595598 - RNA, 24 nt, Human
caugugcccaaaaucaagcaaaau

SEQ ID NO: 595599 - RNA, 23 nt, Human
ccccaaaacaguguaguggggca

SEQ ID NO: 595600 - RNA, 23 nt, Human
ccgccaggcgacucaauucacgu

SEQ ID NO: 595601 - RNA, 25 nt, Human
cgacuagaggagcggauauggaagc

SEQ ID NO: 595602 - RNA, 23 nt, Human
cggcaaacaguggcucgccagag

SEQ ID NO: 595603 - RNA, 24 nt, Human
cuaaaacugcaaacuaaaaaucug

SEQ ID NO: 595604 - RNA, 24 nt, Human
cuaacuaaaagcagaacucacuua

SEQ ID NO: 595605 - RNA, 19 nt, Human
cuccuuuucuggggaugaa

SEQ ID NO: 595606 - RNA, 19 nt, Human
gaggcgguaccgccgcgaa

SEQ ID NO: 595607 - RNA, 18 nt, Human
ggaggagcugagaauggg

SEQ ID NO: 595608 - RNA, 23 nt, Human
guaguggggcaaaauguucaaaa

SEQ ID NO: 595609 - RNA, 19 nt, Human
guggcuuuaaaaaaaaagu

SEQ ID NO: 595610 - RNA, 20 nt, Human
uaaauguaaauaucuuuaac

SEQ ID NO: 595611 - RNA, 18 nt, Human
uaacuaaaagcagaacuc

SEQ ID NO: 595612 - RNA, 24 nt, Human
uaacuaacuaaaagcagaacucag

SEQ ID NO: 595613 - RNA, 23 nt, Human
uacauuucuucaaauaccauuug

SEQ ID NO: 595614 - RNA, 19 nt, Human
uagaauauaaaagauauua

SEQ ID NO: 595615 - RNA, 24 nt, Human
uagaugggcaccaagaagcuaagc

SEQ ID NO: 595616 - RNA, 24 nt, Human
uagugcaacaaaacauuuccagau

SEQ ID NO: 595617 - RNA, 21 nt, Human
uaucugugacaaugaccaaua

SEQ ID NO: 595618 - RNA, 21 nt, Human
uauggaagcgagcgaaagccg

SEQ ID NO: 595619 - RNA, 24 nt, Human
uauuucaugugcccaaaaucaagc

SEQ ID NO: 595620 - RNA, 19 nt, Human
ucaaaacaaacugaccuga

SEQ ID NO: 595621 - RNA, 21 nt, Human
ucaaaauacaaaggcgugcaa

SEQ ID NO: 595622 - RNA, 27 nt, Human
ucaagaauaaaaguuagaauuaacuua

SEQ ID NO: 595623 - RNA, 24 nt, Human
ucacuguguucaauuuugaguuuc

SEQ ID NO: 595624 - RNA, 27 nt, Human
uccaauauaaauguaaauaucuuuaac

SEQ ID NO: 595625 - RNA, 20 nt, Human
ucccugagcgcguacagagc

SEQ ID NO: 595626 - RNA, 21 nt, Human
ucccugagcgcguacagagcc

SEQ ID NO: 595627 - RNA, 22 nt, Human
ucccugagcgcguacagagccg

SEQ ID NO: 595628 - RNA, 19 nt, Human
uccuaaaacugcaaacuaa

SEQ ID NO: 595629 - RNA, 25 nt, Human
ugaaauaaaauucaagaauaaaagu

SEQ ID NO: 595630 - RNA, 19 nt, Human
ugaccugaaauuuuuagua

SEQ ID NO: 595631 - RNA, 24 nt, Human
ugaccugaaauuuuuaguauuuac

SEQ ID NO: 595632 - RNA, 18 nt, Human
ugaguuuccuaacaucca

SEQ ID NO: 595633 - RNA, 24 nt, Human
ugauauuuaaaacauuuauguggu

SEQ ID NO: 595634 - RNA, 20 nt, Human
ugcccaaaaucaagcaaaau

SEQ ID NO: 595635 - RNA, 31 nt, Human
ugcccaaaaucaagcaaaauaaaaucccauu

SEQ ID NO: 595636 - RNA, 18 nt, Human
ugcccgaucaaacggcaa

SEQ ID NO: 595637 - RNA, 24 nt, Human
uggcucgccagaggacccaaucuu

SEQ ID NO: 595638 - RNA, 21 nt, Human
uuaaauaccaugcaguguacu

SEQ ID NO: 595639 - RNA, 18 nt, Human
uuauauauuuaaccugaa

SEQ ID NO: 595640 - RNA, 19 nt, Human
uucaaaagaaaaaucaucc

SEQ ID NO: 595641 - RNA, 23 nt, Human
uucaaauaccauuuguuucacug

SEQ ID NO: 595642 - RNA, 20 nt, Human
uucacgugcuccuuuucugg

SEQ ID NO: 595643 - RNA, 20 nt, Human
aaaagcacaaaugucaagga

SEQ ID NO: 595644 - RNA, 19 nt, Human
aaaaugaggcccagggaga

SEQ ID NO: 595645 - RNA, 22 nt, Human
aaagacagagauccaggaaagg

SEQ ID NO: 595646 - RNA, 19 nt, Human
aaagugcugggauuaccgg

SEQ ID NO: 595647 - RNA, 24 nt, Human
aaagugcugggauuaccggcguga

SEQ ID NO: 595648 - RNA, 23 nt, Human
aacuuggaaaccaucucuggcag

SEQ ID NO: 595649 - RNA, 24 nt, Human
aagaugcuguacaccugcuacaga

SEQ ID NO: 595650 - RNA, 26 nt, Human
aagugcugggauuaccggcgugagcc

SEQ ID NO: 595651 - RNA, 21 nt, Human
aaucucuuucucccacucaac

SEQ ID NO: 595652 - RNA, 22 nt, Human
acaaagagaggcaaagauacca

SEQ ID NO: 595653 - RNA, 23 nt, Human
acacacacacacacacacacaca

SEQ ID NO: 595654 - RNA, 23 nt, Human
acacacacacacacacacacaca

SEQ ID NO: 595655 - RNA, 23 nt, Human
acacacacacacacacacacaca

SEQ ID NO: 595656 - RNA, 23 nt, Human
acacacacacacacacacacaca

SEQ ID NO: 595657 - RNA, 23 nt, Human
acacacacacacacacacacaca

SEQ ID NO: 595658 - RNA, 23 nt, Human
acacacacacacacacacacaca

SEQ ID NO: 595659 - RNA, 29 nt, Human
acacacacacacacacacacacaggccua

SEQ ID NO: 595660 - RNA, 25 nt, Human
acacacacacacacacacaggccua

SEQ ID NO: 595661 - RNA, 33 nt, Human
acggaagagcacacacacacacacacacacagu

SEQ ID NO: 595662 - RNA, 21 nt, Human
acugcaagcuccgccuuccag

SEQ ID NO: 595663 - RNA, 24 nt, Human
aggaaaugcagagacaaagagagg

SEQ ID NO: 595664 - RNA, 21 nt, Human
aggaauauggguggagaagcc

SEQ ID NO: 595665 - RNA, 18 nt, Human
aggagaagcaacuuuagg

SEQ ID NO: 595666 - RNA, 25 nt, Human
aggcuggagugcaguggcgcaaucu

SEQ ID NO: 595667 - RNA, 19 nt, Human
aguagcugggacuacaggc

SEQ ID NO: 595668 - RNA, 21 nt, Human
agugcaguggcgcaaucucag

SEQ ID NO: 595669 - RNA, 24 nt, Human
agugcaguggcgcaaucucagcuc

SEQ ID NO: 595670 - RNA, 20 nt, Human
aguggaaaugggguuucacc

SEQ ID NO: 595671 - RNA, 19 nt, Human
caaagauaccaaagcagac

SEQ ID NO: 595672 - RNA, 27 nt, Human
caaagugcugggauuaccggcgugagc

SEQ ID NO: 595673 - RNA, 24 nt, Human
caacuccauguggggauaucugac

SEQ ID NO: 595674 - RNA, 21 nt, Human
caagaugcuguacaccugcua

SEQ ID NO: 595675 - RNA, 20 nt, Human
cacacacacacacacacaca

SEQ ID NO: 595676 - RNA, 20 nt, Human
cacacacacacacacacaca

SEQ ID NO: 595677 - RNA, 20 nt, Human
cacacacacacacacacaca

SEQ ID NO: 595678 - RNA, 20 nt, Human
cacacacacacacacacaca

SEQ ID NO: 595679 - RNA, 20 nt, Human
cacacacacacacacacaca

SEQ ID NO: 595680 - RNA, 20 nt, Human
cacacacacacacacacaca

SEQ ID NO: 595681 - RNA, 20 nt, Human
cacacacacacacacacaca

SEQ ID NO: 595682 - RNA, 20 nt, Human
cacacacacacacacacaca

SEQ ID NO: 595683 - RNA, 20 nt, Human
cacacacacacacacacaca

SEQ ID NO: 595684 - RNA, 20 nt, Human
cacacacacacacacacaca

SEQ ID NO: 595685 - RNA, 20 nt, Human
cacacacacacacacacaca

SEQ ID NO: 595686 - RNA, 20 nt, Human
cacacacacacacacacaca

SEQ ID NO: 595687 - RNA, 22 nt, Human
cacacacacacacacacacaca

SEQ ID NO: 595688 - RNA, 22 nt, Human
cacacacacacacacacacaca

SEQ ID NO: 595689 - RNA, 22 nt, Human
cacacacacacacacacacaca

SEQ ID NO: 595690 - RNA, 22 nt, Human
cacacacacacacacacacaca

SEQ ID NO: 595691 - RNA, 26 nt, Human
cacacacacacacacacacacacaca

SEQ ID NO: 595692 - RNA, 26 nt, Human
cacacacacacacacacacacacaca

SEQ ID NO: 595693 - RNA, 26 nt, Human
cacacacacacacacacacacacaca

SEQ ID NO: 595694 - RNA, 26 nt, Human
cacacacacacacacacacacacaca

SEQ ID NO: 595695 - RNA, 26 nt, Human
cacacacacacacacacacacacaca

SEQ ID NO: 595696 - RNA, 26 nt, Human
cacacacacacacacacacacacaca

SEQ ID NO: 595697 - RNA, 26 nt, Human
cacacacacacacacacacacacaca

SEQ ID NO: 595698 - RNA, 26 nt, Human
cacacacacacacacacacacacaca

SEQ ID NO: 595699 - RNA, 31 nt, Human
cacacacacacacacacaggccuagguauag

SEQ ID NO: 595700 - RNA, 31 nt, Human
cacacacacacacacaggccuagguauaugg

SEQ ID NO: 595701 - RNA, 18 nt, Human
caccguguuagccaggau

SEQ ID NO: 595702 - RNA, 24 nt, Human
caccguguuagccaggauggucuc

SEQ ID NO: 595703 - RNA, 22 nt, Human
caugccauucuccugccucagc

SEQ ID NO: 595704 - RNA, 22 nt, Human
ccaaagugcugggauuaccggc

SEQ ID NO: 595705 - RNA, 24 nt, Human
ccaaagugcugggauuaccggcgu

SEQ ID NO: 595706 - RNA, 19 nt, Human
ccagguucaugccauucuc

SEQ ID NO: 595707 - RNA, 22 nt, Human
ccagguucaugccauucuccug

SEQ ID NO: 595708 - RNA, 20 nt, Human
ccaguggucacuucugcucu

SEQ ID NO: 595709 - RNA, 21 nt, Human
cccagggagaaaagcacaaau

SEQ ID NO: 595710 - RNA, 18 nt, Human
cccaguggucacuucugc

SEQ ID NO: 595711 - RNA, 24 nt, Human
cccgaguagcugggacuacaggcg

SEQ ID NO: 595712 - RNA, 25 nt, Human
cccgaguagcugggacuacaggcgc

SEQ ID NO: 595713 - RNA, 23 nt, Human
ccugccucagccucccgaguagc

SEQ ID NO: 595714 - RNA, 20 nt, Human
ccuggcccuucagucuuuuc

SEQ ID NO: 595715 - RNA, 21 nt, Human
ccuuccagguucaugccauuc

SEQ ID NO: 595716 - RNA, 24 nt, Human
ccuuccagguucaugccauucucc

SEQ ID NO: 595717 - RNA, 24 nt, Human
cgcccaggcuggagugcaguggcg

SEQ ID NO: 595718 - RNA, 24 nt, Human
cgccucggccucccaaagugcugg

SEQ ID NO: 595719 - RNA, 21 nt, Human
cgucgcccaggcuggagugca

SEQ ID NO: 595720 - RNA, 21 nt, Human
cucagcccaugcaaacugucc

SEQ ID NO: 595721 - RNA, 24 nt, Human
cucagccucccgaguagcugggac

SEQ ID NO: 595722 - RNA, 20 nt, Human
cuccgucgcccaggcuggag

SEQ ID NO: 595723 - RNA, 24 nt, Human
cuccugaccucgugauccgcccgc

SEQ ID NO: 595724 - RNA, 26 nt, Human
cucuagugaaucucuuucucccacuc

SEQ ID NO: 595725 - RNA, 25 nt, Human
cucuccuugguccugggaccugugc

SEQ ID NO: 595726 - RNA, 24 nt, Human
cugcaagcuccgccuuccagguuc

SEQ ID NO: 595727 - RNA, 23 nt, Human
cugccucagccucccgaguagcu

SEQ ID NO: 595728 - RNA, 30 nt, Human
gaagagcacacacacacacacacacacaca

SEQ ID NO: 595729 - RNA, 22 nt, Human
gaccucgugauccgcccgccuc

SEQ ID NO: 595730 - RNA, 22 nt, Human
gaccucgugauccgcccgccuc

SEQ ID NO: 595731 - RNA, 24 nt, Human
gaccucgugauccgcccgccucgg

SEQ ID NO: 595732 - RNA, 31 nt, Human
gacggaagagcacacacacacacacacacag

SEQ ID NO: 595733 - RNA, 23 nt, Human
gagaaaagcacaaaugucaagga

SEQ ID NO: 595734 - RNA, 20 nt, Human
gagacagagucucgcuccgu

SEQ ID NO: 595735 - RNA, 18 nt, Human
gaggaauauggguggaga

SEQ ID NO: 595736 - RNA, 20 nt, Human
gaguagcugggacuacaggc

SEQ ID NO: 595737 - RNA, 25 nt, Human
gaguagcugggacuacaggcgcucg

SEQ ID NO: 595738 - RNA, 18 nt, Human
gauuaccggcgugagcca

SEQ ID NO: 595739 - RNA, 21 nt, Human
gauuaccggcgugagccaccg

SEQ ID NO: 595740 - RNA, 24 nt, Human
gauuaccggcgugagccaccgugc

SEQ ID NO: 595741 - RNA, 22 nt, Human
gcaagcuccgccuuccagguuc

SEQ ID NO: 595742 - RNA, 23 nt, Human
gcccagcuaauuuuuuguauuuu

SEQ ID NO: 595743 - RNA, 19 nt, Human
gcccaggcuggagugcagu

SEQ ID NO: 595744 - RNA, 20 nt, Human
gcccaggcuggagugcagug

SEQ ID NO: 595745 - RNA, 19 nt, Human
gcccaugcaaacuguccug

SEQ ID NO: 595746 - RNA, 22 nt, Human
gcuccgucgcccaggcuggagu

SEQ ID NO: 595747 - RNA, 25 nt, Human
gcuccgucgcccaggcuggagugca

SEQ ID NO: 595748 - RNA, 27 nt, Human
gcuccgucgcccaggcuggggccgcuc

SEQ ID NO: 595749 - RNA, 19 nt, Human
gcuggagugcaguggcgca

SEQ ID NO: 595750 - RNA, 26 nt, Human
ggaaauaaagacagagauccaggaaa

SEQ ID NO: 595751 - RNA, 20 nt, Human
ggaagagcacacacacacac

SEQ ID NO: 595752 - RNA, 19 nt, Human
ggaaggggacaucaacuug

SEQ ID NO: 595753 - RNA, 24 nt, Human
ggauggucucgaucuccugaccuc

SEQ ID NO: 595754 - RNA, 22 nt, Human
ggcgugagccaccgugcccggc

SEQ ID NO: 595755 - RNA, 21 nt, Human
gggggguggggguggcuuagu

SEQ ID NO: 595756 - RNA, 18 nt, Human
gggguuucaccguguuag

SEQ ID NO: 595757 - RNA, 22 nt, Human
gggguuucaccguguuagccag

SEQ ID NO: 595758 - RNA, 19 nt, Human
gguagagagugaggaggaa

SEQ ID NO: 595759 - RNA, 18 nt, Human
gucaaggaagagagaucu

SEQ ID NO: 595760 - RNA, 21 nt, Human
gucccuuugcugugugccugg

SEQ ID NO: 595761 - RNA, 22 nt, Human
gugagcuucuugccugaagucc

SEQ ID NO: 595762 - RNA, 24 nt, Human
gugauccgcccgccucggccuccc

SEQ ID NO: 595763 - RNA, 19 nt, Human
uaaaaugaggcccagggag

SEQ ID NO: 595764 - RNA, 20 nt, Human
uaauuuuuuguauuuuuagu

SEQ ID NO: 595765 - RNA, 23 nt, Human
uaauuuuuuguauuuuuagugga

SEQ ID NO: 595766 - RNA, 24 nt, Human
uacaggcgcucgccaccacgccca

SEQ ID NO: 595767 - RNA, 24 nt, Human
uaccggcgugagccaccgugcccg

SEQ ID NO: 595768 - RNA, 20 nt, Human
uaggaacuggauguuccacc

SEQ ID NO: 595769 - RNA, 23 nt, Human
uagugaaucucuuucucccacuc

SEQ ID NO: 595770 - RNA, 26 nt, Human
uagugaaucucuuucucccacucaac

SEQ ID NO: 595771 - RNA, 21 nt, Human
uaguggaaaugggguuucacc

SEQ ID NO: 595772 - RNA, 24 nt, Human
uaguggaaaugggguuucaccgug

SEQ ID NO: 595773 - RNA, 26 nt, Human
uaguggaaaugggguuucaccguguu

SEQ ID NO: 595774 - RNA, 24 nt, Human
ucaagcuugggaaagcagaguggg

SEQ ID NO: 595775 - RNA, 24 nt, Human
ucaccguguuagccaggauggucu

SEQ ID NO: 595776 - RNA, 18 nt, Human
ucacugcaagcuccgccu

SEQ ID NO: 595777 - RNA, 18 nt, Human
ucacugcaagcuccgccu

SEQ ID NO: 595778 - RNA, 19 nt, Human
ucacugcaagcuccgccuu

SEQ ID NO: 595779 - RNA, 19 nt, Human
ucacugcaagcuccgccuu

SEQ ID NO: 595780 - RNA, 24 nt, Human
ucacugcaagcuccgccuuccagg

SEQ ID NO: 595781 - RNA, 23 nt, Human
ucagccucccgaguagcugggac

SEQ ID NO: 595782 - RNA, 19 nt, Human
ucagcucacugcaagcucc

SEQ ID NO: 595783 - RNA, 23 nt, Human
ucaguucagucccuuugcugugu

SEQ ID NO: 595784 - RNA, 18 nt, Human
ucaugccauucuccugcc

SEQ ID NO: 595785 - RNA, 18 nt, Human
uccaggaaaggaaaugag

SEQ ID NO: 595786 - RNA, 21 nt, Human
ucccaaagugcugggauuacc

SEQ ID NO: 595787 - RNA, 24 nt, Human
ucccaaagugcugggauuaccggc

SEQ ID NO: 595788 - RNA, 24 nt, Human
ucccgaguagcugggacuacaggc

SEQ ID NO: 595789 - RNA, 24 nt, Human
ucgcccaggcuggagugcaguggc

SEQ ID NO: 595790 - RNA, 18 nt, Human
ucggccucccaaagugcu

SEQ ID NO: 595791 - RNA, 24 nt, Human
ucuccugccucagccucccgagua

SEQ ID NO: 595792 - RNA, 22 nt, Human
ucucgcuccgucgcccaggcug

SEQ ID NO: 595793 - RNA, 23 nt, Human
ucucgcuccgucgcccaggcugg

SEQ ID NO: 595794 - RNA, 24 nt, Human
ucucgcuccgucgcccaggcugga

SEQ ID NO: 595795 - RNA, 26 nt, Human
ucucgcuccgucgcccaggcuggagu

SEQ ID NO: 595796 - RNA, 27 nt, Human
ucucgcuccgucgcccaggcuggagug

SEQ ID NO: 595797 - RNA, 21 nt, Human
ucuggcaggaggcaauuuagc

SEQ ID NO: 595798 - RNA, 21 nt, Human
ugaaauccugagguauagaau

SEQ ID NO: 595799 - RNA, 19 nt, Human
ugagacagagucucgcucc

SEQ ID NO: 595800 - RNA, 22 nt, Human
ugagacagagucucgcuccguc

SEQ ID NO: 595801 - RNA, 25 nt, Human
ugaggaggaaggugggggaagggga

SEQ ID NO: 595802 - RNA, 27 nt, Human
ugcagagacaaagagaggcaaagauac

SEQ ID NO: 595803 - RNA, 23 nt, Human
ugcaguggcgcaaucucagcuca

SEQ ID NO: 595804 - RNA, 24 nt, Human
ugccucagccucccgaguagcugg

SEQ ID NO: 595805 - RNA, 18 nt, Human
ugccugaagucccagugg

SEQ ID NO: 595806 - RNA, 22 nt, Human
ugcugugugccugguggugagc

SEQ ID NO: 595807 - RNA, 18 nt, Human
uggagugcaguggcgcaa

SEQ ID NO: 595808 - RNA, 23 nt, Human
uggagugcaguggcgcaaucuca

SEQ ID NO: 595809 - RNA, 24 nt, Human
uggagugcaguggcgcaaucucag

SEQ ID NO: 595810 - RNA, 24 nt, Human
uggcgcaaucucagcucacugcaa

SEQ ID NO: 595811 - RNA, 21 nt, Human
ugggacuacaggcgcucgcca

SEQ ID NO: 595812 - RNA, 22 nt, Human
ugggacuacaggcgcucgccac

SEQ ID NO: 595813 - RNA, 24 nt, Human
ugggacuacaggcgcucgccacca

SEQ ID NO: 595814 - RNA, 18 nt, Human
ugggauuaccggcgugag

SEQ ID NO: 595815 - RNA, 22 nt, Human
ugggauuaccggcgugagccac

SEQ ID NO: 595816 - RNA, 23 nt, Human
ugggauuaccggcgugagccacc

SEQ ID NO: 595817 - RNA, 23 nt, Human
ugggauuaccggcgugagccacc

SEQ ID NO: 595818 - RNA, 24 nt, Human
ugggauuaccggcgugagccaccg

SEQ ID NO: 595819 - RNA, 21 nt, Human
ugggggguggggguggcuuag

SEQ ID NO: 595820 - RNA, 24 nt, Human
ugggguuucaccguguuagccagg

SEQ ID NO: 595821 - RNA, 21 nt, Human
ugguggugagcuucuugccug

SEQ ID NO: 595822 - RNA, 21 nt, Human
uguauuuuuaguggaaauggg

SEQ ID NO: 595823 - RNA, 19 nt, Human
ugucaaggaagagagaucu

SEQ ID NO: 595824 - RNA, 20 nt, Human
ugucaaggaagagagaucug

SEQ ID NO: 595825 - RNA, 24 nt, Human
uguccuggcccuucagucuuuuca

SEQ ID NO: 595826 - RNA, 18 nt, Human
uuaguggaaaugggguuu

SEQ ID NO: 595827 - RNA, 22 nt, Human
uuaguggaaaugggguuucacc

SEQ ID NO: 595828 - RNA, 24 nt, Human
uuaguggaaaugggguuucaccgu

SEQ ID NO: 595829 - RNA, 19 nt, Human
uucaugccauucuccugcc

SEQ ID NO: 595830 - RNA, 19 nt, Human
uugguccugggaccugugc

SEQ ID NO: 595831 - RNA, 20 nt, Human
uugguccugggaccugugcc

SEQ ID NO: 595832 - RNA, 20 nt, Human
uugguccugggaccugugcc

SEQ ID NO: 595833 - RNA, 23 nt, Human
uuguauuuuuaguggaaaugggg

SEQ ID NO: 595834 - RNA, 19 nt, Human
uuucaccguguuagccagg

SEQ ID NO: 595835 - RNA, 24 nt, Human
uuuuuaguggaaaugggguuucac

SEQ ID NO: 595836 - RNA, 19 nt, Human
uuuuuguauuuuuagugga

SEQ ID NO: 595837 - RNA, 22 nt, Human
aaaaaaaaacaaaaaccaccaa

SEQ ID NO: 595838 - RNA, 23 nt, Human
aaaaaaaaacaaaaaccaccaaa

SEQ ID NO: 595839 - RNA, 24 nt, Human
aaaaaaaaacaaaaaccaccaaaa

SEQ ID NO: 595840 - RNA, 23 nt, Human
aaaaaaaacaaaaaccaccaaaa

SEQ ID NO: 595841 - RNA, 18 nt, Human
aaaacaaaaaccaccaaa

SEQ ID NO: 595842 - RNA, 19 nt, Human
aaaacaaaaaccaccaaaa

SEQ ID NO: 595843 - RNA, 18 nt, Human
aacaaaaaccaccaaaac

SEQ ID NO: 595844 - RNA, 23 nt, Human
aacagaaaaugaaaaaaaaacaa

SEQ ID NO: 595845 - RNA, 20 nt, Human
aagcagcaggaagcagcauu

SEQ ID NO: 595846 - RNA, 19 nt, Human
aagcaggugccuagaagca

SEQ ID NO: 595847 - RNA, 19 nt, Human
aagccagucugcccagccu

SEQ ID NO: 595848 - RNA, 23 nt, Human
aauagcugcauuauuuagauuuu

SEQ ID NO: 595849 - RNA, 21 nt, Human
aauccaacagaaaaugaaaaa

SEQ ID NO: 595850 - RNA, 23 nt, Human
acccugagagagggcaagagagu

SEQ ID NO: 595851 - RNA, 23 nt, Human
agaaaaugaaaaaaaaacaaaaa

SEQ ID NO: 595852 - RNA, 18 nt, Human
agacaagagagaaaaugg

SEQ ID NO: 595853 - RNA, 24 nt, Human
agacaagagagaaaauggcaugag

SEQ ID NO: 595854 - RNA, 25 nt, Human
agacaagagagaaaauggcaugagg

SEQ ID NO: 595855 - RNA, 20 nt, Human
agaguucuuucuauauuccc

SEQ ID NO: 595856 - RNA, 27 nt, Human
aguuccuauuuauucucaaaugcccug

SEQ ID NO: 595857 - RNA, 21 nt, Human
auacugaacaucaugaacucc

SEQ ID NO: 595858 - RNA, 18 nt, Human
aucaugaacuccaaaagc

SEQ ID NO: 595859 - RNA, 22 nt, Human
augucauguccucaacauaaua

SEQ ID NO: 595860 - RNA, 21 nt, Human
auuuccuuuucagcauuuguu

SEQ ID NO: 595861 - RNA, 23 nt, Human
caaacaggcagcugauccaaaau

SEQ ID NO: 595862 - RNA, 26 nt, Human
caacagaaaaugaaaaaaaaacaaaa

SEQ ID NO: 595863 - RNA, 21 nt, Human
caccaaaacuuuuucccccua

SEQ ID NO: 595864 - RNA, 21 nt, Human
caccagagccuggaccaccag

SEQ ID NO: 595865 - RNA, 18 nt, Human
cacccccaucucuagcca

SEQ ID NO: 595866 - RNA, 18 nt, Human
cagagcucugggcuccca

SEQ ID NO: 595867 - RNA, 24 nt, Human
caggugccuagaagcaagcagcag

SEQ ID NO: 595868 - RNA, 20 nt, Human
caguuuauauuuucaaacca

SEQ ID NO: 595869 - RNA, 19 nt, Human
caugagucacauaagugca

SEQ ID NO: 595870 - RNA, 25 nt, Human
ccagaaaccaacuuccuuugaaaca

SEQ ID NO: 595871 - RNA, 25 nt, Human
ccagugguaauagcugcauuauuua

SEQ ID NO: 595872 - RNA, 18 nt, Human
ccaugacacuuaagcauc

SEQ ID NO: 595873 - RNA, 26 nt, Human
ccggucucacccccaucucuagccau

SEQ ID NO: 595874 - RNA, 23 nt, Human
ccucaugguugcaugaggcugcc

SEQ ID NO: 595875 - RNA, 21 nt, Human
cucaaaugcccugacuaaacu

SEQ ID NO: 595876 - RNA, 21 nt, Human
cuccucccagagcucugggcu

SEQ ID NO: 595877 - RNA, 24 nt, Human
cuucaccagagccuggaccaccag

SEQ ID NO: 595878 - RNA, 18 nt, Human
cuuggaccagaaaccaac

SEQ ID NO: 595879 - RNA, 21 nt, Human
gcuugaugacuaaguugguag

SEQ ID NO: 595880 - RNA, 23 nt, Human
gucagguaacaaaagccagucug

SEQ ID NO: 595881 - RNA, 18 nt, Human
guccucaacauaaaguuc

SEQ ID NO: 595882 - RNA, 18 nt, Human
guuuuugcaaacaggcag

SEQ ID NO: 595883 - RNA, 21 nt, Human
uaaaugaagggcuucaccaca

SEQ ID NO: 595884 - RNA, 24 nt, Human
uaaaugacaucaauacucuauaaa

SEQ ID NO: 595885 - RNA, 22 nt, Human
uaagugcauuuaacucagacaa

SEQ ID NO: 595886 - RNA, 18 nt, Human
uaccaagaagcuuguuuu

SEQ ID NO: 595887 - RNA, 19 nt, Human
uagaagcaagcagcaggaa

SEQ ID NO: 595888 - RNA, 22 nt, Human
uaggucaaaacuuggaccagaa

SEQ ID NO: 595889 - RNA, 18 nt, Human
ucaaaccaaugucauguc

SEQ ID NO: 595890 - RNA, 21 nt, Human
ucagaaacauaaaugacauca

SEQ ID NO: 595891 - RNA, 20 nt, Human
ucagguaaaggaaaauugag

SEQ ID NO: 595892 - RNA, 19 nt, Human
uccaacagaaaaugaaaaa

SEQ ID NO: 595893 - RNA, 21 nt, Human
ucccagagcucugggcuccca

SEQ ID NO: 595894 - RNA, 22 nt, Human
ucccagagcucugggcucccag

SEQ ID NO: 595895 - RNA, 23 nt, Human
ucccagagcucugggcucccaga

SEQ ID NO: 595896 - RNA, 22 nt, Human
uccccggucucacccccaucuc

SEQ ID NO: 595897 - RNA, 21 nt, Human
ucccucgucacauacuauccc

SEQ ID NO: 595898 - RNA, 18 nt, Human
uccugggcucagagggcu

SEQ ID NO: 595899 - RNA, 20 nt, Human
ucugggcucccagacugugu

SEQ ID NO: 595900 - RNA, 24 nt, Human
ucuguaagagucuuuuauaccaag

SEQ ID NO: 595901 - RNA, 24 nt, Human
ugaaaaaaaaacaaaaaccaccaa

SEQ ID NO: 595902 - RNA, 28 nt, Human
ugaaaaaaaaacaaaaaccaccaaaacu

SEQ ID NO: 595903 - RNA, 22 nt, Human
ugaaacaccucagaaacauaaa

SEQ ID NO: 595904 - RNA, 19 nt, Human
ugaaugggucccauucuuu

SEQ ID NO: 595905 - RNA, 19 nt, Human
ugacacuuaagcauccaga

SEQ ID NO: 595906 - RNA, 19 nt, Human
ugacuaaacugcucaaaag

SEQ ID NO: 595907 - RNA, 21 nt, Human
ugauuuccaucccuuaucugu

SEQ ID NO: 595908 - RNA, 23 nt, Human
ugcaaacaggcagcugauccaaa

SEQ ID NO: 595909 - RNA, 21 nt, Human
ugcauuuaacucagacaacuu

SEQ ID NO: 595910 - RNA, 20 nt, Human
ugccuagaagcaagcagcag

SEQ ID NO: 595911 - RNA, 22 nt, Human
ugccuagaagcaagcagcagga

SEQ ID NO: 595912 - RNA, 24 nt, Human
ugcuguuaggugaagaacuguuua

SEQ ID NO: 595913 - RNA, 18 nt, Human
ugcuucaggaugcucaga

SEQ ID NO: 595914 - RNA, 18 nt, Human
ugguugcaugaggcugcc

SEQ ID NO: 595915 - RNA, 28 nt, Human
uguaauccaacagaaaaugaaaaaaaaa

SEQ ID NO: 595916 - RNA, 23 nt, Human
uguguugaaacaccucagaaaca

SEQ ID NO: 595917 - RNA, 20 nt, Human
uuagauuuugcuucaggaug

SEQ ID NO: 595918 - RNA, 26 nt, Human
uuaucuguucccugcuuuuguccuuc

SEQ ID NO: 595919 - RNA, 20 nt, Human
uucacagugcuuguaagugc

SEQ ID NO: 595920 - RNA, 19 nt, Human
uuuaggaaaaaaacaagau

SEQ ID NO: 595921 - RNA, 24 nt, Human
uuucuauauucccuucugauuucc

SEQ ID NO: 595922 - RNA, 22 nt, Human
uuuucuguaauccaacagaaaa

SEQ ID NO: 595923 - RNA, 21 nt, Human
uuuugcuucaggaugcucaga

SEQ ID NO: 595924 - RNA, 24 nt, Human
uuuuuggucuucggcagugacauu

SEQ ID NO: 595925 - RNA, 22 nt, Human
uuuuuuuuuuaauguagcaaau

SEQ ID NO: 595926 - RNA, 19 nt, Human
uuuuuuuuuuuuuuuuuaa

SEQ ID NO: 595927 - RNA, 19 nt, Human
aaagugcugggauuacagg

SEQ ID NO: 595928 - RNA, 23 nt, Human
aaagugcugggauuacaggcgug

SEQ ID NO: 595929 - RNA, 27 nt, Human
aagugauccuuucaccucggccuccca

SEQ ID NO: 595930 - RNA, 19 nt, Human
aagugcugggauuacaggc

SEQ ID NO: 595931 - RNA, 19 nt, Human
aagugcugggauuacaggc

SEQ ID NO: 595932 - RNA, 24 nt, Human
aagugcugggauuacaggcgugcc

SEQ ID NO: 595933 - RNA, 21 nt, Human
acgcuggucuccaauuccugg

SEQ ID NO: 595934 - RNA, 21 nt, Human
agagacagggucuugcuuugu

SEQ ID NO: 595935 - RNA, 19 nt, Human
aguagcugggacuacaggc

SEQ ID NO: 595936 - RNA, 23 nt, Human
aguagcugggacuacaggcaugu

SEQ ID NO: 595937 - RNA, 23 nt, Human
agugaucuuccuuccccagccuc

SEQ ID NO: 595938 - RNA, 21 nt, Human
agugcaguggugcaaucauag

SEQ ID NO: 595939 - RNA, 23 nt, Human
agugcaguggugcaaucauagcu

SEQ ID NO: 595940 - RNA, 24 nt, Human
caaagugcugggauuacaggcgug

SEQ ID NO: 595941 - RNA, 27 nt, Human
caagugauccuuucaccucggccuccc

SEQ ID NO: 595942 - RNA, 24 nt, Human
caccucggccucccaaagugcugg

SEQ ID NO: 595943 - RNA, 20 nt, Human
cagccuccugaguagcuggg

SEQ ID NO: 595944 - RNA, 24 nt, Human
cagggucuugcuuuguugcccagg

SEQ ID NO: 595945 - RNA, 21 nt, Human
cauuuuguagagauggagucu

SEQ ID NO: 595946 - RNA, 22 nt, Human
ccaaagugcugggauuacaggc

SEQ ID NO: 595947 - RNA, 22 nt, Human
ccaaagugcugggauuacaggc

SEQ ID NO: 595948 - RNA, 24 nt, Human
ccaaagugcugggauuacaggcgu

SEQ ID NO: 595949 - RNA, 22 nt, Human
ccccagccuccugaguagcugg

SEQ ID NO: 595950 - RNA, 23 nt, Human
ccugaguagcugggacuacaggc

SEQ ID NO: 595951 - RNA, 24 nt, Human
ccugaguagcugggacuacaggca

SEQ ID NO: 595952 - RNA, 22 nt, Human
ccugggcucaagugauccuuuc

SEQ ID NO: 595953 - RNA, 24 nt, Human
cucaagugauccuuucaccucggc

SEQ ID NO: 595954 - RNA, 23 nt, Human
cucauggccuuaagugaucuucc

SEQ ID NO: 595955 - RNA, 25 nt, Human
cucauggccuuaagugaucuuccuu

SEQ ID NO: 595956 - RNA, 24 nt, Human
cugauaaaugcggggguccuucuu

SEQ ID NO: 595957 - RNA, 23 nt, Human
cuuccccagccuccugaguagcu

SEQ ID NO: 595958 - RNA, 21 nt, Human
cuugcuuuguugcccaggcug

SEQ ID NO: 595959 - RNA, 20 nt, Human
cuuuguugcccaggcuggag

SEQ ID NO: 595960 - RNA, 27 nt, Human
gaguagcugggacuacaggcauguguc

SEQ ID NO: 595961 - RNA, 19 nt, Human
gcccaggcuggagugcagu

SEQ ID NO: 595962 - RNA, 21 nt, Human
gccugaggccccugccugcuc

SEQ ID NO: 595963 - RNA, 21 nt, Human
gggcucaagugauccuuucac

SEQ ID NO: 595964 - RNA, 22 nt, Human
gggcucaagugauccuuucacc

SEQ ID NO: 595965 - RNA, 24 nt, Human
gucuugcuuuguugcccaggcugg

SEQ ID NO: 595966 - RNA, 24 nt, Human
gugaucuuccuuccccagccuccu

SEQ ID NO: 595967 - RNA, 24 nt, Human
ucccaaagugcugggauuacaggc

SEQ ID NO: 595968 - RNA, 24 nt, Human
uccugaguagcugggacuacaggc

SEQ ID NO: 595969 - RNA, 20 nt, Human
uccugggcucaagugauccu

SEQ ID NO: 595970 - RNA, 21 nt, Human
uccugggcucaagugauccuu

SEQ ID NO: 595971 - RNA, 18 nt, Human
ucggccucccaaagugcu

SEQ ID NO: 595972 - RNA, 24 nt, Human
ucucgcuaaguugcccacgcuggu

SEQ ID NO: 595973 - RNA, 21 nt, Human
ucucugcagcagauaguacuu

SEQ ID NO: 595974 - RNA, 23 nt, Human
ucuugcuuuguugcccaggcugg

SEQ ID NO: 595975 - RNA, 24 nt, Human
ucuugcuuuguugcccaggcugga

SEQ ID NO: 595976 - RNA, 22 nt, Human
ugcaguggugcaaucauagcuc

SEQ ID NO: 595977 - RNA, 18 nt, Human
ugcccaggcuggagugca

SEQ ID NO: 595978 - RNA, 21 nt, Human
ugcccaggcuggagugcagug

SEQ ID NO: 595979 - RNA, 24 nt, Human
ugcccaggcuggagugcaguggug

SEQ ID NO: 595980 - RNA, 19 nt, Human
ugccuggccacagaugaga

SEQ ID NO: 595981 - RNA, 19 nt, Human
ugcugggauuacaggcgug

SEQ ID NO: 595982 - RNA, 18 nt, Human
uggagugcaguggugcaa

SEQ ID NO: 595983 - RNA, 19 nt, Human
uggagugcaguggugcaau

SEQ ID NO: 595984 - RNA, 21 nt, Human
uggagugcaguggugcaauca

SEQ ID NO: 595985 - RNA, 20 nt, Human
uggccuuaagugaucuuccu

SEQ ID NO: 595986 - RNA, 18 nt, Human
ugggacuacaggcaugug

SEQ ID NO: 595987 - RNA, 22 nt, Human
ugggacuacaggcaugugucac

SEQ ID NO: 595988 - RNA, 24 nt, Human
ugggacuacaggcaugugucacca

SEQ ID NO: 595989 - RNA, 18 nt, Human
ugggauuacaggcgugcc

SEQ ID NO: 595990 - RNA, 18 nt, Human
ugggauuacaggcgugcc

SEQ ID NO: 595991 - RNA, 20 nt, Human
ugggauuacaggcgugccug

SEQ ID NO: 595992 - RNA, 24 nt, Human
ugggauuacaggcgugccuggcca

SEQ ID NO: 595993 - RNA, 25 nt, Human
ugggauuacaggcgugccuggccac

SEQ ID NO: 595994 - RNA, 19 nt, Human
ugggcucaagugauccuuu

SEQ ID NO: 595995 - RNA, 22 nt, Human
ugugggugcgagaccuguccag

SEQ ID NO: 595996 - RNA, 28 nt, Human
uuaagugaucuuccuuccccagccuccu

SEQ ID NO: 595997 - RNA, 23 nt, Human
uuccugggcucaagugauccuuu

SEQ ID NO: 595998 - RNA, 24 nt, Human
uugcccaggcuggagugcaguggu

SEQ ID NO: 595999 - RNA, 24 nt, Human
uugcuuuguugcccaggcuggagu

SEQ ID NO: 596000 - RNA, 22 nt, Human
uuguagagauggagucucgcua

SEQ ID NO: 596001 - RNA, 24 nt, Human
uuuguugcccaggcuggagugcag

SEQ ID NO: 596002 - RNA, 20 nt, Human
ccacagggacaaaggaaggc

SEQ ID NO: 596003 - RNA, 23 nt, Human
ccccagaucggcucgccugacuc

SEQ ID NO: 596004 - RNA, 20 nt, Human
cuccaaauccgccgccacca

SEQ ID NO: 596005 - RNA, 21 nt, Human
cuccaaauccgccgccaccau

SEQ ID NO: 596006 - RNA, 27 nt, Human
ugacuccugguucguagggucccuccu

SEQ ID NO: 596007 - RNA, 22 nt, Human
aaaaaaaaccccaaaaaaccaa

SEQ ID NO: 596008 - RNA, 23 nt, Human
aaaaaaaccccaaaaaaccaaaa

SEQ ID NO: 596009 - RNA, 18 nt, Human
aaaaaaccaaaaaaccaa

SEQ ID NO: 596010 - RNA, 22 nt, Human
aaaaaaccaaaaaaccaaauua

SEQ ID NO: 596011 - RNA, 27 nt, Human
aaaaaccccaaaaaaccaaaaaaccaa

SEQ ID NO: 596012 - RNA, 22 nt, Human
aaaaauaugaacauuugaacaa

SEQ ID NO: 596013 - RNA, 19 nt, Human
aaaaccccaaaaaaccaag

SEQ ID NO: 596014 - RNA, 23 nt, Human
aaacaaauguauuucuuaucccu

SEQ ID NO: 596015 - RNA, 23 nt, Human
aaaccaaaaaaccaaauuaccca

SEQ ID NO: 596016 - RNA, 26 nt, Human
aaacccacaggccaaaccucucuuua

SEQ ID NO: 596017 - RNA, 22 nt, Human
aaccaaaaaaccaaauuacccu

SEQ ID NO: 596018 - RNA, 26 nt, Human
aacccacaggccaaaccucucuuuag

SEQ ID NO: 596019 - RNA, 18 nt, Human
aagaaaaagacccaggaa

SEQ ID NO: 596020 - RNA, 19 nt, Human
aagacaaaaguauccagaa

SEQ ID NO: 596021 - RNA, 21 nt, Human
aagacaaaaguauccagaaga

SEQ ID NO: 596022 - RNA, 23 nt, Human
aagauucuuuauuuaagcagacc

SEQ ID NO: 596023 - RNA, 24 nt, Human
aagcagccauggagaaguuaagug

SEQ ID NO: 596024 - RNA, 21 nt, Human
aagcagcugggcaaacuucug

SEQ ID NO: 596025 - RNA, 23 nt, Human
aagcagcugggcaaacuucuggc

SEQ ID NO: 596026 - RNA, 19 nt, Human
aagcuuccggaggccuccc

SEQ ID NO: 596027 - RNA, 22 nt, Human
aaggaaaggaauauuuuucuca

SEQ ID NO: 596028 - RNA, 24 nt, Human
aaggcuccgucucaaaaaaaaccc

SEQ ID NO: 596029 - RNA, 22 nt, Human
aaucugaacuuacagaaaccaa

SEQ ID NO: 596030 - RNA, 24 nt, Human
aaugcccacuaaauuuugaauagc

SEQ ID NO: 596031 - RNA, 18 nt, Human
aauuagccaggcauggug

SEQ ID NO: 596032 - RNA, 18 nt, Human
acaauggaucuguacaac

SEQ ID NO: 596033 - RNA, 20 nt, Human
acagagcaaggcuccgucuc

SEQ ID NO: 596034 - RNA, 23 nt, Human
acagagcaaggcuccgucucaaa

SEQ ID NO: 596035 - RNA, 24 nt, Human
acagagcaaggcuccgucucaaaa

SEQ ID NO: 596036 - RNA, 23 nt, Human
acauaaaacauacagcagccaca

SEQ ID NO: 596037 - RNA, 19 nt, Human
accacaauggaucuguaca

SEQ ID NO: 596038 - RNA, 26 nt, Human
accacuuaaaaacccacaggccaaac

SEQ ID NO: 596039 - RNA, 18 nt, Human
accccaucucuacuaaaa

SEQ ID NO: 596040 - RNA, 18 nt, Human
acggugaaaccccaucuc

SEQ ID NO: 596041 - RNA, 24 nt, Human
acugcacuccagccugggcgacag

SEQ ID NO: 596042 - RNA, 26 nt, Human
acugcacuccagccugggcgacagag

SEQ ID NO: 596043 - RNA, 18 nt, Human
agaaaccaagcagacgcc

SEQ ID NO: 596044 - RNA, 18 nt, Human
agaaaccaauccaccagg

SEQ ID NO: 596045 - RNA, 21 nt, Human
agaagaaagcagcugggcaaa

SEQ ID NO: 596046 - RNA, 21 nt, Human
agacaguaucuuaaaaguuca

SEQ ID NO: 596047 - RNA, 20 nt, Human
agacccaggaaacugaacga

SEQ ID NO: 596048 - RNA, 24 nt, Human
agcagcugggcaaacuucuggcuc

SEQ ID NO: 596049 - RNA, 24 nt, Human
agccugggcgacagagcaaggcuc

SEQ ID NO: 596050 - RNA, 26 nt, Human
aggaaaggaauauuuuucucaaaugu

SEQ ID NO: 596051 - RNA, 24 nt, Human
aggcaggagaauggcaugaaccca

SEQ ID NO: 596052 - RNA, 27 nt, Human
aggcaggagaauggcaugaacccagga

SEQ ID NO: 596053 - RNA, 21 nt, Human
aggcagggcucuguccaagug

SEQ ID NO: 596054 - RNA, 24 nt, Human
aggcaugguggcgggcgccuguag

SEQ ID NO: 596055 - RNA, 19 nt, Human
aggcugaggcaggagaaug

SEQ ID NO: 596056 - RNA, 18 nt, Human
agggcucuguccaaguga

SEQ ID NO: 596057 - RNA, 21 nt, Human
agguggagguugcauagagcc

SEQ ID NO: 596058 - RNA, 24 nt, Human
agguggagguugcauagagccgag

SEQ ID NO: 596059 - RNA, 20 nt, Human
agguggggccuggugggagg

SEQ ID NO: 596060 - RNA, 21 nt, Human
auacuaagaaaaagaaaacca

SEQ ID NO: 596061 - RNA, 25 nt, Human
auagaacaaaaauaugaacauuuga

SEQ ID NO: 596062 - RNA, 24 nt, Human
aucgcgccacugcacuccagccug

SEQ ID NO: 596063 - RNA, 24 nt, Human
augaacccaggagguggagguugc

SEQ ID NO: 596064 - RNA, 20 nt, Human
auggacacucccauacuaag

SEQ ID NO: 596065 - RNA, 19 nt, Human
auguggucaaaugaaggag

SEQ ID NO: 596066 - RNA, 18 nt, Human
caaaaaaaaccccaaaaa

SEQ ID NO: 596067 - RNA, 21 nt, Human
caaaaaaaaccccaaaaaacc

SEQ ID NO: 596068 - RNA, 25 nt, Human
caaaaaaaaccccaaaaaaccaaaa

SEQ ID NO: 596069 - RNA, 24 nt, Human
caaaaaaccaaaaaaccaaauuac

SEQ ID NO: 596070 - RNA, 24 nt, Human
caacacauaaaacauacagcagcc

SEQ ID NO: 596071 - RNA, 19 nt, Human
caagccccacauuccaggg

SEQ ID NO: 596072 - RNA, 24 nt, Human
caagccccacauuccagggauauc

SEQ ID NO: 596073 - RNA, 23 nt, Human
caauguucaagccccacauucca

SEQ ID NO: 596074 - RNA, 19 nt, Human
caccaggacacccugccaa

SEQ ID NO: 596075 - RNA, 23 nt, Human
cacuccagccugggcgacagagc

SEQ ID NO: 596076 - RNA, 19 nt, Human
cacugcacuccagccuggg

SEQ ID NO: 596077 - RNA, 20 nt, Human
cacugcacuccagccugggc

SEQ ID NO: 596078 - RNA, 20 nt, Human
cacugcacuccagccugggc

SEQ ID NO: 596079 - RNA, 22 nt, Human
cacugcacuccagccugggcga

SEQ ID NO: 596080 - RNA, 24 nt, Human
cacugcacuccagccugggcgaca

SEQ ID NO: 596081 - RNA, 27 nt, Human
cacugcacuccagccugggcgacagag

SEQ ID NO: 596082 - RNA, 24 nt, Human
cagagcccauucgucucacaccau

SEQ ID NO: 596083 - RNA, 24 nt, Human
cagcagccacaaaauaauuagaaa

SEQ ID NO: 596084 - RNA, 24 nt, Human
cagccagauuucuucucaaaucaa

SEQ ID NO: 596085 - RNA, 24 nt, Human
cagcuacucgggaggcugaggcag

SEQ ID NO: 596086 - RNA, 18 nt, Human
caguaccaugcuuccugu

SEQ ID NO: 596087 - RNA, 19 nt, Human
cauacggugaaaccccauc

SEQ ID NO: 596088 - RNA, 20 nt, Human
cauacggugaaaccccaucu

SEQ ID NO: 596089 - RNA, 23 nt, Human
cauacuaagaaaaagaaaaccau

SEQ ID NO: 596090 - RNA, 18 nt, Human
caugggucccucagaauc

SEQ ID NO: 596091 - RNA, 22 nt, Human
caugguggcgggcgccuguagu

SEQ ID NO: 596092 - RNA, 19 nt, Human
caugugaugugccugcucc

SEQ ID NO: 596093 - RNA, 24 nt, Human
ccaagugaacacauugagaaugaa

SEQ ID NO: 596094 - RNA, 23 nt, Human
ccaauacuggagguggggccugg

SEQ ID NO: 596095 - RNA, 23 nt, Human
ccaauccaccaggacacccugcc

SEQ ID NO: 596096 - RNA, 20 nt, Human
ccacugcacuccagccuggg

SEQ ID NO: 596097 - RNA, 20 nt, Human
ccacugcacuccagccuggg

SEQ ID NO: 596098 - RNA, 21 nt, Human
ccacugcacuccagccugggc

SEQ ID NO: 596099 - RNA, 21 nt, Human
ccacugcacuccagccugggc

SEQ ID NO: 596100 - RNA, 23 nt, Human
ccacugcacuccagccugggcga

SEQ ID NO: 596101 - RNA, 24 nt, Human
ccacugcacuccagccugggcgac

SEQ ID NO: 596102 - RNA, 21 nt, Human
ccauucgucucacaccauuuc

SEQ ID NO: 596103 - RNA, 20 nt, Human
ccccaaaaaaccaaaaaacc

SEQ ID NO: 596104 - RNA, 22 nt, Human
ccccaaaaaaccaaaaaaccaa

SEQ ID NO: 596105 - RNA, 24 nt, Human
ccccaaaaaaccaaaaaaccaaau

SEQ ID NO: 596106 - RNA, 22 nt, Human
ccccagaaaccaagcagacgcc

SEQ ID NO: 596107 - RNA, 19 nt, Human
cccugccaacaaaccauuc

SEQ ID NO: 596108 - RNA, 22 nt, Human
ccucaggaucuccugauaccaa

SEQ ID NO: 596109 - RNA, 24 nt, Human
ccuggcucauacggugaaacccca

SEQ ID NO: 596110 - RNA, 22 nt, Human
ccugggcgacagagcaaggcuc

SEQ ID NO: 596111 - RNA, 21 nt, Human
ccuguagucccagcuacucgg

SEQ ID NO: 596112 - RNA, 22 nt, Human
ccuguagucccagcuacucggg

SEQ ID NO: 596113 - RNA, 22 nt, Human
cgagaccauccuggcucauacg

SEQ ID NO: 596114 - RNA, 26 nt, Human
cgccacugcacuccagccugggcgac

SEQ ID NO: 596115 - RNA, 23 nt, Human
cgccuguagucccagcuacucgg

SEQ ID NO: 596116 - RNA, 24 nt, Human
cgccuguagucccagcuacucggg

SEQ ID NO: 596117 - RNA, 23 nt, Human
cuaaaugaaucucuaucaacuaa

SEQ ID NO: 596118 - RNA, 27 nt, Human
cucaagccucaauccaauucauggguc

SEQ ID NO: 596119 - RNA, 25 nt, Human
cucagaaucucaucacucccacuuc

SEQ ID NO: 596120 - RNA, 24 nt, Human
cucaggaucuccugauaccaauuc

SEQ ID NO: 596121 - RNA, 21 nt, Human
cuuccuguaaagccugcagag

SEQ ID NO: 596122 - RNA, 23 nt, Human
cuucuggcuccuaacaggcaauu

SEQ ID NO: 596123 - RNA, 20 nt, Human
cuugccauucauggaagagu

SEQ ID NO: 596124 - RNA, 24 nt, Human
gaaaacuugaaaaauacagaggua

SEQ ID NO: 596125 - RNA, 23 nt, Human
gaccacaauggaucuguacaacc

SEQ ID NO: 596126 - RNA, 23 nt, Human
gagaucgcgccacugcacuccag

SEQ ID NO: 596127 - RNA, 21 nt, Human
gagccgagaucgcgccacugc

SEQ ID NO: 596128 - RNA, 23 nt, Human
gagguugcauagagccgagaucg

SEQ ID NO: 596129 - RNA, 21 nt, Human
gcaaauaggccauguggucaa

SEQ ID NO: 596130 - RNA, 24 nt, Human
gcacuccagccugggcgacagagc

SEQ ID NO: 596131 - RNA, 22 nt, Human
gcaggagaauggcaugaaccca

SEQ ID NO: 596132 - RNA, 23 nt, Human
gcauuuagcauagaacaaaaaua

SEQ ID NO: 596133 - RNA, 22 nt, Human
gccacugcacuccagccugggc

SEQ ID NO: 596134 - RNA, 24 nt, Human
gccacugcacuccagccugggcga

SEQ ID NO: 596135 - RNA, 20 nt, Human
gccgagaucgcgccacugca

SEQ ID NO: 596136 - RNA, 24 nt, Human
ggagguugcauagagccgagaucg

SEQ ID NO: 596137 - RNA, 21 nt, Human
ggcccuuuuaucucagaggug

SEQ ID NO: 596138 - RNA, 21 nt, Human
gggcucccaacacauaaaaca

SEQ ID NO: 596139 - RNA, 20 nt, Human
gguggagguugcauagagcc

SEQ ID NO: 596140 - RNA, 24 nt, Human
gguggcgggcgccuguagucccag

SEQ ID NO: 596141 - RNA, 21 nt, Human
guacaaagauucuuuauuuaa

SEQ ID NO: 596142 - RNA, 25 nt, Human
guccagagcccauucggccuaaugg

SEQ ID NO: 596143 - RNA, 20 nt, Human
gucucacaccauuuccccuc

SEQ ID NO: 596144 - RNA, 19 nt, Human
gucuccugagaguaugagg

SEQ ID NO: 596145 - RNA, 23 nt, Human
gucuuguggaucaugaggucagg

SEQ ID NO: 596146 - RNA, 23 nt, Human
gugaugugccugcuccccugaag

SEQ ID NO: 596147 - RNA, 21 nt, Human
guugcauagagccgagaucgc

SEQ ID NO: 596148 - RNA, 21 nt, Human
uaaaacauacagcagccacaa

SEQ ID NO: 596149 - RNA, 18 nt, Human
uaaauaaacucaugaauu

SEQ ID NO: 596150 - RNA, 27 nt, Human
uaaauaaacucaugaauuucauaugga

SEQ ID NO: 596151 - RNA, 23 nt, Human
uaaccacuuaaaaacccacaggc

SEQ ID NO: 596152 - RNA, 19 nt, Human
uaacuuagaaagaauuacc

SEQ ID NO: 596153 - RNA, 25 nt, Human
uaagaaaaagacccaggaaacugaa

SEQ ID NO: 596154 - RNA, 28 nt, Human
uacagcagccacaaaauaauuagaaaca

SEQ ID NO: 596155 - RNA, 22 nt, Human
uaccagccucaggaucuccuga

SEQ ID NO: 596156 - RNA, 21 nt, Human
uagaacaaaaauaugaacauu

SEQ ID NO: 596157 - RNA, 18 nt, Human
uagaaguauaaaacaaau

SEQ ID NO: 596158 - RNA, 20 nt, Human
uagacauaaauaaacucaug

SEQ ID NO: 596159 - RNA, 20 nt, Human
uagcauagaacaaaaauaug

SEQ ID NO: 596160 - RNA, 22 nt, Human
uauagaaaacuugaaaaauaca

SEQ ID NO: 596161 - RNA, 22 nt, Human
uauccagaagagucuccugaga

SEQ ID NO: 596162 - RNA, 21 nt, Human
uauuucuucuucacgucuucc

SEQ ID NO: 596163 - RNA, 18 nt, Human
ucaugaggucaggagauc

SEQ ID NO: 596164 - RNA, 24 nt, Human
ucaugaggucaggagaucgagacc

SEQ ID NO: 596165 - RNA, 24 nt, Human
uccagccugggcgacagagcaagg

SEQ ID NO: 596166 - RNA, 19 nt, Human
ucccuacaaaaaaaggggc

SEQ ID NO: 596167 - RNA, 22 nt, Human
ucccucaugaauggccugggcc

SEQ ID NO: 596168 - RNA, 23 nt, Human
ucgcgccacugcacuccagccug

SEQ ID NO: 596169 - RNA, 22 nt, Human
ucucuacuaaaaauauaaaaaa

SEQ ID NO: 596170 - RNA, 25 nt, Human
ucuuguggaucaugaggucaggaga

SEQ ID NO: 596171 - RNA, 19 nt, Human
ugaaaccccaucucuacua

SEQ ID NO: 596172 - RNA, 21 nt, Human
ugaaggagugugaccugggac

SEQ ID NO: 596173 - RNA, 21 nt, Human
ugagaguaugagggugaacua

SEQ ID NO: 596174 - RNA, 23 nt, Human
ugaggcaggagaauggcaugaac

SEQ ID NO: 596175 - RNA, 24 nt, Human
ugaggcaggagaauggcaugaacc

SEQ ID NO: 596176 - RNA, 25 nt, Human
ugaggcaggagaauggcaugaaccc

SEQ ID NO: 596177 - RNA, 24 nt, Human
ugccugcucccccuucaccuucug

SEQ ID NO: 596178 - RNA, 23 nt, Human
uggaauauuuaccacuacucccc

SEQ ID NO: 596179 - RNA, 23 nt, Human
uggaucccucaugaauggccugg

SEQ ID NO: 596180 - RNA, 24 nt, Human
uggcaugaacccaggagguggagg

SEQ ID NO: 596181 - RNA, 21 nt, Human
uggcugcacugccagggcagg

SEQ ID NO: 596182 - RNA, 20 nt, Human
uggggccuggugggaggugu

SEQ ID NO: 596183 - RNA, 24 nt, Human
ugguacaaagauucuuuauuuaag

SEQ ID NO: 596184 - RNA, 21 nt, Human
ugguacaggcucagugugaag

SEQ ID NO: 596185 - RNA, 24 nt, Human
ugguggcgggcgccuguaguccca

SEQ ID NO: 596186 - RNA, 18 nt, Human
uggugugugcaugugggu

SEQ ID NO: 596187 - RNA, 21 nt, Human
uguaauccccaauacuggagg

SEQ ID NO: 596188 - RNA, 23 nt, Human
uguauaaaaacuauggugugugc

SEQ ID NO: 596189 - RNA, 19 nt, Human
ugugugcauguggguguau

SEQ ID NO: 596190 - RNA, 19 nt, Human
ugugugcauguggguguau

SEQ ID NO: 596191 - RNA, 22 nt, Human
ugugugcauguggguguaugug

SEQ ID NO: 596192 - RNA, 18 nt, Human
uguucccgcccaaaccuc

SEQ ID NO: 596193 - RNA, 26 nt, Human
uguuuguauaaaaacuauggugugug

SEQ ID NO: 596194 - RNA, 21 nt, Human
uucaaaacaaucagaucuuug

SEQ ID NO: 596195 - RNA, 18 nt, Human
uuccuuauagaaaacuug

SEQ ID NO: 596196 - RNA, 19 nt, Human
uucgucucacaccauuucc

SEQ ID NO: 596197 - RNA, 20 nt, Human
uugccugucucccaggauga

SEQ ID NO: 596198 - RNA, 21 nt, Human
uuguuccugcuuuugucaugu

SEQ ID NO: 596199 - RNA, 20 nt, Human
uuuaugagaaucugaacuua

SEQ ID NO: 596200 - RNA, 20 nt, Human
uuuuccauaaguaccccuug

SEQ ID NO: 596201 - RNA, 18 nt, Human
aaggauggcugugcaugg

SEQ ID NO: 596202 - RNA, 23 nt, Human
accaagacucccaacuaaaucag

SEQ ID NO: 596203 - RNA, 21 nt, Human
acuccaaaaaacuguuugagg

SEQ ID NO: 596204 - RNA, 18 nt, Human
acuccuccuccuccuucc

SEQ ID NO: 596205 - RNA, 23 nt, Human
acuccuccuccuccuuccuauug

SEQ ID NO: 596206 - RNA, 18 nt, Human
agcagaucuacaggcaga

SEQ ID NO: 596207 - RNA, 22 nt, Human
aggaugaauagauucauuauca

SEQ ID NO: 596208 - RNA, 21 nt, Human
auaaaaaucagcacauguuca

SEQ ID NO: 596209 - RNA, 21 nt, Human
auccauaaaauugccucccuc

SEQ ID NO: 596210 - RNA, 18 nt, Human
auccccucucccccacug

SEQ ID NO: 596211 - RNA, 20 nt, Human
caacauggaaaacauaagua

SEQ ID NO: 596212 - RNA, 19 nt, Human
caacuacaggcucugccag

SEQ ID NO: 596213 - RNA, 19 nt, Human
caacuuaccaagacuccca

SEQ ID NO: 596214 - RNA, 20 nt, Human
caagacucccaacuaaauca

SEQ ID NO: 596215 - RNA, 20 nt, Human
cacaaaguccaguagucacu

SEQ ID NO: 596216 - RNA, 19 nt, Human
cacguugcagaaauacuaa

SEQ ID NO: 596217 - RNA, 21 nt, Human
cacucuguccccuuuccaacu

SEQ ID NO: 596218 - RNA, 18 nt, Human
cagaccuauggacaaaua

SEQ ID NO: 596219 - RNA, 18 nt, Human
ccaguagucacucugucc

SEQ ID NO: 596220 - RNA, 25 nt, Human
cccacaacuuaccaagacucccaaa

SEQ ID NO: 596221 - RNA, 21 nt, Human
cccacccgucucagccuugac

SEQ ID NO: 596222 - RNA, 22 nt, Human
ccccacccgucucagccuugac

SEQ ID NO: 596223 - RNA, 22 nt, Human
ccccucucccccacugcuuugu

SEQ ID NO: 596224 - RNA, 18 nt, Human
ccuccuauccccucuccc

SEQ ID NO: 596225 - RNA, 22 nt, Human
cuacuccuccuccuccuuccua

SEQ ID NO: 596226 - RNA, 19 nt, Human
cugugcaugggcccagccc

SEQ ID NO: 596227 - RNA, 23 nt, Human
cuuccuauugcccaccaucuucc

SEQ ID NO: 596228 - RNA, 21 nt, Human
cuuuccaacuacaggcucugc

SEQ ID NO: 596229 - RNA, 27 nt, Human
gaaaacaugcagaggaagccgguaccc

SEQ ID NO: 596230 - RNA, 19 nt, Human
ggacaaauaaacaaacagg

SEQ ID NO: 596231 - RNA, 20 nt, Human
gucucagccuugacugaagu

SEQ ID NO: 596232 - RNA, 23 nt, Human
uaaaaucucaaaagaauacacau

SEQ ID NO: 596233 - RNA, 22 nt, Human
uacuauauagcacaauaaaaau

SEQ ID NO: 596234 - RNA, 24 nt, Human
uagaaaacaugcagaggaagcuca

SEQ ID NO: 596235 - RNA, 19 nt, Human
uagaaugucccucguucag

SEQ ID NO: 596236 - RNA, 22 nt, Human
uagcacaauaaaaaucagcaca

SEQ ID NO: 596237 - RNA, 21 nt, Human
uauaaagcacagaaguauagc

SEQ ID NO: 596238 - RNA, 23 nt, Human
uauauacccccacccgucucagc

SEQ ID NO: 596239 - RNA, 19 nt, Human
uauggacaaauaaacaaac

SEQ ID NO: 596240 - RNA, 19 nt, Human
ucacucuguccccuuuccc

SEQ ID NO: 596241 - RNA, 22 nt, Human
uccaguagucacucuguccccu

SEQ ID NO: 596242 - RNA, 18 nt, Human
uccauaaaauugccuccc

SEQ ID NO: 596243 - RNA, 24 nt, Human
uccuauugcccaccaucuuccucu

SEQ ID NO: 596244 - RNA, 22 nt, Human
uccuccuauccccucuccccca

SEQ ID NO: 596245 - RNA, 24 nt, Human
uccuccuccuccuuccuauugccc

SEQ ID NO: 596246 - RNA, 24 nt, Human
ucuccuggugacagaccuuggucc

SEQ ID NO: 596247 - RNA, 21 nt, Human
ucuucagugauugcccuagaa

SEQ ID NO: 596248 - RNA, 20 nt, Human
ugagagcaggacaagcagug

SEQ ID NO: 596249 - RNA, 21 nt, Human
uggaaacugaucuccugguga

SEQ ID NO: 596250 - RNA, 19 nt, Human
uggagagugggaaaggcag

SEQ ID NO: 596251 - RNA, 21 nt, Human
uggagagugggaaaggcagcu

SEQ ID NO: 596252 - RNA, 19 nt, Human
ugggaaaggcagcuuagca

SEQ ID NO: 596253 - RNA, 22 nt, Human
ugggcccagcccuguggagggu

SEQ ID NO: 596254 - RNA, 25 nt, Human
ugugcaugggcccagcccuguggag

SEQ ID NO: 596255 - RNA, 24 nt, Human
uguuugaggcuuuaugagaacaga

SEQ ID NO: 596256 - RNA, 22 nt, Human
uuccaacuacaggcucugccag

SEQ ID NO: 596257 - RNA, 21 nt, Human
uuggucccuugcccuuauucu

SEQ ID NO: 596258 - RNA, 21 nt, Human
uuuguuucagggcuacuccuc

SEQ ID NO: 596259 - RNA, 24 nt, Human
uuuucacacaaaguccaguaguca

SEQ ID NO: 596260 - RNA, 21 nt, Human
aaaaaaaaaaaaaaaaagucc

SEQ ID NO: 596261 - RNA, 19 nt, Human
aacaugaugaaaccccauc

SEQ ID NO: 596262 - RNA, 20 nt, Human
aacaugaugaaaccccaucu

SEQ ID NO: 596263 - RNA, 21 nt, Human
aacaugaugaaaccccaucuc

SEQ ID NO: 596264 - RNA, 21 nt, Human
aacaugaugaaaccccaucuc

SEQ ID NO: 596265 - RNA, 18 nt, Human
aagcaacccuccaagacu

SEQ ID NO: 596266 - RNA, 23 nt, Human
aagcaacccuccaagacuucucc

SEQ ID NO: 596267 - RNA, 18 nt, Human
aaucgcuugaaccuggga

SEQ ID NO: 596268 - RNA, 24 nt, Human
aaucgcuugaaccugggaggcgga

SEQ ID NO: 596269 - RNA, 20 nt, Human
acaagagcaaaacuccaucu

SEQ ID NO: 596270 - RNA, 24 nt, Human
accccaucucuacuaaaaauacaa

SEQ ID NO: 596271 - RNA, 28 nt, Human
acuccaucucaaaaaaaaaaaaaaaaaa

SEQ ID NO: 596272 - RNA, 22 nt, Human
agaaucgcuugaaccugggagg

SEQ ID NO: 596273 - RNA, 23 nt, Human
agccaggcgugguggcaggugcc

SEQ ID NO: 596274 - RNA, 24 nt, Human
agccuggccaacaugaugaaaccc

SEQ ID NO: 596275 - RNA, 22 nt, Human
aggcaggagaaucgcuugaacc

SEQ ID NO: 596276 - RNA, 24 nt, Human
aggcaggagaaucgcuugaaccug

SEQ ID NO: 596277 - RNA, 24 nt, Human
aggcaugguggcucacgccuguaa

SEQ ID NO: 596278 - RNA, 24 nt, Human
aggcggagguugcggugagccaag

SEQ ID NO: 596279 - RNA, 22 nt, Human
aggcgggcagaucaccugaggu

SEQ ID NO: 596280 - RNA, 26 nt, Human
aggcgggcagaucaccugaggucagg

SEQ ID NO: 596281 - RNA, 24 nt, Human
aggcgugguggcaggugccuguaa

SEQ ID NO: 596282 - RNA, 24 nt, Human
agucugaggcaggagaaucgcuug

SEQ ID NO: 596283 - RNA, 24 nt, Human
aucgcgcuauugcacuccagccug

SEQ ID NO: 596284 - RNA, 25 nt, Human
augguggcucacgccuguaauucca

SEQ ID NO: 596285 - RNA, 18 nt, Human
auugcacuccagccuggg

SEQ ID NO: 596286 - RNA, 20 nt, Human
auugcacuccagccugggca

SEQ ID NO: 596287 - RNA, 23 nt, Human
auugcacuccagccugggcaaca

SEQ ID NO: 596288 - RNA, 24 nt, Human
auugcacuccagccugggcaacaa

SEQ ID NO: 596289 - RNA, 21 nt, Human
caacaagagcaaaacuccauc

SEQ ID NO: 596290 - RNA, 24 nt, Human
caagagcaaaacuccaucucaaaa

SEQ ID NO: 596291 - RNA, 24 nt, Human
caagaucgcgcuauugcacuccag

SEQ ID NO: 596292 - RNA, 25 nt, Human
cacgccuguaauuccagcacuuuug

SEQ ID NO: 596293 - RNA, 24 nt, Human
cacuccagccugggcaacaagagc

SEQ ID NO: 596294 - RNA, 18 nt, Human
cacucuucuuauagucuu

SEQ ID NO: 596295 - RNA, 18 nt, Human
cagaagcaacccuccaag

SEQ ID NO: 596296 - RNA, 27 nt, Human
cagaucaccugaggucaggagcucgag

SEQ ID NO: 596297 - RNA, 24 nt, Human
cagcacuuuuggaggccgaggcgg

SEQ ID NO: 596298 - RNA, 23 nt, Human
cagccuccccucaaauucccucc

SEQ ID NO: 596299 - RNA, 18 nt, Human
cccucaaauucccucccc

SEQ ID NO: 596300 - RNA, 22 nt, Human
ccugaggucaggagcucgagac

SEQ ID NO: 596301 - RNA, 24 nt, Human
ccuggccaacaugaugaaacccca

SEQ ID NO: 596302 - RNA, 19 nt, Human
ccugggaggcggagguugc

SEQ ID NO: 596303 - RNA, 21 nt, Human
ccuguaaucccagcuacuuag

SEQ ID NO: 596304 - RNA, 25 nt, Human
ccuuacuaaaaguacacucuucuua

SEQ ID NO: 596305 - RNA, 21 nt, Human
cgagaccagccuggccaacau

SEQ ID NO: 596306 - RNA, 20 nt, Human
cgaggcgggcagaucaccug

SEQ ID NO: 596307 - RNA, 18 nt, Human
cgccuguaauuccagcac

SEQ ID NO: 596308 - RNA, 21 nt, Human
cgcuugaaccugggaggcgga

SEQ ID NO: 596309 - RNA, 24 nt, Human
cgggcagaucaccugaggucagga

SEQ ID NO: 596310 - RNA, 18 nt, Human
cuacuuaggagucugagg

SEQ ID NO: 596311 - RNA, 20 nt, Human
cuauugcacuccagccuggg

SEQ ID NO: 596312 - RNA, 21 nt, Human
cuauugcacuccagccugggc

SEQ ID NO: 596313 - RNA, 24 nt, Human
cuauugcacuccagccugggcaac

SEQ ID NO: 596314 - RNA, 18 nt, Human
cucaaaaaaaaaaaaaaa

SEQ ID NO: 596315 - RNA, 23 nt, Human
cucaaauucccuccccguccugc

SEQ ID NO: 596316 - RNA, 24 nt, Human
cucacgccuguaauuccagcacuu

SEQ ID NO: 596317 - RNA, 21 nt, Human
cuccaagacuucucccuuacu

SEQ ID NO: 596318 - RNA, 19 nt, Human
cuccaucucaaaaaaaaaa

SEQ ID NO: 596319 - RNA, 24 nt, Human
cugggcaacaagagcaaaacucca

SEQ ID NO: 596320 - RNA, 25 nt, Human
gaggcgggcagaucaccugagguca

SEQ ID NO: 596321 - RNA, 23 nt, Human
gagguugcggugagccaagaucg

SEQ ID NO: 596322 - RNA, 18 nt, Human
gaucaccugaggucagga

SEQ ID NO: 596323 - RNA, 24 nt, Human
gaucaccugaggucaggagcucga

SEQ ID NO: 596324 - RNA, 24 nt, Human
gccaacaugaugaaaccccaucuc

SEQ ID NO: 596325 - RNA, 22 nt, Human
gcuauugcacuccagccugggc

SEQ ID NO: 596326 - RNA, 24 nt, Human
gcuauugcacuccagccugggcaa

SEQ ID NO: 596327 - RNA, 22 nt, Human
ggaggccgaggcgggcagauca

SEQ ID NO: 596328 - RNA, 20 nt, Human
ggagguugcggugagccaag

SEQ ID NO: 596329 - RNA, 24 nt, Human
ggagguugcggugagccaagaucg

SEQ ID NO: 596330 - RNA, 21 nt, Human
ggcaggugccuguaaucccag

SEQ ID NO: 596331 - RNA, 22 nt, Human
ggccaggcaugguggcucacgg

SEQ ID NO: 596332 - RNA, 21 nt, Human
ggcucacgccuguaauuccag

SEQ ID NO: 596333 - RNA, 24 nt, Human
gguggcaggugccuguaaucccag

SEQ ID NO: 596334 - RNA, 24 nt, Human
gguggcucacgccuguaauuccag

SEQ ID NO: 596335 - RNA, 27 nt, Human
guaacacauuaccacauaaacacacua

SEQ ID NO: 596336 - RNA, 21 nt, Human
uaaacacacuaaggcacgccg

SEQ ID NO: 596337 - RNA, 24 nt, Human
uaauguuagaauuucucaacauac

SEQ ID NO: 596338 - RNA, 22 nt, Human
uauugcacuccagccugggcaa

SEQ ID NO: 596339 - RNA, 22 nt, Human
ucaaaaaaaaaaaaaaaaaaaa

SEQ ID NO: 596340 - RNA, 23 nt, Human
ucaaaaaaaaaaaaaaaaaaaaa

SEQ ID NO: 596341 - RNA, 23 nt, Human
ucaaaaaaaaaaaaaaaaaaaaa

SEQ ID NO: 596342 - RNA, 19 nt, Human
ucaccugaggucaggagcu

SEQ ID NO: 596343 - RNA, 22 nt, Human
ucacgccuguaauuccagcacu

SEQ ID NO: 596344 - RNA, 23 nt, Human
uccaucucaaaaaaaaaaaaaaa

SEQ ID NO: 596345 - RNA, 21 nt, Human
ucccuccccguccugcagaag

SEQ ID NO: 596346 - RNA, 24 nt, Human
ucgcuugaaccugggaggcggagg

SEQ ID NO: 596347 - RNA, 22 nt, Human
ucucuacuaaaaauacaaaaaa

SEQ ID NO: 596348 - RNA, 19 nt, Human
ugaaaccccaucucuacua

SEQ ID NO: 596349 - RNA, 24 nt, Human
ugaaccugggaggcggagguugcg

SEQ ID NO: 596350 - RNA, 22 nt, Human
ugagccaagaucgcgcuauugc

SEQ ID NO: 596351 - RNA, 20 nt, Human
ugaggcaggagaaucgcuug

SEQ ID NO: 596352 - RNA, 24 nt, Human
ugaggcaggagaaucgcuugaacc

SEQ ID NO: 596353 - RNA, 25 nt, Human
ugaggcaggagaaucgcuugaaccu

SEQ ID NO: 596354 - RNA, 18 nt, Human
ugcacuccagccugggca

SEQ ID NO: 596355 - RNA, 19 nt, Human
ugcacuccagccugggcaa

SEQ ID NO: 596356 - RNA, 19 nt, Human
ugcacuccagccugggcaa

SEQ ID NO: 596357 - RNA, 20 nt, Human
ugcacuccagccugggcaac

SEQ ID NO: 596358 - RNA, 22 nt, Human
ugcacuccagccugggcaacaa

SEQ ID NO: 596359 - RNA, 24 nt, Human
ugccuguaaucccagcuacuuagg

SEQ ID NO: 596360 - RNA, 22 nt, Human
uggcaggugccuguaaucccag

SEQ ID NO: 596361 - RNA, 22 nt, Human
uggcucacgccuguaauuccag

SEQ ID NO: 596362 - RNA, 24 nt, Human
uggcucacgccuguaauuccagca

SEQ ID NO: 596363 - RNA, 24 nt, Human
ugggaggcggagguugcggugagc

SEQ ID NO: 596364 - RNA, 24 nt, Human
ugguggcaggugccuguaauccca

SEQ ID NO: 596365 - RNA, 23 nt, Human
uguaaucccagcuacuuaggagu

SEQ ID NO: 596366 - RNA, 18 nt, Human
uucucccuuacuaaaagu

SEQ ID NO: 596367 - RNA, 24 nt, Human
uugaaccugggaggcggagguugc

SEQ ID NO: 596368 - RNA, 22 nt, Human
uugcggugagccaagaucgcgc

SEQ ID NO: 596369 - RNA, 18 nt, Human
aaaaaaaaaaaaaaaggc

SEQ ID NO: 596370 - RNA, 21 nt, Human
aaaaaaaggccgggugcggug

SEQ ID NO: 596371 - RNA, 23 nt, Human
aacaaaucacugaagucaagguc

SEQ ID NO: 596372 - RNA, 19 nt, Human
aacaaggcgaaaccccguc

SEQ ID NO: 596373 - RNA, 20 nt, Human
aacaaggcgaaaccccgucu

SEQ ID NO: 596374 - RNA, 21 nt, Human
aacaaggcgaaaccccgucuu

SEQ ID NO: 596375 - RNA, 20 nt, Human
aaccccgucuuuaccaaaaa

SEQ ID NO: 596376 - RNA, 23 nt, Human
aaucgcuugaacccaagaggagg

SEQ ID NO: 596377 - RNA, 20 nt, Human
acaagagcaaaacuccaucu

SEQ ID NO: 596378 - RNA, 20 nt, Human
acaccagaggcugagguggg

SEQ ID NO: 596379 - RNA, 19 nt, Human
acagagaccccgccucaaa

SEQ ID NO: 596380 - RNA, 23 nt, Human
accccgucuuuaccaaaaauaca

SEQ ID NO: 596381 - RNA, 24 nt, Human
acccugucucuacuaaaaauacaa

SEQ ID NO: 596382 - RNA, 18 nt, Human
acgguggaacccugucuc

SEQ ID NO: 596383 - RNA, 24 nt, Human
acugcacuccagccugggugacag

SEQ ID NO: 596384 - RNA, 26 nt, Human
acugcacuccagccugggugacagag

SEQ ID NO: 596385 - RNA, 22 nt, Human
agagauugcagugagccgagau

SEQ ID NO: 596386 - RNA, 24 nt, Human
agagauugcagugagccgagauug

SEQ ID NO: 596387 - RNA, 20 nt, Human
agaggaggagguugugguga

SEQ ID NO: 596388 - RNA, 22 nt, Human
agaggaggagguuguggugagc

SEQ ID NO: 596389 - RNA, 24 nt, Human
agcacuuugggaggccaagauggg

SEQ ID NO: 596390 - RNA, 24 nt, Human
agcacuuugggaggccgagguggg

SEQ ID NO: 596391 - RNA, 19 nt, Human
agcaucuguggucccagcu

SEQ ID NO: 596392 - RNA, 20 nt, Human
agccaggcaugguggagcau

SEQ ID NO: 596393 - RNA, 19 nt, Human
agccgagaucacuucagcc

SEQ ID NO: 596394 - RNA, 23 nt, Human
agccgggcgugguggugcaugcc

SEQ ID NO: 596395 - RNA, 24 nt, Human
agccuggccaauacgguggaaccc

SEQ ID NO: 596396 - RNA, 24 nt, Human
aggaggagguuguggugagccgag

SEQ ID NO: 596397 - RNA, 21 nt, Human
aggcagagauugcagugagcc

SEQ ID NO: 596398 - RNA, 24 nt, Human
aggcagagauugcagugagccgag

SEQ ID NO: 596399 - RNA, 23 nt, Human
aggcaggagaaucgcuugaaccc

SEQ ID NO: 596400 - RNA, 24 nt, Human
aggcaggagaaucgcuugaaccca

SEQ ID NO: 596401 - RNA, 21 nt, Human
aggccgaggugggcagaucau

SEQ ID NO: 596402 - RNA, 22 nt, Human
aggccgggugcgguggcucaug

SEQ ID NO: 596403 - RNA, 20 nt, Human
aggcugaggcaggagaaucg

SEQ ID NO: 596404 - RNA, 24 nt, Human
aggcugaggcaggagaaucgcuug

SEQ ID NO: 596405 - RNA, 24 nt, Human
aggcugaggugggaggauugcuug

SEQ ID NO: 596406 - RNA, 24 nt, Human
aguggcucacgucugugaucccag

SEQ ID NO: 596407 - RNA, 24 nt, Human
aguuacagaccacccugggcaaca

SEQ ID NO: 596408 - RNA, 19 nt, Human
aucaugaggucaggaguuc

SEQ ID NO: 596409 - RNA, 20 nt, Human
aucaugaggucaggaguucc

SEQ ID NO: 596410 - RNA, 19 nt, Human
augccuguaaucucagcac

SEQ ID NO: 596411 - RNA, 24 nt, Human
auggaccggacgcaguggcucacg

SEQ ID NO: 596412 - RNA, 19 nt, Human
augggcggaucaugagguc

SEQ ID NO: 596413 - RNA, 19 nt, Human
auugcagugagccgagauu

SEQ ID NO: 596414 - RNA, 18 nt, Human
caaaacuccaucucaaaa

SEQ ID NO: 596415 - RNA, 25 nt, Human
caaaucacugaagucaaggucuaaa

SEQ ID NO: 596416 - RNA, 21 nt, Human
caacaagagcaaaacuccauc

SEQ ID NO: 596417 - RNA, 24 nt, Human
caacaaggcgaaaccccgucuuua

SEQ ID NO: 596418 - RNA, 21 nt, Human
caagaggaggagguuguggug

SEQ ID NO: 596419 - RNA, 24 nt, Human
caagaugggcggaucaugagguca

SEQ ID NO: 596420 - RNA, 18 nt, Human
cacccugggcaacaaggc

SEQ ID NO: 596421 - RNA, 24 nt, Human
cacgucugugaucccagcacuuug

SEQ ID NO: 596422 - RNA, 18 nt, Human
cacuccagccugggugac

SEQ ID NO: 596423 - RNA, 22 nt, Human
cacuccagccugggugacagag

SEQ ID NO: 596424 - RNA, 19 nt, Human
cacugcacuccagccuggg

SEQ ID NO: 596425 - RNA, 19 nt, Human
cacugcacuccagccuggg

SEQ ID NO: 596426 - RNA, 20 nt, Human
cacugcacuccagccugggu

SEQ ID NO: 596427 - RNA, 22 nt, Human
cacugcacuccagccuggguga

SEQ ID NO: 596428 - RNA, 23 nt, Human
cacugcacuccagccugggugac

SEQ ID NO: 596429 - RNA, 24 nt, Human
cacugcacuccagccugggugaca

SEQ ID NO: 596430 - RNA, 24 nt, Human
cacugcacuccagccugggugaca

SEQ ID NO: 596431 - RNA, 19 nt, Human
cacuucagccugggcaaca

SEQ ID NO: 596432 - RNA, 24 nt, Human
cacuucagccugggcaacaagagc

SEQ ID NO: 596433 - RNA, 20 nt, Human
cagauggaccggacgcagug

SEQ ID NO: 596434 - RNA, 20 nt, Human
cagcacuuugggaggccaag

SEQ ID NO: 596435 - RNA, 28 nt, Human
cagcacuuugggaggccaagaugggcgg

SEQ ID NO: 596436 - RNA, 24 nt, Human
cagcacuuugggaggccgaggugg

SEQ ID NO: 596437 - RNA, 20 nt, Human
caggaguucgagagcagccu

SEQ ID NO: 596438 - RNA, 21 nt, Human
caucuguggucccagcuacac

SEQ ID NO: 596439 - RNA, 20 nt, Human
caugccuguaaucucagcac

SEQ ID NO: 596440 - RNA, 24 nt, Human
caugccuguaaucucagcacuuug

SEQ ID NO: 596441 - RNA, 19 nt, Human
ccccgccucaaaaaaaaaa

SEQ ID NO: 596442 - RNA, 23 nt, Human
cccgccucaaaaaaaaaaaaaaa

SEQ ID NO: 596443 - RNA, 24 nt, Human
ccgucuuuaccaaaaauacagcca

SEQ ID NO: 596444 - RNA, 22 nt, Human
ccuggccaauacgguggaaccc

SEQ ID NO: 596445 - RNA, 24 nt, Human
ccuggccaauacgguggaacccug

SEQ ID NO: 596446 - RNA, 23 nt, Human
ccugggcaacaaggcgaaacccc

SEQ ID NO: 596447 - RNA, 24 nt, Human
ccugggcaacaaggcgaaaccccg

SEQ ID NO: 596448 - RNA, 21 nt, Human
ccuguaaucccaguucuccgg

SEQ ID NO: 596449 - RNA, 22 nt, Human
ccuguaaucucagcacuuuggg

SEQ ID NO: 596450 - RNA, 19 nt, Human
cgaggugggcagaucaucu

SEQ ID NO: 596451 - RNA, 22 nt, Human
cggaucaugaggucaggaguuc

SEQ ID NO: 596452 - RNA, 24 nt, Human
cgucugugaucccagcacuuuggg

SEQ ID NO: 596453 - RNA, 27 nt, Human
cuacaacaaaucacugaagucaagguc

SEQ ID NO: 596454 - RNA, 23 nt, Human
cuacaccagaggcugagguggga

SEQ ID NO: 596455 - RNA, 18 nt, Human
cucaaaaaaaaaaaaaaa

SEQ ID NO: 596456 - RNA, 18 nt, Human
cucaaaaaaauaaaagcc

SEQ ID NO: 596457 - RNA, 24 nt, Human
cucacgucugugaucccagcacuu

SEQ ID NO: 596458 - RNA, 24 nt, Human
cucaugccuguaaucucagcacuu

SEQ ID NO: 596459 - RNA, 24 nt, Human
cuggccaauacgguggaacccugu

SEQ ID NO: 596460 - RNA, 24 nt, Human
cugggcaacaagagcaaaacucca

SEQ ID NO: 596461 - RNA, 23 nt, Human
cuuugggaggccgaggugggcag

SEQ ID NO: 596462 - RNA, 22 nt, Human
gagauugugcacugcacuccag

SEQ ID NO: 596463 - RNA, 21 nt, Human
gaggugggaggauugcuuggg

SEQ ID NO: 596464 - RNA, 25 nt, Human
gaggugggcagaucaucugagcuca

SEQ ID NO: 596465 - RNA, 18 nt, Human
gaucaucugagcucagga

SEQ ID NO: 596466 - RNA, 21 nt, Human
gaucaucugagcucaggaguu

SEQ ID NO: 596467 - RNA, 22 nt, Human
gaucaucugagcucaggaguua

SEQ ID NO: 596468 - RNA, 22 nt, Human
gaucaugaggucaggaguucga

SEQ ID NO: 596469 - RNA, 24 nt, Human
gaucaugaggucaggaguucgaga

SEQ ID NO: 596470 - RNA, 20 nt, Human
gauugcuugggaggcagaga

SEQ ID NO: 596471 - RNA, 24 nt, Human
gauugugcacugcacuccagccug

SEQ ID NO: 596472 - RNA, 21 nt, Human
gcacugcacuccagccugggu

SEQ ID NO: 596473 - RNA, 24 nt, Human
gcacugcacuccagccugggugac

SEQ ID NO: 596474 - RNA, 22 nt, Human
gcaggagaaucgcuugaaccca

SEQ ID NO: 596475 - RNA, 22 nt, Human
gcaugguggagcaucugugguc

SEQ ID NO: 596476 - RNA, 24 nt, Human
gccaauacgguggaacccugucuc

SEQ ID NO: 596477 - RNA, 22 nt, Human
gcucaggaguuacagaccaccc

SEQ ID NO: 596478 - RNA, 24 nt, Human
ggacgcaguggcucacgucuguga

SEQ ID NO: 596479 - RNA, 18 nt, Human
ggaggagguuguggugag

SEQ ID NO: 596480 - RNA, 27 nt, Human
ggaggauugcuugggaggcagagauug

SEQ ID NO: 596481 - RNA, 20 nt, Human
ggagguuguggugagccgag

SEQ ID NO: 596482 - RNA, 22 nt, Human
ggagguuguggugagccgagau

SEQ ID NO: 596483 - RNA, 23 nt, Human
ggagguuguggugagccgagauc

SEQ ID NO: 596484 - RNA, 24 nt, Human
ggagguuguggugagccgagauca

SEQ ID NO: 596485 - RNA, 21 nt, Human
ggaucaugaggucaggaguuc

SEQ ID NO: 596486 - RNA, 21 nt, Human
ggcagaucaucugagcucagg

SEQ ID NO: 596487 - RNA, 25 nt, Human
ggcagaucaucugagcucaggaguu

SEQ ID NO: 596488 - RNA, 23 nt, Human
ggccgggugcgguggcucaugcc

SEQ ID NO: 596489 - RNA, 23 nt, Human
ggcggaucaugaggucaggaguu

SEQ ID NO: 596490 - RNA, 24 nt, Human
gggcgugguggugcaugccuguaa

SEQ ID NO: 596491 - RNA, 24 nt, Human
gggugcgguggcucaugccuguaa

SEQ ID NO: 596492 - RNA, 28 nt, Human
ggugacagagaccccgccucaaaaaaaa

SEQ ID NO: 596493 - RNA, 23 nt, Human
gguggcucaugccuguaaucuca

SEQ ID NO: 596494 - RNA, 24 nt, Human
gguggcucaugccuguaaucucag

SEQ ID NO: 596495 - RNA, 24 nt, Human
gguggugcaugccuguaaucccag

SEQ ID NO: 596496 - RNA, 19 nt, Human
guggagcaucugugguccc

SEQ ID NO: 596497 - RNA, 23 nt, Human
guggugcaugccuguaaucccag

SEQ ID NO: 596498 - RNA, 22 nt, Human
guuacagaccacccugggcaac

SEQ ID NO: 596499 - RNA, 22 nt, Human
uaaaaauacaaaauuagccggg

SEQ ID NO: 596500 - RNA, 23 nt, Human
uaaaaauacaaaauuagccgggc

SEQ ID NO: 596501 - RNA, 21 nt, Human
uacaccagaggcugagguggg

SEQ ID NO: 596502 - RNA, 22 nt, Human
uagagaagcauacaagacuaca

SEQ ID NO: 596503 - RNA, 22 nt, Human
uauagagaagcauacaagacua

SEQ ID NO: 596504 - RNA, 20 nt, Human
ucaaaaaaaaaaaaaaaaaa

SEQ ID NO: 596505 - RNA, 22 nt, Human
ucaaaaaaaaaaaaaaaaaaaa

SEQ ID NO: 596506 - RNA, 23 nt, Human
ucaaaaaaaaaaaaaaaaaaaaa

SEQ ID NO: 596507 - RNA, 22 nt, Human
ucacgucugugaucccagcacu

SEQ ID NO: 596508 - RNA, 24 nt, Human
ucaugaggucaggaguucgagagc

SEQ ID NO: 596509 - RNA, 19 nt, Human
uccagccugggugacagag

SEQ ID NO: 596510 - RNA, 20 nt, Human
uccagccugggugacagaga

SEQ ID NO: 596511 - RNA, 18 nt, Human
ucgagagcagccuggcca

SEQ ID NO: 596512 - RNA, 20 nt, Human
ucucuacuaaaaauacaaaa

SEQ ID NO: 596513 - RNA, 26 nt, Human
ugagaagucagauggaccggacgcag

SEQ ID NO: 596514 - RNA, 21 nt, Human
ugagccgagauugugcacugc

SEQ ID NO: 596515 - RNA, 20 nt, Human
ugaggcaggagaaucgcuug

SEQ ID NO: 596516 - RNA, 24 nt, Human
ugaggcaggagaaucgcuugaacc

SEQ ID NO: 596517 - RNA, 25 nt, Human
ugaggcaggagaaucgcuugaaccc

SEQ ID NO: 596518 - RNA, 20 nt, Human
ugaggugggaggauugcuug

SEQ ID NO: 596519 - RNA, 23 nt, Human
ugaggugggaggauugcuuggga

SEQ ID NO: 596520 - RNA, 26 nt, Human
ugaggugggaggauugcuugggaggc

SEQ ID NO: 596521 - RNA, 22 nt, Human
ugcacugcacuccagccugggu

SEQ ID NO: 596522 - RNA, 23 nt, Human
ugccuguaaucccaguucuccgg

SEQ ID NO: 596523 - RNA, 23 nt, Human
ugccuguaaucucagcacuuugg

SEQ ID NO: 596524 - RNA, 18 nt, Human
uggaacccugucucuacu

SEQ ID NO: 596525 - RNA, 24 nt, Human
uggccaauacgguggaacccuguc

SEQ ID NO: 596526 - RNA, 22 nt, Human
uggcucacgucugugaucccag

SEQ ID NO: 596527 - RNA, 24 nt, Human
uggcucacgucugugaucccagca

SEQ ID NO: 596528 - RNA, 22 nt, Human
uggcucaugccuguaaucucag

SEQ ID NO: 596529 - RNA, 24 nt, Human
uggcucaugccuguaaucucagca

SEQ ID NO: 596530 - RNA, 23 nt, Human
ugggaggcagagauugcaguggc

SEQ ID NO: 596531 - RNA, 24 nt, Human
ugggaggccaagaugggcggauca

SEQ ID NO: 596532 - RNA, 20 nt, Human
ugggaggccgaggugggcag

SEQ ID NO: 596533 - RNA, 24 nt, Human
ugggaggccgaggugggcagauca

SEQ ID NO: 596534 - RNA, 24 nt, Human
ugggcagaucaucugagcucagga

SEQ ID NO: 596535 - RNA, 21 nt, Human
uggugcaugccuguaauccca

SEQ ID NO: 596536 - RNA, 22 nt, Human
uggugcaugccuguaaucccag

SEQ ID NO: 596537 - RNA, 24 nt, Human
ugguggugcaugccuguaauccca

SEQ ID NO: 596538 - RNA, 22 nt, Human
uuagccgggcgugguggugcau

SEQ ID NO: 596539 - RNA, 24 nt, Human
uuagccgggcgugguggugcaugc

SEQ ID NO: 596540 - RNA, 18 nt, Human
uugcagugagccgagauu

SEQ ID NO: 596541 - RNA, 19 nt, Human
uugcagugagccgagauug

SEQ ID NO: 596542 - RNA, 22 nt, Human
uugcagugagccgagauugugc

SEQ ID NO: 596543 - RNA, 25 nt, Human
uugggaggccgaggugggcagauca

SEQ ID NO: 596544 - RNA, 21 nt, Human
uugugcacugcacuccagccu

SEQ ID NO: 596545 - RNA, 18 nt, Human
uuguggugagccgagauc

SEQ ID NO: 596546 - RNA, 19 nt, Human
uuguggugagccgagauca

SEQ ID NO: 596547 - RNA, 20 nt, Human
uuguggugagccgagaucac

SEQ ID NO: 596548 - RNA, 19 nt, Human
aaaaaccuugccacauuca

SEQ ID NO: 596549 - RNA, 19 nt, Human
aaaaaccuugccacauuca

SEQ ID NO: 596550 - RNA, 23 nt, Human
aaacagacugggaaaggugcuca

SEQ ID NO: 596551 - RNA, 24 nt, Human
aaagugcugggauuacagguguga

SEQ ID NO: 596552 - RNA, 19 nt, Human
aacaaaaaacagacuggga

SEQ ID NO: 596553 - RNA, 21 nt, Human
aaccaagcagggaaaauagaa

SEQ ID NO: 596554 - RNA, 21 nt, Human
aagucaacucaaacugaacuc

SEQ ID NO: 596555 - RNA, 30 nt, Human
aagucaacucaaacugaacucaaugcugag

SEQ ID NO: 596556 - RNA, 24 nt, Human
aagugaucuaccugucuuggccuc

SEQ ID NO: 596557 - RNA, 18 nt, Human
aagugcugggauuacagg

SEQ ID NO: 596558 - RNA, 19 nt, Human
aagugcugggauuacaggu

SEQ ID NO: 596559 - RNA, 26 nt, Human
aagugcugggauuacaggugugagcc

SEQ ID NO: 596560 - RNA, 23 nt, Human
aauuuugaacaaaggucuugcca

SEQ ID NO: 596561 - RNA, 21 nt, Human
acauucauuacacuuguaaca

SEQ ID NO: 596562 - RNA, 23 nt, Human
accugucuuggccucccaaagug

SEQ ID NO: 596563 - RNA, 18 nt, Human
acugaggacuuugugaca

SEQ ID NO: 596564 - RNA, 19 nt, Human
agaaauauggguuuuagga

SEQ ID NO: 596565 - RNA, 22 nt, Human
agaaggaaauuuaccucaccaa

SEQ ID NO: 596566 - RNA, 22 nt, Human
agcaaugaacuagcaaaagaaa

SEQ ID NO: 596567 - RNA, 19 nt, Human
agccaccgcaccuggccua

SEQ ID NO: 596568 - RNA, 19 nt, Human
agugccauuuacuucuggc

SEQ ID NO: 596569 - RNA, 20 nt, Human
auauaccacuugaacagaau

SEQ ID NO: 596570 - RNA, 18 nt, Human
auaugacuuuuguaagau

SEQ ID NO: 596571 - RNA, 24 nt, Human
caaagugcugggauuacaggugug

SEQ ID NO: 596572 - RNA, 26 nt, Human
caaccaaaauacuacugugacuaaua

SEQ ID NO: 596573 - RNA, 25 nt, Human
caacucaaacugaacucaaugcuga

SEQ ID NO: 596574 - RNA, 22 nt, Human
caagugaucuaccugucuuggc

SEQ ID NO: 596575 - RNA, 22 nt, Human
caauagaaagaccauugaugaa

SEQ ID NO: 596576 - RNA, 18 nt, Human
caaugguuguagcauuac

SEQ ID NO: 596577 - RNA, 24 nt, Human
cacaauacaauaucagcaccaaaa

SEQ ID NO: 596578 - RNA, 24 nt, Human
cacauucauuacacuuguaacauu

SEQ ID NO: 596579 - RNA, 23 nt, Human
caccaaaaauucguugaauuuuc

SEQ ID NO: 596580 - RNA, 18 nt, Human
cacccgaaugccuuguca

SEQ ID NO: 596581 - RNA, 18 nt, Human
caccuggccuaauccucu

SEQ ID NO: 596582 - RNA, 24 nt, Human
cagacuaaagaucuugccacacau

SEQ ID NO: 596583 - RNA, 21 nt, Human
cagagcaaugaacuagcaaaa

SEQ ID NO: 596584 - RNA, 24 nt, Human
cagugugaauucuaguauguugug

SEQ ID NO: 596585 - RNA, 25 nt, Human
caugaaccugaaauaaaggcuuuga

SEQ ID NO: 596586 - RNA, 21 nt, Human
ccaaagugcugggauuacagg

SEQ ID NO: 596587 - RNA, 21 nt, Human
ccaaagugcugggauuacagg

SEQ ID NO: 596588 - RNA, 24 nt, Human
ccaaagugcugggauuacaggugu

SEQ ID NO: 596589 - RNA, 24 nt, Human
ccacacauaugacuuuuguaagau

SEQ ID NO: 596590 - RNA, 25 nt, Human
ccgcaccuggccuaauccucuuaac

SEQ ID NO: 596591 - RNA, 21 nt, Human
ccugaucucaagugaucuacc

SEQ ID NO: 596592 - RNA, 23 nt, Human
ccugaucucaagugaucuaccug

SEQ ID NO: 596593 - RNA, 23 nt, Human
cucaaaaucagaaaaaguaaaau

SEQ ID NO: 596594 - RNA, 23 nt, Human
cucaagugaucuaccugucuugg

SEQ ID NO: 596595 - RNA, 20 nt, Human
cucuccagugugaauucuag

SEQ ID NO: 596596 - RNA, 18 nt, Human
cugaccacugaaggcucu

SEQ ID NO: 596597 - RNA, 22 nt, Human
cugggaaaggugcucaccucug

SEQ ID NO: 596598 - RNA, 23 nt, Human
cugggaaaggugcucaccucugu

SEQ ID NO: 596599 - RNA, 23 nt, Human
cugucuuggccucccaaagugcu

SEQ ID NO: 596600 - RNA, 20 nt, Human
cuugacugaagaccuugcca

SEQ ID NO: 596601 - RNA, 19 nt, Human
cuugcacgguuucucucca

SEQ ID NO: 596602 - RNA, 19 nt, Human
cuuguaacauuucucucca

SEQ ID NO: 596603 - RNA, 19 nt, Human
cuuguaagguuucucucca

SEQ ID NO: 596604 - RNA, 19 nt, Human
cuuguaagguuucucucca

SEQ ID NO: 596605 - RNA, 22 nt, Human
gaccucagacuaaagaucuugc

SEQ ID NO: 596606 - RNA, 20 nt, Human
gagaaggaaauuuaccucac

SEQ ID NO: 596607 - RNA, 18 nt, Human
gauuacaggugugagcca

SEQ ID NO: 596608 - RNA, 20 nt, Human
gauuacaggugugagccacc

SEQ ID NO: 596609 - RNA, 23 nt, Human
gauuacaggugugagccaccgca

SEQ ID NO: 596610 - RNA, 21 nt, Human
gcaaaagaaaugaaaugccuc

SEQ ID NO: 596611 - RNA, 20 nt, Human
gcaaugaacuagcaaaagaa

SEQ ID NO: 596612 - RNA, 20 nt, Human
ggaaaauagaauccuuuucc

SEQ ID NO: 596613 - RNA, 21 nt, Human
uaaacaaaauagauggagaag

SEQ ID NO: 596614 - RNA, 18 nt, Human
uaaaugauuacauaaccc

SEQ ID NO: 596615 - RNA, 18 nt, Human
uacacuuguaacauuucu

SEQ ID NO: 596616 - RNA, 22 nt, Human
uacaggugugagccaccgcacc

SEQ ID NO: 596617 - RNA, 22 nt, Human
uacaggugugagccaccgcacc

SEQ ID NO: 596618 - RNA, 23 nt, Human
uacaggugugagccaccgcaccu

SEQ ID NO: 596619 - RNA, 23 nt, Human
uaccucaaaaaugaauuuccuga

SEQ ID NO: 596620 - RNA, 23 nt, Human
uaccugucuuggccucccaaagu

SEQ ID NO: 596621 - RNA, 23 nt, Human
uagcaaaagaaaugaaaugccuc

SEQ ID NO: 596622 - RNA, 21 nt, Human
uagccagagcaaugaacuagc

SEQ ID NO: 596623 - RNA, 23 nt, Human
uagccagagcaaugaacuagcaa

SEQ ID NO: 596624 - RNA, 21 nt, Human
uaguaaaguuucccuaugaca

SEQ ID NO: 596625 - RNA, 18 nt, Human
ucaacacaauacccauaa

SEQ ID NO: 596626 - RNA, 25 nt, Human
ucaauuaaaaaccuugccacauuca

SEQ ID NO: 596627 - RNA, 21 nt, Human
ucagcaucugaucaucauaga

SEQ ID NO: 596628 - RNA, 23 nt, Human
ucccaaagugcugggauuacagg

SEQ ID NO: 596629 - RNA, 21 nt, Human
ucccuaugacauggauugcuu

SEQ ID NO: 596630 - RNA, 21 nt, Human
ucuaugguuucucuccaguau

SEQ ID NO: 596631 - RNA, 20 nt, Human
ucuuggccucccaaagugcu

SEQ ID NO: 596632 - RNA, 19 nt, Human
ugaagaaacaaaaaacaga

SEQ ID NO: 596633 - RNA, 21 nt, Human
ugaaugaccuuaugcauuaca

SEQ ID NO: 596634 - RNA, 19 nt, Human
ugaauuuugaacaaagguc

SEQ ID NO: 596635 - RNA, 24 nt, Human
ugacacaaucaucacccuugugag

SEQ ID NO: 596636 - RNA, 19 nt, Human
ugacaugaucuucugugua

SEQ ID NO: 596637 - RNA, 20 nt, Human
ugacauggauugcuugaugg

SEQ ID NO: 596638 - RNA, 21 nt, Human
ugacugaccacugaaggcucu

SEQ ID NO: 596639 - RNA, 18 nt, Human
ugagaaauucauacauug

SEQ ID NO: 596640 - RNA, 18 nt, Human
ugaggcaugaaccugaaa

SEQ ID NO: 596641 - RNA, 22 nt, Human
ugauauaccacuugaacagaau

SEQ ID NO: 596642 - RNA, 24 nt, Human
ugaucucaagugaucuaccugucu

SEQ ID NO: 596643 - RNA, 24 nt, Human
ugcugggauuacaggugugagcca

SEQ ID NO: 596644 - RNA, 18 nt, Human
uggaaaaauuaauacugu

SEQ ID NO: 596645 - RNA, 24 nt, Human
uggccaggcugcucucaaacuccu

SEQ ID NO: 596646 - RNA, 18 nt, Human
uggccucccaaagugcug

SEQ ID NO: 596647 - RNA, 18 nt, Human
ugggauuacaggugugag

SEQ ID NO: 596648 - RNA, 19 nt, Human
ugggauuacaggugugagc

SEQ ID NO: 596649 - RNA, 21 nt, Human
ugggauuacaggugugagcca

SEQ ID NO: 596650 - RNA, 22 nt, Human
ugggauuacaggugugagccac

SEQ ID NO: 596651 - RNA, 23 nt, Human
ugggauuacaggugugagccacc

SEQ ID NO: 596652 - RNA, 24 nt, Human
ugggauuacaggugugagccaccg

SEQ ID NO: 596653 - RNA, 18 nt, Human
uguaagguuuuucuccga

SEQ ID NO: 596654 - RNA, 19 nt, Human
ugucacacucaucacacuu

SEQ ID NO: 596655 - RNA, 22 nt, Human
ugucacauucuucacauuugua

SEQ ID NO: 596656 - RNA, 21 nt, Human
ugugagguuucuuucuuguau

SEQ ID NO: 596657 - RNA, 23 nt, Human
uguguaaugaggcaugaaccuga

SEQ ID NO: 596658 - RNA, 21 nt, Human
uguguagaaaaucacaaagag

SEQ ID NO: 596659 - RNA, 21 nt, Human
uuacugaggacuuugugacaa

SEQ ID NO: 596660 - RNA, 18 nt, Human
uucuccuaugucuuucaa

SEQ ID NO: 596661 - RNA, 19 nt, Human
uuucuuguaugaauucacc

SEQ ID NO: 596662 - RNA, 24 nt, Human
uuugcacaauacaauaucagcacc

SEQ ID NO: 596663 - RNA, 19 nt, Human
uuuguaagguuucucucca

SEQ ID NO: 596664 - RNA, 19 nt, Human
uuuguacgguuucucucca

SEQ ID NO: 596665 - RNA, 24 nt, Human
uuuguugaagaaacaaaaaacaga

SEQ ID NO: 596666 - RNA, 18 nt, Human
aggaagggcuguguacug

SEQ ID NO: 596667 - RNA, 19 nt, Human
auauauauauacauauaua

SEQ ID NO: 596668 - RNA, 19 nt, Human
auauauauauauauauaua

SEQ ID NO: 596669 - RNA, 19 nt, Human
auauauauauauauauaua

SEQ ID NO: 596670 - RNA, 19 nt, Human
auauauauauauauauaua

SEQ ID NO: 596671 - RNA, 19 nt, Human
auauauauauauccauaua

SEQ ID NO: 596672 - RNA, 19 nt, Human
auauauccauauauauaua

SEQ ID NO: 596673 - RNA, 19 nt, Human
auauauccauauauauaug

SEQ ID NO: 596674 - RNA, 25 nt, Human
auauauguauauauacauauaugug

SEQ ID NO: 596675 - RNA, 21 nt, Human
auauauguguauauauaucca

SEQ ID NO: 596676 - RNA, 21 nt, Human
auguauauauacauauaugug

SEQ ID NO: 596677 - RNA, 18 nt, Human
auguguguguauauauau

SEQ ID NO: 596678 - RNA, 20 nt, Human
cauauauauauauauauaua

SEQ ID NO: 596679 - RNA, 18 nt, Human
cauauauauguauauaua

SEQ ID NO: 596680 - RNA, 28 nt, Human
cauauauauguauauauacauauaugug

SEQ ID NO: 596681 - RNA, 19 nt, Human
cccacaugcuaggaagggc

SEQ ID NO: 596682 - RNA, 18 nt, Human
cugcccacaugcuaggaa

SEQ ID NO: 596683 - RNA, 18 nt, Human
gggacuggcuuuccaacu

SEQ ID NO: 596684 - RNA, 19 nt, Human
guguauauauauccauaua

SEQ ID NO: 596685 - RNA, 18 nt, Human
uaagggugccugaacugu

SEQ ID NO: 596686 - RNA, 24 nt, Human
uauacauauauguguguguauaua

SEQ ID NO: 596687 - RNA, 30 nt, Human
uauacauauauguguguguauauauauuac

SEQ ID NO: 596688 - RNA, 26 nt, Human
uauauaauacaugugccauauauaua

SEQ ID NO: 596689 - RNA, 25 nt, Human
uauauacaauuauauaaugcacgua

SEQ ID NO: 596690 - RNA, 20 nt, Human
uauauacauauauauguaua

SEQ ID NO: 596691 - RNA, 24 nt, Human
uauauacauauauauguauauaua

SEQ ID NO: 596692 - RNA, 24 nt, Human
uauauacauauauguguguguaua

SEQ ID NO: 596693 - RNA, 25 nt, Human
uauauacauauauguguguguauaa

SEQ ID NO: 596694 - RNA, 21 nt, Human
uauauauauacauauauaugu

SEQ ID NO: 596695 - RNA, 22 nt, Human
uauauauauacauauauaugua

SEQ ID NO: 596696 - RNA, 22 nt, Human
uauauauauacauauauaugua

SEQ ID NO: 596697 - RNA, 24 nt, Human
uauauauauacauauauauguaua

SEQ ID NO: 596698 - RNA, 20 nt, Human
uauauauauauacauauaua

SEQ ID NO: 596699 - RNA, 21 nt, Human
uauauauauauacauauauau

SEQ ID NO: 596700 - RNA, 22 nt, Human
uauauauauauacauauauaug

SEQ ID NO: 596701 - RNA, 19 nt, Human
uauauauauauauauauau

SEQ ID NO: 596702 - RNA, 19 nt, Human
uauauauauauauauauau

SEQ ID NO: 596703 - RNA, 22 nt, Human
uauauauauauauauauccaua

SEQ ID NO: 596704 - RNA, 30 nt, Human
uauauauauauauauauccauauauauaug

SEQ ID NO: 596705 - RNA, 24 nt, Human
uauauauauauauccauauauaua

SEQ ID NO: 596706 - RNA, 23 nt, Human
uauauauauccauauauauauau

SEQ ID NO: 596707 - RNA, 27 nt, Human
uauauauauccauauauauauauauau

SEQ ID NO: 596708 - RNA, 27 nt, Human
uauauauauccauauauauauauauua

SEQ ID NO: 596709 - RNA, 19 nt, Human
uauauauccauauauauau

SEQ ID NO: 596710 - RNA, 20 nt, Human
uauauauccauauauauaua

SEQ ID NO: 596711 - RNA, 18 nt, Human
uauauauguauauauaca

SEQ ID NO: 596712 - RNA, 19 nt, Human
uauauauguauauauacau

SEQ ID NO: 596713 - RNA, 18 nt, Human
uauauauguguauauaua

SEQ ID NO: 596714 - RNA, 20 nt, Human
uauauccauauauauauaua

SEQ ID NO: 596715 - RNA, 22 nt, Human
uauauccauauauauauauaua

SEQ ID NO: 596716 - RNA, 24 nt, Human
uauauccauauauauauauauaua

SEQ ID NO: 596717 - RNA, 23 nt, Human
uauguauauauacauauaugugu

SEQ ID NO: 596718 - RNA, 24 nt, Human
uauguguauauauauccauauaua

SEQ ID NO: 596719 - RNA, 24 nt, Human
uauguguauauauauccauauaua

SEQ ID NO: 596720 - RNA, 24 nt, Human
uauguguguguauauauaugugua

SEQ ID NO: 596721 - RNA, 25 nt, Human
uauguguguguauauauauguguca

SEQ ID NO: 596722 - RNA, 19 nt, Human
uccauauauauauauauau

SEQ ID NO: 596723 - RNA, 19 nt, Human
uccauauauauauauauau

SEQ ID NO: 596724 - RNA, 30 nt, Human
uccauauauauauauauauauauauccauu

SEQ ID NO: 596725 - RNA, 23 nt, Human
ugcagugcaugacuguauauaua

SEQ ID NO: 596726 - RNA, 25 nt, Human
uggagcaaaagugauugcgguuuuu

SEQ ID NO: 596727 - RNA, 19 nt, Human
uguauauauacauauaugu

SEQ ID NO: 596728 - RNA, 21 nt, Human
uguauauauacauauaugugu

SEQ ID NO: 596729 - RNA, 24 nt, Human
uguauauauacauauaugugugug

SEQ ID NO: 596730 - RNA, 23 nt, Human
uguauauauauccauauauauau

SEQ ID NO: 596731 - RNA, 25 nt, Human
uguauauauauccauauauauauau

SEQ ID NO: 596732 - RNA, 18 nt, Human
uguauauauauguguaua

SEQ ID NO: 596733 - RNA, 20 nt, Human
uguauauauauguguauaua

SEQ ID NO: 596734 - RNA, 22 nt, Human
uguauauauauguguauauaua

SEQ ID NO: 596735 - RNA, 25 nt, Human
ugugccauauauauaauacaugugg

SEQ ID NO: 596736 - RNA, 22 nt, Human
uguguauauauauccauauaua

SEQ ID NO: 596737 - RNA, 24 nt, Human
uguguauauauauccauauauaua

SEQ ID NO: 596738 - RNA, 26 nt, Human
uguguauauauauccauauauauaua

SEQ ID NO: 596739 - RNA, 19 nt, Human
uguguauauauauguguau

SEQ ID NO: 596740 - RNA, 22 nt, Human
uguguauauauauguguauaua

SEQ ID NO: 596741 - RNA, 23 nt, Human
uguguauauauauguguauauau

SEQ ID NO: 596742 - RNA, 19 nt, Human
uguguguauauauaugugu

SEQ ID NO: 596743 - RNA, 23 nt, Human
uguguguguauauauauguguau

SEQ ID NO: 596744 - RNA, 19 nt, Human
uuagaaauuuugguacaag

SEQ ID NO: 596745 - RNA, 19 nt, Human
uugguacaagcugaaaagg

SEQ ID NO: 596746 - RNA, 23 nt, Human
aaauauuuauaauaaccugaaua

SEQ ID NO: 596747 - RNA, 23 nt, Human
acaaaacagccuauaccuaaaau

SEQ ID NO: 596748 - RNA, 24 nt, Human
acaacaaaacagccuauaccuaaa

SEQ ID NO: 596749 - RNA, 20 nt, Human
agccauugugaugaaacuaa

SEQ ID NO: 596750 - RNA, 19 nt, Human
auaaugccaacaacaaaac

SEQ ID NO: 596751 - RNA, 24 nt, Human
auccuaugaucaaacuacauuacu

SEQ ID NO: 596752 - RNA, 22 nt, Human
caacaaaacagccuauaccuaa

SEQ ID NO: 596753 - RNA, 18 nt, Human
cacccuacaguagcucua

SEQ ID NO: 596754 - RNA, 21 nt, Human
gaaugcuuuuguuuuccuucu

SEQ ID NO: 596755 - RNA, 21 nt, Human
ggaaaaaaacugauuauugug

SEQ ID NO: 596756 - RNA, 20 nt, Human
ggaagacuuucuugucuaca

SEQ ID NO: 596757 - RNA, 24 nt, Human
uaaauauuuauaauaaccugaaua

SEQ ID NO: 596758 - RNA, 24 nt, Human
uaagaacugaggcaagucuaacca

SEQ ID NO: 596759 - RNA, 21 nt, Human
uacuuguucuucuacagccua

SEQ ID NO: 596760 - RNA, 21 nt, Human
uauguacaugcagccauugug

SEQ ID NO: 596761 - RNA, 21 nt, Human
ucaaggaagacuuucuugucu

SEQ ID NO: 596762 - RNA, 18 nt, Human
ucccaaaccucucacugc

SEQ ID NO: 596763 - RNA, 21 nt, Human
uccuacugaagaaaccacuuc

SEQ ID NO: 596764 - RNA, 23 nt, Human
ucggaaucaaguuuacucaacaa

SEQ ID NO: 596765 - RNA, 24 nt, Human
ucuacagccuacugucuuuagaca

SEQ ID NO: 596766 - RNA, 18 nt, Human
ucugaugaaaugaaacua

SEQ ID NO: 596767 - RNA, 24 nt, Human
ucuugucuacgguucacccuagcu

SEQ ID NO: 596768 - RNA, 24 nt, Human
ugaaaugaaacuaacuuacacaaa

SEQ ID NO: 596769 - RNA, 25 nt, Human
ugaagccccagaaaguccuacagag

SEQ ID NO: 596770 - RNA, 22 nt, Human
ugcgugccugcgcaucuaugug

SEQ ID NO: 596771 - RNA, 18 nt, Human
ugcuuuuguuuuccuucu

SEQ ID NO: 596772 - RNA, 24 nt, Human
ugguccucuggucacaggacccgu

SEQ ID NO: 596773 - RNA, 18 nt, Human
uuaaaaauuuuagugcag

SEQ ID NO: 596774 - RNA, 20 nt, Human
uuucccuuaaaaauuuuaga

SEQ ID NO: 596775 - RNA, 23 nt, Human
uuuuucacccuacaguagcucua

SEQ ID NO: 596776 - RNA, 23 nt, Human
aaaaaacaaaaucuccacuuaaa

SEQ ID NO: 596777 - RNA, 24 nt, Human
aaaaacccagaaaacauaaggcac

SEQ ID NO: 596778 - RNA, 21 nt, Human
aaaaccaaugagaaaaugucc

SEQ ID NO: 596779 - RNA, 19 nt, Human
aaacagaaaccgacucaag

SEQ ID NO: 596780 - RNA, 24 nt, Human
aaacagaaaccgacucaaggcccg

SEQ ID NO: 596781 - RNA, 21 nt, Human
aaacccagaaaacauaaggca

SEQ ID NO: 596782 - RNA, 22 nt, Human
aaacccauucucccagagccgg

SEQ ID NO: 596783 - RNA, 26 nt, Human
aaagcauauacauuugaaaaaaacaa

SEQ ID NO: 596784 - RNA, 25 nt, Human
aacagaaaccgacucaaggcccgag

SEQ ID NO: 596785 - RNA, 19 nt, Human
aagaacacuugguaaaacc

SEQ ID NO: 596786 - RNA, 27 nt, Human
aagcgcuucuguugagaaaggacaguu

SEQ ID NO: 596787 - RNA, 24 nt, Human
acagcacaaagcugcuccucaugc

SEQ ID NO: 596788 - RNA, 23 nt, Human
acaggauuuucacggcaaaacca

SEQ ID NO: 596789 - RNA, 22 nt, Human
acucacucagucccuggccccu

SEQ ID NO: 596790 - RNA, 22 nt, Human
acuuuuuacccaggggcugagc

SEQ ID NO: 596791 - RNA, 23 nt, Human
agagaaacagaaaccgacucaag

SEQ ID NO: 596792 - RNA, 19 nt, Human
agccagcuggcugagggcc

SEQ ID NO: 596793 - RNA, 21 nt, Human
agccagcuggcugagggcccg

SEQ ID NO: 596794 - RNA, 19 nt, Human
aggaagaaaaacccagaaa

SEQ ID NO: 596795 - RNA, 20 nt, Human
aggaagaaaaacccagaaaa

SEQ ID NO: 596796 - RNA, 20 nt, Human
aggauuuucacggcaaaacc

SEQ ID NO: 596797 - RNA, 20 nt, Human
aggcugcagucucugcgcgc

SEQ ID NO: 596798 - RNA, 22 nt, Human
aggcugcagucucugcgcgcug

SEQ ID NO: 596799 - RNA, 24 nt, Human
aggggaggcuggcuccccgaaaug

SEQ ID NO: 596800 - RNA, 23 nt, Human
caaaauuuccaaagcauauacau

SEQ ID NO: 596801 - RNA, 21 nt, Human
cacggcaaaaccaaugagaaa

SEQ ID NO: 596802 - RNA, 19 nt, Human
cacuugucccucugcugcc

SEQ ID NO: 596803 - RNA, 19 nt, Human
cagagccggucucucccac

SEQ ID NO: 596804 - RNA, 21 nt, Human
cagagccggucucucccacag

SEQ ID NO: 596805 - RNA, 21 nt, Human
caggagccugaagcccaaggg

SEQ ID NO: 596806 - RNA, 20 nt, Human
cagugagcacuuuuuacccu

SEQ ID NO: 596807 - RNA, 18 nt, Human
caguucagccaaacucaa

SEQ ID NO: 596808 - RNA, 21 nt, Human
cccaggggcugagcuuccugg

SEQ ID NO: 596809 - RNA, 20 nt, Human
cccuccagagaaacagaaac

SEQ ID NO: 596810 - RNA, 22 nt, Human
cccucugcucugucccuccaga

SEQ ID NO: 596811 - RNA, 23 nt, Human
ccguggcuguccacgaggucacu

SEQ ID NO: 596812 - RNA, 24 nt, Human
ccugccgugcugccagcucaggag

SEQ ID NO: 596813 - RNA, 18 nt, Human
ccugcgacauggauggag

SEQ ID NO: 596814 - RNA, 18 nt, Human
ccuggccccucugcucug

SEQ ID NO: 596815 - RNA, 20 nt, Human
cgagcagcucaggcgguggc

SEQ ID NO: 596816 - RNA, 18 nt, Human
cggaguguguccacagag

SEQ ID NO: 596817 - RNA, 20 nt, Human
cggcaaaaccaaugagaaaa

SEQ ID NO: 596818 - RNA, 20 nt, Human
cggcaggggacggggauggc

SEQ ID NO: 596819 - RNA, 22 nt, Human
cucccacagcacaaagcugcuc

SEQ ID NO: 596820 - RNA, 24 nt, Human
cugcucugucccuccagagaaaca

SEQ ID NO: 596821 - RNA, 20 nt, Human
cuggccccucugcucugucc

SEQ ID NO: 596822 - RNA, 21 nt, Human
cuggccccucugcucuguccc

SEQ ID NO: 596823 - RNA, 25 nt, Human
cuggccccucugcucugucccucca

SEQ ID NO: 596824 - RNA, 21 nt, Human
cugguuuuuagaaacagaacu

SEQ ID NO: 596825 - RNA, 18 nt, Human
cuuccugggcuccugcga

SEQ ID NO: 596826 - RNA, 23 nt, Human
cuuuguucaucuucuccuguuca

SEQ ID NO: 596827 - RNA, 20 nt, Human
gagaaacagaaaccgacuca

SEQ ID NO: 596828 - RNA, 20 nt, Human
gagaacauuuucuugaaagc

SEQ ID NO: 596829 - RNA, 20 nt, Human
gagcaaauguaaggcugcgu

SEQ ID NO: 596830 - RNA, 19 nt, Human
gaggagcggggcuggggag

SEQ ID NO: 596831 - RNA, 19 nt, Human
gagggcccggagugugucc

SEQ ID NO: 596832 - RNA, 27 nt, Human
gaggggaggcuggcuccccgaaaugug

SEQ ID NO: 596833 - RNA, 18 nt, Human
gaucaccuucacaucacc

SEQ ID NO: 596834 - RNA, 24 nt, Human
gauuuucacggcaaaaccaaugag

SEQ ID NO: 596835 - RNA, 23 nt, Human
gcaaaaccaaugagaaaaugucc

SEQ ID NO: 596836 - RNA, 19 nt, Human
ggaaccggagcggcagggg

SEQ ID NO: 596837 - RNA, 19 nt, Human
ggagcggggcuggggaggg

SEQ ID NO: 596838 - RNA, 20 nt, Human
ggagcucucccugccgugcu

SEQ ID NO: 596839 - RNA, 20 nt, Human
gggaagaggggaggcuggcu

SEQ ID NO: 596840 - RNA, 21 nt, Human
gggaagaggggaggcuggcuc

SEQ ID NO: 596841 - RNA, 21 nt, Human
gggcuggggaggggaagaggg

SEQ ID NO: 596842 - RNA, 21 nt, Human
gugcuucaaagaacacuuggu

SEQ ID NO: 596843 - RNA, 19 nt, Human
uaaaaaaucaaaauuucca

SEQ ID NO: 596844 - RNA, 22 nt, Human
uaaaaaaucaaaauuuccaaag

SEQ ID NO: 596845 - RNA, 25 nt, Human
uaaaacccucuggcuaaaaaaucaa

SEQ ID NO: 596846 - RNA, 20 nt, Human
ucaaaauuuccaaagcauau

SEQ ID NO: 596847 - RNA, 19 nt, Human
ucaccuucacaucacccuc

SEQ ID NO: 596848 - RNA, 20 nt, Human
ucacucagucccuggccccu

SEQ ID NO: 596849 - RNA, 20 nt, Human
ucacugagcggugacuucug

SEQ ID NO: 596850 - RNA, 21 nt, Human
ucacugagcggugacuucuga

SEQ ID NO: 596851 - RNA, 21 nt, Human
ucucccacagcacaaagcugc

SEQ ID NO: 596852 - RNA, 21 nt, Human
ucucccagagccggucucucc

SEQ ID NO: 596853 - RNA, 25 nt, Human
ucucccagagccggucucucccaau

SEQ ID NO: 596854 - RNA, 18 nt, Human
ugaaaaaaacaaaaucuc

SEQ ID NO: 596855 - RNA, 18 nt, Human
ugaaacccauucucccag

SEQ ID NO: 596856 - RNA, 20 nt, Human
ugagaagaauugagacccga

SEQ ID NO: 596857 - RNA, 22 nt, Human
ugagaagaauugagacccgagc

SEQ ID NO: 596858 - RNA, 18 nt, Human
ugaucugagcugcaguga

SEQ ID NO: 596859 - RNA, 19 nt, Human
ugccagggccuuuugagag

SEQ ID NO: 596860 - RNA, 23 nt, Human
uggccccucugcucugucccucc

SEQ ID NO: 596861 - RNA, 20 nt, Human
uggggaggggaagaggggag

SEQ ID NO: 596862 - RNA, 21 nt, Human
uggggaggggaagaggggagg

SEQ ID NO: 596863 - RNA, 23 nt, Human
uggggaggggaagaggggaggcu

SEQ ID NO: 596864 - RNA, 19 nt, Human
uguccacagagggaggagc

SEQ ID NO: 596865 - RNA, 21 nt, Human
ugugaccugaggacugaucug

SEQ ID NO: 596866 - RNA, 22 nt, Human
uucaaagaacacuugguaaaac

SEQ ID NO: 596867 - RNA, 24 nt, Human
uuguugcccgggaucaauugcaaa

SEQ ID NO: 596868 - RNA, 22 nt, Human
uuugaaaaaaacaaaaucucca

SEQ ID NO: 596869 - RNA, 20 nt, Human
acagacagugaaucuugaac

SEQ ID NO: 596870 - RNA, 19 nt, Human
agcuguggauauucuugga

SEQ ID NO: 596871 - RNA, 21 nt, Human
augggucucugauggagauuu

SEQ ID NO: 596872 - RNA, 26 nt, Human
cacaccagaaagcauuacagggacac

SEQ ID NO: 596873 - RNA, 24 nt, Human
caccugaaucugaaaccagugauu

SEQ ID NO: 596874 - RNA, 19 nt, Human
cagcaacugaaacuucauu

SEQ ID NO: 596875 - RNA, 20 nt, Human
caggccuucugugaucuggg

SEQ ID NO: 596876 - RNA, 21 nt, Human
ccagaaagcauuacagggaca

SEQ ID NO: 596877 - RNA, 24 nt, Human
ccucaucacagagcuccuuucuua

SEQ ID NO: 596878 - RNA, 21 nt, Human
ccugaaucugaaaccagugau

SEQ ID NO: 596879 - RNA, 24 nt, Human
cuaaaaaugcugauucaucuugag

SEQ ID NO: 596880 - RNA, 22 nt, Human
cuccuuucuuacccucagcaac

SEQ ID NO: 596881 - RNA, 22 nt, Human
cugaaaccagugauuuucuugu

SEQ ID NO: 596882 - RNA, 18 nt, Human
cugaaucugaaaccagug

SEQ ID NO: 596883 - RNA, 26 nt, Human
gaacaggagguaaaaugaagggaccc

SEQ ID NO: 596884 - RNA, 24 nt, Human
gacacauucacugccuggucaggc

SEQ ID NO: 596885 - RNA, 20 nt, Human
ggcuagaucguuucuucucu

SEQ ID NO: 596886 - RNA, 22 nt, Human
gucaguauuauuuucaaaaggc

SEQ ID NO: 596887 - RNA, 19 nt, Human
uaaaaugaauggugauauc

SEQ ID NO: 596888 - RNA, 22 nt, Human
uaagcuggaaccucaucacaga

SEQ ID NO: 596889 - RNA, 21 nt, Human
uaucaugggucucugauggag

SEQ ID NO: 596890 - RNA, 24 nt, Human
ucaguauuauuuucaaaaggcuuc

SEQ ID NO: 596891 - RNA, 19 nt, Human
uccacuguauuuccagcug

SEQ ID NO: 596892 - RNA, 21 nt, Human
uccacuguauuuccagcuguu

SEQ ID NO: 596893 - RNA, 22 nt, Human
uccagcuguuuuucaauaagca

SEQ ID NO: 596894 - RNA, 23 nt, Human
ucucuaaaaaugcugauucaucu

SEQ ID NO: 596895 - RNA, 26 nt, Human
ucugaaaccagugauuuucuuguuuc

SEQ ID NO: 596896 - RNA, 22 nt, Human
ugaaagaucugaaauagcaggg

SEQ ID NO: 596897 - RNA, 20 nt, Human
ugagccaauguuccaacaga

SEQ ID NO: 596898 - RNA, 18 nt, Human
uggaaccucaucacagag

SEQ ID NO: 596899 - RNA, 20 nt, Human
ugguaaagacacauucacug

SEQ ID NO: 596900 - RNA, 28 nt, Human
uguuucguuuuuuugagccaauguucca

SEQ ID NO: 596901 - RNA, 20 nt, Human
uucagcaacugaaacuucau

SEQ ID NO: 596902 - RNA, 24 nt, Human
uuccugcauuucugaauuugucau

SEQ ID NO: 596903 - RNA, 19 nt, Human
uucuucucugagcugugga

SEQ ID NO: 596904 - RNA, 20 nt, Human
uucuucucugagcuguggau

SEQ ID NO: 596905 - RNA, 22 nt, Human
uugaacucucuaaaaaugcuga

SEQ ID NO: 596906 - RNA, 18 nt, Human
uugcauuguugucucagu

SEQ ID NO: 596907 - RNA, 18 nt, Human
uugcauuguugucucagu

SEQ ID NO: 596908 - RNA, 23 nt, Human
uuuacaucacaccagaaagcauu

SEQ ID NO: 596909 - RNA, 24 nt, Human
uuucuuguuucuuucuccaauggu

SEQ ID NO: 596910 - RNA, 21 nt, Human
uuugucauguugcuuaucuug

SEQ ID NO: 596911 - RNA, 24 nt, Human
aggaggagaaaaguucacuuggaa

SEQ ID NO: 596912 - RNA, 26 nt, Human
aggugugugaggcaguuaacaaagga

SEQ ID NO: 596913 - RNA, 20 nt, Human
augcuggagauccccacagc

SEQ ID NO: 596914 - RNA, 21 nt, Human
cugauaaugcuggagaucccc

SEQ ID NO: 596915 - RNA, 25 nt, Human
guuaacaaaggaggagaaaaguuca

SEQ ID NO: 596916 - RNA, 25 nt, Human
aaaaaaacagcugaucuggacaaaa

SEQ ID NO: 596917 - RNA, 22 nt, Human
aaaaaacagcugaucuggacaa

SEQ ID NO: 596918 - RNA, 21 nt, Human
aaaaauccaaaguuuucuaga

SEQ ID NO: 596919 - RNA, 22 nt, Human
aaacacagcucuucaguucagg

SEQ ID NO: 596920 - RNA, 22 nt, Human
aaacagcugaucuggacaaaag

SEQ ID NO: 596921 - RNA, 25 nt, Human
aaacagcugaucuggacaaaaggca

SEQ ID NO: 596922 - RNA, 19 nt, Human
aaccaggacaccagggucc

SEQ ID NO: 596923 - RNA, 21 nt, Human
aacucccuuccccuugaaauc

SEQ ID NO: 596924 - RNA, 22 nt, Human
aaggacaggucgagucauucug

SEQ ID NO: 596925 - RNA, 19 nt, Human
acaaaaccgccuugccagc

SEQ ID NO: 596926 - RNA, 21 nt, Human
acacugccgucuuccagcccu

SEQ ID NO: 596927 - RNA, 24 nt, Human
acagaagcacucccagcccauuuc

SEQ ID NO: 596928 - RNA, 19 nt, Human
accacggccuccacacacc

SEQ ID NO: 596929 - RNA, 18 nt, Human
acccucaucucccggacc

SEQ ID NO: 596930 - RNA, 23 nt, Human
agacaacucccuuccccuugaaa

SEQ ID NO: 596931 - RNA, 25 nt, Human
agagagcaguuacucaaaaaaaaga

SEQ ID NO: 596932 - RNA, 19 nt, Human
agaggugcaggucaagggg

SEQ ID NO: 596933 - RNA, 23 nt, Human
agauuuuaaaaaaacagcugauc

SEQ ID NO: 596934 - RNA, 23 nt, Human
agcagaagcuacgugaggaaugu

SEQ ID NO: 596935 - RNA, 21 nt, Human
aggaaguggccgugccacuga

SEQ ID NO: 596936 - RNA, 20 nt, Human
aggcucuaacccagcuacag

SEQ ID NO: 596937 - RNA, 20 nt, Human
aggcugggccaggcggcugc

SEQ ID NO: 596938 - RNA, 18 nt, Human
aguauguacaucagcacu

SEQ ID NO: 596939 - RNA, 21 nt, Human
aguuacucaaaaaaaagacac

SEQ ID NO: 596940 - RNA, 20 nt, Human
auccaacccucuccagaaac

SEQ ID NO: 596941 - RNA, 18 nt, Human
caaaaggcagacccaggc

SEQ ID NO: 596942 - RNA, 22 nt, Human
caccugugcccguggaagacgc

SEQ ID NO: 596943 - RNA, 23 nt, Human
caccugugcccguggaagacgcg

SEQ ID NO: 596944 - RNA, 25 nt, Human
cacgggcagaggagaacgucuugug

SEQ ID NO: 596945 - RNA, 19 nt, Human
cacugccgucuuccagccc

SEQ ID NO: 596946 - RNA, 19 nt, Human
cagaaaaacacugaugccu

SEQ ID NO: 596947 - RNA, 23 nt, Human
cagaaacugagcagaacaaaacc

SEQ ID NO: 596948 - RNA, 23 nt, Human
cagaacaaaaccgccuugccagc

SEQ ID NO: 596949 - RNA, 27 nt, Human
cagaaugguccccuaauggucccugaa

SEQ ID NO: 596950 - RNA, 20 nt, Human
cagcaggacagaagcacucc

SEQ ID NO: 596951 - RNA, 24 nt, Human
cauccaacccucuccagaaacuga

SEQ ID NO: 596952 - RNA, 27 nt, Human
cauucccaucucacgcugcuuuagagg

SEQ ID NO: 596953 - RNA, 21 nt, Human
ccacagcugcuggugcugggc

SEQ ID NO: 596954 - RNA, 24 nt, Human
ccacuggcaagaccaugcuuucaa

SEQ ID NO: 596955 - RNA, 23 nt, Human
ccagaaucacacucaggguuuuu

SEQ ID NO: 596956 - RNA, 18 nt, Human
ccagagacacggaacacg

SEQ ID NO: 596957 - RNA, 21 nt, Human
ccccggaaacccucaucuccc

SEQ ID NO: 596958 - RNA, 23 nt, Human
cccggaaacccucaucucccgga

SEQ ID NO: 596959 - RNA, 21 nt, Human
ccuaacgcugggcgcuggucc

SEQ ID NO: 596960 - RNA, 22 nt, Human
cggaaggauucgggccuggaua

SEQ ID NO: 596961 - RNA, 19 nt, Human
cuccacagcugcuggugcu

SEQ ID NO: 596962 - RNA, 18 nt, Human
cuccagggacccaccgcg

SEQ ID NO: 596963 - RNA, 24 nt, Human
cucuccagaaacugagcagaacaa

SEQ ID NO: 596964 - RNA, 21 nt, Human
cucucuggucaggacuccugg

SEQ ID NO: 596965 - RNA, 19 nt, Human
cugggcuuccccugugccc

SEQ ID NO: 596966 - RNA, 19 nt, Human
cugugcccagggucauggg

SEQ ID NO: 596967 - RNA, 22 nt, Human
cuucaagccaggccggcugccc

SEQ ID NO: 596968 - RNA, 22 nt, Human
cuuccagcccuaacgcugggcg

SEQ ID NO: 596969 - RNA, 24 nt, Human
gaccacggccuccacacaccuggu

SEQ ID NO: 596970 - RNA, 21 nt, Human
gaucacuagccccggaaaccc

SEQ ID NO: 596971 - RNA, 21 nt, Human
gcagacccaggcucuaaccca

SEQ ID NO: 596972 - RNA, 24 nt, Human
gcagcggaaggauucgggccugga

SEQ ID NO: 596973 - RNA, 18 nt, Human
gcccagaaucacacucag

SEQ ID NO: 596974 - RNA, 19 nt, Human
gccccggaaacccucaucu

SEQ ID NO: 596975 - RNA, 18 nt, Human
gcgcuggucccucucucc

SEQ ID NO: 596976 - RNA, 25 nt, Human
gcuuggagggcagcggaaggauucg

SEQ ID NO: 596977 - RNA, 21 nt, Human
ggaaaagcauggcagcucaag

SEQ ID NO: 596978 - RNA, 20 nt, Human
ggagacucacgggagaggca

SEQ ID NO: 596979 - RNA, 19 nt, Human
ggaucugaaaagcguaaua

SEQ ID NO: 596980 - RNA, 21 nt, Human
ggcauggaaauugcggcagcu

SEQ ID NO: 596981 - RNA, 20 nt, Human
guccguggcgaugccagccc

SEQ ID NO: 596982 - RNA, 22 nt, Human
uaaaaaaacagcugaucuggac

SEQ ID NO: 596983 - RNA, 21 nt, Human
uaaauguaaacauugaauggc

SEQ ID NO: 596984 - RNA, 24 nt, Human
uagccccggaaacccucaucuccc

SEQ ID NO: 596985 - RNA, 24 nt, Human
ucacagacacacgcagauuggucu

SEQ ID NO: 596986 - RNA, 18 nt, Human
ucacgaucacuagccccg

SEQ ID NO: 596987 - RNA, 20 nt, Human
ucagugcuggccucaagcgg

SEQ ID NO: 596988 - RNA, 18 nt, Human
ucaguucaggaccacagu

SEQ ID NO: 596989 - RNA, 19 nt, Human
ucccucucuccuaagccca

SEQ ID NO: 596990 - RNA, 25 nt, Human
ucccugcagaaauuuuaggggaaga

SEQ ID NO: 596991 - RNA, 20 nt, Human
ucgggccuggauaggggcuu

SEQ ID NO: 596992 - RNA, 23 nt, Human
ucucuggucaggacuccugggac

SEQ ID NO: 596993 - RNA, 18 nt, Human
ugaaguacagggcaccaa

SEQ ID NO: 596994 - RNA, 24 nt, Human
ugaauccagagacacggaacacgg

SEQ ID NO: 596995 - RNA, 20 nt, Human
ugauuugcggaaaaauaucc

SEQ ID NO: 596996 - RNA, 21 nt, Human
ugauuugcggaaaaauauccu

SEQ ID NO: 596997 - RNA, 18 nt, Human
ugccagcccccuucccgc

SEQ ID NO: 596998 - RNA, 20 nt, Human
ugcccagacgagggugagca

SEQ ID NO: 596999 - RNA, 18 nt, Human
ugcccagggucauggcgg

SEQ ID NO: 597000 - RNA, 18 nt, Human
ugcccguggaagacgcgg

SEQ ID NO: 597001 - RNA, 20 nt, Human
ugccuuccuuaucgaucucc

SEQ ID NO: 597002 - RNA, 19 nt, Human
ugcggcagcuggaggccgc

SEQ ID NO: 597003 - RNA, 20 nt, Human
ugcuggugcugggcaggcug

SEQ ID NO: 597004 - RNA, 20 nt, Human
ugggagcagaagcuacguga

SEQ ID NO: 597005 - RNA, 20 nt, Human
ugucaggaaaugagcacuuc

SEQ ID NO: 597006 - RNA, 25 nt, Human
uuagaggucaguucacaccuucugu

SEQ ID NO: 597007 - RNA, 24 nt, Human
uucggucagaaaaacacugaugcc

SEQ ID NO: 597008 - RNA, 22 nt, Human
uucuagaucauucccaucucac

SEQ ID NO: 597009 - RNA, 22 nt, Human
uugcaaauaaaagggaucacga

SEQ ID NO: 597010 - RNA, 27 nt, Human
uuuucuacaagucuuguuuauugaaag

SEQ ID NO: 597011 - RNA, 25 nt, Human
uuuuuuuuuuuuuauuuucuacaag

SEQ ID NO: 597012 - RNA, 19 nt, Human
aaauguccuucuagccauc

SEQ ID NO: 597013 - RNA, 21 nt, Human
aacaaugaccucaucucccuc

SEQ ID NO: 597014 - RNA, 24 nt, Human
aaccacgacacucacucgcgucga

SEQ ID NO: 597015 - RNA, 27 nt, Human
aagaacaggggcagguuccaagaaaaa

SEQ ID NO: 597016 - RNA, 21 nt, Human
aagaagaaaaacccuucccac

SEQ ID NO: 597017 - RNA, 21 nt, Human
aagcccuacuuaaguagggga

SEQ ID NO: 597018 - RNA, 23 nt, Human
acagccgcuccuggcagccagca

SEQ ID NO: 597019 - RNA, 19 nt, Human
acaggcaaggggagacaca

SEQ ID NO: 597020 - RNA, 19 nt, Human
acccugaaccccaaaaccu

SEQ ID NO: 597021 - RNA, 22 nt, Human
acgccugaagacucacagccgc

SEQ ID NO: 597022 - RNA, 21 nt, Human
acggggcgacgaacacauggc

SEQ ID NO: 597023 - RNA, 22 nt, Human
acucuggguccagcaccccaac

SEQ ID NO: 597024 - RNA, 18 nt, Human
agaaaaagaagaaaaacc

SEQ ID NO: 597025 - RNA, 18 nt, Human
agauguggaaacugaggc

SEQ ID NO: 597026 - RNA, 21 nt, Human
agcacccugaaccccaaaacc

SEQ ID NO: 597027 - RNA, 18 nt, Human
agccaggcuggcagacgc

SEQ ID NO: 597028 - RNA, 21 nt, Human
aggaaaagggguaccccaagg

SEQ ID NO: 597029 - RNA, 22 nt, Human
aggagagagugggugagagggg

SEQ ID NO: 597030 - RNA, 22 nt, Human
aggcugaggcauggggggcagu

SEQ ID NO: 597031 - RNA, 18 nt, Human
agggauggucacccccau

SEQ ID NO: 597032 - RNA, 21 nt, Human
agggcugaaguugucccggug

SEQ ID NO: 597033 - RNA, 24 nt, Human
aguggggacugggcagauucuggg

SEQ ID NO: 597034 - RNA, 27 nt, Human
auaaauaacagaaggguuugggaugac

SEQ ID NO: 597035 - RNA, 21 nt, Human
auagaguccacucagggugua

SEQ ID NO: 597036 - RNA, 21 nt, Human
caauggccaauggggucaagc

SEQ ID NO: 597037 - RNA, 21 nt, Human
cacagcacccugaaccccaaa

SEQ ID NO: 597038 - RNA, 22 nt, Human
cacagcccuaauaaauaacaga

SEQ ID NO: 597039 - RNA, 21 nt, Human
caccccaaccacgacacucac

SEQ ID NO: 597040 - RNA, 22 nt, Human
cacgcacacacacgcguggcag

SEQ ID NO: 597041 - RNA, 21 nt, Human
cagaugucuccuaaauguccu

SEQ ID NO: 597042 - RNA, 21 nt, Human
cagcaccccaaccacgacacu

SEQ ID NO: 597043 - RNA, 21 nt, Human
cagcagcagcuuccggccacg

SEQ ID NO: 597044 - RNA, 26 nt, Human
cagcaggggcgugggcagcagcagcu

SEQ ID NO: 597045 - RNA, 27 nt, Human
cagccgcuccuggcagccagcagggcu

SEQ ID NO: 597046 - RNA, 18 nt, Human
cagcuuccggccacgucc

SEQ ID NO: 597047 - RNA, 20 nt, Human
caugcccacccacucuagaa

SEQ ID NO: 597048 - RNA, 24 nt, Human
ccaaccacgacacucacucgcguc

SEQ ID NO: 597049 - RNA, 18 nt, Human
ccaagaaaaagaagaaaa

SEQ ID NO: 597050 - RNA, 23 nt, Human
ccaccacccccgccuggcccccc

SEQ ID NO: 597051 - RNA, 21 nt, Human
ccaugggggagccugcccccc

SEQ ID NO: 597052 - RNA, 18 nt, Human
ccccaaaaccucugaagu

SEQ ID NO: 597053 - RNA, 20 nt, Human
ccccaggcugcauccacgcc

SEQ ID NO: 597054 - RNA, 24 nt, Human
ccccauugacuggaaucaugccca

SEQ ID NO: 597055 - RNA, 18 nt, Human
ccccccacccuacagcug

SEQ ID NO: 597056 - RNA, 22 nt, Human
cccccgccuggccccccagguc

SEQ ID NO: 597057 - RNA, 21 nt, Human
ccccucugcuccacccaugcc

SEQ ID NO: 597058 - RNA, 23 nt, Human
cccucugcuccacccaugccccc

SEQ ID NO: 597059 - RNA, 19 nt, Human
cccugaaccccaaaaccuc

SEQ ID NO: 597060 - RNA, 21 nt, Human
cccugaaccccaaaaccucug

SEQ ID NO: 597061 - RNA, 22 nt, Human
ccgccgccugagcccccgcucc

SEQ ID NO: 597062 - RNA, 20 nt, Human
ccgccugagcccccgcuccg

SEQ ID NO: 597063 - RNA, 18 nt, Human
ccgcuccgccuagacugc

SEQ ID NO: 597064 - RNA, 26 nt, Human
ccucuugcaggaggauuccaagaagu

SEQ ID NO: 597065 - RNA, 23 nt, Human
ccuggccccccagguccagggga

SEQ ID NO: 597066 - RNA, 20 nt, Human
ccuuuugguuaaaauucuga

SEQ ID NO: 597067 - RNA, 18 nt, Human
cgccgccgccugagcccc

SEQ ID NO: 597068 - RNA, 21 nt, Human
cgcgucgaggccgccgccgcc

SEQ ID NO: 597069 - RNA, 28 nt, Human
cgcguggcagggaagaaguggggacugg

SEQ ID NO: 597070 - RNA, 18 nt, Human
cgcuggcagggguagggg

SEQ ID NO: 597071 - RNA, 23 nt, Human
cgggauggacagacggacugcca

SEQ ID NO: 597072 - RNA, 23 nt, Human
cgugggcagcagcagcuuccggc

SEQ ID NO: 597073 - RNA, 22 nt, Human
cucacagccgcuccuggcagcc

SEQ ID NO: 597074 - RNA, 19 nt, Human
cuccacccaugccccccau

SEQ ID NO: 597075 - RNA, 21 nt, Human
cuccacccaugccccccauga

SEQ ID NO: 597076 - RNA, 22 nt, Human
cucugcuccacccaugcccccc

SEQ ID NO: 597077 - RNA, 19 nt, Human
cugaaccccaaaaccucug

SEQ ID NO: 597078 - RNA, 19 nt, Human
cuggccccccagguccagg

SEQ ID NO: 597079 - RNA, 23 nt, Human
cugggggugggcgcuggcagggg

SEQ ID NO: 597080 - RNA, 20 nt, Human
cuucccacagcccuaauaaa

SEQ ID NO: 597081 - RNA, 21 nt, Human
gaaaaacccuucccacagccc

SEQ ID NO: 597082 - RNA, 20 nt, Human
gaaggccaggccugugaaag

SEQ ID NO: 597083 - RNA, 20 nt, Human
gacacagcacccugaacccc

SEQ ID NO: 597084 - RNA, 25 nt, Human
gaccucaucucccuccucuccuuug

SEQ ID NO: 597085 - RNA, 23 nt, Human
gaccugggcacaggcaaggggag

SEQ ID NO: 597086 - RNA, 24 nt, Human
gacugggcagauucugggugggug

SEQ ID NO: 597087 - RNA, 25 nt, Human
gaggcugaggcauggggggcagugu

SEQ ID NO: 597088 - RNA, 18 nt, Human
gaguugcccucuugcagg

SEQ ID NO: 597089 - RNA, 18 nt, Human
gcacacagggaggggcug

SEQ ID NO: 597090 - RNA, 21 nt, Human
gcacacgcacacacacgcgug

SEQ ID NO: 597091 - RNA, 21 nt, Human
gcagcagcagcuuccggccac

SEQ ID NO: 597092 - RNA, 23 nt, Human
gcagguuccaagaaaaagaagaa

SEQ ID NO: 597093 - RNA, 22 nt, Human
gccccccacccuacagcugggc

SEQ ID NO: 597094 - RNA, 19 nt, Human
gcgaggggcccuggcuggg

SEQ ID NO: 597095 - RNA, 20 nt, Human
gcgcaccuuccauuugugcc

SEQ ID NO: 597096 - RNA, 19 nt, Human
gcgcggcgggauggacaga

SEQ ID NO: 597097 - RNA, 21 nt, Human
gcgcuggcagggguaggggca

SEQ ID NO: 597098 - RNA, 23 nt, Human
ggacagacggacugccagccagg

SEQ ID NO: 597099 - RNA, 21 nt, Human
ggacugccagccaggcuggca

SEQ ID NO: 597100 - RNA, 23 nt, Human
ggagacacagcacccugaacccc

SEQ ID NO: 597101 - RNA, 23 nt, Human
ggcagccagcagggcagggaugg

SEQ ID NO: 597102 - RNA, 19 nt, Human
ggcaggcgaggguaggcac

SEQ ID NO: 597103 - RNA, 18 nt, Human
ggcagggguaggggcagg

SEQ ID NO: 597104 - RNA, 21 nt, Human
ggcccuggcugggggugggcg

SEQ ID NO: 597105 - RNA, 18 nt, Human
gggagccugccccccacc

SEQ ID NO: 597106 - RNA, 19 nt, Human
gggcagugugaagaacagg

SEQ ID NO: 597107 - RNA, 21 nt, Human
ggggaggaaggcgaggggccc

SEQ ID NO: 597108 - RNA, 18 nt, Human
ggggugggcgcuggcagg

SEQ ID NO: 597109 - RNA, 19 nt, Human
gggugagagguggagaggc

SEQ ID NO: 597110 - RNA, 20 nt, Human
gggugggcgcuggcaggggu

SEQ ID NO: 597111 - RNA, 20 nt, Human
gguaggggcaggggcaaggg

SEQ ID NO: 597112 - RNA, 20 nt, Human
gucugggucuggcuggcuug

SEQ ID NO: 597113 - RNA, 21 nt, Human
guggcacacgcacacacacgc

SEQ ID NO: 597114 - RNA, 22 nt, Human
uaaaagggcaauaguaggggca

SEQ ID NO: 597115 - RNA, 18 nt, Human
uaccccaaggacccugcc

SEQ ID NO: 597116 - RNA, 19 nt, Human
uccaagaaaaagaagaaaa

SEQ ID NO: 597117 - RNA, 21 nt, Human
uccaagaaaaagaagaaaaac

SEQ ID NO: 597118 - RNA, 23 nt, Human
uccaagaagugaggggaaggcuc

SEQ ID NO: 597119 - RNA, 21 nt, Human
uccaccacccccgccuggccc

SEQ ID NO: 597120 - RNA, 23 nt, Human
ucgcgucgaggccgccgccgccu

SEQ ID NO: 597121 - RNA, 19 nt, Human
ucuacccacugccuuugcc

SEQ ID NO: 597122 - RNA, 24 nt, Human
ucuccuaaauguccuucuagccau

SEQ ID NO: 597123 - RNA, 19 nt, Human
ucuggcuggcuuggggggc

SEQ ID NO: 597124 - RNA, 19 nt, Human
ugaaccccaaaaccucuga

SEQ ID NO: 597125 - RNA, 19 nt, Human
ugacaaacaaugaccucau

SEQ ID NO: 597126 - RNA, 20 nt, Human
ugagagaagacucaaugaca

SEQ ID NO: 597127 - RNA, 19 nt, Human
ugagcccccgcuccgccua

SEQ ID NO: 597128 - RNA, 20 nt, Human
ugaggagggggcaggaaagg

SEQ ID NO: 597129 - RNA, 24 nt, Human
ugcccggggugagggagccccucu

SEQ ID NO: 597130 - RNA, 18 nt, Human
ugcuccacccaugccccc

SEQ ID NO: 597131 - RNA, 21 nt, Human
uggaaacugaggcccaggcag

SEQ ID NO: 597132 - RNA, 22 nt, Human
uggacagacggacugccagcca

SEQ ID NO: 597133 - RNA, 19 nt, Human
uggcaaacagguaagggcu

SEQ ID NO: 597134 - RNA, 18 nt, Human
ugggaugaccugggcaca

SEQ ID NO: 597135 - RNA, 20 nt, Human
ugggcagauucugggugggu

SEQ ID NO: 597136 - RNA, 22 nt, Human
uggggucaagcuuuggcccuua

SEQ ID NO: 597137 - RNA, 22 nt, Human
uguaugaggcugaggcaugggg

SEQ ID NO: 597138 - RNA, 18 nt, Human
uucccccaggcugcaucc

SEQ ID NO: 597139 - RNA, 19 nt, Human
uucuggaaaccaagggcuc

SEQ ID NO: 597140 - RNA, 19 nt, Human
uugacuggaaucaugccca

SEQ ID NO: 597141 - RNA, 18 nt, Human
aaaaacaaguaugaccug

SEQ ID NO: 597142 - RNA, 22 nt, Human
aaaaaggcauuucuaauuggcc

SEQ ID NO: 597143 - RNA, 23 nt, Human
aaaacagcaauaaacacaaaagg

SEQ ID NO: 597144 - RNA, 20 nt, Human
aaaggcacucaauucagagg

SEQ ID NO: 597145 - RNA, 22 nt, Human
aaagugcuacuguuuccaacug

SEQ ID NO: 597146 - RNA, 22 nt, Human
aaagugcuacuguuuccaacug

SEQ ID NO: 597147 - RNA, 18 nt, Human
aaccaggaagaaaguauu

SEQ ID NO: 597148 - RNA, 27 nt, Human
aaccuaauaauaaagguguacagacug

SEQ ID NO: 597149 - RNA, 23 nt, Human
aacuggaaagauauuagacuaaa

SEQ ID NO: 597150 - RNA, 19 nt, Human
aagaaaagaccauguaagg

SEQ ID NO: 597151 - RNA, 18 nt, Human
aagcuaaaaauuaaaucu

SEQ ID NO: 597152 - RNA, 18 nt, Human
aagcuaaaaauuaaaucu

SEQ ID NO: 597153 - RNA, 19 nt, Human
aaggcacucaauucagagg

SEQ ID NO: 597154 - RNA, 22 nt, Human
aauaaacacaaaaggucaacau

SEQ ID NO: 597155 - RNA, 22 nt, Human
aauguucuuacgcauaugcaua

SEQ ID NO: 597156 - RNA, 24 nt, Human
acaaauuauucccauuuuaaaagc

SEQ ID NO: 597157 - RNA, 20 nt, Human
acauaagguagaaacaaagu

SEQ ID NO: 597158 - RNA, 20 nt, Human
acauaagguagaaacaaagu

SEQ ID NO: 597159 - RNA, 23 nt, Human
accuucucacgcgcagccccaac

SEQ ID NO: 597160 - RNA, 22 nt, Human
acggcuccccaggacuucaggg

SEQ ID NO: 597161 - RNA, 23 nt, Human
acuucagggagcccagagaaggg

SEQ ID NO: 597162 - RNA, 19 nt, Human
agaaauuuacagauggaua

SEQ ID NO: 597163 - RNA, 21 nt, Human
aggaagaaaauauuuaaugau

SEQ ID NO: 597164 - RNA, 24 nt, Human
auaaacacaaaaggucaacauaca

SEQ ID NO: 597165 - RNA, 24 nt, Human
auaaacacaaaaggucaacguaua

SEQ ID NO: 597166 - RNA, 22 nt, Human
auugcuaauuggccauccaaau

SEQ ID NO: 597167 - RNA, 23 nt, Human
caaaacucccaacuaaaauuuga

SEQ ID NO: 597168 - RNA, 23 nt, Human
caaagcgcgggacggagggcgca

SEQ ID NO: 597169 - RNA, 19 nt, Human
caacaaagcgcgggacgga

SEQ ID NO: 597170 - RNA, 19 nt, Human
caaguccugagcuuaagua

SEQ ID NO: 597171 - RNA, 23 nt, Human
caauaaacacaaaaggucaacgu

SEQ ID NO: 597172 - RNA, 23 nt, Human
cacaaaaggucaacauacauaaa

SEQ ID NO: 597173 - RNA, 23 nt, Human
cacaaaaggucaacguauauaaa

SEQ ID NO: 597174 - RNA, 20 nt, Human
caccgcagcaccucgccccc

SEQ ID NO: 597175 - RNA, 21 nt, Human
caccgcagcaccucgcccccu

SEQ ID NO: 597176 - RNA, 20 nt, Human
caccuucucacgcgcagccc

SEQ ID NO: 597177 - RNA, 22 nt, Human
cacuguucuuaaacuccuagga

SEQ ID NO: 597178 - RNA, 22 nt, Human
cagcucaaaagagcauugcuaa

SEQ ID NO: 597179 - RNA, 20 nt, Human
cagcuucuauguuagauccu

SEQ ID NO: 597180 - RNA, 18 nt, Human
cagggagcccagaggagg

SEQ ID NO: 597181 - RNA, 20 nt, Human
cauguaagacaagaaauauc

SEQ ID NO: 597182 - RNA, 20 nt, Human
cauuaaccacagaaguacuu

SEQ ID NO: 597183 - RNA, 20 nt, Human
cauuaaccacagaaguacuu

SEQ ID NO: 597184 - RNA, 20 nt, Human
ccaaaaccaggaagaaaaua

SEQ ID NO: 597185 - RNA, 24 nt, Human
ccaccuucucacgcgcagccccaa

SEQ ID NO: 597186 - RNA, 19 nt, Human
cccaggacuucagggagcc

SEQ ID NO: 597187 - RNA, 24 nt, Human
ccccaggacuucagggagcccaga

SEQ ID NO: 597188 - RNA, 19 nt, Human
ccccucgcuuucgcaacaa

SEQ ID NO: 597189 - RNA, 19 nt, Human
cccgagacuucagggagcc

SEQ ID NO: 597190 - RNA, 20 nt, Human
cccgcagcguccggucgcgc

SEQ ID NO: 597191 - RNA, 20 nt, Human
ccgccagccuuccccgagcg

SEQ ID NO: 597192 - RNA, 20 nt, Human
ccgccagccuuccccgagcg

SEQ ID NO: 597193 - RNA, 21 nt, Human
ccgcccgcagcguccggucgc

SEQ ID NO: 597194 - RNA, 22 nt, Human
ccgccgccgccagccuuccccg

SEQ ID NO: 597195 - RNA, 22 nt, Human
ccgccgccgccagccuuccccg

SEQ ID NO: 597196 - RNA, 22 nt, Human
cgcccgcagcguccggucgcgc

SEQ ID NO: 597197 - RNA, 21 nt, Human
cuaaaaggaggaaucauaaug

SEQ ID NO: 597198 - RNA, 22 nt, Human
cucacgcgcagccccaaccguu

SEQ ID NO: 597199 - RNA, 24 nt, Human
gaaagcuuucaauacaccaacuga

SEQ ID NO: 597200 - RNA, 23 nt, Human
gaaggugugaagcuaacuuucau

SEQ ID NO: 597201 - RNA, 22 nt, Human
gagcgcaggugccuacaccgcc

SEQ ID NO: 597202 - RNA, 22 nt, Human
gagcgcaggugccuacaccgcc

SEQ ID NO: 597203 - RNA, 19 nt, Human
gcccagagaagggggucuc

SEQ ID NO: 597204 - RNA, 21 nt, Human
gccgcgcucuagcaccgcagc

SEQ ID NO: 597205 - RNA, 20 nt, Human
ggaaagccaaauuuuaaaaa

SEQ ID NO: 597206 - RNA, 21 nt, Human
ggaaagcuuucaauacaccaa

SEQ ID NO: 597207 - RNA, 20 nt, Human
ggcucuauucaaaacagcaa

SEQ ID NO: 597208 - RNA, 23 nt, Human
gggggucucuggccauggcccgg

SEQ ID NO: 597209 - RNA, 25 nt, Human
guaaagaucagagaauauuaaaaug

SEQ ID NO: 597210 - RNA, 21 nt, Human
guacaguucauaaggccuuug

SEQ ID NO: 597211 - RNA, 25 nt, Human
uaaaaauaaauuuacagauagauaa

SEQ ID NO: 597212 - RNA, 20 nt, Human
uaaaaggaggaaucacaaug

SEQ ID NO: 597213 - RNA, 18 nt, Human
uaaaauccuaggaaagcc

SEQ ID NO: 597214 - RNA, 18 nt, Human
uaaacacaaaaggucaac

SEQ ID NO: 597215 - RNA, 18 nt, Human
uaaacacaaaaggucaac

SEQ ID NO: 597216 - RNA, 22 nt, Human
uaaguaggaaacaaaacuccca

SEQ ID NO: 597217 - RNA, 22 nt, Human
uaaguaggaaacaaaguuccca

SEQ ID NO: 597218 - RNA, 22 nt, Human
uaauaauaaagguguacagacu

SEQ ID NO: 597219 - RNA, 22 nt, Human
uaauaauaaagguguacagacu

SEQ ID NO: 597220 - RNA, 21 nt, Human
uacaguucauaaggccuuugu

SEQ ID NO: 597221 - RNA, 21 nt, Human
uacaguucauaaggccuuugu

SEQ ID NO: 597222 - RNA, 24 nt, Human
uagcaaugacaaugcuuaaguuuu

SEQ ID NO: 597223 - RNA, 23 nt, Human
uaucaaguccugagcuuaaguag

SEQ ID NO: 597224 - RNA, 20 nt, Human
uaucugguacauaaauaacu

SEQ ID NO: 597225 - RNA, 20 nt, Human
uaucugguacauaaauaauu

SEQ ID NO: 597226 - RNA, 18 nt, Human
uauuagacuaaaaggagg

SEQ ID NO: 597227 - RNA, 25 nt, Human
uauucccauuuuaaaagccagaaua

SEQ ID NO: 597228 - RNA, 22 nt, Human
ucaauacaccaacugaaaaagg

SEQ ID NO: 597229 - RNA, 21 nt, Human
ucacucaaagccacucaacuc

SEQ ID NO: 597230 - RNA, 22 nt, Human
uccacuaacauaagguagaaac

SEQ ID NO: 597231 - RNA, 22 nt, Human
uccacuaacauaagguagaaac

SEQ ID NO: 597232 - RNA, 18 nt, Human
ucgcccccucgcuuucgc

SEQ ID NO: 597233 - RNA, 24 nt, Human
ucuccauccucuuccccgcccgca

SEQ ID NO: 597234 - RNA, 23 nt, Human
ugaauuaaaagcaugaguuuaau

SEQ ID NO: 597235 - RNA, 18 nt, Human
ugagguccacuaacauaa

SEQ ID NO: 597236 - RNA, 18 nt, Human
ugagguccacuaacauaa

SEQ ID NO: 597237 - RNA, 19 nt, Human
ugccccagcucaaaagagc

SEQ ID NO: 597238 - RNA, 19 nt, Human
ugccccagcucaaaagagc

SEQ ID NO: 597239 - RNA, 20 nt, Human
ugucaaagaaaagaccaugu

SEQ ID NO: 597240 - RNA, 20 nt, Human
ugucaaagaaaagaccaugu

SEQ ID NO: 597241 - RNA, 24 nt, Human
uuaaaacuauaauaucugguacau

SEQ ID NO: 597242 - RNA, 19 nt, Human
uuaaaugccccagcucaaa

SEQ ID NO: 597243 - RNA, 26 nt, Human
uuagacuaaaaggaggaaucacaaug

SEQ ID NO: 597244 - RNA, 26 nt, Human
uuagacuaaaaggaggaaucauaaug

SEQ ID NO: 597245 - RNA, 23 nt, Human
uucaaaacagcaauaaacacaaa

SEQ ID NO: 597246 - RNA, 23 nt, Human
uucaaaacaguaauaaacacaaa

SEQ ID NO: 597247 - RNA, 19 nt, Human
uucaaagugcuacuguuuc

SEQ ID NO: 597248 - RNA, 19 nt, Human
uucaaagugcuacuguuuc

SEQ ID NO: 597249 - RNA, 21 nt, Human
uucaaagugcuacuguuucca

SEQ ID NO: 597250 - RNA, 21 nt, Human
uucaaagugcuacuguuucca

SEQ ID NO: 597251 - RNA, 25 nt, Human
uucaguuuucuggauuuucugggug

SEQ ID NO: 597252 - RNA, 20 nt, Human
uucauaaggccuuugucauu

SEQ ID NO: 597253 - RNA, 20 nt, Human
uucauaaggccuuugucauu

SEQ ID NO: 597254 - RNA, 18 nt, Human
uuccauuuuuacauuaau

SEQ ID NO: 597255 - RNA, 20 nt, Human
uucuauuagcaugugucacu

SEQ ID NO: 597256 - RNA, 25 nt, Human
uuuucuggauuuucugggugacgau

SEQ ID NO: 597257 - RNA, 22 nt, Human
uuuuuuuuuuuuuuuuauuuuu

SEQ ID NO: 597258 - RNA, 20 nt, Human
accucgggaagcgcuggaaa

SEQ ID NO: 597259 - RNA, 19 nt, Human
acgacacagcggagggggc

SEQ ID NO: 597260 - RNA, 19 nt, Human
agcccagaaguccgaccac

SEQ ID NO: 597261 - RNA, 23 nt, Human
agggggcggggcccgacgcgggg

SEQ ID NO: 597262 - RNA, 19 nt, Human
auggucaccaaagggagua

SEQ ID NO: 597263 - RNA, 22 nt, Human
caccuggggcucugggcuguuc

SEQ ID NO: 597264 - RNA, 19 nt, Human
cacucggcggggaccgccu

SEQ ID NO: 597265 - RNA, 21 nt, Human
cagaaguccgaccacggagcc

SEQ ID NO: 597266 - RNA, 18 nt, Human
cagcggagggggcggggc

SEQ ID NO: 597267 - RNA, 20 nt, Human
cagggcccuccaggugggcc

SEQ ID NO: 597268 - RNA, 25 nt, Human
ccacggagccuucgugccgugcccc

SEQ ID NO: 597269 - RNA, 19 nt, Human
cccccagcgguggugcggc

SEQ ID NO: 597270 - RNA, 18 nt, Human
cccgcccccggcgugcac

SEQ ID NO: 597271 - RNA, 21 nt, Human
ccgccuuuucuccucuaggcu

SEQ ID NO: 597272 - RNA, 22 nt, Human
ccuccaggugggccagggccuu

SEQ ID NO: 597273 - RNA, 22 nt, Human
ccuccgaacagcccagaagucc

SEQ ID NO: 597274 - RNA, 18 nt, Human
ccuccgagucugcgcacu

SEQ ID NO: 597275 - RNA, 20 nt, Human
ccuccgagucugcgcacuuc

SEQ ID NO: 597276 - RNA, 23 nt, Human
ccucuaggcucgcuucgcugccc

SEQ ID NO: 597277 - RNA, 23 nt, Human
cggcacgccccuuccguacagca

SEQ ID NO: 597278 - RNA, 23 nt, Human
cuagaagcucccgacgcggccga

SEQ ID NO: 597279 - RNA, 21 nt, Human
cucaccgcuccuccaugauga

SEQ ID NO: 597280 - RNA, 22 nt, Human
cuucgugccgugccccgccccc

SEQ ID NO: 597281 - RNA, 18 nt, Human
cuuggguccccuucccag

SEQ ID NO: 597282 - RNA, 21 nt, Human
ggcucugggcuguucugcuuc

SEQ ID NO: 597283 - RNA, 19 nt, Human
gggccuccgaacagcccag

SEQ ID NO: 597284 - RNA, 21 nt, Human
gggcggggcccgacgcggggg

SEQ ID NO: 597285 - RNA, 23 nt, Human
ggggcggggcccgacgcgggggc

SEQ ID NO: 597286 - RNA, 20 nt, Human
guuuaaucucaauuccagag

SEQ ID NO: 597287 - RNA, 22 nt, Human
uaggaugcugagcgccaagucc

SEQ ID NO: 597288 - RNA, 19 nt, Human
uaugccuccgagucugcgc

SEQ ID NO: 597289 - RNA, 23 nt, Human
uccagaggucuaggccaggccag

SEQ ID NO: 597290 - RNA, 21 nt, Human
ucggcggggaccgccuuuucu

SEQ ID NO: 597291 - RNA, 20 nt, Human
ucgugccgugccccgccccu

SEQ ID NO: 597292 - RNA, 22 nt, Human
ucucaccgcuccuccaugauga

SEQ ID NO: 597293 - RNA, 21 nt, Human
ucugggcccuacacccagaac

SEQ ID NO: 597294 - RNA, 24 nt, Human
ugaagaauggucaccaaagggagu

SEQ ID NO: 597295 - RNA, 23 nt, Human
ugcucagccuccucccuugccag

SEQ ID NO: 597296 - RNA, 22 nt, Human
uguucugcuucucugggcccua

SEQ ID NO: 597297 - RNA, 24 nt, Human
uucuccucuaggcucgcuucgcug

SEQ ID NO: 597298 - RNA, 19 nt, Human
aaaaaaaaaaaaaaaaaga

SEQ ID NO: 597299 - RNA, 24 nt, Human
aaaaaaaaaaaaaaaagaaaagaa

SEQ ID NO: 597300 - RNA, 25 nt, Human
aaaaaaaaaaaagaaaagaaaagaa

SEQ ID NO: 597301 - RNA, 22 nt, Human
aaaaaagaaacagaucuaagca

SEQ ID NO: 597302 - RNA, 23 nt, Human
aaaaagaaacagaucuaagcaac

SEQ ID NO: 597303 - RNA, 25 nt, Human
aaaaagaaacagaucuaagcaugca

SEQ ID NO: 597304 - RNA, 20 nt, Human
aaaagaaaaagauuugguua

SEQ ID NO: 597305 - RNA, 24 nt, Human
aaacaagacacagagugcacagga

SEQ ID NO: 597306 - RNA, 19 nt, Human
aaaccuggugacccccccc

SEQ ID NO: 597307 - RNA, 20 nt, Human
aaagaucaccuccaggcacc

SEQ ID NO: 597308 - RNA, 22 nt, Human
aacaaagaaacccaaagcacaa

SEQ ID NO: 597309 - RNA, 24 nt, Human
aacaaagaaacccaaagcacaaaa

SEQ ID NO: 597310 - RNA, 20 nt, Human
aacauggugaaacccugucu

SEQ ID NO: 597311 - RNA, 21 nt, Human
aacauggugaaacccugucuc

SEQ ID NO: 597312 - RNA, 20 nt, Human
aacccugcccccccugcucc

SEQ ID NO: 597313 - RNA, 19 nt, Human
aagaaaagaaaagaaaaag

SEQ ID NO: 597314 - RNA, 22 nt, Human
aagaaacagaucuaagcaugca

SEQ ID NO: 597315 - RNA, 23 nt, Human
aaggcacuuucaccuugcauuuu

SEQ ID NO: 597316 - RNA, 23 nt, Human
aauuucuaucccuggacuaucuc

SEQ ID NO: 597317 - RNA, 19 nt, Human
acaaagaaacccaaagcac

SEQ ID NO: 597318 - RNA, 24 nt, Human
acacaacacucauguucuauccaa

SEQ ID NO: 597319 - RNA, 23 nt, Human
acagagcaagacucugucucaaa

SEQ ID NO: 597320 - RNA, 24 nt, Human
acagagcaagacucugucucaaaa

SEQ ID NO: 597321 - RNA, 20 nt, Human
acaggaacccugcccccccu

SEQ ID NO: 597322 - RNA, 23 nt, Human
acaggacagacaagccggcggaa

SEQ ID NO: 597323 - RNA, 18 nt, Human
acauuccuuauucuuauc

SEQ ID NO: 597324 - RNA, 21 nt, Human
accaacagggcagcagccaca

SEQ ID NO: 597325 - RNA, 20 nt, Human
accagaacuuucuacuuccc

SEQ ID NO: 597326 - RNA, 26 nt, Human
acccaaagcacaaaagccagccucug

SEQ ID NO: 597327 - RNA, 19 nt, Human
acccugcccccccugcucc

SEQ ID NO: 597328 - RNA, 21 nt, Human
acccugcccccccugcuccuc

SEQ ID NO: 597329 - RNA, 24 nt, Human
acccugucucuacuaaaaauacaa

SEQ ID NO: 597330 - RNA, 24 nt, Human
accugaggucaggaguucgagacc

SEQ ID NO: 597331 - RNA, 24 nt, Human
accuuucucgcuuuuucagucaac

SEQ ID NO: 597332 - RNA, 28 nt, Human
acucugucucaaaaaaaaaaaaaaaaaa

SEQ ID NO: 597333 - RNA, 24 nt, Human
acugcacuccagccuggccgacag

SEQ ID NO: 597334 - RNA, 26 nt, Human
acugcacuccagccuggccgacagag

SEQ ID NO: 597335 - RNA, 18 nt, Human
agaaaagaaaagaaaaag

SEQ ID NO: 597336 - RNA, 18 nt, Human
agaaaagaaaagaaaaag

SEQ ID NO: 597337 - RNA, 19 nt, Human
agaaaagaaaagaaaaaga

SEQ ID NO: 597338 - RNA, 19 nt, Human
agaacauuugaaugucuga

SEQ ID NO: 597339 - RNA, 21 nt, Human
agaagaagaaagaccugcgca

SEQ ID NO: 597340 - RNA, 20 nt, Human
agagguugcagugagccaag

SEQ ID NO: 597341 - RNA, 23 nt, Human
agagguugcagugagccaagauc

SEQ ID NO: 597342 - RNA, 24 nt, Human
agagguugcagugagccaagauca

SEQ ID NO: 597343 - RNA, 24 nt, Human
agcacuuugggaggcugagguggg

SEQ ID NO: 597344 - RNA, 22 nt, Human
agccugcccaauuuagcuacaa

SEQ ID NO: 597345 - RNA, 22 nt, Human
agccuggccgacagagcaagac

SEQ ID NO: 597346 - RNA, 24 nt, Human
agccuggccgacagagcaagacuc

SEQ ID NO: 597347 - RNA, 23 nt, Human
agccugggcauuggcgcuuucug

SEQ ID NO: 597348 - RNA, 24 nt, Human
agccuguccaacauggugaaaccc

SEQ ID NO: 597349 - RNA, 25 nt, Human
aggaacccugcccccccugcuccuc

SEQ ID NO: 597350 - RNA, 23 nt, Human
aggaguucgagaccagccugucc

SEQ ID NO: 597351 - RNA, 23 nt, Human
aggauuaccugaggucaggaguu

SEQ ID NO: 597352 - RNA, 24 nt, Human
aggauuaccugaggucaggaguuc

SEQ ID NO: 597353 - RNA, 24 nt, Human
aggcagagguugcagugagccaag

SEQ ID NO: 597354 - RNA, 22 nt, Human
aggcaggagaauugcuugagcc

SEQ ID NO: 597355 - RNA, 24 nt, Human
aggcaggagaauugcuugagccug

SEQ ID NO: 597356 - RNA, 24 nt, Human
aggcaugguggcacaugccuguaa

SEQ ID NO: 597357 - RNA, 25 nt, Human
aggcgccagacaggacagacaagcc

SEQ ID NO: 597358 - RNA, 21 nt, Human
aggcugaggcaggagaauugc

SEQ ID NO: 597359 - RNA, 24 nt, Human
aggcugaggcaggagaauugcuug

SEQ ID NO: 597360 - RNA, 24 nt, Human
aggcugaggugggaggauuaccug

SEQ ID NO: 597361 - RNA, 22 nt, Human
aggugggaggauuaccugaggu

SEQ ID NO: 597362 - RNA, 23 nt, Human
aggugggaggauuaccugagguc

SEQ ID NO: 597363 - RNA, 23 nt, Human
auagcaguacagaaaaccaauga

SEQ ID NO: 597364 - RNA, 18 nt, Human
auagcucaccuuucucgc

SEQ ID NO: 597365 - RNA, 24 nt, Human
aucaugccacugcacuccagccug

SEQ ID NO: 597366 - RNA, 22 nt, Human
augccacugcacuccagccugg

SEQ ID NO: 597367 - RNA, 24 nt, Human
auuaccugaggucaggaguucgag

SEQ ID NO: 597368 - RNA, 25 nt, Human
caaaaaaggaaaaucaccaucuucc

SEQ ID NO: 597369 - RNA, 19 nt, Human
caacaaagaaacccaaagc

SEQ ID NO: 597370 - RNA, 21 nt, Human
caacaaagaaacccaaagcac

SEQ ID NO: 597371 - RNA, 22 nt, Human
caacaaagaaacccaaagcaca

SEQ ID NO: 597372 - RNA, 24 nt, Human
caacagggcagcagccacaugcag

SEQ ID NO: 597373 - RNA, 24 nt, Human
caacauggugaaacccugucucua

SEQ ID NO: 597374 - RNA, 24 nt, Human
caagaucaugccacugcacuccag

SEQ ID NO: 597375 - RNA, 23 nt, Human
caagggauuguuuagaaccagca

SEQ ID NO: 597376 - RNA, 24 nt, Human
cacaccuguaaucccagcacuuug

SEQ ID NO: 597377 - RNA, 28 nt, Human
caccccacaggcccuugugaauuuccaa

SEQ ID NO: 597378 - RNA, 19 nt, Human
caccguuaucaaguccagc

SEQ ID NO: 597379 - RNA, 19 nt, Human
caccuggguguaaacagca

SEQ ID NO: 597380 - RNA, 23 nt, Human
caccuguaaucccagcacuuugg

SEQ ID NO: 597381 - RNA, 24 nt, Human
caccuguaaucccagcacuuuggg

SEQ ID NO: 597382 - RNA, 23 nt, Human
cacuccagccuggccgacagagc

SEQ ID NO: 597383 - RNA, 18 nt, Human
cacugcacuccagccugg

SEQ ID NO: 597384 - RNA, 18 nt, Human
cacugcacuccagccugg

SEQ ID NO: 597385 - RNA, 24 nt, Human
cacugcacuccagccuggccgaca

SEQ ID NO: 597386 - RNA, 24 nt, Human
cacugcacuccagccuggccgaca

SEQ ID NO: 597387 - RNA, 24 nt, Human
cagcacuuugggaggcugaggugg

SEQ ID NO: 597388 - RNA, 23 nt, Human
cagccagguaaaauuugucuccc

SEQ ID NO: 597389 - RNA, 24 nt, Human
cagcuacucgggaggcugaggcag

SEQ ID NO: 597390 - RNA, 20 nt, Human
caggcaugguggcacaugcc

SEQ ID NO: 597391 - RNA, 23 nt, Human
cagggcagcagccacaugcagag

SEQ ID NO: 597392 - RNA, 19 nt, Human
cagguccaagggauuguuu

SEQ ID NO: 597393 - RNA, 23 nt, Human
cagugcugcagccacaaugcaga

SEQ ID NO: 597394 - RNA, 20 nt, Human
caugacuacauacacuccuc

SEQ ID NO: 597395 - RNA, 19 nt, Human
caugcagagaaacagacac

SEQ ID NO: 597396 - RNA, 19 nt, Human
cauuagaaaccucaauuua

SEQ ID NO: 597397 - RNA, 24 nt, Human
cauucaaagaucaccuccaggcac

SEQ ID NO: 597398 - RNA, 19 nt, Human
ccaaagcacaaaagccagc

SEQ ID NO: 597399 - RNA, 21 nt, Human
ccaacauggugaaacccuguc

SEQ ID NO: 597400 - RNA, 23 nt, Human
ccaacauggugaaacccugucuc

SEQ ID NO: 597401 - RNA, 19 nt, Human
ccaagcacugaaaacgacu

SEQ ID NO: 597402 - RNA, 22 nt, Human
ccacaacuaagcaugagcgauu

SEQ ID NO: 597403 - RNA, 26 nt, Human
ccacuaaaaagcaaccuuugugccau

SEQ ID NO: 597404 - RNA, 19 nt, Human
ccacugcacuccagccugg

SEQ ID NO: 597405 - RNA, 19 nt, Human
ccacugcacuccagccugg

SEQ ID NO: 597406 - RNA, 20 nt, Human
ccacugcacuccagccuggc

SEQ ID NO: 597407 - RNA, 24 nt, Human
ccacugcacuccagccuggccgac

SEQ ID NO: 597408 - RNA, 22 nt, Human
ccacuggacggcggccuggucu

SEQ ID NO: 597409 - RNA, 21 nt, Human
ccagaacuuucuacuucccaa

SEQ ID NO: 597410 - RNA, 18 nt, Human
ccauaccacaacuaagca

SEQ ID NO: 597411 - RNA, 20 nt, Human
cccaagagccugcccaauuu

SEQ ID NO: 597412 - RNA, 27 nt, Human
cccagugcugcagccacaagguacccc

SEQ ID NO: 597413 - RNA, 20 nt, Human
ccccagugcugcagccacaa

SEQ ID NO: 597414 - RNA, 18 nt, Human
ccccuaaaccuggugacc

SEQ ID NO: 597415 - RNA, 22 nt, Human
ccccuaaaccuggugacccccc

SEQ ID NO: 597416 - RNA, 22 nt, Human
ccccuccuucugcacccguguc

SEQ ID NO: 597417 - RNA, 21 nt, Human
cccgcagcuccagaucagcca

SEQ ID NO: 597418 - RNA, 24 nt, Human
cccugucacccucggcggggucug

SEQ ID NO: 597419 - RNA, 20 nt, Human
ccggaaaggccugggucuua

SEQ ID NO: 597420 - RNA, 22 nt, Human
ccuccaggcaccccacaggccc

SEQ ID NO: 597421 - RNA, 20 nt, Human
ccucccuucucucuuuggcc

SEQ ID NO: 597422 - RNA, 23 nt, Human
ccucggauggaugauccuggucu

SEQ ID NO: 597423 - RNA, 22 nt, Human
ccugaggucaggaguucgagac

SEQ ID NO: 597424 - RNA, 22 nt, Human
ccuggccgacagagcaagacuc

SEQ ID NO: 597425 - RNA, 19 nt, Human
ccuguaaucccagcuacuc

SEQ ID NO: 597426 - RNA, 21 nt, Human
ccuguaaucccagcuacucgg

SEQ ID NO: 597427 - RNA, 24 nt, Human
ccuguccaacauggugaaacccug

SEQ ID NO: 597428 - RNA, 24 nt, Human
ccuugugaauuuccacuaaaaagc

SEQ ID NO: 597429 - RNA, 24 nt, Human
cgagaccagccuguccaacauggu

SEQ ID NO: 597430 - RNA, 21 nt, Human
cggaaucagaccacaccugcu

SEQ ID NO: 597431 - RNA, 21 nt, Human
cgucuuggacucagccccucc

SEQ ID NO: 597432 - RNA, 20 nt, Human
cuacaggaacccugcccccc

SEQ ID NO: 597433 - RNA, 18 nt, Human
cucaaaaaaaaaaaaaaa

SEQ ID NO: 597434 - RNA, 22 nt, Human
cucacaccuguaaucccagcac

SEQ ID NO: 597435 - RNA, 24 nt, Human
cucacaccuguaaucccagcacuu

SEQ ID NO: 597436 - RNA, 18 nt, Human
cucacugucgucauccuc

SEQ ID NO: 597437 - RNA, 22 nt, Human
cuccaggcaccccacaggcccu

SEQ ID NO: 597438 - RNA, 22 nt, Human
cuccccuaaaccuggugacccc

SEQ ID NO: 597439 - RNA, 22 nt, Human
cuccucggauggaugauccugg

SEQ ID NO: 597440 - RNA, 22 nt, Human
cucuacaggaacccugcccccc

SEQ ID NO: 597441 - RNA, 19 nt, Human
cucugucucaaaaaaaaaa

SEQ ID NO: 597442 - RNA, 20 nt, Human
cugagcucgucuuggacuca

SEQ ID NO: 597443 - RNA, 20 nt, Human
cugcuguuucucugugucca

SEQ ID NO: 597444 - RNA, 24 nt, Human
cuguccaacauggugaaacccugu

SEQ ID NO: 597445 - RNA, 19 nt, Human
cuucugguuuucugagcuc

SEQ ID NO: 597446 - RNA, 23 nt, Human
cuugagguaaagaaagauuuggu

SEQ ID NO: 597447 - RNA, 21 nt, Human
cuuguaguccuuuacauuccu

SEQ ID NO: 597448 - RNA, 23 nt, Human
gaaacccaaagcacaaaagccag

SEQ ID NO: 597449 - RNA, 27 nt, Human
gaaacccaaagcacaaaagccagccuc

SEQ ID NO: 597450 - RNA, 19 nt, Human
gaaacccugucucuacuaa

SEQ ID NO: 597451 - RNA, 23 nt, Human
gagaggcagggguuaacaccugg

SEQ ID NO: 597452 - RNA, 23 nt, Human
gaggugggaggauuaccugaggu

SEQ ID NO: 597453 - RNA, 18 nt, Human
gagguugcagugagccaa

SEQ ID NO: 597454 - RNA, 24 nt, Human
gauuaccugaggucaggaguucga

SEQ ID NO: 597455 - RNA, 24 nt, Human
gcacuccagccuggccgacagagc

SEQ ID NO: 597456 - RNA, 18 nt, Human
gcagcuccagaucagcca

SEQ ID NO: 597457 - RNA, 22 nt, Human
gcagcuucaccccggaaaggcc

SEQ ID NO: 597458 - RNA, 24 nt, Human
gcaggcaagcagcaucuucugcug

SEQ ID NO: 597459 - RNA, 20 nt, Human
gccaagaucaugccacugca

SEQ ID NO: 597460 - RNA, 19 nt, Human
gccacaaugcagauggggu

SEQ ID NO: 597461 - RNA, 21 nt, Human
gcggaagacauccauaccaca

SEQ ID NO: 597462 - RNA, 19 nt, Human
gcuacaaaaaaggaaaauc

SEQ ID NO: 597463 - RNA, 22 nt, Human
ggaaaggccugggucuuacuga

SEQ ID NO: 597464 - RNA, 21 nt, Human
ggaacccugcccccccugcuc

SEQ ID NO: 597465 - RNA, 24 nt, Human
ggagaggcagggguuaacaccugg

SEQ ID NO: 597466 - RNA, 23 nt, Human
ggauuaccugaggucaggaguuc

SEQ ID NO: 597467 - RNA, 21 nt, Human
ggcacaugccuguaaucccag

SEQ ID NO: 597468 - RNA, 21 nt, Human
gggcagcagccacaugcagag

SEQ ID NO: 597469 - RNA, 24 nt, Human
gggugugguggcucacaccuguaa

SEQ ID NO: 597470 - RNA, 21 nt, Human
ggucucugcccccagagcucc

SEQ ID NO: 597471 - RNA, 24 nt, Human
gguggcacaugccuguaaucccag

SEQ ID NO: 597472 - RNA, 24 nt, Human
gguggcucacaccuguaaucccag

SEQ ID NO: 597473 - RNA, 23 nt, Human
gguuggccgggugugguggcuca

SEQ ID NO: 597474 - RNA, 19 nt, Human
guaaagaaagauuugguug

SEQ ID NO: 597475 - RNA, 25 nt, Human
gucuaggugaaaaaaaaugaaugga

SEQ ID NO: 597476 - RNA, 18 nt, Human
gugaaaaaaaaugaaugg

SEQ ID NO: 597477 - RNA, 20 nt, Human
gugaggcagagguugcagug

SEQ ID NO: 597478 - RNA, 23 nt, Human
guggcacaugccuguaaucccag

SEQ ID NO: 597479 - RNA, 23 nt, Human
guggcucacaccuguaaucccag

SEQ ID NO: 597480 - RNA, 18 nt, Human
gugugguggcucacaccu

SEQ ID NO: 597481 - RNA, 20 nt, Human
guucacauaaucagcauccu

SEQ ID NO: 597482 - RNA, 19 nt, Human
guucgagaccagccugucc

SEQ ID NO: 597483 - RNA, 24 nt, Human
guuggccgggugugguggcucaca

SEQ ID NO: 597484 - RNA, 21 nt, Human
uaaaaagcaaccuuugugcca

SEQ ID NO: 597485 - RNA, 20 nt, Human
uaaacaagacacagagugcu

SEQ ID NO: 597486 - RNA, 21 nt, Human
uaaguguguacauuagaaacc

SEQ ID NO: 597487 - RNA, 20 nt, Human
uacauuagaaaccucaauuu

SEQ ID NO: 597488 - RNA, 23 nt, Human
uaccugaggucaggaguucgaga

SEQ ID NO: 597489 - RNA, 21 nt, Human
uagaugguuauguuaaauccc

SEQ ID NO: 597490 - RNA, 20 nt, Human
uagcaauguagcaaaggucu

SEQ ID NO: 597491 - RNA, 23 nt, Human
uagcaguacagaaaaccaaugac

SEQ ID NO: 597492 - RNA, 19 nt, Human
uauccaagaaugcuaacac

SEQ ID NO: 597493 - RNA, 21 nt, Human
uaugacugacuguuuucuuaa

SEQ ID NO: 597494 - RNA, 22 nt, Human
ucaaaaaaaaaaaaaaaaaaaa

SEQ ID NO: 597495 - RNA, 23 nt, Human
ucaaaaaaaaaaaaaaaaaaaaa

SEQ ID NO: 597496 - RNA, 19 nt, Human
ucaaaaccuucaccagcaa

SEQ ID NO: 597497 - RNA, 22 nt, Human
ucaaaaccuucaccagcaaaaa

SEQ ID NO: 597498 - RNA, 26 nt, Human
ucacagucuucccagugaucaaaauc

SEQ ID NO: 597499 - RNA, 22 nt, Human
ucagucaacaaagaaacccaaa

SEQ ID NO: 597500 - RNA, 26 nt, Human
ucaucuuuccuuaugucgggacagcc

SEQ ID NO: 597501 - RNA, 23 nt, Human
ucaugccacugcacuccagccug

SEQ ID NO: 597502 - RNA, 20 nt, Human
uccaggcaccccacaggccc

SEQ ID NO: 597503 - RNA, 23 nt, Human
ucccaauagcucaccuuucucgc

SEQ ID NO: 597504 - RNA, 21 nt, Human
uccuacaaaauguuagcuuca

SEQ ID NO: 597505 - RNA, 23 nt, Human
ucgggaggcugaggcaggagaau

SEQ ID NO: 597506 - RNA, 20 nt, Human
ucuaggugaaaaaaaaugaa

SEQ ID NO: 597507 - RNA, 24 nt, Human
ucuauccaaauucuuuuccauucc

SEQ ID NO: 597508 - RNA, 21 nt, Human
ucucuacuaaaaauacaaaaa

SEQ ID NO: 597509 - RNA, 19 nt, Human
ucugaaaaaagaaacagau

SEQ ID NO: 597510 - RNA, 22 nt, Human
ucugcagguccaagggauuguu

SEQ ID NO: 597511 - RNA, 23 nt, Human
ucugucucaaaaaaaaaaaaaaa

SEQ ID NO: 597512 - RNA, 19 nt, Human
ucuucacaagcugguaucu

SEQ ID NO: 597513 - RNA, 24 nt, Human
ucuucacagucuucccagugauca

SEQ ID NO: 597514 - RNA, 18 nt, Human
ucuugagcaggacugguc

SEQ ID NO: 597515 - RNA, 22 nt, Human
ugaaaacgacucuaucccuuaa

SEQ ID NO: 597516 - RNA, 21 nt, Human
ugacuacauacacuccucccc

SEQ ID NO: 597517 - RNA, 18 nt, Human
ugagcaggacuggucccu

SEQ ID NO: 597518 - RNA, 24 nt, Human
ugagccugugaggcagagguugca

SEQ ID NO: 597519 - RNA, 23 nt, Human
ugaggcagagguugcagugagcc

SEQ ID NO: 597520 - RNA, 24 nt, Human
ugaggcaggagaauugcuugagcc

SEQ ID NO: 597521 - RNA, 25 nt, Human
ugaggcaggagaauugcuugagccu

SEQ ID NO: 597522 - RNA, 21 nt, Human
ugagguaaagaaagauuuggu

SEQ ID NO: 597523 - RNA, 22 nt, Human
ugaggugggaggauuaccugag

SEQ ID NO: 597524 - RNA, 23 nt, Human
ugaggugggaggauuaccugagg

SEQ ID NO: 597525 - RNA, 24 nt, Human
ugaggugggaggauuaccugaggu

SEQ ID NO: 597526 - RNA, 26 nt, Human
ugaggugggaggauuaccugagguca

SEQ ID NO: 597527 - RNA, 28 nt, Human
ugaguaggugacaccaugcuguaaugac

SEQ ID NO: 597528 - RNA, 26 nt, Human
ugcaggcaagcagcaucuucugcugg

SEQ ID NO: 597529 - RNA, 24 nt, Human
ugccuguaaucccagcuacucggg

SEQ ID NO: 597530 - RNA, 20 nt, Human
ugcggaagacauccauacca

SEQ ID NO: 597531 - RNA, 18 nt, Human
ugcuugagccugugaggc

SEQ ID NO: 597532 - RNA, 19 nt, Human
uggacguaccuuuucagag

SEQ ID NO: 597533 - RNA, 24 nt, Human
uggaugauccuggucuugagcagg

SEQ ID NO: 597534 - RNA, 21 nt, Human
uggcaauauccauuuuuguuc

SEQ ID NO: 597535 - RNA, 21 nt, Human
uggcacaugccuguaauccca

SEQ ID NO: 597536 - RNA, 19 nt, Human
uggccagagugauuacagg

SEQ ID NO: 597537 - RNA, 19 nt, Human
uggccgggugugguggcuc

SEQ ID NO: 597538 - RNA, 21 nt, Human
uggcucacaccuguaauccca

SEQ ID NO: 597539 - RNA, 22 nt, Human
uggcucacaccuguaaucccag

SEQ ID NO: 597540 - RNA, 24 nt, Human
uggcucacaccuguaaucccagca

SEQ ID NO: 597541 - RNA, 24 nt, Human
uggcucucuacaggaacccugccc

SEQ ID NO: 597542 - RNA, 19 nt, Human
ugggaggcugaggugggag

SEQ ID NO: 597543 - RNA, 22 nt, Human
ugggaggcugaggugggaggau

SEQ ID NO: 597544 - RNA, 25 nt, Human
ugggguggcgaaugucugcagggcu

SEQ ID NO: 597545 - RNA, 20 nt, Human
uggguggaagcuagaagaag

SEQ ID NO: 597546 - RNA, 21 nt, Human
uggucucugcccccagagcuc

SEQ ID NO: 597547 - RNA, 24 nt, Human
ugguggcacaugccuguaauccca

SEQ ID NO: 597548 - RNA, 24 nt, Human
ugguggcucacaccuguaauccca

SEQ ID NO: 597549 - RNA, 26 nt, Human
ugucugaaaaaagaaacagaucuaag

SEQ ID NO: 597550 - RNA, 24 nt, Human
ugugaggcagagguugcagugagc

SEQ ID NO: 597551 - RNA, 23 nt, Human
uguguccacccuccuuugauggu

SEQ ID NO: 597552 - RNA, 18 nt, Human
uguugccccgcagcucca

SEQ ID NO: 597553 - RNA, 20 nt, Human
uguuuagaaccagcagcuuc

SEQ ID NO: 597554 - RNA, 21 nt, Human
uuagaacauuugaaugucuga

SEQ ID NO: 597555 - RNA, 19 nt, Human
uucaacaucuuccagccgc

SEQ ID NO: 597556 - RNA, 25 nt, Human
uucaucacccagaugcaugucugcu

SEQ ID NO: 597557 - RNA, 20 nt, Human
uuccucugucugaguaggug

SEQ ID NO: 597558 - RNA, 23 nt, Human
uugaaugucugaaaaaagaaaca

SEQ ID NO: 597559 - RNA, 18 nt, Human
uugaucuuauuaacuggg

SEQ ID NO: 597560 - RNA, 20 nt, Human
uugcagugagccaagaucau

SEQ ID NO: 597561 - RNA, 18 nt, Human
uugcuugagccugugagg

SEQ ID NO: 597562 - RNA, 22 nt, Human
uuggccgggugugguggcucac

SEQ ID NO: 597563 - RNA, 20 nt, Human
uugggaggcugaggugggag

SEQ ID NO: 597564 - RNA, 23 nt, Human
uuuacauuccuuauucuuaucuu

SEQ ID NO: 597565 - RNA, 22 nt, Human
uuugaaugucugaaaaaagaaa

SEQ ID NO: 597566 - RNA, 23 nt, Human
uuugaaugucugaaaaaagaaac

SEQ ID NO: 597567 - RNA, 22 nt, Human
uuugguuggccggguguggugg

SEQ ID NO: 597568 - RNA, 20 nt, Human
uuuucagaggcggcugugca

SEQ ID NO: 597569 - RNA, 19 nt, Human
aaaaguccuuacugaauau

SEQ ID NO: 597570 - RNA, 20 nt, Human
aaacaggguuacacaggagu

SEQ ID NO: 597571 - RNA, 22 nt, Human
aaaccaguucaacucuaauaua

SEQ ID NO: 597572 - RNA, 23 nt, Human
aaccaacugaugaucccauaaaa

SEQ ID NO: 597573 - RNA, 22 nt, Human
aagguucuuucaagggaacuuu

SEQ ID NO: 597574 - RNA, 23 nt, Human
aaguuucuguggccaaacaucug

SEQ ID NO: 597575 - RNA, 19 nt, Human
aaucauuuuaagaaggcaa

SEQ ID NO: 597576 - RNA, 24 nt, Human
acagcgagccgcggggcgcgggcc

SEQ ID NO: 597577 - RNA, 22 nt, Human
accccaacccacugugaacugg

SEQ ID NO: 597578 - RNA, 19 nt, Human
acugaaugcaccccaaccc

SEQ ID NO: 597579 - RNA, 18 nt, Human
acuuggaaccaacugaug

SEQ ID NO: 597580 - RNA, 24 nt, Human
agaaaauaaaaacuuucuaaaggg

SEQ ID NO: 597581 - RNA, 19 nt, Human
agaaggcaaaguuccaaac

SEQ ID NO: 597582 - RNA, 19 nt, Human
agcugaucuaacauacuug

SEQ ID NO: 597583 - RNA, 24 nt, Human
aggcuguuaacaaauguuaagugg

SEQ ID NO: 597584 - RNA, 20 nt, Human
aguucagcucucucaugucu

SEQ ID NO: 597585 - RNA, 25 nt, Human
aucauauaaacaucagguguuacca

SEQ ID NO: 597586 - RNA, 24 nt, Human
augaucccauaaaaaaugccaaaa

SEQ ID NO: 597587 - RNA, 21 nt, Human
auugcuuuuuaaguuuccuau

SEQ ID NO: 597588 - RNA, 23 nt, Human
caaaagcuccaugaaaucaguaa

SEQ ID NO: 597589 - RNA, 20 nt, Human
caacucuaauauaaacauua

SEQ ID NO: 597590 - RNA, 21 nt, Human
caacugaugaucccauaaaaa

SEQ ID NO: 597591 - RNA, 24 nt, Human
caagggaacuuuucugcaagacca

SEQ ID NO: 597592 - RNA, 25 nt, Human
caauagaaucaaagcaacucaauga

SEQ ID NO: 597593 - RNA, 22 nt, Human
cacagcuuuguagcacagcauu

SEQ ID NO: 597594 - RNA, 22 nt, Human
cacucuauuccgcugccugggc

SEQ ID NO: 597595 - RNA, 22 nt, Human
cacucuauuccgcugccugggc

SEQ ID NO: 597596 - RNA, 20 nt, Human
cagcuuaaaaaguaaugucc

SEQ ID NO: 597597 - RNA, 25 nt, Human
caggcuguuaacaaauguuaagugg

SEQ ID NO: 597598 - RNA, 21 nt, Human
cauuucaacagucuggccuau

SEQ ID NO: 597599 - RNA, 26 nt, Human
ccauaaccaugcuacuacagucuguu

SEQ ID NO: 597600 - RNA, 21 nt, Human
cccaaaagccacauucauucc

SEQ ID NO: 597601 - RNA, 19 nt, Human
cccacgcacagcgagccgc

SEQ ID NO: 597602 - RNA, 18 nt, Human
ccccaaagauggacuacu

SEQ ID NO: 597603 - RNA, 22 nt, Human
cccccaaaagccacauucauuc

SEQ ID NO: 597604 - RNA, 20 nt, Human
ccucccacgcacagcgagcu

SEQ ID NO: 597605 - RNA, 21 nt, Human
cgauccgcgggccgagcgcgg

SEQ ID NO: 597606 - RNA, 21 nt, Human
cgcccagcuccucuucagcgg

SEQ ID NO: 597607 - RNA, 19 nt, Human
cucgcgcccucccacgcac

SEQ ID NO: 597608 - RNA, 19 nt, Human
cucuauuaaaacuaauugg

SEQ ID NO: 597609 - RNA, 24 nt, Human
cucuugcaccaccuccuccacuuc

SEQ ID NO: 597610 - RNA, 18 nt, Human
cugaugaucccauaaaaa

SEQ ID NO: 597611 - RNA, 23 nt, Human
cuggaaaaacagagaacuagaaa

SEQ ID NO: 597612 - RNA, 27 nt, Human
cuuuugcccccaaaagccacauucauu

SEQ ID NO: 597613 - RNA, 22 nt, Human
gaaauccgaagcacgauuccuc

SEQ ID NO: 597614 - RNA, 21 nt, Human
gacccuguuuccuugguuaac

SEQ ID NO: 597615 - RNA, 24 nt, Human
gagcgcggccgggcggccggcgcc

SEQ ID NO: 597616 - RNA, 21 nt, Human
gauaccacugacagcuuaaaa

SEQ ID NO: 597617 - RNA, 19 nt, Human
ggaaagguucuuucaaggg

SEQ ID NO: 597618 - RNA, 19 nt, Human
gggcgcgggccucccgcgc

SEQ ID NO: 597619 - RNA, 23 nt, Human
guugaacaacuaguuauuuuuac

SEQ ID NO: 597620 - RNA, 20 nt, Human
uaaaaguccuuacugaauau

SEQ ID NO: 597621 - RNA, 24 nt, Human
uaaaugaauaucugaauuuuacaa

SEQ ID NO: 597622 - RNA, 22 nt, Human
uaacaaauguuaagugggaaaa

SEQ ID NO: 597623 - RNA, 19 nt, Human
uaagaaggcaaaguuccaa

SEQ ID NO: 597624 - RNA, 23 nt, Human
uagaaucaaagcaacucaaugac

SEQ ID NO: 597625 - RNA, 21 nt, Human
uaggaaaaguugaacaacuag

SEQ ID NO: 597626 - RNA, 21 nt, Human
uaggagaaaauaaagacaaug

SEQ ID NO: 597627 - RNA, 21 nt, Human
uaguuauuuuuacuucaguua

SEQ ID NO: 597628 - RNA, 21 nt, Human
ucccucuugcaccaccuccuc

SEQ ID NO: 597629 - RNA, 21 nt, Human
uccgcgggccgagcgcggccg

SEQ ID NO: 597630 - RNA, 19 nt, Human
uccguguauauauagguga

SEQ ID NO: 597631 - RNA, 20 nt, Human
uccuccacuucaguucagcu

SEQ ID NO: 597632 - RNA, 18 nt, Human
ucgccaggggccggggcc

SEQ ID NO: 597633 - RNA, 18 nt, Human
ugaaaucaguaagguaaa

SEQ ID NO: 597634 - RNA, 24 nt, Human
ugaagccuucauuuuauuucuaaa

SEQ ID NO: 597635 - RNA, 26 nt, Human
ugcagccaagcacugcacucuauucc

SEQ ID NO: 597636 - RNA, 24 nt, Human
ugccaaaaauccaauagaaucaaa

SEQ ID NO: 597637 - RNA, 21 nt, Human
uggaaaaacagagaacuagaa

SEQ ID NO: 597638 - RNA, 23 nt, Human
uggaaaaacagagaacuagaaaa

SEQ ID NO: 597639 - RNA, 23 nt, Human
uggcacaaaaaacacauggugac

SEQ ID NO: 597640 - RNA, 22 nt, Human
ugucuuccaccaagaggacaug

SEQ ID NO: 597641 - RNA, 20 nt, Human
uuacucaugaaaaacagccc

SEQ ID NO: 597642 - RNA, 18 nt, Human
uucagagauagauugucc

SEQ ID NO: 597643 - RNA, 23 nt, Human
uuccaaacaggguuacacaggag

SEQ ID NO: 597644 - RNA, 22 nt, Human
uugcaccaccuccuccacuuca

SEQ ID NO: 597645 - RNA, 22 nt, Human
aaccaauugccuuuaaaaccuu

SEQ ID NO: 597646 - RNA, 22 nt, Human
aacuuucuucacagcugccuca

SEQ ID NO: 597647 - RNA, 21 nt, Human
aaucauggucaaccagauguu

SEQ ID NO: 597648 - RNA, 20 nt, Human
agagucaucagugcccauga

SEQ ID NO: 597649 - RNA, 18 nt, Human
agcugccucauaaaguuu

SEQ ID NO: 597650 - RNA, 21 nt, Human
caaccagauguugcuuuugcc

SEQ ID NO: 597651 - RNA, 21 nt, Human
cugaauugccauuuuauuauu

SEQ ID NO: 597652 - RNA, 23 nt, Human
cugcagugaguugucaucugugg

SEQ ID NO: 597653 - RNA, 23 nt, Human
gauggugucauauucuguugcag

SEQ ID NO: 597654 - RNA, 20 nt, Human
uaacuaacuccggucggugc

SEQ ID NO: 597655 - RNA, 21 nt, Human
uaacuccggucggugcaucuc

SEQ ID NO: 597656 - RNA, 22 nt, Human
ucaaccagauguugcuuuugcc

SEQ ID NO: 597657 - RNA, 20 nt, Human
ucagugccugcagugaguug

SEQ ID NO: 597658 - RNA, 18 nt, Human
uccucacuauugggaacu

SEQ ID NO: 597659 - RNA, 24 nt, Human
ucguuaggguccugcacauggccc

SEQ ID NO: 597660 - RNA, 19 nt, Human
ucucuguaaaccaauugcc

SEQ ID NO: 597661 - RNA, 20 nt, Human
ugugcaagaguaaaggcuuc

SEQ ID NO: 597662 - RNA, 20 nt, Human
uuaaaaccuuagcacaauga

SEQ ID NO: 597663 - RNA, 24 nt, Human
aaaaagaagucauagucaucugaa

SEQ ID NO: 597664 - RNA, 21 nt, Human
aaaaaugaaguccucaccauc

SEQ ID NO: 597665 - RNA, 23 nt, Human
aaacacaaauauccaaugugaac

SEQ ID NO: 597666 - RNA, 25 nt, Human
aaacaggaugcaaaucagaaaacaa

SEQ ID NO: 597667 - RNA, 19 nt, Human
aacaguauucuaaaaaacc

SEQ ID NO: 597668 - RNA, 22 nt, Human
aauacuggagaaugugccaugc

SEQ ID NO: 597669 - RNA, 18 nt, Human
acaaaaccaaggaagaaa

SEQ ID NO: 597670 - RNA, 20 nt, Human
acugcaagguacagcaaaac

SEQ ID NO: 597671 - RNA, 22 nt, Human
acuuuuuuuuuuuuuuuuuuuu

SEQ ID NO: 597672 - RNA, 18 nt, Human
agaugcaacacugcugac

SEQ ID NO: 597673 - RNA, 22 nt, Human
agaugcaacacugcugacacag

SEQ ID NO: 597674 - RNA, 21 nt, Human
agccaagagaacaaaaccaag

SEQ ID NO: 597675 - RNA, 18 nt, Human
agcugacuuaacugcaau

SEQ ID NO: 597676 - RNA, 19 nt, Human
aggaacuuuuuuuuuuuuu

SEQ ID NO: 597677 - RNA, 22 nt, Human
aggaacuuuuuuuuuuuuuuuu

SEQ ID NO: 597678 - RNA, 22 nt, Human
aggaagaaaagauaauuuggga

SEQ ID NO: 597679 - RNA, 21 nt, Human
agucaucugaagucaacacaa

SEQ ID NO: 597680 - RNA, 24 nt, Human
auccacuuuucuacaggaaacaga

SEQ ID NO: 597681 - RNA, 24 nt, Human
aucucauuucucauccuuaagcaa

SEQ ID NO: 597682 - RNA, 23 nt, Human
caaagcugcaaaacacuaaacuu

SEQ ID NO: 597683 - RNA, 21 nt, Human
caaaucagaaaacaauuucac

SEQ ID NO: 597684 - RNA, 24 nt, Human
caaaucagaaaacaauuucacuua

SEQ ID NO: 597685 - RNA, 18 nt, Human
caagagaacaaaaccaag

SEQ ID NO: 597686 - RNA, 18 nt, Human
caagaucagaaaacucac

SEQ ID NO: 597687 - RNA, 24 nt, Human
caagccaagagaacaaaaccaagg

SEQ ID NO: 597688 - RNA, 20 nt, Human
cacuuaagguuugcuuggca

SEQ ID NO: 597689 - RNA, 20 nt, Human
cauaaaguuuucuuggcuca

SEQ ID NO: 597690 - RNA, 25 nt, Human
ccaggaacuuuuuuuuuuuuuuuuu

SEQ ID NO: 597691 - RNA, 25 nt, Human
ccaugagacaagguagcaucuguaa

SEQ ID NO: 597692 - RNA, 23 nt, Human
cccacugggcauucccauaauaa

SEQ ID NO: 597693 - RNA, 21 nt, Human
cccaggaacuuuuuuuuuuuu

SEQ ID NO: 597694 - RNA, 21 nt, Human
ccuacaagugaaaaagguaga

SEQ ID NO: 597695 - RNA, 21 nt, Human
ccugucuuuccuagccuuaac

SEQ ID NO: 597696 - RNA, 23 nt, Human
cuagaaccaauucuugauacuau

SEQ ID NO: 597697 - RNA, 24 nt, Human
cuagccuuaacaaacaaaauucca

SEQ ID NO: 597698 - RNA, 24 nt, Human
cucaaggauuuuucccguaguugc

SEQ ID NO: 597699 - RNA, 19 nt, Human
gaaaaagguagaacucgga

SEQ ID NO: 597700 - RNA, 18 nt, Human
gaacuacugcaggcaagg

SEQ ID NO: 597701 - RNA, 23 nt, Human
gaacucaucaaugacccaccccc

SEQ ID NO: 597702 - RNA, 18 nt, Human
gaacucggaacacugcaa

SEQ ID NO: 597703 - RNA, 18 nt, Human
gaaguauaucucccacug

SEQ ID NO: 597704 - RNA, 19 nt, Human
ggaacuuuuuuuuuuuuuu

SEQ ID NO: 597705 - RNA, 19 nt, Human
ggaacuuuuuuuuuuuuuu

SEQ ID NO: 597706 - RNA, 24 nt, Human
guccuuuucuguucccagcauuuu

SEQ ID NO: 597707 - RNA, 23 nt, Human
uaaagaaugauuauuaaaaguca

SEQ ID NO: 597708 - RNA, 26 nt, Human
uaacaaacaaaauuccauaccauccu

SEQ ID NO: 597709 - RNA, 23 nt, Human
uaacugcaaugacuucuugagga

SEQ ID NO: 597710 - RNA, 21 nt, Human
uaagaacucaucaaugaccca

SEQ ID NO: 597711 - RNA, 19 nt, Human
uaagaacuucuucugggac

SEQ ID NO: 597712 - RNA, 21 nt, Human
uacagcaagaguuuaaaaaag

SEQ ID NO: 597713 - RNA, 27 nt, Human
uagaaacacaaauauccaaugugaaca

SEQ ID NO: 597714 - RNA, 23 nt, Human
uagaauggugagaugagaacauc

SEQ ID NO: 597715 - RNA, 22 nt, Human
uagccuuaacaaacaaaauucc

SEQ ID NO: 597716 - RNA, 21 nt, Human
uauccaaugugaacaucaagc

SEQ ID NO: 597717 - RNA, 23 nt, Human
ucaaaauauauucuuccucucuc

SEQ ID NO: 597718 - RNA, 26 nt, Human
ucaagccaagagaacaaaaccaagga

SEQ ID NO: 597719 - RNA, 19 nt, Human
ucagaugcaacacugcuga

SEQ ID NO: 597720 - RNA, 20 nt, Human
ucagaugcaacacugcugac

SEQ ID NO: 597721 - RNA, 23 nt, Human
ucauaggcuauaggugaccugga

SEQ ID NO: 597722 - RNA, 21 nt, Human
uccacuuuucuacaggaaaca

SEQ ID NO: 597723 - RNA, 19 nt, Human
ucccaagcuaguaagaacu

SEQ ID NO: 597724 - RNA, 24 nt, Human
ucccacugggcauucccauaauaa

SEQ ID NO: 597725 - RNA, 19 nt, Human
ucccugucuuuccuagccu

SEQ ID NO: 597726 - RNA, 21 nt, Human
uccuuuucuguucccagcauu

SEQ ID NO: 597727 - RNA, 21 nt, Human
ucggaacacugcaagguacag

SEQ ID NO: 597728 - RNA, 28 nt, Human
ucucccugucuuuccuagccuuaacaaa

SEQ ID NO: 597729 - RNA, 19 nt, Human
ugaaaaagguagaacucgg

SEQ ID NO: 597730 - RNA, 19 nt, Human
ugacccaccccaucaauga

SEQ ID NO: 597731 - RNA, 24 nt, Human
ugacuucuugaggagugucccucc

SEQ ID NO: 597732 - RNA, 22 nt, Human
ugccgggccacugcugagccuc

SEQ ID NO: 597733 - RNA, 22 nt, Human
ugccuaaacaagaucagaaaac

SEQ ID NO: 597734 - RNA, 18 nt, Human
ugccugccgggccacugc

SEQ ID NO: 597735 - RNA, 24 nt, Human
uggaagcuauagagucugaccagu

SEQ ID NO: 597736 - RNA, 21 nt, Human
uggcucagaugcaacacugcu

SEQ ID NO: 597737 - RNA, 19 nt, Human
ugucucucccugucuuucc

SEQ ID NO: 597738 - RNA, 18 nt, Human
ugugaugacacauuuugg

SEQ ID NO: 597739 - RNA, 18 nt, Human
uguucugagcugacuuaa

SEQ ID NO: 597740 - RNA, 24 nt, Human
uuagaucuuuccuaacaaagaaga

SEQ ID NO: 597741 - RNA, 20 nt, Human
uucccauaauaaagcauccu

SEQ ID NO: 597742 - RNA, 24 nt, Human
uuccuagccuuaacaaacaaaauu

SEQ ID NO: 597743 - RNA, 21 nt, Human
uugucucucccugucuuuccu

SEQ ID NO: 597744 - RNA, 22 nt, Human
uuuaagaacucaucaaugaccc

SEQ ID NO: 597745 - RNA, 19 nt, Human
uuuaguacuuuccgggaaa

SEQ ID NO: 597746 - RNA, 20 nt, Human
aaaaagaagaaggaaaaugg

SEQ ID NO: 597747 - RNA, 19 nt, Human
aaaaggaaggggaguggag

SEQ ID NO: 597748 - RNA, 23 nt, Human
aacaagcaaacacuagccaggua

SEQ ID NO: 597749 - RNA, 26 nt, Human
aacuugcaagauuucaccucuccccu

SEQ ID NO: 597750 - RNA, 21 nt, Human
aagaauacgauagauguccuc

SEQ ID NO: 597751 - RNA, 20 nt, Human
aagagacaggcagcugauga

SEQ ID NO: 597752 - RNA, 22 nt, Human
aagaucacuccagaacaagcaa

SEQ ID NO: 597753 - RNA, 24 nt, Human
aaggguucacugauuggcuucuca

SEQ ID NO: 597754 - RNA, 18 nt, Human
aaucaccugaggucagga

SEQ ID NO: 597755 - RNA, 24 nt, Human
aaucaccugaggucaggaguucga

SEQ ID NO: 597756 - RNA, 20 nt, Human
acaagcagaggaccuagaac

SEQ ID NO: 597757 - RNA, 23 nt, Human
acaggacucaacagccacgcuca

SEQ ID NO: 597758 - RNA, 21 nt, Human
accccuuuuuuccuuacccaa

SEQ ID NO: 597759 - RNA, 24 nt, Human
acccuguauaccuuucccagaaua

SEQ ID NO: 597760 - RNA, 24 nt, Human
accugaggucaggaguucgagacc

SEQ ID NO: 597761 - RNA, 22 nt, Human
acuccagaacaagcaaacacua

SEQ ID NO: 597762 - RNA, 20 nt, Human
acuguguggugggagagggu

SEQ ID NO: 597763 - RNA, 27 nt, Human
agaagaaggaaaauggacuuuaaagag

SEQ ID NO: 597764 - RNA, 22 nt, Human
agaaguguuugguucugcucag

SEQ ID NO: 597765 - RNA, 18 nt, Human
agacaggacucaacagcc

SEQ ID NO: 597766 - RNA, 20 nt, Human
agacaggacucaacagccac

SEQ ID NO: 597767 - RNA, 21 nt, Human
agaguugcucaggcagacagc

SEQ ID NO: 597768 - RNA, 22 nt, Human
agauguccucaaaugggggcuu

SEQ ID NO: 597769 - RNA, 20 nt, Human
agcacuuugggagggugagg

SEQ ID NO: 597770 - RNA, 21 nt, Human
agcauggacaauagccaagaa

SEQ ID NO: 597771 - RNA, 23 nt, Human
aggaguucgagaccagccaggac

SEQ ID NO: 597772 - RNA, 22 nt, Human
aggccggcgaaucaccugaggu

SEQ ID NO: 597773 - RNA, 26 nt, Human
aggccggcgaaucaccugaggucagg

SEQ ID NO: 597774 - RNA, 19 nt, Human
aggcgggugggguauagga

SEQ ID NO: 597775 - RNA, 19 nt, Human
aggcuaaaauggaagggua

SEQ ID NO: 597776 - RNA, 21 nt, Human
agggagcagagucaguuggaa

SEQ ID NO: 597777 - RNA, 21 nt, Human
agggguuuccugugugcucuu

SEQ ID NO: 597778 - RNA, 21 nt, Human
aucaccugaggucaggaguuc

SEQ ID NO: 597779 - RNA, 24 nt, Human
aucaccugaggucaggaguucgag

SEQ ID NO: 597780 - RNA, 24 nt, Human
aucacuccagaacaagcaaacacu

SEQ ID NO: 597781 - RNA, 19 nt, Human
augccuguaaucccagcac

SEQ ID NO: 597782 - RNA, 22 nt, Human
auggccagcaaaccuggccugg

SEQ ID NO: 597783 - RNA, 26 nt, Human
auuuucugucucucccaccccuuuuu

SEQ ID NO: 597784 - RNA, 25 nt, Human
caaaucccagguggagagccaaggg

SEQ ID NO: 597785 - RNA, 23 nt, Human
cacaagcagaggaccuagaacaa

SEQ ID NO: 597786 - RNA, 20 nt, Human
caccaagaaaaggaagggga

SEQ ID NO: 597787 - RNA, 23 nt, Human
caccaagaaaaggaaggggagug

SEQ ID NO: 597788 - RNA, 23 nt, Human
caccccuuuuuuccuuacccaaa

SEQ ID NO: 597789 - RNA, 23 nt, Human
caccucuacuguaccccaaucau

SEQ ID NO: 597790 - RNA, 23 nt, Human
caccugaggucaggaguucgaga

SEQ ID NO: 597791 - RNA, 31 nt, Human
cacuccagaacaagcaaacacuagccagggg

SEQ ID NO: 597792 - RNA, 18 nt, Human
cagaacaagcaaacacua

SEQ ID NO: 597793 - RNA, 22 nt, Human
cagaacaagcaaacacuagcca

SEQ ID NO: 597794 - RNA, 28 nt, Human
cagaagaucacuccagaacaagcaaaca

SEQ ID NO: 597795 - RNA, 25 nt, Human
cagauccaagguagagccaaaucuu

SEQ ID NO: 597796 - RNA, 20 nt, Human
cagcacuuugggagggugag

SEQ ID NO: 597797 - RNA, 21 nt, Human
cagcacuuugggagggugagg

SEQ ID NO: 597798 - RNA, 21 nt, Human
cagcagaugggcaaauuuucu

SEQ ID NO: 597799 - RNA, 21 nt, Human
cagccccucauucccgccuua

SEQ ID NO: 597800 - RNA, 21 nt, Human
caggcagacagcucuucaagg

SEQ ID NO: 597801 - RNA, 20 nt, Human
caucuaagagacaggcagcu

SEQ ID NO: 597802 - RNA, 20 nt, Human
caugccuguaaucccagcac

SEQ ID NO: 597803 - RNA, 24 nt, Human
caugccuguaaucccagcacuuug

SEQ ID NO: 597804 - RNA, 24 nt, Human
cauuauagccgcauaauucaugcc

SEQ ID NO: 597805 - RNA, 23 nt, Human
cauucauuaucaggaaaggaggu

SEQ ID NO: 597806 - RNA, 27 nt, Human
cauuguaaagcuguaaaauguacagca

SEQ ID NO: 597807 - RNA, 24 nt, Human
ccaaaaaaaaaaaaaaaaaaagaa

SEQ ID NO: 597808 - RNA, 22 nt, Human
ccaaacccuauuggugaccaga

SEQ ID NO: 597809 - RNA, 22 nt, Human
ccaaagagagaugccagcccca

SEQ ID NO: 597810 - RNA, 18 nt, Human
ccacuacaucgccuccug

SEQ ID NO: 597811 - RNA, 18 nt, Human
ccagcaaaccuggccugg

SEQ ID NO: 597812 - RNA, 22 nt, Human
ccagguggagagccaaggggga

SEQ ID NO: 597813 - RNA, 22 nt, Human
ccccaaucauauuacggaaagu

SEQ ID NO: 597814 - RNA, 24 nt, Human
ccccuuuuuuccuuacccaaauca

SEQ ID NO: 597815 - RNA, 25 nt, Human
cccucaauccuccucaggagccugu

SEQ ID NO: 597816 - RNA, 24 nt, Human
ccggcgaaucaccugaggucagga

SEQ ID NO: 597817 - RNA, 20 nt, Human
ccgggacagaaaggggaaga

SEQ ID NO: 597818 - RNA, 26 nt, Human
ccuacaggcccuucuguuacccugaa

SEQ ID NO: 597819 - RNA, 21 nt, Human
ccucaaaugggggcuuggcuc

SEQ ID NO: 597820 - RNA, 23 nt, Human
ccucuacuguaccccaaucauau

SEQ ID NO: 597821 - RNA, 22 nt, Human
ccugaggucaggaguucgagac

SEQ ID NO: 597822 - RNA, 19 nt, Human
ccuucuguuacccugaacc

SEQ ID NO: 597823 - RNA, 24 nt, Human
cgaaucaccugaggucaggaguuc

SEQ ID NO: 597824 - RNA, 27 nt, Human
cgaaucaccugaggucaggaguucgag

SEQ ID NO: 597825 - RNA, 25 nt, Human
cucacaagcagaggaccuagaacaa

SEQ ID NO: 597826 - RNA, 24 nt, Human
cucaggccaaagagagaugccagc

SEQ ID NO: 597827 - RNA, 23 nt, Human
cucaugccuguaaucccagcacu

SEQ ID NO: 597828 - RNA, 24 nt, Human
cucaugccuguaaucccagcacuu

SEQ ID NO: 597829 - RNA, 18 nt, Human
cuccagaacaagcaaaca

SEQ ID NO: 597830 - RNA, 22 nt, Human
cugccugccuauuaguuauuua

SEQ ID NO: 597831 - RNA, 23 nt, Human
cugcugggcgacgacgacgaccu

SEQ ID NO: 597832 - RNA, 21 nt, Human
cuucaagggcacuaauccucu

SEQ ID NO: 597833 - RNA, 26 nt, Human
cuugcuacaacuugcaagauuucacc

SEQ ID NO: 597834 - RNA, 20 nt, Human
cuuugggagggugaggccgg

SEQ ID NO: 597835 - RNA, 22 nt, Human
gaacaagcaaacacuagccagg

SEQ ID NO: 597836 - RNA, 23 nt, Human
gaaucaccugaggucaggaguuc

SEQ ID NO: 597837 - RNA, 25 nt, Human
gaaucaccugaggucaggaguucga

SEQ ID NO: 597838 - RNA, 25 nt, Human
gagaacucuucccugaaauucugug

SEQ ID NO: 597839 - RNA, 23 nt, Human
gaggaccuagaacaagcuuugcc

SEQ ID NO: 597840 - RNA, 18 nt, Human
gaggagcagcagaugggc

SEQ ID NO: 597841 - RNA, 19 nt, Human
gaggagcagcagaugggca

SEQ ID NO: 597842 - RNA, 22 nt, Human
gcaaaucccagguggagagcca

SEQ ID NO: 597843 - RNA, 19 nt, Human
gcagagggcagggcaaagu

SEQ ID NO: 597844 - RNA, 20 nt, Human
gccaagggggaggagcagcg

SEQ ID NO: 597845 - RNA, 24 nt, Human
gccccauuaaucaccucuacugua

SEQ ID NO: 597846 - RNA, 19 nt, Human
gcuagggaaacagcuugca

SEQ ID NO: 597847 - RNA, 24 nt, Human
ggaaaggacacagcuuugacccuc

SEQ ID NO: 597848 - RNA, 22 nt, Human
ggaaggggaguggagcccugga

SEQ ID NO: 597849 - RNA, 23 nt, Human
ggacagaaaggggaagaggcggg

SEQ ID NO: 597850 - RNA, 18 nt, Human
ggagcagcagaugggcaa

SEQ ID NO: 597851 - RNA, 19 nt, Human
ggagcugcuagggaaacag

SEQ ID NO: 597852 - RNA, 22 nt, Human
ggcagggagcagagucaguugg

SEQ ID NO: 597853 - RNA, 20 nt, Human
ggcagggcaaaguggcaggu

SEQ ID NO: 597854 - RNA, 21 nt, Human
ggccuacuuagggagccaggu

SEQ ID NO: 597855 - RNA, 19 nt, Human
ggcuuugccaaaggguuca

SEQ ID NO: 597856 - RNA, 20 nt, Human
gggaacaccauucauuaucc

SEQ ID NO: 597857 - RNA, 18 nt, Human
gggaggagcagcagaugg

SEQ ID NO: 597858 - RNA, 20 nt, Human
gggcuuugccaaaggguuca

SEQ ID NO: 597859 - RNA, 19 nt, Human
ggggaagaggcgggugggg

SEQ ID NO: 597860 - RNA, 21 nt, Human
ggggccagucucauuugggag

SEQ ID NO: 597861 - RNA, 19 nt, Human
gguaagggaaaggacacag

SEQ ID NO: 597862 - RNA, 24 nt, Human
gguggcucaugccuguaaucccag

SEQ ID NO: 597863 - RNA, 21 nt, Human
guaaagcuguaaaauguacag

SEQ ID NO: 597864 - RNA, 19 nt, Human
gucuggcaugguggcucau

SEQ ID NO: 597865 - RNA, 21 nt, Human
gugccagguguggaugggggc

SEQ ID NO: 597866 - RNA, 21 nt, Human
gugcugagucuuucagugagc

SEQ ID NO: 597867 - RNA, 19 nt, Human
guggagugggaaucagagu

SEQ ID NO: 597868 - RNA, 19 nt, Human
uaaaauguacagcaccugc

SEQ ID NO: 597869 - RNA, 23 nt, Human
uaacugccugccuauuaguuauu

SEQ ID NO: 597870 - RNA, 19 nt, Human
uacaggggaggccugugcu

SEQ ID NO: 597871 - RNA, 20 nt, Human
uacccugaaccauggagggg

SEQ ID NO: 597872 - RNA, 20 nt, Human
uaucaggaaaggaggugccu

SEQ ID NO: 597873 - RNA, 23 nt, Human
ucacugauuggcuucucaaucgc

SEQ ID NO: 597874 - RNA, 19 nt, Human
ucauuaucaggaaaggagg

SEQ ID NO: 597875 - RNA, 22 nt, Human
uccaaacccuauuggugaccag

SEQ ID NO: 597876 - RNA, 19 nt, Human
uccaggaacccugugccag

SEQ ID NO: 597877 - RNA, 19 nt, Human
ucccugaaauucugugugu

SEQ ID NO: 597878 - RNA, 20 nt, Human
ucuccaaaaaaaaaaaaaaa

SEQ ID NO: 597879 - RNA, 18 nt, Human
ucuugccgccagguaucc

SEQ ID NO: 597880 - RNA, 21 nt, Human
ugaaauagaguugcucaggca

SEQ ID NO: 597881 - RNA, 18 nt, Human
ugaaccauggagggggcc

SEQ ID NO: 597882 - RNA, 20 nt, Human
ugagagaaaccucgaagagu

SEQ ID NO: 597883 - RNA, 19 nt, Human
ugagaugcugucuccaaaa

SEQ ID NO: 597884 - RNA, 21 nt, Human
ugagauggugagggcagggag

SEQ ID NO: 597885 - RNA, 18 nt, Human
ugaggcaaggguugaacc

SEQ ID NO: 597886 - RNA, 20 nt, Human
ugaggccggcgaaucaccug

SEQ ID NO: 597887 - RNA, 26 nt, Human
ugaggccggcgaaucaccugagguca

SEQ ID NO: 597888 - RNA, 20 nt, Human
ugccaagaauaaaucaucua

SEQ ID NO: 597889 - RNA, 20 nt, Human
ugccuccagccccucauucc

SEQ ID NO: 597890 - RNA, 23 nt, Human
ugccuguaaucccagcacuuugg

SEQ ID NO: 597891 - RNA, 24 nt, Human
ugccuguaaucccagcacuuuggg

SEQ ID NO: 597892 - RNA, 19 nt, Human
ugcuagggaaacagcuugc

SEQ ID NO: 597893 - RNA, 28 nt, Human
ugcugucuccaaaaaaaaaaaaaaaaaa

SEQ ID NO: 597894 - RNA, 22 nt, Human
uggaaggcuaaaauggaagggu

SEQ ID NO: 597895 - RNA, 19 nt, Human
uggagcccuggaggcagag

SEQ ID NO: 597896 - RNA, 22 nt, Human
uggagcccuggaggcagagggc

SEQ ID NO: 597897 - RNA, 24 nt, Human
uggcaugguggcucaugccuguaa

SEQ ID NO: 597898 - RNA, 21 nt, Human
uggccagcaaaccuggccugg

SEQ ID NO: 597899 - RNA, 18 nt, Human
uggccccaugcccugcaa

SEQ ID NO: 597900 - RNA, 22 nt, Human
uggccuggggggcuccccagcc

SEQ ID NO: 597901 - RNA, 22 nt, Human
uggcucaugccuguaaucccag

SEQ ID NO: 597902 - RNA, 24 nt, Human
uggcucaugccuguaaucccagca

SEQ ID NO: 597903 - RNA, 21 nt, Human
ugggaaucagaguuugagaug

SEQ ID NO: 597904 - RNA, 20 nt, Human
uggugagggcagggagcaga

SEQ ID NO: 597905 - RNA, 24 nt, Human
ugguggcucaugccuguaauccca

SEQ ID NO: 597906 - RNA, 23 nt, Human
uggugggagaggguagagauuca

SEQ ID NO: 597907 - RNA, 19 nt, Human
ugguucugcucaguccugu

SEQ ID NO: 597908 - RNA, 23 nt, Human
ugucuggcauuuaugcuugauuc

SEQ ID NO: 597909 - RNA, 24 nt, Human
uguggaagcuggguggaaggcuag

SEQ ID NO: 597910 - RNA, 21 nt, Human
uuccuuacccaaauaacugcc

SEQ ID NO: 597911 - RNA, 26 nt, Human
uucugucucucccaccccuuuuuucc

SEQ ID NO: 597912 - RNA, 18 nt, Human
uugccgguguggggcacc

SEQ ID NO: 597913 - RNA, 22 nt, Human
uugcugccuccagccccucauu

SEQ ID NO: 597914 - RNA, 18 nt, Human
uugcuggcugguacuugc

SEQ ID NO: 597915 - RNA, 20 nt, Human
uuggaagaaguguuugguuc

SEQ ID NO: 597916 - RNA, 25 nt, Human
uugggagggugaggccggcgaauca

SEQ ID NO: 597917 - RNA, 18 nt, Human
acauugcaucuacuuuga

SEQ ID NO: 597918 - RNA, 21 nt, Human
acugcauuuuuugccuucccg

SEQ ID NO: 597919 - RNA, 25 nt, Human
agaaagaaacgacguuuaaaccuaa

SEQ ID NO: 597920 - RNA, 18 nt, Human
auggacuuauaggaugca

SEQ ID NO: 597921 - RNA, 18 nt, Human
auuucacccaugaaaaaa

SEQ ID NO: 597922 - RNA, 21 nt, Human
auuugugggaaaauacaacuu

SEQ ID NO: 597923 - RNA, 24 nt, Human
auuuuuugccuucccggaauauuu

SEQ ID NO: 597924 - RNA, 20 nt, Human
caaauacccucaaaauaaac

SEQ ID NO: 597925 - RNA, 21 nt, Human
cacaaaucgucacgaguacac

SEQ ID NO: 597926 - RNA, 23 nt, Human
cacugcauuuuuugccuucccgg

SEQ ID NO: 597927 - RNA, 19 nt, Human
caggcggcugcugguccag

SEQ ID NO: 597928 - RNA, 22 nt, Human
cauuacucuuaguagucauuca

SEQ ID NO: 597929 - RNA, 19 nt, Human
cgcgggagccccggcgacg

SEQ ID NO: 597930 - RNA, 22 nt, Human
cggcugccgagccccgcguccc

SEQ ID NO: 597931 - RNA, 24 nt, Human
cucaaaauagacuucaacgacauu

SEQ ID NO: 597932 - RNA, 21 nt, Human
guugcuguucuuuaauaugac

SEQ ID NO: 597933 - RNA, 21 nt, Human
uaaauaccauguagaaauaaa

SEQ ID NO: 597934 - RNA, 24 nt, Human
uaauaugaccucauucauacuaua

SEQ ID NO: 597935 - RNA, 19 nt, Human
uaggcaagaaggcaggaga

SEQ ID NO: 597936 - RNA, 24 nt, Human
ucacccaugaaaaaauaaauaccu

SEQ ID NO: 597937 - RNA, 22 nt, Human
ucauucaccaugugauaaaauc

SEQ ID NO: 597938 - RNA, 22 nt, Human
ucauuggaauuguuuugguugu

SEQ ID NO: 597939 - RNA, 22 nt, Human
ucuguaacagaagagggaagac

SEQ ID NO: 597940 - RNA, 20 nt, Human
ugcugguccagcucccccgc

SEQ ID NO: 597941 - RNA, 20 nt, Human
ugcuuuauccuuucauguga

SEQ ID NO: 597942 - RNA, 21 nt, Human
uggcaaguagucauucacaau

SEQ ID NO: 597943 - RNA, 25 nt, Human
uguuaugaacaaauacccucaaaau

SEQ ID NO: 597944 - RNA, 24 nt, Human
uucauauauauuuccuaauuuaaa

SEQ ID NO: 597945 - RNA, 18 nt, Human
uucccggaauauuuuccu

SEQ ID NO: 597946 - RNA, 23 nt, Human
uuuaaaccuaacacauucuucau

SEQ ID NO: 597947 - RNA, 20 nt, Human
uuucauuggaauuguuuugg

SEQ ID NO: 597948 - RNA, 22 nt, Human
uuucugaauuugugaacaaaca

SEQ ID NO: 597949 - RNA, 24 nt, Human
aaaaaaaaaaaaaauugcuaagaa

SEQ ID NO: 597950 - RNA, 22 nt, Human
aaaaacauucaguuguauccuc

SEQ ID NO: 597951 - RNA, 21 nt, Human
aaaaacuaaguaugcaacaga

SEQ ID NO: 597952 - RNA, 24 nt, Human
aaaacagcagaacuucaagggagc

SEQ ID NO: 597953 - RNA, 21 nt, Human
aaacaaggugcucagagugua

SEQ ID NO: 597954 - RNA, 24 nt, Human
aaacagcuucuguuuauccucuca

SEQ ID NO: 597955 - RNA, 19 nt, Human
aaagaguauauucuucuuc

SEQ ID NO: 597956 - RNA, 22 nt, Human
aaagcccccucagagaaugccu

SEQ ID NO: 597957 - RNA, 22 nt, Human
aaaggucaccacccccgccccu

SEQ ID NO: 597958 - RNA, 24 nt, Human
aagauggucaugguugacaagcac

SEQ ID NO: 597959 - RNA, 22 nt, Human
aagcuauucacacaaagccagg

SEQ ID NO: 597960 - RNA, 21 nt, Human
aagcuccuaauccagaaucca

SEQ ID NO: 597961 - RNA, 19 nt, Human
aaguaauaauacagcaugu

SEQ ID NO: 597962 - RNA, 21 nt, Human
acaaaaucaccuucagaggaa

SEQ ID NO: 597963 - RNA, 20 nt, Human
acagaacaugagcaaacagc

SEQ ID NO: 597964 - RNA, 20 nt, Human
acagcuucuguuuauccucu

SEQ ID NO: 597965 - RNA, 23 nt, Human
acaggacuaaaaacuaaguaugc

SEQ ID NO: 597966 - RNA, 23 nt, Human
accaaccucagaagacuuaaagg

SEQ ID NO: 597967 - RNA, 22 nt, Human
accacccccgccccuacuaccu

SEQ ID NO: 597968 - RNA, 22 nt, Human
acccccgccccuacuaccuuuc

SEQ ID NO: 597969 - RNA, 20 nt, Human
acugagcgcgcccgccgccc

SEQ ID NO: 597970 - RNA, 19 nt, Human
agcacaaagaaaacauuuu

SEQ ID NO: 597971 - RNA, 22 nt, Human
agccgccgccagacugagcgcg

SEQ ID NO: 597972 - RNA, 23 nt, Human
agcgcuucaaacuuuuuuuggca

SEQ ID NO: 597973 - RNA, 31 nt, Human
aggcagagaagaaacauucuguggauccggg

SEQ ID NO: 597974 - RNA, 24 nt, Human
aguuguauuuggaagcuuuauaag

SEQ ID NO: 597975 - RNA, 28 nt, Human
auaaauccuuaaaaguggaaggggagag

SEQ ID NO: 597976 - RNA, 24 nt, Human
auaagcacaaguccacaucucacc

SEQ ID NO: 597977 - RNA, 18 nt, Human
aucucagcagcauagggg

SEQ ID NO: 597978 - RNA, 19 nt, Human
augaagcacauccuuugcc

SEQ ID NO: 597979 - RNA, 25 nt, Human
auucuguggauccggugcuguuggc

SEQ ID NO: 597980 - RNA, 20 nt, Human
caaaacagcagaacuucaaa

SEQ ID NO: 597981 - RNA, 20 nt, Human
caaaacagcagaacuucaac

SEQ ID NO: 597982 - RNA, 21 nt, Human
caaaacagcagaacuucaacc

SEQ ID NO: 597983 - RNA, 21 nt, Human
caaaguauaaguaccaagaac

SEQ ID NO: 597984 - RNA, 31 nt, Human
caaagugagcaagcuauucacacaaagccaa

SEQ ID NO: 597985 - RNA, 23 nt, Human
caaauuacaaaaucaccuucaga

SEQ ID NO: 597986 - RNA, 28 nt, Human
caagaacaaagaaaguuguaaaaaaugc

SEQ ID NO: 597987 - RNA, 23 nt, Human
cacaaugccauuuaaaccagauu

SEQ ID NO: 597988 - RNA, 18 nt, Human
caccacccccgccccuac

SEQ ID NO: 597989 - RNA, 18 nt, Human
cacccccgccccuacuac

SEQ ID NO: 597990 - RNA, 22 nt, Human
cacuacauguacacuuacaggc

SEQ ID NO: 597991 - RNA, 24 nt, Human
caggacuaaaaacuaaguaugcaa

SEQ ID NO: 597992 - RNA, 23 nt, Human
cauuauauuaaaagccaaaagcc

SEQ ID NO: 597993 - RNA, 19 nt, Human
ccagaauccagggaggaga

SEQ ID NO: 597994 - RNA, 19 nt, Human
ccccucagagaaugccuua

SEQ ID NO: 597995 - RNA, 18 nt, Human
ccccugaccucucaucac

SEQ ID NO: 597996 - RNA, 19 nt, Human
ccgccgccagacugagcgc

SEQ ID NO: 597997 - RNA, 23 nt, Human
ccgccgccagacugagcgcgccc

SEQ ID NO: 597998 - RNA, 26 nt, Human
ccgccgccagacugagcgcgcccgcc

SEQ ID NO: 597999 - RNA, 23 nt, Human
ccucagagaaugccuuauucccc

SEQ ID NO: 598000 - RNA, 22 nt, Human
ccuguuuauaguugacugacag

SEQ ID NO: 598001 - RNA, 19 nt, Human
cgaacaaauacaauccaaa

SEQ ID NO: 598002 - RNA, 19 nt, Human
cgacucccuagucaacacu

SEQ ID NO: 598003 - RNA, 22 nt, Human
cgcuucaaacuuuuuuuggcau

SEQ ID NO: 598004 - RNA, 18 nt, Human
cggcaaaaaaaaaaaaaa

SEQ ID NO: 598005 - RNA, 18 nt, Human
cggcucagcucucagugg

SEQ ID NO: 598006 - RNA, 24 nt, Human
cuacuaagcaauccaggcuuguau

SEQ ID NO: 598007 - RNA, 28 nt, Human
cuagagcccaccauuuugauuguuacac

SEQ ID NO: 598008 - RNA, 24 nt, Human
cuucaaacuuuuuuuggcauaguu

SEQ ID NO: 598009 - RNA, 18 nt, Human
gaaacaccaacucgaagc

SEQ ID NO: 598010 - RNA, 19 nt, Human
gaaggggagagagaaaagg

SEQ ID NO: 598011 - RNA, 24 nt, Human
gagaaugccuuauuccccuacuaa

SEQ ID NO: 598012 - RNA, 21 nt, Human
gcacacucaaagcacacccag

SEQ ID NO: 598013 - RNA, 19 nt, Human
gcuaagaagcuguguaagc

SEQ ID NO: 598014 - RNA, 24 nt, Human
ggaaaauuaccaaccucagaagac

SEQ ID NO: 598015 - RNA, 18 nt, Human
gggacuacagacaugaac

SEQ ID NO: 598016 - RNA, 18 nt, Human
gggacuacagacaugaac

SEQ ID NO: 598017 - RNA, 23 nt, Human
gggacuacagacaugaacuagag

SEQ ID NO: 598018 - RNA, 19 nt, Human
guggauccggugcuguugg

SEQ ID NO: 598019 - RNA, 21 nt, Human
uaaaaaaugcuguguuugcau

SEQ ID NO: 598020 - RNA, 19 nt, Human
uaaaagccaaaagccauaa

SEQ ID NO: 598021 - RNA, 19 nt, Human
uaaauccuuaaaaguggaa

SEQ ID NO: 598022 - RNA, 26 nt, Human
uaacaaaacagcagaacuucaaccuu

SEQ ID NO: 598023 - RNA, 22 nt, Human
uaagcuaaacaaguuuugcuag

SEQ ID NO: 598024 - RNA, 20 nt, Human
uaagugcaaacuugauaacc

SEQ ID NO: 598025 - RNA, 23 nt, Human
uacacuguuuguuagaggaugaa

SEQ ID NO: 598026 - RNA, 22 nt, Human
uacaucccuuugaugcacaguc

SEQ ID NO: 598027 - RNA, 18 nt, Human
uaccaagaacaaagaaag

SEQ ID NO: 598028 - RNA, 25 nt, Human
uaccaagaacaaagaaaguuguaaa

SEQ ID NO: 598029 - RNA, 21 nt, Human
uaccucggaccacaaugccau

SEQ ID NO: 598030 - RNA, 28 nt, Human
uagacagaacaccacaccaaccccgggg

SEQ ID NO: 598031 - RNA, 20 nt, Human
uagagcccaccauuuugauu

SEQ ID NO: 598032 - RNA, 22 nt, Human
uagagcgcuucaaacuuuuuuu

SEQ ID NO: 598033 - RNA, 23 nt, Human
uauccucuagacagaacaccaca

SEQ ID NO: 598034 - RNA, 21 nt, Human
uauccucucagccacaaauuc

SEQ ID NO: 598035 - RNA, 24 nt, Human
ucaaaucaaacccuuucuggggug

SEQ ID NO: 598036 - RNA, 25 nt, Human
ucacaaacacauggauagcuuauca

SEQ ID NO: 598037 - RNA, 21 nt, Human
ucacggcagccgccgccagac

SEQ ID NO: 598038 - RNA, 20 nt, Human
ucagcucugggaguguacac

SEQ ID NO: 598039 - RNA, 21 nt, Human
uccaaaaccauucuagagccc

SEQ ID NO: 598040 - RNA, 20 nt, Human
ucccuggaaaagauucagaa

SEQ ID NO: 598041 - RNA, 24 nt, Human
ucccuggaaaagauucagaagcuc

SEQ ID NO: 598042 - RNA, 18 nt, Human
ucccuuuagccucucccc

SEQ ID NO: 598043 - RNA, 19 nt, Human
ucggcaaaaaaaaaaaaaa

SEQ ID NO: 598044 - RNA, 24 nt, Human
ucggcaaaaaaaaaaaaaauugcu

SEQ ID NO: 598045 - RNA, 20 nt, Human
ucggcuaggcugcgggcggc

SEQ ID NO: 598046 - RNA, 18 nt, Human
ucgguggccgaggaugag

SEQ ID NO: 598047 - RNA, 20 nt, Human
ucuacauguucccauccuca

SEQ ID NO: 598048 - RNA, 20 nt, Human
ucucacucacgugguuucgg

SEQ ID NO: 598049 - RNA, 20 nt, Human
ucucgagcuccaaaaccauu

SEQ ID NO: 598050 - RNA, 18 nt, Human
ucucuuaucuuucuaaaa

SEQ ID NO: 598051 - RNA, 26 nt, Human
ucuguaagucagcaaauuaaaaacau

SEQ ID NO: 598052 - RNA, 22 nt, Human
ucuuaguuuguaacuugucugg

SEQ ID NO: 598053 - RNA, 19 nt, Human
ucuuccuuaacagauuuag

SEQ ID NO: 598054 - RNA, 21 nt, Human
ugaaagaaacaccaacucgaa

SEQ ID NO: 598055 - RNA, 22 nt, Human
ugaaagaaacaccaacucgaag

SEQ ID NO: 598056 - RNA, 24 nt, Human
ugaaagaaacaccaacucgaagca

SEQ ID NO: 598057 - RNA, 18 nt, Human
ugaagcgagaucgaagga

SEQ ID NO: 598058 - RNA, 20 nt, Human
ugaagcgagaucgaaggauu

SEQ ID NO: 598059 - RNA, 19 nt, Human
ugacaguaaguucuauaug

SEQ ID NO: 598060 - RNA, 22 nt, Human
ugacaguaaguucuauauggua

SEQ ID NO: 598061 - RNA, 22 nt, Human
ugaccucucaucacacuuuacu

SEQ ID NO: 598062 - RNA, 20 nt, Human
ugaggcugcacacucaaagc

SEQ ID NO: 598063 - RNA, 21 nt, Human
ugaguaacuggguugugacca

SEQ ID NO: 598064 - RNA, 18 nt, Human
uggaaggggagagagaaa

SEQ ID NO: 598065 - RNA, 19 nt, Human
uggaguuguauuuggaagc

SEQ ID NO: 598066 - RNA, 24 nt, Human
uggaguuguauuuggaagcuuuau

SEQ ID NO: 598067 - RNA, 19 nt, Human
uggcagcccuugcaagucc

SEQ ID NO: 598068 - RNA, 24 nt, Human
ugguggguguggggcacagaacau

SEQ ID NO: 598069 - RNA, 24 nt, Human
uguaucaggcauuauaacaaaaca

SEQ ID NO: 598070 - RNA, 22 nt, Human
ugugacucuucucuuuuacugg

SEQ ID NO: 598071 - RNA, 23 nt, Human
ugugacucuucucuuuuacuggg

SEQ ID NO: 598072 - RNA, 19 nt, Human
uuaaacugcugcuaaaggc

SEQ ID NO: 598073 - RNA, 21 nt, Human
uuagguauauuuuccuauacc

SEQ ID NO: 598074 - RNA, 18 nt, Human
uucacauuuuaugucagu

SEQ ID NO: 598075 - RNA, 20 nt, Human
uucccuuuagccucucccca

SEQ ID NO: 598076 - RNA, 23 nt, Human
uuggcucaucucacucacguggu

SEQ ID NO: 598077 - RNA, 21 nt, Human
uuuacugggauguuccccuga

SEQ ID NO: 598078 - RNA, 19 nt, Human
aagaugcuccuggcccguc

SEQ ID NO: 598079 - RNA, 21 nt, Human
aagccagaggcagcaccagga

SEQ ID NO: 598080 - RNA, 21 nt, Human
accaacagaggcucugcaggc

SEQ ID NO: 598081 - RNA, 22 nt, Human
accuccucugccucuccugcca

SEQ ID NO: 598082 - RNA, 20 nt, Human
acuuggucagugaccaggcc

SEQ ID NO: 598083 - RNA, 26 nt, Human
agcaguccccugggaucccucugcuu

SEQ ID NO: 598084 - RNA, 21 nt, Human
agccagaggcagcaccaggac

SEQ ID NO: 598085 - RNA, 20 nt, Human
aggaaagacaaagccagagg

SEQ ID NO: 598086 - RNA, 22 nt, Human
aggcagcaccaggacauggauc

SEQ ID NO: 598087 - RNA, 22 nt, Human
aggcauccucauccccugaaga

SEQ ID NO: 598088 - RNA, 21 nt, Human
aggggcacagaggggcuugag

SEQ ID NO: 598089 - RNA, 22 nt, Human
agguccucuggcuucacagucu

SEQ ID NO: 598090 - RNA, 18 nt, Human
aucucaagagccuuccuc

SEQ ID NO: 598091 - RNA, 19 nt, Human
aucugaagucuccuggccc

SEQ ID NO: 598092 - RNA, 23 nt, Human
augagcagcaaauaccuccagau

SEQ ID NO: 598093 - RNA, 18 nt, Human
augcugggggggugggga

SEQ ID NO: 598094 - RNA, 24 nt, Human
caacauggacucugcucuuggaug

SEQ ID NO: 598095 - RNA, 19 nt, Human
cacugaggaaagacaaagc

SEQ ID NO: 598096 - RNA, 19 nt, Human
cacuguaugcacaggggau

SEQ ID NO: 598097 - RNA, 25 nt, Human
cagagcaaaggcauugaccuccucu

SEQ ID NO: 598098 - RNA, 23 nt, Human
cagcaccaggacauggaucugaa

SEQ ID NO: 598099 - RNA, 23 nt, Human
cagcagcuccagguccucuggcu

SEQ ID NO: 598100 - RNA, 22 nt, Human
caggaagcccagagcaaaggca

SEQ ID NO: 598101 - RNA, 19 nt, Human
caucucaagagccuuccuc

SEQ ID NO: 598102 - RNA, 22 nt, Human
ccacugaggaaagacaaagcca

SEQ ID NO: 598103 - RNA, 19 nt, Human
ccaggacauggaucugaag

SEQ ID NO: 598104 - RNA, 18 nt, Human
ccagggccugagugaagg

SEQ ID NO: 598105 - RNA, 18 nt, Human
ccagguggggacagggaa

SEQ ID NO: 598106 - RNA, 21 nt, Human
ccaguccugcccacugaggaa

SEQ ID NO: 598107 - RNA, 21 nt, Human
ccaucuuuuucucugccucuu

SEQ ID NO: 598108 - RNA, 22 nt, Human
ccccugaagaugcuccuggccc

SEQ ID NO: 598109 - RNA, 21 nt, Human
ccgccgcaucagcagcuccag

SEQ ID NO: 598110 - RNA, 18 nt, Human
ccggggccuggggccggu

SEQ ID NO: 598111 - RNA, 21 nt, Human
ccucugugugucccucagccu

SEQ ID NO: 598112 - RNA, 22 nt, Human
ccuggggccggugguccggggc

SEQ ID NO: 598113 - RNA, 19 nt, Human
ccuuguggggaucuugccg

SEQ ID NO: 598114 - RNA, 19 nt, Human
cggccagcaugagcagcaa

SEQ ID NO: 598115 - RNA, 23 nt, Human
cuaggggcacagaggggcuugag

SEQ ID NO: 598116 - RNA, 18 nt, Human
cucaagagccuuccucuc

SEQ ID NO: 598117 - RNA, 18 nt, Human
cucagagaaggguaaaga

SEQ ID NO: 598118 - RNA, 20 nt, Human
cuccugccagaaacugggcu

SEQ ID NO: 598119 - RNA, 21 nt, Human
cuccuggcccgucagccucag

SEQ ID NO: 598120 - RNA, 22 nt, Human
cucggccccgggcccuccuaac

SEQ ID NO: 598121 - RNA, 22 nt, Human
cucugcaggcucugaagauaag

SEQ ID NO: 598122 - RNA, 22 nt, Human
cugaccaacagaggcucugcag

SEQ ID NO: 598123 - RNA, 19 nt, Human
cugccgccgcaucagcagc

SEQ ID NO: 598124 - RNA, 18 nt, Human
cuggcuucacagucuugc

SEQ ID NO: 598125 - RNA, 24 nt, Human
cuggggggguggggaggagaccug

SEQ ID NO: 598126 - RNA, 19 nt, Human
cugucaccucugugugucc

SEQ ID NO: 598127 - RNA, 20 nt, Human
cugucaccucuguguguccc

SEQ ID NO: 598128 - RNA, 22 nt, Human
cuucuccaccaucucaagagcc

SEQ ID NO: 598129 - RNA, 22 nt, Human
gagcagcugccgguacuccagg

SEQ ID NO: 598130 - RNA, 19 nt, Human
gaggagaccuggagaaaua

SEQ ID NO: 598131 - RNA, 19 nt, Human
gaugaaggaggcagccaca

SEQ ID NO: 598132 - RNA, 18 nt, Human
gaugaugucgccuggccu

SEQ ID NO: 598133 - RNA, 20 nt, Human
gcagcaccaggcgcuggggc

SEQ ID NO: 598134 - RNA, 20 nt, Human
gcaggccaaggcugcauagc

SEQ ID NO: 598135 - RNA, 23 nt, Human
gccccgggcccuccuaaccgccc

SEQ ID NO: 598136 - RNA, 19 nt, Human
gcccugccagaggcauccu

SEQ ID NO: 598137 - RNA, 19 nt, Human
gcccugccagaggcauccu

SEQ ID NO: 598138 - RNA, 21 nt, Human
gcugcccugccagaggcaucc

SEQ ID NO: 598139 - RNA, 24 nt, Human
ggcacagaggggcuugaggaagga

SEQ ID NO: 598140 - RNA, 19 nt, Human
ggcauugaccuccucugcc

SEQ ID NO: 598141 - RNA, 27 nt, Human
ggcccugccgccgcaucagcagcucca

SEQ ID NO: 598142 - RNA, 19 nt, Human
ggccuggagagacucaggg

SEQ ID NO: 598143 - RNA, 18 nt, Human
ggccuggggccggugguc

SEQ ID NO: 598144 - RNA, 19 nt, Human
gggcacagaggggcuugag

SEQ ID NO: 598145 - RNA, 20 nt, Human
gggcccuccuaaccgcccag

SEQ ID NO: 598146 - RNA, 22 nt, Human
ggggaucuugccggggccuggg

SEQ ID NO: 598147 - RNA, 23 nt, Human
ggggguggggaggagaccuggag

SEQ ID NO: 598148 - RNA, 18 nt, Human
ggugcucaggaagcccag

SEQ ID NO: 598149 - RNA, 21 nt, Human
gugcuggaggccgacucugga

SEQ ID NO: 598150 - RNA, 23 nt, Human
ucaagagccuuccucuccauggg

SEQ ID NO: 598151 - RNA, 18 nt, Human
ucagcagcuccagguccu

SEQ ID NO: 598152 - RNA, 19 nt, Human
ucagcagcuccagguccuc

SEQ ID NO: 598153 - RNA, 24 nt, Human
ucagcaguccccugggaucccucu

SEQ ID NO: 598154 - RNA, 18 nt, Human
ucaguccagccuuguggg

SEQ ID NO: 598155 - RNA, 19 nt, Human
ucccucagccucuucuacc

SEQ ID NO: 598156 - RNA, 20 nt, Human
ucccucugcuucugucaccu

SEQ ID NO: 598157 - RNA, 21 nt, Human
uccggggccuagggggaugcc

SEQ ID NO: 598158 - RNA, 22 nt, Human
uccucuggcuucacagucuugc

SEQ ID NO: 598159 - RNA, 23 nt, Human
uccuguugccuccauuucacuca

SEQ ID NO: 598160 - RNA, 19 nt, Human
uccuugugcuccuguugcc

SEQ ID NO: 598161 - RNA, 21 nt, Human
ucggccccgggcccuccuaac

SEQ ID NO: 598162 - RNA, 22 nt, Human
ucugaagucuccuggcccaaca

SEQ ID NO: 598163 - RNA, 21 nt, Human
ugaaggggagagaauacaggc

SEQ ID NO: 598164 - RNA, 20 nt, Human
ugcagcaccaggcgcugggg

SEQ ID NO: 598165 - RNA, 19 nt, Human
ugcagugagacuuggucag

SEQ ID NO: 598166 - RNA, 21 nt, Human
uggaccagcagacccaguccu

SEQ ID NO: 598167 - RNA, 21 nt, Human
uggcucaguccagccuugugg

SEQ ID NO: 598168 - RNA, 19 nt, Human
ugggcugguuucccagggc

SEQ ID NO: 598169 - RNA, 24 nt, Human
uggggggguggggaggagaccugg

SEQ ID NO: 598170 - RNA, 21 nt, Human
uuucacauaguggcucagucc

SEQ ID NO: 598171 - RNA, 26 nt, Human
aaacacuaaaugccccaggcugagcu

SEQ ID NO: 598172 - RNA, 24 nt, Human
aaacuggcugggugugguggcuca

SEQ ID NO: 598173 - RNA, 20 nt, Human
aaagacaguaaagcagauua

SEQ ID NO: 598174 - RNA, 20 nt, Human
aaagugccagugcaggcagg

SEQ ID NO: 598175 - RNA, 19 nt, Human
aacauggugaaacuccauc

SEQ ID NO: 598176 - RNA, 20 nt, Human
aacauggugaaacuccaucu

SEQ ID NO: 598177 - RNA, 21 nt, Human
aacauggugaaacuccaucuc

SEQ ID NO: 598178 - RNA, 21 nt, Human
aagaaggggaaagcuaacggu

SEQ ID NO: 598179 - RNA, 21 nt, Human
aagccaagcacagccccaggc

SEQ ID NO: 598180 - RNA, 26 nt, Human
aagccaagcacagccccaggcccaaa

SEQ ID NO: 598181 - RNA, 19 nt, Human
aagcuccauugaagugcgg

SEQ ID NO: 598182 - RNA, 20 nt, Human
aagggaggugggggagcugc

SEQ ID NO: 598183 - RNA, 20 nt, Human
aagggaggugggggagcugc

SEQ ID NO: 598184 - RNA, 24 nt, Human
aaucgcuugaacccaggaagcgga

SEQ ID NO: 598185 - RNA, 23 nt, Human
acacagauuucaagccaagcaca

SEQ ID NO: 598186 - RNA, 24 nt, Human
acagagugagacuccgucucagaa

SEQ ID NO: 598187 - RNA, 22 nt, Human
accacaagccaacuccccauaa

SEQ ID NO: 598188 - RNA, 22 nt, Human
acgccacugcauuccagccugg

SEQ ID NO: 598189 - RNA, 24 nt, Human
acgccacugcauuccagccugggc

SEQ ID NO: 598190 - RNA, 24 nt, Human
acuccaucucuacuaaaaauacaa

SEQ ID NO: 598191 - RNA, 24 nt, Human
acugcauuccagccugggcgacag

SEQ ID NO: 598192 - RNA, 26 nt, Human
acugcauuccagccugggcgacagag

SEQ ID NO: 598193 - RNA, 22 nt, Human
agaaucgcuugaacccaggaag

SEQ ID NO: 598194 - RNA, 29 nt, Human
agacaguaaagcagauuagaagggacccc

SEQ ID NO: 598195 - RNA, 23 nt, Human
agaggcagcuguugggaaagccu

SEQ ID NO: 598196 - RNA, 18 nt, Human
agaggcugccagaggagg

SEQ ID NO: 598197 - RNA, 23 nt, Human
agaggcugccagaggaggggggg

SEQ ID NO: 598198 - RNA, 20 nt, Human
agcacagccccaggcccaaa

SEQ ID NO: 598199 - RNA, 24 nt, Human
agcacuuugggaggccaagguggg

SEQ ID NO: 598200 - RNA, 24 nt, Human
agccugggcgacagagugagacuc

SEQ ID NO: 598201 - RNA, 20 nt, Human
agcuccaaauccagcugccu

SEQ ID NO: 598202 - RNA, 19 nt, Human
agcuuguaaccucaagauu

SEQ ID NO: 598203 - RNA, 18 nt, Human
aggaaaaagguacccuau

SEQ ID NO: 598204 - RNA, 20 nt, Human
aggaagcaggauguagcucc

SEQ ID NO: 598205 - RNA, 19 nt, Human
aggagggggggcuaaggga

SEQ ID NO: 598206 - RNA, 23 nt, Human
aggcaggagaaucgcuugaaccc

SEQ ID NO: 598207 - RNA, 24 nt, Human
aggcaggagaaucgcuugaaccca

SEQ ID NO: 598208 - RNA, 21 nt, Human
aggcaggagaggcugccagag

SEQ ID NO: 598209 - RNA, 20 nt, Human
aggccaagguggguggauca

SEQ ID NO: 598210 - RNA, 23 nt, Human
aggcggugacuggacagcagagc

SEQ ID NO: 598211 - RNA, 20 nt, Human
aggcugaggcaggagaaucg

SEQ ID NO: 598212 - RNA, 24 nt, Human
aggcugaggcaggagaaucgcuug

SEQ ID NO: 598213 - RNA, 21 nt, Human
aggggacacagauuucaagcc

SEQ ID NO: 598214 - RNA, 21 nt, Human
aggggguggaacacguggagg

SEQ ID NO: 598215 - RNA, 21 nt, Human
agggugcuggcauuacccuga

SEQ ID NO: 598216 - RNA, 18 nt, Human
agucaauucugaauucag

SEQ ID NO: 598217 - RNA, 22 nt, Human
auagauuccuccccagaggaaa

SEQ ID NO: 598218 - RNA, 24 nt, Human
aucacgccacugcauuccagccug

SEQ ID NO: 598219 - RNA, 21 nt, Human
auggagggcacccuaccccca

SEQ ID NO: 598220 - RNA, 21 nt, Human
caaaguaggcaccuugagggc

SEQ ID NO: 598221 - RNA, 21 nt, Human
caacuccccauaagucaggag

SEQ ID NO: 598222 - RNA, 18 nt, Human
caagccaagcacagcccc

SEQ ID NO: 598223 - RNA, 22 nt, Human
caagccaagcacagccccaggc

SEQ ID NO: 598224 - RNA, 24 nt, Human
caagccaagcacagccccaggccc

SEQ ID NO: 598225 - RNA, 21 nt, Human
caagguggguggaucaugaac

SEQ ID NO: 598226 - RNA, 21 nt, Human
cacacccuaaagacaguaaag

SEQ ID NO: 598227 - RNA, 24 nt, Human
cacagccccaggcccaaaggaagc

SEQ ID NO: 598228 - RNA, 27 nt, Human
cacagccccaggcccaaaggaagcagg

SEQ ID NO: 598229 - RNA, 19 nt, Human
caccagcuccaaauccagc

SEQ ID NO: 598230 - RNA, 22 nt, Human
caccagggaaaacacuaaaugc

SEQ ID NO: 598231 - RNA, 22 nt, Human
caccuggccuguuucagaugga

SEQ ID NO: 598232 - RNA, 24 nt, Human
cacgccuguaaucccagcacuuug

SEQ ID NO: 598233 - RNA, 19 nt, Human
cacugcauuccagccuggg

SEQ ID NO: 598234 - RNA, 22 nt, Human
cacugcauuccagccugggcga

SEQ ID NO: 598235 - RNA, 23 nt, Human
cacugcauuccagccugggcgac

SEQ ID NO: 598236 - RNA, 24 nt, Human
cacugcauuccagccugggcgaca

SEQ ID NO: 598237 - RNA, 18 nt, Human
cagaaaauaggaaaacug

SEQ ID NO: 598238 - RNA, 21 nt, Human
cagcacuuugggaggccaagg

SEQ ID NO: 598239 - RNA, 24 nt, Human
cagcacuuugggaggccaaggugg

SEQ ID NO: 598240 - RNA, 25 nt, Human
cagcccccucuccccucgcuccccc

SEQ ID NO: 598241 - RNA, 20 nt, Human
cagccugggcgacagaguga

SEQ ID NO: 598242 - RNA, 24 nt, Human
cagcuacucgggaggcugaggcag

SEQ ID NO: 598243 - RNA, 19 nt, Human
caguaaagccgagaucacg

SEQ ID NO: 598244 - RNA, 22 nt, Human
cauuccagccugggcgacagag

SEQ ID NO: 598245 - RNA, 24 nt, Human
cauuccagccugggcgacagagug

SEQ ID NO: 598246 - RNA, 26 nt, Human
cauuccuccccaaauaagauuauccc

SEQ ID NO: 598247 - RNA, 24 nt, Human
cauuccuggaggccucuccccacu

SEQ ID NO: 598248 - RNA, 24 nt, Human
ccaagcacagccccaggcccaaag

SEQ ID NO: 598249 - RNA, 19 nt, Human
ccacccauuccuccccaaa

SEQ ID NO: 598250 - RNA, 20 nt, Human
ccacugcauuccagccuggg

SEQ ID NO: 598251 - RNA, 21 nt, Human
ccacugcauuccagccugggc

SEQ ID NO: 598252 - RNA, 21 nt, Human
ccacugcauuccagccugggc

SEQ ID NO: 598253 - RNA, 23 nt, Human
ccacugcauuccagccugggcga

SEQ ID NO: 598254 - RNA, 24 nt, Human
ccacugcauuccagccugggcgac

SEQ ID NO: 598255 - RNA, 20 nt, Human
ccagaagaaggggaaagcua

SEQ ID NO: 598256 - RNA, 22 nt, Human
cccacccauuccuccccaaaua

SEQ ID NO: 598257 - RNA, 21 nt, Human
cccagaaucugagcggacaga

SEQ ID NO: 598258 - RNA, 21 nt, Human
cccaggaaguucucucccucc

SEQ ID NO: 598259 - RNA, 22 nt, Human
ccccacauuccuggaggccucu

SEQ ID NO: 598260 - RNA, 22 nt, Human
ccccucgcucccccuccagccc

SEQ ID NO: 598261 - RNA, 18 nt, Human
cccuaaaucugagccaaa

SEQ ID NO: 598262 - RNA, 21 nt, Human
ccuaaagacaguaaagcagau

SEQ ID NO: 598263 - RNA, 18 nt, Human
ccuccugccccugcugcc

SEQ ID NO: 598264 - RNA, 23 nt, Human
ccuccugccccugcugcccaagc

SEQ ID NO: 598265 - RNA, 22 nt, Human
ccugggcgacagagugagacuc

SEQ ID NO: 598266 - RNA, 20 nt, Human
ccuggguaacauggugaaac

SEQ ID NO: 598267 - RNA, 22 nt, Human
ccuggguaacauggugaaacuc

SEQ ID NO: 598268 - RNA, 24 nt, Human
ccuggguaacauggugaaacucca

SEQ ID NO: 598269 - RNA, 22 nt, Human
ccuguaaucccagcacuuuggg

SEQ ID NO: 598270 - RNA, 21 nt, Human
ccuguagucccagcuacucgg

SEQ ID NO: 598271 - RNA, 22 nt, Human
ccuguagucccagcuacucggg

SEQ ID NO: 598272 - RNA, 23 nt, Human
cgccuguaaucccagcacuuugg

SEQ ID NO: 598273 - RNA, 22 nt, Human
cucacgccuguaaucccagcac

SEQ ID NO: 598274 - RNA, 24 nt, Human
cucacgccuguaaucccagcacuu

SEQ ID NO: 598275 - RNA, 20 nt, Human
cucacugcugaauuccugca

SEQ ID NO: 598276 - RNA, 18 nt, Human
cuccaaauccagcugccu

SEQ ID NO: 598277 - RNA, 23 nt, Human
cuccuguagucccagcuacucgg

SEQ ID NO: 598278 - RNA, 19 nt, Human
cugagcuauccauccagug

SEQ ID NO: 598279 - RNA, 22 nt, Human
cugccccugcugcccaagcucc

SEQ ID NO: 598280 - RNA, 23 nt, Human
cuggcugggugugguggcucacg

SEQ ID NO: 598281 - RNA, 19 nt, Human
cuucaccaagagaacuugg

SEQ ID NO: 598282 - RNA, 19 nt, Human
cuuuaaaaagggaggaucu

SEQ ID NO: 598283 - RNA, 21 nt, Human
gacagagugagacuccgucuc

SEQ ID NO: 598284 - RNA, 24 nt, Human
gacagagugagacuccgucucaga

SEQ ID NO: 598285 - RNA, 22 nt, Human
gacaguaaagcagauuagaaau

SEQ ID NO: 598286 - RNA, 23 nt, Human
gagaucacgccacugcauuccag

SEQ ID NO: 598287 - RNA, 19 nt, Human
gaggcugcaguaaagccga

SEQ ID NO: 598288 - RNA, 19 nt, Human
gcacagccccaggcccaaa

SEQ ID NO: 598289 - RNA, 22 nt, Human
gcaggagaaucgcuugaaccca

SEQ ID NO: 598290 - RNA, 18 nt, Human
gcaguccaggugguccca

SEQ ID NO: 598291 - RNA, 24 nt, Human
gcauuccagccugggcgacagagu

SEQ ID NO: 598292 - RNA, 19 nt, Human
gccaagguggguggaucau

SEQ ID NO: 598293 - RNA, 22 nt, Human
gccacugcauuccagccugggc

SEQ ID NO: 598294 - RNA, 24 nt, Human
gccacugcauuccagccugggcga

SEQ ID NO: 598295 - RNA, 20 nt, Human
gccgagaucacgccacugca

SEQ ID NO: 598296 - RNA, 18 nt, Human
gccuguggccccacccag

SEQ ID NO: 598297 - RNA, 21 nt, Human
gcugggugugguggcucacgc

SEQ ID NO: 598298 - RNA, 18 nt, Human
gcuugccucaccagcucc

SEQ ID NO: 598299 - RNA, 23 nt, Human
ggaauagauuccuccccagagga

SEQ ID NO: 598300 - RNA, 18 nt, Human
ggaggugggggagcugcu

SEQ ID NO: 598301 - RNA, 21 nt, Human
ggauguaaacaacagcagggu

SEQ ID NO: 598302 - RNA, 20 nt, Human
ggcaguccagguggucccag

SEQ ID NO: 598303 - RNA, 21 nt, Human
ggcucacgccuguaaucccag

SEQ ID NO: 598304 - RNA, 19 nt, Human
ggcugggugugguggcuca

SEQ ID NO: 598305 - RNA, 18 nt, Human
ggggagcugcuggaaagg

SEQ ID NO: 598306 - RNA, 22 nt, Human
gggggagcugcuggaaagggaa

SEQ ID NO: 598307 - RNA, 22 nt, Human
gggugcuggcauuacccugagg

SEQ ID NO: 598308 - RNA, 23 nt, Human
gggugcuggcauuacccugaggc

SEQ ID NO: 598309 - RNA, 24 nt, Human
gggugugguggcucacgccuguaa

SEQ ID NO: 598310 - RNA, 24 nt, Human
gguggcucacgccuguaaucccag

SEQ ID NO: 598311 - RNA, 20 nt, Human
gugcauagcugcucaauguu

SEQ ID NO: 598312 - RNA, 18 nt, Human
gugcuggcauuacccuga

SEQ ID NO: 598313 - RNA, 18 nt, Human
guggaggggagcucagca

SEQ ID NO: 598314 - RNA, 22 nt, Human
guguuucucuccaaccucgggg

SEQ ID NO: 598315 - RNA, 23 nt, Human
guuugcucccgccauccugaggg

SEQ ID NO: 598316 - RNA, 22 nt, Human
uaacauggugaaacuccaucuc

SEQ ID NO: 598317 - RNA, 24 nt, Human
uaacauggugaaacuccaucucua

SEQ ID NO: 598318 - RNA, 20 nt, Human
uaagauuaucccuggcuuga

SEQ ID NO: 598319 - RNA, 20 nt, Human
uaagggaggugggggagcug

SEQ ID NO: 598320 - RNA, 27 nt, Human
uacacacccuaaagacaguaaagcaga

SEQ ID NO: 598321 - RNA, 25 nt, Human
uaccagugcuguuugcucccgccau

SEQ ID NO: 598322 - RNA, 20 nt, Human
uacccugaggcuugccucac

SEQ ID NO: 598323 - RNA, 21 nt, Human
uaggaaaacuggcugggugug

SEQ ID NO: 598324 - RNA, 24 nt, Human
uaggaaaacuggcuggguguggug

SEQ ID NO: 598325 - RNA, 23 nt, Human
uauccauccagugaucagaugac

SEQ ID NO: 598326 - RNA, 20 nt, Human
ucaagccaagcacagcccca

SEQ ID NO: 598327 - RNA, 23 nt, Human
ucacgccacugcauuccagccug

SEQ ID NO: 598328 - RNA, 18 nt, Human
ucagaaaaaaaaggaaaa

SEQ ID NO: 598329 - RNA, 23 nt, Human
ucagaaaaaaaaggaaaaaggua

SEQ ID NO: 598330 - RNA, 19 nt, Human
ucagaaaauaggaaaacug

SEQ ID NO: 598331 - RNA, 20 nt, Human
ucagaggcugcucagguagg

SEQ ID NO: 598332 - RNA, 21 nt, Human
ucagaugacccagccugugau

SEQ ID NO: 598333 - RNA, 20 nt, Human
ucagcagaggcaggagaggc

SEQ ID NO: 598334 - RNA, 21 nt, Human
ucaggcagguuggauguaaac

SEQ ID NO: 598335 - RNA, 19 nt, Human
uccagccugggcgacagag

SEQ ID NO: 598336 - RNA, 23 nt, Human
uccagccugggcgacagagugag

SEQ ID NO: 598337 - RNA, 24 nt, Human
uccagccugggcgacagagugaga

SEQ ID NO: 598338 - RNA, 26 nt, Human
uccccaaauaagauuaucccuggcuu

SEQ ID NO: 598339 - RNA, 24 nt, Human
ucgggaggcugaggcaggagaauc

SEQ ID NO: 598340 - RNA, 22 nt, Human
ucucuacuaaaaauacaaaaaa

SEQ ID NO: 598341 - RNA, 25 nt, Human
ugacaggaauagauuccuccccaga

SEQ ID NO: 598342 - RNA, 23 nt, Human
ugacccuccugccccugcugccc

SEQ ID NO: 598343 - RNA, 18 nt, Human
ugacuggacaaagugcca

SEQ ID NO: 598344 - RNA, 19 nt, Human
ugacuggacaaagugccag

SEQ ID NO: 598345 - RNA, 24 nt, Human
ugagaccauccuggguaacauggu

SEQ ID NO: 598346 - RNA, 20 nt, Human
ugagaguugaucuguuuuca

SEQ ID NO: 598347 - RNA, 20 nt, Human
ugaggcaggagaaucgcuug

SEQ ID NO: 598348 - RNA, 24 nt, Human
ugaggcaggagaaucgcuugaacc

SEQ ID NO: 598349 - RNA, 25 nt, Human
ugaggcaggagaaucgcuugaaccc

SEQ ID NO: 598350 - RNA, 21 nt, Human
ugaucagaugacccagccugu

SEQ ID NO: 598351 - RNA, 24 nt, Human
ugcacuuacuccuagaauauacca

SEQ ID NO: 598352 - RNA, 19 nt, Human
ugccaaaacuaaaauucaa

SEQ ID NO: 598353 - RNA, 24 nt, Human
ugccaaaacuaaaauucaaaaggc

SEQ ID NO: 598354 - RNA, 25 nt, Human
ugccaccagcuccaaauccagcugc

SEQ ID NO: 598355 - RNA, 20 nt, Human
ugccagaggagggggggcua

SEQ ID NO: 598356 - RNA, 21 nt, Human
ugcccacccauuccuccccaa

SEQ ID NO: 598357 - RNA, 21 nt, Human
ugcugcccaagcuccauugaa

SEQ ID NO: 598358 - RNA, 21 nt, Human
uggauggcaguccaggugguc

SEQ ID NO: 598359 - RNA, 18 nt, Human
uggccuguuucagaugga

SEQ ID NO: 598360 - RNA, 24 nt, Human
uggcucacgccuguaaucccagca

SEQ ID NO: 598361 - RNA, 23 nt, Human
uggcugggugugguggcucacgc

SEQ ID NO: 598362 - RNA, 23 nt, Human
ugggaggccaagguggguggauc

SEQ ID NO: 598363 - RNA, 24 nt, Human
ugggaggccaagguggguggauca

SEQ ID NO: 598364 - RNA, 24 nt, Human
ugguggcucacgccuguaauccca

SEQ ID NO: 598365 - RNA, 23 nt, Human
uguguuucucuccaaccucgggg

SEQ ID NO: 598366 - RNA, 22 nt, Human
uucauacacacccuaaagacag

SEQ ID NO: 598367 - RNA, 19 nt, Human
uuccuggaggccucucccc

SEQ ID NO: 598368 - RNA, 20 nt, Human
uuccuggaggccucucccca

SEQ ID NO: 598369 - RNA, 18 nt, Human
uugcucccgccauccuga

SEQ ID NO: 598370 - RNA, 18 nt, Human
uuugcucccgccauccug

SEQ ID NO: 598371 - RNA, 24 nt, Human
aaagugcugggauuacaggcauga

SEQ ID NO: 598372 - RNA, 19 nt, Human
aagugcugggauuacaggc

SEQ ID NO: 598373 - RNA, 21 nt, Human
aagugcugggauuacaggcau

SEQ ID NO: 598374 - RNA, 26 nt, Human
aagugcugggauuacaggcaugagcc

SEQ ID NO: 598375 - RNA, 23 nt, Human
aauaaggagacaagaaccaaaaa

SEQ ID NO: 598376 - RNA, 25 nt, Human
aaugaccaaccagauucaauccaua

SEQ ID NO: 598377 - RNA, 19 nt, Human
acagacaggguuucaccau

SEQ ID NO: 598378 - RNA, 18 nt, Human
acaggguuucaccauguu

SEQ ID NO: 598379 - RNA, 23 nt, Human
acaggguuucaccauguuggcca

SEQ ID NO: 598380 - RNA, 24 nt, Human
acaggguuucaccauguuggccag

SEQ ID NO: 598381 - RNA, 21 nt, Human
acaguggagggaucaacugga

SEQ ID NO: 598382 - RNA, 24 nt, Human
accauguuggccaggcuggucuug

SEQ ID NO: 598383 - RNA, 25 nt, Human
acccgccucagccucccaaagugcu

SEQ ID NO: 598384 - RNA, 23 nt, Human
accuuuuuuuuuuuaaacuuuaa

SEQ ID NO: 598385 - RNA, 19 nt, Human
acugcagccuccgccuccu

SEQ ID NO: 598386 - RNA, 29 nt, Human
agacagaaaguagaauauugggggacccc

SEQ ID NO: 598387 - RNA, 22 nt, Human
agacagaaaguagaauauuggu

SEQ ID NO: 598388 - RNA, 23 nt, Human
agcacguucugggauagaggcag

SEQ ID NO: 598389 - RNA, 24 nt, Human
agcgauucuccugccucagccucc

SEQ ID NO: 598390 - RNA, 21 nt, Human
aggccgaaaccugguaacagc

SEQ ID NO: 598391 - RNA, 25 nt, Human
aggcuggagugcaguggcacaaucu

SEQ ID NO: 598392 - RNA, 22 nt, Human
aguacagacaggguuucaccau

SEQ ID NO: 598393 - RNA, 18 nt, Human
aguagcugagauuacagg

SEQ ID NO: 598394 - RNA, 23 nt, Human
agugauccacccgccucagccuc

SEQ ID NO: 598395 - RNA, 21 nt, Human
agugcaguggcacaaucucag

SEQ ID NO: 598396 - RNA, 24 nt, Human
agugcaguggcacaaucucagcuc

SEQ ID NO: 598397 - RNA, 18 nt, Human
agugcugggauuacaggc

SEQ ID NO: 598398 - RNA, 20 nt, Human
auacuuagaauggcacaaaa

SEQ ID NO: 598399 - RNA, 24 nt, Human
caaagugcugggauuacaggcaug

SEQ ID NO: 598400 - RNA, 20 nt, Human
caagcagaagacuaaacacu

SEQ ID NO: 598401 - RNA, 22 nt, Human
caagcgauucuccugccucagc

SEQ ID NO: 598402 - RNA, 22 nt, Human
caauccauaucacugggaaaga

SEQ ID NO: 598403 - RNA, 21 nt, Human
caccauguuggccaggcuggu

SEQ ID NO: 598404 - RNA, 23 nt, Human
caccauguuggccaggcuggucu

SEQ ID NO: 598405 - RNA, 24 nt, Human
caccauguuggccaggcuggucuu

SEQ ID NO: 598406 - RNA, 27 nt, Human
caccauguuggccaggcuggucuugaa

SEQ ID NO: 598407 - RNA, 23 nt, Human
cacccgccucagccucccaaagu

SEQ ID NO: 598408 - RNA, 22 nt, Human
caccuccuccugagacagccug

SEQ ID NO: 598409 - RNA, 23 nt, Human
cacugcagccuccgccuccuggg

SEQ ID NO: 598410 - RNA, 20 nt, Human
cagccuccugaguagcugag

SEQ ID NO: 598411 - RNA, 21 nt, Human
cagcuccgggcuccgcguccc

SEQ ID NO: 598412 - RNA, 24 nt, Human
caggguuucaccauguuggccagg

SEQ ID NO: 598413 - RNA, 20 nt, Human
cagugcaguauacaaccccc

SEQ ID NO: 598414 - RNA, 23 nt, Human
caucuaacuguaaguuuccuaaa

SEQ ID NO: 598415 - RNA, 20 nt, Human
caugcucagcuaacuuuugu

SEQ ID NO: 598416 - RNA, 24 nt, Human
cauguuggccaggcuggucuugaa

SEQ ID NO: 598417 - RNA, 23 nt, Human
ccaaagugcugggauuacaggca

SEQ ID NO: 598418 - RNA, 24 nt, Human
ccaaagugcugggauuacaggcau

SEQ ID NO: 598419 - RNA, 28 nt, Human
ccacaacgcccaaccuuuuuuuuuuuaa

SEQ ID NO: 598420 - RNA, 26 nt, Human
ccacccgccucagccucccaaagugc

SEQ ID NO: 598421 - RNA, 24 nt, Human
cccaaagugcugggauuacaggca

SEQ ID NO: 598422 - RNA, 22 nt, Human
cccaggcuggagugcaguggca

SEQ ID NO: 598423 - RNA, 23 nt, Human
cccccgcaaucgccucgucgccc

SEQ ID NO: 598424 - RNA, 19 nt, Human
cccccugauugccucucuu

SEQ ID NO: 598425 - RNA, 21 nt, Human
ccccuccaaaaaugguaaaga

SEQ ID NO: 598426 - RNA, 22 nt, Human
cccuccaaaaaugguaaagagg

SEQ ID NO: 598427 - RNA, 24 nt, Human
ccgccucagccucccaaagugcug

SEQ ID NO: 598428 - RNA, 24 nt, Human
ccgccuccuggguucaagcgauuc

SEQ ID NO: 598429 - RNA, 23 nt, Human
ccuccaaaaaugguaaagaggaa

SEQ ID NO: 598430 - RNA, 19 nt, Human
ccuccgccuccuggguuca

SEQ ID NO: 598431 - RNA, 24 nt, Human
ccuccuggguucaagcgauucucc

SEQ ID NO: 598432 - RNA, 20 nt, Human
ccugaccuagugauccaccc

SEQ ID NO: 598433 - RNA, 19 nt, Human
ccugaguagcugagauuac

SEQ ID NO: 598434 - RNA, 23 nt, Human
ccugaguagcugagauuacaggc

SEQ ID NO: 598435 - RNA, 24 nt, Human
ccugaguagcugagauuacaggca

SEQ ID NO: 598436 - RNA, 23 nt, Human
ccugccucagccuccugaguagc

SEQ ID NO: 598437 - RNA, 23 nt, Human
ccuggguucaagcgauucuccug

SEQ ID NO: 598438 - RNA, 24 nt, Human
cgccucagccucccaaagugcugg

SEQ ID NO: 598439 - RNA, 21 nt, Human
cuagcucugauucaccuccuc

SEQ ID NO: 598440 - RNA, 27 nt, Human
cuagugauccacccgccucagccuccc

SEQ ID NO: 598441 - RNA, 22 nt, Human
cucaaaaaauauacaagaaagg

SEQ ID NO: 598442 - RNA, 24 nt, Human
cucacugcagccuccgccuccugg

SEQ ID NO: 598443 - RNA, 24 nt, Human
cuccugaccuagugauccacccgc

SEQ ID NO: 598444 - RNA, 21 nt, Human
cuccuggguucaagcgauucu

SEQ ID NO: 598445 - RNA, 18 nt, Human
cugaguagcugagauuac

SEQ ID NO: 598446 - RNA, 23 nt, Human
cugaguagcugagauuacaggca

SEQ ID NO: 598447 - RNA, 23 nt, Human
cugcagccuccgccuccuggguu

SEQ ID NO: 598448 - RNA, 23 nt, Human
cugccucagccuccugaguagcu

SEQ ID NO: 598449 - RNA, 24 nt, Human
cuucuuuuuguuauuacaucuaac

SEQ ID NO: 598450 - RNA, 28 nt, Human
gaaauaaggagacaagaaccaaaaauac

SEQ ID NO: 598451 - RNA, 24 nt, Human
gaccaaccagauucaauccauauc

SEQ ID NO: 598452 - RNA, 22 nt, Human
gaccuagugauccacccgccuc

SEQ ID NO: 598453 - RNA, 24 nt, Human
gaccuagugauccacccgccucag

SEQ ID NO: 598454 - RNA, 21 nt, Human
gagacagccuggacaguggag

SEQ ID NO: 598455 - RNA, 24 nt, Human
gaguagcugagauuacaggcacac

SEQ ID NO: 598456 - RNA, 24 nt, Human
gauuacaggcacacgccaccaugc

SEQ ID NO: 598457 - RNA, 18 nt, Human
gauuacaggcaugagcca

SEQ ID NO: 598458 - RNA, 22 nt, Human
gauuacaggcaugagccacaac

SEQ ID NO: 598459 - RNA, 23 nt, Human
gcacaaaaagugauacgcauaaa

SEQ ID NO: 598460 - RNA, 21 nt, Human
gccucgucgccccagcuccgg

SEQ ID NO: 598461 - RNA, 24 nt, Human
gcgauucuccugccucagccuccu

SEQ ID NO: 598462 - RNA, 19 nt, Human
gcuggagugcaguggcaca

SEQ ID NO: 598463 - RNA, 19 nt, Human
ggauuacaggcaugagcca

SEQ ID NO: 598464 - RNA, 18 nt, Human
ggcuggucuugaacuccu

SEQ ID NO: 598465 - RNA, 21 nt, Human
gggaaagaucaaggaaaaaaa

SEQ ID NO: 598466 - RNA, 22 nt, Human
ggguuucaccauguuggccagg

SEQ ID NO: 598467 - RNA, 19 nt, Human
ggucuugaacuccugaccu

SEQ ID NO: 598468 - RNA, 22 nt, Human
gguuuugaguguagguaucucu

SEQ ID NO: 598469 - RNA, 24 nt, Human
gugauccacccgccucagccuccc

SEQ ID NO: 598470 - RNA, 24 nt, Human
uaacuuuuguauuuuuaguacaga

SEQ ID NO: 598471 - RNA, 22 nt, Human
uacaacccccugauugccucuc

SEQ ID NO: 598472 - RNA, 22 nt, Human
uacagacaggguuucaccaugu

SEQ ID NO: 598473 - RNA, 18 nt, Human
uacaggcacacgccacca

SEQ ID NO: 598474 - RNA, 24 nt, Human
uacaggcaugagccacaacgccca

SEQ ID NO: 598475 - RNA, 21 nt, Human
uagaagggaaccugucaggca

SEQ ID NO: 598476 - RNA, 20 nt, Human
uagguaucucugauuuaaaa

SEQ ID NO: 598477 - RNA, 24 nt, Human
uaguacagacaggguuucaccaug

SEQ ID NO: 598478 - RNA, 22 nt, Human
uauccuuuugccuugucugggu

SEQ ID NO: 598479 - RNA, 20 nt, Human
ucaacuggaaggccgaaacc

SEQ ID NO: 598480 - RNA, 19 nt, Human
ucaagcgauucuccugccu

SEQ ID NO: 598481 - RNA, 23 nt, Human
ucacugcagccuccgccuccugg

SEQ ID NO: 598482 - RNA, 24 nt, Human
ucacugcagccuccgccuccuggg

SEQ ID NO: 598483 - RNA, 25 nt, Human
ucacugcagccuccgccuccugggu

SEQ ID NO: 598484 - RNA, 27 nt, Human
ucacugcagccuccgccuccuggguuc

SEQ ID NO: 598485 - RNA, 23 nt, Human
uccaaaaaugguaaagaggaaau

SEQ ID NO: 598486 - RNA, 21 nt, Human
uccacccgccucagccuccca

SEQ ID NO: 598487 - RNA, 24 nt, Human
ucccaaagugcugggauuacaggc

SEQ ID NO: 598488 - RNA, 23 nt, Human
ucccaggcuggagugcaguggca

SEQ ID NO: 598489 - RNA, 18 nt, Human
ucccuagacugguuugca

SEQ ID NO: 598490 - RNA, 19 nt, Human
ucccuagacugguuugcaa

SEQ ID NO: 598491 - RNA, 24 nt, Human
uccugaguagcugagauuacaggc

SEQ ID NO: 598492 - RNA, 21 nt, Human
uccuggguucaagcgauucuc

SEQ ID NO: 598493 - RNA, 24 nt, Human
uccuggguucaagcgauucuccug

SEQ ID NO: 598494 - RNA, 24 nt, Human
uccuuuugccuugucuggguuuug

SEQ ID NO: 598495 - RNA, 24 nt, Human
ucgaucucaaaaaauauacaagaa

SEQ ID NO: 598496 - RNA, 20 nt, Human
ucgccccagcuccgggcucc

SEQ ID NO: 598497 - RNA, 19 nt, Human
ucucauagacuucccuaga

SEQ ID NO: 598498 - RNA, 24 nt, Human
ucucccaggcuggagugcaguggc

SEQ ID NO: 598499 - RNA, 24 nt, Human
ucuccugccucagccuccugagua

SEQ ID NO: 598500 - RNA, 19 nt, Human
ucucugauuuaaaaguggg

SEQ ID NO: 598501 - RNA, 19 nt, Human
ucugucucccaggcuggag

SEQ ID NO: 598502 - RNA, 24 nt, Human
ucugucucccaggcuggagugcag

SEQ ID NO: 598503 - RNA, 19 nt, Human
ucuugcucugucucccagg

SEQ ID NO: 598504 - RNA, 23 nt, Human
ucuugcucugucucccaggcugg

SEQ ID NO: 598505 - RNA, 24 nt, Human
ucuugcucugucucccaggcugga

SEQ ID NO: 598506 - RNA, 27 nt, Human
ugacagacuagcucugauucaccuccu

SEQ ID NO: 598507 - RNA, 23 nt, Human
ugaccuagugauccacccgccuc

SEQ ID NO: 598508 - RNA, 21 nt, Human
ugagauuacaggcacacgcca

SEQ ID NO: 598509 - RNA, 22 nt, Human
ugagauuacaggcacacgccac

SEQ ID NO: 598510 - RNA, 24 nt, Human
ugagauuacaggcacacgccacca

SEQ ID NO: 598511 - RNA, 25 nt, Human
ugagauuacaggcacacgccaccau

SEQ ID NO: 598512 - RNA, 18 nt, Human
ugauuuaaaagugggaaa

SEQ ID NO: 598513 - RNA, 24 nt, Human
ugccucagccuccugaguagcuga

SEQ ID NO: 598514 - RNA, 24 nt, Human
ugcucugucucccaggcuggagug

SEQ ID NO: 598515 - RNA, 18 nt, Human
uggagugcaguggcacaa

SEQ ID NO: 598516 - RNA, 23 nt, Human
uggagugcaguggcacaaucuca

SEQ ID NO: 598517 - RNA, 24 nt, Human
uggagugcaguggcacaaucucag

SEQ ID NO: 598518 - RNA, 24 nt, Human
uggcacaaucucagcucacugcag

SEQ ID NO: 598519 - RNA, 24 nt, Human
uggccaggcuggucuugaacuccu

SEQ ID NO: 598520 - RNA, 19 nt, Human
ugggaaagaucaaggaaaa

SEQ ID NO: 598521 - RNA, 18 nt, Human
ugggauagaggcagguuc

SEQ ID NO: 598522 - RNA, 18 nt, Human
ugggauuacaggcaugag

SEQ ID NO: 598523 - RNA, 19 nt, Human
ugggauuacaggcaugagc

SEQ ID NO: 598524 - RNA, 21 nt, Human
ugggauuacaggcaugagcca

SEQ ID NO: 598525 - RNA, 22 nt, Human
ugggauuacaggcaugagccac

SEQ ID NO: 598526 - RNA, 22 nt, Human
ugggauuacaggcaugagccac

SEQ ID NO: 598527 - RNA, 23 nt, Human
ugggauuacaggcaugagccaca

SEQ ID NO: 598528 - RNA, 26 nt, Human
ugggauuacaggcaugagccacaacg

SEQ ID NO: 598529 - RNA, 27 nt, Human
ugggauuacaggcaugagccacaacgc

SEQ ID NO: 598530 - RNA, 23 nt, Human
uggguucaagcgauucuccugcc

SEQ ID NO: 598531 - RNA, 24 nt, Human
uggguucaagcgauucuccugccu

SEQ ID NO: 598532 - RNA, 19 nt, Human
ugguaaagaggaaauaagg

SEQ ID NO: 598533 - RNA, 19 nt, Human
ugguaaagaggaaauaagg

SEQ ID NO: 598534 - RNA, 24 nt, Human
uuaaaugcuacuuucucauagacu

SEQ ID NO: 598535 - RNA, 24 nt, Human
uuaguacagacaggguuucaccau

SEQ ID NO: 598536 - RNA, 21 nt, Human
uucaagcgauucuccugccuc

SEQ ID NO: 598537 - RNA, 23 nt, Human
uucaagcgauucuccugccucag

SEQ ID NO: 598538 - RNA, 24 nt, Human
uucaagcgauucuccugccucagc

SEQ ID NO: 598539 - RNA, 22 nt, Human
uuccuuuucuuguaucaacuuc

SEQ ID NO: 598540 - RNA, 18 nt, Human
uugaauuguguggauaga

SEQ ID NO: 598541 - RNA, 19 nt, Human
uugagugucaaaucuccag

SEQ ID NO: 598542 - RNA, 18 nt, Human
uugcucugucucccaggc

SEQ ID NO: 598543 - RNA, 21 nt, Human
uuggucaaauaguuguuagaa

SEQ ID NO: 598544 - RNA, 24 nt, Human
uuucaccauguuggccaggcuggu

SEQ ID NO: 598545 - RNA, 24 nt, Human
uuuuuaguacagacaggguuucac

SEQ ID NO: 598546 - RNA, 18 nt, Human
aagugcucaauuccaaag

SEQ ID NO: 598547 - RNA, 21 nt, Human
auugcacugguaaacaccaca

SEQ ID NO: 598548 - RNA, 22 nt, Human
auuuuuugacuguagauucugg

SEQ ID NO: 598549 - RNA, 25 nt, Human
ccaaagccccacccaucuauugcac

SEQ ID NO: 598550 - RNA, 23 nt, Human
cuuuuugaugccaauuuuuugac

SEQ ID NO: 598551 - RNA, 19 nt, Human
gauaauguggcaaaaagaa

SEQ ID NO: 598552 - RNA, 18 nt, Human
gauucuggcgaagugcuc

SEQ ID NO: 598553 - RNA, 20 nt, Human
uaaacagagauaauguggca

SEQ ID NO: 598554 - RNA, 18 nt, Human
uaaggaaaagaauccacc

SEQ ID NO: 598555 - RNA, 20 nt, Human
uauaaggaaaagaauccacc

SEQ ID NO: 598556 - RNA, 23 nt, Human
ucccaauauuaaacccuugauga

SEQ ID NO: 598557 - RNA, 22 nt, Human
ucccaauauuaaacccuugauu

SEQ ID NO: 598558 - RNA, 26 nt, Human
ugcucaauuccaaagccccacccauc

SEQ ID NO: 598559 - RNA, 18 nt, Human
ugguaaacaccacauuuc

SEQ ID NO: 598560 - RNA, 22 nt, Human
aaacugccuggaaaucuucagc

SEQ ID NO: 598561 - RNA, 18 nt, Human
aagagccagggaucacaa

SEQ ID NO: 598562 - RNA, 21 nt, Human
aagagccagggaucacaaaug

SEQ ID NO: 598563 - RNA, 18 nt, Human
accaggcaauuucuuguu

SEQ ID NO: 598564 - RNA, 21 nt, Human
acugauccucccgaagguggg

SEQ ID NO: 598565 - RNA, 22 nt, Human
agggaucacaaaugacuggguc

SEQ ID NO: 598566 - RNA, 25 nt, Human
auuacaauucacaguaacauacacu

SEQ ID NO: 598567 - RNA, 19 nt, Human
caccaaaccggggacgccg

SEQ ID NO: 598568 - RNA, 20 nt, Human
caccaaaccggggacgccgc

SEQ ID NO: 598569 - RNA, 19 nt, Human
cgacacagauacuggcucc

SEQ ID NO: 598570 - RNA, 23 nt, Human
cucacagauuugaccaggcaauu

SEQ ID NO: 598571 - RNA, 23 nt, Human
cuggugucaguauugaucucuuu

SEQ ID NO: 598572 - RNA, 22 nt, Human
gacugggucagaauuggugcca

SEQ ID NO: 598573 - RNA, 23 nt, Human
gcgggcggcggcgacacagauac

SEQ ID NO: 598574 - RNA, 18 nt, Human
ggcgccgcagcaccaaac

SEQ ID NO: 598575 - RNA, 22 nt, Human
guccucacagauuugaccaggc

SEQ ID NO: 598576 - RNA, 18 nt, Human
uaacauguauacauuugc

SEQ ID NO: 598577 - RNA, 22 nt, Human
ucacagauuugaccaggcaauu

SEQ ID NO: 598578 - RNA, 21 nt, Human
uccacaaaaacugccuggaaa

SEQ ID NO: 598579 - RNA, 23 nt, Human
uccggcgacuccgagccucacag

SEQ ID NO: 598580 - RNA, 18 nt, Human
ugccuggaaaucuucagc

SEQ ID NO: 598581 - RNA, 19 nt, Human
ugcuugauuagagcuggac

SEQ ID NO: 598582 - RNA, 19 nt, Human
ugguacaguauacaccuau

SEQ ID NO: 598583 - RNA, 20 nt, Human
ugguacaguauacaccuaua

SEQ ID NO: 598584 - RNA, 26 nt, Human
uguauacauuugcaguaauuuguaca

SEQ ID NO: 598585 - RNA, 27 nt, Human
aaacauuuugaaaagcaaucuaaauuc

SEQ ID NO: 598586 - RNA, 21 nt, Human
aaacugauaugauggcuggaa

SEQ ID NO: 598587 - RNA, 20 nt, Human
aacaggaugacaguagccuu

SEQ ID NO: 598588 - RNA, 18 nt, Human
aagcauuuccuugagucc

SEQ ID NO: 598589 - RNA, 24 nt, Human
agccaagaagagaaauuauauccc

SEQ ID NO: 598590 - RNA, 20 nt, Human
aguuuagguugggaggucaa

SEQ ID NO: 598591 - RNA, 23 nt, Human
auuccagugggcugcuuucuggu

SEQ ID NO: 598592 - RNA, 18 nt, Human
cagaaaguuuaggugacu

SEQ ID NO: 598593 - RNA, 20 nt, Human
ccagaaaguuuaggugacug

SEQ ID NO: 598594 - RNA, 21 nt, Human
cccacuaagcuccccauucca

SEQ ID NO: 598595 - RNA, 23 nt, Human
ccccaaguugucuguguuccgcc

SEQ ID NO: 598596 - RNA, 21 nt, Human
ccuacugccauacaaccugaa

SEQ ID NO: 598597 - RNA, 25 nt, Human
cgccucaacugcuaacuugccuacu

SEQ ID NO: 598598 - RNA, 21 nt, Human
cuaagcuccccauuccagugg

SEQ ID NO: 598599 - RNA, 23 nt, Human
cuauuuugucuucauggaauaua

SEQ ID NO: 598600 - RNA, 30 nt, Human
cucuccugcaaacaaacuacagauuccauu

SEQ ID NO: 598601 - RNA, 19 nt, Human
cugaacuugauuaauucua

SEQ ID NO: 598602 - RNA, 26 nt, Human
cuugccuaccugauaaaccgacuucg

SEQ ID NO: 598603 - RNA, 18 nt, Human
cuuuagaauuuagaguuu

SEQ ID NO: 598604 - RNA, 24 nt, Human
gaaggacugggagaugggagauug

SEQ ID NO: 598605 - RNA, 18 nt, Human
gaauagaaguucaucuuc

SEQ ID NO: 598606 - RNA, 22 nt, Human
gggaggucaaaaucauaacuuu

SEQ ID NO: 598607 - RNA, 20 nt, Human
ggggaggucauccucugcag

SEQ ID NO: 598608 - RNA, 20 nt, Human
guuuuggacuagacuuccaa

SEQ ID NO: 598609 - RNA, 19 nt, Human
uaaagguaugucuuggaau

SEQ ID NO: 598610 - RNA, 20 nt, Human
uaaauuguauguauuuauug

SEQ ID NO: 598611 - RNA, 27 nt, Human
uacacuaugauuuuuuguugugguuag

SEQ ID NO: 598612 - RNA, 24 nt, Human
uagaguuuagguugggaggucaaa

SEQ ID NO: 598613 - RNA, 19 nt, Human
uagcugucauuuccuccag

SEQ ID NO: 598614 - RNA, 21 nt, Human
uaguuaucagucaccaccaga

SEQ ID NO: 598615 - RNA, 18 nt, Human
uaugucuuguacuaggga

SEQ ID NO: 598616 - RNA, 21 nt, Human
uccuuuuccaugauugggcuu

SEQ ID NO: 598617 - RNA, 23 nt, Human
ucuccugcaaacaaacuacagau

SEQ ID NO: 598618 - RNA, 18 nt, Human
ucugcaguuggggacuga

SEQ ID NO: 598619 - RNA, 23 nt, Human
ucugcaguuggggacugaaggac

SEQ ID NO: 598620 - RNA, 21 nt, Human
ucugguccuuuuccaugauug

SEQ ID NO: 598621 - RNA, 21 nt, Human
ugaaacuuaaagagguaaagg

SEQ ID NO: 598622 - RNA, 21 nt, Human
ugaacugaaguccagaaaguu

SEQ ID NO: 598623 - RNA, 23 nt, Human
ugaauagaaguucaucuucuauu

SEQ ID NO: 598624 - RNA, 23 nt, Human
ugccauacaaccugaacugaagu

SEQ ID NO: 598625 - RNA, 23 nt, Human
uggaguuuucugaacagaaaaau

SEQ ID NO: 598626 - RNA, 19 nt, Human
uggcaaacugauaugaugg

SEQ ID NO: 598627 - RNA, 20 nt, Human
uggccccagaccaacaacag

SEQ ID NO: 598628 - RNA, 19 nt, Human
ugggcugcuuucugguccu

SEQ ID NO: 598629 - RNA, 24 nt, Human
uggggaggucauccucugcaguug

SEQ ID NO: 598630 - RNA, 18 nt, Human
uguacuagggauacaaag

SEQ ID NO: 598631 - RNA, 25 nt, Human
uguauuuauugaccuaauugcuuac

SEQ ID NO: 598632 - RNA, 22 nt, Human
ugucauuuccuccaguguccaa

SEQ ID NO: 598633 - RNA, 21 nt, Human
ugugaccuugcugaacuugau

SEQ ID NO: 598634 - RNA, 22 nt, Human
uguuuuggacuagacuuccaaa

SEQ ID NO: 598635 - RNA, 23 nt, Human
uuccagugggcugcuuucugguc

SEQ ID NO: 598636 - RNA, 23 nt, Human
uucugagauuuuccuguuuugga

SEQ ID NO: 598637 - RNA, 28 nt, Human
uugcugaacuugauuaauucuauuacac

SEQ ID NO: 598638 - RNA, 20 nt, Human
uuuuuggaguuuucugaaca

SEQ ID NO: 598639 - RNA, 19 nt, Human
aagaggcccugcagcuggc

SEQ ID NO: 598640 - RNA, 21 nt, Human
acacagcgacaggucccacaa

SEQ ID NO: 598641 - RNA, 18 nt, Human
aggacacagaaggggagg

SEQ ID NO: 598642 - RNA, 22 nt, Human
aggaccugcgccgucagauccu

SEQ ID NO: 598643 - RNA, 21 nt, Human
aggaccuugauggaggguggg

SEQ ID NO: 598644 - RNA, 18 nt, Human
aggagcaggaggcuuugc

SEQ ID NO: 598645 - RNA, 21 nt, Human
aggaggcuuugcaagguagac

SEQ ID NO: 598646 - RNA, 21 nt, Human
agggagcaggggcugggcugg

SEQ ID NO: 598647 - RNA, 22 nt, Human
agggagcaggggcugggcugga

SEQ ID NO: 598648 - RNA, 26 nt, Human
aggggacugggaaugcagccgccagg

SEQ ID NO: 598649 - RNA, 22 nt, Human
aggggccucugagaugaugggc

SEQ ID NO: 598650 - RNA, 24 nt, Human
aucaguuccccugaggauuuguua

SEQ ID NO: 598651 - RNA, 24 nt, Human
auuaaaauacagaggaugccucug

SEQ ID NO: 598652 - RNA, 22 nt, Human
cagaauccaggucugggguuuc

SEQ ID NO: 598653 - RNA, 20 nt, Human
cagaguucauuaaaauacag

SEQ ID NO: 598654 - RNA, 30 nt, Human
cagauuaaaaugcagaguucauuaaaauag

SEQ ID NO: 598655 - RNA, 21 nt, Human
cagcaagaggcccugcagcug

SEQ ID NO: 598656 - RNA, 19 nt, Human
cagccgccaggaccagcac

SEQ ID NO: 598657 - RNA, 20 nt, Human
cagcuggcuggcuggcugga

SEQ ID NO: 598658 - RNA, 18 nt, Human
caggggcaccugagcucc

SEQ ID NO: 598659 - RNA, 27 nt, Human
caggggccucugagaugaugggcucug

SEQ ID NO: 598660 - RNA, 20 nt, Human
cauuucccaguacugugcuc

SEQ ID NO: 598661 - RNA, 20 nt, Human
ccaucagcucuuaagcagca

SEQ ID NO: 598662 - RNA, 24 nt, Human
cccccacacagcgacaggucccac

SEQ ID NO: 598663 - RNA, 23 nt, Human
cccgcccacugucacagagacca

SEQ ID NO: 598664 - RNA, 25 nt, Human
ccucugagaugaugggcucugguuc

SEQ ID NO: 598665 - RNA, 20 nt, Human
ccugcagcuggcuggcuggc

SEQ ID NO: 598666 - RNA, 18 nt, Human
ccuggggccacguucccc

SEQ ID NO: 598667 - RNA, 20 nt, Human
cgacagcccccacacagcga

SEQ ID NO: 598668 - RNA, 19 nt, Human
cgaccgcccaucaguuccc

SEQ ID NO: 598669 - RNA, 25 nt, Human
cgccaggaccagcacugacagccaa

SEQ ID NO: 598670 - RNA, 26 nt, Human
cggccagagccgaguggcaacggaaa

SEQ ID NO: 598671 - RNA, 20 nt, Human
cggugcagggccccgcccag

SEQ ID NO: 598672 - RNA, 20 nt, Human
cugcagaaugugaccccggc

SEQ ID NO: 598673 - RNA, 19 nt, Human
cugcaggacacagaagggg

SEQ ID NO: 598674 - RNA, 20 nt, Human
cugggcucugaggguccugg

SEQ ID NO: 598675 - RNA, 24 nt, Human
cugguuccuggccuguagcauggg

SEQ ID NO: 598676 - RNA, 22 nt, Human
cuguaugcccauuucccaguac

SEQ ID NO: 598677 - RNA, 23 nt, Human
cuguaugcccauuucccaguacu

SEQ ID NO: 598678 - RNA, 22 nt, Human
cuuugcaagguagacucuacag

SEQ ID NO: 598679 - RNA, 20 nt, Human
gcagcuggcuggcuggcugg

SEQ ID NO: 598680 - RNA, 18 nt, Human
gcaggacacagaagggga

SEQ ID NO: 598681 - RNA, 18 nt, Human
gcccugcagcuggcuggc

SEQ ID NO: 598682 - RNA, 20 nt, Human
ggagauguaaacccuccugc

SEQ ID NO: 598683 - RNA, 18 nt, Human
ggcucugaggguccuggu

SEQ ID NO: 598684 - RNA, 21 nt, Human
ggcugcauccucugcaguugc

SEQ ID NO: 598685 - RNA, 26 nt, Human
ggcugggcuggagucggugcagggcc

SEQ ID NO: 598686 - RNA, 22 nt, Human
gggaaugaacagacaugcugca

SEQ ID NO: 598687 - RNA, 25 nt, Human
gggaggaccugcgccgucagauccu

SEQ ID NO: 598688 - RNA, 20 nt, Human
uaagaagucugggcuaggcu

SEQ ID NO: 598689 - RNA, 24 nt, Human
uaagcagguggcugcauccucugc

SEQ ID NO: 598690 - RNA, 19 nt, Human
uccaggguguggaggaccc

SEQ ID NO: 598691 - RNA, 20 nt, Human
uccaggguguggaggaccca

SEQ ID NO: 598692 - RNA, 18 nt, Human
ucccaauacugugcuccc

SEQ ID NO: 598693 - RNA, 22 nt, Human
uccccgcagagggagcaggggc

SEQ ID NO: 598694 - RNA, 24 nt, Human
uccccugaggauuuguuacguucu

SEQ ID NO: 598695 - RNA, 25 nt, Human
ucugguuccuggccuguagcauggg

SEQ ID NO: 598696 - RNA, 18 nt, Human
ugagcccccauuucccag

SEQ ID NO: 598697 - RNA, 19 nt, Human
ugaugggcucugguuccug

SEQ ID NO: 598698 - RNA, 19 nt, Human
ugcaaggcuggcucuucuu

SEQ ID NO: 598699 - RNA, 20 nt, Human
uggagggugggguuucaggg

SEQ ID NO: 598700 - RNA, 21 nt, Human
uggagggugggguuucagggg

SEQ ID NO: 598701 - RNA, 19 nt, Human
uggcccagcacugccuggg

SEQ ID NO: 598702 - RNA, 20 nt, Human
uggcuggcuggcuggacagc

SEQ ID NO: 598703 - RNA, 18 nt, Human
uggguaggagcaggaggc

SEQ ID NO: 598704 - RNA, 20 nt, Human
ugggugugaugaagaugaug

SEQ ID NO: 598705 - RNA, 19 nt, Human
ugugaugaagaugaugaca

SEQ ID NO: 598706 - RNA, 20 nt, Human
uguggaggacccagugcccg

SEQ ID NO: 598707 - RNA, 22 nt, Human
uucccaguacugugggcuccca

SEQ ID NO: 598708 - RNA, 25 nt, Human
uuucccaguacugugcucacaggug

SEQ ID NO: 598709 - RNA, 23 nt, Human
aaaacacucugaucugaggccaa

SEQ ID NO: 598710 - RNA, 21 nt, Human
aaagaagaggaagagaaagag

SEQ ID NO: 598711 - RNA, 23 nt, Human
aaccugcaacccacaacagccga

SEQ ID NO: 598712 - RNA, 19 nt, Human
aagagagagaaagaagagg

SEQ ID NO: 598713 - RNA, 25 nt, Human
aagcaagagagagagaggagggacc

SEQ ID NO: 598714 - RNA, 22 nt, Human
acaggaagggaagagagaggag

SEQ ID NO: 598715 - RNA, 24 nt, Human
accacaacagcagcacccaaccug

SEQ ID NO: 598716 - RNA, 25 nt, Human
acccaaccugcaacccacaacagcc

SEQ ID NO: 598717 - RNA, 23 nt, Human
acccacugaagcaccccgugucc

SEQ ID NO: 598718 - RNA, 20 nt, Human
acccgggcuguggaaggccc

SEQ ID NO: 598719 - RNA, 21 nt, Human
acuggccaggccaaaaugaaa

SEQ ID NO: 598720 - RNA, 23 nt, Human
agaaagaagaggaagagaaagag

SEQ ID NO: 598721 - RNA, 23 nt, Human
agaaagaaguggagaaaagggac

SEQ ID NO: 598722 - RNA, 24 nt, Human
agacaggaagggaagagagaggag

SEQ ID NO: 598723 - RNA, 26 nt, Human
agacaggaagggaagagaggggaccc

SEQ ID NO: 598724 - RNA, 26 nt, Human
agacaggagagagagaagagggaccc

SEQ ID NO: 598725 - RNA, 26 nt, Human
agacaggaggggaagagaggggaccc

SEQ ID NO: 598726 - RNA, 18 nt, Human
agagacaggaagggaaga

SEQ ID NO: 598727 - RNA, 18 nt, Human
agagacaggaggggaaga

SEQ ID NO: 598728 - RNA, 22 nt, Human
agagacaggagggguagagaga

SEQ ID NO: 598729 - RNA, 18 nt, Human
agagagaaagaagaggaa

SEQ ID NO: 598730 - RNA, 18 nt, Human
agagagagaagaaagcaa

SEQ ID NO: 598731 - RNA, 21 nt, Human
agagagagaggagaggaagag

SEQ ID NO: 598732 - RNA, 21 nt, Human
agagagagaggagaggaagag

SEQ ID NO: 598733 - RNA, 21 nt, Human
agagagagaggagaggaagag

SEQ ID NO: 598734 - RNA, 21 nt, Human
agagagagaggagaggaagag

SEQ ID NO: 598735 - RNA, 18 nt, Human
agagagaggaggggagga

SEQ ID NO: 598736 - RNA, 18 nt, Human
agagagaggaggggagga

SEQ ID NO: 598737 - RNA, 26 nt, Human
agagaggagaggaagagauagaggag

SEQ ID NO: 598738 - RNA, 22 nt, Human
agagauagaggacaggaagaga

SEQ ID NO: 598739 - RNA, 22 nt, Human
agagauagaggaggggaagaga

SEQ ID NO: 598740 - RNA, 18 nt, Human
agaggaagagaaagagag

SEQ ID NO: 598741 - RNA, 18 nt, Human
agaggaagagagacagag

SEQ ID NO: 598742 - RNA, 18 nt, Human
agaggaagagagacagag

SEQ ID NO: 598743 - RNA, 18 nt, Human
agaggaagagagagagga

SEQ ID NO: 598744 - RNA, 18 nt, Human
agaggaagagaggagagg

SEQ ID NO: 598745 - RNA, 21 nt, Human
agaggaagagauagaggaggg

SEQ ID NO: 598746 - RNA, 23 nt, Human
agaggacaggaagagagagagga

SEQ ID NO: 598747 - RNA, 22 nt, Human
agaggagaagagagagaaagaa

SEQ ID NO: 598748 - RNA, 18 nt, Human
agaggagaggaagagaga

SEQ ID NO: 598749 - RNA, 22 nt, Human
agaggaggggaagagauagagg

SEQ ID NO: 598750 - RNA, 18 nt, Human
agaggaggggaggagaga

SEQ ID NO: 598751 - RNA, 27 nt, Human
agaggaggggaggagagacaggagggg

SEQ ID NO: 598752 - RNA, 24 nt, Human
agagggcccuggaggaggaaggcc

SEQ ID NO: 598753 - RNA, 22 nt, Human
agcaagagagagagaggagagg

SEQ ID NO: 598754 - RNA, 21 nt, Human
agccuggucugcagagggccc

SEQ ID NO: 598755 - RNA, 23 nt, Human
aggaagagagagaggagaggaag

SEQ ID NO: 598756 - RNA, 23 nt, Human
aggaagagagagaggagaggaag

SEQ ID NO: 598757 - RNA, 23 nt, Human
aggaagagagagaggagaggaag

SEQ ID NO: 598758 - RNA, 18 nt, Human
aggaagagagagaggagg

SEQ ID NO: 598759 - RNA, 18 nt, Human
aggaagagagagaggagg

SEQ ID NO: 598760 - RNA, 21 nt, Human
aggaagagagaggagaggaag

SEQ ID NO: 598761 - RNA, 21 nt, Human
aggaagagagaggaggggagg

SEQ ID NO: 598762 - RNA, 19 nt, Human
aggaagagaggagaggaag

SEQ ID NO: 598763 - RNA, 18 nt, Human
aggaagagauagaggagg

SEQ ID NO: 598764 - RNA, 25 nt, Human
aggaagggaagagagaggagaggaa

SEQ ID NO: 598765 - RNA, 22 nt, Human
aggagaagagagagaaagaaga

SEQ ID NO: 598766 - RNA, 22 nt, Human
aggaggggaagagauagaggac

SEQ ID NO: 598767 - RNA, 23 nt, Human
aggaggggaggagagacaggagg

SEQ ID NO: 598768 - RNA, 24 nt, Human
aggaggggaggagagacaggaggg

SEQ ID NO: 598769 - RNA, 19 nt, Human
aggccaaaaugaaacaucu

SEQ ID NO: 598770 - RNA, 19 nt, Human
agggcgugaugauuuaaaa

SEQ ID NO: 598771 - RNA, 18 nt, Human
aggggaagagagacagga

SEQ ID NO: 598772 - RNA, 18 nt, Human
aggggaggagagacagga

SEQ ID NO: 598773 - RNA, 18 nt, Human
aggggaggagagacagga

SEQ ID NO: 598774 - RNA, 26 nt, Human
auccaagaccaccagagcaggcccac

SEQ ID NO: 598775 - RNA, 24 nt, Human
caaaauacaaauugcugaaguggg

SEQ ID NO: 598776 - RNA, 25 nt, Human
caaccugcaacccacaacagccgag

SEQ ID NO: 598777 - RNA, 21 nt, Human
caagaccaccagagcaggccc

SEQ ID NO: 598778 - RNA, 24 nt, Human
caccagaaauccagaagacaccuu

SEQ ID NO: 598779 - RNA, 20 nt, Human
caccagagcaggcccaccag

SEQ ID NO: 598780 - RNA, 23 nt, Human
cacugaagcaccccguguccugg

SEQ ID NO: 598781 - RNA, 19 nt, Human
cagaagacaccugaagagg

SEQ ID NO: 598782 - RNA, 18 nt, Human
cagcaaccucaaccggca

SEQ ID NO: 598783 - RNA, 19 nt, Human
cagcacccaaccugcaacc

SEQ ID NO: 598784 - RNA, 23 nt, Human
cagcagcacccaaccugcaaccc

SEQ ID NO: 598785 - RNA, 27 nt, Human
cagcaggcaggaggcagcaggagaacc

SEQ ID NO: 598786 - RNA, 21 nt, Human
cagguuccuccaucucagccu

SEQ ID NO: 598787 - RNA, 24 nt, Human
caugcuucaaggagagagggugac

SEQ ID NO: 598788 - RNA, 22 nt, Human
ccaaccugcaacccacaacagc

SEQ ID NO: 598789 - RNA, 24 nt, Human
ccacguugccccucagaaugccug

SEQ ID NO: 598790 - RNA, 18 nt, Human
ccacugaagcaccccgug

SEQ ID NO: 598791 - RNA, 22 nt, Human
ccacugaagcaccccguguccu

SEQ ID NO: 598792 - RNA, 18 nt, Human
ccagguugaaggcauggc

SEQ ID NO: 598793 - RNA, 26 nt, Human
ccaugcaucccuggcccuuccuccac

SEQ ID NO: 598794 - RNA, 20 nt, Human
cccacugaagcaccccgugu

SEQ ID NO: 598795 - RNA, 19 nt, Human
ccggcacccggaguuccgc

SEQ ID NO: 598796 - RNA, 21 nt, Human
ccguguccuggcucgaccagg

SEQ ID NO: 598797 - RNA, 22 nt, Human
ccuccaucucagccuggucugc

SEQ ID NO: 598798 - RNA, 19 nt, Human
ccuccugccagguugaagg

SEQ ID NO: 598799 - RNA, 25 nt, Human
ccugcagcugcagcaggcaggaggc

SEQ ID NO: 598800 - RNA, 20 nt, Human
ccugcugguacaggagcagg

SEQ ID NO: 598801 - RNA, 19 nt, Human
ccuggcccuuccuccacgu

SEQ ID NO: 598802 - RNA, 27 nt, Human
cuacaguggagauucuggugagugugg

SEQ ID NO: 598803 - RNA, 23 nt, Human
cugccagguugaaggcauggcug

SEQ ID NO: 598804 - RNA, 19 nt, Human
cugugccggaagcgcccuc

SEQ ID NO: 598805 - RNA, 23 nt, Human
gaccacaacagcagcacccaacc

SEQ ID NO: 598806 - RNA, 26 nt, Human
gaccacaacagcagcacccaaccugg

SEQ ID NO: 598807 - RNA, 20 nt, Human
gagaaagaagaggaagagaa

SEQ ID NO: 598808 - RNA, 22 nt, Human
gagaaagaagaggaagagaaag

SEQ ID NO: 598809 - RNA, 19 nt, Human
gagaaagagaggagaagag

SEQ ID NO: 598810 - RNA, 20 nt, Human
gagacaggaagggaagagag

SEQ ID NO: 598811 - RNA, 20 nt, Human
gagagagagagaauaucagc

SEQ ID NO: 598812 - RNA, 23 nt, Human
gagaggaagagagaggagaggaa

SEQ ID NO: 598813 - RNA, 22 nt, Human
gagaggaagagauagaggaggg

SEQ ID NO: 598814 - RNA, 18 nt, Human
gaggacaggaagagagag

SEQ ID NO: 598815 - RNA, 18 nt, Human
gaggagagacaggagggg

SEQ ID NO: 598816 - RNA, 20 nt, Human
gagugggagaaagaagugga

SEQ ID NO: 598817 - RNA, 19 nt, Human
gagugugggugggcucgcc

SEQ ID NO: 598818 - RNA, 19 nt, Human
gaguuccgcugugccggaa

SEQ ID NO: 598819 - RNA, 20 nt, Human
gccacuggccaggccaaaau

SEQ ID NO: 598820 - RNA, 22 nt, Human
gccagugaccccaauauuuucu

SEQ ID NO: 598821 - RNA, 20 nt, Human
gcuuucagccacuggccagg

SEQ ID NO: 598822 - RNA, 19 nt, Human
gcuuugaaguggccccugc

SEQ ID NO: 598823 - RNA, 20 nt, Human
ggaagagauagaggacagga

SEQ ID NO: 598824 - RNA, 19 nt, Human
ggacaggaagagagagagg

SEQ ID NO: 598825 - RNA, 19 nt, Human
ggagaacccgggcugugga

SEQ ID NO: 598826 - RNA, 26 nt, Human
ggagaggaagagagagaggagaggaa

SEQ ID NO: 598827 - RNA, 26 nt, Human
ggagaggaagagagagaggagaggaa

SEQ ID NO: 598828 - RNA, 23 nt, Human
ggagaggaagagagagaggaggg

SEQ ID NO: 598829 - RNA, 29 nt, Human
ggagaggaagagagagaggaggggaggag

SEQ ID NO: 598830 - RNA, 21 nt, Human
ggagaggaagagagaggaggg

SEQ ID NO: 598831 - RNA, 27 nt, Human
ggagaggaagagagaggaggggaggag

SEQ ID NO: 598832 - RNA, 26 nt, Human
ggagaggaagagauagaggaggggaa

SEQ ID NO: 598833 - RNA, 20 nt, Human
ggaggaugaggaguggcuac

SEQ ID NO: 598834 - RNA, 23 nt, Human
ggaggggaggagagacaggaggg

SEQ ID NO: 598835 - RNA, 23 nt, Human
ggaggggaggagagacaggaggg

SEQ ID NO: 598836 - RNA, 21 nt, Human
gggaagagagagaagaggaag

SEQ ID NO: 598837 - RNA, 21 nt, Human
gggaagagagaggagaggaag

SEQ ID NO: 598838 - RNA, 23 nt, Human
gggacuacaguggagauucuggu

SEQ ID NO: 598839 - RNA, 22 nt, Human
gggaggagagacaggaggggua

SEQ ID NO: 598840 - RNA, 21 nt, Human
ggguagagagaggagaggaag

SEQ ID NO: 598841 - RNA, 19 nt, Human
gguacaggagcagggugag

SEQ ID NO: 598842 - RNA, 18 nt, Human
gguagagagaggagagga

SEQ ID NO: 598843 - RNA, 21 nt, Human
guccaucaccagaaauccaga

SEQ ID NO: 598844 - RNA, 24 nt, Human
gucugcagagggcccuggaggagg

SEQ ID NO: 598845 - RNA, 22 nt, Human
uaaauaaaagcaacaugcuuca

SEQ ID NO: 598846 - RNA, 20 nt, Human
ucagccacuggccaggccaa

SEQ ID NO: 598847 - RNA, 22 nt, Human
uccaucaccagaaauccagaag

SEQ ID NO: 598848 - RNA, 25 nt, Human
uccaucaccagaaauccagaagaca

SEQ ID NO: 598849 - RNA, 18 nt, Human
uccccaggcaccuugcug

SEQ ID NO: 598850 - RNA, 19 nt, Human
uccccaggcaccuugcugg

SEQ ID NO: 598851 - RNA, 19 nt, Human
ucucugggaaagcugcugg

SEQ ID NO: 598852 - RNA, 22 nt, Human
ucugaucugaggccaauggcau

SEQ ID NO: 598853 - RNA, 18 nt, Human
ucugcucaagucucccca

SEQ ID NO: 598854 - RNA, 22 nt, Human
ucuguccaucaccagaaaucca

SEQ ID NO: 598855 - RNA, 22 nt, Human
ugaaacaucugcucaagucucc

SEQ ID NO: 598856 - RNA, 19 nt, Human
ugaagaggacugacuguuu

SEQ ID NO: 598857 - RNA, 19 nt, Human
ugaagcaccccguguccug

SEQ ID NO: 598858 - RNA, 21 nt, Human
ugaagcaccccguguccuggc

SEQ ID NO: 598859 - RNA, 19 nt, Human
ugaagugggagaggaagug

SEQ ID NO: 598860 - RNA, 21 nt, Human
ugacagacccacugaagcacc

SEQ ID NO: 598861 - RNA, 19 nt, Human
ugacuguuucuuugccacg

SEQ ID NO: 598862 - RNA, 18 nt, Human
ugaggaguggcuacaccu

SEQ ID NO: 598863 - RNA, 21 nt, Human
ugagugggagaaagaagugga

SEQ ID NO: 598864 - RNA, 19 nt, Human
ugcugaagugggagaggaa

SEQ ID NO: 598865 - RNA, 20 nt, Human
ugcuggaccacaaguuauca

SEQ ID NO: 598866 - RNA, 22 nt, Human
ugcuggggaagccagaggucac

SEQ ID NO: 598867 - RNA, 25 nt, Human
ugcugggggugagugggagaaagaa

SEQ ID NO: 598868 - RNA, 23 nt, Human
uggcaucaaaauacaaauugcug

SEQ ID NO: 598869 - RNA, 20 nt, Human
uggcuacaccuccugccagg

SEQ ID NO: 598870 - RNA, 19 nt, Human
uggcuuugaaguggccccu

SEQ ID NO: 598871 - RNA, 22 nt, Human
ugggaaagcugcuggggaagcc

SEQ ID NO: 598872 - RNA, 23 nt, Human
ugggaaggaccacaacagcagca

SEQ ID NO: 598873 - RNA, 22 nt, Human
ugggagaggaagugaagggcug

SEQ ID NO: 598874 - RNA, 22 nt, Human
ugggaggcuagaagcaucucca

SEQ ID NO: 598875 - RNA, 23 nt, Human
uggggaagccagaggucacagug

SEQ ID NO: 598876 - RNA, 19 nt, Human
uggugagugugggugggcu

SEQ ID NO: 598877 - RNA, 26 nt, Human
uguggaaggccccucugccuucaaag

SEQ ID NO: 598878 - RNA, 27 nt, Human
uguggaaggccccucugccuucaaagg

SEQ ID NO: 598879 - RNA, 23 nt, Human
uuaaaacacucugaucugaggcc

SEQ ID NO: 598880 - RNA, 19 nt, Human
uucuggugagugugggugg

SEQ ID NO: 598881 - RNA, 23 nt, Human
uugaaacuguaaaaagauuucuc

SEQ ID NO: 598882 - RNA, 26 nt, Human
uugaaggcauggcuggggccuccuac

SEQ ID NO: 598883 - RNA, 20 nt, Human
uuggcuuugaaguggccccu

SEQ ID NO: 598884 - RNA, 19 nt, Human
aaaacacaaaagauuucac

SEQ ID NO: 598885 - RNA, 21 nt, Human
aaacaaccucccccagagaau

SEQ ID NO: 598886 - RNA, 23 nt, Human
aaagggagagaaauaaaggaaau

SEQ ID NO: 598887 - RNA, 23 nt, Human
aagaaacaaccucccccagagaa

SEQ ID NO: 598888 - RNA, 19 nt, Human
aagguccuauucugcuccu

SEQ ID NO: 598889 - RNA, 22 nt, Human
aaugaagaguuuggcaauggug

SEQ ID NO: 598890 - RNA, 19 nt, Human
acuagacugcucugaagca

SEQ ID NO: 598891 - RNA, 19 nt, Human
agaaaaacagagaagucag

SEQ ID NO: 598892 - RNA, 23 nt, Human
agacaggaguauaucgggaccua

SEQ ID NO: 598893 - RNA, 21 nt, Human
agagaccccaaagcaacacca

SEQ ID NO: 598894 - RNA, 21 nt, Human
agaggaaggacagaggaagag

SEQ ID NO: 598895 - RNA, 20 nt, Human
agagugaguaggggagaugg

SEQ ID NO: 598896 - RNA, 21 nt, Human
agaugggaaauggcggggggc

SEQ ID NO: 598897 - RNA, 20 nt, Human
agcacacauucagaggguag

SEQ ID NO: 598898 - RNA, 20 nt, Human
agccaucuaaccaagaaguc

SEQ ID NO: 598899 - RNA, 19 nt, Human
aggaaggacagaggaagag

SEQ ID NO: 598900 - RNA, 21 nt, Human
agggauaggguagcuguuagu

SEQ ID NO: 598901 - RNA, 19 nt, Human
aucuuagaaggcucuguuc

SEQ ID NO: 598902 - RNA, 21 nt, Human
caacaccaguuugggguuccc

SEQ ID NO: 598903 - RNA, 20 nt, Human
caccuacacaaaauguggaa

SEQ ID NO: 598904 - RNA, 20 nt, Human
caguggcuucccacucucug

SEQ ID NO: 598905 - RNA, 22 nt, Human
cauauaagguccuauucugcuc

SEQ ID NO: 598906 - RNA, 22 nt, Human
cauggagcagggaaggucgucc

SEQ ID NO: 598907 - RNA, 24 nt, Human
ccacccaucuuauugauccaucuc

SEQ ID NO: 598908 - RNA, 19 nt, Human
ccaucucucugauggauuc

SEQ ID NO: 598909 - RNA, 19 nt, Human
cccacucucugucagacac

SEQ ID NO: 598910 - RNA, 23 nt, Human
cccugcccaccccaggucuccca

SEQ ID NO: 598911 - RNA, 30 nt, Human
cccugcccaccccaggucucccagggcagg

SEQ ID NO: 598912 - RNA, 22 nt, Human
ccugcccaccccaggucuccca

SEQ ID NO: 598913 - RNA, 21 nt, Human
ccuucacugcauuuuuuuccc

SEQ ID NO: 598914 - RNA, 25 nt, Human
ccuuugggaagcugguaagucccug

SEQ ID NO: 598915 - RNA, 21 nt, Human
cgggaccuagcuaccagggag

SEQ ID NO: 598916 - RNA, 21 nt, Human
cuauucugcuccuucacugca

SEQ ID NO: 598917 - RNA, 19 nt, Human
cugacaccuacacaaaaug

SEQ ID NO: 598918 - RNA, 19 nt, Human
cugcuccuucacugcauuu

SEQ ID NO: 598919 - RNA, 19 nt, Human
cugcuccuucacugcauuu

SEQ ID NO: 598920 - RNA, 21 nt, Human
gaaacaaccucccccagagaa

SEQ ID NO: 598921 - RNA, 18 nt, Human
gaaggacagaggaagagu

SEQ ID NO: 598922 - RNA, 18 nt, Human
gaaggauguuauggaugg

SEQ ID NO: 598923 - RNA, 25 nt, Human
gacaccuacacaaaauguggaaaug

SEQ ID NO: 598924 - RNA, 28 nt, Human
gaccccccccaagccacccaucuuauug

SEQ ID NO: 598925 - RNA, 18 nt, Human
gagaaaaacagagaaguc

SEQ ID NO: 598926 - RNA, 19 nt, Human
gagaaaaacagagaaguca

SEQ ID NO: 598927 - RNA, 19 nt, Human
gagaggaaggacagaggaa

SEQ ID NO: 598928 - RNA, 18 nt, Human
gagcuugcucacuagcgg

SEQ ID NO: 598929 - RNA, 18 nt, Human
gaggugaagagaaaggga

SEQ ID NO: 598930 - RNA, 19 nt, Human
gaucugggggaaauggugg

SEQ ID NO: 598931 - RNA, 18 nt, Human
gcccacucccugccugcu

SEQ ID NO: 598932 - RNA, 20 nt, Human
ggaaauggcggggggcgggg

SEQ ID NO: 598933 - RNA, 20 nt, Human
ggaccccccccaagccaccc

SEQ ID NO: 598934 - RNA, 22 nt, Human
ggaccccccccaagccacccau

SEQ ID NO: 598935 - RNA, 23 nt, Human
ggagaugggaaauggcggggggc

SEQ ID NO: 598936 - RNA, 20 nt, Human
ggcaaguguggcaggcagca

SEQ ID NO: 598937 - RNA, 20 nt, Human
ggcauggagcagggaagguc

SEQ ID NO: 598938 - RNA, 20 nt, Human
ggcggggggcgggggagaga

SEQ ID NO: 598939 - RNA, 22 nt, Human
gggaaaguauucagagcccaag

SEQ ID NO: 598940 - RNA, 24 nt, Human
ggggggcgggggagagaaaaacag

SEQ ID NO: 598941 - RNA, 22 nt, Human
ggggugcuuuuguguuaagaaa

SEQ ID NO: 598942 - RNA, 24 nt, Human
ggggugcuuuuguguuaagaaaag

SEQ ID NO: 598943 - RNA, 21 nt, Human
gggguucccugcccaccccag

SEQ ID NO: 598944 - RNA, 25 nt, Human
ggguagcuguuaguaucgacucucc

SEQ ID NO: 598945 - RNA, 18 nt, Human
gggucugagguccucagg

SEQ ID NO: 598946 - RNA, 19 nt, Human
ggugaagagaaagggagag

SEQ ID NO: 598947 - RNA, 18 nt, Human
guccuauucugcuccuuc

SEQ ID NO: 598948 - RNA, 24 nt, Human
gucguccuugcuauggaggaaagg

SEQ ID NO: 598949 - RNA, 18 nt, Human
guuaagaaaagcuacaaa

SEQ ID NO: 598950 - RNA, 22 nt, Human
uaaccaagaagucuggcaacag

SEQ ID NO: 598951 - RNA, 19 nt, Human
uaagaaaagcuacaaagug

SEQ ID NO: 598952 - RNA, 23 nt, Human
uaagaaaagcuacaaaguguuag

SEQ ID NO: 598953 - RNA, 18 nt, Human
uagagaccccaaagcaac

SEQ ID NO: 598954 - RNA, 23 nt, Human
uagagaccccaaagcaacaccag

SEQ ID NO: 598955 - RNA, 20 nt, Human
ucacugcauuuuuuucccag

SEQ ID NO: 598956 - RNA, 18 nt, Human
ucagagcggggaagggag

SEQ ID NO: 598957 - RNA, 24 nt, Human
ucagccaaucuccuuuagagaccc

SEQ ID NO: 598958 - RNA, 19 nt, Human
ucccaaucuuagaaggcuc

SEQ ID NO: 598959 - RNA, 25 nt, Human
ucccccaucucaucucgacaaucuc

SEQ ID NO: 598960 - RNA, 22 nt, Human
ucccugcccaccccaggucucc

SEQ ID NO: 598961 - RNA, 26 nt, Human
uccuugcuauggaggaaaggagagag

SEQ ID NO: 598962 - RNA, 19 nt, Human
ugaguaggggagaugggga

SEQ ID NO: 598963 - RNA, 21 nt, Human
ugaguaggggagauggggaga

SEQ ID NO: 598964 - RNA, 20 nt, Human
ugaucuagcacacauucaga

SEQ ID NO: 598965 - RNA, 29 nt, Human
uggacucuuggcacacaagccaguggcuu

SEQ ID NO: 598966 - RNA, 19 nt, Human
uggaggaaaggagagagga

SEQ ID NO: 598967 - RNA, 25 nt, Human
uggcaauggugaguagaucccuuug

SEQ ID NO: 598968 - RNA, 19 nt, Human
ugggaaaguauucagagcc

SEQ ID NO: 598969 - RNA, 21 nt, Human
ugggaggaagggagaugggaa

SEQ ID NO: 598970 - RNA, 20 nt, Human
ugucuaagaaaguagaagag

SEQ ID NO: 598971 - RNA, 21 nt, Human
uguguuaagaaaagcuacaaa

SEQ ID NO: 598972 - RNA, 22 nt, Human
uguuauggaugggaggaaggga

SEQ ID NO: 598973 - RNA, 23 nt, Human
uguuauggaugggaggaagggag

SEQ ID NO: 598974 - RNA, 23 nt, Human
uuagaaaacacaaaagauuucac

SEQ ID NO: 598975 - RNA, 19 nt, Human
uucaggaccccccccaagc

SEQ ID NO: 598976 - RNA, 18 nt, Human
uugggaaaguauucagag

SEQ ID NO: 598977 - RNA, 24 nt, Human
uuucccagaucacuugcacaaaua

SEQ ID NO: 598978 - RNA, 22 nt, Human
uuugccauuucuaacauccucu

SEQ ID NO: 598979 - RNA, 22 nt, Human
uuuggcaauggugaguagaucc

SEQ ID NO: 598980 - RNA, 28 nt, Human
uuuuuucccagaucacuugcacaaauau

SEQ ID NO: 598981 - RNA, 25 nt, Human
aaagaggcacccagagaagcccccu

SEQ ID NO: 598982 - RNA, 24 nt, Human
aaagugcugggauuacaggcguga

SEQ ID NO: 598983 - RNA, 22 nt, Human
aacagcugagggucuucagugu

SEQ ID NO: 598984 - RNA, 19 nt, Human
aagugcugggauuacaggc

SEQ ID NO: 598985 - RNA, 19 nt, Human
aagugcugggauuacaggc

SEQ ID NO: 598986 - RNA, 26 nt, Human
aagugcugggauuacaggcgugagcc

SEQ ID NO: 598987 - RNA, 18 nt, Human
acaaaagauggccuggag

SEQ ID NO: 598988 - RNA, 21 nt, Human
accaguagggcuaggcuggga

SEQ ID NO: 598989 - RNA, 20 nt, Human
accaucuucccgggagcaag

SEQ ID NO: 598990 - RNA, 24 nt, Human
acgggauuucuccauguuggucag

SEQ ID NO: 598991 - RNA, 21 nt, Human
acugagcccauggagggugcu

SEQ ID NO: 598992 - RNA, 19 nt, Human
agacaaggcccugagcaac

SEQ ID NO: 598993 - RNA, 23 nt, Human
agacauggcagcaaagaggcacc

SEQ ID NO: 598994 - RNA, 22 nt, Human
agagaagcccccggggccuggg

SEQ ID NO: 598995 - RNA, 20 nt, Human
agaggagagacugcagggcc

SEQ ID NO: 598996 - RNA, 19 nt, Human
agccccgggcccccccugc

SEQ ID NO: 598997 - RNA, 23 nt, Human
aggaggagccugucccaggccca

SEQ ID NO: 598998 - RNA, 18 nt, Human
aggcaggagggacugccu

SEQ ID NO: 598999 - RNA, 19 nt, Human
aggcaggagggacugccug

SEQ ID NO: 599000 - RNA, 19 nt, Human
aggcaggagggacugccug

SEQ ID NO: 599001 - RNA, 20 nt, Human
aggcaggagggacugccugg

SEQ ID NO: 599002 - RNA, 22 nt, Human
aggcaggagggacugccuggcu

SEQ ID NO: 599003 - RNA, 23 nt, Human
agggagccccgggcccccccugc

SEQ ID NO: 599004 - RNA, 20 nt, Human
agggugcuguggagcuugcu

SEQ ID NO: 599005 - RNA, 24 nt, Human
aggugauccacccaccucggccuc

SEQ ID NO: 599006 - RNA, 23 nt, Human
aguagcugggauuacaggcaugu

SEQ ID NO: 599007 - RNA, 31 nt, Human
agugcaauugcuauggcgugaucuuggcucc

SEQ ID NO: 599008 - RNA, 18 nt, Human
agugccaugggacuggcu

SEQ ID NO: 599009 - RNA, 18 nt, Human
agugcugggauuacaggc

SEQ ID NO: 599010 - RNA, 23 nt, Human
auggcagcaaagaggcacccaga

SEQ ID NO: 599011 - RNA, 18 nt, Human
augugccaccacgcccag

SEQ ID NO: 599012 - RNA, 24 nt, Human
auucugccaaccuccaagcucacc

SEQ ID NO: 599013 - RNA, 21 nt, Human
caaaauaucugcagggcgcag

SEQ ID NO: 599014 - RNA, 26 nt, Human
caaacuccugacuucaggugauccaa

SEQ ID NO: 599015 - RNA, 21 nt, Human
caaacuggcuccugccgcuga

SEQ ID NO: 599016 - RNA, 24 nt, Human
caaagugcugggauuacaggcgug

SEQ ID NO: 599017 - RNA, 21 nt, Human
caaccccgagcucugccuccu

SEQ ID NO: 599018 - RNA, 23 nt, Human
caaccuccaagcucaccaucagc

SEQ ID NO: 599019 - RNA, 24 nt, Human
caaccuccaagcucaccaucagcc

SEQ ID NO: 599020 - RNA, 25 nt, Human
caaccuccaagcucaccaucagccu

SEQ ID NO: 599021 - RNA, 20 nt, Human
caagaacacagcaaaccaac

SEQ ID NO: 599022 - RNA, 21 nt, Human
cacacagcauguugcugucag

SEQ ID NO: 599023 - RNA, 20 nt, Human
cacagcaaaccaacgcacac

SEQ ID NO: 599024 - RNA, 22 nt, Human
cacccaccucggccucccaaag

SEQ ID NO: 599025 - RNA, 23 nt, Human
cacccaccucggccucccaaagu

SEQ ID NO: 599026 - RNA, 21 nt, Human
caccgcaaccuccgccuccug

SEQ ID NO: 599027 - RNA, 24 nt, Human
caccucggccucccaaagugcugg

SEQ ID NO: 599028 - RNA, 22 nt, Human
cacgguggccuuggaacccgcu

SEQ ID NO: 599029 - RNA, 19 nt, Human
cacgugaagacagcaaagc

SEQ ID NO: 599030 - RNA, 20 nt, Human
cagaaggagcugauggaauu

SEQ ID NO: 599031 - RNA, 24 nt, Human
cagacauuugcagccugcccagua

SEQ ID NO: 599032 - RNA, 21 nt, Human
cagcaaagaggcacccagaga

SEQ ID NO: 599033 - RNA, 19 nt, Human
cagcaaccccgagcucugc

SEQ ID NO: 599034 - RNA, 26 nt, Human
cagccuccugcagccccacuuguuuc

SEQ ID NO: 599035 - RNA, 21 nt, Human
cagcuacuggaccccgacccc

SEQ ID NO: 599036 - RNA, 22 nt, Human
cagggagccccgggcccccccu

SEQ ID NO: 599037 - RNA, 23 nt, Human
cagggccuggcacacacagggcc

SEQ ID NO: 599038 - RNA, 18 nt, Human
caggucugugggggcugg

SEQ ID NO: 599039 - RNA, 20 nt, Human
ccaaagugcugggauuacag

SEQ ID NO: 599040 - RNA, 22 nt, Human
ccaaagugcugggauuacaggc

SEQ ID NO: 599041 - RNA, 22 nt, Human
ccaaagugcugggauuacaggc

SEQ ID NO: 599042 - RNA, 24 nt, Human
ccaaagugcugggauuacaggcgu

SEQ ID NO: 599043 - RNA, 25 nt, Human
ccaaccuccaagcucaccaucagcc

SEQ ID NO: 599044 - RNA, 20 nt, Human
ccaccacgcccagcuaauuu

SEQ ID NO: 599045 - RNA, 24 nt, Human
ccaggccggagugcaauugcuaug

SEQ ID NO: 599046 - RNA, 18 nt, Human
ccauguuggucaggcuag

SEQ ID NO: 599047 - RNA, 18 nt, Human
ccccaucguccccaggca

SEQ ID NO: 599048 - RNA, 18 nt, Human
cccccggggccuggggcu

SEQ ID NO: 599049 - RNA, 20 nt, Human
ccccugcagagguuccugcu

SEQ ID NO: 599050 - RNA, 19 nt, Human
cccgggcccccccugcaga

SEQ ID NO: 599051 - RNA, 21 nt, Human
cccugagcaacaaacuggcuc

SEQ ID NO: 599052 - RNA, 23 nt, Human
ccgaguagcugggauuacaggca

SEQ ID NO: 599053 - RNA, 24 nt, Human
ccgaguagcugggauuacaggcau

SEQ ID NO: 599054 - RNA, 18 nt, Human
ccgcaaccuccgccuccu

SEQ ID NO: 599055 - RNA, 23 nt, Human
ccgcaaccuccgccuccuggguu

SEQ ID NO: 599056 - RNA, 24 nt, Human
ccgcaaccuccgccuccuggguuc

SEQ ID NO: 599057 - RNA, 20 nt, Human
ccgcagcaaccccgagcucu

SEQ ID NO: 599058 - RNA, 22 nt, Human
ccgcagcaaccccgagcucugc

SEQ ID NO: 599059 - RNA, 27 nt, Human
ccgccuccuggguucaagcaauucuuu

SEQ ID NO: 599060 - RNA, 20 nt, Human
ccggagccuggguggagcag

SEQ ID NO: 599061 - RNA, 24 nt, Human
ccuaggacugggacaaaagauggc

SEQ ID NO: 599062 - RNA, 21 nt, Human
ccucacucacggcucccccug

SEQ ID NO: 599063 - RNA, 21 nt, Human
ccuccaggacacgcagcuuca

SEQ ID NO: 599064 - RNA, 19 nt, Human
ccuccgccuccuggguuca

SEQ ID NO: 599065 - RNA, 24 nt, Human
ccuccuggguucaagcaauucucc

SEQ ID NO: 599066 - RNA, 24 nt, Human
ccugacuucaggugauccacccac

SEQ ID NO: 599067 - RNA, 19 nt, Human
ccugcccaguacucuccug

SEQ ID NO: 599068 - RNA, 23 nt, Human
ccuggcuucuggagggagaggag

SEQ ID NO: 599069 - RNA, 23 nt, Human
ccuggguucaagcaauucuccug

SEQ ID NO: 599070 - RNA, 21 nt, Human
ccuguccacccgugugucugu

SEQ ID NO: 599071 - RNA, 21 nt, Human
cgcagccgcaggucugugggg

SEQ ID NO: 599072 - RNA, 21 nt, Human
cgcgaugggagaggcggccua

SEQ ID NO: 599073 - RNA, 29 nt, Human
cggagugcaauugcuauggcgugaucuug

SEQ ID NO: 599074 - RNA, 21 nt, Human
cggcucccccuggccgcugcu

SEQ ID NO: 599075 - RNA, 24 nt, Human
cgggauuucuccauguuggucagg

SEQ ID NO: 599076 - RNA, 23 nt, Human
cgugcagacauggcagcaaagag

SEQ ID NO: 599077 - RNA, 24 nt, Human
cuccauguuggucaggcuagucuc

SEQ ID NO: 599078 - RNA, 24 nt, Human
cuccgaguagcugggauuacaggc

SEQ ID NO: 599079 - RNA, 21 nt, Human
cuccuggguucaagcaauucu

SEQ ID NO: 599080 - RNA, 21 nt, Human
cugcuggauaggaaauugugu

SEQ ID NO: 599081 - RNA, 20 nt, Human
cugcuucuguccugucuuaa

SEQ ID NO: 599082 - RNA, 19 nt, Human
cuggauggauggucccccu

SEQ ID NO: 599083 - RNA, 23 nt, Human
cuggcuucuggagggagaggagg

SEQ ID NO: 599084 - RNA, 21 nt, Human
cugucagggagcacugccggc

SEQ ID NO: 599085 - RNA, 23 nt, Human
cuuuuccacgugaagacagcaaa

SEQ ID NO: 599086 - RNA, 24 nt, Human
gacuucaggugauccacccaccuc

SEQ ID NO: 599087 - RNA, 21 nt, Human
gagacgggauuucuccauguu

SEQ ID NO: 599088 - RNA, 23 nt, Human
gagacgggauuucuccauguugg

SEQ ID NO: 599089 - RNA, 19 nt, Human
gagcaggucacagggaugc

SEQ ID NO: 599090 - RNA, 25 nt, Human
gaguagcugggauuacaggcaugug

SEQ ID NO: 599091 - RNA, 18 nt, Human
gauuacaggcaugugcca

SEQ ID NO: 599092 - RNA, 18 nt, Human
gauuacaggcgugagcca

SEQ ID NO: 599093 - RNA, 22 nt, Human
gauuacaggcgugagccacugc

SEQ ID NO: 599094 - RNA, 22 nt, Human
gauuacaggcgugagccacugc

SEQ ID NO: 599095 - RNA, 20 nt, Human
gcagcaaagaggcacccaga

SEQ ID NO: 599096 - RNA, 25 nt, Human
gcagcaaccccgagcucugccuccu

SEQ ID NO: 599097 - RNA, 19 nt, Human
gcaggucugugggggcugg

SEQ ID NO: 599098 - RNA, 23 nt, Human
gcccagcuaauuuuuuguauuuu

SEQ ID NO: 599099 - RNA, 19 nt, Human
gcccaggccggagugcaau

SEQ ID NO: 599100 - RNA, 25 nt, Human
gccccgggcccccccugcagagguu

SEQ ID NO: 599101 - RNA, 25 nt, Human
gcccugagcaacaaacuggcuccug

SEQ ID NO: 599102 - RNA, 21 nt, Human
gcucuuguugcccaggccgga

SEQ ID NO: 599103 - RNA, 24 nt, Human
ggagcaagacugagcccauggagg

SEQ ID NO: 599104 - RNA, 21 nt, Human
ggagggagaggaggagccugu

SEQ ID NO: 599105 - RNA, 19 nt, Human
ggauuacaggcaugugcca

SEQ ID NO: 599106 - RNA, 21 nt, Human
ggccuuggaacccgcuucagc

SEQ ID NO: 599107 - RNA, 24 nt, Human
ggcgguugugggguucgcuuccag

SEQ ID NO: 599108 - RNA, 21 nt, Human
ggcuucuggagggagaggagg

SEQ ID NO: 599109 - RNA, 22 nt, Human
gggagcaagacugagcccaugg

SEQ ID NO: 599110 - RNA, 19 nt, Human
gggagccccgggccccccc

SEQ ID NO: 599111 - RNA, 23 nt, Human
gggauuucuccauguuggucagg

SEQ ID NO: 599112 - RNA, 19 nt, Human
ggugacagcaaacuaccga

SEQ ID NO: 599113 - RNA, 18 nt, Human
guagcugggauuacaggc

SEQ ID NO: 599114 - RNA, 20 nt, Human
guagcugggauuacaggcau

SEQ ID NO: 599115 - RNA, 24 nt, Human
gugauccacccaccucggccuccc

SEQ ID NO: 599116 - RNA, 20 nt, Human
gugcagacauggcagcaaag

SEQ ID NO: 599117 - RNA, 18 nt, Human
gugggggcuggugucugg

SEQ ID NO: 599118 - RNA, 22 nt, Human
uaaaaagacaaggcccugagca

SEQ ID NO: 599119 - RNA, 19 nt, Human
uaacaagcgugagagcauc

SEQ ID NO: 599120 - RNA, 24 nt, Human
uaauuuuuuguauuuuuaguagag

SEQ ID NO: 599121 - RNA, 25 nt, Human
uaauuuuuuguauuuuuaguagaga

SEQ ID NO: 599122 - RNA, 24 nt, Human
uacaggcaugugccaccacgccca

SEQ ID NO: 599123 - RNA, 22 nt, Human
uacaggcgugagccacugcgcc

SEQ ID NO: 599124 - RNA, 22 nt, Human
uacaggcgugagccacugcgcc

SEQ ID NO: 599125 - RNA, 23 nt, Human
uacaggcgugagccacugcgccu

SEQ ID NO: 599126 - RNA, 23 nt, Human
uacgacacuggcuuuuccacgug

SEQ ID NO: 599127 - RNA, 18 nt, Human
uagaauucugccaaccuc

SEQ ID NO: 599128 - RNA, 19 nt, Human
uagaauucugccaaccucc

SEQ ID NO: 599129 - RNA, 24 nt, Human
uaguagagacgggauuucuccaug

SEQ ID NO: 599130 - RNA, 19 nt, Human
ucaagcaauucuccugccu

SEQ ID NO: 599131 - RNA, 24 nt, Human
ucaccgcaaccuccgccuccuggg

SEQ ID NO: 599132 - RNA, 25 nt, Human
ucaccgcaaccuccgccuccugggu

SEQ ID NO: 599133 - RNA, 27 nt, Human
ucaccgcaaccuccgccuccuggguuc

SEQ ID NO: 599134 - RNA, 21 nt, Human
ucagccuccugcagccccacu

SEQ ID NO: 599135 - RNA, 24 nt, Human
ucagccuccugcagccccacuugu

SEQ ID NO: 599136 - RNA, 24 nt, Human
ucccaaagugcugggauuacaggc

SEQ ID NO: 599137 - RNA, 19 nt, Human
ucccuccuucuggcuggcu

SEQ ID NO: 599138 - RNA, 23 nt, Human
uccgaguagcugggauuacaggc

SEQ ID NO: 599139 - RNA, 24 nt, Human
uccgaguagcugggauuacaggca

SEQ ID NO: 599140 - RNA, 24 nt, Human
uccgccuccuggguucaagcaauu

SEQ ID NO: 599141 - RNA, 25 nt, Human
uccugcagccccacuuguuucuggg

SEQ ID NO: 599142 - RNA, 21 nt, Human
uccuggguucaagcaauucuc

SEQ ID NO: 599143 - RNA, 24 nt, Human
uccuggguucaagcaauucuccug

SEQ ID NO: 599144 - RNA, 18 nt, Human
ucggccucccaaagugcu

SEQ ID NO: 599145 - RNA, 22 nt, Human
ucgguagccuggucugcucucc

SEQ ID NO: 599146 - RNA, 21 nt, Human
ucugccaaccuccaagcucac

SEQ ID NO: 599147 - RNA, 19 nt, Human
ucuucccgggagcaagacu

SEQ ID NO: 599148 - RNA, 23 nt, Human
ugacagcaaacuaccgaacuacu

SEQ ID NO: 599149 - RNA, 21 nt, Human
ugacuucaggugauccaccca

SEQ ID NO: 599150 - RNA, 24 nt, Human
ugacuucaggugauccacccaccu

SEQ ID NO: 599151 - RNA, 25 nt, Human
ugagaaacugaggcaggagggacug

SEQ ID NO: 599152 - RNA, 21 nt, Human
ugagaacacaggagacaaucc

SEQ ID NO: 599153 - RNA, 21 nt, Human
ugaggcaggagggacugccug

SEQ ID NO: 599154 - RNA, 24 nt, Human
ugauccacccaccucggccuccca

SEQ ID NO: 599155 - RNA, 23 nt, Human
ugcccaggccggagugcaauugc

SEQ ID NO: 599156 - RNA, 22 nt, Human
ugcuauggcgugaucuuggcuc

SEQ ID NO: 599157 - RNA, 24 nt, Human
ugcugggauuacaggcgugagcca

SEQ ID NO: 599158 - RNA, 20 nt, Human
ugcuguggagcuugcugcag

SEQ ID NO: 599159 - RNA, 25 nt, Human
uggaccccgaccccaucguccccag

SEQ ID NO: 599160 - RNA, 18 nt, Human
ugggauuacaggcaugug

SEQ ID NO: 599161 - RNA, 21 nt, Human
ugggauuacaggcaugugcca

SEQ ID NO: 599162 - RNA, 22 nt, Human
ugggauuacaggcaugugccac

SEQ ID NO: 599163 - RNA, 24 nt, Human
ugggauuacaggcaugugccacca

SEQ ID NO: 599164 - RNA, 18 nt, Human
ugggauuacaggcgugag

SEQ ID NO: 599165 - RNA, 19 nt, Human
ugggauuacaggcgugagc

SEQ ID NO: 599166 - RNA, 21 nt, Human
ugggauuacaggcgugagcca

SEQ ID NO: 599167 - RNA, 22 nt, Human
ugggauuacaggcgugagccac

SEQ ID NO: 599168 - RNA, 22 nt, Human
ugggauuacaggcgugagccac

SEQ ID NO: 599169 - RNA, 24 nt, Human
ugggauuacaggcgugagccacug

SEQ ID NO: 599170 - RNA, 24 nt, Human
ugggauuacaggcgugagccacug

SEQ ID NO: 599171 - RNA, 22 nt, Human
ugggggcuggugucuggccucc

SEQ ID NO: 599172 - RNA, 21 nt, Human
uggguucaagcaauucuccug

SEQ ID NO: 599173 - RNA, 23 nt, Human
uggguucaagcaauucuccugcc

SEQ ID NO: 599174 - RNA, 24 nt, Human
uggguucaagcaauucuccugccu

SEQ ID NO: 599175 - RNA, 24 nt, Human
uggucaggcuagucucaaacuccu

SEQ ID NO: 599176 - RNA, 19 nt, Human
ugucagggagcacugccgg

SEQ ID NO: 599177 - RNA, 19 nt, Human
uguccugcccgcuccgcag

SEQ ID NO: 599178 - RNA, 23 nt, Human
ugucucauccaccugcugucugc

SEQ ID NO: 599179 - RNA, 19 nt, Human
uguggagcuugcugcaggu

SEQ ID NO: 599180 - RNA, 19 nt, Human
uguggccuaaggcgguugu

SEQ ID NO: 599181 - RNA, 19 nt, Human
ugugggcaacaugcaugug

SEQ ID NO: 599182 - RNA, 21 nt, Human
ugugggguucgcuuccagucu

SEQ ID NO: 599183 - RNA, 20 nt, Human
uguugcccaggccggagugc

SEQ ID NO: 599184 - RNA, 22 nt, Human
uguugcccaggccggagugcaa

SEQ ID NO: 599185 - RNA, 24 nt, Human
uguugcugucagggaacggccucc

SEQ ID NO: 599186 - RNA, 21 nt, Human
uguuuugaaaucaacauagag

SEQ ID NO: 599187 - RNA, 18 nt, Human
uuaguagagacgggauuu

SEQ ID NO: 599188 - RNA, 24 nt, Human
uuaguagagacgggauuucuccau

SEQ ID NO: 599189 - RNA, 21 nt, Human
uucaagcaauucuccugccuc

SEQ ID NO: 599190 - RNA, 27 nt, Human
uucaagcaauucuccugccuccgagua

SEQ ID NO: 599191 - RNA, 18 nt, Human
uuccugcugccggccaga

SEQ ID NO: 599192 - RNA, 21 nt, Human
uugcagccugcccaguacucu

SEQ ID NO: 599193 - RNA, 23 nt, Human
uugcagccugcccaguacucucc

SEQ ID NO: 599194 - RNA, 25 nt, Human
uuuaacacagacauuugcagccugc

SEQ ID NO: 599195 - RNA, 21 nt, Human
uuucuccauguuggucaggcu

SEQ ID NO: 599196 - RNA, 22 nt, Human
uuugcagccugcccaguacucu

SEQ ID NO: 599197 - RNA, 24 nt, Human
uuugcucuuguugcccaggccgga

SEQ ID NO: 599198 - RNA, 20 nt, Human
uuuugcucuuguugcccagg

SEQ ID NO: 599199 - RNA, 23 nt, Human
uuuugcucuuguugcccaggccg

SEQ ID NO: 599200 - RNA, 19 nt, Human
uuuuuaguagagacgggau

SEQ ID NO: 599201 - RNA, 21 nt, Human
uuuuuguauuuuuaguagaga

SEQ ID NO: 599202 - RNA, 24 nt, Human
uuuuuuguauuuuuaguagagacg

SEQ ID NO: 599203 - RNA, 22 nt, Human
aaaaacaucuaaaacugaccug

SEQ ID NO: 599204 - RNA, 20 nt, Human
aacuaggcuugcaaacuaaa

SEQ ID NO: 599205 - RNA, 24 nt, Human
aagaacuaggcuugcaaacuaaaa

SEQ ID NO: 599206 - RNA, 26 nt, Human
aagcagaaaguggauuuccaaucuaa

SEQ ID NO: 599207 - RNA, 26 nt, Human
aaggaucaaaaacaucuaaaacugac

SEQ ID NO: 599208 - RNA, 18 nt, Human
aagucaugaauggguagg

SEQ ID NO: 599209 - RNA, 20 nt, Human
agacacaguaagcagaaagu

SEQ ID NO: 599210 - RNA, 23 nt, Human
aggggucagcaaacuuuucccag

SEQ ID NO: 599211 - RNA, 25 nt, Human
aguuaggauucugcucuccuaauug

SEQ ID NO: 599212 - RNA, 18 nt, Human
auuugguaccuggaccau

SEQ ID NO: 599213 - RNA, 24 nt, Human
caucuaaaacugaccuggaaugaa

SEQ ID NO: 599214 - RNA, 23 nt, Human
cuaaaacagagaaucugacucac

SEQ ID NO: 599215 - RNA, 22 nt, Human
gauucugcucuccuaauuggga

SEQ ID NO: 599216 - RNA, 19 nt, Human
gcaaaaccagccauagaua

SEQ ID NO: 599217 - RNA, 19 nt, Human
guuccaauagaacuuauuu

SEQ ID NO: 599218 - RNA, 21 nt, Human
uaaaacagagaaucugacuca

SEQ ID NO: 599219 - RNA, 21 nt, Human
uaaaauaucaaaggaucaaaa

SEQ ID NO: 599220 - RNA, 21 nt, Human
uaauauaaagcaugagaccua

SEQ ID NO: 599221 - RNA, 21 nt, Human
uaauugggaaaaaauuccaag

SEQ ID NO: 599222 - RNA, 23 nt, Human
uacagaguuucuauugcaacuaa

SEQ ID NO: 599223 - RNA, 24 nt, Human
uaccuggaccauaguuugcugacc

SEQ ID NO: 599224 - RNA, 18 nt, Human
uagcaguuaggauucugc

SEQ ID NO: 599225 - RNA, 23 nt, Human
uagugcaaaaccagccauagaua

SEQ ID NO: 599226 - RNA, 21 nt, Human
uaucuaauauaaagcaugaga

SEQ ID NO: 599227 - RNA, 25 nt, Human
uauguagagaagguugauaaaccuu

SEQ ID NO: 599228 - RNA, 22 nt, Human
ucuaaaacagagaaucugacuc

SEQ ID NO: 599229 - RNA, 21 nt, Human
ugcaaaaccagccauagauaa

SEQ ID NO: 599230 - RNA, 25 nt, Human
ugcaaaaccagccauagauaacacg

SEQ ID NO: 599231 - RNA, 22 nt, Human
ugcaugaauaucacaguggaua

SEQ ID NO: 599232 - RNA, 25 nt, Human
ugugauauaauuuacauacaaaaaa

SEQ ID NO: 599233 - RNA, 20 nt, Human
uuaaugcucggugaauugaa

SEQ ID NO: 599234 - RNA, 24 nt, Human
uugcuucaauaucuaauauaaagc

SEQ ID NO: 599235 - RNA, 23 nt, Human
aaguccuccccggaugcgcuucc

SEQ ID NO: 599236 - RNA, 19 nt, Human
aauaaaagggcagacggga

SEQ ID NO: 599237 - RNA, 22 nt, Human
acaaagucaccccugcaccucu

SEQ ID NO: 599238 - RNA, 23 nt, Human
agacacgcccacgcccuccucug

SEQ ID NO: 599239 - RNA, 23 nt, Human
agagaaaguuuccagaacuugaa

SEQ ID NO: 599240 - RNA, 24 nt, Human
agcgccgaccccacccgcgcacga

SEQ ID NO: 599241 - RNA, 19 nt, Human
agggcccccuccuuuccac

SEQ ID NO: 599242 - RNA, 23 nt, Human
aguggugcugccugcagcuuuaa

SEQ ID NO: 599243 - RNA, 22 nt, Human
auaccagacacgcccacgcccu

SEQ ID NO: 599244 - RNA, 22 nt, Human
caaagucaccccugcaccucuc

SEQ ID NO: 599245 - RNA, 18 nt, Human
caccucucgcucccucca

SEQ ID NO: 599246 - RNA, 19 nt, Human
caccucucgcucccuccac

SEQ ID NO: 599247 - RNA, 20 nt, Human
cacgcccuccucugccccgc

SEQ ID NO: 599248 - RNA, 20 nt, Human
cacugccaccccccucccgc

SEQ ID NO: 599249 - RNA, 22 nt, Human
ccaacaaagucaccccugcacc

SEQ ID NO: 599250 - RNA, 20 nt, Human
ccacacgcgacaagcgccga

SEQ ID NO: 599251 - RNA, 19 nt, Human
ccacugccaccccccuccc

SEQ ID NO: 599252 - RNA, 28 nt, Human
ccagcuaguccugcugccaacaaaguca

SEQ ID NO: 599253 - RNA, 19 nt, Human
ccauaccagacacgcccac

SEQ ID NO: 599254 - RNA, 18 nt, Human
cccacugcgcgccacacg

SEQ ID NO: 599255 - RNA, 20 nt, Human
cccacugcgcgccacacgcg

SEQ ID NO: 599256 - RNA, 21 nt, Human
cccacugcgcgccacacgcgg

SEQ ID NO: 599257 - RNA, 21 nt, Human
cccauaccagacacgcccacg

SEQ ID NO: 599258 - RNA, 21 nt, Human
ccccuccuuuccacugcaucc

SEQ ID NO: 599259 - RNA, 22 nt, Human
ccccugcaccucucgcucccuc

SEQ ID NO: 599260 - RNA, 22 nt, Human
cccgcaaguccuccccggaugc

SEQ ID NO: 599261 - RNA, 26 nt, Human
cccuccacugccaccccccucccgcc

SEQ ID NO: 599262 - RNA, 21 nt, Human
cccuccuuuccacugcauccc

SEQ ID NO: 599263 - RNA, 24 nt, Human
ccgccgcccgccccacugcgcgcc

SEQ ID NO: 599264 - RNA, 19 nt, Human
ccgccucucccgcgccucg

SEQ ID NO: 599265 - RNA, 24 nt, Human
ccucccgccgcccgccccacugcg

SEQ ID NO: 599266 - RNA, 18 nt, Human
ccucucgcucccuccacu

SEQ ID NO: 599267 - RNA, 22 nt, Human
ccucucgcucccuccacugcca

SEQ ID NO: 599268 - RNA, 19 nt, Human
cgacaagcgccgaccccac

SEQ ID NO: 599269 - RNA, 22 nt, Human
cgggcuucucgguguccaccgc

SEQ ID NO: 599270 - RNA, 22 nt, Human
cucccuccacugccaccccccu

SEQ ID NO: 599271 - RNA, 24 nt, Human
cucuggaaaucucaaguggugcug

SEQ ID NO: 599272 - RNA, 25 nt, Human
cucuuuagaaugaacaaaggucugg

SEQ ID NO: 599273 - RNA, 23 nt, Human
cugacaaauaaaagggcagacgg

SEQ ID NO: 599274 - RNA, 18 nt, Human
cugccccgcaaguccucc

SEQ ID NO: 599275 - RNA, 21 nt, Human
cugccccgcaaguccuccccg

SEQ ID NO: 599276 - RNA, 24 nt, Human
cugccugcagcuuuaaaaggcuga

SEQ ID NO: 599277 - RNA, 19 nt, Human
cuggguccucuggaaaucu

SEQ ID NO: 599278 - RNA, 19 nt, Human
cuuccaggucuagcucucc

SEQ ID NO: 599279 - RNA, 20 nt, Human
gaacuugaacagagaccaug

SEQ ID NO: 599280 - RNA, 20 nt, Human
gagggcccccuccuuuccac

SEQ ID NO: 599281 - RNA, 21 nt, Human
gcccucuugcuccuucccucu

SEQ ID NO: 599282 - RNA, 22 nt, Human
uaaaaggcugagcacaaaccca

SEQ ID NO: 599283 - RNA, 22 nt, Human
uaaaagggcagacgggaagacg

SEQ ID NO: 599284 - RNA, 21 nt, Human
uaccagacacgcccacgcccu

SEQ ID NO: 599285 - RNA, 18 nt, Human
uagaaagggcccugggca

SEQ ID NO: 599286 - RNA, 18 nt, Human
uccacugccaccccccuc

SEQ ID NO: 599287 - RNA, 27 nt, Human
uccagaacuugaacagagaggacauac

SEQ ID NO: 599288 - RNA, 19 nt, Human
ucccauaccagacacgcca

SEQ ID NO: 599289 - RNA, 21 nt, Human
ucccuccacugccaccccccu

SEQ ID NO: 599290 - RNA, 24 nt, Human
ucccucgcugacaaauaaaagggc

SEQ ID NO: 599291 - RNA, 24 nt, Human
ucucuuuagaaugaacaaagguug

SEQ ID NO: 599292 - RNA, 24 nt, Human
aaaacaaaaauauaaucacaacua

SEQ ID NO: 599293 - RNA, 23 nt, Human
aaaauaccuccaaacuuaguuau

SEQ ID NO: 599294 - RNA, 21 nt, Human
aaacaaaaauauaaucacaac

SEQ ID NO: 599295 - RNA, 21 nt, Human
aaacaaacuuuagacugcuga

SEQ ID NO: 599296 - RNA, 25 nt, Human
aaacaagaaacaaaaaauuuaucug

SEQ ID NO: 599297 - RNA, 26 nt, Human
aaacaagaaacaaaaaauuuaucuga

SEQ ID NO: 599298 - RNA, 25 nt, Human
aaaccaaaaaaaaucauaaaagcaa

SEQ ID NO: 599299 - RNA, 18 nt, Human
aaagaauccuccaucaca

SEQ ID NO: 599300 - RNA, 23 nt, Human
aaauauauacuuucaaccuaaug

SEQ ID NO: 599301 - RNA, 19 nt, Human
aacaaaacagagagagagc

SEQ ID NO: 599302 - RNA, 26 nt, Human
aacaaaccaaaaaaaaucauaaaagc

SEQ ID NO: 599303 - RNA, 21 nt, Human
aacagaaaugaaaacaacaac

SEQ ID NO: 599304 - RNA, 22 nt, Human
aaccaaaaaaaaucauaaaagc

SEQ ID NO: 599305 - RNA, 22 nt, Human
aaccuaaaaauaaacaagaaac

SEQ ID NO: 599306 - RNA, 23 nt, Human
aagaauccuccaucacaaguuac

SEQ ID NO: 599307 - RNA, 27 nt, Human
aagcaagcaaaugaacaaaagggaccc

SEQ ID NO: 599308 - RNA, 20 nt, Human
aagcaagcaaaugaacaaag

SEQ ID NO: 599309 - RNA, 21 nt, Human
aagguaggggcuuauuucaug

SEQ ID NO: 599310 - RNA, 23 nt, Human
aauccaccugauauuaaaacaaa

SEQ ID NO: 599311 - RNA, 19 nt, Human
acaggaugguuagaaaaaa

SEQ ID NO: 599312 - RNA, 21 nt, Human
accugauauuaaaacaaacca

SEQ ID NO: 599313 - RNA, 18 nt, Human
agagcucagaaucuuaca

SEQ ID NO: 599314 - RNA, 22 nt, Human
agcaaaugaacaaaaaacccua

SEQ ID NO: 599315 - RNA, 19 nt, Human
agccccgacggccgcgggc

SEQ ID NO: 599316 - RNA, 18 nt, Human
agcugucagaugagaagu

SEQ ID NO: 599317 - RNA, 23 nt, Human
agguauaugaaaaagccaaagua

SEQ ID NO: 599318 - RNA, 18 nt, Human
aucucagauacuuucaaa

SEQ ID NO: 599319 - RNA, 20 nt, Human
augaaaacaacaacguagua

SEQ ID NO: 599320 - RNA, 23 nt, Human
augaacaaaaaacccuaguuuug

SEQ ID NO: 599321 - RNA, 23 nt, Human
augaagucuagccaaacuuaaag

SEQ ID NO: 599322 - RNA, 24 nt, Human
auggcuagaacaaaaccggggucc

SEQ ID NO: 599323 - RNA, 23 nt, Human
caaaauaaaucuagauugacuua

SEQ ID NO: 599324 - RNA, 22 nt, Human
cacaacauuuccccuugguucc

SEQ ID NO: 599325 - RNA, 30 nt, Human
caccacuagguauaugaaaaagccaaaguu

SEQ ID NO: 599326 - RNA, 18 nt, Human
cagauacuuucaaaaucu

SEQ ID NO: 599327 - RNA, 24 nt, Human
cauaaaagcaagcaaaugaacaaa

SEQ ID NO: 599328 - RNA, 20 nt, Human
cauguaacagugcuauuaug

SEQ ID NO: 599329 - RNA, 23 nt, Human
ccaaccuuccaagaaaauaaccu

SEQ ID NO: 599330 - RNA, 22 nt, Human
ccccuuucccaccauucugugc

SEQ ID NO: 599331 - RNA, 22 nt, Human
cggcggcgacagcgaaggcgaa

SEQ ID NO: 599332 - RNA, 23 nt, Human
cggcggcggcggcgacagcgaag

SEQ ID NO: 599333 - RNA, 20 nt, Human
cgggcggcggcggcggcgac

SEQ ID NO: 599334 - RNA, 19 nt, Human
cuauggaauauauugaggc

SEQ ID NO: 599335 - RNA, 21 nt, Human
cuuccaaaucuucaagccuag

SEQ ID NO: 599336 - RNA, 22 nt, Human
cuuucaaccuaauggcugccuc

SEQ ID NO: 599337 - RNA, 20 nt, Human
cuuuucagauauguugguug

SEQ ID NO: 599338 - RNA, 22 nt, Human
gaggagugggagaaggcagggg

SEQ ID NO: 599339 - RNA, 24 nt, Human
gccuaucccuguagaagaguguga

SEQ ID NO: 599340 - RNA, 21 nt, Human
ggccgcgggcggcggcggcgg

SEQ ID NO: 599341 - RNA, 23 nt, Human
ggccgcgggcggcggcggcggcg

SEQ ID NO: 599342 - RNA, 18 nt, Human
ggcggcggcggcggcgac

SEQ ID NO: 599343 - RNA, 21 nt, Human
gggcggcggcggcggcgacag

SEQ ID NO: 599344 - RNA, 23 nt, Human
gggcggcggcggcggcgacagcg

SEQ ID NO: 599345 - RNA, 23 nt, Human
guugauuuuauguauauauugcu

SEQ ID NO: 599346 - RNA, 24 nt, Human
uaaaacaaaaauauaaucacaacu

SEQ ID NO: 599347 - RNA, 21 nt, Human
uaaaucugugcucuaacacag

SEQ ID NO: 599348 - RNA, 25 nt, Human
uaacacaggcuuuguaaaaaagaga

SEQ ID NO: 599349 - RNA, 19 nt, Human
uaacauuauuaaugaacca

SEQ ID NO: 599350 - RNA, 26 nt, Human
uaaccaaacaguaagauaccaaagaa

SEQ ID NO: 599351 - RNA, 23 nt, Human
uaacugauaaauuucaaaccaaa

SEQ ID NO: 599352 - RNA, 24 nt, Human
uaaggcaccacuagguauaugaaa

SEQ ID NO: 599353 - RNA, 20 nt, Human
uaaugcaguaugacaauucu

SEQ ID NO: 599354 - RNA, 19 nt, Human
uacuuucuauggaauauau

SEQ ID NO: 599355 - RNA, 20 nt, Human
uagaaaaaagcugcuaacau

SEQ ID NO: 599356 - RNA, 24 nt, Human
uagaacaaaacagagaggggaggc

SEQ ID NO: 599357 - RNA, 24 nt, Human
uagaauuuaaaacaaacuuuagac

SEQ ID NO: 599358 - RNA, 21 nt, Human
uauagagugaaaauaccucca

SEQ ID NO: 599359 - RNA, 22 nt, Human
uaugacaauucuguauaacuga

SEQ ID NO: 599360 - RNA, 23 nt, Human
uauugcuuagaaacaaaaaucca

SEQ ID NO: 599361 - RNA, 23 nt, Human
uccaagaaaauaaccuaaaaaua

SEQ ID NO: 599362 - RNA, 20 nt, Human
ucccccaaaguugauuucuc

SEQ ID NO: 599363 - RNA, 19 nt, Human
ucuaacacaggcuuuguaa

SEQ ID NO: 599364 - RNA, 26 nt, Human
ucucagauagccacaccugauuaaau

SEQ ID NO: 599365 - RNA, 24 nt, Human
ugaaaaagccaaaguauuuccaaa

SEQ ID NO: 599366 - RNA, 22 nt, Human
ugaaaauaccuccaaacuuagu

SEQ ID NO: 599367 - RNA, 19 nt, Human
ugaaauagacaauacuucc

SEQ ID NO: 599368 - RNA, 18 nt, Human
ugcgguauauucagauuu

SEQ ID NO: 599369 - RNA, 24 nt, Human
uggcuagaacaaaacagagagaga

SEQ ID NO: 599370 - RNA, 21 nt, Human
uguuuauuuucaaggguuuua

SEQ ID NO: 599371 - RNA, 21 nt, Human
uuaaaacaaaccaaaaaaaau

SEQ ID NO: 599372 - RNA, 21 nt, Human
uuaaccaaacaguaagauacc

SEQ ID NO: 599373 - RNA, 22 nt, Human
uuacacccauucauaaacacuc

SEQ ID NO: 599374 - RNA, 23 nt, Human
uuagcauuucucagguuucauga

SEQ ID NO: 599375 - RNA, 24 nt, Human
uuaucucacaacauuuccccuugg

SEQ ID NO: 599376 - RNA, 26 nt, Human
uucauguaacagugcuauuaugauaa

SEQ ID NO: 599377 - RNA, 25 nt, Human
uuccaaaucauguguuuuuguuacu

SEQ ID NO: 599378 - RNA, 23 nt, Human
uuccugaauuugcuagauuccua

SEQ ID NO: 599379 - RNA, 24 nt, Human
uugaggcacauagguuacaaguuu

SEQ ID NO: 599380 - RNA, 21 nt, Human
uuuaaaauauauauuugacaa

SEQ ID NO: 599381 - RNA, 26 nt, Human
uuuccauauuucaaagacuguaguug

SEQ ID NO: 599382 - RNA, 22 nt, Human
uuucucaggcaaauucauggcu

SEQ ID NO: 599383 - RNA, 22 nt, Human
uuugcuagauuccuauguacca

SEQ ID NO: 599384 - RNA, 19 nt, Human
uuuuucaacaaaccagaaa

SEQ ID NO: 599385 - RNA, 23 nt, Human
aaaaaaaaaaaaaaaagaaagaa

SEQ ID NO: 599386 - RNA, 19 nt, Human
aaaaaaaaaaaaaauuagc

SEQ ID NO: 599387 - RNA, 19 nt, Human
aaacacaguuccaguaaac

SEQ ID NO: 599388 - RNA, 19 nt, Human
aaaccucugacaacgacag

SEQ ID NO: 599389 - RNA, 22 nt, Human
aaagacugaaaagagcugauaa

SEQ ID NO: 599390 - RNA, 19 nt, Human
aaaucaguucuuagaaggu

SEQ ID NO: 599391 - RNA, 20 nt, Human
aacacagcaaaacucugucu

SEQ ID NO: 599392 - RNA, 21 nt, Human
aacacagcaaaacucugucuc

SEQ ID NO: 599393 - RNA, 18 nt, Human
aagaaagaaaguacgaga

SEQ ID NO: 599394 - RNA, 24 nt, Human
aagcagugguugcagugagccaag

SEQ ID NO: 599395 - RNA, 19 nt, Human
aaucacuugaacccaggaa

SEQ ID NO: 599396 - RNA, 23 nt, Human
aaucacuugaacccaggaagcag

SEQ ID NO: 599397 - RNA, 24 nt, Human
aaucauaugaggccaggaguucaa

SEQ ID NO: 599398 - RNA, 19 nt, Human
aaugacauggcugagaaaa

SEQ ID NO: 599399 - RNA, 28 nt, Human
acagagcaagcgaggcucugucucaaaa

SEQ ID NO: 599400 - RNA, 24 nt, Human
accaacacagcaaaacucugucuc

SEQ ID NO: 599401 - RNA, 23 nt, Human
accaucucauaauuuaaagaaug

SEQ ID NO: 599402 - RNA, 18 nt, Human
acugcacucuagccuggg

SEQ ID NO: 599403 - RNA, 18 nt, Human
acugcacucuagccuggg

SEQ ID NO: 599404 - RNA, 18 nt, Human
acugcacucuagccuggg

SEQ ID NO: 599405 - RNA, 19 nt, Human
acugcacucuagccugggu

SEQ ID NO: 599406 - RNA, 21 nt, Human
acugcacucuagccuggguga

SEQ ID NO: 599407 - RNA, 22 nt, Human
acugcacucuagccugggugac

SEQ ID NO: 599408 - RNA, 23 nt, Human
acugcacucuagccugggugaca

SEQ ID NO: 599409 - RNA, 24 nt, Human
acugcacucuagccugggugacag

SEQ ID NO: 599410 - RNA, 26 nt, Human
acugcacucuagccugggugacagag

SEQ ID NO: 599411 - RNA, 19 nt, Human
agaaagacugaaaagagcu

SEQ ID NO: 599412 - RNA, 19 nt, Human
agacugaaaagagcugaua

SEQ ID NO: 599413 - RNA, 23 nt, Human
agagcaagcgaggcucugucuca

SEQ ID NO: 599414 - RNA, 21 nt, Human
agccgggugugguggcauuug

SEQ ID NO: 599415 - RNA, 23 nt, Human
agccgggugugguggcauuuguc

SEQ ID NO: 599416 - RNA, 28 nt, Human
agccugggugacagagcaagcgaggcuc

SEQ ID NO: 599417 - RNA, 21 nt, Human
agcgaggcucugucucaaaaa

SEQ ID NO: 599418 - RNA, 21 nt, Human
agcucaugucuguacucccag

SEQ ID NO: 599419 - RNA, 20 nt, Human
aggaagacauuuuuaggcgu

SEQ ID NO: 599420 - RNA, 23 nt, Human
aggaggcugaggcaugagaauca

SEQ ID NO: 599421 - RNA, 21 nt, Human
aggcaggaaaacauucucagu

SEQ ID NO: 599422 - RNA, 26 nt, Human
aggcaggugaaucauaugaggccagg

SEQ ID NO: 599423 - RNA, 18 nt, Human
aggcaugagaaucacuug

SEQ ID NO: 599424 - RNA, 24 nt, Human
aggcugaggcaugagaaucacuug

SEQ ID NO: 599425 - RNA, 24 nt, Human
auaugaggccaggaguucaagacc

SEQ ID NO: 599426 - RNA, 24 nt, Human
aucgugcuacugcacucuagccug

SEQ ID NO: 599427 - RNA, 24 nt, Human
auuaauucauucaaucuuuuaagg

SEQ ID NO: 599428 - RNA, 18 nt, Human
caaaauccuauccucuuc

SEQ ID NO: 599429 - RNA, 24 nt, Human
caacacagcaaaacucugucucua

SEQ ID NO: 599430 - RNA, 22 nt, Human
caacccagagaaaguuuauauc

SEQ ID NO: 599431 - RNA, 19 nt, Human
caacugucagucuuaaaaa

SEQ ID NO: 599432 - RNA, 23 nt, Human
caagauaugauuuuuggaugcuu

SEQ ID NO: 599433 - RNA, 24 nt, Human
caagaucgugcuacugcacucuag

SEQ ID NO: 599434 - RNA, 23 nt, Human
cacuccaaucccaaaagagagag

SEQ ID NO: 599435 - RNA, 22 nt, Human
cacucuagccugggugacagag

SEQ ID NO: 599436 - RNA, 19 nt, Human
cacuucaauaggacaaagu

SEQ ID NO: 599437 - RNA, 18 nt, Human
cagaacuuugggaggcag

SEQ ID NO: 599438 - RNA, 19 nt, Human
cagaagaggugaacugaca

SEQ ID NO: 599439 - RNA, 24 nt, Human
cagagcaagcgaggcucugucuca

SEQ ID NO: 599440 - RNA, 24 nt, Human
caggugaaucauaugaggccagga

SEQ ID NO: 599441 - RNA, 22 nt, Human
caguaaacguguaguuacacug

SEQ ID NO: 599442 - RNA, 19 nt, Human
cauucugcuccuuucuuua

SEQ ID NO: 599443 - RNA, 18 nt, Human
ccaaaagagagagaagcc

SEQ ID NO: 599444 - RNA, 22 nt, Human
ccaauuaaaaaaaaaacaguaa

SEQ ID NO: 599445 - RNA, 25 nt, Human
ccacacuccaaucccaaaagagaga

SEQ ID NO: 599446 - RNA, 24 nt, Human
ccagaacacagaaaaaaaaagcca

SEQ ID NO: 599447 - RNA, 19 nt, Human
ccauccauacaaaugaaca

SEQ ID NO: 599448 - RNA, 19 nt, Human
cccaaaagagagagaagcc

SEQ ID NO: 599449 - RNA, 20 nt, Human
ccugaccaacacagcaaaac

SEQ ID NO: 599450 - RNA, 24 nt, Human
ccugaccaacacagcaaaacucug

SEQ ID NO: 599451 - RNA, 18 nt, Human
ccugggugacagagcaag

SEQ ID NO: 599452 - RNA, 23 nt, Human
cgaggcucugucucaaaaaaaaa

SEQ ID NO: 599453 - RNA, 23 nt, Human
cggcaaugccacacuccaauccc

SEQ ID NO: 599454 - RNA, 21 nt, Human
cuacugcacucuagccugggu

SEQ ID NO: 599455 - RNA, 24 nt, Human
cuacugcacucuagccugggugac

SEQ ID NO: 599456 - RNA, 25 nt, Human
cucaaaaaaaaaaaaaaaagaaaga

SEQ ID NO: 599457 - RNA, 19 nt, Human
cucugucucaaaaaaaaaa

SEQ ID NO: 599458 - RNA, 19 nt, Human
cuggguacagauaagaaaa

SEQ ID NO: 599459 - RNA, 20 nt, Human
gaauggggaaugggaggaaa

SEQ ID NO: 599460 - RNA, 28 nt, Human
gacagagcaagcgaggcucugucucaaa

SEQ ID NO: 599461 - RNA, 23 nt, Human
gagaaucacuugaacccaggaag

SEQ ID NO: 599462 - RNA, 25 nt, Human
gaggcaggugaaucauaugaggcca

SEQ ID NO: 599463 - RNA, 20 nt, Human
gagugguucuuuaccuccgc

SEQ ID NO: 599464 - RNA, 24 nt, Human
gcacucuagccugggugacagagc

SEQ ID NO: 599465 - RNA, 22 nt, Human
gcaugagaaucacuugaaccca

SEQ ID NO: 599466 - RNA, 21 nt, Human
gcccagcagccaucuuaggac

SEQ ID NO: 599467 - RNA, 20 nt, Human
gcgaaggaugucuagccugc

SEQ ID NO: 599468 - RNA, 18 nt, Human
gcuacugcacucuagccu

SEQ ID NO: 599469 - RNA, 24 nt, Human
gcuacugcacucuagccuggguga

SEQ ID NO: 599470 - RNA, 21 nt, Human
gcuuguuuuaugauuuuccgg

SEQ ID NO: 599471 - RNA, 23 nt, Human
ggaaaccucugacaacgacagaa

SEQ ID NO: 599472 - RNA, 20 nt, Human
ggaauggggaaugggaggaa

SEQ ID NO: 599473 - RNA, 23 nt, Human
ggaggugccgacacaccuggucu

SEQ ID NO: 599474 - RNA, 21 nt, Human
gguugcagugagccaagaucg

SEQ ID NO: 599475 - RNA, 19 nt, Human
gucucuacuaaaaauacaa

SEQ ID NO: 599476 - RNA, 23 nt, Human
uaaaaacacaguuccaguaaacg

SEQ ID NO: 599477 - RNA, 22 nt, Human
uaacaguaauauaaucaugauu

SEQ ID NO: 599478 - RNA, 18 nt, Human
uacaaaugucuugaagca

SEQ ID NO: 599479 - RNA, 25 nt, Human
uacaagggcagcaugguagcucaug

SEQ ID NO: 599480 - RNA, 20 nt, Human
uacgagaagcucacuggcug

SEQ ID NO: 599481 - RNA, 19 nt, Human
uacucccagaacuuuggga

SEQ ID NO: 599482 - RNA, 21 nt, Human
uacugcacucuagccugggug

SEQ ID NO: 599483 - RNA, 23 nt, Human
uacugcacucuagccugggugac

SEQ ID NO: 599484 - RNA, 24 nt, Human
uacugcacucuagccugggugaca

SEQ ID NO: 599485 - RNA, 19 nt, Human
uagugcuaucaauuuucug

SEQ ID NO: 599486 - RNA, 18 nt, Human
uaucagacagguaggaaa

SEQ ID NO: 599487 - RNA, 19 nt, Human
uaucugaaaauacacaaaa

SEQ ID NO: 599488 - RNA, 23 nt, Human
uauuccagaacacagaaaaaaaa

SEQ ID NO: 599489 - RNA, 22 nt, Human
ucaaaaaaaaaaaaaaaagaaa

SEQ ID NO: 599490 - RNA, 21 nt, Human
ucaaaguuauauuaucuugag

SEQ ID NO: 599491 - RNA, 21 nt, Human
ucaacuaaaugaaagcaagau

SEQ ID NO: 599492 - RNA, 22 nt, Human
uccaacauuuggucuggauacu

SEQ ID NO: 599493 - RNA, 23 nt, Human
uccaaucccaaaagagagagaag

SEQ ID NO: 599494 - RNA, 22 nt, Human
uccagaacacagaaaaaaaaag

SEQ ID NO: 599495 - RNA, 22 nt, Human
uccagaacacagaaaaaaaaag

SEQ ID NO: 599496 - RNA, 27 nt, Human
uccauacaaaugaacaaaaggaguuuc

SEQ ID NO: 599497 - RNA, 25 nt, Human
uccauccauacaaaugaacaaaauc

SEQ ID NO: 599498 - RNA, 21 nt, Human
uccuuaaagaaagacugaaaa

SEQ ID NO: 599499 - RNA, 18 nt, Human
ucuagccugggugacaga

SEQ ID NO: 599500 - RNA, 18 nt, Human
ucucaaaaaaaaaaaaaa

SEQ ID NO: 599501 - RNA, 25 nt, Human
ucucaaaaaaaaaaaaaaaagaaag

SEQ ID NO: 599502 - RNA, 22 nt, Human
ucucuacuaaaaauacaaaaaa

SEQ ID NO: 599503 - RNA, 23 nt, Human
ucugucucaaaaaaaaaaaaaaa

SEQ ID NO: 599504 - RNA, 22 nt, Human
ucuuaggguccaagauugcaag

SEQ ID NO: 599505 - RNA, 22 nt, Human
ugaaaauacacaaaaauuaaca

SEQ ID NO: 599506 - RNA, 19 nt, Human
ugaaaugaauauuguaggu

SEQ ID NO: 599507 - RNA, 24 nt, Human
ugaaucauaugaggccaggaguuc

SEQ ID NO: 599508 - RNA, 19 nt, Human
ugagaaaaauacuuaggaa

SEQ ID NO: 599509 - RNA, 22 nt, Human
ugagccaagaucgugcuacugc

SEQ ID NO: 599510 - RNA, 24 nt, Human
ugaggcaugagaaucacuugaacc

SEQ ID NO: 599511 - RNA, 18 nt, Human
ugagugguucuuuaccuc

SEQ ID NO: 599512 - RNA, 19 nt, Human
ugagugguucuuuaccucc

SEQ ID NO: 599513 - RNA, 19 nt, Human
ugcaacucugaaauaucaa

SEQ ID NO: 599514 - RNA, 22 nt, Human
ugcuggcagucccguuaacugg

SEQ ID NO: 599515 - RNA, 19 nt, Human
ugggaggcagaggcaggug

SEQ ID NO: 599516 - RNA, 24 nt, Human
ugggaggcagaggcaggugaauca

SEQ ID NO: 599517 - RNA, 21 nt, Human
ugggcacugagcagggaggug

SEQ ID NO: 599518 - RNA, 24 nt, Human
ugguagcucaugucuguacuccca

SEQ ID NO: 599519 - RNA, 22 nt, Human
uggucuuguucaccugcuuguu

SEQ ID NO: 599520 - RNA, 24 nt, Human
uguccauaaucccagcuacucagg

SEQ ID NO: 599521 - RNA, 21 nt, Human
ugucuagccugcuggcagucc

SEQ ID NO: 599522 - RNA, 18 nt, Human
uuagccgggugugguggc

SEQ ID NO: 599523 - RNA, 20 nt, Human
uuagccgggugugguggcau

SEQ ID NO: 599524 - RNA, 19 nt, Human
uuccugucagaaccaggaa

SEQ ID NO: 599525 - RNA, 22 nt, Human
uugcagugagccaagaucgugc

SEQ ID NO: 599526 - RNA, 21 nt, Human
uuuccaacauuuggucuggau

SEQ ID NO: 599527 - RNA, 18 nt, Human
aaagaaaucucuucccuu

SEQ ID NO: 599528 - RNA, 23 nt, Human
aaagacacaaaaauacaagcaca

SEQ ID NO: 599529 - RNA, 24 nt, Human
aacaugucuccaaccagauuacua

SEQ ID NO: 599530 - RNA, 23 nt, Human
aaccucagaauaagcaaagacca

SEQ ID NO: 599531 - RNA, 20 nt, Human
aacuaagucaccccccauaa

SEQ ID NO: 599532 - RNA, 23 nt, Human
aagaaagaaagaaagacacaaaa

SEQ ID NO: 599533 - RNA, 21 nt, Human
aagaaagaaagacacaaaaaa

SEQ ID NO: 599534 - RNA, 22 nt, Human
aagaaagacacaaaaauacaag

SEQ ID NO: 599535 - RNA, 18 nt, Human
aagcaaagaccaccaaga

SEQ ID NO: 599536 - RNA, 23 nt, Human
aauaacgggggcuaccaucagaa

SEQ ID NO: 599537 - RNA, 18 nt, Human
aauggaagugggaagaga

SEQ ID NO: 599538 - RNA, 25 nt, Human
acaagcacaacucacauuuucaaau

SEQ ID NO: 599539 - RNA, 22 nt, Human
acacuauccaaugaagaugaaa

SEQ ID NO: 599540 - RNA, 22 nt, Human
acagagacaauguuuagaggaa

SEQ ID NO: 599541 - RNA, 19 nt, Human
accaagauuaucugaccca

SEQ ID NO: 599542 - RNA, 25 nt, Human
accuuauaagccaggcaaaaaaggu

SEQ ID NO: 599543 - RNA, 19 nt, Human
acuaagucaccccccauaa

SEQ ID NO: 599544 - RNA, 23 nt, Human
acugcaguccacauccuucuccu

SEQ ID NO: 599545 - RNA, 20 nt, Human
agaaagaaagaaagacacaa

SEQ ID NO: 599546 - RNA, 25 nt, Human
agaaagaaagacacaaaaauacaag

SEQ ID NO: 599547 - RNA, 20 nt, Human
agaaauuucugggauaguau

SEQ ID NO: 599548 - RNA, 20 nt, Human
agaauaaaugccccagaaag

SEQ ID NO: 599549 - RNA, 23 nt, Human
agaauaagcaaagaccaccaaga

SEQ ID NO: 599550 - RNA, 23 nt, Human
agaauuacaacaugucuccaacc

SEQ ID NO: 599551 - RNA, 24 nt, Human
agaauuacaacaugucuccaacca

SEQ ID NO: 599552 - RNA, 21 nt, Human
agagaacaaauagaaaguuau

SEQ ID NO: 599553 - RNA, 19 nt, Human
agagacaauguuuagagga

SEQ ID NO: 599554 - RNA, 23 nt, Human
agauaacuaagucaccccccaua

SEQ ID NO: 599555 - RNA, 19 nt, Human
agaugcugucuuggagcgg

SEQ ID NO: 599556 - RNA, 21 nt, Human
agccuggucaauguauaacag

SEQ ID NO: 599557 - RNA, 20 nt, Human
aggaggaggggagaagagga

SEQ ID NO: 599558 - RNA, 21 nt, Human
aggcacuaagugcccauuacu

SEQ ID NO: 599559 - RNA, 23 nt, Human
aguaaggaggagaguagaagaga

SEQ ID NO: 599560 - RNA, 21 nt, Human
aguaaugcuaaaauccaaaac

SEQ ID NO: 599561 - RNA, 23 nt, Human
auccuucuccuaucccuuucccu

SEQ ID NO: 599562 - RNA, 21 nt, Human
caaaaauacaagcacaacuca

SEQ ID NO: 599563 - RNA, 21 nt, Human
caaaccucuaccacuacccag

SEQ ID NO: 599564 - RNA, 24 nt, Human
caacucacauuuucaaauaaagga

SEQ ID NO: 599565 - RNA, 23 nt, Human
caagcacaacucacauuuucaaa

SEQ ID NO: 599566 - RNA, 21 nt, Human
cacacacuucucuauaaaagc

SEQ ID NO: 599567 - RNA, 21 nt, Human
cacauccuucuccuaucccuu

SEQ ID NO: 599568 - RNA, 21 nt, Human
caccgcgccgggucccgcguc

SEQ ID NO: 599569 - RNA, 19 nt, Human
cacugcagcacugcagucc

SEQ ID NO: 599570 - RNA, 22 nt, Human
cagccgcuucgccgcucgccug

SEQ ID NO: 599571 - RNA, 18 nt, Human
caggaggaggaggggaga

SEQ ID NO: 599572 - RNA, 28 nt, Human
cauaacaugcaugggauaaauguacaua

SEQ ID NO: 599573 - RNA, 20 nt, Human
ccaagauuaucugacccaau

SEQ ID NO: 599574 - RNA, 19 nt, Human
ccaggcaaaaaagguucaa

SEQ ID NO: 599575 - RNA, 20 nt, Human
ccaggcaaaaaagguucaau

SEQ ID NO: 599576 - RNA, 18 nt, Human
ccgccgccgcccaccgcg

SEQ ID NO: 599577 - RNA, 22 nt, Human
ccgcuucgccgcucgccugaca

SEQ ID NO: 599578 - RNA, 21 nt, Human
ccggcgguggcaccggcgggc

SEQ ID NO: 599579 - RNA, 21 nt, Human
ccuuucgccgccgccgcccac

SEQ ID NO: 599580 - RNA, 24 nt, Human
ccuuucgccgccgccgcccaccgc

SEQ ID NO: 599581 - RNA, 18 nt, Human
cgccgcccuccagccgcu

SEQ ID NO: 599582 - RNA, 18 nt, Human
cgccgccgccgcccaccg

SEQ ID NO: 599583 - RNA, 19 nt, Human
cggcaggaggaggagggga

SEQ ID NO: 599584 - RNA, 21 nt, Human
cuaagucaccccccauaaccu

SEQ ID NO: 599585 - RNA, 24 nt, Human
cucgccgcccuccagccgcuucgg

SEQ ID NO: 599586 - RNA, 18 nt, Human
gaaaggcuccaaggagaa

SEQ ID NO: 599587 - RNA, 19 nt, Human
gaacaaguccugaaggcac

SEQ ID NO: 599588 - RNA, 19 nt, Human
gaacaagugagcugauagg

SEQ ID NO: 599589 - RNA, 19 nt, Human
gaagaugaaaugcuuggga

SEQ ID NO: 599590 - RNA, 18 nt, Human
gagagaaaguauuuguca

SEQ ID NO: 599591 - RNA, 18 nt, Human
gaggagaguagaagagac

SEQ ID NO: 599592 - RNA, 20 nt, Human
gaugagagaacaaauagaaa

SEQ ID NO: 599593 - RNA, 21 nt, Human
gcaagaauggaagugggaaga

SEQ ID NO: 599594 - RNA, 23 nt, Human
gccguccccuuucgccgccgccg

SEQ ID NO: 599595 - RNA, 19 nt, Human
gcggccucggaacaagcac

SEQ ID NO: 599596 - RNA, 22 nt, Human
ggaggaggaggggagaagagga

SEQ ID NO: 599597 - RNA, 25 nt, Human
ggaggaggaggggagaagaggagcg

SEQ ID NO: 599598 - RNA, 20 nt, Human
gggauaguauagaacaaguc

SEQ ID NO: 599599 - RNA, 23 nt, Human
ggggaggaguugccguccccuuu

SEQ ID NO: 599600 - RNA, 20 nt, Human
guaaugcuaaaauccaaaac

SEQ ID NO: 599601 - RNA, 18 nt, Human
guuuaaaaaaagaaagaa

SEQ ID NO: 599602 - RNA, 20 nt, Human
uaaaaaaagaaagaaagaaa

SEQ ID NO: 599603 - RNA, 18 nt, Human
uaaaaacaccagagcagu

SEQ ID NO: 599604 - RNA, 25 nt, Human
uaaaaacaccagagcaguuggagac

SEQ ID NO: 599605 - RNA, 23 nt, Human
uaaaacucaguccagugcuuucu

SEQ ID NO: 599606 - RNA, 19 nt, Human
uaaaauucuggggguaggg

SEQ ID NO: 599607 - RNA, 19 nt, Human
uaacagaaugaacuuccaa

SEQ ID NO: 599608 - RNA, 24 nt, Human
uaacagcaccucuuaauucagggg

SEQ ID NO: 599609 - RNA, 20 nt, Human
uaagcaaagaccaccaagau

SEQ ID NO: 599610 - RNA, 22 nt, Human
uaagcaaagaccaccaagauua

SEQ ID NO: 599611 - RNA, 19 nt, Human
uaagccccugcaaggcuau

SEQ ID NO: 599612 - RNA, 24 nt, Human
uaagucaccccccauaaccuuccc

SEQ ID NO: 599613 - RNA, 22 nt, Human
uaauucagggguauccgucuua

SEQ ID NO: 599614 - RNA, 26 nt, Human
uacaagcacaacucacauuuucaaaa

SEQ ID NO: 599615 - RNA, 18 nt, Human
uacccagccugaagcaaa

SEQ ID NO: 599616 - RNA, 18 nt, Human
uacuauguaacacuaucc

SEQ ID NO: 599617 - RNA, 19 nt, Human
uagaucccaagggagagag

SEQ ID NO: 599618 - RNA, 21 nt, Human
uagcagcugucuuaaaacuca

SEQ ID NO: 599619 - RNA, 25 nt, Human
ucaacaauaugaaaucauucccaag

SEQ ID NO: 599620 - RNA, 18 nt, Human
ucaagcauaguguugagc

SEQ ID NO: 599621 - RNA, 19 nt, Human
ucagaauaagcaaagacca

SEQ ID NO: 599622 - RNA, 19 nt, Human
ucagugugucucaaaguga

SEQ ID NO: 599623 - RNA, 21 nt, Human
ucccaagggagagagacagcu

SEQ ID NO: 599624 - RNA, 19 nt, Human
ucccacgugaacuaggcca

SEQ ID NO: 599625 - RNA, 22 nt, Human
ucccacgugaacuaggccaagu

SEQ ID NO: 599626 - RNA, 20 nt, Human
ucccgcguccucucggccgc

SEQ ID NO: 599627 - RNA, 22 nt, Human
ucccuggccacauggcccaacu

SEQ ID NO: 599628 - RNA, 19 nt, Human
ucgccgccgccgcccaccg

SEQ ID NO: 599629 - RNA, 23 nt, Human
ucuaccacuacccagccugaagc

SEQ ID NO: 599630 - RNA, 26 nt, Human
ucuccuaucccuuucccucugcucaa

SEQ ID NO: 599631 - RNA, 18 nt, Human
ucugucuuugaggcagac

SEQ ID NO: 599632 - RNA, 24 nt, Human
ucuucaaucccaucccacgugaac

SEQ ID NO: 599633 - RNA, 23 nt, Human
ucuuugugugucucucgccgccc

SEQ ID NO: 599634 - RNA, 25 nt, Human
ugaaggcacuaagugcccauuacug

SEQ ID NO: 599635 - RNA, 24 nt, Human
ugaauucuugugguuaaagaguuu

SEQ ID NO: 599636 - RNA, 18 nt, Human
ugacuauguuaguauucc

SEQ ID NO: 599637 - RNA, 18 nt, Human
ugagggaagcaauauggg

SEQ ID NO: 599638 - RNA, 18 nt, Human
ugaguagaaucugggugg

SEQ ID NO: 599639 - RNA, 23 nt, Human
ugcagaggugguuucaugaaggg

SEQ ID NO: 599640 - RNA, 20 nt, Human
ugcaugggauaaauguacau

SEQ ID NO: 599641 - RNA, 21 nt, Human
ugcuuucuucucuacaugaag

SEQ ID NO: 599642 - RNA, 19 nt, Human
uggaagugggaagagagaa

SEQ ID NO: 599643 - RNA, 23 nt, Human
uggcacugcagcacugcagucca

SEQ ID NO: 599644 - RNA, 22 nt, Human
ugggaagagagaaagacuugag

SEQ ID NO: 599645 - RNA, 22 nt, Human
uguaucaccuacccuagaguuu

SEQ ID NO: 599646 - RNA, 22 nt, Human
ugucaagaauaaaugccccaga

SEQ ID NO: 599647 - RNA, 19 nt, Human
ugucuccacuuaacagauc

SEQ ID NO: 599648 - RNA, 21 nt, Human
ugugcaagaauggaaguggga

SEQ ID NO: 599649 - RNA, 23 nt, Human
uguuguguugucuuccucucuuu

SEQ ID NO: 599650 - RNA, 24 nt, Human
uguuuagaggaaaaugggguuuua

SEQ ID NO: 599651 - RNA, 19 nt, Human
uuaaaacucaguccagugc

SEQ ID NO: 599652 - RNA, 20 nt, Human
uuccaaguuaugaaaugauu

SEQ ID NO: 599653 - RNA, 18 nt, Human
uucuucuacagcaacucu

SEQ ID NO: 599654 - RNA, 28 nt, Human
uugaagaaugaguagaaucugggugguc

SEQ ID NO: 599655 - RNA, 24 nt, Human
uugcuaaauaaguagcaauuaugc

SEQ ID NO: 599656 - RNA, 24 nt, Human
uuuaagaccaggacauaauugucc

SEQ ID NO: 599657 - RNA, 25 nt, Human
uuugacuauguuaguauuccaaguu

SEQ ID NO: 599658 - RNA, 21 nt, Human
uuugucaagaauaaaugcccc

SEQ ID NO: 599659 - RNA, 24 nt, Human
uuugucaagaauaaaugccccaga

SEQ ID NO: 599660 - RNA, 18 nt, Human
aaaaagcaaacaaacuua

SEQ ID NO: 599661 - RNA, 18 nt, Human
aaaaucagcugggcgugg

SEQ ID NO: 599662 - RNA, 19 nt, Human
aaacaauugucuuuccucc

SEQ ID NO: 599663 - RNA, 19 nt, Human
aaaggcuuaguccucaaac

SEQ ID NO: 599664 - RNA, 24 nt, Human
aaagugcugggauuacagguguga

SEQ ID NO: 599665 - RNA, 20 nt, Human
aaaguguugggauuacaggc

SEQ ID NO: 599666 - RNA, 22 nt, Human
aaaguguugggauuacaggcgu

SEQ ID NO: 599667 - RNA, 24 nt, Human
aaaguguugggauuacaggcguga

SEQ ID NO: 599668 - RNA, 19 nt, Human
aaauguucuaucaauugca

SEQ ID NO: 599669 - RNA, 26 nt, Human
aagcaaucuuccucuucuuggccucc

SEQ ID NO: 599670 - RNA, 24 nt, Human
aagugaucugcccgccuuggucuc

SEQ ID NO: 599671 - RNA, 18 nt, Human
aagugcugggauuacagg

SEQ ID NO: 599672 - RNA, 19 nt, Human
aagugcugggauuacaggu

SEQ ID NO: 599673 - RNA, 26 nt, Human
aagugcugggauuacaggugugagcc

SEQ ID NO: 599674 - RNA, 21 nt, Human
aaguguugggauuacaggcgu

SEQ ID NO: 599675 - RNA, 26 nt, Human
aaguguugggauuacaggcgugagcc

SEQ ID NO: 599676 - RNA, 19 nt, Human
aaguguugggauugcaggu

SEQ ID NO: 599677 - RNA, 24 nt, Human
aaugaucuaccugucucagccucc

SEQ ID NO: 599678 - RNA, 26 nt, Human
acaagaaaacaauugucuuuccucca

SEQ ID NO: 599679 - RNA, 18 nt, Human
acaggguuucaccauguu

SEQ ID NO: 599680 - RNA, 21 nt, Human
acaggguuucaccauguuggc

SEQ ID NO: 599681 - RNA, 24 nt, Human
acaggguuucaccauguuggccag

SEQ ID NO: 599682 - RNA, 23 nt, Human
accacaccuggcuaguuuuugua

SEQ ID NO: 599683 - RNA, 24 nt, Human
accauguuggccaggauggucucg

SEQ ID NO: 599684 - RNA, 20 nt, Human
acccgccuccaccucccaaa

SEQ ID NO: 599685 - RNA, 18 nt, Human
accuugugauccacccgc

SEQ ID NO: 599686 - RNA, 24 nt, Human
acuccagccuggggguucagguga

SEQ ID NO: 599687 - RNA, 18 nt, Human
acuguacuccagccuggg

SEQ ID NO: 599688 - RNA, 20 nt, Human
acuguacuccagccuggggg

SEQ ID NO: 599689 - RNA, 22 nt, Human
agaaaaaacaaauuugaaugca

SEQ ID NO: 599690 - RNA, 24 nt, Human
agaccagguugguuuugaacuccu

SEQ ID NO: 599691 - RNA, 24 nt, Human
agagugcugggauuacacacauga

SEQ ID NO: 599692 - RNA, 24 nt, Human
agcacuuugggaggcagagguggg

SEQ ID NO: 599693 - RNA, 21 nt, Human
agccuggacaacauggcgaaa

SEQ ID NO: 599694 - RNA, 23 nt, Human
agcugggcguggugguacacacc

SEQ ID NO: 599695 - RNA, 23 nt, Human
aggaguucgagaccagccuggac

SEQ ID NO: 599696 - RNA, 21 nt, Human
aggcacaugaucgcuugaacc

SEQ ID NO: 599697 - RNA, 23 nt, Human
aggcacaugaucgcuugaaccug

SEQ ID NO: 599698 - RNA, 21 nt, Human
aggcagaggugggcagaucau

SEQ ID NO: 599699 - RNA, 19 nt, Human
aggcaggcugccacuggga

SEQ ID NO: 599700 - RNA, 19 nt, Human
aggcauggagaaccacacc

SEQ ID NO: 599701 - RNA, 23 nt, Human
aggcgugagccaccgugccuggc

SEQ ID NO: 599702 - RNA, 25 nt, Human
aggcuggagugcaguggcgugaucu

SEQ ID NO: 599703 - RNA, 23 nt, Human
aggcuuaggcacaugaucgcuug

SEQ ID NO: 599704 - RNA, 19 nt, Human
aggugggcagaucauuagg

SEQ ID NO: 599705 - RNA, 21 nt, Human
aguagccgggauuauaggcau

SEQ ID NO: 599706 - RNA, 22 nt, Human
aguagccgggauuauaggcaug

SEQ ID NO: 599707 - RNA, 19 nt, Human
agugcaguggcgugaucuc

SEQ ID NO: 599708 - RNA, 20 nt, Human
agugcaguggcgugaucucg

SEQ ID NO: 599709 - RNA, 23 nt, Human
agugcaguggcgugaucucggcu

SEQ ID NO: 599710 - RNA, 24 nt, Human
agugcaguggcgugaucucggcuc

SEQ ID NO: 599711 - RNA, 20 nt, Human
agugcugggauuacacacau

SEQ ID NO: 599712 - RNA, 22 nt, Human
agugcugggauuacacacauga

SEQ ID NO: 599713 - RNA, 24 nt, Human
agugcugggauuacacacaugagc

SEQ ID NO: 599714 - RNA, 22 nt, Human
aguugagaugggguuucaccau

SEQ ID NO: 599715 - RNA, 24 nt, Human
auccugccacuguacuccagccug

SEQ ID NO: 599716 - RNA, 24 nt, Human
augaucuaccugucucagccuccc

SEQ ID NO: 599717 - RNA, 18 nt, Human
augcgccaccacgcccag

SEQ ID NO: 599718 - RNA, 19 nt, Human
augggguuucaccauguag

SEQ ID NO: 599719 - RNA, 25 nt, Human
augggguuucaccauguagaccagg

SEQ ID NO: 599720 - RNA, 18 nt, Human
auucuccugccucagccu

SEQ ID NO: 599721 - RNA, 18 nt, Human
auucuccugccucagccu

SEQ ID NO: 599722 - RNA, 22 nt, Human
auuuuuuguauuuuuaguugag

SEQ ID NO: 599723 - RNA, 23 nt, Human
caaagauaaaccugaaaaagcaa

SEQ ID NO: 599724 - RNA, 26 nt, Human
caaagcauaauucacugcaaagauaa

SEQ ID NO: 599725 - RNA, 24 nt, Human
caaagugcugggauuacaggugug

SEQ ID NO: 599726 - RNA, 24 nt, Human
caaaguguugggauugcaggugug

SEQ ID NO: 599727 - RNA, 23 nt, Human
caaccuccaccuccuggguucaa

SEQ ID NO: 599728 - RNA, 22 nt, Human
caagugauucuccugccucagc

SEQ ID NO: 599729 - RNA, 22 nt, Human
caaguuaauuaagaagucaaaa

SEQ ID NO: 599730 - RNA, 19 nt, Human
cacaccugugaucccagcu

SEQ ID NO: 599731 - RNA, 24 nt, Human
caccacgcccagcuaauuuuugua

SEQ ID NO: 599732 - RNA, 21 nt, Human
caccauguagaccagguuggu

SEQ ID NO: 599733 - RNA, 21 nt, Human
caccauguagaccagguuggu

SEQ ID NO: 599734 - RNA, 18 nt, Human
caccauguuggccaggau

SEQ ID NO: 599735 - RNA, 22 nt, Human
caccauguuggccaggaugguc

SEQ ID NO: 599736 - RNA, 24 nt, Human
caccauguuggccaggauggucuc

SEQ ID NO: 599737 - RNA, 18 nt, Human
caccauguuggccuggcu

SEQ ID NO: 599738 - RNA, 24 nt, Human
caccauguuggccuggcuggucuc

SEQ ID NO: 599739 - RNA, 23 nt, Human
cacccgccuccaccucccaaagu

SEQ ID NO: 599740 - RNA, 24 nt, Human
caccugugaucccagcuacucagg

SEQ ID NO: 599741 - RNA, 21 nt, Human
cacugcaaagauaaaccugaa

SEQ ID NO: 599742 - RNA, 21 nt, Human
cacugcaaccuccaccuccug

SEQ ID NO: 599743 - RNA, 23 nt, Human
cacugcaaccuccaccuccuggg

SEQ ID NO: 599744 - RNA, 18 nt, Human
cacuguacuccagccugg

SEQ ID NO: 599745 - RNA, 19 nt, Human
cacuguacuccagccuggg

SEQ ID NO: 599746 - RNA, 19 nt, Human
cacuguacuccagccuggg

SEQ ID NO: 599747 - RNA, 25 nt, Human
cacuguacuccagccuggggguuca

SEQ ID NO: 599748 - RNA, 24 nt, Human
cagagugcugggauuacacacaug

SEQ ID NO: 599749 - RNA, 21 nt, Human
cagcacuuugggaggcagagg

SEQ ID NO: 599750 - RNA, 24 nt, Human
cagcacuuugggaggcagaggugg

SEQ ID NO: 599751 - RNA, 20 nt, Human
caggaggcuuaggcacauga

SEQ ID NO: 599752 - RNA, 24 nt, Human
caggguuucaccauguuggccagg

SEQ ID NO: 599753 - RNA, 22 nt, Human
caggugauucuccugccucagc

SEQ ID NO: 599754 - RNA, 20 nt, Human
caguaagcugagauccugcc

SEQ ID NO: 599755 - RNA, 24 nt, Human
cauauuuuaaacaagaaaacaauu

SEQ ID NO: 599756 - RNA, 24 nt, Human
caugccugugaucccagcacuuug

SEQ ID NO: 599757 - RNA, 21 nt, Human
ccaaagugcugggauuacagg

SEQ ID NO: 599758 - RNA, 21 nt, Human
ccaaagugcugggauuacagg

SEQ ID NO: 599759 - RNA, 24 nt, Human
ccaaagugcugggauuacaggugu

SEQ ID NO: 599760 - RNA, 20 nt, Human
ccaaaguguugggauugcag

SEQ ID NO: 599761 - RNA, 21 nt, Human
ccaaaguguugggauugcagg

SEQ ID NO: 599762 - RNA, 24 nt, Human
ccaaaguguugggauugcaggugu

SEQ ID NO: 599763 - RNA, 20 nt, Human
ccaccacgcccagcuaauuu

SEQ ID NO: 599764 - RNA, 20 nt, Human
ccacccgccuccaccuccca

SEQ ID NO: 599765 - RNA, 21 nt, Human
ccacccgccuccaccucccaa

SEQ ID NO: 599766 - RNA, 24 nt, Human
ccaccuccuggguucaagugauuc

SEQ ID NO: 599767 - RNA, 20 nt, Human
ccacuguacuccagccuggg

SEQ ID NO: 599768 - RNA, 20 nt, Human
ccacuguacuccagccuggg

SEQ ID NO: 599769 - RNA, 22 nt, Human
ccacuguacuccagccuggggg

SEQ ID NO: 599770 - RNA, 22 nt, Human
ccacuguacuccagccuggggg

SEQ ID NO: 599771 - RNA, 23 nt, Human
ccacuguacuccagccugggggu

SEQ ID NO: 599772 - RNA, 19 nt, Human
ccagagugcugggauuaca

SEQ ID NO: 599773 - RNA, 24 nt, Human
ccagagugcugggauuacacacau

SEQ ID NO: 599774 - RNA, 20 nt, Human
ccaggaguucgagaccagcc

SEQ ID NO: 599775 - RNA, 19 nt, Human
cccgaccucaagugaucug

SEQ ID NO: 599776 - RNA, 23 nt, Human
cccgaguagccgggauuauaggc

SEQ ID NO: 599777 - RNA, 24 nt, Human
cccgaguagccgggauuauaggca

SEQ ID NO: 599778 - RNA, 19 nt, Human
cccgccuccaccucccaaa

SEQ ID NO: 599779 - RNA, 22 nt, Human
cccgccuuggucuccuaaagug

SEQ ID NO: 599780 - RNA, 24 nt, Human
cccuaguaguugggacuacaggca

SEQ ID NO: 599781 - RNA, 24 nt, Human
ccgaguagccgggauuauaggcau

SEQ ID NO: 599782 - RNA, 24 nt, Human
ccgccuccaccucccaaagugcug

SEQ ID NO: 599783 - RNA, 24 nt, Human
ccgccuuggucuccuaaaguguug

SEQ ID NO: 599784 - RNA, 23 nt, Human
ccuaaaguguugggauuacaggc

SEQ ID NO: 599785 - RNA, 22 nt, Human
ccuccaccuccuggguucaagu

SEQ ID NO: 599786 - RNA, 21 nt, Human
ccuccuggguucaagugauuc

SEQ ID NO: 599787 - RNA, 24 nt, Human
ccuccuggguucaagugauucucc

SEQ ID NO: 599788 - RNA, 20 nt, Human
ccugaccucaaaugaucuac

SEQ ID NO: 599789 - RNA, 21 nt, Human
ccugaccucaaaugaucuacc

SEQ ID NO: 599790 - RNA, 23 nt, Human
ccugaccucaaaugaucuaccug

SEQ ID NO: 599791 - RNA, 23 nt, Human
ccugccucagccucccgaguagc

SEQ ID NO: 599792 - RNA, 24 nt, Human
ccugccucagccucccuaguaguu

SEQ ID NO: 599793 - RNA, 23 nt, Human
ccuggguucaagugauucuccuc

SEQ ID NO: 599794 - RNA, 23 nt, Human
ccuggguucaagugauucuccug

SEQ ID NO: 599795 - RNA, 21 nt, Human
ccugugaucccagcuacucag

SEQ ID NO: 599796 - RNA, 22 nt, Human
cgaaagucuuuacuaaaaauac

SEQ ID NO: 599797 - RNA, 18 nt, Human
cgaccucaagugaucugc

SEQ ID NO: 599798 - RNA, 24 nt, Human
cgccaggcuggagugcaguggcgu

SEQ ID NO: 599799 - RNA, 23 nt, Human
cgcucugucgccaggcuggagug

SEQ ID NO: 599800 - RNA, 20 nt, Human
cgcugcacagcggcggguca

SEQ ID NO: 599801 - RNA, 24 nt, Human
cgggauuauaggcauggagaacca

SEQ ID NO: 599802 - RNA, 22 nt, Human
cuaaaguguugggauuacaggc

SEQ ID NO: 599803 - RNA, 24 nt, Human
cuaaaguguugggauuacaggcgu

SEQ ID NO: 599804 - RNA, 18 nt, Human
cucaagcaaucuuccucu

SEQ ID NO: 599805 - RNA, 24 nt, Human
cucacugcaaccuccaccuccugg

SEQ ID NO: 599806 - RNA, 26 nt, Human
cucacugcaaccuccaccuccugggu

SEQ ID NO: 599807 - RNA, 24 nt, Human
cucaugccugugaucccagcacuu

SEQ ID NO: 599808 - RNA, 26 nt, Human
cucccgaccucaagugaucugcccgc

SEQ ID NO: 599809 - RNA, 22 nt, Human
cuccugccucagccucccuagu

SEQ ID NO: 599810 - RNA, 20 nt, Human
cuccugggcucaagcaaucu

SEQ ID NO: 599811 - RNA, 23 nt, Human
cuccugggcucaagcaaucuucc

SEQ ID NO: 599812 - RNA, 21 nt, Human
cuccuggguucaagugauucu

SEQ ID NO: 599813 - RNA, 23 nt, Human
cucgcucugucgccaggcuggag

SEQ ID NO: 599814 - RNA, 24 nt, Human
cucuugaccuugugauccacccgc

SEQ ID NO: 599815 - RNA, 23 nt, Human
cugcaaccuccaccuccuggguu

SEQ ID NO: 599816 - RNA, 18 nt, Human
cugcaguaagcugagauc

SEQ ID NO: 599817 - RNA, 22 nt, Human
cugccucagccucccgaguagc

SEQ ID NO: 599818 - RNA, 24 nt, Human
cuggggguucaggugauucuccug

SEQ ID NO: 599819 - RNA, 23 nt, Human
cugucucagccucccagagugcu

SEQ ID NO: 599820 - RNA, 21 nt, Human
cugugaucccagcuacucagg

SEQ ID NO: 599821 - RNA, 19 nt, Human
cuuccucuucuuggccucc

SEQ ID NO: 599822 - RNA, 23 nt, Human
cuuugggaggcagaggugggcag

SEQ ID NO: 599823 - RNA, 22 nt, Human
gaaaaagcaaacaaacuuacaa

SEQ ID NO: 599824 - RNA, 18 nt, Human
gaaguuucaccauguugg

SEQ ID NO: 599825 - RNA, 24 nt, Human
gaccucaaaugaucuaccugucuc

SEQ ID NO: 599826 - RNA, 24 nt, Human
gaccucaagugaucugcccgccuu

SEQ ID NO: 599827 - RNA, 22 nt, Human
gaccuugugauccacccgccuc

SEQ ID NO: 599828 - RNA, 22 nt, Human
gaccuugugauccacccgccuc

SEQ ID NO: 599829 - RNA, 23 nt, Human
gaccuugugauccacccgccucc

SEQ ID NO: 599830 - RNA, 25 nt, Human
gaccuugugauccacccgccuccac

SEQ ID NO: 599831 - RNA, 24 nt, Human
gagagggagucucgcucugucgcc

SEQ ID NO: 599832 - RNA, 18 nt, Human
gagaugggguuucaccau

SEQ ID NO: 599833 - RNA, 20 nt, Human
gagaugggguuucaccaugu

SEQ ID NO: 599834 - RNA, 23 nt, Human
gaggugggcagaucauuaggcca

SEQ ID NO: 599835 - RNA, 24 nt, Human
gaguagccgggauuauaggcaugg

SEQ ID NO: 599836 - RNA, 21 nt, Human
gaucauuaggccaggaguucg

SEQ ID NO: 599837 - RNA, 22 nt, Human
gaucauuaggccaggaguucga

SEQ ID NO: 599838 - RNA, 24 nt, Human
gaucauuaggccaggaguucgaga

SEQ ID NO: 599839 - RNA, 24 nt, Human
gaucgcuugaaccugggagaugga

SEQ ID NO: 599840 - RNA, 18 nt, Human
gauuacacacaugagcca

SEQ ID NO: 599841 - RNA, 22 nt, Human
gauuacacacaugagccacugc

SEQ ID NO: 599842 - RNA, 18 nt, Human
gauuacaggcgugagcca

SEQ ID NO: 599843 - RNA, 21 nt, Human
gauuacaggcgugagccaccg

SEQ ID NO: 599844 - RNA, 24 nt, Human
gauuacaggcgugagccaccgugc

SEQ ID NO: 599845 - RNA, 18 nt, Human
gauuacaggugugagcca

SEQ ID NO: 599846 - RNA, 22 nt, Human
gauuacaggugugagccaccgc

SEQ ID NO: 599847 - RNA, 22 nt, Human
gauuacaggugugagccaccgc

SEQ ID NO: 599848 - RNA, 21 nt, Human
gauucuccugccucagccucc

SEQ ID NO: 599849 - RNA, 22 nt, Human
gcaaccuccaccuccuggguuc

SEQ ID NO: 599850 - RNA, 23 nt, Human
gcagaucauuaggccaggaguuc

SEQ ID NO: 599851 - RNA, 22 nt, Human
gccacuguacuccagccugggg

SEQ ID NO: 599852 - RNA, 22 nt, Human
gcccagcuaauuuuuguauuuu

SEQ ID NO: 599853 - RNA, 23 nt, Human
gcccggcuaauuuuuuguauuuu

SEQ ID NO: 599854 - RNA, 23 nt, Human
gccuccaccucccaaagugcugg

SEQ ID NO: 599855 - RNA, 21 nt, Human
gccuuggucuccuaaaguguu

SEQ ID NO: 599856 - RNA, 21 nt, Human
gcugcaguaagcugagauccu

SEQ ID NO: 599857 - RNA, 19 nt, Human
gcuggagugcaguggcgug

SEQ ID NO: 599858 - RNA, 23 nt, Human
gcuggucucaaacucccgaccuc

SEQ ID NO: 599859 - RNA, 19 nt, Human
ggacuacaggcaugcgcca

SEQ ID NO: 599860 - RNA, 23 nt, Human
ggcagaucauuaggccaggaguu

SEQ ID NO: 599861 - RNA, 21 nt, Human
ggcguggugguacacaccugu

SEQ ID NO: 599862 - RNA, 22 nt, Human
ggcuggagugcaguggcgugau

SEQ ID NO: 599863 - RNA, 23 nt, Human
ggcuggguucgguggcucaugcc

SEQ ID NO: 599864 - RNA, 23 nt, Human
gggauuauaggcauggagaacca

SEQ ID NO: 599865 - RNA, 23 nt, Human
gggguuucaccauguagaccagg

SEQ ID NO: 599866 - RNA, 22 nt, Human
ggguuucaccauguuggccagg

SEQ ID NO: 599867 - RNA, 24 nt, Human
ggugauucuccugccucagccucc

SEQ ID NO: 599868 - RNA, 23 nt, Human
gguggcucaugccugugauccca

SEQ ID NO: 599869 - RNA, 24 nt, Human
gguggcucaugccugugaucccag

SEQ ID NO: 599870 - RNA, 24 nt, Human
ggugguacacaccugugaucccag

SEQ ID NO: 599871 - RNA, 21 nt, Human
gguucgguggcucaugccugu

SEQ ID NO: 599872 - RNA, 24 nt, Human
gguuucaccauguuggccaggaug

SEQ ID NO: 599873 - RNA, 20 nt, Human
gguuuugaacuccugaccuc

SEQ ID NO: 599874 - RNA, 20 nt, Human
guagccgggauuauaggcau

SEQ ID NO: 599875 - RNA, 24 nt, Human
gucucgcucugucgccaggcugga

SEQ ID NO: 599876 - RNA, 24 nt, Human
gugauccacccgccuccaccuccc

SEQ ID NO: 599877 - RNA, 24 nt, Human
gugauucuccugccucagccuccc

SEQ ID NO: 599878 - RNA, 24 nt, Human
gugauucuccugccucagccuccc

SEQ ID NO: 599879 - RNA, 21 nt, Human
gugcgccacuacgcccagcuu

SEQ ID NO: 599880 - RNA, 23 nt, Human
gugguacacaccugugaucccag

SEQ ID NO: 599881 - RNA, 24 nt, Human
guuuuuguauuuuuaguagagaug

SEQ ID NO: 599882 - RNA, 21 nt, Human
guuuuuuucuuuuucuuuuuu

SEQ ID NO: 599883 - RNA, 26 nt, Human
uaaagcaaagcauaauucacugcaaa

SEQ ID NO: 599884 - RNA, 22 nt, Human
uaaauuagagacagggucucaa

SEQ ID NO: 599885 - RNA, 24 nt, Human
uaauagagacaggguuucaccaug

SEQ ID NO: 599886 - RNA, 26 nt, Human
uaauagagacaggguuucaccauguu

SEQ ID NO: 599887 - RNA, 24 nt, Human
uaauuuuuguauuuuuaauagaga

SEQ ID NO: 599888 - RNA, 24 nt, Human
uacaggcaugcgccaccacgccca

SEQ ID NO: 599889 - RNA, 22 nt, Human
uacaggcgugagccaccgugcc

SEQ ID NO: 599890 - RNA, 23 nt, Human
uacaggcgugagccaccgugccu

SEQ ID NO: 599891 - RNA, 23 nt, Human
uacaggugugagccaccgcgccc

SEQ ID NO: 599892 - RNA, 20 nt, Human
uaccugucucagccucccag

SEQ ID NO: 599893 - RNA, 23 nt, Human
uaccugucucagccucccagagu

SEQ ID NO: 599894 - RNA, 21 nt, Human
uacuccagccuggggguucag

SEQ ID NO: 599895 - RNA, 24 nt, Human
uacuccagccuggggguucaggug

SEQ ID NO: 599896 - RNA, 18 nt, Human
uagagacagggucucacu

SEQ ID NO: 599897 - RNA, 21 nt, Human
uagagacaggguuucaccaug

SEQ ID NO: 599898 - RNA, 22 nt, Human
uagagacaggguuucaccaugu

SEQ ID NO: 599899 - RNA, 24 nt, Human
uaguagagaugaaguuucaccaug

SEQ ID NO: 599900 - RNA, 26 nt, Human
uaguagagaugaaguuucaccauguu

SEQ ID NO: 599901 - RNA, 27 nt, Human
uaguaguugggacuacaggcaugcgcc

SEQ ID NO: 599902 - RNA, 24 nt, Human
uaguugagaugggguuucaccaug

SEQ ID NO: 599903 - RNA, 22 nt, Human
ucaaaaaacacgucaaauuuaa

SEQ ID NO: 599904 - RNA, 24 nt, Human
ucaaauuuaagcagaauaaggcug

SEQ ID NO: 599905 - RNA, 19 nt, Human
ucaagugauucuccugccu

SEQ ID NO: 599906 - RNA, 24 nt, Human
ucaccauguuggccaggauggucu

SEQ ID NO: 599907 - RNA, 23 nt, Human
ucacugcaaccuccaccuccugg

SEQ ID NO: 599908 - RNA, 23 nt, Human
ucacugcaaccuccaccuccugg

SEQ ID NO: 599909 - RNA, 24 nt, Human
ucacugcaaccuccaccuccuggg

SEQ ID NO: 599910 - RNA, 26 nt, Human
ucacugcaaccuccaccuccuggguu

SEQ ID NO: 599911 - RNA, 21 nt, Human
ucagccucccgaguagccggg

SEQ ID NO: 599912 - RNA, 18 nt, Human
ucagcugggcgugguggu

SEQ ID NO: 599913 - RNA, 19 nt, Human
ucaggugauucuccugccu

SEQ ID NO: 599914 - RNA, 20 nt, Human
ucaggugauucuccugccuc

SEQ ID NO: 599915 - RNA, 22 nt, Human
ucaugccugugaucccagcacu

SEQ ID NO: 599916 - RNA, 20 nt, Human
ucauuaggccaggaguucga

SEQ ID NO: 599917 - RNA, 24 nt, Human
ucauuaggccaggaguucgagacc

SEQ ID NO: 599918 - RNA, 23 nt, Human
uccacccgccuccaccucccaaa

SEQ ID NO: 599919 - RNA, 23 nt, Human
ucccaaagugcugggauuacagg

SEQ ID NO: 599920 - RNA, 23 nt, Human
ucccaaaguguugggauugcagg

SEQ ID NO: 599921 - RNA, 18 nt, Human
ucccagagugcugggauu

SEQ ID NO: 599922 - RNA, 21 nt, Human
ucccagagugcugggauuaca

SEQ ID NO: 599923 - RNA, 24 nt, Human
ucccgaguagccgggauuauaggc

SEQ ID NO: 599924 - RNA, 22 nt, Human
ucccuaguaguugggacuacag

SEQ ID NO: 599925 - RNA, 24 nt, Human
ucccuaguaguugggacuacaggc

SEQ ID NO: 599926 - RNA, 24 nt, Human
uccuaaaguguugggauuacaggc

SEQ ID NO: 599927 - RNA, 18 nt, Human
uccugaccucaaaugauc

SEQ ID NO: 599928 - RNA, 20 nt, Human
uccugggcucaagcaaucuu

SEQ ID NO: 599929 - RNA, 21 nt, Human
uccuggguucaagugauucuc

SEQ ID NO: 599930 - RNA, 24 nt, Human
uccuggguucaagugauucuccug

SEQ ID NO: 599931 - RNA, 24 nt, Human
ucgccaggcuggagugcaguggcg

SEQ ID NO: 599932 - RNA, 21 nt, Human
ucgcuugaaccugggagaugg

SEQ ID NO: 599933 - RNA, 22 nt, Human
ucuaccugucucagccucccag

SEQ ID NO: 599934 - RNA, 23 nt, Human
ucucaaacuccugggcucaagca

SEQ ID NO: 599935 - RNA, 24 nt, Human
ucuccugccucagccucccgagua

SEQ ID NO: 599936 - RNA, 22 nt, Human
ucucgcucugucgccaggcugg

SEQ ID NO: 599937 - RNA, 23 nt, Human
ucucgcucugucgccaggcugga

SEQ ID NO: 599938 - RNA, 18 nt, Human
ucugucgccaggcuggag

SEQ ID NO: 599939 - RNA, 21 nt, Human
ucugucgccaggcuggagugc

SEQ ID NO: 599940 - RNA, 23 nt, Human
ucugucgccaggcuggagugcag

SEQ ID NO: 599941 - RNA, 20 nt, Human
ucuuccucuucuuggccucc

SEQ ID NO: 599942 - RNA, 22 nt, Human
ucuuuacuaaaaauacaaaaau

SEQ ID NO: 599943 - RNA, 18 nt, Human
ugaaaaagcaaacaaacu

SEQ ID NO: 599944 - RNA, 21 nt, Human
ugaaguuucaccauguuggcc

SEQ ID NO: 599945 - RNA, 22 nt, Human
ugaaugcauuucuaacagcuua

SEQ ID NO: 599946 - RNA, 18 nt, Human
ugaccuugugauccaccc

SEQ ID NO: 599947 - RNA, 22 nt, Human
ugagauccugccacuguacucc

SEQ ID NO: 599948 - RNA, 18 nt, Human
ugaguucuuagaacacag

SEQ ID NO: 599949 - RNA, 19 nt, Human
ugaucccagcuacucagga

SEQ ID NO: 599950 - RNA, 22 nt, Human
ugcaguggcgugaucucggcuc

SEQ ID NO: 599951 - RNA, 24 nt, Human
ugccucagccucccgaguagccgg

SEQ ID NO: 599952 - RNA, 20 nt, Human
ugccucagccucccuaguag

SEQ ID NO: 599953 - RNA, 23 nt, Human
ugccugugaucccagcacuuugg

SEQ ID NO: 599954 - RNA, 24 nt, Human
ugccugugaucccagcacuuuggg

SEQ ID NO: 599955 - RNA, 24 nt, Human
ugcugggauuacacacaugagcca

SEQ ID NO: 599956 - RNA, 24 nt, Human
ugcugggauuacaggugugagcca

SEQ ID NO: 599957 - RNA, 19 nt, Human
uggagugcaguggcgugau

SEQ ID NO: 599958 - RNA, 23 nt, Human
uggagugcaguggcgugaucucg

SEQ ID NO: 599959 - RNA, 24 nt, Human
uggagugcaguggcgugaucucgg

SEQ ID NO: 599960 - RNA, 22 nt, Human
uggccaggauggucucgaucuc

SEQ ID NO: 599961 - RNA, 21 nt, Human
uggccuggcuggucucaaacu

SEQ ID NO: 599962 - RNA, 20 nt, Human
uggcgugaucucggcucacu

SEQ ID NO: 599963 - RNA, 24 nt, Human
uggcucaugccugugaucccagca

SEQ ID NO: 599964 - RNA, 20 nt, Human
ugggaauguuuuuuucuuuu

SEQ ID NO: 599965 - RNA, 21 nt, Human
ugggacuacaggcaugcgcca

SEQ ID NO: 599966 - RNA, 22 nt, Human
ugggacuacaggcaugcgccac

SEQ ID NO: 599967 - RNA, 24 nt, Human
ugggacuacaggcaugcgccacca

SEQ ID NO: 599968 - RNA, 18 nt, Human
ugggaggcagaggugggc

SEQ ID NO: 599969 - RNA, 20 nt, Human
ugggaggcagaggugggcag

SEQ ID NO: 599970 - RNA, 24 nt, Human
ugggaggcagaggugggcagauca

SEQ ID NO: 599971 - RNA, 22 nt, Human
ugggauuacacacaugagccac

SEQ ID NO: 599972 - RNA, 22 nt, Human
ugggauuacacacaugagccac

SEQ ID NO: 599973 - RNA, 24 nt, Human
ugggauuacacacaugagccacug

SEQ ID NO: 599974 - RNA, 26 nt, Human
ugggauuacacacaugagccacugcg

SEQ ID NO: 599975 - RNA, 18 nt, Human
ugggauuacaggcgugag

SEQ ID NO: 599976 - RNA, 21 nt, Human
ugggauuacaggcgugagcca

SEQ ID NO: 599977 - RNA, 22 nt, Human
ugggauuacaggcgugagccac

SEQ ID NO: 599978 - RNA, 23 nt, Human
ugggauuacaggcgugagccacc

SEQ ID NO: 599979 - RNA, 23 nt, Human
ugggauuacaggcgugagccacc

SEQ ID NO: 599980 - RNA, 24 nt, Human
ugggauuacaggcgugagccaccg

SEQ ID NO: 599981 - RNA, 18 nt, Human
ugggauuacaggugugag

SEQ ID NO: 599982 - RNA, 19 nt, Human
ugggauuacaggugugagc

SEQ ID NO: 599983 - RNA, 21 nt, Human
ugggauuacaggugugagcca

SEQ ID NO: 599984 - RNA, 22 nt, Human
ugggauuacaggugugagccac

SEQ ID NO: 599985 - RNA, 23 nt, Human
ugggauuacaggugugagccacc

SEQ ID NO: 599986 - RNA, 24 nt, Human
ugggauuacaggugugagccaccg

SEQ ID NO: 599987 - RNA, 21 nt, Human
ugggauugcaggugugcgcca

SEQ ID NO: 599988 - RNA, 22 nt, Human
ugggcagaucauuaggccagga

SEQ ID NO: 599989 - RNA, 24 nt, Human
ugggguuucaccauguagaccagg

SEQ ID NO: 599990 - RNA, 23 nt, Human
uggguucaagugauucuccugcc

SEQ ID NO: 599991 - RNA, 24 nt, Human
uggguucaagugauucuccugccu

SEQ ID NO: 599992 - RNA, 19 nt, Human
uggucucaaacucccgacc

SEQ ID NO: 599993 - RNA, 23 nt, Human
uggugguacacaccugugauccc

SEQ ID NO: 599994 - RNA, 24 nt, Human
uggugguacacaccugugauccca

SEQ ID NO: 599995 - RNA, 24 nt, Human
ugucucagccucccagagugcugg

SEQ ID NO: 599996 - RNA, 19 nt, Human
ugugcgccacuacgcccag

SEQ ID NO: 599997 - RNA, 21 nt, Human
ugugcgccacuacgcccagcu

SEQ ID NO: 599998 - RNA, 24 nt, Human
uuaauagagacaggguuucaccau

SEQ ID NO: 599999 - RNA, 18 nt, Human
uuaguagagaugaaguuu

SEQ ID NO: 600000 - RNA, 24 nt, Human
uuaguagagaugaaguuucaccau

SEQ ID NO: 600001 - RNA, 18 nt, Human
uuaguugagaugggguuu

SEQ ID NO: 600002 - RNA, 24 nt, Human
uuaguugagaugggguuucaccau

SEQ ID NO: 600003 - RNA, 21 nt, Human
uucaagugauucuccugccuc

SEQ ID NO: 600004 - RNA, 23 nt, Human
uucaagugauucuccugccucag

SEQ ID NO: 600005 - RNA, 24 nt, Human
uucaagugauucuccugccucagc

SEQ ID NO: 600006 - RNA, 23 nt, Human
uucaggugauucuccugccucag

SEQ ID NO: 600007 - RNA, 19 nt, Human
uugggaggcagaggugggc

SEQ ID NO: 600008 - RNA, 21 nt, Human
uugggauugcaggugugcgcc

SEQ ID NO: 600009 - RNA, 23 nt, Human
uuuaaacaagaaaacaauugucu

SEQ ID NO: 600010 - RNA, 19 nt, Human
uuucaccauguuggccagg

SEQ ID NO: 600011 - RNA, 20 nt, Human
uuucaccauguuggccagga

SEQ ID NO: 600012 - RNA, 21 nt, Human
uuucaccauguuggccuggcu

SEQ ID NO: 600013 - RNA, 24 nt, Human
uuuuuaauagagacaggguuucac

SEQ ID NO: 600014 - RNA, 24 nt, Human
uuuuuaguagagaugaaguuucac

SEQ ID NO: 600015 - RNA, 24 nt, Human
uuuuuaguugagaugggguuucac

SEQ ID NO: 600016 - RNA, 20 nt, Human
uuuuuguauuuuuaauagag

SEQ ID NO: 600017 - RNA, 23 nt, Human
uuuuuguauuuuuaauagagaca

SEQ ID NO: 600018 - RNA, 19 nt, Human
uuuuuguauuuuuaguaga

SEQ ID NO: 600019 - RNA, 20 nt, Human
uuuuuguauuuuuaguagag

SEQ ID NO: 600020 - RNA, 21 nt, Human
uuuuuguauuuuuaguagaga

SEQ ID NO: 600021 - RNA, 21 nt, Human
uuuuuguauuuuuaguugaga

SEQ ID NO: 600022 - RNA, 24 nt, Human
uuuuuuguauuuuuaguugagaug

SEQ ID NO: 600023 - RNA, 21 nt, Human
aaaaaagcaguuuaacucaaa

SEQ ID NO: 600024 - RNA, 23 nt, Human
aaaaacccaaaguaccacaaaca

SEQ ID NO: 600025 - RNA, 21 nt, Human
aaaaaggcugcugcauucuuc

SEQ ID NO: 600026 - RNA, 25 nt, Human
aaaaggaaaacaugaauauuucaga

SEQ ID NO: 600027 - RNA, 21 nt, Human
aaacagaucuaccuuguccuu

SEQ ID NO: 600028 - RNA, 22 nt, Human
aaacucauucaucaacugucuu

SEQ ID NO: 600029 - RNA, 21 nt, Human
aaagaaaaacaagaacaagga

SEQ ID NO: 600030 - RNA, 21 nt, Human
aacccuauaaacucauucauc

SEQ ID NO: 600031 - RNA, 24 nt, Human
aagaaagaaaaacaagaacaagga

SEQ ID NO: 600032 - RNA, 23 nt, Human
aagagaaaacaauucaaacauga

SEQ ID NO: 600033 - RNA, 24 nt, Human
aagagaagauauaauuacuuaaaa

SEQ ID NO: 600034 - RNA, 20 nt, Human
aagucuacugcacuuuguac

SEQ ID NO: 600035 - RNA, 23 nt, Human
acaguaauugaauuuuuuguguc

SEQ ID NO: 600036 - RNA, 23 nt, Human
accaaacugccccacccaccagc

SEQ ID NO: 600037 - RNA, 20 nt, Human
acugcacuuuguacuuucac

SEQ ID NO: 600038 - RNA, 25 nt, Human
agaagagaagauauaauuacuuaaa

SEQ ID NO: 600039 - RNA, 22 nt, Human
agaggcagugucaucucagaaa

SEQ ID NO: 600040 - RNA, 22 nt, Human
agagucgagugagggcuugagu

SEQ ID NO: 600041 - RNA, 19 nt, Human
agcaacgaaggccgcgaga

SEQ ID NO: 600042 - RNA, 28 nt, Human
auaaaccaguccucacaguggaggaggu

SEQ ID NO: 600043 - RNA, 20 nt, Human
auagaaauagaggcaguguc

SEQ ID NO: 600044 - RNA, 20 nt, Human
auguaacagcaauguuaaaa

SEQ ID NO: 600045 - RNA, 25 nt, Human
caaaauaaccagcucaacauaggac

SEQ ID NO: 600046 - RNA, 18 nt, Human
caaaguaccacaaacaca

SEQ ID NO: 600047 - RNA, 21 nt, Human
caacagcaggaaaaacaaacc

SEQ ID NO: 600048 - RNA, 24 nt, Human
caacagcaggaaaaacaaaccugc

SEQ ID NO: 600049 - RNA, 24 nt, Human
caaggagggagaaaagcuuuaaaa

SEQ ID NO: 600050 - RNA, 21 nt, Human
caaggauaacaauguuccaac

SEQ ID NO: 600051 - RNA, 24 nt, Human
cacaccucuuuaggucaguuaaag

SEQ ID NO: 600052 - RNA, 23 nt, Human
cacagcccaucuaagcuuccuuu

SEQ ID NO: 600053 - RNA, 20 nt, Human
caccaaguaaacuuagccau

SEQ ID NO: 600054 - RNA, 21 nt, Human
caccagcaagaagagaagaua

SEQ ID NO: 600055 - RNA, 19 nt, Human
cacucaaccccgcaagccg

SEQ ID NO: 600056 - RNA, 25 nt, Human
cagaugucucccaucuuacaaaguu

SEQ ID NO: 600057 - RNA, 24 nt, Human
cagggagcugugcgagcaacgaag

SEQ ID NO: 600058 - RNA, 23 nt, Human
caucuaacuucaacugcaaaacu

SEQ ID NO: 600059 - RNA, 26 nt, Human
cauuuauauaucaaagucuauuuuga

SEQ ID NO: 600060 - RNA, 18 nt, Human
ccacucaaccccgcaagc

SEQ ID NO: 600061 - RNA, 21 nt, Human
ccacucauuagcaaaaaagca

SEQ ID NO: 600062 - RNA, 20 nt, Human
ccccaaaaaaccagcaaggu

SEQ ID NO: 600063 - RNA, 23 nt, Human
cccccaaaaaaccagcaaggucu

SEQ ID NO: 600064 - RNA, 27 nt, Human
cccucccgccgcugccgccagccagac

SEQ ID NO: 600065 - RNA, 21 nt, Human
ccgccgcgcuugugccgccgc

SEQ ID NO: 600066 - RNA, 20 nt, Human
ccggccuccuagccugggca

SEQ ID NO: 600067 - RNA, 21 nt, Human
ccuccaaaaaacugagggagc

SEQ ID NO: 600068 - RNA, 22 nt, Human
ccucccgccgcugccgccagcc

SEQ ID NO: 600069 - RNA, 24 nt, Human
ccucccgccgcugccgccagccag

SEQ ID NO: 600070 - RNA, 22 nt, Human
ccuucaaaccaccucacaaaaa

SEQ ID NO: 600071 - RNA, 21 nt, Human
cuaaaccaaacugccccaccc

SEQ ID NO: 600072 - RNA, 19 nt, Human
cucaagcacucuucucuug

SEQ ID NO: 600073 - RNA, 22 nt, Human
cucaauaucacaggcacugagg

SEQ ID NO: 600074 - RNA, 19 nt, Human
cucaguggccacacuuuua

SEQ ID NO: 600075 - RNA, 21 nt, Human
cugagggagcuuuucuuuucc

SEQ ID NO: 600076 - RNA, 22 nt, Human
cugccccacccaccagcaagaa

SEQ ID NO: 600077 - RNA, 19 nt, Human
cugccgccagccagacccg

SEQ ID NO: 600078 - RNA, 21 nt, Human
cuuaacgcuaaacuuuucuuc

SEQ ID NO: 600079 - RNA, 26 nt, Human
gaagaaagaaaaacaagaacaaggag

SEQ ID NO: 600080 - RNA, 20 nt, Human
gaauacccccaaaaaaccag

SEQ ID NO: 600081 - RNA, 18 nt, Human
gagcugugcgagcaacga

SEQ ID NO: 600082 - RNA, 22 nt, Human
gcagugucaucucagaaaacca

SEQ ID NO: 600083 - RNA, 24 nt, Human
gcccaaauucuaaaaguuaaugcc

SEQ ID NO: 600084 - RNA, 21 nt, Human
gcccuuaggucuccgcacccu

SEQ ID NO: 600085 - RNA, 21 nt, Human
gccggccuccuagccugggca

SEQ ID NO: 600086 - RNA, 23 nt, Human
ggaggaaucaaugggccucucuu

SEQ ID NO: 600087 - RNA, 19 nt, Human
gggagaaaagcuuuaaaag

SEQ ID NO: 600088 - RNA, 20 nt, Human
ggucucucggcucccucccg

SEQ ID NO: 600089 - RNA, 22 nt, Human
ggucucucggcucccucccgcc

SEQ ID NO: 600090 - RNA, 22 nt, Human
ggugggggaggaaucaaugggc

SEQ ID NO: 600091 - RNA, 18 nt, Human
gucuucuuuuucuguauu

SEQ ID NO: 600092 - RNA, 21 nt, Human
uaaaacucucagagaaaagga

SEQ ID NO: 600093 - RNA, 22 nt, Human
uaaaaucaaaugcucaguggcc

SEQ ID NO: 600094 - RNA, 21 nt, Human
uaaagguggagugaaggcaau

SEQ ID NO: 600095 - RNA, 23 nt, Human
uaaaugcaacuaacauaguguaa

SEQ ID NO: 600096 - RNA, 22 nt, Human
uaacaaucaacagcaggaaaaa

SEQ ID NO: 600097 - RNA, 23 nt, Human
uaacacuaaaccaaacugcccca

SEQ ID NO: 600098 - RNA, 25 nt, Human
uaacagcaauguuaaaauugacaag

SEQ ID NO: 600099 - RNA, 23 nt, Human
uaaccagcucaacauaggacauu

SEQ ID NO: 600100 - RNA, 21 nt, Human
uaacucaaauacuuagaccaa

SEQ ID NO: 600101 - RNA, 22 nt, Human
uaacucaaauacuuagaccaaa

SEQ ID NO: 600102 - RNA, 19 nt, Human
uaaucuggacaaacuauau

SEQ ID NO: 600103 - RNA, 18 nt, Human
uacaaggauaacaauguu

SEQ ID NO: 600104 - RNA, 23 nt, Human
uacaaggauaacaauguuccaac

SEQ ID NO: 600105 - RNA, 24 nt, Human
uaccuuguccuuccuucaaaccac

SEQ ID NO: 600106 - RNA, 28 nt, Human
uaccuuguccuuccuucaaaccaccuca

SEQ ID NO: 600107 - RNA, 19 nt, Human
uacugcugcugcuucuuuu

SEQ ID NO: 600108 - RNA, 27 nt, Human
uagaccaaaguauaacacuaaaccaaa

SEQ ID NO: 600109 - RNA, 24 nt, Human
uagcaaaaaagcaguuuaacucaa

SEQ ID NO: 600110 - RNA, 25 nt, Human
uagcaaaaaagcaguuuaacucaaa

SEQ ID NO: 600111 - RNA, 28 nt, Human
uagcaaaaaagcaguuuaacucaaauac

SEQ ID NO: 600112 - RNA, 20 nt, Human
uaggucuccgcacccuuagc

SEQ ID NO: 600113 - RNA, 19 nt, Human
uaguggagaugggacuaca

SEQ ID NO: 600114 - RNA, 21 nt, Human
uaucaaaauaaccagcucaac

SEQ ID NO: 600115 - RNA, 22 nt, Human
uaucaaaauaaccagcucaaca

SEQ ID NO: 600116 - RNA, 22 nt, Human
uaugaaugaaacuuccuuuuaa

SEQ ID NO: 600117 - RNA, 21 nt, Human
uauuuggaaaugagacuuuau

SEQ ID NO: 600118 - RNA, 19 nt, Human
ucaugaggcagcuauuagg

SEQ ID NO: 600119 - RNA, 22 nt, Human
uccaacagaugugcaauagcac

SEQ ID NO: 600120 - RNA, 23 nt, Human
uccaggugaaaugguuauagaaa

SEQ ID NO: 600121 - RNA, 20 nt, Human
ucccaaaguguuuaaaaacc

SEQ ID NO: 600122 - RNA, 25 nt, Human
ucccgccgccgcgcuugugccgccg

SEQ ID NO: 600123 - RNA, 23 nt, Human
ucccgccgcugccgccagccaga

SEQ ID NO: 600124 - RNA, 21 nt, Human
ucuaaauaguggagaugggac

SEQ ID NO: 600125 - RNA, 20 nt, Human
ucucccgccgccgcgcuugu

SEQ ID NO: 600126 - RNA, 19 nt, Human
ucuccuccuccuccauaag

SEQ ID NO: 600127 - RNA, 25 nt, Human
ucugagaacauuucuaaauagugga

SEQ ID NO: 600128 - RNA, 26 nt, Human
ucuuccacauucuccuccuccuccaa

SEQ ID NO: 600129 - RNA, 24 nt, Human
ugacaaguuuaauucuuaacugcc

SEQ ID NO: 600130 - RNA, 18 nt, Human
ugacagaaagcucaagcc

SEQ ID NO: 600131 - RNA, 21 nt, Human
ugaguaaacugcuuuagauau

SEQ ID NO: 600132 - RNA, 23 nt, Human
ugcccagcuuuuuaccucuucca

SEQ ID NO: 600133 - RNA, 20 nt, Human
uggaaaugagacuuuauacc

SEQ ID NO: 600134 - RNA, 24 nt, Human
uggacaaacuauauauugcauaga

SEQ ID NO: 600135 - RNA, 22 nt, Human
uggggugggggaggaaucaaug

SEQ ID NO: 600136 - RNA, 20 nt, Human
uguaacucaagcacucuucu

SEQ ID NO: 600137 - RNA, 19 nt, Human
ugucaaagccacuccgugu

SEQ ID NO: 600138 - RNA, 18 nt, Human
uguccaagagaaaacacc

SEQ ID NO: 600139 - RNA, 21 nt, Human
uguuggggugggggaggaauc

SEQ ID NO: 600140 - RNA, 20 nt, Human
uuaaaaaaaauuaaucucac

SEQ ID NO: 600141 - RNA, 24 nt, Human
uucaaaccaccucacaaaaauaag

SEQ ID NO: 600142 - RNA, 25 nt, Human
uuccuccuuaaauaacauguacuug

SEQ ID NO: 600143 - RNA, 18 nt, Human
uucucuuuuuggaggacu

SEQ ID NO: 600144 - RNA, 23 nt, Human
uucucuuuuuggaggacuuuuca

SEQ ID NO: 600145 - RNA, 22 nt, Human
uuguacuuucacauucucaaau

SEQ ID NO: 600146 - RNA, 20 nt, Human
uuuuccaguuaacagaauug

SEQ ID NO: 600147 - RNA, 20 nt, Human
uuuuguaggcucugcccuuc

SEQ ID NO: 600148 - RNA, 22 nt, Human
uuuuuaccucuuccacauucuc

SEQ ID NO: 600149 - RNA, 18 nt, Human
aaaacuuagagcacucac

SEQ ID NO: 600150 - RNA, 19 nt, Human
aaacguaccaccugauuac

SEQ ID NO: 600151 - RNA, 20 nt, Human
aacugauugacuuuagugau

SEQ ID NO: 600152 - RNA, 19 nt, Human
aagcagcauaaagcauaac

SEQ ID NO: 600153 - RNA, 24 nt, Human
acuuuagugaugugccuugaaagu

SEQ ID NO: 600154 - RNA, 23 nt, Human
auugauaccacccucucaagcau

SEQ ID NO: 600155 - RNA, 18 nt, Human
auuuggggaauaaaugug

SEQ ID NO: 600156 - RNA, 23 nt, Human
caacgcucagaaaccguccgagg

SEQ ID NO: 600157 - RNA, 19 nt, Human
cacuugcuccuuggauagc

SEQ ID NO: 600158 - RNA, 20 nt, Human
cauaacugauugacuuuagg

SEQ ID NO: 600159 - RNA, 19 nt, Human
ccccaaauggcacuguggu

SEQ ID NO: 600160 - RNA, 18 nt, Human
ccgcuccugccuugcacg

SEQ ID NO: 600161 - RNA, 19 nt, Human
cgcccgugauaagguuuua

SEQ ID NO: 600162 - RNA, 21 nt, Human
cgcgugccaaacaccaacgcu

SEQ ID NO: 600163 - RNA, 24 nt, Human
cgcuccugccuugcacguuagaga

SEQ ID NO: 600164 - RNA, 21 nt, Human
cuaauauguauuucuuuuccc

SEQ ID NO: 600165 - RNA, 26 nt, Human
cuccuguguuagggagaggcaggaau

SEQ ID NO: 600166 - RNA, 19 nt, Human
cugggccgccgcuccugcc

SEQ ID NO: 600167 - RNA, 21 nt, Human
cugggggcggacaucucccuu

SEQ ID NO: 600168 - RNA, 20 nt, Human
cuuucuggguauucugaaua

SEQ ID NO: 600169 - RNA, 23 nt, Human
cuuuuuuuuuuuuuuuuuucaag

SEQ ID NO: 600170 - RNA, 20 nt, Human
ggucauucuuucauggacau

SEQ ID NO: 600171 - RNA, 20 nt, Human
guauuuggggaauaaaugug

SEQ ID NO: 600172 - RNA, 22 nt, Human
uaacuaaugugguuuuaguggc

SEQ ID NO: 600173 - RNA, 21 nt, Human
uacuuuggagaaaaaaaaauc

SEQ ID NO: 600174 - RNA, 21 nt, Human
uaugaugcauugaggaugaca

SEQ ID NO: 600175 - RNA, 21 nt, Human
uaugauuaagcagcauaaagc

SEQ ID NO: 600176 - RNA, 18 nt, Human
uauuacauuuuauuuuuc

SEQ ID NO: 600177 - RNA, 24 nt, Human
uauuauguuuuccuuauauggugu

SEQ ID NO: 600178 - RNA, 21 nt, Human
ugaauuagaaagauucagaua

SEQ ID NO: 600179 - RNA, 24 nt, Human
ugacacauagucacuacacaccuu

SEQ ID NO: 600180 - RNA, 23 nt, Human
ugacauaacugauugacuuuagu

SEQ ID NO: 600181 - RNA, 23 nt, Human
ugagauuauuauagaagaguguc

SEQ ID NO: 600182 - RNA, 23 nt, Human
ugauaguaauggugucuauggca

SEQ ID NO: 600183 - RNA, 25 nt, Human
ugauaguaauggugucuauggcauu

SEQ ID NO: 600184 - RNA, 18 nt, Human
ugauugacuuuagugaug

SEQ ID NO: 600185 - RNA, 19 nt, Human
uggagaaaaaaaaaucugc

SEQ ID NO: 600186 - RNA, 21 nt, Human
uggccuuuuuuuuuuuuuuuu

SEQ ID NO: 600187 - RNA, 21 nt, Human
ugggagaaaggcucagugaag

SEQ ID NO: 600188 - RNA, 27 nt, Human
ugggggcggacaucucccuugugaccc

SEQ ID NO: 600189 - RNA, 20 nt, Human
uguuuuuaagagccacugau

SEQ ID NO: 600190 - RNA, 18 nt, Human
uguuuuuuugcucuucuc

SEQ ID NO: 600191 - RNA, 23 nt, Human
uuauauggugucagcuaauaagu

SEQ ID NO: 600192 - RNA, 20 nt, Human
uucauggacaucuguugccc

SEQ ID NO: 600193 - RNA, 23 nt, Human
uugauaccacccucucaagcaua

SEQ ID NO: 600194 - RNA, 19 nt, Human
uuucauggacaucuguugc

SEQ ID NO: 600195 - RNA, 23 nt, Human
uuuuuuuuuuuucaaguugcuca

SEQ ID NO: 600196 - RNA, 21 nt, Human
aaaaagaauuugaggccacuu

SEQ ID NO: 600197 - RNA, 23 nt, Human
aaacaaacaaaaauuuuuaaaca

SEQ ID NO: 600198 - RNA, 19 nt, Human
aacagagugagacuccguc

SEQ ID NO: 600199 - RNA, 21 nt, Human
aacagagugagacuccgucuu

SEQ ID NO: 600200 - RNA, 21 nt, Human
aacauggugaaacucuugucu

SEQ ID NO: 600201 - RNA, 22 nt, Human
aacauggugaaacucuugucuc

SEQ ID NO: 600202 - RNA, 20 nt, Human
aaugacaagacaaacuggga

SEQ ID NO: 600203 - RNA, 22 nt, Human
aaugcagcccuuaaacacaccu

SEQ ID NO: 600204 - RNA, 22 nt, Human
acagagugagacuccgucuuug

SEQ ID NO: 600205 - RNA, 20 nt, Human
acauggugaaacucuugucu

SEQ ID NO: 600206 - RNA, 19 nt, Human
accaauuccggacacacau

SEQ ID NO: 600207 - RNA, 20 nt, Human
accugagaauaguuaggaaa

SEQ ID NO: 600208 - RNA, 24 nt, Human
acuccagccugggcaacagaguga

SEQ ID NO: 600209 - RNA, 19 nt, Human
acucuggaggcugaggcag

SEQ ID NO: 600210 - RNA, 24 nt, Human
acugcacuccagccugggcaacag

SEQ ID NO: 600211 - RNA, 24 nt, Human
acugcacuccagccugggcaacag

SEQ ID NO: 600212 - RNA, 24 nt, Human
acuugaggucaggaguucaagacc

SEQ ID NO: 600213 - RNA, 22 nt, Human
agagguugcagugagccgagau

SEQ ID NO: 600214 - RNA, 24 nt, Human
agagguugcagugagccgagauug

SEQ ID NO: 600215 - RNA, 20 nt, Human
agcacuuugggaggcugagg

SEQ ID NO: 600216 - RNA, 19 nt, Human
agcauguucucugcaccuc

SEQ ID NO: 600217 - RNA, 22 nt, Human
agccuggccaacauggugaaac

SEQ ID NO: 600218 - RNA, 24 nt, Human
agccuggccaacauggugaaacuc

SEQ ID NO: 600219 - RNA, 24 nt, Human
agccugggcaacagagugagacuc

SEQ ID NO: 600220 - RNA, 22 nt, Human
agcucugagccuccugaaugac

SEQ ID NO: 600221 - RNA, 20 nt, Human
aggaaaauuuuuuucuucuc

SEQ ID NO: 600222 - RNA, 22 nt, Human
aggcaaaacaucacuaaccuaa

SEQ ID NO: 600223 - RNA, 24 nt, Human
aggcaggaaaaccgcuugaaucca

SEQ ID NO: 600224 - RNA, 25 nt, Human
aggcaguggaucacuugaggucagg

SEQ ID NO: 600225 - RNA, 24 nt, Human
aggcgcaguggcucacgccuauaa

SEQ ID NO: 600226 - RNA, 24 nt, Human
aggcugaggcaggaaaaccgcuug

SEQ ID NO: 600227 - RNA, 23 nt, Human
aggcugaggcaguggaucacuug

SEQ ID NO: 600228 - RNA, 21 nt, Human
agguagagguugcagugagcc

SEQ ID NO: 600229 - RNA, 24 nt, Human
agguagagguugcagugagccgag

SEQ ID NO: 600230 - RNA, 24 nt, Human
aguggcucacgccuauaaucccag

SEQ ID NO: 600231 - RNA, 18 nt, Human
aguuaaaagaacagguga

SEQ ID NO: 600232 - RNA, 24 nt, Human
aucacuugaggucaggaguucaag

SEQ ID NO: 600233 - RNA, 24 nt, Human
auccaggagguagagguugcagug

SEQ ID NO: 600234 - RNA, 19 nt, Human
auccuuggcaacauuccag

SEQ ID NO: 600235 - RNA, 19 nt, Human
augcagcccuuaaacacac

SEQ ID NO: 600236 - RNA, 23 nt, Human
auggaaugcagcccuuaaacaca

SEQ ID NO: 600237 - RNA, 24 nt, Human
auugugccacugcacuccagccug

SEQ ID NO: 600238 - RNA, 19 nt, Human
caaaacaucacuaaccuaa

SEQ ID NO: 600239 - RNA, 22 nt, Human
caaaacaucacuaaccuaauca

SEQ ID NO: 600240 - RNA, 25 nt, Human
caacauggugaaacucuugucucua

SEQ ID NO: 600241 - RNA, 24 nt, Human
caagaccagccuggccaacauggu

SEQ ID NO: 600242 - RNA, 20 nt, Human
cacaggaugacacacagcag

SEQ ID NO: 600243 - RNA, 24 nt, Human
cacgccuauaaucccagcacuuug

SEQ ID NO: 600244 - RNA, 22 nt, Human
cacuccagccugggcaacagag

SEQ ID NO: 600245 - RNA, 22 nt, Human
cacuccagccugggcaacagag

SEQ ID NO: 600246 - RNA, 24 nt, Human
cacuccagccugggcaacagagug

SEQ ID NO: 600247 - RNA, 18 nt, Human
cacugcacuccagccugg

SEQ ID NO: 600248 - RNA, 19 nt, Human
cacugcacuccagccuggg

SEQ ID NO: 600249 - RNA, 21 nt, Human
cacugcacuccagccugggca

SEQ ID NO: 600250 - RNA, 23 nt, Human
cacugcacuccagccugggcaac

SEQ ID NO: 600251 - RNA, 24 nt, Human
cacugcacuccagccugggcaaca

SEQ ID NO: 600252 - RNA, 23 nt, Human
cacuugaggucaggaguucaaga

SEQ ID NO: 600253 - RNA, 23 nt, Human
cagcaauacuuuaggaauaauga

SEQ ID NO: 600254 - RNA, 24 nt, Human
cagcacuuugggaggcugaggcag

SEQ ID NO: 600255 - RNA, 18 nt, Human
cagcuaaugauaucgaag

SEQ ID NO: 600256 - RNA, 21 nt, Human
cagugagaccaagaacccacc

SEQ ID NO: 600257 - RNA, 23 nt, Human
caguggaucacuugaggucagga

SEQ ID NO: 600258 - RNA, 18 nt, Human
cauucacacacgguccgc

SEQ ID NO: 600259 - RNA, 21 nt, Human
ccaauuccggacacacauagc

SEQ ID NO: 600260 - RNA, 20 nt, Human
ccacugcacuccagccuggg

SEQ ID NO: 600261 - RNA, 21 nt, Human
ccacugcacuccagccugggc

SEQ ID NO: 600262 - RNA, 23 nt, Human
ccacugcacuccagccugggcaa

SEQ ID NO: 600263 - RNA, 24 nt, Human
ccacugcacuccagccugggcaac

SEQ ID NO: 600264 - RNA, 22 nt, Human
ccuauaaucccagcacuuuggg

SEQ ID NO: 600265 - RNA, 21 nt, Human
ccuccaaauuuucuuggcuau

SEQ ID NO: 600266 - RNA, 19 nt, Human
ccucucucucuccaaaggu

SEQ ID NO: 600267 - RNA, 20 nt, Human
ccuggccaacauggugaaac

SEQ ID NO: 600268 - RNA, 25 nt, Human
ccuggccaacauggugaaacucuug

SEQ ID NO: 600269 - RNA, 22 nt, Human
ccugggcaacagagugagacuc

SEQ ID NO: 600270 - RNA, 19 nt, Human
ccuguaaucccuguuacuc

SEQ ID NO: 600271 - RNA, 19 nt, Human
ccugugagcugaaagaagg

SEQ ID NO: 600272 - RNA, 20 nt, Human
ccuuggcaacauuccagaag

SEQ ID NO: 600273 - RNA, 22 nt, Human
cgaaaaacagcuaaugauaucg

SEQ ID NO: 600274 - RNA, 23 nt, Human
cgccuauaaucccagcacuuugg

SEQ ID NO: 600275 - RNA, 22 nt, Human
cucacgccuauaaucccagcac

SEQ ID NO: 600276 - RNA, 24 nt, Human
cucacgccuauaaucccagcacuu

SEQ ID NO: 600277 - RNA, 26 nt, Human
cuccaaagguuaaccaugaucaugaa

SEQ ID NO: 600278 - RNA, 19 nt, Human
cuccaaauuuucuuggcua

SEQ ID NO: 600279 - RNA, 18 nt, Human
cuccguacgugugugugc

SEQ ID NO: 600280 - RNA, 24 nt, Human
cugaggcaguggaucacuugaggu

SEQ ID NO: 600281 - RNA, 22 nt, Human
cugcaggagcacuucaaacaca

SEQ ID NO: 600282 - RNA, 22 nt, Human
cuggcuccuucauccuggucuc

SEQ ID NO: 600283 - RNA, 21 nt, Human
gaaaaucuucuuugcuuggcu

SEQ ID NO: 600284 - RNA, 19 nt, Human
gaauucuccagaaauucuc

SEQ ID NO: 600285 - RNA, 20 nt, Human
gacaauguucaagaaaugcc

SEQ ID NO: 600286 - RNA, 23 nt, Human
gagauugugccacugcacuccag

SEQ ID NO: 600287 - RNA, 21 nt, Human
gagguagagguugcagugagc

SEQ ID NO: 600288 - RNA, 21 nt, Human
gaucacuugaggucaggaguu

SEQ ID NO: 600289 - RNA, 23 nt, Human
gaucacuugaggucaggaguuca

SEQ ID NO: 600290 - RNA, 24 nt, Human
gaucacuugaggucaggaguucaa

SEQ ID NO: 600291 - RNA, 23 nt, Human
gcacuccagccugggcaacagag

SEQ ID NO: 600292 - RNA, 22 nt, Human
gcagcugaauucuccagaaauu

SEQ ID NO: 600293 - RNA, 23 nt, Human
gcaguggaucacuugaggucaac

SEQ ID NO: 600294 - RNA, 25 nt, Human
gccaacauggugaaacucuugucuc

SEQ ID NO: 600295 - RNA, 22 nt, Human
gccacugcacuccagccugggc

SEQ ID NO: 600296 - RNA, 24 nt, Human
gccacugcacuccagccugggcaa

SEQ ID NO: 600297 - RNA, 22 nt, Human
ggaguaugccuguaaucccugu

SEQ ID NO: 600298 - RNA, 20 nt, Human
ggaguuguaacaagaaccag

SEQ ID NO: 600299 - RNA, 23 nt, Human
ggcaagguggaguaugccuguaa

SEQ ID NO: 600300 - RNA, 23 nt, Human
ggugaaacucuugucuccggcuc

SEQ ID NO: 600301 - RNA, 21 nt, Human
ggugaugaggggaaacggaga

SEQ ID NO: 600302 - RNA, 19 nt, Human
gucucuacuaaaaauacaa

SEQ ID NO: 600303 - RNA, 20 nt, Human
guggaguaugccuguaaucc

SEQ ID NO: 600304 - RNA, 24 nt, Human
guugcagugagccgagauugugcc

SEQ ID NO: 600305 - RNA, 23 nt, Human
uaaaaauacaaaaucagcagggc

SEQ ID NO: 600306 - RNA, 22 nt, Human
uaaagcacauagcaaaaauccc

SEQ ID NO: 600307 - RNA, 23 nt, Human
uaaagcacauagcaaaaaucccu

SEQ ID NO: 600308 - RNA, 24 nt, Human
uaagaagaggcagcacgagugggc

SEQ ID NO: 600309 - RNA, 20 nt, Human
uacaaaaucagcagggcaag

SEQ ID NO: 600310 - RNA, 21 nt, Human
uagauucugagggcucacaga

SEQ ID NO: 600311 - RNA, 23 nt, Human
uagcugcaggagcacuucaaaca

SEQ ID NO: 600312 - RNA, 24 nt, Human
uagcugcaggagcacuucaaacac

SEQ ID NO: 600313 - RNA, 27 nt, Human
uauaaaaggaggcauacuaauuuuaag

SEQ ID NO: 600314 - RNA, 18 nt, Human
uaucgaagaaaaguaggc

SEQ ID NO: 600315 - RNA, 25 nt, Human
uaugccuguaaucccuguuacucug

SEQ ID NO: 600316 - RNA, 20 nt, Human
uccacgcacucauucagcca

SEQ ID NO: 600317 - RNA, 23 nt, Human
uccagccugggcaacagagugag

SEQ ID NO: 600318 - RNA, 24 nt, Human
uccagccugggcaacagagugaga

SEQ ID NO: 600319 - RNA, 19 nt, Human
uccuuggcaacauuccaga

SEQ ID NO: 600320 - RNA, 24 nt, Human
ucgaaaaacagcuaaugauaucga

SEQ ID NO: 600321 - RNA, 18 nt, Human
ucuaccaaaaagaauuug

SEQ ID NO: 600322 - RNA, 19 nt, Human
ucuccucucucucuccaaa

SEQ ID NO: 600323 - RNA, 19 nt, Human
ucucuacuaaaaauacaaa

SEQ ID NO: 600324 - RNA, 23 nt, Human
ucucugaagagcaaauucaguuu

SEQ ID NO: 600325 - RNA, 18 nt, Human
ucucuggaucucaguucu

SEQ ID NO: 600326 - RNA, 18 nt, Human
ugacaagacaaacuggga

SEQ ID NO: 600327 - RNA, 21 nt, Human
ugacaagacaaacugggaagu

SEQ ID NO: 600328 - RNA, 18 nt, Human
ugagaccaagaacccacc

SEQ ID NO: 600329 - RNA, 19 nt, Human
ugagaccaagaacccacca

SEQ ID NO: 600330 - RNA, 22 nt, Human
ugagccgagauugugccacugc

SEQ ID NO: 600331 - RNA, 25 nt, Human
ugaggcaggaaaaccgcuugaaucc

SEQ ID NO: 600332 - RNA, 23 nt, Human
ugaggcaguggaucacuugaggu

SEQ ID NO: 600333 - RNA, 25 nt, Human
ugaggcaguggaucacuugagguca

SEQ ID NO: 600334 - RNA, 21 nt, Human
ugagggcucacagagcaggca

SEQ ID NO: 600335 - RNA, 21 nt, Human
ugauagcugcaggagcacuuc

SEQ ID NO: 600336 - RNA, 25 nt, Human
ugcauucuaaugcuccuggcuaacc

SEQ ID NO: 600337 - RNA, 21 nt, Human
ugccacagaagcauaaaaaau

SEQ ID NO: 600338 - RNA, 23 nt, Human
ugccacagaagcauaaaaaaucc

SEQ ID NO: 600339 - RNA, 24 nt, Human
ugccacugcacuccagccugggca

SEQ ID NO: 600340 - RNA, 24 nt, Human
ugccuguaaucccuguuacucugg

SEQ ID NO: 600341 - RNA, 24 nt, Human
uggagucagugagaccaagaaccc

SEQ ID NO: 600342 - RNA, 24 nt, Human
uggaucacuugaggucaggaguuc

SEQ ID NO: 600343 - RNA, 27 nt, Human
uggaucacuugaggucaggaguucaag

SEQ ID NO: 600344 - RNA, 25 nt, Human
uggccaacauggugaaacucuuguc

SEQ ID NO: 600345 - RNA, 24 nt, Human
uggccaggcgcaguggcucacgcc

SEQ ID NO: 600346 - RNA, 21 nt, Human
uggcucacgccuauaauccca

SEQ ID NO: 600347 - RNA, 22 nt, Human
uggcucacgccuauaaucccag

SEQ ID NO: 600348 - RNA, 24 nt, Human
uggcucacgccuauaaucccagca

SEQ ID NO: 600349 - RNA, 20 nt, Human
uggcuccuucauccuggucu

SEQ ID NO: 600350 - RNA, 19 nt, Human
ugggaagugacaaaguucu

SEQ ID NO: 600351 - RNA, 23 nt, Human
ugggaggcugaggcaguggauca

SEQ ID NO: 600352 - RNA, 24 nt, Human
uuacaauuucccuucuaccaaaaa

SEQ ID NO: 600353 - RNA, 18 nt, Human
uucuccguacgugugugu

SEQ ID NO: 600354 - RNA, 23 nt, Human
uucuuggcuauuaccaguaguuc

SEQ ID NO: 600355 - RNA, 25 nt, Human
uugaaagugaaaaauucuguuucag

SEQ ID NO: 600356 - RNA, 18 nt, Human
uugcagugagccgagauu

SEQ ID NO: 600357 - RNA, 19 nt, Human
uugcagugagccgagauug

SEQ ID NO: 600358 - RNA, 22 nt, Human
uugcagugagccgagauugugc

SEQ ID NO: 600359 - RNA, 24 nt, Human
uugggaggcugaggcaguggauca

SEQ ID NO: 600360 - RNA, 19 nt, Human
uugugcacacacuucuuca

SEQ ID NO: 600361 - RNA, 24 nt, Human
uugugcacacacuucuucaaauuc

SEQ ID NO: 600362 - RNA, 23 nt, Human
uugugccacugcacuccagccug

SEQ ID NO: 600363 - RNA, 24 nt, Human
uuuggccaggcgcaguggcucacg

SEQ ID NO: 600364 - RNA, 19 nt, Human
uuuuuuuuuauggcauagu

SEQ ID NO: 600365 - RNA, 23 nt, Human
aaacaggaaagaauaucuuccac

SEQ ID NO: 600366 - RNA, 19 nt, Human
aaggaucacuggaaguauu

SEQ ID NO: 600367 - RNA, 23 nt, Human
aaggcaacauuucaucaacgaaa

SEQ ID NO: 600368 - RNA, 20 nt, Human
acaggaaagaauaucuucca

SEQ ID NO: 600369 - RNA, 19 nt, Human
acccggcacuuaaaaaacc

SEQ ID NO: 600370 - RNA, 23 nt, Human
accuuggcaaccguggcccaauc

SEQ ID NO: 600371 - RNA, 25 nt, Human
agacagauaaguggaaaaauacgaa

SEQ ID NO: 600372 - RNA, 21 nt, Human
agagguccaaaauucacccgg

SEQ ID NO: 600373 - RNA, 18 nt, Human
agcguggaguggggagag

SEQ ID NO: 600374 - RNA, 23 nt, Human
agcuuuuaagcucuucuaaacag

SEQ ID NO: 600375 - RNA, 20 nt, Human
aggaagcaaaaaggcaccug

SEQ ID NO: 600376 - RNA, 23 nt, Human
aggcagaacugugccaugugugg

SEQ ID NO: 600377 - RNA, 27 nt, Human
aggcaggauguaguacagaagggaccc

SEQ ID NO: 600378 - RNA, 20 nt, Human
aggcggcaggucacaggcaa

SEQ ID NO: 600379 - RNA, 25 nt, Human
aggcggcaggucacaggcagaacug

SEQ ID NO: 600380 - RNA, 20 nt, Human
aggucacaggcagaacugug

SEQ ID NO: 600381 - RNA, 21 nt, Human
auucugaucaggugaacuggu

SEQ ID NO: 600382 - RNA, 19 nt, Human
caagacagauaaguggaaa

SEQ ID NO: 600383 - RNA, 21 nt, Human
caccucugcuguuccugggag

SEQ ID NO: 600384 - RNA, 22 nt, Human
cacuuaaaaaaccaaucacaga

SEQ ID NO: 600385 - RNA, 19 nt, Human
cagaagguuaagagcacac

SEQ ID NO: 600386 - RNA, 20 nt, Human
cagcacucagaagguuaaga

SEQ ID NO: 600387 - RNA, 24 nt, Human
cagcacucagaagguuaagagcac

SEQ ID NO: 600388 - RNA, 22 nt, Human
cagccagggugguccaccuccu

SEQ ID NO: 600389 - RNA, 19 nt, Human
cagccgccgucgcuccgga

SEQ ID NO: 600390 - RNA, 24 nt, Human
caggaggaaacagcuuuccuuucu

SEQ ID NO: 600391 - RNA, 22 nt, Human
caucucagucucaaaaccugaa

SEQ ID NO: 600392 - RNA, 24 nt, Human
ccaaauaaccaacuguacuuuuuu

SEQ ID NO: 600393 - RNA, 23 nt, Human
ccagggcccggucggcucccuuc

SEQ ID NO: 600394 - RNA, 27 nt, Human
ccagucucuucccugcaguuggugucc

SEQ ID NO: 600395 - RNA, 20 nt, Human
cccggucggcucccuucgcc

SEQ ID NO: 600396 - RNA, 21 nt, Human
ccgcugaucauucuuaguuau

SEQ ID NO: 600397 - RNA, 20 nt, Human
ccugcaguuagaacgugaag

SEQ ID NO: 600398 - RNA, 24 nt, Human
ccugcccgcucagggcaccaggag

SEQ ID NO: 600399 - RNA, 24 nt, Human
cucagaagguuaagagcacacaaa

SEQ ID NO: 600400 - RNA, 19 nt, Human
cuccacagcccugcacagu

SEQ ID NO: 600401 - RNA, 18 nt, Human
cucucuucugggaaacag

SEQ ID NO: 600402 - RNA, 22 nt, Human
cugccgccggugcgcgaggucc

SEQ ID NO: 600403 - RNA, 23 nt, Human
cuggaaguauuaugaccccccuc

SEQ ID NO: 600404 - RNA, 25 nt, Human
cuuuacgcuaguaaccagucucuuc

SEQ ID NO: 600405 - RNA, 24 nt, Human
gaaugauuuccaagggaaccucau

SEQ ID NO: 600406 - RNA, 25 nt, Human
gacuuuuauuucucucuucugggaa

SEQ ID NO: 600407 - RNA, 22 nt, Human
gagaguagggaggugcagggga

SEQ ID NO: 600408 - RNA, 21 nt, Human
gaggugcaggggauggguagg

SEQ ID NO: 600409 - RNA, 21 nt, Human
gaguggggagagaaugacggc

SEQ ID NO: 600410 - RNA, 23 nt, Human
gcgccuggcuccagcugcagccg

SEQ ID NO: 600411 - RNA, 18 nt, Human
gcugguccuucuuucacg

SEQ ID NO: 600412 - RNA, 20 nt, Human
ggaaagaauaucuuccacug

SEQ ID NO: 600413 - RNA, 18 nt, Human
ggaaaugcuauggacgcc

SEQ ID NO: 600414 - RNA, 19 nt, Human
ggaaccucauguucuuucc

SEQ ID NO: 600415 - RNA, 22 nt, Human
ggaauagaaaaauuggaaagga

SEQ ID NO: 600416 - RNA, 19 nt, Human
ggacgggcgagcgccuggc

SEQ ID NO: 600417 - RNA, 20 nt, Human
ggagaguagggaggugcagg

SEQ ID NO: 600418 - RNA, 21 nt, Human
gggaaaugcuauggacgccuc

SEQ ID NO: 600419 - RNA, 18 nt, Human
gguucaggucucucagag

SEQ ID NO: 600420 - RNA, 19 nt, Human
guggucugccucguccaca

SEQ ID NO: 600421 - RNA, 18 nt, Human
uaaagaacaaacacugca

SEQ ID NO: 600422 - RNA, 21 nt, Human
uaauaaagaacaaacacugca

SEQ ID NO: 600423 - RNA, 21 nt, Human
uagcagcacucagaagguuaa

SEQ ID NO: 600424 - RNA, 24 nt, Human
uaguaaccagucucuucccugcag

SEQ ID NO: 600425 - RNA, 22 nt, Human
uauuucucucuucugggaaaca

SEQ ID NO: 600426 - RNA, 25 nt, Human
ucaaaaccugaauuccaguaaagcu

SEQ ID NO: 600427 - RNA, 20 nt, Human
ucaaaaggcaggauguagua

SEQ ID NO: 600428 - RNA, 22 nt, Human
ucacagcccaacaguguuuucc

SEQ ID NO: 600429 - RNA, 19 nt, Human
ucacguuguggucugccuc

SEQ ID NO: 600430 - RNA, 22 nt, Human
ucagaagguuaagagcacacaa

SEQ ID NO: 600431 - RNA, 20 nt, Human
ucagccagggugguccaccu

SEQ ID NO: 600432 - RNA, 21 nt, Human
uccaaaauucacccggcacuu

SEQ ID NO: 600433 - RNA, 18 nt, Human
uccacaggucugggcuag

SEQ ID NO: 600434 - RNA, 19 nt, Human
uccacaggucugggcuagc

SEQ ID NO: 600435 - RNA, 26 nt, Human
uccaccgacaaauauuuugcuaaauu

SEQ ID NO: 600436 - RNA, 27 nt, Human
uccaccgacaaauauuuugcuaaauua

SEQ ID NO: 600437 - RNA, 19 nt, Human
ucucucaggagucacugcu

SEQ ID NO: 600438 - RNA, 22 nt, Human
ugacaagacagauaaguggaaa

SEQ ID NO: 600439 - RNA, 22 nt, Human
ugauaaaacuauuuauuaggga

SEQ ID NO: 600440 - RNA, 18 nt, Human
ugcauaaaaacuugcugc

SEQ ID NO: 600441 - RNA, 20 nt, Human
ugccguaacauaacguggca

SEQ ID NO: 600442 - RNA, 20 nt, Human
ugccucguccacaggucugg

SEQ ID NO: 600443 - RNA, 22 nt, Human
ugcuauggacgccucggcaggg

SEQ ID NO: 600444 - RNA, 21 nt, Human
uggaaaggaugaaagaaggaa

SEQ ID NO: 600445 - RNA, 22 nt, Human
uggaacuuuucagggagagauc

SEQ ID NO: 600446 - RNA, 18 nt, Human
uggaauagaaaaauugga

SEQ ID NO: 600447 - RNA, 21 nt, Human
uggaauagaaaaauuggaaag

SEQ ID NO: 600448 - RNA, 25 nt, Human
uggaauagaaaaauuggaaaggaug

SEQ ID NO: 600449 - RNA, 19 nt, Human
uggcagaggaguggggagc

SEQ ID NO: 600450 - RNA, 21 nt, Human
uggcccaaucacaggggcaga

SEQ ID NO: 600451 - RNA, 21 nt, Human
ugggguuuuaccuccagccca

SEQ ID NO: 600452 - RNA, 23 nt, Human
uuaaaaaaccaaucacagagaag

SEQ ID NO: 600453 - RNA, 21 nt, Human
uuaaaaggaucacuggaaguu

SEQ ID NO: 600454 - RNA, 19 nt, Human
uuccaaagggugaggugga

SEQ ID NO: 600455 - RNA, 23 nt, Human
uuccuuucuuccaaagggugagg

SEQ ID NO: 600456 - RNA, 23 nt, Human
uugcauaaaaacuugcugcacau

SEQ ID NO: 600457 - RNA, 20 nt, Human
aaaaagguucucaacacuuu

SEQ ID NO: 600458 - RNA, 25 nt, Human
aacuauuaaaaguuacaacagaacu

SEQ ID NO: 600459 - RNA, 27 nt, Human
aacuuauucgcuucuuuucuucacuuu

SEQ ID NO: 600460 - RNA, 20 nt, Human
aagaaccuugugaaacaaac

SEQ ID NO: 600461 - RNA, 19 nt, Human
aaguaacucuagagccaga

SEQ ID NO: 600462 - RNA, 22 nt, Human
aagugugcugcuacacuaaacu

SEQ ID NO: 600463 - RNA, 20 nt, Human
acccaacugauucacccauc

SEQ ID NO: 600464 - RNA, 21 nt, Human
accucauggccaagguuucau

SEQ ID NO: 600465 - RNA, 19 nt, Human
agagccagacaccacagag

SEQ ID NO: 600466 - RNA, 21 nt, Human
auggaaacauuaauacccaca

SEQ ID NO: 600467 - RNA, 18 nt, Human
caacaaugucuuccccac

SEQ ID NO: 600468 - RNA, 21 nt, Human
cacaacucggucuaagaaccu

SEQ ID NO: 600469 - RNA, 21 nt, Human
cacuaccacacagcugcaaac

SEQ ID NO: 600470 - RNA, 20 nt, Human
cagaacucucaagcaaguca

SEQ ID NO: 600471 - RNA, 24 nt, Human
cagccuucaaaauggaggcugaaa

SEQ ID NO: 600472 - RNA, 24 nt, Human
caggauacacagaugcacuuaaug

SEQ ID NO: 600473 - RNA, 19 nt, Human
ccuugcuuucuuuuuuuuc

SEQ ID NO: 600474 - RNA, 22 nt, Human
cugaaaaugcuugguaaaaaga

SEQ ID NO: 600475 - RNA, 22 nt, Human
cugcaaauuaaaccacuaccac

SEQ ID NO: 600476 - RNA, 22 nt, Human
gagccagacaccacagagcuaa

SEQ ID NO: 600477 - RNA, 19 nt, Human
gaucuuuucucuucuuuuu

SEQ ID NO: 600478 - RNA, 20 nt, Human
gcuugguaaaaagaaguaac

SEQ ID NO: 600479 - RNA, 25 nt, Human
guuacaacagaacuauuuaaacauc

SEQ ID NO: 600480 - RNA, 19 nt, Human
uaaaaagaaaagucugacu

SEQ ID NO: 600481 - RNA, 26 nt, Human
uaaacugaaaaucgguucucauuuua

SEQ ID NO: 600482 - RNA, 24 nt, Human
uaagaaccuugugaaacaaaccuc

SEQ ID NO: 600483 - RNA, 19 nt, Human
uaaggcugcaaauuaaacc

SEQ ID NO: 600484 - RNA, 22 nt, Human
ucaaaauggaggcugaaaaugc

SEQ ID NO: 600485 - RNA, 18 nt, Human
ucagaaaugcaaugaaca

SEQ ID NO: 600486 - RNA, 21 nt, Human
ucagagguccucuucauaagu

SEQ ID NO: 600487 - RNA, 24 nt, Human
ucaucuuuaccuucuauuuucuua

SEQ ID NO: 600488 - RNA, 21 nt, Human
ucccagagauggaauuuaucc

SEQ ID NO: 600489 - RNA, 23 nt, Human
ucguauuuuuuuuaucuccagaa

SEQ ID NO: 600490 - RNA, 24 nt, Human
ucuagaaccuggguuuuuuuccac

SEQ ID NO: 600491 - RNA, 23 nt, Human
ucuuuucucuucuuuuuugacag

SEQ ID NO: 600492 - RNA, 22 nt, Human
ugacagaacucucaagcaaguc

SEQ ID NO: 600493 - RNA, 25 nt, Human
ugcuccauuaucauucuucucaucu

SEQ ID NO: 600494 - RNA, 20 nt, Human
ugucuugcuacuucuaucaa

SEQ ID NO: 600495 - RNA, 20 nt, Human
uuaauacccacacaauuccc

SEQ ID NO: 600496 - RNA, 18 nt, Human
uuagacagcuaagacuuc

SEQ ID NO: 600497 - RNA, 25 nt, Human
uucaaaauggaggcugaaaaugcuc

SEQ ID NO: 600498 - RNA, 21 nt, Human
uugacagaggcuugugucuug

SEQ ID NO: 600499 - RNA, 22 nt, Human
uuuacaaaacccaacugauuca

SEQ ID NO: 600500 - RNA, 20 nt, Human
aaaaaguccuggucuuuagg

SEQ ID NO: 600501 - RNA, 19 nt, Human
aagccugcuucugaggccc

SEQ ID NO: 600502 - RNA, 21 nt, Human
acgcgcugaacggcugggagc

SEQ ID NO: 600503 - RNA, 21 nt, Human
agaacaccuuggucucugggu

SEQ ID NO: 600504 - RNA, 19 nt, Human
agacugaaaugccagugga

SEQ ID NO: 600505 - RNA, 23 nt, Human
aguguacuuucugauauuuuggu

SEQ ID NO: 600506 - RNA, 24 nt, Human
auccugguccugggauuugggagg

SEQ ID NO: 600507 - RNA, 26 nt, Human
ccaauggcacuccaggaguauuuccu

SEQ ID NO: 600508 - RNA, 21 nt, Human
ccaguggagcuuggaauucag

SEQ ID NO: 600509 - RNA, 18 nt, Human
ccccgaggccugcuccgg

SEQ ID NO: 600510 - RNA, 21 nt, Human
ccugguccugggauuugggag

SEQ ID NO: 600511 - RNA, 18 nt, Human
cucaauauccaugaaaag

SEQ ID NO: 600512 - RNA, 21 nt, Human
cuccggcugagauggcacugg

SEQ ID NO: 600513 - RNA, 21 nt, Human
cucucccuuucucaucuguca

SEQ ID NO: 600514 - RNA, 24 nt, Human
cuuuuugccuuuguuguucuuuaa

SEQ ID NO: 600515 - RNA, 18 nt, Human
guacuuucugauauuuug

SEQ ID NO: 600516 - RNA, 21 nt, Human
guggagcuuggaauucagugc

SEQ ID NO: 600517 - RNA, 18 nt, Human
uaaaaaguccuggucuuu

SEQ ID NO: 600518 - RNA, 22 nt, Human
uaaccgccucaaguaaaccgcc

SEQ ID NO: 600519 - RNA, 18 nt, Human
uacugcuuuugacgcucu

SEQ ID NO: 600520 - RNA, 22 nt, Human
uaggggagucuugguccuggau

SEQ ID NO: 600521 - RNA, 21 nt, Human
ucagguacugcuuuugacgcu

SEQ ID NO: 600522 - RNA, 24 nt, Human
ucagugcucaauccugauugauac

SEQ ID NO: 600523 - RNA, 21 nt, Human
uccuuagguagaaaauucugg

SEQ ID NO: 600524 - RNA, 21 nt, Human
uccuuagguagaaaauucugg

SEQ ID NO: 600525 - RNA, 26 nt, Human
ucucccauuucucaaaagaugagggu

SEQ ID NO: 600526 - RNA, 21 nt, Human
ucucuagacaaaaaauucugg

SEQ ID NO: 600527 - RNA, 24 nt, Human
ucucuagacaaaaaauucuggucc

SEQ ID NO: 600528 - RNA, 21 nt, Human
ucucuagauaaaaaauucugg

SEQ ID NO: 600529 - RNA, 24 nt, Human
ucucuagauaaaaaauucuggucc

SEQ ID NO: 600530 - RNA, 24 nt, Human
ucucuagauaaaaaguccuggucu

SEQ ID NO: 600531 - RNA, 21 nt, Human
ucucuaggggagucuuggucc

SEQ ID NO: 600532 - RNA, 25 nt, Human
ucucucacucuuucuucucucauaa

SEQ ID NO: 600533 - RNA, 21 nt, Human
ucucucauaaaagaugcaggu

SEQ ID NO: 600534 - RNA, 21 nt, Human
ucucuggguagaaaaucccgg

SEQ ID NO: 600535 - RNA, 24 nt, Human
ucucuggguagaaaaucccggucc

SEQ ID NO: 600536 - RNA, 21 nt, Human
ucucuggguagaaaauccugg

SEQ ID NO: 600537 - RNA, 21 nt, Human
ucucuggguagaaaauccugg

SEQ ID NO: 600538 - RNA, 24 nt, Human
ucucuggguagaaaauccuggucc

SEQ ID NO: 600539 - RNA, 24 nt, Human
ucucuggguagaaaauccuggucc

SEQ ID NO: 600540 - RNA, 22 nt, Human
ucugaggccccgaggccugcuc

SEQ ID NO: 600541 - RNA, 19 nt, Human
ucuugguccugacauuugg

SEQ ID NO: 600542 - RNA, 21 nt, Human
ucuuuagguagaaaauccugg

SEQ ID NO: 600543 - RNA, 24 nt, Human
ucuuuagguagaaaauccuggucu

SEQ ID NO: 600544 - RNA, 19 nt, Human
ucuuucuuaucuucuucuc

SEQ ID NO: 600545 - RNA, 21 nt, Human
ucuuugggaagaacaccuugg

SEQ ID NO: 600546 - RNA, 22 nt, Human
ucuuuuguucuuuuugccuuug

SEQ ID NO: 600547 - RNA, 21 nt, Human
ugagauggcacuggccaggaa

SEQ ID NO: 600548 - RNA, 28 nt, Human
ugcuccgucccgcccauccguagccuua

SEQ ID NO: 600549 - RNA, 23 nt, Human
uugggaagaacaccuuggucucu

SEQ ID NO: 600550 - RNA, 23 nt, Human
uuggggagaacaugcuggucucu

SEQ ID NO: 600551 - RNA, 23 nt, Human
uuggggagaacaugcuggucucu

SEQ ID NO: 600552 - RNA, 23 nt, Human
uuggggagaacaugcuggucucu

SEQ ID NO: 600553 - RNA, 22 nt, Human
aaccacuuaaggaaaugacauc

SEQ ID NO: 600554 - RNA, 22 nt, Human
acccugaaaguaacaagcaaau

SEQ ID NO: 600555 - RNA, 21 nt, Human
caacaacaacuuauguaggua

SEQ ID NO: 600556 - RNA, 20 nt, Human
caacgaaagacuaguagguu

SEQ ID NO: 600557 - RNA, 20 nt, Human
caagaacauugugcuacgug

SEQ ID NO: 600558 - RNA, 25 nt, Human
caggagaggguacccacacgcaaca

SEQ ID NO: 600559 - RNA, 20 nt, Human
cauaaaccaauuuuuuuucc

SEQ ID NO: 600560 - RNA, 24 nt, Human
cauauuacaaauugcaaugaaaau

SEQ ID NO: 600561 - RNA, 21 nt, Human
cccugaaaguaacaagcaaau

SEQ ID NO: 600562 - RNA, 24 nt, Human
ccuacccacuaacuacucccuuuc

SEQ ID NO: 600563 - RNA, 28 nt, Human
cgcaacagcagcauagcccguuuuuuuu

SEQ ID NO: 600564 - RNA, 21 nt, Human
cucgauuuuacugaagaggaa

SEQ ID NO: 600565 - RNA, 23 nt, Human
cuuaaagucaguuucuaagaacc

SEQ ID NO: 600566 - RNA, 20 nt, Human
gcgaagacaaugaaccccgg

SEQ ID NO: 600567 - RNA, 19 nt, Human
ggaacagauauuugagaac

SEQ ID NO: 600568 - RNA, 20 nt, Human
ggacucaaacagauccugug

SEQ ID NO: 600569 - RNA, 19 nt, Human
uaagaaccuuucgauggcc

SEQ ID NO: 600570 - RNA, 18 nt, Human
uaagcucuugccuaccca

SEQ ID NO: 600571 - RNA, 25 nt, Human
uacaauugagugcuuacuauguguc

SEQ ID NO: 600572 - RNA, 19 nt, Human
uacccacacgcaacagcag

SEQ ID NO: 600573 - RNA, 20 nt, Human
ucaaaaucuaagcucuugcc

SEQ ID NO: 600574 - RNA, 24 nt, Human
ucaagaacauugugcuacguguca

SEQ ID NO: 600575 - RNA, 22 nt, Human
ugaaccccggggagcucugccc

SEQ ID NO: 600576 - RNA, 24 nt, Human
ugaaccccggggagcucugcccaa

SEQ ID NO: 600577 - RNA, 23 nt, Human
ugucuugcaccucugaauauuua

SEQ ID NO: 600578 - RNA, 27 nt, Human
uugccuacccacuaacuacucccuuuc

SEQ ID NO: 600579 - RNA, 19 nt, Human
aaacaaagggcugcaugug

SEQ ID NO: 600580 - RNA, 20 nt, Human
acaggaaguuuugucuugga

SEQ ID NO: 600581 - RNA, 19 nt, Human
aggcccgagaggaaagcga

SEQ ID NO: 600582 - RNA, 23 nt, Human
aggcggcgugcuuccccgcuccg

SEQ ID NO: 600583 - RNA, 18 nt, Human
aguguccggccccugcga

SEQ ID NO: 600584 - RNA, 24 nt, Human
cacccaccuccccccguccuucca

SEQ ID NO: 600585 - RNA, 19 nt, Human
caccgcgcagcggccgggg

SEQ ID NO: 600586 - RNA, 24 nt, Human
ccacccaccuccccccguccuucc

SEQ ID NO: 600587 - RNA, 21 nt, Human
ccccccguccuuccacauaca

SEQ ID NO: 600588 - RNA, 22 nt, Human
ccccucguggggaaacuuuggc

SEQ ID NO: 600589 - RNA, 21 nt, Human
cccggcgcuucagcccuggcc

SEQ ID NO: 600590 - RNA, 21 nt, Human
cccggcuggacagaaaacaaa

SEQ ID NO: 600591 - RNA, 19 nt, Human
ccgccgcaguguucucucg

SEQ ID NO: 600592 - RNA, 20 nt, Human
ccggagcgcacgcggcgugg

SEQ ID NO: 600593 - RNA, 20 nt, Human
ccggccccugcgaaacgcuc

SEQ ID NO: 600594 - RNA, 20 nt, Human
ccggggucggugcguccgcg

SEQ ID NO: 600595 - RNA, 20 nt, Human
ccguugugaaaccucguggu

SEQ ID NO: 600596 - RNA, 21 nt, Human
cggaaaggagcccggcggccg

SEQ ID NO: 600597 - RNA, 25 nt, Human
cggggucggugcguccgcgugggcg

SEQ ID NO: 600598 - RNA, 23 nt, Human
cgugaucuucagaccccagguuc

SEQ ID NO: 600599 - RNA, 24 nt, Human
cuccacccaccuccccccguccuu

SEQ ID NO: 600600 - RNA, 21 nt, Human
cucggggcggggaagugagug

SEQ ID NO: 600601 - RNA, 21 nt, Human
cuuggcccggacugcucggcc

SEQ ID NO: 600602 - RNA, 19 nt, Human
gaaacgcuccgacaucccu

SEQ ID NO: 600603 - RNA, 20 nt, Human
gaaacgcuccgacaucccug

SEQ ID NO: 600604 - RNA, 20 nt, Human
gaccccagguucuuugguac

SEQ ID NO: 600605 - RNA, 24 nt, Human
gagcuggcggccgagggucuuuaa

SEQ ID NO: 600606 - RNA, 24 nt, Human
gcccccucguggggaaacuuuggc

SEQ ID NO: 600607 - RNA, 20 nt, Human
gccgcaguguucucucgcgg

SEQ ID NO: 600608 - RNA, 20 nt, Human
gcgaaacgcuccgacauccc

SEQ ID NO: 600609 - RNA, 20 nt, Human
gcgcuucagcccuggcgucg

SEQ ID NO: 600610 - RNA, 22 nt, Human
gcguagggccgugcaggucgga

SEQ ID NO: 600611 - RNA, 25 nt, Human
gcgugcgggcgggcgaccgagggag

SEQ ID NO: 600612 - RNA, 20 nt, Human
gcgugggcgcgaggcgcggg

SEQ ID NO: 600613 - RNA, 20 nt, Human
ggagggaugcggaugcgaca

SEQ ID NO: 600614 - RNA, 21 nt, Human
gggaagugaguggagccuggg

SEQ ID NO: 600615 - RNA, 21 nt, Human
gggcauaauugaggagucgcc

SEQ ID NO: 600616 - RNA, 20 nt, Human
gggcgcgggguccggacccc

SEQ ID NO: 600617 - RNA, 18 nt, Human
ggucggggggccaggcuc

SEQ ID NO: 600618 - RNA, 20 nt, Human
guauuugaggcaaaccgaaa

SEQ ID NO: 600619 - RNA, 18 nt, Human
guccgcgugggcgcgagg

SEQ ID NO: 600620 - RNA, 19 nt, Human
gugcugggcucugccggag

SEQ ID NO: 600621 - RNA, 26 nt, Human
ucagcccccucguggggaaacuuugg

SEQ ID NO: 600622 - RNA, 19 nt, Human
uccuuccacauacacacag

SEQ ID NO: 600623 - RNA, 24 nt, Human
ucgccggaguugagggauccacgu

SEQ ID NO: 600624 - RNA, 23 nt, Human
ucgggcgccguugugaaaccucg

SEQ ID NO: 600625 - RNA, 21 nt, Human
ucucucgcggaaaggagcccg

SEQ ID NO: 600626 - RNA, 23 nt, Human
ucucucgcggaaaggagcccggc

SEQ ID NO: 600627 - RNA, 20 nt, Human
ucuucagaccccagguucuu

SEQ ID NO: 600628 - RNA, 23 nt, Human
ugaggagucgccggaguugaggg

SEQ ID NO: 600629 - RNA, 20 nt, Human
uggagccugggcauaauuga

SEQ ID NO: 600630 - RNA, 22 nt, Human
ugggcguagggccgugcagguc

SEQ ID NO: 600631 - RNA, 22 nt, Human
uggugcguagggaggcggcgug

SEQ ID NO: 600632 - RNA, 19 nt, Human
uucucguggcccgggagcc

SEQ ID NO: 600633 - RNA, 24 nt, Human
uugaaggugacaaugacuuuucuc

SEQ ID NO: 600634 - RNA, 18 nt, Human
aaaaaagaaacuaacaga

SEQ ID NO: 600635 - RNA, 19 nt, Human
aaaauaucacaugcacccc

SEQ ID NO: 600636 - RNA, 25 nt, Human
aaagauuuuuuuuuuuccuauuaga

SEQ ID NO: 600637 - RNA, 21 nt, Human
aacuaugacauuauuggagca

SEQ ID NO: 600638 - RNA, 18 nt, Human
aauagcuuuuucagauga

SEQ ID NO: 600639 - RNA, 22 nt, Human
acaaaaaagaaacuaacagaaa

SEQ ID NO: 600640 - RNA, 24 nt, Human
acaauaccaaaaacuaaucagguc

SEQ ID NO: 600641 - RNA, 22 nt, Human
acugguucuuagucaauucuca

SEQ ID NO: 600642 - RNA, 19 nt, Human
agcacaauaccaaaaacua

SEQ ID NO: 600643 - RNA, 24 nt, Human
aggaggaggcaagauagaggguuu

SEQ ID NO: 600644 - RNA, 23 nt, Human
auacaaaaaagaaacuaacagaa

SEQ ID NO: 600645 - RNA, 20 nt, Human
auaucaaaauaucacaugca

SEQ ID NO: 600646 - RNA, 18 nt, Human
auauuuggaaaaagaggg

SEQ ID NO: 600647 - RNA, 24 nt, Human
auccauuccuguuucuuccuccaa

SEQ ID NO: 600648 - RNA, 19 nt, Human
augcaaacuuggcuugaaa

SEQ ID NO: 600649 - RNA, 20 nt, Human
auuuuuuuuuuuccuauuag

SEQ ID NO: 600650 - RNA, 21 nt, Human
caacaauggauaaauagcuag

SEQ ID NO: 600651 - RNA, 27 nt, Human
caauuaaaugacaauuaacaauaaugu

SEQ ID NO: 600652 - RNA, 19 nt, Human
caauuugguaaggagagua

SEQ ID NO: 600653 - RNA, 23 nt, Human
cacaauaccaaaaacuaaucagg

SEQ ID NO: 600654 - RNA, 28 nt, Human
cacaauaccaaaaacuaaucaggucucu

SEQ ID NO: 600655 - RNA, 25 nt, Human
cagggcagaagacagaagaucuccu

SEQ ID NO: 600656 - RNA, 24 nt, Human
ccuauaaagcuauuuucuaaaaca

SEQ ID NO: 600657 - RNA, 19 nt, Human
ccuccaugaaacuuugcuu

SEQ ID NO: 600658 - RNA, 24 nt, Human
cggcaguaggaaacacacagguuu

SEQ ID NO: 600659 - RNA, 21 nt, Human
cuccuaggcuaaacccugcau

SEQ ID NO: 600660 - RNA, 19 nt, Human
cuucacacagguagauauu

SEQ ID NO: 600661 - RNA, 20 nt, Human
cuuccuccaaggcuucaggc

SEQ ID NO: 600662 - RNA, 18 nt, Human
gaacuggaaaggcugaca

SEQ ID NO: 600663 - RNA, 18 nt, Human
gcccugaagucuccuuuu

SEQ ID NO: 600664 - RNA, 22 nt, Human
gggcagaagacagaagaucucc

SEQ ID NO: 600665 - RNA, 19 nt, Human
gucucuguaccaugguucu

SEQ ID NO: 600666 - RNA, 20 nt, Human
uaagaugagccuucuagagg

SEQ ID NO: 600667 - RNA, 29 nt, Human
uacaaaaaagaaacuaacagaaaacaauu

SEQ ID NO: 600668 - RNA, 25 nt, Human
uaccauaccugcuucugcauucaac

SEQ ID NO: 600669 - RNA, 24 nt, Human
uauaaagcuauuuucuaaaacaau

SEQ ID NO: 600670 - RNA, 25 nt, Human
uauacaaaaaagaaacuaacagaaa

SEQ ID NO: 600671 - RNA, 23 nt, Human
uaucccaauuacccugauuugau

SEQ ID NO: 600672 - RNA, 25 nt, Human
uaugcacauaucaaaauaucacaug

SEQ ID NO: 600673 - RNA, 23 nt, Human
uauuuaauagcuuuuucagauga

SEQ ID NO: 600674 - RNA, 21 nt, Human
ucaaaauaucacaugcacccc

SEQ ID NO: 600675 - RNA, 20 nt, Human
ucacuccuaggcuaaacccu

SEQ ID NO: 600676 - RNA, 21 nt, Human
uccauuccuguuucuuccucc

SEQ ID NO: 600677 - RNA, 24 nt, Human
ucuuacaaauuuaagaugagccuu

SEQ ID NO: 600678 - RNA, 22 nt, Human
ugaaagguacuuaucauuuuaa

SEQ ID NO: 600679 - RNA, 21 nt, Human
ugaaaguagguuaugcaaacu

SEQ ID NO: 600680 - RNA, 22 nt, Human
ugaauguuuccaacacaaauaa

SEQ ID NO: 600681 - RNA, 21 nt, Human
ugccuaaugaugcaucaaaua

SEQ ID NO: 600682 - RNA, 19 nt, Human
ugcuacacauuguaugcac

SEQ ID NO: 600683 - RNA, 19 nt, Human
ugcuucugucccuuaaacc

SEQ ID NO: 600684 - RNA, 18 nt, Human
uggaacuggaaaggcuga

SEQ ID NO: 600685 - RNA, 18 nt, Human
uggcuaauccagguaaua

SEQ ID NO: 600686 - RNA, 19 nt, Human
uguacaacuaucauguauc

SEQ ID NO: 600687 - RNA, 25 nt, Human
uguaugcacauaucaaaauaucaca

SEQ ID NO: 600688 - RNA, 22 nt, Human
uguuucuuccuccaaggcuuca

SEQ ID NO: 600689 - RNA, 19 nt, Human
uucacaacagcuaagauau

SEQ ID NO: 600690 - RNA, 19 nt, Human
uucacauugcuucuuucau

SEQ ID NO: 600691 - RNA, 24 nt, Human
uucauugcuucugucccuuaaacc

SEQ ID NO: 600692 - RNA, 24 nt, Human
uuccuccaaggcuucaggcuacag

SEQ ID NO: 600693 - RNA, 21 nt, Human
uuccugcccaaagcauccauu

SEQ ID NO: 600694 - RNA, 18 nt, Human
uugauauaaguauccaac

SEQ ID NO: 600695 - RNA, 19 nt, Human
uugaucugcccuccuacau

SEQ ID NO: 600696 - RNA, 18 nt, Human
uuuuuuuuuuuuuuuuug

SEQ ID NO: 600697 - RNA, 20 nt, Human
aagccgcuuucugcucugcc

SEQ ID NO: 600698 - RNA, 21 nt, Human
aaggaugggagcccuggggca

SEQ ID NO: 600699 - RNA, 23 nt, Human
acacagaaaccgagcagagacaa

SEQ ID NO: 600700 - RNA, 18 nt, Human
accaccuuucucugcucc

SEQ ID NO: 600701 - RNA, 22 nt, Human
accagugcccuggacauggccc

SEQ ID NO: 600702 - RNA, 20 nt, Human
accauaacccaucaacccug

SEQ ID NO: 600703 - RNA, 21 nt, Human
accauguuacagggaucaugc

SEQ ID NO: 600704 - RNA, 19 nt, Human
accucacccgccuuccuga

SEQ ID NO: 600705 - RNA, 21 nt, Human
agacaagugacuucaggucug

SEQ ID NO: 600706 - RNA, 19 nt, Human
agacacagaaggcuucgug

SEQ ID NO: 600707 - RNA, 19 nt, Human
agacagagaugcucacgac

SEQ ID NO: 600708 - RNA, 21 nt, Human
agagcagcagcaggccgagca

SEQ ID NO: 600709 - RNA, 21 nt, Human
agagggcccuggaggagggcc

SEQ ID NO: 600710 - RNA, 21 nt, Human
agcaggaggucggccugggug

SEQ ID NO: 600711 - RNA, 19 nt, Human
agccugggcaccguguccu

SEQ ID NO: 600712 - RNA, 24 nt, Human
aggaggcuggugggcccagcuggg

SEQ ID NO: 600713 - RNA, 18 nt, Human
aggcaggcacugcaggga

SEQ ID NO: 600714 - RNA, 19 nt, Human
aggcuggagugcaguggca

SEQ ID NO: 600715 - RNA, 24 nt, Human
agggccgguauggggggcccgggg

SEQ ID NO: 600716 - RNA, 19 nt, Human
aggugguguuggucacguc

SEQ ID NO: 600717 - RNA, 23 nt, Human
agugcaguggcaccaucacggcu

SEQ ID NO: 600718 - RNA, 20 nt, Human
aucgagcugucccgacaugu

SEQ ID NO: 600719 - RNA, 21 nt, Human
caaccaggcuccacugagggc

SEQ ID NO: 600720 - RNA, 19 nt, Human
caaccccagagggcccugg

SEQ ID NO: 600721 - RNA, 20 nt, Human
cacagaaaccgagcagagac

SEQ ID NO: 600722 - RNA, 18 nt, Human
cacagugccagguccaac

SEQ ID NO: 600723 - RNA, 21 nt, Human
caccaccuuucucugcuccca

SEQ ID NO: 600724 - RNA, 21 nt, Human
caccacuccaggcuguccccc

SEQ ID NO: 600725 - RNA, 22 nt, Human
caccacuccaggcugucccccu

SEQ ID NO: 600726 - RNA, 21 nt, Human
caccccaaccccagagggccc

SEQ ID NO: 600727 - RNA, 26 nt, Human
caccccaaccccagagggccggcgcc

SEQ ID NO: 600728 - RNA, 24 nt, Human
cacgcagggcggcauccggguucu

SEQ ID NO: 600729 - RNA, 19 nt, Human
cagaaaccgagcagagaca

SEQ ID NO: 600730 - RNA, 23 nt, Human
cagagacaaagccgcuuucugcu

SEQ ID NO: 600731 - RNA, 22 nt, Human
cagaggguugcagccugggcac

SEQ ID NO: 600732 - RNA, 18 nt, Human
cagcaccccaaccccaga

SEQ ID NO: 600733 - RNA, 21 nt, Human
cagcaccccaaccccagaggg

SEQ ID NO: 600734 - RNA, 23 nt, Human
cagccuccaccucccagacucaa

SEQ ID NO: 600735 - RNA, 24 nt, Human
cagccuccaccucccagacucaag

SEQ ID NO: 600736 - RNA, 18 nt, Human
cagcgcacgcagggcggc

SEQ ID NO: 600737 - RNA, 23 nt, Human
cagggacagcucacggggaagaa

SEQ ID NO: 600738 - RNA, 22 nt, Human
cagggccaggcuugagcccagg

SEQ ID NO: 600739 - RNA, 20 nt, Human
caucugggggcugucugccc

SEQ ID NO: 600740 - RNA, 20 nt, Human
ccacugccagggcagcugcc

SEQ ID NO: 600741 - RNA, 22 nt, Human
ccagcgaggccgugcgcagccu

SEQ ID NO: 600742 - RNA, 21 nt, Human
ccagcugggacuccugaccau

SEQ ID NO: 600743 - RNA, 24 nt, Human
ccagugugcugcgggccagggcca

SEQ ID NO: 600744 - RNA, 23 nt, Human
cccagggccgagacacagaaggc

SEQ ID NO: 600745 - RNA, 21 nt, Human
cccaugacgacagccagcgag

SEQ ID NO: 600746 - RNA, 19 nt, Human
ccccaaccccagagggccc

SEQ ID NO: 600747 - RNA, 23 nt, Human
cccguaagcauccacgcgcaucu

SEQ ID NO: 600748 - RNA, 24 nt, Human
cccguaagcauccacgcgcaucug

SEQ ID NO: 600749 - RNA, 23 nt, Human
cccuaacuggacccagacccucc

SEQ ID NO: 600750 - RNA, 18 nt, Human
cccucagucccugagagc

SEQ ID NO: 600751 - RNA, 20 nt, Human
cccucagucccugagagccc

SEQ ID NO: 600752 - RNA, 19 nt, Human
ccucccagacucaagggau

SEQ ID NO: 600753 - RNA, 19 nt, Human
ccugcaauucuaagcccuc

SEQ ID NO: 600754 - RNA, 22 nt, Human
ccuggacagcaggccagggccu

SEQ ID NO: 600755 - RNA, 18 nt, Human
ccugggcuggccccagag

SEQ ID NO: 600756 - RNA, 19 nt, Human
cgcagaugggagugccucc

SEQ ID NO: 600757 - RNA, 19 nt, Human
cgcagccuggagauguggc

SEQ ID NO: 600758 - RNA, 18 nt, Human
cuaggguggaggggggca

SEQ ID NO: 600759 - RNA, 18 nt, Human
cucaccacuccaggcugu

SEQ ID NO: 600760 - RNA, 24 nt, Human
cucacugcagccuccaccucccag

SEQ ID NO: 600761 - RNA, 22 nt, Human
cuccaugucccuaacuggaccc

SEQ ID NO: 600762 - RNA, 20 nt, Human
cugcacccugaagauggcca

SEQ ID NO: 600763 - RNA, 24 nt, Human
cugcagccuccaccucccagacuc

SEQ ID NO: 600764 - RNA, 19 nt, Human
cugccacccaggcuggagu

SEQ ID NO: 600765 - RNA, 18 nt, Human
cuggugggcccagcuggg

SEQ ID NO: 600766 - RNA, 19 nt, Human
cuugcaacucacaguggaa

SEQ ID NO: 600767 - RNA, 22 nt, Human
cuuucugcucugcccuugggaa

SEQ ID NO: 600768 - RNA, 18 nt, Human
gaagcagacagguccaga

SEQ ID NO: 600769 - RNA, 21 nt, Human
gaaggaugggagcccuggggc

SEQ ID NO: 600770 - RNA, 23 nt, Human
gacacagaaaccgagcagagaca

SEQ ID NO: 600771 - RNA, 22 nt, Human
gaccagugcccuggacauggcc

SEQ ID NO: 600772 - RNA, 23 nt, Human
gacucaagggauacuccugcuuc

SEQ ID NO: 600773 - RNA, 19 nt, Human
gagccuggacagcaggccg

SEQ ID NO: 600774 - RNA, 18 nt, Human
gagggcucgccacagugc

SEQ ID NO: 600775 - RNA, 19 nt, Human
gagggggccacccuagacc

SEQ ID NO: 600776 - RNA, 18 nt, Human
gagucuguuuccccgugc

SEQ ID NO: 600777 - RNA, 23 nt, Human
gcagaaggaugggagcccugggg

SEQ ID NO: 600778 - RNA, 21 nt, Human
gcagagcagcagcaggccgag

SEQ ID NO: 600779 - RNA, 19 nt, Human
gcagauccacagcgaccau

SEQ ID NO: 600780 - RNA, 21 nt, Human
gcagauccacagcgaccauga

SEQ ID NO: 600781 - RNA, 18 nt, Human
gcauccggguucuggucg

SEQ ID NO: 600782 - RNA, 21 nt, Human
gccacccuagaccaaagcugg

SEQ ID NO: 600783 - RNA, 23 nt, Human
gcgcagaugggagugccucccac

SEQ ID NO: 600784 - RNA, 21 nt, Human
gcggcauccggguucuggucg

SEQ ID NO: 600785 - RNA, 21 nt, Human
gcucccaagaccaucuuacaa

SEQ ID NO: 600786 - RNA, 25 nt, Human
gcucugccacccaggcuggagugca

SEQ ID NO: 600787 - RNA, 19 nt, Human
gcugcacccugaagauggc

SEQ ID NO: 600788 - RNA, 20 nt, Human
gcuggagugcaguggcacca

SEQ ID NO: 600789 - RNA, 22 nt, Human
ggaccggcucagcuccgagggu

SEQ ID NO: 600790 - RNA, 24 nt, Human
ggcaccaaccuugcagggcuucag

SEQ ID NO: 600791 - RNA, 19 nt, Human
ggcauccggguucuggucg

SEQ ID NO: 600792 - RNA, 22 nt, Human
ggcauccggguucuggucgugg

SEQ ID NO: 600793 - RNA, 20 nt, Human
ggcaugucugauaccaacca

SEQ ID NO: 600794 - RNA, 24 nt, Human
ggccagggccaggcuugagcccag

SEQ ID NO: 600795 - RNA, 22 nt, Human
ggcccagggccgagacacagaa

SEQ ID NO: 600796 - RNA, 24 nt, Human
ggcucugccacccaggcuggagug

SEQ ID NO: 600797 - RNA, 19 nt, Human
ggcugucugcccagggccc

SEQ ID NO: 600798 - RNA, 20 nt, Human
gggcccagcugggacuccug

SEQ ID NO: 600799 - RNA, 22 nt, Human
ggggagcuggagccuggacagc

SEQ ID NO: 600800 - RNA, 20 nt, Human
ggguggccucugugggaccc

SEQ ID NO: 600801 - RNA, 23 nt, Human
gguauggggggcccggggaggcc

SEQ ID NO: 600802 - RNA, 18 nt, Human
gguccagagagggugagc

SEQ ID NO: 600803 - RNA, 23 nt, Human
gucacguccacgcuccugcucau

SEQ ID NO: 600804 - RNA, 23 nt, Human
gucugagucuguuuccccgugcu

SEQ ID NO: 600805 - RNA, 25 nt, Human
gugcagaaggaugggagcccugggg

SEQ ID NO: 600806 - RNA, 18 nt, Human
guggaaggcaggcacugc

SEQ ID NO: 600807 - RNA, 19 nt, Human
guggaaggcaggcacugca

SEQ ID NO: 600808 - RNA, 21 nt, Human
gugggggguggggacacagaa

SEQ ID NO: 600809 - RNA, 21 nt, Human
ucacccaugccuccauguccc

SEQ ID NO: 600810 - RNA, 20 nt, Human
ucacugagggcauggcaugu

SEQ ID NO: 600811 - RNA, 18 nt, Human
ucacugcagccuccaccu

SEQ ID NO: 600812 - RNA, 19 nt, Human
ucacugcagccuccaccuc

SEQ ID NO: 600813 - RNA, 23 nt, Human
ucacugcagccuccaccucccag

SEQ ID NO: 600814 - RNA, 24 nt, Human
ucacugcagccuccaccucccaga

SEQ ID NO: 600815 - RNA, 23 nt, Human
ucagucucacaccaaccucaccc

SEQ ID NO: 600816 - RNA, 19 nt, Human
uccacgcuccugcucaucu

SEQ ID NO: 600817 - RNA, 24 nt, Human
ucccaaguagcuggaaacauaggu

SEQ ID NO: 600818 - RNA, 18 nt, Human
ucccugggcuggccccag

SEQ ID NO: 600819 - RNA, 18 nt, Human
uccggguucuggucgugg

SEQ ID NO: 600820 - RNA, 23 nt, Human
uccuaggguggaggggggcaccc

SEQ ID NO: 600821 - RNA, 21 nt, Human
uccugcucaucucucggucca

SEQ ID NO: 600822 - RNA, 19 nt, Human
uccugcuuccgccucccaa

SEQ ID NO: 600823 - RNA, 21 nt, Human
ucgccacagugccagguccaa

SEQ ID NO: 600824 - RNA, 21 nt, Human
ucgugggggguggggacacag

SEQ ID NO: 600825 - RNA, 18 nt, Human
ucuagcaggaggucggcc

SEQ ID NO: 600826 - RNA, 18 nt, Human
ucucacaccaaccucacc

SEQ ID NO: 600827 - RNA, 21 nt, Human
ucucacaccaaccucacccgc

SEQ ID NO: 600828 - RNA, 19 nt, Human
ucugaggugucacugaggg

SEQ ID NO: 600829 - RNA, 24 nt, Human
ucugccacccaggcuggagugcag

SEQ ID NO: 600830 - RNA, 23 nt, Human
ucuggcucugccacccaggcugg

SEQ ID NO: 600831 - RNA, 24 nt, Human
ucuggcucugccacccaggcugga

SEQ ID NO: 600832 - RNA, 19 nt, Human
ucugugaccagugcccugg

SEQ ID NO: 600833 - RNA, 20 nt, Human
ucugugaccagugcccugga

SEQ ID NO: 600834 - RNA, 19 nt, Human
ugaaaugcccagcuugcaa

SEQ ID NO: 600835 - RNA, 22 nt, Human
ugaaaugcccagcuugcaacuc

SEQ ID NO: 600836 - RNA, 20 nt, Human
ugagagcccagggugcuggc

SEQ ID NO: 600837 - RNA, 22 nt, Human
ugagcaggaaggugguguuggu

SEQ ID NO: 600838 - RNA, 26 nt, Human
ugagcccaggcaaggcugaggaccgg

SEQ ID NO: 600839 - RNA, 19 nt, Human
ugaggaccggcucagcucc

SEQ ID NO: 600840 - RNA, 19 nt, Human
ugauaccaaccaggcucca

SEQ ID NO: 600841 - RNA, 22 nt, Human
ugcagaaggaugggagcccugg

SEQ ID NO: 600842 - RNA, 20 nt, Human
ugcccucagucccugagagc

SEQ ID NO: 600843 - RNA, 22 nt, Human
ugcccucagucccugagagccc

SEQ ID NO: 600844 - RNA, 21 nt, Human
ugcccuggacauggcccggag

SEQ ID NO: 600845 - RNA, 19 nt, Human
ugccuggcucgcccugcaa

SEQ ID NO: 600846 - RNA, 24 nt, Human
ugcuggcugcacccugaagauggc

SEQ ID NO: 600847 - RNA, 21 nt, Human
ugcugggccaggcaaggaccc

SEQ ID NO: 600848 - RNA, 18 nt, Human
uggacagcaggccagggc

SEQ ID NO: 600849 - RNA, 22 nt, Human
uggagauagauggaggcggcca

SEQ ID NO: 600850 - RNA, 23 nt, Human
uggaggagggccgguaugggggg

SEQ ID NO: 600851 - RNA, 21 nt, Human
uggagugcaguggcaccauca

SEQ ID NO: 600852 - RNA, 24 nt, Human
uggagugcaguggcaccaucacgg

SEQ ID NO: 600853 - RNA, 21 nt, Human
uggcugcacccugaagauggc

SEQ ID NO: 600854 - RNA, 22 nt, Human
ugggcaggggagcuggagccug

SEQ ID NO: 600855 - RNA, 22 nt, Human
ugggcgcagauccacagcgacc

SEQ ID NO: 600856 - RNA, 21 nt, Human
ugggggguggggacacagaaa

SEQ ID NO: 600857 - RNA, 23 nt, Human
ugggggugcagagcagcagcagg

SEQ ID NO: 600858 - RNA, 22 nt, Human
ugggguggccucugugggaccu

SEQ ID NO: 600859 - RNA, 23 nt, Human
ugggguggccucugugggaccuc

SEQ ID NO: 600860 - RNA, 20 nt, Human
uggguucaaacguggcucug

SEQ ID NO: 600861 - RNA, 23 nt, Human
uucuagcaggaggucggccuggg

SEQ ID NO: 600862 - RNA, 24 nt, Human
aaauuggaccaaaaauguggaguu

SEQ ID NO: 600863 - RNA, 18 nt, Human
aagaguuagccaagagaa

SEQ ID NO: 600864 - RNA, 19 nt, Human
aagcaggcgggcgggcgga

SEQ ID NO: 600865 - RNA, 20 nt, Human
accccugcgggagcuggagg

SEQ ID NO: 600866 - RNA, 24 nt, Human
acucaggguuuguauaaccacguc

SEQ ID NO: 600867 - RNA, 19 nt, Human
aggcaggguuaggaaagcc

SEQ ID NO: 600868 - RNA, 23 nt, Human
aggcgggcgggcggagaaaggag

SEQ ID NO: 600869 - RNA, 18 nt, Human
aucuaaaagacuguagaa

SEQ ID NO: 600870 - RNA, 26 nt, Human
augcagcuucaagaguuagccaagag

SEQ ID NO: 600871 - RNA, 18 nt, Human
auuggagagugagugagg

SEQ ID NO: 600872 - RNA, 21 nt, Human
cacggguuuucuucucggccc

SEQ ID NO: 600873 - RNA, 18 nt, Human
cagauaauggacuaaguc

SEQ ID NO: 600874 - RNA, 20 nt, Human
cagcggcggcggcgcgcggg

SEQ ID NO: 600875 - RNA, 23 nt, Human
cagcuccgacucccugacgccag

SEQ ID NO: 600876 - RNA, 21 nt, Human
ccaauucuggguacguacaac

SEQ ID NO: 600877 - RNA, 22 nt, Human
cccagcaagccucuuugggguc

SEQ ID NO: 600878 - RNA, 24 nt, Human
ccccgcgccguccuccggccccgg

SEQ ID NO: 600879 - RNA, 18 nt, Human
ccgcuccaccgggacuaa

SEQ ID NO: 600880 - RNA, 22 nt, Human
ccggccccggccgcgcugcgcu

SEQ ID NO: 600881 - RNA, 19 nt, Human
cgcaccgagauccccucua

SEQ ID NO: 600882 - RNA, 22 nt, Human
cgccagcgcgaccagaucaauc

SEQ ID NO: 600883 - RNA, 24 nt, Human
cgccccgggccccuccacaucccg

SEQ ID NO: 600884 - RNA, 25 nt, Human
cgccguccuccggccccggccgcgc

SEQ ID NO: 600885 - RNA, 23 nt, Human
cggccccagcaagccucuuuggg

SEQ ID NO: 600886 - RNA, 23 nt, Human
cgggcggagaaaggagaggccga

SEQ ID NO: 600887 - RNA, 24 nt, Human
cggggcgaccccugcgggagcugg

SEQ ID NO: 600888 - RNA, 21 nt, Human
cuaaguccgcuccaccgggac

SEQ ID NO: 600889 - RNA, 18 nt, Human
cugggcagcuccgacucc

SEQ ID NO: 600890 - RNA, 22 nt, Human
cuucaagaguuagccaagagaa

SEQ ID NO: 600891 - RNA, 23 nt, Human
gagaaaaguugacucuugcaaga

SEQ ID NO: 600892 - RNA, 24 nt, Human
gagcgggcgggcaggcaggcgagu

SEQ ID NO: 600893 - RNA, 19 nt, Human
gagcgggucucgcgggcgg

SEQ ID NO: 600894 - RNA, 27 nt, Human
gagcgggugagcgugugagcgggcggg

SEQ ID NO: 600895 - RNA, 21 nt, Human
gcaacgaaagauagacauaaa

SEQ ID NO: 600896 - RNA, 20 nt, Human
gccccggccgcgcugcgcuc

SEQ ID NO: 600897 - RNA, 18 nt, Human
gccccgggccccuccaca

SEQ ID NO: 600898 - RNA, 22 nt, Human
gccccgggccccuccacauccc

SEQ ID NO: 600899 - RNA, 26 nt, Human
gccccgggccccuccacaucccgcac

SEQ ID NO: 600900 - RNA, 23 nt, Human
gcgcggcagcggcggcggcgcgc

SEQ ID NO: 600901 - RNA, 20 nt, Human
gcgugugagcgggcgggcag

SEQ ID NO: 600902 - RNA, 21 nt, Human
gcuccggccgcucccccgcgc

SEQ ID NO: 600903 - RNA, 18 nt, Human
gcucuccaaggcgccugg

SEQ ID NO: 600904 - RNA, 19 nt, Human
ggcaggcaggcgagugcgc

SEQ ID NO: 600905 - RNA, 21 nt, Human
gggccccuccacaucccgcac

SEQ ID NO: 600906 - RNA, 18 nt, Human
gggcguggggcugccggu

SEQ ID NO: 600907 - RNA, 25 nt, Human
ggggaccccggcgccccgggccccu

SEQ ID NO: 600908 - RNA, 24 nt, Human
uaaaagggcgcgucucgaaaggua

SEQ ID NO: 600909 - RNA, 23 nt, Human
uaggaaagccugaacgccgccac

SEQ ID NO: 600910 - RNA, 18 nt, Human
uauuggagagugagugag

SEQ ID NO: 600911 - RNA, 24 nt, Human
uccacaucccgcacggguuuucuu

SEQ ID NO: 600912 - RNA, 18 nt, Human
uccaggaagaaacggggc

SEQ ID NO: 600913 - RNA, 19 nt, Human
uccgcuccaccgggacuaa

SEQ ID NO: 600914 - RNA, 22 nt, Human
ucgcaccgagauccccucuaau

SEQ ID NO: 600915 - RNA, 20 nt, Human
ucgcgccggcggggcgaccc

SEQ ID NO: 600916 - RNA, 23 nt, Human
ucuccaggaagaaacggggcgug

SEQ ID NO: 600917 - RNA, 18 nt, Human
ugagugaggggcaacgaa

SEQ ID NO: 600918 - RNA, 18 nt, Human
ugcaagaagauauuuuca

SEQ ID NO: 600919 - RNA, 19 nt, Human
uggcaugccauuauuugga

SEQ ID NO: 600920 - RNA, 20 nt, Human
ugucuuuucuccaggaagaa

SEQ ID NO: 600921 - RNA, 19 nt, Human
uucgcaccgagauccccuc

SEQ ID NO: 600922 - RNA, 25 nt, Human
aaacaugguuagagcaccugugugc

SEQ ID NO: 600923 - RNA, 22 nt, Human
aaagauggugguugugagggua

SEQ ID NO: 600924 - RNA, 20 nt, Human
aagacuguaagaagguagcu

SEQ ID NO: 600925 - RNA, 21 nt, Human
aagcaagcaggcaguccucca

SEQ ID NO: 600926 - RNA, 24 nt, Human
aagcaagcaggcaguccuccaggg

SEQ ID NO: 600927 - RNA, 19 nt, Human
aagcaggcaguccuccagg

SEQ ID NO: 600928 - RNA, 18 nt, Human
aagcuguuuaagcugugg

SEQ ID NO: 600929 - RNA, 21 nt, Human
aagcuguuuaagcuguggccc

SEQ ID NO: 600930 - RNA, 18 nt, Human
accaacgaaaccacaaaa

SEQ ID NO: 600931 - RNA, 21 nt, Human
accccacaaaaaaaaggguga

SEQ ID NO: 600932 - RNA, 25 nt, Human
acgaaaccacaaaaaaggugguacc

SEQ ID NO: 600933 - RNA, 18 nt, Human
agaaacagagggaagacc

SEQ ID NO: 600934 - RNA, 20 nt, Human
agaaacagagggaagacuga

SEQ ID NO: 600935 - RNA, 22 nt, Human
agaaagcaagcaggcaguccuc

SEQ ID NO: 600936 - RNA, 20 nt, Human
agaaaguagaaagaucacug

SEQ ID NO: 600937 - RNA, 23 nt, Human
agaauagaaagguaugaaaaaga

SEQ ID NO: 600938 - RNA, 23 nt, Human
agagaaacagagggaagacugag

SEQ ID NO: 600939 - RNA, 20 nt, Human
agagaagaaacugacuaacg

SEQ ID NO: 600940 - RNA, 23 nt, Human
agagcaccugugugcaagauagu

SEQ ID NO: 600941 - RNA, 22 nt, Human
agagcauauaagagaagaaacu

SEQ ID NO: 600942 - RNA, 23 nt, Human
agagcauauaagagaagaaacug

SEQ ID NO: 600943 - RNA, 21 nt, Human
agcuguggcccugagcugaag

SEQ ID NO: 600944 - RNA, 18 nt, Human
agggaaggcacucugcag

SEQ ID NO: 600945 - RNA, 21 nt, Human
auccuuuuccuuaccaaaaag

SEQ ID NO: 600946 - RNA, 23 nt, Human
aucuuccuuaucuuucucuguag

SEQ ID NO: 600947 - RNA, 20 nt, Human
augggcuagaaucucuaaac

SEQ ID NO: 600948 - RNA, 19 nt, Human
caagcaggcaguccuccag

SEQ ID NO: 600949 - RNA, 20 nt, Human
cacagcauuuuauucaaguu

SEQ ID NO: 600950 - RNA, 21 nt, Human
caccagagaaacagagggaag

SEQ ID NO: 600951 - RNA, 18 nt, Human
caccuccucuaccccaca

SEQ ID NO: 600952 - RNA, 25 nt, Human
cacuguaccacagaagggaaaugag

SEQ ID NO: 600953 - RNA, 24 nt, Human
cacuuccggcugcagcaucaggga

SEQ ID NO: 600954 - RNA, 19 nt, Human
cagagcuggaaagacacac

SEQ ID NO: 600955 - RNA, 18 nt, Human
cagagucauucugccucc

SEQ ID NO: 600956 - RNA, 19 nt, Human
cagcgugccucuaugccug

SEQ ID NO: 600957 - RNA, 22 nt, Human
cauauaagagaagaaacugacu

SEQ ID NO: 600958 - RNA, 21 nt, Human
caucagaaggcgggagcaagg

SEQ ID NO: 600959 - RNA, 20 nt, Human
caucagggaaggcacucugc

SEQ ID NO: 600960 - RNA, 24 nt, Human
ccaaaaaggaacuucuuaaucacc

SEQ ID NO: 600961 - RNA, 20 nt, Human
cccaugggcuagaaucucua

SEQ ID NO: 600962 - RNA, 21 nt, Human
ccugcacacugcagagcacag

SEQ ID NO: 600963 - RNA, 27 nt, Human
cgaggguaccaacacagccaaagacug

SEQ ID NO: 600964 - RNA, 18 nt, Human
cuagccagauaacccaug

SEQ ID NO: 600965 - RNA, 20 nt, Human
cucaccaacgaaaccacaag

SEQ ID NO: 600966 - RNA, 19 nt, Human
cucugcagucuccccucca

SEQ ID NO: 600967 - RNA, 22 nt, Human
cugcagucuccccuccagguuc

SEQ ID NO: 600968 - RNA, 21 nt, Human
gaaaguagaaagaucacugag

SEQ ID NO: 600969 - RNA, 21 nt, Human
gaaaugagggcuagugucccc

SEQ ID NO: 600970 - RNA, 19 nt, Human
gcacacugcagagcacagu

SEQ ID NO: 600971 - RNA, 18 nt, Human
gcagaaauuuaucucuac

SEQ ID NO: 600972 - RNA, 19 nt, Human
gcuccuaguggugacagag

SEQ ID NO: 600973 - RNA, 18 nt, Human
gcuuuacuugggggcucc

SEQ ID NO: 600974 - RNA, 22 nt, Human
ggagggaaggaucacuuccggc

SEQ ID NO: 600975 - RNA, 18 nt, Human
ggcccugagcugaaggag

SEQ ID NO: 600976 - RNA, 22 nt, Human
guuuugaauaaaucagagcugg

SEQ ID NO: 600977 - RNA, 23 nt, Human
uagaaaguagaaagaucacugag

SEQ ID NO: 600978 - RNA, 20 nt, Human
uagccagauaacccaugggc

SEQ ID NO: 600979 - RNA, 23 nt, Human
uagcucagagcacacgaggguac

SEQ ID NO: 600980 - RNA, 23 nt, Human
uagugcagcaagguggaaagagc

SEQ ID NO: 600981 - RNA, 18 nt, Human
ucaaagguagacuugggc

SEQ ID NO: 600982 - RNA, 26 nt, Human
ucaauaaacaugguuagagcaccugu

SEQ ID NO: 600983 - RNA, 21 nt, Human
ucacugaguaaauuacugcac

SEQ ID NO: 600984 - RNA, 19 nt, Human
ucagagcacacgaggguac

SEQ ID NO: 600985 - RNA, 19 nt, Human
ucauucugccuccccagcc

SEQ ID NO: 600986 - RNA, 18 nt, Human
ucccaggggccaggugga

SEQ ID NO: 600987 - RNA, 21 nt, Human
ucuagaaaguagaaagaucac

SEQ ID NO: 600988 - RNA, 23 nt, Human
ucugcagucuccccuccagguuc

SEQ ID NO: 600989 - RNA, 25 nt, Human
ucugcagucuccccuccagguucuc

SEQ ID NO: 600990 - RNA, 19 nt, Human
ucuuaaguaacaacugguc

SEQ ID NO: 600991 - RNA, 19 nt, Human
ugaauaaaucagagcugga

SEQ ID NO: 600992 - RNA, 18 nt, Human
ugacuaacgagggggucu

SEQ ID NO: 600993 - RNA, 22 nt, Human
ugagaaauggaaguuugagagg

SEQ ID NO: 600994 - RNA, 22 nt, Human
ugauaaugaacaagugaaagug

SEQ ID NO: 600995 - RNA, 20 nt, Human
ugcaccuccucuaccccaca

SEQ ID NO: 600996 - RNA, 22 nt, Human
uggaaagacacacuuuuggaga

SEQ ID NO: 600997 - RNA, 20 nt, Human
uggaaagagcuuuggaaagg

SEQ ID NO: 600998 - RNA, 21 nt, Human
uggaaagagcuuuggaaagga

SEQ ID NO: 600999 - RNA, 23 nt, Human
uggcccugagcugaaggagcaau

SEQ ID NO: 601000 - RNA, 20 nt, Human
ugguuugaauuuccaugaug

SEQ ID NO: 601001 - RNA, 21 nt, Human
uguuugcagaaauuuaucucu

SEQ ID NO: 601002 - RNA, 25 nt, Human
uuccaugaugccuaacucuaugguu

SEQ ID NO: 601003 - RNA, 19 nt, Human
uuucaggguugugcuuuac

SEQ ID NO: 601004 - RNA, 22 nt, Human
uuucucaccaacgaaaccacaa

SEQ ID NO: 601005 - RNA, 22 nt, Human
uuuggaaaggagaggaaagaug

SEQ ID NO: 601006 - RNA, 22 nt, Human
aaacugaggcagggcaaguggu

SEQ ID NO: 601007 - RNA, 30 nt, Human
aaaugaccaggaagguaagucccugaagcc

SEQ ID NO: 601008 - RNA, 19 nt, Human
aagcaaggaggggagcuga

SEQ ID NO: 601009 - RNA, 19 nt, Human
aagcaaggaggggagcuga

SEQ ID NO: 601010 - RNA, 20 nt, Human
aaguagguggcaaguaacau

SEQ ID NO: 601011 - RNA, 18 nt, Human
accaggaagguaaguccc

SEQ ID NO: 601012 - RNA, 19 nt, Human
accccauccaccaccagau

SEQ ID NO: 601013 - RNA, 23 nt, Human
acuggagacuggaggcugagaag

SEQ ID NO: 601014 - RNA, 18 nt, Human
agauggaggacucgaggc

SEQ ID NO: 601015 - RNA, 23 nt, Human
agauggaggacucgaggccuggg

SEQ ID NO: 601016 - RNA, 21 nt, Human
agcccgaggcacagcagcggg

SEQ ID NO: 601017 - RNA, 18 nt, Human
agcgucgaugugguuccc

SEQ ID NO: 601018 - RNA, 21 nt, Human
aggaacaccccauccaccacc

SEQ ID NO: 601019 - RNA, 21 nt, Human
aggaggcagaggaaggcggga

SEQ ID NO: 601020 - RNA, 19 nt, Human
aggcgggcugcagaugggg

SEQ ID NO: 601021 - RNA, 21 nt, Human
agggaggcucagacuggaggc

SEQ ID NO: 601022 - RNA, 26 nt, Human
agguggcaaguaacaucaccuggggg

SEQ ID NO: 601023 - RNA, 20 nt, Human
aguccgcgcucaggaggcag

SEQ ID NO: 601024 - RNA, 23 nt, Human
augcggggggaggugaaggaguc

SEQ ID NO: 601025 - RNA, 20 nt, Human
cacacccagaaaaaucaagu

SEQ ID NO: 601026 - RNA, 24 nt, Human
caccccauucucucccacacccag

SEQ ID NO: 601027 - RNA, 22 nt, Human
cacccuauucuuccuacagggc

SEQ ID NO: 601028 - RNA, 21 nt, Human
cagcccgaggcacagcagcgg

SEQ ID NO: 601029 - RNA, 22 nt, Human
cagcgcgggccaugcacggcuc

SEQ ID NO: 601030 - RNA, 18 nt, Human
ccagcagcccgaggcaca

SEQ ID NO: 601031 - RNA, 19 nt, Human
ccaggcggcucaggaugcg

SEQ ID NO: 601032 - RNA, 19 nt, Human
cccaccccauucucuccca

SEQ ID NO: 601033 - RNA, 30 nt, Human
cccaccccauucucucccacacccagaaag

SEQ ID NO: 601034 - RNA, 20 nt, Human
cccauacacuuccuccgcca

SEQ ID NO: 601035 - RNA, 20 nt, Human
cccauccaccaccagauaca

SEQ ID NO: 601036 - RNA, 22 nt, Human
ccccauacacuuccuccgccaa

SEQ ID NO: 601037 - RNA, 23 nt, Human
ccccauccaccaccagauacaga

SEQ ID NO: 601038 - RNA, 21 nt, Human
ccccauucucucccacaccca

SEQ ID NO: 601039 - RNA, 24 nt, Human
ccgcgcucaggaggcagaggaagg

SEQ ID NO: 601040 - RNA, 22 nt, Human
ccucggggcugcagcagggaga

SEQ ID NO: 601041 - RNA, 21 nt, Human
cgacccggcucccaucccgcc

SEQ ID NO: 601042 - RNA, 24 nt, Human
cgccucggccuccagcaaagacag

SEQ ID NO: 601043 - RNA, 27 nt, Human
cgccucggccuccagcaaagacagcuc

SEQ ID NO: 601044 - RNA, 30 nt, Human
cgccucggccuccagcaaagacagcuccaa

SEQ ID NO: 601045 - RNA, 25 nt, Human
cggcaaggcuggcccccuggcgcug

SEQ ID NO: 601046 - RNA, 19 nt, Human
cggcgcgacccggcgcggg

SEQ ID NO: 601047 - RNA, 21 nt, Human
cggcucccaucccgccgccuc

SEQ ID NO: 601048 - RNA, 19 nt, Human
cugaagcugcggugacccc

SEQ ID NO: 601049 - RNA, 22 nt, Human
gacgcucggcgcgcagcagcuc

SEQ ID NO: 601050 - RNA, 20 nt, Human
gagcaccggggagaggugga

SEQ ID NO: 601051 - RNA, 23 nt, Human
gaggguuuuguuuuuuguuguug

SEQ ID NO: 601052 - RNA, 21 nt, Human
gcaaguaacaucaccuggggg

SEQ ID NO: 601053 - RNA, 18 nt, Human
gcccugccaccugguagc

SEQ ID NO: 601054 - RNA, 18 nt, Human
ggagaugacccauccuug

SEQ ID NO: 601055 - RNA, 18 nt, Human
ggccgggguggugcagcc

SEQ ID NO: 601056 - RNA, 21 nt, Human
ggccuccagcaaagacagcuc

SEQ ID NO: 601057 - RNA, 20 nt, Human
gggaggguuuuguuuuuugu

SEQ ID NO: 601058 - RNA, 18 nt, Human
ggggagagguggacaccc

SEQ ID NO: 601059 - RNA, 20 nt, Human
gguuuuguuuuuuguuguug

SEQ ID NO: 601060 - RNA, 25 nt, Human
guucucagcccuggaaggcaauagg

SEQ ID NO: 601061 - RNA, 20 nt, Human
uaagagaccccagaucugga

SEQ ID NO: 601062 - RNA, 19 nt, Human
uaagucccugaagcugcgg

SEQ ID NO: 601063 - RNA, 21 nt, Human
ucagaacacucgaggaagcaa

SEQ ID NO: 601064 - RNA, 20 nt, Human
ucaggaggcagaggaaggcg

SEQ ID NO: 601065 - RNA, 21 nt, Human
uccaccaccagauacagagau

SEQ ID NO: 601066 - RNA, 25 nt, Human
ucccgccgccucggccuccagcaaa

SEQ ID NO: 601067 - RNA, 23 nt, Human
uccgcccgugagaaggagucccc

SEQ ID NO: 601068 - RNA, 21 nt, Human
uccgcgcucaggaggcagagg

SEQ ID NO: 601069 - RNA, 27 nt, Human
ucuaugcugggugcacaggcugaggga

SEQ ID NO: 601070 - RNA, 18 nt, Human
ucucagcccuggaaggca

SEQ ID NO: 601071 - RNA, 18 nt, Human
ugagaagaagcgucgaug

SEQ ID NO: 601072 - RNA, 19 nt, Human
ugagggaaaccaugguucg

SEQ ID NO: 601073 - RNA, 18 nt, Human
ugcacaggcugagggaaa

SEQ ID NO: 601074 - RNA, 18 nt, Human
uggaggcggcggagcagg

SEQ ID NO: 601075 - RNA, 22 nt, Human
uggcaaguaacaucaccugggg

SEQ ID NO: 601076 - RNA, 24 nt, Human
ugggaggguuuuguuuuuuguugu

SEQ ID NO: 601077 - RNA, 18 nt, Human
ugggggaugcggggggag

SEQ ID NO: 601078 - RNA, 24 nt, Human
uuuuuuguuguugauuuuuuugug

SEQ ID NO: 601079 - RNA, 19 nt, Human
aaaaagucaguaagacaaa

SEQ ID NO: 601080 - RNA, 23 nt, Human
aagaaaagacaaugccugugcca

SEQ ID NO: 601081 - RNA, 26 nt, Human
agauaccaaaagaauaugcucagcaa

SEQ ID NO: 601082 - RNA, 18 nt, Human
aggcugccucugggagcg

SEQ ID NO: 601083 - RNA, 22 nt, Human
agucaguaagacaaacaaguua

SEQ ID NO: 601084 - RNA, 30 nt, Human
cauggcccugaaaaagucaguaagacaaag

SEQ ID NO: 601085 - RNA, 22 nt, Human
ccuuaagauucugagucuugaa

SEQ ID NO: 601086 - RNA, 21 nt, Human
cugcugcccgcagaccacucg

SEQ ID NO: 601087 - RNA, 20 nt, Human
gaaaaacgacagccagcuua

SEQ ID NO: 601088 - RNA, 18 nt, Human
gcuagcugaacuguauaa

SEQ ID NO: 601089 - RNA, 24 nt, Human
uacuuuacuuuuuuuuccuuaaga

SEQ ID NO: 601090 - RNA, 23 nt, Human
uccacagaggccaggagaaaaac

SEQ ID NO: 601091 - RNA, 21 nt, Human
ucccgcccaguccgagcugga

SEQ ID NO: 601092 - RNA, 21 nt, Human
uccgagcuggaauuccaaggc

SEQ ID NO: 601093 - RNA, 20 nt, Human
ugacuagaaacuccaagagc

SEQ ID NO: 601094 - RNA, 23 nt, Human
ugacuagaaacuccaagagcggg

SEQ ID NO: 601095 - RNA, 18 nt, Human
ugagcaaggacaauucca

SEQ ID NO: 601096 - RNA, 19 nt, Human
uggaauuccaaggcugccu

SEQ ID NO: 601097 - RNA, 19 nt, Human
uggcagcaugugagcaagg

SEQ ID NO: 601098 - RNA, 24 nt, Human
ugucggcgaccugggccgccugcg

SEQ ID NO: 601099 - RNA, 22 nt, Human
uugaugcaauggaucaaaauca

SEQ ID NO: 601100 - RNA, 24 nt, Human
uuuugcuauuguuauaauuuugau

SEQ ID NO: 601101 - RNA, 22 nt, Human
aaauagcuguuaacuaaaaucu

SEQ ID NO: 601102 - RNA, 21 nt, Human
acuaaaaucucccacugcuca

SEQ ID NO: 601103 - RNA, 18 nt, Human
agcacagaaccugaaugc

SEQ ID NO: 601104 - RNA, 18 nt, Human
aggcaaagggguccuacu

SEQ ID NO: 601105 - RNA, 19 nt, Human
auggcacagcagaagcuua

SEQ ID NO: 601106 - RNA, 24 nt, Human
cacugcucagacuacuuucugccc

SEQ ID NO: 601107 - RNA, 22 nt, Human
cagacuacuuucugcccuaaug

SEQ ID NO: 601108 - RNA, 18 nt, Human
cagcagggcaguuaacuc

SEQ ID NO: 601109 - RNA, 21 nt, Human
cccacugguaccccuuuuaga

SEQ ID NO: 601110 - RNA, 23 nt, Human
ccgauaugcuugauaugcuuuuc

SEQ ID NO: 601111 - RNA, 23 nt, Human
ccuuccacauguuaagcuaggaa

SEQ ID NO: 601112 - RNA, 26 nt, Human
cuguaaguggaaaagacucacucccc

SEQ ID NO: 601113 - RNA, 19 nt, Human
ggaaaccuaacaggauguc

SEQ ID NO: 601114 - RNA, 24 nt, Human
ggccauuacuauccagucuguauu

SEQ ID NO: 601115 - RNA, 20 nt, Human
gguccuacuguaaguggaaa

SEQ ID NO: 601116 - RNA, 21 nt, Human
uaacucuggacucagagcccu

SEQ ID NO: 601117 - RNA, 19 nt, Human
uacaagggacccacuggua

SEQ ID NO: 601118 - RNA, 20 nt, Human
uacugcuaaugaaaugggaa

SEQ ID NO: 601119 - RNA, 22 nt, Human
uauuguuucuuggccccacugc

SEQ ID NO: 601120 - RNA, 24 nt, Human
ucauauauauuguuucuuggcccc

SEQ ID NO: 601121 - RNA, 20 nt, Human
uccacauguuaagcuaggaa

SEQ ID NO: 601122 - RNA, 18 nt, Human
uccuagaggcaggcagcc

SEQ ID NO: 601123 - RNA, 18 nt, Human
uccuagaggcaggcagcc

SEQ ID NO: 601124 - RNA, 21 nt, Human
uccugggccaagaagcuaaag

SEQ ID NO: 601125 - RNA, 21 nt, Human
ugaggcaaagggguccuacug

SEQ ID NO: 601126 - RNA, 23 nt, Human
ugauaugcuuuuccuuccacaug

SEQ ID NO: 601127 - RNA, 21 nt, Human
ugccaggaaaaauuccugggc

SEQ ID NO: 601128 - RNA, 23 nt, Human
uuccugggccaagaagcuaaagc

SEQ ID NO: 601129 - RNA, 20 nt, Human
uuucacuguggugggauggu

SEQ ID NO: 601130 - RNA, 25 nt, Human
uuuuuuuuucuuucaaacuguaggg

SEQ ID NO: 601131 - RNA, 22 nt, Human
aaaaauaguuauugauucacac

SEQ ID NO: 601132 - RNA, 21 nt, Human
aaaaaucaacagaauuggcca

SEQ ID NO: 601133 - RNA, 20 nt, Human
aaaaguaaaccaccaaagac

SEQ ID NO: 601134 - RNA, 24 nt, Human
aaaaugcugggauuacaggcauga

SEQ ID NO: 601135 - RNA, 19 nt, Human
aaagaccaauacuucucuc

SEQ ID NO: 601136 - RNA, 26 nt, Human
aaaugcugggauuacaggcaugagcc

SEQ ID NO: 601137 - RNA, 24 nt, Human
aacacaaaugcggcugcugacacc

SEQ ID NO: 601138 - RNA, 19 nt, Human
aacauggugaaaccccauc

SEQ ID NO: 601139 - RNA, 20 nt, Human
aacauggugaaaccccaucu

SEQ ID NO: 601140 - RNA, 21 nt, Human
aacauggugaaaccccaucuc

SEQ ID NO: 601141 - RNA, 22 nt, Human
aacauggugaaaccccaucucg

SEQ ID NO: 601142 - RNA, 21 nt, Human
acagcccugcacauaucagaa

SEQ ID NO: 601143 - RNA, 21 nt, Human
acccgucucggccucccaaaa

SEQ ID NO: 601144 - RNA, 25 nt, Human
acccgucucggccucccaaaaugcu

SEQ ID NO: 601145 - RNA, 21 nt, Human
accggggucuggagacuggag

SEQ ID NO: 601146 - RNA, 18 nt, Human
acgggguuucaucguguu

SEQ ID NO: 601147 - RNA, 19 nt, Human
acgggguuucaucguguua

SEQ ID NO: 601148 - RNA, 20 nt, Human
acgggguuucaucguguuag

SEQ ID NO: 601149 - RNA, 24 nt, Human
acgggguuucaucguguuagccag

SEQ ID NO: 601150 - RNA, 19 nt, Human
agaaaaagaaugggcaaau

SEQ ID NO: 601151 - RNA, 24 nt, Human
agagcagcaaaacaaguuagagga

SEQ ID NO: 601152 - RNA, 18 nt, Human
agcaaaacaaguuagagg

SEQ ID NO: 601153 - RNA, 19 nt, Human
agcccugcacauaucagaa

SEQ ID NO: 601154 - RNA, 19 nt, Human
agcguccccacagauguuc

SEQ ID NO: 601155 - RNA, 23 nt, Human
aggaauccgagaccaaucuggcc

SEQ ID NO: 601156 - RNA, 24 nt, Human
aggcacagugguucaugccuguaa

SEQ ID NO: 601157 - RNA, 18 nt, Human
aguagagacgggguuuca

SEQ ID NO: 601158 - RNA, 19 nt, Human
aguggugaauaucaggaaa

SEQ ID NO: 601159 - RNA, 23 nt, Human
agugguucaugccuguaauccca

SEQ ID NO: 601160 - RNA, 24 nt, Human
agugguucaugccuguaaucccag

SEQ ID NO: 601161 - RNA, 26 nt, Human
auacuucucucuccuuucaauacuaa

SEQ ID NO: 601162 - RNA, 18 nt, Human
auaucagaagcgucccca

SEQ ID NO: 601163 - RNA, 27 nt, Human
augauuuuuaaaacugaauaggcaaag

SEQ ID NO: 601164 - RNA, 19 nt, Human
augccuguaaucccagcac

SEQ ID NO: 601165 - RNA, 21 nt, Human
auggcucagagcagcaaaaca

SEQ ID NO: 601166 - RNA, 24 nt, Human
caaaaugcugggauuacaggcaug

SEQ ID NO: 601167 - RNA, 21 nt, Human
caacagcaagggcauagagag

SEQ ID NO: 601168 - RNA, 23 nt, Human
caacagcaagggcauagagagga

SEQ ID NO: 601169 - RNA, 18 nt, Human
caacauggugaaacccca

SEQ ID NO: 601170 - RNA, 25 nt, Human
caagggcauagagaggagaccuuga

SEQ ID NO: 601171 - RNA, 19 nt, Human
caauacuucucucuccuuu

SEQ ID NO: 601172 - RNA, 20 nt, Human
caccaaagaccaauacuucu

SEQ ID NO: 601173 - RNA, 19 nt, Human
caccccagaaaagcuggug

SEQ ID NO: 601174 - RNA, 23 nt, Human
cacccgucucggccucccaaaau

SEQ ID NO: 601175 - RNA, 18 nt, Human
cacucgaaaaaucaacag

SEQ ID NO: 601176 - RNA, 20 nt, Human
cacucggugggagguggcca

SEQ ID NO: 601177 - RNA, 26 nt, Human
cacuuucuccuccucuucguccucca

SEQ ID NO: 601178 - RNA, 20 nt, Human
cacuuugggucacuugaggu

SEQ ID NO: 601179 - RNA, 19 nt, Human
cagagcagcaaaacaaguu

SEQ ID NO: 601180 - RNA, 19 nt, Human
caucguguuagccaggaug

SEQ ID NO: 601181 - RNA, 24 nt, Human
caucguguuagccaggauggucuc

SEQ ID NO: 601182 - RNA, 20 nt, Human
caugccuguaaucccagcac

SEQ ID NO: 601183 - RNA, 24 nt, Human
caugccuguaaucccagcacuuug

SEQ ID NO: 601184 - RNA, 19 nt, Human
cauguucauccaccccaga

SEQ ID NO: 601185 - RNA, 23 nt, Human
ccaaaaugcugggauuacaggca

SEQ ID NO: 601186 - RNA, 24 nt, Human
ccaaaaugcugggauuacaggcau

SEQ ID NO: 601187 - RNA, 19 nt, Human
ccacuuucuccuccucuuc

SEQ ID NO: 601188 - RNA, 20 nt, Human
ccagcacuuugggucacuug

SEQ ID NO: 601189 - RNA, 24 nt, Human
cccaaaaugcugggauuacaggca

SEQ ID NO: 601190 - RNA, 19 nt, Human
cccgcgcuccagugauggg

SEQ ID NO: 601191 - RNA, 20 nt, Human
ccugaccucgugauccaccc

SEQ ID NO: 601192 - RNA, 23 nt, Human
ccugcacauaucagaagcguccc

SEQ ID NO: 601193 - RNA, 24 nt, Human
cgagaccaaucuggccaacauggu

SEQ ID NO: 601194 - RNA, 19 nt, Human
cgccacucggugggaggug

SEQ ID NO: 601195 - RNA, 23 nt, Human
cgccccgccuccgaggccugagc

SEQ ID NO: 601196 - RNA, 24 nt, Human
cuccugaccucgugauccacccgu

SEQ ID NO: 601197 - RNA, 18 nt, Human
cugacgcugcaaacaaca

SEQ ID NO: 601198 - RNA, 19 nt, Human
cugacgcugcaaacaacag

SEQ ID NO: 601199 - RNA, 19 nt, Human
cugagccacuuucuccucc

SEQ ID NO: 601200 - RNA, 21 nt, Human
cuggccaacauggugaaaccc

SEQ ID NO: 601201 - RNA, 23 nt, Human
cuggccaacauggugaaacccca

SEQ ID NO: 601202 - RNA, 22 nt, Human
gaccucgugauccacccgucuc

SEQ ID NO: 601203 - RNA, 22 nt, Human
gaccucgugauccacccgucuc

SEQ ID NO: 601204 - RNA, 24 nt, Human
gaccucgugauccacccgucucgg

SEQ ID NO: 601205 - RNA, 23 nt, Human
gagcagcaaaacaaguuagagga

SEQ ID NO: 601206 - RNA, 18 nt, Human
gauuacaggcaugagcca

SEQ ID NO: 601207 - RNA, 21 nt, Human
gauuacaggcaugagccacca

SEQ ID NO: 601208 - RNA, 24 nt, Human
gauuacaggcaugagccaccauac

SEQ ID NO: 601209 - RNA, 24 nt, Human
gcaaagccuuacucuaacugauca

SEQ ID NO: 601210 - RNA, 24 nt, Human
gccaacauggugaaaccccaucuc

SEQ ID NO: 601211 - RNA, 24 nt, Human
ggauggucucgaucuccugaccuc

SEQ ID NO: 601212 - RNA, 19 nt, Human
ggauuacaggcaugagcca

SEQ ID NO: 601213 - RNA, 18 nt, Human
gggcagcagcaguucguu

SEQ ID NO: 601214 - RNA, 23 nt, Human
gggguuucaucguguuagccagg

SEQ ID NO: 601215 - RNA, 22 nt, Human
ggguuucaucguguuagccagg

SEQ ID NO: 601216 - RNA, 18 nt, Human
ggucacuugaggucagga

SEQ ID NO: 601217 - RNA, 24 nt, Human
guccccacagauguucuaaacaca

SEQ ID NO: 601218 - RNA, 24 nt, Human
gugauccacccgucucggccuccc

SEQ ID NO: 601219 - RNA, 18 nt, Human
guucguacugggcgaccc

SEQ ID NO: 601220 - RNA, 22 nt, Human
uaaaaaguaaaccaccaaagac

SEQ ID NO: 601221 - RNA, 20 nt, Human
uaaaauuaaugaaauaaugu

SEQ ID NO: 601222 - RNA, 23 nt, Human
uaaaccaccaaagaccaauacuu

SEQ ID NO: 601223 - RNA, 23 nt, Human
uaacugaucaaaugaccaaucag

SEQ ID NO: 601224 - RNA, 23 nt, Human
uacaggcaugagccaccauaccc

SEQ ID NO: 601225 - RNA, 20 nt, Human
uagcagugucugaauccagu

SEQ ID NO: 601226 - RNA, 19 nt, Human
uaguagagacgggguuuca

SEQ ID NO: 601227 - RNA, 24 nt, Human
uaguagagacgggguuucaucgug

SEQ ID NO: 601228 - RNA, 19 nt, Human
ucaacagaauuggccaggc

SEQ ID NO: 601229 - RNA, 19 nt, Human
ucaacagaauuggccaggc

SEQ ID NO: 601230 - RNA, 23 nt, Human
ucaacagcccugcacauaucaga

SEQ ID NO: 601231 - RNA, 24 nt, Human
ucacacuuuccaaaauuuuuaaaa

SEQ ID NO: 601232 - RNA, 22 nt, Human
ucacuugaggucaggaauccga

SEQ ID NO: 601233 - RNA, 24 nt, Human
ucagagcagcaaaacaaguuagag

SEQ ID NO: 601234 - RNA, 23 nt, Human
ucagcuccuuucuguuagcccuc

SEQ ID NO: 601235 - RNA, 24 nt, Human
ucaucguguuagccaggauggucu

SEQ ID NO: 601236 - RNA, 23 nt, Human
ucaugccuguaaucccagcacuu

SEQ ID NO: 601237 - RNA, 24 nt, Human
ucccaaaaugcugggauuacaggc

SEQ ID NO: 601238 - RNA, 19 nt, Human
ucgccccgccuccgaggcc

SEQ ID NO: 601239 - RNA, 22 nt, Human
ucggugcauguucauccacccc

SEQ ID NO: 601240 - RNA, 23 nt, Human
ucuccuccucuucguccuccaag

SEQ ID NO: 601241 - RNA, 20 nt, Human
ucucggccucccaaaaugcu

SEQ ID NO: 601242 - RNA, 23 nt, Human
ucuggccaacauggugaaacccc

SEQ ID NO: 601243 - RNA, 20 nt, Human
ugaaaugcacugcagagaaa

SEQ ID NO: 601244 - RNA, 21 nt, Human
ugaaaugcacugcagagaaaa

SEQ ID NO: 601245 - RNA, 23 nt, Human
ugaccucgugauccacccgucuc

SEQ ID NO: 601246 - RNA, 19 nt, Human
ugcaaacaacagcaagggc

SEQ ID NO: 601247 - RNA, 23 nt, Human
ugccuguaaucccagcacuuugg

SEQ ID NO: 601248 - RNA, 23 nt, Human
ugccuguaaucccagcacuuugg

SEQ ID NO: 601249 - RNA, 24 nt, Human
ugccuguaaucccagcacuuuggg

SEQ ID NO: 601250 - RNA, 24 nt, Human
uggccaacauggugaaaccccauc

SEQ ID NO: 601251 - RNA, 24 nt, Human
uggccaggcacagugguucaugcc

SEQ ID NO: 601252 - RNA, 18 nt, Human
ugggauuacaggcaugag

SEQ ID NO: 601253 - RNA, 22 nt, Human
ugggauuacaggcaugagccac

SEQ ID NO: 601254 - RNA, 23 nt, Human
ugggauuacaggcaugagccacc

SEQ ID NO: 601255 - RNA, 24 nt, Human
ugggauuacaggcaugagccacca

SEQ ID NO: 601256 - RNA, 25 nt, Human
ugggauuacaggcaugagccaccau

SEQ ID NO: 601257 - RNA, 23 nt, Human
ugggucacuugaggucaggaauc

SEQ ID NO: 601258 - RNA, 24 nt, Human
ugggucacuugaggucaggaaucc

SEQ ID NO: 601259 - RNA, 22 nt, Human
ugguucaugccuguaaucccag

SEQ ID NO: 601260 - RNA, 24 nt, Human
ugguucaugccuguaaucccagca

SEQ ID NO: 601261 - RNA, 21 nt, Human
uuaaaaauacaaaaucauagu

SEQ ID NO: 601262 - RNA, 18 nt, Human
uuaguagagacgggguuu

SEQ ID NO: 601263 - RNA, 20 nt, Human
uuaguagagacgggguuuca

SEQ ID NO: 601264 - RNA, 24 nt, Human
uuaguagagacgggguuucaucgu

SEQ ID NO: 601265 - RNA, 23 nt, Human
uucaugccuguaaucccagcacu

SEQ ID NO: 601266 - RNA, 18 nt, Human
uucguccuccaagaucgc

SEQ ID NO: 601267 - RNA, 18 nt, Human
uucuccuccucuucgucc

SEQ ID NO: 601268 - RNA, 19 nt, Human
uuucaucguguuagccagg

SEQ ID NO: 601269 - RNA, 21 nt, Human
uuuccaaaauuuuuaaaaagu

SEQ ID NO: 601270 - RNA, 18 nt, Human
uuucuaugugggcagccu

SEQ ID NO: 601271 - RNA, 19 nt, Human
uuucuccuccucuucgucc

SEQ ID NO: 601272 - RNA, 23 nt, Human
uuuuaguagagacgggguuucau

SEQ ID NO: 601273 - RNA, 22 nt, Human
aacaacuuucucacacuagcuc

SEQ ID NO: 601274 - RNA, 18 nt, Human
aacacaccccucccgcua

SEQ ID NO: 601275 - RNA, 20 nt, Human
aacugcuucucuaccaagaa

SEQ ID NO: 601276 - RNA, 18 nt, Human
aaggcaaaggagaagcag

SEQ ID NO: 601277 - RNA, 18 nt, Human
aaguggcccauacgauga

SEQ ID NO: 601278 - RNA, 18 nt, Human
aaucauggcaaaaggcaa

SEQ ID NO: 601279 - RNA, 18 nt, Human
acugaaacucaucugugg

SEQ ID NO: 601280 - RNA, 23 nt, Human
acuguaacccauccugacacacu

SEQ ID NO: 601281 - RNA, 20 nt, Human
agcaggcaccuuugucagau

SEQ ID NO: 601282 - RNA, 20 nt, Human
agggucuagggaugccuuag

SEQ ID NO: 601283 - RNA, 22 nt, Human
aucuguggugacaugcacaucu

SEQ ID NO: 601284 - RNA, 19 nt, Human
augaacacaccccucccgc

SEQ ID NO: 601285 - RNA, 23 nt, Human
augcugucuucccugucucagcu

SEQ ID NO: 601286 - RNA, 29 nt, Human
auggcaaaaggcaaaggagaagggacccc

SEQ ID NO: 601287 - RNA, 19 nt, Human
caaaaggcaaaggagaagc

SEQ ID NO: 601288 - RNA, 25 nt, Human
caaaaggcaaaggagaagcaggcac

SEQ ID NO: 601289 - RNA, 22 nt, Human
cagcuguacagccggcucugcc

SEQ ID NO: 601290 - RNA, 19 nt, Human
caguagcaccuuggcuaga

SEQ ID NO: 601291 - RNA, 19 nt, Human
ccccaugaacacaccccuc

SEQ ID NO: 601292 - RNA, 21 nt, Human
ccccaugaacacaccccuccc

SEQ ID NO: 601293 - RNA, 23 nt, Human
ccccaugaacacaccccucccgc

SEQ ID NO: 601294 - RNA, 25 nt, Human
ccuuccauaguugggaccaaaagcc

SEQ ID NO: 601295 - RNA, 23 nt, Human
cuagacccaucuguauaccaugc

SEQ ID NO: 601296 - RNA, 21 nt, Human
cucuaccaagaaauacuggag

SEQ ID NO: 601297 - RNA, 18 nt, Human
cugaaguaugagggaagu

SEQ ID NO: 601298 - RNA, 24 nt, Human
cugcaagauggauagcucugacuc

SEQ ID NO: 601299 - RNA, 20 nt, Human
cugcccugccuuucggguca

SEQ ID NO: 601300 - RNA, 18 nt, Human
cugugccuucccugucug

SEQ ID NO: 601301 - RNA, 18 nt, Human
gaaguggguggaugggca

SEQ ID NO: 601302 - RNA, 23 nt, Human
gaaguggguggaugggcagaaag

SEQ ID NO: 601303 - RNA, 20 nt, Human
gcucugacucucucuuucuc

SEQ ID NO: 601304 - RNA, 19 nt, Human
gcugaaguaugagggaagu

SEQ ID NO: 601305 - RNA, 24 nt, Human
gggaaguggguggaugggcagaaa

SEQ ID NO: 601306 - RNA, 21 nt, Human
gguuuuauucagcagcagcuc

SEQ ID NO: 601307 - RNA, 22 nt, Human
uaagggacuuggcauacuuugc

SEQ ID NO: 601308 - RNA, 18 nt, Human
uaaguggcccauacgaug

SEQ ID NO: 601309 - RNA, 27 nt, Human
uaaucagaaauaaauauuuauguacag

SEQ ID NO: 601310 - RNA, 18 nt, Human
uacuguuuucccaguuga

SEQ ID NO: 601311 - RNA, 27 nt, Human
uacuuugcugcuccaaguaggcacccc

SEQ ID NO: 601312 - RNA, 22 nt, Human
uagggucuagggaugccuuagg

SEQ ID NO: 601313 - RNA, 19 nt, Human
uauguccuagcucccuccu

SEQ ID NO: 601314 - RNA, 18 nt, Human
uccacauagcugaggaga

SEQ ID NO: 601315 - RNA, 21 nt, Human
uccauaguugggaccaaaagc

SEQ ID NO: 601316 - RNA, 18 nt, Human
ucccacauacagcuguac

SEQ ID NO: 601317 - RNA, 22 nt, Human
ucgaggcagcaguagcaccuug

SEQ ID NO: 601318 - RNA, 20 nt, Human
ugaagaaauaucugagacug

SEQ ID NO: 601319 - RNA, 22 nt, Human
ugaagaaauaucugagacuggg

SEQ ID NO: 601320 - RNA, 23 nt, Human
ugaaguaugagggaagugggugg

SEQ ID NO: 601321 - RNA, 19 nt, Human
ugcaacaacagucgaggca

SEQ ID NO: 601322 - RNA, 19 nt, Human
ugcccugccuuucggguca

SEQ ID NO: 601323 - RNA, 18 nt, Human
ugccuuaggccccacagu

SEQ ID NO: 601324 - RNA, 24 nt, Human
uguauaccaugcccuauuaggaau

SEQ ID NO: 601325 - RNA, 21 nt, Human
ugucugugccuucccugucug

SEQ ID NO: 601326 - RNA, 23 nt, Human
uguuacuaacugcuucucuacca

SEQ ID NO: 601327 - RNA, 23 nt, Human
aaacugcucuaaacacuccccca

SEQ ID NO: 601328 - RNA, 19 nt, Human
aacaaggaagacagggucu

SEQ ID NO: 601329 - RNA, 24 nt, Human
aaggguuucacuauacugcccagg

SEQ ID NO: 601330 - RNA, 25 nt, Human
acuauacugcccaggcuaaacuuga

SEQ ID NO: 601331 - RNA, 24 nt, Human
agccuccugaauagcugggaguag

SEQ ID NO: 601332 - RNA, 23 nt, Human
aguagcugggacuacagggaugu

SEQ ID NO: 601333 - RNA, 27 nt, Human
auagcugggaguagcugggacuacagg

SEQ ID NO: 601334 - RNA, 22 nt, Human
augaaucucuguauugucagaa

SEQ ID NO: 601335 - RNA, 27 nt, Human
cacuauacugcccaggcuaaacuugaa

SEQ ID NO: 601336 - RNA, 22 nt, Human
cagccuccugaauagcugggag

SEQ ID NO: 601337 - RNA, 23 nt, Human
ccagacacuuaauuaaugcugau

SEQ ID NO: 601338 - RNA, 23 nt, Human
ccgccucagccuccugaauagcu

SEQ ID NO: 601339 - RNA, 21 nt, Human
ccugaauagcugggaguagcu

SEQ ID NO: 601340 - RNA, 22 nt, Human
ccugacuggcagaguacccaga

SEQ ID NO: 601341 - RNA, 22 nt, Human
ccugccgccucagccuccugaa

SEQ ID NO: 601342 - RNA, 24 nt, Human
ccugccgccucagccuccugaaua

SEQ ID NO: 601343 - RNA, 18 nt, Human
ccuggcaaguccuuuacc

SEQ ID NO: 601344 - RNA, 23 nt, Human
ccuggcaaguccuuuaccucccc

SEQ ID NO: 601345 - RNA, 20 nt, Human
ccuuggcaugugcucagucc

SEQ ID NO: 601346 - RNA, 19 nt, Human
ccuugguucaagugauccu

SEQ ID NO: 601347 - RNA, 20 nt, Human
ccuugguucaagugauccug

SEQ ID NO: 601348 - RNA, 24 nt, Human
cgccucagccuccugaauagcugg

SEQ ID NO: 601349 - RNA, 20 nt, Human
cuaaccaaauaaugccaccc

SEQ ID NO: 601350 - RNA, 25 nt, Human
cuccugaauagcugggaguagcugg

SEQ ID NO: 601351 - RNA, 22 nt, Human
gaauucuccuugaucacuucuc

SEQ ID NO: 601352 - RNA, 24 nt, Human
gacuacagggauguguuaucaugc

SEQ ID NO: 601353 - RNA, 20 nt, Human
gaguagcugggacuacaggg

SEQ ID NO: 601354 - RNA, 20 nt, Human
gaucuugugauccucucucu

SEQ ID NO: 601355 - RNA, 24 nt, Human
ggacuacagggauguguuaucaug

SEQ ID NO: 601356 - RNA, 19 nt, Human
guagcugggacuacaggga

SEQ ID NO: 601357 - RNA, 24 nt, Human
gugauccugccgccucagccuccu

SEQ ID NO: 601358 - RNA, 18 nt, Human
uaaaagggugccuuggca

SEQ ID NO: 601359 - RNA, 19 nt, Human
uaccuccccguaggccugg

SEQ ID NO: 601360 - RNA, 24 nt, Human
uauacugcccaggcuaaacuugaa

SEQ ID NO: 601361 - RNA, 19 nt, Human
uauaguggugaacaaggaa

SEQ ID NO: 601362 - RNA, 20 nt, Human
uauaguggugaacaaggaag

SEQ ID NO: 601363 - RNA, 22 nt, Human
uaucaugcccagugaaagcccu

SEQ ID NO: 601364 - RNA, 18 nt, Human
ucaagugauccugccgcc

SEQ ID NO: 601365 - RNA, 22 nt, Human
ucacuauacugcccaggcuaaa

SEQ ID NO: 601366 - RNA, 19 nt, Human
uccauaaaagggugccuug

SEQ ID NO: 601367 - RNA, 18 nt, Human
uccuugguucaagugauc

SEQ ID NO: 601368 - RNA, 21 nt, Human
uccuugguucaagugauccug

SEQ ID NO: 601369 - RNA, 24 nt, Human
ugcaagccuuaggaucugaaacuu

SEQ ID NO: 601370 - RNA, 20 nt, Human
ugcccaggcuaaacuugaac

SEQ ID NO: 601371 - RNA, 24 nt, Human
ugcccaggcuaaacuugaacuccu

SEQ ID NO: 601372 - RNA, 20 nt, Human
ugccuuggcaugugcucagu

SEQ ID NO: 601373 - RNA, 18 nt, Human
ugcuacaagcucuguuuu

SEQ ID NO: 601374 - RNA, 18 nt, Human
ugggacuacagggaugug

SEQ ID NO: 601375 - RNA, 22 nt, Human
ugggacuacagggauguguuau

SEQ ID NO: 601376 - RNA, 26 nt, Human
ugguacagguugaauauccauaaaag

SEQ ID NO: 601377 - RNA, 23 nt, Human
ugguucaagugauccugccgccu

SEQ ID NO: 601378 - RNA, 18 nt, Human
uguuuuugagaaaggguu

SEQ ID NO: 601379 - RNA, 23 nt, Human
uucaagugauccugccgccucag

SEQ ID NO: 601380 - RNA, 24 nt, Human
uucaucuuguguaacucuuuuaag

SEQ ID NO: 601381 - RNA, 26 nt, Human
uucaucuuguguaacucuuuuaagua

SEQ ID NO: 601382 - RNA, 19 nt, Human
uuggcaugugcucaguccu

SEQ ID NO: 601383 - RNA, 24 nt, Human
uugugugaucuugugauccucucu

SEQ ID NO: 601384 - RNA, 24 nt, Human
uuuaagcaaagaagaaauuggugu

SEQ ID NO: 601385 - RNA, 24 nt, Human
uuucacuauacugcccaggcuaaa

SEQ ID NO: 601386 - RNA, 22 nt, Human
uuucaguagcccuuuauuuguu

SEQ ID NO: 601387 - RNA, 21 nt, Human
aaacaagauaggaguacucag

SEQ ID NO: 601388 - RNA, 24 nt, Human
aacugguccgggccuccuggccuc

SEQ ID NO: 601389 - RNA, 21 nt, Human
aagcaggggugggaaaauucg

SEQ ID NO: 601390 - RNA, 23 nt, Human
aagcaggggugggaaaauucggg

SEQ ID NO: 601391 - RNA, 22 nt, Human
accucaaggcaguguggugggg

SEQ ID NO: 601392 - RNA, 22 nt, Human
acugcgcucaucccccuccccc

SEQ ID NO: 601393 - RNA, 22 nt, Human
agagacuggggaaggcaggggc

SEQ ID NO: 601394 - RNA, 23 nt, Human
agcaaacugcgcucaucccccuc

SEQ ID NO: 601395 - RNA, 19 nt, Human
aggacaccuggguccucuc

SEQ ID NO: 601396 - RNA, 21 nt, Human
aggccccagcccaagucccaa

SEQ ID NO: 601397 - RNA, 21 nt, Human
aggggaggaggugcgaaggca

SEQ ID NO: 601398 - RNA, 19 nt, Human
aggugcgaaggcaaacacu

SEQ ID NO: 601399 - RNA, 20 nt, Human
caaccuccucggggagaagc

SEQ ID NO: 601400 - RNA, 22 nt, Human
caagucccaacuugcucaagag

SEQ ID NO: 601401 - RNA, 19 nt, Human
cacaacugcagccucccag

SEQ ID NO: 601402 - RNA, 19 nt, Human
cacugcuaggacaccuggg

SEQ ID NO: 601403 - RNA, 24 nt, Human
ccaggccccagcccaagucccaac

SEQ ID NO: 601404 - RNA, 23 nt, Human
ccccagcccaagucccaacuugc

SEQ ID NO: 601405 - RNA, 21 nt, Human
cccccgagucacggccaaccc

SEQ ID NO: 601406 - RNA, 18 nt, Human
cccccggggccugcucac

SEQ ID NO: 601407 - RNA, 20 nt, Human
cccccggggccugcucacuc

SEQ ID NO: 601408 - RNA, 20 nt, Human
ccccgagucacggccaaccc

SEQ ID NO: 601409 - RNA, 22 nt, Human
ccccggggccugcucacuccuc

SEQ ID NO: 601410 - RNA, 19 nt, Human
ccgcccccgagucacggcc

SEQ ID NO: 601411 - RNA, 24 nt, Human
ccgcccccgagucacggccaaccc

SEQ ID NO: 601412 - RNA, 22 nt, Human
ccucccagccaaucauucuucc

SEQ ID NO: 601413 - RNA, 22 nt, Human
ccucccccggggccugcucacu

SEQ ID NO: 601414 - RNA, 23 nt, Human
ccuccucggggagaagcaggggu

SEQ ID NO: 601415 - RNA, 21 nt, Human
ccucggggagaagcaggggug

SEQ ID NO: 601416 - RNA, 23 nt, Human
ccucggggagaagcagggguggg

SEQ ID NO: 601417 - RNA, 21 nt, Human
ccuggccgccugcaccuuggc

SEQ ID NO: 601418 - RNA, 24 nt, Human
ccuggccucccucccgcggccucc

SEQ ID NO: 601419 - RNA, 21 nt, Human
cgagggccucagugccagaug

SEQ ID NO: 601420 - RNA, 18 nt, Human
cggcaggggaggaaagcg

SEQ ID NO: 601421 - RNA, 21 nt, Human
cggcaggggaggaaagcgagc

SEQ ID NO: 601422 - RNA, 23 nt, Human
cucccacccuggccgccugcacc

SEQ ID NO: 601423 - RNA, 20 nt, Human
cucccgaacagguggagaaa

SEQ ID NO: 601424 - RNA, 25 nt, Human
cuccucggggagaagcagggguggg

SEQ ID NO: 601425 - RNA, 19 nt, Human
gacuggggaaggcaggggc

SEQ ID NO: 601426 - RNA, 18 nt, Human
gagcccuggggcccuacu

SEQ ID NO: 601427 - RNA, 18 nt, Human
gauucacuucccagaggg

SEQ ID NO: 601428 - RNA, 24 nt, Human
gcucaagagcucaaccuccucggg

SEQ ID NO: 601429 - RNA, 18 nt, Human
ggagccuggggugguugc

SEQ ID NO: 601430 - RNA, 21 nt, Human
ggagggggccggcaggggagg

SEQ ID NO: 601431 - RNA, 23 nt, Human
gggcggagggggccggcagggga

SEQ ID NO: 601432 - RNA, 22 nt, Human
ggggaggaggugcgaaggcaaa

SEQ ID NO: 601433 - RNA, 24 nt, Human
gggggcggagggggccggcagggg

SEQ ID NO: 601434 - RNA, 20 nt, Human
ggucagaaguugugguugag

SEQ ID NO: 601435 - RNA, 23 nt, Human
ggucuuauuugccccccgcgcug

SEQ ID NO: 601436 - RNA, 19 nt, Human
gugaagcugcagggagggg

SEQ ID NO: 601437 - RNA, 21 nt, Human
uaccacaacugcagccuccca

SEQ ID NO: 601438 - RNA, 23 nt, Human
uaccacaacugcagccucccagg

SEQ ID NO: 601439 - RNA, 20 nt, Human
ucagggucgccagguggcga

SEQ ID NO: 601440 - RNA, 22 nt, Human
ucauucuuccaggccccagccc

SEQ ID NO: 601441 - RNA, 18 nt, Human
ucccaggggagccugggg

SEQ ID NO: 601442 - RNA, 18 nt, Human
ucccugugaagcugcagg

SEQ ID NO: 601443 - RNA, 24 nt, Human
ucgccaccaccccgcggcuuccua

SEQ ID NO: 601444 - RNA, 21 nt, Human
ucgccagguggcgaggcaggu

SEQ ID NO: 601445 - RNA, 19 nt, Human
ugcagccucccaggggagc

SEQ ID NO: 601446 - RNA, 26 nt, Human
uggcugcagagaccccuccacugaca

SEQ ID NO: 601447 - RNA, 19 nt, Human
ugugugggggcggaggggg

SEQ ID NO: 601448 - RNA, 21 nt, Human
ugugugggggcggagggggcc

SEQ ID NO: 601449 - RNA, 23 nt, Human
uuaggugcacaucuccaacuccc

SEQ ID NO: 601450 - RNA, 21 nt, Human
uucuaaacccuaggaaggcuc

SEQ ID NO: 601451 - RNA, 19 nt, Human
aaggaacugacccgagagc

SEQ ID NO: 601452 - RNA, 22 nt, Human
agauuacaggugugagccacug

SEQ ID NO: 601453 - RNA, 19 nt, Human
agcccgagucaaaccgcac

SEQ ID NO: 601454 - RNA, 24 nt, Human
aggccaggacggauugacaggaga

SEQ ID NO: 601455 - RNA, 19 nt, Human
aggucacagaaggaacuga

SEQ ID NO: 601456 - RNA, 20 nt, Human
cacgccuggaaucccagccg

SEQ ID NO: 601457 - RNA, 21 nt, Human
cacgccuggaaucccagccgu

SEQ ID NO: 601458 - RNA, 19 nt, Human
caggagacgccugggccac

SEQ ID NO: 601459 - RNA, 18 nt, Human
ccccuggaugcccacagg

SEQ ID NO: 601460 - RNA, 20 nt, Human
ccccuggaugcccacaggcu

SEQ ID NO: 601461 - RNA, 22 nt, Human
ccuggaaucccagccgucuggg

SEQ ID NO: 601462 - RNA, 22 nt, Human
cgucacagggcggccuuagguu

SEQ ID NO: 601463 - RNA, 22 nt, Human
cgugacaucacuaaccagcucc

SEQ ID NO: 601464 - RNA, 19 nt, Human
cucacgccuggaaucccag

SEQ ID NO: 601465 - RNA, 18 nt, Human
gauuacaggugugagcca

SEQ ID NO: 601466 - RNA, 19 nt, Human
gauuacaggugugagccac

SEQ ID NO: 601467 - RNA, 23 nt, Human
ggaggcugagauuacagguguga

SEQ ID NO: 601468 - RNA, 21 nt, Human
gggaacagccgagaucagccg

SEQ ID NO: 601469 - RNA, 21 nt, Human
gggaggggaguggagaugggg

SEQ ID NO: 601470 - RNA, 19 nt, Human
gggcgugacaucacuaacc

SEQ ID NO: 601471 - RNA, 19 nt, Human
ggggaguggagauggggaa

SEQ ID NO: 601472 - RNA, 22 nt, Human
ggugccgaggucacagaaggaa

SEQ ID NO: 601473 - RNA, 19 nt, Human
guccccagcguuuucucag

SEQ ID NO: 601474 - RNA, 19 nt, Human
uacaggugugagccacugu

SEQ ID NO: 601475 - RNA, 24 nt, Human
uacaggugugagccacugucccca

SEQ ID NO: 601476 - RNA, 21 nt, Human
ucagcccgagucaaaccgcac

SEQ ID NO: 601477 - RNA, 23 nt, Human
uccccagcguuuucucagcccga

SEQ ID NO: 601478 - RNA, 19 nt, Human
ugaaguuaucaucagugca

SEQ ID NO: 601479 - RNA, 20 nt, Human
ugacccgagagccgucacag

SEQ ID NO: 601480 - RNA, 21 nt, Human
ugagauuacaggugugagcca

SEQ ID NO: 601481 - RNA, 22 nt, Human
ugagauuacaggugugagccac

SEQ ID NO: 601482 - RNA, 22 nt, Human
ugagauuacaggugugagccac

SEQ ID NO: 601483 - RNA, 22 nt, Human
ugagauuacaggugugagccac

SEQ ID NO: 601484 - RNA, 24 nt, Human
ugagauuacaggugugagccacug

SEQ ID NO: 601485 - RNA, 21 nt, Human
uggcagcugcugaggccagga

SEQ ID NO: 601486 - RNA, 21 nt, Human
ugugagccacuguccccagcg

SEQ ID NO: 601487 - RNA, 18 nt, Human
uuuuuuuuuuuuuuuuug

SEQ ID NO: 601488 - RNA, 22 nt, Human
aaacugaaccucuauccuguaa

SEQ ID NO: 601489 - RNA, 19 nt, Human
aaauuaauaggaugaauga

SEQ ID NO: 601490 - RNA, 22 nt, Human
aaauuccagagguaucuaaacu

SEQ ID NO: 601491 - RNA, 23 nt, Human
aacccuguuuuucccccacagua

SEQ ID NO: 601492 - RNA, 22 nt, Human
aagaaaaacaaaaagaacuuua

SEQ ID NO: 601493 - RNA, 21 nt, Human
acauacacccccuauuauaug

SEQ ID NO: 601494 - RNA, 19 nt, Human
acccuguuuuucccccaca

SEQ ID NO: 601495 - RNA, 21 nt, Human
acuaaacuguuagacugagau

SEQ ID NO: 601496 - RNA, 18 nt, Human
acugcaagaaaaagaagc

SEQ ID NO: 601497 - RNA, 22 nt, Human
agaugcuaaagccccaacaacu

SEQ ID NO: 601498 - RNA, 23 nt, Human
agccccuucuaaaaagcucccau

SEQ ID NO: 601499 - RNA, 23 nt, Human
aggcucauuuucccaaaucaaaa

SEQ ID NO: 601500 - RNA, 26 nt, Human
aguugauacuacucagagcaagauag

SEQ ID NO: 601501 - RNA, 20 nt, Human
aguugauuguagcacaacug

SEQ ID NO: 601502 - RNA, 21 nt, Human
aguuuaaacaaaauucacaca

SEQ ID NO: 601503 - RNA, 24 nt, Human
auggcugguaccuccuccaaacac

SEQ ID NO: 601504 - RNA, 22 nt, Human
caaagcacuggaguucgguuug

SEQ ID NO: 601505 - RNA, 23 nt, Human
caacaucacuccauuuuuuccac

SEQ ID NO: 601506 - RNA, 20 nt, Human
caaguaaaccugaaagaaaa

SEQ ID NO: 601507 - RNA, 24 nt, Human
caccuccuuuuuccucguugucuu

SEQ ID NO: 601508 - RNA, 21 nt, Human
caccuguguauuucacagaag

SEQ ID NO: 601509 - RNA, 20 nt, Human
cagaaucaaccccguaacaa

SEQ ID NO: 601510 - RNA, 21 nt, Human
cagcaggauaaaaaacguaaa

SEQ ID NO: 601511 - RNA, 23 nt, Human
cagcaggauaaaaaacguaaaac

SEQ ID NO: 601512 - RNA, 24 nt, Human
cagcaggauaaaaaacguaaaaca

SEQ ID NO: 601513 - RNA, 22 nt, Human
cagcauauuacauugccucugg

SEQ ID NO: 601514 - RNA, 20 nt, Human
cauguuccacaaaaagguca

SEQ ID NO: 601515 - RNA, 24 nt, Human
ccaacaacucuuugugcucaguga

SEQ ID NO: 601516 - RNA, 26 nt, Human
ccacucaauuuuagcagcuuuaauuu

SEQ ID NO: 601517 - RNA, 21 nt, Human
ccccuucuaaaaagcucccau

SEQ ID NO: 601518 - RNA, 23 nt, Human
cccuacccggacaccuccuuuuu

SEQ ID NO: 601519 - RNA, 19 nt, Human
cccuucuaaaaagcuccca

SEQ ID NO: 601520 - RNA, 18 nt, Human
ccgaccgccgccgcugcc

SEQ ID NO: 601521 - RNA, 19 nt, Human
ccgaccgccgccgcugccg

SEQ ID NO: 601522 - RNA, 19 nt, Human
ccgaccgccgccgcugccg

SEQ ID NO: 601523 - RNA, 19 nt, Human
ccgccgccaccaccaggcc

SEQ ID NO: 601524 - RNA, 23 nt, Human
ccgccgccaccaccaggccucgg

SEQ ID NO: 601525 - RNA, 23 nt, Human
ccgccgccaccaccaggccucgg

SEQ ID NO: 601526 - RNA, 18 nt, Human
ccgccgccgcugccguuc

SEQ ID NO: 601527 - RNA, 20 nt, Human
ccgccgccgcugccguuccg

SEQ ID NO: 601528 - RNA, 22 nt, Human
ccgcugccguuccguagcugcu

SEQ ID NO: 601529 - RNA, 26 nt, Human
ccuauggucagaaucaaccccguaac

SEQ ID NO: 601530 - RNA, 20 nt, Human
ccuccuuuuuccucguuguc

SEQ ID NO: 601531 - RNA, 23 nt, Human
ccucgggugucgccgcguugccc

SEQ ID NO: 601532 - RNA, 18 nt, Human
ccugccaccagccuugcc

SEQ ID NO: 601533 - RNA, 24 nt, Human
ccugccaccagccuugcccucaau

SEQ ID NO: 601534 - RNA, 18 nt, Human
cgaccgccgccgcugccg

SEQ ID NO: 601535 - RNA, 23 nt, Human
cgcguugcccuacccggacaccu

SEQ ID NO: 601536 - RNA, 23 nt, Human
cuacucagagcaagauaguacag

SEQ ID NO: 601537 - RNA, 22 nt, Human
cucccaucugcacuagccuuac

SEQ ID NO: 601538 - RNA, 23 nt, Human
cugcaagaaaaagaagcuggucu

SEQ ID NO: 601539 - RNA, 18 nt, Human
cuuauuugcucagaucuu

SEQ ID NO: 601540 - RNA, 20 nt, Human
gaguucgguuuguacuucuc

SEQ ID NO: 601541 - RNA, 25 nt, Human
gcucccgccaccacccggcucgguc

SEQ ID NO: 601542 - RNA, 19 nt, Human
ggacuaguguucuuuccca

SEQ ID NO: 601543 - RNA, 19 nt, Human
gugaauuuuggaaacacaa

SEQ ID NO: 601544 - RNA, 23 nt, Human
uaacaaguuuggccaaacaaugc

SEQ ID NO: 601545 - RNA, 22 nt, Human
uaauaaaacauaacaaagcacu

SEQ ID NO: 601546 - RNA, 24 nt, Human
uagcagcuuuaauuuuuuaagaaa

SEQ ID NO: 601547 - RNA, 20 nt, Human
uagugauucacauugcauac

SEQ ID NO: 601548 - RNA, 21 nt, Human
uaugcugucugagauauagua

SEQ ID NO: 601549 - RNA, 25 nt, Human
uauuacauugccucuggcuugcacc

SEQ ID NO: 601550 - RNA, 18 nt, Human
uauuugaaggcaagaaca

SEQ ID NO: 601551 - RNA, 22 nt, Human
uauuugaaggcaagaacauuua

SEQ ID NO: 601552 - RNA, 23 nt, Human
ucaagagacccuuucuucucaaa

SEQ ID NO: 601553 - RNA, 19 nt, Human
ucccaacaauaagaacuuc

SEQ ID NO: 601554 - RNA, 23 nt, Human
ucccugacaccagcacuuagccc

SEQ ID NO: 601555 - RNA, 18 nt, Human
uccggcugcucccgcugc

SEQ ID NO: 601556 - RNA, 22 nt, Human
ucuuuuuuccuuucucacuuaa

SEQ ID NO: 601557 - RNA, 23 nt, Human
ugaaagguuugcauuguuguuuu

SEQ ID NO: 601558 - RNA, 21 nt, Human
ugaauauucauucuaagacaa

SEQ ID NO: 601559 - RNA, 22 nt, Human
ugacaagaguagcuuaggacgc

SEQ ID NO: 601560 - RNA, 23 nt, Human
ugagaauauuaagccugaggcua

SEQ ID NO: 601561 - RNA, 21 nt, Human
ugcaagaaaaagaagcugguc

SEQ ID NO: 601562 - RNA, 19 nt, Human
ugccucuggcuugcaccuc

SEQ ID NO: 601563 - RNA, 26 nt, Human
ugcuucagccuugaauaucucgaucc

SEQ ID NO: 601564 - RNA, 23 nt, Human
ugcuuuguuagcuguaacagccu

SEQ ID NO: 601565 - RNA, 23 nt, Human
uggaaacacaagcguauugaaca

SEQ ID NO: 601566 - RNA, 26 nt, Human
ugguagucaggaguucugggaugacu

SEQ ID NO: 601567 - RNA, 26 nt, Human
uguaacugcaagaaaaagaagcuggu

SEQ ID NO: 601568 - RNA, 18 nt, Human
ugucuuuuuuccuuucuc

SEQ ID NO: 601569 - RNA, 20 nt, Human
ugugcucagugaaagaaucc

SEQ ID NO: 601570 - RNA, 27 nt, Human
uguuguagguuucucugggggugaccc

SEQ ID NO: 601571 - RNA, 20 nt, Human
uguuguuuuaguucuucaag

SEQ ID NO: 601572 - RNA, 20 nt, Human
uuagccccuucuaaaaagcu

SEQ ID NO: 601573 - RNA, 20 nt, Human
uucaaguuuuaguuaaaauu

SEQ ID NO: 601574 - RNA, 24 nt, Human
uucacacauacacccccuauuaua

SEQ ID NO: 601575 - RNA, 18 nt, Human
uucacagaagcccaacac

SEQ ID NO: 601576 - RNA, 18 nt, Human
uuccuuuuuucacucuug

SEQ ID NO: 601577 - RNA, 22 nt, Human
uucucuguaaauagugauucac

SEQ ID NO: 601578 - RNA, 23 nt, Human
uuuuuguuuuuuugccaucuguu

SEQ ID NO: 601579 - RNA, 22 nt, Human
aaaccaucaccugguuugcauu

SEQ ID NO: 601580 - RNA, 23 nt, Human
aacucguuuuuuccugaaacuuu

SEQ ID NO: 601581 - RNA, 22 nt, Human
aagcaucucagaaaguggaccc

SEQ ID NO: 601582 - RNA, 18 nt, Human
aaguauaaacucuauucc

SEQ ID NO: 601583 - RNA, 18 nt, Human
aaguaucugggacuacag

SEQ ID NO: 601584 - RNA, 24 nt, Human
aaguaucugggacuacaggcaugu

SEQ ID NO: 601585 - RNA, 19 nt, Human
aagugcugggauuaacagg

SEQ ID NO: 601586 - RNA, 21 nt, Human
aagugcugggauuaacaggug

SEQ ID NO: 601587 - RNA, 24 nt, Human
aagugcugggauuaacagguguga

SEQ ID NO: 601588 - RNA, 24 nt, Human
accauguugcccaggcuggucucg

SEQ ID NO: 601589 - RNA, 25 nt, Human
accauguugcccaggcuggucucga

SEQ ID NO: 601590 - RNA, 22 nt, Human
acccuugaccuccugggcucaa

SEQ ID NO: 601591 - RNA, 23 nt, Human
acuacauaugaaugaggcuacag

SEQ ID NO: 601592 - RNA, 23 nt, Human
agacauuaauccaauuugaauaa

SEQ ID NO: 601593 - RNA, 18 nt, Human
agauucauuuucuugagu

SEQ ID NO: 601594 - RNA, 18 nt, Human
aggcauugaaaccaucac

SEQ ID NO: 601595 - RNA, 19 nt, Human
aggcauugaaaccaucacc

SEQ ID NO: 601596 - RNA, 19 nt, Human
aggcuggagugcaguggca

SEQ ID NO: 601597 - RNA, 22 nt, Human
aggguuucaccauguugcccag

SEQ ID NO: 601598 - RNA, 23 nt, Human
aggguuucaccauguugcccagg

SEQ ID NO: 601599 - RNA, 23 nt, Human
agugcaguggcaugaccucggcu

SEQ ID NO: 601600 - RNA, 24 nt, Human
agugcaguggcaugaccucggcuc

SEQ ID NO: 601601 - RNA, 18 nt, Human
auaggguuucaccauguu

SEQ ID NO: 601602 - RNA, 19 nt, Human
auaggguuucaccauguug

SEQ ID NO: 601603 - RNA, 24 nt, Human
augaaggcuugcuaugcauaaaua

SEQ ID NO: 601604 - RNA, 25 nt, Human
caacaaacaguuauugagcaccugc

SEQ ID NO: 601605 - RNA, 25 nt, Human
caagcgauucucccaucccagccca

SEQ ID NO: 601606 - RNA, 24 nt, Human
caccauguugcccaggcuggucuc

SEQ ID NO: 601607 - RNA, 27 nt, Human
caccauguugcccaggcuggucucgaa

SEQ ID NO: 601608 - RNA, 19 nt, Human
cacuguacccuugaccucc

SEQ ID NO: 601609 - RNA, 24 nt, Human
cagggucuugcucuguugcccagg

SEQ ID NO: 601610 - RNA, 20 nt, Human
caguggcaugaccucggcca

SEQ ID NO: 601611 - RNA, 21 nt, Human
caguggcaugaccucggcuca

SEQ ID NO: 601612 - RNA, 23 nt, Human
cauguugcccaggcuggucucga

SEQ ID NO: 601613 - RNA, 24 nt, Human
cauguugcccaggcuggucucgaa

SEQ ID NO: 601614 - RNA, 19 nt, Human
cauugcacccagccuguua

SEQ ID NO: 601615 - RNA, 21 nt, Human
ccaggccaggcuggagugcag

SEQ ID NO: 601616 - RNA, 22 nt, Human
ccaggcuggagugcaguggcau

SEQ ID NO: 601617 - RNA, 18 nt, Human
ccauugcacccagccugu

SEQ ID NO: 601618 - RNA, 24 nt, Human
cccaaguaucugggacuacaggca

SEQ ID NO: 601619 - RNA, 20 nt, Human
cccaucccagcccacuccca

SEQ ID NO: 601620 - RNA, 19 nt, Human
ccccaccgcccgcuagccc

SEQ ID NO: 601621 - RNA, 19 nt, Human
cccccaccgcccgcuagcc

SEQ ID NO: 601622 - RNA, 22 nt, Human
cccccaccgcccgcuagcccgc

SEQ ID NO: 601623 - RNA, 25 nt, Human
ccgaagugcugggauuaacaggugu

SEQ ID NO: 601624 - RNA, 24 nt, Human
ccuccugggcucaagcgauucucc

SEQ ID NO: 601625 - RNA, 20 nt, Human
ccugggcucaagcgauucuc

SEQ ID NO: 601626 - RNA, 19 nt, Human
ccuugaccuccugggcuca

SEQ ID NO: 601627 - RNA, 25 nt, Human
cgaagugcugggauuaacaggugug

SEQ ID NO: 601628 - RNA, 21 nt, Human
cggagauaggguuucaccaug

SEQ ID NO: 601629 - RNA, 25 nt, Human
cucaagcgauucucccaucccagcc

SEQ ID NO: 601630 - RNA, 24 nt, Human
cucacuguacccuugaccuccugg

SEQ ID NO: 601631 - RNA, 21 nt, Human
cuccugggcucaagcgauucu

SEQ ID NO: 601632 - RNA, 25 nt, Human
cuccugggcucaagcgauucuccca

SEQ ID NO: 601633 - RNA, 23 nt, Human
cucuguugcccaggccaggcugg

SEQ ID NO: 601634 - RNA, 21 nt, Human
cugcuggcgcccccaccgccc

SEQ ID NO: 601635 - RNA, 21 nt, Human
cuguugcccaggccaggcugg

SEQ ID NO: 601636 - RNA, 22 nt, Human
gaagcuguuuguauauuuucag

SEQ ID NO: 601637 - RNA, 24 nt, Human
gaagugcugggauuaacaggugug

SEQ ID NO: 601638 - RNA, 25 nt, Human
gaagugcugggauuaacagguguga

SEQ ID NO: 601639 - RNA, 20 nt, Human
gagacagggucuugcucugu

SEQ ID NO: 601640 - RNA, 20 nt, Human
gauuugagggggagaugaau

SEQ ID NO: 601641 - RNA, 20 nt, Human
gcaucucagaaaguggaccc

SEQ ID NO: 601642 - RNA, 20 nt, Human
gcucaagcgauucucccauc

SEQ ID NO: 601643 - RNA, 19 nt, Human
gcuggagugcaguggcaug

SEQ ID NO: 601644 - RNA, 18 nt, Human
gcuggcgcccccaccgcc

SEQ ID NO: 601645 - RNA, 19 nt, Human
ggacuacaggcaugugcca

SEQ ID NO: 601646 - RNA, 21 nt, Human
ggguuucaccauguugcccag

SEQ ID NO: 601647 - RNA, 22 nt, Human
ggguuucaccauguugcccagg

SEQ ID NO: 601648 - RNA, 22 nt, Human
guacccuugaccuccugggcuc

SEQ ID NO: 601649 - RNA, 21 nt, Human
gugugugugugugugugaagc

SEQ ID NO: 601650 - RNA, 21 nt, Human
gugugugugugugugugugug

SEQ ID NO: 601651 - RNA, 21 nt, Human
gugugugugugugugugugug

SEQ ID NO: 601652 - RNA, 23 nt, Human
uaacaggugugagccauugcacu

SEQ ID NO: 601653 - RNA, 19 nt, Human
uaaguauaaacucuauucc

SEQ ID NO: 601654 - RNA, 19 nt, Human
uaccgcagccauugaugau

SEQ ID NO: 601655 - RNA, 21 nt, Human
uacuuuggagauucauuuucu

SEQ ID NO: 601656 - RNA, 24 nt, Human
uaggguuucaccauguugcccagg

SEQ ID NO: 601657 - RNA, 22 nt, Human
uauuuuaucuucugaugcuuuc

SEQ ID NO: 601658 - RNA, 18 nt, Human
ucaaauaaacucacacag

SEQ ID NO: 601659 - RNA, 19 nt, Human
ucaaauaaacucacacaga

SEQ ID NO: 601660 - RNA, 21 nt, Human
ucaccauguugcccaggcugg

SEQ ID NO: 601661 - RNA, 24 nt, Human
ucacggagauaggguuucaccaug

SEQ ID NO: 601662 - RNA, 23 nt, Human
ucacuguacccuugaccuccugg

SEQ ID NO: 601663 - RNA, 24 nt, Human
ucacuguacccuugaccuccuggg

SEQ ID NO: 601664 - RNA, 25 nt, Human
ucacuuccguucaugaaggcuugcu

SEQ ID NO: 601665 - RNA, 22 nt, Human
ucagaaaguggacccagaaauc

SEQ ID NO: 601666 - RNA, 24 nt, Human
ucccaaguaucugggacuacaggc

SEQ ID NO: 601667 - RNA, 18 nt, Human
ucccgaagugcugggauu

SEQ ID NO: 601668 - RNA, 19 nt, Human
ucccgaagugcugggauua

SEQ ID NO: 601669 - RNA, 24 nt, Human
ucccgaagugcugggauuaacagg

SEQ ID NO: 601670 - RNA, 22 nt, Human
uccuacuaggcuaccgcagcca

SEQ ID NO: 601671 - RNA, 21 nt, Human
uccugggcucaagcgauucuc

SEQ ID NO: 601672 - RNA, 23 nt, Human
uccugggcucaagcgauucuccc

SEQ ID NO: 601673 - RNA, 21 nt, Human
ucucgaacucuugggcccaag

SEQ ID NO: 601674 - RNA, 21 nt, Human
ucugccauuaguauuuauucu

SEQ ID NO: 601675 - RNA, 21 nt, Human
ucugggacuacaggcaugugc

SEQ ID NO: 601676 - RNA, 29 nt, Human
ucuguugcccaggccaggcuggagugcag

SEQ ID NO: 601677 - RNA, 19 nt, Human
ucuugcucuguugcccagg

SEQ ID NO: 601678 - RNA, 23 nt, Human
ucuugcucuguugcccaggccag

SEQ ID NO: 601679 - RNA, 24 nt, Human
ucuugcucuguugcccaggccagg

SEQ ID NO: 601680 - RNA, 27 nt, Human
ucuugcucuguugcccaggccaggcug

SEQ ID NO: 601681 - RNA, 18 nt, Human
ugaaaugcaacaaacagu

SEQ ID NO: 601682 - RNA, 22 nt, Human
ugagacagggucuugcucuguu

SEQ ID NO: 601683 - RNA, 22 nt, Human
ugcaacaaacaguuauugagca

SEQ ID NO: 601684 - RNA, 20 nt, Human
ugcaguggcaugaccucggc

SEQ ID NO: 601685 - RNA, 24 nt, Human
ugcccaggcuggucucgaacucuu

SEQ ID NO: 601686 - RNA, 26 nt, Human
ugcucuguugcccaggccaggcugga

SEQ ID NO: 601687 - RNA, 22 nt, Human
uggaauggagaguuucaaacag

SEQ ID NO: 601688 - RNA, 23 nt, Human
uggagugcaguggcaugaccucg

SEQ ID NO: 601689 - RNA, 24 nt, Human
uggagugcaguggcaugaccucgg

SEQ ID NO: 601690 - RNA, 18 nt, Human
ugggacuacaggcaugug

SEQ ID NO: 601691 - RNA, 21 nt, Human
ugggacuacaggcaugugcca

SEQ ID NO: 601692 - RNA, 22 nt, Human
ugggacuacaggcaugugccac

SEQ ID NO: 601693 - RNA, 24 nt, Human
ugggacuacaggcaugugccacca

SEQ ID NO: 601694 - RNA, 20 nt, Human
ugggauuaacaggugugagc

SEQ ID NO: 601695 - RNA, 22 nt, Human
ugggauuaacaggugugagcca

SEQ ID NO: 601696 - RNA, 23 nt, Human
ugggauuaacaggugugagccau

SEQ ID NO: 601697 - RNA, 25 nt, Human
ugggauuaacaggugugagccauug

SEQ ID NO: 601698 - RNA, 23 nt, Human
ugggcuccagacuucacuguccu

SEQ ID NO: 601699 - RNA, 20 nt, Human
ugguuuuagaaagcaucuca

SEQ ID NO: 601700 - RNA, 24 nt, Human
ugugccaccacucuuggcuaauuu

SEQ ID NO: 601701 - RNA, 22 nt, Human
ugugugugugugugugaagcug

SEQ ID NO: 601702 - RNA, 18 nt, Human
ugugugugugugugugug

SEQ ID NO: 601703 - RNA, 18 nt, Human
ugugugugugugugugug

SEQ ID NO: 601704 - RNA, 18 nt, Human
ugugugugugugugugug

SEQ ID NO: 601705 - RNA, 18 nt, Human
ugugugugugugugugug

SEQ ID NO: 601706 - RNA, 18 nt, Human
ugugugugugugugugug

SEQ ID NO: 601707 - RNA, 18 nt, Human
ugugugugugugugugug

SEQ ID NO: 601708 - RNA, 18 nt, Human
ugugugugugugugugug

SEQ ID NO: 601709 - RNA, 18 nt, Human
ugugugugugugugugug

SEQ ID NO: 601710 - RNA, 18 nt, Human
ugugugugugugugugug

SEQ ID NO: 601711 - RNA, 18 nt, Human
ugugugugugugugugug

SEQ ID NO: 601712 - RNA, 18 nt, Human
ugugugugugugugugug

SEQ ID NO: 601713 - RNA, 21 nt, Human
ugugugugugugugugugugu

SEQ ID NO: 601714 - RNA, 21 nt, Human
ugugugugugugugugugugu

SEQ ID NO: 601715 - RNA, 21 nt, Human
ugugugugugugugugugugu

SEQ ID NO: 601716 - RNA, 21 nt, Human
ugugugugugugugugugugu

SEQ ID NO: 601717 - RNA, 21 nt, Human
ugugugugugugugugugugu

SEQ ID NO: 601718 - RNA, 21 nt, Human
ugugugugugugugugugugu

SEQ ID NO: 601719 - RNA, 21 nt, Human
ugugugugugugugugugugu

SEQ ID NO: 601720 - RNA, 21 nt, Human
ugugugugugugugugugugu

SEQ ID NO: 601721 - RNA, 21 nt, Human
ugugugugugugugugugugu

SEQ ID NO: 601722 - RNA, 21 nt, Human
ugugugugugugugugugugu

SEQ ID NO: 601723 - RNA, 21 nt, Human
ugugugugugugugugugugu

SEQ ID NO: 601724 - RNA, 21 nt, Human
ugugugugugugugugugugu

SEQ ID NO: 601725 - RNA, 21 nt, Human
ugugugugugugugugugugu

SEQ ID NO: 601726 - RNA, 21 nt, Human
ugugugugugugugugugugu

SEQ ID NO: 601727 - RNA, 21 nt, Human
ugugugugugugugugugugu

SEQ ID NO: 601728 - RNA, 21 nt, Human
ugugugugugugugugugugu

SEQ ID NO: 601729 - RNA, 21 nt, Human
ugugugugugugugugugugu

SEQ ID NO: 601730 - RNA, 21 nt, Human
ugugugugugugugugugugu

SEQ ID NO: 601731 - RNA, 21 nt, Human
ugugugugugugugugugugu

SEQ ID NO: 601732 - RNA, 22 nt, Human
ugugugugugugugugugugug

SEQ ID NO: 601733 - RNA, 22 nt, Human
ugugugugugugugugugugug

SEQ ID NO: 601734 - RNA, 22 nt, Human
ugugugugugugugugugugug

SEQ ID NO: 601735 - RNA, 22 nt, Human
ugugugugugugugugugugug

SEQ ID NO: 601736 - RNA, 22 nt, Human
ugugugugugugugugugugug

SEQ ID NO: 601737 - RNA, 22 nt, Human
ugugugugugugugugugugug

SEQ ID NO: 601738 - RNA, 22 nt, Human
ugugugugugugugugugugug

SEQ ID NO: 601739 - RNA, 23 nt, Human
uguugcccaggccaggcuggagu

SEQ ID NO: 601740 - RNA, 18 nt, Human
uucaaaggauguaaaaaa

SEQ ID NO: 601741 - RNA, 26 nt, Human
uuccuuugugugugugugugugugug

SEQ ID NO: 601742 - RNA, 19 nt, Human
uucuuugaagauacuuugg

SEQ ID NO: 601743 - RNA, 18 nt, Human
uuggccucccgaagugcu

SEQ ID NO: 601744 - RNA, 21 nt, Human
uugguuuuagaaagcaucuca

SEQ ID NO: 601745 - RNA, 22 nt, Human
uuucaccauguugcccaggcug

SEQ ID NO: 601746 - RNA, 24 nt, Human
uuucaccauguugcccaggcuggu

SEQ ID NO: 601747 - RNA, 24 nt, Human
uuugugugugugugugugugugug

SEQ ID NO: 601748 - RNA, 23 nt, Human
uuuugaagcacucccuucaaagg

SEQ ID NO: 601749 - RNA, 23 nt, Human
acucccaaaggauguuuucagaa

SEQ ID NO: 601750 - RNA, 19 nt, Human
auugaaucaguauuuugcu

SEQ ID NO: 601751 - RNA, 22 nt, Human
caucacacacccacuuuuucca

SEQ ID NO: 601752 - RNA, 21 nt, Human
ccacgacauucgucuuguuuu

SEQ ID NO: 601753 - RNA, 20 nt, Human
cucauguaacucuuccucac

SEQ ID NO: 601754 - RNA, 20 nt, Human
gaauugaggcagagagaaau

SEQ ID NO: 601755 - RNA, 20 nt, Human
gauacaucacacacccacuu

SEQ ID NO: 601756 - RNA, 18 nt, Human
ucucugcagaauuuguca

SEQ ID NO: 601757 - RNA, 19 nt, Human
ucuucagacacuggggcuc

SEQ ID NO: 601758 - RNA, 29 nt, Human
ugacuuugguuuuuaaaacuaaugaguuu

SEQ ID NO: 601759 - RNA, 24 nt, Human
ugaggcagagagaaaugaaguccu

SEQ ID NO: 601760 - RNA, 27 nt, Human
ugauauguuuaucauaauugauuugaa

SEQ ID NO: 601761 - RNA, 22 nt, Human
uucucauguaacucuuccucac

SEQ ID NO: 601762 - RNA, 19 nt, Human
uucuuugcccuuuacaguu

SEQ ID NO: 601763 - RNA, 26 nt, Human
uuugaaauacucccaaaggauguuuu

SEQ ID NO: 601764 - RNA, 21 nt, Human
aaaacaagaaaaaaaaaaagc

SEQ ID NO: 601765 - RNA, 23 nt, Human
aaacaagaaaaaaaaaaagccca

SEQ ID NO: 601766 - RNA, 18 nt, Human
aaaccagaagaccgagug

SEQ ID NO: 601767 - RNA, 21 nt, Human
aacaaaagguaaauuucaagg

SEQ ID NO: 601768 - RNA, 22 nt, Human
aacaucuauccauucuuguuuc

SEQ ID NO: 601769 - RNA, 23 nt, Human
aagucaauuugcuucuaaaccag

SEQ ID NO: 601770 - RNA, 27 nt, Human
aauaaaaacaagaaaaaaaaaaagccc

SEQ ID NO: 601771 - RNA, 18 nt, Human
aauggcaaagcauaauua

SEQ ID NO: 601772 - RNA, 21 nt, Human
accagaagaccgagugugucu

SEQ ID NO: 601773 - RNA, 22 nt, Human
agaagaaaguccagacuucuaa

SEQ ID NO: 601774 - RNA, 19 nt, Human
agacuucuaacauauucac

SEQ ID NO: 601775 - RNA, 18 nt, Human
aggaagcaggaagacuuu

SEQ ID NO: 601776 - RNA, 22 nt, Human
aggagcuuucaaccugaaauac

SEQ ID NO: 601777 - RNA, 18 nt, Human
auuacguguauggcauca

SEQ ID NO: 601778 - RNA, 26 nt, Human
auuccccuuauguuuaaccucuuuca

SEQ ID NO: 601779 - RNA, 25 nt, Human
caaaacccagcaguaauaggagcuu

SEQ ID NO: 601780 - RNA, 21 nt, Human
caagccaacccagaagguacc

SEQ ID NO: 601781 - RNA, 19 nt, Human
cauucuuguuucgguggaa

SEQ ID NO: 601782 - RNA, 23 nt, Human
ccaaauaaaaacaagaaaaaaaa

SEQ ID NO: 601783 - RNA, 26 nt, Human
ccaaauaaaaacaagaaaaaaaaaaa

SEQ ID NO: 601784 - RNA, 18 nt, Human
ccaacccagaagguaccu

SEQ ID NO: 601785 - RNA, 25 nt, Human
ccagcaguaauaggagcuuucaacc

SEQ ID NO: 601786 - RNA, 23 nt, Human
cccacauucaagaagcaagagag

SEQ ID NO: 601787 - RNA, 22 nt, Human
cccagcaguaauaggagcuuuc

SEQ ID NO: 601788 - RNA, 19 nt, Human
cccauaaacaccuuccuuu

SEQ ID NO: 601789 - RNA, 21 nt, Human
cccauaaacaccuuccuuugg

SEQ ID NO: 601790 - RNA, 21 nt, Human
cccccacauucaagaagcaag

SEQ ID NO: 601791 - RNA, 22 nt, Human
cccccacauucaagaagcaaga

SEQ ID NO: 601792 - RNA, 24 nt, Human
ccuccaaaacccagcaguaauagg

SEQ ID NO: 601793 - RNA, 24 nt, Human
cuugaaacccuauaugacuccagg

SEQ ID NO: 601794 - RNA, 20 nt, Human
gaacgaaauagcaggagugu

SEQ ID NO: 601795 - RNA, 19 nt, Human
gacccaagccaacccagaa

SEQ ID NO: 601796 - RNA, 18 nt, Human
gauuugggugccuuccuu

SEQ ID NO: 601797 - RNA, 23 nt, Human
gcaagugaauggaucauauuugc

SEQ ID NO: 601798 - RNA, 25 nt, Human
gggcaagugaauggaucauauuugc

SEQ ID NO: 601799 - RNA, 19 nt, Human
gucaauuugcuucuaaacc

SEQ ID NO: 601800 - RNA, 18 nt, Human
uaacaaaagguaaauuuc

SEQ ID NO: 601801 - RNA, 20 nt, Human
uaacccuccuaauggagaag

SEQ ID NO: 601802 - RNA, 20 nt, Human
uccauucuuguuucggugga

SEQ ID NO: 601803 - RNA, 21 nt, Human
ucccaaauaaaaacaagaaaa

SEQ ID NO: 601804 - RNA, 19 nt, Human
uccccccauaaacaccuuc

SEQ ID NO: 601805 - RNA, 21 nt, Human
ucuaaaccagaagaccgagug

SEQ ID NO: 601806 - RNA, 19 nt, Human
ucuaacauauucacucaca

SEQ ID NO: 601807 - RNA, 20 nt, Human
ugauuuauagacuauccgua

SEQ ID NO: 601808 - RNA, 21 nt, Human
ugccacaggauaaaguaacaa

SEQ ID NO: 601809 - RNA, 26 nt, Human
ugggugccuuccuuuuuuaagguuuu

SEQ ID NO: 601810 - RNA, 26 nt, Human
ugucccaaauaaaaacaagaaaaaaa

SEQ ID NO: 601811 - RNA, 21 nt, Human
uuccaugaucucuuccugcag

SEQ ID NO: 601812 - RNA, 24 nt, Human
uuccaugaucucuuccugcagguu

SEQ ID NO: 601813 - RNA, 19 nt, Human
uuccuuugggagauuuggg

SEQ ID NO: 601814 - RNA, 18 nt, Human
uugggagauuugggugcc

SEQ ID NO: 601815 - RNA, 19 nt, Human
uuuacgaaaaucuucagcc

SEQ ID NO: 601816 - RNA, 20 nt, Human
uuuacgaaaaucuucagcca

SEQ ID NO: 601817 - RNA, 25 nt, Human
uuugcuagaagucccuuucccccca

SEQ ID NO: 601818 - RNA, 21 nt, Human
uuuuuaagguuuuaaaaacua

SEQ ID NO: 601819 - RNA, 20 nt, Human
aaacaaaccagugcagagaa

SEQ ID NO: 601820 - RNA, 21 nt, Human
aacuuauugcuggaagaaguc

SEQ ID NO: 601821 - RNA, 23 nt, Human
aaucuuucuguaguuguugauuu

SEQ ID NO: 601822 - RNA, 19 nt, Human
auaauucuccuggaggucu

SEQ ID NO: 601823 - RNA, 25 nt, Human
auacuagagucacuuaaucuguaca

SEQ ID NO: 601824 - RNA, 21 nt, Human
caagcgcucuagaaugugaug

SEQ ID NO: 601825 - RNA, 19 nt, Human
ccaagauagugauuuuuuu

SEQ ID NO: 601826 - RNA, 23 nt, Human
cuagcaaagugguuuauucuuuc

SEQ ID NO: 601827 - RNA, 18 nt, Human
cugucuuuucacucucuc

SEQ ID NO: 601828 - RNA, 18 nt, Human
cuuucuguaguuguugau

SEQ ID NO: 601829 - RNA, 20 nt, Human
gaaugugaugagaccucagu

SEQ ID NO: 601830 - RNA, 18 nt, Human
uaaguaguuaaucuaugg

SEQ ID NO: 601831 - RNA, 18 nt, Human
ucaguuccuccucuucca

SEQ ID NO: 601832 - RNA, 19 nt, Human
ucuguacaagaauaccugu

SEQ ID NO: 601833 - RNA, 22 nt, Human
ucuguacaagaauaccugugau

SEQ ID NO: 601834 - RNA, 19 nt, Human
uguaaguaguuaaucuaug

SEQ ID NO: 601835 - RNA, 18 nt, Human
uuccaagauagugauuuu

SEQ ID NO: 601836 - RNA, 19 nt, Human
aaagugcugggauuucagg

SEQ ID NO: 601837 - RNA, 24 nt, Human
aaagugcugggauuucagguguga

SEQ ID NO: 601838 - RNA, 22 nt, Human
aagacagcagcagccacaagcg

SEQ ID NO: 601839 - RNA, 18 nt, Human
aagugcugggauuucagg

SEQ ID NO: 601840 - RNA, 20 nt, Human
aaugaucuuccugccucggc

SEQ ID NO: 601841 - RNA, 23 nt, Human
acaggaguuaagacagcagcagc

SEQ ID NO: 601842 - RNA, 18 nt, Human
acucugugacccaggaug

SEQ ID NO: 601843 - RNA, 23 nt, Human
agccacaagcgcacuuuuaaaca

SEQ ID NO: 601844 - RNA, 18 nt, Human
aguagcugggauuacagg

SEQ ID NO: 601845 - RNA, 24 nt, Human
auagcucacugcaaccuugauuuc

SEQ ID NO: 601846 - RNA, 18 nt, Human
aucauagcucacugcaac

SEQ ID NO: 601847 - RNA, 24 nt, Human
caaagugcugggauuucaggugug

SEQ ID NO: 601848 - RNA, 23 nt, Human
caaccuugauuucccaagcucaa

SEQ ID NO: 601849 - RNA, 22 nt, Human
caaguaaucguccugccucagc

SEQ ID NO: 601850 - RNA, 21 nt, Human
caccaccaggccugacucuuu

SEQ ID NO: 601851 - RNA, 20 nt, Human
cagcagcagccacaagcgca

SEQ ID NO: 601852 - RNA, 23 nt, Human
cagccaguggcugugaugcagcc

SEQ ID NO: 601853 - RNA, 23 nt, Human
cauguuguccagacugguuucaa

SEQ ID NO: 601854 - RNA, 24 nt, Human
cauguuguccagacugguuucaaa

SEQ ID NO: 601855 - RNA, 21 nt, Human
ccaaagugcugggauuucagg

SEQ ID NO: 601856 - RNA, 24 nt, Human
ccaaagugcugggauuucaggugu

SEQ ID NO: 601857 - RNA, 18 nt, Human
ccacaagcgcacuuuuaa

SEQ ID NO: 601858 - RNA, 23 nt, Human
ccacaagcgcacuuuuaaacacg

SEQ ID NO: 601859 - RNA, 23 nt, Human
ccaguggcugugaugcagccaaa

SEQ ID NO: 601860 - RNA, 23 nt, Human
ccauccccggaccuuuucuuuuc

SEQ ID NO: 601861 - RNA, 19 nt, Human
cccaggauggaguguggcc

SEQ ID NO: 601862 - RNA, 23 nt, Human
cccgaguagcugggauuacaggc

SEQ ID NO: 601863 - RNA, 24 nt, Human
cccgaguagcugggauuacaggcg

SEQ ID NO: 601864 - RNA, 22 nt, Human
ccgaguagcugggauuacaggc

SEQ ID NO: 601865 - RNA, 22 nt, Human
ccgguagagauggggucucccc

SEQ ID NO: 601866 - RNA, 23 nt, Human
ccugccucagccucccgaguagc

SEQ ID NO: 601867 - RNA, 24 nt, Human
ccugccucagccucccgaguagcu

SEQ ID NO: 601868 - RNA, 24 nt, Human
ccugccucggccucccaaagugcu

SEQ ID NO: 601869 - RNA, 24 nt, Human
cgguagagauggggucuccccaug

SEQ ID NO: 601870 - RNA, 24 nt, Human
cguccugccucagccucccgagua

SEQ ID NO: 601871 - RNA, 24 nt, Human
cucagccucccgaguagcugggau

SEQ ID NO: 601872 - RNA, 21 nt, Human
cucugugacccaggauggagu

SEQ ID NO: 601873 - RNA, 26 nt, Human
cucuuuuuuuuuuccuccgguagaga

SEQ ID NO: 601874 - RNA, 23 nt, Human
cugcaaccuugauuucccaagcu

SEQ ID NO: 601875 - RNA, 22 nt, Human
cugggauuucaggugugagcca

SEQ ID NO: 601876 - RNA, 23 nt, Human
gagauggggucuccccauguugu

SEQ ID NO: 601877 - RNA, 25 nt, Human
gaguagcugggauuacaggcgcaca

SEQ ID NO: 601878 - RNA, 18 nt, Human
gauuucaggugugagcca

SEQ ID NO: 601879 - RNA, 21 nt, Human
gauuucaggugugagccacca

SEQ ID NO: 601880 - RNA, 19 nt, Human
gcucaaguaaucguccugc

SEQ ID NO: 601881 - RNA, 24 nt, Human
guaaucguccugccucagccuccc

SEQ ID NO: 601882 - RNA, 18 nt, Human
gugcugggauuucaggug

SEQ ID NO: 601883 - RNA, 22 nt, Human
uaagacagcagcagccacaagc

SEQ ID NO: 601884 - RNA, 21 nt, Human
uaccugugcuaaagcaaggcu

SEQ ID NO: 601885 - RNA, 21 nt, Human
uacuuuuuugagacaaggucu

SEQ ID NO: 601886 - RNA, 20 nt, Human
uagcucacugcaaccuugau

SEQ ID NO: 601887 - RNA, 24 nt, Human
uagcucacugcaaccuugauuucc

SEQ ID NO: 601888 - RNA, 27 nt, Human
ucaaugaucuuccugccucggccuccc

SEQ ID NO: 601889 - RNA, 24 nt, Human
ucacugcaaccuugauuucccaag

SEQ ID NO: 601890 - RNA, 28 nt, Human
ucacugcaaccuugauuucgggcccucc

SEQ ID NO: 601891 - RNA, 28 nt, Human
ucacugcaaccuugauuucggguccucc

SEQ ID NO: 601892 - RNA, 20 nt, Human
ucagccucccgaguagcugg

SEQ ID NO: 601893 - RNA, 23 nt, Human
ucccaaagugcugggauuucagg

SEQ ID NO: 601894 - RNA, 24 nt, Human
ucccgaguagcugggauuacaggc

SEQ ID NO: 601895 - RNA, 18 nt, Human
ucggccucccaaagugcu

SEQ ID NO: 601896 - RNA, 20 nt, Human
ucucacucugugacccagga

SEQ ID NO: 601897 - RNA, 24 nt, Human
ucucacucugugacccaggaugga

SEQ ID NO: 601898 - RNA, 27 nt, Human
ugacucuuuuuuuuuuccuccgguaga

SEQ ID NO: 601899 - RNA, 24 nt, Human
ugccucagccucccgaguagcugg

SEQ ID NO: 601900 - RNA, 21 nt, Human
ugccucggccucccaaagugc

SEQ ID NO: 601901 - RNA, 24 nt, Human
ugccucggccucccaaagugcugg

SEQ ID NO: 601902 - RNA, 20 nt, Human
uggcuucuggcuucauaccu

SEQ ID NO: 601903 - RNA, 21 nt, Human
ugggauuacaggcgcacacca

SEQ ID NO: 601904 - RNA, 22 nt, Human
ugggauuacaggcgcacaccac

SEQ ID NO: 601905 - RNA, 24 nt, Human
ugggauuacaggcgcacaccacca

SEQ ID NO: 601906 - RNA, 18 nt, Human
ugggauuucaggugugag

SEQ ID NO: 601907 - RNA, 24 nt, Human
ugggauuucaggugugagccacca

SEQ ID NO: 601908 - RNA, 18 nt, Human
uguccgccaagcacagga

SEQ ID NO: 601909 - RNA, 21 nt, Human
uguuacuuuuuugagacaagg

SEQ ID NO: 601910 - RNA, 19 nt, Human
uucaggugugagccaccau

SEQ ID NO: 601911 - RNA, 22 nt, Human
uuucaaacuccugagcucaaug

SEQ ID NO: 601912 - RNA, 23 nt, Human
uuuuuuuuuuccuccgguagaga

SEQ ID NO: 601913 - RNA, 22 nt, Human
aaaaaaaaaaaaaaaaacaaag

SEQ ID NO: 601914 - RNA, 26 nt, Human
aaaaaaaaaaaaaaaaacaaaguguu

SEQ ID NO: 601915 - RNA, 23 nt, Human
aaaaaaaaaaaaaacaaaguguu

SEQ ID NO: 601916 - RNA, 21 nt, Human
aaaacccuucauccuuugagg

SEQ ID NO: 601917 - RNA, 22 nt, Human
aaguuucugguaagaacaguuc

SEQ ID NO: 601918 - RNA, 25 nt, Human
acagagcaaggaagucugcugaaac

SEQ ID NO: 601919 - RNA, 27 nt, Human
acaguguuggagaggauuuuucagcac

SEQ ID NO: 601920 - RNA, 23 nt, Human
accacagucgcguuucuccgauc

SEQ ID NO: 601921 - RNA, 21 nt, Human
acccaucuucugcuucagcca

SEQ ID NO: 601922 - RNA, 19 nt, Human
acccugcuauucccagccc

SEQ ID NO: 601923 - RNA, 22 nt, Human
acucuuugugaucauuccuccu

SEQ ID NO: 601924 - RNA, 24 nt, Human
agagggggaaaacacaccacuuuu

SEQ ID NO: 601925 - RNA, 19 nt, Human
agagguggggugucaggag

SEQ ID NO: 601926 - RNA, 20 nt, Human
agauccucagaaaucaagag

SEQ ID NO: 601927 - RNA, 21 nt, Human
agcagagaaguuucugguaag

SEQ ID NO: 601928 - RNA, 21 nt, Human
aggugcuuggcugaaucaacg

SEQ ID NO: 601929 - RNA, 23 nt, Human
aucuccauccacaguguuggaga

SEQ ID NO: 601930 - RNA, 21 nt, Human
caaaaaggagcaauccuccug

SEQ ID NO: 601931 - RNA, 26 nt, Human
cacagagcaaggaagucugcugaaac

SEQ ID NO: 601932 - RNA, 24 nt, Human
cagccaguagagguucuaaaacuu

SEQ ID NO: 601933 - RNA, 22 nt, Human
cagccgcuacauaucucuccca

SEQ ID NO: 601934 - RNA, 23 nt, Human
cagggucagccgcuacauaucuc

SEQ ID NO: 601935 - RNA, 22 nt, Human
cauccagaggggaccuccugga

SEQ ID NO: 601936 - RNA, 22 nt, Human
caugcuauuugaaucagaauca

SEQ ID NO: 601937 - RNA, 20 nt, Human
cauggaucaugcuauuugaa

SEQ ID NO: 601938 - RNA, 18 nt, Human
caugucaaccuuuuugca

SEQ ID NO: 601939 - RNA, 25 nt, Human
ccaauuaaaaaaaaaaaaaaaaaaa

SEQ ID NO: 601940 - RNA, 27 nt, Human
ccaauuaaaaaaaaaaaaaaaaaaaca

SEQ ID NO: 601941 - RNA, 29 nt, Human
ccacucuccuucuucucuucuggggagaa

SEQ ID NO: 601942 - RNA, 20 nt, Human
ccagugguuuccgggguccu

SEQ ID NO: 601943 - RNA, 22 nt, Human
ccgcuacauaucucucccaacc

SEQ ID NO: 601944 - RNA, 18 nt, Human
ccugcagacgcucuccuu

SEQ ID NO: 601945 - RNA, 23 nt, Human
ccugcagacgcucuccuuuccag

SEQ ID NO: 601946 - RNA, 23 nt, Human
cuaguucacugacacaucuccca

SEQ ID NO: 601947 - RNA, 21 nt, Human
cuccauacauuuggccaaaaa

SEQ ID NO: 601948 - RNA, 24 nt, Human
cucugugaccuucuuuaacuggcu

SEQ ID NO: 601949 - RNA, 20 nt, Human
cugagauccucagaaaucaa

SEQ ID NO: 601950 - RNA, 21 nt, Human
cugguaagaacaguucaucuc

SEQ ID NO: 601951 - RNA, 21 nt, Human
cuucagggguugcccaccucu

SEQ ID NO: 601952 - RNA, 18 nt, Human
cuugucuccaaagagggg

SEQ ID NO: 601953 - RNA, 24 nt, Human
cuuugaaauccaauuaaaaaaaaa

SEQ ID NO: 601954 - RNA, 20 nt, Human
cuuuuugcaguuucacaaac

SEQ ID NO: 601955 - RNA, 21 nt, Human
gaaaacacaccacuuuuauuu

SEQ ID NO: 601956 - RNA, 24 nt, Human
gcccacugucccugcagacgcucu

SEQ ID NO: 601957 - RNA, 19 nt, Human
ggagagguggggugucagg

SEQ ID NO: 601958 - RNA, 19 nt, Human
gugucaggagcagagaagu

SEQ ID NO: 601959 - RNA, 18 nt, Human
uccaaagagggggaaaac

SEQ ID NO: 601960 - RNA, 22 nt, Human
uccaggcggccuccagugguuu

SEQ ID NO: 601961 - RNA, 22 nt, Human
uccauccacaguguuggagagg

SEQ ID NO: 601962 - RNA, 23 nt, Human
ucccauccuaacuuuggcuuuaa

SEQ ID NO: 601963 - RNA, 19 nt, Human
ucccugcagacgcucuccu

SEQ ID NO: 601964 - RNA, 18 nt, Human
uccuggcuagaaaagggg

SEQ ID NO: 601965 - RNA, 20 nt, Human
ucuuuccuuuugcaaaggaa

SEQ ID NO: 601966 - RNA, 18 nt, Human
ucuuugugaucauuccuc

SEQ ID NO: 601967 - RNA, 24 nt, Human
ugaaacuucugagauccucagaaa

SEQ ID NO: 601968 - RNA, 21 nt, Human
ugcaguuucacaaacagguua

SEQ ID NO: 601969 - RNA, 19 nt, Human
ugcuugguaacagacacau

SEQ ID NO: 601970 - RNA, 20 nt, Human
uggcaucagccaguagaggu

SEQ ID NO: 601971 - RNA, 24 nt, Human
ugucaggagcagagaaguuucugg

SEQ ID NO: 601972 - RNA, 20 nt, Human
ugugaucauuccuccucugu

SEQ ID NO: 601973 - RNA, 20 nt, Human
ugugaucauuccuccucugu

SEQ ID NO: 601974 - RNA, 22 nt, Human
uucacugacacaucucccauaa

SEQ ID NO: 601975 - RNA, 19 nt, Human
uucccagcccucaugcuau

SEQ ID NO: 601976 - RNA, 19 nt, Human
uuuuucagcaccauuccga

SEQ ID NO: 601977 - RNA, 20 nt, Human
aaagaagaaggggcugagag

SEQ ID NO: 601978 - RNA, 20 nt, Human
aagaaggggcugagagccac

SEQ ID NO: 601979 - RNA, 20 nt, Human
aaguuaacaguguugacuau

SEQ ID NO: 601980 - RNA, 25 nt, Human
accaagccugucaagccagguuggg

SEQ ID NO: 601981 - RNA, 19 nt, Human
agaagaaagcuggcuuaca

SEQ ID NO: 601982 - RNA, 22 nt, Human
aggaaagaagaaggggcugaga

SEQ ID NO: 601983 - RNA, 20 nt, Human
aggcaggaaagaagaagggg

SEQ ID NO: 601984 - RNA, 24 nt, Human
aggcaggaaagaagaaggggcuga

SEQ ID NO: 601985 - RNA, 21 nt, Human
auagaagaaagcuggcuuaca

SEQ ID NO: 601986 - RNA, 18 nt, Human
auguaauaacagaucuuc

SEQ ID NO: 601987 - RNA, 26 nt, Human
caauugccagucuugacuccuucuuu

SEQ ID NO: 601988 - RNA, 21 nt, Human
cguaccggaagugcuggugcc

SEQ ID NO: 601989 - RNA, 18 nt, Human
gaaggggcaacuccggaa

SEQ ID NO: 601990 - RNA, 18 nt, Human
gaccaagccugucaagcc

SEQ ID NO: 601991 - RNA, 19 nt, Human
gcaacuccggaaacagcag

SEQ ID NO: 601992 - RNA, 23 nt, Human
gcaacuccggaaacagcagcugc

SEQ ID NO: 601993 - RNA, 21 nt, Human
gcagcagcgaguuuuccguac

SEQ ID NO: 601994 - RNA, 22 nt, Human
ggaaagaagaaggggcugagag

SEQ ID NO: 601995 - RNA, 22 nt, Human
gguaaaauaggauaaucuuuaa

SEQ ID NO: 601996 - RNA, 22 nt, Human
guaauggucucuuagaguuucu

SEQ ID NO: 601997 - RNA, 18 nt, Human
uaaagaaaaagguguuua

SEQ ID NO: 601998 - RNA, 19 nt, Human
uaaguaaaugaccaaguau

SEQ ID NO: 601999 - RNA, 18 nt, Human
uaaguaaauugucaaagg

SEQ ID NO: 602000 - RNA, 19 nt, Human
uagaaaaaugaacucuucu

SEQ ID NO: 602001 - RNA, 26 nt, Human
uaucagauucucuuuucugucaguuu

SEQ ID NO: 602002 - RNA, 26 nt, Human
ugaggcaggaaagaagaaggggcuga

SEQ ID NO: 602003 - RNA, 20 nt, Human
uguaauuugguaaguaaaug

SEQ ID NO: 602004 - RNA, 23 nt, Human
uguaauuugguaaguaaaugacc

SEQ ID NO: 602005 - RNA, 23 nt, Human
ugucaaaggauccagguugacaa

SEQ ID NO: 602006 - RNA, 21 nt, Human
uuaaacauaucauaaacacug

SEQ ID NO: 602007 - RNA, 20 nt, Human
uugcagagaccaagccuguc

SEQ ID NO: 602008 - RNA, 22 nt, Human
uuggggcagcagcgaguuuucc

SEQ ID NO: 602009 - RNA, 22 nt, Human
uuuguaauuugguaaguaaaug

SEQ ID NO: 602010 - RNA, 23 nt, Human
aaaaugauaaauaaaccgaggca

SEQ ID NO: 602011 - RNA, 19 nt, Human
aaagaaacaguccaggagg

SEQ ID NO: 602012 - RNA, 23 nt, Human
aaauccauuuuuggaggagccaa

SEQ ID NO: 602013 - RNA, 18 nt, Human
aaccaugaaacuguauuc

SEQ ID NO: 602014 - RNA, 21 nt, Human
acacugcuguguccugugaaa

SEQ ID NO: 602015 - RNA, 21 nt, Human
accagguacuaugucugcagg

SEQ ID NO: 602016 - RNA, 18 nt, Human
acuuaaaauuagagaggg

SEQ ID NO: 602017 - RNA, 27 nt, Human
agacgucaaggucacucuguuugaacc

SEQ ID NO: 602018 - RNA, 18 nt, Human
agagagggaaaccccaga

SEQ ID NO: 602019 - RNA, 22 nt, Human
agagauaaccucuuugaccuuc

SEQ ID NO: 602020 - RNA, 19 nt, Human
aggagccaaacaggcucaa

SEQ ID NO: 602021 - RNA, 21 nt, Human
auaaccucuuugaccuucagc

SEQ ID NO: 602022 - RNA, 18 nt, Human
auagcaauaaaaugaugu

SEQ ID NO: 602023 - RNA, 24 nt, Human
caaauccauuuuuggaggagccaa

SEQ ID NO: 602024 - RNA, 20 nt, Human
caggacuacuuguuuuccuu

SEQ ID NO: 602025 - RNA, 22 nt, Human
caggauucaguaaacaacaaua

SEQ ID NO: 602026 - RNA, 21 nt, Human
cagggcuuuugaaauuaaaga

SEQ ID NO: 602027 - RNA, 19 nt, Human
ccagaaugacaccagccac

SEQ ID NO: 602028 - RNA, 21 nt, Human
ccagucagacccagaaugaca

SEQ ID NO: 602029 - RNA, 22 nt, Human
ccccagagaccugaguggcacu

SEQ ID NO: 602030 - RNA, 24 nt, Human
ccucuuugaccuucagcaauuuua

SEQ ID NO: 602031 - RNA, 21 nt, Human
cugaguaucauaaaaaguaaa

SEQ ID NO: 602032 - RNA, 21 nt, Human
cuuucuagguuuugccgaaua

SEQ ID NO: 602033 - RNA, 21 nt, Human
gaaagaauuaaaaaccaugaa

SEQ ID NO: 602034 - RNA, 18 nt, Human
ggaggagccaaacaggcu

SEQ ID NO: 602035 - RNA, 21 nt, Human
gggaaaccccagagaccugag

SEQ ID NO: 602036 - RNA, 22 nt, Human
ggucacucuguuugaacccaaa

SEQ ID NO: 602037 - RNA, 26 nt, Human
gucaaggucacucuguuugaaccaag

SEQ ID NO: 602038 - RNA, 26 nt, Human
uaaaaaaaaaucugacauuucccuua

SEQ ID NO: 602039 - RNA, 22 nt, Human
uaaaauuagagagggaaacccc

SEQ ID NO: 602040 - RNA, 21 nt, Human
uacucauguucauguuaucac

SEQ ID NO: 602041 - RNA, 26 nt, Human
uagcaauaaaaugauguccguaaauc

SEQ ID NO: 602042 - RNA, 23 nt, Human
ucacgucuacaaauagcaauaaa

SEQ ID NO: 602043 - RNA, 24 nt, Human
ucagacccagaaugacaccagcca

SEQ ID NO: 602044 - RNA, 22 nt, Human
ucuacacugcuguguccuguga

SEQ ID NO: 602045 - RNA, 23 nt, Human
ugaauaggaacgccugaguggcc

SEQ ID NO: 602046 - RNA, 25 nt, Human
ugcccauccacugaaggcccacaua

SEQ ID NO: 602047 - RNA, 20 nt, Human
uggaggagccaaacaggcuc

SEQ ID NO: 602048 - RNA, 20 nt, Human
uggcaaacaggacuacuugu

SEQ ID NO: 602049 - RNA, 24 nt, Human
ugugaaaugaaccuaauuuuccga

SEQ ID NO: 602050 - RNA, 18 nt, Human
uuaaaaauuuuuccucau

SEQ ID NO: 602051 - RNA, 27 nt, Human
uuaaaaguucuucauccuaauuucuga

SEQ ID NO: 602052 - RNA, 18 nt, Human
uuaauuuacuugggguuu

SEQ ID NO: 602053 - RNA, 18 nt, Human
uucauuuuauuuuuccuu

SEQ ID NO: 602054 - RNA, 18 nt, Human
uuccuggaaaguccuguc

SEQ ID NO: 602055 - RNA, 22 nt, Human
uugaccuucagcaauuuuaaaa

SEQ ID NO: 602056 - RNA, 18 nt, Human
uuggaggagccaaacagg

SEQ ID NO: 602057 - RNA, 23 nt, Human
uuucacaccaggauucaguaaac

SEQ ID NO: 602058 - RNA, 20 nt, Human
aacuaccuucuaaggaaaac

SEQ ID NO: 602059 - RNA, 18 nt, Human
acccuuuuaaauguacuc

SEQ ID NO: 602060 - RNA, 19 nt, Human
accuacccuuggaaacagc

SEQ ID NO: 602061 - RNA, 23 nt, Human
acuuuauuagcuuagucuccacc

SEQ ID NO: 602062 - RNA, 19 nt, Human
ccaaccacaccgcagccgu

SEQ ID NO: 602063 - RNA, 20 nt, Human
gaagccguuaaauuugugcu

SEQ ID NO: 602064 - RNA, 18 nt, Human
uaaauaagaaugacauuu

SEQ ID NO: 602065 - RNA, 19 nt, Human
uaaauaagaaugacauuuu

SEQ ID NO: 602066 - RNA, 18 nt, Human
uuuacuguaguaaccuac

SEQ ID NO: 602067 - RNA, 22 nt, Human
aaaaaaacccauaaagcucaaa

SEQ ID NO: 602068 - RNA, 18 nt, Human
aaaaagcagcagacaccu

SEQ ID NO: 602069 - RNA, 18 nt, Human
aaaaccacaaccucccaa

SEQ ID NO: 602070 - RNA, 19 nt, Human
aaaccacaaccucccaaca

SEQ ID NO: 602071 - RNA, 22 nt, Human
aaacccaccacccacaccccag

SEQ ID NO: 602072 - RNA, 20 nt, Human
aaacucauaggggucguggg

SEQ ID NO: 602073 - RNA, 24 nt, Human
aacaacuucccaacacacaagcca

SEQ ID NO: 602074 - RNA, 24 nt, Human
aacaacuucccaacacaugagcca

SEQ ID NO: 602075 - RNA, 20 nt, Human
aacagaaucccucugcacag

SEQ ID NO: 602076 - RNA, 20 nt, Human
aacauuucuucucugcuuca

SEQ ID NO: 602077 - RNA, 23 nt, Human
aaccccccaacacgcaagccaca

SEQ ID NO: 602078 - RNA, 22 nt, Human
aacuccugcaggcucagcgcac

SEQ ID NO: 602079 - RNA, 21 nt, Human
aacuucccagcaggcacaggc

SEQ ID NO: 602080 - RNA, 21 nt, Human
aagaaauggacgacggaacaa

SEQ ID NO: 602081 - RNA, 24 nt, Human
aagaacuacagugcaagccacgua

SEQ ID NO: 602082 - RNA, 23 nt, Human
aagccacauaaacaacuucccaa

SEQ ID NO: 602083 - RNA, 23 nt, Human
aagccacauaaacaacuucccaa

SEQ ID NO: 602084 - RNA, 23 nt, Human
aaggaaaugaggucagugaccac

SEQ ID NO: 602085 - RNA, 24 nt, Human
aagggcacccccacagcaggaguc

SEQ ID NO: 602086 - RNA, 20 nt, Human
acaagccacgcagaccacaa

SEQ ID NO: 602087 - RNA, 20 nt, Human
acaagccacgcagaccacaa

SEQ ID NO: 602088 - RNA, 21 nt, Human
acacaagccacgcagaccaca

SEQ ID NO: 602089 - RNA, 21 nt, Human
acacaagccacgcagaccaca

SEQ ID NO: 602090 - RNA, 21 nt, Human
acacagaccacaaccccccaa

SEQ ID NO: 602091 - RNA, 21 nt, Human
acacagacugcaaccucccaa

SEQ ID NO: 602092 - RNA, 19 nt, Human
acacaggugccaacagaau

SEQ ID NO: 602093 - RNA, 18 nt, Human
acaggcaucucccagcuc

SEQ ID NO: 602094 - RNA, 20 nt, Human
acaguaucugucugucuggu

SEQ ID NO: 602095 - RNA, 23 nt, Human
acagugcaagccacguagaccac

SEQ ID NO: 602096 - RNA, 22 nt, Human
accacaaccucccaacacacaa

SEQ ID NO: 602097 - RNA, 21 nt, Human
accacccacaccccaguucug

SEQ ID NO: 602098 - RNA, 23 nt, Human
accacccacaccccaguucugug

SEQ ID NO: 602099 - RNA, 19 nt, Human
accucgcaacacgcaagcc

SEQ ID NO: 602100 - RNA, 21 nt, Human
acgcagaccacaaccucccaa

SEQ ID NO: 602101 - RNA, 21 nt, Human
acgcagaccacgaccucccaa

SEQ ID NO: 602102 - RNA, 21 nt, Human
acggggcuguguacagagacu

SEQ ID NO: 602103 - RNA, 21 nt, Human
acggggcuguguacagagacu

SEQ ID NO: 602104 - RNA, 18 nt, Human
agaacaaacgccagaggg

SEQ ID NO: 602105 - RNA, 18 nt, Human
agacaagaaauggacgac

SEQ ID NO: 602106 - RNA, 21 nt, Human
agacaagaaauggacgacgga

SEQ ID NO: 602107 - RNA, 21 nt, Human
agacaauucauuaccuccccg

SEQ ID NO: 602108 - RNA, 23 nt, Human
agacacacacaacaggcaucucc

SEQ ID NO: 602109 - RNA, 19 nt, Human
agaccacaaccccccaaca

SEQ ID NO: 602110 - RNA, 18 nt, Human
agaccacaaccuccagca

SEQ ID NO: 602111 - RNA, 19 nt, Human
agaccacaaccucccaaca

SEQ ID NO: 602112 - RNA, 19 nt, Human
agaccacaaccucccaaca

SEQ ID NO: 602113 - RNA, 19 nt, Human
agacugcaaccucccaaca

SEQ ID NO: 602114 - RNA, 24 nt, Human
agagggcuucacccagaacccagg

SEQ ID NO: 602115 - RNA, 21 nt, Human
agcacacaagccacauaaaca

SEQ ID NO: 602116 - RNA, 21 nt, Human
agcacacaagccacauaaaca

SEQ ID NO: 602117 - RNA, 23 nt, Human
agccaagcagacaaccgcccaac

SEQ ID NO: 602118 - RNA, 21 nt, Human
agccacgcagaccacgaccuc

SEQ ID NO: 602119 - RNA, 18 nt, Human
agccacgcagaccgcaac

SEQ ID NO: 602120 - RNA, 18 nt, Human
agccacguagaccacaac

SEQ ID NO: 602121 - RNA, 21 nt, Human
agccacguagaccacaaccuc

SEQ ID NO: 602122 - RNA, 19 nt, Human
agcccagcguggugaagcc

SEQ ID NO: 602123 - RNA, 22 nt, Human
agcgaccccaggacaguggggc

SEQ ID NO: 602124 - RNA, 20 nt, Human
aggaggauccaggaagagga

SEQ ID NO: 602125 - RNA, 18 nt, Human
aggccacaaccuccagca

SEQ ID NO: 602126 - RNA, 23 nt, Human
agggcagccaccuggccugagaa

SEQ ID NO: 602127 - RNA, 21 nt, Human
agggccccacgcugaccucug

SEQ ID NO: 602128 - RNA, 18 nt, Human
agggcuggagccacacgu

SEQ ID NO: 602129 - RNA, 21 nt, Human
agugaccacguggccuccacg

SEQ ID NO: 602130 - RNA, 24 nt, Human
auacagaccacugcaacuucccaa

SEQ ID NO: 602131 - RNA, 23 nt, Human
augaaacaccagcggcagcccug

SEQ ID NO: 602132 - RNA, 19 nt, Human
augacaaaaacucuacacg

SEQ ID NO: 602133 - RNA, 20 nt, Human
auguggcaauuccagggcug

SEQ ID NO: 602134 - RNA, 21 nt, Human
caaaaaccacaaccucccaac

SEQ ID NO: 602135 - RNA, 27 nt, Human
caaaaagcagcagacaccucugaaaug

SEQ ID NO: 602136 - RNA, 24 nt, Human
caaaagaacuacagugcaagccac

SEQ ID NO: 602137 - RNA, 24 nt, Human
caacaagcagggcuuaaugggggu

SEQ ID NO: 602138 - RNA, 21 nt, Human
caacaccagcacccccacugg

SEQ ID NO: 602139 - RNA, 22 nt, Human
caacacccagugacagagacac

SEQ ID NO: 602140 - RNA, 22 nt, Human
caagcagacaaccgcccaacac

SEQ ID NO: 602141 - RNA, 22 nt, Human
caagcagacaacugcccaacac

SEQ ID NO: 602142 - RNA, 26 nt, Human
caagccacaaaaaccacaaccuccca

SEQ ID NO: 602143 - RNA, 21 nt, Human
caagccacgcagaccacaacc

SEQ ID NO: 602144 - RNA, 21 nt, Human
caagccacgcagaccacaacu

SEQ ID NO: 602145 - RNA, 21 nt, Human
caagccacguagaccacaacc

SEQ ID NO: 602146 - RNA, 24 nt, Human
cacaaacuaugacaggaacacacu

SEQ ID NO: 602147 - RNA, 18 nt, Human
cacacaagccacauaaac

SEQ ID NO: 602148 - RNA, 20 nt, Human
cacacgugaugcucggacac

SEQ ID NO: 602149 - RNA, 23 nt, Human
cacagacaauucauuaccucccc

SEQ ID NO: 602150 - RNA, 19 nt, Human
cacagaccacaacccccca

SEQ ID NO: 602151 - RNA, 20 nt, Human
cacagaccacaaccccccaa

SEQ ID NO: 602152 - RNA, 19 nt, Human
cacagagcacugcaacuuc

SEQ ID NO: 602153 - RNA, 19 nt, Human
cacagcaggagucauaaaa

SEQ ID NO: 602154 - RNA, 18 nt, Human
caccacccacaccccagu

SEQ ID NO: 602155 - RNA, 21 nt, Human
cacgcaagccacaaaaaccac

SEQ ID NO: 602156 - RNA, 22 nt, Human
cacgcaagccacaaaaaccaca

SEQ ID NO: 602157 - RNA, 27 nt, Human
cacgcaagccacacagagcacugcaac

SEQ ID NO: 602158 - RNA, 22 nt, Human
cacgcagaccacaaccucccaa

SEQ ID NO: 602159 - RNA, 22 nt, Human
cacgcagaccacaaccucccaa

SEQ ID NO: 602160 - RNA, 24 nt, Human
cacgcagcucugcagccuggccac

SEQ ID NO: 602161 - RNA, 22 nt, Human
cacgcuguagagcaggcucccg

SEQ ID NO: 602162 - RNA, 21 nt, Human
cagaacccagguccuggcuuc

SEQ ID NO: 602163 - RNA, 22 nt, Human
cagacuugggguucaaggggga

SEQ ID NO: 602164 - RNA, 20 nt, Human
cagagcaaggcuguccaaaa

SEQ ID NO: 602165 - RNA, 26 nt, Human
cagcacaaaugaaaugaagaccaaca

SEQ ID NO: 602166 - RNA, 24 nt, Human
cagcagacaccucugaaaugcccc

SEQ ID NO: 602167 - RNA, 20 nt, Human
cagcaggucagcauggcacu

SEQ ID NO: 602168 - RNA, 18 nt, Human
cagccuggcccugugcuc

SEQ ID NO: 602169 - RNA, 19 nt, Human
cagcgcacacugcacgccu

SEQ ID NO: 602170 - RNA, 23 nt, Human
cagcgcagcacaaaugaaaugaa

SEQ ID NO: 602171 - RNA, 23 nt, Human
cagcgguuggcugggcuccagug

SEQ ID NO: 602172 - RNA, 19 nt, Human
cagcguccggcucggccgu

SEQ ID NO: 602173 - RNA, 22 nt, Human
caggacaguggggcagacagag

SEQ ID NO: 602174 - RNA, 20 nt, Human
caggagccacgugaacacag

SEQ ID NO: 602175 - RNA, 21 nt, Human
caggaucaaaguccuugucug

SEQ ID NO: 602176 - RNA, 21 nt, Human
caggcaaaaagcagcagacac

SEQ ID NO: 602177 - RNA, 24 nt, Human
caucaaggaaaugaggucagugac

SEQ ID NO: 602178 - RNA, 21 nt, Human
cauuuaaaaacccaccaccca

SEQ ID NO: 602179 - RNA, 18 nt, Human
ccaacacaugagccaagc

SEQ ID NO: 602180 - RNA, 19 nt, Human
ccaacaccagcacccccac

SEQ ID NO: 602181 - RNA, 18 nt, Human
ccaacacgugagccaagc

SEQ ID NO: 602182 - RNA, 23 nt, Human
ccaaccuuggcuucaucuggagg

SEQ ID NO: 602183 - RNA, 20 nt, Human
ccacaaaaaccacaaccucc

SEQ ID NO: 602184 - RNA, 21 nt, Human
ccacagcaggagucauaaaaa

SEQ ID NO: 602185 - RNA, 24 nt, Human
ccaccacaaagaccaucuguggca

SEQ ID NO: 602186 - RNA, 22 nt, Human
ccaccaccacaaagaccaucug

SEQ ID NO: 602187 - RNA, 27 nt, Human
ccagaacccagguccuggcuucuacac

SEQ ID NO: 602188 - RNA, 22 nt, Human
ccagcacacaagccacauaaac

SEQ ID NO: 602189 - RNA, 24 nt, Human
ccagcacccccacuggaauaacaa

SEQ ID NO: 602190 - RNA, 24 nt, Human
ccagccuggcccugugcuccccaa

SEQ ID NO: 602191 - RNA, 19 nt, Human
ccagcggcagcccugccag

SEQ ID NO: 602192 - RNA, 22 nt, Human
ccagcuccuucuucaccuuccc

SEQ ID NO: 602193 - RNA, 21 nt, Human
ccaggaagaggaggcacuggu

SEQ ID NO: 602194 - RNA, 19 nt, Human
ccauggccugccugggaga

SEQ ID NO: 602195 - RNA, 24 nt, Human
cccaacacacaagccacgcagacc

SEQ ID NO: 602196 - RNA, 24 nt, Human
cccaacacacaagccacgcagacc

SEQ ID NO: 602197 - RNA, 25 nt, Human
cccaaccuuggcuucaucuggaggc

SEQ ID NO: 602198 - RNA, 18 nt, Human
cccaccaccacaaagacc

SEQ ID NO: 602199 - RNA, 18 nt, Human
cccaccacccacacccca

SEQ ID NO: 602200 - RNA, 23 nt, Human
cccagccuggcccugugccgguu

SEQ ID NO: 602201 - RNA, 20 nt, Human
ccccauggcccugcuauagg

SEQ ID NO: 602202 - RNA, 21 nt, Human
cccccaacacgcaagccacaa

SEQ ID NO: 602203 - RNA, 24 nt, Human
cccccaacacgcaagccacaaaaa

SEQ ID NO: 602204 - RNA, 20 nt, Human
ccgccgcgcuccgccugugc

SEQ ID NO: 602205 - RNA, 22 nt, Human
ccgccgcgcuccgccugugcuu

SEQ ID NO: 602206 - RNA, 23 nt, Human
ccuaggguguccccaaccuuggc

SEQ ID NO: 602207 - RNA, 22 nt, Human
ccuccccgcggcugcuucccgc

SEQ ID NO: 602208 - RNA, 22 nt, Human
ccugacggcaggcggcuccagc

SEQ ID NO: 602209 - RNA, 25 nt, Human
ccuuacaucaacaauauguggugau

SEQ ID NO: 602210 - RNA, 22 nt, Human
ccuuaugugugucugauccgga

SEQ ID NO: 602211 - RNA, 21 nt, Human
cgaagauuaggagacaagucc

SEQ ID NO: 602212 - RNA, 23 nt, Human
cgagaacugggaauauaaagaua

SEQ ID NO: 602213 - RNA, 24 nt, Human
cgagggaacuggaaguuuccgugu

SEQ ID NO: 602214 - RNA, 21 nt, Human
cggcagcccugccagaggcac

SEQ ID NO: 602215 - RNA, 22 nt, Human
cggcaggcggcuccagcccuca

SEQ ID NO: 602216 - RNA, 21 nt, Human
cggccgagagccgccgcgcuc

SEQ ID NO: 602217 - RNA, 21 nt, Human
cgggcaggcagaacacacucc

SEQ ID NO: 602218 - RNA, 25 nt, Human
cucagccuuggcucccaccaagcuc

SEQ ID NO: 602219 - RNA, 22 nt, Human
cuccagcacacaagccacauaa

SEQ ID NO: 602220 - RNA, 22 nt, Human
cuccagcacacaagccacauaa

SEQ ID NO: 602221 - RNA, 21 nt, Human
cuccucaccccagccuggccc

SEQ ID NO: 602222 - RNA, 20 nt, Human
cuccucaggguucacggggc

SEQ ID NO: 602223 - RNA, 20 nt, Human
cuccucaggguucacggggc

SEQ ID NO: 602224 - RNA, 23 nt, Human
cuccucaggguucguggggcuug

SEQ ID NO: 602225 - RNA, 18 nt, Human
cugaaacaaaaaccuuca

SEQ ID NO: 602226 - RNA, 19 nt, Human
cugaccucuggaucccggu

SEQ ID NO: 602227 - RNA, 20 nt, Human
cuggucccucucggaggcgu

SEQ ID NO: 602228 - RNA, 24 nt, Human
cuucacccagaacccagguccugg

SEQ ID NO: 602229 - RNA, 21 nt, Human
cuucccagguggugcuggucc

SEQ ID NO: 602230 - RNA, 20 nt, Human
cuugaggucccuuaaaauuc

SEQ ID NO: 602231 - RNA, 19 nt, Human
cuugggguucaagggggaa

SEQ ID NO: 602232 - RNA, 23 nt, Human
gaaacaaaaaccuucacccacga

SEQ ID NO: 602233 - RNA, 19 nt, Human
gaaaggagagcguggucag

SEQ ID NO: 602234 - RNA, 22 nt, Human
gaacaaacgccagagggccccu

SEQ ID NO: 602235 - RNA, 24 nt, Human
gaacaaacgccagagggccccuca

SEQ ID NO: 602236 - RNA, 20 nt, Human
gaacaaacgcucuggacaua

SEQ ID NO: 602237 - RNA, 21 nt, Human
gaagcccagcguggugaagcc

SEQ ID NO: 602238 - RNA, 19 nt, Human
gacacgauggccacacgcc

SEQ ID NO: 602239 - RNA, 18 nt, Human
gaccaucuguggcaggag

SEQ ID NO: 602240 - RNA, 19 nt, Human
gacucaccggcaacagcag

SEQ ID NO: 602241 - RNA, 18 nt, Human
gagcaggcucccgucccc

SEQ ID NO: 602242 - RNA, 20 nt, Human
gaggcguuggacagggagcu

SEQ ID NO: 602243 - RNA, 22 nt, Human
gcaagccacaaaaaccacaacc

SEQ ID NO: 602244 - RNA, 24 nt, Human
gcacccccacagcaggagucauaa

SEQ ID NO: 602245 - RNA, 21 nt, Human
gcacugcaacuucccagcagg

SEQ ID NO: 602246 - RNA, 19 nt, Human
gcagaccacaaccucccaa

SEQ ID NO: 602247 - RNA, 19 nt, Human
gcagaccacaacuucccaa

SEQ ID NO: 602248 - RNA, 19 nt, Human
gcagaccacaacuucccaa

SEQ ID NO: 602249 - RNA, 22 nt, Human
gccaagcagacaacugcccaac

SEQ ID NO: 602250 - RNA, 20 nt, Human
gccacacagacugcaaccuc

SEQ ID NO: 602251 - RNA, 23 nt, Human
gcugaaacaaaaaccuucaccca

SEQ ID NO: 602252 - RNA, 19 nt, Human
gcuucccagguggugcugg

SEQ ID NO: 602253 - RNA, 18 nt, Human
ggacagggagcugagguu

SEQ ID NO: 602254 - RNA, 21 nt, Human
ggacagggagcugagguugga

SEQ ID NO: 602255 - RNA, 20 nt, Human
ggcaggcagaacacacuccu

SEQ ID NO: 602256 - RNA, 20 nt, Human
ggccccaccaccacaaagac

SEQ ID NO: 602257 - RNA, 25 nt, Human
ggcccugggggagaggcggaagguc

SEQ ID NO: 602258 - RNA, 18 nt, Human
ggcuuggagacucugcug

SEQ ID NO: 602259 - RNA, 21 nt, Human
gggcaggcagaacacacuccu

SEQ ID NO: 602260 - RNA, 21 nt, Human
gguguccccaaccuuggcuuc

SEQ ID NO: 602261 - RNA, 22 nt, Human
guaaacacaggugccaacagaa

SEQ ID NO: 602262 - RNA, 21 nt, Human
guagagcaggcucccgucccc

SEQ ID NO: 602263 - RNA, 21 nt, Human
gucuccuccucaucagcgucc

SEQ ID NO: 602264 - RNA, 23 nt, Human
guggugcagacacacacaacagg

SEQ ID NO: 602265 - RNA, 24 nt, Human
uaaaaacccaccacccacacccca

SEQ ID NO: 602266 - RNA, 19 nt, Human
uacagaaugaggccagaca

SEQ ID NO: 602267 - RNA, 23 nt, Human
uacagaccacugcaacuucccaa

SEQ ID NO: 602268 - RNA, 22 nt, Human
uagaaagggcacccccacagca

SEQ ID NO: 602269 - RNA, 20 nt, Human
uaggacuucaucgacaugaa

SEQ ID NO: 602270 - RNA, 20 nt, Human
uaggguguccccaaccuugg

SEQ ID NO: 602271 - RNA, 21 nt, Human
uaggguguccccaaccuuggc

SEQ ID NO: 602272 - RNA, 24 nt, Human
ucaaauggcugucgucagggucca

SEQ ID NO: 602273 - RNA, 22 nt, Human
ucaacacccagugacagagaca

SEQ ID NO: 602274 - RNA, 19 nt, Human
ucaccggcaacagcagagc

SEQ ID NO: 602275 - RNA, 23 nt, Human
ucagagcccacaggauggccagg

SEQ ID NO: 602276 - RNA, 22 nt, Human
uccacgaugcaugaaacaccag

SEQ ID NO: 602277 - RNA, 28 nt, Human
uccagggcugaaacacagaccggggucc

SEQ ID NO: 602278 - RNA, 19 nt, Human
uccaucaaggaaaugaggu

SEQ ID NO: 602279 - RNA, 19 nt, Human
ucccaacacaugagccaag

SEQ ID NO: 602280 - RNA, 18 nt, Human
ucccaccaagcucagccg

SEQ ID NO: 602281 - RNA, 20 nt, Human
uccccaaccuuggcuucauc

SEQ ID NO: 602282 - RNA, 18 nt, Human
uccccauggcccugcuau

SEQ ID NO: 602283 - RNA, 25 nt, Human
uccuaggguguccccaaccuuggcu

SEQ ID NO: 602284 - RNA, 22 nt, Human
uccuggcuucuacacaaggcuc

SEQ ID NO: 602285 - RNA, 21 nt, Human
ucuacacgugcaaaauaaaac

SEQ ID NO: 602286 - RNA, 21 nt, Human
ucucccagcucuaucugcaga

SEQ ID NO: 602287 - RNA, 22 nt, Human
ucucgucuuugaagcccagcgu

SEQ ID NO: 602288 - RNA, 24 nt, Human
ucucucgucuuugaagcccagcgu

SEQ ID NO: 602289 - RNA, 21 nt, Human
ucugaaaugcccccacuucag

SEQ ID NO: 602290 - RNA, 19 nt, Human
ucugcagagggcuucaccc

SEQ ID NO: 602291 - RNA, 21 nt, Human
ucugcagccuggccacacacc

SEQ ID NO: 602292 - RNA, 19 nt, Human
ucuggaaggaagcacugcc

SEQ ID NO: 602293 - RNA, 19 nt, Human
ucugucccucaggaggggc

SEQ ID NO: 602294 - RNA, 22 nt, Human
ucuguguacaggccaucaggag

SEQ ID NO: 602295 - RNA, 21 nt, Human
ucuuaggcuccccauggcccu

SEQ ID NO: 602296 - RNA, 22 nt, Human
ugaaacacagacugcagagcaa

SEQ ID NO: 602297 - RNA, 25 nt, Human
ugaaacaccagcggcagcccugcca

SEQ ID NO: 602298 - RNA, 24 nt, Human
ugaaacaccagcggcagcuggagc

SEQ ID NO: 602299 - RNA, 21 nt, Human
ugaaagcacauuuguccaaga

SEQ ID NO: 602300 - RNA, 24 nt, Human
ugaaagcacauuuguccaagaaca

SEQ ID NO: 602301 - RNA, 21 nt, Human
ugaaaugaaaccugcaaggau

SEQ ID NO: 602302 - RNA, 21 nt, Human
ugacaaaaacucuacacgugc

SEQ ID NO: 602303 - RNA, 22 nt, Human
ugacacgauggccacacgcccu

SEQ ID NO: 602304 - RNA, 23 nt, Human
ugacacgauggccauauggccuu

SEQ ID NO: 602305 - RNA, 19 nt, Human
ugaccacgcuguagagcag

SEQ ID NO: 602306 - RNA, 31 nt, Human
ugaccacgcuguagagcaggcucccgucccc

SEQ ID NO: 602307 - RNA, 22 nt, Human
ugaccucuggaucccgguggcu

SEQ ID NO: 602308 - RNA, 21 nt, Human
ugagccacacagaccacaacc

SEQ ID NO: 602309 - RNA, 21 nt, Human
ugagccacgcaggccacaacc

SEQ ID NO: 602310 - RNA, 25 nt, Human
ugaggucagugaccacguggccucc

SEQ ID NO: 602311 - RNA, 25 nt, Human
ugaggucagugaccacguggccucc

SEQ ID NO: 602312 - RNA, 20 nt, Human
ugcacaguguccauguaugu

SEQ ID NO: 602313 - RNA, 18 nt, Human
ugcagcagggccuccauc

SEQ ID NO: 602314 - RNA, 20 nt, Human
ugccaaggagaaccucuuag

SEQ ID NO: 602315 - RNA, 25 nt, Human
ugccaaggagaaccucuuaggcucc

SEQ ID NO: 602316 - RNA, 22 nt, Human
ugccagaaaggagagcgugguc

SEQ ID NO: 602317 - RNA, 18 nt, Human
ugccagaggcaccuggac

SEQ ID NO: 602318 - RNA, 21 nt, Human
uggagaauguggcaauuccag

SEQ ID NO: 602319 - RNA, 20 nt, Human
uggccccugcgaggccccuu

SEQ ID NO: 602320 - RNA, 20 nt, Human
uggggcuuggagacucugcu

SEQ ID NO: 602321 - RNA, 18 nt, Human
ugggggcagcuccccacc

SEQ ID NO: 602322 - RNA, 21 nt, Human
uggugaucacuuagcaauguu

SEQ ID NO: 602323 - RNA, 24 nt, Human
uggugugugcagacuugggguuca

SEQ ID NO: 602324 - RNA, 19 nt, Human
ugugcuccccaauggcccc

SEQ ID NO: 602325 - RNA, 19 nt, Human
uguggcaauuccagggcug

SEQ ID NO: 602326 - RNA, 22 nt, Human
ugugggggcagcuccccaccgc

SEQ ID NO: 602327 - RNA, 21 nt, Human
uguggugcagacacacacaac

SEQ ID NO: 602328 - RNA, 18 nt, Human
uguuuucagcucauacca

SEQ ID NO: 602329 - RNA, 22 nt, Human
uuagccugcagcagggccucca

SEQ ID NO: 602330 - RNA, 22 nt, Human
uucaugggaacauuucuucucu

SEQ ID NO: 602331 - RNA, 23 nt, Human
uucauuaccuccccgcggcugcu

SEQ ID NO: 602332 - RNA, 24 nt, Human
uugaagacuuaauaugaaaaaaac

SEQ ID NO: 602333 - RNA, 23 nt, Human
uuggcugggcuccagugcaaggg

SEQ ID NO: 602334 - RNA, 24 nt, Human
aaagugaacaaacuaaagucagaa

SEQ ID NO: 602335 - RNA, 24 nt, Human
aaauaucaaaagucccagggaacc

SEQ ID NO: 602336 - RNA, 21 nt, Human
aagaagaaaauacacuguuua

SEQ ID NO: 602337 - RNA, 27 nt, Human
aagaagaaaauacacuguuuaucuggg

SEQ ID NO: 602338 - RNA, 24 nt, Human
aaguaacugggauuacaggugugu

SEQ ID NO: 602339 - RNA, 26 nt, Human
aaguaacugggauuacaggugugugc

SEQ ID NO: 602340 - RNA, 18 nt, Human
aagugcugggauuacagg

SEQ ID NO: 602341 - RNA, 18 nt, Human
aagugcugggauuacagg

SEQ ID NO: 602342 - RNA, 19 nt, Human
aagugcugggauuacaggu

SEQ ID NO: 602343 - RNA, 23 nt, Human
aagugcugggauuacagguguga

SEQ ID NO: 602344 - RNA, 26 nt, Human
aagugcugggauuacaggugugagcc

SEQ ID NO: 602345 - RNA, 20 nt, Human
acuaaagucagaagcaggug

SEQ ID NO: 602346 - RNA, 18 nt, Human
acugaaagagcagccaaa

SEQ ID NO: 602347 - RNA, 22 nt, Human
acugcaaccuccgccucccggg

SEQ ID NO: 602348 - RNA, 24 nt, Human
agaaaguggcaaacuacuggaaaa

SEQ ID NO: 602349 - RNA, 18 nt, Human
agccacugugcccagccc

SEQ ID NO: 602350 - RNA, 24 nt, Human
agcgauucuugugccucagccucc

SEQ ID NO: 602351 - RNA, 20 nt, Human
agugcugggauuacaggugu

SEQ ID NO: 602352 - RNA, 24 nt, Human
auccuaagccauacggcaggcccu

SEQ ID NO: 602353 - RNA, 23 nt, Human
aucugcccaccucagcuucccca

SEQ ID NO: 602354 - RNA, 18 nt, Human
augggguuucgccauguu

SEQ ID NO: 602355 - RNA, 24 nt, Human
augggguuucgccauguugaccag

SEQ ID NO: 602356 - RNA, 24 nt, Human
auuuuuguauuuuuaguagagaug

SEQ ID NO: 602357 - RNA, 26 nt, Human
caaaaaaaaaaaaaagaagaaaauac

SEQ ID NO: 602358 - RNA, 27 nt, Human
caagcgauucuugugccucagccuccc

SEQ ID NO: 602359 - RNA, 24 nt, Human
caccacgcccagcuaauuuuugua

SEQ ID NO: 602360 - RNA, 24 nt, Human
caccucagcuuccccaagugcugg

SEQ ID NO: 602361 - RNA, 20 nt, Human
cacugugcccagcccaaagu

SEQ ID NO: 602362 - RNA, 24 nt, Human
cagagucucccucuguugcccagg

SEQ ID NO: 602363 - RNA, 18 nt, Human
cagcagggcgaucuuggc

SEQ ID NO: 602364 - RNA, 24 nt, Human
cauguugaccaggcuggucuagaa

SEQ ID NO: 602365 - RNA, 20 nt, Human
cauuauuguaaugcagaaca

SEQ ID NO: 602366 - RNA, 23 nt, Human
ccaaaaaaaaaaaaaagaagaaa

SEQ ID NO: 602367 - RNA, 24 nt, Human
ccaaaaaaaaaaaaaagaagaaaa

SEQ ID NO: 602368 - RNA, 21 nt, Human
ccaaguaacugggauuacagg

SEQ ID NO: 602369 - RNA, 24 nt, Human
ccaaguaacugggauuacaggugu

SEQ ID NO: 602370 - RNA, 20 nt, Human
ccaagugcugggauuacagg

SEQ ID NO: 602371 - RNA, 20 nt, Human
ccaagugcugggauuacagg

SEQ ID NO: 602372 - RNA, 24 nt, Human
ccaagugcugggauuacaggugug

SEQ ID NO: 602373 - RNA, 20 nt, Human
ccaccacgcccagcuaauuu

SEQ ID NO: 602374 - RNA, 19 nt, Human
ccacugugcccagcccaaa

SEQ ID NO: 602375 - RNA, 19 nt, Human
ccacugugcccagcccaaa

SEQ ID NO: 602376 - RNA, 20 nt, Human
ccauguugaccaggcugguc

SEQ ID NO: 602377 - RNA, 19 nt, Human
cccaaguaacugggauuac

SEQ ID NO: 602378 - RNA, 22 nt, Human
cccaaguaacugggauuacagg

SEQ ID NO: 602379 - RNA, 21 nt, Human
cccaagugcugggauuacagg

SEQ ID NO: 602380 - RNA, 24 nt, Human
cccaagugcugggauuacaggugu

SEQ ID NO: 602381 - RNA, 18 nt, Human
cccaggcuggagugcagc

SEQ ID NO: 602382 - RNA, 22 nt, Human
ccccaagugcugggauuacagg

SEQ ID NO: 602383 - RNA, 20 nt, Human
cccggguucaagcgauucuu

SEQ ID NO: 602384 - RNA, 24 nt, Human
cccucuguugcccaggcuggagug

SEQ ID NO: 602385 - RNA, 24 nt, Human
ccgccucccggguucaagcgauuc

SEQ ID NO: 602386 - RNA, 22 nt, Human
ccucccggguucaagcgauucu

SEQ ID NO: 602387 - RNA, 20 nt, Human
cgauucuugugccucagccu

SEQ ID NO: 602388 - RNA, 22 nt, Human
cgccauguugaccaggcugguc

SEQ ID NO: 602389 - RNA, 27 nt, Human
cgccauguugaccaggcuggucuagaa

SEQ ID NO: 602390 - RNA, 23 nt, Human
cuagaacuccugaccucaacuga

SEQ ID NO: 602391 - RNA, 22 nt, Human
cuagccucauuauggcaaugaa

SEQ ID NO: 602392 - RNA, 20 nt, Human
cucaccaaaaaaaaaaaaaa

SEQ ID NO: 602393 - RNA, 24 nt, Human
cucccucuguugcccaggcuggag

SEQ ID NO: 602394 - RNA, 23 nt, Human
cucuguugcccaggcuggagugc

SEQ ID NO: 602395 - RNA, 21 nt, Human
cugaauuuaauaacuuaagug

SEQ ID NO: 602396 - RNA, 23 nt, Human
cugcaaccuccgccucccggguu

SEQ ID NO: 602397 - RNA, 24 nt, Human
cugcaaccuccgccucccggguuc

SEQ ID NO: 602398 - RNA, 24 nt, Human
cugcccaccucagcuuccccaagu

SEQ ID NO: 602399 - RNA, 18 nt, Human
cuggaaaaguagcuuaaa

SEQ ID NO: 602400 - RNA, 23 nt, Human
cuugugccucagccucccaagua

SEQ ID NO: 602401 - RNA, 24 nt, Human
gaccucaacugaucugcccaccuc

SEQ ID NO: 602402 - RNA, 20 nt, Human
gagacagagucucccucugu

SEQ ID NO: 602403 - RNA, 18 nt, Human
gagaugggguuucgccau

SEQ ID NO: 602404 - RNA, 20 nt, Human
gagaugggguuucgccaugu

SEQ ID NO: 602405 - RNA, 18 nt, Human
gaugacaucccauuauug

SEQ ID NO: 602406 - RNA, 20 nt, Human
gaugcauagugcuggagaca

SEQ ID NO: 602407 - RNA, 18 nt, Human
gauuacaggugugagcca

SEQ ID NO: 602408 - RNA, 21 nt, Human
gauuacaggugugagccacug

SEQ ID NO: 602409 - RNA, 24 nt, Human
gauuacaggugugagccacugugc

SEQ ID NO: 602410 - RNA, 18 nt, Human
gauuacaggugugugcca

SEQ ID NO: 602411 - RNA, 19 nt, Human
gcagaacaugauaaugucc

SEQ ID NO: 602412 - RNA, 22 nt, Human
gcccagcuaauuuuuguauuuu

SEQ ID NO: 602413 - RNA, 24 nt, Human
gcgauucuugugccucagccuccc

SEQ ID NO: 602414 - RNA, 23 nt, Human
gcuggucuagaacuccugaccuc

SEQ ID NO: 602415 - RNA, 21 nt, Human
gcuuaaagcucuggaccacuc

SEQ ID NO: 602416 - RNA, 22 nt, Human
ggagacagagucucccucuguu

SEQ ID NO: 602417 - RNA, 24 nt, Human
ggcuggucuagaacuccugaccuc

SEQ ID NO: 602418 - RNA, 19 nt, Human
gggagcuagccucauuaug

SEQ ID NO: 602419 - RNA, 22 nt, Human
gggguuucgccauguugaccag

SEQ ID NO: 602420 - RNA, 23 nt, Human
guagagaugggguuucgccaugu

SEQ ID NO: 602421 - RNA, 22 nt, Human
gugagccacugugcccagccca

SEQ ID NO: 602422 - RNA, 22 nt, Human
gugccucagccucccaaguaac

SEQ ID NO: 602423 - RNA, 23 nt, Human
uaaaagugaacaaacuaaaguca

SEQ ID NO: 602424 - RNA, 18 nt, Human
uaacugcaaccuccgccu

SEQ ID NO: 602425 - RNA, 21 nt, Human
uaacugcaaccuccgccuccc

SEQ ID NO: 602426 - RNA, 24 nt, Human
uaacugcaaccuccgccucccggg

SEQ ID NO: 602427 - RNA, 19 nt, Human
uaaguuacaaauagucuga

SEQ ID NO: 602428 - RNA, 24 nt, Human
uaauuuuuguauuuuuaguagaga

SEQ ID NO: 602429 - RNA, 23 nt, Human
uacaggugugagccacugugccc

SEQ ID NO: 602430 - RNA, 24 nt, Human
uacaggugugagccacugugccca

SEQ ID NO: 602431 - RNA, 24 nt, Human
uacaggugugugccaccacgccca

SEQ ID NO: 602432 - RNA, 22 nt, Human
uagagaugggguuucgccaugu

SEQ ID NO: 602433 - RNA, 23 nt, Human
uagcaucacugaaagagcagcca

SEQ ID NO: 602434 - RNA, 19 nt, Human
uagccucauuauggcaauu

SEQ ID NO: 602435 - RNA, 24 nt, Human
uaguagagaugggguuucgccaug

SEQ ID NO: 602436 - RNA, 21 nt, Human
ucaccaaaaaaaaaaaaaaga

SEQ ID NO: 602437 - RNA, 26 nt, Human
ucaccaaaaaaaaaaaaaagaagaaa

SEQ ID NO: 602438 - RNA, 23 nt, Human
ucccaaguaacugggauuacagg

SEQ ID NO: 602439 - RNA, 24 nt, Human
ucccaaguaacugggauuacaggu

SEQ ID NO: 602440 - RNA, 23 nt, Human
uccccaagugcugggauuacagg

SEQ ID NO: 602441 - RNA, 20 nt, Human
ucccggguucaagcgauucu

SEQ ID NO: 602442 - RNA, 20 nt, Human
ucccggguucaagcgauucu

SEQ ID NO: 602443 - RNA, 22 nt, Human
ucccggguucaagcgauucuug

SEQ ID NO: 602444 - RNA, 20 nt, Human
ucccucuguugcccaggcug

SEQ ID NO: 602445 - RNA, 24 nt, Human
ucccucuguugcccaggcuggagu

SEQ ID NO: 602446 - RNA, 22 nt, Human
ucgccauguugaccaggcuggu

SEQ ID NO: 602447 - RNA, 23 nt, Human
ucucccucuguugcccaggcugg

SEQ ID NO: 602448 - RNA, 24 nt, Human
ucucccucuguugcccaggcugga

SEQ ID NO: 602449 - RNA, 22 nt, Human
ucugcccaccucagcuucccca

SEQ ID NO: 602450 - RNA, 31 nt, Human
ucuggaccacucaccaaaaaaaaaaaaaagg

SEQ ID NO: 602451 - RNA, 18 nt, Human
ucuguugcccaggcugga

SEQ ID NO: 602452 - RNA, 24 nt, Human
ucuguugcccaggcuggagugcag

SEQ ID NO: 602453 - RNA, 22 nt, Human
ugaaaacaugucaugaaaauac

SEQ ID NO: 602454 - RNA, 21 nt, Human
ugaacaaacuaaagucagaag

SEQ ID NO: 602455 - RNA, 24 nt, Human
ugaccaggcuggucuagaacuccu

SEQ ID NO: 602456 - RNA, 18 nt, Human
ugaccucaacugaucugc

SEQ ID NO: 602457 - RNA, 22 nt, Human
ugaccucaacugaucugcccac

SEQ ID NO: 602458 - RNA, 23 nt, Human
ugaucugcccaccucagcuuccc

SEQ ID NO: 602459 - RNA, 24 nt, Human
ugaucugcccaccucagcuucccc

SEQ ID NO: 602460 - RNA, 18 nt, Human
ugcccaggcuggagugca

SEQ ID NO: 602461 - RNA, 19 nt, Human
ugcccaggcuggagugcag

SEQ ID NO: 602462 - RNA, 25 nt, Human
ugcccaggcuggagugcagcagggc

SEQ ID NO: 602463 - RNA, 25 nt, Human
ugcccaggcuggagugcagcagggc

SEQ ID NO: 602464 - RNA, 24 nt, Human
ugccucagccucccaaguaacugg

SEQ ID NO: 602465 - RNA, 24 nt, Human
ugcugggauuacaggugugagcca

SEQ ID NO: 602466 - RNA, 24 nt, Human
uggagugcagcagggcgaucuugg

SEQ ID NO: 602467 - RNA, 18 nt, Human
ugggauuacaggugugag

SEQ ID NO: 602468 - RNA, 21 nt, Human
ugggauuacaggugugagcca

SEQ ID NO: 602469 - RNA, 22 nt, Human
ugggauuacaggugugagccac

SEQ ID NO: 602470 - RNA, 22 nt, Human
ugggauuacaggugugagccac

SEQ ID NO: 602471 - RNA, 22 nt, Human
ugggauuacaggugugagccac

SEQ ID NO: 602472 - RNA, 24 nt, Human
ugggauuacaggugugagccacug

SEQ ID NO: 602473 - RNA, 19 nt, Human
ugggauuacaggugugugc

SEQ ID NO: 602474 - RNA, 21 nt, Human
ugggauuacaggugugugcca

SEQ ID NO: 602475 - RNA, 22 nt, Human
ugggauuacaggugugugccac

SEQ ID NO: 602476 - RNA, 24 nt, Human
ugggauuacaggugugugccacca

SEQ ID NO: 602477 - RNA, 24 nt, Human
ugggguuucgccauguugaccagg

SEQ ID NO: 602478 - RNA, 23 nt, Human
ugugauaugguuaauauaauaca

SEQ ID NO: 602479 - RNA, 19 nt, Human
ugugugccaccacgcccag

SEQ ID NO: 602480 - RNA, 21 nt, Human
ugugugccaccacgcccagcu

SEQ ID NO: 602481 - RNA, 18 nt, Human
uuaguagagaugggguuu

SEQ ID NO: 602482 - RNA, 22 nt, Human
uuaguagagaugggguuucgcc

SEQ ID NO: 602483 - RNA, 24 nt, Human
uuaguagagaugggguuucgccau

SEQ ID NO: 602484 - RNA, 23 nt, Human
uucaagcgauucuugugccucag

SEQ ID NO: 602485 - RNA, 18 nt, Human
uucacuaacaguuuuugu

SEQ ID NO: 602486 - RNA, 19 nt, Human
uucacuaacaguuuuuguu

SEQ ID NO: 602487 - RNA, 31 nt, Human
uugacacacaauuagcaucacugaaagaggg

SEQ ID NO: 602488 - RNA, 18 nt, Human
uugcccaggcuggagugc

SEQ ID NO: 602489 - RNA, 23 nt, Human
uuguauuuuuaguagagaugggg

SEQ ID NO: 602490 - RNA, 23 nt, Human
uuucgccauguugaccaggcugu

SEQ ID NO: 602491 - RNA, 22 nt, Human
uuuuuaguagagaugggguuuc

SEQ ID NO: 602492 - RNA, 23 nt, Human
uuuuuaguagagaugggguuucg

SEQ ID NO: 602493 - RNA, 20 nt, Human
uuuuuguauuuuuaguagag

SEQ ID NO: 602494 - RNA, 22 nt, Human
uuuuuguuuuuguuuuuggaga

SEQ ID NO: 602495 - RNA, 18 nt, Human
aaaaauaaccuccucccu

SEQ ID NO: 602496 - RNA, 23 nt, Human
aaaacacaaaaauaaccuccucc

SEQ ID NO: 602497 - RNA, 24 nt, Human
aaaaccaaccaaccaaccaacccc

SEQ ID NO: 602498 - RNA, 22 nt, Human
aaaaccacaaaugacaccuuuc

SEQ ID NO: 602499 - RNA, 26 nt, Human
aaacaaaaccaaaaacaaaaccaacc

SEQ ID NO: 602500 - RNA, 19 nt, Human
aaacaaaaccaaccaacca

SEQ ID NO: 602501 - RNA, 27 nt, Human
aaacaagaaacauacuacucaaaagaa

SEQ ID NO: 602502 - RNA, 21 nt, Human
aaacaauguauauccaaccga

SEQ ID NO: 602503 - RNA, 24 nt, Human
aaacaauguauauccaaccgagau

SEQ ID NO: 602504 - RNA, 18 nt, Human
aaagaacaaagucuuuuc

SEQ ID NO: 602505 - RNA, 23 nt, Human
aaagacucccaaauaaaaaugaa

SEQ ID NO: 602506 - RNA, 23 nt, Human
aaaggaaguagaccaaggagacu

SEQ ID NO: 602507 - RNA, 23 nt, Human
aaauagucgaugugaacugcuua

SEQ ID NO: 602508 - RNA, 22 nt, Human
aacaaaaccaaaaacaaaacca

SEQ ID NO: 602509 - RNA, 23 nt, Human
aacaaaaccaaccaaccaaccaa

SEQ ID NO: 602510 - RNA, 22 nt, Human
aaccaaccaaccaaccaacccc

SEQ ID NO: 602511 - RNA, 18 nt, Human
aaccaaccaaccaacccc

SEQ ID NO: 602512 - RNA, 22 nt, Human
aaccaaccaaccccaaaacaca

SEQ ID NO: 602513 - RNA, 23 nt, Human
aaccacaaaucaauacaaaucca

SEQ ID NO: 602514 - RNA, 23 nt, Human
aagaaacauacuacucaaaagaa

SEQ ID NO: 602515 - RNA, 20 nt, Human
aagcaaauguggcacgugau

SEQ ID NO: 602516 - RNA, 18 nt, Human
aagcuaugauguuuuagg

SEQ ID NO: 602517 - RNA, 23 nt, Human
acaaaaauaaccuccucccuaac

SEQ ID NO: 602518 - RNA, 27 nt, Human
acaaaaccaaaaacaaaaccaaccaac

SEQ ID NO: 602519 - RNA, 21 nt, Human
acaaaaccaaccaaccaacca

SEQ ID NO: 602520 - RNA, 21 nt, Human
acaaaaccacaaaugacaccu

SEQ ID NO: 602521 - RNA, 23 nt, Human
accaaccaaccaaccaaccccaa

SEQ ID NO: 602522 - RNA, 24 nt, Human
accaaccaaccaaccccaaaacac

SEQ ID NO: 602523 - RNA, 22 nt, Human
accacaaaucaauacaaaucca

SEQ ID NO: 602524 - RNA, 18 nt, Human
accuaucuucacccccuc

SEQ ID NO: 602525 - RNA, 22 nt, Human
acgaagaacaggaacaugcaaa

SEQ ID NO: 602526 - RNA, 20 nt, Human
agaccaaggagacugaaggu

SEQ ID NO: 602527 - RNA, 20 nt, Human
aggacaaaaccacaaaugac

SEQ ID NO: 602528 - RNA, 22 nt, Human
aggcacaaaggaaguagaccaa

SEQ ID NO: 602529 - RNA, 22 nt, Human
auaaaaccuaaaaaaagaaagu

SEQ ID NO: 602530 - RNA, 21 nt, Human
auuucauuaguuacuggacaa

SEQ ID NO: 602531 - RNA, 23 nt, Human
auuucauuaguuacuggacaaaa

SEQ ID NO: 602532 - RNA, 24 nt, Human
caaaaccaaccaaccaaccaaccc

SEQ ID NO: 602533 - RNA, 21 nt, Human
caaaacuggacaaaacacaau

SEQ ID NO: 602534 - RNA, 21 nt, Human
caaaagaaaacuccccuggaa

SEQ ID NO: 602535 - RNA, 27 nt, Human
caaaaugaacaauaaguauucugggua

SEQ ID NO: 602536 - RNA, 23 nt, Human
caaaugucuucauauagaaaaug

SEQ ID NO: 602537 - RNA, 21 nt, Human
caacacucuucacagaaaagu

SEQ ID NO: 602538 - RNA, 20 nt, Human
caaccaaccaaccccaaaac

SEQ ID NO: 602539 - RNA, 25 nt, Human
caaccaaccccaaaacacaaaaaua

SEQ ID NO: 602540 - RNA, 27 nt, Human
caaccaaccccaaaacacaaaaauaac

SEQ ID NO: 602541 - RNA, 25 nt, Human
caagaaacauacuacucaaaagaaa

SEQ ID NO: 602542 - RNA, 24 nt, Human
caagcaaauguggcacgugauggg

SEQ ID NO: 602543 - RNA, 19 nt, Human
caaugcuaaaaaaugcaaa

SEQ ID NO: 602544 - RNA, 21 nt, Human
caaugcuaaaaaaugcaaaca

SEQ ID NO: 602545 - RNA, 24 nt, Human
cacaaaaauaaccuccucccuaac

SEQ ID NO: 602546 - RNA, 20 nt, Human
cacaaaacuggacaaaacac

SEQ ID NO: 602547 - RNA, 18 nt, Human
cacauacacacacacgca

SEQ ID NO: 602548 - RNA, 24 nt, Human
cacccugggaaaagcuuaaacuca

SEQ ID NO: 602549 - RNA, 21 nt, Human
cagcaagcaaaaaugcuacca

SEQ ID NO: 602550 - RNA, 21 nt, Human
caguaaaaaaacaaaaccaaa

SEQ ID NO: 602551 - RNA, 31 nt, Human
caguaaaaaaacaaaaccaaaaacaaaaccu

SEQ ID NO: 602552 - RNA, 25 nt, Human
caucacuaaacauaaauaaaaaggg

SEQ ID NO: 602553 - RNA, 23 nt, Human
cauuuuuauuccucuuuucaggc

SEQ ID NO: 602554 - RNA, 26 nt, Human
ccaaaacacaaaaauaaccuccuccc

SEQ ID NO: 602555 - RNA, 23 nt, Human
ccaagcaaauguggcacgugaug

SEQ ID NO: 602556 - RNA, 23 nt, Human
ccacaaaucaauacaaauccaac

SEQ ID NO: 602557 - RNA, 21 nt, Human
cccaagugcuccaugccuucu

SEQ ID NO: 602558 - RNA, 19 nt, Human
cccugggaaaagcuuaaac

SEQ ID NO: 602559 - RNA, 19 nt, Human
ccuaccgcuacucuucgcc

SEQ ID NO: 602560 - RNA, 18 nt, Human
ccuguuacaucuggaaca

SEQ ID NO: 602561 - RNA, 19 nt, Human
cgaagaacaggaacaugca

SEQ ID NO: 602562 - RNA, 25 nt, Human
cguucagaaucccgccaacacggaa

SEQ ID NO: 602563 - RNA, 22 nt, Human
cuaaaaaaugcaaacauauaca

SEQ ID NO: 602564 - RNA, 22 nt, Human
cuaaauuucugauuuuacacac

SEQ ID NO: 602565 - RNA, 20 nt, Human
cucccaaauaaaaaugaaaa

SEQ ID NO: 602566 - RNA, 19 nt, Human
cucccuaacuucucugguc

SEQ ID NO: 602567 - RNA, 24 nt, Human
cuuaaacaaagaugacccaaaucu

SEQ ID NO: 602568 - RNA, 24 nt, Human
gaaaagaacaaagucuuuucaaaa

SEQ ID NO: 602569 - RNA, 24 nt, Human
gaacaggaacaugcaaacaagaaa

SEQ ID NO: 602570 - RNA, 26 nt, Human
gaacuuuuaugaggaaaaaagguaac

SEQ ID NO: 602571 - RNA, 24 nt, Human
gagaaaauguaagcuaccuaacau

SEQ ID NO: 602572 - RNA, 22 nt, Human
gagugcuauuucuccaucaugg

SEQ ID NO: 602573 - RNA, 22 nt, Human
gaugggcuggcacuggaaaggc

SEQ ID NO: 602574 - RNA, 22 nt, Human
gcacuggaaaggcugcucugga

SEQ ID NO: 602575 - RNA, 23 nt, Human
uaaaaaaugcaaacauauacaua

SEQ ID NO: 602576 - RNA, 23 nt, Human
uaacaacuuuucuauuucucuca

SEQ ID NO: 602577 - RNA, 19 nt, Human
uaacauaaaacaaaugucu

SEQ ID NO: 602578 - RNA, 19 nt, Human
uaacauaaaacaaaugucu

SEQ ID NO: 602579 - RNA, 21 nt, Human
uaaccuccucccuaacuucuc

SEQ ID NO: 602580 - RNA, 28 nt, Human
uacacacacacgcagaggagaaaaugua

SEQ ID NO: 602581 - RNA, 23 nt, Human
uacacacauacacacacacgcag

SEQ ID NO: 602582 - RNA, 22 nt, Human
uacguuuagaacaauacacuuu

SEQ ID NO: 602583 - RNA, 21 nt, Human
uaggccaucacuaaacauaaa

SEQ ID NO: 602584 - RNA, 27 nt, Human
ucaauacaaauccaacaaaauacaugg

SEQ ID NO: 602585 - RNA, 21 nt, Human
ucccaaauaaaaaugaaaaga

SEQ ID NO: 602586 - RNA, 23 nt, Human
ucuuaccuaucuucacccccuca

SEQ ID NO: 602587 - RNA, 21 nt, Human
ugacaggcugacguaccuucc

SEQ ID NO: 602588 - RNA, 23 nt, Human
ugcaagcuggacacuggcuauua

SEQ ID NO: 602589 - RNA, 24 nt, Human
ugcauaugacaggcugacguaccu

SEQ ID NO: 602590 - RNA, 20 nt, Human
ugcccugggaaaacucuguc

SEQ ID NO: 602591 - RNA, 22 nt, Human
uggacaaaacacaaugcuaaaa

SEQ ID NO: 602592 - RNA, 23 nt, Human
uggacaaaacacaaugcuaaaaa

SEQ ID NO: 602593 - RNA, 23 nt, Human
uggcacgugaugggcagagugag

SEQ ID NO: 602594 - RNA, 21 nt, Human
ugggaaaagcuuaaacucaag

SEQ ID NO: 602595 - RNA, 23 nt, Human
ugggaaaagcuuaaacucaagug

SEQ ID NO: 602596 - RNA, 18 nt, Human
ugggcagagugagcgaca

SEQ ID NO: 602597 - RNA, 23 nt, Human
ugucugaaacaagcagcuugggg

SEQ ID NO: 602598 - RNA, 21 nt, Human
uuuagguuccucuaaacccaa

SEQ ID NO: 602599 - RNA, 21 nt, Human
uuuugcuuaugacauucuuua

SEQ ID NO: 602600 - RNA, 24 nt, Human
uuuuuuuuuuuuuuuugcuuauga

SEQ ID NO: 602601 - RNA, 18 nt, Human
aaaaaagccaccaugccc

SEQ ID NO: 602602 - RNA, 24 nt, Human
aaaagucaaauuccauuuccuuua

SEQ ID NO: 602603 - RNA, 21 nt, Human
aaacagaaacuugaagccaaa

SEQ ID NO: 602604 - RNA, 21 nt, Human
aaacucugucucuacaaaaag

SEQ ID NO: 602605 - RNA, 23 nt, Human
aaacuguagaaucucaagcacaa

SEQ ID NO: 602606 - RNA, 26 nt, Human
aaaggcaccaauaacaguuggagacc

SEQ ID NO: 602607 - RNA, 18 nt, Human
aaagugcugggauuacaa

SEQ ID NO: 602608 - RNA, 24 nt, Human
aaagugcugggauuacaagcauga

SEQ ID NO: 602609 - RNA, 24 nt, Human
aaagugcugggauuacaggcguga

SEQ ID NO: 602610 - RNA, 20 nt, Human
aacaaaaaugacuuugaaau

SEQ ID NO: 602611 - RNA, 27 nt, Human
aaccaucccaacugcaaaggcacucaa

SEQ ID NO: 602612 - RNA, 18 nt, Human
aacuuuuaaaagaauucu

SEQ ID NO: 602613 - RNA, 18 nt, Human
aagaauucucuauuuugu

SEQ ID NO: 602614 - RNA, 25 nt, Human
aagcaauccuccugcuucagcuucc

SEQ ID NO: 602615 - RNA, 18 nt, Human
aaggcauuuuauacagaa

SEQ ID NO: 602616 - RNA, 23 nt, Human
aaggguucgugcaaacuuuacca

SEQ ID NO: 602617 - RNA, 24 nt, Human
aagugaucugcccgccucggccuc

SEQ ID NO: 602618 - RNA, 19 nt, Human
aagugcugggauuacaagc

SEQ ID NO: 602619 - RNA, 21 nt, Human
aagugcugggauuacaagcau

SEQ ID NO: 602620 - RNA, 19 nt, Human
aagugcugggauuacaggc

SEQ ID NO: 602621 - RNA, 19 nt, Human
aagugcugggauuacaggc

SEQ ID NO: 602622 - RNA, 18 nt, Human
acagagugaaacucuguc

SEQ ID NO: 602623 - RNA, 19 nt, Human
acagagugaaacucugucu

SEQ ID NO: 602624 - RNA, 20 nt, Human
acagagugaaacucugucuc

SEQ ID NO: 602625 - RNA, 26 nt, Human
acagagugaaacucugucucuacaaa

SEQ ID NO: 602626 - RNA, 19 nt, Human
acaggcaagagccacuacg

SEQ ID NO: 602627 - RNA, 19 nt, Human
acaggguuucaccauuugg

SEQ ID NO: 602628 - RNA, 20 nt, Human
accacaaccuccaccuccca

SEQ ID NO: 602629 - RNA, 22 nt, Human
accauuugggccaggcuggucu

SEQ ID NO: 602630 - RNA, 24 nt, Human
acccaggcuggagugcaguggcau

SEQ ID NO: 602631 - RNA, 23 nt, Human
accucggccucccaaagugcugg

SEQ ID NO: 602632 - RNA, 24 nt, Human
accuugugauccacccaccucggc

SEQ ID NO: 602633 - RNA, 18 nt, Human
acgggguuucaccacguu

SEQ ID NO: 602634 - RNA, 20 nt, Human
acgggguuucaccacguugg

SEQ ID NO: 602635 - RNA, 24 nt, Human
acgggguuucaccacguuggccag

SEQ ID NO: 602636 - RNA, 25 nt, Human
acuauguugcccaggcuagucuuga

SEQ ID NO: 602637 - RNA, 24 nt, Human
acuccagcuugggcgacagaguga

SEQ ID NO: 602638 - RNA, 18 nt, Human
acuccguuguccaggcug

SEQ ID NO: 602639 - RNA, 19 nt, Human
acuccguuguccaggcugg

SEQ ID NO: 602640 - RNA, 22 nt, Human
acuccguuguccaggcuggagu

SEQ ID NO: 602641 - RNA, 25 nt, Human
acuccguuguccaggcuggagugca

SEQ ID NO: 602642 - RNA, 18 nt, Human
acucugucacccaggcug

SEQ ID NO: 602643 - RNA, 25 nt, Human
acucugucacccaggcuggagugca

SEQ ID NO: 602644 - RNA, 24 nt, Human
acugcacuccagcuugggcgacag

SEQ ID NO: 602645 - RNA, 26 nt, Human
acugcacuccagcuugggcgacagag

SEQ ID NO: 602646 - RNA, 19 nt, Human
agaaaaaauuauuuugugg

SEQ ID NO: 602647 - RNA, 24 nt, Human
agaaaggcauuuuauacagaagca

SEQ ID NO: 602648 - RNA, 24 nt, Human
agaaugcugggauuacaggcaaga

SEQ ID NO: 602649 - RNA, 21 nt, Human
agacaaaaaccuagcauuagc

SEQ ID NO: 602650 - RNA, 24 nt, Human
agaggcugcagugagguaugauug

SEQ ID NO: 602651 - RNA, 23 nt, Human
agagguggacucccgaaggguag

SEQ ID NO: 602652 - RNA, 18 nt, Human
agccaaauaagaugacug

SEQ ID NO: 602653 - RNA, 19 nt, Human
agccuguaguuccagcuac

SEQ ID NO: 602654 - RNA, 24 nt, Human
agcuugggcgacagagugaaacuc

SEQ ID NO: 602655 - RNA, 21 nt, Human
aggaaccaucccaacugcaaa

SEQ ID NO: 602656 - RNA, 26 nt, Human
aggaggcuccggcgagcggcggcucc

SEQ ID NO: 602657 - RNA, 18 nt, Human
aggcaccaauaacaguua

SEQ ID NO: 602658 - RNA, 19 nt, Human
aggcuggagugcaguggca

SEQ ID NO: 602659 - RNA, 25 nt, Human
aggcuggagugcaguggcacgaucu

SEQ ID NO: 602660 - RNA, 22 nt, Human
agggaggguaagauauuccaaa

SEQ ID NO: 602661 - RNA, 22 nt, Human
aguagagacaggguuucaccau

SEQ ID NO: 602662 - RNA, 19 nt, Human
aguagcugggacuauaggc

SEQ ID NO: 602663 - RNA, 18 nt, Human
aguagcugggauuacagg

SEQ ID NO: 602664 - RNA, 24 nt, Human
agugauucucgugccucagccucc

SEQ ID NO: 602665 - RNA, 21 nt, Human
agugcaguggcacgaucuuag

SEQ ID NO: 602666 - RNA, 23 nt, Human
agugcaguggcacgaucuuagcu

SEQ ID NO: 602667 - RNA, 24 nt, Human
agugcaguggcacgaucuuagcuc

SEQ ID NO: 602668 - RNA, 20 nt, Human
agugcaguggcaugauauug

SEQ ID NO: 602669 - RNA, 23 nt, Human
agugcaguggcaugauauuggcu

SEQ ID NO: 602670 - RNA, 24 nt, Human
agugcaguggcaugauauuggcuc

SEQ ID NO: 602671 - RNA, 24 nt, Human
agugcugggauuacaagcaugagc

SEQ ID NO: 602672 - RNA, 18 nt, Human
agugcugggauuacaggc

SEQ ID NO: 602673 - RNA, 19 nt, Human
aguucaaacacugaaagau

SEQ ID NO: 602674 - RNA, 22 nt, Human
auggaggacaagcuucugcuca

SEQ ID NO: 602675 - RNA, 21 nt, Human
auuggaagggacucugagauc

SEQ ID NO: 602676 - RNA, 20 nt, Human
auuguauuuuaauugagagg

SEQ ID NO: 602677 - RNA, 24 nt, Human
auugugccacugcacuccagcuug

SEQ ID NO: 602678 - RNA, 18 nt, Human
auuuccuuaauguugcuu

SEQ ID NO: 602679 - RNA, 24 nt, Human
auuuuuguauauuuaguagagaca

SEQ ID NO: 602680 - RNA, 23 nt, Human
caaccuccaccucccagguucaa

SEQ ID NO: 602681 - RNA, 20 nt, Human
caaccuccacuuccuggguu

SEQ ID NO: 602682 - RNA, 22 nt, Human
caagcaauccuccugcuucagc

SEQ ID NO: 602683 - RNA, 22 nt, Human
caagcgauucuccugccucagc

SEQ ID NO: 602684 - RNA, 22 nt, Human
caagugauucucgugccucagc

SEQ ID NO: 602685 - RNA, 28 nt, Human
caagugauucucgugccucagccucccg

SEQ ID NO: 602686 - RNA, 20 nt, Human
caaugauaaaggaagagacc

SEQ ID NO: 602687 - RNA, 21 nt, Human
caccacaaccuccaccuccca

SEQ ID NO: 602688 - RNA, 21 nt, Human
caccacaaccuccaccuccca

SEQ ID NO: 602689 - RNA, 24 nt, Human
caccacacccagcuaauuuuugua

SEQ ID NO: 602690 - RNA, 22 nt, Human
caccacguuggccagggugguc

SEQ ID NO: 602691 - RNA, 24 nt, Human
caccacguuggccaggguggucuc

SEQ ID NO: 602692 - RNA, 24 nt, Human
caccaugcccagcuaguuuuugua

SEQ ID NO: 602693 - RNA, 24 nt, Human
caccauuugggccaggcuggucuu

SEQ ID NO: 602694 - RNA, 22 nt, Human
cacccaccucggccucccaaag

SEQ ID NO: 602695 - RNA, 23 nt, Human
cacccaccucggccucccaaagu

SEQ ID NO: 602696 - RNA, 20 nt, Human
cacuauguugcccaggcuag

SEQ ID NO: 602697 - RNA, 22 nt, Human
cacuauguugcccaggcuaguc

SEQ ID NO: 602698 - RNA, 24 nt, Human
cacuauguugcccaggcuagucuu

SEQ ID NO: 602699 - RNA, 22 nt, Human
cacuccagcuugggcgacagag

SEQ ID NO: 602700 - RNA, 22 nt, Human
cacuccagcuugggcgacagag

SEQ ID NO: 602701 - RNA, 24 nt, Human
cacuccagcuugggcgacagagug

SEQ ID NO: 602702 - RNA, 24 nt, Human
cacuccguuguccaggcuggagug

SEQ ID NO: 602703 - RNA, 23 nt, Human
cacugcaaccuccacuuccuggg

SEQ ID NO: 602704 - RNA, 19 nt, Human
cacugcacuccagcuuggg

SEQ ID NO: 602705 - RNA, 20 nt, Human
cacugcacuccagcuugggc

SEQ ID NO: 602706 - RNA, 20 nt, Human
cacugcacuccagcuugggc

SEQ ID NO: 602707 - RNA, 22 nt, Human
cacugcacuccagcuugggcga

SEQ ID NO: 602708 - RNA, 24 nt, Human
cacugcacuccagcuugggcgaca

SEQ ID NO: 602709 - RNA, 20 nt, Human
cagccuccugaguagcuggg

SEQ ID NO: 602710 - RNA, 18 nt, Human
caggcuagucuugaacuu

SEQ ID NO: 602711 - RNA, 18 nt, Human
caggguuucaccauuugg

SEQ ID NO: 602712 - RNA, 21 nt, Human
caggugcccgccaccacaccc

SEQ ID NO: 602713 - RNA, 22 nt, Human
cagugagauggggacacuuucu

SEQ ID NO: 602714 - RNA, 18 nt, Human
cagugucagaaaucaggu

SEQ ID NO: 602715 - RNA, 18 nt, Human
cauuugggccaggcuggu

SEQ ID NO: 602716 - RNA, 19 nt, Human
ccaaagugcugggauuaca

SEQ ID NO: 602717 - RNA, 24 nt, Human
ccaaagugcugggauuacaagcau

SEQ ID NO: 602718 - RNA, 22 nt, Human
ccaaagugcugggauuacaggc

SEQ ID NO: 602719 - RNA, 22 nt, Human
ccaaagugcugggauuacaggc

SEQ ID NO: 602720 - RNA, 24 nt, Human
ccaaagugcugggauuacaggcgu

SEQ ID NO: 602721 - RNA, 19 nt, Human
ccaaauggaccaaucacaa

SEQ ID NO: 602722 - RNA, 20 nt, Human
ccaaauggaccaaucacaaa

SEQ ID NO: 602723 - RNA, 23 nt, Human
ccacaaccuccaccucccagguu

SEQ ID NO: 602724 - RNA, 24 nt, Human
ccacaaccuccaccucccagguuc

SEQ ID NO: 602725 - RNA, 20 nt, Human
ccacugcacuccagcuuggg

SEQ ID NO: 602726 - RNA, 20 nt, Human
ccacugcacuccagcuuggg

SEQ ID NO: 602727 - RNA, 21 nt, Human
ccacugcacuccagcuugggc

SEQ ID NO: 602728 - RNA, 21 nt, Human
ccacugcacuccagcuugggc

SEQ ID NO: 602729 - RNA, 23 nt, Human
ccacugcacuccagcuugggcga

SEQ ID NO: 602730 - RNA, 24 nt, Human
ccacugcacuccagcuugggcgac

SEQ ID NO: 602731 - RNA, 23 nt, Human
ccagaaugcugggauuacaggca

SEQ ID NO: 602732 - RNA, 19 nt, Human
ccagauucaggaccuuaca

SEQ ID NO: 602733 - RNA, 24 nt, Human
ccaggcuagucuugaacuucuggg

SEQ ID NO: 602734 - RNA, 24 nt, Human
cccagaaugcugggauuacaggca

SEQ ID NO: 602735 - RNA, 24 nt, Human
cccaggcugagccggcgcggaggc

SEQ ID NO: 602736 - RNA, 20 nt, Human
cccagguucaagcgauucuc

SEQ ID NO: 602737 - RNA, 23 nt, Human
cccagguucaagcgauucuccug

SEQ ID NO: 602738 - RNA, 22 nt, Human
cccaugcagcuuuauucaccuc

SEQ ID NO: 602739 - RNA, 19 nt, Human
cccgaguagcugggacuau

SEQ ID NO: 602740 - RNA, 24 nt, Human
cccgaguagcugggacuauaggcg

SEQ ID NO: 602741 - RNA, 21 nt, Human
cccgccaccacacccagcuaa

SEQ ID NO: 602742 - RNA, 24 nt, Human
ccgagucucacuauguugcccagg

SEQ ID NO: 602743 - RNA, 19 nt, Human
ccgcgcccggccuauuaug

SEQ ID NO: 602744 - RNA, 22 nt, Human
ccuccacuuccuggguucaagu

SEQ ID NO: 602745 - RNA, 24 nt, Human
ccucccagguucaagcgauucucc

SEQ ID NO: 602746 - RNA, 22 nt, Human
ccugaccuugugauccacccac

SEQ ID NO: 602747 - RNA, 22 nt, Human
ccugaguagcugggauuacagg

SEQ ID NO: 602748 - RNA, 23 nt, Human
ccugaguagcugggauuacaggu

SEQ ID NO: 602749 - RNA, 24 nt, Human
ccugaguagcugggauuacaggug

SEQ ID NO: 602750 - RNA, 22 nt, Human
ccugaucucaagugaucugccc

SEQ ID NO: 602751 - RNA, 20 nt, Human
ccuggguucaagugauucuc

SEQ ID NO: 602752 - RNA, 22 nt, Human
ccuguaagggcaacuuccuaaa

SEQ ID NO: 602753 - RNA, 21 nt, Human
ccuguaguuccagcuacucca

SEQ ID NO: 602754 - RNA, 22 nt, Human
ccuguaguuccagcuacuccag

SEQ ID NO: 602755 - RNA, 19 nt, Human
ccugucucauuuuaaaacc

SEQ ID NO: 602756 - RNA, 24 nt, Human
cgacagagugaaacucugucucua

SEQ ID NO: 602757 - RNA, 21 nt, Human
cguuguccaggcuggagugca

SEQ ID NO: 602758 - RNA, 20 nt, Human
cucaaaggcaccaauaacag

SEQ ID NO: 602759 - RNA, 24 nt, Human
cucaagcaauccuccugcuucagc

SEQ ID NO: 602760 - RNA, 18 nt, Human
cucaagugaucugcccgc

SEQ ID NO: 602761 - RNA, 21 nt, Human
cucaagugaucugcccgccuc

SEQ ID NO: 602762 - RNA, 24 nt, Human
cucaccacaaccuccaccucccag

SEQ ID NO: 602763 - RNA, 24 nt, Human
cucacugcaaccuccacuuccugg

SEQ ID NO: 602764 - RNA, 24 nt, Human
cucagccucccgaguagcugggac

SEQ ID NO: 602765 - RNA, 24 nt, Human
cucagccuccugaguagcugggau

SEQ ID NO: 602766 - RNA, 25 nt, Human
cucauaauuccaauacauacaucca

SEQ ID NO: 602767 - RNA, 19 nt, Human
cucauuaugcccuagaaca

SEQ ID NO: 602768 - RNA, 18 nt, Human
cuccugaccuugugaucc

SEQ ID NO: 602769 - RNA, 22 nt, Human
cuccugccucagccuccugagu

SEQ ID NO: 602770 - RNA, 19 nt, Human
cucugagaucagaaaaguc

SEQ ID NO: 602771 - RNA, 21 nt, Human
cugaguagcugggauuacagg

SEQ ID NO: 602772 - RNA, 21 nt, Human
cugcccgccucggccucccag

SEQ ID NO: 602773 - RNA, 23 nt, Human
cugccucagccuccugaguagcu

SEQ ID NO: 602774 - RNA, 20 nt, Human
cugggcucaagcaauccucc

SEQ ID NO: 602775 - RNA, 22 nt, Human
cugucaaaaauaugugcuguua

SEQ ID NO: 602776 - RNA, 18 nt, Human
cugucacccaggcuggag

SEQ ID NO: 602777 - RNA, 24 nt, Human
cugucucuauuccacugaacaaaa

SEQ ID NO: 602778 - RNA, 21 nt, Human
cuguuuucuguacacuuuuag

SEQ ID NO: 602779 - RNA, 21 nt, Human
cuuacucugucacccaggcug

SEQ ID NO: 602780 - RNA, 21 nt, Human
cuuccuggguucaagugauuc

SEQ ID NO: 602781 - RNA, 25 nt, Human
cuucugggcucaagcaauccuccug

SEQ ID NO: 602782 - RNA, 20 nt, Human
cuugaacuucugggcucaag

SEQ ID NO: 602783 - RNA, 25 nt, Human
cuuggcccaggccucggccucuuuc

SEQ ID NO: 602784 - RNA, 24 nt, Human
gaacuucugggcucaagcaauccu

SEQ ID NO: 602785 - RNA, 21 nt, Human
gaagagacccuucuugacuca

SEQ ID NO: 602786 - RNA, 21 nt, Human
gacagagugaaacucugucuc

SEQ ID NO: 602787 - RNA, 22 nt, Human
gaccuugugauccacccaccuc

SEQ ID NO: 602788 - RNA, 22 nt, Human
gaccuugugauccacccaccuc

SEQ ID NO: 602789 - RNA, 24 nt, Human
gaccuugugauccacccaccucgg

SEQ ID NO: 602790 - RNA, 24 nt, Human
gagacgggguuucaccacguuggc

SEQ ID NO: 602791 - RNA, 20 nt, Human
gaggcuccggcgagcggcgg

SEQ ID NO: 602792 - RNA, 18 nt, Human
gauuacaagcaugagcca

SEQ ID NO: 602793 - RNA, 22 nt, Human
gauuacaagcaugagccacugc

SEQ ID NO: 602794 - RNA, 23 nt, Human
gauuacaagcaugagccacugca

SEQ ID NO: 602795 - RNA, 18 nt, Human
gauuacaggcaagagcca

SEQ ID NO: 602796 - RNA, 19 nt, Human
gauuacaggcaagagccac

SEQ ID NO: 602797 - RNA, 18 nt, Human
gauuacaggcgugagcca

SEQ ID NO: 602798 - RNA, 22 nt, Human
gauuacaggcgugagccaccgc

SEQ ID NO: 602799 - RNA, 22 nt, Human
gauuacaggcgugagccaccgc

SEQ ID NO: 602800 - RNA, 18 nt, Human
gauuacaggugcccgcca

SEQ ID NO: 602801 - RNA, 21 nt, Human
gauucuccugccucagccucc

SEQ ID NO: 602802 - RNA, 21 nt, Human
gauugugccacugcacuccag

SEQ ID NO: 602803 - RNA, 21 nt, Human
gcaaaaaagccaccaugccca

SEQ ID NO: 602804 - RNA, 22 nt, Human
gcaaccuccacuuccuggguuc

SEQ ID NO: 602805 - RNA, 24 nt, Human
gcacuccagcuugggcgacagagu

SEQ ID NO: 602806 - RNA, 22 nt, Human
gccacugcacuccagcuugggc

SEQ ID NO: 602807 - RNA, 24 nt, Human
gccacugcacuccagcuugggcga

SEQ ID NO: 602808 - RNA, 23 nt, Human
gccucggccucccagaaugcugg

SEQ ID NO: 602809 - RNA, 23 nt, Human
gcgacagagugaaacucugucuc

SEQ ID NO: 602810 - RNA, 23 nt, Human
gcgauucuccugccucagccucc

SEQ ID NO: 602811 - RNA, 19 nt, Human
gcuggagugcaguggcacg

SEQ ID NO: 602812 - RNA, 24 nt, Human
gcuucagcuucccaaagugcuggg

SEQ ID NO: 602813 - RNA, 22 nt, Human
ggauuacaagcaugagccacug

SEQ ID NO: 602814 - RNA, 19 nt, Human
ggauuacaggcaagagcca

SEQ ID NO: 602815 - RNA, 23 nt, Human
ggccaggcuggucuugaacuccu

SEQ ID NO: 602816 - RNA, 19 nt, Human
ggcucaagcaauccuccug

SEQ ID NO: 602817 - RNA, 23 nt, Human
ggcuggucuugaacuccugaccu

SEQ ID NO: 602818 - RNA, 19 nt, Human
gggcucaagcaauccuccu

SEQ ID NO: 602819 - RNA, 20 nt, Human
gggcucaagcaauccuccug

SEQ ID NO: 602820 - RNA, 23 nt, Human
ggggagaaaacagauuaacacaa

SEQ ID NO: 602821 - RNA, 23 nt, Human
gggguuucaccacguuggccagg

SEQ ID NO: 602822 - RNA, 22 nt, Human
ggguuucaccacguuggccagg

SEQ ID NO: 602823 - RNA, 20 nt, Human
ggucuugaacuccugaccuu

SEQ ID NO: 602824 - RNA, 23 nt, Human
gguggucucgaacuccugaucuc

SEQ ID NO: 602825 - RNA, 18 nt, Human
guagagaccgagucucac

SEQ ID NO: 602826 - RNA, 22 nt, Human
guagagaccgagucucacuaug

SEQ ID NO: 602827 - RNA, 24 nt, Human
gugauccacccaccucggccuccc

SEQ ID NO: 602828 - RNA, 24 nt, Human
gugaucugcccgccucggccuccc

SEQ ID NO: 602829 - RNA, 24 nt, Human
gugauucucgugccucagccuccc

SEQ ID NO: 602830 - RNA, 22 nt, Human
gugccucagccucccgaguagc

SEQ ID NO: 602831 - RNA, 18 nt, Human
guuggccaggguggucuc

SEQ ID NO: 602832 - RNA, 18 nt, Human
guuguccaggcuggagug

SEQ ID NO: 602833 - RNA, 24 nt, Human
guuuuuguauuuuuaguagagacg

SEQ ID NO: 602834 - RNA, 23 nt, Human
uaaaaagucaaauuccauuuccu

SEQ ID NO: 602835 - RNA, 23 nt, Human
uaaaacagaaacuugaagccaaa

SEQ ID NO: 602836 - RNA, 24 nt, Human
uaaaacagaaacuugaagccaaac

SEQ ID NO: 602837 - RNA, 24 nt, Human
uaaaacuugauuauguagaaguuu

SEQ ID NO: 602838 - RNA, 22 nt, Human
uaaaucucuguugaaaacacug

SEQ ID NO: 602839 - RNA, 21 nt, Human
uaaaugaaaauuaaguuucuu

SEQ ID NO: 602840 - RNA, 23 nt, Human
uaacuaauaucaguagccaugga

SEQ ID NO: 602841 - RNA, 22 nt, Human
uaagaucacauaagcccaagag

SEQ ID NO: 602842 - RNA, 21 nt, Human
uaagugauucuuuacuauacu

SEQ ID NO: 602843 - RNA, 22 nt, Human
uaauuuguaaagacaaaaaccu

SEQ ID NO: 602844 - RNA, 24 nt, Human
uaauuuuuguauauuuaguagaga

SEQ ID NO: 602845 - RNA, 22 nt, Human
uacaacugaagcagugucagaa

SEQ ID NO: 602846 - RNA, 24 nt, Human
uacaagcaugagccacugcaucca

SEQ ID NO: 602847 - RNA, 24 nt, Human
uacaggcaagagccacuacgccca

SEQ ID NO: 602848 - RNA, 23 nt, Human
uacaggcgugagccaccgcgccc

SEQ ID NO: 602849 - RNA, 24 nt, Human
uacaggugcccgccaccacaccca

SEQ ID NO: 602850 - RNA, 27 nt, Human
uaccauaaaacuguagaaucucaagca

SEQ ID NO: 602851 - RNA, 18 nt, Human
uacuccagaggcugaggg

SEQ ID NO: 602852 - RNA, 24 nt, Human
uacucugucacccaggcuggagug

SEQ ID NO: 602853 - RNA, 21 nt, Human
uagaaacccccaaaacaucag

SEQ ID NO: 602854 - RNA, 22 nt, Human
uagaaacccccaaaacaucagg

SEQ ID NO: 602855 - RNA, 23 nt, Human
uagaacaucauuauacucuaaaa

SEQ ID NO: 602856 - RNA, 18 nt, Human
uagaaucucaagcacaag

SEQ ID NO: 602857 - RNA, 24 nt, Human
uagaaucucaagcacaaguaaguu

SEQ ID NO: 602858 - RNA, 20 nt, Human
uagagacaggguuucaccau

SEQ ID NO: 602859 - RNA, 22 nt, Human
uagagacgggguuucaccacgu

SEQ ID NO: 602860 - RNA, 19 nt, Human
uaguagagacaggguuuca

SEQ ID NO: 602861 - RNA, 24 nt, Human
uaguagagacgggguuucaccacg

SEQ ID NO: 602862 - RNA, 24 nt, Human
uagucuugaacuucugggcucaag

SEQ ID NO: 602863 - RNA, 18 nt, Human
uagugccacuauaaggca

SEQ ID NO: 602864 - RNA, 24 nt, Human
uaguuuuuguauuuuuaguagaga

SEQ ID NO: 602865 - RNA, 24 nt, Human
uauaaaacagaaacuugaagccaa

SEQ ID NO: 602866 - RNA, 20 nt, Human
uauaccaugaaaccaauucc

SEQ ID NO: 602867 - RNA, 21 nt, Human
uaucacgaaagcaaauuccca

SEQ ID NO: 602868 - RNA, 22 nt, Human
uauggcaaaauuuacugguguc

SEQ ID NO: 602869 - RNA, 20 nt, Human
uauguugcccaggcuagucu

SEQ ID NO: 602870 - RNA, 23 nt, Human
uauguugcccaggcuagucuuga

SEQ ID NO: 602871 - RNA, 24 nt, Human
uauguugcccaggcuagucuugaa

SEQ ID NO: 602872 - RNA, 24 nt, Human
uauuuaguagagacaggguuucac

SEQ ID NO: 602873 - RNA, 18 nt, Human
uauuuuauacuguggugc

SEQ ID NO: 602874 - RNA, 22 nt, Human
ucacauaagcccaagaggcugc

SEQ ID NO: 602875 - RNA, 24 nt, Human
ucaccacaaccuccaccucccagg

SEQ ID NO: 602876 - RNA, 27 nt, Human
ucaccacaaccuccaccucccagguuc

SEQ ID NO: 602877 - RNA, 24 nt, Human
ucaccacguuggccaggguggucu

SEQ ID NO: 602878 - RNA, 22 nt, Human
ucacccaggcuggagugcagug

SEQ ID NO: 602879 - RNA, 24 nt, Human
ucacugcaaccuccacuuccuggg

SEQ ID NO: 602880 - RNA, 25 nt, Human
ucacugcaaccuccacuuccugggu

SEQ ID NO: 602881 - RNA, 26 nt, Human
ucacugcaaccuccacuuccuggguu

SEQ ID NO: 602882 - RNA, 19 nt, Human
ucagaaaagucuggccuaa

SEQ ID NO: 602883 - RNA, 23 nt, Human
ucagccucccgaguagcugggac

SEQ ID NO: 602884 - RNA, 20 nt, Human
ucagccuccugaguagcugg

SEQ ID NO: 602885 - RNA, 20 nt, Human
uccacuguauuuuagccaga

SEQ ID NO: 602886 - RNA, 18 nt, Human
uccagcuugggcgacaga

SEQ ID NO: 602887 - RNA, 22 nt, Human
uccagcuugggcgacagaguga

SEQ ID NO: 602888 - RNA, 18 nt, Human
ucccaaagugcugggauu

SEQ ID NO: 602889 - RNA, 24 nt, Human
ucccaaagugcugggauuacaagc

SEQ ID NO: 602890 - RNA, 24 nt, Human
ucccaaagugcugggauuacaggc

SEQ ID NO: 602891 - RNA, 24 nt, Human
ucccagaaugcugggauuacaggc

SEQ ID NO: 602892 - RNA, 21 nt, Human
ucccagguucaagcgauucuc

SEQ ID NO: 602893 - RNA, 24 nt, Human
ucccagguucaagcgauucuccug

SEQ ID NO: 602894 - RNA, 26 nt, Human
ucccgaaggguagccugaccauuggg

SEQ ID NO: 602895 - RNA, 24 nt, Human
ucccgaguagcugggacuauaggc

SEQ ID NO: 602896 - RNA, 24 nt, Human
uccugaguagcugggauuacaggu

SEQ ID NO: 602897 - RNA, 20 nt, Human
uccuggguucaagugauucu

SEQ ID NO: 602898 - RNA, 21 nt, Human
uccuggguucaagugauucuc

SEQ ID NO: 602899 - RNA, 24 nt, Human
uccuggguucaagugauucucgug

SEQ ID NO: 602900 - RNA, 22 nt, Human
uccuuuagauuuccuuaauguu

SEQ ID NO: 602901 - RNA, 18 nt, Human
ucgaaaaaggaaaaaaaa

SEQ ID NO: 602902 - RNA, 18 nt, Human
ucggccucccaaagugcu

SEQ ID NO: 602903 - RNA, 18 nt, Human
ucggccucccagaaugcu

SEQ ID NO: 602904 - RNA, 19 nt, Human
ucuauacgcaauuuuagga

SEQ ID NO: 602905 - RNA, 19 nt, Human
ucucacuauguugcccagg

SEQ ID NO: 602906 - RNA, 26 nt, Human
ucucacuauguugcccaggcuagucu

SEQ ID NO: 602907 - RNA, 27 nt, Human
ucucacuauguugcccaggcuagucuu

SEQ ID NO: 602908 - RNA, 22 nt, Human
ucucacuccguuguccaggcug

SEQ ID NO: 602909 - RNA, 23 nt, Human
ucucacuccguuguccaggcugg

SEQ ID NO: 602910 - RNA, 24 nt, Human
ucucacuccguuguccaggcugga

SEQ ID NO: 602911 - RNA, 21 nt, Human
ucucgaacuccugaucucaag

SEQ ID NO: 602912 - RNA, 19 nt, Human
ucucgcucuguuucccagg

SEQ ID NO: 602913 - RNA, 22 nt, Human
ucucgcucuguuucccaggugc

SEQ ID NO: 602914 - RNA, 23 nt, Human
ucucgcucuguuucccaggugcc

SEQ ID NO: 602915 - RNA, 23 nt, Human
ucucguuuucugaacuuugucuu

SEQ ID NO: 602916 - RNA, 20 nt, Human
ucucuacaaaaagaaaaaaa

SEQ ID NO: 602917 - RNA, 22 nt, Human
ucugcccgccucggccucccag

SEQ ID NO: 602918 - RNA, 24 nt, Human
ucugucacccaggcuggagugcag

SEQ ID NO: 602919 - RNA, 23 nt, Human
ucuguugucuuaaugauaccaau

SEQ ID NO: 602920 - RNA, 23 nt, Human
ucuuacucugucacccaggcugg

SEQ ID NO: 602921 - RNA, 24 nt, Human
ucuuacucugucacccaggcugga

SEQ ID NO: 602922 - RNA, 19 nt, Human
ucuugaacuccugaccuug

SEQ ID NO: 602923 - RNA, 23 nt, Human
ucuugaacuucugggcucaagca

SEQ ID NO: 602924 - RNA, 25 nt, Human
ucuuucauuuuuggcagugagaugg

SEQ ID NO: 602925 - RNA, 20 nt, Human
ugaaaacacuggccaucuau

SEQ ID NO: 602926 - RNA, 20 nt, Human
ugaaggaacuccaaaaaaaa

SEQ ID NO: 602927 - RNA, 19 nt, Human
ugacaagaagcaauauuua

SEQ ID NO: 602928 - RNA, 24 nt, Human
ugacuugcuaucucucaagugcua

SEQ ID NO: 602929 - RNA, 19 nt, Human
ugagacggagucuuacucu

SEQ ID NO: 602930 - RNA, 18 nt, Human
ugaucucaagugaucugc

SEQ ID NO: 602931 - RNA, 24 nt, Human
ugaucucaagugaucugcccgccu

SEQ ID NO: 602932 - RNA, 24 nt, Human
ugcacugcgaguagaaucauuaca

SEQ ID NO: 602933 - RNA, 22 nt, Human
ugcccaggcuagucuugaacuu

SEQ ID NO: 602934 - RNA, 24 nt, Human
ugcccaggcuagucuugaacuucu

SEQ ID NO: 602935 - RNA, 28 nt, Human
ugcccaggcuagucuugaacuucugggc

SEQ ID NO: 602936 - RNA, 22 nt, Human
ugccucagccucccgaguagcu

SEQ ID NO: 602937 - RNA, 24 nt, Human
ugccucagccucccgaguagcugg

SEQ ID NO: 602938 - RNA, 24 nt, Human
ugccucagccuccugaguagcugg

SEQ ID NO: 602939 - RNA, 27 nt, Human
ugcugggauuacaagcaugagccacug

SEQ ID NO: 602940 - RNA, 22 nt, Human
ugcugggauuacaggcaagagc

SEQ ID NO: 602941 - RNA, 24 nt, Human
ugcugggauuacaggcgugagcca

SEQ ID NO: 602942 - RNA, 24 nt, Human
ugcuucagcuucccaaagugcugg

SEQ ID NO: 602943 - RNA, 23 nt, Human
uggagugcaguggcacgaucuua

SEQ ID NO: 602944 - RNA, 24 nt, Human
uggagugcaguggcacgaucuuag

SEQ ID NO: 602945 - RNA, 23 nt, Human
uggagugcaguggcaugauauug

SEQ ID NO: 602946 - RNA, 24 nt, Human
uggagugcaguggcaugauauugg

SEQ ID NO: 602947 - RNA, 18 nt, Human
uggcaaaauuuacuggug

SEQ ID NO: 602948 - RNA, 24 nt, Human
uggcacgaucuuagcucacugcaa

SEQ ID NO: 602949 - RNA, 21 nt, Human
uggcagugagauggggacacu

SEQ ID NO: 602950 - RNA, 21 nt, Human
uggcagugagauggggacacu

SEQ ID NO: 602951 - RNA, 24 nt, Human
uggcaugauauuggcucaccacaa

SEQ ID NO: 602952 - RNA, 24 nt, Human
uggccaggguggucucgaacuccu

SEQ ID NO: 602953 - RNA, 18 nt, Human
ugggacuauaggcgugca

SEQ ID NO: 602954 - RNA, 21 nt, Human
ugggauuacaagcaugagcca

SEQ ID NO: 602955 - RNA, 22 nt, Human
ugggauuacaagcaugagccac

SEQ ID NO: 602956 - RNA, 22 nt, Human
ugggauuacaagcaugagccac

SEQ ID NO: 602957 - RNA, 24 nt, Human
ugggauuacaagcaugagccacug

SEQ ID NO: 602958 - RNA, 26 nt, Human
ugggauuacaagcaugagccacugca

SEQ ID NO: 602959 - RNA, 22 nt, Human
ugggauuacaggcaagagccac

SEQ ID NO: 602960 - RNA, 22 nt, Human
ugggauuacaggcaagagccac

SEQ ID NO: 602961 - RNA, 23 nt, Human
ugggauuacaggcaagagccacu

SEQ ID NO: 602962 - RNA, 24 nt, Human
ugggauuacaggcaagagccacua

SEQ ID NO: 602963 - RNA, 24 nt, Human
ugggauuacaggcaagagccacua

SEQ ID NO: 602964 - RNA, 19 nt, Human
ugggauuacaggcgugagc

SEQ ID NO: 602965 - RNA, 21 nt, Human
ugggauuacaggcgugagcca

SEQ ID NO: 602966 - RNA, 22 nt, Human
ugggauuacaggcgugagccac

SEQ ID NO: 602967 - RNA, 23 nt, Human
ugggauuacaggcgugagccacc

SEQ ID NO: 602968 - RNA, 24 nt, Human
ugggauuacaggcgugagccaccg

SEQ ID NO: 602969 - RNA, 21 nt, Human
ugggauuacaggugcccgcca

SEQ ID NO: 602970 - RNA, 22 nt, Human
ugggauuacaggugcccgccac

SEQ ID NO: 602971 - RNA, 24 nt, Human
ugggauuacaggugcccgccacca

SEQ ID NO: 602972 - RNA, 19 nt, Human
ugggauuguagauugaccu

SEQ ID NO: 602973 - RNA, 24 nt, Human
ugggcucaagcaauccuccugcuu

SEQ ID NO: 602974 - RNA, 22 nt, Human
ugggggucugauaugcuuuuua

SEQ ID NO: 602975 - RNA, 23 nt, Human
uggguucaagugauucucgugcc

SEQ ID NO: 602976 - RNA, 24 nt, Human
ugguagagaccgagucucacuaug

SEQ ID NO: 602977 - RNA, 21 nt, Human
uguagaaguuugcaaaugaaa

SEQ ID NO: 602978 - RNA, 21 nt, Human
uguauuuuuaguagagacggg

SEQ ID NO: 602979 - RNA, 21 nt, Human
ugucauagaaacccccaaaac

SEQ ID NO: 602980 - RNA, 20 nt, Human
uguccaggcuggagugcagu

SEQ ID NO: 602981 - RNA, 21 nt, Human
uguccaggcuggagugcagug

SEQ ID NO: 602982 - RNA, 22 nt, Human
uguccaggcuggagugcagugg

SEQ ID NO: 602983 - RNA, 24 nt, Human
uguccaggcuggagugcaguggca

SEQ ID NO: 602984 - RNA, 20 nt, Human
uguguaaucuacuuaaggug

SEQ ID NO: 602985 - RNA, 24 nt, Human
uguugcugucucuauuccacugaa

SEQ ID NO: 602986 - RNA, 23 nt, Human
uuaauuuuuuuuuuccccagagu

SEQ ID NO: 602987 - RNA, 24 nt, Human
uuacucugucacccaggcuggagu

SEQ ID NO: 602988 - RNA, 24 nt, Human
uuaguagagacaggguuucaccau

SEQ ID NO: 602989 - RNA, 18 nt, Human
uuaguagagacgggguuu

SEQ ID NO: 602990 - RNA, 22 nt, Human
uuaguagagacgggguuucacc

SEQ ID NO: 602991 - RNA, 24 nt, Human
uuaguagagacgggguuucaccac

SEQ ID NO: 602992 - RNA, 25 nt, Human
uuaguagagacgggguuucaccacg

SEQ ID NO: 602993 - RNA, 21 nt, Human
uucaagcgauucuccugccuc

SEQ ID NO: 602994 - RNA, 23 nt, Human
uucaagcgauucuccugccucag

SEQ ID NO: 602995 - RNA, 24 nt, Human
uucaagcgauucuccugccucagc

SEQ ID NO: 602996 - RNA, 23 nt, Human
uucaagugauucucgugccucag

SEQ ID NO: 602997 - RNA, 23 nt, Human
uucuagguauaaauauggaggac

SEQ ID NO: 602998 - RNA, 19 nt, Human
uucugcucaccgccucaag

SEQ ID NO: 602999 - RNA, 24 nt, Human
uugauuggaagggacucugagauc

SEQ ID NO: 603000 - RNA, 19 nt, Human
uuggcccaggccucggccu

SEQ ID NO: 603001 - RNA, 24 nt, Human
uuguccaggcuggagugcaguggc

SEQ ID NO: 603002 - RNA, 23 nt, Human
uugugccacugcacuccagcuug

SEQ ID NO: 603003 - RNA, 18 nt, Human
uuuagccauuucugaaaa

SEQ ID NO: 603004 - RNA, 19 nt, Human
uuucaccacguuggccagg

SEQ ID NO: 603005 - RNA, 22 nt, Human
uuugggccaggcuggucuugaa

SEQ ID NO: 603006 - RNA, 24 nt, Human
uuuuuaguagagacgggguuucac

SEQ ID NO: 603007 - RNA, 20 nt, Human
uuuuuguauauuuaguagag

SEQ ID NO: 603008 - RNA, 20 nt, Human
uuuuuguauuuuuaguagag

SEQ ID NO: 603009 - RNA, 21 nt, Human
uuuuuguauuuuuaguagaga

SEQ ID NO: 603010 - RNA, 19 nt, Human
uuuuuugguagagaccgag

SEQ ID NO: 603011 - RNA, 20 nt, Human
aggaagcccccgaugggggc

SEQ ID NO: 603012 - RNA, 19 nt, Human
aggcaaaaggagguacagg

SEQ ID NO: 603013 - RNA, 19 nt, Human
aggcaaaaggagguacagg

SEQ ID NO: 603014 - RNA, 18 nt, Human
cagagcaguccgccggcc

SEQ ID NO: 603015 - RNA, 22 nt, Human
cagcuucugccagccuccacug

SEQ ID NO: 603016 - RNA, 20 nt, Human
cccguggcugcgcagcucgg

SEQ ID NO: 603017 - RNA, 21 nt, Human
ccucuucagagcaguccgccg

SEQ ID NO: 603018 - RNA, 20 nt, Human
ccugacaccuucuccccacu

SEQ ID NO: 603019 - RNA, 21 nt, Human
cucagcuucugccagccucca

SEQ ID NO: 603020 - RNA, 18 nt, Human
cugacaccuucuccccac

SEQ ID NO: 603021 - RNA, 25 nt, Human
cuuagcuucugucucuggcuuuggc

SEQ ID NO: 603022 - RNA, 21 nt, Human
gacaccuucuccccacuggcu

SEQ ID NO: 603023 - RNA, 21 nt, Human
gagcagagccaggcaaaagga

SEQ ID NO: 603024 - RNA, 18 nt, Human
gagggguagggaucugga

SEQ ID NO: 603025 - RNA, 18 nt, Human
ggaaagggcuucuccccc

SEQ ID NO: 603026 - RNA, 20 nt, Human
gucacgucucagcuucugcc

SEQ ID NO: 603027 - RNA, 21 nt, Human
uaaugaguguuacuccuagac

SEQ ID NO: 603028 - RNA, 19 nt, Human
uagcuucugucucuggcuu

SEQ ID NO: 603029 - RNA, 18 nt, Human
uccccacuggcuuccucu

SEQ ID NO: 603030 - RNA, 21 nt, Human
ucccggaguguggugcugggg

SEQ ID NO: 603031 - RNA, 24 nt, Human
uccuagacagucacgucucagcuu

SEQ ID NO: 603032 - RNA, 20 nt, Human
ucucuggcuuuggcuucacc

SEQ ID NO: 603033 - RNA, 21 nt, Human
ucugccuuagcuucugucucu

SEQ ID NO: 603034 - RNA, 26 nt, Human
ucugccuuagcuucugucucuggcuu

SEQ ID NO: 603035 - RNA, 24 nt, Human
ugccuuagcuucugucucuggcuu

SEQ ID NO: 603036 - RNA, 18 nt, Human
uggccgcggagccugaca

SEQ ID NO: 603037 - RNA, 20 nt, Human
ugggggcugggcucccggag

SEQ ID NO: 603038 - RNA, 21 nt, Human
ugucccagcucucuuagcugg

SEQ ID NO: 603039 - RNA, 23 nt, Human
ugucccagcucucuuagcuggcc

SEQ ID NO: 603040 - RNA, 27 nt, Human
aaacaaauaauauuaacaaccccagag

SEQ ID NO: 603041 - RNA, 21 nt, Human
aaacaugccagaaaaggauuc

SEQ ID NO: 603042 - RNA, 27 nt, Human
aaagaaaaaaaucaaauacucuuaagc

SEQ ID NO: 603043 - RNA, 22 nt, Human
aaauauaucacccuucaaugca

SEQ ID NO: 603044 - RNA, 19 nt, Human
aagacugaaaaauaucgug

SEQ ID NO: 603045 - RNA, 19 nt, Human
aaggucugaaaacuaaguc

SEQ ID NO: 603046 - RNA, 22 nt, Human
aaguaaaggcuccaagucuuaa

SEQ ID NO: 603047 - RNA, 18 nt, Human
acaaccccagagugaacu

SEQ ID NO: 603048 - RNA, 22 nt, Human
accuacagcuacucuguaauga

SEQ ID NO: 603049 - RNA, 20 nt, Human
agaaaaagaaaaaaaucaaa

SEQ ID NO: 603050 - RNA, 20 nt, Human
agccccggaaccucucuucu

SEQ ID NO: 603051 - RNA, 25 nt, Human
aggaaaaaucaaauccaaaguacua

SEQ ID NO: 603052 - RNA, 20 nt, Human
aggucugaaaacuaagucua

SEQ ID NO: 603053 - RNA, 26 nt, Human
augaaacaaauaauauuaacaacccc

SEQ ID NO: 603054 - RNA, 21 nt, Human
caagucuuaaguauccaauuu

SEQ ID NO: 603055 - RNA, 22 nt, Human
caaguguaguaaaaacgaaaac

SEQ ID NO: 603056 - RNA, 20 nt, Human
caaugcauauacaauaguua

SEQ ID NO: 603057 - RNA, 21 nt, Human
cagcccagccccggaaccucu

SEQ ID NO: 603058 - RNA, 19 nt, Human
ccagcccagccccggaacc

SEQ ID NO: 603059 - RNA, 22 nt, Human
cccagccccggaaccucucuuc

SEQ ID NO: 603060 - RNA, 24 nt, Human
cuaccuacagcuacucuguaauga

SEQ ID NO: 603061 - RNA, 23 nt, Human
gaaaaaaccuguaucagcucaaa

SEQ ID NO: 603062 - RNA, 20 nt, Human
gccccggaaccucucuucca

SEQ ID NO: 603063 - RNA, 26 nt, Human
gccccggaaccucucuuccagugcuu

SEQ ID NO: 603064 - RNA, 25 nt, Human
uaaacacauauacaauacaaacuaa

SEQ ID NO: 603065 - RNA, 22 nt, Human
uaacaaccccagagugaacuaa

SEQ ID NO: 603066 - RNA, 23 nt, Human
uaacucaguguacaguacuggau

SEQ ID NO: 603067 - RNA, 19 nt, Human
uaagacugaaaaauaucgu

SEQ ID NO: 603068 - RNA, 25 nt, Human
uaagucuaucagagagaauugcaau

SEQ ID NO: 603069 - RNA, 28 nt, Human
uaguaaaaacgaaaacugaggucaguac

SEQ ID NO: 603070 - RNA, 20 nt, Human
uauaucacccuucaaugcau

SEQ ID NO: 603071 - RNA, 23 nt, Human
uccauggagagccucauuauuuc

SEQ ID NO: 603072 - RNA, 20 nt, Human
ucccucaaaggacauuaaau

SEQ ID NO: 603073 - RNA, 22 nt, Human
ucucacacaagcaauacaaaau

SEQ ID NO: 603074 - RNA, 22 nt, Human
ugaaaaauaucgugagcaaaaa

SEQ ID NO: 603075 - RNA, 19 nt, Human
ugccaaauaucacaucuua

SEQ ID NO: 603076 - RNA, 26 nt, Human
ugcuugaauuuccgccgguacagcgu

SEQ ID NO: 603077 - RNA, 21 nt, Human
uguauuagaaauccucaagca

SEQ ID NO: 603078 - RNA, 26 nt, Human
uguucauccuuccauggagagccuca

SEQ ID NO: 603079 - RNA, 21 nt, Human
uuauaaauauuuuuggguuuu

SEQ ID NO: 603080 - RNA, 19 nt, Human
aaacgccgacccacccccc

SEQ ID NO: 603081 - RNA, 19 nt, Human
aacggagcccucaccugcc

SEQ ID NO: 603082 - RNA, 18 nt, Human
aagcagaaugggaacccg

SEQ ID NO: 603083 - RNA, 19 nt, Human
aaggcacccugcccuggag

SEQ ID NO: 603084 - RNA, 18 nt, Human
acagacagcugaacuggg

SEQ ID NO: 603085 - RNA, 19 nt, Human
acccagaagcuggcacacc

SEQ ID NO: 603086 - RNA, 26 nt, Human
agccaguaaccgguggugugggcaca

SEQ ID NO: 603087 - RNA, 20 nt, Human
agcugcucccuccccucccc

SEQ ID NO: 603088 - RNA, 19 nt, Human
aggacggggagaggaaggg

SEQ ID NO: 603089 - RNA, 21 nt, Human
aggaggaggagggagcggggc

SEQ ID NO: 603090 - RNA, 22 nt, Human
aggaggaggagggagcggggcc

SEQ ID NO: 603091 - RNA, 21 nt, Human
agggacucggagccccaaggc

SEQ ID NO: 603092 - RNA, 21 nt, Human
aguggcagaagcagaauggga

SEQ ID NO: 603093 - RNA, 24 nt, Human
caacggagcccucaccugccugcc

SEQ ID NO: 603094 - RNA, 18 nt, Human
cacacagcuggaaguggc

SEQ ID NO: 603095 - RNA, 20 nt, Human
cacacugugguacuguggga

SEQ ID NO: 603096 - RNA, 19 nt, Human
cacccccacacugggccca

SEQ ID NO: 603097 - RNA, 20 nt, Human
cagaaugggaacccgggcag

SEQ ID NO: 603098 - RNA, 19 nt, Human
cagaccaaggcaacggagc

SEQ ID NO: 603099 - RNA, 24 nt, Human
cagcagcccuggcagcagccucug

SEQ ID NO: 603100 - RNA, 18 nt, Human
caggacggggagaggaag

SEQ ID NO: 603101 - RNA, 21 nt, Human
cauggccaaguccuguguucc

SEQ ID NO: 603102 - RNA, 19 nt, Human
cauucaccccccugccauc

SEQ ID NO: 603103 - RNA, 19 nt, Human
ccagacccugcuucugaca

SEQ ID NO: 603104 - RNA, 24 nt, Human
ccauagaaugacccagaagcuggc

SEQ ID NO: 603105 - RNA, 19 nt, Human
cccacacagggacaggaga

SEQ ID NO: 603106 - RNA, 21 nt, Human
cccaccacugacuccagggga

SEQ ID NO: 603107 - RNA, 21 nt, Human
cccagaccaaggcaacggagc

SEQ ID NO: 603108 - RNA, 18 nt, Human
cccauagaaugacccaga

SEQ ID NO: 603109 - RNA, 19 nt, Human
ccccacacugggcccaagc

SEQ ID NO: 603110 - RNA, 19 nt, Human
ccccacacugggcccaagc

SEQ ID NO: 603111 - RNA, 22 nt, Human
ccccugcuucccugacuccccu

SEQ ID NO: 603112 - RNA, 21 nt, Human
cccgaguccacugggggguga

SEQ ID NO: 603113 - RNA, 18 nt, Human
cccgccgucugcccggag

SEQ ID NO: 603114 - RNA, 26 nt, Human
ccggcggccuccucguuccgccuccc

SEQ ID NO: 603115 - RNA, 18 nt, Human
ccucaccugccugccacc

SEQ ID NO: 603116 - RNA, 22 nt, Human
ccugaacuaaggcagcaucuuu

SEQ ID NO: 603117 - RNA, 18 nt, Human
ccuggcccugccauucac

SEQ ID NO: 603118 - RNA, 23 nt, Human
cgaaggcaccaaaaggugaaggc

SEQ ID NO: 603119 - RNA, 23 nt, Human
cguuccgccucccaguuuuccca

SEQ ID NO: 603120 - RNA, 23 nt, Human
cuacuggaaggcacccugcccug

SEQ ID NO: 603121 - RNA, 19 nt, Human
cuccucucuggcccccuca

SEQ ID NO: 603122 - RNA, 20 nt, Human
cucgcugaagccccauucca

SEQ ID NO: 603123 - RNA, 22 nt, Human
cugcggagaaagaugcuccugg

SEQ ID NO: 603124 - RNA, 24 nt, Human
cuggaggcuucccuuggcuacugg

SEQ ID NO: 603125 - RNA, 18 nt, Human
cuggcccccucauccagg

SEQ ID NO: 603126 - RNA, 20 nt, Human
cugggcccacacagggacag

SEQ ID NO: 603127 - RNA, 23 nt, Human
cuuggcgcuaacacagccucggc

SEQ ID NO: 603128 - RNA, 24 nt, Human
gaagccccauuccagacccugcuu

SEQ ID NO: 603129 - RNA, 21 nt, Human
gaaugacccagaagcuggcac

SEQ ID NO: 603130 - RNA, 22 nt, Human
gacucggagccccaaggccuuu

SEQ ID NO: 603131 - RNA, 19 nt, Human
gagccaguaaccgguggug

SEQ ID NO: 603132 - RNA, 23 nt, Human
gcauuugacucccaaaacagcuc

SEQ ID NO: 603133 - RNA, 22 nt, Human
gcuaacacagccucggcugcgc

SEQ ID NO: 603134 - RNA, 19 nt, Human
gcucccuccccuccccugc

SEQ ID NO: 603135 - RNA, 18 nt, Human
gcugaacugggucgugcc

SEQ ID NO: 603136 - RNA, 19 nt, Human
ggaagcuucccaccacuga

SEQ ID NO: 603137 - RNA, 18 nt, Human
ggaaggaggaggagggag

SEQ ID NO: 603138 - RNA, 19 nt, Human
ggaggagggagcggggcag

SEQ ID NO: 603139 - RNA, 21 nt, Human
ggcagccugguuccuggcccu

SEQ ID NO: 603140 - RNA, 18 nt, Human
ggcugcggggauuuuauu

SEQ ID NO: 603141 - RNA, 26 nt, Human
gggaacccgggcagccugguuccugg

SEQ ID NO: 603142 - RNA, 18 nt, Human
gggaaggaggaggaggga

SEQ ID NO: 603143 - RNA, 20 nt, Human
gggagaggaagggacucgga

SEQ ID NO: 603144 - RNA, 20 nt, Human
gggcccacacagggacagga

SEQ ID NO: 603145 - RNA, 19 nt, Human
ggugcuaaaugaggaaacg

SEQ ID NO: 603146 - RNA, 22 nt, Human
gugaugccugcugcugaggguu

SEQ ID NO: 603147 - RNA, 24 nt, Human
uagaagaugcuacugguggcccac

SEQ ID NO: 603148 - RNA, 22 nt, Human
ucacuccucucuggcccccuca

SEQ ID NO: 603149 - RNA, 21 nt, Human
uccagagguugcugaggacuc

SEQ ID NO: 603150 - RNA, 18 nt, Human
uccaggggaaggaggagg

SEQ ID NO: 603151 - RNA, 19 nt, Human
ucccaccacugacuccagg

SEQ ID NO: 603152 - RNA, 18 nt, Human
ucccacuacgaggcaggg

SEQ ID NO: 603153 - RNA, 24 nt, Human
uccccuccccugcuucccugacuc

SEQ ID NO: 603154 - RNA, 20 nt, Human
uccuuggcgcuaacacagcc

SEQ ID NO: 603155 - RNA, 24 nt, Human
ucucgccaggaaacggucugcgga

SEQ ID NO: 603156 - RNA, 24 nt, Human
ucucuggaggcuucccuuggcuac

SEQ ID NO: 603157 - RNA, 22 nt, Human
ucugaagccacuuccuugccca

SEQ ID NO: 603158 - RNA, 21 nt, Human
ucuggcccccucauccaggag

SEQ ID NO: 603159 - RNA, 24 nt, Human
ucugugcucucuggaggcuucccu

SEQ ID NO: 603160 - RNA, 21 nt, Human
ugccuggagcucuccgugggg

SEQ ID NO: 603161 - RNA, 23 nt, Human
ugccuggagcucuccguggggcc

SEQ ID NO: 603162 - RNA, 19 nt, Human
uggaaggcacccugcccug

SEQ ID NO: 603163 - RNA, 20 nt, Human
uggcagcagccucugcuaac

SEQ ID NO: 603164 - RNA, 24 nt, Human
ugggaacccgggcagccugguucc

SEQ ID NO: 603165 - RNA, 20 nt, Human
ugggccggguugggaccggc

SEQ ID NO: 603166 - RNA, 19 nt, Human
uggggccagcugaggcugg

SEQ ID NO: 603167 - RNA, 23 nt, Human
uguuccagagguugcugaggacu

SEQ ID NO: 603168 - RNA, 21 nt, Human
uuauucacuccucucuggccc

SEQ ID NO: 603169 - RNA, 18 nt, Human
uucccaccacugacucca

SEQ ID NO: 603170 - RNA, 19 nt, Human
uugcugaggacucuccugg

SEQ ID NO: 603171 - RNA, 19 nt, Human
aaacgcgggcuccuccugg

SEQ ID NO: 603172 - RNA, 24 nt, Human
aaagugcugggaugacagguguga

SEQ ID NO: 603173 - RNA, 18 nt, Human
aacucacaggcucuccuu

SEQ ID NO: 603174 - RNA, 26 nt, Human
acacaagaccuuccccagucaucucu

SEQ ID NO: 603175 - RNA, 23 nt, Human
acaggugugagccaccgcaccca

SEQ ID NO: 603176 - RNA, 19 nt, Human
acucucuuugcccccuucu

SEQ ID NO: 603177 - RNA, 23 nt, Human
acucugggugccagcaucuggag

SEQ ID NO: 603178 - RNA, 18 nt, Human
acucugucauccaggcug

SEQ ID NO: 603179 - RNA, 24 nt, Human
acucugucauccaggcuggagggc

SEQ ID NO: 603180 - RNA, 21 nt, Human
agaccaaggaacagagaccug

SEQ ID NO: 603181 - RNA, 21 nt, Human
agagaagaagccggcaaugua

SEQ ID NO: 603182 - RNA, 21 nt, Human
agaggugcagccggggcugcc

SEQ ID NO: 603183 - RNA, 18 nt, Human
aggccucaagcgcuucuc

SEQ ID NO: 603184 - RNA, 22 nt, Human
aggcuuggaagccaccccagcc

SEQ ID NO: 603185 - RNA, 18 nt, Human
aucucacucugucaucca

SEQ ID NO: 603186 - RNA, 24 nt, Human
caaagugcugggaugacaggugug

SEQ ID NO: 603187 - RNA, 22 nt, Human
caagcgcuucuccugccuuggc

SEQ ID NO: 603188 - RNA, 21 nt, Human
cacaccucuccacacugccca

SEQ ID NO: 603189 - RNA, 19 nt, Human
caccaaagcucauugcagc

SEQ ID NO: 603190 - RNA, 21 nt, Human
caccgcacccagccagagggc

SEQ ID NO: 603191 - RNA, 20 nt, Human
cacuccugcccucccagagg

SEQ ID NO: 603192 - RNA, 22 nt, Human
cacucugucauccaggcuggag

SEQ ID NO: 603193 - RNA, 24 nt, Human
cacucugucauccaggcuggaggg

SEQ ID NO: 603194 - RNA, 22 nt, Human
cagaagccccuuccuugggucu

SEQ ID NO: 603195 - RNA, 23 nt, Human
cagagcccuccacuccugggucu

SEQ ID NO: 603196 - RNA, 19 nt, Human
caguggugccaccaaagcu

SEQ ID NO: 603197 - RNA, 21 nt, Human
ccaaagugcugggaugacagg

SEQ ID NO: 603198 - RNA, 24 nt, Human
ccaaagugcugggaugacaggugu

SEQ ID NO: 603199 - RNA, 22 nt, Human
ccacacugcccagugaagacca

SEQ ID NO: 603200 - RNA, 21 nt, Human
ccaccaagccugacucucuuu

SEQ ID NO: 603201 - RNA, 23 nt, Human
ccaccaagccugacucucuuugc

SEQ ID NO: 603202 - RNA, 20 nt, Human
ccaccagaagccccuuccuu

SEQ ID NO: 603203 - RNA, 22 nt, Human
ccacugaggaugcgccagacac

SEQ ID NO: 603204 - RNA, 26 nt, Human
ccagaagccccuuccuugggucuucc

SEQ ID NO: 603205 - RNA, 23 nt, Human
ccagaggugccuagaaaguagag

SEQ ID NO: 603206 - RNA, 21 nt, Human
ccucaagcgcuucuccugccu

SEQ ID NO: 603207 - RNA, 21 nt, Human
ccucaugccccagccacaggc

SEQ ID NO: 603208 - RNA, 24 nt, Human
ccucucauucugaagagccgggaa

SEQ ID NO: 603209 - RNA, 26 nt, Human
ccugcccucccagaggugccuagaaa

SEQ ID NO: 603210 - RNA, 21 nt, Human
ccugggucuggcaggccaccc

SEQ ID NO: 603211 - RNA, 19 nt, Human
cgcgggcuccuccuggcca

SEQ ID NO: 603212 - RNA, 22 nt, Human
cgcgggcuccuccuggccacac

SEQ ID NO: 603213 - RNA, 18 nt, Human
cggcccaggacgaggaaa

SEQ ID NO: 603214 - RNA, 23 nt, Human
cgugcaccaccacacccagcuaa

SEQ ID NO: 603215 - RNA, 20 nt, Human
cucacagagcccuccacucc

SEQ ID NO: 603216 - RNA, 24 nt, Human
cucacucugucauccaggcuggag

SEQ ID NO: 603217 - RNA, 24 nt, Human
cucucuguccuacuugccucccgg

SEQ ID NO: 603218 - RNA, 21 nt, Human
cugaagagccgggaaguccau

SEQ ID NO: 603219 - RNA, 23 nt, Human
cugccuuggccucccaaagugcu

SEQ ID NO: 603220 - RNA, 21 nt, Human
cugcuggagagugguuggacc

SEQ ID NO: 603221 - RNA, 22 nt, Human
cuucucaccccuuuccaugucc

SEQ ID NO: 603222 - RNA, 20 nt, Human
cuugccucccggcuuucucu

SEQ ID NO: 603223 - RNA, 23 nt, Human
gaagccaccccagccaccaagcc

SEQ ID NO: 603224 - RNA, 21 nt, Human
gaccugcgcagggcucacccc

SEQ ID NO: 603225 - RNA, 21 nt, Human
gaggcuuggaagccaccccag

SEQ ID NO: 603226 - RNA, 18 nt, Human
gaugacaggugugagcca

SEQ ID NO: 603227 - RNA, 22 nt, Human
gccuuggccucccaaagugcug

SEQ ID NO: 603228 - RNA, 18 nt, Human
gcgugcaccaccacaccc

SEQ ID NO: 603229 - RNA, 18 nt, Human
gcuucuccugccuuggcc

SEQ ID NO: 603230 - RNA, 20 nt, Human
gcuucuccugccuuggccuc

SEQ ID NO: 603231 - RNA, 24 nt, Human
ggaacagagaccugcgcagggcuc

SEQ ID NO: 603232 - RNA, 24 nt, Human
ggcuggucuugaacuccaggccuc

SEQ ID NO: 603233 - RNA, 24 nt, Human
gggaaggagaggugcagccggggc

SEQ ID NO: 603234 - RNA, 19 nt, Human
gggaugacaggugugagcc

SEQ ID NO: 603235 - RNA, 24 nt, Human
gggcccucacagagcccuccacuc

SEQ ID NO: 603236 - RNA, 21 nt, Human
gguugucaucugcucccacuc

SEQ ID NO: 603237 - RNA, 23 nt, Human
gugguuggacccuguguuucugg

SEQ ID NO: 603238 - RNA, 24 nt, Human
uaaauugcacaggcuggucuugaa

SEQ ID NO: 603239 - RNA, 22 nt, Human
uaauuuugguauuuuuuggugg

SEQ ID NO: 603240 - RNA, 25 nt, Human
uaauuuugguauuuuuugguggaga

SEQ ID NO: 603241 - RNA, 19 nt, Human
uagacccuggucuggacaa

SEQ ID NO: 603242 - RNA, 22 nt, Human
uaggugggacuacaugcgugca

SEQ ID NO: 603243 - RNA, 19 nt, Human
ucacagagcccuccacucc

SEQ ID NO: 603244 - RNA, 24 nt, Human
ucacaggcucuccuuccucagccu

SEQ ID NO: 603245 - RNA, 21 nt, Human
ucagugagggcuuguuuccug

SEQ ID NO: 603246 - RNA, 22 nt, Human
uccacugaggaugcgccagaca

SEQ ID NO: 603247 - RNA, 23 nt, Human
ucccaaagugcugggaugacagg

SEQ ID NO: 603248 - RNA, 23 nt, Human
uccccagucaucucucuguccua

SEQ ID NO: 603249 - RNA, 22 nt, Human
ucccgggcccucacagagcccu

SEQ ID NO: 603250 - RNA, 23 nt, Human
ucccuguccugaguccgaauucc

SEQ ID NO: 603251 - RNA, 19 nt, Human
uccuccuggccacaccucu

SEQ ID NO: 603252 - RNA, 24 nt, Human
uccugaguccgaauucccgggccc

SEQ ID NO: 603253 - RNA, 22 nt, Human
ucuaaaaugguugucaucugcu

SEQ ID NO: 603254 - RNA, 21 nt, Human
ucucaccccuuuccauguccc

SEQ ID NO: 603255 - RNA, 23 nt, Human
ucucacucugucauccaggcugg

SEQ ID NO: 603256 - RNA, 24 nt, Human
ucucacucugucauccaggcugga

SEQ ID NO: 603257 - RNA, 23 nt, Human
ucucucuguccuacuugccuccc

SEQ ID NO: 603258 - RNA, 24 nt, Human
ucugaagagccgggaaguccaucu

SEQ ID NO: 603259 - RNA, 23 nt, Human
ugcagccggggcugccucaugcc

SEQ ID NO: 603260 - RNA, 18 nt, Human
ugccagaguagacccugg

SEQ ID NO: 603261 - RNA, 18 nt, Human
ugccagcaucuggaguug

SEQ ID NO: 603262 - RNA, 21 nt, Human
ugccucccggcuuucucuucc

SEQ ID NO: 603263 - RNA, 21 nt, Human
ugcgugcaccaccacacccag

SEQ ID NO: 603264 - RNA, 22 nt, Human
ugcucccacuccugcccuccca

SEQ ID NO: 603265 - RNA, 18 nt, Human
ugcugggaugacaggugu

SEQ ID NO: 603266 - RNA, 24 nt, Human
ugggacuacaugcgugcaccacca

SEQ ID NO: 603267 - RNA, 22 nt, Human
ugggaugacaggugugagccac

SEQ ID NO: 603268 - RNA, 23 nt, Human
ugggaugacaggugugagccacc

SEQ ID NO: 603269 - RNA, 24 nt, Human
ugggaugacaggugugagccaccg

SEQ ID NO: 603270 - RNA, 22 nt, Human
uucccgggcccucacagagccc

SEQ ID NO: 603271 - RNA, 20 nt, Human
uuccucagccuccugaguag

SEQ ID NO: 603272 - RNA, 20 nt, Human
uuccuugggucuuccagaca

SEQ ID NO: 603273 - RNA, 22 nt, Human
uuccuugggucuuccagacaca

SEQ ID NO: 603274 - RNA, 21 nt, Human
uucucaccccuuuccaugucc

SEQ ID NO: 603275 - RNA, 23 nt, Human
uuggaagccaccccagccaccaa

SEQ ID NO: 603276 - RNA, 18 nt, Human
uuggccucccaaagugcu

SEQ ID NO: 603277 - RNA, 21 nt, Human
uuugaacacuggagaagugag

SEQ ID NO: 603278 - RNA, 19 nt, Human
uuuuugguggagaugggau

SEQ ID NO: 603279 - RNA, 18 nt, Human
uuuuuugguggagauggg

SEQ ID NO: 603280 - RNA, 24 nt, Human
aaaaaagaaucuucuguaaguaaa

SEQ ID NO: 603281 - RNA, 21 nt, Human
aaaccaaaccaaaaaggagga

SEQ ID NO: 603282 - RNA, 20 nt, Human
aaagugagagcagcuacaga

SEQ ID NO: 603283 - RNA, 21 nt, Human
aagaauuuguagcuggaaaca

SEQ ID NO: 603284 - RNA, 19 nt, Human
aagacaucugaaugugaug

SEQ ID NO: 603285 - RNA, 21 nt, Human
aagagcaacuuguaggcucua

SEQ ID NO: 603286 - RNA, 22 nt, Human
aaguaaacugguaguuuucuua

SEQ ID NO: 603287 - RNA, 25 nt, Human
acaaaaauuaaccgcuuguauuuca

SEQ ID NO: 603288 - RNA, 21 nt, Human
acaaagugagagcagcuacag

SEQ ID NO: 603289 - RNA, 22 nt, Human
acaaagugagagcagcuacaga

SEQ ID NO: 603290 - RNA, 20 nt, Human
acuuguuuccuauccucuga

SEQ ID NO: 603291 - RNA, 21 nt, Human
agaaaagacaaagugagagca

SEQ ID NO: 603292 - RNA, 21 nt, Human
agaaggcaaaccauuuaaaca

SEQ ID NO: 603293 - RNA, 23 nt, Human
agaauacauuacauguauaccag

SEQ ID NO: 603294 - RNA, 19 nt, Human
agcaaugugggcuuuuccc

SEQ ID NO: 603295 - RNA, 23 nt, Human
aggcaaaccauuuaaacaaugaa

SEQ ID NO: 603296 - RNA, 22 nt, Human
agggaggcggcacgccuugggg

SEQ ID NO: 603297 - RNA, 21 nt, Human
aguaagcauuugacucccuac

SEQ ID NO: 603298 - RNA, 23 nt, Human
aguuagugauaauugguaguaug

SEQ ID NO: 603299 - RNA, 18 nt, Human
augaaaccuacuguuugg

SEQ ID NO: 603300 - RNA, 18 nt, Human
auguaacuuggguucucu

SEQ ID NO: 603301 - RNA, 21 nt, Human
caaaccaaaaaggaggagagc

SEQ ID NO: 603302 - RNA, 19 nt, Human
caauaccuacauaaagaau

SEQ ID NO: 603303 - RNA, 21 nt, Human
cacuaacaaggaucagaaaaa

SEQ ID NO: 603304 - RNA, 19 nt, Human
cacuguucauuaagaaaac

SEQ ID NO: 603305 - RNA, 24 nt, Human
cauaagcaaacauuccugaaagug

SEQ ID NO: 603306 - RNA, 20 nt, Human
ccaaaaccaaaccaaaaagg

SEQ ID NO: 603307 - RNA, 21 nt, Human
ccaauguauccgcaacuccua

SEQ ID NO: 603308 - RNA, 25 nt, Human
ccaguauauccaauguauccgcaac

SEQ ID NO: 603309 - RNA, 24 nt, Human
ccagugucggcguaaacuuucucc

SEQ ID NO: 603310 - RNA, 22 nt, Human
ccauacgcgcuaauacaggcca

SEQ ID NO: 603311 - RNA, 18 nt, Human
ccugaccaacgcauggaa

SEQ ID NO: 603312 - RNA, 23 nt, Human
ccugcgacugagaacagggaggc

SEQ ID NO: 603313 - RNA, 24 nt, Human
cgacugagaacagggaggcggcac

SEQ ID NO: 603314 - RNA, 25 nt, Human
cgagggcccgaggccauacgcgcua

SEQ ID NO: 603315 - RNA, 21 nt, Human
cuaagagaaagaguuugcagu

SEQ ID NO: 603316 - RNA, 19 nt, Human
cugaauacuuaaaauagac

SEQ ID NO: 603317 - RNA, 28 nt, Human
gaaaagacaaagugagagcagcuacaga

SEQ ID NO: 603318 - RNA, 23 nt, Human
gaagaauuuguagcuggaaacac

SEQ ID NO: 603319 - RNA, 18 nt, Human
gagaacagggaggcggcc

SEQ ID NO: 603320 - RNA, 19 nt, Human
gaggagagcagacaaggcu

SEQ ID NO: 603321 - RNA, 19 nt, Human
gaggagagcagacaaggcu

SEQ ID NO: 603322 - RNA, 20 nt, Human
gaggagagcagacaaggcuu

SEQ ID NO: 603323 - RNA, 24 nt, Human
gagucaguuccaaaaccaaaccaa

SEQ ID NO: 603324 - RNA, 18 nt, Human
gcugcccucuuucuuuuc

SEQ ID NO: 603325 - RNA, 23 nt, Human
ggagucaguuccaaaaccaaacc

SEQ ID NO: 603326 - RNA, 21 nt, Human
gggaggcggcacgccuugggg

SEQ ID NO: 603327 - RNA, 19 nt, Human
gggaucaaaaucuuuucug

SEQ ID NO: 603328 - RNA, 23 nt, Human
uaacaauaccuacauaaagaaua

SEQ ID NO: 603329 - RNA, 22 nt, Human
uaagcauuugacucccuacaua

SEQ ID NO: 603330 - RNA, 18 nt, Human
uaauaagucacaaccaag

SEQ ID NO: 603331 - RNA, 23 nt, Human
uaauaagucacaaccaagacauc

SEQ ID NO: 603332 - RNA, 23 nt, Human
uacagcauacaaaaaauggcaag

SEQ ID NO: 603333 - RNA, 24 nt, Human
uaccagaagagaaauacuuguuuc

SEQ ID NO: 603334 - RNA, 22 nt, Human
uaccaguguuuucagggccccc

SEQ ID NO: 603335 - RNA, 21 nt, Human
uacuguuuggaaaaaagaauc

SEQ ID NO: 603336 - RNA, 19 nt, Human
uacuuguuuccuauccucu

SEQ ID NO: 603337 - RNA, 18 nt, Human
uagaaaaugguggaggca

SEQ ID NO: 603338 - RNA, 19 nt, Human
uagugauaauugguaguau

SEQ ID NO: 603339 - RNA, 18 nt, Human
uauucaaaacacagaaau

SEQ ID NO: 603340 - RNA, 22 nt, Human
uauuuuaggcugcccucuuucu

SEQ ID NO: 603341 - RNA, 20 nt, Human
ucaaaacacagaaauaauca

SEQ ID NO: 603342 - RNA, 18 nt, Human
uccaaaaccaaaccaaaa

SEQ ID NO: 603343 - RNA, 20 nt, Human
uccacaaauaaaaauacagc

SEQ ID NO: 603344 - RNA, 26 nt, Human
uccacaaauaaaaauacagcauacaa

SEQ ID NO: 603345 - RNA, 21 nt, Human
ucccaacgccuuauauauacc

SEQ ID NO: 603346 - RNA, 19 nt, Human
ucccucacguuacaaaaau

SEQ ID NO: 603347 - RNA, 22 nt, Human
ucgccaccaacgcgcucuccca

SEQ ID NO: 603348 - RNA, 19 nt, Human
ucuaaaauguaacuugggu

SEQ ID NO: 603349 - RNA, 23 nt, Human
ucugaccuucaguagaaaaaaaa

SEQ ID NO: 603350 - RNA, 20 nt, Human
ucuuucuuuucuaagagaaa

SEQ ID NO: 603351 - RNA, 18 nt, Human
ugacucggccgucgccac

SEQ ID NO: 603352 - RNA, 23 nt, Human
ugagagcagcuacagaaguagca

SEQ ID NO: 603353 - RNA, 20 nt, Human
ugagaguacuuuucaaaaag

SEQ ID NO: 603354 - RNA, 23 nt, Human
ugagaguacuuuucaaaaaggaa

SEQ ID NO: 603355 - RNA, 22 nt, Human
ugcaguguuauuuuuaacgucu

SEQ ID NO: 603356 - RNA, 22 nt, Human
ugccacacugguaauaagucac

SEQ ID NO: 603357 - RNA, 22 nt, Human
ugccuaacuaaaauugccaaua

SEQ ID NO: 603358 - RNA, 24 nt, Human
ugccuaacuaaaauugccaauaug

SEQ ID NO: 603359 - RNA, 19 nt, Human
uggaaaggaauaagaagug

SEQ ID NO: 603360 - RNA, 21 nt, Human
uuaccaguguuuucagggccc

SEQ ID NO: 603361 - RNA, 22 nt, Human
uuaggcugcccucuuucuuuuc

SEQ ID NO: 603362 - RNA, 21 nt, Human
uuggaaaaaagaaucuucugu

SEQ ID NO: 603363 - RNA, 19 nt, Human
uuuccuauccucugaccuu

SEQ ID NO: 603364 - RNA, 23 nt, Human
uuucuaagagaaagaguuugcag

SEQ ID NO: 603365 - RNA, 21 nt, Human
uuugcaguucuucaaaugguc

SEQ ID NO: 603366 - RNA, 18 nt, Human
uuuguagcuggaaacacu

SEQ ID NO: 603367 - RNA, 18 nt, Human
uuuuuuuuuuuuuuuuug

SEQ ID NO: 603368 - RNA, 25 nt, Human
uuuuuuuuuuuuuuuuuugauuuuu

SEQ ID NO: 603369 - RNA, 18 nt, Human
aaauguggcugggugaag

SEQ ID NO: 603370 - RNA, 20 nt, Human
aacauagugagaugccaucu

SEQ ID NO: 603371 - RNA, 23 nt, Human
aaguggcucacaccuggaauccc

SEQ ID NO: 603372 - RNA, 25 nt, Human
accugagccccgggagauggaggcc

SEQ ID NO: 603373 - RNA, 30 nt, Human
accuggaaucccagcacuuuaggaggccaa

SEQ ID NO: 603374 - RNA, 23 nt, Human
acugcacucaagccugauuuugc

SEQ ID NO: 603375 - RNA, 24 nt, Human
acuuuaggaggccaaggagagagg

SEQ ID NO: 603376 - RNA, 22 nt, Human
agauggaggcugcagugagcca

SEQ ID NO: 603377 - RNA, 21 nt, Human
agccugggcaacauagugaga

SEQ ID NO: 603378 - RNA, 22 nt, Human
agccugggcaacauagugagau

SEQ ID NO: 603379 - RNA, 23 nt, Human
aggaucacuugaggucaggaguu

SEQ ID NO: 603380 - RNA, 24 nt, Human
aggaucacuugaggucaggaguuc

SEQ ID NO: 603381 - RNA, 18 nt, Human
aggugggaaaaucaccug

SEQ ID NO: 603382 - RNA, 24 nt, Human
aguggcucacaccuggaaucccag

SEQ ID NO: 603383 - RNA, 24 nt, Human
aucacuugaggucaggaguucaag

SEQ ID NO: 603384 - RNA, 23 nt, Human
auguggcugggugaaguggcuca

SEQ ID NO: 603385 - RNA, 24 nt, Human
auugcgccacugcacucaagccug

SEQ ID NO: 603386 - RNA, 25 nt, Human
caagauggauaaauguggcugggug

SEQ ID NO: 603387 - RNA, 19 nt, Human
cacaccuggaaucccagca

SEQ ID NO: 603388 - RNA, 18 nt, Human
caccaaaaaacaaagcaa

SEQ ID NO: 603389 - RNA, 19 nt, Human
caccaaaaaacaaagcaau

SEQ ID NO: 603390 - RNA, 20 nt, Human
caccaaaaaacaaagcaaua

SEQ ID NO: 603391 - RNA, 18 nt, Human
cacugcacucaagccuga

SEQ ID NO: 603392 - RNA, 23 nt, Human
cacuugaggucaggaguucaaga

SEQ ID NO: 603393 - RNA, 20 nt, Human
cagcacuuuaggaggccaag

SEQ ID NO: 603394 - RNA, 21 nt, Human
cagcacuuuaggaggccaagg

SEQ ID NO: 603395 - RNA, 21 nt, Human
cagugagccacgauugcgcca

SEQ ID NO: 603396 - RNA, 20 nt, Human
ccaagugaacuccacagccc

SEQ ID NO: 603397 - RNA, 18 nt, Human
ccacugcacucaagccug

SEQ ID NO: 603398 - RNA, 19 nt, Human
ccacugcacucaagccuga

SEQ ID NO: 603399 - RNA, 20 nt, Human
ccacugcacucaagccugau

SEQ ID NO: 603400 - RNA, 20 nt, Human
ccacuucugggcccuccccc

SEQ ID NO: 603401 - RNA, 19 nt, Human
cccagaaccugcacuuucc

SEQ ID NO: 603402 - RNA, 24 nt, Human
cccccagccuccaagccggccuac

SEQ ID NO: 603403 - RNA, 24 nt, Human
cucacaccuggaaucccagcacuu

SEQ ID NO: 603404 - RNA, 22 nt, Human
cugcagugagccacgauugcgc

SEQ ID NO: 603405 - RNA, 18 nt, Human
cuguagucccagcuacuc

SEQ ID NO: 603406 - RNA, 20 nt, Human
cuguagucccagcuacucgg

SEQ ID NO: 603407 - RNA, 21 nt, Human
cuguagucccagcuacucggg

SEQ ID NO: 603408 - RNA, 18 nt, Human
gaaguggcucacaccugg

SEQ ID NO: 603409 - RNA, 19 nt, Human
gacuucccagaaccugcac

SEQ ID NO: 603410 - RNA, 28 nt, Human
gagcugccacuccucccaagugaacucc

SEQ ID NO: 603411 - RNA, 23 nt, Human
gaggcugcagugagccacgauug

SEQ ID NO: 603412 - RNA, 23 nt, Human
gaucacuugaggucaggaguuca

SEQ ID NO: 603413 - RNA, 24 nt, Human
gaucacuugaggucaggaguucaa

SEQ ID NO: 603414 - RNA, 18 nt, Human
ggaaucccagcacuuuag

SEQ ID NO: 603415 - RNA, 21 nt, Human
ggagagaggaucacuugaggu

SEQ ID NO: 603416 - RNA, 22 nt, Human
ggaggcugcagugagccacgau

SEQ ID NO: 603417 - RNA, 24 nt, Human
ggaggcugcagugagccacgauug

SEQ ID NO: 603418 - RNA, 23 nt, Human
ggaucacuugaggucaggaguuc

SEQ ID NO: 603419 - RNA, 24 nt, Human
gggaaagcugaggugggaaaauca

SEQ ID NO: 603420 - RNA, 19 nt, Human
gggcccucccccagccucc

SEQ ID NO: 603421 - RNA, 24 nt, Human
gggugaaguggcucacaccuggaa

SEQ ID NO: 603422 - RNA, 20 nt, Human
ggugaaguggcucacaccug

SEQ ID NO: 603423 - RNA, 23 nt, Human
gugauucuuugaaaugcaccaaa

SEQ ID NO: 603424 - RNA, 25 nt, Human
uauuccacuucugggcccuccccca

SEQ ID NO: 603425 - RNA, 18 nt, Human
ucagugauucuuugaaau

SEQ ID NO: 603426 - RNA, 23 nt, Human
uccacuucugggcccucccccag

SEQ ID NO: 603427 - RNA, 18 nt, Human
ucccccagccuccaagcc

SEQ ID NO: 603428 - RNA, 19 nt, Human
ucccccagccuccaagccg

SEQ ID NO: 603429 - RNA, 22 nt, Human
uccucccaagugaacuccacag

SEQ ID NO: 603430 - RNA, 24 nt, Human
ucucuguagucccagcuacucggg

SEQ ID NO: 603431 - RNA, 19 nt, Human
ucugggcccucccccagcc

SEQ ID NO: 603432 - RNA, 21 nt, Human
ucugggcccucccccagccuc

SEQ ID NO: 603433 - RNA, 24 nt, Human
ugaaaugcaccaaaaaacaaagca

SEQ ID NO: 603434 - RNA, 25 nt, Human
ugaaguggcucacaccuggaauccc

SEQ ID NO: 603435 - RNA, 19 nt, Human
ugagaugccaucucuguag

SEQ ID NO: 603436 - RNA, 20 nt, Human
ugaggugggaaaaucaccug

SEQ ID NO: 603437 - RNA, 22 nt, Human
ugcagugagccacgauugcgcc

SEQ ID NO: 603438 - RNA, 24 nt, Human
uggcucacaccuggaaucccagca

SEQ ID NO: 603439 - RNA, 22 nt, Human
ugggaaaaucaccugagccccg

SEQ ID NO: 603440 - RNA, 19 nt, Human
ugggcccucccccagccuc

SEQ ID NO: 603441 - RNA, 22 nt, Human
ugggcccucccccagccuccaa

SEQ ID NO: 603442 - RNA, 21 nt, Human
uuugaaaugcaccaaaaaaca

SEQ ID NO: 603443 - RNA, 27 nt, Human
aaucauuccauuuucgucuccuccccu

SEQ ID NO: 603444 - RNA, 27 nt, Human
accuccuccauccccgacuccaaagac

SEQ ID NO: 603445 - RNA, 24 nt, Human
agacugucaaaaauugccagcgcu

SEQ ID NO: 603446 - RNA, 21 nt, Human
aggggcagaaccuccuccauc

SEQ ID NO: 603447 - RNA, 18 nt, Human
agguauuaaaaauagcau

SEQ ID NO: 603448 - RNA, 19 nt, Human
agucaguuuccgcuccugg

SEQ ID NO: 603449 - RNA, 22 nt, Human
caccuuugggacaugggggaug

SEQ ID NO: 603450 - RNA, 20 nt, Human
caggauggaccacuuuucuu

SEQ ID NO: 603451 - RNA, 21 nt, Human
ccucugguuguauuccaccuu

SEQ ID NO: 603452 - RNA, 24 nt, Human
cuaaagccuuggauuuucuucugg

SEQ ID NO: 603453 - RNA, 21 nt, Human
cuccuccauccccgacuccaa

SEQ ID NO: 603454 - RNA, 19 nt, Human
cugguuaccaaaagaguca

SEQ ID NO: 603455 - RNA, 19 nt, Human
cuuuauuggaaaaccccaa

SEQ ID NO: 603456 - RNA, 22 nt, Human
uauaacaccucacaggggcaga

SEQ ID NO: 603457 - RNA, 21 nt, Human
ucaaagucacaaauaaaugca

SEQ ID NO: 603458 - RNA, 22 nt, Human
ucaaagucacaaauaaaugcag

SEQ ID NO: 603459 - RNA, 24 nt, Human
ucagaggcuucauaucccugcugg

SEQ ID NO: 603460 - RNA, 19 nt, Human
uccccgacuccaaagacuc

SEQ ID NO: 603461 - RNA, 19 nt, Human
uccuagguuuuuguaggcu

SEQ ID NO: 603462 - RNA, 23 nt, Human
ucuucugggcaguuccuaaaggc

SEQ ID NO: 603463 - RNA, 19 nt, Human
ugaaaaaucagcaauccag

SEQ ID NO: 603464 - RNA, 19 nt, Human
uggcaggagagauuucuaa

SEQ ID NO: 603465 - RNA, 26 nt, Human
uggcauggaagaaaucauuccauuuu

SEQ ID NO: 603466 - RNA, 23 nt, Human
uggcuaaagccuuggauuuucuu

SEQ ID NO: 603467 - RNA, 22 nt, Human
ugucugguuaccaaaagaguca

SEQ ID NO: 603468 - RNA, 21 nt, Human
uuucuuagcaacaguuucuaa

SEQ ID NO: 603469 - RNA, 22 nt, Human
uuugauggucauguauaacacc

SEQ ID NO: 603470 - RNA, 24 nt, Human
aaaaaaaucaacaaccuaaaaagu

SEQ ID NO: 603471 - RNA, 22 nt, Human
aaaguccaauggucaucuaaaa

SEQ ID NO: 603472 - RNA, 21 nt, Human
aacaguaacacaugauuuaga

SEQ ID NO: 603473 - RNA, 20 nt, Human
aaccucugccuccccgguuc

SEQ ID NO: 603474 - RNA, 19 nt, Human
acaaauggucucagauaca

SEQ ID NO: 603475 - RNA, 24 nt, Human
acaagauaaaaucagaucucuuca

SEQ ID NO: 603476 - RNA, 19 nt, Human
acagacacaaaccauuaca

SEQ ID NO: 603477 - RNA, 24 nt, Human
accuuacggccugcaaagccuaaa

SEQ ID NO: 603478 - RNA, 23 nt, Human
acuacccccuuuguucuaagcaa

SEQ ID NO: 603479 - RNA, 25 nt, Human
acucugucgcucaggcuagagugca

SEQ ID NO: 603480 - RNA, 19 nt, Human
agcuaggaaaaaacuggag

SEQ ID NO: 603481 - RNA, 18 nt, Human
agcuuuuauuuaacagcc

SEQ ID NO: 603482 - RNA, 24 nt, Human
agugcaguagcaugaucucggcuu

SEQ ID NO: 603483 - RNA, 18 nt, Human
aguucuaagaaacaacuc

SEQ ID NO: 603484 - RNA, 20 nt, Human
auacugaaacuuuuuguuac

SEQ ID NO: 603485 - RNA, 21 nt, Human
auacuguguugacaaauauca

SEQ ID NO: 603486 - RNA, 20 nt, Human
augagaaaaaaacccagggg

SEQ ID NO: 603487 - RNA, 23 nt, Human
auuugugacagaaaccuuacggc

SEQ ID NO: 603488 - RNA, 20 nt, Human
caacuauacccugcaggcca

SEQ ID NO: 603489 - RNA, 21 nt, Human
caagauaaaaucagaucucuu

SEQ ID NO: 603490 - RNA, 20 nt, Human
caagugauucuccugccuca

SEQ ID NO: 603491 - RNA, 22 nt, Human
caagugauucuccugccucagc

SEQ ID NO: 603492 - RNA, 24 nt, Human
cacucugucgcucaggcuagagug

SEQ ID NO: 603493 - RNA, 19 nt, Human
cagccuaagcuuuuguuuu

SEQ ID NO: 603494 - RNA, 19 nt, Human
caucuaaaaugaaaugaaa

SEQ ID NO: 603495 - RNA, 22 nt, Human
cauuaaugcugcaaaguuguuu

SEQ ID NO: 603496 - RNA, 21 nt, Human
cauuuuacaggaaagaaaauu

SEQ ID NO: 603497 - RNA, 23 nt, Human
ccaauucugauguguucaguagc

SEQ ID NO: 603498 - RNA, 23 nt, Human
ccccgguucaagugauucuccuc

SEQ ID NO: 603499 - RNA, 23 nt, Human
ccccgguucaagugauucuccug

SEQ ID NO: 603500 - RNA, 23 nt, Human
ccgaauagcuaggaaaaaacugg

SEQ ID NO: 603501 - RNA, 28 nt, Human
ccuacuggcugcucuugaaagguuuucc

SEQ ID NO: 603502 - RNA, 24 nt, Human
ccuccccgguucaagugauucucc

SEQ ID NO: 603503 - RNA, 23 nt, Human
cgguucaagugauucuccugccu

SEQ ID NO: 603504 - RNA, 20 nt, Human
cguuguugacgucaucauuu

SEQ ID NO: 603505 - RNA, 24 nt, Human
cuagagugcaguagcaugaucucg

SEQ ID NO: 603506 - RNA, 22 nt, Human
cuagauugaggucagccaacua

SEQ ID NO: 603507 - RNA, 18 nt, Human
cuccccgguucaagugau

SEQ ID NO: 603508 - RNA, 23 nt, Human
cuccugccucagcuucccgaguc

SEQ ID NO: 603509 - RNA, 24 nt, Human
cugcaaccucugccuccccgguuc

SEQ ID NO: 603510 - RNA, 19 nt, Human
cugccucagcuucccgagu

SEQ ID NO: 603511 - RNA, 23 nt, Human
cugccuccccgguucaagugauu

SEQ ID NO: 603512 - RNA, 20 nt, Human
cuuuuuuuuuugagacagag

SEQ ID NO: 603513 - RNA, 24 nt, Human
gagaacaaaguccaauggucaucu

SEQ ID NO: 603514 - RNA, 19 nt, Human
gagcaguucugugaaacua

SEQ ID NO: 603515 - RNA, 21 nt, Human
gauucuccugccucagcuucc

SEQ ID NO: 603516 - RNA, 23 nt, Human
gccucagcuucccgaguccaacu

SEQ ID NO: 603517 - RNA, 21 nt, Human
gguucaagugauucuccugcc

SEQ ID NO: 603518 - RNA, 24 nt, Human
gugauucuccugccucagcuuccc

SEQ ID NO: 603519 - RNA, 19 nt, Human
uaacugcaaccucugccuc

SEQ ID NO: 603520 - RNA, 21 nt, Human
uaacugcaaccucugccuccc

SEQ ID NO: 603521 - RNA, 24 nt, Human
uaacugcaaccucugccuccccgg

SEQ ID NO: 603522 - RNA, 18 nt, Human
uaagaaacaacucuaucu

SEQ ID NO: 603523 - RNA, 24 nt, Human
uaauagguguagaaaauauacaca

SEQ ID NO: 603524 - RNA, 25 nt, Human
uacaaauacagacacaaaccauuac

SEQ ID NO: 603525 - RNA, 21 nt, Human
uacucaauuuugaggugcaaa

SEQ ID NO: 603526 - RNA, 19 nt, Human
uagaaaauauacacauguu

SEQ ID NO: 603527 - RNA, 24 nt, Human
uagagugcaguagcaugaucucgg

SEQ ID NO: 603528 - RNA, 25 nt, Human
uauggcaauaaauaaugaugcauug

SEQ ID NO: 603529 - RNA, 19 nt, Human
ucaacaaccuaaaaaguaa

SEQ ID NO: 603530 - RNA, 19 nt, Human
ucaagugauucuccugccu

SEQ ID NO: 603531 - RNA, 21 nt, Human
uccccgguucaagugauucuc

SEQ ID NO: 603532 - RNA, 24 nt, Human
uccccgguucaagugauucuccug

SEQ ID NO: 603533 - RNA, 18 nt, Human
ucgcucaggcuagagugc

SEQ ID NO: 603534 - RNA, 18 nt, Human
ucucacucugucgcucag

SEQ ID NO: 603535 - RNA, 19 nt, Human
ucucacucugucgcucagg

SEQ ID NO: 603536 - RNA, 24 nt, Human
ucucacucugucgcucaggcuaga

SEQ ID NO: 603537 - RNA, 24 nt, Human
ucugucgcucaggcuagagugcag

SEQ ID NO: 603538 - RNA, 26 nt, Human
ucuuuuuuuuuugagacagagucuca

SEQ ID NO: 603539 - RNA, 19 nt, Human
ugaaaagccuaacauugga

SEQ ID NO: 603540 - RNA, 19 nt, Human
ugacagaaaccuuacggcc

SEQ ID NO: 603541 - RNA, 20 nt, Human
ugacagaaaccuuacggccu

SEQ ID NO: 603542 - RNA, 18 nt, Human
ugagacagagucucacuc

SEQ ID NO: 603543 - RNA, 22 nt, Human
ugagacagagucucacucuguc

SEQ ID NO: 603544 - RNA, 22 nt, Human
ugaggucagccaacuauacccc

SEQ ID NO: 603545 - RNA, 20 nt, Human
ugauucuccugccucagcuu

SEQ ID NO: 603546 - RNA, 21 nt, Human
ugcaguagcaugaucucggcu

SEQ ID NO: 603547 - RNA, 22 nt, Human
ugccuccccgguucaagugauu

SEQ ID NO: 603548 - RNA, 23 nt, Human
ugcugacucguguucuagauaac

SEQ ID NO: 603549 - RNA, 24 nt, Human
ugggauauuggugaauaaaguagg

SEQ ID NO: 603550 - RNA, 20 nt, Human
ugguuaaagagaucuccagg

SEQ ID NO: 603551 - RNA, 20 nt, Human
ugugacagaaaccuuacggc

SEQ ID NO: 603552 - RNA, 22 nt, Human
uguuacauuaaugcugcaaagu

SEQ ID NO: 603553 - RNA, 22 nt, Human
uuacaaagguaacaaaaagagc

SEQ ID NO: 603554 - RNA, 19 nt, Human
uucaaaacaaauauuuaau

SEQ ID NO: 603555 - RNA, 25 nt, Human
uucaaaacaaauauuuaauauuuua

SEQ ID NO: 603556 - RNA, 21 nt, Human
uucaagugauucuccugccuc

SEQ ID NO: 603557 - RNA, 23 nt, Human
uucaagugauucuccugccucag

SEQ ID NO: 603558 - RNA, 24 nt, Human
uucaagugauucuccugccucagc

SEQ ID NO: 603559 - RNA, 19 nt, Human
uucuaagaaacaacucuau

SEQ ID NO: 603560 - RNA, 21 nt, Human
uuuagggggauucacuuccau

SEQ ID NO: 603561 - RNA, 24 nt, Human
aaaaagacagacauaucuacacaa

SEQ ID NO: 603562 - RNA, 24 nt, Human
aaaaagacagacauaucuacacaa

SEQ ID NO: 603563 - RNA, 20 nt, Human
aaaagacagacauaucuaca

SEQ ID NO: 603564 - RNA, 18 nt, Human
aaacagauguuagaaacu

SEQ ID NO: 603565 - RNA, 22 nt, Human
aaccccaauaacucacaaguau

SEQ ID NO: 603566 - RNA, 22 nt, Human
aacccuuuuacucauugguauc

SEQ ID NO: 603567 - RNA, 22 nt, Human
aagacccaccauuacccaggaa

SEQ ID NO: 603568 - RNA, 21 nt, Human
aagcagagaggagugcagaga

SEQ ID NO: 603569 - RNA, 20 nt, Human
aaggagcagaccucuguccu

SEQ ID NO: 603570 - RNA, 22 nt, Human
aaugcuaaggggccaggagaaa

SEQ ID NO: 603571 - RNA, 18 nt, Human
aaugggcauuuucucuga

SEQ ID NO: 603572 - RNA, 24 nt, Human
acagagucagagugaacaggaaga

SEQ ID NO: 603573 - RNA, 23 nt, Human
acgcggggacgcgggacgggacg

SEQ ID NO: 603574 - RNA, 18 nt, Human
acuugggaacgucagcgg

SEQ ID NO: 603575 - RNA, 19 nt, Human
agacagacauaucuacaca

SEQ ID NO: 603576 - RNA, 18 nt, Human
agacccaccauuacccag

SEQ ID NO: 603577 - RNA, 18 nt, Human
agaggagcagaggcagga

SEQ ID NO: 603578 - RNA, 19 nt, Human
agagucagagugaacagga

SEQ ID NO: 603579 - RNA, 19 nt, Human
agaguggggaaaaggcuga

SEQ ID NO: 603580 - RNA, 18 nt, Human
agaugcuggcucagggag

SEQ ID NO: 603581 - RNA, 25 nt, Human
aggaacccuuuuacucauugguauc

SEQ ID NO: 603582 - RNA, 18 nt, Human
aggagcagaggcaggaga

SEQ ID NO: 603583 - RNA, 27 nt, Human
aggcaggagacagagguggggggaccc

SEQ ID NO: 603584 - RNA, 20 nt, Human
aggcaucuggcccaccccag

SEQ ID NO: 603585 - RNA, 19 nt, Human
auggccaugacuuugggga

SEQ ID NO: 603586 - RNA, 23 nt, Human
auguguguuacugugguggcaug

SEQ ID NO: 603587 - RNA, 21 nt, Human
caaaagagaauaaauaugaca

SEQ ID NO: 603588 - RNA, 23 nt, Human
caaggugaagagggagggacugg

SEQ ID NO: 603589 - RNA, 19 nt, Human
caggaaggagcagaccucu

SEQ ID NO: 603590 - RNA, 19 nt, Human
caggagacagaggugggca

SEQ ID NO: 603591 - RNA, 22 nt, Human
cccaccccaggacccuccugga

SEQ ID NO: 603592 - RNA, 21 nt, Human
ccccuaguauuugugagcaac

SEQ ID NO: 603593 - RNA, 21 nt, Human
cccugaaacagauguuagaaa

SEQ ID NO: 603594 - RNA, 20 nt, Human
cccuggaucugucacuuggg

SEQ ID NO: 603595 - RNA, 21 nt, Human
ccuaccaaagaugagaacagg

SEQ ID NO: 603596 - RNA, 19 nt, Human
cuggcagaauccuaccaaa

SEQ ID NO: 603597 - RNA, 24 nt, Human
cuggcccaccccaggacccuccug

SEQ ID NO: 603598 - RNA, 22 nt, Human
cuggcgggcggcgcgcuccucg

SEQ ID NO: 603599 - RNA, 21 nt, Human
gaacagaagaugcaaaagcaa

SEQ ID NO: 603600 - RNA, 21 nt, Human
gaagaguggacgggcaguggu

SEQ ID NO: 603601 - RNA, 22 nt, Human
gaagaugccuagucaucucuuc

SEQ ID NO: 603602 - RNA, 23 nt, Human
gaaugcuaaggggccaggagaaa

SEQ ID NO: 603603 - RNA, 21 nt, Human
gacagcagugaugaagaugcc

SEQ ID NO: 603604 - RNA, 21 nt, Human
gacuacucuuugauggggaau

SEQ ID NO: 603605 - RNA, 18 nt, Human
gaguggggaaaaggcuga

SEQ ID NO: 603606 - RNA, 19 nt, Human
ggaaaaggcugagcuggga

SEQ ID NO: 603607 - RNA, 20 nt, Human
ggaaugguaaagggacaagg

SEQ ID NO: 603608 - RNA, 18 nt, Human
ggacgcagggagcuggcg

SEQ ID NO: 603609 - RNA, 24 nt, Human
ggagacagaggugggcaggcaucu

SEQ ID NO: 603610 - RNA, 19 nt, Human
ggcaggagacagagguggg

SEQ ID NO: 603611 - RNA, 26 nt, Human
ggcggcgcgcuccucgcaggcucgag

SEQ ID NO: 603612 - RNA, 21 nt, Human
ggcgggcggcgcgcuccucgc

SEQ ID NO: 603613 - RNA, 21 nt, Human
gggaaugguaaagggacaagg

SEQ ID NO: 603614 - RNA, 18 nt, Human
gggcagagggcaagguca

SEQ ID NO: 603615 - RNA, 20 nt, Human
gggcagagggcaaggucagc

SEQ ID NO: 603616 - RNA, 24 nt, Human
gugaagcagagaggagugcagaga

SEQ ID NO: 603617 - RNA, 18 nt, Human
gugguccacccagccucc

SEQ ID NO: 603618 - RNA, 24 nt, Human
guuccuccuguugaagaguggacg

SEQ ID NO: 603619 - RNA, 20 nt, Human
uacaguauuuaagagugggg

SEQ ID NO: 603620 - RNA, 20 nt, Human
uacagugaaguaguacagua

SEQ ID NO: 603621 - RNA, 23 nt, Human
uaccaaagaugagaacagggaag

SEQ ID NO: 603622 - RNA, 21 nt, Human
ucuacagcuggauacccugaa

SEQ ID NO: 603623 - RNA, 23 nt, Human
ucuacagcuggauacccugaaac

SEQ ID NO: 603624 - RNA, 19 nt, Human
ucuguccuuucucuaaugu

SEQ ID NO: 603625 - RNA, 24 nt, Human
ugaagaugccuagucaucucuucu

SEQ ID NO: 603626 - RNA, 19 nt, Human
ugagaacagggaaguugaa

SEQ ID NO: 603627 - RNA, 22 nt, Human
ugagaacagggaaguugaaugu

SEQ ID NO: 603628 - RNA, 24 nt, Human
ugagaacagggaaguugaauguga

SEQ ID NO: 603629 - RNA, 19 nt, Human
ugaggacccaaaaagacag

SEQ ID NO: 603630 - RNA, 20 nt, Human
ugaggacccaaaaagacaga

SEQ ID NO: 603631 - RNA, 22 nt, Human
ugccuagucaucucuucucggg

SEQ ID NO: 603632 - RNA, 20 nt, Human
uggaggggcuuggacacugg

SEQ ID NO: 603633 - RNA, 19 nt, Human
uggaucugucacuugggaa

SEQ ID NO: 603634 - RNA, 21 nt, Human
uggcaggaaggagcagaccuc

SEQ ID NO: 603635 - RNA, 19 nt, Human
uggcaugcuguuccuccug

SEQ ID NO: 603636 - RNA, 30 nt, Human
uggcaugcuguuccuccuguugaagagugg

SEQ ID NO: 603637 - RNA, 23 nt, Human
uggcucagggaggggaccgacag

SEQ ID NO: 603638 - RNA, 21 nt, Human
ugggaggaaugaaggcuggca

SEQ ID NO: 603639 - RNA, 19 nt, Human
ugggcagagggcaagguca

SEQ ID NO: 603640 - RNA, 22 nt, Human
ugggggauaagaacaucuacag

SEQ ID NO: 603641 - RNA, 19 nt, Human
ugugaagcagagaggagug

SEQ ID NO: 603642 - RNA, 18 nt, Human
uuaagacccaccauuacc

SEQ ID NO: 603643 - RNA, 22 nt, Human
uucucugaggacccaaaaagac

SEQ ID NO: 603644 - RNA, 23 nt, Human
uugaagaguggacgggcaguggu

SEQ ID NO: 603645 - RNA, 22 nt, Human
aaaaacaauagaaauguuuggc

SEQ ID NO: 603646 - RNA, 25 nt, Human
aaacagaaagaaaucacaaaagcaa

SEQ ID NO: 603647 - RNA, 22 nt, Human
aaaugaacuuacugcaaguagc

SEQ ID NO: 603648 - RNA, 18 nt, Human
aacagaaagaaaucacaa

SEQ ID NO: 603649 - RNA, 19 nt, Human
aaguaugccugguuaagau

SEQ ID NO: 603650 - RNA, 18 nt, Human
aagugcugggauuacagg

SEQ ID NO: 603651 - RNA, 18 nt, Human
aagugcugggauuacagg

SEQ ID NO: 603652 - RNA, 19 nt, Human
aagugcugggauuacaggu

SEQ ID NO: 603653 - RNA, 22 nt, Human
aagugcugggauuacaggugug

SEQ ID NO: 603654 - RNA, 23 nt, Human
aagugcugggauuacagguguga

SEQ ID NO: 603655 - RNA, 26 nt, Human
aagugcugggauuacaggugugagcc

SEQ ID NO: 603656 - RNA, 18 nt, Human
aauaauggguaagaaaga

SEQ ID NO: 603657 - RNA, 22 nt, Human
aaucacaaaagcaauuaagaga

SEQ ID NO: 603658 - RNA, 20 nt, Human
acaaaauauuccuagacgag

SEQ ID NO: 603659 - RNA, 23 nt, Human
acaacugaauugagcuagcugaa

SEQ ID NO: 603660 - RNA, 19 nt, Human
acaguaagugguuguauga

SEQ ID NO: 603661 - RNA, 22 nt, Human
accgccgacguacucucccccu

SEQ ID NO: 603662 - RNA, 21 nt, Human
acuggccuaucccaaauacac

SEQ ID NO: 603663 - RNA, 20 nt, Human
acuguauucaaaaugauaga

SEQ ID NO: 603664 - RNA, 27 nt, Human
agaaacagaaagaaaucaccgguaccc

SEQ ID NO: 603665 - RNA, 22 nt, Human
agaaagaauaccucaacaacug

SEQ ID NO: 603666 - RNA, 26 nt, Human
agagcaccgccgacguacucuccccc

SEQ ID NO: 603667 - RNA, 19 nt, Human
aggcuuguacuguauucaa

SEQ ID NO: 603668 - RNA, 23 nt, Human
aggugcuggaaagcgagugcgcc

SEQ ID NO: 603669 - RNA, 22 nt, Human
aggugugagccacugugccugg

SEQ ID NO: 603670 - RNA, 24 nt, Human
auaguggugcugucacagaaggac

SEQ ID NO: 603671 - RNA, 20 nt, Human
auaucugauccccaaauagc

SEQ ID NO: 603672 - RNA, 24 nt, Human
auaugauagacauacauguauaua

SEQ ID NO: 603673 - RNA, 19 nt, Human
auuuuacaggucuuugugg

SEQ ID NO: 603674 - RNA, 18 nt, Human
caaaauauuccuagacga

SEQ ID NO: 603675 - RNA, 26 nt, Human
caaagcccgagagcaccgccgacgua

SEQ ID NO: 603676 - RNA, 19 nt, Human
caaguagcucaacauagua

SEQ ID NO: 603677 - RNA, 22 nt, Human
caauagaauggaauuaaaacug

SEQ ID NO: 603678 - RNA, 25 nt, Human
cacaaaagcaauuaagagagcucaa

SEQ ID NO: 603679 - RNA, 18 nt, Human
cacugugccuggucucac

SEQ ID NO: 603680 - RNA, 21 nt, Human
cagaaagaaaucacaaaagca

SEQ ID NO: 603681 - RNA, 24 nt, Human
cagaaggacaaaauauuccuagac

SEQ ID NO: 603682 - RNA, 22 nt, Human
caguucugaguuccacuggccu

SEQ ID NO: 603683 - RNA, 26 nt, Human
cauacaaggauccugcauaucucaag

SEQ ID NO: 603684 - RNA, 22 nt, Human
cauuuuauuuuuuaauagacau

SEQ ID NO: 603685 - RNA, 20 nt, Human
ccauauuuugaaaauaaggc

SEQ ID NO: 603686 - RNA, 21 nt, Human
ccaucagccaaauaaaaaaau

SEQ ID NO: 603687 - RNA, 24 nt, Human
cccuccaugcuaccgccgccucag

SEQ ID NO: 603688 - RNA, 22 nt, Human
ccuaagugcugggauuacaggu

SEQ ID NO: 603689 - RNA, 23 nt, Human
ccuaagugcugggauuacaggug

SEQ ID NO: 603690 - RNA, 24 nt, Human
ccuaagugcugggauuacaggugu

SEQ ID NO: 603691 - RNA, 22 nt, Human
ccucaggcuacacaagaggacu

SEQ ID NO: 603692 - RNA, 20 nt, Human
cuaagugcugggauuacagg

SEQ ID NO: 603693 - RNA, 25 nt, Human
cuccaugcuaccgccgccucaggcu

SEQ ID NO: 603694 - RNA, 20 nt, Human
gaagaaacagaaagaaauca

SEQ ID NO: 603695 - RNA, 19 nt, Human
gacauacauguauauaugu

SEQ ID NO: 603696 - RNA, 22 nt, Human
gagaugauuuacaccuaauaga

SEQ ID NO: 603697 - RNA, 20 nt, Human
gagcacaaagcccgagagca

SEQ ID NO: 603698 - RNA, 18 nt, Human
gauuacaggugugagcca

SEQ ID NO: 603699 - RNA, 21 nt, Human
gauuacaggugugagccacug

SEQ ID NO: 603700 - RNA, 24 nt, Human
gauuacaggugugagccacugugc

SEQ ID NO: 603701 - RNA, 18 nt, Human
gcaaguacaaauguagga

SEQ ID NO: 603702 - RNA, 24 nt, Human
uaaaaacaaaugaacuuacugcaa

SEQ ID NO: 603703 - RNA, 24 nt, Human
uaaacaacuucaacaucauccauu

SEQ ID NO: 603704 - RNA, 26 nt, Human
uaaauucuaucacguuaccacuaaua

SEQ ID NO: 603705 - RNA, 24 nt, Human
uaacuccuagcuucaaucaauccu

SEQ ID NO: 603706 - RNA, 19 nt, Human
uaagagagcucaaauaaug

SEQ ID NO: 603707 - RNA, 24 nt, Human
uaagugcugggauuacagguguga

SEQ ID NO: 603708 - RNA, 19 nt, Human
uaagugguuguaugaugcc

SEQ ID NO: 603709 - RNA, 21 nt, Human
uaauagacauugaauaugaua

SEQ ID NO: 603710 - RNA, 22 nt, Human
uacaggugugagccacugugcc

SEQ ID NO: 603711 - RNA, 22 nt, Human
uacaggugugagccacugugcc

SEQ ID NO: 603712 - RNA, 23 nt, Human
uacaggugugagccacugugccu

SEQ ID NO: 603713 - RNA, 19 nt, Human
uacauugggauggauagug

SEQ ID NO: 603714 - RNA, 23 nt, Human
uacauugggauggauaguggugc

SEQ ID NO: 603715 - RNA, 20 nt, Human
uaccaauguccauuaagcag

SEQ ID NO: 603716 - RNA, 18 nt, Human
uaccacauucuaaaaagc

SEQ ID NO: 603717 - RNA, 19 nt, Human
uacguugcccaggcugguc

SEQ ID NO: 603718 - RNA, 21 nt, Human
uacguugcccaggcuggucuc

SEQ ID NO: 603719 - RNA, 24 nt, Human
uacguugcccaggcuggucucuaa

SEQ ID NO: 603720 - RNA, 27 nt, Human
uacguugcccaggcuggucucuaacuc

SEQ ID NO: 603721 - RNA, 19 nt, Human
uagcauggaauauauuucu

SEQ ID NO: 603722 - RNA, 24 nt, Human
uauaaacaacuucaacaucaucca

SEQ ID NO: 603723 - RNA, 24 nt, Human
uaucuguguauuacugcaaacagg

SEQ ID NO: 603724 - RNA, 20 nt, Human
uaugaugccaauacugacuc

SEQ ID NO: 603725 - RNA, 21 nt, Human
ucacagaaggacaaaauauuc

SEQ ID NO: 603726 - RNA, 19 nt, Human
ucccaaauacacuggauua

SEQ ID NO: 603727 - RNA, 26 nt, Human
uccccaaauagcucauacaauaaucc

SEQ ID NO: 603728 - RNA, 20 nt, Human
uccccaagaagaaaaccuuc

SEQ ID NO: 603729 - RNA, 23 nt, Human
ucccuaagugcugggauuacagg

SEQ ID NO: 603730 - RNA, 21 nt, Human
uccugcauaucucaaggaccc

SEQ ID NO: 603731 - RNA, 19 nt, Human
ucuaaagaaugugucugug

SEQ ID NO: 603732 - RNA, 21 nt, Human
ugcaaacaggugaacauagua

SEQ ID NO: 603733 - RNA, 24 nt, Human
ugcccaggcuggucucuaacuccu

SEQ ID NO: 603734 - RNA, 24 nt, Human
ugcugggauuacaggugugagcca

SEQ ID NO: 603735 - RNA, 19 nt, Human
ugggaagaaacagaaagaa

SEQ ID NO: 603736 - RNA, 18 nt, Human
ugggauuacaggugugag

SEQ ID NO: 603737 - RNA, 21 nt, Human
ugggauuacaggugugagcca

SEQ ID NO: 603738 - RNA, 22 nt, Human
ugggauuacaggugugagccac

SEQ ID NO: 603739 - RNA, 22 nt, Human
ugggauuacaggugugagccac

SEQ ID NO: 603740 - RNA, 22 nt, Human
ugggauuacaggugugagccac

SEQ ID NO: 603741 - RNA, 24 nt, Human
ugggauuacaggugugagccacug

SEQ ID NO: 603742 - RNA, 21 nt, Human
uguaagccuuccccucaacaa

SEQ ID NO: 603743 - RNA, 24 nt, Human
ugucacagaaggacaaaauauucc

SEQ ID NO: 603744 - RNA, 26 nt, Human
uguccgaguccguguugaggugcugg

SEQ ID NO: 603745 - RNA, 20 nt, Human
ugucuguguaagccuucccc

SEQ ID NO: 603746 - RNA, 20 nt, Human
uuaacacucaucacauuuua

SEQ ID NO: 603747 - RNA, 24 nt, Human
uuacaggguuuaugccaguuacau

SEQ ID NO: 603748 - RNA, 23 nt, Human
uuacaguaagugguuguaugaug

SEQ ID NO: 603749 - RNA, 19 nt, Human
uuccccaagaagaaaaccu

SEQ ID NO: 603750 - RNA, 19 nt, Human
uugaggagugagguaaaga

SEQ ID NO: 603751 - RNA, 21 nt, Human
uugaggugcuggaaagcgagu

SEQ ID NO: 603752 - RNA, 22 nt, Human
uugugaaguaaaugcacuaaga

SEQ ID NO: 603753 - RNA, 22 nt, Human
aacuccgccaaggccagaauaa

SEQ ID NO: 603754 - RNA, 24 nt, Human
accgcaaccaccaagcuggacccg

SEQ ID NO: 603755 - RNA, 19 nt, Human
acuaccgcaaccaccaagc

SEQ ID NO: 603756 - RNA, 22 nt, Human
agccuggcaaccagcggaggcc

SEQ ID NO: 603757 - RNA, 23 nt, Human
auagccucuuuccgagauucccu

SEQ ID NO: 603758 - RNA, 22 nt, Human
caaccaccaagcuggacccggc

SEQ ID NO: 603759 - RNA, 18 nt, Human
cacuaccgcaaccaccaa

SEQ ID NO: 603760 - RNA, 21 nt, Human
cagaauaagaucccggaugcc

SEQ ID NO: 603761 - RNA, 23 nt, Human
caucaaagauuccuucugcauuc

SEQ ID NO: 603762 - RNA, 22 nt, Human
ccaaauggucccgagcaagcca

SEQ ID NO: 603763 - RNA, 21 nt, Human
ccaaggccagaauaagauccc

SEQ ID NO: 603764 - RNA, 19 nt, Human
ccaccucuagaccaagccu

SEQ ID NO: 603765 - RNA, 20 nt, Human
ccccaacuccgccaaggcca

SEQ ID NO: 603766 - RNA, 22 nt, Human
ccccaacuccgccaaggccaga

SEQ ID NO: 603767 - RNA, 20 nt, Human
cccggccgcgggcccugacc

SEQ ID NO: 603768 - RNA, 19 nt, Human
ccucucacuaccgcaacca

SEQ ID NO: 603769 - RNA, 18 nt, Human
cggacucuggguccagcc

SEQ ID NO: 603770 - RNA, 23 nt, Human
cucuugaaagaaauucauucuuu

SEQ ID NO: 603771 - RNA, 23 nt, Human
cuggcaaccagcggaggccucuc

SEQ ID NO: 603772 - RNA, 21 nt, Human
cuuuaaaaacaacauucgauc

SEQ ID NO: 603773 - RNA, 21 nt, Human
gaucuuucugcauuuccuuaa

SEQ ID NO: 603774 - RNA, 20 nt, Human
gguguucaggaugaugagaa

SEQ ID NO: 603775 - RNA, 23 nt, Human
gucccgagcaagccaaagcggca

SEQ ID NO: 603776 - RNA, 21 nt, Human
uaauucuuuuaauuuauucug

SEQ ID NO: 603777 - RNA, 24 nt, Human
uaccgcaaccaccaagcuggaccc

SEQ ID NO: 603778 - RNA, 25 nt, Human
uaccgcaaccaccaagcuggacccg

SEQ ID NO: 603779 - RNA, 27 nt, Human
uaccgcaaccaccaagcuggacccggc

SEQ ID NO: 603780 - RNA, 22 nt, Human
ucaggaucuuucugcauuuccu

SEQ ID NO: 603781 - RNA, 20 nt, Human
ucccagagcucgguguucag

SEQ ID NO: 603782 - RNA, 20 nt, Human
ucccggaugccaggagagcc

SEQ ID NO: 603783 - RNA, 23 nt, Human
uccgccaaggccagaauaagauc

SEQ ID NO: 603784 - RNA, 19 nt, Human
uccuugagaaauguuuuca

SEQ ID NO: 603785 - RNA, 21 nt, Human
ucuagaccaagccuggcaacc

SEQ ID NO: 603786 - RNA, 23 nt, Human
ucuccgccggagucccagagcuc

SEQ ID NO: 603787 - RNA, 18 nt, Human
ugaaagaaauucauucuu

SEQ ID NO: 603788 - RNA, 25 nt, Human
ugaauucuuucacugugcuccaccu

SEQ ID NO: 603789 - RNA, 19 nt, Human
ugggcuuucaaaugcagac

SEQ ID NO: 603790 - RNA, 19 nt, Human
uguuucuccuccuuuaaca

SEQ ID NO: 603791 - RNA, 22 nt, Human
uuauagccucuuuccgagauuc

SEQ ID NO: 603792 - RNA, 27 nt, Human
uucuaaaucucuuucuuuuucaauuuu

SEQ ID NO: 603793 - RNA, 21 nt, Human
uugauugugcuucacucauau

SEQ ID NO: 603794 - RNA, 27 nt, Human
aaaaacauguuacccaauuuaaccuuc

SEQ ID NO: 603795 - RNA, 24 nt, Human
aaaaagaggaaagcuguauaaaaa

SEQ ID NO: 603796 - RNA, 22 nt, Human
aaaagaaaaaccaaacaaaaaa

SEQ ID NO: 603797 - RNA, 18 nt, Human
aaacuacuauucaccuca

SEQ ID NO: 603798 - RNA, 24 nt, Human
aaagugcugcgauuacaggcauga

SEQ ID NO: 603799 - RNA, 23 nt, Human
aacaaaaaaauuagcaacacaaa

SEQ ID NO: 603800 - RNA, 24 nt, Human
aagaagcauauuaagaaaacaagc

SEQ ID NO: 603801 - RNA, 25 nt, Human
aagccuauaauuacccaaaucaaaa

SEQ ID NO: 603802 - RNA, 19 nt, Human
aaguagcugggacuacagg

SEQ ID NO: 603803 - RNA, 20 nt, Human
aaguagcugggacuacaggc

SEQ ID NO: 603804 - RNA, 25 nt, Human
aaguagcugggacuacaggcgcccg

SEQ ID NO: 603805 - RNA, 24 nt, Human
aagugauccacccgccucggccuc

SEQ ID NO: 603806 - RNA, 22 nt, Human
aauaagaguagaaaaaucacaa

SEQ ID NO: 603807 - RNA, 18 nt, Human
aaugcagaaaaugaaaaa

SEQ ID NO: 603808 - RNA, 21 nt, Human
acaagccuauaauuacccaaa

SEQ ID NO: 603809 - RNA, 27 nt, Human
acauagcacacuuaauaaaaugucucc

SEQ ID NO: 603810 - RNA, 25 nt, Human
acccgccucggccucccaaagugcu

SEQ ID NO: 603811 - RNA, 23 nt, Human
accucagccucccaaguaccugg

SEQ ID NO: 603812 - RNA, 20 nt, Human
acugcaagcuccgccucccg

SEQ ID NO: 603813 - RNA, 24 nt, Human
acuugugcuuauagagaaaacaaa

SEQ ID NO: 603814 - RNA, 20 nt, Human
agaaaacuguuguaugagga

SEQ ID NO: 603815 - RNA, 22 nt, Human
agaaauuaugaaaagacaaagc

SEQ ID NO: 603816 - RNA, 20 nt, Human
agagaaaacaaacaaaaaaa

SEQ ID NO: 603817 - RNA, 22 nt, Human
agcaauuucaaauauaacccaa

SEQ ID NO: 603818 - RNA, 22 nt, Human
agccgcauugcccucaggccuc

SEQ ID NO: 603819 - RNA, 22 nt, Human
agcuaaaagaaaaaccaaacaa

SEQ ID NO: 603820 - RNA, 18 nt, Human
aggcacaugccaccacac

SEQ ID NO: 603821 - RNA, 18 nt, Human
aggccucgagucccccac

SEQ ID NO: 603822 - RNA, 25 nt, Human
aggcuggagugcaguggcgggaucu

SEQ ID NO: 603823 - RNA, 22 nt, Human
aguagagaugagguuucaccau

SEQ ID NO: 603824 - RNA, 20 nt, Human
agugcaguggcgggaucucg

SEQ ID NO: 603825 - RNA, 23 nt, Human
agugcaguggcgggaucucggcu

SEQ ID NO: 603826 - RNA, 24 nt, Human
agugcaguggcgggaucucggcuc

SEQ ID NO: 603827 - RNA, 24 nt, Human
augagguuucaccauguuggccag

SEQ ID NO: 603828 - RNA, 21 nt, Human
auuaagaaaacaagccuauaa

SEQ ID NO: 603829 - RNA, 23 nt, Human
caaacaaaaaaauuagcaacaca

SEQ ID NO: 603830 - RNA, 24 nt, Human
caaagugcugcgauuacaggcaug

SEQ ID NO: 603831 - RNA, 18 nt, Human
caauccauuaauccuccc

SEQ ID NO: 603832 - RNA, 18 nt, Human
caccauguuggccaggau

SEQ ID NO: 603833 - RNA, 22 nt, Human
caccauguuggccaggaugguc

SEQ ID NO: 603834 - RNA, 24 nt, Human
caccauguuggccaggauggucuc

SEQ ID NO: 603835 - RNA, 23 nt, Human
cacccgccucggccucccaaagu

SEQ ID NO: 603836 - RNA, 22 nt, Human
cacgccauucuccugccucagc

SEQ ID NO: 603837 - RNA, 20 nt, Human
cagaaaaugaaaaacauguu

SEQ ID NO: 603838 - RNA, 24 nt, Human
caggccucgagucccccacuagcu

SEQ ID NO: 603839 - RNA, 21 nt, Human
caggcgcccgccacuacgccc

SEQ ID NO: 603840 - RNA, 25 nt, Human
cauauuaagaaaacaagccuauaau

SEQ ID NO: 603841 - RNA, 24 nt, Human
caugccaccacacuuggcuaauuu

SEQ ID NO: 603842 - RNA, 24 nt, Human
ccaaagugcugcgauuacaggcau

SEQ ID NO: 603843 - RNA, 27 nt, Human
ccauuaauccucccaccucagccuccc

SEQ ID NO: 603844 - RNA, 23 nt, Human
cccaaguagcugggacuacaggc

SEQ ID NO: 603845 - RNA, 24 nt, Human
cccaaguagcugggacuacaggcg

SEQ ID NO: 603846 - RNA, 20 nt, Human
cccaccucagccucccaagu

SEQ ID NO: 603847 - RNA, 22 nt, Human
ccccacuagcuccuuccgucca

SEQ ID NO: 603848 - RNA, 24 nt, Human
cccucaggccucgagucccccacu

SEQ ID NO: 603849 - RNA, 21 nt, Human
ccucgagucccccacuagcuc

SEQ ID NO: 603850 - RNA, 23 nt, Human
ccugccucagccucccaaguagc

SEQ ID NO: 603851 - RNA, 24 nt, Human
ccugccucagccucccaaguagcu

SEQ ID NO: 603852 - RNA, 19 nt, Human
cgauuacaggcaugagcca

SEQ ID NO: 603853 - RNA, 24 nt, Human
cgcccaggcuggagugcaguggcg

SEQ ID NO: 603854 - RNA, 19 nt, Human
cgccucccggguucacgcc

SEQ ID NO: 603855 - RNA, 25 nt, Human
cgccucggccucccaaagugcugcg

SEQ ID NO: 603856 - RNA, 22 nt, Human
cgcggagggacgaucggggccg

SEQ ID NO: 603857 - RNA, 24 nt, Human
cgcucugucgcccaggcuggagug

SEQ ID NO: 603858 - RNA, 19 nt, Human
cguccaggcacgggcuccg

SEQ ID NO: 603859 - RNA, 21 nt, Human
cucaagugauccacccgccuc

SEQ ID NO: 603860 - RNA, 24 nt, Human
cucagccucccaaguagcugggac

SEQ ID NO: 603861 - RNA, 21 nt, Human
cucccggguucacgccauucu

SEQ ID NO: 603862 - RNA, 25 nt, Human
cuccugccucagccucccaaguagc

SEQ ID NO: 603863 - RNA, 24 nt, Human
cucgcucugucgcccaggcuggag

SEQ ID NO: 603864 - RNA, 21 nt, Human
cugaucucaagugauccaccc

SEQ ID NO: 603865 - RNA, 21 nt, Human
gagacggagucucgcucuguc

SEQ ID NO: 603866 - RNA, 18 nt, Human
gagguuucaccauguugg

SEQ ID NO: 603867 - RNA, 22 nt, Human
gagguuucaccauguuggccag

SEQ ID NO: 603868 - RNA, 19 nt, Human
gaguaaauaagugcucuuc

SEQ ID NO: 603869 - RNA, 20 nt, Human
gagucccccacuagcuccuu

SEQ ID NO: 603870 - RNA, 18 nt, Human
gauuacaggcaugagcca

SEQ ID NO: 603871 - RNA, 22 nt, Human
gauuacaggcaugagccaccac

SEQ ID NO: 603872 - RNA, 19 nt, Human
gcccaggcuggagugcagu

SEQ ID NO: 603873 - RNA, 20 nt, Human
gcccaggcuggagugcagug

SEQ ID NO: 603874 - RNA, 23 nt, Human
gcccggcuaauuuuuuguauuuu

SEQ ID NO: 603875 - RNA, 25 nt, Human
gccucccggguucacgccauucucc

SEQ ID NO: 603876 - RNA, 20 nt, Human
gccucgagucccccacuagc

SEQ ID NO: 603877 - RNA, 23 nt, Human
gcuaaaagaaaaaccaaacaaaa

SEQ ID NO: 603878 - RNA, 25 nt, Human
gcucugucgcccaggcuggagugca

SEQ ID NO: 603879 - RNA, 23 nt, Human
gggcuccggcgcuagagcaguuu

SEQ ID NO: 603880 - RNA, 18 nt, Human
gguaacgggagcggcgga

SEQ ID NO: 603881 - RNA, 24 nt, Human
gguuucaccauguuggccaggaug

SEQ ID NO: 603882 - RNA, 24 nt, Human
gugauccacccgccucggccuccc

SEQ ID NO: 603883 - RNA, 19 nt, Human
uaaaagaaaaaccaaacaa

SEQ ID NO: 603884 - RNA, 20 nt, Human
uaaaagaaaaaccaaacaaa

SEQ ID NO: 603885 - RNA, 24 nt, Human
uaaaagaaaaaccaaacaaaaaac

SEQ ID NO: 603886 - RNA, 20 nt, Human
uaaaaugucuccugagauga

SEQ ID NO: 603887 - RNA, 22 nt, Human
uaaaaugucuccugagaugaaa

SEQ ID NO: 603888 - RNA, 21 nt, Human
uaacaaaccugaugaaaaaga

SEQ ID NO: 603889 - RNA, 24 nt, Human
uaauuacccaaaucaaaauuuagc

SEQ ID NO: 603890 - RNA, 24 nt, Human
uaauuuuuuguauuuuuaguagag

SEQ ID NO: 603891 - RNA, 25 nt, Human
uaauuuuuuguauuuuuaguagaga

SEQ ID NO: 603892 - RNA, 23 nt, Human
uacaauuauaaaacauagcacac

SEQ ID NO: 603893 - RNA, 22 nt, Human
uacaggcaugagccaccacgcc

SEQ ID NO: 603894 - RNA, 22 nt, Human
uagagaugagguuucaccaugu

SEQ ID NO: 603895 - RNA, 24 nt, Human
uaguagagaugagguuucaccaug

SEQ ID NO: 603896 - RNA, 26 nt, Human
uaguagagaugagguuucaccauguu

SEQ ID NO: 603897 - RNA, 18 nt, Human
uauuaagaaaacaagccu

SEQ ID NO: 603898 - RNA, 24 nt, Human
ucaccauguuggccaggauggucu

SEQ ID NO: 603899 - RNA, 18 nt, Human
ucacugcaagcuccgccu

SEQ ID NO: 603900 - RNA, 19 nt, Human
ucacugcaagcuccgccuc

SEQ ID NO: 603901 - RNA, 24 nt, Human
ucacugcaagcuccgccucccggg

SEQ ID NO: 603902 - RNA, 20 nt, Human
ucacuuccaaaaauuaaagu

SEQ ID NO: 603903 - RNA, 18 nt, Human
ucagccucccaaguagcu

SEQ ID NO: 603904 - RNA, 20 nt, Human
ucagccucccaaguagcugg

SEQ ID NO: 603905 - RNA, 18 nt, Human
ucagcuaaaagaaaaacc

SEQ ID NO: 603906 - RNA, 24 nt, Human
ucagcuaaaagaaaaaccaaacaa

SEQ ID NO: 603907 - RNA, 24 nt, Human
ucccaaagugcugcgauuacaggc

SEQ ID NO: 603908 - RNA, 24 nt, Human
ucccaaguagcugggacuacaggc

SEQ ID NO: 603909 - RNA, 21 nt, Human
ucccggguucacgccauucuc

SEQ ID NO: 603910 - RNA, 24 nt, Human
ucccggguucacgccauucuccug

SEQ ID NO: 603911 - RNA, 26 nt, Human
uccucccaccucagccucccaaguac

SEQ ID NO: 603912 - RNA, 24 nt, Human
ucgcccaggcuggagugcaguggc

SEQ ID NO: 603913 - RNA, 24 nt, Human
ucgcucugucgcccaggcuggagu

SEQ ID NO: 603914 - RNA, 18 nt, Human
ucggccucccaaagugcu

SEQ ID NO: 603915 - RNA, 19 nt, Human
ucucgcucugucgcccagg

SEQ ID NO: 603916 - RNA, 22 nt, Human
ucucgcucugucgcccaggcug

SEQ ID NO: 603917 - RNA, 23 nt, Human
ucucgcucugucgcccaggcugg

SEQ ID NO: 603918 - RNA, 24 nt, Human
ucucgcucugucgcccaggcugga

SEQ ID NO: 603919 - RNA, 26 nt, Human
ucucgcucugucgcccaggcuggagu

SEQ ID NO: 603920 - RNA, 27 nt, Human
ucucgcucugucgcccaggcuggagug

SEQ ID NO: 603921 - RNA, 24 nt, Human
ucugucgcccaggcuggagugcag

SEQ ID NO: 603922 - RNA, 22 nt, Human
ucuuuaacuccauuuuuaucca

SEQ ID NO: 603923 - RNA, 22 nt, Human
ugaaaaagaggaaagcuguaua

SEQ ID NO: 603924 - RNA, 24 nt, Human
ugaaaaagaggaaagcuguauaaa

SEQ ID NO: 603925 - RNA, 24 nt, Human
ugaagagacaggcuaaguaaguaa

SEQ ID NO: 603926 - RNA, 24 nt, Human
ugagguuucaccauguuggccagg

SEQ ID NO: 603927 - RNA, 24 nt, Human
ugaucucaagugauccacccgccu

SEQ ID NO: 603928 - RNA, 22 nt, Human
ugcaguggcgggaucucggcuc

SEQ ID NO: 603929 - RNA, 20 nt, Human
ugcccucaggccucgagucc

SEQ ID NO: 603930 - RNA, 24 nt, Human
ugccucagccucccaaguagcugg

SEQ ID NO: 603931 - RNA, 22 nt, Human
ugcgauuacaggcaugagccac

SEQ ID NO: 603932 - RNA, 23 nt, Human
ugcgauuacaggcaugagccacc

SEQ ID NO: 603933 - RNA, 24 nt, Human
ugcgauuacaggcaugagccacca

SEQ ID NO: 603934 - RNA, 23 nt, Human
uggagugcaguggcgggaucucg

SEQ ID NO: 603935 - RNA, 24 nt, Human
uggagugcaguggcgggaucucgg

SEQ ID NO: 603936 - RNA, 24 nt, Human
uggccaggauggucucaaacuucu

SEQ ID NO: 603937 - RNA, 21 nt, Human
ugggaccauaggcacaugcca

SEQ ID NO: 603938 - RNA, 24 nt, Human
ugggaccauaggcacaugccacca

SEQ ID NO: 603939 - RNA, 21 nt, Human
ugggacuacaggcgcccgcca

SEQ ID NO: 603940 - RNA, 22 nt, Human
ugggacuacaggcgcccgccac

SEQ ID NO: 603941 - RNA, 22 nt, Human
ugggacuacaggcgcccgccac

SEQ ID NO: 603942 - RNA, 24 nt, Human
ugggacuacaggcgcccgccacua

SEQ ID NO: 603943 - RNA, 20 nt, Human
uguauaaaaacucaguauca

SEQ ID NO: 603944 - RNA, 18 nt, Human
uuaguagagaugagguuu

SEQ ID NO: 603945 - RNA, 22 nt, Human
uuaguagagaugagguuucacc

SEQ ID NO: 603946 - RNA, 24 nt, Human
uuaguagagaugagguuucaccau

SEQ ID NO: 603947 - RNA, 24 nt, Human
uuccaaaaauuaaaguccggcagg

SEQ ID NO: 603948 - RNA, 19 nt, Human
uuucaccauguuggccagg

SEQ ID NO: 603949 - RNA, 20 nt, Human
uuucaccauguuggccagga

SEQ ID NO: 603950 - RNA, 24 nt, Human
uuuuuaguagagaugagguuucac

SEQ ID NO: 603951 - RNA, 21 nt, Human
uuuuuguauuuuuaguagaga

SEQ ID NO: 603952 - RNA, 24 nt, Human
uuuuuuguauuuuuaguagagaug

SEQ ID NO: 603953 - RNA, 20 nt, Human
aaagaagcccaggcaccccc

SEQ ID NO: 603954 - RNA, 24 nt, Human
aaagugcaguuugggaacugggag

SEQ ID NO: 603955 - RNA, 24 nt, Human
aagaacagaggaaagagaagccaa

SEQ ID NO: 603956 - RNA, 18 nt, Human
aagagccuggcuuccacc

SEQ ID NO: 603957 - RNA, 19 nt, Human
aaggucccacagggaucag

SEQ ID NO: 603958 - RNA, 19 nt, Human
aagugcaguuugggaacug

SEQ ID NO: 603959 - RNA, 20 nt, Human
acaggaccuugaugacaggg

SEQ ID NO: 603960 - RNA, 18 nt, Human
acaugccgggagcgcccc

SEQ ID NO: 603961 - RNA, 18 nt, Human
acgcugcgguacagggac

SEQ ID NO: 603962 - RNA, 18 nt, Human
acuggucccuagaccgca

SEQ ID NO: 603963 - RNA, 18 nt, Human
agaaaaucuuccauuccc

SEQ ID NO: 603964 - RNA, 18 nt, Human
agacccccaucccugcug

SEQ ID NO: 603965 - RNA, 26 nt, Human
agaggaaagagaagccaagcaaagag

SEQ ID NO: 603966 - RNA, 21 nt, Human
agcaagggugguucucaucaa

SEQ ID NO: 603967 - RNA, 23 nt, Human
aggaaagagaagccaagcaaaga

SEQ ID NO: 603968 - RNA, 19 nt, Human
aggggaaguugaagugggg

SEQ ID NO: 603969 - RNA, 20 nt, Human
augccgggagcgccccacgc

SEQ ID NO: 603970 - RNA, 19 nt, Human
caagguaggaacugccucu

SEQ ID NO: 603971 - RNA, 22 nt, Human
cacagccucgguaguauuuauu

SEQ ID NO: 603972 - RNA, 24 nt, Human
caccagcgcuucagaauuccucaa

SEQ ID NO: 603973 - RNA, 19 nt, Human
cacugcagagaagcagagu

SEQ ID NO: 603974 - RNA, 26 nt, Human
cagcacccuacagcuguuagaccccc

SEQ ID NO: 603975 - RNA, 19 nt, Human
cagcuuugaauagcgcccc

SEQ ID NO: 603976 - RNA, 20 nt, Human
caggaccuugaugacagggu

SEQ ID NO: 603977 - RNA, 22 nt, Human
ccaccgcgcucccggcgcggcc

SEQ ID NO: 603978 - RNA, 23 nt, Human
ccaccgcgcucccggcgcggccu

SEQ ID NO: 603979 - RNA, 22 nt, Human
ccccacgccuagccccaccgcg

SEQ ID NO: 603980 - RNA, 19 nt, Human
ccccaggggacagucccac

SEQ ID NO: 603981 - RNA, 24 nt, Human
ccccccaggggacagucccacccc

SEQ ID NO: 603982 - RNA, 19 nt, Human
cccuacagcuguuagaccc

SEQ ID NO: 603983 - RNA, 23 nt, Human
ccuagccccaccgcgcucccggc

SEQ ID NO: 603984 - RNA, 21 nt, Human
ccugcccccuuaggagcccac

SEQ ID NO: 603985 - RNA, 24 nt, Human
cgaggucaagugcugucuucggau

SEQ ID NO: 603986 - RNA, 27 nt, Human
cgccaaagaagcccaggcaccccccag

SEQ ID NO: 603987 - RNA, 22 nt, Human
cgccugcccccuuaggagccca

SEQ ID NO: 603988 - RNA, 23 nt, Human
cgccugcccccuuaggagcccac

SEQ ID NO: 603989 - RNA, 24 nt, Human
cgcuucagaauuccucaagcaagg

SEQ ID NO: 603990 - RNA, 18 nt, Human
cugcccccuuaggagccc

SEQ ID NO: 603991 - RNA, 22 nt, Human
cuuccgaucuaaaagugagagg

SEQ ID NO: 603992 - RNA, 21 nt, Human
cuucggauggcguccacucac

SEQ ID NO: 603993 - RNA, 22 nt, Human
gaaagagaagccaagcaaagag

SEQ ID NO: 603994 - RNA, 21 nt, Human
gaagcccaggcaccccccagg

SEQ ID NO: 603995 - RNA, 18 nt, Human
gagcugcugcagcguggc

SEQ ID NO: 603996 - RNA, 20 nt, Human
gagggaaccgcagagaggug

SEQ ID NO: 603997 - RNA, 22 nt, Human
gcagccagggcuggacgggaga

SEQ ID NO: 603998 - RNA, 18 nt, Human
gccccuccugggccucag

SEQ ID NO: 603999 - RNA, 20 nt, Human
gccuagccccaccgcgcucc

SEQ ID NO: 604000 - RNA, 20 nt, Human
gcuaccaaccuggagugaag

SEQ ID NO: 604001 - RNA, 23 nt, Human
ggaaagagaagccaagcaaagag

SEQ ID NO: 604002 - RNA, 25 nt, Human
ggaaggggugcggccauccucccgg

SEQ ID NO: 604003 - RNA, 21 nt, Human
ggacgggagaccacguuuggg

SEQ ID NO: 604004 - RNA, 18 nt, Human
ggcagcauggauugauau

SEQ ID NO: 604005 - RNA, 23 nt, Human
ggcugcagccagggcuggacggg

SEQ ID NO: 604006 - RNA, 23 nt, Human
gggaaccgcagagaggugugagc

SEQ ID NO: 604007 - RNA, 19 nt, Human
guccacucacacgccugcc

SEQ ID NO: 604008 - RNA, 22 nt, Human
gucuucgaggggaaguugaagu

SEQ ID NO: 604009 - RNA, 22 nt, Human
gugaacagaucacugcuuccaa

SEQ ID NO: 604010 - RNA, 23 nt, Human
gugaacagaucacugcuuccaaa

SEQ ID NO: 604011 - RNA, 22 nt, Human
gugaagcgcuucccaaaacuaa

SEQ ID NO: 604012 - RNA, 22 nt, Human
uaaccucagcaggcaaagcaau

SEQ ID NO: 604013 - RNA, 19 nt, Human
uagcgagaggcaagugugu

SEQ ID NO: 604014 - RNA, 20 nt, Human
ucaaugaguuucuccucuuc

SEQ ID NO: 604015 - RNA, 22 nt, Human
ucacacgccugcccccuuagga

SEQ ID NO: 604016 - RNA, 21 nt, Human
ucacggaggggaaggugcgcc

SEQ ID NO: 604017 - RNA, 26 nt, Human
ucacuggucccuagaccgcaccuucu

SEQ ID NO: 604018 - RNA, 22 nt, Human
uccaaaaauagagaagcagagu

SEQ ID NO: 604019 - RNA, 22 nt, Human
ucccugcugucaaaggucccac

SEQ ID NO: 604020 - RNA, 24 nt, Human
ucccugcugucaaaggucccacag

SEQ ID NO: 604021 - RNA, 19 nt, Human
ucccugugcugcucaggcc

SEQ ID NO: 604022 - RNA, 22 nt, Human
ucuccaaagaagcuaccaaccu

SEQ ID NO: 604023 - RNA, 23 nt, Human
ugaacagaucacugcuuccaaaa

SEQ ID NO: 604024 - RNA, 24 nt, Human
ugaggaggacgcuguagcgagagg

SEQ ID NO: 604025 - RNA, 18 nt, Human
ugccgggagcgccccacg

SEQ ID NO: 604026 - RNA, 20 nt, Human
ugcuggaguggcagcacccu

SEQ ID NO: 604027 - RNA, 25 nt, Human
uggcagcacccuacagcuguuagac

SEQ ID NO: 604028 - RNA, 19 nt, Human
ugggaacugggaggcugca

SEQ ID NO: 604029 - RNA, 21 nt, Human
ugggaggcugcagccagggcu

SEQ ID NO: 604030 - RNA, 20 nt, Human
ugggccucagcaaacugcag

SEQ ID NO: 604031 - RNA, 18 nt, Human
ugggugaucagcaggaag

SEQ ID NO: 604032 - RNA, 22 nt, Human
uuccgaucuaaaagugagaggg

SEQ ID NO: 604033 - RNA, 19 nt, Human
aaaaaaaaaguuguccaaa

SEQ ID NO: 604034 - RNA, 21 nt, Human
aaacuagaaggagcuaccugg

SEQ ID NO: 604035 - RNA, 19 nt, Human
aaaugaccuaaaacuaaag

SEQ ID NO: 604036 - RNA, 19 nt, Human
aagggaagcugguuaccaa

SEQ ID NO: 604037 - RNA, 24 nt, Human
acgaguauuuaaagaaaaagcuag

SEQ ID NO: 604038 - RNA, 26 nt, Human
auaaagcagaaaaugcaggaagaggc

SEQ ID NO: 604039 - RNA, 22 nt, Human
auuauuuugaaguuuuucauca

SEQ ID NO: 604040 - RNA, 19 nt, Human
cacucugccuagcacuuac

SEQ ID NO: 604041 - RNA, 22 nt, Human
cacuggcacaaacucacaaaga

SEQ ID NO: 604042 - RNA, 22 nt, Human
cccaaaaaaaauauaacuaucc

SEQ ID NO: 604043 - RNA, 23 nt, Human
ccuaaaaauauauaauuuaaaau

SEQ ID NO: 604044 - RNA, 22 nt, Human
cuaauauaugucuccuucaucu

SEQ ID NO: 604045 - RNA, 18 nt, Human
cugcuaaguuggucaaaa

SEQ ID NO: 604046 - RNA, 21 nt, Human
cuggacuugcuguuaucagaa

SEQ ID NO: 604047 - RNA, 21 nt, Human
cuggcacaaacucacaaagag

SEQ ID NO: 604048 - RNA, 20 nt, Human
cugggaaacaaaguucaucc

SEQ ID NO: 604049 - RNA, 23 nt, Human
uaaagcuacaagguaaaggcaca

SEQ ID NO: 604050 - RNA, 25 nt, Human
uaaauaaagcagaaaaugcaggaaa

SEQ ID NO: 604051 - RNA, 21 nt, Human
uagaaagugcaccuguaagaa

SEQ ID NO: 604052 - RNA, 22 nt, Human
uagaaagugcaccuguaagaaa

SEQ ID NO: 604053 - RNA, 20 nt, Human
uccaaauauuucaacuuuuu

SEQ ID NO: 604054 - RNA, 22 nt, Human
uccaacuucaaugucguagaac

SEQ ID NO: 604055 - RNA, 18 nt, Human
uccuuuagcuaguuugau

SEQ ID NO: 604056 - RNA, 22 nt, Human
ugauguaugguaaauggcuagg

SEQ ID NO: 604057 - RNA, 18 nt, Human
uggaaugcuauccuuaaa

SEQ ID NO: 604058 - RNA, 21 nt, Human
uggcagaacgcuauucaaagu

SEQ ID NO: 604059 - RNA, 24 nt, Human
uguaaaaacugcuuuugucugcua

SEQ ID NO: 604060 - RNA, 21 nt, Human
ugucguagaacccaaaaaaaa

SEQ ID NO: 604061 - RNA, 23 nt, Human
uguuaucagaaugcuuuuucacu

SEQ ID NO: 604062 - RNA, 18 nt, Human
uuagggucauguguuagg

SEQ ID NO: 604063 - RNA, 23 nt, Human
uuccccuauacuaggauucagca

SEQ ID NO: 604064 - RNA, 21 nt, Human
uuucaucacuuaacaauuucu

SEQ ID NO: 604065 - RNA, 21 nt, Human
aaaaagaaacagccacaggua

SEQ ID NO: 604066 - RNA, 24 nt, Human
aaaaauaaaaagaaacagccacag

SEQ ID NO: 604067 - RNA, 26 nt, Human
aaaaauaaagaaaaaaauaccacgac

SEQ ID NO: 604068 - RNA, 25 nt, Human
aaagaaacagccacagguaauuuag

SEQ ID NO: 604069 - RNA, 19 nt, Human
aaauaaaaagaaacagccc

SEQ ID NO: 604070 - RNA, 23 nt, Human
aacauaccuaaaauucaaaauca

SEQ ID NO: 604071 - RNA, 23 nt, Human
aagcaucccuaauuguggaagga

SEQ ID NO: 604072 - RNA, 26 nt, Human
aaguagucaaaaaaauaaaaagaaac

SEQ ID NO: 604073 - RNA, 23 nt, Human
caaacauuuaaaaauaaagaaaa

SEQ ID NO: 604074 - RNA, 22 nt, Human
cacagcuaaauacucaucuaac

SEQ ID NO: 604075 - RNA, 20 nt, Human
cauauaagaccccaaauaaa

SEQ ID NO: 604076 - RNA, 22 nt, Human
cauauaagcaaaacuaaauuuc

SEQ ID NO: 604077 - RNA, 25 nt, Human
ccaugaauucauaagacaguaacac

SEQ ID NO: 604078 - RNA, 18 nt, Human
cccgacuccugcggccgu

SEQ ID NO: 604079 - RNA, 24 nt, Human
ccgaagcccgacuccugcggccgu

SEQ ID NO: 604080 - RNA, 22 nt, Human
ccugcggccgugggcggcaggc

SEQ ID NO: 604081 - RNA, 26 nt, Human
cggaggaaaguccgcugucucugguu

SEQ ID NO: 604082 - RNA, 19 nt, Human
cucugcugcaaccaucgga

SEQ ID NO: 604083 - RNA, 20 nt, Human
gcauuuuauuauuucugauu

SEQ ID NO: 604084 - RNA, 18 nt, Human
ggaaggaugguaauuuau

SEQ ID NO: 604085 - RNA, 21 nt, Human
uaaaaauugccuuaaauuaau

SEQ ID NO: 604086 - RNA, 21 nt, Human
uaagaccccaaauaaauuuua

SEQ ID NO: 604087 - RNA, 20 nt, Human
uaagagaaacaugcuucguc

SEQ ID NO: 604088 - RNA, 21 nt, Human
uagucaaaaaaauaaaaagaa

SEQ ID NO: 604089 - RNA, 25 nt, Human
uauaaaaguagucaaaaaaauaaaa

SEQ ID NO: 604090 - RNA, 19 nt, Human
ugauggggggauaaaagca

SEQ ID NO: 604091 - RNA, 20 nt, Human
ugcgaccgaagcccgacucc

SEQ ID NO: 604092 - RNA, 22 nt, Human
ugcggccgugggcggcaggcac

SEQ ID NO: 604093 - RNA, 20 nt, Human
uggaauguaaaugaaaacuu

SEQ ID NO: 604094 - RNA, 21 nt, Human
ugucucuggugcgaccgaagc

SEQ ID NO: 604095 - RNA, 22 nt, Human
uuaacuaggaaauuugcauuua

SEQ ID NO: 604096 - RNA, 22 nt, Human
uuagauuaauuauaacaacaac

SEQ ID NO: 604097 - RNA, 19 nt, Human
uucaaaaucaaguuaaaua

SEQ ID NO: 604098 - RNA, 20 nt, Human
uugguaucaaacaacugcaa

SEQ ID NO: 604099 - RNA, 18 nt, Human
uuuuuuuuuuuuuuuuug

SEQ ID NO: 604100 - RNA, 24 nt, Human
aaagugcugggauuacagguguga

SEQ ID NO: 604101 - RNA, 18 nt, Human
aagugcugggauuacagg

SEQ ID NO: 604102 - RNA, 19 nt, Human
aagugcugggauuacaggu

SEQ ID NO: 604103 - RNA, 26 nt, Human
aagugcugggauuacaggugugagcc

SEQ ID NO: 604104 - RNA, 20 nt, Human
aauucacccgucucagccuc

SEQ ID NO: 604105 - RNA, 24 nt, Human
aauuuuguauuuuuaguagagaca

SEQ ID NO: 604106 - RNA, 24 nt, Human
acaggauuucaccauguuggucag

SEQ ID NO: 604107 - RNA, 24 nt, Human
accauguuggucaggcuggucucg

SEQ ID NO: 604108 - RNA, 25 nt, Human
acccgucucagccucccaaagugcu

SEQ ID NO: 604109 - RNA, 24 nt, Human
acucuuguugcccaggcuggagug

SEQ ID NO: 604110 - RNA, 23 nt, Human
acuuguugaaggcuuugccauau

SEQ ID NO: 604111 - RNA, 23 nt, Human
aggauuucaccauguuggucagg

SEQ ID NO: 604112 - RNA, 21 nt, Human
aguagcugggauuacaggcau

SEQ ID NO: 604113 - RNA, 23 nt, Human
aguagcugggauuacaggcaugc

SEQ ID NO: 604114 - RNA, 21 nt, Human
agugcaauggcgcgaucucag

SEQ ID NO: 604115 - RNA, 23 nt, Human
augcaccacuacgcauggcuaau

SEQ ID NO: 604116 - RNA, 24 nt, Human
caaagugcugggauuacaggugug

SEQ ID NO: 604117 - RNA, 21 nt, Human
caaccucugccucccggguuc

SEQ ID NO: 604118 - RNA, 22 nt, Human
caagcaauucuccugccucagc

SEQ ID NO: 604119 - RNA, 21 nt, Human
cacagagcgcugaagacgaga

SEQ ID NO: 604120 - RNA, 21 nt, Human
cacauucuucacauuuguaga

SEQ ID NO: 604121 - RNA, 21 nt, Human
caccauguuggucaggcuggu

SEQ ID NO: 604122 - RNA, 24 nt, Human
caccauguuggucaggcuggucuc

SEQ ID NO: 604123 - RNA, 23 nt, Human
cacccgucucagccucccaaagu

SEQ ID NO: 604124 - RNA, 19 nt, Human
caccgcacccagccagaau

SEQ ID NO: 604125 - RNA, 24 nt, Human
cacucuuguugcccaggcuggagu

SEQ ID NO: 604126 - RNA, 23 nt, Human
cacuucaaccucugccucccggg

SEQ ID NO: 604127 - RNA, 20 nt, Human
cagcgagggacaaaggcccc

SEQ ID NO: 604128 - RNA, 24 nt, Human
caggauuucaccauguuggucagg

SEQ ID NO: 604129 - RNA, 21 nt, Human
caggccacagcgagggacaaa

SEQ ID NO: 604130 - RNA, 20 nt, Human
caguaugaauuaucuuaugu

SEQ ID NO: 604131 - RNA, 21 nt, Human
ccaaagugcugggauuacagg

SEQ ID NO: 604132 - RNA, 21 nt, Human
ccaaagugcugggauuacagg

SEQ ID NO: 604133 - RNA, 24 nt, Human
ccaaagugcugggauuacaggugu

SEQ ID NO: 604134 - RNA, 21 nt, Human
ccaauaccugcaggucacagg

SEQ ID NO: 604135 - RNA, 23 nt, Human
ccacauucuucacauuuguagaa

SEQ ID NO: 604136 - RNA, 23 nt, Human
ccacucuuguugcccaggcugga

SEQ ID NO: 604137 - RNA, 23 nt, Human
cccgaguagcugggauuacaggc

SEQ ID NO: 604138 - RNA, 24 nt, Human
cccgaguagcugggauuacaggca

SEQ ID NO: 604139 - RNA, 23 nt, Human
cccggguucaagcaauucuccug

SEQ ID NO: 604140 - RNA, 23 nt, Human
ccgaguagcugggauuacaggca

SEQ ID NO: 604141 - RNA, 24 nt, Human
ccgaguagcugggauuacaggcau

SEQ ID NO: 604142 - RNA, 24 nt, Human
ccgucucagccucccaaagugcug

SEQ ID NO: 604143 - RNA, 24 nt, Human
ccucccggguucaagcaauucucc

SEQ ID NO: 604144 - RNA, 23 nt, Human
ccugccucagccucccgaguagc

SEQ ID NO: 604145 - RNA, 24 nt, Human
ccugccucagccucccgaguagcu

SEQ ID NO: 604146 - RNA, 24 nt, Human
cgucucagccucccaaagugcugg

SEQ ID NO: 604147 - RNA, 24 nt, Human
cuaauuuuguauuuuuaguagaga

SEQ ID NO: 604148 - RNA, 24 nt, Human
cucacuucaaccucugccucccgg

SEQ ID NO: 604149 - RNA, 24 nt, Human
cucagccucccgaguagcugggau

SEQ ID NO: 604150 - RNA, 25 nt, Human
cucccaaccucauguaauucacccg

SEQ ID NO: 604151 - RNA, 18 nt, Human
cucuuguugcccaggcug

SEQ ID NO: 604152 - RNA, 21 nt, Human
cugcaggucacagggccacag

SEQ ID NO: 604153 - RNA, 23 nt, Human
cuucaaccucugccucccggguu

SEQ ID NO: 604154 - RNA, 24 nt, Human
cuuguugcccaggcuggagugcaa

SEQ ID NO: 604155 - RNA, 26 nt, Human
gagccuggaccucuaggagcagagga

SEQ ID NO: 604156 - RNA, 19 nt, Human
gagcgcugaagacgagacc

SEQ ID NO: 604157 - RNA, 20 nt, Human
gagcgcugaagacgagaccu

SEQ ID NO: 604158 - RNA, 18 nt, Human
gagcucaggccacagcga

SEQ ID NO: 604159 - RNA, 22 nt, Human
gagcucaggccacagcgaggga

SEQ ID NO: 604160 - RNA, 19 nt, Human
gaggaccaauuaaagccuu

SEQ ID NO: 604161 - RNA, 18 nt, Human
gauuacaggugugagcca

SEQ ID NO: 604162 - RNA, 22 nt, Human
gauuacaggugugagccaccgc

SEQ ID NO: 604163 - RNA, 23 nt, Human
gauuacaggugugagccaccgca

SEQ ID NO: 604164 - RNA, 19 nt, Human
gccacagcgagggacaaag

SEQ ID NO: 604165 - RNA, 24 nt, Human
gccacucuuguugcccaggcugga

SEQ ID NO: 604166 - RNA, 19 nt, Human
gcccaggcuggagugcaau

SEQ ID NO: 604167 - RNA, 19 nt, Human
gcuggagugcaauggcgcg

SEQ ID NO: 604168 - RNA, 23 nt, Human
gcuggucucgaacucccaaccuc

SEQ ID NO: 604169 - RNA, 23 nt, Human
ggggaccgguuaaaggcuuugcc

SEQ ID NO: 604170 - RNA, 24 nt, Human
guaauucacccgucucagccuccc

SEQ ID NO: 604171 - RNA, 23 nt, Human
guagaauuucucuccaguaugaa

SEQ ID NO: 604172 - RNA, 20 nt, Human
guagcugggauuacaggcau

SEQ ID NO: 604173 - RNA, 24 nt, Human
uaaguuuuggggaccgguuaaagg

SEQ ID NO: 604174 - RNA, 25 nt, Human
uacaggcaugcaccacuacgcaugg

SEQ ID NO: 604175 - RNA, 24 nt, Human
uacaggugugagccaccgcaccca

SEQ ID NO: 604176 - RNA, 20 nt, Human
uaccugcaggucacagggcc

SEQ ID NO: 604177 - RNA, 21 nt, Human
uaccuuauguuuaguaagagu

SEQ ID NO: 604178 - RNA, 22 nt, Human
uagagacaggauuucaccaugu

SEQ ID NO: 604179 - RNA, 25 nt, Human
uagagacaggauuucaccauguugg

SEQ ID NO: 604180 - RNA, 21 nt, Human
uaggagcagaggacacagagc

SEQ ID NO: 604181 - RNA, 18 nt, Human
uaguaagaguugaagacu

SEQ ID NO: 604182 - RNA, 24 nt, Human
uaguagagacaggauuucaccaug

SEQ ID NO: 604183 - RNA, 26 nt, Human
uaguagagacaggauuucaccauguu

SEQ ID NO: 604184 - RNA, 21 nt, Human
uaucuuaugucugguaagaau

SEQ ID NO: 604185 - RNA, 19 nt, Human
uaugugcaguaagguuuga

SEQ ID NO: 604186 - RNA, 18 nt, Human
ucacuucaaccucugccu

SEQ ID NO: 604187 - RNA, 24 nt, Human
ucacuucaaccucugccucccggg

SEQ ID NO: 604188 - RNA, 20 nt, Human
ucagccucccgaguagcugg

SEQ ID NO: 604189 - RNA, 23 nt, Human
ucccaaagugcugggauuacagg

SEQ ID NO: 604190 - RNA, 26 nt, Human
ucccaaccucauguaauucacccguc

SEQ ID NO: 604191 - RNA, 18 nt, Human
ucccaauaccugcagguc

SEQ ID NO: 604192 - RNA, 24 nt, Human
ucccgaguagcugggauuacaggc

SEQ ID NO: 604193 - RNA, 21 nt, Human
ucccggguucaagcaauucuc

SEQ ID NO: 604194 - RNA, 24 nt, Human
ucccggguucaagcaauucuccug

SEQ ID NO: 604195 - RNA, 18 nt, Human
ucuccaauaugaguuauc

SEQ ID NO: 604196 - RNA, 24 nt, Human
ucuccugccucagccucccgagua

SEQ ID NO: 604197 - RNA, 20 nt, Human
ucucuccaguaugaauuauc

SEQ ID NO: 604198 - RNA, 20 nt, Human
ucucuccaguaugaauuauc

SEQ ID NO: 604199 - RNA, 24 nt, Human
ucugccucccggguucaagcaauu

SEQ ID NO: 604200 - RNA, 22 nt, Human
ucuuguugcccaggcuggagug

SEQ ID NO: 604201 - RNA, 21 nt, Human
ucuuuuauguuuaguaagggu

SEQ ID NO: 604202 - RNA, 24 nt, Human
ugaagacgagaccuggagcucagg

SEQ ID NO: 604203 - RNA, 20 nt, Human
ugagauggagugccacucuu

SEQ ID NO: 604204 - RNA, 23 nt, Human
ugagauggagugccacucuuguu

SEQ ID NO: 604205 - RNA, 22 nt, Human
ugccacauucuucacauuugua

SEQ ID NO: 604206 - RNA, 22 nt, Human
ugccacauucuucacauuugua

SEQ ID NO: 604207 - RNA, 24 nt, Human
ugccacucuuguugcccaggcugg

SEQ ID NO: 604208 - RNA, 22 nt, Human
ugccauauucuucacacucaua

SEQ ID NO: 604209 - RNA, 18 nt, Human
ugcccaggcuggagugca

SEQ ID NO: 604210 - RNA, 21 nt, Human
ugcccaggcuggagugcaaug

SEQ ID NO: 604211 - RNA, 21 nt, Human
ugcccaggcuggagugcaaug

SEQ ID NO: 604212 - RNA, 24 nt, Human
ugcccaggcuggagugcaauggcg

SEQ ID NO: 604213 - RNA, 24 nt, Human
ugccucagccucccgaguagcugg

SEQ ID NO: 604214 - RNA, 24 nt, Human
ugcugggauuacaggugugagcca

SEQ ID NO: 604215 - RNA, 23 nt, Human
uggagugcaauggcgcgaucuca

SEQ ID NO: 604216 - RNA, 24 nt, Human
uggagugcaauggcgcgaucucag

SEQ ID NO: 604217 - RNA, 24 nt, Human
uggcgcgaucucagcucacuucaa

SEQ ID NO: 604218 - RNA, 21 nt, Human
ugggauuacaggcaugcacca

SEQ ID NO: 604219 - RNA, 24 nt, Human
ugggauuacaggcaugcaccacua

SEQ ID NO: 604220 - RNA, 24 nt, Human
ugggauuacaggcaugcaccacua

SEQ ID NO: 604221 - RNA, 18 nt, Human
ugggauuacaggugugag

SEQ ID NO: 604222 - RNA, 19 nt, Human
ugggauuacaggugugagc

SEQ ID NO: 604223 - RNA, 21 nt, Human
ugggauuacaggugugagcca

SEQ ID NO: 604224 - RNA, 22 nt, Human
ugggauuacaggugugagccac

SEQ ID NO: 604225 - RNA, 23 nt, Human
ugggauuacaggugugagccacc

SEQ ID NO: 604226 - RNA, 24 nt, Human
ugggauuacaggugugagccaccg

SEQ ID NO: 604227 - RNA, 23 nt, Human
uggucaggcuggucucgaacucc

SEQ ID NO: 604228 - RNA, 22 nt, Human
uguaagauguaucuccaauaug

SEQ ID NO: 604229 - RNA, 25 nt, Human
uguaagauguaucuccaauaugagg

SEQ ID NO: 604230 - RNA, 19 nt, Human
uguaggguuucucuccaga

SEQ ID NO: 604231 - RNA, 23 nt, Human
uguaggguuucucuccaguauga

SEQ ID NO: 604232 - RNA, 23 nt, Human
uguaggguuucucuccaguauga

SEQ ID NO: 604233 - RNA, 23 nt, Human
uguaggguuucucuccaguauga

SEQ ID NO: 604234 - RNA, 23 nt, Human
uguaggguuucucuccaguauga

SEQ ID NO: 604235 - RNA, 20 nt, Human
uguugcccaggcuggagugc

SEQ ID NO: 604236 - RNA, 19 nt, Human
uguuuaguaagguaugaga

SEQ ID NO: 604237 - RNA, 18 nt, Human
uuacuuuguucaauaagg

SEQ ID NO: 604238 - RNA, 24 nt, Human
uuaguagagacaggauuucaccau

SEQ ID NO: 604239 - RNA, 23 nt, Human
uuaucuuauguuuaguaagguuu

SEQ ID NO: 604240 - RNA, 21 nt, Human
uucaagcaauucuccugccuc

SEQ ID NO: 604241 - RNA, 24 nt, Human
uucaagcaauucuccugccucagc

SEQ ID NO: 604242 - RNA, 19 nt, Human
uucuuauguuuaguaagaa

SEQ ID NO: 604243 - RNA, 23 nt, Human
uugaagacuggcuaaaggcuuua

SEQ ID NO: 604244 - RNA, 18 nt, Human
uugcccaggcuggagugc

SEQ ID NO: 604245 - RNA, 24 nt, Human
uuucaccauguuggucaggcuggu

SEQ ID NO: 604246 - RNA, 23 nt, Human
uuugaggacucauuaaaagcuuu

SEQ ID NO: 604247 - RNA, 19 nt, Human
uuuguaagguuucucucca

SEQ ID NO: 604248 - RNA, 19 nt, Human
uuuguaggguuucucucca

SEQ ID NO: 604249 - RNA, 19 nt, Human
uuuguaggguuucucucca

SEQ ID NO: 604250 - RNA, 19 nt, Human
uuuguaggguuucucucca

SEQ ID NO: 604251 - RNA, 19 nt, Human
uuuguaggguuucucucca

SEQ ID NO: 604252 - RNA, 19 nt, Human
uuuuguauuuuuaguagag

SEQ ID NO: 604253 - RNA, 20 nt, Human
uuuuguauuuuuaguagaga

SEQ ID NO: 604254 - RNA, 18 nt, Human
agcagcagccuccugggg

SEQ ID NO: 604255 - RNA, 19 nt, Human
aggagggcaggacaauuuc

SEQ ID NO: 604256 - RNA, 22 nt, Human
cacacugucuccucuucuuugu

SEQ ID NO: 604257 - RNA, 22 nt, Human
cagcagccuccuggggugacug

SEQ ID NO: 604258 - RNA, 22 nt, Human
ccacacugucuccucuucuuug

SEQ ID NO: 604259 - RNA, 23 nt, Human
gggugacacacauucauuaaggu

SEQ ID NO: 604260 - RNA, 24 nt, Human
uaaugaugugguuuugaaauguga

SEQ ID NO: 604261 - RNA, 20 nt, Human
uagcagcagccuccuggggu

SEQ ID NO: 604262 - RNA, 21 nt, Human
ucauagcagcagccuccuggg

SEQ ID NO: 604263 - RNA, 18 nt, Human
ucgaaagggguaaccaca

SEQ ID NO: 604264 - RNA, 20 nt, Human
ugcauuuuuuccagcagcuu

SEQ ID NO: 604265 - RNA, 20 nt, Human
ugugguuuugaaaugugaug

SEQ ID NO: 604266 - RNA, 23 nt, Human
aagcagaacggagggaagcagag

SEQ ID NO: 604267 - RNA, 23 nt, Human
aagcagaacggagggaagcagag

SEQ ID NO: 604268 - RNA, 18 nt, Human
aagcugccaaccccucug

SEQ ID NO: 604269 - RNA, 21 nt, Human
acagcacucucaggguucccc

SEQ ID NO: 604270 - RNA, 20 nt, Human
acucagaggaagcagggcca

SEQ ID NO: 604271 - RNA, 20 nt, Human
acuugggcuccauuuucccu

SEQ ID NO: 604272 - RNA, 21 nt, Human
agaacggagggaagcagagga

SEQ ID NO: 604273 - RNA, 18 nt, Human
agacaggaaaaaugaggc

SEQ ID NO: 604274 - RNA, 19 nt, Human
agacaggaaaaaugaggcc

SEQ ID NO: 604275 - RNA, 22 nt, Human
agacaggaaaaaugaggccaag

SEQ ID NO: 604276 - RNA, 23 nt, Human
agacaggaaaaaugaggccaagg

SEQ ID NO: 604277 - RNA, 18 nt, Human
agacuuggagcccaggug

SEQ ID NO: 604278 - RNA, 19 nt, Human
agcaaaggacaccuguccc

SEQ ID NO: 604279 - RNA, 24 nt, Human
agcacucucaggguuccccugccu

SEQ ID NO: 604280 - RNA, 20 nt, Human
agcagccccagucagggcag

SEQ ID NO: 604281 - RNA, 25 nt, Human
agccagugcucuggacaauagaggc

SEQ ID NO: 604282 - RNA, 19 nt, Human
agccgucaauucuucagcc

SEQ ID NO: 604283 - RNA, 20 nt, Human
aggcagacgggagcugaggu

SEQ ID NO: 604284 - RNA, 19 nt, Human
aggcagcagugagagcgug

SEQ ID NO: 604285 - RNA, 22 nt, Human
aggcagcagugagagcgugggc

SEQ ID NO: 604286 - RNA, 24 nt, Human
aggcagcggccagcaggaggcagc

SEQ ID NO: 604287 - RNA, 19 nt, Human
agguggguuaaguucucuc

SEQ ID NO: 604288 - RNA, 25 nt, Human
agugguacuggugccagcucuuggg

SEQ ID NO: 604289 - RNA, 22 nt, Human
agugguauccuggucccugucc

SEQ ID NO: 604290 - RNA, 23 nt, Human
cacacagugacagagugguaucc

SEQ ID NO: 604291 - RNA, 21 nt, Human
caccaagagcccuggggucug

SEQ ID NO: 604292 - RNA, 25 nt, Human
caccccaggguauggacuuccugga

SEQ ID NO: 604293 - RNA, 20 nt, Human
caccccuccucuaacccccu

SEQ ID NO: 604294 - RNA, 18 nt, Human
cagaagccacuggucaca

SEQ ID NO: 604295 - RNA, 19 nt, Human
cagcccagaggcucuuagc

SEQ ID NO: 604296 - RNA, 22 nt, Human
cagcccagaggcucuuagcugc

SEQ ID NO: 604297 - RNA, 19 nt, Human
cagccuccauacagagcca

SEQ ID NO: 604298 - RNA, 24 nt, Human
cagccucuggguuugggaaguccu

SEQ ID NO: 604299 - RNA, 24 nt, Human
caggaaaaaugaggccaaggguua

SEQ ID NO: 604300 - RNA, 23 nt, Human
caggagggaggagcagccccagu

SEQ ID NO: 604301 - RNA, 20 nt, Human
caggauuacucccugccucu

SEQ ID NO: 604302 - RNA, 22 nt, Human
cagggccauccagaggcccagc

SEQ ID NO: 604303 - RNA, 22 nt, Human
caggguauggacuuccuggagg

SEQ ID NO: 604304 - RNA, 20 nt, Human
cagucagggcagggccaucc

SEQ ID NO: 604305 - RNA, 21 nt, Human
cagugcucuggacaauagagg

SEQ ID NO: 604306 - RNA, 19 nt, Human
cauugcuggacgccaagcc

SEQ ID NO: 604307 - RNA, 21 nt, Human
cauuguacaaugcuaauguua

SEQ ID NO: 604308 - RNA, 20 nt, Human
ccaaguccagccucugcacu

SEQ ID NO: 604309 - RNA, 20 nt, Human
ccagccucugcacuucaguc

SEQ ID NO: 604310 - RNA, 18 nt, Human
ccaggacaggagggagga

SEQ ID NO: 604311 - RNA, 21 nt, Human
ccaggacaggagggaggagca

SEQ ID NO: 604312 - RNA, 25 nt, Human
cccaaucuucaccccuccucuaacc

SEQ ID NO: 604313 - RNA, 25 nt, Human
ccccucuguggguccccagcuuuua

SEQ ID NO: 604314 - RNA, 20 nt, Human
cccugcagcccagaggcucu

SEQ ID NO: 604315 - RNA, 23 nt, Human
cccugccucuuccacucucccca

SEQ ID NO: 604316 - RNA, 24 nt, Human
cccuggggucugcagcuccgagcc

SEQ ID NO: 604317 - RNA, 18 nt, Human
ccuaguauacaacaggau

SEQ ID NO: 604318 - RNA, 21 nt, Human
ccuccaggccguggucaguuc

SEQ ID NO: 604319 - RNA, 21 nt, Human
ccucugcacuucagucuuggg

SEQ ID NO: 604320 - RNA, 19 nt, Human
ccucuggcuguccaccagg

SEQ ID NO: 604321 - RNA, 19 nt, Human
ccugccucuuccacucucc

SEQ ID NO: 604322 - RNA, 19 nt, Human
ccugccucuuccacucucc

SEQ ID NO: 604323 - RNA, 24 nt, Human
ccugugugugugugugugugugug

SEQ ID NO: 604324 - RNA, 22 nt, Human
cucccugccucuuccacucucc

SEQ ID NO: 604325 - RNA, 22 nt, Human
cuccuccaggaugggacaucac

SEQ ID NO: 604326 - RNA, 24 nt, Human
cucuauugcccucuccuggacaua

SEQ ID NO: 604327 - RNA, 22 nt, Human
cucuccccacauccauccugaa

SEQ ID NO: 604328 - RNA, 18 nt, Human
cugagccauggucucccc

SEQ ID NO: 604329 - RNA, 18 nt, Human
cugagcccugagucagug

SEQ ID NO: 604330 - RNA, 19 nt, Human
cugaggcagacgggagcug

SEQ ID NO: 604331 - RNA, 18 nt, Human
cugcacuucagucuuggg

SEQ ID NO: 604332 - RNA, 24 nt, Human
cuggguccccugugggaacucaga

SEQ ID NO: 604333 - RNA, 23 nt, Human
cuuccacucuccccacauccauc

SEQ ID NO: 604334 - RNA, 26 nt, Human
gacaccugugugugugugugugugug

SEQ ID NO: 604335 - RNA, 19 nt, Human
gacuucuucccuagggcuc

SEQ ID NO: 604336 - RNA, 23 nt, Human
gagcagccuccauacagagccaa

SEQ ID NO: 604337 - RNA, 19 nt, Human
gagcccuggggucugcagc

SEQ ID NO: 604338 - RNA, 19 nt, Human
gcagcuccgagcagaagcc

SEQ ID NO: 604339 - RNA, 23 nt, Human
gcccgauucuuucuucccuaacc

SEQ ID NO: 604340 - RNA, 27 nt, Human
gccucuggguuugggaaguccugggug

SEQ ID NO: 604341 - RNA, 22 nt, Human
gcggggucccaggacaggaggg

SEQ ID NO: 604342 - RNA, 28 nt, Human
gcugaagcagaacggagggaagcagagg

SEQ ID NO: 604343 - RNA, 23 nt, Human
gcugccuggucacagcuuucuaa

SEQ ID NO: 604344 - RNA, 19 nt, Human
ggaagcagaggacacagcg

SEQ ID NO: 604345 - RNA, 21 nt, Human
ggacacagcggcccugguggg

SEQ ID NO: 604346 - RNA, 18 nt, Human
ggccguggucaguuccaa

SEQ ID NO: 604347 - RNA, 20 nt, Human
ggggagggcagcucagccca

SEQ ID NO: 604348 - RNA, 18 nt, Human
gggucccuggccagaggc

SEQ ID NO: 604349 - RNA, 22 nt, Human
gguguagaagcugggggagaga

SEQ ID NO: 604350 - RNA, 23 nt, Human
guccuggcugugucacucucuug

SEQ ID NO: 604351 - RNA, 21 nt, Human
gugugugugugugugugugug

SEQ ID NO: 604352 - RNA, 24 nt, Human
guuccaaguuacugucuucacugu

SEQ ID NO: 604353 - RNA, 18 nt, Human
uacaccgucaugauaggg

SEQ ID NO: 604354 - RNA, 22 nt, Human
uacuuuaucuugaaaacaaucu

SEQ ID NO: 604355 - RNA, 23 nt, Human
uagacaccugugugugugugugu

SEQ ID NO: 604356 - RNA, 21 nt, Human
uaggaauuauuguccucuuuc

SEQ ID NO: 604357 - RNA, 21 nt, Human
uaggggaagcugaagcagaac

SEQ ID NO: 604358 - RNA, 18 nt, Human
uauuccagucacuccagg

SEQ ID NO: 604359 - RNA, 22 nt, Human
ucaaugcacaguugucacauuu

SEQ ID NO: 604360 - RNA, 22 nt, Human
ucacugccucuggcauucguga

SEQ ID NO: 604361 - RNA, 20 nt, Human
uccacccuuccucugagcca

SEQ ID NO: 604362 - RNA, 20 nt, Human
uccagagccgucaauucuuc

SEQ ID NO: 604363 - RNA, 18 nt, Human
uccaggcugcauucucca

SEQ ID NO: 604364 - RNA, 21 nt, Human
uccccaccagugucugugggg

SEQ ID NO: 604365 - RNA, 23 nt, Human
ucccccaggauuacucccugccu

SEQ ID NO: 604366 - RNA, 18 nt, Human
ucccccagguggguuaag

SEQ ID NO: 604367 - RNA, 25 nt, Human
ucccccagguggguuaaguucucuc

SEQ ID NO: 604368 - RNA, 18 nt, Human
ucccccugccugggccag

SEQ ID NO: 604369 - RNA, 24 nt, Human
uccccugccuccaccaagagcccu

SEQ ID NO: 604370 - RNA, 20 nt, Human
ucccuagggcuccuccuccu

SEQ ID NO: 604371 - RNA, 20 nt, Human
ucccugacuucuucccuagg

SEQ ID NO: 604372 - RNA, 26 nt, Human
ucccugccucuuccacucuccccaca

SEQ ID NO: 604373 - RNA, 26 nt, Human
ucccugcugucccccaggauuacucc

SEQ ID NO: 604374 - RNA, 23 nt, Human
ucccuggccagaggcuacuuggg

SEQ ID NO: 604375 - RNA, 22 nt, Human
uccucgggacauugggucccug

SEQ ID NO: 604376 - RNA, 18 nt, Human
ucucuguaaacagcacuc

SEQ ID NO: 604377 - RNA, 24 nt, Human
ucugcagcuccgagcagaagccac

SEQ ID NO: 604378 - RNA, 19 nt, Human
ucuucagccucagucuucc

SEQ ID NO: 604379 - RNA, 22 nt, Human
ucuuucuucccuaaccuuaggg

SEQ ID NO: 604380 - RNA, 20 nt, Human
ugaaaacaaucuugagaagu

SEQ ID NO: 604381 - RNA, 23 nt, Human
ugacuucuucccuagggcuccuc

SEQ ID NO: 604382 - RNA, 19 nt, Human
ugagcagccuccauacaga

SEQ ID NO: 604383 - RNA, 25 nt, Human
ugaggcagacgggagcugagguucu

SEQ ID NO: 604384 - RNA, 19 nt, Human
ugccuccucccugcugucc

SEQ ID NO: 604385 - RNA, 27 nt, Human
ugccucuggcauucgugagcccgauuc

SEQ ID NO: 604386 - RNA, 22 nt, Human
ugcuagacagagaugggugugu

SEQ ID NO: 604387 - RNA, 20 nt, Human
ugcuccacccuuccucugag

SEQ ID NO: 604388 - RNA, 24 nt, Human
uggaacgucccugacccaggguuc

SEQ ID NO: 604389 - RNA, 24 nt, Human
uggaacgucccugacccaggguuu

SEQ ID NO: 604390 - RNA, 23 nt, Human
uggagcccagguguagaagcugg

SEQ ID NO: 604391 - RNA, 20 nt, Human
uggccagaggcuacuugggc

SEQ ID NO: 604392 - RNA, 20 nt, Human
ugggaaguccugggugaguc

SEQ ID NO: 604393 - RNA, 18 nt, Human
ugggagaggcugacccug

SEQ ID NO: 604394 - RNA, 20 nt, Human
ugggagaggcugacccugca

SEQ ID NO: 604395 - RNA, 18 nt, Human
ugggcuguggggcugcuu

SEQ ID NO: 604396 - RNA, 30 nt, Human
uggggagggcagcucagcccaguaggguuu

SEQ ID NO: 604397 - RNA, 19 nt, Human
ugggugugugugcgugucu

SEQ ID NO: 604398 - RNA, 20 nt, Human
ugggugugugugcgugucug

SEQ ID NO: 604399 - RNA, 24 nt, Human
ugggugugugugcgugucugucug

SEQ ID NO: 604400 - RNA, 20 nt, Human
ugguauccuggucccugucc

SEQ ID NO: 604401 - RNA, 24 nt, Human
uggucccugucccugacuucuucc

SEQ ID NO: 604402 - RNA, 19 nt, Human
uggugccagcucuugggga

SEQ ID NO: 604403 - RNA, 19 nt, Human
uguggggugagcagccucc

SEQ ID NO: 604404 - RNA, 24 nt, Human
ugugucuucucucucuauccugag

SEQ ID NO: 604405 - RNA, 19 nt, Human
uguguguguguguguguag

SEQ ID NO: 604406 - RNA, 18 nt, Human
ugugugugugugugugug

SEQ ID NO: 604407 - RNA, 18 nt, Human
ugugugugugugugugug

SEQ ID NO: 604408 - RNA, 18 nt, Human
ugugugugugugugugug

SEQ ID NO: 604409 - RNA, 18 nt, Human
ugugugugugugugugug

SEQ ID NO: 604410 - RNA, 18 nt, Human
ugugugugugugugugug

SEQ ID NO: 604411 - RNA, 18 nt, Human
ugugugugugugugugug

SEQ ID NO: 604412 - RNA, 18 nt, Human
ugugugugugugugugug

SEQ ID NO: 604413 - RNA, 18 nt, Human
ugugugugugugugugug

SEQ ID NO: 604414 - RNA, 18 nt, Human
ugugugugugugugugug

SEQ ID NO: 604415 - RNA, 18 nt, Human
ugugugugugugugugug

SEQ ID NO: 604416 - RNA, 18 nt, Human
ugugugugugugugugug

SEQ ID NO: 604417 - RNA, 18 nt, Human
ugugugugugugugugug

SEQ ID NO: 604418 - RNA, 18 nt, Human
ugugugugugugugugug

SEQ ID NO: 604419 - RNA, 18 nt, Human
ugugugugugugugugug

SEQ ID NO: 604420 - RNA, 18 nt, Human
ugugugugugugugugug

SEQ ID NO: 604421 - RNA, 18 nt, Human
ugugugugugugugugug

SEQ ID NO: 604422 - RNA, 18 nt, Human
ugugugugugugugugug

SEQ ID NO: 604423 - RNA, 18 nt, Human
ugugugugugugugugug

SEQ ID NO: 604424 - RNA, 18 nt, Human
ugugugugugugugugug

SEQ ID NO: 604425 - RNA, 21 nt, Human
ugugugugugugugugugugu

SEQ ID NO: 604426 - RNA, 21 nt, Human
ugugugugugugugugugugu

SEQ ID NO: 604427 - RNA, 21 nt, Human
ugugugugugugugugugugu

SEQ ID NO: 604428 - RNA, 21 nt, Human
ugugugugugugugugugugu

SEQ ID NO: 604429 - RNA, 21 nt, Human
ugugugugugugugugugugu

SEQ ID NO: 604430 - RNA, 21 nt, Human
ugugugugugugugugugugu

SEQ ID NO: 604431 - RNA, 21 nt, Human
ugugugugugugugugugugu

SEQ ID NO: 604432 - RNA, 21 nt, Human
ugugugugugugugugugugu

SEQ ID NO: 604433 - RNA, 21 nt, Human
ugugugugugugugugugugu

SEQ ID NO: 604434 - RNA, 21 nt, Human
ugugugugugugugugugugu

SEQ ID NO: 604435 - RNA, 21 nt, Human
ugugugugugugugugugugu

SEQ ID NO: 604436 - RNA, 21 nt, Human
ugugugugugugugugugugu

SEQ ID NO: 604437 - RNA, 21 nt, Human
ugugugugugugugugugugu

SEQ ID NO: 604438 - RNA, 21 nt, Human
ugugugugugugugugugugu

SEQ ID NO: 604439 - RNA, 21 nt, Human
ugugugugugugugugugugu

SEQ ID NO: 604440 - RNA, 21 nt, Human
ugugugugugugugugugugu

SEQ ID NO: 604441 - RNA, 21 nt, Human
ugugugugugugugugugugu

SEQ ID NO: 604442 - RNA, 21 nt, Human
ugugugugugugugugugugu

SEQ ID NO: 604443 - RNA, 21 nt, Human
ugugugugugugugugugugu

SEQ ID NO: 604444 - RNA, 21 nt, Human
ugugugugugugugugugugu

SEQ ID NO: 604445 - RNA, 21 nt, Human
ugugugugugugugugugugu

SEQ ID NO: 604446 - RNA, 21 nt, Human
ugugugugugugugugugugu

SEQ ID NO: 604447 - RNA, 21 nt, Human
ugugugugugugugugugugu

SEQ ID NO: 604448 - RNA, 21 nt, Human
ugugugugugugugugugugu

SEQ ID NO: 604449 - RNA, 21 nt, Human
ugugugugugugugugugugu

SEQ ID NO: 604450 - RNA, 21 nt, Human
ugugugugugugugugugugu

SEQ ID NO: 604451 - RNA, 21 nt, Human
ugugugugugugugugugugu

SEQ ID NO: 604452 - RNA, 21 nt, Human
ugugugugugugugugugugu

SEQ ID NO: 604453 - RNA, 21 nt, Human
ugugugugugugugugugugu

SEQ ID NO: 604454 - RNA, 21 nt, Human
ugugugugugugugugugugu

SEQ ID NO: 604455 - RNA, 21 nt, Human
ugugugugugugugugugugu

SEQ ID NO: 604456 - RNA, 21 nt, Human
ugugugugugugugugugugu

SEQ ID NO: 604457 - RNA, 21 nt, Human
ugugugugugugugugugugu

SEQ ID NO: 604458 - RNA, 21 nt, Human
ugugugugugugugugugugu

SEQ ID NO: 604459 - RNA, 22 nt, Human
ugugugugugugugugugugua

SEQ ID NO: 604460 - RNA, 22 nt, Human
ugugugugugugugugugugug

SEQ ID NO: 604461 - RNA, 22 nt, Human
ugugugugugugugugugugug

SEQ ID NO: 604462 - RNA, 22 nt, Human
ugugugugugugugugugugug

SEQ ID NO: 604463 - RNA, 22 nt, Human
ugugugugugugugugugugug

SEQ ID NO: 604464 - RNA, 22 nt, Human
ugugugugugugugugugugug

SEQ ID NO: 604465 - RNA, 22 nt, Human
ugugugugugugugugugugug

SEQ ID NO: 604466 - RNA, 22 nt, Human
ugugugugugugugugugugug

SEQ ID NO: 604467 - RNA, 22 nt, Human
ugugugugugugugugugugug

SEQ ID NO: 604468 - RNA, 22 nt, Human
ugugugugugugugugugugug

SEQ ID NO: 604469 - RNA, 22 nt, Human
ugugugugugugugugugugug

SEQ ID NO: 604470 - RNA, 22 nt, Human
ugugugugugugugugugugug

SEQ ID NO: 604471 - RNA, 22 nt, Human
ugugugugugugugugugugug

SEQ ID NO: 604472 - RNA, 22 nt, Human
ugugugugugugugugugugug

SEQ ID NO: 604473 - RNA, 22 nt, Human
ugugugugugugugugugugug

SEQ ID NO: 604474 - RNA, 22 nt, Human
ugugugugugugugugugugug

SEQ ID NO: 604475 - RNA, 23 nt, Human
ugugugugugugugugugugugu

SEQ ID NO: 604476 - RNA, 24 nt, Human
uuagugacuugcugagggucacac

SEQ ID NO: 604477 - RNA, 19 nt, Human
uucacaagacaggaaaaau

SEQ ID NO: 604478 - RNA, 18 nt, Human
uugagaaguaggaauuau

SEQ ID NO: 604479 - RNA, 22 nt, Human
uuuagucacuguuuccucuccu

SEQ ID NO: 604480 - RNA, 21 nt, Human
uuugcucugggccccucccca

SEQ ID NO: 604481 - RNA, 19 nt, Human
aaauaaagcacaauauuca

SEQ ID NO: 604482 - RNA, 25 nt, Human
aaguaggaacagacauccaaaacaa

SEQ ID NO: 604483 - RNA, 23 nt, Human
acaggcacaucugggcugacagg

SEQ ID NO: 604484 - RNA, 18 nt, Human
accugguuuccccaaugg

SEQ ID NO: 604485 - RNA, 19 nt, Human
agacauccaaaacaacuga

SEQ ID NO: 604486 - RNA, 22 nt, Human
agggauggggcagugcucuguc

SEQ ID NO: 604487 - RNA, 22 nt, Human
aggggaucaucaguacauggug

SEQ ID NO: 604488 - RNA, 22 nt, Human
aguacaccugcuaaauaaagca

SEQ ID NO: 604489 - RNA, 25 nt, Human
aucugggcugaggucacagagggau

SEQ ID NO: 604490 - RNA, 21 nt, Human
auggggcagugcucugucagu

SEQ ID NO: 604491 - RNA, 22 nt, Human
auucugggaaacuucucagucu

SEQ ID NO: 604492 - RNA, 19 nt, Human
caaggaggggaucaucagu

SEQ ID NO: 604493 - RNA, 18 nt, Human
caaucaccugguuucccc

SEQ ID NO: 604494 - RNA, 18 nt, Human
cacgcgugucagcaaggc

SEQ ID NO: 604495 - RNA, 18 nt, Human
cacugcugaagcccccgg

SEQ ID NO: 604496 - RNA, 28 nt, Human
cagaaagagacuuuuucuaauacagcag

SEQ ID NO: 604497 - RNA, 19 nt, Human
caggcaaucaccugguuuc

SEQ ID NO: 604498 - RNA, 21 nt, Human
cccaugcuggauacugguaga

SEQ ID NO: 604499 - RNA, 18 nt, Human
ccccccugccuccauucu

SEQ ID NO: 604500 - RNA, 19 nt, Human
cccccugccuccauucugg

SEQ ID NO: 604501 - RNA, 23 nt, Human
cgcuggguugggggcgcugccuc

SEQ ID NO: 604502 - RNA, 22 nt, Human
cuccauguacuucccacugcuu

SEQ ID NO: 604503 - RNA, 24 nt, Human
cuccuuggacucuccagggugcua

SEQ ID NO: 604504 - RNA, 20 nt, Human
cucuguggucgggaaggcuc

SEQ ID NO: 604505 - RNA, 23 nt, Human
cucuguggucgggaaggcuccac

SEQ ID NO: 604506 - RNA, 18 nt, Human
cuugucucacggacaguu

SEQ ID NO: 604507 - RNA, 23 nt, Human
gaacagacauccaaaacaacuga

SEQ ID NO: 604508 - RNA, 18 nt, Human
gaagagcgugggggaggc

SEQ ID NO: 604509 - RNA, 19 nt, Human
gacagguuggccggacucu

SEQ ID NO: 604510 - RNA, 20 nt, Human
gagagcuccauguacuuccc

SEQ ID NO: 604511 - RNA, 24 nt, Human
gaguacaccugcuaaauaaagcac

SEQ ID NO: 604512 - RNA, 21 nt, Human
gcacugcugaagcccccggga

SEQ ID NO: 604513 - RNA, 23 nt, Human
gcagcgccugggccagggggccc

SEQ ID NO: 604514 - RNA, 21 nt, Human
gcgccugggccagggggcccc

SEQ ID NO: 604515 - RNA, 21 nt, Human
gcgcuggguugggggcgcugc

SEQ ID NO: 604516 - RNA, 21 nt, Human
gcugccuccuuggacucucca

SEQ ID NO: 604517 - RNA, 20 nt, Human
ggaacggaguaagaauuuca

SEQ ID NO: 604518 - RNA, 18 nt, Human
ggcagagcccaggcugca

SEQ ID NO: 604519 - RNA, 20 nt, Human
ggcccgugguggagcagcag

SEQ ID NO: 604520 - RNA, 24 nt, Human
ggccugggcuuuguuugcauucug

SEQ ID NO: 604521 - RNA, 24 nt, Human
gggauaaaggcuugaccggaaaga

SEQ ID NO: 604522 - RNA, 18 nt, Human
gggauggggcagugcucu

SEQ ID NO: 604523 - RNA, 20 nt, Human
uacugguagaugacuggggc

SEQ ID NO: 604524 - RNA, 23 nt, Human
uacugguagaugacuggggcggg

SEQ ID NO: 604525 - RNA, 20 nt, Human
uaggaacagacauccaaaac

SEQ ID NO: 604526 - RNA, 20 nt, Human
ucacaucuaaguacaggccc

SEQ ID NO: 604527 - RNA, 18 nt, Human
ucaguggcccaucugcug

SEQ ID NO: 604528 - RNA, 22 nt, Human
ucccugucaguaaaauggggau

SEQ ID NO: 604529 - RNA, 21 nt, Human
ucuaaguacaggccccaugcu

SEQ ID NO: 604530 - RNA, 20 nt, Human
ucuguaacuuuggggguaag

SEQ ID NO: 604531 - RNA, 18 nt, Human
ucuuggucagaaaugaag

SEQ ID NO: 604532 - RNA, 21 nt, Human
ugacuugaaggugccagaugg

SEQ ID NO: 604533 - RNA, 22 nt, Human
ugccuccuuggacucuccaggg

SEQ ID NO: 604534 - RNA, 25 nt, Human
uggaacggaguaagaauuucaggca

SEQ ID NO: 604535 - RNA, 18 nt, Human
uggccggacucuccagga

SEQ ID NO: 604536 - RNA, 21 nt, Human
uggcucuguggucgggaaggc

SEQ ID NO: 604537 - RNA, 22 nt, Human
uggcugggacagguuggccgga

SEQ ID NO: 604538 - RNA, 23 nt, Human
uggugaagagcgugggggaggcg

SEQ ID NO: 604539 - RNA, 19 nt, Human
uguaaaaagccccugggua

SEQ ID NO: 604540 - RNA, 26 nt, Human
uguaacuaggaucuguaacuuugggg

SEQ ID NO: 604541 - RNA, 20 nt, Human
ugugucauagggcaggaaaa

SEQ ID NO: 604542 - RNA, 19 nt, Human
uuacuuaaguugagccuca

SEQ ID NO: 604543 - RNA, 26 nt, Human
uuaguggggcgcuggguugggggcgc

SEQ ID NO: 604544 - RNA, 21 nt, Human
uucccugucaguaaaaugggg

SEQ ID NO: 604545 - RNA, 23 nt, Human
uugaugauggagcguccagaacg

SEQ ID NO: 604546 - RNA, 22 nt, Human
uuggaacggaguaagaauuuca

SEQ ID NO: 604547 - RNA, 20 nt, Human
uuucaggggccugggcuuug

SEQ ID NO: 604548 - RNA, 21 nt, Human
uuucaggggccugggcuuugu

SEQ ID NO: 604549 - RNA, 21 nt, Human
aaauaaaauacaaaaccaagg

SEQ ID NO: 604550 - RNA, 21 nt, Human
aagcagcugagggcuggucau

SEQ ID NO: 604551 - RNA, 24 nt, Human
aaggucauugauauccacagccac

SEQ ID NO: 604552 - RNA, 18 nt, Human
acccagugguguaggcac

SEQ ID NO: 604553 - RNA, 22 nt, Human
agaaagccuguucccgaaguga

SEQ ID NO: 604554 - RNA, 19 nt, Human
agacacaugcucuccgugu

SEQ ID NO: 604555 - RNA, 19 nt, Human
agccagcccuuacccuccc

SEQ ID NO: 604556 - RNA, 20 nt, Human
aggagacacugcccacaacc

SEQ ID NO: 604557 - RNA, 19 nt, Human
aguagagggagaaagaugg

SEQ ID NO: 604558 - RNA, 21 nt, Human
auacagcucaucgaucuugcu

SEQ ID NO: 604559 - RNA, 18 nt, Human
cacagccacaaccugggg

SEQ ID NO: 604560 - RNA, 22 nt, Human
cacagccacaaccuggggcagg

SEQ ID NO: 604561 - RNA, 23 nt, Human
caggagacacugcccacaaccac
